United States Patent Application Publication US 2026/0216245 A1 - sequence listing, part 2

SEQ ID NO: 29731 - DNA, 20 bp, synthetic construct
  source 1..20: mol_type = other DNA
tggacagcaaggtattgggg

SEQ ID NO: 29732 - DNA, 20 bp, synthetic construct
  source 1..20: mol_type = other DNA
ttctaatatttaaataaaaa

SEQ ID NO: 29733 - DNA, 20 bp, synthetic construct
  source 1..20: mol_type = other DNA
ccagcagcgggaagtggacc

SEQ ID NO: 29734 - DNA, 20 bp, synthetic construct
  source 1..20: mol_type = other DNA
gaaaaccagatcaacagctt

SEQ ID NO: 29735 - DNA, 20 bp, synthetic construct
  source 1..20: mol_type = other DNA
tcctggaggtctgattccac

SEQ ID NO: 29736 - DNA, 20 bp, synthetic construct
  source 1..20: mol_type = other DNA
aactcgtagtctccatcctg

SEQ ID NO: 29737 - DNA, 20 bp, synthetic construct
  source 1..20: mol_type = other DNA
tgctattaagcaagttcctg

SEQ ID NO: 29738 - DNA, 20 bp, synthetic construct
  source 1..20: mol_type = other DNA
tcctatcactgtattccgct

SEQ ID NO: 29739 - DNA, 20 bp, synthetic construct
  source 1..20: mol_type = other DNA
atccaggatgggctgccgct

SEQ ID NO: 29740 - DNA, 20 bp, synthetic construct
  source 1..20: mol_type = other DNA
ctgcaggagctgagtggctg

SEQ ID NO: 29741 - DNA, 20 bp, synthetic construct
  source 1..20: mol_type = other DNA
cttaatagcaacaatctggc

SEQ ID NO: 29742 - DNA, 20 bp, synthetic construct
  source 1..20: mol_type = other DNA
cacagccactcagctcctgc

SEQ ID NO: 29743 - DNA, 20 bp, synthetic construct
  source 1..20: mol_type = other DNA
tttctatggcagttattccc

SEQ ID NO: 29744 - DNA, 20 bp, synthetic construct
  source 1..20: mol_type = other DNA
tggatcgttatggagtactg

SEQ ID NO: 29745 - DNA, 20 bp, synthetic construct
  source 1..20: mol_type = other DNA
tttctttgattatctcctgg

SEQ ID NO: 29746 - DNA, 20 bp, synthetic construct
  source 1..20: mol_type = other DNA
tttaggataccatggccaag

SEQ ID NO: 29747 - DNA, 20 bp, synthetic construct
  source 1..20: mol_type = other DNA
cgattacgaaataaaacggt

SEQ ID NO: 29748 - DNA, 20 bp, synthetic construct
  source 1..20: mol_type = other DNA
tcatacctgcaggagctgag

SEQ ID NO: 29749 - DNA, 20 bp, synthetic construct
  source 1..20: mol_type = other DNA
ctttggcactcctgacaaat

SEQ ID NO: 29750 - DNA, 20 bp, synthetic construct
  source 1..20: mol_type = other DNA
tgccataggacctatacatt

SEQ ID NO: 29751 - DNA, 20 bp, synthetic construct
  source 1..20: mol_type = other DNA
attggatggatatcagcata

SEQ ID NO: 29752 - DNA, 20 bp, synthetic construct
  source 1..20: mol_type = other DNA
tcacaggcagctgaaaaagt

SEQ ID NO: 29753 - DNA, 20 bp, synthetic construct
  source 1..20: mol_type = other DNA
atacaccgagatatcaaggc

SEQ ID NO: 29754 - DNA, 20 bp, synthetic construct
  source 1..20: mol_type = other DNA
ggcagaagtaccagtccaag

SEQ ID NO: 29755 - DNA, 20 bp, synthetic construct
  source 1..20: mol_type = other DNA
cgagcagtgggtgatgagat

SEQ ID NO: 29756 - DNA, 20 bp, synthetic construct
  source 1..20: mol_type = other DNA
cattccgaaaaccagagcta

SEQ ID NO: 29757 - DNA, 20 bp, synthetic construct
  source 1..20: mol_type = other DNA
cctcagcctcccaaagtgct

SEQ ID NO: 29758 - DNA, 20 bp, synthetic construct
  source 1..20: mol_type = other DNA
ttctatttttagtagagatg

SEQ ID NO: 29759 - DNA, 20 bp, synthetic construct
  source 1..20: mol_type = other DNA
cctagcactttgggaggctg

SEQ ID NO: 29760 - DNA, 20 bp, synthetic construct
  source 1..20: mol_type = other DNA
cagaccatgtcggtgattgg

SEQ ID NO: 29761 - DNA, 20 bp, synthetic construct
  source 1..20: mol_type = other DNA
aaacagtacatgcagctcgg

SEQ ID NO: 29762 - DNA, 20 bp, synthetic construct
  source 1..20: mol_type = other DNA
aatacttacagaaaagaagc

SEQ ID NO: 29763 - DNA, 20 bp, synthetic construct
  source 1..20: mol_type = other DNA
gacgcagccagctggagaga

SEQ ID NO: 29764 - DNA, 20 bp, synthetic construct
  source 1..20: mol_type = other DNA
agacagaggcgcgccacgtg

SEQ ID NO: 29765 - DNA, 20 bp, synthetic construct
  source 1..20: mol_type = other DNA
ccagaccatgtcggtgattg

SEQ ID NO: 29766 - DNA, 20 bp, synthetic construct
  source 1..20: mol_type = other DNA
cagacagaggcgcgccacgt

SEQ ID NO: 29767 - DNA, 20 bp, synthetic construct
  source 1..20: mol_type = other DNA
aacaccaggacgcagccagc

SEQ ID NO: 29768 - DNA, 20 bp, synthetic construct
  source 1..20: mol_type = other DNA
cagctgagtgagtggctctg

SEQ ID NO: 29769 - DNA, 20 bp, synthetic construct
  source 1..20: mol_type = other DNA
tcagacagaggcgcgccacg

SEQ ID NO: 29770 - DNA, 20 bp, synthetic construct
  source 1..20: mol_type = other DNA
caagtcccataaaatgctgt

SEQ ID NO: 29771 - DNA, 20 bp, synthetic construct
  source 1..20: mol_type = other DNA
gaagggaagagcatgtttgc

SEQ ID NO: 29772 - DNA, 20 bp, synthetic construct
  source 1..20: mol_type = other DNA
ttgatgaggtatgtgcattc

SEQ ID NO: 29773 - DNA, 20 bp, synthetic construct
  source 1..20: mol_type = other DNA
ccccaatcaccgacatggtc

SEQ ID NO: 29774 - DNA, 20 bp, synthetic construct
  source 1..20: mol_type = other DNA
acggatgccgtcctccagga

SEQ ID NO: 29775 - DNA, 20 bp, synthetic construct
  source 1..20: mol_type = other DNA
cccaaacagtacatgcagct

SEQ ID NO: 29776 - DNA, 20 bp, synthetic construct
  source 1..20: mol_type = other DNA
ctgcaggtacacgggccgcg

SEQ ID NO: 29777 - DNA, 20 bp, synthetic construct
  source 1..20: mol_type = other DNA
gttgaggaagacgaaggacg

SEQ ID NO: 29778 - DNA, 20 bp, synthetic construct
  source 1..20: mol_type = other DNA
ctcaggaacctggccctggg

SEQ ID NO: 29779 - DNA, 20 bp, synthetic construct
  source 1..20: mol_type = other DNA
cagagccgcaactacctggg

SEQ ID NO: 29780 - DNA, 20 bp, synthetic construct
  source 1..20: mol_type = other DNA
catgggcatgaagtacttgg

SEQ ID NO: 29781 - DNA, 20 bp, synthetic construct
  source 1..20: mol_type = other DNA
ccctgtccgtggcccacggg

SEQ ID NO: 29782 - DNA, 20 bp, synthetic construct
  source 1..20: mol_type = other DNA
tggacaacccgtacatcgtg

SEQ ID NO: 29783 - DNA, 20 bp, synthetic construct
  source 1..20: mol_type = other DNA
tcgccctgtccgtggcccac

SEQ ID NO: 29784 - DNA, 20 bp, synthetic construct
  source 1..20: mol_type = other DNA
tccttgggcctgatctcctc

SEQ ID NO: 29785 - DNA, 20 bp, synthetic construct
  source 1..20: mol_type = other DNA
cacagcgaattaaggctgga

SEQ ID NO: 29786 - DNA, 20 bp, synthetic construct
  source 1..20: mol_type = other DNA
atacactaacctttgggttt

SEQ ID NO: 29787 - DNA, 20 bp, synthetic construct
  source 1..20: mol_type = other DNA
gtgaacagtgtgagatgcca

SEQ ID NO: 29788 - DNA, 20 bp, synthetic construct
  source 1..20: mol_type = other DNA
gacacaacagcattctggct

SEQ ID NO: 29789 - DNA, 20 bp, synthetic construct
  source 1..20: mol_type = other DNA
agacacaacagcattctggc

SEQ ID NO: 29790 - DNA, 20 bp, synthetic construct
  source 1..20: mol_type = other DNA
gaaatagttcactattggac

SEQ ID NO: 29791 - DNA, 20 bp, synthetic construct
  source 1..20: mol_type = other DNA
aagacttacggaaggtatct

SEQ ID NO: 29792 - DNA, 20 bp, synthetic construct
  source 1..20: mol_type = other DNA
tcaagacacagaagatgatg

SEQ ID NO: 29793 - DNA, 20 bp, synthetic construct
  source 1..20: mol_type = other DNA
tggatggttcaaaaaagtac

SEQ ID NO: 29794 - DNA, 20 bp, synthetic construct
  source 1..20: mol_type = other DNA
tacctgaagttgttgtatcc

SEQ ID NO: 29795 - DNA, 20 bp, synthetic construct
  source 1..20: mol_type = other DNA
cactaacctttgggttttgg

SEQ ID NO: 29796 - DNA, 20 bp, synthetic construct
  source 1..20: mol_type = other DNA
atggttcaaaaaagtacagg

SEQ ID NO: 29797 - DNA, 20 bp, synthetic construct
  source 1..20: mol_type = other DNA
ggtacaccagaaggccagaa

SEQ ID NO: 29798 - DNA, 20 bp, synthetic construct
  source 1..20: mol_type = other DNA
actgacctgtaacatgcacc

SEQ ID NO: 29799 - DNA, 20 bp, synthetic construct
  source 1..20: mol_type = other DNA
caagacacagaagatgatga

SEQ ID NO: 29800 - DNA, 20 bp, synthetic construct
  source 1..20: mol_type = other DNA
tcacagaacatttaccacca

SEQ ID NO: 29801 - DNA, 20 bp, synthetic construct
  source 1..20: mol_type = other DNA
atatagaatttgatcttttc

SEQ ID NO: 29802 - DNA, 20 bp, synthetic construct
  source 1..20: mol_type = other DNA
ttaagcagtcaatgtcaatc

SEQ ID NO: 29803 - DNA, 20 bp, synthetic construct
  source 1..20: mol_type = other DNA
ctgagagagaacagcacagc

SEQ ID NO: 29804 - DNA, 20 bp, synthetic construct
  source 1..20: mol_type = other DNA
aacattcagaatatttcaac

SEQ ID NO: 29805 - DNA, 20 bp, synthetic construct
  source 1..20: mol_type = other DNA
acagaaccggagaacagcac

SEQ ID NO: 29806 - DNA, 20 bp, synthetic construct
  source 1..20: mol_type = other DNA
ggggatatgctcagcaacgt

SEQ ID NO: 29807 - DNA, 20 bp, synthetic construct
  source 1..20: mol_type = other DNA
aaccccctgcagagtggtgg

SEQ ID NO: 29808 - DNA, 20 bp, synthetic construct
  source 1..20: mol_type = other DNA
caggtggtgcgggaagccgt

SEQ ID NO: 29809 - DNA, 20 bp, synthetic construct
  source 1..20: mol_type = other DNA
gaagcacttcctggaaaaga

SEQ ID NO: 29810 - DNA, 20 bp, synthetic construct
  source 1..20: mol_type = other DNA
gcaggtacaaggcgcgttcc

SEQ ID NO: 29811 - DNA, 20 bp, synthetic construct
  source 1..20: mol_type = other DNA
atggagcatggaatatacac

SEQ ID NO: 29812 - DNA, 20 bp, synthetic construct
  source 1..20: mol_type = other DNA
tctcaggtcagggagccgca

SEQ ID NO: 29813 - DNA, 20 bp, synthetic construct
  source 1..20: mol_type = other DNA
ttatggaattttgtccatgt

SEQ ID NO: 29814 - DNA, 20 bp, synthetic construct
  source 1..20: mol_type = other DNA
tgtctttcgtggaagacata

SEQ ID NO: 29815 - DNA, 20 bp, synthetic construct
  source 1..20: mol_type = other DNA
aaagatcatcagaagaaata

SEQ ID NO: 29816 - DNA, 20 bp, synthetic construct
  source 1..20: mol_type = other DNA
ggacggtgagtgcggcgcgc

SEQ ID NO: 29817 - DNA, 20 bp, synthetic construct
  source 1..20: mol_type = other DNA
gtggctggtgggctccagcc

SEQ ID NO: 29818 - DNA, 20 bp, synthetic construct
  source 1..20: mol_type = other DNA
gggtcgcggcgggtaggcgt

SEQ ID NO: 29819 - DNA, 20 bp, synthetic construct
  source 1..20: mol_type = other DNA
tgatcatcaccaagcaggga

SEQ ID NO: 29820 - DNA, 20 bp, synthetic construct
  source 1..20: mol_type = other DNA
cggactctgcccatggaacc

SEQ ID NO: 29821 - DNA, 20 bp, synthetic construct
  source 1..20: mol_type = other DNA
aacatcctgtagtggctggt

SEQ ID NO: 29822 - DNA, 20 bp, synthetic construct
  source 1..20: mol_type = other DNA
cttacgactcaaagttctcc

SEQ ID NO: 29823 - DNA, 20 bp, synthetic construct
  source 1..20: mol_type = other DNA
cctcacctcggcattctggt

SEQ ID NO: 29824 - DNA, 20 bp, synthetic construct
  source 1..20: mol_type = other DNA
caggaatgggaacatccgcc

SEQ ID NO: 29825 - DNA, 20 bp, synthetic construct
  source 1..20: mol_type = other DNA
ggacccaactgtcaattcct

SEQ ID NO: 29826 - DNA, 20 bp, synthetic construct
  source 1..20: mol_type = other DNA
gactgcctaccagaatgccg

SEQ ID NO: 29827 - DNA, 20 bp, synthetic construct
  source 1..20: mol_type = other DNA
cccaccatgtcctactaccg

SEQ ID NO: 29828 - DNA, 20 bp, synthetic construct
  source 1..20: mol_type = other DNA
cccggaatcctttggcaaag

SEQ ID NO: 29829 - DNA, 20 bp, synthetic construct
  source 1..20: mol_type = other DNA
taaacttggaccacaacagg

SEQ ID NO: 29830 - DNA, 20 bp, synthetic construct
  source 1..20: mol_type = other DNA
gacgtacaggcggtttcctg

SEQ ID NO: 29831 - DNA, 20 bp, synthetic construct
  source 1..20: mol_type = other DNA
ccccaggcggccggcttccc

SEQ ID NO: 29832 - DNA, 20 bp, synthetic construct
  source 1..20: mol_type = other DNA
ctaccagaatgccgaggtga

SEQ ID NO: 29833 - DNA, 20 bp, synthetic construct
  source 1..20: mol_type = other DNA
atgccaggtgcgcgcgcccc

SEQ ID NO: 29834 - DNA, 20 bp, synthetic construct
  source 1..20: mol_type = other DNA
caacgatatgcagccggggc

SEQ ID NO: 29835 - DNA, 20 bp, synthetic construct
  source 1..20: mol_type = other DNA
gattaaacttggaccacaac

SEQ ID NO: 29836 - DNA, 20 bp, synthetic construct
  source 1..20: mol_type = other DNA
cgtccacaaacatcctgtag

SEQ ID NO: 29837 - DNA, 20 bp, synthetic construct
  source 1..20: mol_type = other DNA
tccctacccggggggcgcct

SEQ ID NO: 29838 - DNA, 20 bp, synthetic construct
  source 1..20: mol_type = other DNA
gttccccaggcttactggct

SEQ ID NO: 29839 - DNA, 20 bp, synthetic construct
  source 1..20: mol_type = other DNA
ggccaggaggtcctggcacc

SEQ ID NO: 29840 - DNA, 20 bp, synthetic construct
  source 1..20: mol_type = other DNA
gctggtacttatggagggac

SEQ ID NO: 29841 - DNA, 20 bp, synthetic construct
  source 1..20: mol_type = other DNA
ccgcactcaccgtccctgct

SEQ ID NO: 29842 - DNA, 20 bp, synthetic construct
  source 1..20: mol_type = other DNA
aaacatcctgtagtggctgg

SEQ ID NO: 29843 - DNA, 20 bp, synthetic construct
  source 1..20: mol_type = other DNA
catccagtgcgctcctgtgt

SEQ ID NO: 29844 - DNA, 20 bp, synthetic construct
  source 1..20: mol_type = other DNA
atccagtgcgctcctgtgtt

SEQ ID NO: 29845 - DNA, 20 bp, synthetic construct
  source 1..20: mol_type = other DNA
ggcgaaggatgtggttcccc

SEQ ID NO: 29846 - DNA, 20 bp, synthetic construct
  source 1..20: mol_type = other DNA
cctaccagaatgccgaggtg

SEQ ID NO: 29847 - DNA, 20 bp, synthetic construct
  source 1..20: mol_type = other DNA
caggacgcggacgagcgtcg

SEQ ID NO: 29848 - DNA, 20 bp, synthetic construct
  source 1..20: mol_type = other DNA
gagggctaccagccgggcga

SEQ ID NO: 29849 - DNA, 20 bp, synthetic construct
  source 1..20: mol_type = other DNA
cccccaacacaggagcgcac

SEQ ID NO: 29850 - DNA, 20 bp, synthetic construct
  source 1..20: mol_type = other DNA
gggagtccgggtggacgtac

SEQ ID NO: 29851 - DNA, 20 bp, synthetic construct
  source 1..20: mol_type = other DNA
tccaacaatgtgacccaggt

SEQ ID NO: 29852 - DNA, 20 bp, synthetic construct
  source 1..20: mol_type = other DNA
cacccggactcccccaacac

SEQ ID NO: 29853 - DNA, 20 bp, synthetic construct
  source 1..20: mol_type = other DNA
ccgcgcgccgggctctaccc

SEQ ID NO: 29854 - DNA, 20 bp, synthetic construct
  source 1..20: mol_type = other DNA
agcggcaagtgggtgcagtg

SEQ ID NO: 29855 - DNA, 20 bp, synthetic construct
  source 1..20: mol_type = other DNA
gcggtaccagagcggcaagt

SEQ ID NO: 29856 - DNA, 20 bp, synthetic construct
  source 1..20: mol_type = other DNA
gtcgctccccggcatcggct

SEQ ID NO: 29857 - DNA, 20 bp, synthetic construct
  source 1..20: mol_type = other DNA
gcgggtaggcgtaggctcca

SEQ ID NO: 29858 - DNA, 20 bp, synthetic construct
  source 1..20: mol_type = other DNA
tctggtaccgccagtggtgc

SEQ ID NO: 29859 - DNA, 20 bp, synthetic construct
  source 1..20: mol_type = other DNA
tgtctggtgctgattaaact

SEQ ID NO: 29860 - DNA, 20 bp, synthetic construct
  source 1..20: mol_type = other DNA
ctaaagctcacaaacaacaa

SEQ ID NO: 29861 - DNA, 20 bp, synthetic construct
  source 1..20: mol_type = other DNA
agcctcatagctgtggtccc

SEQ ID NO: 29862 - DNA, 20 bp, synthetic construct
  source 1..20: mol_type = other DNA
ccctccataagtaccagccc

SEQ ID NO: 29863 - DNA, 20 bp, synthetic construct
  source 1..20: mol_type = other DNA
ccagtgcgctcctgtgttgg

SEQ ID NO: 29864 - DNA, 20 bp, synthetic construct
  source 1..20: mol_type = other DNA
gtgcagtgtggaaaggccga

SEQ ID NO: 29865 - DNA, 20 bp, synthetic construct
  source 1..20: mol_type = other DNA
ctggcctcggtagtaggaca

SEQ ID NO: 29866 - DNA, 20 bp, synthetic construct
  source 1..20: mol_type = other DNA
cgctcaacaaccacctgttg

SEQ ID NO: 29867 - DNA, 20 bp, synthetic construct
  source 1..20: mol_type = other DNA
ttcgcccagtcctgaatcac

SEQ ID NO: 29868 - DNA, 20 bp, synthetic construct
  source 1..20: mol_type = other DNA
gagatgatcatcaccaagca

SEQ ID NO: 29869 - DNA, 20 bp, synthetic construct
  source 1..20: mol_type = other DNA
actgcacccacttgccgctc

SEQ ID NO: 29870 - DNA, 20 bp, synthetic construct
  source 1..20: mol_type = other DNA
ctacgcgctacccgcgggac

SEQ ID NO: 29871 - DNA, 20 bp, synthetic construct
  source 1..20: mol_type = other DNA
ggcgtccaacaatgtgaccc

SEQ ID NO: 29872 - DNA, 20 bp, synthetic construct
  source 1..20: mol_type = other DNA
cgagggctaccagccgggcg

SEQ ID NO: 29873 - DNA, 20 bp, synthetic construct
  source 1..20: mol_type = other DNA
ccgcgggactggaggtgtcg

SEQ ID NO: 29874 - DNA, 20 bp, synthetic construct
  source 1..20: mol_type = other DNA
gcagcaccgctacttctacc

SEQ ID NO: 29875 - DNA, 20 bp, synthetic construct
  source 1..20: mol_type = other DNA
tccagtgcgctcctgtgttg

SEQ ID NO: 29876 - DNA, 20 bp, synthetic construct
  source 1..20: mol_type = other DNA
cgcctacccgccgcgacccc

SEQ ID NO: 29877 - DNA, 20 bp, synthetic construct
  source 1..20: mol_type = other DNA
ggcgtccgcgggcggcggga

SEQ ID NO: 29878 - DNA, 20 bp, synthetic construct
  source 1..20: mol_type = other DNA
cccggcgcgcgggtccgggg

SEQ ID NO: 29879 - DNA, 20 bp, synthetic construct
  source 1..20: mol_type = other DNA
caagtgggtgcagtgtggaa

SEQ ID NO: 29880 - DNA, 20 bp, synthetic construct
  source 1..20: mol_type = other DNA
ctacccgccgcgaccccagg

SEQ ID NO: 29881 - DNA, 20 bp, synthetic construct
  source 1..20: mol_type = other DNA
gctgagtaatctagagagaa

SEQ ID NO: 29882 - DNA, 20 bp, synthetic construct
  source 1..20: mol_type = other DNA
ctgtgttgggggagtccggg

SEQ ID NO: 29883 - DNA, 20 bp, synthetic construct
  source 1..20: mol_type = other DNA
cggatgggcatcgtggagcc

SEQ ID NO: 29884 - DNA, 20 bp, synthetic construct
  source 1..20: mol_type = other DNA
cacaaacatcctgtagtggc

SEQ ID NO: 29885 - DNA, 20 bp, synthetic construct
  source 1..20: mol_type = other DNA
ggcagtcacggcaatgaact

SEQ ID NO: 29886 - DNA, 20 bp, synthetic construct
  source 1..20: mol_type = other DNA
cgcacctggcatgctgccct

SEQ ID NO: 29887 - DNA, 20 bp, synthetic construct
  source 1..20: mol_type = other DNA
cccaactgtcaattccttgg

SEQ ID NO: 29888 - DNA, 20 bp, synthetic construct
  source 1..20: mol_type = other DNA
aaagctcacaaacaacaagg

SEQ ID NO: 29889 - DNA, 20 bp, synthetic construct
  source 1..20: mol_type = other DNA
tcctacctgggtcacattgt

SEQ ID NO: 29890 - DNA, 20 bp, synthetic construct
  source 1..20: mol_type = other DNA
gccccggctgcatatcgttg

SEQ ID NO: 29891 - DNA, 20 bp, synthetic construct
  source 1..20: mol_type = other DNA
tgccaggtgcgcgcgcccct

SEQ ID NO: 29892 - DNA, 20 bp, synthetic construct
  source 1..20: mol_type = other DNA
tggtggaccagcaccactgg

SEQ ID NO: 29893 - DNA, 20 bp, synthetic construct
  source 1..20: mol_type = other DNA
ccccagtaccctcccaagat

SEQ ID NO: 29894 - DNA, 20 bp, synthetic construct
  source 1..20: mol_type = other DNA
gacgcggacgagcgtcgcgg

SEQ ID NO: 29895 - DNA, 20 bp, synthetic construct
  source 1..20: mol_type = other DNA
agctgagtaatctagagaga

SEQ ID NO: 29896 - DNA, 20 bp, synthetic construct
  source 1..20: mol_type = other DNA
tcctggccaggcgaaggatg

SEQ ID NO: 29897 - DNA, 20 bp, synthetic construct
  source 1..20: mol_type = other DNA
ccaagcagggacggtgagtg

SEQ ID NO: 29898 - DNA, 20 bp, synthetic construct
  source 1..20: mol_type = other DNA
catctgtagacagagcaaga

SEQ ID NO: 29899 - DNA, 20 bp, synthetic construct
  source 1..20: mol_type = other DNA
ggttccccaggcttactggc

SEQ ID NO: 29900 - DNA, 20 bp, synthetic construct
  source 1..20: mol_type = other DNA
gccggggctggtacttatgg

SEQ ID NO: 29901 - DNA, 20 bp, synthetic construct
  source 1..20: mol_type = other DNA
gacccaactgtcaattcctt

SEQ ID NO: 29902 - DNA, 20 bp, synthetic construct
  source 1..20: mol_type = other DNA
ggcggtaccagagcggcaag

SEQ ID NO: 29903 - DNA, 20 bp, synthetic construct
  source 1..20: mol_type = other DNA
agagatgatcatcaccaagc

SEQ ID NO: 29904 - DNA, 20 bp, synthetic construct
  source 1..20: mol_type = other DNA
tcttggtggaccagcaccac

SEQ ID NO: 29905 - DNA, 20 bp, synthetic construct
  source 1..20: mol_type = other DNA
ggtgcagtgtggaaaggccg

SEQ ID NO: 29906 - DNA, 20 bp, synthetic construct
  source 1..20: mol_type = other DNA
cccattcctgtcatttactg

SEQ ID NO: 29907 - DNA, 20 bp, synthetic construct
  source 1..20: mol_type = other DNA
tccccaggcttactggctgg

SEQ ID NO: 29908 - DNA, 20 bp, synthetic construct
  source 1..20: mol_type = other DNA
gcccggccacagtaaatgac

SEQ ID NO: 29909 - DNA, 20 bp, synthetic construct
  source 1..20: mol_type = other DNA
ctacaggatgtttgtggacg

SEQ ID NO: 29910 - DNA, 20 bp, synthetic construct
  source 1..20: mol_type = other DNA
tggtgatgatcatctctgtc

SEQ ID NO: 29911 - DNA, 20 bp, synthetic construct
  source 1..20: mol_type = other DNA
ccggccgcctggggtcgcgg

SEQ ID NO: 29912 - DNA, 20 bp, synthetic construct
  source 1..20: mol_type = other DNA
taaagctcacaaacaacaag

SEQ ID NO: 29913 - DNA, 20 bp, synthetic construct
  source 1..20: mol_type = other DNA
gcctcatagctgtggtcccg

SEQ ID NO: 29914 - DNA, 20 bp, synthetic construct
  source 1..20: mol_type = other DNA
agcctacctgtgagaggtga

SEQ ID NO: 29915 - DNA, 20 bp, synthetic construct
  source 1..20: mol_type = other DNA
catacagcagtctcgaatgg

SEQ ID NO: 29916 - DNA, 20 bp, synthetic construct
  source 1..20: mol_type = other DNA
agtgatatacatagtttatt

SEQ ID NO: 29917 - DNA, 20 bp, synthetic construct
  source 1..20: mol_type = other DNA
acagaagatagaaagggaga

SEQ ID NO: 29918 - DNA, 20 bp, synthetic construct
  source 1..20: mol_type = other DNA
tctcttaaggcaggctgctt

SEQ ID NO: 29919 - DNA, 20 bp, synthetic construct
  source 1..20: mol_type = other DNA
ttcatgtcatctgatgaagg

SEQ ID NO: 29920 - DNA, 20 bp, synthetic construct
  source 1..20: mol_type = other DNA
agcagtcaattcagtggatc

SEQ ID NO: 29921 - DNA, 20 bp, synthetic construct
  source 1..20: mol_type = other DNA
tcaagtgaagctgacacatt

SEQ ID NO: 29922 - DNA, 20 bp, synthetic construct
  source 1..20: mol_type = other DNA
cttacagaagaaggcaaacc

SEQ ID NO: 29923 - DNA, 20 bp, synthetic construct
  source 1..20: mol_type = other DNA
actctagatgaatcatagga

SEQ ID NO: 29924 - DNA, 20 bp, synthetic construct
  source 1..20: mol_type = other DNA
ccaagcggtcatgtgaatga

SEQ ID NO: 29925 - DNA, 20 bp, synthetic construct
  source 1..20: mol_type = other DNA
tatagaggtaactatattgt

SEQ ID NO: 29926 - DNA, 20 bp, synthetic construct
  source 1..20: mol_type = other DNA
atccgcaggaaggggacagg

SEQ ID NO: 29927 - DNA, 20 bp, synthetic construct
  source 1..20: mol_type = other DNA
ctccctccaggctctcgggc

SEQ ID NO: 29928 - DNA, 20 bp, synthetic construct
  source 1..20: mol_type = other DNA
gctcacctcggcctcgccgc

SEQ ID NO: 29929 - DNA, 20 bp, synthetic construct
  source 1..20: mol_type = other DNA
agagtccaaggcagagaagg

SEQ ID NO: 29930 - DNA, 20 bp, synthetic construct
  source 1..20: mol_type = other DNA
gccgcccgcgccgcccccgc

SEQ ID NO: 29931 - DNA, 20 bp, synthetic construct
  source 1..20: mol_type = other DNA
gagaagtttggagaggaaag

SEQ ID NO: 29932 - DNA, 20 bp, synthetic construct
  source 1..20: mol_type = other DNA
agcaatatcaatggtatctg

SEQ ID NO: 29933 - DNA, 20 bp, synthetic construct
  source 1..20: mol_type = other DNA
atttatgatatgacaacgtc

SEQ ID NO: 29934 - DNA, 20 bp, synthetic construct
  source 1..20: mol_type = other DNA
gtgagctggagcatctggac

SEQ ID NO: 29935 - DNA, 20 bp, synthetic construct
  source 1..20: mol_type = other DNA
ctagtcatatttcaagtgac

SEQ ID NO: 29936 - DNA, 20 bp, synthetic construct
  source 1..20: mol_type = other DNA
aggagcggaagacggagttg

SEQ ID NO: 29937 - DNA, 20 bp, synthetic construct
  source 1..20: mol_type = other DNA
ctgggaggacctgcgcaagc

SEQ ID NO: 29938 - DNA, 20 bp, synthetic construct
  source 1..20: mol_type = other DNA
tcctgctctgggggtgtggg

SEQ ID NO: 29939 - DNA, 20 bp, synthetic construct
  source 1..20: mol_type = other DNA
ccctttcccacgtggggagc

SEQ ID NO: 29940 - DNA, 20 bp, synthetic construct
  source 1..20: mol_type = other DNA
ccacgtgggaaaggggctgc

SEQ ID NO: 29941 - DNA, 20 bp, synthetic construct
  source 1..20: mol_type = other DNA
agcagcccctttcccacgtg

SEQ ID NO: 29942 - DNA, 20 bp, synthetic construct
  source 1..20: mol_type = other DNA
cagtaggcatctgccaagaa

SEQ ID NO: 29943 - DNA, 20 bp, synthetic construct
  source 1..20: mol_type = other DNA
cagcagcccctttcccacgt

SEQ ID NO: 29944 - DNA, 20 bp, synthetic construct
  source 1..20: mol_type = other DNA
gccgcttcactcaggccagg

SEQ ID NO: 29945 - DNA, 20 bp, synthetic construct
  source 1..20: mol_type = other DNA
tccttacttgcagcactgac

SEQ ID NO: 29946 - DNA, 20 bp, synthetic construct
  source 1..20: mol_type = other DNA
agctgtcatccgtatctgtt

SEQ ID NO: 29947 - DNA, 20 bp, synthetic construct
  source 1..20: mol_type = other DNA
agaaagaaaggagcaaccgt

SEQ ID NO: 29948 - DNA, 20 bp, synthetic construct
  source 1..20: mol_type = other DNA
agtctcccaaggtaaggcta

SEQ ID NO: 29949 - DNA, 20 bp, synthetic construct
  source 1..20: mol_type = other DNA
tggtggatgaagagaaagaa

SEQ ID NO: 29950 - DNA, 20 bp, synthetic construct
  source 1..20: mol_type = other DNA
tcctcctccaactgcagtcc

SEQ ID NO: 29951 - DNA, 20 bp, synthetic construct
  source 1..20: mol_type = other DNA
ttacagatttttcaaataag

SEQ ID NO: 29952 - DNA, 20 bp, synthetic construct
  source 1..20: mol_type = other DNA
cttcgacatctagactgggg

SEQ ID NO: 29953 - DNA, 20 bp, synthetic construct
  source 1..20: mol_type = other DNA
ttctataaataaaaaaagaa

SEQ ID NO: 29954 - DNA, 20 bp, synthetic construct
  source 1..20: mol_type = other DNA
gcagagaattgcttgaaccc

SEQ ID NO: 29955 - DNA, 20 bp, synthetic construct
  source 1..20: mol_type = other DNA
gcgactggagggtgaggccc

SEQ ID NO: 29956 - DNA, 20 bp, synthetic construct
  source 1..20: mol_type = other DNA
cagcagcatggggtggccaa

SEQ ID NO: 29957 - DNA, 20 bp, synthetic construct
  source 1..20: mol_type = other DNA
tgccacttctcagtacatgt

SEQ ID NO: 29958 - DNA, 20 bp, synthetic construct
  source 1..20: mol_type = other DNA
attccagttctaaggggagc

SEQ ID NO: 29959 - DNA, 20 bp, synthetic construct
  source 1..20: mol_type = other DNA
ttcatcattccagttctaag

SEQ ID NO: 29960 - DNA, 20 bp, synthetic construct
  source 1..20: mol_type = other DNA
ttccagttctaaggggagcg

SEQ ID NO: 29961 - DNA, 20 bp, synthetic construct
  source 1..20: mol_type = other DNA
tcaagctgcacggactcctg

SEQ ID NO: 29962 - DNA, 20 bp, synthetic construct
  source 1..20: mol_type = other DNA
gccccacatgtactgagaag

SEQ ID NO: 29963 - DNA, 20 bp, synthetic construct
  source 1..20: mol_type = other DNA
tcagaatcagagatttcatg

SEQ ID NO: 29964 - DNA, 20 bp, synthetic construct
  source 1..20: mol_type = other DNA
gggcgttcaggacacagact

SEQ ID NO: 29965 - DNA, 20 bp, synthetic construct
  source 1..20: mol_type = other DNA
cccgtccaaggctgggacca

SEQ ID NO: 29966 - DNA, 20 bp, synthetic construct
  source 1..20: mol_type = other DNA
gtctgttcaaagaaagagaa

SEQ ID NO: 29967 - DNA, 20 bp, synthetic construct
  source 1..20: mol_type = other DNA
cttagaactggaatgatgaa

SEQ ID NO: 29968 - DNA, 20 bp, synthetic construct
  source 1..20: mol_type = other DNA
cagaaacatccaggccaccc

SEQ ID NO: 29969 - DNA, 20 bp, synthetic construct
  source 1..20: mol_type = other DNA
ccacttgttaacagagaccg

SEQ ID NO: 29970 - DNA, 20 bp, synthetic construct
  source 1..20: mol_type = other DNA
catggtcccagccttggacg

SEQ ID NO: 29971 - DNA, 20 bp, synthetic construct
  source 1..20: mol_type = other DNA
gcatgagtacaagaaatggc

SEQ ID NO: 29972 - DNA, 20 bp, synthetic construct
  source 1..20: mol_type = other DNA
agtgtcagcatcccaaccag

SEQ ID NO: 29973 - DNA, 20 bp, synthetic construct
  source 1..20: mol_type = other DNA
tcacctgaaatgacaatgat

SEQ ID NO: 29974 - DNA, 20 bp, synthetic construct
  source 1..20: mol_type = other DNA
gttgcagtagccgttgcact

SEQ ID NO: 29975 - DNA, 20 bp, synthetic construct
  source 1..20: mol_type = other DNA
tctcaagctgcacggactcc

SEQ ID NO: 29976 - DNA, 20 bp, synthetic construct
  source 1..20: mol_type = other DNA
ggggcacgcccagaatccca

SEQ ID NO: 29977 - DNA, 20 bp, synthetic construct
  source 1..20: mol_type = other DNA
gcccggcaacgctgcttggg

SEQ ID NO: 29978 - DNA, 20 bp, synthetic construct
  source 1..20: mol_type = other DNA
tcaccaagggtacaaaatga

SEQ ID NO: 29979 - DNA, 20 bp, synthetic construct
  source 1..20: mol_type = other DNA
agcattcctgggcaggccag

SEQ ID NO: 29980 - DNA, 20 bp, synthetic construct
  source 1..20: mol_type = other DNA
gcaactggtgagacacttgg

SEQ ID NO: 29981 - DNA, 20 bp, synthetic construct
  source 1..20: mol_type = other DNA
tggcaggaaaacagcgagca

SEQ ID NO: 29982 - DNA, 20 bp, synthetic construct
  source 1..20: mol_type = other DNA
gtcacctgaggacagaaagg

SEQ ID NO: 29983 - DNA, 20 bp, synthetic construct
  source 1..20: mol_type = other DNA
tcgagaagtccggaagcttg

SEQ ID NO: 29984 - DNA, 20 bp, synthetic construct
  source 1..20: mol_type = other DNA
agagcaactggtgagacact

SEQ ID NO: 29985 - DNA, 20 bp, synthetic construct
  source 1..20: mol_type = other DNA
cccggcaacgctgcttgggg

SEQ ID NO: 29986 - DNA, 20 bp, synthetic construct
  source 1..20: mol_type = other DNA
gaatttacttgcctctccac

SEQ ID NO: 29987 - DNA, 20 bp, synthetic construct
  source 1..20: mol_type = other DNA
gccttctgaggatgttgcaa

SEQ ID NO: 29988 - DNA, 20 bp, synthetic construct
  source 1..20: mol_type = other DNA
cattccagttctaaggggag

SEQ ID NO: 29989 - DNA, 20 bp, synthetic construct
  source 1..20: mol_type = other DNA
aggaaaacagcgagcagggg

SEQ ID NO: 29990 - DNA, 20 bp, synthetic construct
  source 1..20: mol_type = other DNA
gccatggtcccagccttgga

SEQ ID NO: 29991 - DNA, 20 bp, synthetic construct
  source 1..20: mol_type = other DNA
gcctctccactggcctgccc

SEQ ID NO: 29992 - DNA, 20 bp, synthetic construct
  source 1..20: mol_type = other DNA
aggacacagacttggtactg

SEQ ID NO: 29993 - DNA, 20 bp, synthetic construct
  source 1..20: mol_type = other DNA
gacaccagttgagtttcttc

SEQ ID NO: 29994 - DNA, 20 bp, synthetic construct
  source 1..20: mol_type = other DNA
tccacttgttaacagagacc

SEQ ID NO: 29995 - DNA, 20 bp, synthetic construct
  source 1..20: mol_type = other DNA
actgagaagtggcatgcatg

SEQ ID NO: 29996 - DNA, 20 bp, synthetic construct
  source 1..20: mol_type = other DNA
gttccacgccaagggctcat

SEQ ID NO: 29997 - DNA, 20 bp, synthetic construct
  source 1..20: mol_type = other DNA
ctcaggaatttgttgaaacg

SEQ ID NO: 29998 - DNA, 20 bp, synthetic construct
  source 1..20: mol_type = other DNA
cagcatcccaaccagaggat

SEQ ID NO: 29999 - DNA, 20 bp, synthetic construct
  source 1..20: mol_type = other DNA
tcaactggtgtcgagaagtc

SEQ ID NO: 30000 - DNA, 20 bp, synthetic construct
  source 1..20: mol_type = other DNA
ttcagcatgagtacaagaaa

SEQ ID NO: 30001 - DNA, 20 bp, synthetic construct
  source 1..20: mol_type = other DNA
tgtacccttggtgaccctga

SEQ ID NO: 30002 - DNA, 20 bp, synthetic construct
  source 1..20: mol_type = other DNA
gctccctggcatggcgctcg

SEQ ID NO: 30003 - DNA, 20 bp, synthetic construct
  source 1..20: mol_type = other DNA
cgtgccccagctttctctca

SEQ ID NO: 30004 - DNA, 20 bp, synthetic construct
  source 1..20: mol_type = other DNA
ccaggcacggaatggtgttc

SEQ ID NO: 30005 - DNA, 20 bp, synthetic construct
  source 1..20: mol_type = other DNA
ggcaggaaaacagcgagcag

SEQ ID NO: 30006 - DNA, 20 bp, synthetic construct
  source 1..20: mol_type = other DNA
taacatcctggaggcaggct

SEQ ID NO: 30007 - DNA, 20 bp, synthetic construct
  source 1..20: mol_type = other DNA
tatctgtagcattcctgggc

SEQ ID NO: 30008 - DNA, 20 bp, synthetic construct
  source 1..20: mol_type = other DNA
accaggcccactgtccttca

SEQ ID NO: 30009 - DNA, 20 bp, synthetic construct
  source 1..20: mol_type = other DNA
gccacttctcagtacatgtg

SEQ ID NO: 30010 - DNA, 20 bp, synthetic construct
  source 1..20: mol_type = other DNA
ctcgctgcgctcccgggatt

SEQ ID NO: 30011 - DNA, 20 bp, synthetic construct
  source 1..20: mol_type = other DNA
tctcatagatcagaacatcc

SEQ ID NO: 30012 - DNA, 20 bp, synthetic construct
  source 1..20: mol_type = other DNA
gctcctcggcccccgcctcg

SEQ ID NO: 30013 - DNA, 20 bp, synthetic construct
  source 1..20: mol_type = other DNA
catcgatctcatttttcgtg

SEQ ID NO: 30014 - DNA, 20 bp, synthetic construct
  source 1..20: mol_type = other DNA
agcacagccaccaacagcaa

SEQ ID NO: 30015 - DNA, 20 bp, synthetic construct
  source 1..20: mol_type = other DNA
cccaggacccaggccggcgc

SEQ ID NO: 30016 - DNA, 20 bp, synthetic construct
  source 1..20: mol_type = other DNA
tctgctggtgagttggggac

SEQ ID NO: 30017 - DNA, 20 bp, synthetic construct
  source 1..20: mol_type = other DNA
ctctaccgtcttctgagata

SEQ ID NO: 30018 - DNA, 20 bp, synthetic construct
  source 1..20: mol_type = other DNA
acacctgggtacacacacag

SEQ ID NO: 30019 - DNA, 20 bp, synthetic construct
  source 1..20: mol_type = other DNA
ccgggcccccgaagcggccg

SEQ ID NO: 30020 - DNA, 20 bp, synthetic construct
  source 1..20: mol_type = other DNA
tccttcacgagttcctgggg

SEQ ID NO: 30021 - DNA, 20 bp, synthetic construct
  source 1..20: mol_type = other DNA
cgctgctggggttttcccag

SEQ ID NO: 30022 - DNA, 20 bp, synthetic construct
  source 1..20: mol_type = other DNA
cacctgggtacacacagaga

SEQ ID NO: 30023 - DNA, 20 bp, synthetic construct
  source 1..20: mol_type = other DNA
agcctgtaacccgtgcacag

SEQ ID NO: 30024 - DNA, 20 bp, synthetic construct
  source 1..20: mol_type = other DNA
tcctttttcacactgacaca

SEQ ID NO: 30025 - DNA, 20 bp, synthetic construct
  source 1..20: mol_type = other DNA
ctaaaaccactatgatgata

SEQ ID NO: 30026 - DNA, 20 bp, synthetic construct
  source 1..20: mol_type = other DNA
gataaggtagtgatagggag

SEQ ID NO: 30027 - DNA, 20 bp, synthetic construct
  source 1..20: mol_type = other DNA
ttgactctgccaccatcccc

SEQ ID NO: 30028 - DNA, 20 bp, synthetic construct
  source 1..20: mol_type = other DNA
gctggaggcggcgacagcgg

SEQ ID NO: 30029 - DNA, 20 bp, synthetic construct
  source 1..20: mol_type = other DNA
tccccaggaggaggccaggc

SEQ ID NO: 30030 - DNA, 20 bp, synthetic construct
  source 1..20: mol_type = other DNA
gtcaccccaagcctgggagg

SEQ ID NO: 30031 - DNA, 20 bp, synthetic construct
  source 1..20: mol_type = other DNA
cagccactgcaggctggggc

SEQ ID NO: 30032 - DNA, 20 bp, synthetic construct
  source 1..20: mol_type = other DNA
tgggagagaaggtccccggg

SEQ ID NO: 30033 - DNA, 20 bp, synthetic construct
  source 1..20: mol_type = other DNA
tggaggacctgaggccggga

SEQ ID NO: 30034 - DNA, 20 bp, synthetic construct
  source 1..20: mol_type = other DNA
gcacctgtctacttgggctg

SEQ ID NO: 30035 - DNA, 20 bp, synthetic construct
  source 1..20: mol_type = other DNA
gggccagcaagggaggaagg

SEQ ID NO: 30036 - DNA, 20 bp, synthetic construct
  source 1..20: mol_type = other DNA
tccccgccggcagagccgct

SEQ ID NO: 30037 - DNA, 20 bp, synthetic construct
  source 1..20: mol_type = other DNA
ggtgcggggaggtgggagca

SEQ ID NO: 30038 - DNA, 20 bp, synthetic construct
  source 1..20: mol_type = other DNA
gcagcagctgggtctctgca

SEQ ID NO: 30039 - DNA, 20 bp, synthetic construct
  source 1..20: mol_type = other DNA
ccccggtggggcgctgaccc

SEQ ID NO: 30040 - DNA, 20 bp, synthetic construct
  source 1..20: mol_type = other DNA
ccgcggctgggccctgcagg

SEQ ID NO: 30041 - DNA, 20 bp, synthetic construct
  source 1..20: mol_type = other DNA
gcgcgggcgggagggcggcg

SEQ ID NO: 30042 - DNA, 20 bp, synthetic construct
  source 1..20: mol_type = other DNA
accgggggtataggtggagc

SEQ ID NO: 30043 - DNA, 20 bp, synthetic construct
  source 1..20: mol_type = other DNA
gcatgctggcgacctggagg

SEQ ID NO: 30044 - DNA, 20 bp, synthetic construct
  source 1..20: mol_type = other DNA
cgggactgaagcccagggtg

SEQ ID NO: 30045 - DNA, 20 bp, synthetic construct
  source 1..20: mol_type = other DNA
ctcccacttctgaagggggt

SEQ ID NO: 30046 - DNA, 20 bp, synthetic construct
  source 1..20: mol_type = other DNA
ggtgggaatatacccctcag

SEQ ID NO: 30047 - DNA, 20 bp, synthetic construct
  source 1..20: mol_type = other DNA
cgaccacgagatcgatcggc

SEQ ID NO: 30048 - DNA, 20 bp, synthetic construct
  source 1..20: mol_type = other DNA
cagagatactcacttactac

SEQ ID NO: 30049 - DNA, 20 bp, synthetic construct
  source 1..20: mol_type = other DNA
tgactgtccaggcccggggc

SEQ ID NO: 30050 - DNA, 20 bp, synthetic construct
  source 1..20: mol_type = other DNA
aagtccaagctctactccat

SEQ ID NO: 30051 - DNA, 20 bp, synthetic construct
  source 1..20: mol_type = other DNA
tcccacttctgaagggggtt

SEQ ID NO: 30052 - DNA, 20 bp, synthetic construct
  source 1..20: mol_type = other DNA
agatgaggctgcgcccctgc

SEQ ID NO: 30053 - DNA, 20 bp, synthetic construct
  source 1..20: mol_type = other DNA
ccaacagctccaggagcacc

SEQ ID NO: 30054 - DNA, 20 bp, synthetic construct
  source 1..20: mol_type = other DNA
tctcgtggtcgctcagccct

SEQ ID NO: 30055 - DNA, 20 bp, synthetic construct
  source 1..20: mol_type = other DNA
tctggtgaggggagaagatg

SEQ ID NO: 30056 - DNA, 20 bp, synthetic construct
  source 1..20: mol_type = other DNA
tgcagtccgtatcctgcccc

SEQ ID NO: 30057 - DNA, 20 bp, synthetic construct
  source 1..20: mol_type = other DNA
ttcggcatttggagcagctg

SEQ ID NO: 30058 - DNA, 20 bp, synthetic construct
  source 1..20: mol_type = other DNA
accaagtgccacaaaggtag

SEQ ID NO: 30059 - DNA, 20 bp, synthetic construct
  source 1..20: mol_type = other DNA
tgcaggcttgagtttccacc

SEQ ID NO: 30060 - DNA, 20 bp, synthetic construct
  source 1..20: mol_type = other DNA
gcacgccttgcccgcccagg

SEQ ID NO: 30061 - DNA, 20 bp, synthetic construct
  source 1..20: mol_type = other DNA
tctgatgtttcagttccttc

SEQ ID NO: 30062 - DNA, 20 bp, synthetic construct
  source 1..20: mol_type = other DNA
atacacccagctctggaact

SEQ ID NO: 30063 - DNA, 20 bp, synthetic construct
  source 1..20: mol_type = other DNA
tggactcttacttttcacct

SEQ ID NO: 30064 - DNA, 20 bp, synthetic construct
  source 1..20: mol_type = other DNA
ccgctgcgcaagtgccgccc

SEQ ID NO: 30065 - DNA, 20 bp, synthetic construct
  source 1..20: mol_type = other DNA
gggcgccatgggtgcgggcg

SEQ ID NO: 30066 - DNA, 20 bp, synthetic construct
  source 1..20: mol_type = other DNA
caccctacgccccggagccc

SEQ ID NO: 30067 - DNA, 20 bp, synthetic construct
  source 1..20: mol_type = other DNA
gtactgcgcgctgagcaagc

SEQ ID NO: 30068 - DNA, 20 bp, synthetic construct
  source 1..20: mol_type = other DNA
catgttggcctgaggaaaca

SEQ ID NO: 30069 - DNA, 20 bp, synthetic construct
  source 1..20: mol_type = other DNA
atgttggcctgaggaaacaa

SEQ ID NO: 30070 - DNA, 20 bp, synthetic construct
  source 1..20: mol_type = other DNA
tggccagaccaggtacgggg

SEQ ID NO: 30071 - DNA, 20 bp, synthetic construct
  source 1..20: mol_type = other DNA
gcccaggtgggtgactcgcg

SEQ ID NO: 30072 - DNA, 20 bp, synthetic construct
  source 1..20: mol_type = other DNA
gagaacgtccccggggcaca

SEQ ID NO: 30073 - DNA, 20 bp, synthetic construct
  source 1..20: mol_type = other DNA
ggagtcacacacggtgtccg

SEQ ID NO: 30074 - DNA, 20 bp, synthetic construct
  source 1..20: mol_type = other DNA
agcccagagctccagtccga

SEQ ID NO: 30075 - DNA, 20 bp, synthetic construct
  source 1..20: mol_type = other DNA
cctggtctagagcagcgaga

SEQ ID NO: 30076 - DNA, 20 bp, synthetic construct
  source 1..20: mol_type = other DNA
gaggtgtgcagagccctggg

SEQ ID NO: 30077 - DNA, 20 bp, synthetic construct
  source 1..20: mol_type = other DNA
gttcccgagtgcttgagctg

SEQ ID NO: 30078 - DNA, 20 bp, synthetic construct
  source 1..20: mol_type = other DNA
ctgatgtttcagttccttca

SEQ ID NO: 30079 - DNA, 20 bp, synthetic construct
  source 1..20: mol_type = other DNA
ctccaacacgacttcatcca

SEQ ID NO: 30080 - DNA, 20 bp, synthetic construct
  source 1..20: mol_type = other DNA
ggccagaccaggtacggggt

SEQ ID NO: 30081 - DNA, 20 bp, synthetic construct
  source 1..20: mol_type = other DNA
ggcttctctctgcaggcaca

SEQ ID NO: 30082 - DNA, 20 bp, synthetic construct
  source 1..20: mol_type = other DNA
ctcctcctccagctgtaacg

SEQ ID NO: 30083 - DNA, 20 bp, synthetic construct
  source 1..20: mol_type = other DNA
caccgtgtgtgactcctgtg

SEQ ID NO: 30084 - DNA, 20 bp, synthetic construct
  source 1..20: mol_type = other DNA
gtggggcctgcaaatatccg

SEQ ID NO: 30085 - DNA, 20 bp, synthetic construct
  source 1..20: mol_type = other DNA
gcagtaccagccgggcctgc

SEQ ID NO: 30086 - DNA, 20 bp, synthetic construct
  source 1..20: mol_type = other DNA
ggcttctctataaagaggag

SEQ ID NO: 30087 - DNA, 20 bp, synthetic construct
  source 1..20: mol_type = other DNA
ccctggggccatactccggg

SEQ ID NO: 30088 - DNA, 20 bp, synthetic construct
  source 1..20: mol_type = other DNA
ttctttctaggactgattgt

SEQ ID NO: 30089 - DNA, 20 bp, synthetic construct
  source 1..20: mol_type = other DNA
gcatgtgctcccgggctccg

SEQ ID NO: 30090 - DNA, 20 bp, synthetic construct
  source 1..20: mol_type = other DNA
ggtctagagcagcgagaggg

SEQ ID NO: 30091 - DNA, 20 bp, synthetic construct
  source 1..20: mol_type = other DNA
ctcctccagctgtaacgtgg

SEQ ID NO: 30092 - DNA, 20 bp, synthetic construct
  source 1..20: mol_type = other DNA
catgcttgcattcccaggga

SEQ ID NO: 30093 - DNA, 20 bp, synthetic construct
  source 1..20: mol_type = other DNA
ctactcaccagagctacagc

SEQ ID NO: 30094 - DNA, 20 bp, synthetic construct
  source 1..20: mol_type = other DNA
ctgagccggcatgtgctccc

SEQ ID NO: 30095 - DNA, 20 bp, synthetic construct
  source 1..20: mol_type = other DNA
cccgggcggcacttgcgcag

SEQ ID NO: 30096 - DNA, 20 bp, synthetic construct
  source 1..20: mol_type = other DNA
cagacggcgacgggcgccat

SEQ ID NO: 30097 - DNA, 20 bp, synthetic construct
  source 1..20: mol_type = other DNA
cctgcagagagaagccaagg

SEQ ID NO: 30098 - DNA, 20 bp, synthetic construct
  source 1..20: mol_type = other DNA
gcttctctataaagaggaga

SEQ ID NO: 30099 - DNA, 20 bp, synthetic construct
  source 1..20: mol_type = other DNA
acagcacatacacccagctc

SEQ ID NO: 30100 - DNA, 20 bp, synthetic construct
  source 1..20: mol_type = other DNA
cgcatctgcacctgcaggcc

SEQ ID NO: 30101 - DNA, 20 bp, synthetic construct
  source 1..20: mol_type = other DNA
ccgctgtagctctggtgagt

SEQ ID NO: 30102 - DNA, 20 bp, synthetic construct
  source 1..20: mol_type = other DNA
cgcaagtgccgcccgggctt

SEQ ID NO: 30103 - DNA, 20 bp, synthetic construct
  source 1..20: mol_type = other DNA
ctccagtccgacggccagcg

SEQ ID NO: 30104 - DNA, 20 bp, synthetic construct
  source 1..20: mol_type = other DNA
catacacccagctctggaac

SEQ ID NO: 30105 - DNA, 20 bp, synthetic construct
  source 1..20: mol_type = other DNA
cctactcaccagagctacag

SEQ ID NO: 30106 - DNA, 20 bp, synthetic construct
  source 1..20: mol_type = other DNA
ccatgggtgcgggcggggtc

SEQ ID NO: 30107 - DNA, 20 bp, synthetic construct
  source 1..20: mol_type = other DNA
tgcagcacatctgagctgtc

SEQ ID NO: 30108 - DNA, 20 bp, synthetic construct
  source 1..20: mol_type = other DNA
tggaaactcaagcctgcact

SEQ ID NO: 30109 - DNA, 20 bp, synthetic construct
  source 1..20: mol_type = other DNA
caccacgttacagctggagg

SEQ ID NO: 30110 - DNA, 20 bp, synthetic construct
  source 1..20: mol_type = other DNA
gccgctgcgcaagtgccgcc

SEQ ID NO: 30111 - DNA, 20 bp, synthetic construct
  source 1..20: mol_type = other DNA
gagccacagctcaagcactc

SEQ ID NO: 30112 - DNA, 20 bp, synthetic construct
  source 1..20: mol_type = other DNA
gcggttctgttcccgagtgc

SEQ ID NO: 30113 - DNA, 20 bp, synthetic construct
  source 1..20: mol_type = other DNA
ggagaacgtccccggggcac

SEQ ID NO: 30114 - DNA, 20 bp, synthetic construct
  source 1..20: mol_type = other DNA
cgggcgccatgggtgcgggc

SEQ ID NO: 30115 - DNA, 20 bp, synthetic construct
  source 1..20: mol_type = other DNA
ccaccttggcttctctctgc

SEQ ID NO: 30116 - DNA, 20 bp, synthetic construct
  source 1..20: mol_type = other DNA
cacagagggcccttgggcgt

SEQ ID NO: 30117 - DNA, 20 bp, synthetic construct
  source 1..20: mol_type = other DNA
gccgggtgagggcagccacg

SEQ ID NO: 30118 - DNA, 20 bp, synthetic construct
  source 1..20: mol_type = other DNA
agcgcggcccagacggcgac

SEQ ID NO: 30119 - DNA, 20 bp, synthetic construct
  source 1..20: mol_type = other DNA
cagcgcggcccagacggcga

SEQ ID NO: 30120 - DNA, 20 bp, synthetic construct
  source 1..20: mol_type = other DNA
ggtgtatgtgctgtcctcac

SEQ ID NO: 30121 - DNA, 20 bp, synthetic construct
  source 1..20: mol_type = other DNA
gtcctcacaggagtcacaca

SEQ ID NO: 30122 - DNA, 20 bp, synthetic construct
  source 1..20: mol_type = other DNA
cctgaggaaacaagggccag

SEQ ID NO: 30123 - DNA, 20 bp, synthetic construct
  source 1..20: mol_type = other DNA
gctcgatccagcctgcaggg

SEQ ID NO: 30124 - DNA, 20 bp, synthetic construct
  source 1..20: mol_type = other DNA
ggaaactcaagcctgcactc

SEQ ID NO: 30125 - DNA, 20 bp, synthetic construct
  source 1..20: mol_type = other DNA
gttacagctggaggaggagg

SEQ ID NO: 30126 - DNA, 20 bp, synthetic construct
  source 1..20: mol_type = other DNA
acctggtctagagcagcgag

SEQ ID NO: 30127 - DNA, 20 bp, synthetic construct
  source 1..20: mol_type = other DNA
acgggcgccatgggtgcggg

SEQ ID NO: 30128 - DNA, 20 bp, synthetic construct
  source 1..20: mol_type = other DNA
gacggccagcgcggcccaga

SEQ ID NO: 30129 - DNA, 20 bp, synthetic construct
  source 1..20: mol_type = other DNA
gctcagcgcgcagtaccagc

SEQ ID NO: 30130 - DNA, 20 bp, synthetic construct
  source 1..20: mol_type = other DNA
cgggcctgcaggtgcagatg

SEQ ID NO: 30131 - DNA, 20 bp, synthetic construct
  source 1..20: mol_type = other DNA
ggtcatagtattctctgagc

SEQ ID NO: 30132 - DNA, 20 bp, synthetic construct
  source 1..20: mol_type = other DNA
cggcatgtgctcccgggctc

SEQ ID NO: 30133 - DNA, 20 bp, synthetic construct
  source 1..20: mol_type = other DNA
gtcacccacctgggcgggca

SEQ ID NO: 30134 - DNA, 20 bp, synthetic construct
  source 1..20: mol_type = other DNA
ccagacggcgacgggcgcca

SEQ ID NO: 30135 - DNA, 20 bp, synthetic construct
  source 1..20: mol_type = other DNA
tggccacgccgaagcccggg

SEQ ID NO: 30136 - DNA, 20 bp, synthetic construct
  source 1..20: mol_type = other DNA
gggaacccagttccagagct

SEQ ID NO: 30137 - DNA, 20 bp, synthetic construct
  source 1..20: mol_type = other DNA
ggagccacagctcaagcact

SEQ ID NO: 30138 - DNA, 20 bp, synthetic construct
  source 1..20: mol_type = other DNA
cgtgttggagaacgtccccg

SEQ ID NO: 30139 - DNA, 20 bp, synthetic construct
  source 1..20: mol_type = other DNA
atctctcaggtttgaggtag

SEQ ID NO: 30140 - DNA, 20 bp, synthetic construct
  source 1..20: mol_type = other DNA
tcagctactcacatctggtg

SEQ ID NO: 30141 - DNA, 20 bp, synthetic construct
  source 1..20: mol_type = other DNA
cctgcgggcagagcgcctcc

SEQ ID NO: 30142 - DNA, 20 bp, synthetic construct
  source 1..20: mol_type = other DNA
ctacctgaaggccccttgca

SEQ ID NO: 30143 - DNA, 20 bp, synthetic construct
  source 1..20: mol_type = other DNA
ttcatagaagccaggcaggc

SEQ ID NO: 30144 - DNA, 20 bp, synthetic construct
  source 1..20: mol_type = other DNA
tctgctgggcaactggtccc

SEQ ID NO: 30145 - DNA, 20 bp, synthetic construct
  source 1..20: mol_type = other DNA
ccaagacaccttcttggcct

SEQ ID NO: 30146 - DNA, 20 bp, synthetic construct
  source 1..20: mol_type = other DNA
gttctccagcgccacctggg

SEQ ID NO: 30147 - DNA, 20 bp, synthetic construct
  source 1..20: mol_type = other DNA
ccaggatggcggcaaccgca

SEQ ID NO: 30148 - DNA, 20 bp, synthetic construct
  source 1..20: mol_type = other DNA
ggcctggtgctggggctgct

SEQ ID NO: 30149 - DNA, 20 bp, synthetic construct
  source 1..20: mol_type = other DNA
cagggccagcaggatggcca

SEQ ID NO: 30150 - DNA, 20 bp, synthetic construct
  source 1..20: mol_type = other DNA
cccggggacctccacgggcc

SEQ ID NO: 30151 - DNA, 20 bp, synthetic construct
  source 1..20: mol_type = other DNA
tctcctggggctgcgtggct

SEQ ID NO: 30152 - DNA, 20 bp, synthetic construct
  source 1..20: mol_type = other DNA
gtgggtgggcctcacccgcc

SEQ ID NO: 30153 - DNA, 20 bp, synthetic construct
  source 1..20: mol_type = other DNA
cgagccttcccacaggtaag

SEQ ID NO: 30154 - DNA, 20 bp, synthetic construct
  source 1..20: mol_type = other DNA
gctggcactggaggttgctg

SEQ ID NO: 30155 - DNA, 20 bp, synthetic construct
  source 1..20: mol_type = other DNA
ggtgatcctggtgttggttg

SEQ ID NO: 30156 - DNA, 20 bp, synthetic construct
  source 1..20: mol_type = other DNA
cccgccaggccccggccctc

SEQ ID NO: 30157 - DNA, 20 bp, synthetic construct
  source 1..20: mol_type = other DNA
agctcacgcaggccgtgcag

SEQ ID NO: 30158 - DNA, 20 bp, synthetic construct
  source 1..20: mol_type = other DNA
cttaccgttgagctcctcct

SEQ ID NO: 30159 - DNA, 20 bp, synthetic construct
  source 1..20: mol_type = other DNA
tcactttccagaggcagctg

SEQ ID NO: 30160 - DNA, 20 bp, synthetic construct
  source 1..20: mol_type = other DNA
agccttgtcatagtagtggc

SEQ ID NO: 30161 - DNA, 20 bp, synthetic construct
  source 1..20: mol_type = other DNA
tctctgcaaggcaaaaggat

SEQ ID NO: 30162 - DNA, 20 bp, synthetic construct
  source 1..20: mol_type = other DNA
ccggggctcaggaaggtccc

SEQ ID NO: 30163 - DNA, 20 bp, synthetic construct
  source 1..20: mol_type = other DNA
aacttgacaatcatccctgc

SEQ ID NO: 30164 - DNA, 20 bp, synthetic construct
  source 1..20: mol_type = other DNA
tctccagcgcaggtggacaa

SEQ ID NO: 30165 - DNA, 20 bp, synthetic construct
  source 1..20: mol_type = other DNA
tactccaaggtgcagctggg

SEQ ID NO: 30166 - DNA, 20 bp, synthetic construct
  source 1..20: mol_type = other DNA
aaggtgcagctgggcggtgt

SEQ ID NO: 30167 - DNA, 20 bp, synthetic construct
  source 1..20: mol_type = other DNA
tgcctgtgagtgggaccggg

SEQ ID NO: 30168 - DNA, 20 bp, synthetic construct
  source 1..20: mol_type = other DNA
tctcttgctgttgctgatgg

SEQ ID NO: 30169 - DNA, 20 bp, synthetic construct
  source 1..20: mol_type = other DNA
taggcccatgacttcttgaa

SEQ ID NO: 30170 - DNA, 20 bp, synthetic construct
  source 1..20: mol_type = other DNA
tgcatggctgtgtctccagg

SEQ ID NO: 30171 - DNA, 20 bp, synthetic construct
  source 1..20: mol_type = other DNA
atggagtcagatatcaggat

SEQ ID NO: 30172 - DNA, 20 bp, synthetic construct
  source 1..20: mol_type = other DNA
aattaacccacctggctggc

SEQ ID NO: 30173 - DNA, 20 bp, synthetic construct
  source 1..20: mol_type = other DNA
tccaatatgctgggccagga

SEQ ID NO: 30174 - DNA, 20 bp, synthetic construct
  source 1..20: mol_type = other DNA
tgagatgctggtgaagaggc

SEQ ID NO: 30175 - DNA, 20 bp, synthetic construct
  source 1..20: mol_type = other DNA
tgggcccagccaggcccact

SEQ ID NO: 30176 - DNA, 20 bp, synthetic construct
  source 1..20: mol_type = other DNA
caatagtaggggtccaggca

SEQ ID NO: 30177 - DNA, 20 bp, synthetic construct
  source 1..20: mol_type = other DNA
gccaggacccaaaggagccc

SEQ ID NO: 30178 - DNA, 20 bp, synthetic construct
  source 1..20: mol_type = other DNA
ggctgaaacgcagaagccag

SEQ ID NO: 30179 - DNA, 20 bp, synthetic construct
  source 1..20: mol_type = other DNA
tctgatcctcgccattcctg

SEQ ID NO: 30180 - DNA, 20 bp, synthetic construct
  source 1..20: mol_type = other DNA
acgctgagcttaggtcaggc

SEQ ID NO: 30181 - DNA, 20 bp, synthetic construct
  source 1..20: mol_type = other DNA
gagcagagggtgagtgtggg

SEQ ID NO: 30182 - DNA, 20 bp, synthetic construct
  source 1..20: mol_type = other DNA
tctggaaggacgctgagctt

SEQ ID NO: 30183 - DNA, 20 bp, synthetic construct
  source 1..20: mol_type = other DNA
tccctgataagtagctgggg

SEQ ID NO: 30184 - DNA, 20 bp, synthetic construct
  source 1..20: mol_type = other DNA
ccagaaccgcgtgaccgagc

SEQ ID NO: 30185 - DNA, 20 bp, synthetic construct
  source 1..20: mol_type = other DNA
agcagcttcaagaagcccac

SEQ ID NO: 30186 - DNA, 20 bp, synthetic construct
  source 1..20: mol_type = other DNA
ggacagggtcttccccatga

SEQ ID NO: 30187 - DNA, 20 bp, synthetic construct
  source 1..20: mol_type = other DNA
cctgcgagaccacgtggaga

SEQ ID NO: 30188 - DNA, 20 bp, synthetic construct
  source 1..20: mol_type = other DNA
gggtctacctgaacggggac

SEQ ID NO: 30189 - DNA, 20 bp, synthetic construct
  source 1..20: mol_type = other DNA
gcagcacgtcaacctgctga

SEQ ID NO: 30190 - DNA, 20 bp, synthetic construct
  source 1..20: mol_type = other DNA
cctgaggagcgaggtagggg

SEQ ID NO: 30191 - DNA, 20 bp, synthetic construct
  source 1..20: mol_type = other DNA
ctggaagcgcaggtccatgt

SEQ ID NO: 30192 - DNA, 20 bp, synthetic construct
  source 1..20: mol_type = other DNA
gcccgaagcagaccgagtgt

SEQ ID NO: 30193 - DNA, 20 bp, synthetic construct
  source 1..20: mol_type = other DNA
aggctggctgtaaagggaca

SEQ ID NO: 30194 - DNA, 20 bp, synthetic construct
  source 1..20: mol_type = other DNA
gtccccgttcaggtagaccc

SEQ ID NO: 30195 - DNA, 20 bp, synthetic construct
  source 1..20: mol_type = other DNA
gcagaagcggtgcccacact

SEQ ID NO: 30196 - DNA, 20 bp, synthetic construct
  source 1..20: mol_type = other DNA
aaactggcgtcccagcactg

SEQ ID NO: 30197 - DNA, 20 bp, synthetic construct
  source 1..20: mol_type = other DNA
acggggacgggatggggaag

SEQ ID NO: 30198 - DNA, 20 bp, synthetic construct
  source 1..20: mol_type = other DNA
ctacaagcggcggaagcagg

SEQ ID NO: 30199 - DNA, 20 bp, synthetic construct
  source 1..20: mol_type = other DNA
tctccaggacctggaagcgc

SEQ ID NO: 30200 - DNA, 20 bp, synthetic construct
  source 1..20: mol_type = other DNA
ttgcagtcaggacgcacaca

SEQ ID NO: 30201 - DNA, 20 bp, synthetic construct
  source 1..20: mol_type = other DNA
tggctataagatgtgtgcca

SEQ ID NO: 30202 - DNA, 20 bp, synthetic construct
  source 1..20: mol_type = other DNA
tgtgccagggtctacctgaa

SEQ ID NO: 30203 - DNA, 20 bp, synthetic construct
  source 1..20: mol_type = other DNA
cagccaagcagagaaactga

SEQ ID NO: 30204 - DNA, 20 bp, synthetic construct
  source 1..20: mol_type = other DNA
tccccatcccgtccccgttc

SEQ ID NO: 30205 - DNA, 20 bp, synthetic construct
  source 1..20: mol_type = other DNA
gggcaagtggctcggaacac

SEQ ID NO: 30206 - DNA, 20 bp, synthetic construct
  source 1..20: mol_type = other DNA
gcccacactcggtctgcttc

SEQ ID NO: 30207 - DNA, 20 bp, synthetic construct
  source 1..20: mol_type = other DNA
tcctcccagttctgccggaa

SEQ ID NO: 30208 - DNA, 20 bp, synthetic construct
  source 1..20: mol_type = other DNA
agggtctacctgaacgggga

SEQ ID NO: 30209 - DNA, 20 bp, synthetic construct
  source 1..20: mol_type = other DNA
gcttaaacggccaaggaagc

SEQ ID NO: 30210 - DNA, 20 bp, synthetic construct
  source 1..20: mol_type = other DNA
cttaaacggccaaggaagca

SEQ ID NO: 30211 - DNA, 20 bp, synthetic construct
  source 1..20: mol_type = other DNA
tggctcttcagatctattgt

SEQ ID NO: 30212 - DNA, 20 bp, synthetic construct
  source 1..20: mol_type = other DNA
tgtagaaaggctggctgtaa

SEQ ID NO: 30213 - DNA, 20 bp, synthetic construct
  source 1..20: mol_type = other DNA
agcccgaagcagaccgagtg

SEQ ID NO: 30214 - DNA, 20 bp, synthetic construct
  source 1..20: mol_type = other DNA
cactcagcatctggtcatgc

SEQ ID NO: 30215 - DNA, 20 bp, synthetic construct
  source 1..20: mol_type = other DNA
ggaagcaggaggccgtcatg

SEQ ID NO: 30216 - DNA, 20 bp, synthetic construct
  source 1..20: mol_type = other DNA
ccatgcagctctcgcagaag

SEQ ID NO: 30217 - DNA, 20 bp, synthetic construct
  source 1..20: mol_type = other DNA
gaagctgctgctgttggggt

SEQ ID NO: 30218 - DNA, 20 bp, synthetic construct
  source 1..20: mol_type = other DNA
tcttgaagctgctgctgttg

SEQ ID NO: 30219 - DNA, 20 bp, synthetic construct
  source 1..20: mol_type = other DNA
acacttgtacttgtcctcca

SEQ ID NO: 30220 - DNA, 20 bp, synthetic construct
  source 1..20: mol_type = other DNA
tgccagggtctacctgaacg

SEQ ID NO: 30221 - DNA, 20 bp, synthetic construct
  source 1..20: mol_type = other DNA
cgactacaagcggcggaagc

SEQ ID NO: 30222 - DNA, 20 bp, synthetic construct
  source 1..20: mol_type = other DNA
ctacctgaacggggacggga

SEQ ID NO: 30223 - DNA, 20 bp, synthetic construct
  source 1..20: mol_type = other DNA
gtagaaaggctggctgtaaa

SEQ ID NO: 30224 - DNA, 20 bp, synthetic construct
  source 1..20: mol_type = other DNA
tgcccacactcggtctgctt

SEQ ID NO: 30225 - DNA, 20 bp, synthetic construct
  source 1..20: mol_type = other DNA
agcgcaggtccatgtcggct

SEQ ID NO: 30226 - DNA, 20 bp, synthetic construct
  source 1..20: mol_type = other DNA
tacagccagcctttctacac

SEQ ID NO: 30227 - DNA, 20 bp, synthetic construct
  source 1..20: mol_type = other DNA
agattcttacctgtaaatga

SEQ ID NO: 30228 - DNA, 20 bp, synthetic construct
  source 1..20: mol_type = other DNA
atctcccaaatgacgtcgag

SEQ ID NO: 30229 - DNA, 20 bp, synthetic construct
  source 1..20: mol_type = other DNA
aacaacttacgcaattcttc

SEQ ID NO: 30230 - DNA, 20 bp, synthetic construct
  source 1..20: mol_type = other DNA
tcctcttccggggaatattc

SEQ ID NO: 30231 - DNA, 20 bp, synthetic construct
  source 1..20: mol_type = other DNA
aaatacaaacaggacgtgga

SEQ ID NO: 30232 - DNA, 20 bp, synthetic construct
  source 1..20: mol_type = other DNA
agggtgggcagaggcccccg

SEQ ID NO: 30233 - DNA, 20 bp, synthetic construct
  source 1..20: mol_type = other DNA
ctcttcgtggtcccaggggc

SEQ ID NO: 30234 - DNA, 20 bp, synthetic construct
  source 1..20: mol_type = other DNA
tcctgaattatcccagcccc

SEQ ID NO: 30235 - DNA, 20 bp, synthetic construct
  source 1..20: mol_type = other DNA
tcaggttgtctttattggcc

SEQ ID NO: 30236 - DNA, 20 bp, synthetic construct
  source 1..20: mol_type = other DNA
aggaggactggaggaccctt

SEQ ID NO: 30237 - DNA, 20 bp, synthetic construct
  source 1..20: mol_type = other DNA
ccagtatgaggctctgaagg

SEQ ID NO: 30238 - DNA, 20 bp, synthetic construct
  source 1..20: mol_type = other DNA
tctctcaggtactcagacaa

SEQ ID NO: 30239 - DNA, 20 bp, synthetic construct
  source 1..20: mol_type = other DNA
caccgggccaagccagggga

SEQ ID NO: 30240 - DNA, 20 bp, synthetic construct
  source 1..20: mol_type = other DNA
cagtcatgctgcaagtgtgc

SEQ ID NO: 30241 - DNA, 20 bp, synthetic construct
  source 1..20: mol_type = other DNA
tctgcattcctcaatggcaa

SEQ ID NO: 30242 - DNA, 20 bp, synthetic construct
  source 1..20: mol_type = other DNA
tctcacagtagacactctcc

SEQ ID NO: 30243 - DNA, 20 bp, synthetic construct
  source 1..20: mol_type = other DNA
tggaagaatttccagaagcc

SEQ ID NO: 30244 - DNA, 20 bp, synthetic construct
  source 1..20: mol_type = other DNA
gcacacatcatggccagatg

SEQ ID NO: 30245 - DNA, 20 bp, synthetic construct
  source 1..20: mol_type = other DNA
tctggaaattcttccagttt

SEQ ID NO: 30246 - DNA, 20 bp, synthetic construct
  source 1..20: mol_type = other DNA
atggggatgggtcagggagg

SEQ ID NO: 30247 - DNA, 20 bp, synthetic construct
  source 1..20: mol_type = other DNA
ggggcgcgggcggaggggcg

SEQ ID NO: 30248 - DNA, 20 bp, synthetic construct
  source 1..20: mol_type = other DNA
ttgatgacctctttatctac

SEQ ID NO: 30249 - DNA, 20 bp, synthetic construct
  source 1..20: mol_type = other DNA
cggggccggggcgcgggcgg

SEQ ID NO: 30250 - DNA, 20 bp, synthetic construct
  source 1..20: mol_type = other DNA
gggcgggcgcaggggaagag

SEQ ID NO: 30251 - DNA, 20 bp, synthetic construct
  source 1..20: mol_type = other DNA
gtgaagcaccgagtggcaga

SEQ ID NO: 30252 - DNA, 20 bp, synthetic construct
  source 1..20: mol_type = other DNA
cagccacgaagtactgatgc

SEQ ID NO: 30253 - DNA, 20 bp, synthetic construct
  source 1..20: mol_type = other DNA
ccagggctatgaatcacaac

SEQ ID NO: 30254 - DNA, 20 bp, synthetic construct
  source 1..20: mol_type = other DNA
ttgtaaggcgtattgtaccc

SEQ ID NO: 30255 - DNA, 20 bp, synthetic construct
  source 1..20: mol_type = other DNA
cagtctagatcataatgatt

SEQ ID NO: 30256 - DNA, 20 bp, synthetic construct
  source 1..20: mol_type = other DNA
tccagcgacccacaatccca

SEQ ID NO: 30257 - DNA, 20 bp, synthetic construct
  source 1..20: mol_type = other DNA
aatatgacagccacctccct

SEQ ID NO: 30258 - DNA, 20 bp, synthetic construct
  source 1..20: mol_type = other DNA
gtgcatggaattggggctgt

SEQ ID NO: 30259 - DNA, 20 bp, synthetic construct
  source 1..20: mol_type = other DNA
tcatacttgctttccagggg

SEQ ID NO: 30260 - DNA, 20 bp, synthetic construct
  source 1..20: mol_type = other DNA
tgcaggctttgcagaaccta

SEQ ID NO: 30261 - DNA, 20 bp, synthetic construct
  source 1..20: mol_type = other DNA
ttggaagggacgctggcatt

SEQ ID NO: 30262 - DNA, 20 bp, synthetic construct
  source 1..20: mol_type = other DNA
caaactctacatcatatccc

SEQ ID NO: 30263 - DNA, 20 bp, synthetic construct
  source 1..20: mol_type = other DNA
cattcatacttgctttccag

SEQ ID NO: 30264 - DNA, 20 bp, synthetic construct
  source 1..20: mol_type = other DNA
catattctccttgcattgtg

SEQ ID NO: 30265 - DNA, 20 bp, synthetic construct
  source 1..20: mol_type = other DNA
tttgcacagcgctgagcagt

SEQ ID NO: 30266 - DNA, 20 bp, synthetic construct
  source 1..20: mol_type = other DNA
caacattctcatgtgtgact

SEQ ID NO: 30267 - DNA, 20 bp, synthetic construct
  source 1..20: mol_type = other DNA
ggtttgccagtgtagaatcc

SEQ ID NO: 30268 - DNA, 20 bp, synthetic construct
  source 1..20: mol_type = other DNA
gcgcatgcacagtttgtacc

SEQ ID NO: 30269 - DNA, 20 bp, synthetic construct
  source 1..20: mol_type = other DNA
ttcagcaactttgtcctcaa

SEQ ID NO: 30270 - DNA, 20 bp, synthetic construct
  source 1..20: mol_type = other DNA
aggcgtattgtaccctggaa

SEQ ID NO: 30271 - DNA, 20 bp, synthetic construct
  source 1..20: mol_type = other DNA
ggattctacactggcaaacc

SEQ ID NO: 30272 - DNA, 20 bp, synthetic construct
  source 1..20: mol_type = other DNA
cgcatgcacagtttgtaccc

SEQ ID NO: 30273 - DNA, 20 bp, synthetic construct
  source 1..20: mol_type = other DNA
atcttttgttacagcgctac

SEQ ID NO: 30274 - DNA, 20 bp, synthetic construct
  source 1..20: mol_type = other DNA
ccagtcacacatgagaatgt

SEQ ID NO: 30275 - DNA, 20 bp, synthetic construct
  source 1..20: mol_type = other DNA
agccacgaagtactgatgca

SEQ ID NO: 30276 - DNA, 20 bp, synthetic construct
  source 1..20: mol_type = other DNA
aaggcgtattgtaccctgga

SEQ ID NO: 30277 - DNA, 20 bp, synthetic construct
  source 1..20: mol_type = other DNA
tgtagagtttgacccacccc

SEQ ID NO: 30278 - DNA, 20 bp, synthetic construct
  source 1..20: mol_type = other DNA
cagtcagctcccggatttga

SEQ ID NO: 30279 - DNA, 20 bp, synthetic construct
  source 1..20: mol_type = other DNA
gcatttgaaatgtcaagaag

SEQ ID NO: 30280 - DNA, 20 bp, synthetic construct
  source 1..20: mol_type = other DNA
ccaacattctcatgtgtgac

SEQ ID NO: 30281 - DNA, 20 bp, synthetic construct
  source 1..20: mol_type = other DNA
ttagatgcagaggaatcact

SEQ ID NO: 30282 - DNA, 20 bp, synthetic construct
  source 1..20: mol_type = other DNA
cgctggaaagcaagcagctc

SEQ ID NO: 30283 - DNA, 20 bp, synthetic construct
  source 1..20: mol_type = other DNA
tcacaagaaacctgtctcct

SEQ ID NO: 30284 - DNA, 20 bp, synthetic construct
  source 1..20: mol_type = other DNA
aagacaagaccatcaaatcc

SEQ ID NO: 30285 - DNA, 20 bp, synthetic construct
  source 1..20: mol_type = other DNA
gcaaaaccacgaagagataa

SEQ ID NO: 30286 - DNA, 20 bp, synthetic construct
  source 1..20: mol_type = other DNA
ccatgaccagaactgtcctt

SEQ ID NO: 30287 - DNA, 20 bp, synthetic construct
  source 1..20: mol_type = other DNA
acaatcccacggaacccaaa

SEQ ID NO: 30288 - DNA, 20 bp, synthetic construct
  source 1..20: mol_type = other DNA
acattctgaaggattgtcca

SEQ ID NO: 30289 - DNA, 20 bp, synthetic construct
  source 1..20: mol_type = other DNA
ccaaaggacagttctggtca

SEQ ID NO: 30290 - DNA, 20 bp, synthetic construct
  source 1..20: mol_type = other DNA
gtaatgccatcaagcagatg

SEQ ID NO: 30291 - DNA, 20 bp, synthetic construct
  source 1..20: mol_type = other DNA
cctggaagggccaagggagg

SEQ ID NO: 30292 - DNA, 20 bp, synthetic construct
  source 1..20: mol_type = other DNA
gcattcatacttgctttcca

SEQ ID NO: 30293 - DNA, 20 bp, synthetic construct
  source 1..20: mol_type = other DNA
catagccctggattctacac

SEQ ID NO: 30294 - DNA, 20 bp, synthetic construct
  source 1..20: mol_type = other DNA
taagacaagaccatcaaatc

SEQ ID NO: 30295 - DNA, 20 bp, synthetic construct
  source 1..20: mol_type = other DNA
gattctacactggcaaaccc

SEQ ID NO: 30296 - DNA, 20 bp, synthetic construct
  source 1..20: mol_type = other DNA
ttgcagaacctatggccgca

SEQ ID NO: 30297 - DNA, 20 bp, synthetic construct
  source 1..20: mol_type = other DNA
taccctggaagggccaaggg

SEQ ID NO: 30298 - DNA, 20 bp, synthetic construct
  source 1..20: mol_type = other DNA
gccacgaagtactgatgcag

SEQ ID NO: 30299 - DNA, 20 bp, synthetic construct
  source 1..20: mol_type = other DNA
acacatgagaatgttggccc

SEQ ID NO: 30300 - DNA, 20 bp, synthetic construct
  source 1..20: mol_type = other DNA
ggcattcatacttgctttcc

SEQ ID NO: 30301 - DNA, 20 bp, synthetic construct
  source 1..20: mol_type = other DNA
tggaagggacgctggcattg

SEQ ID NO: 30302 - DNA, 20 bp, synthetic construct
  source 1..20: mol_type = other DNA
cagactgatcaagaattgta

SEQ ID NO: 30303 - DNA, 20 bp, synthetic construct
  source 1..20: mol_type = other DNA
tcacagatgacatttgccaa

SEQ ID NO: 30304 - DNA, 20 bp, synthetic construct
  source 1..20: mol_type = other DNA
atcagtctgaagcacctgta

SEQ ID NO: 30305 - DNA, 20 bp, synthetic construct
  source 1..20: mol_type = other DNA
gaaagcaagcagctctggtt

SEQ ID NO: 30306 - DNA, 20 bp, synthetic construct
  source 1..20: mol_type = other DNA
acgaaccattcgaacccttg

SEQ ID NO: 30307 - DNA, 20 bp, synthetic construct
  source 1..20: mol_type = other DNA
catacttgctttccaggggt

SEQ ID NO: 30308 - DNA, 20 bp, synthetic construct
  source 1..20: mol_type = other DNA
ccattttagcagtcagctcc

SEQ ID NO: 30309 - DNA, 20 bp, synthetic construct
  source 1..20: mol_type = other DNA
tgcaaacgccatgcggccat

SEQ ID NO: 30310 - DNA, 20 bp, synthetic construct
  source 1..20: mol_type = other DNA
ttacaaggcgaccctctaac

SEQ ID NO: 30311 - DNA, 20 bp, synthetic construct
  source 1..20: mol_type = other DNA
ttgtaccctggaagggccaa

SEQ ID NO: 30312 - DNA, 20 bp, synthetic construct
  source 1..20: mol_type = other DNA
tgacaattcttcagtcattc

SEQ ID NO: 30313 - DNA, 20 bp, synthetic construct
  source 1..20: mol_type = other DNA
tagaagtttggccaagctca

SEQ ID NO: 30314 - DNA, 20 bp, synthetic construct
  source 1..20: mol_type = other DNA
gtttattaggtggactaagg

SEQ ID NO: 30315 - DNA, 20 bp, synthetic construct
  source 1..20: mol_type = other DNA
gaaccaggggagcagctcag

SEQ ID NO: 30316 - DNA, 20 bp, synthetic construct
  source 1..20: mol_type = other DNA
ttctatatgaaaatcaagac

SEQ ID NO: 30317 - DNA, 20 bp, synthetic construct
  source 1..20: mol_type = other DNA
gatcacaaactctgtatcac

SEQ ID NO: 30318 - DNA, 20 bp, synthetic construct
  source 1..20: mol_type = other DNA
cggcgggtacctggaggcgc

SEQ ID NO: 30319 - DNA, 20 bp, synthetic construct
  source 1..20: mol_type = other DNA
catgcaccacctgctgctgg

SEQ ID NO: 30320 - DNA, 20 bp, synthetic construct
  source 1..20: mol_type = other DNA
ggaggcgcagggggaagcca

SEQ ID NO: 30321 - DNA, 20 bp, synthetic construct
  source 1..20: mol_type = other DNA
cctctatcacttccacctgc

SEQ ID NO: 30322 - DNA, 20 bp, synthetic construct
  source 1..20: mol_type = other DNA
ggcgggtacctggaggcgca

SEQ ID NO: 30323 - DNA, 20 bp, synthetic construct
  source 1..20: mol_type = other DNA
gcgggtacctggaggcgcag

SEQ ID NO: 30324 - DNA, 20 bp, synthetic construct
  source 1..20: mol_type = other DNA
ctccagcagcaggtggtgca

SEQ ID NO: 30325 - DNA, 20 bp, synthetic construct
  source 1..20: mol_type = other DNA
atcacttccacctgcgggca

SEQ ID NO: 30326 - DNA, 20 bp, synthetic construct
  source 1..20: mol_type = other DNA
acttccacctgcgggcaggg

SEQ ID NO: 30327 - DNA, 20 bp, synthetic construct
  source 1..20: mol_type = other DNA
gcagcatgttggggatcccg

SEQ ID NO: 30328 - DNA, 20 bp, synthetic construct
  source 1..20: mol_type = other DNA
gtatgatacctaaagtggag

SEQ ID NO: 30329 - DNA, 20 bp, synthetic construct
  source 1..20: mol_type = other DNA
cccgcaggtggaagtgatag

SEQ ID NO: 30330 - DNA, 20 bp, synthetic construct
  source 1..20: mol_type = other DNA
gatccaggtgccgaaagggc

SEQ ID NO: 30331 - DNA, 20 bp, synthetic construct
  source 1..20: mol_type = other DNA
ttctcacctccagcagcagg

SEQ ID NO: 30332 - DNA, 20 bp, synthetic construct
  source 1..20: mol_type = other DNA
cttccacctgcgggcaggga

SEQ ID NO: 30333 - DNA, 20 bp, synthetic construct
  source 1..20: mol_type = other DNA
acggacctcggtggcctgca

SEQ ID NO: 30334 - DNA, 20 bp, synthetic construct
  source 1..20: mol_type = other DNA
tcacgttatcggccgcctcc

SEQ ID NO: 30335 - DNA, 20 bp, synthetic construct
  source 1..20: mol_type = other DNA
cccacagttgcgtctgatcc

SEQ ID NO: 30336 - DNA, 20 bp, synthetic construct
  source 1..20: mol_type = other DNA
ccgcaggtggaagtgataga

SEQ ID NO: 30337 - DNA, 20 bp, synthetic construct
  source 1..20: mol_type = other DNA
gtatgctgtgagagaggagg

SEQ ID NO: 30338 - DNA, 20 bp, synthetic construct
  source 1..20: mol_type = other DNA
gcttgccagggtcttcaaca

SEQ ID NO: 30339 - DNA, 20 bp, synthetic construct
  source 1..20: mol_type = other DNA
cacacacattaccatgaacc

SEQ ID NO: 30340 - DNA, 20 bp, synthetic construct
  source 1..20: mol_type = other DNA
gtagaaggcctgtggggacc

SEQ ID NO: 30341 - DNA, 20 bp, synthetic construct
  source 1..20: mol_type = other DNA
cccgtgttctggtgaccagg

SEQ ID NO: 30342 - DNA, 20 bp, synthetic construct
  source 1..20: mol_type = other DNA
taagaatgagagcctgggca

SEQ ID NO: 30343 - DNA, 20 bp, synthetic construct
  source 1..20: mol_type = other DNA
ggatgcagtccttgaagctg

SEQ ID NO: 30344 - DNA, 20 bp, synthetic construct
  source 1..20: mol_type = other DNA
ctggcatggcatgaatcctc

SEQ ID NO: 30345 - DNA, 20 bp, synthetic construct
  source 1..20: mol_type = other DNA
cagccactacctgtgccacg

SEQ ID NO: 30346 - DNA, 20 bp, synthetic construct
  source 1..20: mol_type = other DNA
actgtgaggatcaggcggta

SEQ ID NO: 30347 - DNA, 20 bp, synthetic construct
  source 1..20: mol_type = other DNA
ccccaagttcccgaacgctg

SEQ ID NO: 30348 - DNA, 20 bp, synthetic construct
  source 1..20: mol_type = other DNA
cctggtgagtgggcagggcc

SEQ ID NO: 30349 - DNA, 20 bp, synthetic construct
  source 1..20: mol_type = other DNA
gaggtgacagaggtgcagaa

SEQ ID NO: 30350 - DNA, 20 bp, synthetic construct
  source 1..20: mol_type = other DNA
aggtatgtctaggagaccct

SEQ ID NO: 30351 - DNA, 20 bp, synthetic construct
  source 1..20: mol_type = other DNA
cacacagacgccatgcacga

SEQ ID NO: 30352 - DNA, 20 bp, synthetic construct
  source 1..20: mol_type = other DNA
cgaccagggtcacttcggca

SEQ ID NO: 30353 - DNA, 20 bp, synthetic construct
  source 1..20: mol_type = other DNA
cgcaggatggtgcggaatga

SEQ ID NO: 30354 - DNA, 20 bp, synthetic construct
  source 1..20: mol_type = other DNA
gacagcgccgcagcccggga

SEQ ID NO: 30355 - DNA, 20 bp, synthetic construct
  source 1..20: mol_type = other DNA
tcacagaagtaggcccacag

SEQ ID NO: 30356 - DNA, 20 bp, synthetic construct
  source 1..20: mol_type = other DNA
cccgaacgctggggaaggac

SEQ ID NO: 30357 - DNA, 20 bp, synthetic construct
  source 1..20: mol_type = other DNA
cctggatgtgtggctgcgga

SEQ ID NO: 30358 - DNA, 20 bp, synthetic construct
  source 1..20: mol_type = other DNA
ggagacctggctcatgaggc

SEQ ID NO: 30359 - DNA, 20 bp, synthetic construct
  source 1..20: mol_type = other DNA
tctggggcatacctaggggg

SEQ ID NO: 30360 - DNA, 20 bp, synthetic construct
  source 1..20: mol_type = other DNA
cactgtgaggatcaggcggt

SEQ ID NO: 30361 - DNA, 20 bp, synthetic construct
  source 1..20: mol_type = other DNA
aggagctgagcttgccttcc

SEQ ID NO: 30362 - DNA, 20 bp, synthetic construct
  source 1..20: mol_type = other DNA
ggcggagagcgaggtgacag

SEQ ID NO: 30363 - DNA, 20 bp, synthetic construct
  source 1..20: mol_type = other DNA
ttccagggagccatttgtgc

SEQ ID NO: 30364 - DNA, 20 bp, synthetic construct
  source 1..20: mol_type = other DNA
tgaggatcaggcggtagggg

SEQ ID NO: 30365 - DNA, 20 bp, synthetic construct
  source 1..20: mol_type = other DNA
aatgaggtacaggccgtcct

SEQ ID NO: 30366 - DNA, 20 bp, synthetic construct
  source 1..20: mol_type = other DNA
ccctggtcgggagcgcacga

SEQ ID NO: 30367 - DNA, 20 bp, synthetic construct
  source 1..20: mol_type = other DNA
atttctaccagaggcagcac

SEQ ID NO: 30368 - DNA, 20 bp, synthetic construct
  source 1..20: mol_type = other DNA
agggtctcctagacatacct

SEQ ID NO: 30369 - DNA, 20 bp, synthetic construct
  source 1..20: mol_type = other DNA
tgagcaggtatgagcagggc

SEQ ID NO: 30370 - DNA, 20 bp, synthetic construct
  source 1..20: mol_type = other DNA
cactgggctggtccaggcgg

SEQ ID NO: 30371 - DNA, 20 bp, synthetic construct
  source 1..20: mol_type = other DNA
ccctggatgtgtggctgcgg

SEQ ID NO: 30372 - DNA, 20 bp, synthetic construct
  source 1..20: mol_type = other DNA
tgactcactgaaagtgaccc

SEQ ID NO: 30373 - DNA, 20 bp, synthetic construct
  source 1..20: mol_type = other DNA
actcagcttgatgaaggggc

SEQ ID NO: 30374 - DNA, 20 bp, synthetic construct
  source 1..20: mol_type = other DNA
ggaccaaggtgggcgggacc

SEQ ID NO: 30375 - DNA, 20 bp, synthetic construct
  source 1..20: mol_type = other DNA
actggcatggcatgaatcct

SEQ ID NO: 30376 - DNA, 20 bp, synthetic construct
  source 1..20: mol_type = other DNA
gtgcagataggccatgccct

SEQ ID NO: 30377 - DNA, 20 bp, synthetic construct
  source 1..20: mol_type = other DNA
gcctcccagagcgggtggag

SEQ ID NO: 30378 - DNA, 20 bp, synthetic construct
  source 1..20: mol_type = other DNA
gtcaccagcacctcgtgggt

SEQ ID NO: 30379 - DNA, 20 bp, synthetic construct
  source 1..20: mol_type = other DNA
ggtgcagaaaggccatgccc

SEQ ID NO: 30380 - DNA, 20 bp, synthetic construct
  source 1..20: mol_type = other DNA
gcactcacagcaggggtccg

SEQ ID NO: 30381 - DNA, 20 bp, synthetic construct
  source 1..20: mol_type = other DNA
ccccgctgccctccactcgc

SEQ ID NO: 30382 - DNA, 20 bp, synthetic construct
  source 1..20: mol_type = other DNA
gaccaacctcgcagatctgc

SEQ ID NO: 30383 - DNA, 20 bp, synthetic construct
  source 1..20: mol_type = other DNA
ggtggaagctgagctggctg

SEQ ID NO: 30384 - DNA, 20 bp, synthetic construct
  source 1..20: mol_type = other DNA
ggtggagaggatcccctggc

SEQ ID NO: 30385 - DNA, 20 bp, synthetic construct
  source 1..20: mol_type = other DNA
ctggttcatggtaatgtgtg

SEQ ID NO: 30386 - DNA, 20 bp, synthetic construct
  source 1..20: mol_type = other DNA
caccagcacctcgtgggttg

SEQ ID NO: 30387 - DNA, 20 bp, synthetic construct
  source 1..20: mol_type = other DNA
aagcaccttcaggcctccca

SEQ ID NO: 30388 - DNA, 20 bp, synthetic construct
  source 1..20: mol_type = other DNA
cggaatgatggcctctgggt

SEQ ID NO: 30389 - DNA, 20 bp, synthetic construct
  source 1..20: mol_type = other DNA
cctcagcaagcagccctgca

SEQ ID NO: 30390 - DNA, 20 bp, synthetic construct
  source 1..20: mol_type = other DNA
agctcagctcctgccagcca

SEQ ID NO: 30391 - DNA, 20 bp, synthetic construct
  source 1..20: mol_type = other DNA
ggatcactcagcttgatgaa

SEQ ID NO: 30392 - DNA, 20 bp, synthetic construct
  source 1..20: mol_type = other DNA
cttcgggcacggccttggct

SEQ ID NO: 30393 - DNA, 20 bp, synthetic construct
  source 1..20: mol_type = other DNA
ctgtctcgtagaaggcctgt

SEQ ID NO: 30394 - DNA, 20 bp, synthetic construct
  source 1..20: mol_type = other DNA
ccaggctctcattcttaaag

SEQ ID NO: 30395 - DNA, 20 bp, synthetic construct
  source 1..20: mol_type = other DNA
ctgtgaggatcaggcggtag

SEQ ID NO: 30396 - DNA, 20 bp, synthetic construct
  source 1..20: mol_type = other DNA
tctcctgaggtgggcaggag

SEQ ID NO: 30397 - DNA, 20 bp, synthetic construct
  source 1..20: mol_type = other DNA
tgacctatgagccaacccag

SEQ ID NO: 30398 - DNA, 20 bp, synthetic construct
  source 1..20: mol_type = other DNA
tgcacaaatggctccctgga

SEQ ID NO: 30399 - DNA, 20 bp, synthetic construct
  source 1..20: mol_type = other DNA
ccccgaatgcctaccaggtg

SEQ ID NO: 30400 - DNA, 20 bp, synthetic construct
  source 1..20: mol_type = other DNA
cggaaataaaacctgcagga

SEQ ID NO: 30401 - DNA, 20 bp, synthetic construct
  source 1..20: mol_type = other DNA
aggcactctggggcatacct

SEQ ID NO: 30402 - DNA, 20 bp, synthetic construct
  source 1..20: mol_type = other DNA
accaggttcttgttctcctg

SEQ ID NO: 30403 - DNA, 20 bp, synthetic construct
  source 1..20: mol_type = other DNA
ctcatacagggtcaccccga

SEQ ID NO: 30404 - DNA, 20 bp, synthetic construct
  source 1..20: mol_type = other DNA
gggacagctgcgggatcatg

SEQ ID NO: 30405 - DNA, 20 bp, synthetic construct
  source 1..20: mol_type = other DNA
gaagaccaggtgtctgggaa

SEQ ID NO: 30406 - DNA, 20 bp, synthetic construct
  source 1..20: mol_type = other DNA
gcccccagcaccgctcgggc

SEQ ID NO: 30407 - DNA, 20 bp, synthetic construct
  source 1..20: mol_type = other DNA
aggatcactcagcttgatga

SEQ ID NO: 30408 - DNA, 20 bp, synthetic construct
  source 1..20: mol_type = other DNA
ccggcaggacaacaagtgcc

SEQ ID NO: 30409 - DNA, 20 bp, synthetic construct
  source 1..20: mol_type = other DNA
cgcctggtcaccagaacacg

SEQ ID NO: 30410 - DNA, 20 bp, synthetic construct
  source 1..20: mol_type = other DNA
tagacctagaaggaaaaacc

SEQ ID NO: 30411 - DNA, 20 bp, synthetic construct
  source 1..20: mol_type = other DNA
gggtgccagccgctcgagtg

SEQ ID NO: 30412 - DNA, 20 bp, synthetic construct
  source 1..20: mol_type = other DNA
cgtagaaggcctgtggggac

SEQ ID NO: 30413 - DNA, 20 bp, synthetic construct
  source 1..20: mol_type = other DNA
gattcatgccatgccagttc

SEQ ID NO: 30414 - DNA, 20 bp, synthetic construct
  source 1..20: mol_type = other DNA
gagcaggtatgagcagggct

SEQ ID NO: 30415 - DNA, 20 bp, synthetic construct
  source 1..20: mol_type = other DNA
cagacactggctggtgagtg

SEQ ID NO: 30416 - DNA, 20 bp, synthetic construct
  source 1..20: mol_type = other DNA
ctgtcttcagaatgggtatg

SEQ ID NO: 30417 - DNA, 20 bp, synthetic construct
  source 1..20: mol_type = other DNA
agaggtactcaaatgaggct

SEQ ID NO: 30418 - DNA, 20 bp, synthetic construct
  source 1..20: mol_type = other DNA
cagcgtagccaggtgagccc

SEQ ID NO: 30419 - DNA, 20 bp, synthetic construct
  source 1..20: mol_type = other DNA
caccaggtagctgagggcgc

SEQ ID NO: 30420 - DNA, 20 bp, synthetic construct
  source 1..20: mol_type = other DNA
gtagtgctgcgcgtgcagat

SEQ ID NO: 30421 - DNA, 20 bp, synthetic construct
  source 1..20: mol_type = other DNA
gatgagattggaggtttctg

SEQ ID NO: 30422 - DNA, 20 bp, synthetic construct
  source 1..20: mol_type = other DNA
ggcccaagtgggacagctgc

SEQ ID NO: 30423 - DNA, 20 bp, synthetic construct
  source 1..20: mol_type = other DNA
gtactcaccctccctggaga

SEQ ID NO: 30424 - DNA, 20 bp, synthetic construct
  source 1..20: mol_type = other DNA
gctgtctcgtagaaggcctg

SEQ ID NO: 30425 - DNA, 20 bp, synthetic construct
  source 1..20: mol_type = other DNA
tggcccaagtgggacagctg

SEQ ID NO: 30426 - DNA, 20 bp, synthetic construct
  source 1..20: mol_type = other DNA
ctccgcagccacacatccag

SEQ ID NO: 30427 - DNA, 20 bp, synthetic construct
  source 1..20: mol_type = other DNA
aatacctagccacactcgag

SEQ ID NO: 30428 - DNA, 20 bp, synthetic construct
  source 1..20: mol_type = other DNA
gccaaacccccacttgtcca

SEQ ID NO: 30429 - DNA, 20 bp, synthetic construct
  source 1..20: mol_type = other DNA
ccaggcacttgttgtcctgc

SEQ ID NO: 30430 - DNA, 20 bp, synthetic construct
  source 1..20: mol_type = other DNA
ggtactcaccctccctggag

SEQ ID NO: 30431 - DNA, 20 bp, synthetic construct
  source 1..20: mol_type = other DNA
gccacgaggtggctccccca

SEQ ID NO: 30432 - DNA, 20 bp, synthetic construct
  source 1..20: mol_type = other DNA
ctgcactgggctggtccagg

SEQ ID NO: 30433 - DNA, 20 bp, synthetic construct
  source 1..20: mol_type = other DNA
ccctcacctcgcccagatct

SEQ ID NO: 30434 - DNA, 20 bp, synthetic construct
  source 1..20: mol_type = other DNA
gaatgacgtggcatcactgt

SEQ ID NO: 30435 - DNA, 20 bp, synthetic construct
  source 1..20: mol_type = other DNA
cgtgcagataggccatgccc

SEQ ID NO: 30436 - DNA, 20 bp, synthetic construct
  source 1..20: mol_type = other DNA
ccaggtgcgtgtgggagacc

SEQ ID NO: 30437 - DNA, 20 bp, synthetic construct
  source 1..20: mol_type = other DNA
ggtatgaggttctcgaaggt

SEQ ID NO: 30438 - DNA, 20 bp, synthetic construct
  source 1..20: mol_type = other DNA
tgtggccagctgtgggcagg

SEQ ID NO: 30439 - DNA, 20 bp, synthetic construct
  source 1..20: mol_type = other DNA
ggtagaaatgctccttctgt

SEQ ID NO: 30440 - DNA, 20 bp, synthetic construct
  source 1..20: mol_type = other DNA
cctccgcagccacacatcca

SEQ ID NO: 30441 - DNA, 20 bp, synthetic construct
  source 1..20: mol_type = other DNA
cccctgctgtgagtgctggg

SEQ ID NO: 30442 - DNA, 20 bp, synthetic construct
  source 1..20: mol_type = other DNA
aaacccccacttgtccatgg

SEQ ID NO: 30443 - DNA, 20 bp, synthetic construct
  source 1..20: mol_type = other DNA
gacccctggatgtgtggctg

SEQ ID NO: 30444 - DNA, 20 bp, synthetic construct
  source 1..20: mol_type = other DNA
gtggccagctgtgggcagga

SEQ ID NO: 30445 - DNA, 20 bp, synthetic construct
  source 1..20: mol_type = other DNA
tgaggtcacgcaggatggtg

SEQ ID NO: 30446 - DNA, 20 bp, synthetic construct
  source 1..20: mol_type = other DNA
gcaggttttatttccggaac

SEQ ID NO: 30447 - DNA, 20 bp, synthetic construct
  source 1..20: mol_type = other DNA
cttctgcactgggctggtcc

SEQ ID NO: 30448 - DNA, 20 bp, synthetic construct
  source 1..20: mol_type = other DNA
cgcgcacgcggtagtactcg

SEQ ID NO: 30449 - DNA, 20 bp, synthetic construct
  source 1..20: mol_type = other DNA
atgaggtacaggccgtcctc

SEQ ID NO: 30450 - DNA, 20 bp, synthetic construct
  source 1..20: mol_type = other DNA
gatgcagtccttgaagctgg

SEQ ID NO: 30451 - DNA, 20 bp, synthetic construct
  source 1..20: mol_type = other DNA
ccactacctgtgccacgagg

SEQ ID NO: 30452 - DNA, 20 bp, synthetic construct
  source 1..20: mol_type = other DNA
gccggggcaggtagtctcgg

SEQ ID NO: 30453 - DNA, 20 bp, synthetic construct
  source 1..20: mol_type = other DNA
ttcatcaagctgagtgatcc

SEQ ID NO: 30454 - DNA, 20 bp, synthetic construct
  source 1..20: mol_type = other DNA
taggccatgccctggggacg

SEQ ID NO: 30455 - DNA, 20 bp, synthetic construct
  source 1..20: mol_type = other DNA
agggcaaagagattgaagca

SEQ ID NO: 30456 - DNA, 20 bp, synthetic construct
  source 1..20: mol_type = other DNA
gcaaagagattgaagcaagg

SEQ ID NO: 30457 - DNA, 20 bp, synthetic construct
  source 1..20: mol_type = other DNA
ctcaaagaggtactcaaatg

SEQ ID NO: 30458 - DNA, 20 bp, synthetic construct
  source 1..20: mol_type = other DNA
tgcagagtccaccctgcacc

SEQ ID NO: 30459 - DNA, 20 bp, synthetic construct
  source 1..20: mol_type = other DNA
gcgcaacaccaggtgcaggg

SEQ ID NO: 30460 - DNA, 20 bp, synthetic construct
  source 1..20: mol_type = other DNA
gcaggcgcaacaccaggtgc

SEQ ID NO: 30461 - DNA, 20 bp, synthetic construct
  source 1..20: mol_type = other DNA
ccagaaaggtaccggggttg

SEQ ID NO: 30462 - DNA, 20 bp, synthetic construct
  source 1..20: mol_type = other DNA
atctgcatgtttgcgtctgc

SEQ ID NO: 30463 - DNA, 20 bp, synthetic construct
  source 1..20: mol_type = other DNA
tgggcaagctggcggagaga

SEQ ID NO: 30464 - DNA, 20 bp, synthetic construct
  source 1..20: mol_type = other DNA
tgcggcagttgacagcacga

SEQ ID NO: 30465 - DNA, 20 bp, synthetic construct
  source 1..20: mol_type = other DNA
caggcgcaacaccaggtgca

SEQ ID NO: 30466 - DNA, 20 bp, synthetic construct
  source 1..20: mol_type = other DNA
accttatttgaccttcttct

SEQ ID NO: 30467 - DNA, 20 bp, synthetic construct
  source 1..20: mol_type = other DNA
tgcatgtttgcgtctgcagg

SEQ ID NO: 30468 - DNA, 20 bp, synthetic construct
  source 1..20: mol_type = other DNA
gcacctgcacagagacagga

SEQ ID NO: 30469 - DNA, 20 bp, synthetic construct
  source 1..20: mol_type = other DNA
tggcaaaaccatcacccttg

SEQ ID NO: 30470 - DNA, 20 bp, synthetic construct
  source 1..20: mol_type = other DNA
ttgcggcagttgacagcacg

SEQ ID NO: 30471 - DNA, 20 bp, synthetic construct
  source 1..20: mol_type = other DNA
tctcaaggtaagccatgcac

SEQ ID NO: 30472 - DNA, 20 bp, synthetic construct
  source 1..20: mol_type = other DNA
tccagggttgagccgtagaa

SEQ ID NO: 30473 - DNA, 20 bp, synthetic construct
  source 1..20: mol_type = other DNA
ggtagagattggctgcgcca

SEQ ID NO: 30474 - DNA, 20 bp, synthetic construct
  source 1..20: mol_type = other DNA
gaccagtctctggctcacta

SEQ ID NO: 30475 - DNA, 20 bp, synthetic construct
  source 1..20: mol_type = other DNA
cttccagatgttctcctttg

SEQ ID NO: 30476 - DNA, 20 bp, synthetic construct
  source 1..20: mol_type = other DNA
tgttctcagagagccaacaa

SEQ ID NO: 30477 - DNA, 20 bp, synthetic construct
  source 1..20: mol_type = other DNA
cgtgcagatgaagctggagg

SEQ ID NO: 30478 - DNA, 20 bp, synthetic construct
  source 1..20: mol_type = other DNA
gaaagtcccgtccgagcggt

SEQ ID NO: 30479 - DNA, 20 bp, synthetic construct
  source 1..20: mol_type = other DNA
aggcggtagccatggagctg

SEQ ID NO: 30480 - DNA, 20 bp, synthetic construct
  source 1..20: mol_type = other DNA
cgcccagccaccgcgtgacc

SEQ ID NO: 30481 - DNA, 20 bp, synthetic construct
  source 1..20: mol_type = other DNA
ctatgaggacctcatgcgct

SEQ ID NO: 30482 - DNA, 20 bp, synthetic construct
  source 1..20: mol_type = other DNA
gttctcagagagccaacaac

SEQ ID NO: 30483 - DNA, 20 bp, synthetic construct
  source 1..20: mol_type = other DNA
tgagccaggtcctggggagg

SEQ ID NO: 30484 - DNA, 20 bp, synthetic construct
  source 1..20: mol_type = other DNA
acagcaaggctggtggcgag

SEQ ID NO: 30485 - DNA, 20 bp, synthetic construct
  source 1..20: mol_type = other DNA
ttcaagaaatgctgcgggga

SEQ ID NO: 30486 - DNA, 20 bp, synthetic construct
  source 1..20: mol_type = other DNA
cagggtgaacctcccgttgt

SEQ ID NO: 30487 - DNA, 20 bp, synthetic construct
  source 1..20: mol_type = other DNA
caccatcagcaggtcccgca

SEQ ID NO: 30488 - DNA, 20 bp, synthetic construct
  source 1..20: mol_type = other DNA
tcccaggtcacgcggtggct

SEQ ID NO: 30489 - DNA, 20 bp, synthetic construct
  source 1..20: mol_type = other DNA
ccatgagggtgagtgggtgt

SEQ ID NO: 30490 - DNA, 20 bp, synthetic construct
  source 1..20: mol_type = other DNA
gaggccgaacttctcacagc

SEQ ID NO: 30491 - DNA, 20 bp, synthetic construct
  source 1..20: mol_type = other DNA
ctcctagaaggcggaccaca

SEQ ID NO: 30492 - DNA, 20 bp, synthetic construct
  source 1..20: mol_type = other DNA
ggggaagggcctggggggtc

SEQ ID NO: 30493 - DNA, 20 bp, synthetic construct
  source 1..20: mol_type = other DNA
gagccgtagaaagggtccaa

SEQ ID NO: 30494 - DNA, 20 bp, synthetic construct
  source 1..20: mol_type = other DNA
cggacgggactttcttggtg

SEQ ID NO: 30495 - DNA, 20 bp, synthetic construct
  source 1..20: mol_type = other DNA
gcaggccccatggagcgggc

SEQ ID NO: 30496 - DNA, 20 bp, synthetic construct
  source 1..20: mol_type = other DNA
tggtagagattggctgcgcc

SEQ ID NO: 30497 - DNA, 20 bp, synthetic construct
  source 1..20: mol_type = other DNA
gtccctccatgtggccgaca

SEQ ID NO: 30498 - DNA, 20 bp, synthetic construct
  source 1..20: mol_type = other DNA
ctggaagtcatgcccgttgg

SEQ ID NO: 30499 - DNA, 20 bp, synthetic construct
  source 1..20: mol_type = other DNA
ttaccagcagaactctctaa

SEQ ID NO: 30500 - DNA, 20 bp, synthetic construct
  source 1..20: mol_type = other DNA
agaattgaagaagaagtgga

SEQ ID NO: 30501 - DNA, 20 bp, synthetic construct
  source 1..20: mol_type = other DNA
ccctgtaggttcctcgtcta

SEQ ID NO: 30502 - DNA, 20 bp, synthetic construct
  source 1..20: mol_type = other DNA
acctccatcttgggcagacc

SEQ ID NO: 30503 - DNA, 20 bp, synthetic construct
  source 1..20: mol_type = other DNA
aggtgtttcaggaatactac

SEQ ID NO: 30504 - DNA, 20 bp, synthetic construct
  source 1..20: mol_type = other DNA
gcaccatcagcaggtcccgc

SEQ ID NO: 30505 - DNA, 20 bp, synthetic construct
  source 1..20: mol_type = other DNA
gcaaggtacgagtgggaggg

SEQ ID NO: 30506 - DNA, 20 bp, synthetic construct
  source 1..20: mol_type = other DNA
ctactcatctgtaagcgcag

SEQ ID NO: 30507 - DNA, 20 bp, synthetic construct
  source 1..20: mol_type = other DNA
aaaggagatgaaggaagccc

SEQ ID NO: 30508 - DNA, 20 bp, synthetic construct
  source 1..20: mol_type = other DNA
gtagagattggctgcgccag

SEQ ID NO: 30509 - DNA, 20 bp, synthetic construct
  source 1..20: mol_type = other DNA
ggaggcgcccacctgctgga

SEQ ID NO: 30510 - DNA, 20 bp, synthetic construct
  source 1..20: mol_type = other DNA
cttgggcagacctggaggac

SEQ ID NO: 30511 - DNA, 20 bp, synthetic construct
  source 1..20: mol_type = other DNA
acaccctgtctgctctgtcc

SEQ ID NO: 30512 - DNA, 20 bp, synthetic construct
  source 1..20: mol_type = other DNA
gtgaactggcccaggccctc

SEQ ID NO: 30513 - DNA, 20 bp, synthetic construct
  source 1..20: mol_type = other DNA
atcccaggtcacgcggtggc

SEQ ID NO: 30514 - DNA, 20 bp, synthetic construct
  source 1..20: mol_type = other DNA
acgttatatctggaaccaga

SEQ ID NO: 30515 - DNA, 20 bp, synthetic construct
  source 1..20: mol_type = other DNA
cttaacaagaagggacagca

SEQ ID NO: 30516 - DNA, 20 bp, synthetic construct
  source 1..20: mol_type = other DNA
agggtgtagatgacctgtga

SEQ ID NO: 30517 - DNA, 20 bp, synthetic construct
  source 1..20: mol_type = other DNA
ggtccaggacagagcagaca

SEQ ID NO: 30518 - DNA, 20 bp, synthetic construct
  source 1..20: mol_type = other DNA
ggtcctatgcagtaggcagg

SEQ ID NO: 30519 - DNA, 20 bp, synthetic construct
  source 1..20: mol_type = other DNA
gtacgcaggccccatggagc

SEQ ID NO: 30520 - DNA, 20 bp, synthetic construct
  source 1..20: mol_type = other DNA
gacatgggcaaggtacgagt

SEQ ID NO: 30521 - DNA, 20 bp, synthetic construct
  source 1..20: mol_type = other DNA
tgaggctgaacagaactggt

SEQ ID NO: 30522 - DNA, 20 bp, synthetic construct
  source 1..20: mol_type = other DNA
tgggcaaggtacgagtggga

SEQ ID NO: 30523 - DNA, 20 bp, synthetic construct
  source 1..20: mol_type = other DNA
ttcctgggaaatctacggga

SEQ ID NO: 30524 - DNA, 20 bp, synthetic construct
  source 1..20: mol_type = other DNA
gtcccaggtgagccctccgc

SEQ ID NO: 30525 - DNA, 20 bp, synthetic construct
  source 1..20: mol_type = other DNA
cttggtgcggcagagggtga

SEQ ID NO: 30526 - DNA, 20 bp, synthetic construct
  source 1..20: mol_type = other DNA
tgctgcttaggtgagaatct

SEQ ID NO: 30527 - DNA, 20 bp, synthetic construct
  source 1..20: mol_type = other DNA
cttgaaggggaactgcaagg

SEQ ID NO: 30528 - DNA, 20 bp, synthetic construct
  source 1..20: mol_type = other DNA
tccaggtctgcccaagatgg

SEQ ID NO: 30529 - DNA, 20 bp, synthetic construct
  source 1..20: mol_type = other DNA
cgtgacctgggatggggctc

SEQ ID NO: 30530 - DNA, 20 bp, synthetic construct
  source 1..20: mol_type = other DNA
tgaactggcccaggccctcc

SEQ ID NO: 30531 - DNA, 20 bp, synthetic construct
  source 1..20: mol_type = other DNA
gctaccgctgccatcggtgc

SEQ ID NO: 30532 - DNA, 20 bp, synthetic construct
  source 1..20: mol_type = other DNA
ccgtctgctggatctcccgc

SEQ ID NO: 30533 - DNA, 20 bp, synthetic construct
  source 1..20: mol_type = other DNA
tgtggagctcacgaaggctg

SEQ ID NO: 30534 - DNA, 20 bp, synthetic construct
  source 1..20: mol_type = other DNA
cctcccgggctgcggccaca

SEQ ID NO: 30535 - DNA, 20 bp, synthetic construct
  source 1..20: mol_type = other DNA
cctgcacagcttccaggttc

SEQ ID NO: 30536 - DNA, 20 bp, synthetic construct
  source 1..20: mol_type = other DNA
gtgagaagttcggcctcaag

SEQ ID NO: 30537 - DNA, 20 bp, synthetic construct
  source 1..20: mol_type = other DNA
cagcatctgacaggccttgc

SEQ ID NO: 30538 - DNA, 20 bp, synthetic construct
  source 1..20: mol_type = other DNA
acaagcgctgctgctgcctg

SEQ ID NO: 30539 - DNA, 20 bp, synthetic construct
  source 1..20: mol_type = other DNA
tgtcccaggtgagccctccg

SEQ ID NO: 30540 - DNA, 20 bp, synthetic construct
  source 1..20: mol_type = other DNA
tctactcatctgtaagcgca

SEQ ID NO: 30541 - DNA, 20 bp, synthetic construct
  source 1..20: mol_type = other DNA
gcaggatgtggtctcctcaa

SEQ ID NO: 30542 - DNA, 20 bp, synthetic construct
  source 1..20: mol_type = other DNA
ctcggtggggaagggcctgg

SEQ ID NO: 30543 - DNA, 20 bp, synthetic construct
  source 1..20: mol_type = other DNA
cgaagcaggtcctactcgga

SEQ ID NO: 30544 - DNA, 20 bp, synthetic construct
  source 1..20: mol_type = other DNA
ggatcatgtgagtaaccacc

SEQ ID NO: 30545 - DNA, 20 bp, synthetic construct
  source 1..20: mol_type = other DNA
tcgctgtgggttgtgaggtc

SEQ ID NO: 30546 - DNA, 20 bp, synthetic construct
  source 1..20: mol_type = other DNA
ctcacgcaggttgatggcat

SEQ ID NO: 30547 - DNA, 20 bp, synthetic construct
  source 1..20: mol_type = other DNA
cctcgatcaggaggaacatg

SEQ ID NO: 30548 - DNA, 20 bp, synthetic construct
  source 1..20: mol_type = other DNA
tgtacttctcctccgtctgc

SEQ ID NO: 30549 - DNA, 20 bp, synthetic construct
  source 1..20: mol_type = other DNA
ccatgccatcaacctgcgtg

SEQ ID NO: 30550 - DNA, 20 bp, synthetic construct
  source 1..20: mol_type = other DNA
gccaccgcgtgacctgggat

SEQ ID NO: 30551 - DNA, 20 bp, synthetic construct
  source 1..20: mol_type = other DNA
ccatagacgaggaacctaca

SEQ ID NO: 30552 - DNA, 20 bp, synthetic construct
  source 1..20: mol_type = other DNA
ctctcctcctcggtggggaa

SEQ ID NO: 30553 - DNA, 20 bp, synthetic construct
  source 1..20: mol_type = other DNA
ggacagcaaggctggtggcg

SEQ ID NO: 30554 - DNA, 20 bp, synthetic construct
  source 1..20: mol_type = other DNA
tgacccttaccgtaagcccc

SEQ ID NO: 30555 - DNA, 20 bp, synthetic construct
  source 1..20: mol_type = other DNA
tccatggctaccgcctgccc

SEQ ID NO: 30556 - DNA, 20 bp, synthetic construct
  source 1..20: mol_type = other DNA
gaagggcctggggggtcagg

SEQ ID NO: 30557 - DNA, 20 bp, synthetic construct
  source 1..20: mol_type = other DNA
cagcaaacacctggaccgtg

SEQ ID NO: 30558 - DNA, 20 bp, synthetic construct
  source 1..20: mol_type = other DNA
agaaccatcagcaggccagc

SEQ ID NO: 30559 - DNA, 20 bp, synthetic construct
  source 1..20: mol_type = other DNA
ggaaatctacgggagggtaa

SEQ ID NO: 30560 - DNA, 20 bp, synthetic construct
  source 1..20: mol_type = other DNA
gggctcacctgggacatctg

SEQ ID NO: 30561 - DNA, 20 bp, synthetic construct
  source 1..20: mol_type = other DNA
cctgcgggagatccagcaga

SEQ ID NO: 30562 - DNA, 20 bp, synthetic construct
  source 1..20: mol_type = other DNA
gaacagacaggtcctgagga

SEQ ID NO: 30563 - DNA, 20 bp, synthetic construct
  source 1..20: mol_type = other DNA
gaggaatgagctgggtgagt

SEQ ID NO: 30564 - DNA, 20 bp, synthetic construct
  source 1..20: mol_type = other DNA
agaccgagacaacaagaagg

SEQ ID NO: 30565 - DNA, 20 bp, synthetic construct
  source 1..20: mol_type = other DNA
cccaccgaggaggagagtgt

SEQ ID NO: 30566 - DNA, 20 bp, synthetic construct
  source 1..20: mol_type = other DNA
tatggccggcccaagatcga

SEQ ID NO: 30567 - DNA, 20 bp, synthetic construct
  source 1..20: mol_type = other DNA
ccttgcccatgtcggccaca

SEQ ID NO: 30568 - DNA, 20 bp, synthetic construct
  source 1..20: mol_type = other DNA
ggaccgtgtggccgcagccc

SEQ ID NO: 30569 - DNA, 20 bp, synthetic construct
  source 1..20: mol_type = other DNA
actccttgtgtgcagatgcc

SEQ ID NO: 30570 - DNA, 20 bp, synthetic construct
  source 1..20: mol_type = other DNA
gtcgagcaggaaggcatacc

SEQ ID NO: 30571 - DNA, 20 bp, synthetic construct
  source 1..20: mol_type = other DNA
tatttctgccctaaacaccc

SEQ ID NO: 30572 - DNA, 20 bp, synthetic construct
  source 1..20: mol_type = other DNA
ttggctggtttccttgtaac

SEQ ID NO: 30573 - DNA, 20 bp, synthetic construct
  source 1..20: mol_type = other DNA
ggaactcaagatcacctcgg

SEQ ID NO: 30574 - DNA, 20 bp, synthetic construct
  source 1..20: mol_type = other DNA
ttgagaacctggtgaggcgg

SEQ ID NO: 30575 - DNA, 20 bp, synthetic construct
  source 1..20: mol_type = other DNA
cgatgtgcaggattttggca

SEQ ID NO: 30576 - DNA, 20 bp, synthetic construct
  source 1..20: mol_type = other DNA
aaactccaccagctcctaga

SEQ ID NO: 30577 - DNA, 20 bp, synthetic construct
  source 1..20: mol_type = other DNA
acacaaggagtgtctgggga

SEQ ID NO: 30578 - DNA, 20 bp, synthetic construct
  source 1..20: mol_type = other DNA
ctgcacgtcctcccgggctg

SEQ ID NO: 30579 - DNA, 20 bp, synthetic construct
  source 1..20: mol_type = other DNA
tcatcttgggctgagagcga

SEQ ID NO: 30580 - DNA, 20 bp, synthetic construct
  source 1..20: mol_type = other DNA
ggctggccctggatgccatg

SEQ ID NO: 30581 - DNA, 20 bp, synthetic construct
  source 1..20: mol_type = other DNA
gcgctccaagatggacaggt

SEQ ID NO: 30582 - DNA, 20 bp, synthetic construct
  source 1..20: mol_type = other DNA
tttcccaggaactatgaaga

SEQ ID NO: 30583 - DNA, 20 bp, synthetic construct
  source 1..20: mol_type = other DNA
tggtggcgaggggagatcta

SEQ ID NO: 30584 - DNA, 20 bp, synthetic construct
  source 1..20: mol_type = other DNA
ccgcctcaccaggttctcaa

SEQ ID NO: 30585 - DNA, 20 bp, synthetic construct
  source 1..20: mol_type = other DNA
cctgggacatctgggggcgc

SEQ ID NO: 30586 - DNA, 20 bp, synthetic construct
  source 1..20: mol_type = other DNA
ctggtcctatgcagtaggca

SEQ ID NO: 30587 - DNA, 20 bp, synthetic construct
  source 1..20: mol_type = other DNA
atcctggccaaccgctcgga

SEQ ID NO: 30588 - DNA, 20 bp, synthetic construct
  source 1..20: mol_type = other DNA
tctcaatgtcttgaggtttc

SEQ ID NO: 30589 - DNA, 20 bp, synthetic construct
  source 1..20: mol_type = other DNA
tccccctgttctgggcgatc

SEQ ID NO: 30590 - DNA, 20 bp, synthetic construct
  source 1..20: mol_type = other DNA
tgagtagagctttgtcgagc

SEQ ID NO: 30591 - DNA, 20 bp, synthetic construct
  source 1..20: mol_type = other DNA
tagagctttgtcgagcagga

SEQ ID NO: 30592 - DNA, 20 bp, synthetic construct
  source 1..20: mol_type = other DNA
ggggcttcaagaaatgctgc

SEQ ID NO: 30593 - DNA, 20 bp, synthetic construct
  source 1..20: mol_type = other DNA
catctggaagtcatgcccgt

SEQ ID NO: 30594 - DNA, 20 bp, synthetic construct
  source 1..20: mol_type = other DNA
ccggcactggatgagccagt

SEQ ID NO: 30595 - DNA, 20 bp, synthetic construct
  source 1..20: mol_type = other DNA
gagcactcactcgatctggt

SEQ ID NO: 30596 - DNA, 20 bp, synthetic construct
  source 1..20: mol_type = other DNA
cctacctgctggcctgctga

SEQ ID NO: 30597 - DNA, 20 bp, synthetic construct
  source 1..20: mol_type = other DNA
tcgggcgcagaagtcatagc

SEQ ID NO: 30598 - DNA, 20 bp, synthetic construct
  source 1..20: mol_type = other DNA
tcacgcaccggcatggacac

SEQ ID NO: 30599 - DNA, 20 bp, synthetic construct
  source 1..20: mol_type = other DNA
ctggatgccatgagggtgag

SEQ ID NO: 30600 - DNA, 20 bp, synthetic construct
  source 1..20: mol_type = other DNA
caggccccatggagcgggca

SEQ ID NO: 30601 - DNA, 20 bp, synthetic construct
  source 1..20: mol_type = other DNA
tggctctctgagaacattcc

SEQ ID NO: 30602 - DNA, 20 bp, synthetic construct
  source 1..20: mol_type = other DNA
ggttgatggcatggggtagc

SEQ ID NO: 30603 - DNA, 20 bp, synthetic construct
  source 1..20: mol_type = other DNA
ttaccttcttcatagttcct

SEQ ID NO: 30604 - DNA, 20 bp, synthetic construct
  source 1..20: mol_type = other DNA
ctggttccctgccaactacg

SEQ ID NO: 30605 - DNA, 20 bp, synthetic construct
  source 1..20: mol_type = other DNA
tcaggtgtgtgaactggccc

SEQ ID NO: 30606 - DNA, 20 bp, synthetic construct
  source 1..20: mol_type = other DNA
gtgcagatgaagctggaggt

SEQ ID NO: 30607 - DNA, 20 bp, synthetic construct
  source 1..20: mol_type = other DNA
cacgctgggctccatccagc

SEQ ID NO: 30608 - DNA, 20 bp, synthetic construct
  source 1..20: mol_type = other DNA
ggctgcgccaggggtgccca

SEQ ID NO: 30609 - DNA, 20 bp, synthetic construct
  source 1..20: mol_type = other DNA
atcgaggaccaaggtgccca

SEQ ID NO: 30610 - DNA, 20 bp, synthetic construct
  source 1..20: mol_type = other DNA
atgggcaaggtacgagtggg

SEQ ID NO: 30611 - DNA, 20 bp, synthetic construct
  source 1..20: mol_type = other DNA
atctggaaccagatggtcac

SEQ ID NO: 30612 - DNA, 20 bp, synthetic construct
  source 1..20: mol_type = other DNA
cctggggaatcagagaacaa

SEQ ID NO: 30613 - DNA, 20 bp, synthetic construct
  source 1..20: mol_type = other DNA
ggagctggtgaaacacacgc

SEQ ID NO: 30614 - DNA, 20 bp, synthetic construct
  source 1..20: mol_type = other DNA
gatgaagacctggtagagat

SEQ ID NO: 30615 - DNA, 20 bp, synthetic construct
  source 1..20: mol_type = other DNA
tctgcacacaaggagtgtct

SEQ ID NO: 30616 - DNA, 20 bp, synthetic construct
  source 1..20: mol_type = other DNA
tgaggcactcacatggacat

SEQ ID NO: 30617 - DNA, 20 bp, synthetic construct
  source 1..20: mol_type = other DNA
gagcatcctggccaaccgct

SEQ ID NO: 30618 - DNA, 20 bp, synthetic construct
  source 1..20: mol_type = other DNA
tggttccagatataacgtcg

SEQ ID NO: 30619 - DNA, 20 bp, synthetic construct
  source 1..20: mol_type = other DNA
cctgcgcccccagatgtccc

SEQ ID NO: 30620 - DNA, 20 bp, synthetic construct
  source 1..20: mol_type = other DNA
ccccaggcccttccccaccg

SEQ ID NO: 30621 - DNA, 20 bp, synthetic construct
  source 1..20: mol_type = other DNA
cagagaaaaaggctttccgg

SEQ ID NO: 30622 - DNA, 20 bp, synthetic construct
  source 1..20: mol_type = other DNA
ctccaagatggacaggtggg

SEQ ID NO: 30623 - DNA, 20 bp, synthetic construct
  source 1..20: mol_type = other DNA
cttaaggcacaggaactgtg

SEQ ID NO: 30624 - DNA, 20 bp, synthetic construct
  source 1..20: mol_type = other DNA
cactgagccaggtcctgggg

SEQ ID NO: 30625 - DNA, 20 bp, synthetic construct
  source 1..20: mol_type = other DNA
gaggcactcacatggacata

SEQ ID NO: 30626 - DNA, 20 bp, synthetic construct
  source 1..20: mol_type = other DNA
gttgacctcacgcaggttga

SEQ ID NO: 30627 - DNA, 20 bp, synthetic construct
  source 1..20: mol_type = other DNA
cccgaacctggaagctgtgc

SEQ ID NO: 30628 - DNA, 20 bp, synthetic construct
  source 1..20: mol_type = other DNA
ggatgagccagtgggtgcat

SEQ ID NO: 30629 - DNA, 20 bp, synthetic construct
  source 1..20: mol_type = other DNA
gtccatgccggtgcgtgacg

SEQ ID NO: 30630 - DNA, 20 bp, synthetic construct
  source 1..20: mol_type = other DNA
agccaacctggaaacagacg

SEQ ID NO: 30631 - DNA, 20 bp, synthetic construct
  source 1..20: mol_type = other DNA
gaccccgatcgcccagaaca

SEQ ID NO: 30632 - DNA, 20 bp, synthetic construct
  source 1..20: mol_type = other DNA
cgacatgggcaaggtacgag

SEQ ID NO: 30633 - DNA, 20 bp, synthetic construct
  source 1..20: mol_type = other DNA
cactcgtaccttgcccatgt

SEQ ID NO: 30634 - DNA, 20 bp, synthetic construct
  source 1..20: mol_type = other DNA
ccccgatcgcccagaacagg

SEQ ID NO: 30635 - DNA, 20 bp, synthetic construct
  source 1..20: mol_type = other DNA
acaggtgggtggagtcaaca

SEQ ID NO: 30636 - DNA, 20 bp, synthetic construct
  source 1..20: mol_type = other DNA
ggaccccgatcgcccagaac

SEQ ID NO: 30637 - DNA, 20 bp, synthetic construct
  source 1..20: mol_type = other DNA
tgagctccacaatgtctcca

SEQ ID NO: 30638 - DNA, 20 bp, synthetic construct
  source 1..20: mol_type = other DNA
caacgggaggttcaccctgc

SEQ ID NO: 30639 - DNA, 20 bp, synthetic construct
  source 1..20: mol_type = other DNA
caggtcacgcggtggctggg

SEQ ID NO: 30640 - DNA, 20 bp, synthetic construct
  source 1..20: mol_type = other DNA
cttggagcgccgttccaccg

SEQ ID NO: 30641 - DNA, 20 bp, synthetic construct
  source 1..20: mol_type = other DNA
ctctgcccctgcccgctcca

SEQ ID NO: 30642 - DNA, 20 bp, synthetic construct
  source 1..20: mol_type = other DNA
gagccccatcccaggtcacg

SEQ ID NO: 30643 - DNA, 20 bp, synthetic construct
  source 1..20: mol_type = other DNA
cggggaactcaagatcacct

SEQ ID NO: 30644 - DNA, 20 bp, synthetic construct
  source 1..20: mol_type = other DNA
gctcaaccctggagacattg

SEQ ID NO: 30645 - DNA, 20 bp, synthetic construct
  source 1..20: mol_type = other DNA
ctcagagagccaacaacggg

SEQ ID NO: 30646 - DNA, 20 bp, synthetic construct
  source 1..20: mol_type = other DNA
tggctggtttccttgtaaca

SEQ ID NO: 30647 - DNA, 20 bp, synthetic construct
  source 1..20: mol_type = other DNA
cctcgttcacgcactgagcc

SEQ ID NO: 30648 - DNA, 20 bp, synthetic construct
  source 1..20: mol_type = other DNA
gaggtttcaggaaccgttgc

SEQ ID NO: 30649 - DNA, 20 bp, synthetic construct
  source 1..20: mol_type = other DNA
ggaaggttctaatgttctta

SEQ ID NO: 30650 - DNA, 20 bp, synthetic construct
  source 1..20: mol_type = other DNA
ggagtcagccagcaaacacc

SEQ ID NO: 30651 - DNA, 20 bp, synthetic construct
  source 1..20: mol_type = other DNA
gcaggtttacaaagtccttg

SEQ ID NO: 30652 - DNA, 20 bp, synthetic construct
  source 1..20: mol_type = other DNA
gacacagaaggacaccatcc

SEQ ID NO: 30653 - DNA, 20 bp, synthetic construct
  source 1..20: mol_type = other DNA
caggcccttccccaccgagg

SEQ ID NO: 30654 - DNA, 20 bp, synthetic construct
  source 1..20: mol_type = other DNA
ctactcggagggaagggtga

SEQ ID NO: 30655 - DNA, 20 bp, synthetic construct
  source 1..20: mol_type = other DNA
tggccgctactgcagccagg

SEQ ID NO: 30656 - DNA, 20 bp, synthetic construct
  source 1..20: mol_type = other DNA
ccacagcgacacggtggagg

SEQ ID NO: 30657 - DNA, 20 bp, synthetic construct
  source 1..20: mol_type = other DNA
tcagcaggccagcaggtagg

SEQ ID NO: 30658 - DNA, 20 bp, synthetic construct
  source 1..20: mol_type = other DNA
gaagaacagctcatagccct

SEQ ID NO: 30659 - DNA, 20 bp, synthetic construct
  source 1..20: mol_type = other DNA
ggctctctgagaacattcct

SEQ ID NO: 30660 - DNA, 20 bp, synthetic construct
  source 1..20: mol_type = other DNA
cacgcactgagccaggtcct

SEQ ID NO: 30661 - DNA, 20 bp, synthetic construct
  source 1..20: mol_type = other DNA
acgaagcaggtcctactcgg

SEQ ID NO: 30662 - DNA, 20 bp, synthetic construct
  source 1..20: mol_type = other DNA
gcaggtcctactcggaggga

SEQ ID NO: 30663 - DNA, 20 bp, synthetic construct
  source 1..20: mol_type = other DNA
ctggcccaggccctccggga

SEQ ID NO: 30664 - DNA, 20 bp, synthetic construct
  source 1..20: mol_type = other DNA
ccccctgttctgggcgatcg

SEQ ID NO: 30665 - DNA, 20 bp, synthetic construct
  source 1..20: mol_type = other DNA
ccaggttctcaatggacagc

SEQ ID NO: 30666 - DNA, 20 bp, synthetic construct
  source 1..20: mol_type = other DNA
acagagaaaaaggctttccg

SEQ ID NO: 30667 - DNA, 20 bp, synthetic construct
  source 1..20: mol_type = other DNA
gccgaacttctcacagcagg

SEQ ID NO: 30668 - DNA, 20 bp, synthetic construct
  source 1..20: mol_type = other DNA
aaggagaggtgagacccagc

SEQ ID NO: 30669 - DNA, 20 bp, synthetic construct
  source 1..20: mol_type = other DNA
tgtccattgagaacctggtg

SEQ ID NO: 30670 - DNA, 20 bp, synthetic construct
  source 1..20: mol_type = other DNA
ggtggctgggcggcagcacc

SEQ ID NO: 30671 - DNA, 20 bp, synthetic construct
  source 1..20: mol_type = other DNA
aaggaagccctgggcacccc

SEQ ID NO: 30672 - DNA, 20 bp, synthetic construct
  source 1..20: mol_type = other DNA
tcacttcctaaaggagatga

SEQ ID NO: 30673 - DNA, 20 bp, synthetic construct
  source 1..20: mol_type = other DNA
ccttgtatttgatgaagacc

SEQ ID NO: 30674 - DNA, 20 bp, synthetic construct
  source 1..20: mol_type = other DNA
gctcatagccctgggcacct

SEQ ID NO: 30675 - DNA, 20 bp, synthetic construct
  source 1..20: mol_type = other DNA
ggaacctacagggagaagac

SEQ ID NO: 30676 - DNA, 20 bp, synthetic construct
  source 1..20: mol_type = other DNA
ccacatgttcctcctgatcg

SEQ ID NO: 30677 - DNA, 20 bp, synthetic construct
  source 1..20: mol_type = other DNA
tagggcttcaccctgttaca

SEQ ID NO: 30678 - DNA, 20 bp, synthetic construct
  source 1..20: mol_type = other DNA
aagatgatctcaatgtcttg

SEQ ID NO: 30679 - DNA, 20 bp, synthetic construct
  source 1..20: mol_type = other DNA
aaggagttacttaatgctga

SEQ ID NO: 30680 - DNA, 20 bp, synthetic construct
  source 1..20: mol_type = other DNA
ctcaccagagatgaacagac

SEQ ID NO: 30681 - DNA, 20 bp, synthetic construct
  source 1..20: mol_type = other DNA
cttcctccacgtagttggca

SEQ ID NO: 30682 - DNA, 20 bp, synthetic construct
  source 1..20: mol_type = other DNA
ctgcccctgcccgctccatg

SEQ ID NO: 30683 - DNA, 20 bp, synthetic construct
  source 1..20: mol_type = other DNA
acaagaagggacagcaaggc

SEQ ID NO: 30684 - DNA, 20 bp, synthetic construct
  source 1..20: mol_type = other DNA
tggcatccagggccagccgc

SEQ ID NO: 30685 - DNA, 20 bp, synthetic construct
  source 1..20: mol_type = other DNA
tggggctcaggtgtgtgaac

SEQ ID NO: 30686 - DNA, 20 bp, synthetic construct
  source 1..20: mol_type = other DNA
catgagggtgagtgggtgta

SEQ ID NO: 30687 - DNA, 20 bp, synthetic construct
  source 1..20: mol_type = other DNA
cacaacccacagcgacacgg

SEQ ID NO: 30688 - DNA, 20 bp, synthetic construct
  source 1..20: mol_type = other DNA
ccaccgcgtgacctgggatg

SEQ ID NO: 30689 - DNA, 20 bp, synthetic construct
  source 1..20: mol_type = other DNA
ctttccgggggcttacggta

SEQ ID NO: 30690 - DNA, 20 bp, synthetic construct
  source 1..20: mol_type = other DNA
gtggagaatgaggaggcgga

SEQ ID NO: 30691 - DNA, 20 bp, synthetic construct
  source 1..20: mol_type = other DNA
ttgcaggtacgcaggcccca

SEQ ID NO: 30692 - DNA, 20 bp, synthetic construct
  source 1..20: mol_type = other DNA
tcacgcaggttgatggcatg

SEQ ID NO: 30693 - DNA, 20 bp, synthetic construct
  source 1..20: mol_type = other DNA
tcttcatcaaatacaaggag

SEQ ID NO: 30694 - DNA, 20 bp, synthetic construct
  source 1..20: mol_type = other DNA
gaagtcatgcccgttggcgg

SEQ ID NO: 30695 - DNA, 20 bp, synthetic construct
  source 1..20: mol_type = other DNA
cagaaggacaccatcccgga

SEQ ID NO: 30696 - DNA, 20 bp, synthetic construct
  source 1..20: mol_type = other DNA
ccatcagcaggccagcaggt

SEQ ID NO: 30697 - DNA, 20 bp, synthetic construct
  source 1..20: mol_type = other DNA
ctccttgaaggggaactgca

SEQ ID NO: 30698 - DNA, 20 bp, synthetic construct
  source 1..20: mol_type = other DNA
ggaggacgtgcagatgaagc

SEQ ID NO: 30699 - DNA, 20 bp, synthetic construct
  source 1..20: mol_type = other DNA
agggctcacctgggacatct

SEQ ID NO: 30700 - DNA, 20 bp, synthetic construct
  source 1..20: mol_type = other DNA
tcacctaagcagcatctgac

SEQ ID NO: 30701 - DNA, 20 bp, synthetic construct
  source 1..20: mol_type = other DNA
gactttcttggtgcggcaga

SEQ ID NO: 30702 - DNA, 20 bp, synthetic construct
  source 1..20: mol_type = other DNA
aacggcgctccaagatggac

SEQ ID NO: 30703 - DNA, 20 bp, synthetic construct
  source 1..20: mol_type = other DNA
gatgacctgtgacggggcag

SEQ ID NO: 30704 - DNA, 20 bp, synthetic construct
  source 1..20: mol_type = other DNA
aggcctgtcagatgctgctt

SEQ ID NO: 30705 - DNA, 20 bp, synthetic construct
  source 1..20: mol_type = other DNA
ccaggtcttcatcaaataca

SEQ ID NO: 30706 - DNA, 20 bp, synthetic construct
  source 1..20: mol_type = other DNA
tcacatgatccccctgttct

SEQ ID NO: 30707 - DNA, 20 bp, synthetic construct
  source 1..20: mol_type = other DNA
agatgaacagacaggtcctg

SEQ ID NO: 30708 - DNA, 20 bp, synthetic construct
  source 1..20: mol_type = other DNA
agagactggtcctatgcagt

SEQ ID NO: 30709 - DNA, 20 bp, synthetic construct
  source 1..20: mol_type = other DNA
gcagcggtagccctgataga

SEQ ID NO: 30710 - DNA, 20 bp, synthetic construct
  source 1..20: mol_type = other DNA
gttccctgccaactacgtgg

SEQ ID NO: 30711 - DNA, 20 bp, synthetic construct
  source 1..20: mol_type = other DNA
ggaaggcatacctggaagga

SEQ ID NO: 30712 - DNA, 20 bp, synthetic construct
  source 1..20: mol_type = other DNA
acttctcacagcaggtggac

SEQ ID NO: 30713 - DNA, 20 bp, synthetic construct
  source 1..20: mol_type = other DNA
ggaacatgtggctccactgc

SEQ ID NO: 30714 - DNA, 20 bp, synthetic construct
  source 1..20: mol_type = other DNA
ctccacccacctgtccatct

SEQ ID NO: 30715 - DNA, 20 bp, synthetic construct
  source 1..20: mol_type = other DNA
tatttgagaactcgctgcat

SEQ ID NO: 30716 - DNA, 20 bp, synthetic construct
  source 1..20: mol_type = other DNA
ctccggatagatgttggagc

SEQ ID NO: 30717 - DNA, 20 bp, synthetic construct
  source 1..20: mol_type = other DNA
gtggatggagcagtttgaga

SEQ ID NO: 30718 - DNA, 20 bp, synthetic construct
  source 1..20: mol_type = other DNA
ttctgaatactgctgagccc

SEQ ID NO: 30719 - DNA, 20 bp, synthetic construct
  source 1..20: mol_type = other DNA
caccctgcgggacctgctga

SEQ ID NO: 30720 - DNA, 20 bp, synthetic construct
  source 1..20: mol_type = other DNA
caccttggtcctcgatcagg

SEQ ID NO: 30721 - DNA, 20 bp, synthetic construct
  source 1..20: mol_type = other DNA
ctcactcgatctggtcggac

SEQ ID NO: 30722 - DNA, 20 bp, synthetic construct
  source 1..20: mol_type = other DNA
tgggcggcagcacccggcac

SEQ ID NO: 30723 - DNA, 20 bp, synthetic construct
  source 1..20: mol_type = other DNA
aacacgaagcaggtcctact

SEQ ID NO: 30724 - DNA, 20 bp, synthetic construct
  source 1..20: mol_type = other DNA
caggtcctactcggagggaa

SEQ ID NO: 30725 - DNA, 20 bp, synthetic construct
  source 1..20: mol_type = other DNA
gccatagacgaggaacctac

SEQ ID NO: 30726 - DNA, 20 bp, synthetic construct
  source 1..20: mol_type = other DNA
ttgggcagacctggaggaca

SEQ ID NO: 30727 - DNA, 20 bp, synthetic construct
  source 1..20: mol_type = other DNA
ccgtgtggccgcagcccggg

SEQ ID NO: 30728 - DNA, 20 bp, synthetic construct
  source 1..20: mol_type = other DNA
gggcaccttggtcctcgatc

SEQ ID NO: 30729 - DNA, 20 bp, synthetic construct
  source 1..20: mol_type = other DNA
gcattggcgccacagctcca

SEQ ID NO: 30730 - DNA, 20 bp, synthetic construct
  source 1..20: mol_type = other DNA
actggtcctatgcagtaggc

SEQ ID NO: 30731 - DNA, 20 bp, synthetic construct
  source 1..20: mol_type = other DNA
atcagagctgtcgctcaagg

SEQ ID NO: 30732 - DNA, 20 bp, synthetic construct
  source 1..20: mol_type = other DNA
gctggccctggatgccatga

SEQ ID NO: 30733 - DNA, 20 bp, synthetic construct
  source 1..20: mol_type = other DNA
ccagctgtccattgagaacc

SEQ ID NO: 30734 - DNA, 20 bp, synthetic construct
  source 1..20: mol_type = other DNA
gcgaggggagatctatggcc

SEQ ID NO: 30735 - DNA, 20 bp, synthetic construct
  source 1..20: mol_type = other DNA
ctgagccaggtcctggggag

SEQ ID NO: 30736 - DNA, 20 bp, synthetic construct
  source 1..20: mol_type = other DNA
aacccacagcgacacggtgg

SEQ ID NO: 30737 - DNA, 20 bp, synthetic construct
  source 1..20: mol_type = other DNA
gtgccgggcatctgcacaca

SEQ ID NO: 30738 - DNA, 20 bp, synthetic construct
  source 1..20: mol_type = other DNA
ccaagaaagtcccgtccgag

SEQ ID NO: 30739 - DNA, 20 bp, synthetic construct
  source 1..20: mol_type = other DNA
gggagatctatggccgggtg

SEQ ID NO: 30740 - DNA, 20 bp, synthetic construct
  source 1..20: mol_type = other DNA
gggcttcaagaaatgctgcg

SEQ ID NO: 30741 - DNA, 20 bp, synthetic construct
  source 1..20: mol_type = other DNA
cacgcaggaggcgatggaga

SEQ ID NO: 30742 - DNA, 20 bp, synthetic construct
  source 1..20: mol_type = other DNA
gtgcagatgcccggcaccga

SEQ ID NO: 30743 - DNA, 20 bp, synthetic construct
  source 1..20: mol_type = other DNA
gtgagctccacaatgtctcc

SEQ ID NO: 30744 - DNA, 20 bp, synthetic construct
  source 1..20: mol_type = other DNA
gaacatgtggctccactgca

SEQ ID NO: 30745 - DNA, 20 bp, synthetic construct
  source 1..20: mol_type = other DNA
ctcgggcgcagaagtcatag

SEQ ID NO: 30746 - DNA, 20 bp, synthetic construct
  source 1..20: mol_type = other DNA
ccgtgtcgctgtgggttgtg

SEQ ID NO: 30747 - DNA, 20 bp, synthetic construct
  source 1..20: mol_type = other DNA
ttatcaacattgaggtgagc

SEQ ID NO: 30748 - DNA, 20 bp, synthetic construct
  source 1..20: mol_type = other DNA
aatcctttagagagttctgc

SEQ ID NO: 30749 - DNA, 20 bp, synthetic construct
  source 1..20: mol_type = other DNA
atcagggctaccgctgccat

SEQ ID NO: 30750 - DNA, 20 bp, synthetic construct
  source 1..20: mol_type = other DNA
cgggtgaggcaggcagggct

SEQ ID NO: 30751 - DNA, 20 bp, synthetic construct
  source 1..20: mol_type = other DNA
agacattgtggagctcacga

SEQ ID NO: 30752 - DNA, 20 bp, synthetic construct
  source 1..20: mol_type = other DNA
ccagggttgagccgtagaaa

SEQ ID NO: 30753 - DNA, 20 bp, synthetic construct
  source 1..20: mol_type = other DNA
ccgatcagagctgtcgctca

SEQ ID NO: 30754 - DNA, 20 bp, synthetic construct
  source 1..20: mol_type = other DNA
aaggagatgaaggaagccct

SEQ ID NO: 30755 - DNA, 20 bp, synthetic construct
  source 1..20: mol_type = other DNA
gaaggtacctctgagatgca

SEQ ID NO: 30756 - DNA, 20 bp, synthetic construct
  source 1..20: mol_type = other DNA
gaccgagacaacaagaaggt

SEQ ID NO: 30757 - DNA, 20 bp, synthetic construct
  source 1..20: mol_type = other DNA
ctcaatggacagctggaaat

SEQ ID NO: 30758 - DNA, 20 bp, synthetic construct
  source 1..20: mol_type = other DNA
acaacgggaggttcaccctg

SEQ ID NO: 30759 - DNA, 20 bp, synthetic construct
  source 1..20: mol_type = other DNA
gcccagccaccgcgtgacct

SEQ ID NO: 30760 - DNA, 20 bp, synthetic construct
  source 1..20: mol_type = other DNA
gggtgtagatgacctgtgac

SEQ ID NO: 30761 - DNA, 20 bp, synthetic construct
  source 1..20: mol_type = other DNA
tggtcctatgcagtaggcag

SEQ ID NO: 30762 - DNA, 20 bp, synthetic construct
  source 1..20: mol_type = other DNA
gacaaaaagaggaatgagct

SEQ ID NO: 30763 - DNA, 20 bp, synthetic construct
  source 1..20: mol_type = other DNA
agaaggtggggctttgacgc

SEQ ID NO: 30764 - DNA, 20 bp, synthetic construct
  source 1..20: mol_type = other DNA
tccacctgctgtgagaagtt

SEQ ID NO: 30765 - DNA, 20 bp, synthetic construct
  source 1..20: mol_type = other DNA
gagaagtacactgacacgct

SEQ ID NO: 30766 - DNA, 20 bp, synthetic construct
  source 1..20: mol_type = other DNA
tgccagctccaacatctatc

SEQ ID NO: 30767 - DNA, 20 bp, synthetic construct
  source 1..20: mol_type = other DNA
ttctaatgttcttaaggcac

SEQ ID NO: 30768 - DNA, 20 bp, synthetic construct
  source 1..20: mol_type = other DNA
agacctggaggacagggtac

SEQ ID NO: 30769 - DNA, 20 bp, synthetic construct
  source 1..20: mol_type = other DNA
tgcagtagcggccatagacg

SEQ ID NO: 30770 - DNA, 20 bp, synthetic construct
  source 1..20: mol_type = other DNA
cctggctcagtgcgtgaacg

SEQ ID NO: 30771 - DNA, 20 bp, synthetic construct
  source 1..20: mol_type = other DNA
ctgcacacaaggagtgtctg

SEQ ID NO: 30772 - DNA, 20 bp, synthetic construct
  source 1..20: mol_type = other DNA
gaggtgtttcaggaatacta

SEQ ID NO: 30773 - DNA, 20 bp, synthetic construct
  source 1..20: mol_type = other DNA
acagaactggtgggaggtac

SEQ ID NO: 30774 - DNA, 20 bp, synthetic construct
  source 1..20: mol_type = other DNA
ccggagaatgccaccgccaa

SEQ ID NO: 30775 - DNA, 20 bp, synthetic construct
  source 1..20: mol_type = other DNA
aggtttcaggaaccgttgca

SEQ ID NO: 30776 - DNA, 20 bp, synthetic construct
  source 1..20: mol_type = other DNA
ctatggccgctactgcagcc

SEQ ID NO: 30777 - DNA, 20 bp, synthetic construct
  source 1..20: mol_type = other DNA
tgagctgggtgagttggcag

SEQ ID NO: 30778 - DNA, 20 bp, synthetic construct
  source 1..20: mol_type = other DNA
atgcccggcaccgatggcag

SEQ ID NO: 30779 - DNA, 20 bp, synthetic construct
  source 1..20: mol_type = other DNA
ggtttcaggaaccgttgcag

SEQ ID NO: 30780 - DNA, 20 bp, synthetic construct
  source 1..20: mol_type = other DNA
actccacctggctgcagtag

SEQ ID NO: 30781 - DNA, 20 bp, synthetic construct
  source 1..20: mol_type = other DNA
tccaggacaaactacatcgc

SEQ ID NO: 30782 - DNA, 20 bp, synthetic construct
  source 1..20: mol_type = other DNA
cggagaatgccaccgccaac

SEQ ID NO: 30783 - DNA, 20 bp, synthetic construct
  source 1..20: mol_type = other DNA
ggtgtagatgacctgtgacg

SEQ ID NO: 30784 - DNA, 20 bp, synthetic construct
  source 1..20: mol_type = other DNA
tccctccatgtggccgacat

SEQ ID NO: 30785 - DNA, 20 bp, synthetic construct
  source 1..20: mol_type = other DNA
ggcgaggggagatctatggc

SEQ ID NO: 30786 - DNA, 20 bp, synthetic construct
  source 1..20: mol_type = other DNA
tctgcccctgcccgctccat

SEQ ID NO: 30787 - DNA, 20 bp, synthetic construct
  source 1..20: mol_type = other DNA
agcaggaaggcatacctgga

SEQ ID NO: 30788 - DNA, 20 bp, synthetic construct
  source 1..20: mol_type = other DNA
tcctccaggtctgcccaaga

SEQ ID NO: 30789 - DNA, 20 bp, synthetic construct
  source 1..20: mol_type = other DNA
ctgaggctgaacagaactgg

SEQ ID NO: 30790 - DNA, 20 bp, synthetic construct
  source 1..20: mol_type = other DNA
gcagaagtcatagcgggctt

SEQ ID NO: 30791 - DNA, 20 bp, synthetic construct
  source 1..20: mol_type = other DNA
atgaagctggaggtgggcgc

SEQ ID NO: 30792 - DNA, 20 bp, synthetic construct
  source 1..20: mol_type = other DNA
ctgacaggccttgcaggatg

SEQ ID NO: 30793 - DNA, 20 bp, synthetic construct
  source 1..20: mol_type = other DNA
tccatcttgggcagacctgg

SEQ ID NO: 30794 - DNA, 20 bp, synthetic construct
  source 1..20: mol_type = other DNA
ctacgggagggtaaaggaaa

SEQ ID NO: 30795 - DNA, 20 bp, synthetic construct
  source 1..20: mol_type = other DNA
cctacactctcctcctcggt

SEQ ID NO: 30796 - DNA, 20 bp, synthetic construct
  source 1..20: mol_type = other DNA
atagttcctgggaaatctac

SEQ ID NO: 30797 - DNA, 20 bp, synthetic construct
  source 1..20: mol_type = other DNA
catcttgggctgagagcgag

SEQ ID NO: 30798 - DNA, 20 bp, synthetic construct
  source 1..20: mol_type = other DNA
gcgggagatccagcagacgg

SEQ ID NO: 30799 - DNA, 20 bp, synthetic construct
  source 1..20: mol_type = other DNA
caccttgcagttccccttca

SEQ ID NO: 30800 - DNA, 20 bp, synthetic construct
  source 1..20: mol_type = other DNA
tcaagatcacctcggtggaa

SEQ ID NO: 30801 - DNA, 20 bp, synthetic construct
  source 1..20: mol_type = other DNA
ggctcacctgggacatctgg

SEQ ID NO: 30802 - DNA, 20 bp, synthetic construct
  source 1..20: mol_type = other DNA
catctactaatgaaattggc

SEQ ID NO: 30803 - DNA, 20 bp, synthetic construct
  source 1..20: mol_type = other DNA
gtacctgcaaagagacacca

SEQ ID NO: 30804 - DNA, 20 bp, synthetic construct
  source 1..20: mol_type = other DNA
acgcactgagccaggtcctg

SEQ ID NO: 30805 - DNA, 20 bp, synthetic construct
  source 1..20: mol_type = other DNA
atgtgcctggcacctggaga

SEQ ID NO: 30806 - DNA, 20 bp, synthetic construct
  source 1..20: mol_type = other DNA
tgtggcgccaatgcacccac

SEQ ID NO: 30807 - DNA, 20 bp, synthetic construct
  source 1..20: mol_type = other DNA
tctggaaccagatggtcacc

SEQ ID NO: 30808 - DNA, 20 bp, synthetic construct
  source 1..20: mol_type = other DNA
tcggtggggaagggcctggg

SEQ ID NO: 30809 - DNA, 20 bp, synthetic construct
  source 1..20: mol_type = other DNA
aatacatctactaatgaaat

SEQ ID NO: 30810 - DNA, 20 bp, synthetic construct
  source 1..20: mol_type = other DNA
caggttcgggatgactcttc

SEQ ID NO: 30811 - DNA, 20 bp, synthetic construct
  source 1..20: mol_type = other DNA
cccggcactggatgagccag

SEQ ID NO: 30812 - DNA, 20 bp, synthetic construct
  source 1..20: mol_type = other DNA
gccccaccttcttgttgtct

SEQ ID NO: 30813 - DNA, 20 bp, synthetic construct
  source 1..20: mol_type = other DNA
ctctactcatctgtaagcgc

SEQ ID NO: 30814 - DNA, 20 bp, synthetic construct
  source 1..20: mol_type = other DNA
aggagaccgagacaacaaga

SEQ ID NO: 30815 - DNA, 20 bp, synthetic construct
  source 1..20: mol_type = other DNA
ccctttctacggctcaaccc

SEQ ID NO: 30816 - DNA, 20 bp, synthetic construct
  source 1..20: mol_type = other DNA
gagggctcacctgggacatc

SEQ ID NO: 30817 - DNA, 20 bp, synthetic construct
  source 1..20: mol_type = other DNA
actgagccaggtcctgggga

SEQ ID NO: 30818 - DNA, 20 bp, synthetic construct
  source 1..20: mol_type = other DNA
cccactggctcatccagtgc

SEQ ID NO: 30819 - DNA, 20 bp, synthetic construct
  source 1..20: mol_type = other DNA
accccgatcgcccagaacag

SEQ ID NO: 30820 - DNA, 20 bp, synthetic construct
  source 1..20: mol_type = other DNA
cacacaaggagtgtctgggg

SEQ ID NO: 30821 - DNA, 20 bp, synthetic construct
  source 1..20: mol_type = other DNA
accgagacaacaagaaggtg

SEQ ID NO: 30822 - DNA, 20 bp, synthetic construct
  source 1..20: mol_type = other DNA
tggcagggaaccagccaacc

SEQ ID NO: 30823 - DNA, 20 bp, synthetic construct
  source 1..20: mol_type = other DNA
tgcctggcacctggagaagg

SEQ ID NO: 30824 - DNA, 20 bp, synthetic construct
  source 1..20: mol_type = other DNA
gctctctgagaacattcctg

SEQ ID NO: 30825 - DNA, 20 bp, synthetic construct
  source 1..20: mol_type = other DNA
gacagcaaggctggtggcga

SEQ ID NO: 30826 - DNA, 20 bp, synthetic construct
  source 1..20: mol_type = other DNA
ccatgtggccgacatgggca

SEQ ID NO: 30827 - DNA, 20 bp, synthetic construct
  source 1..20: mol_type = other DNA
gggtccaggacagagcagac

SEQ ID NO: 30828 - DNA, 20 bp, synthetic construct
  source 1..20: mol_type = other DNA
gcagggctcaggacaaaaag

SEQ ID NO: 30829 - DNA, 20 bp, synthetic construct
  source 1..20: mol_type = other DNA
ctcacagcaggtggacagga

SEQ ID NO: 30830 - DNA, 20 bp, synthetic construct
  source 1..20: mol_type = other DNA
cgagtgagtgctcaggcctg

SEQ ID NO: 30831 - DNA, 20 bp, synthetic construct
  source 1..20: mol_type = other DNA
gtttgctggctgactccacc

SEQ ID NO: 30832 - DNA, 20 bp, synthetic construct
  source 1..20: mol_type = other DNA
gggagactcctatgacctca

SEQ ID NO: 30833 - DNA, 20 bp, synthetic construct
  source 1..20: mol_type = other DNA
gtcacgcaccggcatggaca

SEQ ID NO: 30834 - DNA, 20 bp, synthetic construct
  source 1..20: mol_type = other DNA
accagatcgagtgagtgctc

SEQ ID NO: 30835 - DNA, 20 bp, synthetic construct
  source 1..20: mol_type = other DNA
gttccccgtcgatcttgggc

SEQ ID NO: 30836 - DNA, 20 bp, synthetic construct
  source 1..20: mol_type = other DNA
ctccaccagctcctagaagg

SEQ ID NO: 30837 - DNA, 20 bp, synthetic construct
  source 1..20: mol_type = other DNA
gtattcttagggccctcctc

SEQ ID NO: 30838 - DNA, 20 bp, synthetic construct
  source 1..20: mol_type = other DNA
ggcgctccaagatggacagg

SEQ ID NO: 30839 - DNA, 20 bp, synthetic construct
  source 1..20: mol_type = other DNA
tcagagctgtcgctcaagga

SEQ ID NO: 30840 - DNA, 20 bp, synthetic construct
  source 1..20: mol_type = other DNA
caaaatcctgcacatcgaag

SEQ ID NO: 30841 - DNA, 20 bp, synthetic construct
  source 1..20: mol_type = other DNA
ccatggctaccgcctgccca

SEQ ID NO: 30842 - DNA, 20 bp, synthetic construct
  source 1..20: mol_type = other DNA
gaaacacacgcaggaggcga

SEQ ID NO: 30843 - DNA, 20 bp, synthetic construct
  source 1..20: mol_type = other DNA
ccaggacaaactacatcgca

SEQ ID NO: 30844 - DNA, 20 bp, synthetic construct
  source 1..20: mol_type = other DNA
ggagaaggagaacctgcggc

SEQ ID NO: 30845 - DNA, 20 bp, synthetic construct
  source 1..20: mol_type = other DNA
catagttcctgggaaatcta

SEQ ID NO: 30846 - DNA, 20 bp, synthetic construct
  source 1..20: mol_type = other DNA
ccactggctcatccagtgcc

SEQ ID NO: 30847 - DNA, 20 bp, synthetic construct
  source 1..20: mol_type = other DNA
cgacagctctgatcggtctc

SEQ ID NO: 30848 - DNA, 20 bp, synthetic construct
  source 1..20: mol_type = other DNA
actcaccctcatggcatcca

SEQ ID NO: 30849 - DNA, 20 bp, synthetic construct
  source 1..20: mol_type = other DNA
caagagaattgaagaagaag

SEQ ID NO: 30850 - DNA, 20 bp, synthetic construct
  source 1..20: mol_type = other DNA
ggctgaacagaactggtggg

SEQ ID NO: 30851 - DNA, 20 bp, synthetic construct
  source 1..20: mol_type = other DNA
ctggtgggaggtacaggctg

SEQ ID NO: 30852 - DNA, 20 bp, synthetic construct
  source 1..20: mol_type = other DNA
ggtacgcaggccccatggag

SEQ ID NO: 30853 - DNA, 20 bp, synthetic construct
  source 1..20: mol_type = other DNA
ggacaaaaagaggaatgagc

SEQ ID NO: 30854 - DNA, 20 bp, synthetic construct
  source 1..20: mol_type = other DNA
tgttcatactcacttcctaa

SEQ ID NO: 30855 - DNA, 20 bp, synthetic construct
  source 1..20: mol_type = other DNA
gatcgaggaccaaggtgccc

SEQ ID NO: 30856 - DNA, 20 bp, synthetic construct
  source 1..20: mol_type = other DNA
gttcctgggaaatctacggg

SEQ ID NO: 30857 - DNA, 20 bp, synthetic construct
  source 1..20: mol_type = other DNA
tgacagcagaaggactgtac

SEQ ID NO: 30858 - DNA, 20 bp, synthetic construct
  source 1..20: mol_type = other DNA
tgggctgagagcgaggggag

SEQ ID NO: 30859 - DNA, 20 bp, synthetic construct
  source 1..20: mol_type = other DNA
gcttcatctgcacgtcctcc

SEQ ID NO: 30860 - DNA, 20 bp, synthetic construct
  source 1..20: mol_type = other DNA
tggatgccatgagggtgagt

SEQ ID NO: 30861 - DNA, 20 bp, synthetic construct
  source 1..20: mol_type = other DNA
aggacctgtctgttcatctc

SEQ ID NO: 30862 - DNA, 20 bp, synthetic construct
  source 1..20: mol_type = other DNA
ggagaagtacactgacacgc

SEQ ID NO: 30863 - DNA, 20 bp, synthetic construct
  source 1..20: mol_type = other DNA
aggggcttcaagaaatgctg

SEQ ID NO: 30864 - DNA, 20 bp, synthetic construct
  source 1..20: mol_type = other DNA
gctgggctccatccagcagg

SEQ ID NO: 30865 - DNA, 20 bp, synthetic construct
  source 1..20: mol_type = other DNA
cgaagagctcgctccgcttg

SEQ ID NO: 30866 - DNA, 20 bp, synthetic construct
  source 1..20: mol_type = other DNA
ggacgtgcagatgaagctgg

SEQ ID NO: 30867 - DNA, 20 bp, synthetic construct
  source 1..20: mol_type = other DNA
ctcacatgatccccctgttc

SEQ ID NO: 30868 - DNA, 20 bp, synthetic construct
  source 1..20: mol_type = other DNA
agaaggtacctctgagatgc

SEQ ID NO: 30869 - DNA, 20 bp, synthetic construct
  source 1..20: mol_type = other DNA
atccccctgttctgggcgat

SEQ ID NO: 30870 - DNA, 20 bp, synthetic construct
  source 1..20: mol_type = other DNA
atggccggcccaagatcgac

SEQ ID NO: 30871 - DNA, 20 bp, synthetic construct
  source 1..20: mol_type = other DNA
tgaagaacagctcatagccc

SEQ ID NO: 30872 - DNA, 20 bp, synthetic construct
  source 1..20: mol_type = other DNA
atttcttgaagcccctgcaa

SEQ ID NO: 30873 - DNA, 20 bp, synthetic construct
  source 1..20: mol_type = other DNA
acagaaggacaccatcccgg

SEQ ID NO: 30874 - DNA, 20 bp, synthetic construct
  source 1..20: mol_type = other DNA
tcttttcaggctccttgaag

SEQ ID NO: 30875 - DNA, 20 bp, synthetic construct
  source 1..20: mol_type = other DNA
gcccatgtcggccacatgga

SEQ ID NO: 30876 - DNA, 20 bp, synthetic construct
  source 1..20: mol_type = other DNA
tgttaagcagctgacacaga

SEQ ID NO: 30877 - DNA, 20 bp, synthetic construct
  source 1..20: mol_type = other DNA
atctgcacacaaggagtgtc

SEQ ID NO: 30878 - DNA, 20 bp, synthetic construct
  source 1..20: mol_type = other DNA
ggcgcaggttgacctcacgc

SEQ ID NO: 30879 - DNA, 20 bp, synthetic construct
  source 1..20: mol_type = other DNA
tggccggcccaagatcgacg

SEQ ID NO: 30880 - DNA, 20 bp, synthetic construct
  source 1..20: mol_type = other DNA
caggtgccaggcacatctct

SEQ ID NO: 30881 - DNA, 20 bp, synthetic construct
  source 1..20: mol_type = other DNA
agtctctggctcactatggc

SEQ ID NO: 30882 - DNA, 20 bp, synthetic construct
  source 1..20: mol_type = other DNA
agaagggacagcaaggctgg

SEQ ID NO: 30883 - DNA, 20 bp, synthetic construct
  source 1..20: mol_type = other DNA
agccaccgcgtgacctggga

SEQ ID NO: 30884 - DNA, 20 bp, synthetic construct
  source 1..20: mol_type = other DNA
ctgaagagtcatcccgaacc

SEQ ID NO: 30885 - DNA, 20 bp, synthetic construct
  source 1..20: mol_type = other DNA
ccattgagaacctggtgagg

SEQ ID NO: 30886 - DNA, 20 bp, synthetic construct
  source 1..20: mol_type = other DNA
cctcctccaccgtgtcgctg

SEQ ID NO: 30887 - DNA, 20 bp, synthetic construct
  source 1..20: mol_type = other DNA
ggcaggggcagagagcatcc

SEQ ID NO: 30888 - DNA, 20 bp, synthetic construct
  source 1..20: mol_type = other DNA
tcttcctccacgtagttggc

SEQ ID NO: 30889 - DNA, 20 bp, synthetic construct
  source 1..20: mol_type = other DNA
cgatggagaaggagaacctg

SEQ ID NO: 30890 - DNA, 20 bp, synthetic construct
  source 1..20: mol_type = other DNA
cactcaccctcatggcatcc

SEQ ID NO: 30891 - DNA, 20 bp, synthetic construct
  source 1..20: mol_type = other DNA
caaatatcacctccttctcc

SEQ ID NO: 30892 - DNA, 20 bp, synthetic construct
  source 1..20: mol_type = other DNA
ggactttcttggtgcggcag

SEQ ID NO: 30893 - DNA, 20 bp, synthetic construct
  source 1..20: mol_type = other DNA
gcaggtaggaggtctcagac

SEQ ID NO: 30894 - DNA, 20 bp, synthetic construct
  source 1..20: mol_type = other DNA
caggtaggaggtctcagact

SEQ ID NO: 30895 - DNA, 20 bp, synthetic construct
  source 1..20: mol_type = other DNA
cttcatctgcacgtcctccc

SEQ ID NO: 30896 - DNA, 20 bp, synthetic construct
  source 1..20: mol_type = other DNA
cgctgtgggttgtgaggtca

SEQ ID NO: 30897 - DNA, 20 bp, synthetic construct
  source 1..20: mol_type = other DNA
tcaagaaatgctgcggggaa

SEQ ID NO: 30898 - DNA, 20 bp, synthetic construct
  source 1..20: mol_type = other DNA
aactggtgggaggtacaggc

SEQ ID NO: 30899 - DNA, 20 bp, synthetic construct
  source 1..20: mol_type = other DNA
gcgacagctctgatcggtct

SEQ ID NO: 30900 - DNA, 20 bp, synthetic construct
  source 1..20: mol_type = other DNA
ccccatcccaggtcacgcgg

SEQ ID NO: 30901 - DNA, 20 bp, synthetic construct
  source 1..20: mol_type = other DNA
ggcattctccggatagatgt

SEQ ID NO: 30902 - DNA, 20 bp, synthetic construct
  source 1..20: mol_type = other DNA
tgcttaggtgagaatctggg

SEQ ID NO: 30903 - DNA, 20 bp, synthetic construct
  source 1..20: mol_type = other DNA
aagaaggtaagactttcccg

SEQ ID NO: 30904 - DNA, 20 bp, synthetic construct
  source 1..20: mol_type = other DNA
ttaggtgagaatctgggagg

SEQ ID NO: 30905 - DNA, 20 bp, synthetic construct
  source 1..20: mol_type = other DNA
ctcagaggtaccttctatca

SEQ ID NO: 30906 - DNA, 20 bp, synthetic construct
  source 1..20: mol_type = other DNA
tcacgcactgagccaggtcc

SEQ ID NO: 30907 - DNA, 20 bp, synthetic construct
  source 1..20: mol_type = other DNA
cctccaccccctggagccat

SEQ ID NO: 30908 - DNA, 20 bp, synthetic construct
  source 1..20: mol_type = other DNA
ccctgcgatgtagtttgtcc

SEQ ID NO: 30909 - DNA, 20 bp, synthetic construct
  source 1..20: mol_type = other DNA
gtcatcttgggctgagagcg

SEQ ID NO: 30910 - DNA, 20 bp, synthetic construct
  source 1..20: mol_type = other DNA
gagggcggagaactgggacg

SEQ ID NO: 30911 - DNA, 20 bp, synthetic construct
  source 1..20: mol_type = other DNA
attgcagaagatgacctggg

SEQ ID NO: 30912 - DNA, 20 bp, synthetic construct
  source 1..20: mol_type = other DNA
acaggagactggacatcgtc

SEQ ID NO: 30913 - DNA, 20 bp, synthetic construct
  source 1..20: mol_type = other DNA
cgagttcaccgagcgcagca

SEQ ID NO: 30914 - DNA, 20 bp, synthetic construct
  source 1..20: mol_type = other DNA
agtacctggcagtgtgatat

SEQ ID NO: 30915 - DNA, 20 bp, synthetic construct
  source 1..20: mol_type = other DNA
aagagccaaaggtgacctat

SEQ ID NO: 30916 - DNA, 20 bp, synthetic construct
  source 1..20: mol_type = other DNA
tttcagagtatacactggaa

SEQ ID NO: 30917 - DNA, 20 bp, synthetic construct
  source 1..20: mol_type = other DNA
tgactaggctccggacaacc

SEQ ID NO: 30918 - DNA, 20 bp, synthetic construct
  source 1..20: mol_type = other DNA
tgtccgtcaacattgagaga

SEQ ID NO: 30919 - DNA, 20 bp, synthetic construct
  source 1..20: mol_type = other DNA
accgagcgcagcacgggccg

SEQ ID NO: 30920 - DNA, 20 bp, synthetic construct
  source 1..20: mol_type = other DNA
atgtgcagaaagacctggag

SEQ ID NO: 30921 - DNA, 20 bp, synthetic construct
  source 1..20: mol_type = other DNA
cccgtatggctcaacttcga

SEQ ID NO: 30922 - DNA, 20 bp, synthetic construct
  source 1..20: mol_type = other DNA
agtgtgatattggcaaaaat

SEQ ID NO: 30923 - DNA, 20 bp, synthetic construct
  source 1..20: mol_type = other DNA
tacctcggtagctgtggatg

SEQ ID NO: 30924 - DNA, 20 bp, synthetic construct
  source 1..20: mol_type = other DNA
cgctctttcagagtatacac

SEQ ID NO: 30925 - DNA, 20 bp, synthetic construct
  source 1..20: mol_type = other DNA
agagatgcagggacacacga

SEQ ID NO: 30926 - DNA, 20 bp, synthetic construct
  source 1..20: mol_type = other DNA
agagccaaaggtgacctatc

SEQ ID NO: 30927 - DNA, 20 bp, synthetic construct
  source 1..20: mol_type = other DNA
cagctaccgaggtacgggcc

SEQ ID NO: 30928 - DNA, 20 bp, synthetic construct
  source 1..20: mol_type = other DNA
ggcccgtacctcggtagctg

SEQ ID NO: 30929 - DNA, 20 bp, synthetic construct
  source 1..20: mol_type = other DNA
gtgccatctctcaatgttga

SEQ ID NO: 30930 - DNA, 20 bp, synthetic construct
  source 1..20: mol_type = other DNA
catacgggcagcacgacgcg

SEQ ID NO: 30931 - DNA, 20 bp, synthetic construct
  source 1..20: mol_type = other DNA
gagatgcagggacacacgat

SEQ ID NO: 30932 - DNA, 20 bp, synthetic construct
  source 1..20: mol_type = other DNA
ctttcagagtatacactgga

SEQ ID NO: 30933 - DNA, 20 bp, synthetic construct
  source 1..20: mol_type = other DNA
ctcggtagctgtggatgcgg

SEQ ID NO: 30934 - DNA, 20 bp, synthetic construct
  source 1..20: mol_type = other DNA
ccctacccaacgctgccgcc

SEQ ID NO: 30935 - DNA, 20 bp, synthetic construct
  source 1..20: mol_type = other DNA
ttgcagaagatgacctggga

SEQ ID NO: 30936 - DNA, 20 bp, synthetic construct
  source 1..20: mol_type = other DNA
cccaaatgtgcagaaagacc

SEQ ID NO: 30937 - DNA, 20 bp, synthetic construct
  source 1..20: mol_type = other DNA
ggcagcgttgggtagggctg

SEQ ID NO: 30938 - DNA, 20 bp, synthetic construct
  source 1..20: mol_type = other DNA
ccaacgctgccgcctggcac

SEQ ID NO: 30939 - DNA, 20 bp, synthetic construct
  source 1..20: mol_type = other DNA
atccacagctaccgaggtac

SEQ ID NO: 30940 - DNA, 20 bp, synthetic construct
  source 1..20: mol_type = other DNA
ctgcatctctgaagagccaa

SEQ ID NO: 30941 - DNA, 20 bp, synthetic construct
  source 1..20: mol_type = other DNA
ctaggctccggacaacctgg

SEQ ID NO: 30942 - DNA, 20 bp, synthetic construct
  source 1..20: mol_type = other DNA
tgacctatcgggacaagcaa

SEQ ID NO: 30943 - DNA, 20 bp, synthetic construct
  source 1..20: mol_type = other DNA
catccacagctaccgaggta

SEQ ID NO: 30944 - DNA, 20 bp, synthetic construct
  source 1..20: mol_type = other DNA
cgcgcgtcgtgctgcccgta

SEQ ID NO: 30945 - DNA, 20 bp, synthetic construct
  source 1..20: mol_type = other DNA
cctctacgaggaggagatgc

SEQ ID NO: 30946 - DNA, 20 bp, synthetic construct
  source 1..20: mol_type = other DNA
ggctctcacttgaatccact

SEQ ID NO: 30947 - DNA, 20 bp, synthetic construct
  source 1..20: mol_type = other DNA
gtggaggtgaggaggccaca

SEQ ID NO: 30948 - DNA, 20 bp, synthetic construct
  source 1..20: mol_type = other DNA
ggtccagtgctcagctccag

SEQ ID NO: 30949 - DNA, 20 bp, synthetic construct
  source 1..20: mol_type = other DNA
cagctcaccggaggagtgga

SEQ ID NO: 30950 - DNA, 20 bp, synthetic construct
  source 1..20: mol_type = other DNA
tcacgtcaaatccattctgg

SEQ ID NO: 30951 - DNA, 20 bp, synthetic construct
  source 1..20: mol_type = other DNA
cacgagggcccggaaggcct

SEQ ID NO: 30952 - DNA, 20 bp, synthetic construct
  source 1..20: mol_type = other DNA
tccggtgagctgatcctgcc

SEQ ID NO: 30953 - DNA, 20 bp, synthetic construct
  source 1..20: mol_type = other DNA
ttccccacaggccctccagt

SEQ ID NO: 30954 - DNA, 20 bp, synthetic construct
  source 1..20: mol_type = other DNA
cagtggccagcgtctgggag

SEQ ID NO: 30955 - DNA, 20 bp, synthetic construct
  source 1..20: mol_type = other DNA
cacagccccacaatgctcct

SEQ ID NO: 30956 - DNA, 20 bp, synthetic construct
  source 1..20: mol_type = other DNA
cgggggccgaggagcaccag

SEQ ID NO: 30957 - DNA, 20 bp, synthetic construct
  source 1..20: mol_type = other DNA
gtggtcctggaggagggtgg

SEQ ID NO: 30958 - DNA, 20 bp, synthetic construct
  source 1..20: mol_type = other DNA
cggcaggagatgaggcgcca

SEQ ID NO: 30959 - DNA, 20 bp, synthetic construct
  source 1..20: mol_type = other DNA
gtccagtgctcagctccagg

SEQ ID NO: 30960 - DNA, 20 bp, synthetic construct
  source 1..20: mol_type = other DNA
ccagcgaaggtgtggaagaa

SEQ ID NO: 30961 - DNA, 20 bp, synthetic construct
  source 1..20: mol_type = other DNA
ttacatctccagcgaaggtg

SEQ ID NO: 30962 - DNA, 20 bp, synthetic construct
  source 1..20: mol_type = other DNA
gcggatgaagtaggacttct

SEQ ID NO: 30963 - DNA, 20 bp, synthetic construct
  source 1..20: mol_type = other DNA
agcctggagaggtgtagggt

SEQ ID NO: 30964 - DNA, 20 bp, synthetic construct
  source 1..20: mol_type = other DNA
gacgaaaatgcttggtgagc

SEQ ID NO: 30965 - DNA, 20 bp, synthetic construct
  source 1..20: mol_type = other DNA
gcggcaggagatgaggcgcc

SEQ ID NO: 30966 - DNA, 20 bp, synthetic construct
  source 1..20: mol_type = other DNA
ccaatgggaggaaggcccgg

SEQ ID NO: 30967 - DNA, 20 bp, synthetic construct
  source 1..20: mol_type = other DNA
tcccaggcatgtcagccacg

SEQ ID NO: 30968 - DNA, 20 bp, synthetic construct
  source 1..20: mol_type = other DNA
atgtgcaggactgccaagcg

SEQ ID NO: 30969 - DNA, 20 bp, synthetic construct
  source 1..20: mol_type = other DNA
tccaggctggtcggctgctc

SEQ ID NO: 30970 - DNA, 20 bp, synthetic construct
  source 1..20: mol_type = other DNA
gcagggaattcagctgaaca

SEQ ID NO: 30971 - DNA, 20 bp, synthetic construct
  source 1..20: mol_type = other DNA
gaattcagctgaacaaggtg

SEQ ID NO: 30972 - DNA, 20 bp, synthetic construct
  source 1..20: mol_type = other DNA
tcacctgaaggccgtaaagg

SEQ ID NO: 30973 - DNA, 20 bp, synthetic construct
  source 1..20: mol_type = other DNA
cgaccagcctggagaggtgt

SEQ ID NO: 30974 - DNA, 20 bp, synthetic construct
  source 1..20: mol_type = other DNA
ttggtccagtgctcagctcc

SEQ ID NO: 30975 - DNA, 20 bp, synthetic construct
  source 1..20: mol_type = other DNA
gcacctccttggtctccacc

SEQ ID NO: 30976 - DNA, 20 bp, synthetic construct
  source 1..20: mol_type = other DNA
cagctgaacaaggtgaggac

SEQ ID NO: 30977 - DNA, 20 bp, synthetic construct
  source 1..20: mol_type = other DNA
gactccgcagatctgggtcg

SEQ ID NO: 30978 - DNA, 20 bp, synthetic construct
  source 1..20: mol_type = other DNA
aggaatcagaggcaaagtgg

SEQ ID NO: 30979 - DNA, 20 bp, synthetic construct
  source 1..20: mol_type = other DNA
agcgaaggtgtggaagaagg

SEQ ID NO: 30980 - DNA, 20 bp, synthetic construct
  source 1..20: mol_type = other DNA
tatgtgcaggactgccaagc

SEQ ID NO: 30981 - DNA, 20 bp, synthetic construct
  source 1..20: mol_type = other DNA
ctcctgcacgagggcccgga

SEQ ID NO: 30982 - DNA, 20 bp, synthetic construct
  source 1..20: mol_type = other DNA
tcacctgcccaggaggaaaa

SEQ ID NO: 30983 - DNA, 20 bp, synthetic construct
  source 1..20: mol_type = other DNA
gcggaagtggctctgtggag

SEQ ID NO: 30984 - DNA, 20 bp, synthetic construct
  source 1..20: mol_type = other DNA
ggtgtggaagaagggggtgg

SEQ ID NO: 30985 - DNA, 20 bp, synthetic construct
  source 1..20: mol_type = other DNA
cagcgaaggtgtggaagaag

SEQ ID NO: 30986 - DNA, 20 bp, synthetic construct
  source 1..20: mol_type = other DNA
agcactctgggaggctgagg

SEQ ID NO: 30987 - DNA, 20 bp, synthetic construct
  source 1..20: mol_type = other DNA
ggatgaagtaggacttctgg

SEQ ID NO: 30988 - DNA, 20 bp, synthetic construct
  source 1..20: mol_type = other DNA
tttccccacaggccctccag

SEQ ID NO: 30989 - DNA, 20 bp, synthetic construct
  source 1..20: mol_type = other DNA
gaggcaaagtggaggtgagg

SEQ ID NO: 30990 - DNA, 20 bp, synthetic construct
  source 1..20: mol_type = other DNA
acctcagagctcagagggac

SEQ ID NO: 30991 - DNA, 20 bp, synthetic construct
  source 1..20: mol_type = other DNA
cggatgaagtaggacttctg

SEQ ID NO: 30992 - DNA, 20 bp, synthetic construct
  source 1..20: mol_type = other DNA
gcacgagggcccggaaggcc

SEQ ID NO: 30993 - DNA, 20 bp, synthetic construct
  source 1..20: mol_type = other DNA
agtggaggtgaggaggccac

SEQ ID NO: 30994 - DNA, 20 bp, synthetic construct
  source 1..20: mol_type = other DNA
gtcgctggttctcgtggtcc

SEQ ID NO: 30995 - DNA, 20 bp, synthetic construct
  source 1..20: mol_type = other DNA
gaccagcctggagaggtgta

SEQ ID NO: 30996 - DNA, 20 bp, synthetic construct
  source 1..20: mol_type = other DNA
aaaaggaatcagaggcaaag

SEQ ID NO: 30997 - DNA, 20 bp, synthetic construct
  source 1..20: mol_type = other DNA
ggcagtcctgcacatacctt

SEQ ID NO: 30998 - DNA, 20 bp, synthetic construct
  source 1..20: mol_type = other DNA
agcagccgaccagcctggag

SEQ ID NO: 30999 - DNA, 20 bp, synthetic construct
  source 1..20: mol_type = other DNA
caaaaattagccaggtatgg

SEQ ID NO: 31000 - DNA, 20 bp, synthetic construct
  source 1..20: mol_type = other DNA
tcccattgggcccccactca

SEQ ID NO: 31001 - DNA, 20 bp, synthetic construct
  source 1..20: mol_type = other DNA
tggtccagtgctcagctcca

SEQ ID NO: 31002 - DNA, 20 bp, synthetic construct
  source 1..20: mol_type = other DNA
caggcgtgtgccaccatacc

SEQ ID NO: 31003 - DNA, 20 bp, synthetic construct
  source 1..20: mol_type = other DNA
actggaccaaggagcattgt

SEQ ID NO: 31004 - DNA, 20 bp, synthetic construct
  source 1..20: mol_type = other DNA
gggtcacctgaaggccgtaa

SEQ ID NO: 31005 - DNA, 20 bp, synthetic construct
  source 1..20: mol_type = other DNA
cccccggccccctattgtgg

SEQ ID NO: 31006 - DNA, 20 bp, synthetic construct
  source 1..20: mol_type = other DNA
tccacctggatgcaggggca

SEQ ID NO: 31007 - DNA, 20 bp, synthetic construct
  source 1..20: mol_type = other DNA
tggagctgagcactggacca

SEQ ID NO: 31008 - DNA, 20 bp, synthetic construct
  source 1..20: mol_type = other DNA
tggcagtcctgcacatacct

SEQ ID NO: 31009 - DNA, 20 bp, synthetic construct
  source 1..20: mol_type = other DNA
gccgtaaaggcggatgaagt

SEQ ID NO: 31010 - DNA, 20 bp, synthetic construct
  source 1..20: mol_type = other DNA
ggttctcgtggtcctggagg

SEQ ID NO: 31011 - DNA, 20 bp, synthetic construct
  source 1..20: mol_type = other DNA
accccccacaatagggggcc

SEQ ID NO: 31012 - DNA, 20 bp, synthetic construct
  source 1..20: mol_type = other DNA
tgtcccaggctggagtacag

SEQ ID NO: 31013 - DNA, 20 bp, synthetic construct
  source 1..20: mol_type = other DNA
gaagtcgtagataagtttag

SEQ ID NO: 31014 - DNA, 20 bp, synthetic construct
  source 1..20: mol_type = other DNA
ccaggctggtcggctgctct

SEQ ID NO: 31015 - DNA, 20 bp, synthetic construct
  source 1..20: mol_type = other DNA
ggggcagatcgcttgagccc

SEQ ID NO: 31016 - DNA, 20 bp, synthetic construct
  source 1..20: mol_type = other DNA
tgcagttgttcagctgtacc

SEQ ID NO: 31017 - DNA, 20 bp, synthetic construct
  source 1..20: mol_type = other DNA
gtggaagaagggggtggggg

SEQ ID NO: 31018 - DNA, 20 bp, synthetic construct
  source 1..20: mol_type = other DNA
gccaccacctcagagctcag

SEQ ID NO: 31019 - DNA, 20 bp, synthetic construct
  source 1..20: mol_type = other DNA
agcgtctgggagaggaaagc

SEQ ID NO: 31020 - DNA, 20 bp, synthetic construct
  source 1..20: mol_type = other DNA
cgaaaatgcttggtgagctg

SEQ ID NO: 31021 - DNA, 20 bp, synthetic construct
  source 1..20: mol_type = other DNA
gcgtctgggagaggaaagca

SEQ ID NO: 31022 - DNA, 20 bp, synthetic construct
  source 1..20: mol_type = other DNA
gtatgtgcaggactgccaag

SEQ ID NO: 31023 - DNA, 20 bp, synthetic construct
  source 1..20: mol_type = other DNA
cctcgagatggcggtggggg

SEQ ID NO: 31024 - DNA, 20 bp, synthetic construct
  source 1..20: mol_type = other DNA
atcacttacatctccagcga

SEQ ID NO: 31025 - DNA, 20 bp, synthetic construct
  source 1..20: mol_type = other DNA
ccaggcatgtcagccacgtg

SEQ ID NO: 31026 - DNA, 20 bp, synthetic construct
  source 1..20: mol_type = other DNA
cccttcttccacaccttcgc

SEQ ID NO: 31027 - DNA, 20 bp, synthetic construct
  source 1..20: mol_type = other DNA
gaacgtccagtagctggagg

SEQ ID NO: 31028 - DNA, 20 bp, synthetic construct
  source 1..20: mol_type = other DNA
ctcctgctctggtgcctgcc

SEQ ID NO: 31029 - DNA, 20 bp, synthetic construct
  source 1..20: mol_type = other DNA
ctcacgtcaaatccattctg

SEQ ID NO: 31030 - DNA, 20 bp, synthetic construct
  source 1..20: mol_type = other DNA
cccaggcatgtcagccacgt

SEQ ID NO: 31031 - DNA, 20 bp, synthetic construct
  source 1..20: mol_type = other DNA
tccagcgaaggtgtggaaga

SEQ ID NO: 31032 - DNA, 20 bp, synthetic construct
  source 1..20: mol_type = other DNA
ccccaccgccatctcgagga

SEQ ID NO: 31033 - DNA, 20 bp, synthetic construct
  source 1..20: mol_type = other DNA
tggtcggctgctctgggaac

SEQ ID NO: 31034 - DNA, 20 bp, synthetic construct
  source 1..20: mol_type = other DNA
tgcaggagaagatacaaaaa

SEQ ID NO: 31035 - DNA, 20 bp, synthetic construct
  source 1..20: mol_type = other DNA
ctgcaaagttcagccccgct

SEQ ID NO: 31036 - DNA, 20 bp, synthetic construct
  source 1..20: mol_type = other DNA
gctggttctcgtggtcctgg

SEQ ID NO: 31037 - DNA, 20 bp, synthetic construct
  source 1..20: mol_type = other DNA
agatacaaaaaaggaatcag

SEQ ID NO: 31038 - DNA, 20 bp, synthetic construct
  source 1..20: mol_type = other DNA
ggtggcggtggtggcggtgg

SEQ ID NO: 31039 - DNA, 20 bp, synthetic construct
  source 1..20: mol_type = other DNA
tcagaggcaaagtggaggtg

SEQ ID NO: 31040 - DNA, 20 bp, synthetic construct
  source 1..20: mol_type = other DNA
caactgcagtggccagcgtc

SEQ ID NO: 31041 - DNA, 20 bp, synthetic construct
  source 1..20: mol_type = other DNA
cccagagcagccgaccagcc

SEQ ID NO: 31042 - DNA, 20 bp, synthetic construct
  source 1..20: mol_type = other DNA
gcagtcctgcacataccttg

SEQ ID NO: 31043 - DNA, 20 bp, synthetic construct
  source 1..20: mol_type = other DNA
gagaacagactccgcagatc

SEQ ID NO: 31044 - DNA, 20 bp, synthetic construct
  source 1..20: mol_type = other DNA
caagcatctcaaagagtcgc

SEQ ID NO: 31045 - DNA, 20 bp, synthetic construct
  source 1..20: mol_type = other DNA
caaagagtcgctggttctcg

SEQ ID NO: 31046 - DNA, 20 bp, synthetic construct
  source 1..20: mol_type = other DNA
gatgcttggacgaaaatgct

SEQ ID NO: 31047 - DNA, 20 bp, synthetic construct
  source 1..20: mol_type = other DNA
tggaggtgaggaggccacag

SEQ ID NO: 31048 - DNA, 20 bp, synthetic construct
  source 1..20: mol_type = other DNA
cagcgactctttgagatgct

SEQ ID NO: 31049 - DNA, 20 bp, synthetic construct
  source 1..20: mol_type = other DNA
ccggtgagctgatcctgccg

SEQ ID NO: 31050 - DNA, 20 bp, synthetic construct
  source 1..20: mol_type = other DNA
ggggctgaactttgcagacg

SEQ ID NO: 31051 - DNA, 20 bp, synthetic construct
  source 1..20: mol_type = other DNA
gcctcagcctcccagagtgc

SEQ ID NO: 31052 - DNA, 20 bp, synthetic construct
  source 1..20: mol_type = other DNA
gtacagctgaacaactgcag

SEQ ID NO: 31053 - DNA, 20 bp, synthetic construct
  source 1..20: mol_type = other DNA
ctggaccaaggagcattgtg

SEQ ID NO: 31054 - DNA, 20 bp, synthetic construct
  source 1..20: mol_type = other DNA
ccccccacaatagggggccg

SEQ ID NO: 31055 - DNA, 20 bp, synthetic construct
  source 1..20: mol_type = other DNA
ggcggatgaagtaggacttc

SEQ ID NO: 31056 - DNA, 20 bp, synthetic construct
  source 1..20: mol_type = other DNA
gcccccaggcagcacacaga

SEQ ID NO: 31057 - DNA, 20 bp, synthetic construct
  source 1..20: mol_type = other DNA
aggttgcagggcagcccgtc

SEQ ID NO: 31058 - DNA, 20 bp, synthetic construct
  source 1..20: mol_type = other DNA
cgaggagcacctgaagctgg

SEQ ID NO: 31059 - DNA, 20 bp, synthetic construct
  source 1..20: mol_type = other DNA
ccgaccaggaacttgtgcag

SEQ ID NO: 31060 - DNA, 20 bp, synthetic construct
  source 1..20: mol_type = other DNA
gggcacggagaaggcagaca

SEQ ID NO: 31061 - DNA, 20 bp, synthetic construct
  source 1..20: mol_type = other DNA
ggacacctggtgcagcagct

SEQ ID NO: 31062 - DNA, 20 bp, synthetic construct
  source 1..20: mol_type = other DNA
gccgagcgcaaactttactc

SEQ ID NO: 31063 - DNA, 20 bp, synthetic construct
  source 1..20: mol_type = other DNA
cgccagtgcctgcgctcgct

SEQ ID NO: 31064 - DNA, 20 bp, synthetic construct
  source 1..20: mol_type = other DNA
ttccgcggcctcagcctggc

SEQ ID NO: 31065 - DNA, 20 bp, synthetic construct
  source 1..20: mol_type = other DNA
gcgagcctgttactacagcc

SEQ ID NO: 31066 - DNA, 20 bp, synthetic construct
  source 1..20: mol_type = other DNA
cctgaagctggcgggcatgg

SEQ ID NO: 31067 - DNA, 20 bp, synthetic construct
  source 1..20: mol_type = other DNA
ggccgaggagcacctgaagc

SEQ ID NO: 31068 - DNA, 20 bp, synthetic construct
  source 1..20: mol_type = other DNA
gggcaggaagcagatcgacg

SEQ ID NO: 31069 - DNA, 20 bp, synthetic construct
  source 1..20: mol_type = other DNA
cgcaggcagtcgaagacccc

SEQ ID NO: 31070 - DNA, 20 bp, synthetic construct
  source 1..20: mol_type = other DNA
gctgagcgggcctggggagg

SEQ ID NO: 31071 - DNA, 20 bp, synthetic construct
  source 1..20: mol_type = other DNA
ccacgttgactcatgtgagt

SEQ ID NO: 31072 - DNA, 20 bp, synthetic construct
  source 1..20: mol_type = other DNA
tcatggagatggctgggggc

SEQ ID NO: 31073 - DNA, 20 bp, synthetic construct
  source 1..20: mol_type = other DNA
gccgtcacctgaggcgttgc

SEQ ID NO: 31074 - DNA, 20 bp, synthetic construct
  source 1..20: mol_type = other DNA
ctccaggtacttcatcccca

SEQ ID NO: 31075 - DNA, 20 bp, synthetic construct
  source 1..20: mol_type = other DNA
tcttcccatagatgagggac

SEQ ID NO: 31076 - DNA, 20 bp, synthetic construct
  source 1..20: mol_type = other DNA
ctccccaggcccgctcagca

SEQ ID NO: 31077 - DNA, 20 bp, synthetic construct
  source 1..20: mol_type = other DNA
gcctgagctcccgctgccca

SEQ ID NO: 31078 - DNA, 20 bp, synthetic construct
  source 1..20: mol_type = other DNA
gcaggtttcgggaggcccag

SEQ ID NO: 31079 - DNA, 20 bp, synthetic construct
  source 1..20: mol_type = other DNA
tggcgtaggtgccgttgagc

SEQ ID NO: 31080 - DNA, 20 bp, synthetic construct
  source 1..20: mol_type = other DNA
gcagcgatgtctggagctat

SEQ ID NO: 31081 - DNA, 20 bp, synthetic construct
  source 1..20: mol_type = other DNA
cgcccagcgagcgcaggcac

SEQ ID NO: 31082 - DNA, 20 bp, synthetic construct
  source 1..20: mol_type = other DNA
tccgcggcctcagcctggca

SEQ ID NO: 31083 - DNA, 20 bp, synthetic construct
  source 1..20: mol_type = other DNA
tgagccaggtgagcgggcag

SEQ ID NO: 31084 - DNA, 20 bp, synthetic construct
  source 1..20: mol_type = other DNA
tgcctgagctcccgctgccc

SEQ ID NO: 31085 - DNA, 20 bp, synthetic construct
  source 1..20: mol_type = other DNA
acggcaagttcctgtatgtg

SEQ ID NO: 31086 - DNA, 20 bp, synthetic construct
  source 1..20: mol_type = other DNA
ccgccttgtcttggctgatg

SEQ ID NO: 31087 - DNA, 20 bp, synthetic construct
  source 1..20: mol_type = other DNA
caccgtcttcccatagatga

SEQ ID NO: 31088 - DNA, 20 bp, synthetic construct
  source 1..20: mol_type = other DNA
agcagctctgaggcccacgg

SEQ ID NO: 31089 - DNA, 20 bp, synthetic construct
  source 1..20: mol_type = other DNA
ggtcggcaagaggtgagcac

SEQ ID NO: 31090 - DNA, 20 bp, synthetic construct
  source 1..20: mol_type = other DNA
ctcatcagccaagacaaggc

SEQ ID NO: 31091 - DNA, 20 bp, synthetic construct
  source 1..20: mol_type = other DNA
gcacaaagttcttctcctcc

SEQ ID NO: 31092 - DNA, 20 bp, synthetic construct
  source 1..20: mol_type = other DNA
ctagaaaaggagaggcgagg

SEQ ID NO: 31093 - DNA, 20 bp, synthetic construct
  source 1..20: mol_type = other DNA
gcccttccaccttgctggcc

SEQ ID NO: 31094 - DNA, 20 bp, synthetic construct
  source 1..20: mol_type = other DNA
tgttggggcaggcctccttc

SEQ ID NO: 31095 - DNA, 20 bp, synthetic construct
  source 1..20: mol_type = other DNA
cgtgtcaaacttggtgccct

SEQ ID NO: 31096 - DNA, 20 bp, synthetic construct
  source 1..20: mol_type = other DNA
ctggtcatggagatggctgg

SEQ ID NO: 31097 - DNA, 20 bp, synthetic construct
  source 1..20: mol_type = other DNA
cagcctggcaggggaaggga

SEQ ID NO: 31098 - DNA, 20 bp, synthetic construct
  source 1..20: mol_type = other DNA
ggcctcagcctggcagggga

SEQ ID NO: 31099 - DNA, 20 bp, synthetic construct
  source 1..20: mol_type = other DNA
gcgccagtgcctgcgctcgc

SEQ ID NO: 31100 - DNA, 20 bp, synthetic construct
  source 1..20: mol_type = other DNA
gctcatctactgcctgaagg

SEQ ID NO: 31101 - DNA, 20 bp, synthetic construct
  source 1..20: mol_type = other DNA
ttcttgtccttgagctcctc

SEQ ID NO: 31102 - DNA, 20 bp, synthetic construct
  source 1..20: mol_type = other DNA
gggcgatcctcccacctgtg

SEQ ID NO: 31103 - DNA, 20 bp, synthetic construct
  source 1..20: mol_type = other DNA
ggggcgatcctcccacctgt

SEQ ID NO: 31104 - DNA, 20 bp, synthetic construct
  source 1..20: mol_type = other DNA
ctttggcctctccaaagcac

SEQ ID NO: 31105 - DNA, 20 bp, synthetic construct
  source 1..20: mol_type = other DNA
gacggcaagttcctgtatgt

SEQ ID NO: 31106 - DNA, 20 bp, synthetic construct
  source 1..20: mol_type = other DNA
ggcaggtgcgccgcggggtc

SEQ ID NO: 31107 - DNA, 20 bp, synthetic construct
  source 1..20: mol_type = other DNA
atctacaagtgagtgccagt

SEQ ID NO: 31108 - DNA, 20 bp, synthetic construct
  source 1..20: mol_type = other DNA
cctcacgcgtcaggctgctg

SEQ ID NO: 31109 - DNA, 20 bp, synthetic construct
  source 1..20: mol_type = other DNA
cctggatgcgaagacaggaa

SEQ ID NO: 31110 - DNA, 20 bp, synthetic construct
  source 1..20: mol_type = other DNA
ggctcgcatgcgctgctcca

SEQ ID NO: 31111 - DNA, 20 bp, synthetic construct
  source 1..20: mol_type = other DNA
atcctcccacctgtggggcg

SEQ ID NO: 31112 - DNA, 20 bp, synthetic construct
  source 1..20: mol_type = other DNA
ggagcaggccatcatcagcc

SEQ ID NO: 31113 - DNA, 20 bp, synthetic construct
  source 1..20: mol_type = other DNA
tggacaacccctacatcgtg

SEQ ID NO: 31114 - DNA, 20 bp, synthetic construct
  source 1..20: mol_type = other DNA
ctccaccagctgcagggagc

SEQ ID NO: 31115 - DNA, 20 bp, synthetic construct
  source 1..20: mol_type = other DNA
ggaggtgagagcgcagcctg

SEQ ID NO: 31116 - DNA, 20 bp, synthetic construct
  source 1..20: mol_type = other DNA
cacatacaggaacttgccgt

SEQ ID NO: 31117 - DNA, 20 bp, synthetic construct
  source 1..20: mol_type = other DNA
cacccctgagccaggtgagc

SEQ ID NO: 31118 - DNA, 20 bp, synthetic construct
  source 1..20: mol_type = other DNA
cgagatgctgccgtagaaga

SEQ ID NO: 31119 - DNA, 20 bp, synthetic construct
  source 1..20: mol_type = other DNA
gccagcaacgcctcaggtga

SEQ ID NO: 31120 - DNA, 20 bp, synthetic construct
  source 1..20: mol_type = other DNA
cagatactccaccagctgca

SEQ ID NO: 31121 - DNA, 20 bp, synthetic construct
  source 1..20: mol_type = other DNA
catcagccaggccccgcagg

SEQ ID NO: 31122 - DNA, 20 bp, synthetic construct
  source 1..20: mol_type = other DNA
ctgctgcaccaggtgtccat

SEQ ID NO: 31123 - DNA, 20 bp, synthetic construct
  source 1..20: mol_type = other DNA
ccgcaggtttcgggaggccc

SEQ ID NO: 31124 - DNA, 20 bp, synthetic construct
  source 1..20: mol_type = other DNA
gccggttgcacggcttgcgc

SEQ ID NO: 31125 - DNA, 20 bp, synthetic construct
  source 1..20: mol_type = other DNA
cgagcgcaaactttactctg

SEQ ID NO: 31126 - DNA, 20 bp, synthetic construct
  source 1..20: mol_type = other DNA
ggccatcaaggtgctgaagc

SEQ ID NO: 31127 - DNA, 20 bp, synthetic construct
  source 1..20: mol_type = other DNA
cgacggcaagttcctgtatg

SEQ ID NO: 31128 - DNA, 20 bp, synthetic construct
  source 1..20: mol_type = other DNA
cggcacccagtgctttggag

SEQ ID NO: 31129 - DNA, 20 bp, synthetic construct
  source 1..20: mol_type = other DNA
ctgctccacggtcaggaagt

SEQ ID NO: 31130 - DNA, 20 bp, synthetic construct
  source 1..20: mol_type = other DNA
ctcatagctgacattgaact

SEQ ID NO: 31131 - DNA, 20 bp, synthetic construct
  source 1..20: mol_type = other DNA
ccgcggcctcagcctggcag

SEQ ID NO: 31132 - DNA, 20 bp, synthetic construct
  source 1..20: mol_type = other DNA
caatgagccgcacgatgtag

SEQ ID NO: 31133 - DNA, 20 bp, synthetic construct
  source 1..20: mol_type = other DNA
gcatgcgctgctccacggtc

SEQ ID NO: 31134 - DNA, 20 bp, synthetic construct
  source 1..20: mol_type = other DNA
gaactttgtgcaccgtgacc

SEQ ID NO: 31135 - DNA, 20 bp, synthetic construct
  source 1..20: mol_type = other DNA
catcgagcagggcaagcgga

SEQ ID NO: 31136 - DNA, 20 bp, synthetic construct
  source 1..20: mol_type = other DNA
gctggcgctcgatgggaaag

SEQ ID NO: 31137 - DNA, 20 bp, synthetic construct
  source 1..20: mol_type = other DNA
ggagaagctcattgctacga

SEQ ID NO: 31138 - DNA, 20 bp, synthetic construct
  source 1..20: mol_type = other DNA
ctcatgagtgcgtacagttc

SEQ ID NO: 31139 - DNA, 20 bp, synthetic construct
  source 1..20: mol_type = other DNA
gccatcaaggtgctgaagca

SEQ ID NO: 31140 - DNA, 20 bp, synthetic construct
  source 1..20: mol_type = other DNA
cgggccgctgcacaagttcc

SEQ ID NO: 31141 - DNA, 20 bp, synthetic construct
  source 1..20: mol_type = other DNA
gcgcacgtagtcacgcacca

SEQ ID NO: 31142 - DNA, 20 bp, synthetic construct
  source 1..20: mol_type = other DNA
cttacctggggacgtacagg

SEQ ID NO: 31143 - DNA, 20 bp, synthetic construct
  source 1..20: mol_type = other DNA
ctttgtgcaccgtgacctgg

SEQ ID NO: 31144 - DNA, 20 bp, synthetic construct
  source 1..20: mol_type = other DNA
ctcatacacgctcgtgtcca

SEQ ID NO: 31145 - DNA, 20 bp, synthetic construct
  source 1..20: mol_type = other DNA
cccatcgagcgccagctcaa

SEQ ID NO: 31146 - DNA, 20 bp, synthetic construct
  source 1..20: mol_type = other DNA
gcgccagacgtggaagctgg

SEQ ID NO: 31147 - DNA, 20 bp, synthetic construct
  source 1..20: mol_type = other DNA
ggcacctacgccattgccgg

SEQ ID NO: 31148 - DNA, 20 bp, synthetic construct
  source 1..20: mol_type = other DNA
agccttctgtgtgctgcctg

SEQ ID NO: 31149 - DNA, 20 bp, synthetic construct
  source 1..20: mol_type = other DNA
tgtcttggctgatgaggtag

SEQ ID NO: 31150 - DNA, 20 bp, synthetic construct
  source 1..20: mol_type = other DNA
cgcagcgatgtctggagcta

SEQ ID NO: 31151 - DNA, 20 bp, synthetic construct
  source 1..20: mol_type = other DNA
cgtgcgccagacgtggaagc

SEQ ID NO: 31152 - DNA, 20 bp, synthetic construct
  source 1..20: mol_type = other DNA
cagcagcctgacgcgtgagg

SEQ ID NO: 31153 - DNA, 20 bp, synthetic construct
  source 1..20: mol_type = other DNA
tgcgcatgcggtacacgccc

SEQ ID NO: 31154 - DNA, 20 bp, synthetic construct
  source 1..20: mol_type = other DNA
gctgctgcaccaggtgtcca

SEQ ID NO: 31155 - DNA, 20 bp, synthetic construct
  source 1..20: mol_type = other DNA
ccacttacctggggacgtac

SEQ ID NO: 31156 - DNA, 20 bp, synthetic construct
  source 1..20: mol_type = other DNA
gccaatgagccgcacgatgt

SEQ ID NO: 31157 - DNA, 20 bp, synthetic construct
  source 1..20: mol_type = other DNA
gctccagacatcgctgcggc

SEQ ID NO: 31158 - DNA, 20 bp, synthetic construct
  source 1..20: mol_type = other DNA
gatgaaagggccggaggtca

SEQ ID NO: 31159 - DNA, 20 bp, synthetic construct
  source 1..20: mol_type = other DNA
gcacggcttgcgcaggttgc

SEQ ID NO: 31160 - DNA, 20 bp, synthetic construct
  source 1..20: mol_type = other DNA
cctcatgctggtcatggaga

SEQ ID NO: 31161 - DNA, 20 bp, synthetic construct
  source 1..20: mol_type = other DNA
ctacagcctggccagcaagg

SEQ ID NO: 31162 - DNA, 20 bp, synthetic construct
  source 1..20: mol_type = other DNA
ccgccatgcccgccagcttc

SEQ ID NO: 31163 - DNA, 20 bp, synthetic construct
  source 1..20: mol_type = other DNA
atctgaagctgaaggcggac

SEQ ID NO: 31164 - DNA, 20 bp, synthetic construct
  source 1..20: mol_type = other DNA
ctctgaggctaaaggccaca

SEQ ID NO: 31165 - DNA, 20 bp, synthetic construct
  source 1..20: mol_type = other DNA
gcctggccagcaaggtggaa

SEQ ID NO: 31166 - DNA, 20 bp, synthetic construct
  source 1..20: mol_type = other DNA
aatgagcttctccacctgcg

SEQ ID NO: 31167 - DNA, 20 bp, synthetic construct
  source 1..20: mol_type = other DNA
cgggctcatctactgcctga

SEQ ID NO: 31168 - DNA, 20 bp, synthetic construct
  source 1..20: mol_type = other DNA
cagggaagtggccgctcaag

SEQ ID NO: 31169 - DNA, 20 bp, synthetic construct
  source 1..20: mol_type = other DNA
tctactcgcgcgaccccgac

SEQ ID NO: 31170 - DNA, 20 bp, synthetic construct
  source 1..20: mol_type = other DNA
agtacttgcccgccttgtct

SEQ ID NO: 31171 - DNA, 20 bp, synthetic construct
  source 1..20: mol_type = other DNA
cgccagcttcaggtgctcct

SEQ ID NO: 31172 - DNA, 20 bp, synthetic construct
  source 1..20: mol_type = other DNA
acgccctgtccctcatctat

SEQ ID NO: 31173 - DNA, 20 bp, synthetic construct
  source 1..20: mol_type = other DNA
cctggggtggcggggaaggc

SEQ ID NO: 31174 - DNA, 20 bp, synthetic construct
  source 1..20: mol_type = other DNA
tagaactcgcagagctctgc

SEQ ID NO: 31175 - DNA, 20 bp, synthetic construct
  source 1..20: mol_type = other DNA
ggcaagaggtgagcaccggg

SEQ ID NO: 31176 - DNA, 20 bp, synthetic construct
  source 1..20: mol_type = other DNA
tgctggtcatggagatggct

SEQ ID NO: 31177 - DNA, 20 bp, synthetic construct
  source 1..20: mol_type = other DNA
cggggcgatcctcccacctg

SEQ ID NO: 31178 - DNA, 20 bp, synthetic construct
  source 1..20: mol_type = other DNA
caagttcaatgtcagctatg

SEQ ID NO: 31179 - DNA, 20 bp, synthetic construct
  source 1..20: mol_type = other DNA
ggcgcagatcatgcaccagc

SEQ ID NO: 31180 - DNA, 20 bp, synthetic construct
  source 1..20: mol_type = other DNA
ctggatgcgaagacaggaaa

SEQ ID NO: 31181 - DNA, 20 bp, synthetic construct
  source 1..20: mol_type = other DNA
gttcaatgtcagctatgagg

SEQ ID NO: 31182 - DNA, 20 bp, synthetic construct
  source 1..20: mol_type = other DNA
gccctagaaaaggagaggcg

SEQ ID NO: 31183 - DNA, 20 bp, synthetic construct
  source 1..20: mol_type = other DNA
tgccaggctgaggccgcgga

SEQ ID NO: 31184 - DNA, 20 bp, synthetic construct
  source 1..20: mol_type = other DNA
cggggtctggcatcgcccct

SEQ ID NO: 31185 - DNA, 20 bp, synthetic construct
  source 1..20: mol_type = other DNA
catagccgcccagcgagcgc

SEQ ID NO: 31186 - DNA, 20 bp, synthetic construct
  source 1..20: mol_type = other DNA
gatctacaagtgagtgccag

SEQ ID NO: 31187 - DNA, 20 bp, synthetic construct
  source 1..20: mol_type = other DNA
caatgagcttctccacctgc

SEQ ID NO: 31188 - DNA, 20 bp, synthetic construct
  source 1..20: mol_type = other DNA
gggtgtatccatctgagttg

SEQ ID NO: 31189 - DNA, 20 bp, synthetic construct
  source 1..20: mol_type = other DNA
caagtttgacacgctctggc

SEQ ID NO: 31190 - DNA, 20 bp, synthetic construct
  source 1..20: mol_type = other DNA
catgaccagcatgagggcct

SEQ ID NO: 31191 - DNA, 20 bp, synthetic construct
  source 1..20: mol_type = other DNA
gcggccacttccctgctgag

SEQ ID NO: 31192 - DNA, 20 bp, synthetic construct
  source 1..20: mol_type = other DNA
atgagtcaacgtggatgggt

SEQ ID NO: 31193 - DNA, 20 bp, synthetic construct
  source 1..20: mol_type = other DNA
gcggggtctggcatcgcccc

SEQ ID NO: 31194 - DNA, 20 bp, synthetic construct
  source 1..20: mol_type = other DNA
aactttggctcagtgcgcca

SEQ ID NO: 31195 - DNA, 20 bp, synthetic construct
  source 1..20: mol_type = other DNA
cagtgcctgcgctcgctggg

SEQ ID NO: 31196 - DNA, 20 bp, synthetic construct
  source 1..20: mol_type = other DNA
cctcaggtgacggcagcagg

SEQ ID NO: 31197 - DNA, 20 bp, synthetic construct
  source 1..20: mol_type = other DNA
caaggtgctgaagcagggca

SEQ ID NO: 31198 - DNA, 20 bp, synthetic construct
  source 1..20: mol_type = other DNA
tacagtgtagtagctgtcgt

SEQ ID NO: 31199 - DNA, 20 bp, synthetic construct
  source 1..20: mol_type = other DNA
caagtgagtgccagtgggga

SEQ ID NO: 31200 - DNA, 20 bp, synthetic construct
  source 1..20: mol_type = other DNA
ctgctgagcgggcctgggga

SEQ ID NO: 31201 - DNA, 20 bp, synthetic construct
  source 1..20: mol_type = other DNA
ggtggagtatctgaagctga

SEQ ID NO: 31202 - DNA, 20 bp, synthetic construct
  source 1..20: mol_type = other DNA
cggcccacgagcggatgccc

SEQ ID NO: 31203 - DNA, 20 bp, synthetic construct
  source 1..20: mol_type = other DNA
cagcgatgtctggagctatg

SEQ ID NO: 31204 - DNA, 20 bp, synthetic construct
  source 1..20: mol_type = other DNA
cgaaacctgcgggttcacag

SEQ ID NO: 31205 - DNA, 20 bp, synthetic construct
  source 1..20: mol_type = other DNA
cctcatcagccaagacaagg

SEQ ID NO: 31206 - DNA, 20 bp, synthetic construct
  source 1..20: mol_type = other DNA
acaagtgagtgccagtgggg

SEQ ID NO: 31207 - DNA, 20 bp, synthetic construct
  source 1..20: mol_type = other DNA
gcagctctgaggcccacggt

SEQ ID NO: 31208 - DNA, 20 bp, synthetic construct
  source 1..20: mol_type = other DNA
tgaggaggttatcgcgcttc

SEQ ID NO: 31209 - DNA, 20 bp, synthetic construct
  source 1..20: mol_type = other DNA
catcatcagccaggccccgc

SEQ ID NO: 31210 - DNA, 20 bp, synthetic construct
  source 1..20: mol_type = other DNA
tcacatgagtcaacgtggat

SEQ ID NO: 31211 - DNA, 20 bp, synthetic construct
  source 1..20: mol_type = other DNA
gcagatcgacgtggccatca

SEQ ID NO: 31212 - DNA, 20 bp, synthetic construct
  source 1..20: mol_type = other DNA
cctgagctcccgctgcccag

SEQ ID NO: 31213 - DNA, 20 bp, synthetic construct
  source 1..20: mol_type = other DNA
gctgaagcagggcacggaga

SEQ ID NO: 31214 - DNA, 20 bp, synthetic construct
  source 1..20: mol_type = other DNA
gaacttggctgcggcaactt

SEQ ID NO: 31215 - DNA, 20 bp, synthetic construct
  source 1..20: mol_type = other DNA
gcctcgccctagaaaaggag

SEQ ID NO: 31216 - DNA, 20 bp, synthetic construct
  source 1..20: mol_type = other DNA
ccagggcctcgccctagaaa

SEQ ID NO: 31217 - DNA, 20 bp, synthetic construct
  source 1..20: mol_type = other DNA
cacggaagagatgatgcgcg

SEQ ID NO: 31218 - DNA, 20 bp, synthetic construct
  source 1..20: mol_type = other DNA
tcgggtgcgtaccacttgag

SEQ ID NO: 31219 - DNA, 20 bp, synthetic construct
  source 1..20: mol_type = other DNA
tgagcagaagatgaaagggc

SEQ ID NO: 31220 - DNA, 20 bp, synthetic construct
  source 1..20: mol_type = other DNA
ccaactcacatgagtcaacg

SEQ ID NO: 31221 - DNA, 20 bp, synthetic construct
  source 1..20: mol_type = other DNA
cttcaggtgctcctcggcct

SEQ ID NO: 31222 - DNA, 20 bp, synthetic construct
  source 1..20: mol_type = other DNA
gtgctcacctcttgccgacc

SEQ ID NO: 31223 - DNA, 20 bp, synthetic construct
  source 1..20: mol_type = other DNA
ccatctccatgaccagcatg

SEQ ID NO: 31224 - DNA, 20 bp, synthetic construct
  source 1..20: mol_type = other DNA
cttgtagggcttctggccgt

SEQ ID NO: 31225 - DNA, 20 bp, synthetic construct
  source 1..20: mol_type = other DNA
ctggaggtgagagcgcagcc

SEQ ID NO: 31226 - DNA, 20 bp, synthetic construct
  source 1..20: mol_type = other DNA
ctgaggccgcggaaggagca

SEQ ID NO: 31227 - DNA, 20 bp, synthetic construct
  source 1..20: mol_type = other DNA
ctgcccgctcacctggctca

SEQ ID NO: 31228 - DNA, 20 bp, synthetic construct
  source 1..20: mol_type = other DNA
ccgcttgccctgctcgatga

SEQ ID NO: 31229 - DNA, 20 bp, synthetic construct
  source 1..20: mol_type = other DNA
gctccacggtcaggaagtcg

SEQ ID NO: 31230 - DNA, 20 bp, synthetic construct
  source 1..20: mol_type = other DNA
cttcctgcccgacccggcca

SEQ ID NO: 31231 - DNA, 20 bp, synthetic construct
  source 1..20: mol_type = other DNA
ttcatcttctgctcaagccg

SEQ ID NO: 31232 - DNA, 20 bp, synthetic construct
  source 1..20: mol_type = other DNA
cttcccatagatgagggaca

SEQ ID NO: 31233 - DNA, 20 bp, synthetic construct
  source 1..20: mol_type = other DNA
tacgccctgtccctcatcta

SEQ ID NO: 31234 - DNA, 20 bp, synthetic construct
  source 1..20: mol_type = other DNA
atgagtgcgtacagttcggg

SEQ ID NO: 31235 - DNA, 20 bp, synthetic construct
  source 1..20: mol_type = other DNA
gctggtcatggagatggctg

SEQ ID NO: 31236 - DNA, 20 bp, synthetic construct
  source 1..20: mol_type = other DNA
cgcaggtttcgggaggccca

SEQ ID NO: 31237 - DNA, 20 bp, synthetic construct
  source 1..20: mol_type = other DNA
tactctggggcgcagaccga

SEQ ID NO: 31238 - DNA, 20 bp, synthetic construct
  source 1..20: mol_type = other DNA
tttcatcttctgctcaagcc

SEQ ID NO: 31239 - DNA, 20 bp, synthetic construct
  source 1..20: mol_type = other DNA
gcctcagcctggcaggggaa

SEQ ID NO: 31240 - DNA, 20 bp, synthetic construct
  source 1..20: mol_type = other DNA
aagaagggcaggtgcgccgc

SEQ ID NO: 31241 - DNA, 20 bp, synthetic construct
  source 1..20: mol_type = other DNA
tacaaggcaggcgcgggcag

SEQ ID NO: 31242 - DNA, 20 bp, synthetic construct
  source 1..20: mol_type = other DNA
ccctacatcgtgcggctcat

SEQ ID NO: 31243 - DNA, 20 bp, synthetic construct
  source 1..20: mol_type = other DNA
tcacctccagcttccacgtc

SEQ ID NO: 31244 - DNA, 20 bp, synthetic construct
  source 1..20: mol_type = other DNA
caggttgcagggcagcccgt

SEQ ID NO: 31245 - DNA, 20 bp, synthetic construct
  source 1..20: mol_type = other DNA
gtcatggagatggctggggg

SEQ ID NO: 31246 - DNA, 20 bp, synthetic construct
  source 1..20: mol_type = other DNA
gaaacctgcgggttcacaga

SEQ ID NO: 31247 - DNA, 20 bp, synthetic construct
  source 1..20: mol_type = other DNA
catccccgacaggaaggaac

SEQ ID NO: 31248 - DNA, 20 bp, synthetic construct
  source 1..20: mol_type = other DNA
gggcaggcctggcccaccgt

SEQ ID NO: 31249 - DNA, 20 bp, synthetic construct
  source 1..20: mol_type = other DNA
gcgcacctgcccttcttcta

SEQ ID NO: 31250 - DNA, 20 bp, synthetic construct
  source 1..20: mol_type = other DNA
gctcctctgggtcgctgtag

SEQ ID NO: 31251 - DNA, 20 bp, synthetic construct
  source 1..20: mol_type = other DNA
actcatgagtgcgtacagtt

SEQ ID NO: 31252 - DNA, 20 bp, synthetic construct
  source 1..20: mol_type = other DNA
caggtgagcgggcagaggtg

SEQ ID NO: 31253 - DNA, 20 bp, synthetic construct
  source 1..20: mol_type = other DNA
ccgctgcacaagttcctggt

SEQ ID NO: 31254 - DNA, 20 bp, synthetic construct
  source 1..20: mol_type = other DNA
ccaggccgaggccctcatgc

SEQ ID NO: 31255 - DNA, 20 bp, synthetic construct
  source 1..20: mol_type = other DNA
ttgctacgacggcccacgag

SEQ ID NO: 31256 - DNA, 20 bp, synthetic construct
  source 1..20: mol_type = other DNA
agcctggccagcaaggtgga

SEQ ID NO: 31257 - DNA, 20 bp, synthetic construct
  source 1..20: mol_type = other DNA
ctcacatgagtcaacgtgga

SEQ ID NO: 31258 - DNA, 20 bp, synthetic construct
  source 1..20: mol_type = other DNA
acttcatccccatggacacc

SEQ ID NO: 31259 - DNA, 20 bp, synthetic construct
  source 1..20: mol_type = other DNA
agaagggcaggtgcgccgcg

SEQ ID NO: 31260 - DNA, 20 bp, synthetic construct
  source 1..20: mol_type = other DNA
tgctgcaccaggtgtccatg

SEQ ID NO: 31261 - DNA, 20 bp, synthetic construct
  source 1..20: mol_type = other DNA
tttgacacgctctggcaggt

SEQ ID NO: 31262 - DNA, 20 bp, synthetic construct
  source 1..20: mol_type = other DNA
ttctactcgcgcgaccccga

SEQ ID NO: 31263 - DNA, 20 bp, synthetic construct
  source 1..20: mol_type = other DNA
agcagtgccagcaacgcctc

SEQ ID NO: 31264 - DNA, 20 bp, synthetic construct
  source 1..20: mol_type = other DNA
gaagccctacaaggcaggcg

SEQ ID NO: 31265 - DNA, 20 bp, synthetic construct
  source 1..20: mol_type = other DNA
tgcccgctcacctggctcag

SEQ ID NO: 31266 - DNA, 20 bp, synthetic construct
  source 1..20: mol_type = other DNA
gtccatggggatgaagtacc

SEQ ID NO: 31267 - DNA, 20 bp, synthetic construct
  source 1..20: mol_type = other DNA
tatgtgccctgctccttccg

SEQ ID NO: 31268 - DNA, 20 bp, synthetic construct
  source 1..20: mol_type = other DNA
ttccctgctgagcgggcctg

SEQ ID NO: 31269 - DNA, 20 bp, synthetic construct
  source 1..20: mol_type = other DNA
cagcgacccagaggagctca

SEQ ID NO: 31270 - DNA, 20 bp, synthetic construct
  source 1..20: mol_type = other DNA
tgctgagcgggcctggggag

SEQ ID NO: 31271 - DNA, 20 bp, synthetic construct
  source 1..20: mol_type = other DNA
acaccgtcttcccatagatg

SEQ ID NO: 31272 - DNA, 20 bp, synthetic construct
  source 1..20: mol_type = other DNA
ccgagcgcaaactttactct

SEQ ID NO: 31273 - DNA, 20 bp, synthetic construct
  source 1..20: mol_type = other DNA
cccagagtaaagtttgcgct

SEQ ID NO: 31274 - DNA, 20 bp, synthetic construct
  source 1..20: mol_type = other DNA
gggcaagtactgcattcccg

SEQ ID NO: 31275 - DNA, 20 bp, synthetic construct
  source 1..20: mol_type = other DNA
tacagttcgggtggacactc

SEQ ID NO: 31276 - DNA, 20 bp, synthetic construct
  source 1..20: mol_type = other DNA
tatttcctggatgcgaagac

SEQ ID NO: 31277 - DNA, 20 bp, synthetic construct
  source 1..20: mol_type = other DNA
tgctggggcattcaggtaag

SEQ ID NO: 31278 - DNA, 20 bp, synthetic construct
  source 1..20: mol_type = other DNA
ccgttgagctggcgctcgat

SEQ ID NO: 31279 - DNA, 20 bp, synthetic construct
  source 1..20: mol_type = other DNA
tacgccaagatcagcgactt

SEQ ID NO: 31280 - DNA, 20 bp, synthetic construct
  source 1..20: mol_type = other DNA
tgctgccgtagaagaagggc

SEQ ID NO: 31281 - DNA, 20 bp, synthetic construct
  source 1..20: mol_type = other DNA
ctcaggtgacggcagcaggc

SEQ ID NO: 31282 - DNA, 20 bp, synthetic construct
  source 1..20: mol_type = other DNA
tatctgaagctgaaggcgga

SEQ ID NO: 31283 - DNA, 20 bp, synthetic construct
  source 1..20: mol_type = other DNA
tgctccacggtcaggaagtc

SEQ ID NO: 31284 - DNA, 20 bp, synthetic construct
  source 1..20: mol_type = other DNA
gcagaagatgaaagggccgg

SEQ ID NO: 31285 - DNA, 20 bp, synthetic construct
  source 1..20: mol_type = other DNA
cacggcttgcgcaggttgca

SEQ ID NO: 31286 - DNA, 20 bp, synthetic construct
  source 1..20: mol_type = other DNA
agcgcaggcactggcgcagc

SEQ ID NO: 31287 - DNA, 20 bp, synthetic construct
  source 1..20: mol_type = other DNA
tcttgtccttgagctcctct

SEQ ID NO: 31288 - DNA, 20 bp, synthetic construct
  source 1..20: mol_type = other DNA
ggcgctcgatgggaaagtgg

SEQ ID NO: 31289 - DNA, 20 bp, synthetic construct
  source 1..20: mol_type = other DNA
tctacaagtgagtgccagtg

SEQ ID NO: 31290 - DNA, 20 bp, synthetic construct
  source 1..20: mol_type = other DNA
gggcttctggccgtaggaca

SEQ ID NO: 31291 - DNA, 20 bp, synthetic construct
  source 1..20: mol_type = other DNA
gagctatggggtcaccatgt

SEQ ID NO: 31292 - DNA, 20 bp, synthetic construct
  source 1..20: mol_type = other DNA
gatctgcttcctgcccgacc

SEQ ID NO: 31293 - DNA, 20 bp, synthetic construct
  source 1..20: mol_type = other DNA
cgatgtaggggttgtccagc

SEQ ID NO: 31294 - DNA, 20 bp, synthetic construct
  source 1..20: mol_type = other DNA
ctgccagagcgtgtcaaact

SEQ ID NO: 31295 - DNA, 20 bp, synthetic construct
  source 1..20: mol_type = other DNA
tcctcccacctgtggggcgt

SEQ ID NO: 31296 - DNA, 20 bp, synthetic construct
  source 1..20: mol_type = other DNA
gaagaagggcaggtgcgccg

SEQ ID NO: 31297 - DNA, 20 bp, synthetic construct
  source 1..20: mol_type = other DNA
cgtcaggctgctgtggtacc

SEQ ID NO: 31298 - DNA, 20 bp, synthetic construct
  source 1..20: mol_type = other DNA
acgcactcatgagtgactgc

SEQ ID NO: 31299 - DNA, 20 bp, synthetic construct
  source 1..20: mol_type = other DNA
ggcggcccgcaacgtcctgc

SEQ ID NO: 31300 - DNA, 20 bp, synthetic construct
  source 1..20: mol_type = other DNA
ctatggggtcaccatgtggg

SEQ ID NO: 31301 - DNA, 20 bp, synthetic construct
  source 1..20: mol_type = other DNA
cctgcgggttcacagagggt

SEQ ID NO: 31302 - DNA, 20 bp, synthetic construct
  source 1..20: mol_type = other DNA
gcctggtgtctgctgagctc

SEQ ID NO: 31303 - DNA, 20 bp, synthetic construct
  source 1..20: mol_type = other DNA
ctacctcatcagccaagaca

SEQ ID NO: 31304 - DNA, 20 bp, synthetic construct
  source 1..20: mol_type = other DNA
ggagctatggggtcaccatg

SEQ ID NO: 31305 - DNA, 20 bp, synthetic construct
  source 1..20: mol_type = other DNA
gagatgctgccgtagaagaa

SEQ ID NO: 31306 - DNA, 20 bp, synthetic construct
  source 1..20: mol_type = other DNA
ttcctgcccgacccggccac

SEQ ID NO: 31307 - DNA, 20 bp, synthetic construct
  source 1..20: mol_type = other DNA
caagccgtgcaaccggccgt

SEQ ID NO: 31308 - DNA, 20 bp, synthetic construct
  source 1..20: mol_type = other DNA
atgtgggaggccttgtccta

SEQ ID NO: 31309 - DNA, 20 bp, synthetic construct
  source 1..20: mol_type = other DNA
gcttctccacctgcggggcc

SEQ ID NO: 31310 - DNA, 20 bp, synthetic construct
  source 1..20: mol_type = other DNA
gccaggtgagcgggcagagg

SEQ ID NO: 31311 - DNA, 20 bp, synthetic construct
  source 1..20: mol_type = other DNA
acaagttcctggtcggcaag

SEQ ID NO: 31312 - DNA, 20 bp, synthetic construct
  source 1..20: mol_type = other DNA
tcatacacgctcgtgtccat

SEQ ID NO: 31313 - DNA, 20 bp, synthetic construct
  source 1..20: mol_type = other DNA
ccttcatcgagcagggcaag

SEQ ID NO: 31314 - DNA, 20 bp, synthetic construct
  source 1..20: mol_type = other DNA
gtgtcaaacttggtgccctc

SEQ ID NO: 31315 - DNA, 20 bp, synthetic construct
  source 1..20: mol_type = other DNA
tcgccccgacttcctgaccg

SEQ ID NO: 31316 - DNA, 20 bp, synthetic construct
  source 1..20: mol_type = other DNA
ggccagaagccctacaaggc

SEQ ID NO: 31317 - DNA, 20 bp, synthetic construct
  source 1..20: mol_type = other DNA
ccaatgagccgcacgatgta

SEQ ID NO: 31318 - DNA, 20 bp, synthetic construct
  source 1..20: mol_type = other DNA
gcaagaggtgagcaccgggt

SEQ ID NO: 31319 - DNA, 20 bp, synthetic construct
  source 1..20: mol_type = other DNA
gaggccaaagtcgctgatct

SEQ ID NO: 31320 - DNA, 20 bp, synthetic construct
  source 1..20: mol_type = other DNA
ggtaccagggcatccgctcg

SEQ ID NO: 31321 - DNA, 20 bp, synthetic construct
  source 1..20: mol_type = other DNA
ggcaagtactgcattcccga

SEQ ID NO: 31322 - DNA, 20 bp, synthetic construct
  source 1..20: mol_type = other DNA
tcaggtaagcggctgtcctc

SEQ ID NO: 31323 - DNA, 20 bp, synthetic construct
  source 1..20: mol_type = other DNA
catgagtcaacgtggatggg

SEQ ID NO: 31324 - DNA, 20 bp, synthetic construct
  source 1..20: mol_type = other DNA
gtaggacaaggcctcccaca

SEQ ID NO: 31325 - DNA, 20 bp, synthetic construct
  source 1..20: mol_type = other DNA
ccacagcagcctgacgcgtg

SEQ ID NO: 31326 - DNA, 20 bp, synthetic construct
  source 1..20: mol_type = other DNA
tcagatactccaccagctgc

SEQ ID NO: 31327 - DNA, 20 bp, synthetic construct
  source 1..20: mol_type = other DNA
cgtagtgccggttaaccagc

SEQ ID NO: 31328 - DNA, 20 bp, synthetic construct
  source 1..20: mol_type = other DNA
tccacagtgcgctttgccgc

SEQ ID NO: 31329 - DNA, 20 bp, synthetic construct
  source 1..20: mol_type = other DNA
cggccacttccctgctgagc

SEQ ID NO: 31330 - DNA, 20 bp, synthetic construct
  source 1..20: mol_type = other DNA
cgggcaggcctggcccaccg

SEQ ID NO: 31331 - DNA, 20 bp, synthetic construct
  source 1..20: mol_type = other DNA
ggagtatctgaagctgaagg

SEQ ID NO: 31332 - DNA, 20 bp, synthetic construct
  source 1..20: mol_type = other DNA
ctttcatcttctgctcaagc

SEQ ID NO: 31333 - DNA, 20 bp, synthetic construct
  source 1..20: mol_type = other DNA
ggtgtatccatctgagttga

SEQ ID NO: 31334 - DNA, 20 bp, synthetic construct
  source 1..20: mol_type = other DNA
ccagcatgagggcctcggcc

SEQ ID NO: 31335 - DNA, 20 bp, synthetic construct
  source 1..20: mol_type = other DNA
aagccctacaaggcaggcgc

SEQ ID NO: 31336 - DNA, 20 bp, synthetic construct
  source 1..20: mol_type = other DNA
cgctgcggctggagaacttg

SEQ ID NO: 31337 - DNA, 20 bp, synthetic construct
  source 1..20: mol_type = other DNA
gtccctcatctatgggaaga

SEQ ID NO: 31338 - DNA, 20 bp, synthetic construct
  source 1..20: mol_type = other DNA
gctggccaggctgtagtaac

SEQ ID NO: 31339 - DNA, 20 bp, synthetic construct
  source 1..20: mol_type = other DNA
gtaccagggcatccgctcgt

SEQ ID NO: 31340 - DNA, 20 bp, synthetic construct
  source 1..20: mol_type = other DNA
tctgcccgctcacctggctc

SEQ ID NO: 31341 - DNA, 20 bp, synthetic construct
  source 1..20: mol_type = other DNA
ctgcccgacccggccacggg

SEQ ID NO: 31342 - DNA, 20 bp, synthetic construct
  source 1..20: mol_type = other DNA
gcaggacgttgcgggccgcc

SEQ ID NO: 31343 - DNA, 20 bp, synthetic construct
  source 1..20: mol_type = other DNA
catggggatgaagtacctgg

SEQ ID NO: 31344 - DNA, 20 bp, synthetic construct
  source 1..20: mol_type = other DNA
ccaggtgagcgggcagaggt

SEQ ID NO: 31345 - DNA, 20 bp, synthetic construct
  source 1..20: mol_type = other DNA
gcaccaagtttgacacgctc

SEQ ID NO: 31346 - DNA, 20 bp, synthetic construct
  source 1..20: mol_type = other DNA
ctacggccagaagccctaca

SEQ ID NO: 31347 - DNA, 20 bp, synthetic construct
  source 1..20: mol_type = other DNA
cgttgcgggccgccaggtca

SEQ ID NO: 31348 - DNA, 20 bp, synthetic construct
  source 1..20: mol_type = other DNA
catagctccagacatcgctg

SEQ ID NO: 31349 - DNA, 20 bp, synthetic construct
  source 1..20: mol_type = other DNA
gctcggcctcctcacgcgtc

SEQ ID NO: 31350 - DNA, 20 bp, synthetic construct
  source 1..20: mol_type = other DNA
cgctgatcttggcgtagtgc

SEQ ID NO: 31351 - DNA, 20 bp, synthetic construct
  source 1..20: mol_type = other DNA
tctctgaggctaaaggccac

SEQ ID NO: 31352 - DNA, 20 bp, synthetic construct
  source 1..20: mol_type = other DNA
gtcaggctgctgtggtacca

SEQ ID NO: 31353 - DNA, 20 bp, synthetic construct
  source 1..20: mol_type = other DNA
gcaatgagcttctccacctg

SEQ ID NO: 31354 - DNA, 20 bp, synthetic construct
  source 1..20: mol_type = other DNA
acgctcgtgtccatgggcat

SEQ ID NO: 31355 - DNA, 20 bp, synthetic construct
  source 1..20: mol_type = other DNA
gttaaccagcaggacgttgc

SEQ ID NO: 31356 - DNA, 20 bp, synthetic construct
  source 1..20: mol_type = other DNA
gtgactacgtgcgccagacg

SEQ ID NO: 31357 - DNA, 20 bp, synthetic construct
  source 1..20: mol_type = other DNA
gttcgggtggacactctggt

SEQ ID NO: 31358 - DNA, 20 bp, synthetic construct
  source 1..20: mol_type = other DNA
gtgtaccgcatgcgcaagta

SEQ ID NO: 31359 - DNA, 20 bp, synthetic construct
  source 1..20: mol_type = other DNA
tcgatgaaggccatgacctc

SEQ ID NO: 31360 - DNA, 20 bp, synthetic construct
  source 1..20: mol_type = other DNA
catctccatgaccagcatga

SEQ ID NO: 31361 - DNA, 20 bp, synthetic construct
  source 1..20: mol_type = other DNA
tcagcctggcaggggaaggg

SEQ ID NO: 31362 - DNA, 20 bp, synthetic construct
  source 1..20: mol_type = other DNA
cctgctgagcgggcctgggg

SEQ ID NO: 31363 - DNA, 20 bp, synthetic construct
  source 1..20: mol_type = other DNA
gctgaggccgcggaaggagc

SEQ ID NO: 31364 - DNA, 20 bp, synthetic construct
  source 1..20: mol_type = other DNA
taggaagtacgagtgtgagt

SEQ ID NO: 31365 - DNA, 20 bp, synthetic construct
  source 1..20: mol_type = other DNA
cactcgtacttcctattgac

SEQ ID NO: 31366 - DNA, 20 bp, synthetic construct
  source 1..20: mol_type = other DNA
tgcagtcatggcgcaggaag

SEQ ID NO: 31367 - DNA, 20 bp, synthetic construct
  source 1..20: mol_type = other DNA
cagatgtccagtgagtatag

SEQ ID NO: 31368 - DNA, 20 bp, synthetic construct
  source 1..20: mol_type = other DNA
cttctttaggttacacgcat

SEQ ID NO: 31369 - DNA, 20 bp, synthetic construct
  source 1..20: mol_type = other DNA
ttctttaggttacacgcatg

SEQ ID NO: 31370 - DNA, 20 bp, synthetic construct
  source 1..20: mol_type = other DNA
acacgcatggggagatactc

SEQ ID NO: 31371 - DNA, 20 bp, synthetic construct
  source 1..20: mol_type = other DNA
gacttctgttccctaaagtt

SEQ ID NO: 31372 - DNA, 20 bp, synthetic construct
  source 1..20: mol_type = other DNA
tgacttctgttccctaaagt

SEQ ID NO: 31373 - DNA, 20 bp, synthetic construct
  source 1..20: mol_type = other DNA
tgaagaacagaaggcgatca

SEQ ID NO: 31374 - DNA, 20 bp, synthetic construct
  source 1..20: mol_type = other DNA
aataacatattcagcaatgc

SEQ ID NO: 31375 - DNA, 20 bp, synthetic construct
  source 1..20: mol_type = other DNA
tgatgaattcttcatacccc

SEQ ID NO: 31376 - DNA, 20 bp, synthetic construct
  source 1..20: mol_type = other DNA
gaagtacgagtgtgagtagg

SEQ ID NO: 31377 - DNA, 20 bp, synthetic construct
  source 1..20: mol_type = other DNA
ttcataccccgggtaagcaa

SEQ ID NO: 31378 - DNA, 20 bp, synthetic construct
  source 1..20: mol_type = other DNA
gctgtatgatccaaatctga

SEQ ID NO: 31379 - DNA, 20 bp, synthetic construct
  source 1..20: mol_type = other DNA
catgacagatactgggacag

SEQ ID NO: 31380 - DNA, 20 bp, synthetic construct
  source 1..20: mol_type = other DNA
tgctgtatgatccaaatctg

SEQ ID NO: 31381 - DNA, 20 bp, synthetic construct
  source 1..20: mol_type = other DNA
acgcaggaagttgtccaggc

SEQ ID NO: 31382 - DNA, 20 bp, synthetic construct
  source 1..20: mol_type = other DNA
ttcctggaagaggaatcaag

SEQ ID NO: 31383 - DNA, 20 bp, synthetic construct
  source 1..20: mol_type = other DNA
tgccagcaggatgccccggc

SEQ ID NO: 31384 - DNA, 20 bp, synthetic construct
  source 1..20: mol_type = other DNA
tcactgccagcaggatgccc

SEQ ID NO: 31385 - DNA, 20 bp, synthetic construct
  source 1..20: mol_type = other DNA
tgtgctggtctgggaggtga

SEQ ID NO: 31386 - DNA, 20 bp, synthetic construct
  source 1..20: mol_type = other DNA
tcacctgtgatgggcacgtc

SEQ ID NO: 31387 - DNA, 20 bp, synthetic construct
  source 1..20: mol_type = other DNA
gcaggatgtgctggtctggg

SEQ ID NO: 31388 - DNA, 20 bp, synthetic construct
  source 1..20: mol_type = other DNA
tgtccaggctgggcccgtgc

SEQ ID NO: 31389 - DNA, 20 bp, synthetic construct
  source 1..20: mol_type = other DNA
tcatctgccacagagcgctg

SEQ ID NO: 31390 - DNA, 20 bp, synthetic construct
  source 1..20: mol_type = other DNA
ccagcacatcctgcgggaac

SEQ ID NO: 31391 - DNA, 20 bp, synthetic construct
  source 1..20: mol_type = other DNA
gcgggactagagggagctga

SEQ ID NO: 31392 - DNA, 20 bp, synthetic construct
  source 1..20: mol_type = other DNA
agaagacctccttgttccca

SEQ ID NO: 31393 - DNA, 20 bp, synthetic construct
  source 1..20: mol_type = other DNA
tcccagaccagcacatcctg

SEQ ID NO: 31394 - DNA, 20 bp, synthetic construct
  source 1..20: mol_type = other DNA
gtttgtgccatcctggagga

SEQ ID NO: 31395 - DNA, 20 bp, synthetic construct
  source 1..20: mol_type = other DNA
tccaaggcgagcggcaggag

SEQ ID NO: 31396 - DNA, 20 bp, synthetic construct
  source 1..20: mol_type = other DNA
tgggtgagctggtgaaacac

SEQ ID NO: 31397 - DNA, 20 bp, synthetic construct
  source 1..20: mol_type = other DNA
cccagaccagcacatcctgc

SEQ ID NO: 31398 - DNA, 20 bp, synthetic construct
  source 1..20: mol_type = other DNA
cggcccagtgggtcatcagg

SEQ ID NO: 31399 - DNA, 20 bp, synthetic construct
  source 1..20: mol_type = other DNA
tctcgaggtggaaaggcagg

SEQ ID NO: 31400 - DNA, 20 bp, synthetic construct
  source 1..20: mol_type = other DNA
acgacgcgtgggtggcaagc

SEQ ID NO: 31401 - DNA, 20 bp, synthetic construct
  source 1..20: mol_type = other DNA
cacgacgcgtgggtggcaag

SEQ ID NO: 31402 - DNA, 20 bp, synthetic construct
  source 1..20: mol_type = other DNA
acacagcttagtatacacgc

SEQ ID NO: 31403 - DNA, 20 bp, synthetic construct
  source 1..20: mol_type = other DNA
agctggcctacgagtctgac

SEQ ID NO: 31404 - DNA, 20 bp, synthetic construct
  source 1..20: mol_type = other DNA
gacacataccgtgacctcca

SEQ ID NO: 31405 - DNA, 20 bp, synthetic construct
  source 1..20: mol_type = other DNA
atgacccactgggccggcac

SEQ ID NO: 31406 - DNA, 20 bp, synthetic construct
  source 1..20: mol_type = other DNA
gccagatgtcggaactttgg

SEQ ID NO: 31407 - DNA, 20 bp, synthetic construct
  source 1..20: mol_type = other DNA
gtcgtgatggtgtgaacacc

SEQ ID NO: 31408 - DNA, 20 bp, synthetic construct
  source 1..20: mol_type = other DNA
ggctgctccttcctccagga

SEQ ID NO: 31409 - DNA, 20 bp, synthetic construct
  source 1..20: mol_type = other DNA
gccgattcttccacccagag

SEQ ID NO: 31410 - DNA, 20 bp, synthetic construct
  source 1..20: mol_type = other DNA
ctcacctgtgatgggcacgt

SEQ ID NO: 31411 - DNA, 20 bp, synthetic construct
  source 1..20: mol_type = other DNA
caaacactgtgatgtctgtg

SEQ ID NO: 31412 - DNA, 20 bp, synthetic construct
  source 1..20: mol_type = other DNA
gaaaccagttcactgccagc

SEQ ID NO: 31413 - DNA, 20 bp, synthetic construct
  source 1..20: mol_type = other DNA
gcagccgtgtccctatggta

SEQ ID NO: 31414 - DNA, 20 bp, synthetic construct
  source 1..20: mol_type = other DNA
ttcacaccatcacgacgcgt

SEQ ID NO: 31415 - DNA, 20 bp, synthetic construct
  source 1..20: mol_type = other DNA
gttcacaccatcacgacgcg

SEQ ID NO: 31416 - DNA, 20 bp, synthetic construct
  source 1..20: mol_type = other DNA
ctcagctccctctagtcccg

SEQ ID NO: 31417 - DNA, 20 bp, synthetic construct
  source 1..20: mol_type = other DNA
ccagtgcagagcccaggggc

SEQ ID NO: 31418 - DNA, 20 bp, synthetic construct
  source 1..20: mol_type = other DNA
cagggggcataaacctgcag

SEQ ID NO: 31419 - DNA, 20 bp, synthetic construct
  source 1..20: mol_type = other DNA
tggtcaacaaaatccacgtc

SEQ ID NO: 31420 - DNA, 20 bp, synthetic construct
  source 1..20: mol_type = other DNA
caggcaccgttttcctcaaa

SEQ ID NO: 31421 - DNA, 20 bp, synthetic construct
  source 1..20: mol_type = other DNA
cccgtaggggcaaaagccga

SEQ ID NO: 31422 - DNA, 20 bp, synthetic construct
  source 1..20: mol_type = other DNA
cagcccggtggcagcggcgg

SEQ ID NO: 31423 - DNA, 20 bp, synthetic construct
  source 1..20: mol_type = other DNA
ccgccaccccaagtacaaga

SEQ ID NO: 31424 - DNA, 20 bp, synthetic construct
  source 1..20: mol_type = other DNA
cacagctccgtcttgtactt

SEQ ID NO: 31425 - DNA, 20 bp, synthetic construct
  source 1..20: mol_type = other DNA
gctaaagctatgctggaggc

SEQ ID NO: 31426 - DNA, 20 bp, synthetic construct
  source 1..20: mol_type = other DNA
gccccatgctaggggcaaag

SEQ ID NO: 31427 - DNA, 20 bp, synthetic construct
  source 1..20: mol_type = other DNA
agtggcagcggggcccgtag

SEQ ID NO: 31428 - DNA, 20 bp, synthetic construct
  source 1..20: mol_type = other DNA
gaagtggcagcggggcccgt

SEQ ID NO: 31429 - DNA, 20 bp, synthetic construct
  source 1..20: mol_type = other DNA
gtggtcggggagccaccccc

SEQ ID NO: 31430 - DNA, 20 bp, synthetic construct
  source 1..20: mol_type = other DNA
gcacagctccgtcttgtact

SEQ ID NO: 31431 - DNA, 20 bp, synthetic construct
  source 1..20: mol_type = other DNA
tgcccacccagaagcagccc

SEQ ID NO: 31432 - DNA, 20 bp, synthetic construct
  source 1..20: mol_type = other DNA
agccgatggtgtggaaggtg

SEQ ID NO: 31433 - DNA, 20 bp, synthetic construct
  source 1..20: mol_type = other DNA
ctggtgggggcttccctcgg

SEQ ID NO: 31434 - DNA, 20 bp, synthetic construct
  source 1..20: mol_type = other DNA
aagtggcagcggggcccgta

SEQ ID NO: 31435 - DNA, 20 bp, synthetic construct
  source 1..20: mol_type = other DNA
tgccgcaccttccacaccat

SEQ ID NO: 31436 - DNA, 20 bp, synthetic construct
  source 1..20: mol_type = other DNA
cagcaaagctaaagctatgc

SEQ ID NO: 31437 - DNA, 20 bp, synthetic construct
  source 1..20: mol_type = other DNA
ttctctgtctgccaaaggga

SEQ ID NO: 31438 - DNA, 20 bp, synthetic construct
  source 1..20: mol_type = other DNA
tgccggcccttcgaggagag

SEQ ID NO: 31439 - DNA, 20 bp, synthetic construct
  source 1..20: mol_type = other DNA
ttggcagacagagaaatccc

SEQ ID NO: 31440 - DNA, 20 bp, synthetic construct
  source 1..20: mol_type = other DNA
gctacaagaccgagctgtgc

SEQ ID NO: 31441 - DNA, 20 bp, synthetic construct
  source 1..20: mol_type = other DNA
tgtagcgcgtggagttgatc

SEQ ID NO: 31442 - DNA, 20 bp, synthetic construct
  source 1..20: mol_type = other DNA
gagtcaggctgcgcagctcg

SEQ ID NO: 31443 - DNA, 20 bp, synthetic construct
  source 1..20: mol_type = other DNA
gtagcgcgtggagttgatct

SEQ ID NO: 31444 - DNA, 20 bp, synthetic construct
  source 1..20: mol_type = other DNA
ggaacaggaggaggcggagg

SEQ ID NO: 31445 - DNA, 20 bp, synthetic construct
  source 1..20: mol_type = other DNA
cttgcctcagtcgtcggaga

SEQ ID NO: 31446 - DNA, 20 bp, synthetic construct
  source 1..20: mol_type = other DNA
ctcagtcgtcggagatggag

SEQ ID NO: 31447 - DNA, 20 bp, synthetic construct
  source 1..20: mol_type = other DNA
tgccgctctcctcgaagggc

SEQ ID NO: 31448 - DNA, 20 bp, synthetic construct
  source 1..20: mol_type = other DNA
gcaggcggcggccagggtcg

SEQ ID NO: 31449 - DNA, 20 bp, synthetic construct
  source 1..20: mol_type = other DNA
atggagaggcggctgaagat

SEQ ID NO: 31450 - DNA, 20 bp, synthetic construct
  source 1..20: mol_type = other DNA
atgaaaggtgcggcacagct

SEQ ID NO: 31451 - DNA, 20 bp, synthetic construct
  source 1..20: mol_type = other DNA
tgccgcacctttcataccat

SEQ ID NO: 31452 - DNA, 20 bp, synthetic construct
  source 1..20: mol_type = other DNA
gaagtggcagcgcggcccat

SEQ ID NO: 31453 - DNA, 20 bp, synthetic construct
  source 1..20: mol_type = other DNA
agtggcagcgcggcccatag

SEQ ID NO: 31454 - DNA, 20 bp, synthetic construct
  source 1..20: mol_type = other DNA
gctcggtcttgtacttcgga

SEQ ID NO: 31455 - DNA, 20 bp, synthetic construct
  source 1..20: mol_type = other DNA
gcggcgccggcggctgcgcg

SEQ ID NO: 31456 - DNA, 20 bp, synthetic construct
  source 1..20: mol_type = other DNA
ggcggctgaagattggcagg

SEQ ID NO: 31457 - DNA, 20 bp, synthetic construct
  source 1..20: mol_type = other DNA
acctgcagcagcagcagaag

SEQ ID NO: 31458 - DNA, 20 bp, synthetic construct
  source 1..20: mol_type = other DNA
cgaggaacaggaggaggcgg

SEQ ID NO: 31459 - DNA, 20 bp, synthetic construct
  source 1..20: mol_type = other DNA
ctcgaagggccggcacagct

SEQ ID NO: 31460 - DNA, 20 bp, synthetic construct
  source 1..20: mol_type = other DNA
cacgtgccgctctcctcgaa

SEQ ID NO: 31461 - DNA, 20 bp, synthetic construct
  source 1..20: mol_type = other DNA
gaaaagtgccagttcgcgca

SEQ ID NO: 31462 - DNA, 20 bp, synthetic construct
  source 1..20: mol_type = other DNA
cacagctcggtcttgtactt

SEQ ID NO: 31463 - DNA, 20 bp, synthetic construct
  source 1..20: mol_type = other DNA
gcagaagccgatggtatgaa

SEQ ID NO: 31464 - DNA, 20 bp, synthetic construct
  source 1..20: mol_type = other DNA
agccgatggtatgaaaggtg

SEQ ID NO: 31465 - DNA, 20 bp, synthetic construct
  source 1..20: mol_type = other DNA
cccataggggcagaagccga

SEQ ID NO: 31466 - DNA, 20 bp, synthetic construct
  source 1..20: mol_type = other DNA
ctgccacttcatccacaacg

SEQ ID NO: 31467 - DNA, 20 bp, synthetic construct
  source 1..20: mol_type = other DNA
tccacaacgcggacgagcgg

SEQ ID NO: 31468 - DNA, 20 bp, synthetic construct
  source 1..20: mol_type = other DNA
cgagctgtgccggcccttcg

SEQ ID NO: 31469 - DNA, 20 bp, synthetic construct
  source 1..20: mol_type = other DNA
gtacggcaccgggggcgccg

SEQ ID NO: 31470 - DNA, 20 bp, synthetic construct
  source 1..20: mol_type = other DNA
gcacctgcagcagcagcaga

SEQ ID NO: 31471 - DNA, 20 bp, synthetic construct
  source 1..20: mol_type = other DNA
aagtggcagcgcggcccata

SEQ ID NO: 31472 - DNA, 20 bp, synthetic construct
  source 1..20: mol_type = other DNA
cagctcggtcttgtagcgcg

SEQ ID NO: 31473 - DNA, 20 bp, synthetic construct
  source 1..20: mol_type = other DNA
gaagagcaggagggcggcgg

SEQ ID NO: 31474 - DNA, 20 bp, synthetic construct
  source 1..20: mol_type = other DNA
tcatccacaacgcggacgag

SEQ ID NO: 31475 - DNA, 20 bp, synthetic construct
  source 1..20: mol_type = other DNA
gagagcggcacgtgcaagta

SEQ ID NO: 31476 - DNA, 20 bp, synthetic construct
  source 1..20: mol_type = other DNA
gcacgtgccgctctcctcga

SEQ ID NO: 31477 - DNA, 20 bp, synthetic construct
  source 1..20: mol_type = other DNA
tctccgacgactgaggcaag

SEQ ID NO: 31478 - DNA, 20 bp, synthetic construct
  source 1..20: mol_type = other DNA
catgtttctggatcccgcag

SEQ ID NO: 31479 - DNA, 20 bp, synthetic construct
  source 1..20: mol_type = other DNA
tctcatagatcagaacatcc

SEQ ID NO: 31480 - DNA, 20 bp, synthetic construct
  source 1..20: mol_type = other DNA
tctcggaggcggcgcgcagc

SEQ ID NO: 31481 - DNA, 20 bp, synthetic construct
  source 1..20: mol_type = other DNA
tctctgggcctgacctgctt

SEQ ID NO: 31482 - DNA, 20 bp, synthetic construct
  source 1..20: mol_type = other DNA
gagcagcggctgtacaaggt

SEQ ID NO: 31483 - DNA, 20 bp, synthetic construct
  source 1..20: mol_type = other DNA
agacgttcagctgctgtcct

SEQ ID NO: 31484 - DNA, 20 bp, synthetic construct
  source 1..20: mol_type = other DNA
cgagcagcggctgtacaagg

SEQ ID NO: 31485 - DNA, 20 bp, synthetic construct
  source 1..20: mol_type = other DNA
cgcagccgtcccagttgcag

SEQ ID NO: 31486 - DNA, 20 bp, synthetic construct
  source 1..20: mol_type = other DNA
gctgtacaaggtgggtcccg

SEQ ID NO: 31487 - DNA, 20 bp, synthetic construct
  source 1..20: mol_type = other DNA
gggcagtcctgcagaaggac

SEQ ID NO: 31488 - DNA, 20 bp, synthetic construct
  source 1..20: mol_type = other DNA
gcgccactaccgaaagcaca

SEQ ID NO: 31489 - DNA, 20 bp, synthetic construct
  source 1..20: mol_type = other DNA
tcgcacagatggcactggaa

SEQ ID NO: 31490 - DNA, 20 bp, synthetic construct
  source 1..20: mol_type = other DNA
ctgtacaaggtgggtcccgc

SEQ ID NO: 31491 - DNA, 20 bp, synthetic construct
  source 1..20: mol_type = other DNA
tctcttcgccgctcggcctc

SEQ ID NO: 31492 - DNA, 20 bp, synthetic construct
  source 1..20: mol_type = other DNA
cttcagttcgaacaccgtgc

SEQ ID NO: 31493 - DNA, 20 bp, synthetic construct
  source 1..20: mol_type = other DNA
tacagccgctgctcgtcagg

SEQ ID NO: 31494 - DNA, 20 bp, synthetic construct
  source 1..20: mol_type = other DNA
gatggcactggaatggccgg

SEQ ID NO: 31495 - DNA, 20 bp, synthetic construct
  source 1..20: mol_type = other DNA
ttgtacagccgctgctcgtc

SEQ ID NO: 31496 - DNA, 20 bp, synthetic construct
  source 1..20: mol_type = other DNA
ggcagtcctgcagaaggaca

SEQ ID NO: 31497 - DNA, 20 bp, synthetic construct
  source 1..20: mol_type = other DNA
cgccactaccgaaagcacac

SEQ ID NO: 31498 - DNA, 20 bp, synthetic construct
  source 1..20: mol_type = other DNA
agacgtcccaccaagggtct

SEQ ID NO: 31499 - DNA, 20 bp, synthetic construct
  source 1..20: mol_type = other DNA
tcctcaggatgaccaactct

SEQ ID NO: 31500 - DNA, 20 bp, synthetic construct
  source 1..20: mol_type = other DNA
gaactgaagcgcatcgtcga

SEQ ID NO: 31501 - DNA, 20 bp, synthetic construct
  source 1..20: mol_type = other DNA
tcatgaggaacacgtcctgg

SEQ ID NO: 31502 - DNA, 20 bp, synthetic construct
  source 1..20: mol_type = other DNA
tacacatagcgcctctgact

SEQ ID NO: 31503 - DNA, 20 bp, synthetic construct
  source 1..20: mol_type = other DNA
atcatgaggaacacgtcctg

SEQ ID NO: 31504 - DNA, 20 bp, synthetic construct
  source 1..20: mol_type = other DNA
accaggaaggccccatcacg

SEQ ID NO: 31505 - DNA, 20 bp, synthetic construct
  source 1..20: mol_type = other DNA
ccggaaggccagccccactg

SEQ ID NO: 31506 - DNA, 20 bp, synthetic construct
  source 1..20: mol_type = other DNA
tctcagtgaaagtgccaatc

SEQ ID NO: 31507 - DNA, 20 bp, synthetic construct
  source 1..20: mol_type = other DNA
gcgatggtgagcgggcgtgg

SEQ ID NO: 31508 - DNA, 20 bp, synthetic construct
  source 1..20: mol_type = other DNA
tcttccctcaggaactgcaa

SEQ ID NO: 31509 - DNA, 20 bp, synthetic construct
  source 1..20: mol_type = other DNA
tctcctgcacagccagaata

SEQ ID NO: 31510 - DNA, 20 bp, synthetic construct
  source 1..20: mol_type = other DNA
agacgcgctcaaactccgtc

SEQ ID NO: 31511 - DNA, 20 bp, synthetic construct
  source 1..20: mol_type = other DNA
ccaggaaggccccatcacga

SEQ ID NO: 31512 - DNA, 20 bp, synthetic construct
  source 1..20: mol_type = other DNA
gtatgagcacgagaaggacc

SEQ ID NO: 31513 - DNA, 20 bp, synthetic construct
  source 1..20: mol_type = other DNA
aaacaaaaggagatatcaag

SEQ ID NO: 31514 - DNA, 20 bp, synthetic construct
  source 1..20: mol_type = other DNA
cgcgatggtgagcgggcgtg

SEQ ID NO: 31515 - DNA, 20 bp, synthetic construct
  source 1..20: mol_type = other DNA
ctccacagatgacacctttg

SEQ ID NO: 31516 - DNA, 20 bp, synthetic construct
  source 1..20: mol_type = other DNA
agaaggcacgatcgcacaga

SEQ ID NO: 31517 - DNA, 20 bp, synthetic construct
  source 1..20: mol_type = other DNA
tctctgggttctgaagttct

SEQ ID NO: 31518 - DNA, 20 bp, synthetic construct
  source 1..20: mol_type = other DNA
catgcagactctgctcagct

SEQ ID NO: 31519 - DNA, 20 bp, synthetic construct
  source 1..20: mol_type = other DNA
aaaaggagatatcaagagga

SEQ ID NO: 31520 - DNA, 20 bp, synthetic construct
  source 1..20: mol_type = other DNA
cctcatcttcagccacatgc

SEQ ID NO: 31521 - DNA, 20 bp, synthetic construct
  source 1..20: mol_type = other DNA
ggtttgataagttctagctg

SEQ ID NO: 31522 - DNA, 20 bp, synthetic construct
  source 1..20: mol_type = other DNA
gccgcgatggtgagcgggcg

SEQ ID NO: 31523 - DNA, 20 bp, synthetic construct
  source 1..20: mol_type = other DNA
acctctgcaattaaatttgg

SEQ ID NO: 31524 - DNA, 20 bp, synthetic construct
  source 1..20: mol_type = other DNA
cacacacaggtaacggctga

SEQ ID NO: 31525 - DNA, 20 bp, synthetic construct
  source 1..20: mol_type = other DNA
ccgtgaagatggtggtcttg

SEQ ID NO: 31526 - DNA, 20 bp, synthetic construct
  source 1..20: mol_type = other DNA
gcagaggaagttggggctgt

SEQ ID NO: 31527 - DNA, 20 bp, synthetic construct
  source 1..20: mol_type = other DNA
ccgcgatggtgagcgggcgt

SEQ ID NO: 31528 - DNA, 20 bp, synthetic construct
  source 1..20: mol_type = other DNA
tgaccagaatttcctggctc

SEQ ID NO: 31529 - DNA, 20 bp, synthetic construct
  source 1..20: mol_type = other DNA
tctcaggtgtgcgaagtccc

SEQ ID NO: 31530 - DNA, 20 bp, synthetic construct
  source 1..20: mol_type = other DNA
gtacttcacaaaaacagtag

SEQ ID NO: 31531 - DNA, 20 bp, synthetic construct
  source 1..20: mol_type = other DNA
gatcatgaggaacacgtcct

SEQ ID NO: 31532 - DNA, 20 bp, synthetic construct
  source 1..20: mol_type = other DNA
ccacacacaggtaacggctg

SEQ ID NO: 31533 - DNA, 20 bp, synthetic construct
  source 1..20: mol_type = other DNA
gtagctgcaggtgtgagtgg

SEQ ID NO: 31534 - DNA, 20 bp, synthetic construct
  source 1..20: mol_type = other DNA
acagatggcactggaatggc

SEQ ID NO: 31535 - DNA, 20 bp, synthetic construct
  source 1..20: mol_type = other DNA
gactgggaatagttactccc

SEQ ID NO: 31536 - DNA, 20 bp, synthetic construct
  source 1..20: mol_type = other DNA
agacgatcgtcaccggattg

SEQ ID NO: 31537 - DNA, 20 bp, synthetic construct
  source 1..20: mol_type = other DNA
atacacatagcgcctctgac

SEQ ID NO: 31538 - DNA, 20 bp, synthetic construct
  source 1..20: mol_type = other DNA
agacgaggaggacggggaac

SEQ ID NO: 31539 - DNA, 20 bp, synthetic construct
  source 1..20: mol_type = other DNA
cctcagccgttacctgtgtg

SEQ ID NO: 31540 - DNA, 20 bp, synthetic construct
  source 1..20: mol_type = other DNA
attcactgtaaagctggaaa

SEQ ID NO: 31541 - DNA, 20 bp, synthetic construct
  source 1..20: mol_type = other DNA
tctcaatgtcttgaggtttc

SEQ ID NO: 31542 - DNA, 20 bp, synthetic construct
  source 1..20: mol_type = other DNA
tctcttcctagtctctcaca

SEQ ID NO: 31543 - DNA, 20 bp, synthetic construct
  source 1..20: mol_type = other DNA
ttgacctgtatccatttctg

SEQ ID NO: 31544 - DNA, 20 bp, synthetic construct
  source 1..20: mol_type = other DNA
tctctgaaattacaaagtaa

SEQ ID NO: 31545 - DNA, 20 bp, synthetic construct
  source 1..20: mol_type = other DNA
tctccaactttaaatcctgt

SEQ ID NO: 31546 - DNA, 20 bp, synthetic construct
  source 1..20: mol_type = other DNA
tctcagctcctgtagcagct

SEQ ID NO: 31547 - DNA, 20 bp, synthetic construct
  source 1..20: mol_type = other DNA
tgggaatagttactccctgg

SEQ ID NO: 31548 - DNA, 20 bp, synthetic construct
  source 1..20: mol_type = other DNA
tctcataggatcccccggct

SEQ ID NO: 31549 - DNA, 20 bp, synthetic construct
  source 1..20: mol_type = other DNA
tctcttaaggcaggctgctt

SEQ ID NO: 31550 - DNA, 20 bp, synthetic construct
  source 1..20: mol_type = other DNA
ctggcacttcgagttggaac

SEQ ID NO: 31551 - DNA, 20 bp, synthetic construct
  source 1..20: mol_type = other DNA
tctctgctccttttggtgac

SEQ ID NO: 31552 - DNA, 20 bp, synthetic construct
  source 1..20: mol_type = other DNA
tctcggagtgcacaggccga

SEQ ID NO: 31553 - DNA, 20 bp, synthetic construct
  source 1..20: mol_type = other DNA
tgttgcagaggaagttctcc

SEQ ID NO: 31554 - DNA, 20 bp, synthetic construct
  source 1..20: mol_type = other DNA
gttctagctgtggtgggtta

SEQ ID NO: 31555 - DNA, 20 bp, synthetic construct
  source 1..20: mol_type = other DNA
tccaagagttggtcatcctg

SEQ ID NO: 31556 - DNA, 20 bp, synthetic construct
  source 1..20: mol_type = other DNA
tctctctgttgtccgaggcc

SEQ ID NO: 31557 - DNA, 20 bp, synthetic construct
  source 1..20: mol_type = other DNA
tctcgtggtggtaataaggg

SEQ ID NO: 31558 - DNA, 20 bp, synthetic construct
  source 1..20: mol_type = other DNA
ccgtcccagttgcagtggta

SEQ ID NO: 31559 - DNA, 20 bp, synthetic construct
  source 1..20: mol_type = other DNA
tctcccggcaaacctcgccc

SEQ ID NO: 31560 - DNA, 20 bp, synthetic construct
  source 1..20: mol_type = other DNA
atatcaccacacacaggtaa

SEQ ID NO: 31561 - DNA, 20 bp, synthetic construct
  source 1..20: mol_type = other DNA
tctcgaagtgtgggaggtac

SEQ ID NO: 31562 - DNA, 20 bp, synthetic construct
  source 1..20: mol_type = other DNA
tctcccaaagttcgtggcac

SEQ ID NO: 31563 - DNA, 20 bp, synthetic construct
  source 1..20: mol_type = other DNA
atcttccattggattggcaa

SEQ ID NO: 31564 - DNA, 20 bp, synthetic construct
  source 1..20: mol_type = other DNA
tctcgacacagcaggtcaag

SEQ ID NO: 31565 - DNA, 20 bp, synthetic construct
  source 1..20: mol_type = other DNA
tctcacctaggaaaacatct

SEQ ID NO: 31566 - DNA, 20 bp, synthetic construct
  source 1..20: mol_type = other DNA
aattcactgtaaagctggaa

SEQ ID NO: 31567 - DNA, 20 bp, synthetic construct
  source 1..20: mol_type = other DNA
tctcacagtagacactctcc

SEQ ID NO: 31568 - DNA, 20 bp, synthetic construct
  source 1..20: mol_type = other DNA
tctctttctgaaggagacac

SEQ ID NO: 31569 - DNA, 20 bp, synthetic construct
  source 1..20: mol_type = other DNA
tctctttgatctgcgccttg

SEQ ID NO: 31570 - DNA, 20 bp, synthetic construct
  source 1..20: mol_type = other DNA
tagcagatgattgagctctg

SEQ ID NO: 31571 - DNA, 20 bp, synthetic construct
  source 1..20: mol_type = other DNA
agcggcctcctgacgagcag

SEQ ID NO: 31572 - DNA, 20 bp, synthetic construct
  source 1..20: mol_type = other DNA
tctctcggcggaagtcgctc

SEQ ID NO: 31573 - DNA, 20 bp, synthetic construct
  source 1..20: mol_type = other DNA
ccacaaactgaggatctgca

SEQ ID NO: 31574 - DNA, 20 bp, synthetic construct
  source 1..20: mol_type = other DNA
tctcccttggatggtcggcg

SEQ ID NO: 31575 - DNA, 20 bp, synthetic construct
  source 1..20: mol_type = other DNA
ggagctgtatgagcacgaga

SEQ ID NO: 31576 - DNA, 20 bp, synthetic construct
  source 1..20: mol_type = other DNA
tgggacactgaggagacaga

SEQ ID NO: 31577 - DNA, 20 bp, synthetic construct
  source 1..20: mol_type = other DNA
tctccgccgaggaggtgaca

SEQ ID NO: 31578 - DNA, 20 bp, synthetic construct
  source 1..20: mol_type = other DNA
aatcccatagcaataatgtt

SEQ ID NO: 31579 - DNA, 20 bp, synthetic construct
  source 1..20: mol_type = other DNA
ccagcatgtggctgaagatg

SEQ ID NO: 31580 - DNA, 20 bp, synthetic construct
  source 1..20: mol_type = other DNA
ctggaggtctacctcaagga

SEQ ID NO: 31581 - DNA, 20 bp, synthetic construct
  source 1..20: mol_type = other DNA
tctctcctggcctcagcgac

SEQ ID NO: 31582 - DNA, 20 bp, synthetic construct
  source 1..20: mol_type = other DNA
tccattggattggcaagggc

SEQ ID NO: 31583 - DNA, 20 bp, synthetic construct
  source 1..20: mol_type = other DNA
aggccagccccactgtggct

SEQ ID NO: 31584 - DNA, 20 bp, synthetic construct
  source 1..20: mol_type = other DNA
tctccaggctggtgcgcgag

SEQ ID NO: 31585 - DNA, 20 bp, synthetic construct
  source 1..20: mol_type = other DNA
gcgcatctgcgcacgcacac

SEQ ID NO: 31586 - DNA, 20 bp, synthetic construct
  source 1..20: mol_type = other DNA
catccccagcaggtacaagg

SEQ ID NO: 31587 - DNA, 20 bp, synthetic construct
  source 1..20: mol_type = other DNA
actcacccagcatccccagc

SEQ ID NO: 31588 - DNA, 20 bp, synthetic construct
  source 1..20: mol_type = other DNA
ggcaagacactgggcgagtg

SEQ ID NO: 31589 - DNA, 20 bp, synthetic construct
  source 1..20: mol_type = other DNA
gggacactgaggagacagaa

SEQ ID NO: 31590 - DNA, 20 bp, synthetic construct
  source 1..20: mol_type = other DNA
ccgccgccctcacctcctgc

SEQ ID NO: 31591 - DNA, 20 bp, synthetic construct
  source 1..20: mol_type = other DNA
cacactggaggttgttgcag

SEQ ID NO: 31592 - DNA, 20 bp, synthetic construct
  source 1..20: mol_type = other DNA
tctccttgatgccagctcac

SEQ ID NO: 31593 - DNA, 20 bp, synthetic construct
  source 1..20: mol_type = other DNA
tctcaggctccgattattca

SEQ ID NO: 31594 - DNA, 20 bp, synthetic construct
  source 1..20: mol_type = other DNA
cagaagtctgtgcagaacag

SEQ ID NO: 31595 - DNA, 20 bp, synthetic construct
  source 1..20: mol_type = other DNA
aggggcaggatggcaacagg

SEQ ID NO: 31596 - DNA, 20 bp, synthetic construct
  source 1..20: mol_type = other DNA
tgttcaggaaaacaacacac

SEQ ID NO: 31597 - DNA, 20 bp, synthetic construct
  source 1..20: mol_type = other DNA
cactgggacagcttctgatg

SEQ ID NO: 31598 - DNA, 20 bp, synthetic construct
  source 1..20: mol_type = other DNA
gctgcagcctgggaggagct

SEQ ID NO: 31599 - DNA, 20 bp, synthetic construct
  source 1..20: mol_type = other DNA
tctcctggcatgtctcagca

SEQ ID NO: 31600 - DNA, 20 bp, synthetic construct
  source 1..20: mol_type = other DNA
tctctcaggtactcagacaa

SEQ ID NO: 31601 - DNA, 20 bp, synthetic construct
  source 1..20: mol_type = other DNA
agcgccatggccgggacccg

SEQ ID NO: 31602 - DNA, 20 bp, synthetic construct
  source 1..20: mol_type = other DNA
cgtgaggctgcaagcttgca

SEQ ID NO: 31603 - DNA, 20 bp, synthetic construct
  source 1..20: mol_type = other DNA
tctccaaagaagcagaaaaa

SEQ ID NO: 31604 - DNA, 20 bp, synthetic construct
  source 1..20: mol_type = other DNA
ggcagccagcatgatgagac

SEQ ID NO: 31605 - DNA, 20 bp, synthetic construct
  source 1..20: mol_type = other DNA
tctcctctgccccagggggc

SEQ ID NO: 31606 - DNA, 20 bp, synthetic construct
  source 1..20: mol_type = other DNA
tttctcagctggataaggtc

SEQ ID NO: 31607 - DNA, 20 bp, synthetic construct
  source 1..20: mol_type = other DNA
tctcacaggtgacgcagcca

SEQ ID NO: 31608 - DNA, 20 bp, synthetic construct
  source 1..20: mol_type = other DNA
tgaggaacacgtcctggggg

SEQ ID NO: 31609 - DNA, 20 bp, synthetic construct
  source 1..20: mol_type = other DNA
tgctgctcctgagctgagac

SEQ ID NO: 31610 - DNA, 20 bp, synthetic construct
  source 1..20: mol_type = other DNA
gggaggtacagcttgagttc

SEQ ID NO: 31611 - DNA, 20 bp, synthetic construct
  source 1..20: mol_type = other DNA
ctggctcacctgaccacgtt

SEQ ID NO: 31612 - DNA, 20 bp, synthetic construct
  source 1..20: mol_type = other DNA
ggtgcagcagcagtcgtaca

SEQ ID NO: 31613 - DNA, 20 bp, synthetic construct
  source 1..20: mol_type = other DNA
cccttaccaggcttgatgag

SEQ ID NO: 31614 - DNA, 20 bp, synthetic construct
  source 1..20: mol_type = other DNA
tctccaggacctggaagcgc

SEQ ID NO: 31615 - DNA, 20 bp, synthetic construct
  source 1..20: mol_type = other DNA
agaggaagttctccaggtcc

SEQ ID NO: 31616 - DNA, 20 bp, synthetic construct
  source 1..20: mol_type = other DNA
agacgcccccgggcccagcc

SEQ ID NO: 31617 - DNA, 20 bp, synthetic construct
  source 1..20: mol_type = other DNA
ccttgaggtagacctccagc

SEQ ID NO: 31618 - DNA, 20 bp, synthetic construct
  source 1..20: mol_type = other DNA
gttctacagcggcagcctgg

SEQ ID NO: 31619 - DNA, 20 bp, synthetic construct
  source 1..20: mol_type = other DNA
gtagttgttgaagacatcca

SEQ ID NO: 31620 - DNA, 20 bp, synthetic construct
  source 1..20: mol_type = other DNA
tctcgctccaatgtcgacac

SEQ ID NO: 31621 - DNA, 20 bp, synthetic construct
  source 1..20: mol_type = other DNA
tctctgcaaggcaaaaggat

SEQ ID NO: 31622 - DNA, 20 bp, synthetic construct
  source 1..20: mol_type = other DNA
tgcagcagcagtcgtacaag

SEQ ID NO: 31623 - DNA, 20 bp, synthetic construct
  source 1..20: mol_type = other DNA
gctaacgatctctttgatga

SEQ ID NO: 31624 - DNA, 20 bp, synthetic construct
  source 1..20: mol_type = other DNA
caggtgatcggagcgcgaga

SEQ ID NO: 31625 - DNA, 20 bp, synthetic construct
  source 1..20: mol_type = other DNA
gatcttccattggattggca

SEQ ID NO: 31626 - DNA, 20 bp, synthetic construct
  source 1..20: mol_type = other DNA
ccaaatttaattgcagaggt

SEQ ID NO: 31627 - DNA, 20 bp, synthetic construct
  source 1..20: mol_type = other DNA
tctccgacgactgaggcaag

SEQ ID NO: 31628 - DNA, 20 bp, synthetic construct
  source 1..20: mol_type = other DNA
cctggcacttcgagttggaa

SEQ ID NO: 31629 - DNA, 20 bp, synthetic construct
  source 1..20: mol_type = other DNA
tctccaccacggctttctgg

SEQ ID NO: 31630 - DNA, 20 bp, synthetic construct
  source 1..20: mol_type = other DNA
gcactgggacagcttctgat

SEQ ID NO: 31631 - DNA, 20 bp, synthetic construct
  source 1..20: mol_type = other DNA
cataccagctgagccgtccg

SEQ ID NO: 31632 - DNA, 20 bp, synthetic construct
  source 1..20: mol_type = other DNA
agacggctgctcgggcacct

SEQ ID NO: 31633 - DNA, 20 bp, synthetic construct
  source 1..20: mol_type = other DNA
tctcgtggtcgctcagccct

SEQ ID NO: 31634 - DNA, 20 bp, synthetic construct
  source 1..20: mol_type = other DNA
tctctgggttggcctctggg

SEQ ID NO: 31635 - DNA, 20 bp, synthetic construct
  source 1..20: mol_type = other DNA
tctccaagaacggtaagcaa

SEQ ID NO: 31636 - DNA, 20 bp, synthetic construct
  source 1..20: mol_type = other DNA
agcaaaggagggcaagaact

SEQ ID NO: 31637 - DNA, 20 bp, synthetic construct
  source 1..20: mol_type = other DNA
ccccgcagcaagtcccctag

SEQ ID NO: 31638 - DNA, 20 bp, synthetic construct
  source 1..20: mol_type = other DNA
gtaaatacattcttcatacc

SEQ ID NO: 31639 - DNA, 20 bp, synthetic construct
  source 1..20: mol_type = other DNA
gctgtagaactccaccacgc

SEQ ID NO: 31640 - DNA, 20 bp, synthetic construct
  source 1..20: mol_type = other DNA
agtggcagcggggcccgtag

SEQ ID NO: 31641 - DNA, 20 bp, synthetic construct
  source 1..20: mol_type = other DNA
cgccttcagatgcgaactct

SEQ ID NO: 31642 - DNA, 20 bp, synthetic construct
  source 1..20: mol_type = other DNA
tggctcacctgaccacgttg

SEQ ID NO: 31643 - DNA, 20 bp, synthetic construct
  source 1..20: mol_type = other DNA
gccgtcccagttgcagtggt

SEQ ID NO: 31644 - DNA, 20 bp, synthetic construct
  source 1..20: mol_type = other DNA
tctctggagggacagtcgcc

SEQ ID NO: 31645 - DNA, 20 bp, synthetic construct
  source 1..20: mol_type = other DNA
ttcaggaaaacaacacactg

SEQ ID NO: 31646 - DNA, 20 bp, synthetic construct
  source 1..20: mol_type = other DNA
caccagacggctctgcacct

SEQ ID NO: 31647 - DNA, 20 bp, synthetic construct
  source 1..20: mol_type = other DNA
tctcctgccacggaaagaga

SEQ ID NO: 31648 - DNA, 20 bp, synthetic construct
  source 1..20: mol_type = other DNA
cccgcagcaagtcccctagg

SEQ ID NO: 31649 - DNA, 20 bp, synthetic construct
  source 1..20: mol_type = other DNA
gcctcagcaccgccacctcg

SEQ ID NO: 31650 - DNA, 20 bp, synthetic construct
  source 1..20: mol_type = other DNA
atataaacttacagttcata

SEQ ID NO: 31651 - DNA, 20 bp, synthetic construct
  source 1..20: mol_type = other DNA
tctcaaggtaagccatgcac

SEQ ID NO: 31652 - DNA, 20 bp, synthetic construct
  source 1..20: mol_type = other DNA
tctcctgaggtgggcaggag

SEQ ID NO: 31653 - DNA, 20 bp, synthetic construct
  source 1..20: mol_type = other DNA
cagtcgcttcctgcctcgga

SEQ ID NO: 31654 - DNA, 20 bp, synthetic construct
  source 1..20: mol_type = other DNA
gacccccagatttccaggca

SEQ ID NO: 31655 - DNA, 20 bp, synthetic construct
  source 1..20: mol_type = other DNA
ggcactgggacagcttctga

SEQ ID NO: 31656 - DNA, 20 bp, synthetic construct
  source 1..20: mol_type = other DNA
accgccaaatttaattgcag

SEQ ID NO: 31657 - DNA, 20 bp, synthetic construct
  source 1..20: mol_type = other DNA
gcagagaattgcttgaaccc

SEQ ID NO: 31658 - DNA, 20 bp, synthetic construct
  source 1..20: mol_type = other DNA
ttccacatccacatcaccat

SEQ ID NO: 31659 - DNA, 20 bp, synthetic construct
  source 1..20: mol_type = other DNA
caattcaggacccacacgac

SEQ ID NO: 31660 - DNA, 20 bp, synthetic construct
  source 1..20: mol_type = other DNA
tgtctcacatgaccagcgtc

SEQ ID NO: 31661 - DNA, 20 bp, synthetic construct
  source 1..20: mol_type = other DNA
tctccccccacatctcctcc

SEQ ID NO: 31662 - DNA, 20 bp, synthetic construct
  source 1..20: mol_type = other DNA
tctcaagccgtgtgcaccac

SEQ ID NO: 31663 - DNA, 20 bp, synthetic construct
  source 1..20: mol_type = other DNA
tctctgggccgtagaggaaa

SEQ ID NO: 31664 - DNA, 20 bp, synthetic construct
  source 1..20: mol_type = other DNA
agacggtgagtagtggcgcg

SEQ ID NO: 31665 - DNA, 20 bp, synthetic construct
  source 1..20: mol_type = other DNA
agaagccctaccactgcaac

SEQ ID NO: 31666 - DNA, 20 bp, synthetic construct
  source 1..20: mol_type = other DNA
tctccatttacaaaaactga

SEQ ID NO: 31667 - DNA, 20 bp, synthetic construct
  source 1..20: mol_type = other DNA
tctcctgcttcaacgaagcc

SEQ ID NO: 31668 - DNA, 20 bp, synthetic construct
  source 1..20: mol_type = other DNA
ttgataagttctagctgtgg

SEQ ID NO: 31669 - DNA, 20 bp, synthetic construct
  source 1..20: mol_type = other DNA
tctcgaggtggaaaggcagg

SEQ ID NO: 31670 - DNA, 20 bp, synthetic construct
  source 1..20: mol_type = other DNA
ttgatgatggctgtcatgtc

SEQ ID NO: 31671 - DNA, 20 bp, synthetic construct
  source 1..20: mol_type = other DNA
tctcctggacaaggcatccc

SEQ ID NO: 31672 - DNA, 20 bp, synthetic construct
  source 1..20: mol_type = other DNA
tctcatcagctgtcataaac

SEQ ID NO: 31673 - DNA, 20 bp, synthetic construct
  source 1..20: mol_type = other DNA
tcagcgccatggccgggacc

SEQ ID NO: 31674 - DNA, 20 bp, synthetic construct
  source 1..20: mol_type = other DNA
cctgaagcaatgctccaggg

SEQ ID NO: 31675 - DNA, 20 bp, synthetic construct
  source 1..20: mol_type = other DNA
catgtgcagcgccaggtgat

SEQ ID NO: 31676 - DNA, 20 bp, synthetic construct
  source 1..20: mol_type = other DNA
tgataagttctagctgtggt

SEQ ID NO: 31677 - DNA, 20 bp, synthetic construct
  source 1..20: mol_type = other DNA
actattccaatgttcagtgg

SEQ ID NO: 31678 - DNA, 20 bp, synthetic construct
  source 1..20: mol_type = other DNA
ctcccaccgcagcgagctcc

SEQ ID NO: 31679 - DNA, 20 bp, synthetic construct
  source 1..20: mol_type = other DNA
tctcctggggctgcgtggct

SEQ ID NO: 31680 - DNA, 20 bp, synthetic construct
  source 1..20: mol_type = other DNA
gtgcagcagcagtcgtacaa

SEQ ID NO: 31681 - DNA, 20 bp, synthetic construct
  source 1..20: mol_type = other DNA
cccccgcagcaagtccccta

SEQ ID NO: 31682 - DNA, 20 bp, synthetic construct
  source 1..20: mol_type = other DNA
cgtggaactccagggtgacg

SEQ ID NO: 31683 - DNA, 20 bp, synthetic construct
  source 1..20: mol_type = other DNA
tctctgctgccctgcgctcc

SEQ ID NO: 31684 - DNA, 20 bp, synthetic construct
  source 1..20: mol_type = other DNA
tatgccaaggagctggatca

SEQ ID NO: 31685 - DNA, 20 bp, synthetic construct
  source 1..20: mol_type = other DNA
cattgcaggtcgtcacgctg

SEQ ID NO: 31686 - DNA, 20 bp, synthetic construct
  source 1..20: mol_type = other DNA
tgatgatggctgtcatgtct

SEQ ID NO: 31687 - DNA, 20 bp, synthetic construct
  source 1..20: mol_type = other DNA
ccaggggcaggatggcaaca

SEQ ID NO: 31688 - DNA, 20 bp, synthetic construct
  source 1..20: mol_type = other DNA
tctctcgccagtcagacgtc

SEQ ID NO: 31689 - DNA, 20 bp, synthetic construct
  source 1..20: mol_type = other DNA
tacccttctttcaggtgcac

SEQ ID NO: 31690 - DNA, 20 bp, synthetic construct
  source 1..20: mol_type = other DNA
tctcttcccacattgtccgg

SEQ ID NO: 31691 - DNA, 20 bp, synthetic construct
  source 1..20: mol_type = other DNA
agaggatccagcccacctgg

SEQ ID NO: 31692 - DNA, 20 bp, synthetic construct
  source 1..20: mol_type = other DNA
atttacctgaacctctgaat

SEQ ID NO: 31693 - DNA, 20 bp, synthetic construct
  source 1..20: mol_type = other DNA
tctctagattgttggtgacg

SEQ ID NO: 31694 - DNA, 20 bp, synthetic construct
  source 1..20: mol_type = other DNA
cggccagcactgtgccggcg

SEQ ID NO: 31695 - DNA, 20 bp, synthetic construct
  source 1..20: mol_type = other DNA
agttccacgagtctcgaggt

SEQ ID NO: 31696 - DNA, 20 bp, synthetic construct
  source 1..20: mol_type = other DNA
aaaactcacctgggatgtgc

SEQ ID NO: 31697 - DNA, 20 bp, synthetic construct
  source 1..20: mol_type = other DNA
tctccgagagctcgtagaag

SEQ ID NO: 31698 - DNA, 20 bp, synthetic construct
  source 1..20: mol_type = other DNA
ggccagccccactgtggctg

SEQ ID NO: 31699 - DNA, 20 bp, synthetic construct
  source 1..20: mol_type = other DNA
tctccgacagttcacctctg

SEQ ID NO: 31700 - DNA, 20 bp, synthetic construct
  source 1..20: mol_type = other DNA
gtggaactccagggtgacgt

SEQ ID NO: 31701 - DNA, 20 bp, synthetic construct
  source 1..20: mol_type = other DNA
cctggctcacctgaccacgt

SEQ ID NO: 31702 - DNA, 20 bp, synthetic construct
  source 1..20: mol_type = other DNA
tgaagcaggacaccttgctg

SEQ ID NO: 31703 - DNA, 20 bp, synthetic construct
  source 1..20: mol_type = other DNA
ttctacagcggcagcctggg

SEQ ID NO: 31704 - DNA, 20 bp, synthetic construct
  source 1..20: mol_type = other DNA
cagcaaggggtcatagacaa

SEQ ID NO: 31705 - DNA, 20 bp, synthetic construct
  source 1..20: mol_type = other DNA
cttggtgatgaggtcggcgt

SEQ ID NO: 31706 - DNA, 20 bp, synthetic construct
  source 1..20: mol_type = other DNA
actacctggctgtttgtggt

SEQ ID NO: 31707 - DNA, 20 bp, synthetic construct
  source 1..20: mol_type = other DNA
cttgcaccacgagcagctga

SEQ ID NO: 31708 - DNA, 20 bp, synthetic construct
  source 1..20: mol_type = other DNA
gaacacgtcctgggggcggc

SEQ ID NO: 31709 - DNA, 20 bp, synthetic construct
  source 1..20: mol_type = other DNA
tctccccacgggagttgact

SEQ ID NO: 31710 - DNA, 20 bp, synthetic construct
  source 1..20: mol_type = other DNA
taagattctctcgaatctac

SEQ ID NO: 31711 - DNA, 20 bp, synthetic construct
  source 1..20: mol_type = other DNA
tctctatcctgacattccca

SEQ ID NO: 31712 - DNA, 20 bp, synthetic construct
  source 1..20: mol_type = other DNA
ggaacacgtcctgggggcgg

SEQ ID NO: 31713 - DNA, 20 bp, synthetic construct
  source 1..20: mol_type = other DNA
tacttccccatagaaatcta

SEQ ID NO: 31714 - DNA, 20 bp, synthetic construct
  source 1..20: mol_type = other DNA
tctcctcagactgggggggc

SEQ ID NO: 31715 - DNA, 20 bp, synthetic construct
  source 1..20: mol_type = other DNA
aagtcgttgccagtacccag

SEQ ID NO: 31716 - DNA, 20 bp, synthetic construct
  source 1..20: mol_type = other DNA
tctccggccgggccaacgcg

SEQ ID NO: 31717 - DNA, 20 bp, synthetic construct
  source 1..20: mol_type = other DNA
gaaccaactggggagcagca

SEQ ID NO: 31718 - DNA, 20 bp, synthetic construct
  source 1..20: mol_type = other DNA
ggaacaggcctgtctccggc

SEQ ID NO: 31719 - DNA, 20 bp, synthetic construct
  source 1..20: mol_type = other DNA
actttgatatcaccacacac

SEQ ID NO: 31720 - DNA, 20 bp, synthetic construct
  source 1..20: mol_type = other DNA
gagtaactattcccagtcag

SEQ ID NO: 31721 - DNA, 20 bp, synthetic construct
  source 1..20: mol_type = other DNA
tctctgaggctaaaggccac

SEQ ID NO: 31722 - DNA, 20 bp, synthetic construct
  source 1..20: mol_type = other DNA
tctctaggatctgaggaagt

SEQ ID NO: 31723 - DNA, 20 bp, synthetic construct
  source 1..20: mol_type = other DNA
tctccagggctgtggttgtc

SEQ ID NO: 31724 - DNA, 20 bp, synthetic construct
  source 1..20: mol_type = other DNA
tatggtcatgctgtagagac

SEQ ID NO: 31725 - DNA, 20 bp, synthetic construct
  source 1..20: mol_type = other DNA
atgttgcacttgggacactg

SEQ ID NO: 31726 - DNA, 20 bp, synthetic construct
  source 1..20: mol_type = other DNA
tctcctcacacagtgcgccc

SEQ ID NO: 31727 - DNA, 20 bp, synthetic construct
  source 1..20: mol_type = other DNA
ccctaccactgcaactggga

SEQ ID NO: 31728 - DNA, 20 bp, synthetic construct
  source 1..20: mol_type = other DNA
tgatgaggtcggcgtaggac

SEQ ID NO: 31729 - DNA, 20 bp, synthetic construct
  source 1..20: mol_type = other DNA
gcacggtgagctccccgcat

SEQ ID NO: 31730 - DNA, 20 bp, synthetic construct
  source 1..20: mol_type = other DNA
tgcttaccccaccccagttg

SEQ ID NO: 31731 - DNA, 20 bp, synthetic construct
  source 1..20: mol_type = other DNA
ctaggaaaacatcttggact

SEQ ID NO: 31732 - DNA, 20 bp, synthetic construct
  source 1..20: mol_type = other DNA
cccataggggcagaagccga

SEQ ID NO: 31733 - DNA, 20 bp, synthetic construct
  source 1..20: mol_type = other DNA
cttactgtacaacaagctgc

SEQ ID NO: 31734 - DNA, 20 bp, synthetic construct
  source 1..20: mol_type = other DNA
gagaggatccagcccacctg

SEQ ID NO: 31735 - DNA, 20 bp, synthetic construct
  source 1..20: mol_type = other DNA
gtttgtggtctgccagctaa

SEQ ID NO: 31736 - DNA, 20 bp, synthetic construct
  source 1..20: mol_type = other DNA
tctccaaggggggtgagcga

SEQ ID NO: 31737 - DNA, 20 bp, synthetic construct
  source 1..20: mol_type = other DNA
cggatcagaaaggtgccggc

SEQ ID NO: 31738 - DNA, 20 bp, synthetic construct
  source 1..20: mol_type = other DNA
gactaagaaaaaacaaacac

SEQ ID NO: 31739 - DNA, 20 bp, synthetic construct
  source 1..20: mol_type = other DNA
tctcagttcaaagacacgaa

SEQ ID NO: 31740 - DNA, 20 bp, synthetic construct
  source 1..20: mol_type = other DNA
agtagtggggataccattcc

SEQ ID NO: 31741 - DNA, 20 bp, synthetic construct
  source 1..20: mol_type = other DNA
ggatgtggaagaaagtgatg

SEQ ID NO: 31742 - DNA, 20 bp, synthetic construct
  source 1..20: mol_type = other DNA
aagagggagaggcgggagac

SEQ ID NO: 31743 - DNA, 20 bp, synthetic construct
  source 1..20: mol_type = other DNA
ttctgtacctcatcaagaat

SEQ ID NO: 31744 - DNA, 20 bp, synthetic construct
  source 1..20: mol_type = other DNA
aggagtagatttcccagaga

SEQ ID NO: 31745 - DNA, 20 bp, synthetic construct
  source 1..20: mol_type = other DNA
cgggagagcaccaactaccc

SEQ ID NO: 31746 - DNA, 20 bp, synthetic construct
  source 1..20: mol_type = other DNA
tctctctcaggtctggctgt

SEQ ID NO: 31747 - DNA, 20 bp, synthetic construct
  source 1..20: mol_type = other DNA
caagttccgccactgaacat

SEQ ID NO: 31748 - DNA, 20 bp, synthetic construct
  source 1..20: mol_type = other DNA
gaacttactagcatcttcag

SEQ ID NO: 31749 - DNA, 20 bp, synthetic construct
  source 1..20: mol_type = other DNA
cgctccagtccactgtactc

SEQ ID NO: 31750 - DNA, 20 bp, synthetic construct
  source 1..20: mol_type = other DNA
tgacgagcagcggctgtaca

SEQ ID NO: 31751 - DNA, 20 bp, synthetic construct
  source 1..20: mol_type = other DNA
gaagccctaccactgcaact

SEQ ID NO: 31752 - DNA, 20 bp, synthetic construct
  source 1..20: mol_type = other DNA
tctcgttcacctcctccctg

SEQ ID NO: 31753 - DNA, 20 bp, synthetic construct
  source 1..20: mol_type = other DNA
tctcacccacacagcacgcc

SEQ ID NO: 31754 - DNA, 20 bp, synthetic construct
  source 1..20: mol_type = other DNA
tctcctagccgctcactcag

SEQ ID NO: 31755 - DNA, 20 bp, synthetic construct
  source 1..20: mol_type = other DNA
tctcttgctgttgctgatgg

SEQ ID NO: 31756 - DNA, 20 bp, synthetic construct
  source 1..20: mol_type = other DNA
gttcagcggatgagagagac

SEQ ID NO: 31757 - DNA, 20 bp, synthetic construct
  source 1..20: mol_type = other DNA
tctcaggtcagggagccgca

SEQ ID NO: 31758 - DNA, 20 bp, synthetic construct
  source 1..20: mol_type = other DNA
aaagagatggcatatgagtt

SEQ ID NO: 31759 - DNA, 20 bp, synthetic construct
  source 1..20: mol_type = other DNA
tctccttcttgacacagctt

SEQ ID NO: 31760 - DNA, 20 bp, synthetic construct
  source 1..20: mol_type = other DNA
gacacatgtcatttctgctg

SEQ ID NO: 31761 - DNA, 20 bp, synthetic construct
  source 1..20: mol_type = other DNA
gttcaggaaaacaacacact

SEQ ID NO: 31762 - DNA, 20 bp, synthetic construct
  source 1..20: mol_type = other DNA
tctccttgtgatgtttttca

SEQ ID NO: 31763 - DNA, 20 bp, synthetic construct
  source 1..20: mol_type = other DNA
acgcagtcgaagcggggcac

SEQ ID NO: 31764 - DNA, 20 bp, synthetic construct
  source 1..20: mol_type = other DNA
tctctctgccccgccctggc

SEQ ID NO: 31765 - DNA, 20 bp, synthetic construct
  source 1..20: mol_type = other DNA
agcacgagaaggacctggtg

SEQ ID NO: 31766 - DNA, 20 bp, synthetic construct
  source 1..20: mol_type = other DNA
caagtcgttgccagtaccca

SEQ ID NO: 31767 - DNA, 20 bp, synthetic construct
  source 1..20: mol_type = other DNA
cacgcacagcgtgtagtctc

SEQ ID NO: 31768 - DNA, 20 bp, synthetic construct
  source 1..20: mol_type = other DNA
tacccccagagatgtctgcg

SEQ ID NO: 31769 - DNA, 20 bp, synthetic construct
  source 1..20: mol_type = other DNA
ctcaggtcgaagacttgtcg

SEQ ID NO: 31770 - DNA, 20 bp, synthetic construct
  source 1..20: mol_type = other DNA
acgcacagcgtgtagtctcc

SEQ ID NO: 31771 - DNA, 20 bp, synthetic construct
  source 1..20: mol_type = other DNA
ctggccctggcacttcgagt

SEQ ID NO: 31772 - DNA, 20 bp, synthetic construct
  source 1..20: mol_type = other DNA
tctgcagtcgcttcctgcct

SEQ ID NO: 31773 - DNA, 20 bp, synthetic construct
  source 1..20: mol_type = other DNA
tctctgtgaattcttttgca

SEQ ID NO: 31774 - DNA, 20 bp, synthetic construct
  source 1..20: mol_type = other DNA
tctccacaccttgagggctc

SEQ ID NO: 31775 - DNA, 20 bp, synthetic construct
  source 1..20: mol_type = other DNA
tctctgtcatggtcaaaatc

SEQ ID NO: 31776 - DNA, 20 bp, synthetic construct
  source 1..20: mol_type = other DNA
ccaattcaggacccacacga

SEQ ID NO: 31777 - DNA, 20 bp, synthetic construct
  source 1..20: mol_type = other DNA
tctcttggaattggtggtgg

SEQ ID NO: 31778 - DNA, 20 bp, synthetic construct
  source 1..20: mol_type = other DNA
gaaaactcacctgggatgtg

SEQ ID NO: 31779 - DNA, 20 bp, synthetic construct
  source 1..20: mol_type = other DNA
ccagctgagccgtccgaggc

SEQ ID NO: 31780 - DNA, 20 bp, synthetic construct
  source 1..20: mol_type = other DNA
tctcaagacaggcaggccca

SEQ ID NO: 31781 - DNA, 20 bp, synthetic construct
  source 1..20: mol_type = other DNA
tctctgtcagctcccggcgt

SEQ ID NO: 31782 - DNA, 20 bp, synthetic construct
  source 1..20: mol_type = other DNA
tcgagactcgtggaactcca

SEQ ID NO: 31783 - DNA, 20 bp, synthetic construct
  source 1..20: mol_type = other DNA
acgccttcaagtctttctgc

SEQ ID NO: 31784 - DNA, 20 bp, synthetic construct
  source 1..20: mol_type = other DNA
gctgtacaagttatagggct

SEQ ID NO: 31785 - DNA, 20 bp, synthetic construct
  source 1..20: mol_type = other DNA
accaggaacaggcctgtctc

SEQ ID NO: 31786 - DNA, 20 bp, synthetic construct
  source 1..20: mol_type = other DNA
gcatgacgacggctacctcg

SEQ ID NO: 31787 - DNA, 20 bp, synthetic construct
  source 1..20: mol_type = other DNA
gtgctggaggacaatgacta

SEQ ID NO: 31788 - DNA, 20 bp, synthetic construct
  source 1..20: mol_type = other DNA
cagcgccatggccgggaccc

SEQ ID NO: 31789 - DNA, 20 bp, synthetic construct
  source 1..20: mol_type = other DNA
atgataaaggaatcatctat

SEQ ID NO: 31790 - DNA, 20 bp, synthetic construct
  source 1..20: mol_type = other DNA
tgacatcttctcaggagctc

SEQ ID NO: 31791 - DNA, 20 bp, synthetic construct
  source 1..20: mol_type = other DNA
tctcaagctgcacggactcc

SEQ ID NO: 31792 - DNA, 20 bp, synthetic construct
  source 1..20: mol_type = other DNA
tcgcagacatctctgggggt

SEQ ID NO: 31793 - DNA, 20 bp, synthetic construct
  source 1..20: mol_type = other DNA
ctgtcatgtctgggagcctg

SEQ ID NO: 31794 - DNA, 20 bp, synthetic construct
  source 1..20: mol_type = other DNA
gacgtactcgctgtgcaggg

SEQ ID NO: 31795 - DNA, 20 bp, synthetic construct
  source 1..20: mol_type = other DNA
ccggtgaggggtgtggcact

SEQ ID NO: 31796 - DNA, 20 bp, synthetic construct
  source 1..20: mol_type = other DNA
gtcgttctcagagtacatca

SEQ ID NO: 31797 - DNA, 20 bp, synthetic construct
  source 1..20: mol_type = other DNA
cagctggtggcacagtctgg

SEQ ID NO: 31798 - DNA, 20 bp, synthetic construct
  source 1..20: mol_type = other DNA
tctgccagcggctgaactgt

SEQ ID NO: 31799 - DNA, 20 bp, synthetic construct
  source 1..20: mol_type = other DNA
tgagaggtattcaggagacc

SEQ ID NO: 31800 - DNA, 20 bp, synthetic construct
  source 1..20: mol_type = other DNA
gccgcagcccgcgtagctgc

SEQ ID NO: 31801 - DNA, 20 bp, synthetic construct
  source 1..20: mol_type = other DNA
cagggcgatgcggatgcgtg

SEQ ID NO: 31802 - DNA, 20 bp, synthetic construct
  source 1..20: mol_type = other DNA
gagaaggtagaccttgggct

SEQ ID NO: 31803 - DNA, 20 bp, synthetic construct
  source 1..20: mol_type = other DNA
cgatgatgccaatggtgatg

SEQ ID NO: 31804 - DNA, 20 bp, synthetic construct
  source 1..20: mol_type = other DNA
gcgcgggcgggagggcggcg

SEQ ID NO: 31805 - DNA, 20 bp, synthetic construct
  source 1..20: mol_type = other DNA
agaggggccggctcaacacc

SEQ ID NO: 31806 - DNA, 20 bp, synthetic construct
  source 1..20: mol_type = other DNA
gccaccagctgcagcctggg

SEQ ID NO: 31807 - DNA, 20 bp, synthetic construct
  source 1..20: mol_type = other DNA
catcacactggaggcgggcg

SEQ ID NO: 31808 - DNA, 20 bp, synthetic construct
  source 1..20: mol_type = other DNA
gactgggcaagagacaagaa

SEQ ID NO: 31809 - DNA, 20 bp, synthetic construct
  source 1..20: mol_type = other DNA
aaccagagagccattcacag

SEQ ID NO: 31810 - DNA, 20 bp, synthetic construct
  source 1..20: mol_type = other DNA
ggtagacctccagctggccc

SEQ ID NO: 31811 - DNA, 20 bp, synthetic construct
  source 1..20: mol_type = other DNA
tctcgagcatacgattcata

SEQ ID NO: 31812 - DNA, 20 bp, synthetic construct
  source 1..20: mol_type = other DNA
tcactcacagcgagaacttg

SEQ ID NO: 31813 - DNA, 20 bp, synthetic construct
  source 1..20: mol_type = other DNA
agcccgaggtgagcagccgc

SEQ ID NO: 31814 - DNA, 20 bp, synthetic construct
  source 1..20: mol_type = other DNA
gcagaagtccccggacacgt

SEQ ID NO: 31815 - DNA, 20 bp, synthetic construct
  source 1..20: mol_type = other DNA
ggaaccaactggggagcagc

SEQ ID NO: 31816 - DNA, 20 bp, synthetic construct
  source 1..20: mol_type = other DNA
gcaggttcttggtcccagac

SEQ ID NO: 31817 - DNA, 20 bp, synthetic construct
  source 1..20: mol_type = other DNA
agtcagagaaagctgtctgt

SEQ ID NO: 31818 - DNA, 20 bp, synthetic construct
  source 1..20: mol_type = other DNA
cggcgggggcggcggcaggg

SEQ ID NO: 31819 - DNA, 20 bp, synthetic construct
  source 1..20: mol_type = other DNA
tgggacgtactcgctgtgca

SEQ ID NO: 31820 - DNA, 20 bp, synthetic construct
  source 1..20: mol_type = other DNA
ccaagtcgttgccagtaccc

SEQ ID NO: 31821 - DNA, 20 bp, synthetic construct
  source 1..20: mol_type = other DNA
ggctggaaggtgagtggact

SEQ ID NO: 31822 - DNA, 20 bp, synthetic construct
  source 1..20: mol_type = other DNA
gtcgcggatcagaaaggtgc

SEQ ID NO: 31823 - DNA, 20 bp, synthetic construct
  source 1..20: mol_type = other DNA
gatagcgcagcttcatcttg

SEQ ID NO: 31824 - DNA, 20 bp, synthetic construct
  source 1..20: mol_type = other DNA
tttctctaccagatcctcag

SEQ ID NO: 31825 - DNA, 20 bp, synthetic construct
  source 1..20: mol_type = other DNA
ggagaggatccagcccacct

SEQ ID NO: 31826 - DNA, 20 bp, synthetic construct
  source 1..20: mol_type = other DNA
ggaggaggaggacgaggagg

SEQ ID NO: 31827 - DNA, 20 bp, synthetic construct
  source 1..20: mol_type = other DNA
gtctcacatgaccagcgtcc

SEQ ID NO: 31828 - DNA, 20 bp, synthetic construct
  source 1..20: mol_type = other DNA
cccagctactcgggaggctg

SEQ ID NO: 31829 - DNA, 20 bp, synthetic construct
  source 1..20: mol_type = other DNA
accgaaagcacacgggccac

SEQ ID NO: 31830 - DNA, 20 bp, synthetic construct
  source 1..20: mol_type = other DNA
cgtaatactgctccagatat

SEQ ID NO: 31831 - DNA, 20 bp, synthetic construct
  source 1..20: mol_type = other DNA
ggacgtactcgctgtgcagg

SEQ ID NO: 31832 - DNA, 20 bp, synthetic construct
  source 1..20: mol_type = other DNA
ccatggtggcctggttgcgc

SEQ ID NO: 31833 - DNA, 20 bp, synthetic construct
  source 1..20: mol_type = other DNA
gcccgaaccctcaactgggg

SEQ ID NO: 31834 - DNA, 20 bp, synthetic construct
  source 1..20: mol_type = other DNA
ccaccacgccggcacagtgc

SEQ ID NO: 31835 - DNA, 20 bp, synthetic construct
  source 1..20: mol_type = other DNA
tgaagtccagcacgctgttg

SEQ ID NO: 31836 - DNA, 20 bp, synthetic construct
  source 1..20: mol_type = other DNA
cgcacagtacctgcaaaggc

SEQ ID NO: 31837 - DNA, 20 bp, synthetic construct
  source 1..20: mol_type = other DNA
ccacaggccgcgctgcaggt

SEQ ID NO: 31838 - DNA, 20 bp, synthetic construct
  source 1..20: mol_type = other DNA
aggtgcatgatcgtccacca

SEQ ID NO: 31839 - DNA, 20 bp, synthetic construct
  source 1..20: mol_type = other DNA
gcggatcagaaaggtgccgg

SEQ ID NO: 31840 - DNA, 20 bp, synthetic construct
  source 1..20: mol_type = other DNA
tgaacatccccaggtgagga

SEQ ID NO: 31841 - DNA, 20 bp, synthetic construct
  source 1..20: mol_type = other DNA
gctcaggtcgaagacttgtc

SEQ ID NO: 31842 - DNA, 20 bp, synthetic construct
  source 1..20: mol_type = other DNA
tctctttctcacgagcagcc

SEQ ID NO: 31843 - DNA, 20 bp, synthetic construct
  source 1..20: mol_type = other DNA
tctccagcgcaggtggacaa

SEQ ID NO: 31844 - DNA, 20 bp, synthetic construct
  source 1..20: mol_type = other DNA
ctttgacgcccacgtcaccc

SEQ ID NO: 31845 - DNA, 20 bp, synthetic construct
  source 1..20: mol_type = other DNA
cagctcggtcttgtagcgcg

SEQ ID NO: 31846 - DNA, 20 bp, synthetic construct
  source 1..20: mol_type = other DNA
ggccagcgctgcgggcgaca

SEQ ID NO: 31847 - DNA, 20 bp, synthetic construct
  source 1..20: mol_type = other DNA
gtgcagagccgtctggtggg

SEQ ID NO: 31848 - DNA, 20 bp, synthetic construct
  source 1..20: mol_type = other DNA
gatccttcttattcccaacc

SEQ ID NO: 31849 - DNA, 20 bp, synthetic construct
  source 1..20: mol_type = other DNA
gcttgagcacgcagtcgaag

SEQ ID NO: 31850 - DNA, 20 bp, synthetic construct
  source 1..20: mol_type = other DNA
cacgcagtcgaagcggggca

SEQ ID NO: 31851 - DNA, 20 bp, synthetic construct
  source 1..20: mol_type = other DNA
tctccgcctggggcagagag

SEQ ID NO: 31852 - DNA, 20 bp, synthetic construct
  source 1..20: mol_type = other DNA
tctctcgtaaggggtctcgg

SEQ ID NO: 31853 - DNA, 20 bp, synthetic construct
  source 1..20: mol_type = other DNA
caagctcagcatcgacgagg

SEQ ID NO: 31854 - DNA, 20 bp, synthetic construct
  source 1..20: mol_type = other DNA
catggcatgccttgatgcta

SEQ ID NO: 31855 - DNA, 20 bp, synthetic construct
  source 1..20: mol_type = other DNA
cctctcatcaagcctggtaa

SEQ ID NO: 31856 - DNA, 20 bp, synthetic construct
  source 1..20: mol_type = other DNA
tctcgatgtgctccaccacg

SEQ ID NO: 31857 - DNA, 20 bp, synthetic construct
  source 1..20: mol_type = other DNA
caggttcttggtcccagact

SEQ ID NO: 31858 - DNA, 20 bp, synthetic construct
  source 1..20: mol_type = other DNA
ttggagggcttgacatctgc

SEQ ID NO: 31859 - DNA, 20 bp, synthetic construct
  source 1..20: mol_type = other DNA
cagccccaccttctctctca

SEQ ID NO: 31860 - DNA, 20 bp, synthetic construct
  source 1..20: mol_type = other DNA
agcgactgcagaaagaagag

SEQ ID NO: 31861 - DNA, 20 bp, synthetic construct
  source 1..20: mol_type = other DNA
tgggagaggatcttggacac

SEQ ID NO: 31862 - DNA, 20 bp, synthetic construct
  source 1..20: mol_type = other DNA
ggaggaggaggaggagtgga

SEQ ID NO: 31863 - DNA, 20 bp, synthetic construct
  source 1..20: mol_type = other DNA
ttctactggagcgcagtgac

SEQ ID NO: 31864 - DNA, 20 bp, synthetic construct
  source 1..20: mol_type = other DNA
agcaaaataatatagttgtc

SEQ ID NO: 31865 - DNA, 20 bp, synthetic construct
  source 1..20: mol_type = other DNA
cgcactcgaagcagaaaacg

SEQ ID NO: 31866 - DNA, 20 bp, synthetic construct
  source 1..20: mol_type = other DNA
tcgagcaccccaacgtggtc

SEQ ID NO: 31867 - DNA, 20 bp, synthetic construct
  source 1..20: mol_type = other DNA
tagataggtatggatatcca

SEQ ID NO: 31868 - DNA, 20 bp, synthetic construct
  source 1..20: mol_type = other DNA
aggaacaggcctgtctccgg

SEQ ID NO: 31869 - DNA, 20 bp, synthetic construct
  source 1..20: mol_type = other DNA
ttcaacaggagtctcttgca

SEQ ID NO: 31870 - DNA, 20 bp, synthetic construct
  source 1..20: mol_type = other DNA
gccgtgagtaccacgaggag

SEQ ID NO: 31871 - DNA, 20 bp, synthetic construct
  source 1..20: mol_type = other DNA
caggggcaggatggcaacag

SEQ ID NO: 31872 - DNA, 20 bp, synthetic construct
  source 1..20: mol_type = other DNA
atccagcagtgcctccaagt

SEQ ID NO: 31873 - DNA, 20 bp, synthetic construct
  source 1..20: mol_type = other DNA
cactacacctcagacgcaga

SEQ ID NO: 31874 - DNA, 20 bp, synthetic construct
  source 1..20: mol_type = other DNA
cagcaggttcgcctcgccgc

SEQ ID NO: 31875 - DNA, 20 bp, synthetic construct
  source 1..20: mol_type = other DNA
acagagtccatctgcgtctg

SEQ ID NO: 31876 - DNA, 20 bp, synthetic construct
  source 1..20: mol_type = other DNA
tgagcgtgaagaagtggcgc

SEQ ID NO: 31877 - DNA, 20 bp, synthetic construct
  source 1..20: mol_type = other DNA
aggtgcagagccgtctggtg

SEQ ID NO: 31878 - DNA, 20 bp, synthetic construct
  source 1..20: mol_type = other DNA
tgacgctgagcgtgaagaag

SEQ ID NO: 31879 - DNA, 20 bp, synthetic construct
  source 1..20: mol_type = other DNA
ggctaggagtcagcgacata

SEQ ID NO: 31880 - DNA, 20 bp, synthetic construct
  source 1..20: mol_type = other DNA
ggttctgcaatgagacactc

SEQ ID NO: 31881 - DNA, 20 bp, synthetic construct
  source 1..20: mol_type = other DNA
gaaactattccaatgttcag

SEQ ID NO: 31882 - DNA, 20 bp, synthetic construct
  source 1..20: mol_type = other DNA
aatactgctccagatatggg

SEQ ID NO: 31883 - DNA, 20 bp, synthetic construct
  source 1..20: mol_type = other DNA
tcgtaatactgctccagata

SEQ ID NO: 31884 - DNA, 20 bp, synthetic construct
  source 1..20: mol_type = other DNA
ccatgcagatcctcagtttg

SEQ ID NO: 31885 - DNA, 20 bp, synthetic construct
  source 1..20: mol_type = other DNA
gcgcggaggatccaggtggg

SEQ ID NO: 31886 - DNA, 20 bp, synthetic construct
  source 1..20: mol_type = other DNA
ggtcgcaaatgaaaagtatg

SEQ ID NO: 31887 - DNA, 20 bp, synthetic construct
  source 1..20: mol_type = other DNA
gctcttgctgctccgctgtc

SEQ ID NO: 31888 - DNA, 20 bp, synthetic construct
  source 1..20: mol_type = other DNA
tgaacacttactggatgatg

SEQ ID NO: 31889 - DNA, 20 bp, synthetic construct
  source 1..20: mol_type = other DNA
ggctcaggtcgaagacttgt

SEQ ID NO: 31890 - DNA, 20 bp, synthetic construct
  source 1..20: mol_type = other DNA
cagcagcagcagcagcagcg

SEQ ID NO: 31891 - DNA, 20 bp, synthetic construct
  source 1..20: mol_type = other DNA
gggcccccagtagaatccgc

SEQ ID NO: 31892 - DNA, 20 bp, synthetic construct
  source 1..20: mol_type = other DNA
ctaggagtcagcgacatatg

SEQ ID NO: 31893 - DNA, 20 bp, synthetic construct
  source 1..20: mol_type = other DNA
cagcaggggcttcatgagcg

SEQ ID NO: 31894 - DNA, 20 bp, synthetic construct
  source 1..20: mol_type = other DNA
ggaataagatgttctacgcc

SEQ ID NO: 31895 - DNA, 20 bp, synthetic construct
  source 1..20: mol_type = other DNA
gaataagatgttctacgccg

SEQ ID NO: 31896 - DNA, 20 bp, synthetic construct
  source 1..20: mol_type = other DNA
tggacaggtaaggtatttgg

SEQ ID NO: 31897 - DNA, 20 bp, synthetic construct
  source 1..20: mol_type = other DNA
agtgctccagcagctcgaag

SEQ ID NO: 31898 - DNA, 20 bp, synthetic construct
  source 1..20: mol_type = other DNA
gggacgtactcgctgtgcag

SEQ ID NO: 31899 - DNA, 20 bp, synthetic construct
  source 1..20: mol_type = other DNA
agtgaccatgacaataactg

SEQ ID NO: 31900 - DNA, 20 bp, synthetic construct
  source 1..20: mol_type = other DNA
cacccctcaccggaaagaga

SEQ ID NO: 31901 - DNA, 20 bp, synthetic construct
  source 1..20: mol_type = other DNA
tagccgtcgtcatgccgctg

SEQ ID NO: 31902 - DNA, 20 bp, synthetic construct
  source 1..20: mol_type = other DNA
gcttacctggataagctgac

SEQ ID NO: 31903 - DNA, 20 bp, synthetic construct
  source 1..20: mol_type = other DNA
cagtcaaacagcacggccac

SEQ ID NO: 31904 - DNA, 20 bp, synthetic construct
  source 1..20: mol_type = other DNA
agataccttggccaagagct

SEQ ID NO: 31905 - DNA, 20 bp, synthetic construct
  source 1..20: mol_type = other DNA
ggaggatggggaggaggagg

SEQ ID NO: 31906 - DNA, 20 bp, synthetic construct
  source 1..20: mol_type = other DNA
gtctgccagcggctgaactg

SEQ ID NO: 31907 - DNA, 20 bp, synthetic construct
  source 1..20: mol_type = other DNA
tcacctccaccagctgcatg

SEQ ID NO: 31908 - DNA, 20 bp, synthetic construct
  source 1..20: mol_type = other DNA
cccgtaggggcaaaagccga

SEQ ID NO: 31909 - DNA, 20 bp, synthetic construct
  source 1..20: mol_type = other DNA
gtcttcctcttctgtccagg

SEQ ID NO: 31910 - DNA, 20 bp, synthetic construct
  source 1..20: mol_type = other DNA
tcgagagctcggcggagaag

SEQ ID NO: 31911 - DNA, 20 bp, synthetic construct
  source 1..20: mol_type = other DNA
tacaaattgacatgcagtgg

SEQ ID NO: 31912 - DNA, 20 bp, synthetic construct
  source 1..20: mol_type = other DNA
tgaccagcagtacgaatgcg

SEQ ID NO: 31913 - DNA, 20 bp, synthetic construct
  source 1..20: mol_type = other DNA
atcggtatctgggtaggaga

SEQ ID NO: 31914 - DNA, 20 bp, synthetic construct
  source 1..20: mol_type = other DNA
tcccccagccaacctttgta

SEQ ID NO: 31915 - DNA, 20 bp, synthetic construct
  source 1..20: mol_type = other DNA
ctgcgcatccagtgtgaggg

SEQ ID NO: 31916 - DNA, 20 bp, synthetic construct
  source 1..20: mol_type = other DNA
ctatcaacagaagatcaagg

SEQ ID NO: 31917 - DNA, 20 bp, synthetic construct
  source 1..20: mol_type = other DNA
actaagaaaaaacaaacaca

SEQ ID NO: 31918 - DNA, 20 bp, synthetic construct
  source 1..20: mol_type = other DNA
tttatatatataagatcttt

SEQ ID NO: 31919 - DNA, 20 bp, synthetic construct
  source 1..20: mol_type = other DNA
actccagagatccacggggg

SEQ ID NO: 31920 - DNA, 20 bp, synthetic construct
  source 1..20: mol_type = other DNA
accagcaggggcttcatgag

SEQ ID NO: 31921 - DNA, 20 bp, synthetic construct
  source 1..20: mol_type = other DNA
cggaataagatgttctacgc

SEQ ID NO: 31922 - DNA, 20 bp, synthetic construct
  source 1..20: mol_type = other DNA
gatggccttggtgatgaggt

SEQ ID NO: 31923 - DNA, 20 bp, synthetic construct
  source 1..20: mol_type = other DNA
tacttacagaatctataaat

SEQ ID NO: 31924 - DNA, 20 bp, synthetic construct
  source 1..20: mol_type = other DNA
ccacctggatggacacgctg

SEQ ID NO: 31925 - DNA, 20 bp, synthetic construct
  source 1..20: mol_type = other DNA
tacccagtggtgccgtacaa

SEQ ID NO: 31926 - DNA, 20 bp, synthetic construct
  source 1..20: mol_type = other DNA
agccttgcagggcagcctcg

SEQ ID NO: 31927 - DNA, 20 bp, synthetic construct
  source 1..20: mol_type = other DNA
agaagctgcccccctcacac

SEQ ID NO: 31928 - DNA, 20 bp, synthetic construct
  source 1..20: mol_type = other DNA
tacctggataagctgacagg

SEQ ID NO: 31929 - DNA, 20 bp, synthetic construct
  source 1..20: mol_type = other DNA
ggtgtatccatctgagttga

SEQ ID NO: 31930 - DNA, 20 bp, synthetic construct
  source 1..20: mol_type = other DNA
gcttcaccagtcaaacagca

SEQ ID NO: 31931 - DNA, 20 bp, synthetic construct
  source 1..20: mol_type = other DNA
caggtaacggggagccgggc

SEQ ID NO: 31932 - DNA, 20 bp, synthetic construct
  source 1..20: mol_type = other DNA
tcccccaggctggagtgcag

SEQ ID NO: 31933 - DNA, 20 bp, synthetic construct
  source 1..20: mol_type = other DNA
aaagctggaaagggacgaac

SEQ ID NO: 31934 - DNA, 20 bp, synthetic construct
  source 1..20: mol_type = other DNA
atatgccaaggagctggatc

SEQ ID NO: 31935 - DNA, 20 bp, synthetic construct
  source 1..20: mol_type = other DNA
acaatattgatgatgtagta

SEQ ID NO: 31936 - DNA, 20 bp, synthetic construct
  source 1..20: mol_type = other DNA
accagcccttgccaatccaa

SEQ ID NO: 31937 - DNA, 20 bp, synthetic construct
  source 1..20: mol_type = other DNA
gtcccagttccaggtagaag

SEQ ID NO: 31938 - DNA, 20 bp, synthetic construct
  source 1..20: mol_type = other DNA
gctgtggctgcagttggaga

SEQ ID NO: 31939 - DNA, 20 bp, synthetic construct
  source 1..20: mol_type = other DNA
tgtagcgtgattggactccc

SEQ ID NO: 31940 - DNA, 20 bp, synthetic construct
  source 1..20: mol_type = other DNA
gtcgcagatctacgagtgga

SEQ ID NO: 31941 - DNA, 20 bp, synthetic construct
  source 1..20: mol_type = other DNA
caggcgtagctggtccaggg

SEQ ID NO: 31942 - DNA, 20 bp, synthetic construct
  source 1..20: mol_type = other DNA
tacacactgcacagtggtga

SEQ ID NO: 31943 - DNA, 20 bp, synthetic construct
  source 1..20: mol_type = other DNA
caccagctggtactcgctct

SEQ ID NO: 31944 - DNA, 20 bp, synthetic construct
  source 1..20: mol_type = other DNA
ctgccagcggctgaactgtg

SEQ ID NO: 31945 - DNA, 20 bp, synthetic construct
  source 1..20: mol_type = other DNA
ggccaggatccaaaccccgc

SEQ ID NO: 31946 - DNA, 20 bp, synthetic construct
  source 1..20: mol_type = other DNA
ttgtcctccagcacctgcac

SEQ ID NO: 31947 - DNA, 20 bp, synthetic construct
  source 1..20: mol_type = other DNA
gagccccagcggcatgacga

SEQ ID NO: 31948 - DNA, 20 bp, synthetic construct
  source 1..20: mol_type = other DNA
agcaggtacaaggtggccag

SEQ ID NO: 31949 - DNA, 20 bp, synthetic construct
  source 1..20: mol_type = other DNA
cacgatcgcacagatggcac

SEQ ID NO: 31950 - DNA, 20 bp, synthetic construct
  source 1..20: mol_type = other DNA
tgccaatggtgatgtggatg

SEQ ID NO: 31951 - DNA, 20 bp, synthetic construct
  source 1..20: mol_type = other DNA
caggggcttcatgagcgggg

SEQ ID NO: 31952 - DNA, 20 bp, synthetic construct
  source 1..20: mol_type = other DNA
gagtcttcagagtcaacacc

SEQ ID NO: 31953 - DNA, 20 bp, synthetic construct
  source 1..20: mol_type = other DNA
cacggaaggacggcttacag

SEQ ID NO: 31954 - DNA, 20 bp, synthetic construct
  source 1..20: mol_type = other DNA
ttccctggctacccgatgtc

SEQ ID NO: 31955 - DNA, 20 bp, synthetic construct
  source 1..20: mol_type = other DNA
tcctcccaggctgcagctgg

SEQ ID NO: 31956 - DNA, 20 bp, synthetic construct
  source 1..20: mol_type = other DNA
caaggacccttgatgagctc

SEQ ID NO: 31957 - DNA, 20 bp, synthetic construct
  source 1..20: mol_type = other DNA
tctggcggccagcactgtgc

SEQ ID NO: 31958 - DNA, 20 bp, synthetic construct
  source 1..20: mol_type = other DNA
atacctgagtgctcttccca

SEQ ID NO: 31959 - DNA, 20 bp, synthetic construct
  source 1..20: mol_type = other DNA
gcagacttttgacgcttgac

SEQ ID NO: 31960 - DNA, 20 bp, synthetic construct
  source 1..20: mol_type = other DNA
cgggtgcagaccggcgagga

SEQ ID NO: 31961 - DNA, 20 bp, synthetic construct
  source 1..20: mol_type = other DNA
actgcagaaagaagagagga

SEQ ID NO: 31962 - DNA, 20 bp, synthetic construct
  source 1..20: mol_type = other DNA
caatggggcagtcctgcaga

SEQ ID NO: 31963 - DNA, 20 bp, synthetic construct
  source 1..20: mol_type = other DNA
gccagaagaagcagcgccag

SEQ ID NO: 31964 - DNA, 20 bp, synthetic construct
  source 1..20: mol_type = other DNA
aactggatataaatcccagt

SEQ ID NO: 31965 - DNA, 20 bp, synthetic construct
  source 1..20: mol_type = other DNA
gctgacaggccagagagagt

SEQ ID NO: 31966 - DNA, 20 bp, synthetic construct
  source 1..20: mol_type = other DNA
ccagcagtacgaatgcgtgg

SEQ ID NO: 31967 - DNA, 20 bp, synthetic construct
  source 1..20: mol_type = other DNA
ccagcaggggcttcatgagc

SEQ ID NO: 31968 - DNA, 20 bp, synthetic construct
  source 1..20: mol_type = other DNA
taccagcttcttcctgggtc

SEQ ID NO: 31969 - DNA, 20 bp, synthetic construct
  source 1..20: mol_type = other DNA
atacacactgcacagtggtg

SEQ ID NO: 31970 - DNA, 20 bp, synthetic construct
  source 1..20: mol_type = other DNA
cacactggggtttcaggtcc

SEQ ID NO: 31971 - DNA, 20 bp, synthetic construct
  source 1..20: mol_type = other DNA
gctcctgcagcggccgcacg

SEQ ID NO: 31972 - DNA, 20 bp, synthetic construct
  source 1..20: mol_type = other DNA
ccaagaactaaatggggaaa

SEQ ID NO: 31973 - DNA, 20 bp, synthetic construct
  source 1..20: mol_type = other DNA
tccagccgctctgacaccag

SEQ ID NO: 31974 - DNA, 20 bp, synthetic construct
  source 1..20: mol_type = other DNA
gctcaaggaagaactcggat

SEQ ID NO: 31975 - DNA, 20 bp, synthetic construct
  source 1..20: mol_type = other DNA
gggcgaaaaagcagttccgc

SEQ ID NO: 31976 - DNA, 20 bp, synthetic construct
  source 1..20: mol_type = other DNA
gtagccgtcgtcatgccgct

SEQ ID NO: 31977 - DNA, 20 bp, synthetic construct
  source 1..20: mol_type = other DNA
tccgcaggttgtgcactttg

SEQ ID NO: 31978 - DNA, 20 bp, synthetic construct
  source 1..20: mol_type = other DNA
cgcacagcgtgtagtctccg

SEQ ID NO: 31979 - DNA, 20 bp, synthetic construct
  source 1..20: mol_type = other DNA
agaacttactagcatcttca

SEQ ID NO: 31980 - DNA, 20 bp, synthetic construct
  source 1..20: mol_type = other DNA
gtgagccttgcctggaaatc

SEQ ID NO: 31981 - DNA, 20 bp, synthetic construct
  source 1..20: mol_type = other DNA
acctgcgcatccagtgtgag

SEQ ID NO: 31982 - DNA, 20 bp, synthetic construct
  source 1..20: mol_type = other DNA
acctgtgggctctggagttg

SEQ ID NO: 31983 - DNA, 20 bp, synthetic construct
  source 1..20: mol_type = other DNA
gggttaccttcaacaatgct

SEQ ID NO: 31984 - DNA, 20 bp, synthetic construct
  source 1..20: mol_type = other DNA
gcagccgcaggtagaccaca

SEQ ID NO: 31985 - DNA, 20 bp, synthetic construct
  source 1..20: mol_type = other DNA
caagaactaaatggggaaat

SEQ ID NO: 31986 - DNA, 20 bp, synthetic construct
  source 1..20: mol_type = other DNA
ccccactcacgtcatgactg

SEQ ID NO: 31987 - DNA, 20 bp, synthetic construct
  source 1..20: mol_type = other DNA
atacaccacgaagcgcagaa

SEQ ID NO: 31988 - DNA, 20 bp, synthetic construct
  source 1..20: mol_type = other DNA
ggccagcaggtcggcgacag

SEQ ID NO: 31989 - DNA, 20 bp, synthetic construct
  source 1..20: mol_type = other DNA
cttgagcacgcagtcgaagc

SEQ ID NO: 31990 - DNA, 20 bp, synthetic construct
  source 1..20: mol_type = other DNA
tcaagtccattccatcacac

SEQ ID NO: 31991 - DNA, 20 bp, synthetic construct
  source 1..20: mol_type = other DNA
ttacaaagagatctccgtat

SEQ ID NO: 31992 - DNA, 20 bp, synthetic construct
  source 1..20: mol_type = other DNA
ccagctggaggtctacctca

SEQ ID NO: 31993 - DNA, 20 bp, synthetic construct
  source 1..20: mol_type = other DNA
tatttaatcgaagagacccc

SEQ ID NO: 31994 - DNA, 20 bp, synthetic construct
  source 1..20: mol_type = other DNA
tgaagaggaggaagaggagg

SEQ ID NO: 31995 - DNA, 20 bp, synthetic construct
  source 1..20: mol_type = other DNA
actggaattctacaatgcgt

SEQ ID NO: 31996 - DNA, 20 bp, synthetic construct
  source 1..20: mol_type = other DNA
ttggatgatggcaagacact

SEQ ID NO: 31997 - DNA, 20 bp, synthetic construct
  source 1..20: mol_type = other DNA
aaaacacatcagtataacat

SEQ ID NO: 31998 - DNA, 20 bp, synthetic construct
  source 1..20: mol_type = other DNA
ttagcatcttgttctgtttg

SEQ ID NO: 31999 - DNA, 20 bp, synthetic construct
  source 1..20: mol_type = other DNA
ctgttttggttcattcccgt

SEQ ID NO: 32000 - DNA, 20 bp, synthetic construct
  source 1..20: mol_type = other DNA
ctgggtggagacaagcagtg

SEQ ID NO: 32001 - DNA, 20 bp, synthetic construct
  source 1..20: mol_type = other DNA
gctgctgcagaccatcggga

SEQ ID NO: 32002 - DNA, 20 bp, synthetic construct
  source 1..20: mol_type = other DNA
taggccagtcttcttctcct

SEQ ID NO: 32003 - DNA, 20 bp, synthetic construct
  source 1..20: mol_type = other DNA
cccgaaccctcaactggggt

SEQ ID NO: 32004 - DNA, 20 bp, synthetic construct
  source 1..20: mol_type = other DNA
cccgcaggcgcccggctccg

SEQ ID NO: 32005 - DNA, 20 bp, synthetic construct
  source 1..20: mol_type = other DNA
cttcagagtgttgaagatgg

SEQ ID NO: 32006 - DNA, 20 bp, synthetic construct
  source 1..20: mol_type = other DNA
tcagcgtcaagacccagtct

SEQ ID NO: 32007 - DNA, 20 bp, synthetic construct
  source 1..20: mol_type = other DNA
aagaagcagcgccagtggat

SEQ ID NO: 32008 - DNA, 20 bp, synthetic construct
  source 1..20: mol_type = other DNA
ggcggcggcggaggcggcgg

SEQ ID NO: 32009 - DNA, 20 bp, synthetic construct
  source 1..20: mol_type = other DNA
cagtggtccactgcaggcag

SEQ ID NO: 32010 - DNA, 20 bp, synthetic construct
  source 1..20: mol_type = other DNA
tgagaaggaaaagcgaataa

SEQ ID NO: 32011 - DNA, 20 bp, synthetic construct
  source 1..20: mol_type = other DNA
gaacaccgtgctggactcct

SEQ ID NO: 32012 - DNA, 20 bp, synthetic construct
  source 1..20: mol_type = other DNA
gttctcagcatgggatcgga

SEQ ID NO: 32013 - DNA, 20 bp, synthetic construct
  source 1..20: mol_type = other DNA
tggtcaagatcttcacaaaa

SEQ ID NO: 32014 - DNA, 20 bp, synthetic construct
  source 1..20: mol_type = other DNA
tggagaggatccagcccacc

SEQ ID NO: 32015 - DNA, 20 bp, synthetic construct
  source 1..20: mol_type = other DNA
tacaaggtgggtcccgcggg

SEQ ID NO: 32016 - DNA, 20 bp, synthetic construct
  source 1..20: mol_type = other DNA
cgaactgaagcgcatcgtcg

SEQ ID NO: 32017 - DNA, 20 bp, synthetic construct
  source 1..20: mol_type = other DNA
ccacaagtgaagcagcgtac

SEQ ID NO: 32018 - DNA, 20 bp, synthetic construct
  source 1..20: mol_type = other DNA
tacaaactttgggaagctgg

SEQ ID NO: 32019 - DNA, 20 bp, synthetic construct
  source 1..20: mol_type = other DNA
cagaagagcccccgggatgt

SEQ ID NO: 32020 - DNA, 20 bp, synthetic construct
  source 1..20: mol_type = other DNA
ctgtgcatgggtgagggtga

SEQ ID NO: 32021 - DNA, 20 bp, synthetic construct
  source 1..20: mol_type = other DNA
tggctgggatgatgccctca

SEQ ID NO: 32022 - DNA, 20 bp, synthetic construct
  source 1..20: mol_type = other DNA
tgccttaccagcttcttcct

SEQ ID NO: 32023 - DNA, 20 bp, synthetic construct
  source 1..20: mol_type = other DNA
tagaggatatcgtagtgtcc

SEQ ID NO: 32024 - DNA, 20 bp, synthetic construct
  source 1..20: mol_type = other DNA
agaacaagtgtgcagaatac

SEQ ID NO: 32025 - DNA, 20 bp, synthetic construct
  source 1..20: mol_type = other DNA
tctgggtggagacaagcagt

SEQ ID NO: 32026 - DNA, 20 bp, synthetic construct
  source 1..20: mol_type = other DNA
caggtggagtacatggaccg

SEQ ID NO: 32027 - DNA, 20 bp, synthetic construct
  source 1..20: mol_type = other DNA
tggtgaagccaatgacctcg

SEQ ID NO: 32028 - DNA, 20 bp, synthetic construct
  source 1..20: mol_type = other DNA
cctcccactgcttggagctc

SEQ ID NO: 32029 - DNA, 20 bp, synthetic construct
  source 1..20: mol_type = other DNA
tcttggagctgaaggtcttg

SEQ ID NO: 32030 - DNA, 20 bp, synthetic construct
  source 1..20: mol_type = other DNA
caccaagaagaagtccaaga

SEQ ID NO: 32031 - DNA, 20 bp, synthetic construct
  source 1..20: mol_type = other DNA
gacgccaggacggcaagtgt

SEQ ID NO: 32032 - DNA, 20 bp, synthetic construct
  source 1..20: mol_type = other DNA
agtagttgttgaagacatcc

SEQ ID NO: 32033 - DNA, 20 bp, synthetic construct
  source 1..20: mol_type = other DNA
atactcacaattcttggata

SEQ ID NO: 32034 - DNA, 20 bp, synthetic construct
  source 1..20: mol_type = other DNA
ccaggtcctgggtcttgtcc

SEQ ID NO: 32035 - DNA, 20 bp, synthetic construct
  source 1..20: mol_type = other DNA
cagaaaggtgccggcgggct

SEQ ID NO: 32036 - DNA, 20 bp, synthetic construct
  source 1..20: mol_type = other DNA
ctgctgcagaccatcgggaa

SEQ ID NO: 32037 - DNA, 20 bp, synthetic construct
  source 1..20: mol_type = other DNA
cctgggtactggcaacgact

SEQ ID NO: 32038 - DNA, 20 bp, synthetic construct
  source 1..20: mol_type = other DNA
ggttccacggcaagatcaca

SEQ ID NO: 32039 - DNA, 20 bp, synthetic construct
  source 1..20: mol_type = other DNA
aataggtatgtagttacctc

SEQ ID NO: 32040 - DNA, 20 bp, synthetic construct
  source 1..20: mol_type = other DNA
tacaggtaccacaggggtga

SEQ ID NO: 32041 - DNA, 20 bp, synthetic construct
  source 1..20: mol_type = other DNA
agccacagccgccttcaaca

SEQ ID NO: 32042 - DNA, 20 bp, synthetic construct
  source 1..20: mol_type = other DNA
aatgaagaaagtccagacct

SEQ ID NO: 32043 - DNA, 20 bp, synthetic construct
  source 1..20: mol_type = other DNA
cagcgatgtggagcagcagg

SEQ ID NO: 32044 - DNA, 20 bp, synthetic construct
  source 1..20: mol_type = other DNA
cgtgcacatgaatccccccc

SEQ ID NO: 32045 - DNA, 20 bp, synthetic construct
  source 1..20: mol_type = other DNA
ccgcacagtacctgcaaagg

SEQ ID NO: 32046 - DNA, 20 bp, synthetic construct
  source 1..20: mol_type = other DNA
ctgctcagtgccgagcccgc

SEQ ID NO: 32047 - DNA, 20 bp, synthetic construct
  source 1..20: mol_type = other DNA
agcactctgggaggctgagg

SEQ ID NO: 32048 - DNA, 20 bp, synthetic construct
  source 1..20: mol_type = other DNA
gcaccccacagttcagccgc

SEQ ID NO: 32049 - DNA, 20 bp, synthetic construct
  source 1..20: mol_type = other DNA
caaggtgcagagccgtctgg

SEQ ID NO: 32050 - DNA, 20 bp, synthetic construct
  source 1..20: mol_type = other DNA
agaggaggaggcggaggcgg

SEQ ID NO: 32051 - DNA, 20 bp, synthetic construct
  source 1..20: mol_type = other DNA
ccatcagtttgtggatgtta

SEQ ID NO: 32052 - DNA, 20 bp, synthetic construct
  source 1..20: mol_type = other DNA
gatattggctaaatacagaa

SEQ ID NO: 32053 - DNA, 20 bp, synthetic construct
  source 1..20: mol_type = other DNA
ctttcagaggaagcttggaa

SEQ ID NO: 32054 - DNA, 20 bp, synthetic construct
  source 1..20: mol_type = other DNA
aaggtgcatgatcgtccacc

SEQ ID NO: 32055 - DNA, 20 bp, synthetic construct
  source 1..20: mol_type = other DNA
tggaggacaatgactatggc

SEQ ID NO: 32056 - DNA, 20 bp, synthetic construct
  source 1..20: mol_type = other DNA
gcctgttgactccaattcag

SEQ ID NO: 32057 - DNA, 20 bp, synthetic construct
  source 1..20: mol_type = other DNA
agttctacagcggcagcctg

SEQ ID NO: 32058 - DNA, 20 bp, synthetic construct
  source 1..20: mol_type = other DNA
cctctcaggtttccagccca

SEQ ID NO: 32059 - DNA, 20 bp, synthetic construct
  source 1..20: mol_type = other DNA
tggagttgaaggtagtttcg

SEQ ID NO: 32060 - DNA, 20 bp, synthetic construct
  source 1..20: mol_type = other DNA
accgaattcagcaagaggtg

SEQ ID NO: 32061 - DNA, 20 bp, synthetic construct
  source 1..20: mol_type = other DNA
ctaggccagtcttcttctcc

SEQ ID NO: 32062 - DNA, 20 bp, synthetic construct
  source 1..20: mol_type = other DNA
caagagcggcggccgcgctt

SEQ ID NO: 32063 - DNA, 20 bp, synthetic construct
  source 1..20: mol_type = other DNA
tgtgcatatttattacatcg

SEQ ID NO: 32064 - DNA, 20 bp, synthetic construct
  source 1..20: mol_type = other DNA
cctcctgcaggccgcgctcg

SEQ ID NO: 32065 - DNA, 20 bp, synthetic construct
  source 1..20: mol_type = other DNA
agctgaaggtcttgaggcgc

SEQ ID NO: 32066 - DNA, 20 bp, synthetic construct
  source 1..20: mol_type = other DNA
aagtcagagaaagctgtctg

SEQ ID NO: 32067 - DNA, 20 bp, synthetic construct
  source 1..20: mol_type = other DNA
tagaccgcaggtagtccaca

SEQ ID NO: 32068 - DNA, 20 bp, synthetic construct
  source 1..20: mol_type = other DNA
cctcttcagagtgttgaaga

SEQ ID NO: 32069 - DNA, 20 bp, synthetic construct
  source 1..20: mol_type = other DNA
gatacctttatggtttcagt

SEQ ID NO: 32070 - DNA, 20 bp, synthetic construct
  source 1..20: mol_type = other DNA
gcggcagatccggagtacag

SEQ ID NO: 32071 - DNA, 20 bp, synthetic construct
  source 1..20: mol_type = other DNA
cctgcgcatccagtgtgagg

SEQ ID NO: 32072 - DNA, 20 bp, synthetic construct
  source 1..20: mol_type = other DNA
agtagaataagtacttcttg

SEQ ID NO: 32073 - DNA, 20 bp, synthetic construct
  source 1..20: mol_type = other DNA
gttacccacctaagcaggtc

SEQ ID NO: 32074 - DNA, 20 bp, synthetic construct
  source 1..20: mol_type = other DNA
cgagctgtcgcggatcagaa

SEQ ID NO: 32075 - DNA, 20 bp, synthetic construct
  source 1..20: mol_type = other DNA
ctcgtgcagtttctcatacc

SEQ ID NO: 32076 - DNA, 20 bp, synthetic construct
  source 1..20: mol_type = other DNA
ggtgcagagccgtctggtgg

SEQ ID NO: 32077 - DNA, 20 bp, synthetic construct
  source 1..20: mol_type = other DNA
gagccctgagagaggagggg

SEQ ID NO: 32078 - DNA, 20 bp, synthetic construct
  source 1..20: mol_type = other DNA
tggcggcacagctcctgcag

SEQ ID NO: 32079 - DNA, 20 bp, synthetic construct
  source 1..20: mol_type = other DNA
ctggcaggcctctatctcca

SEQ ID NO: 32080 - DNA, 20 bp, synthetic construct
  source 1..20: mol_type = other DNA
gcgggtgcagaccggcgagg

SEQ ID NO: 32081 - DNA, 20 bp, synthetic construct
  source 1..20: mol_type = other DNA
gcagaagggcaggtcctgct

SEQ ID NO: 32082 - DNA, 20 bp, synthetic construct
  source 1..20: mol_type = other DNA
gcttaccccaccccagttga

SEQ ID NO: 32083 - DNA, 20 bp, synthetic construct
  source 1..20: mol_type = other DNA
taagatccccaaaccagaag

SEQ ID NO: 32084 - DNA, 20 bp, synthetic construct
  source 1..20: mol_type = other DNA
ggcacggtgagctccccgca

SEQ ID NO: 32085 - DNA, 20 bp, synthetic construct
  source 1..20: mol_type = other DNA
acagaaatgcttgacttctg

SEQ ID NO: 32086 - DNA, 20 bp, synthetic construct
  source 1..20: mol_type = other DNA
gcggctgacgcagtgtcgcg

SEQ ID NO: 32087 - DNA, 20 bp, synthetic construct
  source 1..20: mol_type = other DNA
ttctctaccagatcctcaga

SEQ ID NO: 32088 - DNA, 20 bp, synthetic construct
  source 1..20: mol_type = other DNA
aggagcaggtgctggtctgg

SEQ ID NO: 32089 - DNA, 20 bp, synthetic construct
  source 1..20: mol_type = other DNA
cagatgcgaactcttggtgt

SEQ ID NO: 32090 - DNA, 20 bp, synthetic construct
  source 1..20: mol_type = other DNA
caccactacatgccgccccc

SEQ ID NO: 32091 - DNA, 20 bp, synthetic construct
  source 1..20: mol_type = other DNA
ttgctacagccaagagacaa

SEQ ID NO: 32092 - DNA, 20 bp, synthetic construct
  source 1..20: mol_type = other DNA
cacagcgtgacgacctgcaa

SEQ ID NO: 32093 - DNA, 20 bp, synthetic construct
  source 1..20: mol_type = other DNA
cgatcctgaaaattgaaaac

SEQ ID NO: 32094 - DNA, 20 bp, synthetic construct
  source 1..20: mol_type = other DNA
gaaaagatcacttttctctt

SEQ ID NO: 32095 - DNA, 20 bp, synthetic construct
  source 1..20: mol_type = other DNA
cagagctcaatcatctgcta

SEQ ID NO: 32096 - DNA, 20 bp, synthetic construct
  source 1..20: mol_type = other DNA
tgcccgcacagtacctgcaa

SEQ ID NO: 32097 - DNA, 20 bp, synthetic construct
  source 1..20: mol_type = other DNA
ccgtctgcccagccactccc

SEQ ID NO: 32098 - DNA, 20 bp, synthetic construct
  source 1..20: mol_type = other DNA
tgagccttgcctggaaatct

SEQ ID NO: 32099 - DNA, 20 bp, synthetic construct
  source 1..20: mol_type = other DNA
accatggtggcggatggcgg

SEQ ID NO: 32100 - DNA, 20 bp, synthetic construct
  source 1..20: mol_type = other DNA
aacactccagagatccacgg

SEQ ID NO: 32101 - DNA, 20 bp, synthetic construct
  source 1..20: mol_type = other DNA
cagacttttgacgcttgact

SEQ ID NO: 32102 - DNA, 20 bp, synthetic construct
  source 1..20: mol_type = other DNA
ccgggcggcgggggctgcgg

SEQ ID NO: 32103 - DNA, 20 bp, synthetic construct
  source 1..20: mol_type = other DNA
gtaggaagagccgcaccagc

SEQ ID NO: 32104 - DNA, 20 bp, synthetic construct
  source 1..20: mol_type = other DNA
ctggactggagcaagacttc

SEQ ID NO: 32105 - DNA, 20 bp, synthetic construct
  source 1..20: mol_type = other DNA
ctgaacatccccaggtgagg

SEQ ID NO: 32106 - DNA, 20 bp, synthetic construct
  source 1..20: mol_type = other DNA
ctctcctcagtaccacagca

SEQ ID NO: 32107 - DNA, 20 bp, synthetic construct
  source 1..20: mol_type = other DNA
gctcgccatccacctgcacc

SEQ ID NO: 32108 - DNA, 20 bp, synthetic construct
  source 1..20: mol_type = other DNA
tgatgagcttatcctcacca

SEQ ID NO: 32109 - DNA, 20 bp, synthetic construct
  source 1..20: mol_type = other DNA
tgtggaaggtgaacttctgc

SEQ ID NO: 32110 - DNA, 20 bp, synthetic construct
  source 1..20: mol_type = other DNA
ctgagatcgaaaacctctca

SEQ ID NO: 32111 - DNA, 20 bp, synthetic construct
  source 1..20: mol_type = other DNA
taccttggtgacggccacaa

SEQ ID NO: 32112 - DNA, 20 bp, synthetic construct
  source 1..20: mol_type = other DNA
agaggagccgtcaaatccag

SEQ ID NO: 32113 - DNA, 20 bp, synthetic construct
  source 1..20: mol_type = other DNA
cttaaagcggggcatcgtac

SEQ ID NO: 32114 - DNA, 20 bp, synthetic construct
  source 1..20: mol_type = other DNA
gctgttgaatttctctgggt

SEQ ID NO: 32115 - DNA, 20 bp, synthetic construct
  source 1..20: mol_type = other DNA
cgcggaggatccaggtgggc

SEQ ID NO: 32116 - DNA, 20 bp, synthetic construct
  source 1..20: mol_type = other DNA
taccatcagctatgaggccc

SEQ ID NO: 32117 - DNA, 20 bp, synthetic construct
  source 1..20: mol_type = other DNA
ttccctagcatgtttcgcca

SEQ ID NO: 32118 - DNA, 20 bp, synthetic construct
  source 1..20: mol_type = other DNA
tgtgcacatgaggtgtccac

SEQ ID NO: 32119 - DNA, 20 bp, synthetic construct
  source 1..20: mol_type = other DNA
gtctcagttcaaagacacga

SEQ ID NO: 32120 - DNA, 20 bp, synthetic construct
  source 1..20: mol_type = other DNA
gctccccgttacctgtgccg

SEQ ID NO: 32121 - DNA, 20 bp, synthetic construct
  source 1..20: mol_type = other DNA
cactgcaacctcctcctccc

SEQ ID NO: 32122 - DNA, 20 bp, synthetic construct
  source 1..20: mol_type = other DNA
ccagcgcaatgatgtggatg

SEQ ID NO: 32123 - DNA, 20 bp, synthetic construct
  source 1..20: mol_type = other DNA
catgcagatgagtgccctgg

SEQ ID NO: 32124 - DNA, 20 bp, synthetic construct
  source 1..20: mol_type = other DNA
tccgcgaggtggcggtgctg

SEQ ID NO: 32125 - DNA, 20 bp, synthetic construct
  source 1..20: mol_type = other DNA
cgtgcgggtgcagaccggcg

SEQ ID NO: 32126 - DNA, 20 bp, synthetic construct
  source 1..20: mol_type = other DNA
gttctacgccggggtgagtg

SEQ ID NO: 32127 - DNA, 20 bp, synthetic construct
  source 1..20: mol_type = other DNA
ggcaggatggcaacaggggg

SEQ ID NO: 32128 - DNA, 20 bp, synthetic construct
  source 1..20: mol_type = other DNA
cttggcccgaaccctcaact

SEQ ID NO: 32129 - DNA, 20 bp, synthetic construct
  source 1..20: mol_type = other DNA
catggtggcctggttgcgca

SEQ ID NO: 32130 - DNA, 20 bp, synthetic construct
  source 1..20: mol_type = other DNA
gatatgaattatgagaccat

SEQ ID NO: 32131 - DNA, 20 bp, synthetic construct
  source 1..20: mol_type = other DNA
gaaagagatggcatatgagt

SEQ ID NO: 32132 - DNA, 20 bp, synthetic construct
  source 1..20: mol_type = other DNA
tttcatccaagaactaaatg

SEQ ID NO: 32133 - DNA, 20 bp, synthetic construct
  source 1..20: mol_type = other DNA
gtacaaagccaaaaacaagg

SEQ ID NO: 32134 - DNA, 20 bp, synthetic construct
  source 1..20: mol_type = other DNA
tcagggactatgtggaggta

SEQ ID NO: 32135 - DNA, 20 bp, synthetic construct
  source 1..20: mol_type = other DNA
ccgccaccccaagtacaaga

SEQ ID NO: 32136 - DNA, 20 bp, synthetic construct
  source 1..20: mol_type = other DNA
acaggtacgtgtgctccccg

SEQ ID NO: 32137 - DNA, 20 bp, synthetic construct
  source 1..20: mol_type = other DNA
tctaggggtcggtcagtgct

SEQ ID NO: 32138 - DNA, 20 bp, synthetic construct
  source 1..20: mol_type = other DNA
tcatcatctcatccagacat

SEQ ID NO: 32139 - DNA, 20 bp, synthetic construct
  source 1..20: mol_type = other DNA
ccgggcggcggcgggggcgg

SEQ ID NO: 32140 - DNA, 20 bp, synthetic construct
  source 1..20: mol_type = other DNA
acctggcgctgcacatgaaa

SEQ ID NO: 32141 - DNA, 20 bp, synthetic construct
  source 1..20: mol_type = other DNA
gctgcagctccagcagggcg

SEQ ID NO: 32142 - DNA, 20 bp, synthetic construct
  source 1..20: mol_type = other DNA
aaggtgcagagccgtctggt

SEQ ID NO: 32143 - DNA, 20 bp, synthetic construct
  source 1..20: mol_type = other DNA
gctaggagtcagcgacatat

SEQ ID NO: 32144 - DNA, 20 bp, synthetic construct
  source 1..20: mol_type = other DNA
tcttcgacctgagccaggga

SEQ ID NO: 32145 - DNA, 20 bp, synthetic construct
  source 1..20: mol_type = other DNA
cagccaactacgtccagaag

SEQ ID NO: 32146 - DNA, 20 bp, synthetic construct
  source 1..20: mol_type = other DNA
gctggactggagcaagactt

SEQ ID NO: 32147 - DNA, 20 bp, synthetic construct
  source 1..20: mol_type = other DNA
ggctgagggcagtgcctacg

SEQ ID NO: 32148 - DNA, 20 bp, synthetic construct
  source 1..20: mol_type = other DNA
ctcagtttgaggagcaagtg

SEQ ID NO: 32149 - DNA, 20 bp, synthetic construct
  source 1..20: mol_type = other DNA
ttggacaggtaaggtatttg

SEQ ID NO: 32150 - DNA, 20 bp, synthetic construct
  source 1..20: mol_type = other DNA
ctcgagactcgtggaactcc

SEQ ID NO: 32151 - DNA, 20 bp, synthetic construct
  source 1..20: mol_type = other DNA
ccttgaacctgggggtggga

SEQ ID NO: 32152 - DNA, 20 bp, synthetic construct
  source 1..20: mol_type = other DNA
tcaagaaggagccacactgg

SEQ ID NO: 32153 - DNA, 20 bp, synthetic construct
  source 1..20: mol_type = other DNA
catcttagagtttaacagat

SEQ ID NO: 32154 - DNA, 20 bp, synthetic construct
  source 1..20: mol_type = other DNA
acagattgtatatcttgtaa

SEQ ID NO: 32155 - DNA, 20 bp, synthetic construct
  source 1..20: mol_type = other DNA
ttctccagctgctcgatgca

SEQ ID NO: 32156 - DNA, 20 bp, synthetic construct
  source 1..20: mol_type = other DNA
gttccacggcaagatcacac

SEQ ID NO: 32157 - DNA, 20 bp, synthetic construct
  source 1..20: mol_type = other DNA
cctgggccagcgcaatgatg

SEQ ID NO: 32158 - DNA, 20 bp, synthetic construct
  source 1..20: mol_type = other DNA
gaggaggagtggatggagga

SEQ ID NO: 32159 - DNA, 20 bp, synthetic construct
  source 1..20: mol_type = other DNA
tcctctcatcaagcctggta

SEQ ID NO: 32160 - DNA, 20 bp, synthetic construct
  source 1..20: mol_type = other DNA
caagagcgagtaccagctgg

SEQ ID NO: 32161 - DNA, 20 bp, synthetic construct
  source 1..20: mol_type = other DNA
gactgcagaaagaagagagg

SEQ ID NO: 32162 - DNA, 20 bp, synthetic construct
  source 1..20: mol_type = other DNA
ggcggcggcggaggaggagg

SEQ ID NO: 32163 - DNA, 20 bp, synthetic construct
  source 1..20: mol_type = other DNA
catctgcgcacgcacacagg

SEQ ID NO: 32164 - DNA, 20 bp, synthetic construct
  source 1..20: mol_type = other DNA
ctatgaggacctcatgcgct

SEQ ID NO: 32165 - DNA, 20 bp, synthetic construct
  source 1..20: mol_type = other DNA
ttgtaccagttggggtcctg

SEQ ID NO: 32166 - DNA, 20 bp, synthetic construct
  source 1..20: mol_type = other DNA
gggaggaggaggttgcagtg

SEQ ID NO: 32167 - DNA, 20 bp, synthetic construct
  source 1..20: mol_type = other DNA
gggtgtatccatctgagttg

SEQ ID NO: 32168 - DNA, 20 bp, synthetic construct
  source 1..20: mol_type = other DNA
aaaatatgcaaacatcactg

SEQ ID NO: 32169 - DNA, 20 bp, synthetic construct
  source 1..20: mol_type = other DNA
tccccagtctcttgtgtgcc

SEQ ID NO: 32170 - DNA, 20 bp, synthetic construct
  source 1..20: mol_type = other DNA
tgacgtgggcgtcaaagccc

SEQ ID NO: 32171 - DNA, 20 bp, synthetic construct
  source 1..20: mol_type = other DNA
tatcaacagaagatcaaggt

SEQ ID NO: 32172 - DNA, 20 bp, synthetic construct
  source 1..20: mol_type = other DNA
tcacgcccaggagctgcacc

SEQ ID NO: 32173 - DNA, 20 bp, synthetic construct
  source 1..20: mol_type = other DNA
ggggcagatcgcttgagccc

SEQ ID NO: 32174 - DNA, 20 bp, synthetic construct
  source 1..20: mol_type = other DNA
tggtgcagaaggccaagcgg

SEQ ID NO: 32175 - DNA, 20 bp, synthetic construct
  source 1..20: mol_type = other DNA
cacaactacctggctgtttg

SEQ ID NO: 32176 - DNA, 20 bp, synthetic construct
  source 1..20: mol_type = other DNA
ccgaattcagcaagaggtga

SEQ ID NO: 32177 - DNA, 20 bp, synthetic construct
  source 1..20: mol_type = other DNA
ctagagaaactgttgcataa

SEQ ID NO: 32178 - DNA, 20 bp, synthetic construct
  source 1..20: mol_type = other DNA
gtaccagcctcagccttgag

SEQ ID NO: 32179 - DNA, 20 bp, synthetic construct
  source 1..20: mol_type = other DNA
gtagaataagtacttcttga

SEQ ID NO: 32180 - DNA, 20 bp, synthetic construct
  source 1..20: mol_type = other DNA
gtgtcctacctgaaagagtc

SEQ ID NO: 32181 - DNA, 20 bp, synthetic construct
  source 1..20: mol_type = other DNA
gggttccatgatataatccc

SEQ ID NO: 32182 - DNA, 20 bp, synthetic construct
  source 1..20: mol_type = other DNA
gccacaggccccagccacag

SEQ ID NO: 32183 - DNA, 20 bp, synthetic construct
  source 1..20: mol_type = other DNA
taatagtcctctatgtcccc

SEQ ID NO: 32184 - DNA, 20 bp, synthetic construct
  source 1..20: mol_type = other DNA
atccagcgtaagaataacag

SEQ ID NO: 32185 - DNA, 20 bp, synthetic construct
  source 1..20: mol_type = other DNA
aggacctggtgtggaagctg

SEQ ID NO: 32186 - DNA, 20 bp, synthetic construct
  source 1..20: mol_type = other DNA
ggtgtagtgctgcagggtgt

SEQ ID NO: 32187 - DNA, 20 bp, synthetic construct
  source 1..20: mol_type = other DNA
gtgcacatgaggtgtccaca

SEQ ID NO: 32188 - DNA, 20 bp, synthetic construct
  source 1..20: mol_type = other DNA
ccatgtgccatccgtccttg

SEQ ID NO: 32189 - DNA, 20 bp, synthetic construct
  source 1..20: mol_type = other DNA
gcatgtcgacttctcctcgg

SEQ ID NO: 32190 - DNA, 20 bp, synthetic construct
  source 1..20: mol_type = other DNA
ggctcgccatccacctgcac

SEQ ID NO: 32191 - DNA, 20 bp, synthetic construct
  source 1..20: mol_type = other DNA
ctgcagctggtggcacagtc

SEQ ID NO: 32192 - DNA, 20 bp, synthetic construct
  source 1..20: mol_type = other DNA
ccatcacactggaggcgggc

SEQ ID NO: 32193 - DNA, 20 bp, synthetic construct
  source 1..20: mol_type = other DNA
cccgtggatctctggagtgt

SEQ ID NO: 32194 - DNA, 20 bp, synthetic construct
  source 1..20: mol_type = other DNA
tgcaccgattgcactgtact

SEQ ID NO: 32195 - DNA, 20 bp, synthetic construct
  source 1..20: mol_type = other DNA
ccatgaactgcagccacgga

SEQ ID NO: 32196 - DNA, 20 bp, synthetic construct
  source 1..20: mol_type = other DNA
aggtgtagtgctgcagggtg

SEQ ID NO: 32197 - DNA, 20 bp, synthetic construct
  source 1..20: mol_type = other DNA
tgagctgctgcgacccgagc

SEQ ID NO: 32198 - DNA, 20 bp, synthetic construct
  source 1..20: mol_type = other DNA
gccctacagtccctcgcctg

SEQ ID NO: 32199 - DNA, 20 bp, synthetic construct
  source 1..20: mol_type = other DNA
ggatcatgaggaacacgtcc

SEQ ID NO: 32200 - DNA, 20 bp, synthetic construct
  source 1..20: mol_type = other DNA
caacactccagagatccacg

SEQ ID NO: 32201 - DNA, 20 bp, synthetic construct
  source 1..20: mol_type = other DNA
tatacaaactttgggaagct

SEQ ID NO: 32202 - DNA, 20 bp, synthetic construct
  source 1..20: mol_type = other DNA
gggcaactggaaaaaggtca

SEQ ID NO: 32203 - DNA, 20 bp, synthetic construct
  source 1..20: mol_type = other DNA
agaacatcttattccgaaag

SEQ ID NO: 32204 - DNA, 20 bp, synthetic construct
  source 1..20: mol_type = other DNA
ttccccagataatctgatag

SEQ ID NO: 32205 - DNA, 20 bp, synthetic construct
  source 1..20: mol_type = other DNA
gacgtccagcacctgcgtgg

SEQ ID NO: 32206 - DNA, 20 bp, synthetic construct
  source 1..20: mol_type = other DNA
tggcttcaccatgacgtcgt

SEQ ID NO: 32207 - DNA, 20 bp, synthetic construct
  source 1..20: mol_type = other DNA
ctcagacaccagcacattgc

SEQ ID NO: 32208 - DNA, 20 bp, synthetic construct
  source 1..20: mol_type = other DNA
cgcgcttcaacgccacgaaa

SEQ ID NO: 32209 - DNA, 20 bp, synthetic construct
  source 1..20: mol_type = other DNA
caggcgcaacaccaggtgca

SEQ ID NO: 32210 - DNA, 20 bp, synthetic construct
  source 1..20: mol_type = other DNA
cacagctcggtcttgtactt

SEQ ID NO: 32211 - DNA, 20 bp, synthetic construct
  source 1..20: mol_type = other DNA
ggttgccccacgcgttgcgg

SEQ ID NO: 32212 - DNA, 20 bp, synthetic construct
  source 1..20: mol_type = other DNA
ttcaggtgttgagccagtgc

SEQ ID NO: 32213 - DNA, 20 bp, synthetic construct
  source 1..20: mol_type = other DNA
gccatggcgcggcgggcgcg

SEQ ID NO: 32214 - DNA, 20 bp, synthetic construct
  source 1..20: mol_type = other DNA
cagaagttaagaaaacctcc

SEQ ID NO: 32215 - DNA, 20 bp, synthetic construct
  source 1..20: mol_type = other DNA
gatgaccaactcttggatga

SEQ ID NO: 32216 - DNA, 20 bp, synthetic construct
  source 1..20: mol_type = other DNA
ctggaagtatgggtgagaca

SEQ ID NO: 32217 - DNA, 20 bp, synthetic construct
  source 1..20: mol_type = other DNA
gtgtccgcccacctgcagcg

SEQ ID NO: 32218 - DNA, 20 bp, synthetic construct
  source 1..20: mol_type = other DNA
acacactgcacagtggtgag

SEQ ID NO: 32219 - DNA, 20 bp, synthetic construct
  source 1..20: mol_type = other DNA
cctagcactttgggaggctg

SEQ ID NO: 32220 - DNA, 20 bp, synthetic construct
  source 1..20: mol_type = other DNA
tgcaggtgaagagctgattg

SEQ ID NO: 32221 - DNA, 20 bp, synthetic construct
  source 1..20: mol_type = other DNA
catcatctcatccagacatc

SEQ ID NO: 32222 - DNA, 20 bp, synthetic construct
  source 1..20: mol_type = other DNA
gaggagaccagcagtgacca

SEQ ID NO: 32223 - DNA, 20 bp, synthetic construct
  source 1..20: mol_type = other DNA
accaggcacacaagagactg

SEQ ID NO: 32224 - DNA, 20 bp, synthetic construct
  source 1..20: mol_type = other DNA
cacagtgcgccctgggggag

SEQ ID NO: 32225 - DNA, 20 bp, synthetic construct
  source 1..20: mol_type = other DNA
acctctgaattggagtcaac

SEQ ID NO: 32226 - DNA, 20 bp, synthetic construct
  source 1..20: mol_type = other DNA
gttcttgccctcctttgctc

SEQ ID NO: 32227 - DNA, 20 bp, synthetic construct
  source 1..20: mol_type = other DNA
cacctggatggacacgctga

SEQ ID NO: 32228 - DNA, 20 bp, synthetic construct
  source 1..20: mol_type = other DNA
cctgtgggcacaggaagctt

SEQ ID NO: 32229 - DNA, 20 bp, synthetic construct
  source 1..20: mol_type = other DNA
tgtatacctgtattattggt

SEQ ID NO: 32230 - DNA, 20 bp, synthetic construct
  source 1..20: mol_type = other DNA
tcctatcgagtgctggacgc

SEQ ID NO: 32231 - DNA, 20 bp, synthetic construct
  source 1..20: mol_type = other DNA
accaaaacagtaagtgtccc

SEQ ID NO: 32232 - DNA, 20 bp, synthetic construct
  source 1..20: mol_type = other DNA
aggctggtactggccctctg

SEQ ID NO: 32233 - DNA, 20 bp, synthetic construct
  source 1..20: mol_type = other DNA
cttacctggatatagtcaac

SEQ ID NO: 32234 - DNA, 20 bp, synthetic construct
  source 1..20: mol_type = other DNA
gctgactcctagccacggga

SEQ ID NO: 32235 - DNA, 20 bp, synthetic construct
  source 1..20: mol_type = other DNA
ggatgatctggccccctccg

SEQ ID NO: 32236 - DNA, 20 bp, synthetic construct
  source 1..20: mol_type = other DNA
gctgcgggcgacagggcaat

SEQ ID NO: 32237 - DNA, 20 bp, synthetic construct
  source 1..20: mol_type = other DNA
ccaggtgggcgggatgacca

SEQ ID NO: 32238 - DNA, 20 bp, synthetic construct
  source 1..20: mol_type = other DNA
aacatccccaggtgaggagg

SEQ ID NO: 32239 - DNA, 20 bp, synthetic construct
  source 1..20: mol_type = other DNA
ttgacatgaccgctaaagaa

SEQ ID NO: 32240 - DNA, 20 bp, synthetic construct
  source 1..20: mol_type = other DNA
gggagtcaatgaggttgatg

SEQ ID NO: 32241 - DNA, 20 bp, synthetic construct
  source 1..20: mol_type = other DNA
ttggcccgaaccctcaactg

SEQ ID NO: 32242 - DNA, 20 bp, synthetic construct
  source 1..20: mol_type = other DNA
acctagaagaaaaaacaaag

SEQ ID NO: 32243 - DNA, 20 bp, synthetic construct
  source 1..20: mol_type = other DNA
cttacaagttcaaccggagg

SEQ ID NO: 32244 - DNA, 20 bp, synthetic construct
  source 1..20: mol_type = other DNA
aaggacccttgatgagctca

SEQ ID NO: 32245 - DNA, 20 bp, synthetic construct
  source 1..20: mol_type = other DNA
cacaggccccagccacagtg

SEQ ID NO: 32246 - DNA, 20 bp, synthetic construct
  source 1..20: mol_type = other DNA
gccgctgtcgcagcacccgc

SEQ ID NO: 32247 - DNA, 20 bp, synthetic construct
  source 1..20: mol_type = other DNA
aggaggcctgtgagtgcggt

SEQ ID NO: 32248 - DNA, 20 bp, synthetic construct
  source 1..20: mol_type = other DNA
tgcaggagagcggcttctac

SEQ ID NO: 32249 - DNA, 20 bp, synthetic construct
  source 1..20: mol_type = other DNA
caagtgaactggtactcctc

SEQ ID NO: 32250 - DNA, 20 bp, synthetic construct
  source 1..20: mol_type = other DNA
cccatgcagatgagtgccct

SEQ ID NO: 32251 - DNA, 20 bp, synthetic construct
  source 1..20: mol_type = other DNA
cttctacacagttatttgcc

SEQ ID NO: 32252 - DNA, 20 bp, synthetic construct
  source 1..20: mol_type = other DNA
gtacacagacgacgccagga

SEQ ID NO: 32253 - DNA, 20 bp, synthetic construct
  source 1..20: mol_type = other DNA
ggcagcagcggcggcggcgg

SEQ ID NO: 32254 - DNA, 20 bp, synthetic construct
  source 1..20: mol_type = other DNA
ctgactcctagccacgggat

SEQ ID NO: 32255 - DNA, 20 bp, synthetic construct
  source 1..20: mol_type = other DNA
gcatgagaatcacttgaacc

SEQ ID NO: 32256 - DNA, 20 bp, synthetic construct
  source 1..20: mol_type = other DNA
ttcctgaacatccccaggtg

SEQ ID NO: 32257 - DNA, 20 bp, synthetic construct
  source 1..20: mol_type = other DNA
gtctctgaaattacaaagta

SEQ ID NO: 32258 - DNA, 20 bp, synthetic construct
  source 1..20: mol_type = other DNA
ctgggaagggcaacatctct

SEQ ID NO: 32259 - DNA, 20 bp, synthetic construct
  source 1..20: mol_type = other DNA
gtatgagaaactgcacgagt

SEQ ID NO: 32260 - DNA, 20 bp, synthetic construct
  source 1..20: mol_type = other DNA
ggaagacagaattatttacc

SEQ ID NO: 32261 - DNA, 20 bp, synthetic construct
  source 1..20: mol_type = other DNA
ccaggagctgcaccgagctg

SEQ ID NO: 32262 - DNA, 20 bp, synthetic construct
  source 1..20: mol_type = other DNA
gggggctacggaggagctgg

SEQ ID NO: 32263 - DNA, 20 bp, synthetic construct
  source 1..20: mol_type = other DNA
aggaggtggagaaggagaag

SEQ ID NO: 32264 - DNA, 20 bp, synthetic construct
  source 1..20: mol_type = other DNA
gacagaaatgcttgacttct

SEQ ID NO: 32265 - DNA, 20 bp, synthetic construct
  source 1..20: mol_type = other DNA
cagctttggccatttatgag

SEQ ID NO: 32266 - DNA, 20 bp, synthetic construct
  source 1..20: mol_type = other DNA
acgaatacagccaacctccc

SEQ ID NO: 32267 - DNA, 20 bp, synthetic construct
  source 1..20: mol_type = other DNA
gtcggggattgagataccag

SEQ ID NO: 32268 - DNA, 20 bp, synthetic construct
  source 1..20: mol_type = other DNA
cgggctggcgaaagtggaga

SEQ ID NO: 32269 - DNA, 20 bp, synthetic construct
  source 1..20: mol_type = other DNA
caggagctgcaccgagctgg

SEQ ID NO: 32270 - DNA, 20 bp, synthetic construct
  source 1..20: mol_type = other DNA
ggcccagactgtgaacctgc

SEQ ID NO: 32271 - DNA, 20 bp, synthetic construct
  source 1..20: mol_type = other DNA
tggcaaaaccatcacccttg

SEQ ID NO: 32272 - DNA, 20 bp, synthetic construct
  source 1..20: mol_type = other DNA
cttaccaaaggtgctgctct

SEQ ID NO: 32273 - DNA, 20 bp, synthetic construct
  source 1..20: mol_type = other DNA
gaacgccgacgagcggatga

SEQ ID NO: 32274 - DNA, 20 bp, synthetic construct
  source 1..20: mol_type = other DNA
ataagatacctgctttgtag

SEQ ID NO: 32275 - DNA, 20 bp, synthetic construct
  source 1..20: mol_type = other DNA
agaggcagtcgaagctctcg

SEQ ID NO: 32276 - DNA, 20 bp, synthetic construct
  source 1..20: mol_type = other DNA
gtattacgacccgagtgacg

SEQ ID NO: 32277 - DNA, 20 bp, synthetic construct
  source 1..20: mol_type = other DNA
cctggttgcccccactcttg

SEQ ID NO: 32278 - DNA, 20 bp, synthetic construct
  source 1..20: mol_type = other DNA
ggatccagcccacctggggg

SEQ ID NO: 32279 - DNA, 20 bp, synthetic construct
  source 1..20: mol_type = other DNA
cctggggcctccgggcgcgg

SEQ ID NO: 32280 - DNA, 20 bp, synthetic construct
  source 1..20: mol_type = other DNA
ccatagaagcccacgatgta

SEQ ID NO: 32281 - DNA, 20 bp, synthetic construct
  source 1..20: mol_type = other DNA
ctagcttcttgtaggcaagg

SEQ ID NO: 32282 - DNA, 20 bp, synthetic construct
  source 1..20: mol_type = other DNA
caaagtcgtggtgctcccca

SEQ ID NO: 32283 - DNA, 20 bp, synthetic construct
  source 1..20: mol_type = other DNA
cgatgctgagcttgctggca

SEQ ID NO: 32284 - DNA, 20 bp, synthetic construct
  source 1..20: mol_type = other DNA
gtaccattcagcatcttgta

SEQ ID NO: 32285 - DNA, 20 bp, synthetic construct
  source 1..20: mol_type = other DNA
caccatcttcacggacgcca

SEQ ID NO: 32286 - DNA, 20 bp, synthetic construct
  source 1..20: mol_type = other DNA
agtactcacctggggcctcc

SEQ ID NO: 32287 - DNA, 20 bp, synthetic construct
  source 1..20: mol_type = other DNA
ctgcaaggcaggtgacacgt

SEQ ID NO: 32288 - DNA, 20 bp, synthetic construct
  source 1..20: mol_type = other DNA
caggaaggtgcccacgggct

SEQ ID NO: 32289 - DNA, 20 bp, synthetic construct
  source 1..20: mol_type = other DNA
tgccgtgagtaccacgagga

SEQ ID NO: 32290 - DNA, 20 bp, synthetic construct
  source 1..20: mol_type = other DNA
cttaccggtgcatctgccac

SEQ ID NO: 32291 - DNA, 20 bp, synthetic construct
  source 1..20: mol_type = other DNA
tgagtccacctgcttggcca

SEQ ID NO: 32292 - DNA, 20 bp, synthetic construct
  source 1..20: mol_type = other DNA
cgtctgcccagccactccct

SEQ ID NO: 32293 - DNA, 20 bp, synthetic construct
  source 1..20: mol_type = other DNA
gacggcaagtgtcggcactg

SEQ ID NO: 32294 - DNA, 20 bp, synthetic construct
  source 1..20: mol_type = other DNA
ctggtacaaagccaaaaaca

SEQ ID NO: 32295 - DNA, 20 bp, synthetic construct
  source 1..20: mol_type = other DNA
gctacaagaccgagctgtgc

SEQ ID NO: 32296 - DNA, 20 bp, synthetic construct
  source 1..20: mol_type = other DNA
ttactataacaacagtacca

SEQ ID NO: 32297 - DNA, 20 bp, synthetic construct
  source 1..20: mol_type = other DNA
ggaggagatcaaggagtaca

SEQ ID NO: 32298 - DNA, 20 bp, synthetic construct
  source 1..20: mol_type = other DNA
gtccagctacgccacccccg

SEQ ID NO: 32299 - DNA, 20 bp, synthetic construct
  source 1..20: mol_type = other DNA
tcgtgcatgcgaggtcccgg

SEQ ID NO: 32300 - DNA, 20 bp, synthetic construct
  source 1..20: mol_type = other DNA
tgtgggctctggagttgtgg

SEQ ID NO: 32301 - DNA, 20 bp, synthetic construct
  source 1..20: mol_type = other DNA
ctagtccaagatgttttcct

SEQ ID NO: 32302 - DNA, 20 bp, synthetic construct
  source 1..20: mol_type = other DNA
ctggcgaaagtggagaagga

SEQ ID NO: 32303 - DNA, 20 bp, synthetic construct
  source 1..20: mol_type = other DNA
tcccagacacgcctgcgtag

SEQ ID NO: 32304 - DNA, 20 bp, synthetic construct
  source 1..20: mol_type = other DNA
caggacaataagtcgagtta

SEQ ID NO: 32305 - DNA, 20 bp, synthetic construct
  source 1..20: mol_type = other DNA
caccaagagttcgcatctga

SEQ ID NO: 32306 - DNA, 20 bp, synthetic construct
  source 1..20: mol_type = other DNA
ctacgccgacctcatcacca

SEQ ID NO: 32307 - DNA, 20 bp, synthetic construct
  source 1..20: mol_type = other DNA
gagttctacagcggcagcct

SEQ ID NO: 32308 - DNA, 20 bp, synthetic construct
  source 1..20: mol_type = other DNA
gcaggcgtccaggagcgcgc

SEQ ID NO: 32309 - DNA, 20 bp, synthetic construct
  source 1..20: mol_type = other DNA
gcggctgcggaaccggctgg

SEQ ID NO: 32310 - DNA, 20 bp, synthetic construct
  source 1..20: mol_type = other DNA
cccacctgcagcgcggcctg

SEQ ID NO: 32311 - DNA, 20 bp, synthetic construct
  source 1..20: mol_type = other DNA
ataatcactcaggtgagtga

SEQ ID NO: 32312 - DNA, 20 bp, synthetic construct
  source 1..20: mol_type = other DNA
ttggtcaagatcttcacaaa

SEQ ID NO: 32313 - DNA, 20 bp, synthetic construct
  source 1..20: mol_type = other DNA
tgcacagtggtgagggggat

SEQ ID NO: 32314 - DNA, 20 bp, synthetic construct
  source 1..20: mol_type = other DNA
cagtgactatgatctgcatg

SEQ ID NO: 32315 - DNA, 20 bp, synthetic construct
  source 1..20: mol_type = other DNA
attacttggaacatcttcat

SEQ ID NO: 32316 - DNA, 20 bp, synthetic construct
  source 1..20: mol_type = other DNA
gccgtcacaggtgcagctcg

SEQ ID NO: 32317 - DNA, 20 bp, synthetic construct
  source 1..20: mol_type = other DNA
agctgtctgtgggagacaga

SEQ ID NO: 32318 - DNA, 20 bp, synthetic construct
  source 1..20: mol_type = other DNA
ggagaattggaaaacaatgt

SEQ ID NO: 32319 - DNA, 20 bp, synthetic construct
  source 1..20: mol_type = other DNA
gaaaatgttctatagttttc

SEQ ID NO: 32320 - DNA, 20 bp, synthetic construct
  source 1..20: mol_type = other DNA
ccggctcaccgtggtccagc

SEQ ID NO: 32321 - DNA, 20 bp, synthetic construct
  source 1..20: mol_type = other DNA
gtgggtagatgagggcctga

SEQ ID NO: 32322 - DNA, 20 bp, synthetic construct
  source 1..20: mol_type = other DNA
ccgcaccctacggcatcgaa

SEQ ID NO: 32323 - DNA, 20 bp, synthetic construct
  source 1..20: mol_type = other DNA
gtgggacgtactcgctgtgc

SEQ ID NO: 32324 - DNA, 20 bp, synthetic construct
  source 1..20: mol_type = other DNA
cgcaccaggaaggtgcccac

SEQ ID NO: 32325 - DNA, 20 bp, synthetic construct
  source 1..20: mol_type = other DNA
ctgtgagtgaagcagcctct

SEQ ID NO: 32326 - DNA, 20 bp, synthetic construct
  source 1..20: mol_type = other DNA
ccccgcacgccaggatccgc

SEQ ID NO: 32327 - DNA, 20 bp, synthetic construct
  source 1..20: mol_type = other DNA
ctgaggctaaacggaagagt

SEQ ID NO: 32328 - DNA, 20 bp, synthetic construct
  source 1..20: mol_type = other DNA
taaggtctcacctgaaactt

SEQ ID NO: 32329 - DNA, 20 bp, synthetic construct
  source 1..20: mol_type = other DNA
tgtcccagtgccacgaactt

SEQ ID NO: 32330 - DNA, 20 bp, synthetic construct
  source 1..20: mol_type = other DNA
tcaggttatctgagaaagag

SEQ ID NO: 32331 - DNA, 20 bp, synthetic construct
  source 1..20: mol_type = other DNA
ggaggaggcagcggaggagg

SEQ ID NO: 32332 - DNA, 20 bp, synthetic construct
  source 1..20: mol_type = other DNA
tacaagatggatgcccccga

SEQ ID NO: 32333 - DNA, 20 bp, synthetic construct
  source 1..20: mol_type = other DNA
gtgaagaaatgtaggtgtca

SEQ ID NO: 32334 - DNA, 20 bp, synthetic construct
  source 1..20: mol_type = other DNA
ccgctccttgtagccaatga

SEQ ID NO: 32335 - DNA, 20 bp, synthetic construct
  source 1..20: mol_type = other DNA
cctcaccaaccacctgcacc

SEQ ID NO: 32336 - DNA, 20 bp, synthetic construct
  source 1..20: mol_type = other DNA
ccacaggccccagccacagt

SEQ ID NO: 32337 - DNA, 20 bp, synthetic construct
  source 1..20: mol_type = other DNA
ctgtaccataaatttggacc

SEQ ID NO: 32338 - DNA, 20 bp, synthetic construct
  source 1..20: mol_type = other DNA
caagagactggggaacagat

SEQ ID NO: 32339 - DNA, 20 bp, synthetic construct
  source 1..20: mol_type = other DNA
ctggcagcttgcccgtgtcc

SEQ ID NO: 32340 - DNA, 20 bp, synthetic construct
  source 1..20: mol_type = other DNA
taccaggcacacaagagact

SEQ ID NO: 32341 - DNA, 20 bp, synthetic construct
  source 1..20: mol_type = other DNA
cagtggtgccgtacaaaggt

SEQ ID NO: 32342 - DNA, 20 bp, synthetic construct
  source 1..20: mol_type = other DNA
tgtcagcattgaagcttcct

SEQ ID NO: 32343 - DNA, 20 bp, synthetic construct
  source 1..20: mol_type = other DNA
tgaataccagcaggctcagc

SEQ ID NO: 32344 - DNA, 20 bp, synthetic construct
  source 1..20: mol_type = other DNA
cccacaggccgcgctgcagg

SEQ ID NO: 32345 - DNA, 20 bp, synthetic construct
  source 1..20: mol_type = other DNA
acagctcaactccctgccac

SEQ ID NO: 32346 - DNA, 20 bp, synthetic construct
  source 1..20: mol_type = other DNA
aataggtactattaccaaag

SEQ ID NO: 32347 - DNA, 20 bp, synthetic construct
  source 1..20: mol_type = other DNA
ccatttacctgttggtggca

SEQ ID NO: 32348 - DNA, 20 bp, synthetic construct
  source 1..20: mol_type = other DNA
cagggggatcttctcgcccc

SEQ ID NO: 32349 - DNA, 20 bp, synthetic construct
  source 1..20: mol_type = other DNA
gcgctatcccatcaacgagg

SEQ ID NO: 32350 - DNA, 20 bp, synthetic construct
  source 1..20: mol_type = other DNA
ggcgcgcggcgcggcggcgg

SEQ ID NO: 32351 - DNA, 20 bp, synthetic construct
  source 1..20: mol_type = other DNA
aatatatcttcacctttagc

SEQ ID NO: 32352 - DNA, 20 bp, synthetic construct
  source 1..20: mol_type = other DNA
ggcaactggaaaaaggtcaa

SEQ ID NO: 32353 - DNA, 20 bp, synthetic construct
  source 1..20: mol_type = other DNA
tcaaactgtataggcagagc

SEQ ID NO: 32354 - DNA, 20 bp, synthetic construct
  source 1..20: mol_type = other DNA
ctcctgggagacaaggtgag

SEQ ID NO: 32355 - DNA, 20 bp, synthetic construct
  source 1..20: mol_type = other DNA
gcaatacattctgtaccgga

SEQ ID NO: 32356 - DNA, 20 bp, synthetic construct
  source 1..20: mol_type = other DNA
gcaggcgcccggctccgtgg

SEQ ID NO: 32357 - DNA, 20 bp, synthetic construct
  source 1..20: mol_type = other DNA
ttgagcacgcagtcgaagcg

SEQ ID NO: 32358 - DNA, 20 bp, synthetic construct
  source 1..20: mol_type = other DNA
ctcattcactgcaggtgcgt

SEQ ID NO: 32359 - DNA, 20 bp, synthetic construct
  source 1..20: mol_type = other DNA
aaaaggatattgtgcaactg

SEQ ID NO: 32360 - DNA, 20 bp, synthetic construct
  source 1..20: mol_type = other DNA
cccggtcagcagcgcgaaca

SEQ ID NO: 32361 - DNA, 20 bp, synthetic construct
  source 1..20: mol_type = other DNA
gcagaaaacgtggaagcact

SEQ ID NO: 32362 - DNA, 20 bp, synthetic construct
  source 1..20: mol_type = other DNA
ctcagataacctgaggacca

SEQ ID NO: 32363 - DNA, 20 bp, synthetic construct
  source 1..20: mol_type = other DNA
gggtatgcctgaaaaaggag

SEQ ID NO: 32364 - DNA, 20 bp, synthetic construct
  source 1..20: mol_type = other DNA
agggttccatgatataatcc

SEQ ID NO: 32365 - DNA, 20 bp, synthetic construct
  source 1..20: mol_type = other DNA
gccagtacccaggggcagga

SEQ ID NO: 32366 - DNA, 20 bp, synthetic construct
  source 1..20: mol_type = other DNA
ctcagtcatgacgtgagtgg

SEQ ID NO: 32367 - DNA, 20 bp, synthetic construct
  source 1..20: mol_type = other DNA
ttcaaacgctaaatcaagct

SEQ ID NO: 32368 - DNA, 20 bp, synthetic construct
  source 1..20: mol_type = other DNA
cactagcttcttgtaggcaa

SEQ ID NO: 32369 - DNA, 20 bp, synthetic construct
  source 1..20: mol_type = other DNA
aagcgtcaaaagtctgccag

SEQ ID NO: 32370 - DNA, 20 bp, synthetic construct
  source 1..20: mol_type = other DNA
gacacttacgttaaaagctg

SEQ ID NO: 32371 - DNA, 20 bp, synthetic construct
  source 1..20: mol_type = other DNA
gcccacgagagcaaagagtg

SEQ ID NO: 32372 - DNA, 20 bp, synthetic construct
  source 1..20: mol_type = other DNA
tgtagtgctgcagggtgtgg

SEQ ID NO: 32373 - DNA, 20 bp, synthetic construct
  source 1..20: mol_type = other DNA
tggtcattcctgttccaatg

SEQ ID NO: 32374 - DNA, 20 bp, synthetic construct
  source 1..20: mol_type = other DNA
taagacaggatgtgcacatg

SEQ ID NO: 32375 - DNA, 20 bp, synthetic construct
  source 1..20: mol_type = other DNA
ggaggtggaagaggaagagg

SEQ ID NO: 32376 - DNA, 20 bp, synthetic construct
  source 1..20: mol_type = other DNA
gcgggatgaccacggctgcg

SEQ ID NO: 32377 - DNA, 20 bp, synthetic construct
  source 1..20: mol_type = other DNA
catcagcctccagttcagca

SEQ ID NO: 32378 - DNA, 20 bp, synthetic construct
  source 1..20: mol_type = other DNA
caaggccatcgagagctcgg

SEQ ID NO: 32379 - DNA, 20 bp, synthetic construct
  source 1..20: mol_type = other DNA
tcaaagtcgtggtgctcccc

SEQ ID NO: 32380 - DNA, 20 bp, synthetic construct
  source 1..20: mol_type = other DNA
agaggaggaagaggaggagg

SEQ ID NO: 32381 - DNA, 20 bp, synthetic construct
  source 1..20: mol_type = other DNA
ccatgacgtcgttggtgagt

SEQ ID NO: 32382 - DNA, 20 bp, synthetic construct
  source 1..20: mol_type = other DNA
tgagctggaggaggaggagg

SEQ ID NO: 32383 - DNA, 20 bp, synthetic construct
  source 1..20: mol_type = other DNA
gcaacaggaagaggccgagg

SEQ ID NO: 32384 - DNA, 20 bp, synthetic construct
  source 1..20: mol_type = other DNA
gtctaggggtcggtcagtgc

SEQ ID NO: 32385 - DNA, 20 bp, synthetic construct
  source 1..20: mol_type = other DNA
ccatgcagatgagtgccctg

SEQ ID NO: 32386 - DNA, 20 bp, synthetic construct
  source 1..20: mol_type = other DNA
gtcttccctcaggaactgca

SEQ ID NO: 32387 - DNA, 20 bp, synthetic construct
  source 1..20: mol_type = other DNA
cactgcggtagaactcatcc

SEQ ID NO: 32388 - DNA, 20 bp, synthetic construct
  source 1..20: mol_type = other DNA
tggtgcaagcaggcagtgag

SEQ ID NO: 32389 - DNA, 20 bp, synthetic construct
  source 1..20: mol_type = other DNA
cagcaatacaggtaccacag

SEQ ID NO: 32390 - DNA, 20 bp, synthetic construct
  source 1..20: mol_type = other DNA
cgggcatgtcgacttctcct

SEQ ID NO: 32391 - DNA, 20 bp, synthetic construct
  source 1..20: mol_type = other DNA
atacaaactttgggaagctg

SEQ ID NO: 32392 - DNA, 20 bp, synthetic construct
  source 1..20: mol_type = other DNA
tgacgacctgcaatggcaag

SEQ ID NO: 32393 - DNA, 20 bp, synthetic construct
  source 1..20: mol_type = other DNA
tgaggagaccagcagtgacc

SEQ ID NO: 32394 - DNA, 20 bp, synthetic construct
  source 1..20: mol_type = other DNA
tagggaacaagggagccgtg

SEQ ID NO: 32395 - DNA, 20 bp, synthetic construct
  source 1..20: mol_type = other DNA
tctggtcagggctcggacac

SEQ ID NO: 32396 - DNA, 20 bp, synthetic construct
  source 1..20: mol_type = other DNA
tctgcgtgcgtgggaaggtg

SEQ ID NO: 32397 - DNA, 20 bp, synthetic construct
  source 1..20: mol_type = other DNA
ctgggccagcttccccaccg

SEQ ID NO: 32398 - DNA, 20 bp, synthetic construct
  source 1..20: mol_type = other DNA
acaggtaaggtatttggggg

SEQ ID NO: 32399 - DNA, 20 bp, synthetic construct
  source 1..20: mol_type = other DNA
gatgcttgccaccgtgcctg

SEQ ID NO: 32400 - DNA, 20 bp, synthetic construct
  source 1..20: mol_type = other DNA
cacgccgacgccatccaccg

SEQ ID NO: 32401 - DNA, 20 bp, synthetic construct
  source 1..20: mol_type = other DNA
ttaagcagtcaatgtcaatc

SEQ ID NO: 32402 - DNA, 20 bp, synthetic construct
  source 1..20: mol_type = other DNA
ccacctggatcctccgcgcc

SEQ ID NO: 32403 - DNA, 20 bp, synthetic construct
  source 1..20: mol_type = other DNA
catagctgatggtacccccc

SEQ ID NO: 32404 - DNA, 20 bp, synthetic construct
  source 1..20: mol_type = other DNA
acaaggtgggtcccgcgggc

SEQ ID NO: 32405 - DNA, 20 bp, synthetic construct
  source 1..20: mol_type = other DNA
tccgaccccatggtgcaggt

SEQ ID NO: 32406 - DNA, 20 bp, synthetic construct
  source 1..20: mol_type = other DNA
ttaccacatgttggcttaga

SEQ ID NO: 32407 - DNA, 20 bp, synthetic construct
  source 1..20: mol_type = other DNA
gctcgtcaggaggccgcttg

SEQ ID NO: 32408 - DNA, 20 bp, synthetic construct
  source 1..20: mol_type = other DNA
tttgcaccctggatgggatg

SEQ ID NO: 32409 - DNA, 20 bp, synthetic construct
  source 1..20: mol_type = other DNA
agctcctcccaggctgcagc

SEQ ID NO: 32410 - DNA, 20 bp, synthetic construct
  source 1..20: mol_type = other DNA
ggaggaggagtggatggagg

SEQ ID NO: 32411 - DNA, 20 bp, synthetic construct
  source 1..20: mol_type = other DNA
catctgccaaaagtcaccaa

SEQ ID NO: 32412 - DNA, 20 bp, synthetic construct
  source 1..20: mol_type = other DNA
tggattctaaagcagtgtcc

SEQ ID NO: 32413 - DNA, 20 bp, synthetic construct
  source 1..20: mol_type = other DNA
cgctgtcgcagatctacgag

SEQ ID NO: 32414 - DNA, 20 bp, synthetic construct
  source 1..20: mol_type = other DNA
cggatgaggaaggcccctcc

SEQ ID NO: 32415 - DNA, 20 bp, synthetic construct
  source 1..20: mol_type = other DNA
gaggaagttctccaggtcct

SEQ ID NO: 32416 - DNA, 20 bp, synthetic construct
  source 1..20: mol_type = other DNA
aacctgccaaaactgtgcac

SEQ ID NO: 32417 - DNA, 20 bp, synthetic construct
  source 1..20: mol_type = other DNA
cctctcaggtaggcaggcgt

SEQ ID NO: 32418 - DNA, 20 bp, synthetic construct
  source 1..20: mol_type = other DNA
gggacccgccagagcgcagg

SEQ ID NO: 32419 - DNA, 20 bp, synthetic construct
  source 1..20: mol_type = other DNA
acagattcacaagtttgccc

SEQ ID NO: 32420 - DNA, 20 bp, synthetic construct
  source 1..20: mol_type = other DNA
atactgctccagatatgggt

SEQ ID NO: 32421 - DNA, 20 bp, synthetic construct
  source 1..20: mol_type = other DNA
attacctacagatttcagtg

SEQ ID NO: 32422 - DNA, 20 bp, synthetic construct
  source 1..20: mol_type = other DNA
acctgtctgaatgagccact

SEQ ID NO: 32423 - DNA, 20 bp, synthetic construct
  source 1..20: mol_type = other DNA
tccccagagagctggagcgg

SEQ ID NO: 32424 - DNA, 20 bp, synthetic construct
  source 1..20: mol_type = other DNA
ttctataaataaaaaaagaa

SEQ ID NO: 32425 - DNA, 20 bp, synthetic construct
  source 1..20: mol_type = other DNA
gcgctgcaggtgggcggaca

SEQ ID NO: 32426 - DNA, 20 bp, synthetic construct
  source 1..20: mol_type = other DNA
tctggattggcttcaggtag

SEQ ID NO: 32427 - DNA, 20 bp, synthetic construct
  source 1..20: mol_type = other DNA
cccaggggcaggatggcaac

SEQ ID NO: 32428 - DNA, 20 bp, synthetic construct
  source 1..20: mol_type = other DNA
gcttttctcccgtgtgtacc

SEQ ID NO: 32429 - DNA, 20 bp, synthetic construct
  source 1..20: mol_type = other DNA
ggtggtggcggcggcggcgg

SEQ ID NO: 32430 - DNA, 20 bp, synthetic construct
  source 1..20: mol_type = other DNA
gcgtgaggctgcaagcttgc

SEQ ID NO: 32431 - DNA, 20 bp, synthetic construct
  source 1..20: mol_type = other DNA
gtgggctctggagttgtggt

SEQ ID NO: 32432 - DNA, 20 bp, synthetic construct
  source 1..20: mol_type = other DNA
tcaatgcagatgttgcactt

SEQ ID NO: 32433 - DNA, 20 bp, synthetic construct
  source 1..20: mol_type = other DNA
cacactggaggcgggcgggg

SEQ ID NO: 32434 - DNA, 20 bp, synthetic construct
  source 1..20: mol_type = other DNA
atctgcattgagaagaatgg

SEQ ID NO: 32435 - DNA, 20 bp, synthetic construct
  source 1..20: mol_type = other DNA
acagggacatcaaggtggtc

SEQ ID NO: 32436 - DNA, 20 bp, synthetic construct
  source 1..20: mol_type = other DNA
ccccccgcagcaagtcccct

SEQ ID NO: 32437 - DNA, 20 bp, synthetic construct
  source 1..20: mol_type = other DNA
ctcccaaactgacctctagg

SEQ ID NO: 32438 - DNA, 20 bp, synthetic construct
  source 1..20: mol_type = other DNA
tcatctggattatagaccag

SEQ ID NO: 32439 - DNA, 20 bp, synthetic construct
  source 1..20: mol_type = other DNA
gtacattgtataaagaccac

SEQ ID NO: 32440 - DNA, 20 bp, synthetic construct
  source 1..20: mol_type = other DNA
caagtccttgttagcctcca

SEQ ID NO: 32441 - DNA, 20 bp, synthetic construct
  source 1..20: mol_type = other DNA
agcggctgttgaatttctct

SEQ ID NO: 32442 - DNA, 20 bp, synthetic construct
  source 1..20: mol_type = other DNA
taggatggtagcacacaacc

SEQ ID NO: 32443 - DNA, 20 bp, synthetic construct
  source 1..20: mol_type = other DNA
gaatgatcatcaaacagcta

SEQ ID NO: 32444 - DNA, 20 bp, synthetic construct
  source 1..20: mol_type = other DNA
ttcccgttgggccaatccac

SEQ ID NO: 32445 - DNA, 20 bp, synthetic construct
  source 1..20: mol_type = other DNA
ggtgaaggtggtggtggtgg

SEQ ID NO: 32446 - DNA, 20 bp, synthetic construct
  source 1..20: mol_type = other DNA
ccgctccttggggaaggggt

SEQ ID NO: 32447 - DNA, 20 bp, synthetic construct
  source 1..20: mol_type = other DNA
aacctgcgcatccagtgtga

SEQ ID NO: 32448 - DNA, 20 bp, synthetic construct
  source 1..20: mol_type = other DNA
gctgtattcgttatccacgt

SEQ ID NO: 32449 - DNA, 20 bp, synthetic construct
  source 1..20: mol_type = other DNA
ttctacttagccaaacacag

SEQ ID NO: 32450 - DNA, 20 bp, synthetic construct
  source 1..20: mol_type = other DNA
tgacatccacattcagtctg

SEQ ID NO: 32451 - DNA, 20 bp, synthetic construct
  source 1..20: mol_type = other DNA
aggaccctgtgaaccacgtg

SEQ ID NO: 32452 - DNA, 20 bp, synthetic construct
  source 1..20: mol_type = other DNA
gactctgtgaacacaccaag

SEQ ID NO: 32453 - DNA, 20 bp, synthetic construct
  source 1..20: mol_type = other DNA
agtggagaatttctgccatg

SEQ ID NO: 32454 - DNA, 20 bp, synthetic construct
  source 1..20: mol_type = other DNA
gggacatcaaggtggtctgg

SEQ ID NO: 32455 - DNA, 20 bp, synthetic construct
  source 1..20: mol_type = other DNA
aacctgagaggggaagcaat

SEQ ID NO: 32456 - DNA, 20 bp, synthetic construct
  source 1..20: mol_type = other DNA
gcgccatggcccgaagaccc

SEQ ID NO: 32457 - DNA, 20 bp, synthetic construct
  source 1..20: mol_type = other DNA
agtggatcaccgcaggccca

SEQ ID NO: 32458 - DNA, 20 bp, synthetic construct
  source 1..20: mol_type = other DNA
cattttgtgcttcagaaatg

SEQ ID NO: 32459 - DNA, 20 bp, synthetic construct
  source 1..20: mol_type = other DNA
gagggagatggcactgatgg

SEQ ID NO: 32460 - DNA, 20 bp, synthetic construct
  source 1..20: mol_type = other DNA
atgtgcagtgccagcaccga

SEQ ID NO: 32461 - DNA, 20 bp, synthetic construct
  source 1..20: mol_type = other DNA
cccactcaccaacgacgtca

SEQ ID NO: 32462 - DNA, 20 bp, synthetic construct
  source 1..20: mol_type = other DNA
cgacaaggagcagctcaagg

SEQ ID NO: 32463 - DNA, 20 bp, synthetic construct
  source 1..20: mol_type = other DNA
cacaaggctcccctgggggc

SEQ ID NO: 32464 - DNA, 20 bp, synthetic construct
  source 1..20: mol_type = other DNA
catctatcaacagaagatca

SEQ ID NO: 32465 - DNA, 20 bp, synthetic construct
  source 1..20: mol_type = other DNA
acaccaagcagaaagcgaca

SEQ ID NO: 32466 - DNA, 20 bp, synthetic construct
  source 1..20: mol_type = other DNA
gtcccagatctacgagtgga

SEQ ID NO: 32467 - DNA, 20 bp, synthetic construct
  source 1..20: mol_type = other DNA
caaacaggtctccccgctgg

SEQ ID NO: 32468 - DNA, 20 bp, synthetic construct
  source 1..20: mol_type = other DNA
atttccatctggtaagaaat

SEQ ID NO: 32469 - DNA, 20 bp, synthetic construct
  source 1..20: mol_type = other DNA
agtccattccatcacactgg

SEQ ID NO: 32470 - DNA, 20 bp, synthetic construct
  source 1..20: mol_type = other DNA
cgctacaaaagaaccacaca

SEQ ID NO: 32471 - DNA, 20 bp, synthetic construct
  source 1..20: mol_type = other DNA
tgacatgaccgctaaagaac

SEQ ID NO: 32472 - DNA, 20 bp, synthetic construct
  source 1..20: mol_type = other DNA
cgtgtgcagaatgaaggaac

SEQ ID NO: 32473 - DNA, 20 bp, synthetic construct
  source 1..20: mol_type = other DNA
cagcaccaccaggagcacca

SEQ ID NO: 32474 - DNA, 20 bp, synthetic construct
  source 1..20: mol_type = other DNA
tgcaaataggccagtccctg

SEQ ID NO: 32475 - DNA, 20 bp, synthetic construct
  source 1..20: mol_type = other DNA
cggcccagtgggtcatcagg

SEQ ID NO: 32476 - DNA, 20 bp, synthetic construct
  source 1..20: mol_type = other DNA
ggtatgagaaactgcacgag

SEQ ID NO: 32477 - DNA, 20 bp, synthetic construct
  source 1..20: mol_type = other DNA
tgactccaattcagaggttc

SEQ ID NO: 32478 - DNA, 20 bp, synthetic construct
  source 1..20: mol_type = other DNA
tgatggtgcccgtcttcacc

SEQ ID NO: 32479 - DNA, 20 bp, synthetic construct
  source 1..20: mol_type = other DNA
tgttttggttcattcccgtt

SEQ ID NO: 32480 - DNA, 20 bp, synthetic construct
  source 1..20: mol_type = other DNA
cttggatgatggcaagacac

SEQ ID NO: 32481 - DNA, 20 bp, synthetic construct
  source 1..20: mol_type = other DNA
tccaggagctgcaccgagct

SEQ ID NO: 32482 - DNA, 20 bp, synthetic construct
  source 1..20: mol_type = other DNA
gaccacgttggggtgctcga

SEQ ID NO: 32483 - DNA, 20 bp, synthetic construct
  source 1..20: mol_type = other DNA
acggcaagtgtcggcactgt

SEQ ID NO: 32484 - DNA, 20 bp, synthetic construct
  source 1..20: mol_type = other DNA
ggcaagcatcatcctggccc

SEQ ID NO: 32485 - DNA, 20 bp, synthetic construct
  source 1..20: mol_type = other DNA
cagctgctcgtggtgcaagc

SEQ ID NO: 32486 - DNA, 20 bp, synthetic construct
  source 1..20: mol_type = other DNA
ccagcactgtgccggcgtgg

SEQ ID NO: 32487 - DNA, 20 bp, synthetic construct
  source 1..20: mol_type = other DNA
ttctaatatttaaataaaaa

SEQ ID NO: 32488 - DNA, 20 bp, synthetic construct
  source 1..20: mol_type = other DNA
gtgtagtgctgcagggtgtg

SEQ ID NO: 32489 - DNA, 20 bp, synthetic construct
  source 1..20: mol_type = other DNA
tttacataggtatctttagg

SEQ ID NO: 32490 - DNA, 20 bp, synthetic construct
  source 1..20: mol_type = other DNA
agaggaggaggatgaagagg

SEQ ID NO: 32491 - DNA, 20 bp, synthetic construct
  source 1..20: mol_type = other DNA
cgttgccagtacccaggggc

SEQ ID NO: 32492 - DNA, 20 bp, synthetic construct
  source 1..20: mol_type = other DNA
tgagataccagaggaaagac

SEQ ID NO: 32493 - DNA, 20 bp, synthetic construct
  source 1..20: mol_type = other DNA
ggctccacctcctgtggcac

SEQ ID NO: 32494 - DNA, 20 bp, synthetic construct
  source 1..20: mol_type = other DNA
cccagataatctgatagtgg

SEQ ID NO: 32495 - DNA, 20 bp, synthetic construct
  source 1..20: mol_type = other DNA
gcaagtgaactggtactcct

SEQ ID NO: 32496 - DNA, 20 bp, synthetic construct
  source 1..20: mol_type = other DNA
cgtgcacatgaacccccccc

SEQ ID NO: 32497 - DNA, 20 bp, synthetic construct
  source 1..20: mol_type = other DNA
aggctccaggaatgtccgcg

SEQ ID NO: 32498 - DNA, 20 bp, synthetic construct
  source 1..20: mol_type = other DNA
gaaggtaacccttaaatgtg

SEQ ID NO: 32499 - DNA, 20 bp, synthetic construct
  source 1..20: mol_type = other DNA
caggcagagcccaagaccca

SEQ ID NO: 32500 - DNA, 20 bp, synthetic construct
  source 1..20: mol_type = other DNA
gcgcaacaccaggtgcaggg

SEQ ID NO: 32501 - DNA, 20 bp, synthetic construct
  source 1..20: mol_type = other DNA
tgcggatgttccagagcgtg

SEQ ID NO: 32502 - DNA, 20 bp, synthetic construct
  source 1..20: mol_type = other DNA
caacttacaagttcaaccgg

SEQ ID NO: 32503 - DNA, 20 bp, synthetic construct
  source 1..20: mol_type = other DNA
acaataagaatattttcatt

SEQ ID NO: 32504 - DNA, 20 bp, synthetic construct
  source 1..20: mol_type = other DNA
tgcggaagtgcgtgtcgccg

SEQ ID NO: 32505 - DNA, 20 bp, synthetic construct
  source 1..20: mol_type = other DNA
tgtcccaggctggagtacag

SEQ ID NO: 32506 - DNA, 20 bp, synthetic construct
  source 1..20: mol_type = other DNA
ggcggcggcggcggaggagg

SEQ ID NO: 32507 - DNA, 20 bp, synthetic construct
  source 1..20: mol_type = other DNA
atccagacatcgggtagcca

SEQ ID NO: 32508 - DNA, 20 bp, synthetic construct
  source 1..20: mol_type = other DNA
agacagtcatgttccagacc

SEQ ID NO: 32509 - DNA, 20 bp, synthetic construct
  source 1..20: mol_type = other DNA
ggcagcggaggaggaggagg

SEQ ID NO: 32510 - DNA, 20 bp, synthetic construct
  source 1..20: mol_type = other DNA
ctcaccatggtggcggatgg

SEQ ID NO: 32511 - DNA, 20 bp, synthetic construct
  source 1..20: mol_type = other DNA
ccttcaggggctgtggccag

SEQ ID NO: 32512 - DNA, 20 bp, synthetic construct
  source 1..20: mol_type = other DNA
caggacctgcccttctgcaa

SEQ ID NO: 32513 - DNA, 20 bp, synthetic construct
  source 1..20: mol_type = other DNA
tgacagagagtaagagcctg

SEQ ID NO: 32514 - DNA, 20 bp, synthetic construct
  source 1..20: mol_type = other DNA
acagtgaaatctcgatggag

SEQ ID NO: 32515 - DNA, 20 bp, synthetic construct
  source 1..20: mol_type = other DNA
tgcctggggcaggacgagag

SEQ ID NO: 32516 - DNA, 20 bp, synthetic construct
  source 1..20: mol_type = other DNA
cacactgcacagtggtgagg

SEQ ID NO: 32517 - DNA, 20 bp, synthetic construct
  source 1..20: mol_type = other DNA
aaggccagccccactgtggc

SEQ ID NO: 32518 - DNA, 20 bp, synthetic construct
  source 1..20: mol_type = other DNA
ccttttgagtgcaacatgtg

SEQ ID NO: 32519 - DNA, 20 bp, synthetic construct
  source 1..20: mol_type = other DNA
gggcccagccgcctgtgggg

SEQ ID NO: 32520 - DNA, 20 bp, synthetic construct
  source 1..20: mol_type = other DNA
aggcttaaaagaaatagatg

SEQ ID NO: 32521 - DNA, 20 bp, synthetic construct
  source 1..20: mol_type = other DNA
ggctgtattcgttatccacg

SEQ ID NO: 32522 - DNA, 20 bp, synthetic construct
  source 1..20: mol_type = other DNA
gcagcacaatgttctagtag

SEQ ID NO: 32523 - DNA, 20 bp, synthetic construct
  source 1..20: mol_type = other DNA
taccttgccagtaggcggtg

SEQ ID NO: 32524 - DNA, 20 bp, synthetic construct
  source 1..20: mol_type = other DNA
ggacttcttcacggccacag

SEQ ID NO: 32525 - DNA, 20 bp, synthetic construct
  source 1..20: mol_type = other DNA
tacgaaacatcatgggttcc

SEQ ID NO: 32526 - DNA, 20 bp, synthetic construct
  source 1..20: mol_type = other DNA
ccagaagcgggagggcgtga

SEQ ID NO: 32527 - DNA, 20 bp, synthetic construct
  source 1..20: mol_type = other DNA
cgaacaggaaggttatctgc

SEQ ID NO: 32528 - DNA, 20 bp, synthetic construct
  source 1..20: mol_type = other DNA
ggtggcggtggtggcggtgg

SEQ ID NO: 32529 - DNA, 20 bp, synthetic construct
  source 1..20: mol_type = other DNA
gaataggtactattaccaaa

SEQ ID NO: 32530 - DNA, 20 bp, synthetic construct
  source 1..20: mol_type = other DNA
tatacagtttgaataccagc

SEQ ID NO: 32531 - DNA, 20 bp, synthetic construct
  source 1..20: mol_type = other DNA
agggcttctcacctgcaggg

SEQ ID NO: 32532 - DNA, 20 bp, synthetic construct
  source 1..20: mol_type = other DNA
tggagcagctgagctcaggc

SEQ ID NO: 32533 - DNA, 20 bp, synthetic construct
  source 1..20: mol_type = other DNA
ggccaagcacatccgagtgg

SEQ ID NO: 32534 - DNA, 20 bp, synthetic construct
  source 1..20: mol_type = other DNA
ggaacactggtggagcgcct

SEQ ID NO: 32535 - DNA, 20 bp, synthetic construct
  source 1..20: mol_type = other DNA
ctcagcgtcaagacccagtc

SEQ ID NO: 32536 - DNA, 20 bp, synthetic construct
  source 1..20: mol_type = other DNA
gtgcagtgaggacccccaag

SEQ ID NO: 32537 - DNA, 20 bp, synthetic construct
  source 1..20: mol_type = other DNA
gaacatccccaggtgaggag

SEQ ID NO: 32538 - DNA, 20 bp, synthetic construct
  source 1..20: mol_type = other DNA
tattttctgctaaaaatttc

SEQ ID NO: 32539 - DNA, 20 bp, synthetic construct
  source 1..20: mol_type = other DNA
aaccttcagtaaatcaaacc

SEQ ID NO: 32540 - DNA, 20 bp, synthetic construct
  source 1..20: mol_type = other DNA
tggaggtatggccctggaac

SEQ ID NO: 32541 - DNA, 20 bp, synthetic construct
  source 1..20: mol_type = other DNA
actgaaactaaagagtccag

SEQ ID NO: 32542 - DNA, 20 bp, synthetic construct
  source 1..20: mol_type = other DNA
accttacaaaacctcgtcca

SEQ ID NO: 32543 - DNA, 20 bp, synthetic construct
  source 1..20: mol_type = other DNA
ttccctaggtattttcaggc

SEQ ID NO: 32544 - DNA, 20 bp, synthetic construct
  source 1..20: mol_type = other DNA
gtatacctgtattattggtt

SEQ ID NO: 32545 - DNA, 20 bp, synthetic construct
  source 1..20: mol_type = other DNA
agaccaagagcgcatcaaag

SEQ ID NO: 32546 - DNA, 20 bp, synthetic construct
  source 1..20: mol_type = other DNA
ccaccaggagcaccagggcc

SEQ ID NO: 32547 - DNA, 20 bp, synthetic construct
  source 1..20: mol_type = other DNA
cgctgccacactgctgctcc

SEQ ID NO: 32548 - DNA, 20 bp, synthetic construct
  source 1..20: mol_type = other DNA
acggcggacggcggcggtgg

SEQ ID NO: 32549 - DNA, 20 bp, synthetic construct
  source 1..20: mol_type = other DNA
tggccacaatctccttgctg

SEQ ID NO: 32550 - DNA, 20 bp, synthetic construct
  source 1..20: mol_type = other DNA
gcagctggtggaggtgagct

SEQ ID NO: 32551 - DNA, 20 bp, synthetic construct
  source 1..20: mol_type = other DNA
ccacctgcagcgcggcctgt

SEQ ID NO: 32552 - DNA, 20 bp, synthetic construct
  source 1..20: mol_type = other DNA
attgtcctccagcacctgca

SEQ ID NO: 32553 - DNA, 20 bp, synthetic construct
  source 1..20: mol_type = other DNA
tgtggtactgaggagagcga

SEQ ID NO: 32554 - DNA, 20 bp, synthetic construct
  source 1..20: mol_type = other DNA
tcacacttatactcatgttc

SEQ ID NO: 32555 - DNA, 20 bp, synthetic construct
  source 1..20: mol_type = other DNA
acccgagctggatgcgccgc

SEQ ID NO: 32556 - DNA, 20 bp, synthetic construct
  source 1..20: mol_type = other DNA
tctgaacttccacgaaaaag

SEQ ID NO: 32557 - DNA, 20 bp, synthetic construct
  source 1..20: mol_type = other DNA
attgaaggaggccagcaggt

SEQ ID NO: 32558 - DNA, 20 bp, synthetic construct
  source 1..20: mol_type = other DNA
tcttgccatcatccaagagt

SEQ ID NO: 32559 - DNA, 20 bp, synthetic construct
  source 1..20: mol_type = other DNA
acatcctcatcaatgatgct

SEQ ID NO: 32560 - DNA, 20 bp, synthetic construct
  source 1..20: mol_type = other DNA
cctgttgccatcctgcccct

SEQ ID NO: 32561 - DNA, 20 bp, synthetic construct
  source 1..20: mol_type = other DNA
acccacagagcgacgagctg

SEQ ID NO: 32562 - DNA, 20 bp, synthetic construct
  source 1..20: mol_type = other DNA
atcctcttacctgtgggctc

SEQ ID NO: 32563 - DNA, 20 bp, synthetic construct
  source 1..20: mol_type = other DNA
ctaagagtggcgggaagcag

SEQ ID NO: 32564 - DNA, 20 bp, synthetic construct
  source 1..20: mol_type = other DNA
catggtcccagccttggacg

SEQ ID NO: 32565 - DNA, 20 bp, synthetic construct
  source 1..20: mol_type = other DNA
ataaataccgggtgtttatt

SEQ ID NO: 32566 - DNA, 20 bp, synthetic construct
  source 1..20: mol_type = other DNA
cttaccttggggggaagtgg

SEQ ID NO: 32567 - DNA, 20 bp, synthetic construct
  source 1..20: mol_type = other DNA
ggccatggcgcggcgggcgc

SEQ ID NO: 32568 - DNA, 20 bp, synthetic construct
  source 1..20: mol_type = other DNA
tccctagcatgtttcgccaa

SEQ ID NO: 32569 - DNA, 20 bp, synthetic construct
  source 1..20: mol_type = other DNA
tacacttgggacatttgcgc

SEQ ID NO: 32570 - DNA, 20 bp, synthetic construct
  source 1..20: mol_type = other DNA
ggtagccgtcgtcatgccgc

SEQ ID NO: 32571 - DNA, 20 bp, synthetic construct
  source 1..20: mol_type = other DNA
ccagcttcacagagcctgga

SEQ ID NO: 32572 - DNA, 20 bp, synthetic construct
  source 1..20: mol_type = other DNA
gcagcggccgcacgcggcgc

SEQ ID NO: 32573 - DNA, 20 bp, synthetic construct
  source 1..20: mol_type = other DNA
ttcaagatgaaggtaggtga

SEQ ID NO: 32574 - DNA, 20 bp, synthetic construct
  source 1..20: mol_type = other DNA
gagccttgcctggaaatctg

SEQ ID NO: 32575 - DNA, 20 bp, synthetic construct
  source 1..20: mol_type = other DNA
cttggggcacttcctctggc

SEQ ID NO: 32576 - DNA, 20 bp, synthetic construct
  source 1..20: mol_type = other DNA
aagtggacccagcgagagaa

SEQ ID NO: 32577 - DNA, 20 bp, synthetic construct
  source 1..20: mol_type = other DNA
actgacactggactcgtacc

SEQ ID NO: 32578 - DNA, 20 bp, synthetic construct
  source 1..20: mol_type = other DNA
tctgaggctaaacggaagag

SEQ ID NO: 32579 - DNA, 20 bp, synthetic construct
  source 1..20: mol_type = other DNA
ttctcatgatctggatctcc

SEQ ID NO: 32580 - DNA, 20 bp, synthetic construct
  source 1..20: mol_type = other DNA
ggaggaggaggagtggatgg

SEQ ID NO: 32581 - DNA, 20 bp, synthetic construct
  source 1..20: mol_type = other DNA
gagactggtgaaaacactct

SEQ ID NO: 32582 - DNA, 20 bp, synthetic construct
  source 1..20: mol_type = other DNA
cagtgaaatctcgatggagt

SEQ ID NO: 32583 - DNA, 20 bp, synthetic construct
  source 1..20: mol_type = other DNA
gcagcaccaccaggagcacc

SEQ ID NO: 32584 - DNA, 20 bp, synthetic construct
  source 1..20: mol_type = other DNA
gaacaggatgatcttggaga

SEQ ID NO: 32585 - DNA, 20 bp, synthetic construct
  source 1..20: mol_type = other DNA
ggaggttgaacacctgtcga

SEQ ID NO: 32586 - DNA, 20 bp, synthetic construct
  source 1..20: mol_type = other DNA
attaaaacctattcttgatg

SEQ ID NO: 32587 - DNA, 20 bp, synthetic construct
  source 1..20: mol_type = other DNA
cttggcgtccgtgaagatgg

SEQ ID NO: 32588 - DNA, 20 bp, synthetic construct
  source 1..20: mol_type = other DNA
ggggcccccagcatgcggcg

SEQ ID NO: 32589 - DNA, 20 bp, synthetic construct
  source 1..20: mol_type = other DNA
aggctcccctgggggcagga

SEQ ID NO: 32590 - DNA, 20 bp, synthetic construct
  source 1..20: mol_type = other DNA
agccctaccaggggaccccg

SEQ ID NO: 32591 - DNA, 20 bp, synthetic construct
  source 1..20: mol_type = other DNA
cttctccagctgctcgatgc

SEQ ID NO: 32592 - DNA, 20 bp, synthetic construct
  source 1..20: mol_type = other DNA
ggatatcgtagtgtccaggc

SEQ ID NO: 32593 - DNA, 20 bp, synthetic construct
  source 1..20: mol_type = other DNA
gagcacctccgactaccttg

SEQ ID NO: 32594 - DNA, 20 bp, synthetic construct
  source 1..20: mol_type = other DNA
gctttcagaggaagcttgga

SEQ ID NO: 32595 - DNA, 20 bp, synthetic construct
  source 1..20: mol_type = other DNA
ccggcccctctcctccaacg

SEQ ID NO: 32596 - DNA, 20 bp, synthetic construct
  source 1..20: mol_type = other DNA
ttgtccatgtgattcagcag

SEQ ID NO: 32597 - DNA, 20 bp, synthetic construct
  source 1..20: mol_type = other DNA
ctaaagcagtgtccaggttg

SEQ ID NO: 32598 - DNA, 20 bp, synthetic construct
  source 1..20: mol_type = other DNA
acactggatgcgcaggttct

SEQ ID NO: 32599 - DNA, 20 bp, synthetic construct
  source 1..20: mol_type = other DNA
gaaaacctcctggacagaag

SEQ ID NO: 32600 - DNA, 20 bp, synthetic construct
  source 1..20: mol_type = other DNA
agggcaccggcagaagctgg

SEQ ID NO: 32601 - DNA, 20 bp, synthetic construct
  source 1..20: mol_type = other DNA
taggccagtccctggggaga

SEQ ID NO: 32602 - DNA, 20 bp, synthetic construct
  source 1..20: mol_type = other DNA
tggaggccgtgggtctgtgc

SEQ ID NO: 32603 - DNA, 20 bp, synthetic construct
  source 1..20: mol_type = other DNA
gcccgcgacttgaagaacgg

SEQ ID NO: 32604 - DNA, 20 bp, synthetic construct
  source 1..20: mol_type = other DNA
ttgtccttcctgcagggagg

SEQ ID NO: 32605 - DNA, 20 bp, synthetic construct
  source 1..20: mol_type = other DNA
tcgggcgcagaagtcatagc

SEQ ID NO: 32606 - DNA, 20 bp, synthetic construct
  source 1..20: mol_type = other DNA
cttggtcttccatgttgatg

SEQ ID NO: 32607 - DNA, 20 bp, synthetic construct
  source 1..20: mol_type = other DNA
cccaggtatgttgtggggtg

SEQ ID NO: 32608 - DNA, 20 bp, synthetic construct
  source 1..20: mol_type = other DNA
acttggggcacttcctctgg

SEQ ID NO: 32609 - DNA, 20 bp, synthetic construct
  source 1..20: mol_type = other DNA
atactggccgtcaatggaag

SEQ ID NO: 32610 - DNA, 20 bp, synthetic construct
  source 1..20: mol_type = other DNA
tgagaatctcagttgatctg

SEQ ID NO: 32611 - DNA, 20 bp, synthetic construct
  source 1..20: mol_type = other DNA
gagcaagcatgtctttccac

SEQ ID NO: 32612 - DNA, 20 bp, synthetic construct
  source 1..20: mol_type = other DNA
gaagatgcctttctctcgct

SEQ ID NO: 32613 - DNA, 20 bp, synthetic construct
  source 1..20: mol_type = other DNA
gctccactttgatgcgctct

SEQ ID NO: 32614 - DNA, 20 bp, synthetic construct
  source 1..20: mol_type = other DNA
tgcaggaggtgagggcggcg

SEQ ID NO: 32615 - DNA, 20 bp, synthetic construct
  source 1..20: mol_type = other DNA
ccaggacaagacccaggacc

SEQ ID NO: 32616 - DNA, 20 bp, synthetic construct
  source 1..20: mol_type = other DNA
caggctgagggttagtgagc

SEQ ID NO: 32617 - DNA, 20 bp, synthetic construct
  source 1..20: mol_type = other DNA
gtagtgctgcagggtgtggg

SEQ ID NO: 32618 - DNA, 20 bp, synthetic construct
  source 1..20: mol_type = other DNA
tcattgtcctccagcacctg

SEQ ID NO: 32619 - DNA, 20 bp, synthetic construct
  source 1..20: mol_type = other DNA
cctttccacggtcatcttga

SEQ ID NO: 32620 - DNA, 20 bp, synthetic construct
  source 1..20: mol_type = other DNA
gccggggcgctggcggtgct

SEQ ID NO: 32621 - DNA, 20 bp, synthetic construct
  source 1..20: mol_type = other DNA
tgatatgaattatgagacca

SEQ ID NO: 32622 - DNA, 20 bp, synthetic construct
  source 1..20: mol_type = other DNA
ggccttgaacaccttcccat

SEQ ID NO: 32623 - DNA, 20 bp, synthetic construct
  source 1..20: mol_type = other DNA
tgcccagatctacgagtgga

SEQ ID NO: 32624 - DNA, 20 bp, synthetic construct
  source 1..20: mol_type = other DNA
tagctccctgggaatgagag

SEQ ID NO: 32625 - DNA, 20 bp, synthetic construct
  source 1..20: mol_type = other DNA
ccccaggtgtgaaagcctgg

SEQ ID NO: 32626 - DNA, 20 bp, synthetic construct
  source 1..20: mol_type = other DNA
ttgtggaaggcagccgacct

SEQ ID NO: 32627 - DNA, 20 bp, synthetic construct
  source 1..20: mol_type = other DNA
gtgtggccggggcacccaca

SEQ ID NO: 32628 - DNA, 20 bp, synthetic construct
  source 1..20: mol_type = other DNA
tttgtgggacacagctgggc

SEQ ID NO: 32629 - DNA, 20 bp, synthetic construct
  source 1..20: mol_type = other DNA
cagggggctcggccttgacc

SEQ ID NO: 32630 - DNA, 20 bp, synthetic construct
  source 1..20: mol_type = other DNA
taccttatttatgagatgtt

SEQ ID NO: 32631 - DNA, 20 bp, synthetic construct
  source 1..20: mol_type = other DNA
ggagcgcatcgcgcgcctgg

SEQ ID NO: 32632 - DNA, 20 bp, synthetic construct
  source 1..20: mol_type = other DNA
agtagaatccgcaggcgtcc

SEQ ID NO: 32633 - DNA, 20 bp, synthetic construct
  source 1..20: mol_type = other DNA
cctagcttatttctgacgca

SEQ ID NO: 32634 - DNA, 20 bp, synthetic construct
  source 1..20: mol_type = other DNA
gaagaagaagtaaccctggt

SEQ ID NO: 32635 - DNA, 20 bp, synthetic construct
  source 1..20: mol_type = other DNA
ccgttccaactcgaagtgcc

SEQ ID NO: 32636 - DNA, 20 bp, synthetic construct
  source 1..20: mol_type = other DNA
ggaggacaatgactatggcc

SEQ ID NO: 32637 - DNA, 20 bp, synthetic construct
  source 1..20: mol_type = other DNA
ttgccggcacgccaacatcg

SEQ ID NO: 32638 - DNA, 20 bp, synthetic construct
  source 1..20: mol_type = other DNA
gaatggcatcctctacctgg

SEQ ID NO: 32639 - DNA, 20 bp, synthetic construct
  source 1..20: mol_type = other DNA
gcagctcctgggcgtgatcg

SEQ ID NO: 32640 - DNA, 20 bp, synthetic construct
  source 1..20: mol_type = other DNA
agtcaagtggacagcccctg

SEQ ID NO: 32641 - DNA, 20 bp, synthetic construct
  source 1..20: mol_type = other DNA
gtggtactgaggagagcgag

SEQ ID NO: 32642 - DNA, 20 bp, synthetic construct
  source 1..20: mol_type = other DNA
acccgagcggaagaccttcc

SEQ ID NO: 32643 - DNA, 20 bp, synthetic construct
  source 1..20: mol_type = other DNA
gggcgatgacagacatgttg

SEQ ID NO: 32644 - DNA, 20 bp, synthetic construct
  source 1..20: mol_type = other DNA
agccgatggtgtggaaggtg

SEQ ID NO: 32645 - DNA, 20 bp, synthetic construct
  source 1..20: mol_type = other DNA
gaacctgcgcatccagtgtg

SEQ ID NO: 32646 - DNA, 20 bp, synthetic construct
  source 1..20: mol_type = other DNA
aacctgcggatcctggcgtg

SEQ ID NO: 32647 - DNA, 20 bp, synthetic construct
  source 1..20: mol_type = other DNA
catccacattcagtctgtgg

SEQ ID NO: 32648 - DNA, 20 bp, synthetic construct
  source 1..20: mol_type = other DNA
atctgggggtcagaaaggtg

SEQ ID NO: 32649 - DNA, 20 bp, synthetic construct
  source 1..20: mol_type = other DNA
acaagctaatagcattgttc

SEQ ID NO: 32650 - DNA, 20 bp, synthetic construct
  source 1..20: mol_type = other DNA
gccaacactccagagatcca

SEQ ID NO: 32651 - DNA, 20 bp, synthetic construct
  source 1..20: mol_type = other DNA
gcaggatgtggaccaacgtg

SEQ ID NO: 32652 - DNA, 20 bp, synthetic construct
  source 1..20: mol_type = other DNA
agccgctccacatacagtcc

SEQ ID NO: 32653 - DNA, 20 bp, synthetic construct
  source 1..20: mol_type = other DNA
ctctgggtggagacaagcag

SEQ ID NO: 32654 - DNA, 20 bp, synthetic construct
  source 1..20: mol_type = other DNA
cacggtggcaagcatcatcc

SEQ ID NO: 32655 - DNA, 20 bp, synthetic construct
  source 1..20: mol_type = other DNA
tgcctgcggccaggcctgcg

SEQ ID NO: 32656 - DNA, 20 bp, synthetic construct
  source 1..20: mol_type = other DNA
gtactcgctcttggagctga

SEQ ID NO: 32657 - DNA, 20 bp, synthetic construct
  source 1..20: mol_type = other DNA
catttcacagtcctttccca

SEQ ID NO: 32658 - DNA, 20 bp, synthetic construct
  source 1..20: mol_type = other DNA
ctccaggagctgcaccgagc

SEQ ID NO: 32659 - DNA, 20 bp, synthetic construct
  source 1..20: mol_type = other DNA
tcaatcagtgcttggaagag

SEQ ID NO: 32660 - DNA, 20 bp, synthetic construct
  source 1..20: mol_type = other DNA
agaagctagtgaagaaatgt

SEQ ID NO: 32661 - DNA, 20 bp, synthetic construct
  source 1..20: mol_type = other DNA
tcctagcttatttctgacgc

SEQ ID NO: 32662 - DNA, 20 bp, synthetic construct
  source 1..20: mol_type = other DNA
agaccccctgctgctccccg

SEQ ID NO: 32663 - DNA, 20 bp, synthetic construct
  source 1..20: mol_type = other DNA
tccccaggacaatagtccct

SEQ ID NO: 32664 - DNA, 20 bp, synthetic construct
  source 1..20: mol_type = other DNA
gggcctgggggaggaagatg

SEQ ID NO: 32665 - DNA, 20 bp, synthetic construct
  source 1..20: mol_type = other DNA
tacagcttgaaggtgactgt

SEQ ID NO: 32666 - DNA, 20 bp, synthetic construct
  source 1..20: mol_type = other DNA
gtctctatcgaaaatgtaga

SEQ ID NO: 32667 - DNA, 20 bp, synthetic construct
  source 1..20: mol_type = other DNA
gaaaagtgccagttcgcgca

SEQ ID NO: 32668 - DNA, 20 bp, synthetic construct
  source 1..20: mol_type = other DNA
ttctgctcaactgcttgttg

SEQ ID NO: 32669 - DNA, 20 bp, synthetic construct
  source 1..20: mol_type = other DNA
gtggaatcgatgagcaatag

SEQ ID NO: 32670 - DNA, 20 bp, synthetic construct
  source 1..20: mol_type = other DNA
gacttcttcacggccacaga

SEQ ID NO: 32671 - DNA, 20 bp, synthetic construct
  source 1..20: mol_type = other DNA
gtaccactgaagcaggacaa

SEQ ID NO: 32672 - DNA, 20 bp, synthetic construct
  source 1..20: mol_type = other DNA
gttcacgcagacctcgcctg

SEQ ID NO: 32673 - DNA, 20 bp, synthetic construct
  source 1..20: mol_type = other DNA
aaccccgcaggcctggccgc

SEQ ID NO: 32674 - DNA, 20 bp, synthetic construct
  source 1..20: mol_type = other DNA
ggcttaatcaacctcttcaa

SEQ ID NO: 32675 - DNA, 20 bp, synthetic construct
  source 1..20: mol_type = other DNA
tgagtggcggtgcgtttgcg

SEQ ID NO: 32676 - DNA, 20 bp, synthetic construct
  source 1..20: mol_type = other DNA
tcctccagcacctgcacggg

SEQ ID NO: 32677 - DNA, 20 bp, synthetic construct
  source 1..20: mol_type = other DNA
tcatgactgaggcttcagcc

SEQ ID NO: 32678 - DNA, 20 bp, synthetic construct
  source 1..20: mol_type = other DNA
cctctccttgtacccaatga

SEQ ID NO: 32679 - DNA, 20 bp, synthetic construct
  source 1..20: mol_type = other DNA
gagatgtataaaagagctca

SEQ ID NO: 32680 - DNA, 20 bp, synthetic construct
  source 1..20: mol_type = other DNA
aagtggcagcgcggcccata

SEQ ID NO: 32681 - DNA, 20 bp, synthetic construct
  source 1..20: mol_type = other DNA
cctgctggagtctctcaatg

SEQ ID NO: 32682 - DNA, 20 bp, synthetic construct
  source 1..20: mol_type = other DNA
gcggcggcagcagcaggagg

SEQ ID NO: 32683 - DNA, 20 bp, synthetic construct
  source 1..20: mol_type = other DNA
cagtttggggaagtatggat

SEQ ID NO: 32684 - DNA, 20 bp, synthetic construct
  source 1..20: mol_type = other DNA
gtgaagtctctctgccgagt

SEQ ID NO: 32685 - DNA, 20 bp, synthetic construct
  source 1..20: mol_type = other DNA
gacatggaagagaaggtagc

SEQ ID NO: 32686 - DNA, 20 bp, synthetic construct
  source 1..20: mol_type = other DNA
ctcagtcgtcggagatggag

SEQ ID NO: 32687 - DNA, 20 bp, synthetic construct
  source 1..20: mol_type = other DNA
gggagtttatatctctttcc

SEQ ID NO: 32688 - DNA, 20 bp, synthetic construct
  source 1..20: mol_type = other DNA
ccgcgactcaccaagtacag

SEQ ID NO: 32689 - DNA, 20 bp, synthetic construct
  source 1..20: mol_type = other DNA
tagctacctgactccagtat

SEQ ID NO: 32690 - DNA, 20 bp, synthetic construct
  source 1..20: mol_type = other DNA
atagataggtatggatatcc

SEQ ID NO: 32691 - DNA, 20 bp, synthetic construct
  source 1..20: mol_type = other DNA
gcaccatacacaatgcagcc

SEQ ID NO: 32692 - DNA, 20 bp, synthetic construct
  source 1..20: mol_type = other DNA
caccaccactcggatgtgct

SEQ ID NO: 32693 - DNA, 20 bp, synthetic construct
  source 1..20: mol_type = other DNA
atccgccgagggatagcagg

SEQ ID NO: 32694 - DNA, 20 bp, synthetic construct
  source 1..20: mol_type = other DNA
ttcgatggccgtgatgccca

SEQ ID NO: 32695 - DNA, 20 bp, synthetic construct
  source 1..20: mol_type = other DNA
ccttcggagtcgctgcccag

SEQ ID NO: 32696 - DNA, 20 bp, synthetic construct
  source 1..20: mol_type = other DNA
aactcttttaatttgttctc

SEQ ID NO: 32697 - DNA, 20 bp, synthetic construct
  source 1..20: mol_type = other DNA
cggccagcaggttcacagtc

SEQ ID NO: 32698 - DNA, 20 bp, synthetic construct
  source 1..20: mol_type = other DNA
ccttattatgcagtacttga

SEQ ID NO: 32699 - DNA, 20 bp, synthetic construct
  source 1..20: mol_type = other DNA
ggtgaagatggagcctggtg

SEQ ID NO: 32700 - DNA, 20 bp, synthetic construct
  source 1..20: mol_type = other DNA
caggaagtgaaaagaaactc

SEQ ID NO: 32701 - DNA, 20 bp, synthetic construct
  source 1..20: mol_type = other DNA
gttatctgagaaagagagga

SEQ ID NO: 32702 - DNA, 20 bp, synthetic construct
  source 1..20: mol_type = other DNA
ccagctgctcacagagagga

SEQ ID NO: 32703 - DNA, 20 bp, synthetic construct
  source 1..20: mol_type = other DNA
ctcggattggtgggaggagg

SEQ ID NO: 32704 - DNA, 20 bp, synthetic construct
  source 1..20: mol_type = other DNA
acagcacatacacccagctc

SEQ ID NO: 32705 - DNA, 20 bp, synthetic construct
  source 1..20: mol_type = other DNA
cagagaaggcattgtcccac

SEQ ID NO: 32706 - DNA, 20 bp, synthetic construct
  source 1..20: mol_type = other DNA
ccccgacaaggaggaggacg

SEQ ID NO: 32707 - DNA, 20 bp, synthetic construct
  source 1..20: mol_type = other DNA
ggaggtgagggcggcgggga

SEQ ID NO: 32708 - DNA, 20 bp, synthetic construct
  source 1..20: mol_type = other DNA
tagcaggtcatagtggtccc

SEQ ID NO: 32709 - DNA, 20 bp, synthetic construct
  source 1..20: mol_type = other DNA
gccatccacctgcaccggga

SEQ ID NO: 32710 - DNA, 20 bp, synthetic construct
  source 1..20: mol_type = other DNA
attgccaagtacaacttcca

SEQ ID NO: 32711 - DNA, 20 bp, synthetic construct
  source 1..20: mol_type = other DNA
aataaataccgggtgtttat

SEQ ID NO: 32712 - DNA, 20 bp, synthetic construct
  source 1..20: mol_type = other DNA
cagacacagccttgaacctg

SEQ ID NO: 32713 - DNA, 20 bp, synthetic construct
  source 1..20: mol_type = other DNA
ttacaagttcaaccggagga

SEQ ID NO: 32714 - DNA, 20 bp, synthetic construct
  source 1..20: mol_type = other DNA
caatcagctcttcacctgca

SEQ ID NO: 32715 - DNA, 20 bp, synthetic construct
  source 1..20: mol_type = other DNA
taccaatgcagagccagcat

SEQ ID NO: 32716 - DNA, 20 bp, synthetic construct
  source 1..20: mol_type = other DNA
tctgcaccccagcccggacc

SEQ ID NO: 32717 - DNA, 20 bp, synthetic construct
  source 1..20: mol_type = other DNA
ctgagggtagacaggatgga

SEQ ID NO: 32718 - DNA, 20 bp, synthetic construct
  source 1..20: mol_type = other DNA
tccaccagggcctggagtga

SEQ ID NO: 32719 - DNA, 20 bp, synthetic construct
  source 1..20: mol_type = other DNA
gctgtggagagaaaacagac

SEQ ID NO: 32720 - DNA, 20 bp, synthetic construct
  source 1..20: mol_type = other DNA
catcggtatctgggtaggag

SEQ ID NO: 32721 - DNA, 20 bp, synthetic construct
  source 1..20: mol_type = other DNA
actccacacgtcagacttag

SEQ ID NO: 32722 - DNA, 20 bp, synthetic construct
  source 1..20: mol_type = other DNA
ggcggcggcggcggcggcgc

SEQ ID NO: 32723 - DNA, 20 bp, synthetic construct
  source 1..20: mol_type = other DNA
ctgcaggaggtgagggcggc

SEQ ID NO: 32724 - DNA, 20 bp, synthetic construct
  source 1..20: mol_type = other DNA
gctgggggcggcggcggcgg

SEQ ID NO: 32725 - DNA, 20 bp, synthetic construct
  source 1..20: mol_type = other DNA
caccaggtcttccttgctct

SEQ ID NO: 32726 - DNA, 20 bp, synthetic construct
  source 1..20: mol_type = other DNA
aatagtcctctatgtcccca

SEQ ID NO: 32727 - DNA, 20 bp, synthetic construct
  source 1..20: mol_type = other DNA
gtttgcggggccaagagcgg

SEQ ID NO: 32728 - DNA, 20 bp, synthetic construct
  source 1..20: mol_type = other DNA
atcagcctccagttcagcaa

SEQ ID NO: 32729 - DNA, 20 bp, synthetic construct
  source 1..20: mol_type = other DNA
acccttgaggtggggcagga

SEQ ID NO: 32730 - DNA, 20 bp, synthetic construct
  source 1..20: mol_type = other DNA
ggcccagccgcctgtgggga

SEQ ID NO: 32731 - DNA, 20 bp, synthetic construct
  source 1..20: mol_type = other DNA
gcccagcaggatctcctagg

SEQ ID NO: 32732 - DNA, 20 bp, synthetic construct
  source 1..20: mol_type = other DNA
tggaacgggtgagccttgcc

SEQ ID NO: 32733 - DNA, 20 bp, synthetic construct
  source 1..20: mol_type = other DNA
ccaaagtcagctggaagcag

SEQ ID NO: 32734 - DNA, 20 bp, synthetic construct
  source 1..20: mol_type = other DNA
gaaatcgcaaagctactgcc

SEQ ID NO: 32735 - DNA, 20 bp, synthetic construct
  source 1..20: mol_type = other DNA
ccatggtggggcctgcagtg

SEQ ID NO: 32736 - DNA, 20 bp, synthetic construct
  source 1..20: mol_type = other DNA
taaacagcgaagctctttag

SEQ ID NO: 32737 - DNA, 20 bp, synthetic construct
  source 1..20: mol_type = other DNA
gacccaggtagaggaagata

SEQ ID NO: 32738 - DNA, 20 bp, synthetic construct
  source 1..20: mol_type = other DNA
gatggtagcacacaaccagg

SEQ ID NO: 32739 - DNA, 20 bp, synthetic construct
  source 1..20: mol_type = other DNA
tgacacaccacgtgcaccag

SEQ ID NO: 32740 - DNA, 20 bp, synthetic construct
  source 1..20: mol_type = other DNA
ctgcaacaaatgaaaaagaa

SEQ ID NO: 32741 - DNA, 20 bp, synthetic construct
  source 1..20: mol_type = other DNA
gtatcttaccaaagatagct

SEQ ID NO: 32742 - DNA, 20 bp, synthetic construct
  source 1..20: mol_type = other DNA
ctgagcccaaccccgaggca

SEQ ID NO: 32743 - DNA, 20 bp, synthetic construct
  source 1..20: mol_type = other DNA
gcagcggggcccccagcatg

SEQ ID NO: 32744 - DNA, 20 bp, synthetic construct
  source 1..20: mol_type = other DNA
caccaatgctggctctgcat

SEQ ID NO: 32745 - DNA, 20 bp, synthetic construct
  source 1..20: mol_type = other DNA
catagacagattctgtgggg

SEQ ID NO: 32746 - DNA, 20 bp, synthetic construct
  source 1..20: mol_type = other DNA
acgagctgagcttcaaaagg

SEQ ID NO: 32747 - DNA, 20 bp, synthetic construct
  source 1..20: mol_type = other DNA
gactgaggcttcagccagga

SEQ ID NO: 32748 - DNA, 20 bp, synthetic construct
  source 1..20: mol_type = other DNA
agcaggccatgatggtgggt

SEQ ID NO: 32749 - DNA, 20 bp, synthetic construct
  source 1..20: mol_type = other DNA
agtgccgacacttgccgtcc

SEQ ID NO: 32750 - DNA, 20 bp, synthetic construct
  source 1..20: mol_type = other DNA
tacgcgcctcattaaaccaa

SEQ ID NO: 32751 - DNA, 20 bp, synthetic construct
  source 1..20: mol_type = other DNA
acttcctgcggggagaggga

SEQ ID NO: 32752 - DNA, 20 bp, synthetic construct
  source 1..20: mol_type = other DNA
agccaagcagacggaaagtg

SEQ ID NO: 32753 - DNA, 20 bp, synthetic construct
  source 1..20: mol_type = other DNA
gcgtacagggatgatcatgg

SEQ ID NO: 32754 - DNA, 20 bp, synthetic construct
  source 1..20: mol_type = other DNA
ctgcaggaatcagaaggtca

SEQ ID NO: 32755 - DNA, 20 bp, synthetic construct
  source 1..20: mol_type = other DNA
ccaggtaaggaagagccaca

SEQ ID NO: 32756 - DNA, 20 bp, synthetic construct
  source 1..20: mol_type = other DNA
ggaggcctgtgagtgcggtg

SEQ ID NO: 32757 - DNA, 20 bp, synthetic construct
  source 1..20: mol_type = other DNA
tagatgtaataggctcttct

SEQ ID NO: 32758 - DNA, 20 bp, synthetic construct
  source 1..20: mol_type = other DNA
agatgcatatagcggagcag

SEQ ID NO: 32759 - DNA, 20 bp, synthetic construct
  source 1..20: mol_type = other DNA
gacggcggccaggtgaggcg

SEQ ID NO: 32760 - DNA, 20 bp, synthetic construct
  source 1..20: mol_type = other DNA
agtggcagcgcggcccatag

SEQ ID NO: 32761 - DNA, 20 bp, synthetic construct
  source 1..20: mol_type = other DNA
catgaggtcattccgaatga

SEQ ID NO: 32762 - DNA, 20 bp, synthetic construct
  source 1..20: mol_type = other DNA
ttggtcttccatgttgatgg

SEQ ID NO: 32763 - DNA, 20 bp, synthetic construct
  source 1..20: mol_type = other DNA
ccattccatcacactggagg

SEQ ID NO: 32764 - DNA, 20 bp, synthetic construct
  source 1..20: mol_type = other DNA
ttaatgtatgacatgctgac

SEQ ID NO: 32765 - DNA, 20 bp, synthetic construct
  source 1..20: mol_type = other DNA
gggcctctcacctgcccgga

SEQ ID NO: 32766 - DNA, 20 bp, synthetic construct
  source 1..20: mol_type = other DNA
cccaacgtagcagaagtccc

SEQ ID NO: 32767 - DNA, 20 bp, synthetic construct
  source 1..20: mol_type = other DNA
gcaggcgcaacaccaggtgc

SEQ ID NO: 32768 - DNA, 20 bp, synthetic construct
  source 1..20: mol_type = other DNA
ggtttcaggtcctggatctt

SEQ ID NO: 32769 - DNA, 20 bp, synthetic construct
  source 1..20: mol_type = other DNA
cccaggtaagcgctgctgct

SEQ ID NO: 32770 - DNA, 20 bp, synthetic construct
  source 1..20: mol_type = other DNA
gccgctgtagcaggtcatag

SEQ ID NO: 32771 - DNA, 20 bp, synthetic construct
  source 1..20: mol_type = other DNA
tgagaagatggattcagatg

SEQ ID NO: 32772 - DNA, 20 bp, synthetic construct
  source 1..20: mol_type = other DNA
gtcttcgggccatggcgcgg

SEQ ID NO: 32773 - DNA, 20 bp, synthetic construct
  source 1..20: mol_type = other DNA
caccaagcagaaagcgacag

SEQ ID NO: 32774 - DNA, 20 bp, synthetic construct
  source 1..20: mol_type = other DNA
tcgcaaagctactgcctgga

SEQ ID NO: 32775 - DNA, 20 bp, synthetic construct
  source 1..20: mol_type = other DNA
gaaaccagttcactgccagc

SEQ ID NO: 32776 - DNA, 20 bp, synthetic construct
  source 1..20: mol_type = other DNA
ctgtaaagagtaaccaaccc

SEQ ID NO: 32777 - DNA, 20 bp, synthetic construct
  source 1..20: mol_type = other DNA
gcccaaggtgcagagccgtc

SEQ ID NO: 32778 - DNA, 20 bp, synthetic construct
  source 1..20: mol_type = other DNA
tgccccaggaggacatctca

SEQ ID NO: 32779 - DNA, 20 bp, synthetic construct
  source 1..20: mol_type = other DNA
aattgaacttagctcattaa

SEQ ID NO: 32780 - DNA, 20 bp, synthetic construct
  source 1..20: mol_type = other DNA
acccccagaaccagcctgtg

SEQ ID NO: 32781 - DNA, 20 bp, synthetic construct
  source 1..20: mol_type = other DNA
gcggcaaaactggtgctgac

SEQ ID NO: 32782 - DNA, 20 bp, synthetic construct
  source 1..20: mol_type = other DNA
tctgcaggaatcagaaggtc

SEQ ID NO: 32783 - DNA, 20 bp, synthetic construct
  source 1..20: mol_type = other DNA
gcccatttatcaattggatg

SEQ ID NO: 32784 - DNA, 20 bp, synthetic construct
  source 1..20: mol_type = other DNA
agctcaagaatgctggacgt

SEQ ID NO: 32785 - DNA, 20 bp, synthetic construct
  source 1..20: mol_type = other DNA
ataccagcaggctcagctgg

SEQ ID NO: 32786 - DNA, 20 bp, synthetic construct
  source 1..20: mol_type = other DNA
gcactacagtggatcaccgc

SEQ ID NO: 32787 - DNA, 20 bp, synthetic construct
  source 1..20: mol_type = other DNA
gtagctggtccagggtggag

SEQ ID NO: 32788 - DNA, 20 bp, synthetic construct
  source 1..20: mol_type = other DNA
agcctgtgcacctgaaagaa

SEQ ID NO: 32789 - DNA, 20 bp, synthetic construct
  source 1..20: mol_type = other DNA
cgcacctgtgagggctgcaa

SEQ ID NO: 32790 - DNA, 20 bp, synthetic construct
  source 1..20: mol_type = other DNA
ttctatttttagtagagatg

SEQ ID NO: 32791 - DNA, 20 bp, synthetic construct
  source 1..20: mol_type = other DNA
caccacatccaaggccatcc

SEQ ID NO: 32792 - DNA, 20 bp, synthetic construct
  source 1..20: mol_type = other DNA
ccatggggcagtctgcacca

SEQ ID NO: 32793 - DNA, 20 bp, synthetic construct
  source 1..20: mol_type = other DNA
gcccagccgcctgtggggag

SEQ ID NO: 32794 - DNA, 20 bp, synthetic construct
  source 1..20: mol_type = other DNA
tacacccacgtagtccggct

SEQ ID NO: 32795 - DNA, 20 bp, synthetic construct
  source 1..20: mol_type = other DNA
ccctctcagaaccctcactc

SEQ ID NO: 32796 - DNA, 20 bp, synthetic construct
  source 1..20: mol_type = other DNA
ctgccggtcaaatctggaag

SEQ ID NO: 32797 - DNA, 20 bp, synthetic construct
  source 1..20: mol_type = other DNA
gtaacattacttggattacc

SEQ ID NO: 32798 - DNA, 20 bp, synthetic construct
  source 1..20: mol_type = other DNA
tcaagctgcacggactcctg

SEQ ID NO: 32799 - DNA, 20 bp, synthetic construct
  source 1..20: mol_type = other DNA
cctcattaaaccaaaggtca

SEQ ID NO: 32800 - DNA, 20 bp, synthetic construct
  source 1..20: mol_type = other DNA
tcatccacaacgcggacgag

SEQ ID NO: 32801 - DNA, 20 bp, synthetic construct
  source 1..20: mol_type = other DNA
tcatcaaaaggttcattctc

SEQ ID NO: 32802 - DNA, 20 bp, synthetic construct
  source 1..20: mol_type = other DNA
gagggtgctggggacagccc

SEQ ID NO: 32803 - DNA, 20 bp, synthetic construct
  source 1..20: mol_type = other DNA
agatgatgaaaatagtggga

SEQ ID NO: 32804 - DNA, 20 bp, synthetic construct
  source 1..20: mol_type = other DNA
accgcatcaaggatctctgg

SEQ ID NO: 32805 - DNA, 20 bp, synthetic construct
  source 1..20: mol_type = other DNA
agacatgagaacgttgttga

SEQ ID NO: 32806 - DNA, 20 bp, synthetic construct
  source 1..20: mol_type = other DNA
atgttgatgggggacaccgg

SEQ ID NO: 32807 - DNA, 20 bp, synthetic construct
  source 1..20: mol_type = other DNA
ttgcagaagatggtgtgcca

SEQ ID NO: 32808 - DNA, 20 bp, synthetic construct
  source 1..20: mol_type = other DNA
gcaaagtgcacctggagctg

SEQ ID NO: 32809 - DNA, 20 bp, synthetic construct
  source 1..20: mol_type = other DNA
tacctttttaagcagatctc

SEQ ID NO: 32810 - DNA, 20 bp, synthetic construct
  source 1..20: mol_type = other DNA
ctgatccggttctcgtgctc

SEQ ID NO: 32811 - DNA, 20 bp, synthetic construct
  source 1..20: mol_type = other DNA
ccgatcacgtaaatgtcatg

SEQ ID NO: 32812 - DNA, 20 bp, synthetic construct
  source 1..20: mol_type = other DNA
ggccttaccttggggggaag

SEQ ID NO: 32813 - DNA, 20 bp, synthetic construct
  source 1..20: mol_type = other DNA
ctcctctcctagctcctccc

SEQ ID NO: 32814 - DNA, 20 bp, synthetic construct
  source 1..20: mol_type = other DNA
agtgcaaataggccagtccc

SEQ ID NO: 32815 - DNA, 20 bp, synthetic construct
  source 1..20: mol_type = other DNA
acagatgtgagggactggga

SEQ ID NO: 32816 - DNA, 20 bp, synthetic construct
  source 1..20: mol_type = other DNA
ggaggaggtggaagaggaag

SEQ ID NO: 32817 - DNA, 20 bp, synthetic construct
  source 1..20: mol_type = other DNA
tgatcttcttctttggtcca

SEQ ID NO: 32818 - DNA, 20 bp, synthetic construct
  source 1..20: mol_type = other DNA
ctgctggagtctctcaatgt

SEQ ID NO: 32819 - DNA, 20 bp, synthetic construct
  source 1..20: mol_type = other DNA
tttaccagatgctccaaaag

SEQ ID NO: 32820 - DNA, 20 bp, synthetic construct
  source 1..20: mol_type = other DNA
gaggccggcagtgaggaggg

SEQ ID NO: 32821 - DNA, 20 bp, synthetic construct
  source 1..20: mol_type = other DNA
cttcagcgactcagagattg

SEQ ID NO: 32822 - DNA, 20 bp, synthetic construct
  source 1..20: mol_type = other DNA
tactggccgtcaatggaaga

SEQ ID NO: 32823 - DNA, 20 bp, synthetic construct
  source 1..20: mol_type = other DNA
tcagcctccagttcagcaag

SEQ ID NO: 32824 - DNA, 20 bp, synthetic construct
  source 1..20: mol_type = other DNA
cttccacagcaaggagattg

SEQ ID NO: 32825 - DNA, 20 bp, synthetic construct
  source 1..20: mol_type = other DNA
cgctgcgggcgacagggcaa

SEQ ID NO: 32826 - DNA, 20 bp, synthetic construct
  source 1..20: mol_type = other DNA
ccgtcacaggtgcagctcgt

SEQ ID NO: 32827 - DNA, 20 bp, synthetic construct
  source 1..20: mol_type = other DNA
cttactcacctctcctggtc

SEQ ID NO: 32828 - DNA, 20 bp, synthetic construct
  source 1..20: mol_type = other DNA
ctgatggacgatgatgccaa

SEQ ID NO: 32829 - DNA, 20 bp, synthetic construct
  source 1..20: mol_type = other DNA
tgtctccttctcctccagcg

SEQ ID NO: 32830 - DNA, 20 bp, synthetic construct
  source 1..20: mol_type = other DNA
caccaaggccatcgagagct

SEQ ID NO: 32831 - DNA, 20 bp, synthetic construct
  source 1..20: mol_type = other DNA
gcccacctgcaccatggggt

SEQ ID NO: 32832 - DNA, 20 bp, synthetic construct
  source 1..20: mol_type = other DNA
ctcagctcctgtagcagcta

SEQ ID NO: 32833 - DNA, 20 bp, synthetic construct
  source 1..20: mol_type = other DNA
gaacctcatgcagctggtgg

SEQ ID NO: 32834 - DNA, 20 bp, synthetic construct
  source 1..20: mol_type = other DNA
atcagctggcagaaggtgcg

SEQ ID NO: 32835 - DNA, 20 bp, synthetic construct
  source 1..20: mol_type = other DNA
gcactggagagcccccacca

SEQ ID NO: 32836 - DNA, 20 bp, synthetic construct
  source 1..20: mol_type = other DNA
gatcatgcaccttgctggcg

SEQ ID NO: 32837 - DNA, 20 bp, synthetic construct
  source 1..20: mol_type = other DNA
cgagctgtgccggcccttcg

SEQ ID NO: 32838 - DNA, 20 bp, synthetic construct
  source 1..20: mol_type = other DNA
tttacccgactctttcaggt

SEQ ID NO: 32839 - DNA, 20 bp, synthetic construct
  source 1..20: mol_type = other DNA
gggccggggccgggaccgcg

SEQ ID NO: 32840 - DNA, 20 bp, synthetic construct
  source 1..20: mol_type = other DNA
gctggaggaagtacctgggt

SEQ ID NO: 32841 - DNA, 20 bp, synthetic construct
  source 1..20: mol_type = other DNA
aagcgcaagggcctgaaaga

SEQ ID NO: 32842 - DNA, 20 bp, synthetic construct
  source 1..20: mol_type = other DNA
ccctgttgccatcctgcccc

SEQ ID NO: 32843 - DNA, 20 bp, synthetic construct
  source 1..20: mol_type = other DNA
atgaatagtagtattagttc

SEQ ID NO: 32844 - DNA, 20 bp, synthetic construct
  source 1..20: mol_type = other DNA
attaaaccaaaggtcatgga

SEQ ID NO: 32845 - DNA, 20 bp, synthetic construct
  source 1..20: mol_type = other DNA
agtgaggggaaggtgaggcg

SEQ ID NO: 32846 - DNA, 20 bp, synthetic construct
  source 1..20: mol_type = other DNA
atatctgagtactttagtta

SEQ ID NO: 32847 - DNA, 20 bp, synthetic construct
  source 1..20: mol_type = other DNA
tataagctcagcttattctc

SEQ ID NO: 32848 - DNA, 20 bp, synthetic construct
  source 1..20: mol_type = other DNA
atccctgagggtagacagga

SEQ ID NO: 32849 - DNA, 20 bp, synthetic construct
  source 1..20: mol_type = other DNA
caaaaaatcttatttctgac

SEQ ID NO: 32850 - DNA, 20 bp, synthetic construct
  source 1..20: mol_type = other DNA
gatagatggaagatggaggc

SEQ ID NO: 32851 - DNA, 20 bp, synthetic construct
  source 1..20: mol_type = other DNA
ctcaccaaaggactcgttga

SEQ ID NO: 32852 - DNA, 20 bp, synthetic construct
  source 1..20: mol_type = other DNA
gctgacgcagtgtcgcgagg

SEQ ID NO: 32853 - DNA, 20 bp, synthetic construct
  source 1..20: mol_type = other DNA
gtgtatactttgcgatcctc

SEQ ID NO: 32854 - DNA, 20 bp, synthetic construct
  source 1..20: mol_type = other DNA
gaagctttcaaaaagtcttc

SEQ ID NO: 32855 - DNA, 20 bp, synthetic construct
  source 1..20: mol_type = other DNA
tactgaggagagcgaggggc

SEQ ID NO: 32856 - DNA, 20 bp, synthetic construct
  source 1..20: mol_type = other DNA
gacggctctgcaccttgggc

SEQ ID NO: 32857 - DNA, 20 bp, synthetic construct
  source 1..20: mol_type = other DNA
ggatgaggaaggcccctcca

SEQ ID NO: 32858 - DNA, 20 bp, synthetic construct
  source 1..20: mol_type = other DNA
caggaggatgattctggaga

SEQ ID NO: 32859 - DNA, 20 bp, synthetic construct
  source 1..20: mol_type = other DNA
gtgcactctcaggtggacct

SEQ ID NO: 32860 - DNA, 20 bp, synthetic construct
  source 1..20: mol_type = other DNA
gggtttcaggtcctggatct

SEQ ID NO: 32861 - DNA, 20 bp, synthetic construct
  source 1..20: mol_type = other DNA
atgcagatcatagtcactgt

SEQ ID NO: 32862 - DNA, 20 bp, synthetic construct
  source 1..20: mol_type = other DNA
agcccaacctctcctggagt

SEQ ID NO: 32863 - DNA, 20 bp, synthetic construct
  source 1..20: mol_type = other DNA
tacctgccaggatgtaagac

SEQ ID NO: 32864 - DNA, 20 bp, synthetic construct
  source 1..20: mol_type = other DNA
ataccagttgatgctggcgg

SEQ ID NO: 32865 - DNA, 20 bp, synthetic construct
  source 1..20: mol_type = other DNA
ggcctcgcagacatctctgg

SEQ ID NO: 32866 - DNA, 20 bp, synthetic construct
  source 1..20: mol_type = other DNA
aacagcagcagcagcagcag

SEQ ID NO: 32867 - DNA, 20 bp, synthetic construct
  source 1..20: mol_type = other DNA
ctgtaggaaggagggccgca

SEQ ID NO: 32868 - DNA, 20 bp, synthetic construct
  source 1..20: mol_type = other DNA
ccagcgatgtggagcagcag

SEQ ID NO: 32869 - DNA, 20 bp, synthetic construct
  source 1..20: mol_type = other DNA
tcggcctacctggaggcggg

SEQ ID NO: 32870 - DNA, 20 bp, synthetic construct
  source 1..20: mol_type = other DNA
catgaggttctcgatctcac

SEQ ID NO: 32871 - DNA, 20 bp, synthetic construct
  source 1..20: mol_type = other DNA
agggacatcaaggtggtctg

SEQ ID NO: 32872 - DNA, 20 bp, synthetic construct
  source 1..20: mol_type = other DNA
tgctaggtagctacatgggc

SEQ ID NO: 32873 - DNA, 20 bp, synthetic construct
  source 1..20: mol_type = other DNA
ccttcacgccctcccgcttc

SEQ ID NO: 32874 - DNA, 20 bp, synthetic construct
  source 1..20: mol_type = other DNA
ttcgtagactccactccact

SEQ ID NO: 32875 - DNA, 20 bp, synthetic construct
  source 1..20: mol_type = other DNA
cccatttatcaattggatga

SEQ ID NO: 32876 - DNA, 20 bp, synthetic construct
  source 1..20: mol_type = other DNA
taggaaagagctgcagggaa

SEQ ID NO: 32877 - DNA, 20 bp, synthetic construct
  source 1..20: mol_type = other DNA
ctgcacagtggtgaggggga

SEQ ID NO: 32878 - DNA, 20 bp, synthetic construct
  source 1..20: mol_type = other DNA
tacaaagccaaaaacaaggt

SEQ ID NO: 32879 - DNA, 20 bp, synthetic construct
  source 1..20: mol_type = other DNA
agtacatgaattatgagata

SEQ ID NO: 32880 - DNA, 20 bp, synthetic construct
  source 1..20: mol_type = other DNA
gctgggataccagttgatgc

SEQ ID NO: 32881 - DNA, 20 bp, synthetic construct
  source 1..20: mol_type = other DNA
actagagaaactgttgcata

SEQ ID NO: 32882 - DNA, 20 bp, synthetic construct
  source 1..20: mol_type = other DNA
tttttcatatattcagtaac

SEQ ID NO: 32883 - DNA, 20 bp, synthetic construct
  source 1..20: mol_type = other DNA
ccgtcgtgtgggtcctgaat

SEQ ID NO: 32884 - DNA, 20 bp, synthetic construct
  source 1..20: mol_type = other DNA
ccacatacccgcctgctcgt

SEQ ID NO: 32885 - DNA, 20 bp, synthetic construct
  source 1..20: mol_type = other DNA
ctgtacccgcagagcctcag

SEQ ID NO: 32886 - DNA, 20 bp, synthetic construct
  source 1..20: mol_type = other DNA
caaccgttcagtgtccgtaa

SEQ ID NO: 32887 - DNA, 20 bp, synthetic construct
  source 1..20: mol_type = other DNA
ctcacctaccacaaacagcc

SEQ ID NO: 32888 - DNA, 20 bp, synthetic construct
  source 1..20: mol_type = other DNA
acggctcatctgaggaggtt

SEQ ID NO: 32889 - DNA, 20 bp, synthetic construct
  source 1..20: mol_type = other DNA
acaggatgagatttatatcc

SEQ ID NO: 32890 - DNA, 20 bp, synthetic construct
  source 1..20: mol_type = other DNA
tcaagtactgcataataagg

SEQ ID NO: 32891 - DNA, 20 bp, synthetic construct
  source 1..20: mol_type = other DNA
ggtagggcttctcacctgca

SEQ ID NO: 32892 - DNA, 20 bp, synthetic construct
  source 1..20: mol_type = other DNA
tgggtgatcttgatctggaa

SEQ ID NO: 32893 - DNA, 20 bp, synthetic construct
  source 1..20: mol_type = other DNA
gcagcccagtatcaaggtgc

SEQ ID NO: 32894 - DNA, 20 bp, synthetic construct
  source 1..20: mol_type = other DNA
gaaccagagccaacaagccc

SEQ ID NO: 32895 - DNA, 20 bp, synthetic construct
  source 1..20: mol_type = other DNA
acaggatgatcttggagaag

SEQ ID NO: 32896 - DNA, 20 bp, synthetic construct
  source 1..20: mol_type = other DNA
tgatccgccgagggatagca

SEQ ID NO: 32897 - DNA, 20 bp, synthetic construct
  source 1..20: mol_type = other DNA
gtacagctctctgaaagaac

SEQ ID NO: 32898 - DNA, 20 bp, synthetic construct
  source 1..20: mol_type = other DNA
tggaaatctgggggtcagaa

SEQ ID NO: 32899 - DNA, 20 bp, synthetic construct
  source 1..20: mol_type = other DNA
cagcaagcgtggttgagacc

SEQ ID NO: 32900 - DNA, 20 bp, synthetic construct
  source 1..20: mol_type = other DNA
aagcagtgtccaggttgtgg

SEQ ID NO: 32901 - DNA, 20 bp, synthetic construct
  source 1..20: mol_type = other DNA
aacgttctcatgtctctctc

SEQ ID NO: 32902 - DNA, 20 bp, synthetic construct
  source 1..20: mol_type = other DNA
ccccccagagatccttgatg

SEQ ID NO: 32903 - DNA, 20 bp, synthetic construct
  source 1..20: mol_type = other DNA
acaggtaacggggagccggg

SEQ ID NO: 32904 - DNA, 20 bp, synthetic construct
  source 1..20: mol_type = other DNA
agaccagcacctgctcctgg

SEQ ID NO: 32905 - DNA, 20 bp, synthetic construct
  source 1..20: mol_type = other DNA
ccagctggacgtgatggagc

SEQ ID NO: 32906 - DNA, 20 bp, synthetic construct
  source 1..20: mol_type = other DNA
ggtggagggatgtgtccagg

SEQ ID NO: 32907 - DNA, 20 bp, synthetic construct
  source 1..20: mol_type = other DNA
ccactcggatgtgcttggcc

SEQ ID NO: 32908 - DNA, 20 bp, synthetic construct
  source 1..20: mol_type = other DNA
cggcggcggggggcaccggc

SEQ ID NO: 32909 - DNA, 20 bp, synthetic construct
  source 1..20: mol_type = other DNA
cccacgagagcaaagagtga

SEQ ID NO: 32910 - DNA, 20 bp, synthetic construct
  source 1..20: mol_type = other DNA
gagcctgtgcacctgaaaga

SEQ ID NO: 32911 - DNA, 20 bp, synthetic construct
  source 1..20: mol_type = other DNA
agccttgcctggaaatctgg

SEQ ID NO: 32912 - DNA, 20 bp, synthetic construct
  source 1..20: mol_type = other DNA
tgccctaaggagaagagggg

SEQ ID NO: 32913 - DNA, 20 bp, synthetic construct
  source 1..20: mol_type = other DNA
cccttgaggtggggcaggag

SEQ ID NO: 32914 - DNA, 20 bp, synthetic construct
  source 1..20: mol_type = other DNA
acctcacctggatctccaca

SEQ ID NO: 32915 - DNA, 20 bp, synthetic construct
  source 1..20: mol_type = other DNA
cacgaatgaacttgctgtgt

SEQ ID NO: 32916 - DNA, 20 bp, synthetic construct
  source 1..20: mol_type = other DNA
ttccagttctaaggggagcg

SEQ ID NO: 32917 - DNA, 20 bp, synthetic construct
  source 1..20: mol_type = other DNA
gaattctacaatgcgtcgga

SEQ ID NO: 32918 - DNA, 20 bp, synthetic construct
  source 1..20: mol_type = other DNA
ctctgacattagcttaaagt

SEQ ID NO: 32919 - DNA, 20 bp, synthetic construct
  source 1..20: mol_type = other DNA
ctgtgtgacatctggtccct

SEQ ID NO: 32920 - DNA, 20 bp, synthetic construct
  source 1..20: mol_type = other DNA
ccgtaccatgatgttgccca

SEQ ID NO: 32921 - DNA, 20 bp, synthetic construct
  source 1..20: mol_type = other DNA
ctgaagaaggaactgccaca

SEQ ID NO: 32922 - DNA, 20 bp, synthetic construct
  source 1..20: mol_type = other DNA
cggctgctgtgggtacaggc

SEQ ID NO: 32923 - DNA, 20 bp, synthetic construct
  source 1..20: mol_type = other DNA
cccaccgctccagctctctg

SEQ ID NO: 32924 - DNA, 20 bp, synthetic construct
  source 1..20: mol_type = other DNA
gaccaaagatggagtgagag

SEQ ID NO: 32925 - DNA, 20 bp, synthetic construct
  source 1..20: mol_type = other DNA
ccaacatcgtggcctaccat

SEQ ID NO: 32926 - DNA, 20 bp, synthetic construct
  source 1..20: mol_type = other DNA
tggacttcatcctgtccatg

SEQ ID NO: 32927 - DNA, 20 bp, synthetic construct
  source 1..20: mol_type = other DNA
gctccctggcatggcgctcg

SEQ ID NO: 32928 - DNA, 20 bp, synthetic construct
  source 1..20: mol_type = other DNA
aaagagctcaaggaagaact

SEQ ID NO: 32929 - DNA, 20 bp, synthetic construct
  source 1..20: mol_type = other DNA
gcaggaatttgttcatgggc

SEQ ID NO: 32930 - DNA, 20 bp, synthetic construct
  source 1..20: mol_type = other DNA
cccctacgccaccgtgacgc

SEQ ID NO: 32931 - DNA, 20 bp, synthetic construct
  source 1..20: mol_type = other DNA
gcctctccgtccacctgcac

SEQ ID NO: 32932 - DNA, 20 bp, synthetic construct
  source 1..20: mol_type = other DNA
actggcgctgcttcttctgg

SEQ ID NO: 32933 - DNA, 20 bp, synthetic construct
  source 1..20: mol_type = other DNA
ctcacgccgatgcacacagc

SEQ ID NO: 32934 - DNA, 20 bp, synthetic construct
  source 1..20: mol_type = other DNA
ctcgaagggccggcacagct

SEQ ID NO: 32935 - DNA, 20 bp, synthetic construct
  source 1..20: mol_type = other DNA
acctcgcggatggtggagag

SEQ ID NO: 32936 - DNA, 20 bp, synthetic construct
  source 1..20: mol_type = other DNA
cctacctctgcaattaaatt

SEQ ID NO: 32937 - DNA, 20 bp, synthetic construct
  source 1..20: mol_type = other DNA
agaggccctagatttctatg

SEQ ID NO: 32938 - DNA, 20 bp, synthetic construct
  source 1..20: mol_type = other DNA
tccttacctggagcacttcc

SEQ ID NO: 32939 - DNA, 20 bp, synthetic construct
  source 1..20: mol_type = other DNA
tggataaggcactcgcccaa

SEQ ID NO: 32940 - DNA, 20 bp, synthetic construct
  source 1..20: mol_type = other DNA
accgtccaggaagcaccact

SEQ ID NO: 32941 - DNA, 20 bp, synthetic construct
  source 1..20: mol_type = other DNA
ggaggccgtgggtctgtgca

SEQ ID NO: 32942 - DNA, 20 bp, synthetic construct
  source 1..20: mol_type = other DNA
tggcactgtgaccacagcat

SEQ ID NO: 32943 - DNA, 20 bp, synthetic construct
  source 1..20: mol_type = other DNA
ccagccgctctgacaccaga

SEQ ID NO: 32944 - DNA, 20 bp, synthetic construct
  source 1..20: mol_type = other DNA
cccgtccaaggctgggacca

SEQ ID NO: 32945 - DNA, 20 bp, synthetic construct
  source 1..20: mol_type = other DNA
ctcgaacttgcttctctggt

SEQ ID NO: 32946 - DNA, 20 bp, synthetic construct
  source 1..20: mol_type = other DNA
gaaggcactgaagtcgatgc

SEQ ID NO: 32947 - DNA, 20 bp, synthetic construct
  source 1..20: mol_type = other DNA
tcgagaagtccggaagcttg

SEQ ID NO: 32948 - DNA, 20 bp, synthetic construct
  source 1..20: mol_type = other DNA
ggagccttgtggactacctg

SEQ ID NO: 32949 - DNA, 20 bp, synthetic construct
  source 1..20: mol_type = other DNA
gaaggtaaggggctgtcctg

SEQ ID NO: 32950 - DNA, 20 bp, synthetic construct
  source 1..20: mol_type = other DNA
ttcttgagaagctgtgggtg

SEQ ID NO: 32951 - DNA, 20 bp, synthetic construct
  source 1..20: mol_type = other DNA
cttcatgctgcagcagatcg

SEQ ID NO: 32952 - DNA, 20 bp, synthetic construct
  source 1..20: mol_type = other DNA
gtcttcgacctgagccaggg

SEQ ID NO: 32953 - DNA, 20 bp, synthetic construct
  source 1..20: mol_type = other DNA
gccaagtctcggaaggacat

SEQ ID NO: 32954 - DNA, 20 bp, synthetic construct
  source 1..20: mol_type = other DNA
tcaccaagggtacaaaatga

SEQ ID NO: 32955 - DNA, 20 bp, synthetic construct
  source 1..20: mol_type = other DNA
catccctgggggcctgagct

SEQ ID NO: 32956 - DNA, 20 bp, synthetic construct
  source 1..20: mol_type = other DNA
tccccagctcttggagcagt

SEQ ID NO: 32957 - DNA, 20 bp, synthetic construct
  source 1..20: mol_type = other DNA
tgaagaatctgagcacagag

SEQ ID NO: 32958 - DNA, 20 bp, synthetic construct
  source 1..20: mol_type = other DNA
ctttgaatatgataaaagcc

SEQ ID NO: 32959 - DNA, 20 bp, synthetic construct
  source 1..20: mol_type = other DNA
cggggaatacctggtgacga

SEQ ID NO: 32960 - DNA, 20 bp, synthetic construct
  source 1..20: mol_type = other DNA
tgatcaaagtggaggagggg

SEQ ID NO: 32961 - DNA, 20 bp, synthetic construct
  source 1..20: mol_type = other DNA
gatgaagatggtgatcatgt

SEQ ID NO: 32962 - DNA, 20 bp, synthetic construct
  source 1..20: mol_type = other DNA
gtagatgtaataggctcttc

SEQ ID NO: 32963 - DNA, 20 bp, synthetic construct
  source 1..20: mol_type = other DNA
gttccaattcctgagcaaag

SEQ ID NO: 32964 - DNA, 20 bp, synthetic construct
  source 1..20: mol_type = other DNA
cggtgcagctcctggagctg

SEQ ID NO: 32965 - DNA, 20 bp, synthetic construct
  source 1..20: mol_type = other DNA
ccagatggctctaacctcag

SEQ ID NO: 32966 - DNA, 20 bp, synthetic construct
  source 1..20: mol_type = other DNA
caagcggctgcggaaccggc

SEQ ID NO: 32967 - DNA, 20 bp, synthetic construct
  source 1..20: mol_type = other DNA
cgtgggccagcagcatccgg

SEQ ID NO: 32968 - DNA, 20 bp, synthetic construct
  source 1..20: mol_type = other DNA
gttcctcaccatttccagcg

SEQ ID NO: 32969 - DNA, 20 bp, synthetic construct
  source 1..20: mol_type = other DNA
cctcaccaggttcttgaaca

SEQ ID NO: 32970 - DNA, 20 bp, synthetic construct
  source 1..20: mol_type = other DNA
ctgaccgacccctagaccgc

SEQ ID NO: 32971 - DNA, 20 bp, synthetic construct
  source 1..20: mol_type = other DNA
acctgcggatcctggcgtgc

SEQ ID NO: 32972 - DNA, 20 bp, synthetic construct
  source 1..20: mol_type = other DNA
cggcgttcactttgctgccc

SEQ ID NO: 32973 - DNA, 20 bp, synthetic construct
  source 1..20: mol_type = other DNA
cattaaaccaaaggtcatgg

SEQ ID NO: 32974 - DNA, 20 bp, synthetic construct
  source 1..20: mol_type = other DNA
gcgccagtggattggcccaa

SEQ ID NO: 32975 - DNA, 20 bp, synthetic construct
  source 1..20: mol_type = other DNA
aggcaacatctacaggcaac

SEQ ID NO: 32976 - DNA, 20 bp, synthetic construct
  source 1..20: mol_type = other DNA
ttcaccagctggccagacca

SEQ ID NO: 32977 - DNA, 20 bp, synthetic construct
  source 1..20: mol_type = other DNA
gatcttgatctggaagggaa

SEQ ID NO: 32978 - DNA, 20 bp, synthetic construct
  source 1..20: mol_type = other DNA
ttgccttaccagcttcttcc

SEQ ID NO: 32979 - DNA, 20 bp, synthetic construct
  source 1..20: mol_type = other DNA
gggactgaggagtacctggt

SEQ ID NO: 32980 - DNA, 20 bp, synthetic construct
  source 1..20: mol_type = other DNA
cactcccagttgcttcctgg

SEQ ID NO: 32981 - DNA, 20 bp, synthetic construct
  source 1..20: mol_type = other DNA
ggagggggtgggggcggggg

SEQ ID NO: 32982 - DNA, 20 bp, synthetic construct
  source 1..20: mol_type = other DNA
ccccctcacactggatgcgc

SEQ ID NO: 32983 - DNA, 20 bp, synthetic construct
  source 1..20: mol_type = other DNA
gttattaagaaacgtattga

SEQ ID NO: 32984 - DNA, 20 bp, synthetic construct
  source 1..20: mol_type = other DNA
gacgcattgtagaattccag

SEQ ID NO: 32985 - DNA, 20 bp, synthetic construct
  source 1..20: mol_type = other DNA
ggagttgtcaggctgcatgg

SEQ ID NO: 32986 - DNA, 20 bp, synthetic construct
  source 1..20: mol_type = other DNA
tgcatggtggctccaacctc

SEQ ID NO: 32987 - DNA, 20 bp, synthetic construct
  source 1..20: mol_type = other DNA
tggggttctcagcatgggat

SEQ ID NO: 32988 - DNA, 20 bp, synthetic construct
  source 1..20: mol_type = other DNA
aaggcccgcgacttgaagaa

SEQ ID NO: 32989 - DNA, 20 bp, synthetic construct
  source 1..20: mol_type = other DNA
cccaggagcaggtgctggtc

SEQ ID NO: 32990 - DNA, 20 bp, synthetic construct
  source 1..20: mol_type = other DNA
tgtacagggcgtctgcatcc

SEQ ID NO: 32991 - DNA, 20 bp, synthetic construct
  source 1..20: mol_type = other DNA
gttgccctccaggtattcca

SEQ ID NO: 32992 - DNA, 20 bp, synthetic construct
  source 1..20: mol_type = other DNA
ctacatatgcagctttatcc

SEQ ID NO: 32993 - DNA, 20 bp, synthetic construct
  source 1..20: mol_type = other DNA
ccaagacccaggggagccac

SEQ ID NO: 32994 - DNA, 20 bp, synthetic construct
  source 1..20: mol_type = other DNA
tgatacctttatggtttcag

SEQ ID NO: 32995 - DNA, 20 bp, synthetic construct
  source 1..20: mol_type = other DNA
tgtacaagtgcgaacactgc

SEQ ID NO: 32996 - DNA, 20 bp, synthetic construct
  source 1..20: mol_type = other DNA
gcataggtgctgacttcaca

SEQ ID NO: 32997 - DNA, 20 bp, synthetic construct
  source 1..20: mol_type = other DNA
gaaaacaatgtagggagagg

SEQ ID NO: 32998 - DNA, 20 bp, synthetic construct
  source 1..20: mol_type = other DNA
caagtcttcgacctgagcca

SEQ ID NO: 32999 - DNA, 20 bp, synthetic construct
  source 1..20: mol_type = other DNA
gctgacagccgttgctgacg

SEQ ID NO: 33000 - DNA, 20 bp, synthetic construct
  source 1..20: mol_type = other DNA
atttctcagccttggtttcc

SEQ ID NO: 33001 - DNA, 20 bp, synthetic construct
  source 1..20: mol_type = other DNA
cggatgtgagtggggcaggt

SEQ ID NO: 33002 - DNA, 20 bp, synthetic construct
  source 1..20: mol_type = other DNA
acgacgtggacatgtaagtg

SEQ ID NO: 33003 - DNA, 20 bp, synthetic construct
  source 1..20: mol_type = other DNA
cggtcaaatctggaagggga

SEQ ID NO: 33004 - DNA, 20 bp, synthetic construct
  source 1..20: mol_type = other DNA
gcagaagccgatggtatgaa

SEQ ID NO: 33005 - DNA, 20 bp, synthetic construct
  source 1..20: mol_type = other DNA
cgccgctgccgccgcggagg

SEQ ID NO: 33006 - DNA, 20 bp, synthetic construct
  source 1..20: mol_type = other DNA
caaataggaatcaaaccagc

SEQ ID NO: 33007 - DNA, 20 bp, synthetic construct
  source 1..20: mol_type = other DNA
gtggaaggccaggcagctga

SEQ ID NO: 33008 - DNA, 20 bp, synthetic construct
  source 1..20: mol_type = other DNA
aagacttctgctcggagctg

SEQ ID NO: 33009 - DNA, 20 bp, synthetic construct
  source 1..20: mol_type = other DNA
agcctcacttgagctctgct

SEQ ID NO: 33010 - DNA, 20 bp, synthetic construct
  source 1..20: mol_type = other DNA
gaaccatcagttgtacccac

SEQ ID NO: 33011 - DNA, 20 bp, synthetic construct
  source 1..20: mol_type = other DNA
aacgcatctgcagatgccgg

SEQ ID NO: 33012 - DNA, 20 bp, synthetic construct
  source 1..20: mol_type = other DNA
agagaggcaagtgttcgtga

SEQ ID NO: 33013 - DNA, 20 bp, synthetic construct
  source 1..20: mol_type = other DNA
tcagggcgcccttggcgccg

SEQ ID NO: 33014 - DNA, 20 bp, synthetic construct
  source 1..20: mol_type = other DNA
caaacctgtaattcagaaag

SEQ ID NO: 33015 - DNA, 20 bp, synthetic construct
  source 1..20: mol_type = other DNA
cttgggctggaaacctgaga

SEQ ID NO: 33016 - DNA, 20 bp, synthetic construct
  source 1..20: mol_type = other DNA
tcacttacctgagcaaagga

SEQ ID NO: 33017 - DNA, 20 bp, synthetic construct
  source 1..20: mol_type = other DNA
gtgctaccatcctacagaag

SEQ ID NO: 33018 - DNA, 20 bp, synthetic construct
  source 1..20: mol_type = other DNA
gcggctgtcgcgcaccagga

SEQ ID NO: 33019 - DNA, 20 bp, synthetic construct
  source 1..20: mol_type = other DNA
agcctgggctcatgggaaga

SEQ ID NO: 33020 - DNA, 20 bp, synthetic construct
  source 1..20: mol_type = other DNA
cagccactgcaggctggggc

SEQ ID NO: 33021 - DNA, 20 bp, synthetic construct
  source 1..20: mol_type = other DNA
catttggaaaactgtgatcc

SEQ ID NO: 33022 - DNA, 20 bp, synthetic construct
  source 1..20: mol_type = other DNA
gtaattcatttttgaaccac

SEQ ID NO: 33023 - DNA, 20 bp, synthetic construct
  source 1..20: mol_type = other DNA
gatgttccagagcgtgtgga

SEQ ID NO: 33024 - DNA, 20 bp, synthetic construct
  source 1..20: mol_type = other DNA
aaggaggcctgtgagtgcgg

SEQ ID NO: 33025 - DNA, 20 bp, synthetic construct
  source 1..20: mol_type = other DNA
tcaggtaatgggacaggcta

SEQ ID NO: 33026 - DNA, 20 bp, synthetic construct
  source 1..20: mol_type = other DNA
gacgctcaaggccgagaacg

SEQ ID NO: 33027 - DNA, 20 bp, synthetic construct
  source 1..20: mol_type = other DNA
tggggcagggtgaggtggag

SEQ ID NO: 33028 - DNA, 20 bp, synthetic construct
  source 1..20: mol_type = other DNA
tgccactaaaacagagagga

SEQ ID NO: 33029 - DNA, 20 bp, synthetic construct
  source 1..20: mol_type = other DNA
agagccaacaagcccaggcg

SEQ ID NO: 33030 - DNA, 20 bp, synthetic construct
  source 1..20: mol_type = other DNA
ctatctccaaggcatccggg

SEQ ID NO: 33031 - DNA, 20 bp, synthetic construct
  source 1..20: mol_type = other DNA
gaggtcagattgggtgagta

SEQ ID NO: 33032 - DNA, 20 bp, synthetic construct
  source 1..20: mol_type = other DNA
attcgtactgctggtcagcg

SEQ ID NO: 33033 - DNA, 20 bp, synthetic construct
  source 1..20: mol_type = other DNA
gcacgtgccgctctcctcga

SEQ ID NO: 33034 - DNA, 20 bp, synthetic construct
  source 1..20: mol_type = other DNA
gggcttctcacctgcaggga

SEQ ID NO: 33035 - DNA, 20 bp, synthetic construct
  source 1..20: mol_type = other DNA
agatagaagctgctatagtg

SEQ ID NO: 33036 - DNA, 20 bp, synthetic construct
  source 1..20: mol_type = other DNA
ccaacactccagagatccac

SEQ ID NO: 33037 - DNA, 20 bp, synthetic construct
  source 1..20: mol_type = other DNA
gtggggctgaaacacaaaga

SEQ ID NO: 33038 - DNA, 20 bp, synthetic construct
  source 1..20: mol_type = other DNA
ctccacttccccccaaggta

SEQ ID NO: 33039 - DNA, 20 bp, synthetic construct
  source 1..20: mol_type = other DNA
gacctctccaccacctcggg

SEQ ID NO: 33040 - DNA, 20 bp, synthetic construct
  source 1..20: mol_type = other DNA
gcacctgctcctgggggcag

SEQ ID NO: 33041 - DNA, 20 bp, synthetic construct
  source 1..20: mol_type = other DNA
tgggcaagctggcggagaga

SEQ ID NO: 33042 - DNA, 20 bp, synthetic construct
  source 1..20: mol_type = other DNA
catccgagtggtggtgagcg

SEQ ID NO: 33043 - DNA, 20 bp, synthetic construct
  source 1..20: mol_type = other DNA
cttcaggggctgtggccagg

SEQ ID NO: 33044 - DNA, 20 bp, synthetic construct
  source 1..20: mol_type = other DNA
ccaccagctcctgcaccccc

SEQ ID NO: 33045 - DNA, 20 bp, synthetic construct
  source 1..20: mol_type = other DNA
ccagtgcagagcccaggggc

SEQ ID NO: 33046 - DNA, 20 bp, synthetic construct
  source 1..20: mol_type = other DNA
acctgcagcagcagcagaag

SEQ ID NO: 33047 - DNA, 20 bp, synthetic construct
  source 1..20: mol_type = other DNA
gccagcgatgtggagcagca

SEQ ID NO: 33048 - DNA, 20 bp, synthetic construct
  source 1..20: mol_type = other DNA
tacagttgagaagaagaggt

SEQ ID NO: 33049 - DNA, 20 bp, synthetic construct
  source 1..20: mol_type = other DNA
caccagggcacagctggagc

SEQ ID NO: 33050 - DNA, 20 bp, synthetic construct
  source 1..20: mol_type = other DNA
gaaacattggccctttatgg

SEQ ID NO: 33051 - DNA, 20 bp, synthetic construct
  source 1..20: mol_type = other DNA
tccgaactcccccttcccga

SEQ ID NO: 33052 - DNA, 20 bp, synthetic construct
  source 1..20: mol_type = other DNA
atagatcagtgggatacaac

SEQ ID NO: 33053 - DNA, 20 bp, synthetic construct
  source 1..20: mol_type = other DNA
actcaaaatgtaagcagctg

SEQ ID NO: 33054 - DNA, 20 bp, synthetic construct
  source 1..20: mol_type = other DNA
cacttccggagccatcctgg

SEQ ID NO: 33055 - DNA, 20 bp, synthetic construct
  source 1..20: mol_type = other DNA
ccacggccactctgacaaca

SEQ ID NO: 33056 - DNA, 20 bp, synthetic construct
  source 1..20: mol_type = other DNA
acctcctgtggcacaggtgc

SEQ ID NO: 33057 - DNA, 20 bp, synthetic construct
  source 1..20: mol_type = other DNA
tgctgtgcaggatgagaatg

SEQ ID NO: 33058 - DNA, 20 bp, synthetic construct
  source 1..20: mol_type = other DNA
gcctgtgggcacaggaagct

SEQ ID NO: 33059 - DNA, 20 bp, synthetic construct
  source 1..20: mol_type = other DNA
tgctgcgggccgcacaggga

SEQ ID NO: 33060 - DNA, 20 bp, synthetic construct
  source 1..20: mol_type = other DNA
cgggcaagctgccagtcaag

SEQ ID NO: 33061 - DNA, 20 bp, synthetic construct
  source 1..20: mol_type = other DNA
tgttctacgccggggtgagt

SEQ ID NO: 33062 - DNA, 20 bp, synthetic construct
  source 1..20: mol_type = other DNA
aggggcaacacagcaacagg

SEQ ID NO: 33063 - DNA, 20 bp, synthetic construct
  source 1..20: mol_type = other DNA
gattgcagtagactggtctg

SEQ ID NO: 33064 - DNA, 20 bp, synthetic construct
  source 1..20: mol_type = other DNA
gttaagtacctcctgagaca

SEQ ID NO: 33065 - DNA, 20 bp, synthetic construct
  source 1..20: mol_type = other DNA
cacgttcccctcctccacgt

SEQ ID NO: 33066 - DNA, 20 bp, synthetic construct
  source 1..20: mol_type = other DNA
agggaacaagggagccgtgg

SEQ ID NO: 33067 - DNA, 20 bp, synthetic construct
  source 1..20: mol_type = other DNA
gatctgttatcaagtgagaa

SEQ ID NO: 33068 - DNA, 20 bp, synthetic construct
  source 1..20: mol_type = other DNA
caacttaccttcgcaggtgg

SEQ ID NO: 33069 - DNA, 20 bp, synthetic construct
  source 1..20: mol_type = other DNA
tcgcacagattgcagtagac

SEQ ID NO: 33070 - DNA, 20 bp, synthetic construct
  source 1..20: mol_type = other DNA
tccctcactctttgctctcg

SEQ ID NO: 33071 - DNA, 20 bp, synthetic construct
  source 1..20: mol_type = other DNA
ttctgtggccatcctgcccc

SEQ ID NO: 33072 - DNA, 20 bp, synthetic construct
  source 1..20: mol_type = other DNA
ctccaagagcgagtaccagc

SEQ ID NO: 33073 - DNA, 20 bp, synthetic construct
  source 1..20: mol_type = other DNA
ggcaggtcttcttctcactg

SEQ ID NO: 33074 - DNA, 20 bp, synthetic construct
  source 1..20: mol_type = other DNA
cggagatgctggtaggtatc

SEQ ID NO: 33075 - DNA, 20 bp, synthetic construct
  source 1..20: mol_type = other DNA
tttcacaatggagactatcc

SEQ ID NO: 33076 - DNA, 20 bp, synthetic construct
  source 1..20: mol_type = other DNA
tgccagcgagtccatctccc

SEQ ID NO: 33077 - DNA, 20 bp, synthetic construct
  source 1..20: mol_type = other DNA
ccaggtaggagaagcgcagc

SEQ ID NO: 33078 - DNA, 20 bp, synthetic construct
  source 1..20: mol_type = other DNA
tggaggagctcttcagggac

SEQ ID NO: 33079 - DNA, 20 bp, synthetic construct
  source 1..20: mol_type = other DNA
acccagctagacgaggctcg

SEQ ID NO: 33080 - DNA, 20 bp, synthetic construct
  source 1..20: mol_type = other DNA
gctgcagggtgtggggggca

SEQ ID NO: 33081 - DNA, 20 bp, synthetic construct
  source 1..20: mol_type = other DNA
gcaggcagagcccaagaccc

SEQ ID NO: 33082 - DNA, 20 bp, synthetic construct
  source 1..20: mol_type = other DNA
attcacacaggtgtgtgcct

SEQ ID NO: 33083 - DNA, 20 bp, synthetic construct
  source 1..20: mol_type = other DNA
gtgcaccctctcaggtaggc

SEQ ID NO: 33084 - DNA, 20 bp, synthetic construct
  source 1..20: mol_type = other DNA
atgaaaggtgcggcacagct

SEQ ID NO: 33085 - DNA, 20 bp, synthetic construct
  source 1..20: mol_type = other DNA
cggtagagaaggtagacctt

SEQ ID NO: 33086 - DNA, 20 bp, synthetic construct
  source 1..20: mol_type = other DNA
gaagagccgcaccagcggga

SEQ ID NO: 33087 - DNA, 20 bp, synthetic construct
  source 1..20: mol_type = other DNA
cagagtgagggttctgagag

SEQ ID NO: 33088 - DNA, 20 bp, synthetic construct
  source 1..20: mol_type = other DNA
gatcatgtctctgtggggtc

SEQ ID NO: 33089 - DNA, 20 bp, synthetic construct
  source 1..20: mol_type = other DNA
tcgcccagcatcacgtctgg

SEQ ID NO: 33090 - DNA, 20 bp, synthetic construct
  source 1..20: mol_type = other DNA
ttgcataagggtcacagctt

SEQ ID NO: 33091 - DNA, 20 bp, synthetic construct
  source 1..20: mol_type = other DNA
cgtcggaaggtcgaacagga

SEQ ID NO: 33092 - DNA, 20 bp, synthetic construct
  source 1..20: mol_type = other DNA
gttgcagcggtgagaagggt

SEQ ID NO: 33093 - DNA, 20 bp, synthetic construct
  source 1..20: mol_type = other DNA
tggccagaagggtgttaacc

SEQ ID NO: 33094 - DNA, 20 bp, synthetic construct
  source 1..20: mol_type = other DNA
tggactcgctggcacgcacg

SEQ ID NO: 33095 - DNA, 20 bp, synthetic construct
  source 1..20: mol_type = other DNA
aaccatcagttgtacccact

SEQ ID NO: 33096 - DNA, 20 bp, synthetic construct
  source 1..20: mol_type = other DNA
agtggcctgtcaactcccca

SEQ ID NO: 33097 - DNA, 20 bp, synthetic construct
  source 1..20: mol_type = other DNA
tcctgcagggagttcctggt

SEQ ID NO: 33098 - DNA, 20 bp, synthetic construct
  source 1..20: mol_type = other DNA
caggaaccttaatctcacct

SEQ ID NO: 33099 - DNA, 20 bp, synthetic construct
  source 1..20: mol_type = other DNA
cggcgagcgagagtgaggag

SEQ ID NO: 33100 - DNA, 20 bp, synthetic construct
  source 1..20: mol_type = other DNA
taagctcaacctggtgctgg

SEQ ID NO: 33101 - DNA, 20 bp, synthetic construct
  source 1..20: mol_type = other DNA
acgaccagctgctcacagag

SEQ ID NO: 33102 - DNA, 20 bp, synthetic construct
  source 1..20: mol_type = other DNA
gaaccaggggagcagctcag

SEQ ID NO: 33103 - DNA, 20 bp, synthetic construct
  source 1..20: mol_type = other DNA
cgctcaaggccgagaacgcg

SEQ ID NO: 33104 - DNA, 20 bp, synthetic construct
  source 1..20: mol_type = other DNA
tcgtgtgggtcctgaattgg

SEQ ID NO: 33105 - DNA, 20 bp, synthetic construct
  source 1..20: mol_type = other DNA
catctgccagagactgaggc

SEQ ID NO: 33106 - DNA, 20 bp, synthetic construct
  source 1..20: mol_type = other DNA
gaagcaatatgtgtcatact

SEQ ID NO: 33107 - DNA, 20 bp, synthetic construct
  source 1..20: mol_type = other DNA
gcactcccagctggacgtga

SEQ ID NO: 33108 - DNA, 20 bp, synthetic construct
  source 1..20: mol_type = other DNA
tcccagtttgtctccaagaa

SEQ ID NO: 33109 - DNA, 20 bp, synthetic construct
  source 1..20: mol_type = other DNA
agcccctcagccccacctgg

SEQ ID NO: 33110 - DNA, 20 bp, synthetic construct
  source 1..20: mol_type = other DNA
ccagaagaagtcgtggttga

SEQ ID NO: 33111 - DNA, 20 bp, synthetic construct
  source 1..20: mol_type = other DNA
gcaaacaggtctccccgctg

SEQ ID NO: 33112 - DNA, 20 bp, synthetic construct
  source 1..20: mol_type = other DNA
tcttctggaacagagggcaa

SEQ ID NO: 33113 - DNA, 20 bp, synthetic construct
  source 1..20: mol_type = other DNA
ctatgtgactgagatcgcac

SEQ ID NO: 33114 - DNA, 20 bp, synthetic construct
  source 1..20: mol_type = other DNA
caagaggtgaggggctgcag

SEQ ID NO: 33115 - DNA, 20 bp, synthetic construct
  source 1..20: mol_type = other DNA
gaggggccggctcaacacca

SEQ ID NO: 33116 - DNA, 20 bp, synthetic construct
  source 1..20: mol_type = other DNA
gccggctctgggagccgaga

SEQ ID NO: 33117 - DNA, 20 bp, synthetic construct
  source 1..20: mol_type = other DNA
ccagagataactcccatggt

SEQ ID NO: 33118 - DNA, 20 bp, synthetic construct
  source 1..20: mol_type = other DNA
ctggggaaggaggaagagtt

SEQ ID NO: 33119 - DNA, 20 bp, synthetic construct
  source 1..20: mol_type = other DNA
catcgagcagctggagaagg

SEQ ID NO: 33120 - DNA, 20 bp, synthetic construct
  source 1..20: mol_type = other DNA
cttcagccaggagctcgctg

SEQ ID NO: 33121 - DNA, 20 bp, synthetic construct
  source 1..20: mol_type = other DNA
tccttcccgccgcctttcgg

SEQ ID NO: 33122 - DNA, 20 bp, synthetic construct
  source 1..20: mol_type = other DNA
cgtggttcacagggtcctcc

SEQ ID NO: 33123 - DNA, 20 bp, synthetic construct
  source 1..20: mol_type = other DNA
gatacctgctttgtagagga

SEQ ID NO: 33124 - DNA, 20 bp, synthetic construct
  source 1..20: mol_type = other DNA
agatcatccagtctttcctc

SEQ ID NO: 33125 - DNA, 20 bp, synthetic construct
  source 1..20: mol_type = other DNA
gccagccattgtcaaggcag

SEQ ID NO: 33126 - DNA, 20 bp, synthetic construct
  source 1..20: mol_type = other DNA
gtgcaaataggccagtccct

SEQ ID NO: 33127 - DNA, 20 bp, synthetic construct
  source 1..20: mol_type = other DNA
gagggttacactgagcatct

SEQ ID NO: 33128 - DNA, 20 bp, synthetic construct
  source 1..20: mol_type = other DNA
ctgcccccaggagcaggtgc

SEQ ID NO: 33129 - DNA, 20 bp, synthetic construct
  source 1..20: mol_type = other DNA
aggatggaggcccaaccgct

SEQ ID NO: 33130 - DNA, 20 bp, synthetic construct
  source 1..20: mol_type = other DNA
ggctttcggattctcccact

SEQ ID NO: 33131 - DNA, 20 bp, synthetic construct
  source 1..20: mol_type = other DNA
tgactgtccaggcccggggc

SEQ ID NO: 33132 - DNA, 20 bp, synthetic construct
  source 1..20: mol_type = other DNA
tgatgaggatgttagctccc

SEQ ID NO: 33133 - DNA, 20 bp, synthetic construct
  source 1..20: mol_type = other DNA
gctcgagccaagcaccgaga

SEQ ID NO: 33134 - DNA, 20 bp, synthetic construct
  source 1..20: mol_type = other DNA
aaacatgaaaaagagtaagt

SEQ ID NO: 33135 - DNA, 20 bp, synthetic construct
  source 1..20: mol_type = other DNA
ttctgaatactgctgagccc

SEQ ID NO: 33136 - DNA, 20 bp, synthetic construct
  source 1..20: mol_type = other DNA
attcgggtcagatcttccaa

SEQ ID NO: 33137 - DNA, 20 bp, synthetic construct
  source 1..20: mol_type = other DNA
ggatccccagagagctggag

SEQ ID NO: 33138 - DNA, 20 bp, synthetic construct
  source 1..20: mol_type = other DNA
tctgtcttcctcttctgtcc

SEQ ID NO: 33139 - DNA, 20 bp, synthetic construct
  source 1..20: mol_type = other DNA
ctcctgctctggtgcctgcc

SEQ ID NO: 33140 - DNA, 20 bp, synthetic construct
  source 1..20: mol_type = other DNA
tccagggtaagaaaaagaag

SEQ ID NO: 33141 - DNA, 20 bp, synthetic construct
  source 1..20: mol_type = other DNA
tgctgcagaccatcgggaag

SEQ ID NO: 33142 - DNA, 20 bp, synthetic construct
  source 1..20: mol_type = other DNA
tggggatcttaactaccgtg

SEQ ID NO: 33143 - DNA, 20 bp, synthetic construct
  source 1..20: mol_type = other DNA
ggcaggaaaacagcgagcag

SEQ ID NO: 33144 - DNA, 20 bp, synthetic construct
  source 1..20: mol_type = other DNA
agggccacagctgccacttc

SEQ ID NO: 33145 - DNA, 20 bp, synthetic construct
  source 1..20: mol_type = other DNA
ggtgatccaagacttggagg

SEQ ID NO: 33146 - DNA, 20 bp, synthetic construct
  source 1..20: mol_type = other DNA
tctagggaaaatccaattgt

SEQ ID NO: 33147 - DNA, 20 bp, synthetic construct
  source 1..20: mol_type = other DNA
atgatctggttccggattgc

SEQ ID NO: 33148 - DNA, 20 bp, synthetic construct
  source 1..20: mol_type = other DNA
atgccgcagttgcctggggc

SEQ ID NO: 33149 - DNA, 20 bp, synthetic construct
  source 1..20: mol_type = other DNA
tgtggaaggcagccgacctt

SEQ ID NO: 33150 - DNA, 20 bp, synthetic construct
  source 1..20: mol_type = other DNA
tgagcagctggtcgtgggac

SEQ ID NO: 33151 - DNA, 20 bp, synthetic construct
  source 1..20: mol_type = other DNA
acttggcccgaaccctcaac

SEQ ID NO: 33152 - DNA, 20 bp, synthetic construct
  source 1..20: mol_type = other DNA
agtcctgcatcagagaaaca

SEQ ID NO: 33153 - DNA, 20 bp, synthetic construct
  source 1..20: mol_type = other DNA
tgatctacaaacaggccaga

SEQ ID NO: 33154 - DNA, 20 bp, synthetic construct
  source 1..20: mol_type = other DNA
tctggttggggagcaggctc

SEQ ID NO: 33155 - DNA, 20 bp, synthetic construct
  source 1..20: mol_type = other DNA
gacatagaggactattacgt

SEQ ID NO: 33156 - DNA, 20 bp, synthetic construct
  source 1..20: mol_type = other DNA
gttcttaccagccaagaggt

SEQ ID NO: 33157 - DNA, 20 bp, synthetic construct
  source 1..20: mol_type = other DNA
acgcttcactgatacccgga

SEQ ID NO: 33158 - DNA, 20 bp, synthetic construct
  source 1..20: mol_type = other DNA
acgctgtgcgtgagctgcga

SEQ ID NO: 33159 - DNA, 20 bp, synthetic construct
  source 1..20: mol_type = other DNA
aggaaatacattgctgcaca

SEQ ID NO: 33160 - DNA, 20 bp, synthetic construct
  source 1..20: mol_type = other DNA
aggaaagagctgcagggaat

SEQ ID NO: 33161 - DNA, 20 bp, synthetic construct
  source 1..20: mol_type = other DNA
cttctcgcgctccgatcacc

SEQ ID NO: 33162 - DNA, 20 bp, synthetic construct
  source 1..20: mol_type = other DNA
ctacaaaggggacatattaa

SEQ ID NO: 33163 - DNA, 20 bp, synthetic construct
  source 1..20: mol_type = other DNA
ggtaccttgccagtaggcgg

SEQ ID NO: 33164 - DNA, 20 bp, synthetic construct
  source 1..20: mol_type = other DNA
cctgaagttcatggctgagg

SEQ ID NO: 33165 - DNA, 20 bp, synthetic construct
  source 1..20: mol_type = other DNA
caagtgtcggcactgtggga

SEQ ID NO: 33166 - DNA, 20 bp, synthetic construct
  source 1..20: mol_type = other DNA
tctggtgaggggagaagatg

SEQ ID NO: 33167 - DNA, 20 bp, synthetic construct
  source 1..20: mol_type = other DNA
atgaaacggcacatgtagcc

SEQ ID NO: 33168 - DNA, 20 bp, synthetic construct
  source 1..20: mol_type = other DNA
cgcaggctgtgatgcgccgc

SEQ ID NO: 33169 - DNA, 20 bp, synthetic construct
  source 1..20: mol_type = other DNA
ctctgcaacaacctccagtg

SEQ ID NO: 33170 - DNA, 20 bp, synthetic construct
  source 1..20: mol_type = other DNA
aacttctgctggaatccctg

SEQ ID NO: 33171 - DNA, 20 bp, synthetic construct
  source 1..20: mol_type = other DNA
aacaggatgatcttggagaa

SEQ ID NO: 33172 - DNA, 20 bp, synthetic construct
  source 1..20: mol_type = other DNA
gaacgcatctgcagatgccg

SEQ ID NO: 33173 - DNA, 20 bp, synthetic construct
  source 1..20: mol_type = other DNA
tgcccgggagatggactcgc

SEQ ID NO: 33174 - DNA, 20 bp, synthetic construct
  source 1..20: mol_type = other DNA
ggaaccaggtgtccctgttg

SEQ ID NO: 33175 - DNA, 20 bp, synthetic construct
  source 1..20: mol_type = other DNA
ggatggccaggcggcctgca

SEQ ID NO: 33176 - DNA, 20 bp, synthetic construct
  source 1..20: mol_type = other DNA
gttgccccacgcgttgcggc

SEQ ID NO: 33177 - DNA, 20 bp, synthetic construct
  source 1..20: mol_type = other DNA
ctcgttgccgtggaaaagcc

SEQ ID NO: 33178 - DNA, 20 bp, synthetic construct
  source 1..20: mol_type = other DNA
gcaactgcggcatagcaacc

SEQ ID NO: 33179 - DNA, 20 bp, synthetic construct
  source 1..20: mol_type = other DNA
aggcagagcccaagacccag

SEQ ID NO: 33180 - DNA, 20 bp, synthetic construct
  source 1..20: mol_type = other DNA
cggggacttctgctacgttg

SEQ ID NO: 33181 - DNA, 20 bp, synthetic construct
  source 1..20: mol_type = other DNA
ttcaggtaatgggacaggct

SEQ ID NO: 33182 - DNA, 20 bp, synthetic construct
  source 1..20: mol_type = other DNA
tatcccaacaggctctgagg

SEQ ID NO: 33183 - DNA, 20 bp, synthetic construct
  source 1..20: mol_type = other DNA
cacgtgccgctctcctcgaa

SEQ ID NO: 33184 - DNA, 20 bp, synthetic construct
  source 1..20: mol_type = other DNA
tatggatcgatggtctgtgg

SEQ ID NO: 33185 - DNA, 20 bp, synthetic construct
  source 1..20: mol_type = other DNA
ttctgtagagcatatatcag

SEQ ID NO: 33186 - DNA, 20 bp, synthetic construct
  source 1..20: mol_type = other DNA
aggaatatatgaaatctatt

SEQ ID NO: 33187 - DNA, 20 bp, synthetic construct
  source 1..20: mol_type = other DNA
ctcacctgtgttgtaggcag

SEQ ID NO: 33188 - DNA, 20 bp, synthetic construct
  source 1..20: mol_type = other DNA
agagcctggaaggagataga

SEQ ID NO: 33189 - DNA, 20 bp, synthetic construct
  source 1..20: mol_type = other DNA
cccagactgaatcacagcct

SEQ ID NO: 33190 - DNA, 20 bp, synthetic construct
  source 1..20: mol_type = other DNA
gaaagtaggtgggggagagg

SEQ ID NO: 33191 - DNA, 20 bp, synthetic construct
  source 1..20: mol_type = other DNA
ggattccttgtaggaaaaac

SEQ ID NO: 33192 - DNA, 20 bp, synthetic construct
  source 1..20: mol_type = other DNA
caaaaattagccaggtatgg

SEQ ID NO: 33193 - DNA, 20 bp, synthetic construct
  source 1..20: mol_type = other DNA
ggcagacacagccttgaacc

SEQ ID NO: 33194 - DNA, 20 bp, synthetic construct
  source 1..20: mol_type = other DNA
tccacaacgcggacgagcgg

SEQ ID NO: 33195 - DNA, 20 bp, synthetic construct
  source 1..20: mol_type = other DNA
gtctggccaggagggtgctg

SEQ ID NO: 33196 - DNA, 20 bp, synthetic construct
  source 1..20: mol_type = other DNA
tcaggcgctgcagtttcacc

SEQ ID NO: 33197 - DNA, 20 bp, synthetic construct
  source 1..20: mol_type = other DNA
ctcttggtcttccatgttga

SEQ ID NO: 33198 - DNA, 20 bp, synthetic construct
  source 1..20: mol_type = other DNA
ataatttcttttgcatcatc

SEQ ID NO: 33199 - DNA, 20 bp, synthetic construct
  source 1..20: mol_type = other DNA
gcctctatctccaaggcatc

SEQ ID NO: 33200 - DNA, 20 bp, synthetic construct
  source 1..20: mol_type = other DNA
ggagctggtaccttgccagt

SEQ ID NO: 33201 - DNA, 20 bp, synthetic construct
  source 1..20: mol_type = other DNA
gacaggtctttggcagagaa

SEQ ID NO: 33202 - DNA, 20 bp, synthetic construct
  source 1..20: mol_type = other DNA
ccccatgcagatgagtgccc

SEQ ID NO: 33203 - DNA, 20 bp, synthetic construct
  source 1..20: mol_type = other DNA
accggctgtacatgaaggcg

SEQ ID NO: 33204 - DNA, 20 bp, synthetic construct
  source 1..20: mol_type = other DNA
cttccagctggatgaaactg

SEQ ID NO: 33205 - DNA, 20 bp, synthetic construct
  source 1..20: mol_type = other DNA
cacttgggagcttctcctgg

SEQ ID NO: 33206 - DNA, 20 bp, synthetic construct
  source 1..20: mol_type = other DNA
ctgtggtactgaggagagcg

SEQ ID NO: 33207 - DNA, 20 bp, synthetic construct
  source 1..20: mol_type = other DNA
tccaggtaaggagaggcctg

SEQ ID NO: 33208 - DNA, 20 bp, synthetic construct
  source 1..20: mol_type = other DNA
tgcgcatgcggtacacgccc

SEQ ID NO: 33209 - DNA, 20 bp, synthetic construct
  source 1..20: mol_type = other DNA
ccctcgcctgcagggaaagt

SEQ ID NO: 33210 - DNA, 20 bp, synthetic construct
  source 1..20: mol_type = other DNA
acactggaggcgggcgggga

SEQ ID NO: 33211 - DNA, 20 bp, synthetic construct
  source 1..20: mol_type = other DNA
acagccttgaacctgggggt

SEQ ID NO: 33212 - DNA, 20 bp, synthetic construct
  source 1..20: mol_type = other DNA
ctatagaaatgcatatacaa

SEQ ID NO: 33213 - DNA, 20 bp, synthetic construct
  source 1..20: mol_type = other DNA
gggcccagccgggggccccc

SEQ ID NO: 33214 - DNA, 20 bp, synthetic construct
  source 1..20: mol_type = other DNA
ctatacccctgggaagaagg

SEQ ID NO: 33215 - DNA, 20 bp, synthetic construct
  source 1..20: mol_type = other DNA
ggtggaagaagaagtaaccc

SEQ ID NO: 33216 - DNA, 20 bp, synthetic construct
  source 1..20: mol_type = other DNA
aggccacgatgttggcgtgc

SEQ ID NO: 33217 - DNA, 20 bp, synthetic construct
  source 1..20: mol_type = other DNA
gctgctcagaaggtcgatcc

SEQ ID NO: 33218 - DNA, 20 bp, synthetic construct
  source 1..20: mol_type = other DNA
atatgctaagaatgagacat

SEQ ID NO: 33219 - DNA, 20 bp, synthetic construct
  source 1..20: mol_type = other DNA
gggtggcgcagggggcgctg

SEQ ID NO: 33220 - DNA, 20 bp, synthetic construct
  source 1..20: mol_type = other DNA
cctggatcctccgcgcccgg

SEQ ID NO: 33221 - DNA, 20 bp, synthetic construct
  source 1..20: mol_type = other DNA
cagccactccttctcactca

SEQ ID NO: 33222 - DNA, 20 bp, synthetic construct
  source 1..20: mol_type = other DNA
ctttgtaccagttggggtcc

SEQ ID NO: 33223 - DNA, 20 bp, synthetic construct
  source 1..20: mol_type = other DNA
agaattgggcctgcagcatg

SEQ ID NO: 33224 - DNA, 20 bp, synthetic construct
  source 1..20: mol_type = other DNA
tggcctcgcagacatctctg

SEQ ID NO: 33225 - DNA, 20 bp, synthetic construct
  source 1..20: mol_type = other DNA
tgccacttccggagccatcc

SEQ ID NO: 33226 - DNA, 20 bp, synthetic construct
  source 1..20: mol_type = other DNA
cgcttccacggggagcagca

SEQ ID NO: 33227 - DNA, 20 bp, synthetic construct
  source 1..20: mol_type = other DNA
agaagatcaagcggtgtgag

SEQ ID NO: 33228 - DNA, 20 bp, synthetic construct
  source 1..20: mol_type = other DNA
gacagggcctgaagagggtg

SEQ ID NO: 33229 - DNA, 20 bp, synthetic construct
  source 1..20: mol_type = other DNA
ctctgtgagcagctggtcgt

SEQ ID NO: 33230 - DNA, 20 bp, synthetic construct
  source 1..20: mol_type = other DNA
acgctcaaggccgagaacgc

SEQ ID NO: 33231 - DNA, 20 bp, synthetic construct
  source 1..20: mol_type = other DNA
cccccgggtagggtggcggg

SEQ ID NO: 33232 - DNA, 20 bp, synthetic construct
  source 1..20: mol_type = other DNA
tcaggtttttatccagattg

SEQ ID NO: 33233 - DNA, 20 bp, synthetic construct
  source 1..20: mol_type = other DNA
tgtggtgcagggagaaccag

SEQ ID NO: 33234 - DNA, 20 bp, synthetic construct
  source 1..20: mol_type = other DNA
ctctgaagaggtccaagcaa

SEQ ID NO: 33235 - DNA, 20 bp, synthetic construct
  source 1..20: mol_type = other DNA
ctgcggatcctggcgtgcgg

SEQ ID NO: 33236 - DNA, 20 bp, synthetic construct
  source 1..20: mol_type = other DNA
gcgagatggactgaaagaaa

SEQ ID NO: 33237 - DNA, 20 bp, synthetic construct
  source 1..20: mol_type = other DNA
ctctggcagatgcttcaaga

SEQ ID NO: 33238 - DNA, 20 bp, synthetic construct
  source 1..20: mol_type = other DNA
gcagacacagccttgaacct

SEQ ID NO: 33239 - DNA, 20 bp, synthetic construct
  source 1..20: mol_type = other DNA
acctgaggagagaagaaagg

SEQ ID NO: 33240 - DNA, 20 bp, synthetic construct
  source 1..20: mol_type = other DNA
agtcacttgggagcttctcc

SEQ ID NO: 33241 - DNA, 20 bp, synthetic construct
  source 1..20: mol_type = other DNA
atagaggcagcgccgtgctg

SEQ ID NO: 33242 - DNA, 20 bp, synthetic construct
  source 1..20: mol_type = other DNA
taccataaccaggaggctga

SEQ ID NO: 33243 - DNA, 20 bp, synthetic construct
  source 1..20: mol_type = other DNA
gcaataacagaccaacgttt

SEQ ID NO: 33244 - DNA, 20 bp, synthetic construct
  source 1..20: mol_type = other DNA
ggccagcaggttcacagtct

SEQ ID NO: 33245 - DNA, 20 bp, synthetic construct
  source 1..20: mol_type = other DNA
gcatgctggaaaaaagcaga

SEQ ID NO: 33246 - DNA, 20 bp, synthetic construct
  source 1..20: mol_type = other DNA
ctcaaaggtgtcatctgtgg

SEQ ID NO: 33247 - DNA, 20 bp, synthetic construct
  source 1..20: mol_type = other DNA
tccaagggactattgtcctg

SEQ ID NO: 33248 - DNA, 20 bp, synthetic construct
  source 1..20: mol_type = other DNA
taaaagccaagttcaacttg

SEQ ID NO: 33249 - DNA, 20 bp, synthetic construct
  source 1..20: mol_type = other DNA
gagatggcactgatggaggg

SEQ ID NO: 33250 - DNA, 20 bp, synthetic construct
  source 1..20: mol_type = other DNA
ctcacctcacactcacgatg

SEQ ID NO: 33251 - DNA, 20 bp, synthetic construct
  source 1..20: mol_type = other DNA
gcgcaccaggaaggtgccca

SEQ ID NO: 33252 - DNA, 20 bp, synthetic construct
  source 1..20: mol_type = other DNA
tgaggcccaggacaagaccc

SEQ ID NO: 33253 - DNA, 20 bp, synthetic construct
  source 1..20: mol_type = other DNA
cgatcaggtccgcctggggg

SEQ ID NO: 33254 - DNA, 20 bp, synthetic construct
  source 1..20: mol_type = other DNA
gtcaccccaagcctgggagg

SEQ ID NO: 33255 - DNA, 20 bp, synthetic construct
  source 1..20: mol_type = other DNA
ggcctgtgagtgcggtgggg

SEQ ID NO: 33256 - DNA, 20 bp, synthetic construct
  source 1..20: mol_type = other DNA
actggccagcgagaccctgg

SEQ ID NO: 33257 - DNA, 20 bp, synthetic construct
  source 1..20: mol_type = other DNA
tgtagttttcagataagagc

SEQ ID NO: 33258 - DNA, 20 bp, synthetic construct
  source 1..20: mol_type = other DNA
tcggtatctgggtaggagag

SEQ ID NO: 33259 - DNA, 20 bp, synthetic construct
  source 1..20: mol_type = other DNA
ttagatgaattaaataatct

SEQ ID NO: 33260 - DNA, 20 bp, synthetic construct
  source 1..20: mol_type = other DNA
cacttacagatgtgagggac

SEQ ID NO: 33261 - DNA, 20 bp, synthetic construct
  source 1..20: mol_type = other DNA
gacaggcattgcaaacacac

SEQ ID NO: 33262 - DNA, 20 bp, synthetic construct
  source 1..20: mol_type = other DNA
gaaatagttcactattggac

SEQ ID NO: 33263 - DNA, 20 bp, synthetic construct
  source 1..20: mol_type = other DNA
gctcctgtggggggaggtca

SEQ ID NO: 33264 - DNA, 20 bp, synthetic construct
  source 1..20: mol_type = other DNA
ctggggagcagcagggctgg

SEQ ID NO: 33265 - DNA, 20 bp, synthetic construct
  source 1..20: mol_type = other DNA
gacaccagttgagtttcttc

SEQ ID NO: 33266 - DNA, 20 bp, synthetic construct
  source 1..20: mol_type = other DNA
cttagcatcaaggcatgcca

SEQ ID NO: 33267 - DNA, 20 bp, synthetic construct
  source 1..20: mol_type = other DNA
cggcctgcaggaggtgaggg

SEQ ID NO: 33268 - DNA, 20 bp, synthetic construct
  source 1..20: mol_type = other DNA
tcacccaggactgatacaga

SEQ ID NO: 33269 - DNA, 20 bp, synthetic construct
  source 1..20: mol_type = other DNA
atttccagctcatgtttaag

SEQ ID NO: 33270 - DNA, 20 bp, synthetic construct
  source 1..20: mol_type = other DNA
cggcacgaggcagagtcccc

SEQ ID NO: 33271 - DNA, 20 bp, synthetic construct
  source 1..20: mol_type = other DNA
tgtgcactctcaggtggacc

SEQ ID NO: 33272 - DNA, 20 bp, synthetic construct
  source 1..20: mol_type = other DNA
gtgcccacaggccgcgctgc

SEQ ID NO: 33273 - DNA, 20 bp, synthetic construct
  source 1..20: mol_type = other DNA
atcctgtccatggggctgga

SEQ ID NO: 33274 - DNA, 20 bp, synthetic construct
  source 1..20: mol_type = other DNA
cgggcgcggaggatccaggt

SEQ ID NO: 33275 - DNA, 20 bp, synthetic construct
  source 1..20: mol_type = other DNA
aggcctcgaggcagcgcatg

SEQ ID NO: 33276 - DNA, 20 bp, synthetic construct
  source 1..20: mol_type = other DNA
gggagactcctatgacctca

SEQ ID NO: 33277 - DNA, 20 bp, synthetic construct
  source 1..20: mol_type = other DNA
cccccagtgagcgaatggac

SEQ ID NO: 33278 - DNA, 20 bp, synthetic construct
  source 1..20: mol_type = other DNA
tctgggccagaacgtcatga

SEQ ID NO: 33279 - DNA, 20 bp, synthetic construct
  source 1..20: mol_type = other DNA
cttgcctcagtcgtcggaga

SEQ ID NO: 33280 - DNA, 20 bp, synthetic construct
  source 1..20: mol_type = other DNA
gctggcactggaggttgctg

SEQ ID NO: 33281 - DNA, 20 bp, synthetic construct
  source 1..20: mol_type = other DNA
gaggaggagggaggtgtgga

SEQ ID NO: 33282 - DNA, 20 bp, synthetic construct
  source 1..20: mol_type = other DNA
ggtccagacgcaggatggca

SEQ ID NO: 33283 - DNA, 20 bp, synthetic construct
  source 1..20: mol_type = other DNA
ttccatgatataatcccggg

SEQ ID NO: 33284 - DNA, 20 bp, synthetic construct
  source 1..20: mol_type = other DNA
tcttatatatataaatgatg

SEQ ID NO: 33285 - DNA, 20 bp, synthetic construct
  source 1..20: mol_type = other DNA
tgctcggacgacgtggcgaa

SEQ ID NO: 33286 - DNA, 20 bp, synthetic construct
  source 1..20: mol_type = other DNA
ctgaatgggcggtgaggtgg

SEQ ID NO: 33287 - DNA, 20 bp, synthetic construct
  source 1..20: mol_type = other DNA
gttcgatggccgtgatgccc

SEQ ID NO: 33288 - DNA, 20 bp, synthetic construct
  source 1..20: mol_type = other DNA
ttctgtaccggatggccagg

SEQ ID NO: 33289 - DNA, 20 bp, synthetic construct
  source 1..20: mol_type = other DNA
aatcttcggagtgagtcctg

SEQ ID NO: 33290 - DNA, 20 bp, synthetic construct
  source 1..20: mol_type = other DNA
gtactcccctacagacgtgc

SEQ ID NO: 33291 - DNA, 20 bp, synthetic construct
  source 1..20: mol_type = other DNA
tgtaggaagagccgcaccag

SEQ ID NO: 33292 - DNA, 20 bp, synthetic construct
  source 1..20: mol_type = other DNA
caaagtacatatcacagtgc

SEQ ID NO: 33293 - DNA, 20 bp, synthetic construct
  source 1..20: mol_type = other DNA
acaggttgccccacgcgttg

SEQ ID NO: 33294 - DNA, 20 bp, synthetic construct
  source 1..20: mol_type = other DNA
gtagaaccgacctttgtcgg

SEQ ID NO: 33295 - DNA, 20 bp, synthetic construct
  source 1..20: mol_type = other DNA
agaggaggaggaagatgaag

SEQ ID NO: 33296 - DNA, 20 bp, synthetic construct
  source 1..20: mol_type = other DNA
caggtgggagccaccacgcc

SEQ ID NO: 33297 - DNA, 20 bp, synthetic construct
  source 1..20: mol_type = other DNA
tcaactgagattctcataca

SEQ ID NO: 33298 - DNA, 20 bp, synthetic construct
  source 1..20: mol_type = other DNA
aagcccgtggcgccgcagga

SEQ ID NO: 33299 - DNA, 20 bp, synthetic construct
  source 1..20: mol_type = other DNA
cggcgcggcggcggcggcgg

SEQ ID NO: 33300 - DNA, 20 bp, synthetic construct
  source 1..20: mol_type = other DNA
tttgtgaaccccaagagtgg

SEQ ID NO: 33301 - DNA, 20 bp, synthetic construct
  source 1..20: mol_type = other DNA
gaagatggagcctggtgagg

SEQ ID NO: 33302 - DNA, 20 bp, synthetic construct
  source 1..20: mol_type = other DNA
acagtgcaatcggtgcaacg

SEQ ID NO: 33303 - DNA, 20 bp, synthetic construct
  source 1..20: mol_type = other DNA
gacgagctgagcttcaaaag

SEQ ID NO: 33304 - DNA, 20 bp, synthetic construct
  source 1..20: mol_type = other DNA
gctggaggcggcgacagcgg

SEQ ID NO: 33305 - DNA, 20 bp, synthetic construct
  source 1..20: mol_type = other DNA
aagtcctctggtgtacggag

SEQ ID NO: 33306 - DNA, 20 bp, synthetic construct
  source 1..20: mol_type = other DNA
ctgacgtccgggtcatctgc

SEQ ID NO: 33307 - DNA, 20 bp, synthetic construct
  source 1..20: mol_type = other DNA
gccttaggtaagcggggctg

SEQ ID NO: 33308 - DNA, 20 bp, synthetic construct
  source 1..20: mol_type = other DNA
ccctgaggccctgagagaga

SEQ ID NO: 33309 - DNA, 20 bp, synthetic construct
  source 1..20: mol_type = other DNA
agcctggtgaggagggaaca

SEQ ID NO: 33310 - DNA, 20 bp, synthetic construct
  source 1..20: mol_type = other DNA
gccctcatacagccacctgg

SEQ ID NO: 33311 - DNA, 20 bp, synthetic construct
  source 1..20: mol_type = other DNA
acagaacaagatgctaaaaa

SEQ ID NO: 33312 - DNA, 20 bp, synthetic construct
  source 1..20: mol_type = other DNA
ttggccacagggaggaggcc

SEQ ID NO: 33313 - DNA, 20 bp, synthetic construct
  source 1..20: mol_type = other DNA
cgtccgttgtcctgcttcag

SEQ ID NO: 33314 - DNA, 20 bp, synthetic construct
  source 1..20: mol_type = other DNA
acagcttcttaaaactttat

SEQ ID NO: 33315 - DNA, 20 bp, synthetic construct
  source 1..20: mol_type = other DNA
gatacacagggacatcaagg

SEQ ID NO: 33316 - DNA, 20 bp, synthetic construct
  source 1..20: mol_type = other DNA
agtgggtagatgagggcctg

SEQ ID NO: 33317 - DNA, 20 bp, synthetic construct
  source 1..20: mol_type = other DNA
aatcgcccagcatcacgtct

SEQ ID NO: 33318 - DNA, 20 bp, synthetic construct
  source 1..20: mol_type = other DNA
actgcatacacactgcacag

SEQ ID NO: 33319 - DNA, 20 bp, synthetic construct
  source 1..20: mol_type = other DNA
agatgtaataggctcttctg

SEQ ID NO: 33320 - DNA, 20 bp, synthetic construct
  source 1..20: mol_type = other DNA
tggaacactggtggagcgcc

SEQ ID NO: 33321 - DNA, 20 bp, synthetic construct
  source 1..20: mol_type = other DNA
tcatgaggcaaatgaggaac

SEQ ID NO: 33322 - DNA, 20 bp, synthetic construct
  source 1..20: mol_type = other DNA
atggggaagtctttaaggtg

SEQ ID NO: 33323 - DNA, 20 bp, synthetic construct
  source 1..20: mol_type = other DNA
caggtcctgggtcttgtcct

SEQ ID NO: 33324 - DNA, 20 bp, synthetic construct
  source 1..20: mol_type = other DNA
actactactggtggctttga

SEQ ID NO: 33325 - DNA, 20 bp, synthetic construct
  source 1..20: mol_type = other DNA
gaacatgaacgacaccccca

SEQ ID NO: 33326 - DNA, 20 bp, synthetic construct
  source 1..20: mol_type = other DNA
tgagccgatgcaatcaaaac

SEQ ID NO: 33327 - DNA, 20 bp, synthetic construct
  source 1..20: mol_type = other DNA
gatcatccagctgtgacagg

SEQ ID NO: 33328 - DNA, 20 bp, synthetic construct
  source 1..20: mol_type = other DNA
tactgttgttatagtaacct

SEQ ID NO: 33329 - DNA, 20 bp, synthetic construct
  source 1..20: mol_type = other DNA
gcgggataaggtgcagctca

SEQ ID NO: 33330 - DNA, 20 bp, synthetic construct
  source 1..20: mol_type = other DNA
gacagacttcggcgctgccc

SEQ ID NO: 33331 - DNA, 20 bp, synthetic construct
  source 1..20: mol_type = other DNA
gggcatcacggccatcgaac

SEQ ID NO: 33332 - DNA, 20 bp, synthetic construct
  source 1..20: mol_type = other DNA
acattaaggtaaaccatcat

SEQ ID NO: 33333 - DNA, 20 bp, synthetic construct
  source 1..20: mol_type = other DNA
atttggagcattgctgtcag

SEQ ID NO: 33334 - DNA, 20 bp, synthetic construct
  source 1..20: mol_type = other DNA
tcactcactgggggtgaggc

SEQ ID NO: 33335 - DNA, 20 bp, synthetic construct
  source 1..20: mol_type = other DNA
ggggcaggtcaaccgcgcct

SEQ ID NO: 33336 - DNA, 20 bp, synthetic construct
  source 1..20: mol_type = other DNA
cagcatcaaacagtctggat

SEQ ID NO: 33337 - DNA, 20 bp, synthetic construct
  source 1..20: mol_type = other DNA
agaggcgggggtgaggcggg

SEQ ID NO: 33338 - DNA, 20 bp, synthetic construct
  source 1..20: mol_type = other DNA
ccaccaaacagcccccgtcc

SEQ ID NO: 33339 - DNA, 20 bp, synthetic construct
  source 1..20: mol_type = other DNA
gccatcccggtgcaggtgga

SEQ ID NO: 33340 - DNA, 20 bp, synthetic construct
  source 1..20: mol_type = other DNA
cgacgacctcaacagcgtgc

SEQ ID NO: 33341 - DNA, 20 bp, synthetic construct
  source 1..20: mol_type = other DNA
ggcgtcgtctgtgtacccag

SEQ ID NO: 33342 - DNA, 20 bp, synthetic construct
  source 1..20: mol_type = other DNA
gcaactggtgagacacttgg

SEQ ID NO: 33343 - DNA, 20 bp, synthetic construct
  source 1..20: mol_type = other DNA
ggttctatccgtaaacagta

SEQ ID NO: 33344 - DNA, 20 bp, synthetic construct
  source 1..20: mol_type = other DNA
caggtaatctgggtggaggg

SEQ ID NO: 33345 - DNA, 20 bp, synthetic construct
  source 1..20: mol_type = other DNA
agggcagagcagcagttccc

SEQ ID NO: 33346 - DNA, 20 bp, synthetic construct
  source 1..20: mol_type = other DNA
gtcccacaggatagtggctt

SEQ ID NO: 33347 - DNA, 20 bp, synthetic construct
  source 1..20: mol_type = other DNA
aaaagccagccagccagcag

SEQ ID NO: 33348 - DNA, 20 bp, synthetic construct
  source 1..20: mol_type = other DNA
tgctgcagggtgtggggggc

SEQ ID NO: 33349 - DNA, 20 bp, synthetic construct
  source 1..20: mol_type = other DNA
gccccctggggcagaggaga

SEQ ID NO: 33350 - DNA, 20 bp, synthetic construct
  source 1..20: mol_type = other DNA
gaagaccccggcacaggtaa

SEQ ID NO: 33351 - DNA, 20 bp, synthetic construct
  source 1..20: mol_type = other DNA
ggcttccaggccttctagca

SEQ ID NO: 33352 - DNA, 20 bp, synthetic construct
  source 1..20: mol_type = other DNA
gctttctctgacttcctgat

SEQ ID NO: 33353 - DNA, 20 bp, synthetic construct
  source 1..20: mol_type = other DNA
tgagtcctgggaagcagaga

SEQ ID NO: 33354 - DNA, 20 bp, synthetic construct
  source 1..20: mol_type = other DNA
gtccagcaggccatgatggt

SEQ ID NO: 33355 - DNA, 20 bp, synthetic construct
  source 1..20: mol_type = other DNA
gctggtaccttgccagtagg

SEQ ID NO: 33356 - DNA, 20 bp, synthetic construct
  source 1..20: mol_type = other DNA
tggaggaagtggaggaggaa

SEQ ID NO: 33357 - DNA, 20 bp, synthetic construct
  source 1..20: mol_type = other DNA
ccaacgtggtcaggtgagcc

SEQ ID NO: 33358 - DNA, 20 bp, synthetic construct
  source 1..20: mol_type = other DNA
ttcacaccatcacgacgcgt

SEQ ID NO: 33359 - DNA, 20 bp, synthetic construct
  source 1..20: mol_type = other DNA
ctgacacaccacgtgcacca

SEQ ID NO: 33360 - DNA, 20 bp, synthetic construct
  source 1..20: mol_type = other DNA
ctgatctacaaacaggccag

SEQ ID NO: 33361 - DNA, 20 bp, synthetic construct
  source 1..20: mol_type = other DNA
gctgtgttgcccctgggtac

SEQ ID NO: 33362 - DNA, 20 bp, synthetic construct
  source 1..20: mol_type = other DNA
ggaggctgcgaggcaggagg

SEQ ID NO: 33363 - DNA, 20 bp, synthetic construct
  source 1..20: mol_type = other DNA
actcagcttcttgtcgccca

SEQ ID NO: 33364 - DNA, 20 bp, synthetic construct
  source 1..20: mol_type = other DNA
ctggccaccttgtacctgct

SEQ ID NO: 33365 - DNA, 20 bp, synthetic construct
  source 1..20: mol_type = other DNA
gaggggaagtgggggttggg

SEQ ID NO: 33366 - DNA, 20 bp, synthetic construct
  source 1..20: mol_type = other DNA
gatgtaaagattgagccctg

SEQ ID NO: 33367 - DNA, 20 bp, synthetic construct
  source 1..20: mol_type = other DNA
ccctgtccgtggcccacggg

SEQ ID NO: 33368 - DNA, 20 bp, synthetic construct
  source 1..20: mol_type = other DNA
gttctagaatgagagactac

SEQ ID NO: 33369 - DNA, 20 bp, synthetic construct
  source 1..20: mol_type = other DNA
agcagcagcagcagcagcgg

SEQ ID NO: 33370 - DNA, 20 bp, synthetic construct
  source 1..20: mol_type = other DNA
ggcgtggtggagttctacag

SEQ ID NO: 33371 - DNA, 20 bp, synthetic construct
  source 1..20: mol_type = other DNA
acttctgctggaatccctga

SEQ ID NO: 33372 - DNA, 20 bp, synthetic construct
  source 1..20: mol_type = other DNA
tgagggttctgagaggggtt

SEQ ID NO: 33373 - DNA, 20 bp, synthetic construct
  source 1..20: mol_type = other DNA
cctgcaaggcaggtgacacg

SEQ ID NO: 33374 - DNA, 20 bp, synthetic construct
  source 1..20: mol_type = other DNA
accttgccagtaggcggtgg

SEQ ID NO: 33375 - DNA, 20 bp, synthetic construct
  source 1..20: mol_type = other DNA
ctgcaccacgcagtcagcac

SEQ ID NO: 33376 - DNA, 20 bp, synthetic construct
  source 1..20: mol_type = other DNA
agtaaggaccagagacaaaa

SEQ ID NO: 33377 - DNA, 20 bp, synthetic construct
  source 1..20: mol_type = other DNA
atgccgtgagtaccacgagg

SEQ ID NO: 33378 - DNA, 20 bp, synthetic construct
  source 1..20: mol_type = other DNA
cctcatcaatgatgctgggg

SEQ ID NO: 33379 - DNA, 20 bp, synthetic construct
  source 1..20: mol_type = other DNA
aatccagatgattctttaac

SEQ ID NO: 33380 - DNA, 20 bp, synthetic construct
  source 1..20: mol_type = other DNA
cagcaccacggcggtggcgg

SEQ ID NO: 33381 - DNA, 20 bp, synthetic construct
  source 1..20: mol_type = other DNA
tcttggtcttccatgttgat

SEQ ID NO: 33382 - DNA, 20 bp, synthetic construct
  source 1..20: mol_type = other DNA
ttagctccctgggaatgaga

SEQ ID NO: 33383 - DNA, 20 bp, synthetic construct
  source 1..20: mol_type = other DNA
ataatgtcatagagctcatc

SEQ ID NO: 33384 - DNA, 20 bp, synthetic construct
  source 1..20: mol_type = other DNA
agcgctgggggcggcggcgg

SEQ ID NO: 33385 - DNA, 20 bp, synthetic construct
  source 1..20: mol_type = other DNA
ccagtccctggggagaaggg

SEQ ID NO: 33386 - DNA, 20 bp, synthetic construct
  source 1..20: mol_type = other DNA
gacaggtgacgaaagctccg

SEQ ID NO: 33387 - DNA, 20 bp, synthetic construct
  source 1..20: mol_type = other DNA
gccgggaagtgctccaggta

SEQ ID NO: 33388 - DNA, 20 bp, synthetic construct
  source 1..20: mol_type = other DNA
cataatggcaagcacctctg

SEQ ID NO: 33389 - DNA, 20 bp, synthetic construct
  source 1..20: mol_type = other DNA
cagtacttttacccccgcgg

SEQ ID NO: 33390 - DNA, 20 bp, synthetic construct
  source 1..20: mol_type = other DNA
tggatggcactgcgcagctc

SEQ ID NO: 33391 - DNA, 20 bp, synthetic construct
  source 1..20: mol_type = other DNA
aagatggagcctggtgagga

SEQ ID NO: 33392 - DNA, 20 bp, synthetic construct
  source 1..20: mol_type = other DNA
gtgtccaggcggccgtgctg

SEQ ID NO: 33393 - DNA, 20 bp, synthetic construct
  source 1..20: mol_type = other DNA
agccgatggtatgaaaggtg

SEQ ID NO: 33394 - DNA, 20 bp, synthetic construct
  source 1..20: mol_type = other DNA
aggccagtccctggggagaa

SEQ ID NO: 33395 - DNA, 20 bp, synthetic construct
  source 1..20: mol_type = other DNA
agagtagtagatcttgctgc

SEQ ID NO: 33396 - DNA, 20 bp, synthetic construct
  source 1..20: mol_type = other DNA
cctgcagagagaagccaagg

SEQ ID NO: 33397 - DNA, 20 bp, synthetic construct
  source 1..20: mol_type = other DNA
tgcatcgcgacatcaagccg

SEQ ID NO: 33398 - DNA, 20 bp, synthetic construct
  source 1..20: mol_type = other DNA
aaaaatgcctttctctcgct

SEQ ID NO: 33399 - DNA, 20 bp, synthetic construct
  source 1..20: mol_type = other DNA
ggaagcatggagtgcaggtg

SEQ ID NO: 33400 - DNA, 20 bp, synthetic construct
  source 1..20: mol_type = other DNA
atacctctacttgaaccatc

SEQ ID NO: 33401 - DNA, 20 bp, synthetic construct
  source 1..20: mol_type = other DNA
tcaggccggccgctttcacc

SEQ ID NO: 33402 - DNA, 20 bp, synthetic construct
  source 1..20: mol_type = other DNA
gtttatccagtcagttcctg

SEQ ID NO: 33403 - DNA, 20 bp, synthetic construct
  source 1..20: mol_type = other DNA
ggacgccaaggagtccagca

SEQ ID NO: 33404 - DNA, 20 bp, synthetic construct
  source 1..20: mol_type = other DNA
tcagaatcagagatttcatg

SEQ ID NO: 33405 - DNA, 20 bp, synthetic construct
  source 1..20: mol_type = other DNA
tcttaacttctggattcaag

SEQ ID NO: 33406 - DNA, 20 bp, synthetic construct
  source 1..20: mol_type = other DNA
gagcctattacatctactcc

SEQ ID NO: 33407 - DNA, 20 bp, synthetic construct
  source 1..20: mol_type = other DNA
gccccacatgtactgagaag

SEQ ID NO: 33408 - DNA, 20 bp, synthetic construct
  source 1..20: mol_type = other DNA
ctaccagcctccccgactga

SEQ ID NO: 33409 - DNA, 20 bp, synthetic construct
  source 1..20: mol_type = other DNA
tcagcaatacaggtaccaca

SEQ ID NO: 33410 - DNA, 20 bp, synthetic construct
  source 1..20: mol_type = other DNA
aggtcaaccgcgcctgggcc

SEQ ID NO: 33411 - DNA, 20 bp, synthetic construct
  source 1..20: mol_type = other DNA
ggtccagacgcaggatggcg

SEQ ID NO: 33412 - DNA, 20 bp, synthetic construct
  source 1..20: mol_type = other DNA
ccaatgtatctccatccatg

SEQ ID NO: 33413 - DNA, 20 bp, synthetic construct
  source 1..20: mol_type = other DNA
gcagaaggtgggagaactga

SEQ ID NO: 33414 - DNA, 20 bp, synthetic construct
  source 1..20: mol_type = other DNA
gtctctctcaggtctggctg

SEQ ID NO: 33415 - DNA, 20 bp, synthetic construct
  source 1..20: mol_type = other DNA
gtgctcgatggggtacttca

SEQ ID NO: 33416 - DNA, 20 bp, synthetic construct
  source 1..20: mol_type = other DNA
gagggtgagggacaggaggt

SEQ ID NO: 33417 - DNA, 20 bp, synthetic construct
  source 1..20: mol_type = other DNA
tcgtcccgccgcaacgcgtg

SEQ ID NO: 33418 - DNA, 20 bp, synthetic construct
  source 1..20: mol_type = other DNA
agtacacgctgaccctcagg

SEQ ID NO: 33419 - DNA, 20 bp, synthetic construct
  source 1..20: mol_type = other DNA
ctgttgcaggtcactgcaag

SEQ ID NO: 33420 - DNA, 20 bp, synthetic construct
  source 1..20: mol_type = other DNA
tccctgataagtagctgggg

SEQ ID NO: 33421 - DNA, 20 bp, synthetic construct
  source 1..20: mol_type = other DNA
cggctcagctggtatgaccc

SEQ ID NO: 33422 - DNA, 20 bp, synthetic construct
  source 1..20: mol_type = other DNA
ccagcttgttcctctcccgc

SEQ ID NO: 33423 - DNA, 20 bp, synthetic construct
  source 1..20: mol_type = other DNA
agaactcggccacttttctg

SEQ ID NO: 33424 - DNA, 20 bp, synthetic construct
  source 1..20: mol_type = other DNA
gatccgccgagggatagcag

SEQ ID NO: 33425 - DNA, 20 bp, synthetic construct
  source 1..20: mol_type = other DNA
caccaaaggggatgaagggc

SEQ ID NO: 33426 - DNA, 20 bp, synthetic construct
  source 1..20: mol_type = other DNA
gtgatggagtacatggagaa

SEQ ID NO: 33427 - DNA, 20 bp, synthetic construct
  source 1..20: mol_type = other DNA
cttgatccatcaggctttgg

SEQ ID NO: 33428 - DNA, 20 bp, synthetic construct
  source 1..20: mol_type = other DNA
ggtagtttcgtggatgccac

SEQ ID NO: 33429 - DNA, 20 bp, synthetic construct
  source 1..20: mol_type = other DNA
gaagtcgtagataagtttag

SEQ ID NO: 33430 - DNA, 20 bp, synthetic construct
  source 1..20: mol_type = other DNA
cacccaaccgcgccgggagg

SEQ ID NO: 33431 - DNA, 20 bp, synthetic construct
  source 1..20: mol_type = other DNA
tcttcgggccatggcgcggc

SEQ ID NO: 33432 - DNA, 20 bp, synthetic construct
  source 1..20: mol_type = other DNA
cgttccaactcgaagtgcca

SEQ ID NO: 33433 - DNA, 20 bp, synthetic construct
  source 1..20: mol_type = other DNA
ttggtactggggctctgtcg

SEQ ID NO: 33434 - DNA, 20 bp, synthetic construct
  source 1..20: mol_type = other DNA
ccaggccatgatgtccgtgc

SEQ ID NO: 33435 - DNA, 20 bp, synthetic construct
  source 1..20: mol_type = other DNA
ggcgccgcgccgcatgctgg

SEQ ID NO: 33436 - DNA, 20 bp, synthetic construct
  source 1..20: mol_type = other DNA
ctcctgcagtagcatggcca

SEQ ID NO: 33437 - DNA, 20 bp, synthetic construct
  source 1..20: mol_type = other DNA
gaagaagatgtcacacatga

SEQ ID NO: 33438 - DNA, 20 bp, synthetic construct
  source 1..20: mol_type = other DNA
ctttaggacagaagctaagc

SEQ ID NO: 33439 - DNA, 20 bp, synthetic construct
  source 1..20: mol_type = other DNA
cttgcagggcaaagtgcacc

SEQ ID NO: 33440 - DNA, 20 bp, synthetic construct
  source 1..20: mol_type = other DNA
tgactattacagccctctgc

SEQ ID NO: 33441 - DNA, 20 bp, synthetic construct
  source 1..20: mol_type = other DNA
cccaatgaaagagaggcgtc

SEQ ID NO: 33442 - DNA, 20 bp, synthetic construct
  source 1..20: mol_type = other DNA
ccgtagaagcccacgatgta

SEQ ID NO: 33443 - DNA, 20 bp, synthetic construct
  source 1..20: mol_type = other DNA
ccatcaagatgaccgtggaa

SEQ ID NO: 33444 - DNA, 20 bp, synthetic construct
  source 1..20: mol_type = other DNA
aaagtgcacgcggatgctcg

SEQ ID NO: 33445 - DNA, 20 bp, synthetic construct
  source 1..20: mol_type = other DNA
cgacgagctgagcttcaaaa

SEQ ID NO: 33446 - DNA, 20 bp, synthetic construct
  source 1..20: mol_type = other DNA
ccagttttgccgcagctgct

SEQ ID NO: 33447 - DNA, 20 bp, synthetic construct
  source 1..20: mol_type = other DNA
cctttgcaaggctcgagaca

SEQ ID NO: 33448 - DNA, 20 bp, synthetic construct
  source 1..20: mol_type = other DNA
ctgcgatgccttctagggac

SEQ ID NO: 33449 - DNA, 20 bp, synthetic construct
  source 1..20: mol_type = other DNA
agggtgtcccaatgaaagag

SEQ ID NO: 33450 - DNA, 20 bp, synthetic construct
  source 1..20: mol_type = other DNA
ctacctgaacggggacggga

SEQ ID NO: 33451 - DNA, 20 bp, synthetic construct
  source 1..20: mol_type = other DNA
acagcaggttagggaaagga

SEQ ID NO: 33452 - DNA, 20 bp, synthetic construct
  source 1..20: mol_type = other DNA
agatccccctggtgttgagc

SEQ ID NO: 33453 - DNA, 20 bp, synthetic construct
  source 1..20: mol_type = other DNA
tctgttcatatacaaagagc

SEQ ID NO: 33454 - DNA, 20 bp, synthetic construct
  source 1..20: mol_type = other DNA
caaggtagatgggctccatg

SEQ ID NO: 33455 - DNA, 20 bp, synthetic construct
  source 1..20: mol_type = other DNA
gggcttcgttaaacttcact

SEQ ID NO: 33456 - DNA, 20 bp, synthetic construct
  source 1..20: mol_type = other DNA
atctgcgcacgcacacaggt

SEQ ID NO: 33457 - DNA, 20 bp, synthetic construct
  source 1..20: mol_type = other DNA
cggcgcatcacagcctgcgg

SEQ ID NO: 33458 - DNA, 20 bp, synthetic construct
  source 1..20: mol_type = other DNA
gttcacctattaccctctgg

SEQ ID NO: 33459 - DNA, 20 bp, synthetic construct
  source 1..20: mol_type = other DNA
cgttcagccgcagggagccc

SEQ ID NO: 33460 - DNA, 20 bp, synthetic construct
  source 1..20: mol_type = other DNA
agtgtcagcatcccaaccag

SEQ ID NO: 33461 - DNA, 20 bp, synthetic construct
  source 1..20: mol_type = other DNA
aggagcaagtgaggatcctc

SEQ ID NO: 33462 - DNA, 20 bp, synthetic construct
  source 1..20: mol_type = other DNA
cctgagcagggagaaagcag

SEQ ID NO: 33463 - DNA, 20 bp, synthetic construct
  source 1..20: mol_type = other DNA
tcagggcccagccgcctgtg

SEQ ID NO: 33464 - DNA, 20 bp, synthetic construct
  source 1..20: mol_type = other DNA
agaccatgggaagagcactc

SEQ ID NO: 33465 - DNA, 20 bp, synthetic construct
  source 1..20: mol_type = other DNA
ccatccctgggggcctgagc

SEQ ID NO: 33466 - DNA, 20 bp, synthetic construct
  source 1..20: mol_type = other DNA
tggcaggaaaacagcgagca

SEQ ID NO: 33467 - DNA, 20 bp, synthetic construct
  source 1..20: mol_type = other DNA
acagacactgaccagagaca

SEQ ID NO: 33468 - DNA, 20 bp, synthetic construct
  source 1..20: mol_type = other DNA
ccttccgtgaatcaggctcc

SEQ ID NO: 33469 - DNA, 20 bp, synthetic construct
  source 1..20: mol_type = other DNA
tgactacctgcgcagtgtgc

SEQ ID NO: 33470 - DNA, 20 bp, synthetic construct
  source 1..20: mol_type = other DNA
agcacatgtggaggcccaag

SEQ ID NO: 33471 - DNA, 20 bp, synthetic construct
  source 1..20: mol_type = other DNA
tgcgcacgcacacaggtggg

SEQ ID NO: 33472 - DNA, 20 bp, synthetic construct
  source 1..20: mol_type = other DNA
cccaactcactgagctgtcc

SEQ ID NO: 33473 - DNA, 20 bp, synthetic construct
  source 1..20: mol_type = other DNA
gcgggaggaggagcaggagc

SEQ ID NO: 33474 - DNA, 20 bp, synthetic construct
  source 1..20: mol_type = other DNA
gtccaccagggcctggagtg

SEQ ID NO: 33475 - DNA, 20 bp, synthetic construct
  source 1..20: mol_type = other DNA
ggaggccgctgacctctgca

SEQ ID NO: 33476 - DNA, 20 bp, synthetic construct
  source 1..20: mol_type = other DNA
aaaagttcctgaacatattc

SEQ ID NO: 33477 - DNA, 20 bp, synthetic construct
  source 1..20: mol_type = other DNA
gaagagaactctagaatagt

SEQ ID NO: 33478 - DNA, 20 bp, synthetic construct
  source 1..20: mol_type = other DNA
ggaaagcagctcctccgcct

SEQ ID NO: 33479 - DNA, 20 bp, synthetic construct
  source 1..20: mol_type = other DNA
caatcacatgtgtgggtgcg

SEQ ID NO: 33480 - DNA, 20 bp, synthetic construct
  source 1..20: mol_type = other DNA
gcggccatacctgggacttg

SEQ ID NO: 33481 - DNA, 20 bp, synthetic construct
  source 1..20: mol_type = other DNA
ccctgtgttctcgtacactg

SEQ ID NO: 33482 - DNA, 20 bp, synthetic construct
  source 1..20: mol_type = other DNA
gctcccccaggtatgttgtg

SEQ ID NO: 33483 - DNA, 20 bp, synthetic construct
  source 1..20: mol_type = other DNA
tagaggcatcctggagagtt

SEQ ID NO: 33484 - DNA, 20 bp, synthetic construct
  source 1..20: mol_type = other DNA
agaagaatttattgtgtctt

SEQ ID NO: 33485 - DNA, 20 bp, synthetic construct
  source 1..20: mol_type = other DNA
aggctcgagacaaggtgtca

SEQ ID NO: 33486 - DNA, 20 bp, synthetic construct
  source 1..20: mol_type = other DNA
ccagatcatttccagtaccc

SEQ ID NO: 33487 - DNA, 20 bp, synthetic construct
  source 1..20: mol_type = other DNA
gcccggggcccgggccgccc

SEQ ID NO: 33488 - DNA, 20 bp, synthetic construct
  source 1..20: mol_type = other DNA
gccacctgtggatacaggca

SEQ ID NO: 33489 - DNA, 20 bp, synthetic construct
  source 1..20: mol_type = other DNA
cttatccaggtaagcaccag

SEQ ID NO: 33490 - DNA, 20 bp, synthetic construct
  source 1..20: mol_type = other DNA
aggaccatggatgctgatga

SEQ ID NO: 33491 - DNA, 20 bp, synthetic construct
  source 1..20: mol_type = other DNA
cagaagaacagtcatttgat

SEQ ID NO: 33492 - DNA, 20 bp, synthetic construct
  source 1..20: mol_type = other DNA
cccggcaacgctgcttgggg

SEQ ID NO: 33493 - DNA, 20 bp, synthetic construct
  source 1..20: mol_type = other DNA
cctgcctggtgtggaaggac

SEQ ID NO: 33494 - DNA, 20 bp, synthetic construct
  source 1..20: mol_type = other DNA
gccatcctgcccctgggtac

SEQ ID NO: 33495 - DNA, 20 bp, synthetic construct
  source 1..20: mol_type = other DNA
atgcccgaggaggctggggc

SEQ ID NO: 33496 - DNA, 20 bp, synthetic construct
  source 1..20: mol_type = other DNA
cctaccatgggagttatctc

SEQ ID NO: 33497 - DNA, 20 bp, synthetic construct
  source 1..20: mol_type = other DNA
aaactccgtctggttggtgg

SEQ ID NO: 33498 - DNA, 20 bp, synthetic construct
  source 1..20: mol_type = other DNA
agtctggccaggagggtgct

SEQ ID NO: 33499 - DNA, 20 bp, synthetic construct
  source 1..20: mol_type = other DNA
gtcgtgatggtgtgaacacc

SEQ ID NO: 33500 - DNA, 20 bp, synthetic construct
  source 1..20: mol_type = other DNA
cacaatctccttgctgtgga

SEQ ID NO: 33501 - DNA, 20 bp, synthetic construct
  source 1..20: mol_type = other DNA
agccaggagctcgctgcggt

SEQ ID NO: 33502 - DNA, 20 bp, synthetic construct
  source 1..20: mol_type = other DNA
atcgagcagctggagaaggt

SEQ ID NO: 33503 - DNA, 20 bp, synthetic construct
  source 1..20: mol_type = other DNA
ttctctgcttattagaatca

SEQ ID NO: 33504 - DNA, 20 bp, synthetic construct
  source 1..20: mol_type = other DNA
ctgtggtaaaccaacacagc

SEQ ID NO: 33505 - DNA, 20 bp, synthetic construct
  source 1..20: mol_type = other DNA
gctcctgggcgtgatcgtgg

SEQ ID NO: 33506 - DNA, 20 bp, synthetic construct
  source 1..20: mol_type = other DNA
gagaagtcccgacctagcac

SEQ ID NO: 33507 - DNA, 20 bp, synthetic construct
  source 1..20: mol_type = other DNA
tgctccaaaagtgggtgatg

SEQ ID NO: 33508 - DNA, 20 bp, synthetic construct
  source 1..20: mol_type = other DNA
gagccttgcaaaggggaagt

SEQ ID NO: 33509 - DNA, 20 bp, synthetic construct
  source 1..20: mol_type = other DNA
tgtcagcgtcctggacgtct

SEQ ID NO: 33510 - DNA, 20 bp, synthetic construct
  source 1..20: mol_type = other DNA
ccagccactccttctcactc

SEQ ID NO: 33511 - DNA, 20 bp, synthetic construct
  source 1..20: mol_type = other DNA
gatgatctttgcaccctgga

SEQ ID NO: 33512 - DNA, 20 bp, synthetic construct
  source 1..20: mol_type = other DNA
caagaagacggggattgagg

SEQ ID NO: 33513 - DNA, 20 bp, synthetic construct
  source 1..20: mol_type = other DNA
atccaggggcaactggaaaa

SEQ ID NO: 33514 - DNA, 20 bp, synthetic construct
  source 1..20: mol_type = other DNA
acacccacctctcagttccc

SEQ ID NO: 33515 - DNA, 20 bp, synthetic construct
  source 1..20: mol_type = other DNA
catgagcacgccgtgcagct

SEQ ID NO: 33516 - DNA, 20 bp, synthetic construct
  source 1..20: mol_type = other DNA
gctcacgcttgtagtggctc

SEQ ID NO: 33517 - DNA, 20 bp, synthetic construct
  source 1..20: mol_type = other DNA
ttctctattggcgtggtcag

SEQ ID NO: 33518 - DNA, 20 bp, synthetic construct
  source 1..20: mol_type = other DNA
ctcttcctcatgaccaagag

SEQ ID NO: 33519 - DNA, 20 bp, synthetic construct
  source 1..20: mol_type = other DNA
ctcattgtatcctcccttca

SEQ ID NO: 33520 - DNA, 20 bp, synthetic construct
  source 1..20: mol_type = other DNA
agaacgagaacgagaaagga

SEQ ID NO: 33521 - DNA, 20 bp, synthetic construct
  source 1..20: mol_type = other DNA
aacagcaggttagggaaagg

SEQ ID NO: 33522 - DNA, 20 bp, synthetic construct
  source 1..20: mol_type = other DNA
tccacatcttaaaggaggca

SEQ ID NO: 33523 - DNA, 20 bp, synthetic construct
  source 1..20: mol_type = other DNA
tctgtggccatcctgcccct

SEQ ID NO: 33524 - DNA, 20 bp, synthetic construct
  source 1..20: mol_type = other DNA
ttgtggccatcagctgctcg

SEQ ID NO: 33525 - DNA, 20 bp, synthetic construct
  source 1..20: mol_type = other DNA
tgtggctcccaggcaggggc

SEQ ID NO: 33526 - DNA, 20 bp, synthetic construct
  source 1..20: mol_type = other DNA
gccgtaggttctcctgcaac

SEQ ID NO: 33527 - DNA, 20 bp, synthetic construct
  source 1..20: mol_type = other DNA
gaagaacgggctgtgctgcg

SEQ ID NO: 33528 - DNA, 20 bp, synthetic construct
  source 1..20: mol_type = other DNA
atcttcagccacctccactg

SEQ ID NO: 33529 - DNA, 20 bp, synthetic construct
  source 1..20: mol_type = other DNA
gtgcgcaagctgcaggagag

SEQ ID NO: 33530 - DNA, 20 bp, synthetic construct
  source 1..20: mol_type = other DNA
cagtctggccaggagggtgc

SEQ ID NO: 33531 - DNA, 20 bp, synthetic construct
  source 1..20: mol_type = other DNA
cctgggaagggaaggagggg

SEQ ID NO: 33532 - DNA, 20 bp, synthetic construct
  source 1..20: mol_type = other DNA
tggagggcttgacatctgca

SEQ ID NO: 33533 - DNA, 20 bp, synthetic construct
  source 1..20: mol_type = other DNA
cctgctctccggttctctgg

SEQ ID NO: 33534 - DNA, 20 bp, synthetic construct
  source 1..20: mol_type = other DNA
agagcctattacatctactc

SEQ ID NO: 33535 - DNA, 20 bp, synthetic construct
  source 1..20: mol_type = other DNA
tcacgttggtccacatcctg

SEQ ID NO: 33536 - DNA, 20 bp, synthetic construct
  source 1..20: mol_type = other DNA
gtggagaatgaggaggcgga

SEQ ID NO: 33537 - DNA, 20 bp, synthetic construct
  source 1..20: mol_type = other DNA
cctgcggatcctggcgtgcg

SEQ ID NO: 33538 - DNA, 20 bp, synthetic construct
  source 1..20: mol_type = other DNA
tcagattgggtgagtaaggc

SEQ ID NO: 33539 - DNA, 20 bp, synthetic construct
  source 1..20: mol_type = other DNA
tcaacagcaggtcccgcaga

SEQ ID NO: 33540 - DNA, 20 bp, synthetic construct
  source 1..20: mol_type = other DNA
aggggccggctcaacaccag

SEQ ID NO: 33541 - DNA, 20 bp, synthetic construct
  source 1..20: mol_type = other DNA
cgtatgacgaagtgaaagct

SEQ ID NO: 33542 - DNA, 20 bp, synthetic construct
  source 1..20: mol_type = other DNA
caagaatggcatcctctacc

SEQ ID NO: 33543 - DNA, 20 bp, synthetic construct
  source 1..20: mol_type = other DNA
gcactcacagcaggggtccg

SEQ ID NO: 33544 - DNA, 20 bp, synthetic construct
  source 1..20: mol_type = other DNA
gaggacctctccaccacctc

SEQ ID NO: 33545 - DNA, 20 bp, synthetic construct
  source 1..20: mol_type = other DNA
agtatttgacacatttactc

SEQ ID NO: 33546 - DNA, 20 bp, synthetic construct
  source 1..20: mol_type = other DNA
actccttgatctcctcctgg

SEQ ID NO: 33547 - DNA, 20 bp, synthetic construct
  source 1..20: mol_type = other DNA
agttcggaggtgagctgggc

SEQ ID NO: 33548 - DNA, 20 bp, synthetic construct
  source 1..20: mol_type = other DNA
taacttaccatagacatctg

SEQ ID NO: 33549 - DNA, 20 bp, synthetic construct
  source 1..20: mol_type = other DNA
gtccgcaagggacagcgggg

SEQ ID NO: 33550 - DNA, 20 bp, synthetic construct
  source 1..20: mol_type = other DNA
tgtcatgctgaaccgcattg

SEQ ID NO: 33551 - DNA, 20 bp, synthetic construct
  source 1..20: mol_type = other DNA
ggttacactgagcatcttgg

SEQ ID NO: 33552 - DNA, 20 bp, synthetic construct
  source 1..20: mol_type = other DNA
tacctatgatggaatccctc

SEQ ID NO: 33553 - DNA, 20 bp, synthetic construct
  source 1..20: mol_type = other DNA
tgtagcgcgtggagttgatc

SEQ ID NO: 33554 - DNA, 20 bp, synthetic construct
  source 1..20: mol_type = other DNA
gagccagggagggcccaagg

SEQ ID NO: 33555 - DNA, 20 bp, synthetic construct
  source 1..20: mol_type = other DNA
gtacagggcgtctgcatcca

SEQ ID NO: 33556 - DNA, 20 bp, synthetic construct
  source 1..20: mol_type = other DNA
cgacatatggggagcacatc

SEQ ID NO: 33557 - DNA, 20 bp, synthetic construct
  source 1..20: mol_type = other DNA
agcatggcggtggaggacga

SEQ ID NO: 33558 - DNA, 20 bp, synthetic construct
  source 1..20: mol_type = other DNA
agacaaggtgtcaggggacc

SEQ ID NO: 33559 - DNA, 20 bp, synthetic construct
  source 1..20: mol_type = other DNA
ggtgatcctggtgaaggaga

SEQ ID NO: 33560 - DNA, 20 bp, synthetic construct
  source 1..20: mol_type = other DNA
ccccatcgcaccgtctgcaa

SEQ ID NO: 33561 - DNA, 20 bp, synthetic construct
  source 1..20: mol_type = other DNA
ttccagcaggggaccatggt

SEQ ID NO: 33562 - DNA, 20 bp, synthetic construct
  source 1..20: mol_type = other DNA
cggagctggaggaggcggcg

SEQ ID NO: 33563 - DNA, 20 bp, synthetic construct
  source 1..20: mol_type = other DNA
cagctggtatgacccaggta

SEQ ID NO: 33564 - DNA, 20 bp, synthetic construct
  source 1..20: mol_type = other DNA
tgaggagctgcagaagcaga

SEQ ID NO: 33565 - DNA, 20 bp, synthetic construct
  source 1..20: mol_type = other DNA
ggcttctcacctgcagggag

SEQ ID NO: 33566 - DNA, 20 bp, synthetic construct
  source 1..20: mol_type = other DNA
tacctcagccagggtctcgg

SEQ ID NO: 33567 - DNA, 20 bp, synthetic construct
  source 1..20: mol_type = other DNA
ccagtacaggctgtcccaga

SEQ ID NO: 33568 - DNA, 20 bp, synthetic construct
  source 1..20: mol_type = other DNA
acagtgagtgggagcccaga

SEQ ID NO: 33569 - DNA, 20 bp, synthetic construct
  source 1..20: mol_type = other DNA
cttccacaggcctgtagtgg

SEQ ID NO: 33570 - DNA, 20 bp, synthetic construct
  source 1..20: mol_type = other DNA
gtctgaggtgtagtgctgca

SEQ ID NO: 33571 - DNA, 20 bp, synthetic construct
  source 1..20: mol_type = other DNA
ggagtgcttcttcttcctaa

SEQ ID NO: 33572 - DNA, 20 bp, synthetic construct
  source 1..20: mol_type = other DNA
cccgtggagatctctgccga

SEQ ID NO: 33573 - DNA, 20 bp, synthetic construct
  source 1..20: mol_type = other DNA
cgcagggagcccaggtcgtc

SEQ ID NO: 33574 - DNA, 20 bp, synthetic construct
  source 1..20: mol_type = other DNA
ttacctcatccagcaacgcc

SEQ ID NO: 33575 - DNA, 20 bp, synthetic construct
  source 1..20: mol_type = other DNA
ttataggccattgggtacga

SEQ ID NO: 33576 - DNA, 20 bp, synthetic construct
  source 1..20: mol_type = other DNA
agctgaatgccacctggcac

SEQ ID NO: 33577 - DNA, 20 bp, synthetic construct
  source 1..20: mol_type = other DNA
cgtctgaggtgtagtgctgc

SEQ ID NO: 33578 - DNA, 20 bp, synthetic construct
  source 1..20: mol_type = other DNA
gggtgtggaacgcttgcgtt

SEQ ID NO: 33579 - DNA, 20 bp, synthetic construct
  source 1..20: mol_type = other DNA
tccgccaggtggctgtatga

SEQ ID NO: 33580 - DNA, 20 bp, synthetic construct
  source 1..20: mol_type = other DNA
ccggtagagaaggtagacct

SEQ ID NO: 33581 - DNA, 20 bp, synthetic construct
  source 1..20: mol_type = other DNA
gtgcggaagtgcgtgtcgcc

SEQ ID NO: 33582 - DNA, 20 bp, synthetic construct
  source 1..20: mol_type = other DNA
ccccaggatggctccggaag

SEQ ID NO: 33583 - DNA, 20 bp, synthetic construct
  source 1..20: mol_type = other DNA
cctctatgaacaggtaagag

SEQ ID NO: 33584 - DNA, 20 bp, synthetic construct
  source 1..20: mol_type = other DNA
ttcctccaggggccatgctg

SEQ ID NO: 33585 - DNA, 20 bp, synthetic construct
  source 1..20: mol_type = other DNA
gttcagggcccagccgcctg

SEQ ID NO: 33586 - DNA, 20 bp, synthetic construct
  source 1..20: mol_type = other DNA
ggatgacgttcaacacttca

SEQ ID NO: 33587 - DNA, 20 bp, synthetic construct
  source 1..20: mol_type = other DNA
atggtggagaatctccgagt

SEQ ID NO: 33588 - DNA, 20 bp, synthetic construct
  source 1..20: mol_type = other DNA
caacatatatggtggtgcaa

SEQ ID NO: 33589 - DNA, 20 bp, synthetic construct
  source 1..20: mol_type = other DNA
cacaaagggcacgcggtcct

SEQ ID NO: 33590 - DNA, 20 bp, synthetic construct
  source 1..20: mol_type = other DNA
acctgtgctcaccctatctc

SEQ ID NO: 33591 - DNA, 20 bp, synthetic construct
  source 1..20: mol_type = other DNA
cagttcacgtcaaaactgga

SEQ ID NO: 33592 - DNA, 20 bp, synthetic construct
  source 1..20: mol_type = other DNA
tttacttactttcacatatt

SEQ ID NO: 33593 - DNA, 20 bp, synthetic construct
  source 1..20: mol_type = other DNA
tacctgcggctgctcacctc

SEQ ID NO: 33594 - DNA, 20 bp, synthetic construct
  source 1..20: mol_type = other DNA
tgtttgtgaaccccaagagt

SEQ ID NO: 33595 - DNA, 20 bp, synthetic construct
  source 1..20: mol_type = other DNA
tgggtgagaggcgtgtagat

SEQ ID NO: 33596 - DNA, 20 bp, synthetic construct
  source 1..20: mol_type = other DNA
cgggagagccagaccaggag

SEQ ID NO: 33597 - DNA, 20 bp, synthetic construct
  source 1..20: mol_type = other DNA
gcagcgggctgagaaggctc

SEQ ID NO: 33598 - DNA, 20 bp, synthetic construct
  source 1..20: mol_type = other DNA
ctctccacaggtccaggaga

SEQ ID NO: 33599 - DNA, 20 bp, synthetic construct
  source 1..20: mol_type = other DNA
cagattcctcatctgtaaaa

SEQ ID NO: 33600 - DNA, 20 bp, synthetic construct
  source 1..20: mol_type = other DNA
cattccagttctaaggggag

SEQ ID NO: 33601 - DNA, 20 bp, synthetic construct
  source 1..20: mol_type = other DNA
acaccatggacaagttttgg

SEQ ID NO: 33602 - DNA, 20 bp, synthetic construct
  source 1..20: mol_type = other DNA
caaggccaagttggtgccct

SEQ ID NO: 33603 - DNA, 20 bp, synthetic construct
  source 1..20: mol_type = other DNA
ttcaacagcaggtcccgcag

SEQ ID NO: 33604 - DNA, 20 bp, synthetic construct
  source 1..20: mol_type = other DNA
ggaaacttggccactctatg

SEQ ID NO: 33605 - DNA, 20 bp, synthetic construct
  source 1..20: mol_type = other DNA
taccagctccagctgtgccc

SEQ ID NO: 33606 - DNA, 20 bp, synthetic construct
  source 1..20: mol_type = other DNA
gtgctcacactaaagacgta

SEQ ID NO: 33607 - DNA, 20 bp, synthetic construct
  source 1..20: mol_type = other DNA
tgctacttttcccttctgga

SEQ ID NO: 33608 - DNA, 20 bp, synthetic construct
  source 1..20: mol_type = other DNA
ggttcttaccagccaagagg

SEQ ID NO: 33609 - DNA, 20 bp, synthetic construct
  source 1..20: mol_type = other DNA
tttgcagccagagctggggc

SEQ ID NO: 33610 - DNA, 20 bp, synthetic construct
  source 1..20: mol_type = other DNA
agtgtcctacctgaaagagt

SEQ ID NO: 33611 - DNA, 20 bp, synthetic construct
  source 1..20: mol_type = other DNA
cctgttggcagtgccatctg

SEQ ID NO: 33612 - DNA, 20 bp, synthetic construct
  source 1..20: mol_type = other DNA
gaacctctgctgatagtgtc

SEQ ID NO: 33613 - DNA, 20 bp, synthetic construct
  source 1..20: mol_type = other DNA
ccactcttcagcatctctgt

SEQ ID NO: 33614 - DNA, 20 bp, synthetic construct
  source 1..20: mol_type = other DNA
gtgcttccttcagagtacta

SEQ ID NO: 33615 - DNA, 20 bp, synthetic construct
  source 1..20: mol_type = other DNA
tccagaccagcacctgctcc

SEQ ID NO: 33616 - DNA, 20 bp, synthetic construct
  source 1..20: mol_type = other DNA
tacaggtgagcagagtgggc

SEQ ID NO: 33617 - DNA, 20 bp, synthetic construct
  source 1..20: mol_type = other DNA
gcctattacatctactccgg

SEQ ID NO: 33618 - DNA, 20 bp, synthetic construct
  source 1..20: mol_type = other DNA
cggcggcggcggcggcggcg

SEQ ID NO: 33619 - DNA, 20 bp, synthetic construct
  source 1..20: mol_type = other DNA
acgtcctggtttctctccaa

SEQ ID NO: 33620 - DNA, 20 bp, synthetic construct
  source 1..20: mol_type = other DNA
cacgcagagcgcgtatgccc

SEQ ID NO: 33621 - DNA, 20 bp, synthetic construct
  source 1..20: mol_type = other DNA
gaaggtcgatcctggaacac

SEQ ID NO: 33622 - DNA, 20 bp, synthetic construct
  source 1..20: mol_type = other DNA
gcgcggcctgcaggaggtga

SEQ ID NO: 33623 - DNA, 20 bp, synthetic construct
  source 1..20: mol_type = other DNA
gtgctggaaggagcgcccag

SEQ ID NO: 33624 - DNA, 20 bp, synthetic construct
  source 1..20: mol_type = other DNA
tgcaaattgacggagaaccc

SEQ ID NO: 33625 - DNA, 20 bp, synthetic construct
  source 1..20: mol_type = other DNA
ggagttgaggaggctggagt

SEQ ID NO: 33626 - DNA, 20 bp, synthetic construct
  source 1..20: mol_type = other DNA
tgtccccgcggcctccttgg

SEQ ID NO: 33627 - DNA, 20 bp, synthetic construct
  source 1..20: mol_type = other DNA
aatccagtgtgtgaagaagc

SEQ ID NO: 33628 - DNA, 20 bp, synthetic construct
  source 1..20: mol_type = other DNA
cgggcttcagggtgacatgc

SEQ ID NO: 33629 - DNA, 20 bp, synthetic construct
  source 1..20: mol_type = other DNA
ctgtactcgtctgggtcagt

SEQ ID NO: 33630 - DNA, 20 bp, synthetic construct
  source 1..20: mol_type = other DNA
tgaataggtactattaccaa

SEQ ID NO: 33631 - DNA, 20 bp, synthetic construct
  source 1..20: mol_type = other DNA
aaggaaaaagttgatttcct

SEQ ID NO: 33632 - DNA, 20 bp, synthetic construct
  source 1..20: mol_type = other DNA
tgtgctggtctgggaggtga

SEQ ID NO: 33633 - DNA, 20 bp, synthetic construct
  source 1..20: mol_type = other DNA
cttctcttctggcagagcag

SEQ ID NO: 33634 - DNA, 20 bp, synthetic construct
  source 1..20: mol_type = other DNA
aggaaaacagcgagcagggg

SEQ ID NO: 33635 - DNA, 20 bp, synthetic construct
  source 1..20: mol_type = other DNA
agccaggaaggcctgggcag

SEQ ID NO: 33636 - DNA, 20 bp, synthetic construct
  source 1..20: mol_type = other DNA
agcaactcatccagcaaaag

SEQ ID NO: 33637 - DNA, 20 bp, synthetic construct
  source 1..20: mol_type = other DNA
tttcacagggtttgtggctc

SEQ ID NO: 33638 - DNA, 20 bp, synthetic construct
  source 1..20: mol_type = other DNA
ccagttccaggtagaagagg

SEQ ID NO: 33639 - DNA, 20 bp, synthetic construct
  source 1..20: mol_type = other DNA
ctcccaaagttcgtggcact

SEQ ID NO: 33640 - DNA, 20 bp, synthetic construct
  source 1..20: mol_type = other DNA
ctacatcgaacgggcgcagc

SEQ ID NO: 33641 - DNA, 20 bp, synthetic construct
  source 1..20: mol_type = other DNA
tgctgggggaggctctgcag

SEQ ID NO: 33642 - DNA, 20 bp, synthetic construct
  source 1..20: mol_type = other DNA
gattactaaagcagatgctg

SEQ ID NO: 33643 - DNA, 20 bp, synthetic construct
  source 1..20: mol_type = other DNA
gtacctattacaattggtcc

SEQ ID NO: 33644 - DNA, 20 bp, synthetic construct
  source 1..20: mol_type = other DNA
gcagcaattcactgtaaagc

SEQ ID NO: 33645 - DNA, 20 bp, synthetic construct
  source 1..20: mol_type = other DNA
cgaggcccccctgaacccca

SEQ ID NO: 33646 - DNA, 20 bp, synthetic construct
  source 1..20: mol_type = other DNA
atcaagaggacccagctttc

SEQ ID NO: 33647 - DNA, 20 bp, synthetic construct
  source 1..20: mol_type = other DNA
gccgcccggccgcctggtca

SEQ ID NO: 33648 - DNA, 20 bp, synthetic construct
  source 1..20: mol_type = other DNA
ttatggaattttgtccatgt

SEQ ID NO: 33649 - DNA, 20 bp, synthetic construct
  source 1..20: mol_type = other DNA
tcaccaaaaactgtgttggt

SEQ ID NO: 33650 - DNA, 20 bp, synthetic construct
  source 1..20: mol_type = other DNA
tccgtctgcttggctccccc

SEQ ID NO: 33651 - DNA, 20 bp, synthetic construct
  source 1..20: mol_type = other DNA
acaaggagtcaaactcgtgg

SEQ ID NO: 33652 - DNA, 20 bp, synthetic construct
  source 1..20: mol_type = other DNA
tataacataaaagcattcag

SEQ ID NO: 33653 - DNA, 20 bp, synthetic construct
  source 1..20: mol_type = other DNA
ccagcgcatcgtggccaccg

SEQ ID NO: 33654 - DNA, 20 bp, synthetic construct
  source 1..20: mol_type = other DNA
aagtccttgttagcctccaa

SEQ ID NO: 33655 - DNA, 20 bp, synthetic construct
  source 1..20: mol_type = other DNA
agtagcgcagattctcctgc

SEQ ID NO: 33656 - DNA, 20 bp, synthetic construct
  source 1..20: mol_type = other DNA
gccacttctcagtacatgtg

SEQ ID NO: 33657 - DNA, 20 bp, synthetic construct
  source 1..20: mol_type = other DNA
gaacgcctggccgcccgtgt

SEQ ID NO: 33658 - DNA, 20 bp, synthetic construct
  source 1..20: mol_type = other DNA
ggccaggacccagctgaggg

SEQ ID NO: 33659 - DNA, 20 bp, synthetic construct
  source 1..20: mol_type = other DNA
agagtttctgcaacctgcag

SEQ ID NO: 33660 - DNA, 20 bp, synthetic construct
  source 1..20: mol_type = other DNA
aaggctcgagacaaggtgtc

SEQ ID NO: 33661 - DNA, 20 bp, synthetic construct
  source 1..20: mol_type = other DNA
taccagttgatgctggcgga

SEQ ID NO: 33662 - DNA, 20 bp, synthetic construct
  source 1..20: mol_type = other DNA
tccaagaccgttcagaccct

SEQ ID NO: 33663 - DNA, 20 bp, synthetic construct
  source 1..20: mol_type = other DNA
cggggacttccagggcccgg

SEQ ID NO: 33664 - DNA, 20 bp, synthetic construct
  source 1..20: mol_type = other DNA
gttccaggtgccgatgaaga

SEQ ID NO: 33665 - DNA, 20 bp, synthetic construct
  source 1..20: mol_type = other DNA
acagcggagggtgcgagctc

SEQ ID NO: 33666 - DNA, 20 bp, synthetic construct
  source 1..20: mol_type = other DNA
atcgcccagcatcacgtctg

SEQ ID NO: 33667 - DNA, 20 bp, synthetic construct
  source 1..20: mol_type = other DNA
gtagcaggtcatagtggtcc

SEQ ID NO: 33668 - DNA, 20 bp, synthetic construct
  source 1..20: mol_type = other DNA
gatgtagttcttgtggcact

SEQ ID NO: 33669 - DNA, 20 bp, synthetic construct
  source 1..20: mol_type = other DNA
ctgccacttcatccacaacg

SEQ ID NO: 33670 - DNA, 20 bp, synthetic construct
  source 1..20: mol_type = other DNA
cccgtccacctgcaccgggg

SEQ ID NO: 33671 - DNA, 20 bp, synthetic construct
  source 1..20: mol_type = other DNA
gttcacaccatcacgacgcg

SEQ ID NO: 33672 - DNA, 20 bp, synthetic construct
  source 1..20: mol_type = other DNA
cccagaccagcacatcctgc

SEQ ID NO: 33673 - DNA, 20 bp, synthetic construct
  source 1..20: mol_type = other DNA
ccacgatgactgcctgcaag

SEQ ID NO: 33674 - DNA, 20 bp, synthetic construct
  source 1..20: mol_type = other DNA
ctctggagttgtggtgggcg

SEQ ID NO: 33675 - DNA, 20 bp, synthetic construct
  source 1..20: mol_type = other DNA
tgtccatgatggcgcggatc

SEQ ID NO: 33676 - DNA, 20 bp, synthetic construct
  source 1..20: mol_type = other DNA
ctgtgtagcgggccgcccac

SEQ ID NO: 33677 - DNA, 20 bp, synthetic construct
  source 1..20: mol_type = other DNA
cccatccaatgttctctgta

SEQ ID NO: 33678 - DNA, 20 bp, synthetic construct
  source 1..20: mol_type = other DNA
tcaccatatcttcctctacc

SEQ ID NO: 33679 - DNA, 20 bp, synthetic construct
  source 1..20: mol_type = other DNA
tgcgaggaggctgtgagtcc

SEQ ID NO: 33680 - DNA, 20 bp, synthetic construct
  source 1..20: mol_type = other DNA
ccacagcttggacacagctt

SEQ ID NO: 33681 - DNA, 20 bp, synthetic construct
  source 1..20: mol_type = other DNA
ctggacagctcagtgagttg

SEQ ID NO: 33682 - DNA, 20 bp, synthetic construct
  source 1..20: mol_type = other DNA
acgtggtacagctggaccgc

SEQ ID NO: 33683 - DNA, 20 bp, synthetic construct
  source 1..20: mol_type = other DNA
tccgcctccgccgccgccgc

SEQ ID NO: 33684 - DNA, 20 bp, synthetic construct
  source 1..20: mol_type = other DNA
acaagcaggaatttgttcat

SEQ ID NO: 33685 - DNA, 20 bp, synthetic construct
  source 1..20: mol_type = other DNA
ctcctgcctgaaaataccta

SEQ ID NO: 33686 - DNA, 20 bp, synthetic construct
  source 1..20: mol_type = other DNA
tccctgggcaggtcgccgcg

SEQ ID NO: 33687 - DNA, 20 bp, synthetic construct
  source 1..20: mol_type = other DNA
cattttagtgcacatccggg

SEQ ID NO: 33688 - DNA, 20 bp, synthetic construct
  source 1..20: mol_type = other DNA
cctgcagggtgtgtgtatgt

SEQ ID NO: 33689 - DNA, 20 bp, synthetic construct
  source 1..20: mol_type = other DNA
tgccacttctcagtacatgt

SEQ ID NO: 33690 - DNA, 20 bp, synthetic construct
  source 1..20: mol_type = other DNA
ctcctgaggccagggaggcc

SEQ ID NO: 33691 - DNA, 20 bp, synthetic construct
  source 1..20: mol_type = other DNA
tcccagcctgggctgaatcg

SEQ ID NO: 33692 - DNA, 20 bp, synthetic construct
  source 1..20: mol_type = other DNA
aaagggtccttagtagctct

SEQ ID NO: 33693 - DNA, 20 bp, synthetic construct
  source 1..20: mol_type = other DNA
cctccccagcatcattgatg

SEQ ID NO: 33694 - DNA, 20 bp, synthetic construct
  source 1..20: mol_type = other DNA
gcctctccactggcctgccc

SEQ ID NO: 33695 - DNA, 20 bp, synthetic construct
  source 1..20: mol_type = other DNA
cggctgagctgtactcgtct

SEQ ID NO: 33696 - DNA, 20 bp, synthetic construct
  source 1..20: mol_type = other DNA
tatgcccaagtccagaaacc

SEQ ID NO: 33697 - DNA, 20 bp, synthetic construct
  source 1..20: mol_type = other DNA
tgagaaactgcacgagtggg

SEQ ID NO: 33698 - DNA, 20 bp, synthetic construct
  source 1..20: mol_type = other DNA
gcgagctcgggagagaagtg

SEQ ID NO: 33699 - DNA, 20 bp, synthetic construct
  source 1..20: mol_type = other DNA
ggcccgcaggtggctccggg

SEQ ID NO: 33700 - DNA, 20 bp, synthetic construct
  source 1..20: mol_type = other DNA
ccgcgagaacggcggtggtg

SEQ ID NO: 33701 - DNA, 20 bp, synthetic construct
  source 1..20: mol_type = other DNA
ccagactttccagcgcatcg

SEQ ID NO: 33702 - DNA, 20 bp, synthetic construct
  source 1..20: mol_type = other DNA
tggcactccgggctccggcg

SEQ ID NO: 33703 - DNA, 20 bp, synthetic construct
  source 1..20: mol_type = other DNA
ggtggcggtggcggtggtgg

SEQ ID NO: 33704 - DNA, 20 bp, synthetic construct
  source 1..20: mol_type = other DNA
ccttgggcttgtggttgggc

SEQ ID NO: 33705 - DNA, 20 bp, synthetic construct
  source 1..20: mol_type = other DNA
ggacagtttataaagtgttc

SEQ ID NO: 33706 - DNA, 20 bp, synthetic construct
  source 1..20: mol_type = other DNA
gcacctcaccttgatgaaag

SEQ ID NO: 33707 - DNA, 20 bp, synthetic construct
  source 1..20: mol_type = other DNA
attggatggatatcagcata

SEQ ID NO: 33708 - DNA, 20 bp, synthetic construct
  source 1..20: mol_type = other DNA
cagcagacatctgcagttaa

SEQ ID NO: 33709 - DNA, 20 bp, synthetic construct
  source 1..20: mol_type = other DNA
ggacatagaggactattacg

SEQ ID NO: 33710 - DNA, 20 bp, synthetic construct
  source 1..20: mol_type = other DNA
gcggtcccggccccggcccc

SEQ ID NO: 33711 - DNA, 20 bp, synthetic construct
  source 1..20: mol_type = other DNA
tactctccaagcagctcgag

SEQ ID NO: 33712 - DNA, 20 bp, synthetic construct
  source 1..20: mol_type = other DNA
tcttatagttggaagatcta

SEQ ID NO: 33713 - DNA, 20 bp, synthetic construct
  source 1..20: mol_type = other DNA
tgaaaacctcctcctggtcc

SEQ ID NO: 33714 - DNA, 20 bp, synthetic construct
  source 1..20: mol_type = other DNA
ccgcatcaaggatctctggg

SEQ ID NO: 33715 - DNA, 20 bp, synthetic construct
  source 1..20: mol_type = other DNA
atccaaggccatcccggtgc

SEQ ID NO: 33716 - DNA, 20 bp, synthetic construct
  source 1..20: mol_type = other DNA
tatgccagatgggaccttct

SEQ ID NO: 33717 - DNA, 20 bp, synthetic construct
  source 1..20: mol_type = other DNA
gatggagctgaaggaggagg

SEQ ID NO: 33718 - DNA, 20 bp, synthetic construct
  source 1..20: mol_type = other DNA
ggtgactgggaagactggag

SEQ ID NO: 33719 - DNA, 20 bp, synthetic construct
  source 1..20: mol_type = other DNA
tacctgaatgggcggtgagg

SEQ ID NO: 33720 - DNA, 20 bp, synthetic construct
  source 1..20: mol_type = other DNA
tctgtgtcagccccaacaca

SEQ ID NO: 33721 - DNA, 20 bp, synthetic construct
  source 1..20: mol_type = other DNA
acatttcacagtcctttccc

SEQ ID NO: 33722 - DNA, 20 bp, synthetic construct
  source 1..20: mol_type = other DNA
ggaatggactcctctcctca

SEQ ID NO: 33723 - DNA, 20 bp, synthetic construct
  source 1..20: mol_type = other DNA
gcgggtatgtggtgaggata

SEQ ID NO: 33724 - DNA, 20 bp, synthetic construct
  source 1..20: mol_type = other DNA
ggtcgcccttccctggggag

SEQ ID NO: 33725 - DNA, 20 bp, synthetic construct
  source 1..20: mol_type = other DNA
agtttggccacatagttgct

SEQ ID NO: 33726 - DNA, 20 bp, synthetic construct
  source 1..20: mol_type = other DNA
tatgaggatttccttctgaa

SEQ ID NO: 33727 - DNA, 20 bp, synthetic construct
  source 1..20: mol_type = other DNA
cagcagccgcgatggtgagc

SEQ ID NO: 33728 - DNA, 20 bp, synthetic construct
  source 1..20: mol_type = other DNA
ccaggaagcaactgggagtg

SEQ ID NO: 33729 - DNA, 20 bp, synthetic construct
  source 1..20: mol_type = other DNA
cgacacttgaaacttaaaat

SEQ ID NO: 33730 - DNA, 20 bp, synthetic construct
  source 1..20: mol_type = other DNA
aagatcctctaggttcttca

SEQ ID NO: 33731 - DNA, 20 bp, synthetic construct
  source 1..20: mol_type = other DNA
ctggagttccacgagtctcg

SEQ ID NO: 33732 - DNA, 20 bp, synthetic construct
  source 1..20: mol_type = other DNA
cctggcactcgacgatgctg

SEQ ID NO: 33733 - DNA, 20 bp, synthetic construct
  source 1..20: mol_type = other DNA
tagtgccatgaggaagaccc

SEQ ID NO: 33734 - DNA, 20 bp, synthetic construct
  source 1..20: mol_type = other DNA
gtaccactgagacatcctat

SEQ ID NO: 33735 - DNA, 20 bp, synthetic construct
  source 1..20: mol_type = other DNA
gagaaacagcacgaaggtca

SEQ ID NO: 33736 - DNA, 20 bp, synthetic construct
  source 1..20: mol_type = other DNA
gccgctctgcgcggcggccg

SEQ ID NO: 33737 - DNA, 20 bp, synthetic construct
  source 1..20: mol_type = other DNA
ccactgctccagctccagga

SEQ ID NO: 33738 - DNA, 20 bp, synthetic construct
  source 1..20: mol_type = other DNA
cctggacagctcagtgagtt

SEQ ID NO: 33739 - DNA, 20 bp, synthetic construct
  source 1..20: mol_type = other DNA
ggttctggggggcccagggg

SEQ ID NO: 33740 - DNA, 20 bp, synthetic construct
  source 1..20: mol_type = other DNA
caaacttctcccctccatac

SEQ ID NO: 33741 - DNA, 20 bp, synthetic construct
  source 1..20: mol_type = other DNA
ggttttcaggatatcagggt

SEQ ID NO: 33742 - DNA, 20 bp, synthetic construct
  source 1..20: mol_type = other DNA
agtggaaaggcattggcaag

SEQ ID NO: 33743 - DNA, 20 bp, synthetic construct
  source 1..20: mol_type = other DNA
gccggcaagttttcaatatg

SEQ ID NO: 33744 - DNA, 20 bp, synthetic construct
  source 1..20: mol_type = other DNA
gccaggaagaggaagtgctc

SEQ ID NO: 33745 - DNA, 20 bp, synthetic construct
  source 1..20: mol_type = other DNA
gatgcctatacaaacacttc

SEQ ID NO: 33746 - DNA, 20 bp, synthetic construct
  source 1..20: mol_type = other DNA
gccggccgctttcacctgga

SEQ ID NO: 33747 - DNA, 20 bp, synthetic construct
  source 1..20: mol_type = other DNA
tggggcgcggccacggcggg

SEQ ID NO: 33748 - DNA, 20 bp, synthetic construct
  source 1..20: mol_type = other DNA
ccttaaacctgtcaagagtg

SEQ ID NO: 33749 - DNA, 20 bp, synthetic construct
  source 1..20: mol_type = other DNA
ccagctacagcaggaggtag

SEQ ID NO: 33750 - DNA, 20 bp, synthetic construct
  source 1..20: mol_type = other DNA
agcttctcaagaagatcaag

SEQ ID NO: 33751 - DNA, 20 bp, synthetic construct
  source 1..20: mol_type = other DNA
gtttcctggggaaagagaga

SEQ ID NO: 33752 - DNA, 20 bp, synthetic construct
  source 1..20: mol_type = other DNA
tgctgacctgtttctggggc

SEQ ID NO: 33753 - DNA, 20 bp, synthetic construct
  source 1..20: mol_type = other DNA
caaccagccaaaggaggagc

SEQ ID NO: 33754 - DNA, 20 bp, synthetic construct
  source 1..20: mol_type = other DNA
actggtcaacacagatagct

SEQ ID NO: 33755 - DNA, 20 bp, synthetic construct
  source 1..20: mol_type = other DNA
agagcgtgtggatggcgacc

SEQ ID NO: 33756 - DNA, 20 bp, synthetic construct
  source 1..20: mol_type = other DNA
gagagaatcgatctcaatac

SEQ ID NO: 33757 - DNA, 20 bp, synthetic construct
  source 1..20: mol_type = other DNA
tttgtcaatcctaagagtgg

SEQ ID NO: 33758 - DNA, 20 bp, synthetic construct
  source 1..20: mol_type = other DNA
tggatccctgaagttcccca

SEQ ID NO: 33759 - DNA, 20 bp, synthetic construct
  source 1..20: mol_type = other DNA
cggtgcatctgccacaggcg

SEQ ID NO: 33760 - DNA, 20 bp, synthetic construct
  source 1..20: mol_type = other DNA
agagaagcccgtggcgccgc

SEQ ID NO: 33761 - DNA, 20 bp, synthetic construct
  source 1..20: mol_type = other DNA
ccattgatgtatccagaagc

SEQ ID NO: 33762 - DNA, 20 bp, synthetic construct
  source 1..20: mol_type = other DNA
tggaaatcagcatattcctg

SEQ ID NO: 33763 - DNA, 20 bp, synthetic construct
  source 1..20: mol_type = other DNA
accaggcccactgtccttca

SEQ ID NO: 33764 - DNA, 20 bp, synthetic construct
  source 1..20: mol_type = other DNA
ttacctgtgccggggtcttc

SEQ ID NO: 33765 - DNA, 20 bp, synthetic construct
  source 1..20: mol_type = other DNA
gccgagatgccaaagtcagc

SEQ ID NO: 33766 - DNA, 20 bp, synthetic construct
  source 1..20: mol_type = other DNA
cccgcggcggggcgctgcgg

SEQ ID NO: 33767 - DNA, 20 bp, synthetic construct
  source 1..20: mol_type = other DNA
cacctggcggagcgaaagag

SEQ ID NO: 33768 - DNA, 20 bp, synthetic construct
  source 1..20: mol_type = other DNA
ggactttctggtgtaactac

SEQ ID NO: 33769 - DNA, 20 bp, synthetic construct
  source 1..20: mol_type = other DNA
tgcacttggggcacttcctc

SEQ ID NO: 33770 - DNA, 20 bp, synthetic construct
  source 1..20: mol_type = other DNA
atccactgtagtgcaggcat

SEQ ID NO: 33771 - DNA, 20 bp, synthetic construct
  source 1..20: mol_type = other DNA
agattcttacctgtaaatga

SEQ ID NO: 33772 - DNA, 20 bp, synthetic construct
  source 1..20: mol_type = other DNA
agattgcagtagactggtct

SEQ ID NO: 33773 - DNA, 20 bp, synthetic construct
  source 1..20: mol_type = other DNA
ccccagagagctggagcggt

SEQ ID NO: 33774 - DNA, 20 bp, synthetic construct
  source 1..20: mol_type = other DNA
cagatcatagtcactgtcgg

SEQ ID NO: 33775 - DNA, 20 bp, synthetic construct
  source 1..20: mol_type = other DNA
gtccagcaagaaagggcctg

SEQ ID NO: 33776 - DNA, 20 bp, synthetic construct
  source 1..20: mol_type = other DNA
cataccactgcagcaggagc

SEQ ID NO: 33777 - DNA, 20 bp, synthetic construct
  source 1..20: mol_type = other DNA
ccttttctaaggaaaatggc

SEQ ID NO: 33778 - DNA, 20 bp, synthetic construct
  source 1..20: mol_type = other DNA
gctgtactcgtctgggtcag

SEQ ID NO: 33779 - DNA, 20 bp, synthetic construct
  source 1..20: mol_type = other DNA
caccactacaggcctgtgga

SEQ ID NO: 33780 - DNA, 20 bp, synthetic construct
  source 1..20: mol_type = other DNA
gatgaggatgttagctccct

SEQ ID NO: 33781 - DNA, 20 bp, synthetic construct
  source 1..20: mol_type = other DNA
ctgacagcggtcgcagcgcc

SEQ ID NO: 33782 - DNA, 20 bp, synthetic construct
  source 1..20: mol_type = other DNA
agtcccaaaacctaggaaag

SEQ ID NO: 33783 - DNA, 20 bp, synthetic construct
  source 1..20: mol_type = other DNA
cggccagcgctgcgggcgac

SEQ ID NO: 33784 - DNA, 20 bp, synthetic construct
  source 1..20: mol_type = other DNA
actccagggctggcgtgcct

SEQ ID NO: 33785 - DNA, 20 bp, synthetic construct
  source 1..20: mol_type = other DNA
ggagaaccagatgcatatag

SEQ ID NO: 33786 - DNA, 20 bp, synthetic construct
  source 1..20: mol_type = other DNA
gtcaccagcttcacagagcc

SEQ ID NO: 33787 - DNA, 20 bp, synthetic construct
  source 1..20: mol_type = other DNA
gtgccagcgagtccatctcc

SEQ ID NO: 33788 - DNA, 20 bp, synthetic construct
  source 1..20: mol_type = other DNA
tcagcgtcctcctcctgagt

SEQ ID NO: 33789 - DNA, 20 bp, synthetic construct
  source 1..20: mol_type = other DNA
cgggacgagctgctcttgcg

SEQ ID NO: 33790 - DNA, 20 bp, synthetic construct
  source 1..20: mol_type = other DNA
accgcaaagtgcacaacctg

SEQ ID NO: 33791 - DNA, 20 bp, synthetic construct
  source 1..20: mol_type = other DNA
tccaaagctccaaacatctg

SEQ ID NO: 33792 - DNA, 20 bp, synthetic construct
  source 1..20: mol_type = other DNA
agaagtcgtcgccggcctgg

SEQ ID NO: 33793 - DNA, 20 bp, synthetic construct
  source 1..20: mol_type = other DNA
ccaggtacttcctccagccc

SEQ ID NO: 33794 - DNA, 20 bp, synthetic construct
  source 1..20: mol_type = other DNA
tgagtcttcagtacctgggg

SEQ ID NO: 33795 - DNA, 20 bp, synthetic construct
  source 1..20: mol_type = other DNA
gttcattgtggccttgccga

SEQ ID NO: 33796 - DNA, 20 bp, synthetic construct
  source 1..20: mol_type = other DNA
cgaccctggaggaggccgtg

SEQ ID NO: 33797 - DNA, 20 bp, synthetic construct
  source 1..20: mol_type = other DNA
tccatgaactgcagccacgg

SEQ ID NO: 33798 - DNA, 20 bp, synthetic construct
  source 1..20: mol_type = other DNA
cgcgaggtaagtgcccaggg

SEQ ID NO: 33799 - DNA, 20 bp, synthetic construct
  source 1..20: mol_type = other DNA
tgtcatcttcacttagccat

SEQ ID NO: 33800 - DNA, 20 bp, synthetic construct
  source 1..20: mol_type = other DNA
tcgtgtagggttcaaccgca

SEQ ID NO: 33801 - DNA, 20 bp, synthetic construct
  source 1..20: mol_type = other DNA
ttccccccaaggtaaggccc

SEQ ID NO: 33802 - DNA, 20 bp, synthetic construct
  source 1..20: mol_type = other DNA
cctgcaacaaatgaaaaaga

SEQ ID NO: 33803 - DNA, 20 bp, synthetic construct
  source 1..20: mol_type = other DNA
ggcggcgcgcgcagcagcag

SEQ ID NO: 33804 - DNA, 20 bp, synthetic construct
  source 1..20: mol_type = other DNA
gaccttgggaagaagaagcc

SEQ ID NO: 33805 - DNA, 20 bp, synthetic construct
  source 1..20: mol_type = other DNA
ggcactgaagatggtgaaga

SEQ ID NO: 33806 - DNA, 20 bp, synthetic construct
  source 1..20: mol_type = other DNA
caggagagtctcagcaaggt

SEQ ID NO: 33807 - DNA, 20 bp, synthetic construct
  source 1..20: mol_type = other DNA
agctcgcaggcctactccca

SEQ ID NO: 33808 - DNA, 20 bp, synthetic construct
  source 1..20: mol_type = other DNA
cctaggtattttcaggcagg

SEQ ID NO: 33809 - DNA, 20 bp, synthetic construct
  source 1..20: mol_type = other DNA
gtcagcaatacaggtaccac

SEQ ID NO: 33810 - DNA, 20 bp, synthetic construct
  source 1..20: mol_type = other DNA
ccagcttacgctccagcccc

SEQ ID NO: 33811 - DNA, 20 bp, synthetic construct
  source 1..20: mol_type = other DNA
gctgcagggaatgggagaga

SEQ ID NO: 33812 - DNA, 20 bp, synthetic construct
  source 1..20: mol_type = other DNA
agactacagtaactttgacc

SEQ ID NO: 33813 - DNA, 20 bp, synthetic construct
  source 1..20: mol_type = other DNA
tttcagccccacccctgcag

SEQ ID NO: 33814 - DNA, 20 bp, synthetic construct
  source 1..20: mol_type = other DNA
cctcacgggccaccaggcgc

SEQ ID NO: 33815 - DNA, 20 bp, synthetic construct
  source 1..20: mol_type = other DNA
gtcctggaccggcagggctg

SEQ ID NO: 33816 - DNA, 20 bp, synthetic construct
  source 1..20: mol_type = other DNA
gctctggaacatccgcatcg

SEQ ID NO: 33817 - DNA, 20 bp, synthetic construct
  source 1..20: mol_type = other DNA
tgggacaccctactggtgag

SEQ ID NO: 33818 - DNA, 20 bp, synthetic construct
  source 1..20: mol_type = other DNA
tgccgctctcctcgaagggc

SEQ ID NO: 33819 - DNA, 20 bp, synthetic construct
  source 1..20: mol_type = other DNA
ggctccccgtccacctgcac

SEQ ID NO: 33820 - DNA, 20 bp, synthetic construct
  source 1..20: mol_type = other DNA
agccaactacgtccagaagc

SEQ ID NO: 33821 - DNA, 20 bp, synthetic construct
  source 1..20: mol_type = other DNA
tcagggaaagaaagtggtgc

SEQ ID NO: 33822 - DNA, 20 bp, synthetic construct
  source 1..20: mol_type = other DNA
taccagagtaatggtccacc

SEQ ID NO: 33823 - DNA, 20 bp, synthetic construct
  source 1..20: mol_type = other DNA
attccagttctaaggggagc

SEQ ID NO: 33824 - DNA, 20 bp, synthetic construct
  source 1..20: mol_type = other DNA
ggtgccgccggactcgggtt

SEQ ID NO: 33825 - DNA, 20 bp, synthetic construct
  source 1..20: mol_type = other DNA
agtccagctgccaggtgcag

SEQ ID NO: 33826 - DNA, 20 bp, synthetic construct
  source 1..20: mol_type = other DNA
ggagctgagggcaggaggca

SEQ ID NO: 33827 - DNA, 20 bp, synthetic construct
  source 1..20: mol_type = other DNA
ggacagaaatgcttgacttc

SEQ ID NO: 33828 - DNA, 20 bp, synthetic construct
  source 1..20: mol_type = other DNA
gcaggatctcctagggggag

SEQ ID NO: 33829 - DNA, 20 bp, synthetic construct
  source 1..20: mol_type = other DNA
ctgtagctcggccagttcga

SEQ ID NO: 33830 - DNA, 20 bp, synthetic construct
  source 1..20: mol_type = other DNA
agatccggagtacagtggac

SEQ ID NO: 33831 - DNA, 20 bp, synthetic construct
  source 1..20: mol_type = other DNA
tgagcggcttctgtacccgc

SEQ ID NO: 33832 - DNA, 20 bp, synthetic construct
  source 1..20: mol_type = other DNA
gggcctggatgcctacgacc

SEQ ID NO: 33833 - DNA, 20 bp, synthetic construct
  source 1..20: mol_type = other DNA
cagtaaggatctgggaggag

SEQ ID NO: 33834 - DNA, 20 bp, synthetic construct
  source 1..20: mol_type = other DNA
cgggactgaagcccagggtg

SEQ ID NO: 33835 - DNA, 20 bp, synthetic construct
  source 1..20: mol_type = other DNA
ccaggcctttgaagacatgc

SEQ ID NO: 33836 - DNA, 20 bp, synthetic construct
  source 1..20: mol_type = other DNA
cgcgtgctcgaaggtggtga

SEQ ID NO: 33837 - DNA, 20 bp, synthetic construct
  source 1..20: mol_type = other DNA
ccttgttagcctccaagggt

SEQ ID NO: 33838 - DNA, 20 bp, synthetic construct
  source 1..20: mol_type = other DNA
gccaagcagacggaaagtga

SEQ ID NO: 33839 - DNA, 20 bp, synthetic construct
  source 1..20: mol_type = other DNA
ttgcagtcaggacgcacaca

SEQ ID NO: 33840 - DNA, 20 bp, synthetic construct
  source 1..20: mol_type = other DNA
actgtataggcagagcagga

SEQ ID NO: 33841 - DNA, 20 bp, synthetic construct
  source 1..20: mol_type = other DNA
gtactcactactgtcataga

SEQ ID NO: 33842 - DNA, 20 bp, synthetic construct
  source 1..20: mol_type = other DNA
gaatgagccactcggccagc

SEQ ID NO: 33843 - DNA, 20 bp, synthetic construct
  source 1..20: mol_type = other DNA
gggctggtaaggctgagtgg

SEQ ID NO: 33844 - DNA, 20 bp, synthetic construct
  source 1..20: mol_type = other DNA
gtggatctgaaagacgaggt

SEQ ID NO: 33845 - DNA, 20 bp, synthetic construct
  source 1..20: mol_type = other DNA
gggcctgtccctggtggagc

SEQ ID NO: 33846 - DNA, 20 bp, synthetic construct
  source 1..20: mol_type = other DNA
tttagcagcaaagttttcaa

SEQ ID NO: 33847 - DNA, 20 bp, synthetic construct
  source 1..20: mol_type = other DNA
tctagatcacaagagacccc

SEQ ID NO: 33848 - DNA, 20 bp, synthetic construct
  source 1..20: mol_type = other DNA
gtctctacacagtactgaaa

SEQ ID NO: 33849 - DNA, 20 bp, synthetic construct
  source 1..20: mol_type = other DNA
gaggatttccttctgaaggg

SEQ ID NO: 33850 - DNA, 20 bp, synthetic construct
  source 1..20: mol_type = other DNA
aagcggctgttgaatttctc

SEQ ID NO: 33851 - DNA, 20 bp, synthetic construct
  source 1..20: mol_type = other DNA
gaacataattcacatttgta

SEQ ID NO: 33852 - DNA, 20 bp, synthetic construct
  source 1..20: mol_type = other DNA
cagagccgcaactacctggg

SEQ ID NO: 33853 - DNA, 20 bp, synthetic construct
  source 1..20: mol_type = other DNA
aagaggtgaggggctgcagt

SEQ ID NO: 33854 - DNA, 20 bp, synthetic construct
  source 1..20: mol_type = other DNA
agatggtggtcttgtggcgc

SEQ ID NO: 33855 - DNA, 20 bp, synthetic construct
  source 1..20: mol_type = other DNA
tcatgtagtacagccagtac

SEQ ID NO: 33856 - DNA, 20 bp, synthetic construct
  source 1..20: mol_type = other DNA
tctgcaactacgcctgccgc

SEQ ID NO: 33857 - DNA, 20 bp, synthetic construct
  source 1..20: mol_type = other DNA
tcacatgtgtgggtgcgagg

SEQ ID NO: 33858 - DNA, 20 bp, synthetic construct
  source 1..20: mol_type = other DNA
ggagctcctcaggcttccag

SEQ ID NO: 33859 - DNA, 20 bp, synthetic construct
  source 1..20: mol_type = other DNA
gcacaatgttctagtagcgg

SEQ ID NO: 33860 - DNA, 20 bp, synthetic construct
  source 1..20: mol_type = other DNA
ctaggagaggagagagcagg

SEQ ID NO: 33861 - DNA, 20 bp, synthetic construct
  source 1..20: mol_type = other DNA
tcacagggtcctccaggtag

SEQ ID NO: 33862 - DNA, 20 bp, synthetic construct
  source 1..20: mol_type = other DNA
ggcccggccagcgctggggg

SEQ ID NO: 33863 - DNA, 20 bp, synthetic construct
  source 1..20: mol_type = other DNA
tctacctgggtcacctgcac

SEQ ID NO: 33864 - DNA, 20 bp, synthetic construct
  source 1..20: mol_type = other DNA
ccctctacagcctcctgctc

SEQ ID NO: 33865 - DNA, 20 bp, synthetic construct
  source 1..20: mol_type = other DNA
tcctcttccggggaatattc

SEQ ID NO: 33866 - DNA, 20 bp, synthetic construct
  source 1..20: mol_type = other DNA
tcccgacatgtatgagcggg

SEQ ID NO: 33867 - DNA, 20 bp, synthetic construct
  source 1..20: mol_type = other DNA
gggatgctgcagaggcccgg

SEQ ID NO: 33868 - DNA, 20 bp, synthetic construct
  source 1..20: mol_type = other DNA
gctcattctcggttgacatt

SEQ ID NO: 33869 - DNA, 20 bp, synthetic construct
  source 1..20: mol_type = other DNA
tgccgatcacgtaaatgtca

SEQ ID NO: 33870 - DNA, 20 bp, synthetic construct
  source 1..20: mol_type = other DNA
cctatgcagagacacaggga

SEQ ID NO: 33871 - DNA, 20 bp, synthetic construct
  source 1..20: mol_type = other DNA
caagagcggcggctccgagg

SEQ ID NO: 33872 - DNA, 20 bp, synthetic construct
  source 1..20: mol_type = other DNA
tcggcctagcagtgctttgg

SEQ ID NO: 33873 - DNA, 20 bp, synthetic construct
  source 1..20: mol_type = other DNA
gatcatttacagctgtctga

SEQ ID NO: 33874 - DNA, 20 bp, synthetic construct
  source 1..20: mol_type = other DNA
cttccgcttccggcacttgg

SEQ ID NO: 33875 - DNA, 20 bp, synthetic construct
  source 1..20: mol_type = other DNA
ctcacattcagttcaccagc

SEQ ID NO: 33876 - DNA, 20 bp, synthetic construct
  source 1..20: mol_type = other DNA
caggtcttcgctctcctgta

SEQ ID NO: 33877 - DNA, 20 bp, synthetic construct
  source 1..20: mol_type = other DNA
cttactgttctcgggatggg

SEQ ID NO: 33878 - DNA, 20 bp, synthetic construct
  source 1..20: mol_type = other DNA
ttcagggcccagccgcctgt

SEQ ID NO: 33879 - DNA, 20 bp, synthetic construct
  source 1..20: mol_type = other DNA
tgcaactctccgtacatcgt

SEQ ID NO: 33880 - DNA, 20 bp, synthetic construct
  source 1..20: mol_type = other DNA
tgagaacctcatgcagctgg

SEQ ID NO: 33881 - DNA, 20 bp, synthetic construct
  source 1..20: mol_type = other DNA
gctatgagaatacaggtggg

SEQ ID NO: 33882 - DNA, 20 bp, synthetic construct
  source 1..20: mol_type = other DNA
cctgttcaagaacctggtga

SEQ ID NO: 33883 - DNA, 20 bp, synthetic construct
  source 1..20: mol_type = other DNA
ccctctcaggtaggcaggcg

SEQ ID NO: 33884 - DNA, 20 bp, synthetic construct
  source 1..20: mol_type = other DNA
gtccacgacgtccatccctg

SEQ ID NO: 33885 - DNA, 20 bp, synthetic construct
  source 1..20: mol_type = other DNA
cgtgccactgcactccagcc

SEQ ID NO: 33886 - DNA, 20 bp, synthetic construct
  source 1..20: mol_type = other DNA
ttattgccaagcacttaaag

SEQ ID NO: 33887 - DNA, 20 bp, synthetic construct
  source 1..20: mol_type = other DNA
gtgttctcgtgcctctccca

SEQ ID NO: 33888 - DNA, 20 bp, synthetic construct
  source 1..20: mol_type = other DNA
gagagcagccaggggaaggg

SEQ ID NO: 33889 - DNA, 20 bp, synthetic construct
  source 1..20: mol_type = other DNA
actgcggtagaactcatcct

SEQ ID NO: 33890 - DNA, 20 bp, synthetic construct
  source 1..20: mol_type = other DNA
tatccaagaattgtgagtat

SEQ ID NO: 33891 - DNA, 20 bp, synthetic construct
  source 1..20: mol_type = other DNA
ctgttactcggggtaggtgg

SEQ ID NO: 33892 - DNA, 20 bp, synthetic construct
  source 1..20: mol_type = other DNA
ccggggacttctgctacgtt

SEQ ID NO: 33893 - DNA, 20 bp, synthetic construct
  source 1..20: mol_type = other DNA
tctgtagagcatatatcaga

SEQ ID NO: 33894 - DNA, 20 bp, synthetic construct
  source 1..20: mol_type = other DNA
tgatcttgatctggaaggga

SEQ ID NO: 33895 - DNA, 20 bp, synthetic construct
  source 1..20: mol_type = other DNA
caactggggagcagcagggc

SEQ ID NO: 33896 - DNA, 20 bp, synthetic construct
  source 1..20: mol_type = other DNA
ctctaccgtcttctgagata

SEQ ID NO: 33897 - DNA, 20 bp, synthetic construct
  source 1..20: mol_type = other DNA
cgaggagaagtcgacatgcc

SEQ ID NO: 33898 - DNA, 20 bp, synthetic construct
  source 1..20: mol_type = other DNA
agtagcatgtcagccaggat

SEQ ID NO: 33899 - DNA, 20 bp, synthetic construct
  source 1..20: mol_type = other DNA
atcaggaggtgattcagact

SEQ ID NO: 33900 - DNA, 20 bp, synthetic construct
  source 1..20: mol_type = other DNA
cgtgagccatttccggattg

SEQ ID NO: 33901 - DNA, 20 bp, synthetic construct
  source 1..20: mol_type = other DNA
ttcacctgggcaagacaagg

SEQ ID NO: 33902 - DNA, 20 bp, synthetic construct
  source 1..20: mol_type = other DNA
tggtaccaattaaaggtact

SEQ ID NO: 33903 - DNA, 20 bp, synthetic construct
  source 1..20: mol_type = other DNA
ggataattctaatttataca

SEQ ID NO: 33904 - DNA, 20 bp, synthetic construct
  source 1..20: mol_type = other DNA
ataggtatggatatccaggg

SEQ ID NO: 33905 - DNA, 20 bp, synthetic construct
  source 1..20: mol_type = other DNA
aagaggaagattgctgatga

SEQ ID NO: 33906 - DNA, 20 bp, synthetic construct
  source 1..20: mol_type = other DNA
gtgcctgcggccaggcctgc

SEQ ID NO: 33907 - DNA, 20 bp, synthetic construct
  source 1..20: mol_type = other DNA
attctccctaccagctcacc

SEQ ID NO: 33908 - DNA, 20 bp, synthetic construct
  source 1..20: mol_type = other DNA
cgagatcaagttgtacgtta

SEQ ID NO: 33909 - DNA, 20 bp, synthetic construct
  source 1..20: mol_type = other DNA
acgaatgaacttgctgtgta

SEQ ID NO: 33910 - DNA, 20 bp, synthetic construct
  source 1..20: mol_type = other DNA
ggctgctccttcctccagga

SEQ ID NO: 33911 - DNA, 20 bp, synthetic construct
  source 1..20: mol_type = other DNA
tggaatccctgagggtagac

SEQ ID NO: 33912 - DNA, 20 bp, synthetic construct
  source 1..20: mol_type = other DNA
ggtcaacggggcaggcatgg

SEQ ID NO: 33913 - DNA, 20 bp, synthetic construct
  source 1..20: mol_type = other DNA
gagcgcgtatgcccgggaga

SEQ ID NO: 33914 - DNA, 20 bp, synthetic construct
  source 1..20: mol_type = other DNA
ggtgcgccagggggctcagt

SEQ ID NO: 33915 - DNA, 20 bp, synthetic construct
  source 1..20: mol_type = other DNA
gaccatgactatgagcgaga

SEQ ID NO: 33916 - DNA, 20 bp, synthetic construct
  source 1..20: mol_type = other DNA
tagactttatgagctaaaca

SEQ ID NO: 33917 - DNA, 20 bp, synthetic construct
  source 1..20: mol_type = other DNA
caagtactgtatcagaacaa

SEQ ID NO: 33918 - DNA, 20 bp, synthetic construct
  source 1..20: mol_type = other DNA
gaaacagttgccgtcaggcc

SEQ ID NO: 33919 - DNA, 20 bp, synthetic construct
  source 1..20: mol_type = other DNA
agaggccgcggcgccggcgc

SEQ ID NO: 33920 - DNA, 20 bp, synthetic construct
  source 1..20: mol_type = other DNA
caaggtccaatcacatgtgt

SEQ ID NO: 33921 - DNA, 20 bp, synthetic construct
  source 1..20: mol_type = other DNA
tatttggatacagatacttc

SEQ ID NO: 33922 - DNA, 20 bp, synthetic construct
  source 1..20: mol_type = other DNA
tgccgtaggttctcctgcaa

SEQ ID NO: 33923 - DNA, 20 bp, synthetic construct
  source 1..20: mol_type = other DNA
cagaaattcattcacaaacc

SEQ ID NO: 33924 - DNA, 20 bp, synthetic construct
  source 1..20: mol_type = other DNA
tttctactggagagaacagc

SEQ ID NO: 33925 - DNA, 20 bp, synthetic construct
  source 1..20: mol_type = other DNA
ccatgtcttctccctgtccc

SEQ ID NO: 33926 - DNA, 20 bp, synthetic construct
  source 1..20: mol_type = other DNA
ctgagggcaggaggcatggc

SEQ ID NO: 33927 - DNA, 20 bp, synthetic construct
  source 1..20: mol_type = other DNA
aggtgaggaggagggaggtg

SEQ ID NO: 33928 - DNA, 20 bp, synthetic construct
  source 1..20: mol_type = other DNA
ggcccggctccgccgccggt

SEQ ID NO: 33929 - DNA, 20 bp, synthetic construct
  source 1..20: mol_type = other DNA
ggggctggaggaggaagaag

SEQ ID NO: 33930 - DNA, 20 bp, synthetic construct
  source 1..20: mol_type = other DNA
tgcacctctggatggtccag

SEQ ID NO: 33931 - DNA, 20 bp, synthetic construct
  source 1..20: mol_type = other DNA
tcaggctgtattcagctccg

SEQ ID NO: 33932 - DNA, 20 bp, synthetic construct
  source 1..20: mol_type = other DNA
gctgcagaccatcgggaagg

SEQ ID NO: 33933 - DNA, 20 bp, synthetic construct
  source 1..20: mol_type = other DNA
tcagcacctatgccaagtct

SEQ ID NO: 33934 - DNA, 20 bp, synthetic construct
  source 1..20: mol_type = other DNA
ctccatcatgaagtgtgacg

SEQ ID NO: 33935 - DNA, 20 bp, synthetic construct
  source 1..20: mol_type = other DNA
gtggaggagaggggctgctg

SEQ ID NO: 33936 - DNA, 20 bp, synthetic construct
  source 1..20: mol_type = other DNA
tcactttccagaggcagctg

SEQ ID NO: 33937 - DNA, 20 bp, synthetic construct
  source 1..20: mol_type = other DNA
gaccagccttcagaaggagg

SEQ ID NO: 33938 - DNA, 20 bp, synthetic construct
  source 1..20: mol_type = other DNA
gttctcggccccgggaggaa

SEQ ID NO: 33939 - DNA, 20 bp, synthetic construct
  source 1..20: mol_type = other DNA
tggccggcatgaaccacctg

SEQ ID NO: 33940 - DNA, 20 bp, synthetic construct
  source 1..20: mol_type = other DNA
caggtgagccggggaaggag

SEQ ID NO: 33941 - DNA, 20 bp, synthetic construct
  source 1..20: mol_type = other DNA
cctaaaaccatggaggaggg

SEQ ID NO: 33942 - DNA, 20 bp, synthetic construct
  source 1..20: mol_type = other DNA
ctcagctccctctagtcccg

SEQ ID NO: 33943 - DNA, 20 bp, synthetic construct
  source 1..20: mol_type = other DNA
cctggttgcgcagggcgatg

SEQ ID NO: 33944 - DNA, 20 bp, synthetic construct
  source 1..20: mol_type = other DNA
gcagcttcctactagtggat

SEQ ID NO: 33945 - DNA, 20 bp, synthetic construct
  source 1..20: mol_type = other DNA
tccaggagctgggatggtgg

SEQ ID NO: 33946 - DNA, 20 bp, synthetic construct
  source 1..20: mol_type = other DNA
gccgatcacgtaaatgtcat

SEQ ID NO: 33947 - DNA, 20 bp, synthetic construct
  source 1..20: mol_type = other DNA
cactaacctttgggttttgg

SEQ ID NO: 33948 - DNA, 20 bp, synthetic construct
  source 1..20: mol_type = other DNA
gccaatgtttcatatcagac

SEQ ID NO: 33949 - DNA, 20 bp, synthetic construct
  source 1..20: mol_type = other DNA
actttggccacgtggacgct

SEQ ID NO: 33950 - DNA, 20 bp, synthetic construct
  source 1..20: mol_type = other DNA
gcaagtacttacgcctcctt

SEQ ID NO: 33951 - DNA, 20 bp, synthetic construct
  source 1..20: mol_type = other DNA
ttccccgtcgccggagcccg

SEQ ID NO: 33952 - DNA, 20 bp, synthetic construct
  source 1..20: mol_type = other DNA
ctgctacagcggctgggtgg

SEQ ID NO: 33953 - DNA, 20 bp, synthetic construct
  source 1..20: mol_type = other DNA
acttactgattaggagttcc

SEQ ID NO: 33954 - DNA, 20 bp, synthetic construct
  source 1..20: mol_type = other DNA
gtaatttacctgaatttgac

SEQ ID NO: 33955 - DNA, 20 bp, synthetic construct
  source 1..20: mol_type = other DNA
ccagtgtctgaggtgaccgt

SEQ ID NO: 33956 - DNA, 20 bp, synthetic construct
  source 1..20: mol_type = other DNA
aattcttatggaatatgaag

SEQ ID NO: 33957 - DNA, 20 bp, synthetic construct
  source 1..20: mol_type = other DNA
ggggccggagctccaagcag

SEQ ID NO: 33958 - DNA, 20 bp, synthetic construct
  source 1..20: mol_type = other DNA
cttgtcctaaatacatcaag

SEQ ID NO: 33959 - DNA, 20 bp, synthetic construct
  source 1..20: mol_type = other DNA
aacatgagaaaataccgaat

SEQ ID NO: 33960 - DNA, 20 bp, synthetic construct
  source 1..20: mol_type = other DNA
catacatgtcgggatgctgc

SEQ ID NO: 33961 - DNA, 20 bp, synthetic construct
  source 1..20: mol_type = other DNA
catcgcgcgcctggaggaca

SEQ ID NO: 33962 - DNA, 20 bp, synthetic construct
  source 1..20: mol_type = other DNA
gggtccacgacgtccatccc

SEQ ID NO: 33963 - DNA, 20 bp, synthetic construct
  source 1..20: mol_type = other DNA
taagcaatagcagcagcagt

SEQ ID NO: 33964 - DNA, 20 bp, synthetic construct
  source 1..20: mol_type = other DNA
tggcccgaagaccccggcac

SEQ ID NO: 33965 - DNA, 20 bp, synthetic construct
  source 1..20: mol_type = other DNA
ggaaccgcagaccgtgccgg

SEQ ID NO: 33966 - DNA, 20 bp, synthetic construct
  source 1..20: mol_type = other DNA
caatgactatggccgggccg

SEQ ID NO: 33967 - DNA, 20 bp, synthetic construct
  source 1..20: mol_type = other DNA
cctcatccagcaacgccagg

SEQ ID NO: 33968 - DNA, 20 bp, synthetic construct
  source 1..20: mol_type = other DNA
acgagggtcctgggagcatg

SEQ ID NO: 33969 - DNA, 20 bp, synthetic construct
  source 1..20: mol_type = other DNA
ccagcgtcacggtggcgtag

SEQ ID NO: 33970 - DNA, 20 bp, synthetic construct
  source 1..20: mol_type = other DNA
tgcggcagttgacagcacga

SEQ ID NO: 33971 - DNA, 20 bp, synthetic construct
  source 1..20: mol_type = other DNA
ggggtcttcgggccatggcg

SEQ ID NO: 33972 - DNA, 20 bp, synthetic construct
  source 1..20: mol_type = other DNA
gctggttggtcggagagggg

SEQ ID NO: 33973 - DNA, 20 bp, synthetic construct
  source 1..20: mol_type = other DNA
atgttggagggcttcacatc

SEQ ID NO: 33974 - DNA, 20 bp, synthetic construct
  source 1..20: mol_type = other DNA
tccttacttgcagcactgac

SEQ ID NO: 33975 - DNA, 20 bp, synthetic construct
  source 1..20: mol_type = other DNA
agcagcagcagcagcagcaa

SEQ ID NO: 33976 - DNA, 20 bp, synthetic construct
  source 1..20: mol_type = other DNA
tcactagcttcttgtaggca

SEQ ID NO: 33977 - DNA, 20 bp, synthetic construct
  source 1..20: mol_type = other DNA
ctgattcctctcatcaagcc

SEQ ID NO: 33978 - DNA, 20 bp, synthetic construct
  source 1..20: mol_type = other DNA
gtggccacgttggaggagag

SEQ ID NO: 33979 - DNA, 20 bp, synthetic construct
  source 1..20: mol_type = other DNA
ccagaaccagtgaggagggc

SEQ ID NO: 33980 - DNA, 20 bp, synthetic construct
  source 1..20: mol_type = other DNA
aacatcctcatcaatgatgc

SEQ ID NO: 33981 - DNA, 20 bp, synthetic construct
  source 1..20: mol_type = other DNA
ttggctctaggacatcccta

SEQ ID NO: 33982 - DNA, 20 bp, synthetic construct
  source 1..20: mol_type = other DNA
gataccactagatgtgaaga

SEQ ID NO: 33983 - DNA, 20 bp, synthetic construct
  source 1..20: mol_type = other DNA
gaactcaccgtgtttacatt

SEQ ID NO: 33984 - DNA, 20 bp, synthetic construct
  source 1..20: mol_type = other DNA
aggaggtaggggcggctggt

SEQ ID NO: 33985 - DNA, 20 bp, synthetic construct
  source 1..20: mol_type = other DNA
ctgtattctcatagcatcct

SEQ ID NO: 33986 - DNA, 20 bp, synthetic construct
  source 1..20: mol_type = other DNA
acaagtcttcgacctgagcc

SEQ ID NO: 33987 - DNA, 20 bp, synthetic construct
  source 1..20: mol_type = other DNA
gagcaggtgagcagtgcccg

SEQ ID NO: 33988 - DNA, 20 bp, synthetic construct
  source 1..20: mol_type = other DNA
cagccaggagctcgctgcgg

SEQ ID NO: 33989 - DNA, 20 bp, synthetic construct
  source 1..20: mol_type = other DNA
agcattcctgggcaggccag

SEQ ID NO: 33990 - DNA, 20 bp, synthetic construct
  source 1..20: mol_type = other DNA
ttgactctgccaccatcccc

SEQ ID NO: 33991 - DNA, 20 bp, synthetic construct
  source 1..20: mol_type = other DNA
caacatgccagggaaggcct

SEQ ID NO: 33992 - DNA, 20 bp, synthetic construct
  source 1..20: mol_type = other DNA
tcacggcatgaggctgagtt

SEQ ID NO: 33993 - DNA, 20 bp, synthetic construct
  source 1..20: mol_type = other DNA
ccaacctctggggtgatacc

SEQ ID NO: 33994 - DNA, 20 bp, synthetic construct
  source 1..20: mol_type = other DNA
tacaccaagcagaaagcgac

SEQ ID NO: 33995 - DNA, 20 bp, synthetic construct
  source 1..20: mol_type = other DNA
tttccaggacaggcaaggac

SEQ ID NO: 33996 - DNA, 20 bp, synthetic construct
  source 1..20: mol_type = other DNA
tcacgttgtcagtacagatg

SEQ ID NO: 33997 - DNA, 20 bp, synthetic construct
  source 1..20: mol_type = other DNA
catggggtctctgcaaccgc

SEQ ID NO: 33998 - DNA, 20 bp, synthetic construct
  source 1..20: mol_type = other DNA
caaagtcagctggaagcaga

SEQ ID NO: 33999 - DNA, 20 bp, synthetic construct
  source 1..20: mol_type = other DNA
ttagggaacaagggagccgt

SEQ ID NO: 34000 - DNA, 20 bp, synthetic construct
  source 1..20: mol_type = other DNA
gttcatcgtcattctggggc

SEQ ID NO: 34001 - DNA, 20 bp, synthetic construct
  source 1..20: mol_type = other DNA
gccatggtcccagccttgga

SEQ ID NO: 34002 - DNA, 20 bp, synthetic construct
  source 1..20: mol_type = other DNA
ccagctcacgccgcaccaca

SEQ ID NO: 34003 - DNA, 20 bp, synthetic construct
  source 1..20: mol_type = other DNA
gacagcggcccgggcggcgg

SEQ ID NO: 34004 - DNA, 20 bp, synthetic construct
  source 1..20: mol_type = other DNA
aagctgtctgtgggagacag

SEQ ID NO: 34005 - DNA, 20 bp, synthetic construct
  source 1..20: mol_type = other DNA
gcaggcggcggccagggtcg

SEQ ID NO: 34006 - DNA, 20 bp, synthetic construct
  source 1..20: mol_type = other DNA
ggaggaggaggaagtagagg

SEQ ID NO: 34007 - DNA, 20 bp, synthetic construct
  source 1..20: mol_type = other DNA
ttcattcgtgtgcagaatga

SEQ ID NO: 34008 - DNA, 20 bp, synthetic construct
  source 1..20: mol_type = other DNA
tctgtaagtagaattgtgaa

SEQ ID NO: 34009 - DNA, 20 bp, synthetic construct
  source 1..20: mol_type = other DNA
ttccagagcaccctgtgtgt

SEQ ID NO: 34010 - DNA, 20 bp, synthetic construct
  source 1..20: mol_type = other DNA
cagacacatagaggcgatag

SEQ ID NO: 34011 - DNA, 20 bp, synthetic construct
  source 1..20: mol_type = other DNA
cctccacatagtccctgaag

SEQ ID NO: 34012 - DNA, 20 bp, synthetic construct
  source 1..20: mol_type = other DNA
acacaggttcatgatcaaga

SEQ ID NO: 34013 - DNA, 20 bp, synthetic construct
  source 1..20: mol_type = other DNA
ctgcacggtgaacctggacc

SEQ ID NO: 34014 - DNA, 20 bp, synthetic construct
  source 1..20: mol_type = other DNA
aaagaacttacggcaaactc

SEQ ID NO: 34015 - DNA, 20 bp, synthetic construct
  source 1..20: mol_type = other DNA
agccaggatgagttacagca

SEQ ID NO: 34016 - DNA, 20 bp, synthetic construct
  source 1..20: mol_type = other DNA
gaagaatcctcaggctgtgc

SEQ ID NO: 34017 - DNA, 20 bp, synthetic construct
  source 1..20: mol_type = other DNA
ggcagccttgacataaatga

SEQ ID NO: 34018 - DNA, 20 bp, synthetic construct
  source 1..20: mol_type = other DNA
atgtactggatctgagtgag

SEQ ID NO: 34019 - DNA, 20 bp, synthetic construct
  source 1..20: mol_type = other DNA
ggttcacctggagctggatg

SEQ ID NO: 34020 - DNA, 20 bp, synthetic construct
  source 1..20: mol_type = other DNA
acgagaccatgaagctggcg

SEQ ID NO: 34021 - DNA, 20 bp, synthetic construct
  source 1..20: mol_type = other DNA
tttccagatcctgacagctg

SEQ ID NO: 34022 - DNA, 20 bp, synthetic construct
  source 1..20: mol_type = other DNA
gtaccttgccagtaggcggt

SEQ ID NO: 34023 - DNA, 20 bp, synthetic construct
  source 1..20: mol_type = other DNA
cttgagggagaagaccccag

SEQ ID NO: 34024 - DNA, 20 bp, synthetic construct
  source 1..20: mol_type = other DNA
tgttggtctataaccaatca

SEQ ID NO: 34025 - DNA, 20 bp, synthetic construct
  source 1..20: mol_type = other DNA
ggccggcctgaaagtgcacg

SEQ ID NO: 34026 - DNA, 20 bp, synthetic construct
  source 1..20: mol_type = other DNA
gtgacatggaatccatcatt

SEQ ID NO: 34027 - DNA, 20 bp, synthetic construct
  source 1..20: mol_type = other DNA
gacctcgccgctgcagaccc

SEQ ID NO: 34028 - DNA, 20 bp, synthetic construct
  source 1..20: mol_type = other DNA
ctgctgcaggacaggaagag

SEQ ID NO: 34029 - DNA, 20 bp, synthetic construct
  source 1..20: mol_type = other DNA
aggcctcccagggaccgtaa

SEQ ID NO: 34030 - DNA, 20 bp, synthetic construct
  source 1..20: mol_type = other DNA
gccactccttctcactcagg

SEQ ID NO: 34031 - DNA, 20 bp, synthetic construct
  source 1..20: mol_type = other DNA
tgtataccacgttcagccgc

SEQ ID NO: 34032 - DNA, 20 bp, synthetic construct
  source 1..20: mol_type = other DNA
tggaggaaaagtaagtatct

SEQ ID NO: 34033 - DNA, 20 bp, synthetic construct
  source 1..20: mol_type = other DNA
gcttcagcgactcagagatt

SEQ ID NO: 34034 - DNA, 20 bp, synthetic construct
  source 1..20: mol_type = other DNA
ctcctaccagttctccatgg

SEQ ID NO: 34035 - DNA, 20 bp, synthetic construct
  source 1..20: mol_type = other DNA
ttgttagcaaaaggttatcc

SEQ ID NO: 34036 - DNA, 20 bp, synthetic construct
  source 1..20: mol_type = other DNA
caaggcctggccctcagggg

SEQ ID NO: 34037 - DNA, 20 bp, synthetic construct
  source 1..20: mol_type = other DNA
gtcagcgtcctggacgtctg

SEQ ID NO: 34038 - DNA, 20 bp, synthetic construct
  source 1..20: mol_type = other DNA
gtttcaccaggaggagctgc

SEQ ID NO: 34039 - DNA, 20 bp, synthetic construct
  source 1..20: mol_type = other DNA
tcctgctctgggggtgtggg

SEQ ID NO: 34040 - DNA, 20 bp, synthetic construct
  source 1..20: mol_type = other DNA
gtttcacacatcttctccca

SEQ ID NO: 34041 - DNA, 20 bp, synthetic construct
  source 1..20: mol_type = other DNA
gtctgccgtcgccgccgccg

SEQ ID NO: 34042 - DNA, 20 bp, synthetic construct
  source 1..20: mol_type = other DNA
cgcttcagcgactcagagat

SEQ ID NO: 34043 - DNA, 20 bp, synthetic construct
  source 1..20: mol_type = other DNA
gtggaggatttgctgagggc

SEQ ID NO: 34044 - DNA, 20 bp, synthetic construct
  source 1..20: mol_type = other DNA
cacactggattcccaggttc

SEQ ID NO: 34045 - DNA, 20 bp, synthetic construct
  source 1..20: mol_type = other DNA
ttctccagggataggatgac

SEQ ID NO: 34046 - DNA, 20 bp, synthetic construct
  source 1..20: mol_type = other DNA
ggcgggtatgtggtgaggat

SEQ ID NO: 34047 - DNA, 20 bp, synthetic construct
  source 1..20: mol_type = other DNA
tccgtcaatttgcatgggaa

SEQ ID NO: 34048 - DNA, 20 bp, synthetic construct
  source 1..20: mol_type = other DNA
tgtccttccacgtcttatgc

SEQ ID NO: 34049 - DNA, 20 bp, synthetic construct
  source 1..20: mol_type = other DNA
cgtgccccagctttctctca

SEQ ID NO: 34050 - DNA, 20 bp, synthetic construct
  source 1..20: mol_type = other DNA
ttcgtgaaccccaagagtgg

SEQ ID NO: 34051 - DNA, 20 bp, synthetic construct
  source 1..20: mol_type = other DNA
ccgacttccccggccgcccg

SEQ ID NO: 34052 - DNA, 20 bp, synthetic construct
  source 1..20: mol_type = other DNA
gtgcgccccgtgcacgctca

SEQ ID NO: 34053 - DNA, 20 bp, synthetic construct
  source 1..20: mol_type = other DNA
tactggagcgcagtgaccgg

SEQ ID NO: 34054 - DNA, 20 bp, synthetic construct
  source 1..20: mol_type = other DNA
ggggccccccggtagcgccc

SEQ ID NO: 34055 - DNA, 20 bp, synthetic construct
  source 1..20: mol_type = other DNA
ggggttcacaaacaccagca

SEQ ID NO: 34056 - DNA, 20 bp, synthetic construct
  source 1..20: mol_type = other DNA
gtgtgtgagtatgcatctcc

SEQ ID NO: 34057 - DNA, 20 bp, synthetic construct
  source 1..20: mol_type = other DNA
tggagttgaaggtggtctcg

SEQ ID NO: 34058 - DNA, 20 bp, synthetic construct
  source 1..20: mol_type = other DNA
ccgttgagctggcgctcgat

SEQ ID NO: 34059 - DNA, 20 bp, synthetic construct
  source 1..20: mol_type = other DNA
aaccccctgcagagtggtgg

SEQ ID NO: 34060 - DNA, 20 bp, synthetic construct
  source 1..20: mol_type = other DNA
ttttggctttgtaccagttg

SEQ ID NO: 34061 - DNA, 20 bp, synthetic construct
  source 1..20: mol_type = other DNA
actgagaagtggcatgcatg

SEQ ID NO: 34062 - DNA, 20 bp, synthetic construct
  source 1..20: mol_type = other DNA
tccccaggaggaggccaggc

SEQ ID NO: 34063 - DNA, 20 bp, synthetic construct
  source 1..20: mol_type = other DNA
cacagctccgtcttgtactt

SEQ ID NO: 34064 - DNA, 20 bp, synthetic construct
  source 1..20: mol_type = other DNA
gcacacgtacctgtttgccc

SEQ ID NO: 34065 - DNA, 20 bp, synthetic construct
  source 1..20: mol_type = other DNA
gaagactcagaccaagttcc

SEQ ID NO: 34066 - DNA, 20 bp, synthetic construct
  source 1..20: mol_type = other DNA
gaaggtggccatccagaagg

SEQ ID NO: 34067 - DNA, 20 bp, synthetic construct
  source 1..20: mol_type = other DNA
gctggccaccttgtacctgc

SEQ ID NO: 34068 - DNA, 20 bp, synthetic construct
  source 1..20: mol_type = other DNA
gccctgcctggcagagagcc

SEQ ID NO: 34069 - DNA, 20 bp, synthetic construct
  source 1..20: mol_type = other DNA
actgcaggttgcagaaactc

SEQ ID NO: 34070 - DNA, 20 bp, synthetic construct
  source 1..20: mol_type = other DNA
gcccatcatcaagattgttc

SEQ ID NO: 34071 - DNA, 20 bp, synthetic construct
  source 1..20: mol_type = other DNA
gccatttctggcttatggtt

SEQ ID NO: 34072 - DNA, 20 bp, synthetic construct
  source 1..20: mol_type = other DNA
caggtgagcagacggcaggc

SEQ ID NO: 34073 - DNA, 20 bp, synthetic construct
  source 1..20: mol_type = other DNA
cttacagaagtcgttcctct

SEQ ID NO: 34074 - DNA, 20 bp, synthetic construct
  source 1..20: mol_type = other DNA
accactatgacctgctacag

SEQ ID NO: 34075 - DNA, 20 bp, synthetic construct
  source 1..20: mol_type = other DNA
actcacagaagaagatacac

SEQ ID NO: 34076 - DNA, 20 bp, synthetic construct
  source 1..20: mol_type = other DNA
ccagctccacatctgggcag

SEQ ID NO: 34077 - DNA, 20 bp, synthetic construct
  source 1..20: mol_type = other DNA
tcacattgcccattcacgat

SEQ ID NO: 34078 - DNA, 20 bp, synthetic construct
  source 1..20: mol_type = other DNA
gcactgcgttcaccaccagc

SEQ ID NO: 34079 - DNA, 20 bp, synthetic construct
  source 1..20: mol_type = other DNA
agtcgcctatggggagaagg

SEQ ID NO: 34080 - DNA, 20 bp, synthetic construct
  source 1..20: mol_type = other DNA
cttggcaatacattctgtac

SEQ ID NO: 34081 - DNA, 20 bp, synthetic construct
  source 1..20: mol_type = other DNA
ttcagcatgagtacaagaaa

SEQ ID NO: 34082 - DNA, 20 bp, synthetic construct
  source 1..20: mol_type = other DNA
taaataaacttaccacatgt

SEQ ID NO: 34083 - DNA, 20 bp, synthetic construct
  source 1..20: mol_type = other DNA
ggttcattgtggccttgccg

SEQ ID NO: 34084 - DNA, 20 bp, synthetic construct
  source 1..20: mol_type = other DNA
gaggacggcgggggacgggc

SEQ ID NO: 34085 - DNA, 20 bp, synthetic construct
  source 1..20: mol_type = other DNA
ggtcaagtcgtggtggcacc

SEQ ID NO: 34086 - DNA, 20 bp, synthetic construct
  source 1..20: mol_type = other DNA
gtgggaacagcacctgctgc

SEQ ID NO: 34087 - DNA, 20 bp, synthetic construct
  source 1..20: mol_type = other DNA
aacagaatggaacagatgac

SEQ ID NO: 34088 - DNA, 20 bp, synthetic construct
  source 1..20: mol_type = other DNA
acgacgcgtgggtggcaagc

SEQ ID NO: 34089 - DNA, 20 bp, synthetic construct
  source 1..20: mol_type = other DNA
taaaagattatccacctggg

SEQ ID NO: 34090 - DNA, 20 bp, synthetic construct
  source 1..20: mol_type = other DNA
tcaccggggcgtgggtgagc

SEQ ID NO: 34091 - DNA, 20 bp, synthetic construct
  source 1..20: mol_type = other DNA
aataacatattcagcaatgc

SEQ ID NO: 34092 - DNA, 20 bp, synthetic construct
  source 1..20: mol_type = other DNA
gcataatattttattacatt

SEQ ID NO: 34093 - DNA, 20 bp, synthetic construct
  source 1..20: mol_type = other DNA
caagaagccaaagaaattgg

SEQ ID NO: 34094 - DNA, 20 bp, synthetic construct
  source 1..20: mol_type = other DNA
tgtcgggcggcggcgggggg

SEQ ID NO: 34095 - DNA, 20 bp, synthetic construct
  source 1..20: mol_type = other DNA
tgccaaagccactatcctgt

SEQ ID NO: 34096 - DNA, 20 bp, synthetic construct
  source 1..20: mol_type = other DNA
cgctgcgccagcgccgcgtg

SEQ ID NO: 34097 - DNA, 20 bp, synthetic construct
  source 1..20: mol_type = other DNA
agcctgcaggaggaggtagg

SEQ ID NO: 34098 - DNA, 20 bp, synthetic construct
  source 1..20: mol_type = other DNA
ccaccagggcctggagtgag

SEQ ID NO: 34099 - DNA, 20 bp, synthetic construct
  source 1..20: mol_type = other DNA
gtgcgaggaggctgtgagtc

SEQ ID NO: 34100 - DNA, 20 bp, synthetic construct
  source 1..20: mol_type = other DNA
gctggagacacccacttggg

SEQ ID NO: 34101 - DNA, 20 bp, synthetic construct
  source 1..20: mol_type = other DNA
cataacgcccccgcctgcgg

SEQ ID NO: 34102 - DNA, 20 bp, synthetic construct
  source 1..20: mol_type = other DNA
ggggagttcggaggtgagct

SEQ ID NO: 34103 - DNA, 20 bp, synthetic construct
  source 1..20: mol_type = other DNA
caggaggctgatcgcggcga

SEQ ID NO: 34104 - DNA, 20 bp, synthetic construct
  source 1..20: mol_type = other DNA
ctcagagggcccaattggtg

SEQ ID NO: 34105 - DNA, 20 bp, synthetic construct
  source 1..20: mol_type = other DNA
ctagtcatatttcaagtgac

SEQ ID NO: 34106 - DNA, 20 bp, synthetic construct
  source 1..20: mol_type = other DNA
tccatcacactggaggcggg

SEQ ID NO: 34107 - DNA, 20 bp, synthetic construct
  source 1..20: mol_type = other DNA
ccaaggtccaatcacatgtg

SEQ ID NO: 34108 - DNA, 20 bp, synthetic construct
  source 1..20: mol_type = other DNA
tgaacagctaaaggaaacaa

SEQ ID NO: 34109 - DNA, 20 bp, synthetic construct
  source 1..20: mol_type = other DNA
tcacacgggagcaggctgag

SEQ ID NO: 34110 - DNA, 20 bp, synthetic construct
  source 1..20: mol_type = other DNA
ctgcaagtcctccttctgga

SEQ ID NO: 34111 - DNA, 20 bp, synthetic construct
  source 1..20: mol_type = other DNA
atgacttccatgccttccac

SEQ ID NO: 34112 - DNA, 20 bp, synthetic construct
  source 1..20: mol_type = other DNA
cgaatgcgtggcggagatcg

SEQ ID NO: 34113 - DNA, 20 bp, synthetic construct
  source 1..20: mol_type = other DNA
caccttcaagctgtacgaca

SEQ ID NO: 34114 - DNA, 20 bp, synthetic construct
  source 1..20: mol_type = other DNA
tgtcgaaggggtctccgggc

SEQ ID NO: 34115 - DNA, 20 bp, synthetic construct
  source 1..20: mol_type = other DNA
ctcagccttggtttccggga

SEQ ID NO: 34116 - DNA, 20 bp, synthetic construct
  source 1..20: mol_type = other DNA
gagcttccagctggtggagg

SEQ ID NO: 34117 - DNA, 20 bp, synthetic construct
  source 1..20: mol_type = other DNA
aaatatgtgtctctcatgtt

SEQ ID NO: 34118 - DNA, 20 bp, synthetic construct
  source 1..20: mol_type = other DNA
acctgtaattcagaaagtgg

SEQ ID NO: 34119 - DNA, 20 bp, synthetic construct
  source 1..20: mol_type = other DNA
ctagcctgcagagcagtgtt

SEQ ID NO: 34120 - DNA, 20 bp, synthetic construct
  source 1..20: mol_type = other DNA
gcaccagtcggcgggctcca

SEQ ID NO: 34121 - DNA, 20 bp, synthetic construct
  source 1..20: mol_type = other DNA
gagctgcccgctgtgtgcat

SEQ ID NO: 34122 - DNA, 20 bp, synthetic construct
  source 1..20: mol_type = other DNA
gatgcacttgtgcatgcggc

SEQ ID NO: 34123 - DNA, 20 bp, synthetic construct
  source 1..20: mol_type = other DNA
ataaggtctcacctgaaact

SEQ ID NO: 34124 - DNA, 20 bp, synthetic construct
  source 1..20: mol_type = other DNA
ctcaggaatttgttgaaacg

SEQ ID NO: 34125 - DNA, 20 bp, synthetic construct
  source 1..20: mol_type = other DNA
gtgggtgatcttgatctgga

SEQ ID NO: 34126 - DNA, 20 bp, synthetic construct
  source 1..20: mol_type = other DNA
aattctcccctttaagtgct

SEQ ID NO: 34127 - DNA, 20 bp, synthetic construct
  source 1..20: mol_type = other DNA
ggcagccaacaaacgtggat

SEQ ID NO: 34128 - DNA, 20 bp, synthetic construct
  source 1..20: mol_type = other DNA
ctcacagaagaagatacaca

SEQ ID NO: 34129 - DNA, 20 bp, synthetic construct
  source 1..20: mol_type = other DNA
cgggcagccccgggcggcgg

SEQ ID NO: 34130 - DNA, 20 bp, synthetic construct
  source 1..20: mol_type = other DNA
aacatccctagcatgcatgg

SEQ ID NO: 34131 - DNA, 20 bp, synthetic construct
  source 1..20: mol_type = other DNA
ctgggccagaacgtcatgat

SEQ ID NO: 34132 - DNA, 20 bp, synthetic construct
  source 1..20: mol_type = other DNA
tcacctgggtcactttgata

SEQ ID NO: 34133 - DNA, 20 bp, synthetic construct
  source 1..20: mol_type = other DNA
aggagtacccctgactcatg

SEQ ID NO: 34134 - DNA, 20 bp, synthetic construct
  source 1..20: mol_type = other DNA
ccgccatggcgcgaggcggc

SEQ ID NO: 34135 - DNA, 20 bp, synthetic construct
  source 1..20: mol_type = other DNA
gtcccattgtggtgcactgc

SEQ ID NO: 34136 - DNA, 20 bp, synthetic construct
  source 1..20: mol_type = other DNA
tgtggattacttatataaca

SEQ ID NO: 34137 - DNA, 20 bp, synthetic construct
  source 1..20: mol_type = other DNA
aaaggtatggtcaagcaggt

SEQ ID NO: 34138 - DNA, 20 bp, synthetic construct
  source 1..20: mol_type = other DNA
ctctcaggtaggcaggcgtg

SEQ ID NO: 34139 - DNA, 20 bp, synthetic construct
  source 1..20: mol_type = other DNA
gctgggaataaatgtccacc

SEQ ID NO: 34140 - DNA, 20 bp, synthetic construct
  source 1..20: mol_type = other DNA
caccagcttccggtaccctg

SEQ ID NO: 34141 - DNA, 20 bp, synthetic construct
  source 1..20: mol_type = other DNA
cacggacagaaatgggatcc

SEQ ID NO: 34142 - DNA, 20 bp, synthetic construct
  source 1..20: mol_type = other DNA
tgatcaactaggaaaaatct

SEQ ID NO: 34143 - DNA, 20 bp, synthetic construct
  source 1..20: mol_type = other DNA
ccactcacttggacgaggtg

SEQ ID NO: 34144 - DNA, 20 bp, synthetic construct
  source 1..20: mol_type = other DNA
tcacccatacttccaggacc

SEQ ID NO: 34145 - DNA, 20 bp, synthetic construct
  source 1..20: mol_type = other DNA
tggccccaggtgtgaaagcc

SEQ ID NO: 34146 - DNA, 20 bp, synthetic construct
  source 1..20: mol_type = other DNA
ggcacttggaggcagcgatg

SEQ ID NO: 34147 - DNA, 20 bp, synthetic construct
  source 1..20: mol_type = other DNA
cagggcctggagtgagggga

SEQ ID NO: 34148 - DNA, 20 bp, synthetic construct
  source 1..20: mol_type = other DNA
gtacagcttgaaggtgactg

SEQ ID NO: 34149 - DNA, 20 bp, synthetic construct
  source 1..20: mol_type = other DNA
cttagaagataaactttatg

SEQ ID NO: 34150 - DNA, 20 bp, synthetic construct
  source 1..20: mol_type = other DNA
gaaggtcttgaggcgcaggc

SEQ ID NO: 34151 - DNA, 20 bp, synthetic construct
  source 1..20: mol_type = other DNA
agaaggcaaacccctgctga

SEQ ID NO: 34152 - DNA, 20 bp, synthetic construct
  source 1..20: mol_type = other DNA
tccccctaggagatcctgct

SEQ ID NO: 34153 - DNA, 20 bp, synthetic construct
  source 1..20: mol_type = other DNA
caccaggacactgggataga

SEQ ID NO: 34154 - DNA, 20 bp, synthetic construct
  source 1..20: mol_type = other DNA
tctggctcgatgcctaagat

SEQ ID NO: 34155 - DNA, 20 bp, synthetic construct
  source 1..20: mol_type = other DNA
gccatccaggtgaaagcggc

SEQ ID NO: 34156 - DNA, 20 bp, synthetic construct
  source 1..20: mol_type = other DNA
gttacttactgttctcggga

SEQ ID NO: 34157 - DNA, 20 bp, synthetic construct
  source 1..20: mol_type = other DNA
tctaaccttggtagatgtcc

SEQ ID NO: 34158 - DNA, 20 bp, synthetic construct
  source 1..20: mol_type = other DNA
ggcggctgaagattggcagg

SEQ ID NO: 34159 - DNA, 20 bp, synthetic construct
  source 1..20: mol_type = other DNA
tgcggggcctggaggcggag

SEQ ID NO: 34160 - DNA, 20 bp, synthetic construct
  source 1..20: mol_type = other DNA
ctgagtcaggactcccacgc

SEQ ID NO: 34161 - DNA, 20 bp, synthetic construct
  source 1..20: mol_type = other DNA
tacagcgcagggcactccgc

SEQ ID NO: 34162 - DNA, 20 bp, synthetic construct
  source 1..20: mol_type = other DNA
cccaggacccaggccggcgc

SEQ ID NO: 34163 - DNA, 20 bp, synthetic construct
  source 1..20: mol_type = other DNA
caggcacacacccgagagct

SEQ ID NO: 34164 - DNA, 20 bp, synthetic construct
  source 1..20: mol_type = other DNA
ggcggcggcgcccctgcggc

SEQ ID NO: 34165 - DNA, 20 bp, synthetic construct
  source 1..20: mol_type = other DNA
tccaggacaccaaaggctgc

SEQ ID NO: 34166 - DNA, 20 bp, synthetic construct
  source 1..20: mol_type = other DNA
tgatgtattcacctgaaatg

SEQ ID NO: 34167 - DNA, 20 bp, synthetic construct
  source 1..20: mol_type = other DNA
tcaaggtggtctgggggtgt

SEQ ID NO: 34168 - DNA, 20 bp, synthetic construct
  source 1..20: mol_type = other DNA
gtggtcggggagccaccccc

SEQ ID NO: 34169 - DNA, 20 bp, synthetic construct
  source 1..20: mol_type = other DNA
tgatgcccgccttgcacacc

SEQ ID NO: 34170 - DNA, 20 bp, synthetic construct
  source 1..20: mol_type = other DNA
cgcgtaatgcaggccgggcc

SEQ ID NO: 34171 - DNA, 20 bp, synthetic construct
  source 1..20: mol_type = other DNA
taaatattgatatcattacg

SEQ ID NO: 34172 - DNA, 20 bp, synthetic construct
  source 1..20: mol_type = other DNA
caccagaaagtcccagttcc

SEQ ID NO: 34173 - DNA, 20 bp, synthetic construct
  source 1..20: mol_type = other DNA
cggagctcctgggcaaggtg

SEQ ID NO: 34174 - DNA, 20 bp, synthetic construct
  source 1..20: mol_type = other DNA
agcgggggtggagaggcgag

SEQ ID NO: 34175 - DNA, 20 bp, synthetic construct
  source 1..20: mol_type = other DNA
tgccctcatccgcttcttgg

SEQ ID NO: 34176 - DNA, 20 bp, synthetic construct
  source 1..20: mol_type = other DNA
tggttctgtgtctaaggaag

SEQ ID NO: 34177 - DNA, 20 bp, synthetic construct
  source 1..20: mol_type = other DNA
cactccagctgtaagccaca

SEQ ID NO: 34178 - DNA, 20 bp, synthetic construct
  source 1..20: mol_type = other DNA
gaataagctgagcttataac

SEQ ID NO: 34179 - DNA, 20 bp, synthetic construct
  source 1..20: mol_type = other DNA
gttccacgccaagggctcat

SEQ ID NO: 34180 - DNA, 20 bp, synthetic construct
  source 1..20: mol_type = other DNA
gcgccaggctcagcggcacg

SEQ ID NO: 34181 - DNA, 20 bp, synthetic construct
  source 1..20: mol_type = other DNA
ggctcgagacaaggtgtcag

SEQ ID NO: 34182 - DNA, 20 bp, synthetic construct
  source 1..20: mol_type = other DNA
acagatgacctgctggggca

SEQ ID NO: 34183 - DNA, 20 bp, synthetic construct
  source 1..20: mol_type = other DNA
gcggctgaacgtggtataca

SEQ ID NO: 34184 - DNA, 20 bp, synthetic construct
  source 1..20: mol_type = other DNA
cggctttcctccacctgcga

SEQ ID NO: 34185 - DNA, 20 bp, synthetic construct
  source 1..20: mol_type = other DNA
ctgtggggaggggccagtga

SEQ ID NO: 34186 - DNA, 20 bp, synthetic construct
  source 1..20: mol_type = other DNA
gcttggccagcaccacgatg

SEQ ID NO: 34187 - DNA, 20 bp, synthetic construct
  source 1..20: mol_type = other DNA
ctaggtattttcaggcagga

SEQ ID NO: 34188 - DNA, 20 bp, synthetic construct
  source 1..20: mol_type = other DNA
ccccaggtatgttgtggggt

SEQ ID NO: 34189 - DNA, 20 bp, synthetic construct
  source 1..20: mol_type = other DNA
agaaatgaggaagtttcgga

SEQ ID NO: 34190 - DNA, 20 bp, synthetic construct
  source 1..20: mol_type = other DNA
actagcttcttgtaggcaag

SEQ ID NO: 34191 - DNA, 20 bp, synthetic construct
  source 1..20: mol_type = other DNA
tccagattagctatgtctgc

SEQ ID NO: 34192 - DNA, 20 bp, synthetic construct
  source 1..20: mol_type = other DNA
acaggaatcgaactccagcc

SEQ ID NO: 34193 - DNA, 20 bp, synthetic construct
  source 1..20: mol_type = other DNA
ctgcactccatgcttccaga

SEQ ID NO: 34194 - DNA, 20 bp, synthetic construct
  source 1..20: mol_type = other DNA
tcttcttgagaagctgtggg

SEQ ID NO: 34195 - DNA, 20 bp, synthetic construct
  source 1..20: mol_type = other DNA
agtcagtctctcaaaacggt

SEQ ID NO: 34196 - DNA, 20 bp, synthetic construct
  source 1..20: mol_type = other DNA
ccacacatgtgattggacct

SEQ ID NO: 34197 - DNA, 20 bp, synthetic construct
  source 1..20: mol_type = other DNA
agcgcagggcgatcttgatg

SEQ ID NO: 34198 - DNA, 20 bp, synthetic construct
  source 1..20: mol_type = other DNA
gttcttcctggagaataggt

SEQ ID NO: 34199 - DNA, 20 bp, synthetic construct
  source 1..20: mol_type = other DNA
gcggtcgatctccacccgct

SEQ ID NO: 34200 - DNA, 20 bp, synthetic construct
  source 1..20: mol_type = other DNA
aggagttgcagcggtgagaa

SEQ ID NO: 34201 - DNA, 20 bp, synthetic construct
  source 1..20: mol_type = other DNA
gataaaacatatttcgtata

SEQ ID NO: 34202 - DNA, 20 bp, synthetic construct
  source 1..20: mol_type = other DNA
gcacctgaagagatgccagc

SEQ ID NO: 34203 - DNA, 20 bp, synthetic construct
  source 1..20: mol_type = other DNA
gtaagtaaagtacacctggc

SEQ ID NO: 34204 - DNA, 20 bp, synthetic construct
  source 1..20: mol_type = other DNA
tccttgttagcctccaaggg

SEQ ID NO: 34205 - DNA, 20 bp, synthetic construct
  source 1..20: mol_type = other DNA
ctggatgccatgagggtgag

SEQ ID NO: 34206 - DNA, 20 bp, synthetic construct
  source 1..20: mol_type = other DNA
gcaatatgtgtcatactggg

SEQ ID NO: 34207 - DNA, 20 bp, synthetic construct
  source 1..20: mol_type = other DNA
cctgcagcggggagcgctcg

SEQ ID NO: 34208 - DNA, 20 bp, synthetic construct
  source 1..20: mol_type = other DNA
catgggagactttggccacg

SEQ ID NO: 34209 - DNA, 20 bp, synthetic construct
  source 1..20: mol_type = other DNA
gcggcggcggcagcagcagg

SEQ ID NO: 34210 - DNA, 20 bp, synthetic construct
  source 1..20: mol_type = other DNA
cgtccttcatgagcccaatc

SEQ ID NO: 34211 - DNA, 20 bp, synthetic construct
  source 1..20: mol_type = other DNA
atcacctatatacttggagt

SEQ ID NO: 34212 - DNA, 20 bp, synthetic construct
  source 1..20: mol_type = other DNA
gcaactcatccagcaaaagc

SEQ ID NO: 34213 - DNA, 20 bp, synthetic construct
  source 1..20: mol_type = other DNA
gtattcgttatccacgtggg

SEQ ID NO: 34214 - DNA, 20 bp, synthetic construct
  source 1..20: mol_type = other DNA
ggccatggcctgggcagggt

SEQ ID NO: 34215 - DNA, 20 bp, synthetic construct
  source 1..20: mol_type = other DNA
cactcacttggacgaggtgc

SEQ ID NO: 34216 - DNA, 20 bp, synthetic construct
  source 1..20: mol_type = other DNA
tgctctcccgcaccaggaac

SEQ ID NO: 34217 - DNA, 20 bp, synthetic construct
  source 1..20: mol_type = other DNA
ctggtcaccagaatgttctg

SEQ ID NO: 34218 - DNA, 20 bp, synthetic construct
  source 1..20: mol_type = other DNA
aggtgaaggcagagtctctg

SEQ ID NO: 34219 - DNA, 20 bp, synthetic construct
  source 1..20: mol_type = other DNA
gctgccggtcaaatctggaa

SEQ ID NO: 34220 - DNA, 20 bp, synthetic construct
  source 1..20: mol_type = other DNA
cgtgagtaatgggagctggg

SEQ ID NO: 34221 - DNA, 20 bp, synthetic construct
  source 1..20: mol_type = other DNA
ctgccacttcagtgcctatg

SEQ ID NO: 34222 - DNA, 20 bp, synthetic construct
  source 1..20: mol_type = other DNA
gccagggcctatgggcagag

SEQ ID NO: 34223 - DNA, 20 bp, synthetic construct
  source 1..20: mol_type = other DNA
cagcagcatggggtggccaa

SEQ ID NO: 34224 - DNA, 20 bp, synthetic construct
  source 1..20: mol_type = other DNA
aggcgcgtcttccaggtggg

SEQ ID NO: 34225 - DNA, 20 bp, synthetic construct
  source 1..20: mol_type = other DNA
gggcttctggccgtaggaca

SEQ ID NO: 34226 - DNA, 20 bp, synthetic construct
  source 1..20: mol_type = other DNA
gcttctggacgtagttggct

SEQ ID NO: 34227 - DNA, 20 bp, synthetic construct
  source 1..20: mol_type = other DNA
ccagtttacagtgaccctcg

SEQ ID NO: 34228 - DNA, 20 bp, synthetic construct
  source 1..20: mol_type = other DNA
tgtggtgctataggaggcca

SEQ ID NO: 34229 - DNA, 20 bp, synthetic construct
  source 1..20: mol_type = other DNA
gcgatggtgggcgccggtgt

SEQ ID NO: 34230 - DNA, 20 bp, synthetic construct
  source 1..20: mol_type = other DNA
ccggggctcaggaaggtccc

SEQ ID NO: 34231 - DNA, 20 bp, synthetic construct
  source 1..20: mol_type = other DNA
gagaattggaaaacaatgta

SEQ ID NO: 34232 - DNA, 20 bp, synthetic construct
  source 1..20: mol_type = other DNA
agcagcttcaagaagcccac

SEQ ID NO: 34233 - DNA, 20 bp, synthetic construct
  source 1..20: mol_type = other DNA
taatcaacctcttcaatggt

SEQ ID NO: 34234 - DNA, 20 bp, synthetic construct
  source 1..20: mol_type = other DNA
gctctggggtaggaagtggt

SEQ ID NO: 34235 - DNA, 20 bp, synthetic construct
  source 1..20: mol_type = other DNA
caacgctctgggagagcccc

SEQ ID NO: 34236 - DNA, 20 bp, synthetic construct
  source 1..20: mol_type = other DNA
atgacccactgggccggcac

SEQ ID NO: 34237 - DNA, 20 bp, synthetic construct
  source 1..20: mol_type = other DNA
atccttgttgaaggcggctg

SEQ ID NO: 34238 - DNA, 20 bp, synthetic construct
  source 1..20: mol_type = other DNA
cgaggccatggaatacctgg

SEQ ID NO: 34239 - DNA, 20 bp, synthetic construct
  source 1..20: mol_type = other DNA
ggctggaggaagtacctggg

SEQ ID NO: 34240 - DNA, 20 bp, synthetic construct
  source 1..20: mol_type = other DNA
cccccgtggggtgtccaggg

SEQ ID NO: 34241 - DNA, 20 bp, synthetic construct
  source 1..20: mol_type = other DNA
gctccaggataaagtgacat

SEQ ID NO: 34242 - DNA, 20 bp, synthetic construct
  source 1..20: mol_type = other DNA
atcttttgttacagcgctac

SEQ ID NO: 34243 - DNA, 20 bp, synthetic construct
  source 1..20: mol_type = other DNA
ggagatcaaggagtacaagg

SEQ ID NO: 34244 - DNA, 20 bp, synthetic construct
  source 1..20: mol_type = other DNA
tagttcccaggcctcggggc

SEQ ID NO: 34245 - DNA, 20 bp, synthetic construct
  source 1..20: mol_type = other DNA
tcctttggtgagtgcctgcc

SEQ ID NO: 34246 - DNA, 20 bp, synthetic construct
  source 1..20: mol_type = other DNA
cgtcctggtttctctccaag

SEQ ID NO: 34247 - DNA, 20 bp, synthetic construct
  source 1..20: mol_type = other DNA
tggaggacctgaggccggga

SEQ ID NO: 34248 - DNA, 20 bp, synthetic construct
  source 1..20: mol_type = other DNA
ctcacaggcaaggtgtaggg

SEQ ID NO: 34249 - DNA, 20 bp, synthetic construct
  source 1..20: mol_type = other DNA
tcaccatcttcagtgccacc

SEQ ID NO: 34250 - DNA, 20 bp, synthetic construct
  source 1..20: mol_type = other DNA
gccaacatcgtggcctacca

SEQ ID NO: 34251 - DNA, 20 bp, synthetic construct
  source 1..20: mol_type = other DNA
gtcacatctgagcagagcag

SEQ ID NO: 34252 - DNA, 20 bp, synthetic construct
  source 1..20: mol_type = other DNA
gggccccccggtagcgccca

SEQ ID NO: 34253 - DNA, 20 bp, synthetic construct
  source 1..20: mol_type = other DNA
ccccccagcagcctgctggg

SEQ ID NO: 34254 - DNA, 20 bp, synthetic construct
  source 1..20: mol_type = other DNA
ctggaccaactcagccaaag

SEQ ID NO: 34255 - DNA, 20 bp, synthetic construct
  source 1..20: mol_type = other DNA
ttcctcggaagatggtgttg

SEQ ID NO: 34256 - DNA, 20 bp, synthetic construct
  source 1..20: mol_type = other DNA
gtcaagtcgtggtggcaccg

SEQ ID NO: 34257 - DNA, 20 bp, synthetic construct
  source 1..20: mol_type = other DNA
ttcatgtcatctgatgaagg

SEQ ID NO: 34258 - DNA, 20 bp, synthetic construct
  source 1..20: mol_type = other DNA
gacaaacaccttcttgcagt

SEQ ID NO: 34259 - DNA, 20 bp, synthetic construct
  source 1..20: mol_type = other DNA
cggcaagatcacacgggagc

SEQ ID NO: 34260 - DNA, 20 bp, synthetic construct
  source 1..20: mol_type = other DNA
gacaataagtcgagttatgg

SEQ ID NO: 34261 - DNA, 20 bp, synthetic construct
  source 1..20: mol_type = other DNA
cacatccctccaccaagggt

SEQ ID NO: 34262 - DNA, 20 bp, synthetic construct
  source 1..20: mol_type = other DNA
gaagtggcagcgcggcccat

SEQ ID NO: 34263 - DNA, 20 bp, synthetic construct
  source 1..20: mol_type = other DNA
gagccagccctggtgagtcc

SEQ ID NO: 34264 - DNA, 20 bp, synthetic construct
  source 1..20: mol_type = other DNA
gggcgcacaggaacctatat

SEQ ID NO: 34265 - DNA, 20 bp, synthetic construct
  source 1..20: mol_type = other DNA
gaagtgctccaggtaaggag

SEQ ID NO: 34266 - DNA, 20 bp, synthetic construct
  source 1..20: mol_type = other DNA
ctgtgtgtctccgatgcatg

SEQ ID NO: 34267 - DNA, 20 bp, synthetic construct
  source 1..20: mol_type = other DNA
gcacaggccatcagcgccag

SEQ ID NO: 34268 - DNA, 20 bp, synthetic construct
  source 1..20: mol_type = other DNA
gcggcgtgtggaggagctcc

SEQ ID NO: 34269 - DNA, 20 bp, synthetic construct
  source 1..20: mol_type = other DNA
ttcgtgcatgcgaggtcccg

SEQ ID NO: 34270 - DNA, 20 bp, synthetic construct
  source 1..20: mol_type = other DNA
tgtgcatcgcgacatcaagc

SEQ ID NO: 34271 - DNA, 20 bp, synthetic construct
  source 1..20: mol_type = other DNA
tgctggctgtcgggcagggc

SEQ ID NO: 34272 - DNA, 20 bp, synthetic construct
  source 1..20: mol_type = other DNA
gaagtgccagggccagctgg

SEQ ID NO: 34273 - DNA, 20 bp, synthetic construct
  source 1..20: mol_type = other DNA
actcgtaccggtcctggctg

SEQ ID NO: 34274 - DNA, 20 bp, synthetic construct
  source 1..20: mol_type = other DNA
catcaagactgagaatgtga

SEQ ID NO: 34275 - DNA, 20 bp, synthetic construct
  source 1..20: mol_type = other DNA
gcggccccagctggggccgt

SEQ ID NO: 34276 - DNA, 20 bp, synthetic construct
  source 1..20: mol_type = other DNA
gctcccgtgtgatcttgccg

SEQ ID NO: 34277 - DNA, 20 bp, synthetic construct
  source 1..20: mol_type = other DNA
ctattaccaaaggggtattc

SEQ ID NO: 34278 - DNA, 20 bp, synthetic construct
  source 1..20: mol_type = other DNA
ttaccacgcctcgtaggagc

SEQ ID NO: 34279 - DNA, 20 bp, synthetic construct
  source 1..20: mol_type = other DNA
gaaaatgtccgtgcaaaggt

SEQ ID NO: 34280 - DNA, 20 bp, synthetic construct
  source 1..20: mol_type = other DNA
cagcatccccagcaggtaca

SEQ ID NO: 34281 - DNA, 20 bp, synthetic construct
  source 1..20: mol_type = other DNA
ggtagaggaagatatggtga

SEQ ID NO: 34282 - DNA, 20 bp, synthetic construct
  source 1..20: mol_type = other DNA
atcagtgaagcgtgtctccc

SEQ ID NO: 34283 - DNA, 20 bp, synthetic construct
  source 1..20: mol_type = other DNA
gtcctgcctagaggccctgg

SEQ ID NO: 34284 - DNA, 20 bp, synthetic construct
  source 1..20: mol_type = other DNA
cccagtgtgtgtttgaccac

SEQ ID NO: 34285 - DNA, 20 bp, synthetic construct
  source 1..20: mol_type = other DNA
ctcgaacatggacgtcaggt

SEQ ID NO: 34286 - DNA, 20 bp, synthetic construct
  source 1..20: mol_type = other DNA
ccaggcggcatggagaagga

SEQ ID NO: 34287 - DNA, 20 bp, synthetic construct
  source 1..20: mol_type = other DNA
cctctaggccgatacaaagc

SEQ ID NO: 34288 - DNA, 20 bp, synthetic construct
  source 1..20: mol_type = other DNA
tacccgaccaccatgtcctt

SEQ ID NO: 34289 - DNA, 20 bp, synthetic construct
  source 1..20: mol_type = other DNA
accggtcagaccagtagctc

SEQ ID NO: 34290 - DNA, 20 bp, synthetic construct
  source 1..20: mol_type = other DNA
agaagatggaagcggagagg

SEQ ID NO: 34291 - DNA, 20 bp, synthetic construct
  source 1..20: mol_type = other DNA
tcatacttgctttccagggg

SEQ ID NO: 34292 - DNA, 20 bp, synthetic construct
  source 1..20: mol_type = other DNA
gatggagtaccaccaagcca

SEQ ID NO: 34293 - DNA, 20 bp, synthetic construct
  source 1..20: mol_type = other DNA
tgaaggggaagaagctcggg

SEQ ID NO: 34294 - DNA, 20 bp, synthetic construct
  source 1..20: mol_type = other DNA
tctaacttcagatccctgca

SEQ ID NO: 34295 - DNA, 20 bp, synthetic construct
  source 1..20: mol_type = other DNA
acagtacctggaggagaagg

SEQ ID NO: 34296 - DNA, 20 bp, synthetic construct
  source 1..20: mol_type = other DNA
tttgtgaagatcttgaccaa

SEQ ID NO: 34297 - DNA, 20 bp, synthetic construct
  source 1..20: mol_type = other DNA
atgggctgcaggagccgcgg

SEQ ID NO: 34298 - DNA, 20 bp, synthetic construct
  source 1..20: mol_type = other DNA
tatttctcagccttggtttc

SEQ ID NO: 34299 - DNA, 20 bp, synthetic construct
  source 1..20: mol_type = other DNA
aatctgagcacagagtggaa

SEQ ID NO: 34300 - DNA, 20 bp, synthetic construct
  source 1..20: mol_type = other DNA
ctcgtcgatgctgagcttgc

SEQ ID NO: 34301 - DNA, 20 bp, synthetic construct
  source 1..20: mol_type = other DNA
cagcccctcacctggccccg

SEQ ID NO: 34302 - DNA, 20 bp, synthetic construct
  source 1..20: mol_type = other DNA
gatctaggcagatgttgggc

SEQ ID NO: 34303 - DNA, 20 bp, synthetic construct
  source 1..20: mol_type = other DNA
acctgggggagccaagcaga

SEQ ID NO: 34304 - DNA, 20 bp, synthetic construct
  source 1..20: mol_type = other DNA
gatcagcctggccgggatga

SEQ ID NO: 34305 - DNA, 20 bp, synthetic construct
  source 1..20: mol_type = other DNA
tttcagaagtgtctcagtgt

SEQ ID NO: 34306 - DNA, 20 bp, synthetic construct
  source 1..20: mol_type = other DNA
tcgtctttctcagctggata

SEQ ID NO: 34307 - DNA, 20 bp, synthetic construct
  source 1..20: mol_type = other DNA
ctgaggcctacctgcttcca

SEQ ID NO: 34308 - DNA, 20 bp, synthetic construct
  source 1..20: mol_type = other DNA
ccgtgtggtgcggcgtgagc

SEQ ID NO: 34309 - DNA, 20 bp, synthetic construct
  source 1..20: mol_type = other DNA
tgcggccagcacagcccggt

SEQ ID NO: 34310 - DNA, 20 bp, synthetic construct
  source 1..20: mol_type = other DNA
cagcaagctcagcatcgacg

SEQ ID NO: 34311 - DNA, 20 bp, synthetic construct
  source 1..20: mol_type = other DNA
ggatagtagaggaaaggttt

SEQ ID NO: 34312 - DNA, 20 bp, synthetic construct
  source 1..20: mol_type = other DNA
actacgggagcgcggccgag

SEQ ID NO: 34313 - DNA, 20 bp, synthetic construct
  source 1..20: mol_type = other DNA
tcgtccttcagagtctagga

SEQ ID NO: 34314 - DNA, 20 bp, synthetic construct
  source 1..20: mol_type = other DNA
agaagagcccccgggatgtt

SEQ ID NO: 34315 - DNA, 20 bp, synthetic construct
  source 1..20: mol_type = other DNA
ccagagtttcatctgcgacc

SEQ ID NO: 34316 - DNA, 20 bp, synthetic construct
  source 1..20: mol_type = other DNA
cccctgctgtgagtgctggg

SEQ ID NO: 34317 - DNA, 20 bp, synthetic construct
  source 1..20: mol_type = other DNA
ttatctaatatgatgtcaga

SEQ ID NO: 34318 - DNA, 20 bp, synthetic construct
  source 1..20: mol_type = other DNA
gcagtagcgcttcaggccca

SEQ ID NO: 34319 - DNA, 20 bp, synthetic construct
  source 1..20: mol_type = other DNA
cctggaacatgtaaagcaca

SEQ ID NO: 34320 - DNA, 20 bp, synthetic construct
  source 1..20: mol_type = other DNA
aggctgccgggcgtgctgtg

SEQ ID NO: 34321 - DNA, 20 bp, synthetic construct
  source 1..20: mol_type = other DNA
ttatccaagaattgtgagta

SEQ ID NO: 34322 - DNA, 20 bp, synthetic construct
  source 1..20: mol_type = other DNA
gtacatctcaccaccacctg

SEQ ID NO: 34323 - DNA, 20 bp, synthetic construct
  source 1..20: mol_type = other DNA
ttacttactgttctcgggat

SEQ ID NO: 34324 - DNA, 20 bp, synthetic construct
  source 1..20: mol_type = other DNA
cttctcaacatgcaaaaagc

SEQ ID NO: 34325 - DNA, 20 bp, synthetic construct
  source 1..20: mol_type = other DNA
ccaatgcaccgcacaggaac

SEQ ID NO: 34326 - DNA, 20 bp, synthetic construct
  source 1..20: mol_type = other DNA
cgcaggtgctgtgggaggag

SEQ ID NO: 34327 - DNA, 20 bp, synthetic construct
  source 1..20: mol_type = other DNA
attactatcactaatgacaa

SEQ ID NO: 34328 - DNA, 20 bp, synthetic construct
  source 1..20: mol_type = other DNA
tcctagatctgtaactacga

SEQ ID NO: 34329 - DNA, 20 bp, synthetic construct
  source 1..20: mol_type = other DNA
ggcaccacctactcttgtgt

SEQ ID NO: 34330 - DNA, 20 bp, synthetic construct
  source 1..20: mol_type = other DNA
gtccatctcgctcatagtca

SEQ ID NO: 34331 - DNA, 20 bp, synthetic construct
  source 1..20: mol_type = other DNA
caaccagtgttggggaagga

SEQ ID NO: 34332 - DNA, 20 bp, synthetic construct
  source 1..20: mol_type = other DNA
agaggaagagaatctgcttc

SEQ ID NO: 34333 - DNA, 20 bp, synthetic construct
  source 1..20: mol_type = other DNA
tgttacactcgaaagggtca

SEQ ID NO: 34334 - DNA, 20 bp, synthetic construct
  source 1..20: mol_type = other DNA
ctcccgcaggtggttcatgc

SEQ ID NO: 34335 - DNA, 20 bp, synthetic construct
  source 1..20: mol_type = other DNA
tcgcaggcctactcccacgg

SEQ ID NO: 34336 - DNA, 20 bp, synthetic construct
  source 1..20: mol_type = other DNA
atgcagatgagtgccctggg

SEQ ID NO: 34337 - DNA, 20 bp, synthetic construct
  source 1..20: mol_type = other DNA
ggaggtgagggggtgaggag

SEQ ID NO: 34338 - DNA, 20 bp, synthetic construct
  source 1..20: mol_type = other DNA
cctgaggctgggggtgcccg

SEQ ID NO: 34339 - DNA, 20 bp, synthetic construct
  source 1..20: mol_type = other DNA
cgatctaggcagatgttggg

SEQ ID NO: 34340 - DNA, 20 bp, synthetic construct
  source 1..20: mol_type = other DNA
ctggtctggaggcacagaca

SEQ ID NO: 34341 - DNA, 20 bp, synthetic construct
  source 1..20: mol_type = other DNA
gttcaaatttcacagcctaa

SEQ ID NO: 34342 - DNA, 20 bp, synthetic construct
  source 1..20: mol_type = other DNA
gtgttagaagataatgacta

SEQ ID NO: 34343 - DNA, 20 bp, synthetic construct
  source 1..20: mol_type = other DNA
cctctgtcggctcttctggg

SEQ ID NO: 34344 - DNA, 20 bp, synthetic construct
  source 1..20: mol_type = other DNA
agcctgggaggagctaggag

SEQ ID NO: 34345 - DNA, 20 bp, synthetic construct
  source 1..20: mol_type = other DNA
tgaatacttcatatataaat

SEQ ID NO: 34346 - DNA, 20 bp, synthetic construct
  source 1..20: mol_type = other DNA
tttgtatcggcctagagggc

SEQ ID NO: 34347 - DNA, 20 bp, synthetic construct
  source 1..20: mol_type = other DNA
cttatggtgagttcaaacac

SEQ ID NO: 34348 - DNA, 20 bp, synthetic construct
  source 1..20: mol_type = other DNA
gtagctggaatcctcatcag

SEQ ID NO: 34349 - DNA, 20 bp, synthetic construct
  source 1..20: mol_type = other DNA
tgtactcccctacagacgtg

SEQ ID NO: 34350 - DNA, 20 bp, synthetic construct
  source 1..20: mol_type = other DNA
gccgtggcagcccatgtgga

SEQ ID NO: 34351 - DNA, 20 bp, synthetic construct
  source 1..20: mol_type = other DNA
gacctgctacagcggctggg

SEQ ID NO: 34352 - DNA, 20 bp, synthetic construct
  source 1..20: mol_type = other DNA
tgagagagaccgctggatcg

SEQ ID NO: 34353 - DNA, 20 bp, synthetic construct
  source 1..20: mol_type = other DNA
gatccccatgaccgaagcgg

SEQ ID NO: 34354 - DNA, 20 bp, synthetic construct
  source 1..20: mol_type = other DNA
gagcctgattcacggaagga

SEQ ID NO: 34355 - DNA, 20 bp, synthetic construct
  source 1..20: mol_type = other DNA
gggggtgatggagaggaagg

SEQ ID NO: 34356 - DNA, 20 bp, synthetic construct
  source 1..20: mol_type = other DNA
ccagaagcaagtgcctaaaa

SEQ ID NO: 34357 - DNA, 20 bp, synthetic construct
  source 1..20: mol_type = other DNA
acctggcggagcgaaagaga

SEQ ID NO: 34358 - DNA, 20 bp, synthetic construct
  source 1..20: mol_type = other DNA
tatagcagagacacagacac

SEQ ID NO: 34359 - DNA, 20 bp, synthetic construct
  source 1..20: mol_type = other DNA
acaggtaagattaaaggggt

SEQ ID NO: 34360 - DNA, 20 bp, synthetic construct
  source 1..20: mol_type = other DNA
ttctgcaagaggcaaagcag

SEQ ID NO: 34361 - DNA, 20 bp, synthetic construct
  source 1..20: mol_type = other DNA
caggccccctgaccctggtg

SEQ ID NO: 34362 - DNA, 20 bp, synthetic construct
  source 1..20: mol_type = other DNA
ccgatgccatgagagccagg

SEQ ID NO: 34363 - DNA, 20 bp, synthetic construct
  source 1..20: mol_type = other DNA
tgcaggtgactttcaccaag

SEQ ID NO: 34364 - DNA, 20 bp, synthetic construct
  source 1..20: mol_type = other DNA
ccgaagccgtaggctggggg

SEQ ID NO: 34365 - DNA, 20 bp, synthetic construct
  source 1..20: mol_type = other DNA
tgggccaagggccaaggaag

SEQ ID NO: 34366 - DNA, 20 bp, synthetic construct
  source 1..20: mol_type = other DNA
cggggagcgggaggaggagc

SEQ ID NO: 34367 - DNA, 20 bp, synthetic construct
  source 1..20: mol_type = other DNA
cagggggcataaacctgcag

SEQ ID NO: 34368 - DNA, 20 bp, synthetic construct
  source 1..20: mol_type = other DNA
ttctcacctaatactctgaa

SEQ ID NO: 34369 - DNA, 20 bp, synthetic construct
  source 1..20: mol_type = other DNA
gctccttcagcagctgcctc

SEQ ID NO: 34370 - DNA, 20 bp, synthetic construct
  source 1..20: mol_type = other DNA
tggacgatcatgcaccttgc

SEQ ID NO: 34371 - DNA, 20 bp, synthetic construct
  source 1..20: mol_type = other DNA
ctgggggcccagcaggcagg

SEQ ID NO: 34372 - DNA, 20 bp, synthetic construct
  source 1..20: mol_type = other DNA
ggaggagttgtcaggctgca

SEQ ID NO: 34373 - DNA, 20 bp, synthetic construct
  source 1..20: mol_type = other DNA
gcgactggagggtgaggccc

SEQ ID NO: 34374 - DNA, 20 bp, synthetic construct
  source 1..20: mol_type = other DNA
aggtctacctcaaggacgga

SEQ ID NO: 34375 - DNA, 20 bp, synthetic construct
  source 1..20: mol_type = other DNA
ctcgcacccacacatgtgat

SEQ ID NO: 34376 - DNA, 20 bp, synthetic construct
  source 1..20: mol_type = other DNA
acacctgggtacacacacag

SEQ ID NO: 34377 - DNA, 20 bp, synthetic construct
  source 1..20: mol_type = other DNA
gcggaagtgcgtgtcgccgg

SEQ ID NO: 34378 - DNA, 20 bp, synthetic construct
  source 1..20: mol_type = other DNA
ccccatgaccgaagcggtgg

SEQ ID NO: 34379 - DNA, 20 bp, synthetic construct
  source 1..20: mol_type = other DNA
caatgttattcaagaatgga

SEQ ID NO: 34380 - DNA, 20 bp, synthetic construct
  source 1..20: mol_type = other DNA
atatagaatttgatcttttc

SEQ ID NO: 34381 - DNA, 20 bp, synthetic construct
  source 1..20: mol_type = other DNA
caggaggtcatgaaaacgga

SEQ ID NO: 34382 - DNA, 20 bp, synthetic construct
  source 1..20: mol_type = other DNA
ctcttcgaactcccgctcga

SEQ ID NO: 34383 - DNA, 20 bp, synthetic construct
  source 1..20: mol_type = other DNA
aacgccgcctgccagcacta

SEQ ID NO: 34384 - DNA, 20 bp, synthetic construct
  source 1..20: mol_type = other DNA
gtcccagtgccacgaacttt

SEQ ID NO: 34385 - DNA, 20 bp, synthetic construct
  source 1..20: mol_type = other DNA
acgacacatagctgggtgtc

SEQ ID NO: 34386 - DNA, 20 bp, synthetic construct
  source 1..20: mol_type = other DNA
gaaatcgacagtactgacat

SEQ ID NO: 34387 - DNA, 20 bp, synthetic construct
  source 1..20: mol_type = other DNA
tccccacaggttcctgcact

SEQ ID NO: 34388 - DNA, 20 bp, synthetic construct
  source 1..20: mol_type = other DNA
cgcgcacgcggtagtactcg

SEQ ID NO: 34389 - DNA, 20 bp, synthetic construct
  source 1..20: mol_type = other DNA
cagttctgggctggaggcca

SEQ ID NO: 34390 - DNA, 20 bp, synthetic construct
  source 1..20: mol_type = other DNA
tggtagggcttctcacctgc

SEQ ID NO: 34391 - DNA, 20 bp, synthetic construct
  source 1..20: mol_type = other DNA
gccaagtgcaggaacctgtg

SEQ ID NO: 34392 - DNA, 20 bp, synthetic construct
  source 1..20: mol_type = other DNA
atggagaggcggctgaagat

SEQ ID NO: 34393 - DNA, 20 bp, synthetic construct
  source 1..20: mol_type = other DNA
gctctaggcccagtgacctg

SEQ ID NO: 34394 - DNA, 20 bp, synthetic construct
  source 1..20: mol_type = other DNA
cagaccagcacctgctcctg

SEQ ID NO: 34395 - DNA, 20 bp, synthetic construct
  source 1..20: mol_type = other DNA
atcattaagaagtccaagga

SEQ ID NO: 34396 - DNA, 20 bp, synthetic construct
  source 1..20: mol_type = other DNA
atgggtatgaggtggtggcc

SEQ ID NO: 34397 - DNA, 20 bp, synthetic construct
  source 1..20: mol_type = other DNA
gctgttgacgaaccctaagg

SEQ ID NO: 34398 - DNA, 20 bp, synthetic construct
  source 1..20: mol_type = other DNA
ggatgaggaggagcccaagg

SEQ ID NO: 34399 - DNA, 20 bp, synthetic construct
  source 1..20: mol_type = other DNA
agcccagagatgatgggcct

SEQ ID NO: 34400 - DNA, 20 bp, synthetic construct
  source 1..20: mol_type = other DNA
tgggggcaaccaggtgaacg

SEQ ID NO: 34401 - DNA, 20 bp, synthetic construct
  source 1..20: mol_type = other DNA
catacttgctttccaggggt

SEQ ID NO: 34402 - DNA, 20 bp, synthetic construct
  source 1..20: mol_type = other DNA
ctacctgcttccatggtcac

SEQ ID NO: 34403 - DNA, 20 bp, synthetic construct
  source 1..20: mol_type = other DNA
ccgcacctgcgcccggccgg

SEQ ID NO: 34404 - DNA, 20 bp, synthetic construct
  source 1..20: mol_type = other DNA
agaattgtgagtatgggtac

SEQ ID NO: 34405 - DNA, 20 bp, synthetic construct
  source 1..20: mol_type = other DNA
ccaaagctttctggatgtcc

SEQ ID NO: 34406 - DNA, 20 bp, synthetic construct
  source 1..20: mol_type = other DNA
gaaccttgaggctacagaga

SEQ ID NO: 34407 - DNA, 20 bp, synthetic construct
  source 1..20: mol_type = other DNA
ttgcctcagtatgctggctc

SEQ ID NO: 34408 - DNA, 20 bp, synthetic construct
  source 1..20: mol_type = other DNA
ccacaaagggcacgcggtcc

SEQ ID NO: 34409 - DNA, 20 bp, synthetic construct
  source 1..20: mol_type = other DNA
acccaggctcagggcacctg

SEQ ID NO: 34410 - DNA, 20 bp, synthetic construct
  source 1..20: mol_type = other DNA
catccctctgtgtatctgaa

SEQ ID NO: 34411 - DNA, 20 bp, synthetic construct
  source 1..20: mol_type = other DNA
gcttcttctcctccaagccc

SEQ ID NO: 34412 - DNA, 20 bp, synthetic construct
  source 1..20: mol_type = other DNA
gctaaagcaagtcatcgctg

SEQ ID NO: 34413 - DNA, 20 bp, synthetic construct
  source 1..20: mol_type = other DNA
attgcaaaagtgcaacgtaa

SEQ ID NO: 34414 - DNA, 20 bp, synthetic construct
  source 1..20: mol_type = other DNA
ggtgcaggtcccgttctcct

SEQ ID NO: 34415 - DNA, 20 bp, synthetic construct
  source 1..20: mol_type = other DNA
catctcacggtgttggctgg

SEQ ID NO: 34416 - DNA, 20 bp, synthetic construct
  source 1..20: mol_type = other DNA
gcatggcggtggaggacgag

SEQ ID NO: 34417 - DNA, 20 bp, synthetic construct
  source 1..20: mol_type = other DNA
gctcacgccgatgcacacag

SEQ ID NO: 34418 - DNA, 20 bp, synthetic construct
  source 1..20: mol_type = other DNA
ttggtggatgctcaatccag

SEQ ID NO: 34419 - DNA, 20 bp, synthetic construct
  source 1..20: mol_type = other DNA
taacatcctggaggcaggct

SEQ ID NO: 34420 - DNA, 20 bp, synthetic construct
  source 1..20: mol_type = other DNA
ccaggaagaggaagtgctct

SEQ ID NO: 34421 - DNA, 20 bp, synthetic construct
  source 1..20: mol_type = other DNA
actccctgggaaaggaggga

SEQ ID NO: 34422 - DNA, 20 bp, synthetic construct
  source 1..20: mol_type = other DNA
catccaggccaacaactgcg

SEQ ID NO: 34423 - DNA, 20 bp, synthetic construct
  source 1..20: mol_type = other DNA
cgaacctgcgagggctgcaa

SEQ ID NO: 34424 - DNA, 20 bp, synthetic construct
  source 1..20: mol_type = other DNA
ggaacagtcaaaagatggag

SEQ ID NO: 34425 - DNA, 20 bp, synthetic construct
  source 1..20: mol_type = other DNA
gaatacacctgcaaagcggc

SEQ ID NO: 34426 - DNA, 20 bp, synthetic construct
  source 1..20: mol_type = other DNA
cctccaccgcttcggtcatg

SEQ ID NO: 34427 - DNA, 20 bp, synthetic construct
  source 1..20: mol_type = other DNA
cccaggggcaacacagcaac

SEQ ID NO: 34428 - DNA, 20 bp, synthetic construct
  source 1..20: mol_type = other DNA
agagtccaccaggactggga

SEQ ID NO: 34429 - DNA, 20 bp, synthetic construct
  source 1..20: mol_type = other DNA
gccgccgccgcccccagcgc

SEQ ID NO: 34430 - DNA, 20 bp, synthetic construct
  source 1..20: mol_type = other DNA
ccaagatcaataccaactgc

SEQ ID NO: 34431 - DNA, 20 bp, synthetic construct
  source 1..20: mol_type = other DNA
ggccctcgccgaagcccggg

SEQ ID NO: 34432 - DNA, 20 bp, synthetic construct
  source 1..20: mol_type = other DNA
gggtggccatctgcctcggc

SEQ ID NO: 34433 - DNA, 20 bp, synthetic construct
  source 1..20: mol_type = other DNA
ccgcaatgtgctggtgtctg

SEQ ID NO: 34434 - DNA, 20 bp, synthetic construct
  source 1..20: mol_type = other DNA
caaggccatcccggtgcagg

SEQ ID NO: 34435 - DNA, 20 bp, synthetic construct
  source 1..20: mol_type = other DNA
ggtcaacattacaaccatag

SEQ ID NO: 34436 - DNA, 20 bp, synthetic construct
  source 1..20: mol_type = other DNA
ggctcccccaggtatgttgt

SEQ ID NO: 34437 - DNA, 20 bp, synthetic construct
  source 1..20: mol_type = other DNA
ccctgttcaagaacctggtg

SEQ ID NO: 34438 - DNA, 20 bp, synthetic construct
  source 1..20: mol_type = other DNA
agaccatatcaaagtgaccc

SEQ ID NO: 34439 - DNA, 20 bp, synthetic construct
  source 1..20: mol_type = other DNA
ccacttgttaacagagaccg

SEQ ID NO: 34440 - DNA, 20 bp, synthetic construct
  source 1..20: mol_type = other DNA
gtcttatcccctggtgcacg

SEQ ID NO: 34441 - DNA, 20 bp, synthetic construct
  source 1..20: mol_type = other DNA
ctgggcgatcctgcgcacag

SEQ ID NO: 34442 - DNA, 20 bp, synthetic construct
  source 1..20: mol_type = other DNA
ggccgccgccggggaggctg

SEQ ID NO: 34443 - DNA, 20 bp, synthetic construct
  source 1..20: mol_type = other DNA
gaacaagaagcaggagtccg

SEQ ID NO: 34444 - DNA, 20 bp, synthetic construct
  source 1..20: mol_type = other DNA
cgatcacgtaaatgtcatgg

SEQ ID NO: 34445 - DNA, 20 bp, synthetic construct
  source 1..20: mol_type = other DNA
agtacatgatggagttgctc

SEQ ID NO: 34446 - DNA, 20 bp, synthetic construct
  source 1..20: mol_type = other DNA
tgtgttcataccagacacat

SEQ ID NO: 34447 - DNA, 20 bp, synthetic construct
  source 1..20: mol_type = other DNA
ccagatatggtgtaaggagc

SEQ ID NO: 34448 - DNA, 20 bp, synthetic construct
  source 1..20: mol_type = other DNA
gagccaacaagcccaggcga

SEQ ID NO: 34449 - DNA, 20 bp, synthetic construct
  source 1..20: mol_type = other DNA
tgctgtgaaggtgctgaaga

SEQ ID NO: 34450 - DNA, 20 bp, synthetic construct
  source 1..20: mol_type = other DNA
agccaaggctggcttctggg

SEQ ID NO: 34451 - DNA, 20 bp, synthetic construct
  source 1..20: mol_type = other DNA
tcggatgtgagtggggcagg

SEQ ID NO: 34452 - DNA, 20 bp, synthetic construct
  source 1..20: mol_type = other DNA
gctgggtgagtacccctccc

SEQ ID NO: 34453 - DNA, 20 bp, synthetic construct
  source 1..20: mol_type = other DNA
ccccggtggggcgctgaccc

SEQ ID NO: 34454 - DNA, 20 bp, synthetic construct
  source 1..20: mol_type = other DNA
tctgggaattgttgctgata

SEQ ID NO: 34455 - DNA, 20 bp, synthetic construct
  source 1..20: mol_type = other DNA
gaccaccaggggcagagaca

SEQ ID NO: 34456 - DNA, 20 bp, synthetic construct
  source 1..20: mol_type = other DNA
tagcaatccctcatcttgct

SEQ ID NO: 34457 - DNA, 20 bp, synthetic construct
  source 1..20: mol_type = other DNA
ctacaagcgtgagctggaac

SEQ ID NO: 34458 - DNA, 20 bp, synthetic construct
  source 1..20: mol_type = other DNA
ggagtcgttgtgctgcacaa

SEQ ID NO: 34459 - DNA, 20 bp, synthetic construct
  source 1..20: mol_type = other DNA
ttccagggctccgagccgcg

SEQ ID NO: 34460 - DNA, 20 bp, synthetic construct
  source 1..20: mol_type = other DNA
ctgtcctgcatccgggccac

SEQ ID NO: 34461 - DNA, 20 bp, synthetic construct
  source 1..20: mol_type = other DNA
caggatgatgggataggggg

SEQ ID NO: 34462 - DNA, 20 bp, synthetic construct
  source 1..20: mol_type = other DNA
attcaggcctattttcacaa

SEQ ID NO: 34463 - DNA, 20 bp, synthetic construct
  source 1..20: mol_type = other DNA
cgtcactgtaagtgatgagg

SEQ ID NO: 34464 - DNA, 20 bp, synthetic construct
  source 1..20: mol_type = other DNA
ctctcaagctgagtgggtcc

SEQ ID NO: 34465 - DNA, 20 bp, synthetic construct
  source 1..20: mol_type = other DNA
ctcggatgcagccttctagc

SEQ ID NO: 34466 - DNA, 20 bp, synthetic construct
  source 1..20: mol_type = other DNA
agcccagtctgacctgaaca

SEQ ID NO: 34467 - DNA, 20 bp, synthetic construct
  source 1..20: mol_type = other DNA
ctgtgcgcctgctggtgggc

SEQ ID NO: 34468 - DNA, 20 bp, synthetic construct
  source 1..20: mol_type = other DNA
tttcctgaagcaatgctcca

SEQ ID NO: 34469 - DNA, 20 bp, synthetic construct
  source 1..20: mol_type = other DNA
gcccaacctctcctggagtg

SEQ ID NO: 34470 - DNA, 20 bp, synthetic construct
  source 1..20: mol_type = other DNA
gggtgcgctgggtgctccgc

SEQ ID NO: 34471 - DNA, 20 bp, synthetic construct
  source 1..20: mol_type = other DNA
tttaaaggatcccgtatata

SEQ ID NO: 34472 - DNA, 20 bp, synthetic construct
  source 1..20: mol_type = other DNA
ggacaggaggtgggagctgt

SEQ ID NO: 34473 - DNA, 20 bp, synthetic construct
  source 1..20: mol_type = other DNA
acatctgtggaggatctgcc

SEQ ID NO: 34474 - DNA, 20 bp, synthetic construct
  source 1..20: mol_type = other DNA
ataaggaaggagaggagaca

SEQ ID NO: 34475 - DNA, 20 bp, synthetic construct
  source 1..20: mol_type = other DNA
catccgagtgatgggcatgt

SEQ ID NO: 34476 - DNA, 20 bp, synthetic construct
  source 1..20: mol_type = other DNA
ggttctgtgtctaaggaagg

SEQ ID NO: 34477 - DNA, 20 bp, synthetic construct
  source 1..20: mol_type = other DNA
atggggatgggtcagggagg

SEQ ID NO: 34478 - DNA, 20 bp, synthetic construct
  source 1..20: mol_type = other DNA
tgaggcgcaggctggtgtcc

SEQ ID NO: 34479 - DNA, 20 bp, synthetic construct
  source 1..20: mol_type = other DNA
cactgcaactgggacggctg

SEQ ID NO: 34480 - DNA, 20 bp, synthetic construct
  source 1..20: mol_type = other DNA
cccactcgtacttctcggcc

SEQ ID NO: 34481 - DNA, 20 bp, synthetic construct
  source 1..20: mol_type = other DNA
gtgtctatcgttattggtgt

SEQ ID NO: 34482 - DNA, 20 bp, synthetic construct
  source 1..20: mol_type = other DNA
ctcttccaagcactgattga

SEQ ID NO: 34483 - DNA, 20 bp, synthetic construct
  source 1..20: mol_type = other DNA
tcctacgcggaggacgggag

SEQ ID NO: 34484 - DNA, 20 bp, synthetic construct
  source 1..20: mol_type = other DNA
ggcctccaccgcttcggtca

SEQ ID NO: 34485 - DNA, 20 bp, synthetic construct
  source 1..20: mol_type = other DNA
tggtgcgcgacagccgccag

SEQ ID NO: 34486 - DNA, 20 bp, synthetic construct
  source 1..20: mol_type = other DNA
ccttgatctgggggggagag

SEQ ID NO: 34487 - DNA, 20 bp, synthetic construct
  source 1..20: mol_type = other DNA
ctccatgtgccgccctaggg

SEQ ID NO: 34488 - DNA, 20 bp, synthetic construct
  source 1..20: mol_type = other DNA
agtgggccggggaggagggg

SEQ ID NO: 34489 - DNA, 20 bp, synthetic construct
  source 1..20: mol_type = other DNA
agagcttggcagcattctgt

SEQ ID NO: 34490 - DNA, 20 bp, synthetic construct
  source 1..20: mol_type = other DNA
tcacacacggcaagaggatg

SEQ ID NO: 34491 - DNA, 20 bp, synthetic construct
  source 1..20: mol_type = other DNA
atccacctaaggaccagagg

SEQ ID NO: 34492 - DNA, 20 bp, synthetic construct
  source 1..20: mol_type = other DNA
aatgcagcccggtcagactg

SEQ ID NO: 34493 - DNA, 20 bp, synthetic construct
  source 1..20: mol_type = other DNA
actctaaaagaaaaaaagaa

SEQ ID NO: 34494 - DNA, 20 bp, synthetic construct
  source 1..20: mol_type = other DNA
gtgcaaacaggtctccccgc

SEQ ID NO: 34495 - DNA, 20 bp, synthetic construct
  source 1..20: mol_type = other DNA
ccggctaggaaagagctgca

SEQ ID NO: 34496 - DNA, 20 bp, synthetic construct
  source 1..20: mol_type = other DNA
ttggagggcttcacatctgg

SEQ ID NO: 34497 - DNA, 20 bp, synthetic construct
  source 1..20: mol_type = other DNA
cccaggtaagcgggggtctc

SEQ ID NO: 34498 - DNA, 20 bp, synthetic construct
  source 1..20: mol_type = other DNA
gtagcatggccagggcctat

SEQ ID NO: 34499 - DNA, 20 bp, synthetic construct
  source 1..20: mol_type = other DNA
aggcaccaggtagtccacca

SEQ ID NO: 34500 - DNA, 20 bp, synthetic construct
  source 1..20: mol_type = other DNA
tgtgcaggacaggggccagg

SEQ ID NO: 34501 - DNA, 20 bp, synthetic construct
  source 1..20: mol_type = other DNA
caactacgtccagaagcggg

SEQ ID NO: 34502 - DNA, 20 bp, synthetic construct
  source 1..20: mol_type = other DNA
cttgcagaaccagaagaagg

SEQ ID NO: 34503 - DNA, 20 bp, synthetic construct
  source 1..20: mol_type = other DNA
cgtccagccccgagggctgc

SEQ ID NO: 34504 - DNA, 20 bp, synthetic construct
  source 1..20: mol_type = other DNA
cggcacactctgtgcctgcg

SEQ ID NO: 34505 - DNA, 20 bp, synthetic construct
  source 1..20: mol_type = other DNA
gggctgtaggccagggagga

SEQ ID NO: 34506 - DNA, 20 bp, synthetic construct
  source 1..20: mol_type = other DNA
tccatggtgtccggagcgaa

SEQ ID NO: 34507 - DNA, 20 bp, synthetic construct
  source 1..20: mol_type = other DNA
agagtaagttctttcttcat

SEQ ID NO: 34508 - DNA, 20 bp, synthetic construct
  source 1..20: mol_type = other DNA
tcggcgggctggaaggtgag

SEQ ID NO: 34509 - DNA, 20 bp, synthetic construct
  source 1..20: mol_type = other DNA
catacacccttacccatccc

SEQ ID NO: 34510 - DNA, 20 bp, synthetic construct
  source 1..20: mol_type = other DNA
tccactggcgctgcttcttc

SEQ ID NO: 34511 - DNA, 20 bp, synthetic construct
  source 1..20: mol_type = other DNA
ttacttccccatagaaatct

SEQ ID NO: 34512 - DNA, 20 bp, synthetic construct
  source 1..20: mol_type = other DNA
gactctcacctcattcgttc

SEQ ID NO: 34513 - DNA, 20 bp, synthetic construct
  source 1..20: mol_type = other DNA
ttggcagacagagaaatccc

SEQ ID NO: 34514 - DNA, 20 bp, synthetic construct
  source 1..20: mol_type = other DNA
ttctgcagagggatagagaa

SEQ ID NO: 34515 - DNA, 20 bp, synthetic construct
  source 1..20: mol_type = other DNA
ccccaggcgctttgagactc

SEQ ID NO: 34516 - DNA, 20 bp, synthetic construct
  source 1..20: mol_type = other DNA
gcgtggacccccagcgagca

SEQ ID NO: 34517 - DNA, 20 bp, synthetic construct
  source 1..20: mol_type = other DNA
gcacggagcagaggaagttg

SEQ ID NO: 34518 - DNA, 20 bp, synthetic construct
  source 1..20: mol_type = other DNA
acctgtgtgaagagcacaca

SEQ ID NO: 34519 - DNA, 20 bp, synthetic construct
  source 1..20: mol_type = other DNA
caagatcggtgagtgtccgc

SEQ ID NO: 34520 - DNA, 20 bp, synthetic construct
  source 1..20: mol_type = other DNA
gggcgggcgcaggggaagag

SEQ ID NO: 34521 - DNA, 20 bp, synthetic construct
  source 1..20: mol_type = other DNA
ggggagaaaggggctggggt

SEQ ID NO: 34522 - DNA, 20 bp, synthetic construct
  source 1..20: mol_type = other DNA
gatttaattcatcaagggta

SEQ ID NO: 34523 - DNA, 20 bp, synthetic construct
  source 1..20: mol_type = other DNA
cactactatgtgtttagtac

SEQ ID NO: 34524 - DNA, 20 bp, synthetic construct
  source 1..20: mol_type = other DNA
cctgcaggatcactcggctg

SEQ ID NO: 34525 - DNA, 20 bp, synthetic construct
  source 1..20: mol_type = other DNA
taggaggggactgggagtcc

SEQ ID NO: 34526 - DNA, 20 bp, synthetic construct
  source 1..20: mol_type = other DNA
agcctattacatctactccg

SEQ ID NO: 34527 - DNA, 20 bp, synthetic construct
  source 1..20: mol_type = other DNA
cctcctcatcctcgttgccc

SEQ ID NO: 34528 - DNA, 20 bp, synthetic construct
  source 1..20: mol_type = other DNA
gcggcggccggggccggtgc

SEQ ID NO: 34529 - DNA, 20 bp, synthetic construct
  source 1..20: mol_type = other DNA
ctctgtctttgagacagtgg

SEQ ID NO: 34530 - DNA, 20 bp, synthetic construct
  source 1..20: mol_type = other DNA
cctcctccaccgtgtcgctg

SEQ ID NO: 34531 - DNA, 20 bp, synthetic construct
  source 1..20: mol_type = other DNA
taaatctacaaatgtttatt

SEQ ID NO: 34532 - DNA, 20 bp, synthetic construct
  source 1..20: mol_type = other DNA
gaatgagctaaaaggacagc

SEQ ID NO: 34533 - DNA, 20 bp, synthetic construct
  source 1..20: mol_type = other DNA
aagcagtggagagctttacc

SEQ ID NO: 34534 - DNA, 20 bp, synthetic construct
  source 1..20: mol_type = other DNA
tagacctagaaggaaaaacc

SEQ ID NO: 34535 - DNA, 20 bp, synthetic construct
  source 1..20: mol_type = other DNA
ctggggagaagggtggacaa

SEQ ID NO: 34536 - DNA, 20 bp, synthetic construct
  source 1..20: mol_type = other DNA
gtttgtgccatcctggagga

SEQ ID NO: 34537 - DNA, 20 bp, synthetic construct
  source 1..20: mol_type = other DNA
gaccttgttgaactgcgacc

SEQ ID NO: 34538 - DNA, 20 bp, synthetic construct
  source 1..20: mol_type = other DNA
gttgtgcctgtgggcaggaa

SEQ ID NO: 34539 - DNA, 20 bp, synthetic construct
  source 1..20: mol_type = other DNA
gctcacctcggcctcgccgc

SEQ ID NO: 34540 - DNA, 20 bp, synthetic construct
  source 1..20: mol_type = other DNA
ccccagctcggtgcagctcc

SEQ ID NO: 34541 - DNA, 20 bp, synthetic construct
  source 1..20: mol_type = other DNA
cattgtctatgatattgctc

SEQ ID NO: 34542 - DNA, 20 bp, synthetic construct
  source 1..20: mol_type = other DNA
cgatctcagtcacatagttg

SEQ ID NO: 34543 - DNA, 20 bp, synthetic construct
  source 1..20: mol_type = other DNA
ccgaaccctcaactggggtg

SEQ ID NO: 34544 - DNA, 20 bp, synthetic construct
  source 1..20: mol_type = other DNA
gcttcagctccttcatgttc

SEQ ID NO: 34545 - DNA, 20 bp, synthetic construct
  source 1..20: mol_type = other DNA
ggtgcggggaggtgggagca

SEQ ID NO: 34546 - DNA, 20 bp, synthetic construct
  source 1..20: mol_type = other DNA
taccactgagacatcctata

SEQ ID NO: 34547 - DNA, 20 bp, synthetic construct
  source 1..20: mol_type = other DNA
accagtaccaatatacaaac

SEQ ID NO: 34548 - DNA, 20 bp, synthetic construct
  source 1..20: mol_type = other DNA
ggccaggaggtcctggcacc

SEQ ID NO: 34549 - DNA, 20 bp, synthetic construct
  source 1..20: mol_type = other DNA
caccgtggtccagcaggtag

SEQ ID NO: 34550 - DNA, 20 bp, synthetic construct
  source 1..20: mol_type = other DNA
gccgtgggtctgtgcaggga

SEQ ID NO: 34551 - DNA, 20 bp, synthetic construct
  source 1..20: mol_type = other DNA
gtgcgcagcctgcaagattg

SEQ ID NO: 34552 - DNA, 20 bp, synthetic construct
  source 1..20: mol_type = other DNA
aggccgaatggagttctcca

SEQ ID NO: 34553 - DNA, 20 bp, synthetic construct
  source 1..20: mol_type = other DNA
gatgaagccaatgatcagcc

SEQ ID NO: 34554 - DNA, 20 bp, synthetic construct
  source 1..20: mol_type = other DNA
cccgaacgctggggaaggac

SEQ ID NO: 34555 - DNA, 20 bp, synthetic construct
  source 1..20: mol_type = other DNA
caatgctccaaatgtaaaca

SEQ ID NO: 34556 - DNA, 20 bp, synthetic construct
  source 1..20: mol_type = other DNA
cgaattcagcaagaggtgag

SEQ ID NO: 34557 - DNA, 20 bp, synthetic construct
  source 1..20: mol_type = other DNA
cggctgggcaggttctccct

SEQ ID NO: 34558 - DNA, 20 bp, synthetic construct
  source 1..20: mol_type = other DNA
actttgccctgcaaggcaca

SEQ ID NO: 34559 - DNA, 20 bp, synthetic construct
  source 1..20: mol_type = other DNA
tgcagtcactctttaaacca

SEQ ID NO: 34560 - DNA, 20 bp, synthetic construct
  source 1..20: mol_type = other DNA
tccacttgttaacagagacc

SEQ ID NO: 34561 - DNA, 20 bp, synthetic construct
  source 1..20: mol_type = other DNA
agcatcccgacatgtatgag

SEQ ID NO: 34562 - DNA, 20 bp, synthetic construct
  source 1..20: mol_type = other DNA
gccttctgaggatgttgcaa

SEQ ID NO: 34563 - DNA, 20 bp, synthetic construct
  source 1..20: mol_type = other DNA
tccgtcaccacggctgctgt

SEQ ID NO: 34564 - DNA, 20 bp, synthetic construct
  source 1..20: mol_type = other DNA
ggatcctgtagtgtctgatc

SEQ ID NO: 34565 - DNA, 20 bp, synthetic construct
  source 1..20: mol_type = other DNA
cccgctggtgcagacgcccc

SEQ ID NO: 34566 - DNA, 20 bp, synthetic construct
  source 1..20: mol_type = other DNA
ggccgtggaggcctgaggtg

SEQ ID NO: 34567 - DNA, 20 bp, synthetic construct
  source 1..20: mol_type = other DNA
gaaggagaacagtttacatc

SEQ ID NO: 34568 - DNA, 20 bp, synthetic construct
  source 1..20: mol_type = other DNA
gggataccagttgatgctgg

SEQ ID NO: 34569 - DNA, 20 bp, synthetic construct
  source 1..20: mol_type = other DNA
cttggtgaccagcagcagcc

SEQ ID NO: 34570 - DNA, 20 bp, synthetic construct
  source 1..20: mol_type = other DNA
atttcatccaagaactaaat

SEQ ID NO: 34571 - DNA, 20 bp, synthetic construct
  source 1..20: mol_type = other DNA
tttgtaccagttggggtcct

SEQ ID NO: 34572 - DNA, 20 bp, synthetic construct
  source 1..20: mol_type = other DNA
tcaggaacatggtgaggacg

SEQ ID NO: 34573 - DNA, 20 bp, synthetic construct
  source 1..20: mol_type = other DNA
acagattgccacattagccc

SEQ ID NO: 34574 - DNA, 20 bp, synthetic construct
  source 1..20: mol_type = other DNA
aggggccccatcacggggcc

SEQ ID NO: 34575 - DNA, 20 bp, synthetic construct
  source 1..20: mol_type = other DNA
ccggccggaggggcgagcag

SEQ ID NO: 34576 - DNA, 20 bp, synthetic construct
  source 1..20: mol_type = other DNA
actgggccatggaagagatg

SEQ ID NO: 34577 - DNA, 20 bp, synthetic construct
  source 1..20: mol_type = other DNA
gcccccgggcggttccgagg

SEQ ID NO: 34578 - DNA, 20 bp, synthetic construct
  source 1..20: mol_type = other DNA
tgggtccttacccttgatgt

SEQ ID NO: 34579 - DNA, 20 bp, synthetic construct
  source 1..20: mol_type = other DNA
tgggtgtcttaccgtcatcg

SEQ ID NO: 34580 - DNA, 20 bp, synthetic construct
  source 1..20: mol_type = other DNA
ctttcctagccggactacgt

SEQ ID NO: 34581 - DNA, 20 bp, synthetic construct
  source 1..20: mol_type = other DNA
cgccactgcccaggccttcc

SEQ ID NO: 34582 - DNA, 20 bp, synthetic construct
  source 1..20: mol_type = other DNA
catctccagcctgggctcat

SEQ ID NO: 34583 - DNA, 20 bp, synthetic construct
  source 1..20: mol_type = other DNA
gggccggagctccaagcagt

SEQ ID NO: 34584 - DNA, 20 bp, synthetic construct
  source 1..20: mol_type = other DNA
ccttctactgcgagcgccgc

SEQ ID NO: 34585 - DNA, 20 bp, synthetic construct
  source 1..20: mol_type = other DNA
actgatcattaagaagtcca

SEQ ID NO: 34586 - DNA, 20 bp, synthetic construct
  source 1..20: mol_type = other DNA
tggaatggtaaaagaaggta

SEQ ID NO: 34587 - DNA, 20 bp, synthetic construct
  source 1..20: mol_type = other DNA
aaggggtattctggcaaaag

SEQ ID NO: 34588 - DNA, 20 bp, synthetic construct
  source 1..20: mol_type = other DNA
tctgcaataccctgtgccgc

SEQ ID NO: 34589 - DNA, 20 bp, synthetic construct
  source 1..20: mol_type = other DNA
tctgatcctcgccattcctg

SEQ ID NO: 34590 - DNA, 20 bp, synthetic construct
  source 1..20: mol_type = other DNA
gtctagtttggcatctcgaa

SEQ ID NO: 34591 - DNA, 20 bp, synthetic construct
  source 1..20: mol_type = other DNA
tgccaaaccactgttccttc

SEQ ID NO: 34592 - DNA, 20 bp, synthetic construct
  source 1..20: mol_type = other DNA
gcggaggagaaaggttccgt

SEQ ID NO: 34593 - DNA, 20 bp, synthetic construct
  source 1..20: mol_type = other DNA
tcggagctggcggggggctg

SEQ ID NO: 34594 - DNA, 20 bp, synthetic construct
  source 1..20: mol_type = other DNA
ttgtgaaacaacagtgccac

SEQ ID NO: 34595 - DNA, 20 bp, synthetic construct
  source 1..20: mol_type = other DNA
ctacagatttctccatctag

SEQ ID NO: 34596 - DNA, 20 bp, synthetic construct
  source 1..20: mol_type = other DNA
cctggccaagcacatccgag

SEQ ID NO: 34597 - DNA, 20 bp, synthetic construct
  source 1..20: mol_type = other DNA
ctccggaaagcctcatcctt

SEQ ID NO: 34598 - DNA, 20 bp, synthetic construct
  source 1..20: mol_type = other DNA
ctcatcctcaggcagcccaa

SEQ ID NO: 34599 - DNA, 20 bp, synthetic construct
  source 1..20: mol_type = other DNA
gtatgctgtgagagaggagg

SEQ ID NO: 34600 - DNA, 20 bp, synthetic construct
  source 1..20: mol_type = other DNA
cacacctggggccaggacag

SEQ ID NO: 34601 - DNA, 20 bp, synthetic construct
  source 1..20: mol_type = other DNA
aatacaggcgctacctcttc

SEQ ID NO: 34602 - DNA, 20 bp, synthetic construct
  source 1..20: mol_type = other DNA
gcagcaggaggcggcggcgg

SEQ ID NO: 34603 - DNA, 20 bp, synthetic construct
  source 1..20: mol_type = other DNA
acctccagatatattgatgg

SEQ ID NO: 34604 - DNA, 20 bp, synthetic construct
  source 1..20: mol_type = other DNA
tgtcgtattcttggaagagc

SEQ ID NO: 34605 - DNA, 20 bp, synthetic construct
  source 1..20: mol_type = other DNA
aacagcagtagcagcagcag

SEQ ID NO: 34606 - DNA, 20 bp, synthetic construct
  source 1..20: mol_type = other DNA
agacttttgacgcttgactg

SEQ ID NO: 34607 - DNA, 20 bp, synthetic construct
  source 1..20: mol_type = other DNA
gggggcaagcagtacctcct

SEQ ID NO: 34608 - DNA, 20 bp, synthetic construct
  source 1..20: mol_type = other DNA
gcaggtagaggaaggatggt

SEQ ID NO: 34609 - DNA, 20 bp, synthetic construct
  source 1..20: mol_type = other DNA
aacttaccatagacatctgg

SEQ ID NO: 34610 - DNA, 20 bp, synthetic construct
  source 1..20: mol_type = other DNA
ctggaggctggaggaatgga

SEQ ID NO: 34611 - DNA, 20 bp, synthetic construct
  source 1..20: mol_type = other DNA
ctgagcggcggtgtgtcggg

SEQ ID NO: 34612 - DNA, 20 bp, synthetic construct
  source 1..20: mol_type = other DNA
gagtcaggctgcgcagctcg

SEQ ID NO: 34613 - DNA, 20 bp, synthetic construct
  source 1..20: mol_type = other DNA
gaaggtaaaatcagtgactc

SEQ ID NO: 34614 - DNA, 20 bp, synthetic construct
  source 1..20: mol_type = other DNA
gaacttgtcttcccgtcgtg

SEQ ID NO: 34615 - DNA, 20 bp, synthetic construct
  source 1..20: mol_type = other DNA
gcaataccctgtgccgctgg

SEQ ID NO: 34616 - DNA, 20 bp, synthetic construct
  source 1..20: mol_type = other DNA
aagtgcacgcggatgctcgt

SEQ ID NO: 34617 - DNA, 20 bp, synthetic construct
  source 1..20: mol_type = other DNA
actggccaaaaagaagctcc

SEQ ID NO: 34618 - DNA, 20 bp, synthetic construct
  source 1..20: mol_type = other DNA
gcgacacatcgagcacatgg

SEQ ID NO: 34619 - DNA, 20 bp, synthetic construct
  source 1..20: mol_type = other DNA
tgcccagaacaacatcgaga

SEQ ID NO: 34620 - DNA, 20 bp, synthetic construct
  source 1..20: mol_type = other DNA
tgaagcaatatgtgtcatac

SEQ ID NO: 34621 - DNA, 20 bp, synthetic construct
  source 1..20: mol_type = other DNA
cgatgactgtggtccactgc

SEQ ID NO: 34622 - DNA, 20 bp, synthetic construct
  source 1..20: mol_type = other DNA
tggctttgtgggacacagct

SEQ ID NO: 34623 - DNA, 20 bp, synthetic construct
  source 1..20: mol_type = other DNA
cggcccggcgcgggcggcgg

SEQ ID NO: 34624 - DNA, 20 bp, synthetic construct
  source 1..20: mol_type = other DNA
taagccaagtcccaaaacct

SEQ ID NO: 34625 - DNA, 20 bp, synthetic construct
  source 1..20: mol_type = other DNA
gaacatgagaaaataccgaa

SEQ ID NO: 34626 - DNA, 20 bp, synthetic construct
  source 1..20: mol_type = other DNA
gtcgctgaagcggaggagaa

SEQ ID NO: 34627 - DNA, 20 bp, synthetic construct
  source 1..20: mol_type = other DNA
ctcgcctgtggcagatgcac

SEQ ID NO: 34628 - DNA, 20 bp, synthetic construct
  source 1..20: mol_type = other DNA
tgtgatctctgtagtggaga

SEQ ID NO: 34629 - DNA, 20 bp, synthetic construct
  source 1..20: mol_type = other DNA
ttctggcagaggggcccgga

SEQ ID NO: 34630 - DNA, 20 bp, synthetic construct
  source 1..20: mol_type = other DNA
ccaaggtacggcacggaggg

SEQ ID NO: 34631 - DNA, 20 bp, synthetic construct
  source 1..20: mol_type = other DNA
cattatccagaatggtgccc

SEQ ID NO: 34632 - DNA, 20 bp, synthetic construct
  source 1..20: mol_type = other DNA
ccttctggcagtggtttgac

SEQ ID NO: 34633 - DNA, 20 bp, synthetic construct
  source 1..20: mol_type = other DNA
tgggcccagccaggcccact

SEQ ID NO: 34634 - DNA, 20 bp, synthetic construct
  source 1..20: mol_type = other DNA
tacagagcaacattggcaca

SEQ ID NO: 34635 - DNA, 20 bp, synthetic construct
  source 1..20: mol_type = other DNA
aggaggactggaggaccctt

SEQ ID NO: 34636 - DNA, 20 bp, synthetic construct
  source 1..20: mol_type = other DNA
gtttctccgtatgtattact

SEQ ID NO: 34637 - DNA, 20 bp, synthetic construct
  source 1..20: mol_type = other DNA
tgtaaatgatcatagacatc

SEQ ID NO: 34638 - DNA, 20 bp, synthetic construct
  source 1..20: mol_type = other DNA
gctgtgtagcgggccgccca

SEQ ID NO: 34639 - DNA, 20 bp, synthetic construct
  source 1..20: mol_type = other DNA
gcaggtcatagtggtcccgg

SEQ ID NO: 34640 - DNA, 20 bp, synthetic construct
  source 1..20: mol_type = other DNA
gtgctgccggttctccaggt

SEQ ID NO: 34641 - DNA, 20 bp, synthetic construct
  source 1..20: mol_type = other DNA
tatctctcagtttgggcggc

SEQ ID NO: 34642 - DNA, 20 bp, synthetic construct
  source 1..20: mol_type = other DNA
acctggacagactctgggac

SEQ ID NO: 34643 - DNA, 20 bp, synthetic construct
  source 1..20: mol_type = other DNA
atgatgacattattgtcaac

SEQ ID NO: 34644 - DNA, 20 bp, synthetic construct
  source 1..20: mol_type = other DNA
caattgtgtctggcactgac

SEQ ID NO: 34645 - DNA, 20 bp, synthetic construct
  source 1..20: mol_type = other DNA
agcaggttagggaaaggagg

SEQ ID NO: 34646 - DNA, 20 bp, synthetic construct
  source 1..20: mol_type = other DNA
ccgaagctggacaaacacag

SEQ ID NO: 34647 - DNA, 20 bp, synthetic construct
  source 1..20: mol_type = other DNA
atcaccagagataactccca

SEQ ID NO: 34648 - DNA, 20 bp, synthetic construct
  source 1..20: mol_type = other DNA
agatcgttagcagaaacaaa

SEQ ID NO: 34649 - DNA, 20 bp, synthetic construct
  source 1..20: mol_type = other DNA
ggccgagggtgagggacagg

SEQ ID NO: 34650 - DNA, 20 bp, synthetic construct
  source 1..20: mol_type = other DNA
tccatgttgatgggggacac

SEQ ID NO: 34651 - DNA, 20 bp, synthetic construct
  source 1..20: mol_type = other DNA
cttcagctccttcatgttca

SEQ ID NO: 34652 - DNA, 20 bp, synthetic construct
  source 1..20: mol_type = other DNA
aagatggtgaagatggagcc

SEQ ID NO: 34653 - DNA, 20 bp, synthetic construct
  source 1..20: mol_type = other DNA
tgccgacagacaaggcctgg

SEQ ID NO: 34654 - DNA, 20 bp, synthetic construct
  source 1..20: mol_type = other DNA
agaatttcaggtgtcgtttc

SEQ ID NO: 34655 - DNA, 20 bp, synthetic construct
  source 1..20: mol_type = other DNA
ttcatcattccagttctaag

SEQ ID NO: 34656 - DNA, 20 bp, synthetic construct
  source 1..20: mol_type = other DNA
agtctgcaccagggcacagc

SEQ ID NO: 34657 - DNA, 20 bp, synthetic construct
  source 1..20: mol_type = other DNA
accatccacatgggctgcca

SEQ ID NO: 34658 - DNA, 20 bp, synthetic construct
  source 1..20: mol_type = other DNA
gggatggtaccttatgaccc

SEQ ID NO: 34659 - DNA, 20 bp, synthetic construct
  source 1..20: mol_type = other DNA
cgcgtcctgcgagttctcgg

SEQ ID NO: 34660 - DNA, 20 bp, synthetic construct
  source 1..20: mol_type = other DNA
aggcagcgggagaaaggtcg

SEQ ID NO: 34661 - DNA, 20 bp, synthetic construct
  source 1..20: mol_type = other DNA
ggcccagggcccttcctccc

SEQ ID NO: 34662 - DNA, 20 bp, synthetic construct
  source 1..20: mol_type = other DNA
agccactccttctcactcag

SEQ ID NO: 34663 - DNA, 20 bp, synthetic construct
  source 1..20: mol_type = other DNA
tgtaaaataaagggttctcc

SEQ ID NO: 34664 - DNA, 20 bp, synthetic construct
  source 1..20: mol_type = other DNA
gcaccatggggcaggtggga

SEQ ID NO: 34665 - DNA, 20 bp, synthetic construct
  source 1..20: mol_type = other DNA
cccgtgttctggtgaccagg

SEQ ID NO: 34666 - DNA, 20 bp, synthetic construct
  source 1..20: mol_type = other DNA
gacgcacctgcaaccgaagc

SEQ ID NO: 34667 - DNA, 20 bp, synthetic construct
  source 1..20: mol_type = other DNA
cctcatgtcccaacaagcca

SEQ ID NO: 34668 - DNA, 20 bp, synthetic construct
  source 1..20: mol_type = other DNA
aactgcaggccgaacttcag

SEQ ID NO: 34669 - DNA, 20 bp, synthetic construct
  source 1..20: mol_type = other DNA
agcctacctgtgagaggtga

SEQ ID NO: 34670 - DNA, 20 bp, synthetic construct
  source 1..20: mol_type = other DNA
ccagtttaaggagatgccca

SEQ ID NO: 34671 - DNA, 20 bp, synthetic construct
  source 1..20: mol_type = other DNA
gccacttccggagccatcct

SEQ ID NO: 34672 - DNA, 20 bp, synthetic construct
  source 1..20: mol_type = other DNA
ttagtgaggtcctgttcagt

SEQ ID NO: 34673 - DNA, 20 bp, synthetic construct
  source 1..20: mol_type = other DNA
atcttgaggattcatgttac

SEQ ID NO: 34674 - DNA, 20 bp, synthetic construct
  source 1..20: mol_type = other DNA
cggttcacctggagctggat

SEQ ID NO: 34675 - DNA, 20 bp, synthetic construct
  source 1..20: mol_type = other DNA
agcgagtgtacagccgaggt

SEQ ID NO: 34676 - DNA, 20 bp, synthetic construct
  source 1..20: mol_type = other DNA
tccaacaccacccggagaca

SEQ ID NO: 34677 - DNA, 20 bp, synthetic construct
  source 1..20: mol_type = other DNA
gaaggaggacggttgtgttg

SEQ ID NO: 34678 - DNA, 20 bp, synthetic construct
  source 1..20: mol_type = other DNA
cggggccggggcgcgggcgg

SEQ ID NO: 34679 - DNA, 20 bp, synthetic construct
  source 1..20: mol_type = other DNA
ggcaccgctgggcctgagag

SEQ ID NO: 34680 - DNA, 20 bp, synthetic construct
  source 1..20: mol_type = other DNA
aactacgtccagaagcggga

SEQ ID NO: 34681 - DNA, 20 bp, synthetic construct
  source 1..20: mol_type = other DNA
ccttgggctggaaacctgag

SEQ ID NO: 34682 - DNA, 20 bp, synthetic construct
  source 1..20: mol_type = other DNA
ccggagctccaagcagtggg

SEQ ID NO: 34683 - DNA, 20 bp, synthetic construct
  source 1..20: mol_type = other DNA
aaaacagtaagtgtccccgg

SEQ ID NO: 34684 - DNA, 20 bp, synthetic construct
  source 1..20: mol_type = other DNA
ctatataggggagaaaggga

SEQ ID NO: 34685 - DNA, 20 bp, synthetic construct
  source 1..20: mol_type = other DNA
ccagaccccaatccaaggta

SEQ ID NO: 34686 - DNA, 20 bp, synthetic construct
  source 1..20: mol_type = other DNA
gcagtcactctttaaaccag

SEQ ID NO: 34687 - DNA, 20 bp, synthetic construct
  source 1..20: mol_type = other DNA
acgcaggaagttgtccaggc

SEQ ID NO: 34688 - DNA, 20 bp, synthetic construct
  source 1..20: mol_type = other DNA
tgtctgccgggaagtgctcc

SEQ ID NO: 34689 - DNA, 20 bp, synthetic construct
  source 1..20: mol_type = other DNA
caggtcaatggtattgctgc

SEQ ID NO: 34690 - DNA, 20 bp, synthetic construct
  source 1..20: mol_type = other DNA
catggtggctccaacctctg

SEQ ID NO: 34691 - DNA, 20 bp, synthetic construct
  source 1..20: mol_type = other DNA
ctgcatctcctgccctgagc

SEQ ID NO: 34692 - DNA, 20 bp, synthetic construct
  source 1..20: mol_type = other DNA
cccggcagcctttggtgtcc

SEQ ID NO: 34693 - DNA, 20 bp, synthetic construct
  source 1..20: mol_type = other DNA
actttctccttccaaatcaa

SEQ ID NO: 34694 - DNA, 20 bp, synthetic construct
  source 1..20: mol_type = other DNA
tgtgttggcagaccccagcg

SEQ ID NO: 34695 - DNA, 20 bp, synthetic construct
  source 1..20: mol_type = other DNA
cgcctaatgcaaggaaaaag

SEQ ID NO: 34696 - DNA, 20 bp, synthetic construct
  source 1..20: mol_type = other DNA
gccccatgctaggggcaaag

SEQ ID NO: 34697 - DNA, 20 bp, synthetic construct
  source 1..20: mol_type = other DNA
gtctgttcaaagaaagagaa

SEQ ID NO: 34698 - DNA, 20 bp, synthetic construct
  source 1..20: mol_type = other DNA
acagctttggtaaggagccg

SEQ ID NO: 34699 - DNA, 20 bp, synthetic construct
  source 1..20: mol_type = other DNA
atatgaggatttccttctga

SEQ ID NO: 34700 - DNA, 20 bp, synthetic construct
  source 1..20: mol_type = other DNA
tagatttctatggggaagta

SEQ ID NO: 34701 - DNA, 20 bp, synthetic construct
  source 1..20: mol_type = other DNA
ggcagccaacatggcggcgg

SEQ ID NO: 34702 - DNA, 20 bp, synthetic construct
  source 1..20: mol_type = other DNA
tcatcagcgtggaggacctg

SEQ ID NO: 34703 - DNA, 20 bp, synthetic construct
  source 1..20: mol_type = other DNA
atggcctcgcagacatctct

SEQ ID NO: 34704 - DNA, 20 bp, synthetic construct
  source 1..20: mol_type = other DNA
cctccccgttgactgtgggc

SEQ ID NO: 34705 - DNA, 20 bp, synthetic construct
  source 1..20: mol_type = other DNA
ggacatagaacaggtgccac

SEQ ID NO: 34706 - DNA, 20 bp, synthetic construct
  source 1..20: mol_type = other DNA
ctctgtcggaagaccgtcaa

SEQ ID NO: 34707 - DNA, 20 bp, synthetic construct
  source 1..20: mol_type = other DNA
tgagcgcgtcttctgagggc

SEQ ID NO: 34708 - DNA, 20 bp, synthetic construct
  source 1..20: mol_type = other DNA
gtggtggtggtgcggctgga

SEQ ID NO: 34709 - DNA, 20 bp, synthetic construct
  source 1..20: mol_type = other DNA
cggcgtgcagggtgacgtcg

SEQ ID NO: 34710 - DNA, 20 bp, synthetic construct
  source 1..20: mol_type = other DNA
gcagcacccacgtggggcag

SEQ ID NO: 34711 - DNA, 20 bp, synthetic construct
  source 1..20: mol_type = other DNA
aaaggtcatggagggcacag

SEQ ID NO: 34712 - DNA, 20 bp, synthetic construct
  source 1..20: mol_type = other DNA
agtgggacatcgagaagctg

SEQ ID NO: 34713 - DNA, 20 bp, synthetic construct
  source 1..20: mol_type = other DNA
gactgtggggtgttttaggg

SEQ ID NO: 34714 - DNA, 20 bp, synthetic construct
  source 1..20: mol_type = other DNA
tgtggactacctgcggtcta

SEQ ID NO: 34715 - DNA, 20 bp, synthetic construct
  source 1..20: mol_type = other DNA
tattttacatagttggaatg

SEQ ID NO: 34716 - DNA, 20 bp, synthetic construct
  source 1..20: mol_type = other DNA
atatcctctacaaatagggc

SEQ ID NO: 34717 - DNA, 20 bp, synthetic construct
  source 1..20: mol_type = other DNA
atgagccagagagaaagctc

SEQ ID NO: 34718 - DNA, 20 bp, synthetic construct
  source 1..20: mol_type = other DNA
cagctccttacaccatatct

SEQ ID NO: 34719 - DNA, 20 bp, synthetic construct
  source 1..20: mol_type = other DNA
cgtcatgctcaacagagtga

SEQ ID NO: 34720 - DNA, 20 bp, synthetic construct
  source 1..20: mol_type = other DNA
gctgcgggccgcacagggag

SEQ ID NO: 34721 - DNA, 20 bp, synthetic construct
  source 1..20: mol_type = other DNA
cctgtcccaagtacatcaag

SEQ ID NO: 34722 - DNA, 20 bp, synthetic construct
  source 1..20: mol_type = other DNA
agaaaagtggtgaggggagt

SEQ ID NO: 34723 - DNA, 20 bp, synthetic construct
  source 1..20: mol_type = other DNA
cttccatggtcacaggtccc

SEQ ID NO: 34724 - DNA, 20 bp, synthetic construct
  source 1..20: mol_type = other DNA
tcccacctgtcagcttatcc

SEQ ID NO: 34725 - DNA, 20 bp, synthetic construct
  source 1..20: mol_type = other DNA
gttttacaagaaggaaaaca

SEQ ID NO: 34726 - DNA, 20 bp, synthetic construct
  source 1..20: mol_type = other DNA
tgaccctagggggcgagaga

SEQ ID NO: 34727 - DNA, 20 bp, synthetic construct
  source 1..20: mol_type = other DNA
gcacgcagagcgcgtatgcc

SEQ ID NO: 34728 - DNA, 20 bp, synthetic construct
  source 1..20: mol_type = other DNA
atcagcgtcctcctcctgag

SEQ ID NO: 34729 - DNA, 20 bp, synthetic construct
  source 1..20: mol_type = other DNA
ctgcgagagggggatggtgg

SEQ ID NO: 34730 - DNA, 20 bp, synthetic construct
  source 1..20: mol_type = other DNA
tgtgcggccgatgccggcgc

SEQ ID NO: 34731 - DNA, 20 bp, synthetic construct
  source 1..20: mol_type = other DNA
ggcctcaaaggtgtcatctg

SEQ ID NO: 34732 - DNA, 20 bp, synthetic construct
  source 1..20: mol_type = other DNA
cagaaggtcttcctacactt

SEQ ID NO: 34733 - DNA, 20 bp, synthetic construct
  source 1..20: mol_type = other DNA
ggggcagccatgagtctcca

SEQ ID NO: 34734 - DNA, 20 bp, synthetic construct
  source 1..20: mol_type = other DNA
cagattgggtgagtaaggct

SEQ ID NO: 34735 - DNA, 20 bp, synthetic construct
  source 1..20: mol_type = other DNA
cagcaccgccacctcgcgga

SEQ ID NO: 34736 - DNA, 20 bp, synthetic construct
  source 1..20: mol_type = other DNA
ccttcagaaggaggcgggtg

SEQ ID NO: 34737 - DNA, 20 bp, synthetic construct
  source 1..20: mol_type = other DNA
tactggtgagtggcgcccag

SEQ ID NO: 34738 - DNA, 20 bp, synthetic construct
  source 1..20: mol_type = other DNA
aatgaactgataacggagaa

SEQ ID NO: 34739 - DNA, 20 bp, synthetic construct
  source 1..20: mol_type = other DNA
gcccggcaacgctgcttggg

SEQ ID NO: 34740 - DNA, 20 bp, synthetic construct
  source 1..20: mol_type = other DNA
ctgttggggcctgaaggagg

SEQ ID NO: 34741 - DNA, 20 bp, synthetic construct
  source 1..20: mol_type = other DNA
tccggagacagcgtttggtg

SEQ ID NO: 34742 - DNA, 20 bp, synthetic construct
  source 1..20: mol_type = other DNA
gcacctctggatggtccagt

SEQ ID NO: 34743 - DNA, 20 bp, synthetic construct
  source 1..20: mol_type = other DNA
ctttgactttgatccccagg

SEQ ID NO: 34744 - DNA, 20 bp, synthetic construct
  source 1..20: mol_type = other DNA
gaccttggtcttagtttgat

SEQ ID NO: 34745 - DNA, 20 bp, synthetic construct
  source 1..20: mol_type = other DNA
tgcacgtcagctgacacttt

SEQ ID NO: 34746 - DNA, 20 bp, synthetic construct
  source 1..20: mol_type = other DNA
agaaggcatcctccactccc

SEQ ID NO: 34747 - DNA, 20 bp, synthetic construct
  source 1..20: mol_type = other DNA
cggaggaaccgtttcaagtg

SEQ ID NO: 34748 - DNA, 20 bp, synthetic construct
  source 1..20: mol_type = other DNA
actgcagtgcaggcatcggc

SEQ ID NO: 34749 - DNA, 20 bp, synthetic construct
  source 1..20: mol_type = other DNA
tatgcacagaatgaggtgta

SEQ ID NO: 34750 - DNA, 20 bp, synthetic construct
  source 1..20: mol_type = other DNA
accgtcatcggggtgttctc

SEQ ID NO: 34751 - DNA, 20 bp, synthetic construct
  source 1..20: mol_type = other DNA
aggagatgtgagtggcagct

SEQ ID NO: 34752 - DNA, 20 bp, synthetic construct
  source 1..20: mol_type = other DNA
caaacactgtgatgtctgtg

SEQ ID NO: 34753 - DNA, 20 bp, synthetic construct
  source 1..20: mol_type = other DNA
atctgagcacagagtggaaa

SEQ ID NO: 34754 - DNA, 20 bp, synthetic construct
  source 1..20: mol_type = other DNA
cacgccgtagtgctggcagg

SEQ ID NO: 34755 - DNA, 20 bp, synthetic construct
  source 1..20: mol_type = other DNA
ggccggggggccgggcccgg

SEQ ID NO: 34756 - DNA, 20 bp, synthetic construct
  source 1..20: mol_type = other DNA
ctcgggcgcagaagtcatag

SEQ ID NO: 34757 - DNA, 20 bp, synthetic construct
  source 1..20: mol_type = other DNA
tccagctggggtctatgttg

SEQ ID NO: 34758 - DNA, 20 bp, synthetic construct
  source 1..20: mol_type = other DNA
aacagcttgggcggcgcggg

SEQ ID NO: 34759 - DNA, 20 bp, synthetic construct
  source 1..20: mol_type = other DNA
agtctagggtaagaagggaa

SEQ ID NO: 34760 - DNA, 20 bp, synthetic construct
  source 1..20: mol_type = other DNA
ccactactgcctgttgtctt

SEQ ID NO: 34761 - DNA, 20 bp, synthetic construct
  source 1..20: mol_type = other DNA
acattgtctagggatataaa

SEQ ID NO: 34762 - DNA, 20 bp, synthetic construct
  source 1..20: mol_type = other DNA
cagttggggtcctggggaga

SEQ ID NO: 34763 - DNA, 20 bp, synthetic construct
  source 1..20: mol_type = other DNA
gtgaacctaccgtgaactct

SEQ ID NO: 34764 - DNA, 20 bp, synthetic construct
  source 1..20: mol_type = other DNA
ccgccacgcattcgtactgc

SEQ ID NO: 34765 - DNA, 20 bp, synthetic construct
  source 1..20: mol_type = other DNA
cactaagcaggaagatgtgg

SEQ ID NO: 34766 - DNA, 20 bp, synthetic construct
  source 1..20: mol_type = other DNA
accaggacacagaacggtgc

SEQ ID NO: 34767 - DNA, 20 bp, synthetic construct
  source 1..20: mol_type = other DNA
ttctgctcacaccactggga

SEQ ID NO: 34768 - DNA, 20 bp, synthetic construct
  source 1..20: mol_type = other DNA
aaagaaacttacgcagtaca

SEQ ID NO: 34769 - DNA, 20 bp, synthetic construct
  source 1..20: mol_type = other DNA
cctggagtaatactttccaa

SEQ ID NO: 34770 - DNA, 20 bp, synthetic construct
  source 1..20: mol_type = other DNA
gccgattcttccacccagag

SEQ ID NO: 34771 - DNA, 20 bp, synthetic construct
  source 1..20: mol_type = other DNA
gaggtgtgcagagccctggg

SEQ ID NO: 34772 - DNA, 20 bp, synthetic construct
  source 1..20: mol_type = other DNA
caccggggcgtgggtgagca

SEQ ID NO: 34773 - DNA, 20 bp, synthetic construct
  source 1..20: mol_type = other DNA
cccagagatccttgatgcgg

SEQ ID NO: 34774 - DNA, 20 bp, synthetic construct
  source 1..20: mol_type = other DNA
tgcgtggcggagatcgggga

SEQ ID NO: 34775 - DNA, 20 bp, synthetic construct
  source 1..20: mol_type = other DNA
tgtgtgtctccgatgcatga

SEQ ID NO: 34776 - DNA, 20 bp, synthetic construct
  source 1..20: mol_type = other DNA
gccagcgtcacggtggcgta

SEQ ID NO: 34777 - DNA, 20 bp, synthetic construct
  source 1..20: mol_type = other DNA
actcacacctgcagctacgc

SEQ ID NO: 34778 - DNA, 20 bp, synthetic construct
  source 1..20: mol_type = other DNA
tttacaagaaggaaaacatg

SEQ ID NO: 34779 - DNA, 20 bp, synthetic construct
  source 1..20: mol_type = other DNA
tcacccatgcagggcaggga

SEQ ID NO: 34780 - DNA, 20 bp, synthetic construct
  source 1..20: mol_type = other DNA
agaaatacggtccgaaacgt

SEQ ID NO: 34781 - DNA, 20 bp, synthetic construct
  source 1..20: mol_type = other DNA
agtgcacaacctgcggatcc

SEQ ID NO: 34782 - DNA, 20 bp, synthetic construct
  source 1..20: mol_type = other DNA
gcactcaccctggaagcgct

SEQ ID NO: 34783 - DNA, 20 bp, synthetic construct
  source 1..20: mol_type = other DNA
cacgacagcagtctgcatct

SEQ ID NO: 34784 - DNA, 20 bp, synthetic construct
  source 1..20: mol_type = other DNA
aactagaaaacatacaaaat

SEQ ID NO: 34785 - DNA, 20 bp, synthetic construct
  source 1..20: mol_type = other DNA
agagcaactggtgagacact

SEQ ID NO: 34786 - DNA, 20 bp, synthetic construct
  source 1..20: mol_type = other DNA
ggcaccaggtagtccaccat

SEQ ID NO: 34787 - DNA, 20 bp, synthetic construct
  source 1..20: mol_type = other DNA
aaccctacctttagttaaga

SEQ ID NO: 34788 - DNA, 20 bp, synthetic construct
  source 1..20: mol_type = other DNA
atggactacagcctgctggt

SEQ ID NO: 34789 - DNA, 20 bp, synthetic construct
  source 1..20: mol_type = other DNA
tccccccaaggtaaggccct

SEQ ID NO: 34790 - DNA, 20 bp, synthetic construct
  source 1..20: mol_type = other DNA
aatgtactgatttataatgc

SEQ ID NO: 34791 - DNA, 20 bp, synthetic construct
  source 1..20: mol_type = other DNA
ccagaggactcggtcacacc

SEQ ID NO: 34792 - DNA, 20 bp, synthetic construct
  source 1..20: mol_type = other DNA
ggtgcagctcctggagctga

SEQ ID NO: 34793 - DNA, 20 bp, synthetic construct
  source 1..20: mol_type = other DNA
tccctttcagactatctgta

SEQ ID NO: 34794 - DNA, 20 bp, synthetic construct
  source 1..20: mol_type = other DNA
gaggagaagtcgacatgccc

SEQ ID NO: 34795 - DNA, 20 bp, synthetic construct
  source 1..20: mol_type = other DNA
ccacgggcacccccagcctc

SEQ ID NO: 34796 - DNA, 20 bp, synthetic construct
  source 1..20: mol_type = other DNA
cccccaggtatgttgtgggg

SEQ ID NO: 34797 - DNA, 20 bp, synthetic construct
  source 1..20: mol_type = other DNA
ctcctaccagagactggtga

SEQ ID NO: 34798 - DNA, 20 bp, synthetic construct
  source 1..20: mol_type = other DNA
gccgacgccatccaccgcgg

SEQ ID NO: 34799 - DNA, 20 bp, synthetic construct
  source 1..20: mol_type = other DNA
tccaatgcaccgcacaggaa

SEQ ID NO: 34800 - DNA, 20 bp, synthetic construct
  source 1..20: mol_type = other DNA
cttcacctccgagaccttcc

SEQ ID NO: 34801 - DNA, 20 bp, synthetic construct
  source 1..20: mol_type = other DNA
cctggaacaagaacatgccc

SEQ ID NO: 34802 - DNA, 20 bp, synthetic construct
  source 1..20: mol_type = other DNA
agtgatatacatagtttatt

SEQ ID NO: 34803 - DNA, 20 bp, synthetic construct
  source 1..20: mol_type = other DNA
ggagagcatgcccttgaggt

SEQ ID NO: 34804 - DNA, 20 bp, synthetic construct
  source 1..20: mol_type = other DNA
tcctcaggtcacaccccaag

SEQ ID NO: 34805 - DNA, 20 bp, synthetic construct
  source 1..20: mol_type = other DNA
tgtgtacaaggcccgcaaca

SEQ ID NO: 34806 - DNA, 20 bp, synthetic construct
  source 1..20: mol_type = other DNA
aactctagaatagtagggaa

SEQ ID NO: 34807 - DNA, 20 bp, synthetic construct
  source 1..20: mol_type = other DNA
ctcttcaatggtgggccctg

SEQ ID NO: 34808 - DNA, 20 bp, synthetic construct
  source 1..20: mol_type = other DNA
ggtgatgagggaaggcataa

SEQ ID NO: 34809 - DNA, 20 bp, synthetic construct
  source 1..20: mol_type = other DNA
tgtgctaccatcctacagaa

SEQ ID NO: 34810 - DNA, 20 bp, synthetic construct
  source 1..20: mol_type = other DNA
gttcgagaccaacgtgtccg

SEQ ID NO: 34811 - DNA, 20 bp, synthetic construct
  source 1..20: mol_type = other DNA
cgagatggagcagctcaagg

SEQ ID NO: 34812 - DNA, 20 bp, synthetic construct
  source 1..20: mol_type = other DNA
aggttaaatgtgcacagtac

SEQ ID NO: 34813 - DNA, 20 bp, synthetic construct
  source 1..20: mol_type = other DNA
aagaaagagcaagaaggcaa

SEQ ID NO: 34814 - DNA, 20 bp, synthetic construct
  source 1..20: mol_type = other DNA
gctactttgtggattctgct

SEQ ID NO: 34815 - DNA, 20 bp, synthetic construct
  source 1..20: mol_type = other DNA
cttacagaagaaggcaaacc

SEQ ID NO: 34816 - DNA, 20 bp, synthetic construct
  source 1..20: mol_type = other DNA
cgtgctcacctcctcgatgg

SEQ ID NO: 34817 - DNA, 20 bp, synthetic construct
  source 1..20: mol_type = other DNA
caccgggatggccttggatg

SEQ ID NO: 34818 - DNA, 20 bp, synthetic construct
  source 1..20: mol_type = other DNA
cccggtgtcgacgctgatgc

SEQ ID NO: 34819 - DNA, 20 bp, synthetic construct
  source 1..20: mol_type = other DNA
tgcaggtagaggaaggatgg

SEQ ID NO: 34820 - DNA, 20 bp, synthetic construct
  source 1..20: mol_type = other DNA
tgcccagctgaatgagtatg

SEQ ID NO: 34821 - DNA, 20 bp, synthetic construct
  source 1..20: mol_type = other DNA
tttgctcaggtaggaagttt

SEQ ID NO: 34822 - DNA, 20 bp, synthetic construct
  source 1..20: mol_type = other DNA
gtcacctgaggacagaaagg

SEQ ID NO: 34823 - DNA, 20 bp, synthetic construct
  source 1..20: mol_type = other DNA
tcttggaggcatctcttcca

SEQ ID NO: 34824 - DNA, 20 bp, synthetic construct
  source 1..20: mol_type = other DNA
tcctggacagctcagtgagt

SEQ ID NO: 34825 - DNA, 20 bp, synthetic construct
  source 1..20: mol_type = other DNA
agtgctggaattggccggac

SEQ ID NO: 34826 - DNA, 20 bp, synthetic construct
  source 1..20: mol_type = other DNA
ctcatcctcactgtgacaca

SEQ ID NO: 34827 - DNA, 20 bp, synthetic construct
  source 1..20: mol_type = other DNA
gcacatcctgtcttacatcc

SEQ ID NO: 34828 - DNA, 20 bp, synthetic construct
  source 1..20: mol_type = other DNA
acagcagcccagacagaatg

SEQ ID NO: 34829 - DNA, 20 bp, synthetic construct
  source 1..20: mol_type = other DNA
ttaaactccgggacggccgc

SEQ ID NO: 34830 - DNA, 20 bp, synthetic construct
  source 1..20: mol_type = other DNA
gtgtgggagcagaaaagcag

SEQ ID NO: 34831 - DNA, 20 bp, synthetic construct
  source 1..20: mol_type = other DNA
agaggttcaggtaaatatta

SEQ ID NO: 34832 - DNA, 20 bp, synthetic construct
  source 1..20: mol_type = other DNA
cagctcctggagctgagggc

SEQ ID NO: 34833 - DNA, 20 bp, synthetic construct
  source 1..20: mol_type = other DNA
tgtgcgcctccctcttcctg

SEQ ID NO: 34834 - DNA, 20 bp, synthetic construct
  source 1..20: mol_type = other DNA
gccagcttcacacttggccc

SEQ ID NO: 34835 - DNA, 20 bp, synthetic construct
  source 1..20: mol_type = other DNA
cctggaacatctgaggacac

SEQ ID NO: 34836 - DNA, 20 bp, synthetic construct
  source 1..20: mol_type = other DNA
catcatcgtccatcagtttg

SEQ ID NO: 34837 - DNA, 20 bp, synthetic construct
  source 1..20: mol_type = other DNA
agaagacctccttgttccca

SEQ ID NO: 34838 - DNA, 20 bp, synthetic construct
  source 1..20: mol_type = other DNA
ctgatcgctgacggcggcgg

SEQ ID NO: 34839 - DNA, 20 bp, synthetic construct
  source 1..20: mol_type = other DNA
ctcggccaggccgtcgggga

SEQ ID NO: 34840 - DNA, 20 bp, synthetic construct
  source 1..20: mol_type = other DNA
ggtctctcgtctttctcagc

SEQ ID NO: 34841 - DNA, 20 bp, synthetic construct
  source 1..20: mol_type = other DNA
actggtgagtggcgcccagc

SEQ ID NO: 34842 - DNA, 20 bp, synthetic construct
  source 1..20: mol_type = other DNA
agggggctccaggccgggca

SEQ ID NO: 34843 - DNA, 20 bp, synthetic construct
  source 1..20: mol_type = other DNA
ggtgtgtaggtgacaaggaa

SEQ ID NO: 34844 - DNA, 20 bp, synthetic construct
  source 1..20: mol_type = other DNA
gtgccctacttcaaggataa

SEQ ID NO: 34845 - DNA, 20 bp, synthetic construct
  source 1..20: mol_type = other DNA
cgggccacgggctgaaggtc

SEQ ID NO: 34846 - DNA, 20 bp, synthetic construct
  source 1..20: mol_type = other DNA
tcctccaggggccatgctgg

SEQ ID NO: 34847 - DNA, 20 bp, synthetic construct
  source 1..20: mol_type = other DNA
actcagcgtggccgtggagg

SEQ ID NO: 34848 - DNA, 20 bp, synthetic construct
  source 1..20: mol_type = other DNA
cttcctcatcacagtcccca

SEQ ID NO: 34849 - DNA, 20 bp, synthetic construct
  source 1..20: mol_type = other DNA
cctaagagtggcgggaagca

SEQ ID NO: 34850 - DNA, 20 bp, synthetic construct
  source 1..20: mol_type = other DNA
gacacagaagtatttgtgac

SEQ ID NO: 34851 - DNA, 20 bp, synthetic construct
  source 1..20: mol_type = other DNA
gcagcagctgggtctctgca

SEQ ID NO: 34852 - DNA, 20 bp, synthetic construct
  source 1..20: mol_type = other DNA
gtcacagcttttaatgcctg

SEQ ID NO: 34853 - DNA, 20 bp, synthetic construct
  source 1..20: mol_type = other DNA
caagagcgtgccctacttca

SEQ ID NO: 34854 - DNA, 20 bp, synthetic construct
  source 1..20: mol_type = other DNA
ggaagccgtggcagcccatg

SEQ ID NO: 34855 - DNA, 20 bp, synthetic construct
  source 1..20: mol_type = other DNA
cacagtgtttgagaactatg

SEQ ID NO: 34856 - DNA, 20 bp, synthetic construct
  source 1..20: mol_type = other DNA
ttcacgagaagattcaggag

SEQ ID NO: 34857 - DNA, 20 bp, synthetic construct
  source 1..20: mol_type = other DNA
cagaaacatccaggccaccc

SEQ ID NO: 34858 - DNA, 20 bp, synthetic construct
  source 1..20: mol_type = other DNA
aagtccaagctctactccat

SEQ ID NO: 34859 - DNA, 20 bp, synthetic construct
  source 1..20: mol_type = other DNA
tgggtgagacagggcactgt

SEQ ID NO: 34860 - DNA, 20 bp, synthetic construct
  source 1..20: mol_type = other DNA
ggaagtgcagcgctttgccc

SEQ ID NO: 34861 - DNA, 20 bp, synthetic construct
  source 1..20: mol_type = other DNA
tgcggccgatgccggcgctg

SEQ ID NO: 34862 - DNA, 20 bp, synthetic construct
  source 1..20: mol_type = other DNA
gagaagctgtgggtggggtg

SEQ ID NO: 34863 - DNA, 20 bp, synthetic construct
  source 1..20: mol_type = other DNA
caagaacggtaagcaaagga

SEQ ID NO: 34864 - DNA, 20 bp, synthetic construct
  source 1..20: mol_type = other DNA
gctcgatgcctaagatgggg

SEQ ID NO: 34865 - DNA, 20 bp, synthetic construct
  source 1..20: mol_type = other DNA
atacctgcagtgaatgcata

SEQ ID NO: 34866 - DNA, 20 bp, synthetic construct
  source 1..20: mol_type = other DNA
ccctcaccaggttcttgaac

SEQ ID NO: 34867 - DNA, 20 bp, synthetic construct
  source 1..20: mol_type = other DNA
atagtatgggtggcaagagg

SEQ ID NO: 34868 - DNA, 20 bp, synthetic construct
  source 1..20: mol_type = other DNA
ggttttcaggaccaaaattg

SEQ ID NO: 34869 - DNA, 20 bp, synthetic construct
  source 1..20: mol_type = other DNA
accttaataaaattatatct

SEQ ID NO: 34870 - DNA, 20 bp, synthetic construct
  source 1..20: mol_type = other DNA
ccagttataattaggggttt

SEQ ID NO: 34871 - DNA, 20 bp, synthetic construct
  source 1..20: mol_type = other DNA
gcttcaagaaggagccacac

SEQ ID NO: 34872 - DNA, 20 bp, synthetic construct
  source 1..20: mol_type = other DNA
cagggccgagggcaccgggc

SEQ ID NO: 34873 - DNA, 20 bp, synthetic construct
  source 1..20: mol_type = other DNA
tagaggcacagacataccag

SEQ ID NO: 34874 - DNA, 20 bp, synthetic construct
  source 1..20: mol_type = other DNA
ctgcaccatggggtcggact

SEQ ID NO: 34875 - DNA, 20 bp, synthetic construct
  source 1..20: mol_type = other DNA
ggcctggtgggggaaacagg

SEQ ID NO: 34876 - DNA, 20 bp, synthetic construct
  source 1..20: mol_type = other DNA
cagccgggtggtgaagctcc

SEQ ID NO: 34877 - DNA, 20 bp, synthetic construct
  source 1..20: mol_type = other DNA
gggtgcacatcaaagagcgg

SEQ ID NO: 34878 - DNA, 20 bp, synthetic construct
  source 1..20: mol_type = other DNA
gaggaccatggatgctgatg

SEQ ID NO: 34879 - DNA, 20 bp, synthetic construct
  source 1..20: mol_type = other DNA
ttccaaatggtaacgttcat

SEQ ID NO: 34880 - DNA, 20 bp, synthetic construct
  source 1..20: mol_type = other DNA
tctaatattaatgtcttatc

SEQ ID NO: 34881 - DNA, 20 bp, synthetic construct
  source 1..20: mol_type = other DNA
acctccttctggcccacgtg

SEQ ID NO: 34882 - DNA, 20 bp, synthetic construct
  source 1..20: mol_type = other DNA
tttcatcacacattgttcga

SEQ ID NO: 34883 - DNA, 20 bp, synthetic construct
  source 1..20: mol_type = other DNA
tgaagttcatggctgaggtg

SEQ ID NO: 34884 - DNA, 20 bp, synthetic construct
  source 1..20: mol_type = other DNA
acaccaggagtacctctttg

SEQ ID NO: 34885 - DNA, 20 bp, synthetic construct
  source 1..20: mol_type = other DNA
accatgtgggcagaactgca

SEQ ID NO: 34886 - DNA, 20 bp, synthetic construct
  source 1..20: mol_type = other DNA
ccgagctggatgcgccgctg

SEQ ID NO: 34887 - DNA, 20 bp, synthetic construct
  source 1..20: mol_type = other DNA
ggcttcctaaaaggtggtgg

SEQ ID NO: 34888 - DNA, 20 bp, synthetic construct
  source 1..20: mol_type = other DNA
tgcccttcatcccctttggt

SEQ ID NO: 34889 - DNA, 20 bp, synthetic construct
  source 1..20: mol_type = other DNA
gagggcggagaactgggacg

SEQ ID NO: 34890 - DNA, 20 bp, synthetic construct
  source 1..20: mol_type = other DNA
gggacccgtgcaggtgaccc

SEQ ID NO: 34891 - DNA, 20 bp, synthetic construct
  source 1..20: mol_type = other DNA
gtggctggaactctgggtgg

SEQ ID NO: 34892 - DNA, 20 bp, synthetic construct
  source 1..20: mol_type = other DNA
atgcctgatggttcaagtag

SEQ ID NO: 34893 - DNA, 20 bp, synthetic construct
  source 1..20: mol_type = other DNA
ggccactgccagtgtgtaca

SEQ ID NO: 34894 - DNA, 20 bp, synthetic construct
  source 1..20: mol_type = other DNA
gacctgtttgcaccaagcag

SEQ ID NO: 34895 - DNA, 20 bp, synthetic construct
  source 1..20: mol_type = other DNA
agaagttctagggggcagca

SEQ ID NO: 34896 - DNA, 20 bp, synthetic construct
  source 1..20: mol_type = other DNA
cccatgacgtttggaccccg

SEQ ID NO: 34897 - DNA, 20 bp, synthetic construct
  source 1..20: mol_type = other DNA
ggccccggcggcggcggcgg

SEQ ID NO: 34898 - DNA, 20 bp, synthetic construct
  source 1..20: mol_type = other DNA
gcaaacctcgcccaggatgt

SEQ ID NO: 34899 - DNA, 20 bp, synthetic construct
  source 1..20: mol_type = other DNA
ggcatgagcgcggtgagctg

SEQ ID NO: 34900 - DNA, 20 bp, synthetic construct
  source 1..20: mol_type = other DNA
gctcaataagcacctggcag

SEQ ID NO: 34901 - DNA, 20 bp, synthetic construct
  source 1..20: mol_type = other DNA
cagtaaggaagactccacca

SEQ ID NO: 34902 - DNA, 20 bp, synthetic construct
  source 1..20: mol_type = other DNA
tgtccaggctgggcccgtgc

SEQ ID NO: 34903 - DNA, 20 bp, synthetic construct
  source 1..20: mol_type = other DNA
tcatagcatccttggcctgc

SEQ ID NO: 34904 - DNA, 20 bp, synthetic construct
  source 1..20: mol_type = other DNA
ctggaagcagcagctcaccg

SEQ ID NO: 34905 - DNA, 20 bp, synthetic construct
  source 1..20: mol_type = other DNA
catgggccgcacctgcttgg

SEQ ID NO: 34906 - DNA, 20 bp, synthetic construct
  source 1..20: mol_type = other DNA
atgcggctgagaccccaccc

SEQ ID NO: 34907 - DNA, 20 bp, synthetic construct
  source 1..20: mol_type = other DNA
tggcatgttttgctgggcat

SEQ ID NO: 34908 - DNA, 20 bp, synthetic construct
  source 1..20: mol_type = other DNA
tggtacacttgctgacggtg

SEQ ID NO: 34909 - DNA, 20 bp, synthetic construct
  source 1..20: mol_type = other DNA
gaccagcggaggcttggctg

SEQ ID NO: 34910 - DNA, 20 bp, synthetic construct
  source 1..20: mol_type = other DNA
gtagcgcgtggagttgatct

SEQ ID NO: 34911 - DNA, 20 bp, synthetic construct
  source 1..20: mol_type = other DNA
aggtgcaggtcccgttctcc

SEQ ID NO: 34912 - DNA, 20 bp, synthetic construct
  source 1..20: mol_type = other DNA
cacaagcctctacaaagagc

SEQ ID NO: 34913 - DNA, 20 bp, synthetic construct
  source 1..20: mol_type = other DNA
aggcttgatgcgctcggcaa

SEQ ID NO: 34914 - DNA, 20 bp, synthetic construct
  source 1..20: mol_type = other DNA
tgatgtgcaccctctcaggt

SEQ ID NO: 34915 - DNA, 20 bp, synthetic construct
  source 1..20: mol_type = other DNA
gtcactcgtcatgatgtcgc

SEQ ID NO: 34916 - DNA, 20 bp, synthetic construct
  source 1..20: mol_type = other DNA
cattgataattcccactcaa

SEQ ID NO: 34917 - DNA, 20 bp, synthetic construct
  source 1..20: mol_type = other DNA
accaaaaactggggtcacaa

SEQ ID NO: 34918 - DNA, 20 bp, synthetic construct
  source 1..20: mol_type = other DNA
gggaagcaggggcaaaggtg

SEQ ID NO: 34919 - DNA, 20 bp, synthetic construct
  source 1..20: mol_type = other DNA
gcaggtgagcagtgcccgtg

SEQ ID NO: 34920 - DNA, 20 bp, synthetic construct
  source 1..20: mol_type = other DNA
aggcccacaatgttcccaca

SEQ ID NO: 34921 - DNA, 20 bp, synthetic construct
  source 1..20: mol_type = other DNA
gctgccctgctcctgggtgc

SEQ ID NO: 34922 - DNA, 20 bp, synthetic construct
  source 1..20: mol_type = other DNA
ctggagagttcgggacatga

SEQ ID NO: 34923 - DNA, 20 bp, synthetic construct
  source 1..20: mol_type = other DNA
tttccagacgcccttgcact

SEQ ID NO: 34924 - DNA, 20 bp, synthetic construct
  source 1..20: mol_type = other DNA
cttcgcttctcctcttcctc

SEQ ID NO: 34925 - DNA, 20 bp, synthetic construct
  source 1..20: mol_type = other DNA
agacaggagagagcaggggc

SEQ ID NO: 34926 - DNA, 20 bp, synthetic construct
  source 1..20: mol_type = other DNA
aactctgtacaaagaccgcg

SEQ ID NO: 34927 - DNA, 20 bp, synthetic construct
  source 1..20: mol_type = other DNA
gtacagatagtctgaaaggg

SEQ ID NO: 34928 - DNA, 20 bp, synthetic construct
  source 1..20: mol_type = other DNA
ccttaccactgtctggaagc

SEQ ID NO: 34929 - DNA, 20 bp, synthetic construct
  source 1..20: mol_type = other DNA
ggagctgctgcggcagggcg

SEQ ID NO: 34930 - DNA, 20 bp, synthetic construct
  source 1..20: mol_type = other DNA
aggctgcgaagtcgcgtggt

SEQ ID NO: 34931 - DNA, 20 bp, synthetic construct
  source 1..20: mol_type = other DNA
catgtttttagatgaacttg

SEQ ID NO: 34932 - DNA, 20 bp, synthetic construct
  source 1..20: mol_type = other DNA
ctggtccccggtcaggtacc

SEQ ID NO: 34933 - DNA, 20 bp, synthetic construct
  source 1..20: mol_type = other DNA
gttccagcgactgcaaagca

SEQ ID NO: 34934 - DNA, 20 bp, synthetic construct
  source 1..20: mol_type = other DNA
ggcactcacctgccagctgg

SEQ ID NO: 34935 - DNA, 20 bp, synthetic construct
  source 1..20: mol_type = other DNA
ccgatctgcgccaggctcag

SEQ ID NO: 34936 - DNA, 20 bp, synthetic construct
  source 1..20: mol_type = other DNA
ttctaggactgcatcgacgt

SEQ ID NO: 34937 - DNA, 20 bp, synthetic construct
  source 1..20: mol_type = other DNA
agcgctcggcgtcctctctg

SEQ ID NO: 34938 - DNA, 20 bp, synthetic construct
  source 1..20: mol_type = other DNA
gtcacattgcccattcacga

SEQ ID NO: 34939 - DNA, 20 bp, synthetic construct
  source 1..20: mol_type = other DNA
agggaaggtggccatccaga

SEQ ID NO: 34940 - DNA, 20 bp, synthetic construct
  source 1..20: mol_type = other DNA
cgcaggagcagatcccctgg

SEQ ID NO: 34941 - DNA, 20 bp, synthetic construct
  source 1..20: mol_type = other DNA
agatcttctgggccaggaag

SEQ ID NO: 34942 - DNA, 20 bp, synthetic construct
  source 1..20: mol_type = other DNA
ccaggccaacaactgcgtgg

SEQ ID NO: 34943 - DNA, 20 bp, synthetic construct
  source 1..20: mol_type = other DNA
ggccgtgctgtggatccgga

SEQ ID NO: 34944 - DNA, 20 bp, synthetic construct
  source 1..20: mol_type = other DNA
cgggagcctgggactcaggt

SEQ ID NO: 34945 - DNA, 20 bp, synthetic construct
  source 1..20: mol_type = other DNA
tcagccattcattccagcta

SEQ ID NO: 34946 - DNA, 20 bp, synthetic construct
  source 1..20: mol_type = other DNA
cgcaggcctggccgcaggca

SEQ ID NO: 34947 - DNA, 20 bp, synthetic construct
  source 1..20: mol_type = other DNA
cgcaagtactcggtgtggat

SEQ ID NO: 34948 - DNA, 20 bp, synthetic construct
  source 1..20: mol_type = other DNA
gcttttcttccggatagcac

SEQ ID NO: 34949 - DNA, 20 bp, synthetic construct
  source 1..20: mol_type = other DNA
tgccggccatggcctgggca

SEQ ID NO: 34950 - DNA, 20 bp, synthetic construct
  source 1..20: mol_type = other DNA
gccgctctccaccatccgcg

SEQ ID NO: 34951 - DNA, 20 bp, synthetic construct
  source 1..20: mol_type = other DNA
agcgtgcctggcgttcctcg

SEQ ID NO: 34952 - DNA, 20 bp, synthetic construct
  source 1..20: mol_type = other DNA
gctttggggtcagagttcct

SEQ ID NO: 34953 - DNA, 20 bp, synthetic construct
  source 1..20: mol_type = other DNA
tccaaggcgagcggcaggag

SEQ ID NO: 34954 - DNA, 20 bp, synthetic construct
  source 1..20: mol_type = other DNA
gggctccatgaggcgtggct

SEQ ID NO: 34955 - DNA, 20 bp, synthetic construct
  source 1..20: mol_type = other DNA
ggatgtgagtggggcaggtg

SEQ ID NO: 34956 - DNA, 20 bp, synthetic construct
  source 1..20: mol_type = other DNA
ttattctccttactggtagc

SEQ ID NO: 34957 - DNA, 20 bp, synthetic construct
  source 1..20: mol_type = other DNA
acagcttgaaggtgactgtg

SEQ ID NO: 34958 - DNA, 20 bp, synthetic construct
  source 1..20: mol_type = other DNA
cgtgtagtctccggggtagt

SEQ ID NO: 34959 - DNA, 20 bp, synthetic construct
  source 1..20: mol_type = other DNA
ttgacctacaaggaatctga

SEQ ID NO: 34960 - DNA, 20 bp, synthetic construct
  source 1..20: mol_type = other DNA
ggagacctggctcatgaggc

SEQ ID NO: 34961 - DNA, 20 bp, synthetic construct
  source 1..20: mol_type = other DNA
tatagaggtaactatattgt

SEQ ID NO: 34962 - DNA, 20 bp, synthetic construct
  source 1..20: mol_type = other DNA
tgtgaggtgaggcaggcggg

SEQ ID NO: 34963 - DNA, 20 bp, synthetic construct
  source 1..20: mol_type = other DNA
gcagctggtcgtgggacagg

SEQ ID NO: 34964 - DNA, 20 bp, synthetic construct
  source 1..20: mol_type = other DNA
gcatggtggctccaacctct

SEQ ID NO: 34965 - DNA, 20 bp, synthetic construct
  source 1..20: mol_type = other DNA
ccatgcccaccaccatcgag

SEQ ID NO: 34966 - DNA, 20 bp, synthetic construct
  source 1..20: mol_type = other DNA
gcaggaggcggccgtcccgc

SEQ ID NO: 34967 - DNA, 20 bp, synthetic construct
  source 1..20: mol_type = other DNA
tatgtccaaggagatgtgag

SEQ ID NO: 34968 - DNA, 20 bp, synthetic construct
  source 1..20: mol_type = other DNA
ccaccgcgacggcgtcgggg

SEQ ID NO: 34969 - DNA, 20 bp, synthetic construct
  source 1..20: mol_type = other DNA
ccgtgcgcatgttgatgtcc

SEQ ID NO: 34970 - DNA, 20 bp, synthetic construct
  source 1..20: mol_type = other DNA
gtagtcaggtgtcccacaga

SEQ ID NO: 34971 - DNA, 20 bp, synthetic construct
  source 1..20: mol_type = other DNA
gctgtggtggcaggcggaga

SEQ ID NO: 34972 - DNA, 20 bp, synthetic construct
  source 1..20: mol_type = other DNA
ggatttcattaataatatct

SEQ ID NO: 34973 - DNA, 20 bp, synthetic construct
  source 1..20: mol_type = other DNA
gtggctggtgggctccagcc

SEQ ID NO: 34974 - DNA, 20 bp, synthetic construct
  source 1..20: mol_type = other DNA
ccaggacatccagaaagctt

SEQ ID NO: 34975 - DNA, 20 bp, synthetic construct
  source 1..20: mol_type = other DNA
caaaagtgacaatgtacttt

SEQ ID NO: 34976 - DNA, 20 bp, synthetic construct
  source 1..20: mol_type = other DNA
tatgctgcagaaataagaat

SEQ ID NO: 34977 - DNA, 20 bp, synthetic construct
  source 1..20: mol_type = other DNA
ctccgtcaatttgcatggga

SEQ ID NO: 34978 - DNA, 20 bp, synthetic construct
  source 1..20: mol_type = other DNA
atccgctggcagagatggag

SEQ ID NO: 34979 - DNA, 20 bp, synthetic construct
  source 1..20: mol_type = other DNA
aagctgttggaggccgtgga

SEQ ID NO: 34980 - DNA, 20 bp, synthetic construct
  source 1..20: mol_type = other DNA
agtgctggctgtggaaggac

SEQ ID NO: 34981 - DNA, 20 bp, synthetic construct
  source 1..20: mol_type = other DNA
caacgtggtcaggtgagcca

SEQ ID NO: 34982 - DNA, 20 bp, synthetic construct
  source 1..20: mol_type = other DNA
ggggtgctattggggcctcc

SEQ ID NO: 34983 - DNA, 20 bp, synthetic construct
  source 1..20: mol_type = other DNA
ctttgatttcaggatagtag

SEQ ID NO: 34984 - DNA, 20 bp, synthetic construct
  source 1..20: mol_type = other DNA
caggacaggggccaggaggt

SEQ ID NO: 34985 - DNA, 20 bp, synthetic construct
  source 1..20: mol_type = other DNA
ggggccggctcaacaccagg

SEQ ID NO: 34986 - DNA, 20 bp, synthetic construct
  source 1..20: mol_type = other DNA
tcacgtttctgaatacctgt

SEQ ID NO: 34987 - DNA, 20 bp, synthetic construct
  source 1..20: mol_type = other DNA
cactgcaggtgcgtgggatt

SEQ ID NO: 34988 - DNA, 20 bp, synthetic construct
  source 1..20: mol_type = other DNA
acaggtgttcaacctcctaa

SEQ ID NO: 34989 - DNA, 20 bp, synthetic construct
  source 1..20: mol_type = other DNA
tctggatgagaccctggagc

SEQ ID NO: 34990 - DNA, 20 bp, synthetic construct
  source 1..20: mol_type = other DNA
acaggcattgcaaacacact

SEQ ID NO: 34991 - DNA, 20 bp, synthetic construct
  source 1..20: mol_type = other DNA
gtgtgctaccatcctacaga

SEQ ID NO: 34992 - DNA, 20 bp, synthetic construct
  source 1..20: mol_type = other DNA
caagaagctcctgaagactc

SEQ ID NO: 34993 - DNA, 20 bp, synthetic construct
  source 1..20: mol_type = other DNA
agccccaggctcagaggccc

SEQ ID NO: 34994 - DNA, 20 bp, synthetic construct
  source 1..20: mol_type = other DNA
ccagagtgagggttctgaga

SEQ ID NO: 34995 - DNA, 20 bp, synthetic construct
  source 1..20: mol_type = other DNA
aggtgccaaattcatcatgg

SEQ ID NO: 34996 - DNA, 20 bp, synthetic construct
  source 1..20: mol_type = other DNA
gttcttccgttgatttgtca

SEQ ID NO: 34997 - DNA, 20 bp, synthetic construct
  source 1..20: mol_type = other DNA
ctggcggccaacgagcaggc

SEQ ID NO: 34998 - DNA, 20 bp, synthetic construct
  source 1..20: mol_type = other DNA
cctccacttttcgatctgag

SEQ ID NO: 34999 - DNA, 20 bp, synthetic construct
  source 1..20: mol_type = other DNA
ggcgcaccttcatgacgggc

SEQ ID NO: 35000 - DNA, 20 bp, synthetic construct
  source 1..20: mol_type = other DNA
taatacagctggggacgacc

SEQ ID NO: 35001 - DNA, 20 bp, synthetic construct
  source 1..20: mol_type = other DNA
tctagatactactaccaaag

SEQ ID NO: 35002 - DNA, 20 bp, synthetic construct
  source 1..20: mol_type = other DNA
cctgcagtgagagcagtagg

SEQ ID NO: 35003 - DNA, 20 bp, synthetic construct
  source 1..20: mol_type = other DNA
cccaccccagttgagggttc

SEQ ID NO: 35004 - DNA, 20 bp, synthetic construct
  source 1..20: mol_type = other DNA
tgcggcccagcatcagctct

SEQ ID NO: 35005 - DNA, 20 bp, synthetic construct
  source 1..20: mol_type = other DNA
cattgatgtatccagaagct

SEQ ID NO: 35006 - DNA, 20 bp, synthetic construct
  source 1..20: mol_type = other DNA
ccgacagagatgctgaagag

SEQ ID NO: 35007 - DNA, 20 bp, synthetic construct
  source 1..20: mol_type = other DNA
gaatgcatctgcagatgctg

SEQ ID NO: 35008 - DNA, 20 bp, synthetic construct
  source 1..20: mol_type = other DNA
agtctcccaaggtaaggcta

SEQ ID NO: 35009 - DNA, 20 bp, synthetic construct
  source 1..20: mol_type = other DNA
tatgcagcaatgaaaactac

SEQ ID NO: 35010 - DNA, 20 bp, synthetic construct
  source 1..20: mol_type = other DNA
gagtttaagccacaaataca

SEQ ID NO: 35011 - DNA, 20 bp, synthetic construct
  source 1..20: mol_type = other DNA
taccccctgctatccctcgg

SEQ ID NO: 35012 - DNA, 20 bp, synthetic construct
  source 1..20: mol_type = other DNA
gcggttcagtgagagctccc

SEQ ID NO: 35013 - DNA, 20 bp, synthetic construct
  source 1..20: mol_type = other DNA
ccagacgcaggatggcatgg

SEQ ID NO: 35014 - DNA, 20 bp, synthetic construct
  source 1..20: mol_type = other DNA
cttaaacctgaagggagaca

SEQ ID NO: 35015 - DNA, 20 bp, synthetic construct
  source 1..20: mol_type = other DNA
cacgtggccaaagtctccca

SEQ ID NO: 35016 - DNA, 20 bp, synthetic construct
  source 1..20: mol_type = other DNA
aaattcttttgaggtggaag

SEQ ID NO: 35017 - DNA, 20 bp, synthetic construct
  source 1..20: mol_type = other DNA
tttgtccatgtgattcagca

SEQ ID NO: 35018 - DNA, 20 bp, synthetic construct
  source 1..20: mol_type = other DNA
agaaggaagtgagggggagc

SEQ ID NO: 35019 - DNA, 20 bp, synthetic construct
  source 1..20: mol_type = other DNA
ttttctatggggagaggatg

SEQ ID NO: 35020 - DNA, 20 bp, synthetic construct
  source 1..20: mol_type = other DNA
cgaggatgaggaggagccca

SEQ ID NO: 35021 - DNA, 20 bp, synthetic construct
  source 1..20: mol_type = other DNA
tgtgtattaactaaaacaaa

SEQ ID NO: 35022 - DNA, 20 bp, synthetic construct
  source 1..20: mol_type = other DNA
tgtacagccagccattgtca

SEQ ID NO: 35023 - DNA, 20 bp, synthetic construct
  source 1..20: mol_type = other DNA
cggcgtgagctggaagaggt

SEQ ID NO: 35024 - DNA, 20 bp, synthetic construct
  source 1..20: mol_type = other DNA
tcagtgagagctcccgggaa

SEQ ID NO: 35025 - DNA, 20 bp, synthetic construct
  source 1..20: mol_type = other DNA
ccaggtagtccaccatggga

SEQ ID NO: 35026 - DNA, 20 bp, synthetic construct
  source 1..20: mol_type = other DNA
tagcccaacctctcctggag

SEQ ID NO: 35027 - DNA, 20 bp, synthetic construct
  source 1..20: mol_type = other DNA
gtccagacgcaggatggcgt

SEQ ID NO: 35028 - DNA, 20 bp, synthetic construct
  source 1..20: mol_type = other DNA
gggcgttcaggacacagact

SEQ ID NO: 35029 - DNA, 20 bp, synthetic construct
  source 1..20: mol_type = other DNA
gcaacgtgaagaagagctct

SEQ ID NO: 35030 - DNA, 20 bp, synthetic construct
  source 1..20: mol_type = other DNA
tcgccacccaggcatgccca

SEQ ID NO: 35031 - DNA, 20 bp, synthetic construct
  source 1..20: mol_type = other DNA
tggcatctcggcccagattg

SEQ ID NO: 35032 - DNA, 20 bp, synthetic construct
  source 1..20: mol_type = other DNA
tgtattgctgacatcttctc

SEQ ID NO: 35033 - DNA, 20 bp, synthetic construct
  source 1..20: mol_type = other DNA
gactgcccttcacctcgcag

SEQ ID NO: 35034 - DNA, 20 bp, synthetic construct
  source 1..20: mol_type = other DNA
ttccgttctccatcagacga

SEQ ID NO: 35035 - DNA, 20 bp, synthetic construct
  source 1..20: mol_type = other DNA
gagctccttgcagagcagtg

SEQ ID NO: 35036 - DNA, 20 bp, synthetic construct
  source 1..20: mol_type = other DNA
agtagtatctagaggaagag

SEQ ID NO: 35037 - DNA, 20 bp, synthetic construct
  source 1..20: mol_type = other DNA
cgtgctcgatggggtacttc

SEQ ID NO: 35038 - DNA, 20 bp, synthetic construct
  source 1..20: mol_type = other DNA
caggaggtaggggcggctgg

SEQ ID NO: 35039 - DNA, 20 bp, synthetic construct
  source 1..20: mol_type = other DNA
ttctccagcttcgcaaacct

SEQ ID NO: 35040 - DNA, 20 bp, synthetic construct
  source 1..20: mol_type = other DNA
acatgaggttgacctgctcc

SEQ ID NO: 35041 - DNA, 20 bp, synthetic construct
  source 1..20: mol_type = other DNA
aactaccaaaaatatacata

SEQ ID NO: 35042 - DNA, 20 bp, synthetic construct
  source 1..20: mol_type = other DNA
tgaaaattgtaagaatggac

SEQ ID NO: 35043 - DNA, 20 bp, synthetic construct
  source 1..20: mol_type = other DNA
gatgatggtttaccttaatg

SEQ ID NO: 35044 - DNA, 20 bp, synthetic construct
  source 1..20: mol_type = other DNA
tcatcatctgtgaggagggc

SEQ ID NO: 35045 - DNA, 20 bp, synthetic construct
  source 1..20: mol_type = other DNA
caggtttatttcatgacctt

SEQ ID NO: 35046 - DNA, 20 bp, synthetic construct
  source 1..20: mol_type = other DNA
gaaataggggacttggacaa

SEQ ID NO: 35047 - DNA, 20 bp, synthetic construct
  source 1..20: mol_type = other DNA
gccactccccaaatccacga

SEQ ID NO: 35048 - DNA, 20 bp, synthetic construct
  source 1..20: mol_type = other DNA
gcgtcgccggggcctcgggg

SEQ ID NO: 35049 - DNA, 20 bp, synthetic construct
  source 1..20: mol_type = other DNA
accagggccacccccacctc

SEQ ID NO: 35050 - DNA, 20 bp, synthetic construct
  source 1..20: mol_type = other DNA
tcttgctttgggcctcatcc

SEQ ID NO: 35051 - DNA, 20 bp, synthetic construct
  source 1..20: mol_type = other DNA
cgtgcgccccgtgcacgctc

SEQ ID NO: 35052 - DNA, 20 bp, synthetic construct
  source 1..20: mol_type = other DNA
aacttgacaatcatccctgc

SEQ ID NO: 35053 - DNA, 20 bp, synthetic construct
  source 1..20: mol_type = other DNA
tgactcaaaattcctggagc

SEQ ID NO: 35054 - DNA, 20 bp, synthetic construct
  source 1..20: mol_type = other DNA
tcaatcctcactattgagga

SEQ ID NO: 35055 - DNA, 20 bp, synthetic construct
  source 1..20: mol_type = other DNA
aatgaaaagcctgcctggga

SEQ ID NO: 35056 - DNA, 20 bp, synthetic construct
  source 1..20: mol_type = other DNA
atgaaagtgagatattgttc

SEQ ID NO: 35057 - DNA, 20 bp, synthetic construct
  source 1..20: mol_type = other DNA
gtcatgacgtgagtgggggc

SEQ ID NO: 35058 - DNA, 20 bp, synthetic construct
  source 1..20: mol_type = other DNA
gagcgcagtgaccggcggcg

SEQ ID NO: 35059 - DNA, 20 bp, synthetic construct
  source 1..20: mol_type = other DNA
gctcagctgtgaagaggatg

SEQ ID NO: 35060 - DNA, 20 bp, synthetic construct
  source 1..20: mol_type = other DNA
ctcatgttcctccatgataa

SEQ ID NO: 35061 - DNA, 20 bp, synthetic construct
  source 1..20: mol_type = other DNA
gggtggccaccggcgaaggg

SEQ ID NO: 35062 - DNA, 20 bp, synthetic construct
  source 1..20: mol_type = other DNA
tatgatctggttccggattg

SEQ ID NO: 35063 - DNA, 20 bp, synthetic construct
  source 1..20: mol_type = other DNA
cggctgggtggcggcacgta

SEQ ID NO: 35064 - DNA, 20 bp, synthetic construct
  source 1..20: mol_type = other DNA
ggctccccgttacctgtgcc

SEQ ID NO: 35065 - DNA, 20 bp, synthetic construct
  source 1..20: mol_type = other DNA
cggtggattgcacagagggg

SEQ ID NO: 35066 - DNA, 20 bp, synthetic construct
  source 1..20: mol_type = other DNA
catctgcgggagagagaagc

SEQ ID NO: 35067 - DNA, 20 bp, synthetic construct
  source 1..20: mol_type = other DNA
gctccttcttaactaaaggt

SEQ ID NO: 35068 - DNA, 20 bp, synthetic construct
  source 1..20: mol_type = other DNA
cgggggtggcgtagctggac

SEQ ID NO: 35069 - DNA, 20 bp, synthetic construct
  source 1..20: mol_type = other DNA
taaggtaaaccatcatcggt

SEQ ID NO: 35070 - DNA, 20 bp, synthetic construct
  source 1..20: mol_type = other DNA
tctggggcatacctaggggg

SEQ ID NO: 35071 - DNA, 20 bp, synthetic construct
  source 1..20: mol_type = other DNA
gccctcgcctgcagggaaag

SEQ ID NO: 35072 - DNA, 20 bp, synthetic construct
  source 1..20: mol_type = other DNA
ctatgacctgctacagcggc

SEQ ID NO: 35073 - DNA, 20 bp, synthetic construct
  source 1..20: mol_type = other DNA
gccagatgtcggaactttgg

SEQ ID NO: 35074 - DNA, 20 bp, synthetic construct
  source 1..20: mol_type = other DNA
tgtaattgcgaatgatgtca

SEQ ID NO: 35075 - DNA, 20 bp, synthetic construct
  source 1..20: mol_type = other DNA
tgagaagttggagaagcggc

SEQ ID NO: 35076 - DNA, 20 bp, synthetic construct
  source 1..20: mol_type = other DNA
gcagcagcgaaagcgccttg

SEQ ID NO: 35077 - DNA, 20 bp, synthetic construct
  source 1..20: mol_type = other DNA
cgtgcctgcggccaggcctg

SEQ ID NO: 35078 - DNA, 20 bp, synthetic construct
  source 1..20: mol_type = other DNA
gcagtcaaataaagtgcccg

SEQ ID NO: 35079 - DNA, 20 bp, synthetic construct
  source 1..20: mol_type = other DNA
gcccaggccatccagcccca

SEQ ID NO: 35080 - DNA, 20 bp, synthetic construct
  source 1..20: mol_type = other DNA
ccagcacatcctgcgggaac

SEQ ID NO: 35081 - DNA, 20 bp, synthetic construct
  source 1..20: mol_type = other DNA
cattccatcacactggaggc

SEQ ID NO: 35082 - DNA, 20 bp, synthetic construct
  source 1..20: mol_type = other DNA
catctgcaaatcaaagtcat

SEQ ID NO: 35083 - DNA, 20 bp, synthetic construct
  source 1..20: mol_type = other DNA
aatcaaagccaaggccaaga

SEQ ID NO: 35084 - DNA, 20 bp, synthetic construct
  source 1..20: mol_type = other DNA
tccaagtcaatggcatccct

SEQ ID NO: 35085 - DNA, 20 bp, synthetic construct
  source 1..20: mol_type = other DNA
ttcttacctcttggttaaat

SEQ ID NO: 35086 - DNA, 20 bp, synthetic construct
  source 1..20: mol_type = other DNA
tacctctcctcctgatcacc

SEQ ID NO: 35087 - DNA, 20 bp, synthetic construct
  source 1..20: mol_type = other DNA
ctgaccagcggaggcttggc

SEQ ID NO: 35088 - DNA, 20 bp, synthetic construct
  source 1..20: mol_type = other DNA
aagacgttcagctgctgtcc

SEQ ID NO: 35089 - DNA, 20 bp, synthetic construct
  source 1..20: mol_type = other DNA
tgggtgagctggtgaaacac

SEQ ID NO: 35090 - DNA, 20 bp, synthetic construct
  source 1..20: mol_type = other DNA
tttgcaagcagaaggtggag

SEQ ID NO: 35091 - DNA, 20 bp, synthetic construct
  source 1..20: mol_type = other DNA
cgcaggcctactcccacggt

SEQ ID NO: 35092 - DNA, 20 bp, synthetic construct
  source 1..20: mol_type = other DNA
cctggccaacatcctggagg

SEQ ID NO: 35093 - DNA, 20 bp, synthetic construct
  source 1..20: mol_type = other DNA
gtccctgggaaatggcgatg

SEQ ID NO: 35094 - DNA, 20 bp, synthetic construct
  source 1..20: mol_type = other DNA
tgaagcgtgtctccccggcc

SEQ ID NO: 35095 - DNA, 20 bp, synthetic construct
  source 1..20: mol_type = other DNA
ctgtggagctgcagctgagt

SEQ ID NO: 35096 - DNA, 20 bp, synthetic construct
  source 1..20: mol_type = other DNA
agtggaggtggatagttttc

SEQ ID NO: 35097 - DNA, 20 bp, synthetic construct
  source 1..20: mol_type = other DNA
tctgcagcagaccaaggaga

SEQ ID NO: 35098 - DNA, 20 bp, synthetic construct
  source 1..20: mol_type = other DNA
agaaaaatatgcagactcac

SEQ ID NO: 35099 - DNA, 20 bp, synthetic construct
  source 1..20: mol_type = other DNA
gcgtaatgcaggccgggccc

SEQ ID NO: 35100 - DNA, 20 bp, synthetic construct
  source 1..20: mol_type = other DNA
actggaacagcttgttggag

SEQ ID NO: 35101 - DNA, 20 bp, synthetic construct
  source 1..20: mol_type = other DNA
agtgcaggttcaggaaactg

SEQ ID NO: 35102 - DNA, 20 bp, synthetic construct
  source 1..20: mol_type = other DNA
gcaagatcaggagcccagcg

SEQ ID NO: 35103 - DNA, 20 bp, synthetic construct
  source 1..20: mol_type = other DNA
taatcgcccagcatcacgtc

SEQ ID NO: 35104 - DNA, 20 bp, synthetic construct
  source 1..20: mol_type = other DNA
tatgacctgctacagcggct

SEQ ID NO: 35105 - DNA, 20 bp, synthetic construct
  source 1..20: mol_type = other DNA
tatcgtttacttcctttggg

SEQ ID NO: 35106 - DNA, 20 bp, synthetic construct
  source 1..20: mol_type = other DNA
acaaccgtaggggatttgga

SEQ ID NO: 35107 - DNA, 20 bp, synthetic construct
  source 1..20: mol_type = other DNA
agagacatcaagtatggtag

SEQ ID NO: 35108 - DNA, 20 bp, synthetic construct
  source 1..20: mol_type = other DNA
ggtggcccagctcaaacaga

SEQ ID NO: 35109 - DNA, 20 bp, synthetic construct
  source 1..20: mol_type = other DNA
aaagacactgggcagatggt

SEQ ID NO: 35110 - DNA, 20 bp, synthetic construct
  source 1..20: mol_type = other DNA
tgccggcccttcgaggagag

SEQ ID NO: 35111 - DNA, 20 bp, synthetic construct
  source 1..20: mol_type = other DNA
gcacaaccggctgtacatga

SEQ ID NO: 35112 - DNA, 20 bp, synthetic construct
  source 1..20: mol_type = other DNA
tgcagaagatggtgtgccac

SEQ ID NO: 35113 - DNA, 20 bp, synthetic construct
  source 1..20: mol_type = other DNA
cttcttctggcaggtgctgg

SEQ ID NO: 35114 - DNA, 20 bp, synthetic construct
  source 1..20: mol_type = other DNA
acgtggccaaagtctcccat

SEQ ID NO: 35115 - DNA, 20 bp, synthetic construct
  source 1..20: mol_type = other DNA
gcgtgagctggaagaggttg

SEQ ID NO: 35116 - DNA, 20 bp, synthetic construct
  source 1..20: mol_type = other DNA
agtcacccagaagatgccgc

SEQ ID NO: 35117 - DNA, 20 bp, synthetic construct
  source 1..20: mol_type = other DNA
tgctgccagtgctgactgcg

SEQ ID NO: 35118 - DNA, 20 bp, synthetic construct
  source 1..20: mol_type = other DNA
actttaaatggaatgagtgg

SEQ ID NO: 35119 - DNA, 20 bp, synthetic construct
  source 1..20: mol_type = other DNA
gtgcacgagaaggatgtgat

SEQ ID NO: 35120 - DNA, 20 bp, synthetic construct
  source 1..20: mol_type = other DNA
caatccaaggtacggcacgg

SEQ ID NO: 35121 - DNA, 20 bp, synthetic construct
  source 1..20: mol_type = other DNA
atccgcgtgcactttcaggc

SEQ ID NO: 35122 - DNA, 20 bp, synthetic construct
  source 1..20: mol_type = other DNA
tcctgaaggtgtccaggggc

SEQ ID NO: 35123 - DNA, 20 bp, synthetic construct
  source 1..20: mol_type = other DNA
tgagactgataatttctctt

SEQ ID NO: 35124 - DNA, 20 bp, synthetic construct
  source 1..20: mol_type = other DNA
ggagcctgcggccagcagcc

SEQ ID NO: 35125 - DNA, 20 bp, synthetic construct
  source 1..20: mol_type = other DNA
ttttgtcgtaatagtagcgt

SEQ ID NO: 35126 - DNA, 20 bp, synthetic construct
  source 1..20: mol_type = other DNA
ggacatctgcgggtcctcca

SEQ ID NO: 35127 - DNA, 20 bp, synthetic construct
  source 1..20: mol_type = other DNA
caggtctggaaccttctgtc

SEQ ID NO: 35128 - DNA, 20 bp, synthetic construct
  source 1..20: mol_type = other DNA
ccgcggctgggccctgcagg

SEQ ID NO: 35129 - DNA, 20 bp, synthetic construct
  source 1..20: mol_type = other DNA
ggcgctttagggaggagtca

SEQ ID NO: 35130 - DNA, 20 bp, synthetic construct
  source 1..20: mol_type = other DNA
aggagtacaaggtggggctg

SEQ ID NO: 35131 - DNA, 20 bp, synthetic construct
  source 1..20: mol_type = other DNA
ggctgtggccagggggaggc

SEQ ID NO: 35132 - DNA, 20 bp, synthetic construct
  source 1..20: mol_type = other DNA
atggagagctgggcttccgc

SEQ ID NO: 35133 - DNA, 20 bp, synthetic construct
  source 1..20: mol_type = other DNA
cctgctttcccgtatcccca

SEQ ID NO: 35134 - DNA, 20 bp, synthetic construct
  source 1..20: mol_type = other DNA
agattctatggagtgggata

SEQ ID NO: 35135 - DNA, 20 bp, synthetic construct
  source 1..20: mol_type = other DNA
ttacacgggggcaggttgag

SEQ ID NO: 35136 - DNA, 20 bp, synthetic construct
  source 1..20: mol_type = other DNA
tctgctcacaccactgggaa

SEQ ID NO: 35137 - DNA, 20 bp, synthetic construct
  source 1..20: mol_type = other DNA
gcccggccagtggggacgga

SEQ ID NO: 35138 - DNA, 20 bp, synthetic construct
  source 1..20: mol_type = other DNA
gagcctctgtccagtccccc

SEQ ID NO: 35139 - DNA, 20 bp, synthetic construct
  source 1..20: mol_type = other DNA
agataatgtagaaaataata

SEQ ID NO: 35140 - DNA, 20 bp, synthetic construct
  source 1..20: mol_type = other DNA
ctgctacttttcccttctgg

SEQ ID NO: 35141 - DNA, 20 bp, synthetic construct
  source 1..20: mol_type = other DNA
aatcagaatcctgatctgac

SEQ ID NO: 35142 - DNA, 20 bp, synthetic construct
  source 1..20: mol_type = other DNA
ctgaaaacacacacacaagc

SEQ ID NO: 35143 - DNA, 20 bp, synthetic construct
  source 1..20: mol_type = other DNA
tgagatgctggtgaagaggc

SEQ ID NO: 35144 - DNA, 20 bp, synthetic construct
  source 1..20: mol_type = other DNA
agtggtggcggcggcggcgg

SEQ ID NO: 35145 - DNA, 20 bp, synthetic construct
  source 1..20: mol_type = other DNA
gttagctccctgggaatgag

SEQ ID NO: 35146 - DNA, 20 bp, synthetic construct
  source 1..20: mol_type = other DNA
tttgctgatgtttcaataaa

SEQ ID NO: 35147 - DNA, 20 bp, synthetic construct
  source 1..20: mol_type = other DNA
cccgagtctcagcgacagct

SEQ ID NO: 35148 - DNA, 20 bp, synthetic construct
  source 1..20: mol_type = other DNA
gggctgctggtggatggggg

SEQ ID NO: 35149 - DNA, 20 bp, synthetic construct
  source 1..20: mol_type = other DNA
gatgcgagtggctgaatacc

SEQ ID NO: 35150 - DNA, 20 bp, synthetic construct
  source 1..20: mol_type = other DNA
tcctagtaaaggaattaagt

SEQ ID NO: 35151 - DNA, 20 bp, synthetic construct
  source 1..20: mol_type = other DNA
attgtcgtagtttctggagg

SEQ ID NO: 35152 - DNA, 20 bp, synthetic construct
  source 1..20: mol_type = other DNA
gcgaacacggacagaggcgt

SEQ ID NO: 35153 - DNA, 20 bp, synthetic construct
  source 1..20: mol_type = other DNA
gatgcatacagaacggaagg

SEQ ID NO: 35154 - DNA, 20 bp, synthetic construct
  source 1..20: mol_type = other DNA
cgagtttcttactcttggtg

SEQ ID NO: 35155 - DNA, 20 bp, synthetic construct
  source 1..20: mol_type = other DNA
aggcaccttcgggtaaggct

SEQ ID NO: 35156 - DNA, 20 bp, synthetic construct
  source 1..20: mol_type = other DNA
ctgctcccggaggaggccgg

SEQ ID NO: 35157 - DNA, 20 bp, synthetic construct
  source 1..20: mol_type = other DNA
gtacggcaccgggggcgccg

SEQ ID NO: 35158 - DNA, 20 bp, synthetic construct
  source 1..20: mol_type = other DNA
ccggattgtggcacagtctg

SEQ ID NO: 35159 - DNA, 20 bp, synthetic construct
  source 1..20: mol_type = other DNA
tgtaccgactgtaagtataa

SEQ ID NO: 35160 - DNA, 20 bp, synthetic construct
  source 1..20: mol_type = other DNA
ctgagtagggtggaacagga

SEQ ID NO: 35161 - DNA, 20 bp, synthetic construct
  source 1..20: mol_type = other DNA
cccaagtgagtcaccagcca

SEQ ID NO: 35162 - DNA, 20 bp, synthetic construct
  source 1..20: mol_type = other DNA
taggaaggagggccgcatgg

SEQ ID NO: 35163 - DNA, 20 bp, synthetic construct
  source 1..20: mol_type = other DNA
aaaggtgatccaagacttgg

SEQ ID NO: 35164 - DNA, 20 bp, synthetic construct
  source 1..20: mol_type = other DNA
cagggccagcaggatggcca

SEQ ID NO: 35165 - DNA, 20 bp, synthetic construct
  source 1..20: mol_type = other DNA
ttcccaggaaagcatccaga

SEQ ID NO: 35166 - DNA, 20 bp, synthetic construct
  source 1..20: mol_type = other DNA
acttgtctatgaacatctgt

SEQ ID NO: 35167 - DNA, 20 bp, synthetic construct
  source 1..20: mol_type = other DNA
tcctggaacaagaacatgcc

SEQ ID NO: 35168 - DNA, 20 bp, synthetic construct
  source 1..20: mol_type = other DNA
tttgtgcttcccccacaacc

SEQ ID NO: 35169 - DNA, 20 bp, synthetic construct
  source 1..20: mol_type = other DNA
ttacctgtaccataaccagg

SEQ ID NO: 35170 - DNA, 20 bp, synthetic construct
  source 1..20: mol_type = other DNA
gcacctgcagcagcagcaga

SEQ ID NO: 35171 - DNA, 20 bp, synthetic construct
  source 1..20: mol_type = other DNA
accgcgcctgggccaggcaa

SEQ ID NO: 35172 - DNA, 20 bp, synthetic construct
  source 1..20: mol_type = other DNA
cttaccgtgtggcgagcttg

SEQ ID NO: 35173 - DNA, 20 bp, synthetic construct
  source 1..20: mol_type = other DNA
ataaaaaaggtcccgccacg

SEQ ID NO: 35174 - DNA, 20 bp, synthetic construct
  source 1..20: mol_type = other DNA
actgagcatcttggtggcgc

SEQ ID NO: 35175 - DNA, 20 bp, synthetic construct
  source 1..20: mol_type = other DNA
ttatattagttaatttccac

SEQ ID NO: 35176 - DNA, 20 bp, synthetic construct
  source 1..20: mol_type = other DNA
agcctacctggcagtggaga

SEQ ID NO: 35177 - DNA, 20 bp, synthetic construct
  source 1..20: mol_type = other DNA
cttcgtgcggaggctgctct

SEQ ID NO: 35178 - DNA, 20 bp, synthetic construct
  source 1..20: mol_type = other DNA
cgcgggcgcgcgggggccgc

SEQ ID NO: 35179 - DNA, 20 bp, synthetic construct
  source 1..20: mol_type = other DNA
gtccacgctgacagactccc

SEQ ID NO: 35180 - DNA, 20 bp, synthetic construct
  source 1..20: mol_type = other DNA
cagggacatcaaggtggtct

SEQ ID NO: 35181 - DNA, 20 bp, synthetic construct
  source 1..20: mol_type = other DNA
tcgcggtaaagtagtcttcc

SEQ ID NO: 35182 - DNA, 20 bp, synthetic construct
  source 1..20: mol_type = other DNA
tgaatacaaggagagctttg

SEQ ID NO: 35183 - DNA, 20 bp, synthetic construct
  source 1..20: mol_type = other DNA
tcacattcacatgggtggag

SEQ ID NO: 35184 - DNA, 20 bp, synthetic construct
  source 1..20: mol_type = other DNA
ggggcttcatgagcggggag

SEQ ID NO: 35185 - DNA, 20 bp, synthetic construct
  source 1..20: mol_type = other DNA
gatgtacaatcttcttcagg

SEQ ID NO: 35186 - DNA, 20 bp, synthetic construct
  source 1..20: mol_type = other DNA
cactagcagtggcacggtgg

SEQ ID NO: 35187 - DNA, 20 bp, synthetic construct
  source 1..20: mol_type = other DNA
atggggagctatggtcccca

SEQ ID NO: 35188 - DNA, 20 bp, synthetic construct
  source 1..20: mol_type = other DNA
cagcccatcgtgcttaaaga

SEQ ID NO: 35189 - DNA, 20 bp, synthetic construct
  source 1..20: mol_type = other DNA
tggggctgaaacacaaagat

SEQ ID NO: 35190 - DNA, 20 bp, synthetic construct
  source 1..20: mol_type = other DNA
tgcaactcgccgtacatcgt

SEQ ID NO: 35191 - DNA, 20 bp, synthetic construct
  source 1..20: mol_type = other DNA
gccaagcaggtgagaggtga

SEQ ID NO: 35192 - DNA, 20 bp, synthetic construct
  source 1..20: mol_type = other DNA
cggatgcccccaggggagtg

SEQ ID NO: 35193 - DNA, 20 bp, synthetic construct
  source 1..20: mol_type = other DNA
ctgtggggctggttctctcc

SEQ ID NO: 35194 - DNA, 20 bp, synthetic construct
  source 1..20: mol_type = other DNA
ctctacctgggtcacctgca

SEQ ID NO: 35195 - DNA, 20 bp, synthetic construct
  source 1..20: mol_type = other DNA
tagctcctgcccatccagca

SEQ ID NO: 35196 - DNA, 20 bp, synthetic construct
  source 1..20: mol_type = other DNA
tcctcatattgaaaacttgc

SEQ ID NO: 35197 - DNA, 20 bp, synthetic construct
  source 1..20: mol_type = other DNA
agtcaccgatggcgcattgg

SEQ ID NO: 35198 - DNA, 20 bp, synthetic construct
  source 1..20: mol_type = other DNA
ttgaatcaaagtatggacac

SEQ ID NO: 35199 - DNA, 20 bp, synthetic construct
  source 1..20: mol_type = other DNA
ccagatggcggctgagctca

SEQ ID NO: 35200 - DNA, 20 bp, synthetic construct
  source 1..20: mol_type = other DNA
agctccagcggggacgcagg

SEQ ID NO: 35201 - DNA, 20 bp, synthetic construct
  source 1..20: mol_type = other DNA
tgatgagggagccttctcct

SEQ ID NO: 35202 - DNA, 20 bp, synthetic construct
  source 1..20: mol_type = other DNA
cctctgactcagagaggccc

SEQ ID NO: 35203 - DNA, 20 bp, synthetic construct
  source 1..20: mol_type = other DNA
acatttcaagaattttgtca

SEQ ID NO: 35204 - DNA, 20 bp, synthetic construct
  source 1..20: mol_type = other DNA
cattatacctgcttgttcat

SEQ ID NO: 35205 - DNA, 20 bp, synthetic construct
  source 1..20: mol_type = other DNA
cggatgggcatcgtggagcc

SEQ ID NO: 35206 - DNA, 20 bp, synthetic construct
  source 1..20: mol_type = other DNA
ccgagaggtggagaaaggcc

SEQ ID NO: 35207 - DNA, 20 bp, synthetic construct
  source 1..20: mol_type = other DNA
cattgtggccttgccgaggg

SEQ ID NO: 35208 - DNA, 20 bp, synthetic construct
  source 1..20: mol_type = other DNA
tgagggcagtgcctacgagg

SEQ ID NO: 35209 - DNA, 20 bp, synthetic construct
  source 1..20: mol_type = other DNA
gcgtgcctggcgttcctcgt

SEQ ID NO: 35210 - DNA, 20 bp, synthetic construct
  source 1..20: mol_type = other DNA
acatcataagagggcctttg

SEQ ID NO: 35211 - DNA, 20 bp, synthetic construct
  source 1..20: mol_type = other DNA
atcctacagaaggggccagc

SEQ ID NO: 35212 - DNA, 20 bp, synthetic construct
  source 1..20: mol_type = other DNA
gtgggtgagaggcgtgtaga

SEQ ID NO: 35213 - DNA, 20 bp, synthetic construct
  source 1..20: mol_type = other DNA
ctgacaggcaggctaaggct

SEQ ID NO: 35214 - DNA, 20 bp, synthetic construct
  source 1..20: mol_type = other DNA
ccaggcacggaatggtgttc

SEQ ID NO: 35215 - DNA, 20 bp, synthetic construct
  source 1..20: mol_type = other DNA
cgttccttccccagcctggg

SEQ ID NO: 35216 - DNA, 20 bp, synthetic construct
  source 1..20: mol_type = other DNA
aacagctgaacagatgggta

SEQ ID NO: 35217 - DNA, 20 bp, synthetic construct
  source 1..20: mol_type = other DNA
cagtaagtgtccccggaggc

SEQ ID NO: 35218 - DNA, 20 bp, synthetic construct
  source 1..20: mol_type = other DNA
agagcaggatctactgggac

SEQ ID NO: 35219 - DNA, 20 bp, synthetic construct
  source 1..20: mol_type = other DNA
tataacatcggtatctgggt

SEQ ID NO: 35220 - DNA, 20 bp, synthetic construct
  source 1..20: mol_type = other DNA
ggcggctggccgggaggtgt

SEQ ID NO: 35221 - DNA, 20 bp, synthetic construct
  source 1..20: mol_type = other DNA
ggccctgaccagcggaggct

SEQ ID NO: 35222 - DNA, 20 bp, synthetic construct
  source 1..20: mol_type = other DNA
actcctgtgggagggagatg

SEQ ID NO: 35223 - DNA, 20 bp, synthetic construct
  source 1..20: mol_type = other DNA
gtatgatacctaaagtggag

SEQ ID NO: 35224 - DNA, 20 bp, synthetic construct
  source 1..20: mol_type = other DNA
accagctgctcacagagagg

SEQ ID NO: 35225 - DNA, 20 bp, synthetic construct
  source 1..20: mol_type = other DNA
cgcgtagctgcaggtgtgag

SEQ ID NO: 35226 - DNA, 20 bp, synthetic construct
  source 1..20: mol_type = other DNA
gtactgtgtagccaggatgc

SEQ ID NO: 35227 - DNA, 20 bp, synthetic construct
  source 1..20: mol_type = other DNA
ggcaaatctggctctggcac

SEQ ID NO: 35228 - DNA, 20 bp, synthetic construct
  source 1..20: mol_type = other DNA
agtgctttctctgccagggg

SEQ ID NO: 35229 - DNA, 20 bp, synthetic construct
  source 1..20: mol_type = other DNA
atcgacgtaggctggtggga

SEQ ID NO: 35230 - DNA, 20 bp, synthetic construct
  source 1..20: mol_type = other DNA
ggtggaggggtatcaggaag

SEQ ID NO: 35231 - DNA, 20 bp, synthetic construct
  source 1..20: mol_type = other DNA
taaggaacaagagcctatta

SEQ ID NO: 35232 - DNA, 20 bp, synthetic construct
  source 1..20: mol_type = other DNA
gttgtcctgcagatgggagt

SEQ ID NO: 35233 - DNA, 20 bp, synthetic construct
  source 1..20: mol_type = other DNA
caggtagtccaccatgggat

SEQ ID NO: 35234 - DNA, 20 bp, synthetic construct
  source 1..20: mol_type = other DNA
caagctgagtgggtccgggc

SEQ ID NO: 35235 - DNA, 20 bp, synthetic construct
  source 1..20: mol_type = other DNA
catccagcagtgcctccaag

SEQ ID NO: 35236 - DNA, 20 bp, synthetic construct
  source 1..20: mol_type = other DNA
ccaagcggtcatgtgaatga

SEQ ID NO: 35237 - DNA, 20 bp, synthetic construct
  source 1..20: mol_type = other DNA
agcagcccctttcccacgtg

SEQ ID NO: 35238 - DNA, 20 bp, synthetic construct
  source 1..20: mol_type = other DNA
gggagggtactgagaatgag

SEQ ID NO: 35239 - DNA, 20 bp, synthetic construct
  source 1..20: mol_type = other DNA
caaggtgaggcctctccctc

SEQ ID NO: 35240 - DNA, 20 bp, synthetic construct
  source 1..20: mol_type = other DNA
ggccgagcggctgctgcagg

SEQ ID NO: 35241 - DNA, 20 bp, synthetic construct
  source 1..20: mol_type = other DNA
catagccctttggcgcttcc

SEQ ID NO: 35242 - DNA, 20 bp, synthetic construct
  source 1..20: mol_type = other DNA
ggacctggtggcactgaaga

SEQ ID NO: 35243 - DNA, 20 bp, synthetic construct
  source 1..20: mol_type = other DNA
gcatcaatgaatctaaagtg

SEQ ID NO: 35244 - DNA, 20 bp, synthetic construct
  source 1..20: mol_type = other DNA
accgtgtggatctgcctacc

SEQ ID NO: 35245 - DNA, 20 bp, synthetic construct
  source 1..20: mol_type = other DNA
gtttattaggtggactaagg

SEQ ID NO: 35246 - DNA, 20 bp, synthetic construct
  source 1..20: mol_type = other DNA
gctcgatccagcctgcaggg

SEQ ID NO: 35247 - DNA, 20 bp, synthetic construct
  source 1..20: mol_type = other DNA
actgccacatccccgcctca

SEQ ID NO: 35248 - DNA, 20 bp, synthetic construct
  source 1..20: mol_type = other DNA
ctacccagcctccgttatcc

SEQ ID NO: 35249 - DNA, 20 bp, synthetic construct
  source 1..20: mol_type = other DNA
cattgaagacggctgtggct

SEQ ID NO: 35250 - DNA, 20 bp, synthetic construct
  source 1..20: mol_type = other DNA
aggatcctgtgggaggggtg

SEQ ID NO: 35251 - DNA, 20 bp, synthetic construct
  source 1..20: mol_type = other DNA
caggacgtgatcttcttggg

SEQ ID NO: 35252 - DNA, 20 bp, synthetic construct
  source 1..20: mol_type = other DNA
gagcacctctgaggctctgc

SEQ ID NO: 35253 - DNA, 20 bp, synthetic construct
  source 1..20: mol_type = other DNA
tccggtcccaggatgcaggg

SEQ ID NO: 35254 - DNA, 20 bp, synthetic construct
  source 1..20: mol_type = other DNA
ggtcactttgatatggtctt

SEQ ID NO: 35255 - DNA, 20 bp, synthetic construct
  source 1..20: mol_type = other DNA
atggaaagacactgggcaga

SEQ ID NO: 35256 - DNA, 20 bp, synthetic construct
  source 1..20: mol_type = other DNA
agggtcaggtggaccacagg

SEQ ID NO: 35257 - DNA, 20 bp, synthetic construct
  source 1..20: mol_type = other DNA
cttcacctcctcagcctcac

SEQ ID NO: 35258 - DNA, 20 bp, synthetic construct
  source 1..20: mol_type = other DNA
gagaatttctgccatgtgga

SEQ ID NO: 35259 - DNA, 20 bp, synthetic construct
  source 1..20: mol_type = other DNA
agggtgggcagaggcccccg

SEQ ID NO: 35260 - DNA, 20 bp, synthetic construct
  source 1..20: mol_type = other DNA
gatctacagttagaagaaga

SEQ ID NO: 35261 - DNA, 20 bp, synthetic construct
  source 1..20: mol_type = other DNA
gagttttaaggagtcctaca

SEQ ID NO: 35262 - DNA, 20 bp, synthetic construct
  source 1..20: mol_type = other DNA
gccatggacgatgaccacca

SEQ ID NO: 35263 - DNA, 20 bp, synthetic construct
  source 1..20: mol_type = other DNA
ccttgtctcgagccttgcaa

SEQ ID NO: 35264 - DNA, 20 bp, synthetic construct
  source 1..20: mol_type = other DNA
gacaaatactggaaagttct

SEQ ID NO: 35265 - DNA, 20 bp, synthetic construct
  source 1..20: mol_type = other DNA
gttcagcatgacaactgctt

SEQ ID NO: 35266 - DNA, 20 bp, synthetic construct
  source 1..20: mol_type = other DNA
gctgtggtgtgcaaggctga

SEQ ID NO: 35267 - DNA, 20 bp, synthetic construct
  source 1..20: mol_type = other DNA
tgcccttcacctccaggagc

SEQ ID NO: 35268 - DNA, 20 bp, synthetic construct
  source 1..20: mol_type = other DNA
ctgcggttcctccttgaagg

SEQ ID NO: 35269 - DNA, 20 bp, synthetic construct
  source 1..20: mol_type = other DNA
gccaaaccataagccagaaa

SEQ ID NO: 35270 - DNA, 20 bp, synthetic construct
  source 1..20: mol_type = other DNA
agacacagtagcgaatgtca

SEQ ID NO: 35271 - DNA, 20 bp, synthetic construct
  source 1..20: mol_type = other DNA
ttcttgcgggtgttacagca

SEQ ID NO: 35272 - DNA, 20 bp, synthetic construct
  source 1..20: mol_type = other DNA
aaggtccaagtagaatacaa

SEQ ID NO: 35273 - DNA, 20 bp, synthetic construct
  source 1..20: mol_type = other DNA
gagtgtgaggtgaggcaggc

SEQ ID NO: 35274 - DNA, 20 bp, synthetic construct
  source 1..20: mol_type = other DNA
gctggcccaggaggagcagg

SEQ ID NO: 35275 - DNA, 20 bp, synthetic construct
  source 1..20: mol_type = other DNA
cgtggtgcagccatcccatg

SEQ ID NO: 35276 - DNA, 20 bp, synthetic construct
  source 1..20: mol_type = other DNA
ttcgcccagtcctgaatcac

SEQ ID NO: 35277 - DNA, 20 bp, synthetic construct
  source 1..20: mol_type = other DNA
ttggagccaccatgcatgct

SEQ ID NO: 35278 - DNA, 20 bp, synthetic construct
  source 1..20: mol_type = other DNA
gttgcgacaggccgatgatg

SEQ ID NO: 35279 - DNA, 20 bp, synthetic construct
  source 1..20: mol_type = other DNA
accagagtaatggtccacca

SEQ ID NO: 35280 - DNA, 20 bp, synthetic construct
  source 1..20: mol_type = other DNA
ctccctggagggacacacag

SEQ ID NO: 35281 - DNA, 20 bp, synthetic construct
  source 1..20: mol_type = other DNA
cctggagctgggcgctggag

SEQ ID NO: 35282 - DNA, 20 bp, synthetic construct
  source 1..20: mol_type = other DNA
gatttcccgctcggccgtgg

SEQ ID NO: 35283 - DNA, 20 bp, synthetic construct
  source 1..20: mol_type = other DNA
ggcactggctacagaagaca

SEQ ID NO: 35284 - DNA, 20 bp, synthetic construct
  source 1..20: mol_type = other DNA
tgcgagtcaagcattggtct

SEQ ID NO: 35285 - DNA, 20 bp, synthetic construct
  source 1..20: mol_type = other DNA
ggctggatgttctctatctg

SEQ ID NO: 35286 - DNA, 20 bp, synthetic construct
  source 1..20: mol_type = other DNA
gaggccatggaatacctgga

SEQ ID NO: 35287 - DNA, 20 bp, synthetic construct
  source 1..20: mol_type = other DNA
atgagcagcacaggtgaggg

SEQ ID NO: 35288 - DNA, 20 bp, synthetic construct
  source 1..20: mol_type = other DNA
cggatttagtgtggagcgga

SEQ ID NO: 35289 - DNA, 20 bp, synthetic construct
  source 1..20: mol_type = other DNA
actcattcactgcaggtgcg

SEQ ID NO: 35290 - DNA, 20 bp, synthetic construct
  source 1..20: mol_type = other DNA
cattcacgatggggaggccc

SEQ ID NO: 35291 - DNA, 20 bp, synthetic construct
  source 1..20: mol_type = other DNA
cgtgagggatgatgtcacca

SEQ ID NO: 35292 - DNA, 20 bp, synthetic construct
  source 1..20: mol_type = other DNA
cagttggaatgtaaaggtga

SEQ ID NO: 35293 - DNA, 20 bp, synthetic construct
  source 1..20: mol_type = other DNA
ggcggattacaacactgcca

SEQ ID NO: 35294 - DNA, 20 bp, synthetic construct
  source 1..20: mol_type = other DNA
gctcctctcacctggtacac

SEQ ID NO: 35295 - DNA, 20 bp, synthetic construct
  source 1..20: mol_type = other DNA
cgaagtcgcggcggtagcgg

SEQ ID NO: 35296 - DNA, 20 bp, synthetic construct
  source 1..20: mol_type = other DNA
actgcagaatactgaacatg

SEQ ID NO: 35297 - DNA, 20 bp, synthetic construct
  source 1..20: mol_type = other DNA
gacccctggatgtgtggctg

SEQ ID NO: 35298 - DNA, 20 bp, synthetic construct
  source 1..20: mol_type = other DNA
ctccactccatctctgccag

SEQ ID NO: 35299 - DNA, 20 bp, synthetic construct
  source 1..20: mol_type = other DNA
cctatgataaattctagagt

SEQ ID NO: 35300 - DNA, 20 bp, synthetic construct
  source 1..20: mol_type = other DNA
acctgaatgggcggtgaggt

SEQ ID NO: 35301 - DNA, 20 bp, synthetic construct
  source 1..20: mol_type = other DNA
ggcagctgcacagctgggga

SEQ ID NO: 35302 - DNA, 20 bp, synthetic construct
  source 1..20: mol_type = other DNA
tccccttaggacactcacat

SEQ ID NO: 35303 - DNA, 20 bp, synthetic construct
  source 1..20: mol_type = other DNA
ccacatccacatcattgcgc

SEQ ID NO: 35304 - DNA, 20 bp, synthetic construct
  source 1..20: mol_type = other DNA
tagcaatcggggagtacagc

SEQ ID NO: 35305 - DNA, 20 bp, synthetic construct
  source 1..20: mol_type = other DNA
gaagtcattttctctttcaa

SEQ ID NO: 35306 - DNA, 20 bp, synthetic construct
  source 1..20: mol_type = other DNA
cagtgagtgggagcccagat

SEQ ID NO: 35307 - DNA, 20 bp, synthetic construct
  source 1..20: mol_type = other DNA
tgtgtgcacagccccactgc

SEQ ID NO: 35308 - DNA, 20 bp, synthetic construct
  source 1..20: mol_type = other DNA
tcggggtaatagaacgcagg

SEQ ID NO: 35309 - DNA, 20 bp, synthetic construct
  source 1..20: mol_type = other DNA
gctgttgatcagtgctctgt

SEQ ID NO: 35310 - DNA, 20 bp, synthetic construct
  source 1..20: mol_type = other DNA
cgatctcctagataacgtgg

SEQ ID NO: 35311 - DNA, 20 bp, synthetic construct
  source 1..20: mol_type = other DNA
gacaagcaggaatttgttca

SEQ ID NO: 35312 - DNA, 20 bp, synthetic construct
  source 1..20: mol_type = other DNA
ttttgtagagaacaacaagc

SEQ ID NO: 35313 - DNA, 20 bp, synthetic construct
  source 1..20: mol_type = other DNA
cttcgccgtccaccctagag

SEQ ID NO: 35314 - DNA, 20 bp, synthetic construct
  source 1..20: mol_type = other DNA
cccaggcgtgtgcgtgcaga

SEQ ID NO: 35315 - DNA, 20 bp, synthetic construct
  source 1..20: mol_type = other DNA
gccttccttagagccagtga

SEQ ID NO: 35316 - DNA, 20 bp, synthetic construct
  source 1..20: mol_type = other DNA
cggccaccaagtgccggaag

SEQ ID NO: 35317 - DNA, 20 bp, synthetic construct
  source 1..20: mol_type = other DNA
tacttgtctatgaacatctg

SEQ ID NO: 35318 - DNA, 20 bp, synthetic construct
  source 1..20: mol_type = other DNA
tgatggagtactgctccagt

SEQ ID NO: 35319 - DNA, 20 bp, synthetic construct
  source 1..20: mol_type = other DNA
gggccaggacccagctgagg

SEQ ID NO: 35320 - DNA, 20 bp, synthetic construct
  source 1..20: mol_type = other DNA
cttaggtctggggacgaagt

SEQ ID NO: 35321 - DNA, 20 bp, synthetic construct
  source 1..20: mol_type = other DNA
tgacccctatccagaggtct

SEQ ID NO: 35322 - DNA, 20 bp, synthetic construct
  source 1..20: mol_type = other DNA
ccctggagagagaaaggagt

SEQ ID NO: 35323 - DNA, 20 bp, synthetic construct
  source 1..20: mol_type = other DNA
gggtcgatggggccgcacca

SEQ ID NO: 35324 - DNA, 20 bp, synthetic construct
  source 1..20: mol_type = other DNA
tacaggtaataagggaggga

SEQ ID NO: 35325 - DNA, 20 bp, synthetic construct
  source 1..20: mol_type = other DNA
cttacacaggatacagagaa

SEQ ID NO: 35326 - DNA, 20 bp, synthetic construct
  source 1..20: mol_type = other DNA
tcctcgtccatgatggcgcc

SEQ ID NO: 35327 - DNA, 20 bp, synthetic construct
  source 1..20: mol_type = other DNA
gatgaagggcaggctgccag

SEQ ID NO: 35328 - DNA, 20 bp, synthetic construct
  source 1..20: mol_type = other DNA
ctgatggatcaagatgtact

SEQ ID NO: 35329 - DNA, 20 bp, synthetic construct
  source 1..20: mol_type = other DNA
gctccaagccttacatgaaa

SEQ ID NO: 35330 - DNA, 20 bp, synthetic construct
  source 1..20: mol_type = other DNA
ccacgttggaggagaggggc

SEQ ID NO: 35331 - DNA, 20 bp, synthetic construct
  source 1..20: mol_type = other DNA
tggcctcaccatcctggccc

SEQ ID NO: 35332 - DNA, 20 bp, synthetic construct
  source 1..20: mol_type = other DNA
gtgacagctggcaggtgatg

SEQ ID NO: 35333 - DNA, 20 bp, synthetic construct
  source 1..20: mol_type = other DNA
aggtgggcggacacggcgag

SEQ ID NO: 35334 - DNA, 20 bp, synthetic construct
  source 1..20: mol_type = other DNA
caagacaacgacacatagct

SEQ ID NO: 35335 - DNA, 20 bp, synthetic construct
  source 1..20: mol_type = other DNA
cgccgccgcaggggaaggcc

SEQ ID NO: 35336 - DNA, 20 bp, synthetic construct
  source 1..20: mol_type = other DNA
cattcagacaggtgctttgt

SEQ ID NO: 35337 - DNA, 20 bp, synthetic construct
  source 1..20: mol_type = other DNA
acaggagactggacatcgtc

SEQ ID NO: 35338 - DNA, 20 bp, synthetic construct
  source 1..20: mol_type = other DNA
ggtggagaggatcccctggc

SEQ ID NO: 35339 - DNA, 20 bp, synthetic construct
  source 1..20: mol_type = other DNA
gaaccaggcctgatgggaga

SEQ ID NO: 35340 - DNA, 20 bp, synthetic construct
  source 1..20: mol_type = other DNA
gagacttcacactttccgtt

SEQ ID NO: 35341 - DNA, 20 bp, synthetic construct
  source 1..20: mol_type = other DNA
gcttcccttgatctgactgg

SEQ ID NO: 35342 - DNA, 20 bp, synthetic construct
  source 1..20: mol_type = other DNA
agatagggtgagcacaggtt

SEQ ID NO: 35343 - DNA, 20 bp, synthetic construct
  source 1..20: mol_type = other DNA
aagcccatgtaagtacttgt

SEQ ID NO: 35344 - DNA, 20 bp, synthetic construct
  source 1..20: mol_type = other DNA
ttgcttccgttcccgtgggg

SEQ ID NO: 35345 - DNA, 20 bp, synthetic construct
  source 1..20: mol_type = other DNA
catcatgaacatgcaggggc

SEQ ID NO: 35346 - DNA, 20 bp, synthetic construct
  source 1..20: mol_type = other DNA
agaggcatcctggagagttc

SEQ ID NO: 35347 - DNA, 20 bp, synthetic construct
  source 1..20: mol_type = other DNA
ctctcccttggatggtcggc

SEQ ID NO: 35348 - DNA, 20 bp, synthetic construct
  source 1..20: mol_type = other DNA
tgcctcaagaggcttggggt

SEQ ID NO: 35349 - DNA, 20 bp, synthetic construct
  source 1..20: mol_type = other DNA
gttgaatgatgtaaaataaa

SEQ ID NO: 35350 - DNA, 20 bp, synthetic construct
  source 1..20: mol_type = other DNA
tttcaccaggaggagctgct

SEQ ID NO: 35351 - DNA, 20 bp, synthetic construct
  source 1..20: mol_type = other DNA
ggcctggtgctggggctgct

SEQ ID NO: 35352 - DNA, 20 bp, synthetic construct
  source 1..20: mol_type = other DNA
cggaggggagcccctgccat

SEQ ID NO: 35353 - DNA, 20 bp, synthetic construct
  source 1..20: mol_type = other DNA
agaaatgcagtgctgtgtcg

SEQ ID NO: 35354 - DNA, 20 bp, synthetic construct
  source 1..20: mol_type = other DNA
gcatccttggcctgctggaa

SEQ ID NO: 35355 - DNA, 20 bp, synthetic construct
  source 1..20: mol_type = other DNA
cacagatgacctgctggggc

SEQ ID NO: 35356 - DNA, 20 bp, synthetic construct
  source 1..20: mol_type = other DNA
ccttcagttgctaggtgggg

SEQ ID NO: 35357 - DNA, 20 bp, synthetic construct
  source 1..20: mol_type = other DNA
gttctggtaaaagagaaggt

SEQ ID NO: 35358 - DNA, 20 bp, synthetic construct
  source 1..20: mol_type = other DNA
cgagacatcaagccttccag

SEQ ID NO: 35359 - DNA, 20 bp, synthetic construct
  source 1..20: mol_type = other DNA
cgatcactagcagagaggac

SEQ ID NO: 35360 - DNA, 20 bp, synthetic construct
  source 1..20: mol_type = other DNA
ctaaaggatggtcctgagat

SEQ ID NO: 35361 - DNA, 20 bp, synthetic construct
  source 1..20: mol_type = other DNA
tatttaaccaagaggtaaga

SEQ ID NO: 35362 - DNA, 20 bp, synthetic construct
  source 1..20: mol_type = other DNA
caccatccactcgtagatct

SEQ ID NO: 35363 - DNA, 20 bp, synthetic construct
  source 1..20: mol_type = other DNA
caagaactatgatcacgacc

SEQ ID NO: 35364 - DNA, 20 bp, synthetic construct
  source 1..20: mol_type = other DNA
tcctggcaagaaggtacagg

SEQ ID NO: 35365 - DNA, 20 bp, synthetic construct
  source 1..20: mol_type = other DNA
tgttcagcaaagaccaaaga

SEQ ID NO: 35366 - DNA, 20 bp, synthetic construct
  source 1..20: mol_type = other DNA
gggcagccggggggccgtga

SEQ ID NO: 35367 - DNA, 20 bp, synthetic construct
  source 1..20: mol_type = other DNA
gtgtgctcaaaatcagatgg

SEQ ID NO: 35368 - DNA, 20 bp, synthetic construct
  source 1..20: mol_type = other DNA
tccgtctggttggtggtggc

SEQ ID NO: 35369 - DNA, 20 bp, synthetic construct
  source 1..20: mol_type = other DNA
ccacgagagcgtaagtcccg

SEQ ID NO: 35370 - DNA, 20 bp, synthetic construct
  source 1..20: mol_type = other DNA
gctcacaggcaaggtgtagg

SEQ ID NO: 35371 - DNA, 20 bp, synthetic construct
  source 1..20: mol_type = other DNA
cctcgagatggcggtggggg

SEQ ID NO: 35372 - DNA, 20 bp, synthetic construct
  source 1..20: mol_type = other DNA
ggtccacgacgtccatccct

SEQ ID NO: 35373 - DNA, 20 bp, synthetic construct
  source 1..20: mol_type = other DNA
catcctcatcaatgatgctg

SEQ ID NO: 35374 - DNA, 20 bp, synthetic construct
  source 1..20: mol_type = other DNA
catttacagtacctaaaaac

SEQ ID NO: 35375 - DNA, 20 bp, synthetic construct
  source 1..20: mol_type = other DNA
cgtgatgttccatgtaatac

SEQ ID NO: 35376 - DNA, 20 bp, synthetic construct
  source 1..20: mol_type = other DNA
ctcaccaacagggctggggc

SEQ ID NO: 35377 - DNA, 20 bp, synthetic construct
  source 1..20: mol_type = other DNA
ctccctgcagtgagagcagt

SEQ ID NO: 35378 - DNA, 20 bp, synthetic construct
  source 1..20: mol_type = other DNA
agatcatttccagtacccag

SEQ ID NO: 35379 - DNA, 20 bp, synthetic construct
  source 1..20: mol_type = other DNA
gtgtatgctgggctgttagg

SEQ ID NO: 35380 - DNA, 20 bp, synthetic construct
  source 1..20: mol_type = other DNA
tccacagagtgcctttcagg

SEQ ID NO: 35381 - DNA, 20 bp, synthetic construct
  source 1..20: mol_type = other DNA
ttagcggtcatgtcaatggt

SEQ ID NO: 35382 - DNA, 20 bp, synthetic construct
  source 1..20: mol_type = other DNA
cctccccgactgaaggaaaa

SEQ ID NO: 35383 - DNA, 20 bp, synthetic construct
  source 1..20: mol_type = other DNA
tcatctgcggagaaagggga

SEQ ID NO: 35384 - DNA, 20 bp, synthetic construct
  source 1..20: mol_type = other DNA
ctcggccttgaccaggcggc

SEQ ID NO: 35385 - DNA, 20 bp, synthetic construct
  source 1..20: mol_type = other DNA
gactttgatgaagttgtgga

SEQ ID NO: 35386 - DNA, 20 bp, synthetic construct
  source 1..20: mol_type = other DNA
cagtgtctgctgagtgactc

SEQ ID NO: 35387 - DNA, 20 bp, synthetic construct
  source 1..20: mol_type = other DNA
tcagccacagcagtggcaaa

SEQ ID NO: 35388 - DNA, 20 bp, synthetic construct
  source 1..20: mol_type = other DNA
ccatcttcaacactctgaag

SEQ ID NO: 35389 - DNA, 20 bp, synthetic construct
  source 1..20: mol_type = other DNA
acaagatagtacggagatgc

SEQ ID NO: 35390 - DNA, 20 bp, synthetic construct
  source 1..20: mol_type = other DNA
cgcccgggggagcgcggcgc

SEQ ID NO: 35391 - DNA, 20 bp, synthetic construct
  source 1..20: mol_type = other DNA
tttggagcattgctgtcaga

SEQ ID NO: 35392 - DNA, 20 bp, synthetic construct
  source 1..20: mol_type = other DNA
cagtccagctgccaggtgca

SEQ ID NO: 35393 - DNA, 20 bp, synthetic construct
  source 1..20: mol_type = other DNA
acagccggttgtgcttgttg

SEQ ID NO: 35394 - DNA, 20 bp, synthetic construct
  source 1..20: mol_type = other DNA
aatttctctcccaaagttcg

SEQ ID NO: 35395 - DNA, 20 bp, synthetic construct
  source 1..20: mol_type = other DNA
ctcgctgcgctcccgggatt

SEQ ID NO: 35396 - DNA, 20 bp, synthetic construct
  source 1..20: mol_type = other DNA
gtcttgagtacaaagagtct

SEQ ID NO: 35397 - DNA, 20 bp, synthetic construct
  source 1..20: mol_type = other DNA
tcatcctccagaagtccagg

SEQ ID NO: 35398 - DNA, 20 bp, synthetic construct
  source 1..20: mol_type = other DNA
caccagtgtgaccgatcccc

SEQ ID NO: 35399 - DNA, 20 bp, synthetic construct
  source 1..20: mol_type = other DNA
tgctgctgccccccaccaga

SEQ ID NO: 35400 - DNA, 20 bp, synthetic construct
  source 1..20: mol_type = other DNA
ggatggaggcccaaccgctc

SEQ ID NO: 35401 - DNA, 20 bp, synthetic construct
  source 1..20: mol_type = other DNA
gctacagaagaagggggaca

SEQ ID NO: 35402 - DNA, 20 bp, synthetic construct
  source 1..20: mol_type = other DNA
ttacttttacgtgtgatggt

SEQ ID NO: 35403 - DNA, 20 bp, synthetic construct
  source 1..20: mol_type = other DNA
ctgagcatcttggtggcgct

SEQ ID NO: 35404 - DNA, 20 bp, synthetic construct
  source 1..20: mol_type = other DNA
gcatcctttccagtgtactc

SEQ ID NO: 35405 - DNA, 20 bp, synthetic construct
  source 1..20: mol_type = other DNA
actccaggagaggttgggct

SEQ ID NO: 35406 - DNA, 20 bp, synthetic construct
  source 1..20: mol_type = other DNA
cattcagtatggcctcaaag

SEQ ID NO: 35407 - DNA, 20 bp, synthetic construct
  source 1..20: mol_type = other DNA
ccctggtgcagactgcccca

SEQ ID NO: 35408 - DNA, 20 bp, synthetic construct
  source 1..20: mol_type = other DNA
accagacggctctgcacctt

SEQ ID NO: 35409 - DNA, 20 bp, synthetic construct
  source 1..20: mol_type = other DNA
agctgtcatccgtatctgtt

SEQ ID NO: 35410 - DNA, 20 bp, synthetic construct
  source 1..20: mol_type = other DNA
tacttacagactgagggaga

SEQ ID NO: 35411 - DNA, 20 bp, synthetic construct
  source 1..20: mol_type = other DNA
ctggtgaaaagaaaccataa

SEQ ID NO: 35412 - DNA, 20 bp, synthetic construct
  source 1..20: mol_type = other DNA
tgtgtctaaggaagggggaa

SEQ ID NO: 35413 - DNA, 20 bp, synthetic construct
  source 1..20: mol_type = other DNA
aagtaactggctctaataca

SEQ ID NO: 35414 - DNA, 20 bp, synthetic construct
  source 1..20: mol_type = other DNA
gccgcagtggcaggtggtgt

SEQ ID NO: 35415 - DNA, 20 bp, synthetic construct
  source 1..20: mol_type = other DNA
gtgatataaaaactcacaag

SEQ ID NO: 35416 - DNA, 20 bp, synthetic construct
  source 1..20: mol_type = other DNA
acatcttgtaagttatcact

SEQ ID NO: 35417 - DNA, 20 bp, synthetic construct
  source 1..20: mol_type = other DNA
actttgagttactaaaggta

SEQ ID NO: 35418 - DNA, 20 bp, synthetic construct
  source 1..20: mol_type = other DNA
ggcactcaccgatctgcgcc

SEQ ID NO: 35419 - DNA, 20 bp, synthetic construct
  source 1..20: mol_type = other DNA
tggacagcaaggtattgggg

SEQ ID NO: 35420 - DNA, 20 bp, synthetic construct
  source 1..20: mol_type = other DNA
agcactgaacagtaaggtgg

SEQ ID NO: 35421 - DNA, 20 bp, synthetic construct
  source 1..20: mol_type = other DNA
cgtgcccaagagcccctctg

SEQ ID NO: 35422 - DNA, 20 bp, synthetic construct
  source 1..20: mol_type = other DNA
gcgtcagtgccccagcccca

SEQ ID NO: 35423 - DNA, 20 bp, synthetic construct
  source 1..20: mol_type = other DNA
tgcccacccagaagcagccc

SEQ ID NO: 35424 - DNA, 20 bp, synthetic construct
  source 1..20: mol_type = other DNA
cgcgtactgagtccgcgcgc

SEQ ID NO: 35425 - DNA, 20 bp, synthetic construct
  source 1..20: mol_type = other DNA
catgaggttcttcaccaagc

SEQ ID NO: 35426 - DNA, 20 bp, synthetic construct
  source 1..20: mol_type = other DNA
tcagtaaggatctgggagga

SEQ ID NO: 35427 - DNA, 20 bp, synthetic construct
  source 1..20: mol_type = other DNA
agaattctcagcctaggtaa

SEQ ID NO: 35428 - DNA, 20 bp, synthetic construct
  source 1..20: mol_type = other DNA
tcttgccgtggaaccaactg

SEQ ID NO: 35429 - DNA, 20 bp, synthetic construct
  source 1..20: mol_type = other DNA
gcgattgacgatgaggagtg

SEQ ID NO: 35430 - DNA, 20 bp, synthetic construct
  source 1..20: mol_type = other DNA
gcgcgtgcacgtggccgcgc

SEQ ID NO: 35431 - DNA, 20 bp, synthetic construct
  source 1..20: mol_type = other DNA
gcccagtactggccatctga

SEQ ID NO: 35432 - DNA, 20 bp, synthetic construct
  source 1..20: mol_type = other DNA
gacctccggacctcagtccc

SEQ ID NO: 35433 - DNA, 20 bp, synthetic construct
  source 1..20: mol_type = other DNA
gattgtgaacctcccgtaca

SEQ ID NO: 35434 - DNA, 20 bp, synthetic construct
  source 1..20: mol_type = other DNA
catcgtggatctgaaagacg

SEQ ID NO: 35435 - DNA, 20 bp, synthetic construct
  source 1..20: mol_type = other DNA
tcacagatttggacttggac

SEQ ID NO: 35436 - DNA, 20 bp, synthetic construct
  source 1..20: mol_type = other DNA
aattaacccacctggctggc

SEQ ID NO: 35437 - DNA, 20 bp, synthetic construct
  source 1..20: mol_type = other DNA
cctgtggtaaaccaacacag

SEQ ID NO: 35438 - DNA, 20 bp, synthetic construct
  source 1..20: mol_type = other DNA
agatctaaggcaaagactca

SEQ ID NO: 35439 - DNA, 20 bp, synthetic construct
  source 1..20: mol_type = other DNA
ctttggccacgtggacgctg

SEQ ID NO: 35440 - DNA, 20 bp, synthetic construct
  source 1..20: mol_type = other DNA
aaattgaacttagctcatta

SEQ ID NO: 35441 - DNA, 20 bp, synthetic construct
  source 1..20: mol_type = other DNA
cagggaccggcagagctcca

SEQ ID NO: 35442 - DNA, 20 bp, synthetic construct
  source 1..20: mol_type = other DNA
ctcatgccgtgagtaccacg

SEQ ID NO: 35443 - DNA, 20 bp, synthetic construct
  source 1..20: mol_type = other DNA
tcctccagggcgacactccc

SEQ ID NO: 35444 - DNA, 20 bp, synthetic construct
  source 1..20: mol_type = other DNA
cgagcggagcccgcggggcc

SEQ ID NO: 35445 - DNA, 20 bp, synthetic construct
  source 1..20: mol_type = other DNA
gaatcaagcgaagttctccc

SEQ ID NO: 35446 - DNA, 20 bp, synthetic construct
  source 1..20: mol_type = other DNA
ctgggccagcacggacatca

SEQ ID NO: 35447 - DNA, 20 bp, synthetic construct
  source 1..20: mol_type = other DNA
ccttgggccctccctggctc

SEQ ID NO: 35448 - DNA, 20 bp, synthetic construct
  source 1..20: mol_type = other DNA
agcacgtgcagactcggctg

SEQ ID NO: 35449 - DNA, 20 bp, synthetic construct
  source 1..20: mol_type = other DNA
gcagtcccagtctagtactg

SEQ ID NO: 35450 - DNA, 20 bp, synthetic construct
  source 1..20: mol_type = other DNA
aaaaatgggctagaaagaaa

SEQ ID NO: 35451 - DNA, 20 bp, synthetic construct
  source 1..20: mol_type = other DNA
tgcgcctggggtgggaggtg

SEQ ID NO: 35452 - DNA, 20 bp, synthetic construct
  source 1..20: mol_type = other DNA
gtctaattcagccacagcag

SEQ ID NO: 35453 - DNA, 20 bp, synthetic construct
  source 1..20: mol_type = other DNA
aggagaccgcgggcggcggg

SEQ ID NO: 35454 - DNA, 20 bp, synthetic construct
  source 1..20: mol_type = other DNA
gagcagagggtgagtgtggg

SEQ ID NO: 35455 - DNA, 20 bp, synthetic construct
  source 1..20: mol_type = other DNA
ggtttgccgggagaagcagg

SEQ ID NO: 35456 - DNA, 20 bp, synthetic construct
  source 1..20: mol_type = other DNA
tgttagcacagtatttcaca

SEQ ID NO: 35457 - DNA, 20 bp, synthetic construct
  source 1..20: mol_type = other DNA
actctagatgaatcatagga

SEQ ID NO: 35458 - DNA, 20 bp, synthetic construct
  source 1..20: mol_type = other DNA
caatagtaggggtccaggca

SEQ ID NO: 35459 - DNA, 20 bp, synthetic construct
  source 1..20: mol_type = other DNA
gtcatcctgaggagagaagc

SEQ ID NO: 35460 - DNA, 20 bp, synthetic construct
  source 1..20: mol_type = other DNA
aggcataaagggagccacgg

SEQ ID NO: 35461 - DNA, 20 bp, synthetic construct
  source 1..20: mol_type = other DNA
ctccgggcaggatctgccag

SEQ ID NO: 35462 - DNA, 20 bp, synthetic construct
  source 1..20: mol_type = other DNA
atttacttacatttttcagg

SEQ ID NO: 35463 - DNA, 20 bp, synthetic construct
  source 1..20: mol_type = other DNA
atgacgaattgaattctgta

SEQ ID NO: 35464 - DNA, 20 bp, synthetic construct
  source 1..20: mol_type = other DNA
agcagccagaggcctggcag

SEQ ID NO: 35465 - DNA, 20 bp, synthetic construct
  source 1..20: mol_type = other DNA
cgccgagctctcgatggcct

SEQ ID NO: 35466 - DNA, 20 bp, synthetic construct
  source 1..20: mol_type = other DNA
aaagagttataaagctgtcc

SEQ ID NO: 35467 - DNA, 20 bp, synthetic construct
  source 1..20: mol_type = other DNA
tcctcgatgatgcactgaaa

SEQ ID NO: 35468 - DNA, 20 bp, synthetic construct
  source 1..20: mol_type = other DNA
cccctcactccaggccctgg

SEQ ID NO: 35469 - DNA, 20 bp, synthetic construct
  source 1..20: mol_type = other DNA
tcaccacacggttggtgtag

SEQ ID NO: 35470 - DNA, 20 bp, synthetic construct
  source 1..20: mol_type = other DNA
ctattgtaatactgcatagg

SEQ ID NO: 35471 - DNA, 20 bp, synthetic construct
  source 1..20: mol_type = other DNA
tgaggaagggaaattacctg

SEQ ID NO: 35472 - DNA, 20 bp, synthetic construct
  source 1..20: mol_type = other DNA
ggcagaaaaggagacttgct

SEQ ID NO: 35473 - DNA, 20 bp, synthetic construct
  source 1..20: mol_type = other DNA
gctcggtcttgtacttcgga

SEQ ID NO: 35474 - DNA, 20 bp, synthetic construct
  source 1..20: mol_type = other DNA
tgtgctggaggacttcttca

SEQ ID NO: 35475 - DNA, 20 bp, synthetic construct
  source 1..20: mol_type = other DNA
gtaccctacttcaaggacaa

SEQ ID NO: 35476 - DNA, 20 bp, synthetic construct
  source 1..20: mol_type = other DNA
tccttgggcctgatctcctc

SEQ ID NO: 35477 - DNA, 20 bp, synthetic construct
  source 1..20: mol_type = other DNA
gaagggtaaggagggtaagg

SEQ ID NO: 35478 - DNA, 20 bp, synthetic construct
  source 1..20: mol_type = other DNA
taagaagatggaggaagtaa

SEQ ID NO: 35479 - DNA, 20 bp, synthetic construct
  source 1..20: mol_type = other DNA
tccacctggatgcaggggca

SEQ ID NO: 35480 - DNA, 20 bp, synthetic construct
  source 1..20: mol_type = other DNA
gctcagcgtggaggtcccag

SEQ ID NO: 35481 - DNA, 20 bp, synthetic construct
  source 1..20: mol_type = other DNA
gcgtcttcaccttgtcctcc

SEQ ID NO: 35482 - DNA, 20 bp, synthetic construct
  source 1..20: mol_type = other DNA
ggagtgttgcctttgggtac

SEQ ID NO: 35483 - DNA, 20 bp, synthetic construct
  source 1..20: mol_type = other DNA
tgaaccggcacctgcacacc

SEQ ID NO: 35484 - DNA, 20 bp, synthetic construct
  source 1..20: mol_type = other DNA
agcgatggggtttcctgctc

SEQ ID NO: 35485 - DNA, 20 bp, synthetic construct
  source 1..20: mol_type = other DNA
acattttcaatagagacccc

SEQ ID NO: 35486 - DNA, 20 bp, synthetic construct
  source 1..20: mol_type = other DNA
gtctccacagttccagaagg

SEQ ID NO: 35487 - DNA, 20 bp, synthetic construct
  source 1..20: mol_type = other DNA
gggtgcggctctccaggccc

SEQ ID NO: 35488 - DNA, 20 bp, synthetic construct
  source 1..20: mol_type = other DNA
gtaggaggagatggacctga

SEQ ID NO: 35489 - DNA, 20 bp, synthetic construct
  source 1..20: mol_type = other DNA
gccgcagctcccgctggccg

SEQ ID NO: 35490 - DNA, 20 bp, synthetic construct
  source 1..20: mol_type = other DNA
aaaagacttggtgttgttga

SEQ ID NO: 35491 - DNA, 20 bp, synthetic construct
  source 1..20: mol_type = other DNA
ctgtgagtgggaccctgctg

SEQ ID NO: 35492 - DNA, 20 bp, synthetic construct
  source 1..20: mol_type = other DNA
gaatgaccaggaggccacgc

SEQ ID NO: 35493 - DNA, 20 bp, synthetic construct
  source 1..20: mol_type = other DNA
ctttccaggacaggcaagga

SEQ ID NO: 35494 - DNA, 20 bp, synthetic construct
  source 1..20: mol_type = other DNA
cgtaccatgatgttgcccat

SEQ ID NO: 35495 - DNA, 20 bp, synthetic construct
  source 1..20: mol_type = other DNA
gtataagaatgaggatgtga

SEQ ID NO: 35496 - DNA, 20 bp, synthetic construct
  source 1..20: mol_type = other DNA
gagaccaaagtcgctgacct

SEQ ID NO: 35497 - DNA, 20 bp, synthetic construct
  source 1..20: mol_type = other DNA
agtctcttgtcacttaggtc

SEQ ID NO: 35498 - DNA, 20 bp, synthetic construct
  source 1..20: mol_type = other DNA
caagaaccagatgacaaacg

SEQ ID NO: 35499 - DNA, 20 bp, synthetic construct
  source 1..20: mol_type = other DNA
agtggaggcagtggtggcgg

SEQ ID NO: 35500 - DNA, 20 bp, synthetic construct
  source 1..20: mol_type = other DNA
cagcaggttagggaaaggag

SEQ ID NO: 35501 - DNA, 20 bp, synthetic construct
  source 1..20: mol_type = other DNA
cgtggaatacacctgcaaag

SEQ ID NO: 35502 - DNA, 20 bp, synthetic construct
  source 1..20: mol_type = other DNA
gcctcagcctcccagagtgc

SEQ ID NO: 35503 - DNA, 20 bp, synthetic construct
  source 1..20: mol_type = other DNA
cagcttcctactagtggatg

SEQ ID NO: 35504 - DNA, 20 bp, synthetic construct
  source 1..20: mol_type = other DNA
cgccagtggattggcccaac

SEQ ID NO: 35505 - DNA, 20 bp, synthetic construct
  source 1..20: mol_type = other DNA
gcaggatgtgctggtctggg

SEQ ID NO: 35506 - DNA, 20 bp, synthetic construct
  source 1..20: mol_type = other DNA
tgttgtcagagtggccgtgg

SEQ ID NO: 35507 - DNA, 20 bp, synthetic construct
  source 1..20: mol_type = other DNA
cagcatcccaaccagaggat

SEQ ID NO: 35508 - DNA, 20 bp, synthetic construct
  source 1..20: mol_type = other DNA
agacccagcagcactagcag

SEQ ID NO: 35509 - DNA, 20 bp, synthetic construct
  source 1..20: mol_type = other DNA
atggggagccttgggcccaa

SEQ ID NO: 35510 - DNA, 20 bp, synthetic construct
  source 1..20: mol_type = other DNA
ttacggtgatggtactgaaa

SEQ ID NO: 35511 - DNA, 20 bp, synthetic construct
  source 1..20: mol_type = other DNA
aaaaggaggggcccttgggg

SEQ ID NO: 35512 - DNA, 20 bp, synthetic construct
  source 1..20: mol_type = other DNA
actgcccagggccacggctg

SEQ ID NO: 35513 - DNA, 20 bp, synthetic construct
  source 1..20: mol_type = other DNA
aaagaagttgaacgagtggt

SEQ ID NO: 35514 - DNA, 20 bp, synthetic construct
  source 1..20: mol_type = other DNA
ggctccatgaagatgccaca

SEQ ID NO: 35515 - DNA, 20 bp, synthetic construct
  source 1..20: mol_type = other DNA
ctggctcgatgcctaagatg

SEQ ID NO: 35516 - DNA, 20 bp, synthetic construct
  source 1..20: mol_type = other DNA
tggacatctgcgggtcctcc

SEQ ID NO: 35517 - DNA, 20 bp, synthetic construct
  source 1..20: mol_type = other DNA
cttgatgatgggccgctacg

SEQ ID NO: 35518 - DNA, 20 bp, synthetic construct
  source 1..20: mol_type = other DNA
cttaccgttgagctcctcct

SEQ ID NO: 35519 - DNA, 20 bp, synthetic construct
  source 1..20: mol_type = other DNA
ccagacgagtacagctcagc

SEQ ID NO: 35520 - DNA, 20 bp, synthetic construct
  source 1..20: mol_type = other DNA
gagctcgtagaagagggaga

SEQ ID NO: 35521 - DNA, 20 bp, synthetic construct
  source 1..20: mol_type = other DNA
caggaaggggcggcggcgct

SEQ ID NO: 35522 - DNA, 20 bp, synthetic construct
  source 1..20: mol_type = other DNA
tttaatgtggaacatttctc

SEQ ID NO: 35523 - DNA, 20 bp, synthetic construct
  source 1..20: mol_type = other DNA
gcttcaggttggttctcagg

SEQ ID NO: 35524 - DNA, 20 bp, synthetic construct
  source 1..20: mol_type = other DNA
cggcacaggtaacggggagc

SEQ ID NO: 35525 - DNA, 20 bp, synthetic construct
  source 1..20: mol_type = other DNA
ccccctgaagcggacggcgg

SEQ ID NO: 35526 - DNA, 20 bp, synthetic construct
  source 1..20: mol_type = other DNA
ggatgtggaggaggccgagg

SEQ ID NO: 35527 - DNA, 20 bp, synthetic construct
  source 1..20: mol_type = other DNA
acttactctttggaatgccc

SEQ ID NO: 35528 - DNA, 20 bp, synthetic construct
  source 1..20: mol_type = other DNA
attcagccaagcattgttga

SEQ ID NO: 35529 - DNA, 20 bp, synthetic construct
  source 1..20: mol_type = other DNA
gcccccagcaccgctcgggc

SEQ ID NO: 35530 - DNA, 20 bp, synthetic construct
  source 1..20: mol_type = other DNA
cattacctgaatgggcggtg

SEQ ID NO: 35531 - DNA, 20 bp, synthetic construct
  source 1..20: mol_type = other DNA
ctgcgcgcagctcgtcaggg

SEQ ID NO: 35532 - DNA, 20 bp, synthetic construct
  source 1..20: mol_type = other DNA
gctgcacaagccgctcgcgg

SEQ ID NO: 35533 - DNA, 20 bp, synthetic construct
  source 1..20: mol_type = other DNA
cactgacttgctgaggggag

SEQ ID NO: 35534 - DNA, 20 bp, synthetic construct
  source 1..20: mol_type = other DNA
caagatcctctcccacgtgg

SEQ ID NO: 35535 - DNA, 20 bp, synthetic construct
  source 1..20: mol_type = other DNA
taatcttgtatctagaatcc

SEQ ID NO: 35536 - DNA, 20 bp, synthetic construct
  source 1..20: mol_type = other DNA
ggcatctcttccacggttcg

SEQ ID NO: 35537 - DNA, 20 bp, synthetic construct
  source 1..20: mol_type = other DNA
gtctcagctgcaggaacgtg

SEQ ID NO: 35538 - DNA, 20 bp, synthetic construct
  source 1..20: mol_type = other DNA
gcgggtggagagcgagaagg

SEQ ID NO: 35539 - DNA, 20 bp, synthetic construct
  source 1..20: mol_type = other DNA
agaaagaaaggagcaaccgt

SEQ ID NO: 35540 - DNA, 20 bp, synthetic construct
  source 1..20: mol_type = other DNA
aggttcgcacgccgtagtgc

SEQ ID NO: 35541 - DNA, 20 bp, synthetic construct
  source 1..20: mol_type = other DNA
catagcctcttccctggccc

SEQ ID NO: 35542 - DNA, 20 bp, synthetic construct
  source 1..20: mol_type = other DNA
aataccagagaatgtgttga

SEQ ID NO: 35543 - DNA, 20 bp, synthetic construct
  source 1..20: mol_type = other DNA
ttctctacgatatggtgtgt

SEQ ID NO: 35544 - DNA, 20 bp, synthetic construct
  source 1..20: mol_type = other DNA
tgactcccatccgctctagc

SEQ ID NO: 35545 - DNA, 20 bp, synthetic construct
  source 1..20: mol_type = other DNA
agcaccgtaatggggatgcc

SEQ ID NO: 35546 - DNA, 20 bp, synthetic construct
  source 1..20: mol_type = other DNA
ctctagtttggtgatattgg

SEQ ID NO: 35547 - DNA, 20 bp, synthetic construct
  source 1..20: mol_type = other DNA
ccccgcttgccgcgggctgg

SEQ ID NO: 35548 - DNA, 20 bp, synthetic construct
  source 1..20: mol_type = other DNA
agatgatcttccagatccca

SEQ ID NO: 35549 - DNA, 20 bp, synthetic construct
  source 1..20: mol_type = other DNA
atatccagttggaggtacct

SEQ ID NO: 35550 - DNA, 20 bp, synthetic construct
  source 1..20: mol_type = other DNA
tcagtgggaggcagcagagg

SEQ ID NO: 35551 - DNA, 20 bp, synthetic construct
  source 1..20: mol_type = other DNA
cggattgtggcacagtctgt

SEQ ID NO: 35552 - DNA, 20 bp, synthetic construct
  source 1..20: mol_type = other DNA
taaggtgaaggcagagtctc

SEQ ID NO: 35553 - DNA, 20 bp, synthetic construct
  source 1..20: mol_type = other DNA
tgtcaaagatgggatgagaa

SEQ ID NO: 35554 - DNA, 20 bp, synthetic construct
  source 1..20: mol_type = other DNA
gcaccgggttctggtcgtgc

SEQ ID NO: 35555 - DNA, 20 bp, synthetic construct
  source 1..20: mol_type = other DNA
gagctaggagaggagagagc

SEQ ID NO: 35556 - DNA, 20 bp, synthetic construct
  source 1..20: mol_type = other DNA
tctttccatcgtttctaggt

SEQ ID NO: 35557 - DNA, 20 bp, synthetic construct
  source 1..20: mol_type = other DNA
agcaatgtctaacctgggca

SEQ ID NO: 35558 - DNA, 20 bp, synthetic construct
  source 1..20: mol_type = other DNA
caccaaccccgaggagaccg

SEQ ID NO: 35559 - DNA, 20 bp, synthetic construct
  source 1..20: mol_type = other DNA
cactcccaaaagggaaaggt

SEQ ID NO: 35560 - DNA, 20 bp, synthetic construct
  source 1..20: mol_type = other DNA
ttttcctgaagcaatgctcc

SEQ ID NO: 35561 - DNA, 20 bp, synthetic construct
  source 1..20: mol_type = other DNA
ctccaggagaggttgggcta

SEQ ID NO: 35562 - DNA, 20 bp, synthetic construct
  source 1..20: mol_type = other DNA
tgtacccttggtgaccctga

SEQ ID NO: 35563 - DNA, 20 bp, synthetic construct
  source 1..20: mol_type = other DNA
gctactcgagacacaatcac

SEQ ID NO: 35564 - DNA, 20 bp, synthetic construct
  source 1..20: mol_type = other DNA
caacgagatgctgtgcaaga

SEQ ID NO: 35565 - DNA, 20 bp, synthetic construct
  source 1..20: mol_type = other DNA
ccagtgcccagccccgacca

SEQ ID NO: 35566 - DNA, 20 bp, synthetic construct
  source 1..20: mol_type = other DNA
caggctgccgagggtctgaa

SEQ ID NO: 35567 - DNA, 20 bp, synthetic construct
  source 1..20: mol_type = other DNA
ctgcagcttaagtaaactga

SEQ ID NO: 35568 - DNA, 20 bp, synthetic construct
  source 1..20: mol_type = other DNA
tatggacgaaatgggtggtg

SEQ ID NO: 35569 - DNA, 20 bp, synthetic construct
  source 1..20: mol_type = other DNA
agaccccaggtcatcagttt

SEQ ID NO: 35570 - DNA, 20 bp, synthetic construct
  source 1..20: mol_type = other DNA
gcatgggcatctggttcttg

SEQ ID NO: 35571 - DNA, 20 bp, synthetic construct
  source 1..20: mol_type = other DNA
tgagcaggagggcttcgccg

SEQ ID NO: 35572 - DNA, 20 bp, synthetic construct
  source 1..20: mol_type = other DNA
gctcctcggcccccgcctcg

SEQ ID NO: 35573 - DNA, 20 bp, synthetic construct
  source 1..20: mol_type = other DNA
ggatgaaaaactgaagaagc

SEQ ID NO: 35574 - DNA, 20 bp, synthetic construct
  source 1..20: mol_type = other DNA
gggtctacctgaacggggac

SEQ ID NO: 35575 - DNA, 20 bp, synthetic construct
  source 1..20: mol_type = other DNA
tcctgattgctatcagagtc

SEQ ID NO: 35576 - DNA, 20 bp, synthetic construct
  source 1..20: mol_type = other DNA
ctccagcaggtaaggggtgg

SEQ ID NO: 35577 - DNA, 20 bp, synthetic construct
  source 1..20: mol_type = other DNA
tggccgaaggagccatccca

SEQ ID NO: 35578 - DNA, 20 bp, synthetic construct
  source 1..20: mol_type = other DNA
ccggccacgcgcctcggggc

SEQ ID NO: 35579 - DNA, 20 bp, synthetic construct
  source 1..20: mol_type = other DNA
ctgttggaggacaaaaaggc

SEQ ID NO: 35580 - DNA, 20 bp, synthetic construct
  source 1..20: mol_type = other DNA
ggaacatcatgcgcctcgta

SEQ ID NO: 35581 - DNA, 20 bp, synthetic construct
  source 1..20: mol_type = other DNA
tggatctgcatggaattctg

SEQ ID NO: 35582 - DNA, 20 bp, synthetic construct
  source 1..20: mol_type = other DNA
gtgtgggaggtagctgatgg

SEQ ID NO: 35583 - DNA, 20 bp, synthetic construct
  source 1..20: mol_type = other DNA
aactaaccctggatgggcta

SEQ ID NO: 35584 - DNA, 20 bp, synthetic construct
  source 1..20: mol_type = other DNA
aactgtataggcagagcagg

SEQ ID NO: 35585 - DNA, 20 bp, synthetic construct
  source 1..20: mol_type = other DNA
tgtttgatttagtctacagc

SEQ ID NO: 35586 - DNA, 20 bp, synthetic construct
  source 1..20: mol_type = other DNA
gccgtccgcttcagggggct

SEQ ID NO: 35587 - DNA, 20 bp, synthetic construct
  source 1..20: mol_type = other DNA
gcacctgctgcgggccgcac

SEQ ID NO: 35588 - DNA, 20 bp, synthetic construct
  source 1..20: mol_type = other DNA
cggagatggagggcagcgcg

SEQ ID NO: 35589 - DNA, 20 bp, synthetic construct
  source 1..20: mol_type = other DNA
cctacccacagcacccagct

SEQ ID NO: 35590 - DNA, 20 bp, synthetic construct
  source 1..20: mol_type = other DNA
tcaaaatcttgaggttgatt

SEQ ID NO: 35591 - DNA, 20 bp, synthetic construct
  source 1..20: mol_type = other DNA
tacatacctggtgcttgggc

SEQ ID NO: 35592 - DNA, 20 bp, synthetic construct
  source 1..20: mol_type = other DNA
aaggcgttgtcatggtgtag

SEQ ID NO: 35593 - DNA, 20 bp, synthetic construct
  source 1..20: mol_type = other DNA
cgagtaccgccggcctcctc

SEQ ID NO: 35594 - DNA, 20 bp, synthetic construct
  source 1..20: mol_type = other DNA
ccagaaaaatttgacctgtg

SEQ ID NO: 35595 - DNA, 20 bp, synthetic construct
  source 1..20: mol_type = other DNA
atacatcaatggaggctgtc

SEQ ID NO: 35596 - DNA, 20 bp, synthetic construct
  source 1..20: mol_type = other DNA
tcctcacctccaatgagatg

SEQ ID NO: 35597 - DNA, 20 bp, synthetic construct
  source 1..20: mol_type = other DNA
cggcggccaggagctgggcc

SEQ ID NO: 35598 - DNA, 20 bp, synthetic construct
  source 1..20: mol_type = other DNA
agcagcttcctactagtgga

SEQ ID NO: 35599 - DNA, 20 bp, synthetic construct
  source 1..20: mol_type = other DNA
ataccaccaacctcactctg

SEQ ID NO: 35600 - DNA, 20 bp, synthetic construct
  source 1..20: mol_type = other DNA
ggccaggcggcctgcaaggc

SEQ ID NO: 35601 - DNA, 20 bp, synthetic construct
  source 1..20: mol_type = other DNA
ctcacatgttttgatggatt

SEQ ID NO: 35602 - DNA, 20 bp, synthetic construct
  source 1..20: mol_type = other DNA
ccggtgccccccgccgccgc

SEQ ID NO: 35603 - DNA, 20 bp, synthetic construct
  source 1..20: mol_type = other DNA
gttacctgtgccggggtctt

SEQ ID NO: 35604 - DNA, 20 bp, synthetic construct
  source 1..20: mol_type = other DNA
tccatgtcggggccgggctg

SEQ ID NO: 35605 - DNA, 20 bp, synthetic construct
  source 1..20: mol_type = other DNA
cagtcctttatcacatctct

SEQ ID NO: 35606 - DNA, 20 bp, synthetic construct
  source 1..20: mol_type = other DNA
gcagctgacacatgaggtgg

SEQ ID NO: 35607 - DNA, 20 bp, synthetic construct
  source 1..20: mol_type = other DNA
tgtcactttatcctggagct

SEQ ID NO: 35608 - DNA, 20 bp, synthetic construct
  source 1..20: mol_type = other DNA
ccatcagctatttgcgtgtg

SEQ ID NO: 35609 - DNA, 20 bp, synthetic construct
  source 1..20: mol_type = other DNA
ggcagctgtcagcaaggtag

SEQ ID NO: 35610 - DNA, 20 bp, synthetic construct
  source 1..20: mol_type = other DNA
tcacctgtgatgggcacgtc

SEQ ID NO: 35611 - DNA, 20 bp, synthetic construct
  source 1..20: mol_type = other DNA
agaccaggtacctgagaggc

SEQ ID NO: 35612 - DNA, 20 bp, synthetic construct
  source 1..20: mol_type = other DNA
ggcagatggtgcgctggccc

SEQ ID NO: 35613 - DNA, 20 bp, synthetic construct
  source 1..20: mol_type = other DNA
ggaggaggtggaggaggact

SEQ ID NO: 35614 - DNA, 20 bp, synthetic construct
  source 1..20: mol_type = other DNA
ggtttttccgaagagatgtt

SEQ ID NO: 35615 - DNA, 20 bp, synthetic construct
  source 1..20: mol_type = other DNA
ggaaatctgattatataatc

SEQ ID NO: 35616 - DNA, 20 bp, synthetic construct
  source 1..20: mol_type = other DNA
ttttcggatagtttcggcgg

SEQ ID NO: 35617 - DNA, 20 bp, synthetic construct
  source 1..20: mol_type = other DNA
aaagaagggtaaggagggta

SEQ ID NO: 35618 - DNA, 20 bp, synthetic construct
  source 1..20: mol_type = other DNA
tgaagcgtgcggcgggcggc

SEQ ID NO: 35619 - DNA, 20 bp, synthetic construct
  source 1..20: mol_type = other DNA
gcagcccgtgtcagcgtctg

SEQ ID NO: 35620 - DNA, 20 bp, synthetic construct
  source 1..20: mol_type = other DNA
tcttcatggtttacagaatc

SEQ ID NO: 35621 - DNA, 20 bp, synthetic construct
  source 1..20: mol_type = other DNA
agtgccgtggaagttgtact

SEQ ID NO: 35622 - DNA, 20 bp, synthetic construct
  source 1..20: mol_type = other DNA
ggtggtgcaggtgaggagga

SEQ ID NO: 35623 - DNA, 20 bp, synthetic construct
  source 1..20: mol_type = other DNA
acctacggcgagggcgagag

SEQ ID NO: 35624 - DNA, 20 bp, synthetic construct
  source 1..20: mol_type = other DNA
ggaaaagcagaggaaggtgg

SEQ ID NO: 35625 - DNA, 20 bp, synthetic construct
  source 1..20: mol_type = other DNA
gtttgtgaaccccaagagtg

SEQ ID NO: 35626 - DNA, 20 bp, synthetic construct
  source 1..20: mol_type = other DNA
ccctcctccactttgatcaa

SEQ ID NO: 35627 - DNA, 20 bp, synthetic construct
  source 1..20: mol_type = other DNA
gcactgccttgacaaatcaa

SEQ ID NO: 35628 - DNA, 20 bp, synthetic construct
  source 1..20: mol_type = other DNA
ttcctggaagaggaatcaag

SEQ ID NO: 35629 - DNA, 20 bp, synthetic construct
  source 1..20: mol_type = other DNA
gctgaagatgagggacagtt

SEQ ID NO: 35630 - DNA, 20 bp, synthetic construct
  source 1..20: mol_type = other DNA
catcgctcctgttccacctc

SEQ ID NO: 35631 - DNA, 20 bp, synthetic construct
  source 1..20: mol_type = other DNA
ggctgggtggcggcacgtat

SEQ ID NO: 35632 - DNA, 20 bp, synthetic construct
  source 1..20: mol_type = other DNA
aggatttcattaataatatc

SEQ ID NO: 35633 - DNA, 20 bp, synthetic construct
  source 1..20: mol_type = other DNA
tacttcttgaccaccccaac

SEQ ID NO: 35634 - DNA, 20 bp, synthetic construct
  source 1..20: mol_type = other DNA
ggtttagtactttctgccat

SEQ ID NO: 35635 - DNA, 20 bp, synthetic construct
  source 1..20: mol_type = other DNA
tcccttggtattgaaactgc

SEQ ID NO: 35636 - DNA, 20 bp, synthetic construct
  source 1..20: mol_type = other DNA
tccatcagccaatgaggaga

SEQ ID NO: 35637 - DNA, 20 bp, synthetic construct
  source 1..20: mol_type = other DNA
gaggatgaagagctccagga

SEQ ID NO: 35638 - DNA, 20 bp, synthetic construct
  source 1..20: mol_type = other DNA
tccgagaagccctgcagaag

SEQ ID NO: 35639 - DNA, 20 bp, synthetic construct
  source 1..20: mol_type = other DNA
ttcatgagggctgaccacaa

SEQ ID NO: 35640 - DNA, 20 bp, synthetic construct
  source 1..20: mol_type = other DNA
attggagtccttataggaaa

SEQ ID NO: 35641 - DNA, 20 bp, synthetic construct
  source 1..20: mol_type = other DNA
aagctggattatttccacaa

SEQ ID NO: 35642 - DNA, 20 bp, synthetic construct
  source 1..20: mol_type = other DNA
cgcctgctgggctggaagaa

SEQ ID NO: 35643 - DNA, 20 bp, synthetic construct
  source 1..20: mol_type = other DNA
caccatatcttcctctacct

SEQ ID NO: 35644 - DNA, 20 bp, synthetic construct
  source 1..20: mol_type = other DNA
ctgcatgcccacagcctggt

SEQ ID NO: 35645 - DNA, 20 bp, synthetic construct
  source 1..20: mol_type = other DNA
gtggaggaaaagtaagtatc

SEQ ID NO: 35646 - DNA, 20 bp, synthetic construct
  source 1..20: mol_type = other DNA
cagccggttgtgcttgttgg

SEQ ID NO: 35647 - DNA, 20 bp, synthetic construct
  source 1..20: mol_type = other DNA
agggtcactgaagatgtagc

SEQ ID NO: 35648 - DNA, 20 bp, synthetic construct
  source 1..20: mol_type = other DNA
cgcgagggccagggcggggc

SEQ ID NO: 35649 - DNA, 20 bp, synthetic construct
  source 1..20: mol_type = other DNA
aagttcagctattgggtaag

SEQ ID NO: 35650 - DNA, 20 bp, synthetic construct
  source 1..20: mol_type = other DNA
gcggcgccggcggctgcgcg

SEQ ID NO: 35651 - DNA, 20 bp, synthetic construct
  source 1..20: mol_type = other DNA
ccagtacatcttgatccatc

SEQ ID NO: 35652 - DNA, 20 bp, synthetic construct
  source 1..20: mol_type = other DNA
cgagccttcccacaggtaag

SEQ ID NO: 35653 - DNA, 20 bp, synthetic construct
  source 1..20: mol_type = other DNA
atttggaaaactgtgatcca

SEQ ID NO: 35654 - DNA, 20 bp, synthetic construct
  source 1..20: mol_type = other DNA
aggacgtgatcttcttggga

SEQ ID NO: 35655 - DNA, 20 bp, synthetic construct
  source 1..20: mol_type = other DNA
ggaggaaccgcagaccgtgc

SEQ ID NO: 35656 - DNA, 20 bp, synthetic construct
  source 1..20: mol_type = other DNA
aacctgtcaagagtggggat

SEQ ID NO: 35657 - DNA, 20 bp, synthetic construct
  source 1..20: mol_type = other DNA
tctggtaatgcccccgaccc

SEQ ID NO: 35658 - DNA, 20 bp, synthetic construct
  source 1..20: mol_type = other DNA
taccataaagcctcaactgc

SEQ ID NO: 35659 - DNA, 20 bp, synthetic construct
  source 1..20: mol_type = other DNA
gcaccaggttgagcttattg

SEQ ID NO: 35660 - DNA, 20 bp, synthetic construct
  source 1..20: mol_type = other DNA
ggtcgtaagtaaagtacacc

SEQ ID NO: 35661 - DNA, 20 bp, synthetic construct
  source 1..20: mol_type = other DNA
tacctgtcggttccgctcgt

SEQ ID NO: 35662 - DNA, 20 bp, synthetic construct
  source 1..20: mol_type = other DNA
tcaaccgagaatgagctaaa

SEQ ID NO: 35663 - DNA, 20 bp, synthetic construct
  source 1..20: mol_type = other DNA
ggtcgccctcacgggccacc

SEQ ID NO: 35664 - DNA, 20 bp, synthetic construct
  source 1..20: mol_type = other DNA
tgggagcctgctgagtgtgc

SEQ ID NO: 35665 - DNA, 20 bp, synthetic construct
  source 1..20: mol_type = other DNA
tctgttgcaggtcactgcaa

SEQ ID NO: 35666 - DNA, 20 bp, synthetic construct
  source 1..20: mol_type = other DNA
tccacaagaaggtggagaag

SEQ ID NO: 35667 - DNA, 20 bp, synthetic construct
  source 1..20: mol_type = other DNA
cagcagcactagcagtggca

SEQ ID NO: 35668 - DNA, 20 bp, synthetic construct
  source 1..20: mol_type = other DNA
ccaatgcgccatcggtgact

SEQ ID NO: 35669 - DNA, 20 bp, synthetic construct
  source 1..20: mol_type = other DNA
actccgactgctccaagagc

SEQ ID NO: 35670 - DNA, 20 bp, synthetic construct
  source 1..20: mol_type = other DNA
tctgcattcctcaatggcaa

SEQ ID NO: 35671 - DNA, 20 bp, synthetic construct
  source 1..20: mol_type = other DNA
cctgctccatcacgtccagc

SEQ ID NO: 35672 - DNA, 20 bp, synthetic construct
  source 1..20: mol_type = other DNA
tactggagagaacagcagga

SEQ ID NO: 35673 - DNA, 20 bp, synthetic construct
  source 1..20: mol_type = other DNA
accagttttgccgcagctgc

SEQ ID NO: 35674 - DNA, 20 bp, synthetic construct
  source 1..20: mol_type = other DNA
aggagctcaggtagtcgcgg

SEQ ID NO: 35675 - DNA, 20 bp, synthetic construct
  source 1..20: mol_type = other DNA
ggtgcctgtgcggccgatgc

SEQ ID NO: 35676 - DNA, 20 bp, synthetic construct
  source 1..20: mol_type = other DNA
actgtgggcacatacacctc

SEQ ID NO: 35677 - DNA, 20 bp, synthetic construct
  source 1..20: mol_type = other DNA
ggtagcaggtctaagatata

SEQ ID NO: 35678 - DNA, 20 bp, synthetic construct
  source 1..20: mol_type = other DNA
cggaagccggcagaaggtac

SEQ ID NO: 35679 - DNA, 20 bp, synthetic construct
  source 1..20: mol_type = other DNA
aagtcagaatgttgaacttc

SEQ ID NO: 35680 - DNA, 20 bp, synthetic construct
  source 1..20: mol_type = other DNA
gaccccacagagacatgatc

SEQ ID NO: 35681 - DNA, 20 bp, synthetic construct
  source 1..20: mol_type = other DNA
ctatcaattccagaacaacc

SEQ ID NO: 35682 - DNA, 20 bp, synthetic construct
  source 1..20: mol_type = other DNA
ttaactgaaaaaggaaaaca

SEQ ID NO: 35683 - DNA, 20 bp, synthetic construct
  source 1..20: mol_type = other DNA
tcacgagaagattcaggaga

SEQ ID NO: 35684 - DNA, 20 bp, synthetic construct
  source 1..20: mol_type = other DNA
acagagcttgatctccccac

SEQ ID NO: 35685 - DNA, 20 bp, synthetic construct
  source 1..20: mol_type = other DNA
agcgagctcgggagagaagt

SEQ ID NO: 35686 - DNA, 20 bp, synthetic construct
  source 1..20: mol_type = other DNA
atgatgtttcagcttctccg

SEQ ID NO: 35687 - DNA, 20 bp, synthetic construct
  source 1..20: mol_type = other DNA
tcccaacaggtaacctggac

SEQ ID NO: 35688 - DNA, 20 bp, synthetic construct
  source 1..20: mol_type = other DNA
atgtcgctgactcctagcca

SEQ ID NO: 35689 - DNA, 20 bp, synthetic construct
  source 1..20: mol_type = other DNA
ggagcaatgtgagggtgaag

SEQ ID NO: 35690 - DNA, 20 bp, synthetic construct
  source 1..20: mol_type = other DNA
tcgcggatgaggatgccctg

SEQ ID NO: 35691 - DNA, 20 bp, synthetic construct
  source 1..20: mol_type = other DNA
tccctcacctgcacctcgcg

SEQ ID NO: 35692 - DNA, 20 bp, synthetic construct
  source 1..20: mol_type = other DNA
tatgcaacagtttctctagt

SEQ ID NO: 35693 - DNA, 20 bp, synthetic construct
  source 1..20: mol_type = other DNA
acacttccaactaattctga

SEQ ID NO: 35694 - DNA, 20 bp, synthetic construct
  source 1..20: mol_type = other DNA
cctcctgcctgaaaatacct

SEQ ID NO: 35695 - DNA, 20 bp, synthetic construct
  source 1..20: mol_type = other DNA
tgccccagcagacgggcacg

SEQ ID NO: 35696 - DNA, 20 bp, synthetic construct
  source 1..20: mol_type = other DNA
ggctgcccaagcgcatggtg

SEQ ID NO: 35697 - DNA, 20 bp, synthetic construct
  source 1..20: mol_type = other DNA
cctaccgcgtccagcctgct

SEQ ID NO: 35698 - DNA, 20 bp, synthetic construct
  source 1..20: mol_type = other DNA
tgcagctggtggaggtgagc

SEQ ID NO: 35699 - DNA, 20 bp, synthetic construct
  source 1..20: mol_type = other DNA
tttaaactatgcgatgcttg

SEQ ID NO: 35700 - DNA, 20 bp, synthetic construct
  source 1..20: mol_type = other DNA
accagtttgggcaggcagca

SEQ ID NO: 35701 - DNA, 20 bp, synthetic construct
  source 1..20: mol_type = other DNA
cacattgcccattcacgatg

SEQ ID NO: 35702 - DNA, 20 bp, synthetic construct
  source 1..20: mol_type = other DNA
ggaacccagatttatgtaat

SEQ ID NO: 35703 - DNA, 20 bp, synthetic construct
  source 1..20: mol_type = other DNA
ggccctgtctctgcccctgg

SEQ ID NO: 35704 - DNA, 20 bp, synthetic construct
  source 1..20: mol_type = other DNA
cctgtaatataatatagata

SEQ ID NO: 35705 - DNA, 20 bp, synthetic construct
  source 1..20: mol_type = other DNA
cctcagacaccagcacattg

SEQ ID NO: 35706 - DNA, 20 bp, synthetic construct
  source 1..20: mol_type = other DNA
ccaaatggtaacgttcatgg

SEQ ID NO: 35707 - DNA, 20 bp, synthetic construct
  source 1..20: mol_type = other DNA
cactgtactcggcgagctct

SEQ ID NO: 35708 - DNA, 20 bp, synthetic construct
  source 1..20: mol_type = other DNA
caccgggccaagccagggga

SEQ ID NO: 35709 - DNA, 20 bp, synthetic construct
  source 1..20: mol_type = other DNA
ggtgctgacttcacaaggca

SEQ ID NO: 35710 - DNA, 20 bp, synthetic construct
  source 1..20: mol_type = other DNA
tttcctcaccatctcagaga

SEQ ID NO: 35711 - DNA, 20 bp, synthetic construct
  source 1..20: mol_type = other DNA
atatagatcttacctccaag

SEQ ID NO: 35712 - DNA, 20 bp, synthetic construct
  source 1..20: mol_type = other DNA
tggtcagcatgtggctggag

SEQ ID NO: 35713 - DNA, 20 bp, synthetic construct
  source 1..20: mol_type = other DNA
ctccctccaggctctcgggc

SEQ ID NO: 35714 - DNA, 20 bp, synthetic construct
  source 1..20: mol_type = other DNA
actgccgcaggactttcaac

SEQ ID NO: 35715 - DNA, 20 bp, synthetic construct
  source 1..20: mol_type = other DNA
cagcttccgcttccggcact

SEQ ID NO: 35716 - DNA, 20 bp, synthetic construct
  source 1..20: mol_type = other DNA
catcagagcacacaggtggg

SEQ ID NO: 35717 - DNA, 20 bp, synthetic construct
  source 1..20: mol_type = other DNA
aacactccggccgctgcctc

SEQ ID NO: 35718 - DNA, 20 bp, synthetic construct
  source 1..20: mol_type = other DNA
gggaggaggggaagaaaccg

SEQ ID NO: 35719 - DNA, 20 bp, synthetic construct
  source 1..20: mol_type = other DNA
tatttctcctaagtctagcg

SEQ ID NO: 35720 - DNA, 20 bp, synthetic construct
  source 1..20: mol_type = other DNA
gggttctccgtcaatttgca

SEQ ID NO: 35721 - DNA, 20 bp, synthetic construct
  source 1..20: mol_type = other DNA
gactcgcagacgccctctgc

SEQ ID NO: 35722 - DNA, 20 bp, synthetic construct
  source 1..20: mol_type = other DNA
atgcagtgcaccagccctca

SEQ ID NO: 35723 - DNA, 20 bp, synthetic construct
  source 1..20: mol_type = other DNA
gccgctggggctcaaagtcg

SEQ ID NO: 35724 - DNA, 20 bp, synthetic construct
  source 1..20: mol_type = other DNA
atatttctgcttcactgtgt

SEQ ID NO: 35725 - DNA, 20 bp, synthetic construct
  source 1..20: mol_type = other DNA
ccgcaagaagctggtggtgg

SEQ ID NO: 35726 - DNA, 20 bp, synthetic construct
  source 1..20: mol_type = other DNA
cgtgcaggtgacccaggtag

SEQ ID NO: 35727 - DNA, 20 bp, synthetic construct
  source 1..20: mol_type = other DNA
atggagggtttcgtgctgga

SEQ ID NO: 35728 - DNA, 20 bp, synthetic construct
  source 1..20: mol_type = other DNA
ccttcattctcaacttgtga

SEQ ID NO: 35729 - DNA, 20 bp, synthetic construct
  source 1..20: mol_type = other DNA
tacagcctcctcgagacctc

SEQ ID NO: 35730 - DNA, 20 bp, synthetic construct
  source 1..20: mol_type = other DNA
gcttcggaggaaatctgact

SEQ ID NO: 35731 - DNA, 20 bp, synthetic construct
  source 1..20: mol_type = other DNA
gggtcactttgatatggtct

SEQ ID NO: 35732 - DNA, 20 bp, synthetic construct
  source 1..20: mol_type = other DNA
cgccgtacctctcgtagtgg

SEQ ID NO: 35733 - DNA, 20 bp, synthetic construct
  source 1..20: mol_type = other DNA
tttcagaaatctgatgtacc

SEQ ID NO: 35734 - DNA, 20 bp, synthetic construct
  source 1..20: mol_type = other DNA
acgcacgacatcaggctgga

SEQ ID NO: 35735 - DNA, 20 bp, synthetic construct
  source 1..20: mol_type = other DNA
cgcgctgatgctcaagtgcg

SEQ ID NO: 35736 - DNA, 20 bp, synthetic construct
  source 1..20: mol_type = other DNA
ggaggtctgggtcttcaaca

SEQ ID NO: 35737 - DNA, 20 bp, synthetic construct
  source 1..20: mol_type = other DNA
gaacggaaagagaccagagc

SEQ ID NO: 35738 - DNA, 20 bp, synthetic construct
  source 1..20: mol_type = other DNA
cctgcgggcagagcgcctcc

SEQ ID NO: 35739 - DNA, 20 bp, synthetic construct
  source 1..20: mol_type = other DNA
ccacatgctgtccgagctgg

SEQ ID NO: 35740 - DNA, 20 bp, synthetic construct
  source 1..20: mol_type = other DNA
caccattgtggccgtcacca

SEQ ID NO: 35741 - DNA, 20 bp, synthetic construct
  source 1..20: mol_type = other DNA
tccccgctggacaatgtgag

SEQ ID NO: 35742 - DNA, 20 bp, synthetic construct
  source 1..20: mol_type = other DNA
cccaggacccccagacgtcc

SEQ ID NO: 35743 - DNA, 20 bp, synthetic construct
  source 1..20: mol_type = other DNA
gtctgcagccgggtgcaggg

SEQ ID NO: 35744 - DNA, 20 bp, synthetic construct
  source 1..20: mol_type = other DNA
acccttcccatgcaaattga

SEQ ID NO: 35745 - DNA, 20 bp, synthetic construct
  source 1..20: mol_type = other DNA
catccttccaaggaggtcta

SEQ ID NO: 35746 - DNA, 20 bp, synthetic construct
  source 1..20: mol_type = other DNA
gattactatcactaatgaca

SEQ ID NO: 35747 - DNA, 20 bp, synthetic construct
  source 1..20: mol_type = other DNA
tgcagacagtaacttcgtgc

SEQ ID NO: 35748 - DNA, 20 bp, synthetic construct
  source 1..20: mol_type = other DNA
gccgcccgcgccgcccccgc

SEQ ID NO: 35749 - DNA, 20 bp, synthetic construct
  source 1..20: mol_type = other DNA
gcagacggaaagtgagggta

SEQ ID NO: 35750 - DNA, 20 bp, synthetic construct
  source 1..20: mol_type = other DNA
gggactcacagatttggact

SEQ ID NO: 35751 - DNA, 20 bp, synthetic construct
  source 1..20: mol_type = other DNA
acttctctacagccgaaaag

SEQ ID NO: 35752 - DNA, 20 bp, synthetic construct
  source 1..20: mol_type = other DNA
gcgggggcgctgtagggcgg

SEQ ID NO: 35753 - DNA, 20 bp, synthetic construct
  source 1..20: mol_type = other DNA
tatacttgaaaaaattcata

SEQ ID NO: 35754 - DNA, 20 bp, synthetic construct
  source 1..20: mol_type = other DNA
gggaggagagcggctgaagc

SEQ ID NO: 35755 - DNA, 20 bp, synthetic construct
  source 1..20: mol_type = other DNA
cgacccctcatcctcaagac

SEQ ID NO: 35756 - DNA, 20 bp, synthetic construct
  source 1..20: mol_type = other DNA
cctgcgtgtaccaaatgcag

SEQ ID NO: 35757 - DNA, 20 bp, synthetic construct
  source 1..20: mol_type = other DNA
gcacctgctgcaggttgttc

SEQ ID NO: 35758 - DNA, 20 bp, synthetic construct
  source 1..20: mol_type = other DNA
cttcacctccgcgctggcga

SEQ ID NO: 35759 - DNA, 20 bp, synthetic construct
  source 1..20: mol_type = other DNA
gtgatggagtactgctccag

SEQ ID NO: 35760 - DNA, 20 bp, synthetic construct
  source 1..20: mol_type = other DNA
tccccgccggcagagccgct

SEQ ID NO: 35761 - DNA, 20 bp, synthetic construct
  source 1..20: mol_type = other DNA
aatcttactcgtcctccttg

SEQ ID NO: 35762 - DNA, 20 bp, synthetic construct
  source 1..20: mol_type = other DNA
cgaggacctctccaccacct

SEQ ID NO: 35763 - DNA, 20 bp, synthetic construct
  source 1..20: mol_type = other DNA
tcactgccagcaggatgccc

SEQ ID NO: 35764 - DNA, 20 bp, synthetic construct
  source 1..20: mol_type = other DNA
actgaatgcgaatgattggc

SEQ ID NO: 35765 - DNA, 20 bp, synthetic construct
  source 1..20: mol_type = other DNA
gtgccgtacaaaggttggct

SEQ ID NO: 35766 - DNA, 20 bp, synthetic construct
  source 1..20: mol_type = other DNA
gaggtcctcggggatcggca

SEQ ID NO: 35767 - DNA, 20 bp, synthetic construct
  source 1..20: mol_type = other DNA
ctccaggatgttggccagga

SEQ ID NO: 35768 - DNA, 20 bp, synthetic construct
  source 1..20: mol_type = other DNA
cttcatcaaagggaacaggc

SEQ ID NO: 35769 - DNA, 20 bp, synthetic construct
  source 1..20: mol_type = other DNA
tgcatatagcggagcagcgg

SEQ ID NO: 35770 - DNA, 20 bp, synthetic construct
  source 1..20: mol_type = other DNA
gaacgcagtgcgcaagctgc

SEQ ID NO: 35771 - DNA, 20 bp, synthetic construct
  source 1..20: mol_type = other DNA
tgacgcggctgtaggggagg

SEQ ID NO: 35772 - DNA, 20 bp, synthetic construct
  source 1..20: mol_type = other DNA
caaggccaccccggtgcagg

SEQ ID NO: 35773 - DNA, 20 bp, synthetic construct
  source 1..20: mol_type = other DNA
gtccaccaggctttcacacc

SEQ ID NO: 35774 - DNA, 20 bp, synthetic construct
  source 1..20: mol_type = other DNA
taactacttctctattggcg

SEQ ID NO: 35775 - DNA, 20 bp, synthetic construct
  source 1..20: mol_type = other DNA
aggtcaagtcgtggtggcac

SEQ ID NO: 35776 - DNA, 20 bp, synthetic construct
  source 1..20: mol_type = other DNA
tgtcactgcaaaggtcaccc

SEQ ID NO: 35777 - DNA, 20 bp, synthetic construct
  source 1..20: mol_type = other DNA
gcccaggcctggggcaacag

SEQ ID NO: 35778 - DNA, 20 bp, synthetic construct
  source 1..20: mol_type = other DNA
caggacgatagtactgtgtt

SEQ ID NO: 35779 - DNA, 20 bp, synthetic construct
  source 1..20: mol_type = other DNA
accagaagaggtgcgtgaag

SEQ ID NO: 35780 - DNA, 20 bp, synthetic construct
  source 1..20: mol_type = other DNA
aggacacagacttggtactg

SEQ ID NO: 35781 - DNA, 20 bp, synthetic construct
  source 1..20: mol_type = other DNA
tgattggaccttggggagaa

SEQ ID NO: 35782 - DNA, 20 bp, synthetic construct
  source 1..20: mol_type = other DNA
gcggtgagaagggtgggcac

SEQ ID NO: 35783 - DNA, 20 bp, synthetic construct
  source 1..20: mol_type = other DNA
agcagctctgcagcagacca

SEQ ID NO: 35784 - DNA, 20 bp, synthetic construct
  source 1..20: mol_type = other DNA
actgtgcctggaggggccca

SEQ ID NO: 35785 - DNA, 20 bp, synthetic construct
  source 1..20: mol_type = other DNA
tacagctggagtgaaaaggc

SEQ ID NO: 35786 - DNA, 20 bp, synthetic construct
  source 1..20: mol_type = other DNA
gaagctgggcagggcagtgg

SEQ ID NO: 35787 - DNA, 20 bp, synthetic construct
  source 1..20: mol_type = other DNA
cagcgccctgggcccccagc

SEQ ID NO: 35788 - DNA, 20 bp, synthetic construct
  source 1..20: mol_type = other DNA
caggaggttttcttaacttc

SEQ ID NO: 35789 - DNA, 20 bp, synthetic construct
  source 1..20: mol_type = other DNA
ctccttctgaggaaggggct

SEQ ID NO: 35790 - DNA, 20 bp, synthetic construct
  source 1..20: mol_type = other DNA
cctcgatgaccaccatggac

SEQ ID NO: 35791 - DNA, 20 bp, synthetic construct
  source 1..20: mol_type = other DNA
gtggacatggcagcacaggt

SEQ ID NO: 35792 - DNA, 20 bp, synthetic construct
  source 1..20: mol_type = other DNA
acagagccccagtaccaacc

SEQ ID NO: 35793 - DNA, 20 bp, synthetic construct
  source 1..20: mol_type = other DNA
tccagtgctttctctgccag

SEQ ID NO: 35794 - DNA, 20 bp, synthetic construct
  source 1..20: mol_type = other DNA
gcccgggcgcgccgaaacca

SEQ ID NO: 35795 - DNA, 20 bp, synthetic construct
  source 1..20: mol_type = other DNA
aggggctgaggacctgaagg

SEQ ID NO: 35796 - DNA, 20 bp, synthetic construct
  source 1..20: mol_type = other DNA
aggctttatggtaataatgg

SEQ ID NO: 35797 - DNA, 20 bp, synthetic construct
  source 1..20: mol_type = other DNA
tctgcttgtgtaaatcctcc

SEQ ID NO: 35798 - DNA, 20 bp, synthetic construct
  source 1..20: mol_type = other DNA
gcggcagcgggcgggccact

SEQ ID NO: 35799 - DNA, 20 bp, synthetic construct
  source 1..20: mol_type = other DNA
ccactcttacctgttcatag

SEQ ID NO: 35800 - DNA, 20 bp, synthetic construct
  source 1..20: mol_type = other DNA
ttgaatggggagaaaggggc

SEQ ID NO: 35801 - DNA, 20 bp, synthetic construct
  source 1..20: mol_type = other DNA
ctcacctctggattggcttc

SEQ ID NO: 35802 - DNA, 20 bp, synthetic construct
  source 1..20: mol_type = other DNA
cagcgtagccaggtgagccc

SEQ ID NO: 35803 - DNA, 20 bp, synthetic construct
  source 1..20: mol_type = other DNA
gttggtgaacgtaggaccca

SEQ ID NO: 35804 - DNA, 20 bp, synthetic construct
  source 1..20: mol_type = other DNA
tgaggtggcggtgactggga

SEQ ID NO: 35805 - DNA, 20 bp, synthetic construct
  source 1..20: mol_type = other DNA
atcacatcgggcagctctgg

SEQ ID NO: 35806 - DNA, 20 bp, synthetic construct
  source 1..20: mol_type = other DNA
aacagtcaaagaaaaacagt

SEQ ID NO: 35807 - DNA, 20 bp, synthetic construct
  source 1..20: mol_type = other DNA
tactccaaggtgcagctggg

SEQ ID NO: 35808 - DNA, 20 bp, synthetic construct
  source 1..20: mol_type = other DNA
cttttgccagaatacccctt

SEQ ID NO: 35809 - DNA, 20 bp, synthetic construct
  source 1..20: mol_type = other DNA
cttgtctatgaacatctgtg

SEQ ID NO: 35810 - DNA, 20 bp, synthetic construct
  source 1..20: mol_type = other DNA
ttgtcaatcctaagagtggc

SEQ ID NO: 35811 - DNA, 20 bp, synthetic construct
  source 1..20: mol_type = other DNA
aaccttctcctcactctcca

SEQ ID NO: 35812 - DNA, 20 bp, synthetic construct
  source 1..20: mol_type = other DNA
tgtggccacacgttggtaca

SEQ ID NO: 35813 - DNA, 20 bp, synthetic construct
  source 1..20: mol_type = other DNA
tgaagcttcttgtcatgacg

SEQ ID NO: 35814 - DNA, 20 bp, synthetic construct
  source 1..20: mol_type = other DNA
ctcccctggacatgagagag

SEQ ID NO: 35815 - DNA, 20 bp, synthetic construct
  source 1..20: mol_type = other DNA
attcactttctatccgtgat

SEQ ID NO: 35816 - DNA, 20 bp, synthetic construct
  source 1..20: mol_type = other DNA
agctggcctacgagtctgac

SEQ ID NO: 35817 - DNA, 20 bp, synthetic construct
  source 1..20: mol_type = other DNA
cggggagggcgcctatggga

SEQ ID NO: 35818 - DNA, 20 bp, synthetic construct
  source 1..20: mol_type = other DNA
ttctgctagtcatgactgtc

SEQ ID NO: 35819 - DNA, 20 bp, synthetic construct
  source 1..20: mol_type = other DNA
tcaccacagaggggacgccg

SEQ ID NO: 35820 - DNA, 20 bp, synthetic construct
  source 1..20: mol_type = other DNA
caaggttagagaaaggacaa

SEQ ID NO: 35821 - DNA, 20 bp, synthetic construct
  source 1..20: mol_type = other DNA
aaagttaagggagtgggctt

SEQ ID NO: 35822 - DNA, 20 bp, synthetic construct
  source 1..20: mol_type = other DNA
tacgaacgagttgtatcacc

SEQ ID NO: 35823 - DNA, 20 bp, synthetic construct
  source 1..20: mol_type = other DNA
ctcccaagaagatcacgtcc

SEQ ID NO: 35824 - DNA, 20 bp, synthetic construct
  source 1..20: mol_type = other DNA
ccggaacatcaagatcctag

SEQ ID NO: 35825 - DNA, 20 bp, synthetic construct
  source 1..20: mol_type = other DNA
ctccttaagaaagggagaca

SEQ ID NO: 35826 - DNA, 20 bp, synthetic construct
  source 1..20: mol_type = other DNA
gaagagcaggagggcggcgg

SEQ ID NO: 35827 - DNA, 20 bp, synthetic construct
  source 1..20: mol_type = other DNA
ccacctgccctcccctgtga

SEQ ID NO: 35828 - DNA, 20 bp, synthetic construct
  source 1..20: mol_type = other DNA
tatcctatccgcaaacagta

SEQ ID NO: 35829 - DNA, 20 bp, synthetic construct
  source 1..20: mol_type = other DNA
gcatgaacagagaaaggagc

SEQ ID NO: 35830 - DNA, 20 bp, synthetic construct
  source 1..20: mol_type = other DNA
gtggattttggcctgtttga

SEQ ID NO: 35831 - DNA, 20 bp, synthetic construct
  source 1..20: mol_type = other DNA
tcctgaattatcccagcccc

SEQ ID NO: 35832 - DNA, 20 bp, synthetic construct
  source 1..20: mol_type = other DNA
gtaccatgatgttgcccatg

SEQ ID NO: 35833 - DNA, 20 bp, synthetic construct
  source 1..20: mol_type = other DNA
accctggttggtgaagcagc

SEQ ID NO: 35834 - DNA, 20 bp, synthetic construct
  source 1..20: mol_type = other DNA
gtcttactttgatcctcgtg

SEQ ID NO: 35835 - DNA, 20 bp, synthetic construct
  source 1..20: mol_type = other DNA
cccctgctgctccacatcgc

SEQ ID NO: 35836 - DNA, 20 bp, synthetic construct
  source 1..20: mol_type = other DNA
tggacgccagtgagtttcct

SEQ ID NO: 35837 - DNA, 20 bp, synthetic construct
  source 1..20: mol_type = other DNA
gtactttctgccatcggtgc

SEQ ID NO: 35838 - DNA, 20 bp, synthetic construct
  source 1..20: mol_type = other DNA
aagttcacctgggcaagaca

SEQ ID NO: 35839 - DNA, 20 bp, synthetic construct
  source 1..20: mol_type = other DNA
aggcaccgggcagtcctcca

SEQ ID NO: 35840 - DNA, 20 bp, synthetic construct
  source 1..20: mol_type = other DNA
aacagggtcctcgaaggccc

SEQ ID NO: 35841 - DNA, 20 bp, synthetic construct
  source 1..20: mol_type = other DNA
tggctccgcggcttcctccc

SEQ ID NO: 35842 - DNA, 20 bp, synthetic construct
  source 1..20: mol_type = other DNA
cggcccagtggaggagatgc

SEQ ID NO: 35843 - DNA, 20 bp, synthetic construct
  source 1..20: mol_type = other DNA
actcccatcacctatccgca

SEQ ID NO: 35844 - DNA, 20 bp, synthetic construct
  source 1..20: mol_type = other DNA
ggtccgcttcacctccgcgc

SEQ ID NO: 35845 - DNA, 20 bp, synthetic construct
  source 1..20: mol_type = other DNA
aggaggagcccaaggaggtg

SEQ ID NO: 35846 - DNA, 20 bp, synthetic construct
  source 1..20: mol_type = other DNA
taagtgaaggtctggtttct

SEQ ID NO: 35847 - DNA, 20 bp, synthetic construct
  source 1..20: mol_type = other DNA
atcctcagggtcctgcccat

SEQ ID NO: 35848 - DNA, 20 bp, synthetic construct
  source 1..20: mol_type = other DNA
caagcacccagcagcacctg

SEQ ID NO: 35849 - DNA, 20 bp, synthetic construct
  source 1..20: mol_type = other DNA
ccatcaccagtaccttctgc

SEQ ID NO: 35850 - DNA, 20 bp, synthetic construct
  source 1..20: mol_type = other DNA
ttccagagtccgtctgcatg

SEQ ID NO: 35851 - DNA, 20 bp, synthetic construct
  source 1..20: mol_type = other DNA
agcccagtcaaattttctcc

SEQ ID NO: 35852 - DNA, 20 bp, synthetic construct
  source 1..20: mol_type = other DNA
agccagaggcctggcagcgg

SEQ ID NO: 35853 - DNA, 20 bp, synthetic construct
  source 1..20: mol_type = other DNA
cctgtaccggaagagcggtg

SEQ ID NO: 35854 - DNA, 20 bp, synthetic construct
  source 1..20: mol_type = other DNA
aggaggttgaacacctgtcg

SEQ ID NO: 35855 - DNA, 20 bp, synthetic construct
  source 1..20: mol_type = other DNA
ggggggtgtccggaacacaa

SEQ ID NO: 35856 - DNA, 20 bp, synthetic construct
  source 1..20: mol_type = other DNA
tcctagactctgaaggacga

SEQ ID NO: 35857 - DNA, 20 bp, synthetic construct
  source 1..20: mol_type = other DNA
ggaacacctcggggtgcagg

SEQ ID NO: 35858 - DNA, 20 bp, synthetic construct
  source 1..20: mol_type = other DNA
ccttgtcccctgtggaaagc

SEQ ID NO: 35859 - DNA, 20 bp, synthetic construct
  source 1..20: mol_type = other DNA
ttctccctaccagctcacct

SEQ ID NO: 35860 - DNA, 20 bp, synthetic construct
  source 1..20: mol_type = other DNA
gcatgttacttactgttctc

SEQ ID NO: 35861 - DNA, 20 bp, synthetic construct
  source 1..20: mol_type = other DNA
ccgagtcaccgatggcgcat

SEQ ID NO: 35862 - DNA, 20 bp, synthetic construct
  source 1..20: mol_type = other DNA
agagctccagatgcctacca

SEQ ID NO: 35863 - DNA, 20 bp, synthetic construct
  source 1..20: mol_type = other DNA
tgtccagcagctgtgtgagg

SEQ ID NO: 35864 - DNA, 20 bp, synthetic construct
  source 1..20: mol_type = other DNA
cacctatgccaagtctcgga

SEQ ID NO: 35865 - DNA, 20 bp, synthetic construct
  source 1..20: mol_type = other DNA
cggatttctgccattgggga

SEQ ID NO: 35866 - DNA, 20 bp, synthetic construct
  source 1..20: mol_type = other DNA
agcaggatgaggaggatgac

SEQ ID NO: 35867 - DNA, 20 bp, synthetic construct
  source 1..20: mol_type = other DNA
acccacggcctccaccgctt

SEQ ID NO: 35868 - DNA, 20 bp, synthetic construct
  source 1..20: mol_type = other DNA
tccagggcttggctacaacg

SEQ ID NO: 35869 - DNA, 20 bp, synthetic construct
  source 1..20: mol_type = other DNA
ggaggaagtacctgggtggg

SEQ ID NO: 35870 - DNA, 20 bp, synthetic construct
  source 1..20: mol_type = other DNA
ggcgaggagggctgcagggc

SEQ ID NO: 35871 - DNA, 20 bp, synthetic construct
  source 1..20: mol_type = other DNA
ggaggaggagcaggagcggg

SEQ ID NO: 35872 - DNA, 20 bp, synthetic construct
  source 1..20: mol_type = other DNA
gagatgatgaaaatagtggg

SEQ ID NO: 35873 - DNA, 20 bp, synthetic construct
  source 1..20: mol_type = other DNA
accccccacaatagggggcc

SEQ ID NO: 35874 - DNA, 20 bp, synthetic construct
  source 1..20: mol_type = other DNA
cgtagttacagatctaggag

SEQ ID NO: 35875 - DNA, 20 bp, synthetic construct
  source 1..20: mol_type = other DNA
tgtcgcccagggccaggaac

SEQ ID NO: 35876 - DNA, 20 bp, synthetic construct
  source 1..20: mol_type = other DNA
accagcagtttcaataccaa

SEQ ID NO: 35877 - DNA, 20 bp, synthetic construct
  source 1..20: mol_type = other DNA
cagggctccttactgcagaa

SEQ ID NO: 35878 - DNA, 20 bp, synthetic construct
  source 1..20: mol_type = other DNA
ccatgacctttggtttaatg

SEQ ID NO: 35879 - DNA, 20 bp, synthetic construct
  source 1..20: mol_type = other DNA
atgattagttacctcttccc

SEQ ID NO: 35880 - DNA, 20 bp, synthetic construct
  source 1..20: mol_type = other DNA
cctcaaggacggatggcaca

SEQ ID NO: 35881 - DNA, 20 bp, synthetic construct
  source 1..20: mol_type = other DNA
cttcatgacttcatagactg

SEQ ID NO: 35882 - DNA, 20 bp, synthetic construct
  source 1..20: mol_type = other DNA
ggccatgggccccatcccca

SEQ ID NO: 35883 - DNA, 20 bp, synthetic construct
  source 1..20: mol_type = other DNA
cacaggttttcaggatatca

SEQ ID NO: 35884 - DNA, 20 bp, synthetic construct
  source 1..20: mol_type = other DNA
ttctctgtctgccaaaggga

SEQ ID NO: 35885 - DNA, 20 bp, synthetic construct
  source 1..20: mol_type = other DNA
tagcagttaaaaaggtatga

SEQ ID NO: 35886 - DNA, 20 bp, synthetic construct
  source 1..20: mol_type = other DNA
ctggtggccctcacggaggc

SEQ ID NO: 35887 - DNA, 20 bp, synthetic construct
  source 1..20: mol_type = other DNA
ctctctacaagacagagggg

SEQ ID NO: 35888 - DNA, 20 bp, synthetic construct
  source 1..20: mol_type = other DNA
tgcctgtgagtgggaccggg

SEQ ID NO: 35889 - DNA, 20 bp, synthetic construct
  source 1..20: mol_type = other DNA
accatagaagacacctcctc

SEQ ID NO: 35890 - DNA, 20 bp, synthetic construct
  source 1..20: mol_type = other DNA
tggctcccccaggtatgttg

SEQ ID NO: 35891 - DNA, 20 bp, synthetic construct
  source 1..20: mol_type = other DNA
tctgcagcttaagtaaactg

SEQ ID NO: 35892 - DNA, 20 bp, synthetic construct
  source 1..20: mol_type = other DNA
acggttcacctggagctgga

SEQ ID NO: 35893 - DNA, 20 bp, synthetic construct
  source 1..20: mol_type = other DNA
tctttcctagccggactacg

SEQ ID NO: 35894 - DNA, 20 bp, synthetic construct
  source 1..20: mol_type = other DNA
acacagcttagtatacacgc

SEQ ID NO: 35895 - DNA, 20 bp, synthetic construct
  source 1..20: mol_type = other DNA
cgcagcagcggacgcaggcc

SEQ ID NO: 35896 - DNA, 20 bp, synthetic construct
  source 1..20: mol_type = other DNA
tgactcgggacaggtcctgc

SEQ ID NO: 35897 - DNA, 20 bp, synthetic construct
  source 1..20: mol_type = other DNA
ggatctcctagggggagagg

SEQ ID NO: 35898 - DNA, 20 bp, synthetic construct
  source 1..20: mol_type = other DNA
cgtagcaacaaaggagagag

SEQ ID NO: 35899 - DNA, 20 bp, synthetic construct
  source 1..20: mol_type = other DNA
tcccagaccagcacatcctg

SEQ ID NO: 35900 - DNA, 20 bp, synthetic construct
  source 1..20: mol_type = other DNA
gtccagcccacctctgtcta

SEQ ID NO: 35901 - DNA, 20 bp, synthetic construct
  source 1..20: mol_type = other DNA
cctcctctgttcaaattgaa

SEQ ID NO: 35902 - DNA, 20 bp, synthetic construct
  source 1..20: mol_type = other DNA
gttgaagatgagaaacttca

SEQ ID NO: 35903 - DNA, 20 bp, synthetic construct
  source 1..20: mol_type = other DNA
ggcatgagaaaggggctccg

SEQ ID NO: 35904 - DNA, 20 bp, synthetic construct
  source 1..20: mol_type = other DNA
acgtcttcagggagcaccaa

SEQ ID NO: 35905 - DNA, 20 bp, synthetic construct
  source 1..20: mol_type = other DNA
tggatacttacacgtgcatt

SEQ ID NO: 35906 - DNA, 20 bp, synthetic construct
  source 1..20: mol_type = other DNA
gcttgttctgaggcttctgc

SEQ ID NO: 35907 - DNA, 20 bp, synthetic construct
  source 1..20: mol_type = other DNA
ctccggcctgggcagcggcc

SEQ ID NO: 35908 - DNA, 20 bp, synthetic construct
  source 1..20: mol_type = other DNA
tgtctccatgaggtctggtg

SEQ ID NO: 35909 - DNA, 20 bp, synthetic construct
  source 1..20: mol_type = other DNA
cgcgggcaggcagcggcgaa

SEQ ID NO: 35910 - DNA, 20 bp, synthetic construct
  source 1..20: mol_type = other DNA
ctctctgaaatggatgtcac

SEQ ID NO: 35911 - DNA, 20 bp, synthetic construct
  source 1..20: mol_type = other DNA
aaccatgaggaagacatagg

SEQ ID NO: 35912 - DNA, 20 bp, synthetic construct
  source 1..20: mol_type = other DNA
ccaggaggctgatggtgagt

SEQ ID NO: 35913 - DNA, 20 bp, synthetic construct
  source 1..20: mol_type = other DNA
ttgggggcttctgttcacag

SEQ ID NO: 35914 - DNA, 20 bp, synthetic construct
  source 1..20: mol_type = other DNA
tggagagctgggcttccgcc

SEQ ID NO: 35915 - DNA, 20 bp, synthetic construct
  source 1..20: mol_type = other DNA
cgaaggtaagttgatttgct

SEQ ID NO: 35916 - DNA, 20 bp, synthetic construct
  source 1..20: mol_type = other DNA
ctcctggagctgagggcagg

SEQ ID NO: 35917 - DNA, 20 bp, synthetic construct
  source 1..20: mol_type = other DNA
gcccgccggcagccaccacg

SEQ ID NO: 35918 - DNA, 20 bp, synthetic construct
  source 1..20: mol_type = other DNA
ggaggaacatgacatcgcgg

SEQ ID NO: 35919 - DNA, 20 bp, synthetic construct
  source 1..20: mol_type = other DNA
acgagcactcaccagcatcc

SEQ ID NO: 35920 - DNA, 20 bp, synthetic construct
  source 1..20: mol_type = other DNA
tgtgggaactggaactttaa

SEQ ID NO: 35921 - DNA, 20 bp, synthetic construct
  source 1..20: mol_type = other DNA
ctcttcgtggtcccaggggc

SEQ ID NO: 35922 - DNA, 20 bp, synthetic construct
  source 1..20: mol_type = other DNA
ctatgacagcttcgactcag

SEQ ID NO: 35923 - DNA, 20 bp, synthetic construct
  source 1..20: mol_type = other DNA
tcagcctgttcctttgcttc

SEQ ID NO: 35924 - DNA, 20 bp, synthetic construct
  source 1..20: mol_type = other DNA
ggggcgcgggcggaggggcg

SEQ ID NO: 35925 - DNA, 20 bp, synthetic construct
  source 1..20: mol_type = other DNA
ggcggcggaggtggtagtgg

SEQ ID NO: 35926 - DNA, 20 bp, synthetic construct
  source 1..20: mol_type = other DNA
gcagggctgcctggccagcg

SEQ ID NO: 35927 - DNA, 20 bp, synthetic construct
  source 1..20: mol_type = other DNA
gatgaggccctgtcctccag

SEQ ID NO: 35928 - DNA, 20 bp, synthetic construct
  source 1..20: mol_type = other DNA
gcttctgaaggcgtcattgc

SEQ ID NO: 35929 - DNA, 20 bp, synthetic construct
  source 1..20: mol_type = other DNA
ctacatcgtcactgagtaca

SEQ ID NO: 35930 - DNA, 20 bp, synthetic construct
  source 1..20: mol_type = other DNA
caacatcacccgctccaagg

SEQ ID NO: 35931 - DNA, 20 bp, synthetic construct
  source 1..20: mol_type = other DNA
cataaatcagtggataatcc

SEQ ID NO: 35932 - DNA, 20 bp, synthetic construct
  source 1..20: mol_type = other DNA
agctaccatcaagatgaccg

SEQ ID NO: 35933 - DNA, 20 bp, synthetic construct
  source 1..20: mol_type = other DNA
cgaggtgacagcagcattgc

SEQ ID NO: 35934 - DNA, 20 bp, synthetic construct
  source 1..20: mol_type = other DNA
ctgagcacatagcatcgacg

SEQ ID NO: 35935 - DNA, 20 bp, synthetic construct
  source 1..20: mol_type = other DNA
tgtaatgaatttataatgga

SEQ ID NO: 35936 - DNA, 20 bp, synthetic construct
  source 1..20: mol_type = other DNA
agaatgaggctggtgattca

SEQ ID NO: 35937 - DNA, 20 bp, synthetic construct
  source 1..20: mol_type = other DNA
aattagaagatggatggatg

SEQ ID NO: 35938 - DNA, 20 bp, synthetic construct
  source 1..20: mol_type = other DNA
tcaagatcgtgtctgcagtg

SEQ ID NO: 35939 - DNA, 20 bp, synthetic construct
  source 1..20: mol_type = other DNA
ccccgctgccctccactcgc

SEQ ID NO: 35940 - DNA, 20 bp, synthetic construct
  source 1..20: mol_type = other DNA
catagatttgtttcgaggca

SEQ ID NO: 35941 - DNA, 20 bp, synthetic construct
  source 1..20: mol_type = other DNA
tgtgtctggagagggcggcc

SEQ ID NO: 35942 - DNA, 20 bp, synthetic construct
  source 1..20: mol_type = other DNA
gcacaacatcccacagcggg

SEQ ID NO: 35943 - DNA, 20 bp, synthetic construct
  source 1..20: mol_type = other DNA
tgtactccttgatctcctcc

SEQ ID NO: 35944 - DNA, 20 bp, synthetic construct
  source 1..20: mol_type = other DNA
cagcactggcagcaaggatg

SEQ ID NO: 35945 - DNA, 20 bp, synthetic construct
  source 1..20: mol_type = other DNA
ttaggtctggggacgaagta

SEQ ID NO: 35946 - DNA, 20 bp, synthetic construct
  source 1..20: mol_type = other DNA
ctcaaactccgtctggttgg

SEQ ID NO: 35947 - DNA, 20 bp, synthetic construct
  source 1..20: mol_type = other DNA
ttgggctggaaacctgagag

SEQ ID NO: 35948 - DNA, 20 bp, synthetic construct
  source 1..20: mol_type = other DNA
ccagaccagcacctgctcct

SEQ ID NO: 35949 - DNA, 20 bp, synthetic construct
  source 1..20: mol_type = other DNA
gagaagtttggagaggaaag

SEQ ID NO: 35950 - DNA, 20 bp, synthetic construct
  source 1..20: mol_type = other DNA
gcatactgaggcaaggcctg

SEQ ID NO: 35951 - DNA, 20 bp, synthetic construct
  source 1..20: mol_type = other DNA
gtccatgtactccacctgga

SEQ ID NO: 35952 - DNA, 20 bp, synthetic construct
  source 1..20: mol_type = other DNA
tgcccccttccagaaagctc

SEQ ID NO: 35953 - DNA, 20 bp, synthetic construct
  source 1..20: mol_type = other DNA
cgttcccaaaaccatccaga

SEQ ID NO: 35954 - DNA, 20 bp, synthetic construct
  source 1..20: mol_type = other DNA
cccgggcgcaccttcatgac

SEQ ID NO: 35955 - DNA, 20 bp, synthetic construct
  source 1..20: mol_type = other DNA
agatgatggcagtccctaga

SEQ ID NO: 35956 - DNA, 20 bp, synthetic construct
  source 1..20: mol_type = other DNA
ggcggccagcaggtaggtgc

SEQ ID NO: 35957 - DNA, 20 bp, synthetic construct
  source 1..20: mol_type = other DNA
cttcttcaggtggagctatg

SEQ ID NO: 35958 - DNA, 20 bp, synthetic construct
  source 1..20: mol_type = other DNA
gcaggtgtgggctctaggct

SEQ ID NO: 35959 - DNA, 20 bp, synthetic construct
  source 1..20: mol_type = other DNA
gaaggatgagttgggcgagc

SEQ ID NO: 35960 - DNA, 20 bp, synthetic construct
  source 1..20: mol_type = other DNA
aaagtgctggttgtatctcc

SEQ ID NO: 35961 - DNA, 20 bp, synthetic construct
  source 1..20: mol_type = other DNA
cagcgcatcgtggccaccgt

SEQ ID NO: 35962 - DNA, 20 bp, synthetic construct
  source 1..20: mol_type = other DNA
tgtagatattgtcagcatgc

SEQ ID NO: 35963 - DNA, 20 bp, synthetic construct
  source 1..20: mol_type = other DNA
ccccgcgagcggcccagcgg

SEQ ID NO: 35964 - DNA, 20 bp, synthetic construct
  source 1..20: mol_type = other DNA
ttgggatccatcagccaatg

SEQ ID NO: 35965 - DNA, 20 bp, synthetic construct
  source 1..20: mol_type = other DNA
ctctatctgtggagagccta

SEQ ID NO: 35966 - DNA, 20 bp, synthetic construct
  source 1..20: mol_type = other DNA
actttcagaatggtccaccc

SEQ ID NO: 35967 - DNA, 20 bp, synthetic construct
  source 1..20: mol_type = other DNA
actctaaaaagtgaaaatca

SEQ ID NO: 35968 - DNA, 20 bp, synthetic construct
  source 1..20: mol_type = other DNA
tgagtctccaggagaggtcc

SEQ ID NO: 35969 - DNA, 20 bp, synthetic construct
  source 1..20: mol_type = other DNA
tactatggcaacaatacctt

SEQ ID NO: 35970 - DNA, 20 bp, synthetic construct
  source 1..20: mol_type = other DNA
tgcagaatactggccgtcaa

SEQ ID NO: 35971 - DNA, 20 bp, synthetic construct
  source 1..20: mol_type = other DNA
actgccctgtggacaagagg

SEQ ID NO: 35972 - DNA, 20 bp, synthetic construct
  source 1..20: mol_type = other DNA
gcaggaggtgccgcgcggct

SEQ ID NO: 35973 - DNA, 20 bp, synthetic construct
  source 1..20: mol_type = other DNA
ccaggaggctgatcgcggcg

SEQ ID NO: 35974 - DNA, 20 bp, synthetic construct
  source 1..20: mol_type = other DNA
cagcacctacggggcacggt

SEQ ID NO: 35975 - DNA, 20 bp, synthetic construct
  source 1..20: mol_type = other DNA
caagagtaggtttttctctt

SEQ ID NO: 35976 - DNA, 20 bp, synthetic construct
  source 1..20: mol_type = other DNA
ggcctctggcgtggcctcgc

SEQ ID NO: 35977 - DNA, 20 bp, synthetic construct
  source 1..20: mol_type = other DNA
atccgcaggaaggggacagg

SEQ ID NO: 35978 - DNA, 20 bp, synthetic construct
  source 1..20: mol_type = other DNA
caggtacttcctccagcccc

SEQ ID NO: 35979 - DNA, 20 bp, synthetic construct
  source 1..20: mol_type = other DNA
tacatgcaccttgggagttg

SEQ ID NO: 35980 - DNA, 20 bp, synthetic construct
  source 1..20: mol_type = other DNA
ctagaagagatgctgctggc

SEQ ID NO: 35981 - DNA, 20 bp, synthetic construct
  source 1..20: mol_type = other DNA
cggacaccatggacaagttt

SEQ ID NO: 35982 - DNA, 20 bp, synthetic construct
  source 1..20: mol_type = other DNA
aagtggcagcggggcccgta

SEQ ID NO: 35983 - DNA, 20 bp, synthetic construct
  source 1..20: mol_type = other DNA
agcattgccagctcctcccc

SEQ ID NO: 35984 - DNA, 20 bp, synthetic construct
  source 1..20: mol_type = other DNA
tagaggtcctccttcttccc

SEQ ID NO: 35985 - DNA, 20 bp, synthetic construct
  source 1..20: mol_type = other DNA
tgtaggtcaagcaagtgaac

SEQ ID NO: 35986 - DNA, 20 bp, synthetic construct
  source 1..20: mol_type = other DNA
ccaggccaccatggtgcaga

SEQ ID NO: 35987 - DNA, 20 bp, synthetic construct
  source 1..20: mol_type = other DNA
tcctcaatgtccccaatgga

SEQ ID NO: 35988 - DNA, 20 bp, synthetic construct
  source 1..20: mol_type = other DNA
tgggggtgaggctggtcaaa

SEQ ID NO: 35989 - DNA, 20 bp, synthetic construct
  source 1..20: mol_type = other DNA
gctcattgtatcctcccttc

SEQ ID NO: 35990 - DNA, 20 bp, synthetic construct
  source 1..20: mol_type = other DNA
aaacatcagaggaataatgt

SEQ ID NO: 35991 - DNA, 20 bp, synthetic construct
  source 1..20: mol_type = other DNA
ctccgtgttctgactcttga

SEQ ID NO: 35992 - DNA, 20 bp, synthetic construct
  source 1..20: mol_type = other DNA
agctgaagtctagcagctcc

SEQ ID NO: 35993 - DNA, 20 bp, synthetic construct
  source 1..20: mol_type = other DNA
tgttcttcttagtcacatgc

SEQ ID NO: 35994 - DNA, 20 bp, synthetic construct
  source 1..20: mol_type = other DNA
ggacctcactaagcttctcc

SEQ ID NO: 35995 - DNA, 20 bp, synthetic construct
  source 1..20: mol_type = other DNA
tcggaggagggcagaagccc

SEQ ID NO: 35996 - DNA, 20 bp, synthetic construct
  source 1..20: mol_type = other DNA
tcatacacagctacgggata

SEQ ID NO: 35997 - DNA, 20 bp, synthetic construct
  source 1..20: mol_type = other DNA
gccaaagaaattggtggagc

SEQ ID NO: 35998 - DNA, 20 bp, synthetic construct
  source 1..20: mol_type = other DNA
ccccgagaagtgggtccccg

SEQ ID NO: 35999 - DNA, 20 bp, synthetic construct
  source 1..20: mol_type = other DNA
cgaaagtggagaaggacggc

SEQ ID NO: 36000 - DNA, 20 bp, synthetic construct
  source 1..20: mol_type = other DNA
caggcgttccagctccgaag

SEQ ID NO: 36001 - DNA, 20 bp, synthetic construct
  source 1..20: mol_type = other DNA
atcctcatgcttgttccact

SEQ ID NO: 36002 - DNA, 20 bp, synthetic construct
  source 1..20: mol_type = other DNA
ccactcagcatcctgcaggg

SEQ ID NO: 36003 - DNA, 20 bp, synthetic construct
  source 1..20: mol_type = other DNA
cggtcactcaccgtgtggtg

SEQ ID NO: 36004 - DNA, 20 bp, synthetic construct
  source 1..20: mol_type = other DNA
gtgcaactctccgtacatcg

SEQ ID NO: 36005 - DNA, 20 bp, synthetic construct
  source 1..20: mol_type = other DNA
gccctgggcagtttcccggc

SEQ ID NO: 36006 - DNA, 20 bp, synthetic construct
  source 1..20: mol_type = other DNA
tcccacttctgaagggggtt

SEQ ID NO: 36007 - DNA, 20 bp, synthetic construct
  source 1..20: mol_type = other DNA
agtgatctgaaggaagaggt

SEQ ID NO: 36008 - DNA, 20 bp, synthetic construct
  source 1..20: mol_type = other DNA
tggtcctgaaaacctcctcc

SEQ ID NO: 36009 - DNA, 20 bp, synthetic construct
  source 1..20: mol_type = other DNA
ggggctccactgattctcag

SEQ ID NO: 36010 - DNA, 20 bp, synthetic construct
  source 1..20: mol_type = other DNA
ttaaatcactagaggtaaag

SEQ ID NO: 36011 - DNA, 20 bp, synthetic construct
  source 1..20: mol_type = other DNA
ggccgctgcttggtgcaaac

SEQ ID NO: 36012 - DNA, 20 bp, synthetic construct
  source 1..20: mol_type = other DNA
attataaacaacacttggca

SEQ ID NO: 36013 - DNA, 20 bp, synthetic construct
  source 1..20: mol_type = other DNA
ccagctcaagctgcagttcg

SEQ ID NO: 36014 - DNA, 20 bp, synthetic construct
  source 1..20: mol_type = other DNA
atatccccagatctactggg

SEQ ID NO: 36015 - DNA, 20 bp, synthetic construct
  source 1..20: mol_type = other DNA
tccttcatttcaagtgtaag

SEQ ID NO: 36016 - DNA, 20 bp, synthetic construct
  source 1..20: mol_type = other DNA
caaggactcaccgtctttgg

SEQ ID NO: 36017 - DNA, 20 bp, synthetic construct
  source 1..20: mol_type = other DNA
ctggccgaccaccctccaga

SEQ ID NO: 36018 - DNA, 20 bp, synthetic construct
  source 1..20: mol_type = other DNA
caaaactgtgcacaggtatg

SEQ ID NO: 36019 - DNA, 20 bp, synthetic construct
  source 1..20: mol_type = other DNA
gttgtgtcagaacccaaagc

SEQ ID NO: 36020 - DNA, 20 bp, synthetic construct
  source 1..20: mol_type = other DNA
gcaccgtggaggtgcgccag

SEQ ID NO: 36021 - DNA, 20 bp, synthetic construct
  source 1..20: mol_type = other DNA
aaggtgcagctgggcggtgt

SEQ ID NO: 36022 - DNA, 20 bp, synthetic construct
  source 1..20: mol_type = other DNA
cctgcatgcccacagcctgg

SEQ ID NO: 36023 - DNA, 20 bp, synthetic construct
  source 1..20: mol_type = other DNA
tccaatatgctgggccagga

SEQ ID NO: 36024 - DNA, 20 bp, synthetic construct
  source 1..20: mol_type = other DNA
atgctggagccactgcacgg

SEQ ID NO: 36025 - DNA, 20 bp, synthetic construct
  source 1..20: mol_type = other DNA
ctgcccgccctcgcgtcgcc

SEQ ID NO: 36026 - DNA, 20 bp, synthetic construct
  source 1..20: mol_type = other DNA
ctttcatcctggatataaga

SEQ ID NO: 36027 - DNA, 20 bp, synthetic construct
  source 1..20: mol_type = other DNA
acatagatattctctccctt

SEQ ID NO: 36028 - DNA, 20 bp, synthetic construct
  source 1..20: mol_type = other DNA
accgggggtataggtggagc

SEQ ID NO: 36029 - DNA, 20 bp, synthetic construct
  source 1..20: mol_type = other DNA
actgaatctgctggatgctg

SEQ ID NO: 36030 - DNA, 20 bp, synthetic construct
  source 1..20: mol_type = other DNA
gttgcagtagccgttgcact

SEQ ID NO: 36031 - DNA, 20 bp, synthetic construct
  source 1..20: mol_type = other DNA
atgcgtggcggagatcgggg

SEQ ID NO: 36032 - DNA, 20 bp, synthetic construct
  source 1..20: mol_type = other DNA
atggccatcgaaatgattga

SEQ ID NO: 36033 - DNA, 20 bp, synthetic construct
  source 1..20: mol_type = other DNA
acagagcaacattggcacag

SEQ ID NO: 36034 - DNA, 20 bp, synthetic construct
  source 1..20: mol_type = other DNA
gctctggagttgtggtgggc

SEQ ID NO: 36035 - DNA, 20 bp, synthetic construct
  source 1..20: mol_type = other DNA
ctggtgggggcttccctcgg

SEQ ID NO: 36036 - DNA, 20 bp, synthetic construct
  source 1..20: mol_type = other DNA
gaccccaacaccatcttccg

SEQ ID NO: 36037 - DNA, 20 bp, synthetic construct
  source 1..20: mol_type = other DNA
ctcttacctgtaccataacc

SEQ ID NO: 36038 - DNA, 20 bp, synthetic construct
  source 1..20: mol_type = other DNA
ggcttattgagatccacatc

SEQ ID NO: 36039 - DNA, 20 bp, synthetic construct
  source 1..20: mol_type = other DNA
actcacctttgcagaagaca

SEQ ID NO: 36040 - DNA, 20 bp, synthetic construct
  source 1..20: mol_type = other DNA
tctgcaggacaacgtggagc

SEQ ID NO: 36041 - DNA, 20 bp, synthetic construct
  source 1..20: mol_type = other DNA
catacagcagtctcgaatgg

SEQ ID NO: 36042 - DNA, 20 bp, synthetic construct
  source 1..20: mol_type = other DNA
ctgctggtgttcgcgagctc

SEQ ID NO: 36043 - DNA, 20 bp, synthetic construct
  source 1..20: mol_type = other DNA
ggtgccgtacaaaggttggc

SEQ ID NO: 36044 - DNA, 20 bp, synthetic construct
  source 1..20: mol_type = other DNA
gctgctggagcactacgtgg

SEQ ID NO: 36045 - DNA, 20 bp, synthetic construct
  source 1..20: mol_type = other DNA
tcttaacatacttgaacatc

SEQ ID NO: 36046 - DNA, 20 bp, synthetic construct
  source 1..20: mol_type = other DNA
acgaggcgcatgatgttccc

SEQ ID NO: 36047 - DNA, 20 bp, synthetic construct
  source 1..20: mol_type = other DNA
tcaagtgaagctgacacatt

SEQ ID NO: 36048 - DNA, 20 bp, synthetic construct
  source 1..20: mol_type = other DNA
acatcctttaatcaggtatg

SEQ ID NO: 36049 - DNA, 20 bp, synthetic construct
  source 1..20: mol_type = other DNA
cgtaatagtagcgtaagccc

SEQ ID NO: 36050 - DNA, 20 bp, synthetic construct
  source 1..20: mol_type = other DNA
aatgtgttcattacagccac

SEQ ID NO: 36051 - DNA, 20 bp, synthetic construct
  source 1..20: mol_type = other DNA
tgagcccatcgtgcacatgg

SEQ ID NO: 36052 - DNA, 20 bp, synthetic construct
  source 1..20: mol_type = other DNA
gtccttccgagacttggcat

SEQ ID NO: 36053 - DNA, 20 bp, synthetic construct
  source 1..20: mol_type = other DNA
atatgtaccaagcagttatc

SEQ ID NO: 36054 - DNA, 20 bp, synthetic construct
  source 1..20: mol_type = other DNA
tcaaggccagtgtgagagtg

SEQ ID NO: 36055 - DNA, 20 bp, synthetic construct
  source 1..20: mol_type = other DNA
agagaaaatggcggcggcgg

SEQ ID NO: 36056 - DNA, 20 bp, synthetic construct
  source 1..20: mol_type = other DNA
atggagcatggaatatacac

SEQ ID NO: 36057 - DNA, 20 bp, synthetic construct
  source 1..20: mol_type = other DNA
gaagtggcagcggggcccgt

SEQ ID NO: 36058 - DNA, 20 bp, synthetic construct
  source 1..20: mol_type = other DNA
agaatatgtttctatagatt

SEQ ID NO: 36059 - DNA, 20 bp, synthetic construct
  source 1..20: mol_type = other DNA
catcgatctcatttttcgtg

SEQ ID NO: 36060 - DNA, 20 bp, synthetic construct
  source 1..20: mol_type = other DNA
ctggacagcgccaagcagag

SEQ ID NO: 36061 - DNA, 20 bp, synthetic construct
  source 1..20: mol_type = other DNA
tgacgcctgggctgggggca

SEQ ID NO: 36062 - DNA, 20 bp, synthetic construct
  source 1..20: mol_type = other DNA
gtccttcaggggctgtggcc

SEQ ID NO: 36063 - DNA, 20 bp, synthetic construct
  source 1..20: mol_type = other DNA
tatctgtagcattcctgggc

SEQ ID NO: 36064 - DNA, 20 bp, synthetic construct
  source 1..20: mol_type = other DNA
agcacttgtggggccgctcc

SEQ ID NO: 36065 - DNA, 20 bp, synthetic construct
  source 1..20: mol_type = other DNA
ctgggcccgggggcgcccgc

SEQ ID NO: 36066 - DNA, 20 bp, synthetic construct
  source 1..20: mol_type = other DNA
ccagtatgaggctctgaagg

SEQ ID NO: 36067 - DNA, 20 bp, synthetic construct
  source 1..20: mol_type = other DNA
gggggctaatgtgagcgatg

SEQ ID NO: 36068 - DNA, 20 bp, synthetic construct
  source 1..20: mol_type = other DNA
cctggaggatctgtgcaaag

SEQ ID NO: 36069 - DNA, 20 bp, synthetic construct
  source 1..20: mol_type = other DNA
acatcagcacccttgaggtg

SEQ ID NO: 36070 - DNA, 20 bp, synthetic construct
  source 1..20: mol_type = other DNA
ccacagtagtacacgtcatc

SEQ ID NO: 36071 - DNA, 20 bp, synthetic construct
  source 1..20: mol_type = other DNA
cccgctgcgtccgcgggctc

SEQ ID NO: 36072 - DNA, 20 bp, synthetic construct
  source 1..20: mol_type = other DNA
agaagcaggtcctttcgtgt

SEQ ID NO: 36073 - DNA, 20 bp, synthetic construct
  source 1..20: mol_type = other DNA
tgtttacagtttgaactaac

SEQ ID NO: 36074 - DNA, 20 bp, synthetic construct
  source 1..20: mol_type = other DNA
gagggtctcaccaggacact

SEQ ID NO: 36075 - DNA, 20 bp, synthetic construct
  source 1..20: mol_type = other DNA
ctgcagaatactgaacatga

SEQ ID NO: 36076 - DNA, 20 bp, synthetic construct
  source 1..20: mol_type = other DNA
tgggtgggctgtgacctctc

SEQ ID NO: 36077 - DNA, 20 bp, synthetic construct
  source 1..20: mol_type = other DNA
gcccgaggaggctggggccg

SEQ ID NO: 36078 - DNA, 20 bp, synthetic construct
  source 1..20: mol_type = other DNA
ctcccacttctgaagggggt

SEQ ID NO: 36079 - DNA, 20 bp, synthetic construct
  source 1..20: mol_type = other DNA
cttcttctcaatgagcccga

SEQ ID NO: 36080 - DNA, 20 bp, synthetic construct
  source 1..20: mol_type = other DNA
tcagccagctcccgagcggt

SEQ ID NO: 36081 - DNA, 20 bp, synthetic construct
  source 1..20: mol_type = other DNA
gctaatctggagctctgaca

SEQ ID NO: 36082 - DNA, 20 bp, synthetic construct
  source 1..20: mol_type = other DNA
gatcaagcggtgtgagcgga

SEQ ID NO: 36083 - DNA, 20 bp, synthetic construct
  source 1..20: mol_type = other DNA
actgatattttatattgaaa

SEQ ID NO: 36084 - DNA, 20 bp, synthetic construct
  source 1..20: mol_type = other DNA
gagggttaaaggcagtggag

SEQ ID NO: 36085 - DNA, 20 bp, synthetic construct
  source 1..20: mol_type = other DNA
actaaagtcagtggggacag

SEQ ID NO: 36086 - DNA, 20 bp, synthetic construct
  source 1..20: mol_type = other DNA
gatgtaataggctcttctgg

SEQ ID NO: 36087 - DNA, 20 bp, synthetic construct
  source 1..20: mol_type = other DNA
ggagaaggaaagcaaacata

SEQ ID NO: 36088 - DNA, 20 bp, synthetic construct
  source 1..20: mol_type = other DNA
tctttggagcagctgagctc

SEQ ID NO: 36089 - DNA, 20 bp, synthetic construct
  source 1..20: mol_type = other DNA
gcggcccttgatcaaagtgg

SEQ ID NO: 36090 - DNA, 20 bp, synthetic construct
  source 1..20: mol_type = other DNA
aagggtgtgtacgtgcgggt

SEQ ID NO: 36091 - DNA, 20 bp, synthetic construct
  source 1..20: mol_type = other DNA
accgctgtcagaaaaagatc

SEQ ID NO: 36092 - DNA, 20 bp, synthetic construct
  source 1..20: mol_type = other DNA
atttccctgcaataataccc

SEQ ID NO: 36093 - DNA, 20 bp, synthetic construct
  source 1..20: mol_type = other DNA
caaggaggcgtccagcaccc

SEQ ID NO: 36094 - DNA, 20 bp, synthetic construct
  source 1..20: mol_type = other DNA
ccagctggtggaggtggcga

SEQ ID NO: 36095 - DNA, 20 bp, synthetic construct
  source 1..20: mol_type = other DNA
ttcagagtgttgaagatgga

SEQ ID NO: 36096 - DNA, 20 bp, synthetic construct
  source 1..20: mol_type = other DNA
cgatgacagtggtccactgc

SEQ ID NO: 36097 - DNA, 20 bp, synthetic construct
  source 1..20: mol_type = other DNA
gtggtgatccggtacctgcg

SEQ ID NO: 36098 - DNA, 20 bp, synthetic construct
  source 1..20: mol_type = other DNA
atactacagttgagaagaag

SEQ ID NO: 36099 - DNA, 20 bp, synthetic construct
  source 1..20: mol_type = other DNA
ctctcctggtctggctctcc

SEQ ID NO: 36100 - DNA, 20 bp, synthetic construct
  source 1..20: mol_type = other DNA
cctggagtgaggggaaggtg

SEQ ID NO: 36101 - DNA, 20 bp, synthetic construct
  source 1..20: mol_type = other DNA
tattggccttcatgcctccc

SEQ ID NO: 36102 - DNA, 20 bp, synthetic construct
  source 1..20: mol_type = other DNA
tcaactggtgtcgagaagtc

SEQ ID NO: 36103 - DNA, 20 bp, synthetic construct
  source 1..20: mol_type = other DNA
ctacctgaaggccccttgca

SEQ ID NO: 36104 - DNA, 20 bp, synthetic construct
  source 1..20: mol_type = other DNA
ctcggcgatggtagggttga

SEQ ID NO: 36105 - DNA, 20 bp, synthetic construct
  source 1..20: mol_type = other DNA
ctgctccatcacgtccagct

SEQ ID NO: 36106 - DNA, 20 bp, synthetic construct
  source 1..20: mol_type = other DNA
ggctgcctctagctctccag

SEQ ID NO: 36107 - DNA, 20 bp, synthetic construct
  source 1..20: mol_type = other DNA
tttgtaagaacccgctgtgt

SEQ ID NO: 36108 - DNA, 20 bp, synthetic construct
  source 1..20: mol_type = other DNA
agcatctcacggtgttggct

SEQ ID NO: 36109 - DNA, 20 bp, synthetic construct
  source 1..20: mol_type = other DNA
gataaggtagtgatagggag

SEQ ID NO: 36110 - DNA, 20 bp, synthetic construct
  source 1..20: mol_type = other DNA
acaaccatgtacaccttcga

SEQ ID NO: 36111 - DNA, 20 bp, synthetic construct
  source 1..20: mol_type = other DNA
ctactgggtccagggtgcca

SEQ ID NO: 36112 - DNA, 20 bp, synthetic construct
  source 1..20: mol_type = other DNA
ggcccttgggcatgcctggg

SEQ ID NO: 36113 - DNA, 20 bp, synthetic construct
  source 1..20: mol_type = other DNA
ctcacctgtgatgggcacgt

SEQ ID NO: 36114 - DNA, 20 bp, synthetic construct
  source 1..20: mol_type = other DNA
gcctggccgggatgaaggag

SEQ ID NO: 36115 - DNA, 20 bp, synthetic construct
  source 1..20: mol_type = other DNA
atggagaagcagcggtcctc

SEQ ID NO: 36116 - DNA, 20 bp, synthetic construct
  source 1..20: mol_type = other DNA
tccctttcaggtgaaccttg

SEQ ID NO: 36117 - DNA, 20 bp, synthetic construct
  source 1..20: mol_type = other DNA
tttctttctttttacttcct

SEQ ID NO: 36118 - DNA, 20 bp, synthetic construct
  source 1..20: mol_type = other DNA
ggtagggagccaggatccgc

SEQ ID NO: 36119 - DNA, 20 bp, synthetic construct
  source 1..20: mol_type = other DNA
cagcggagcctggaagcgcc

SEQ ID NO: 36120 - DNA, 20 bp, synthetic construct
  source 1..20: mol_type = other DNA
gaccttcgagcaccccaacg

SEQ ID NO: 36121 - DNA, 20 bp, synthetic construct
  source 1..20: mol_type = other DNA
aatagcaatccaatctgtcg

SEQ ID NO: 36122 - DNA, 20 bp, synthetic construct
  source 1..20: mol_type = other DNA
tcactgtcggaggagttgtc

SEQ ID NO: 36123 - DNA, 20 bp, synthetic construct
  source 1..20: mol_type = other DNA
tggctgagcaacagtggaac

SEQ ID NO: 36124 - DNA, 20 bp, synthetic construct
  source 1..20: mol_type = other DNA
catggacgacaactcgctgc

SEQ ID NO: 36125 - DNA, 20 bp, synthetic construct
  source 1..20: mol_type = other DNA
ccatgactatcctcatagag

SEQ ID NO: 36126 - DNA, 20 bp, synthetic construct
  source 1..20: mol_type = other DNA
ttctggatcttccattggat

SEQ ID NO: 36127 - DNA, 20 bp, synthetic construct
  source 1..20: mol_type = other DNA
aaactggcgtcccagcactg

SEQ ID NO: 36128 - DNA, 20 bp, synthetic construct
  source 1..20: mol_type = other DNA
tgtatctgtaggaggagaag

SEQ ID NO: 36129 - DNA, 20 bp, synthetic construct
  source 1..20: mol_type = other DNA
aggagtgacccagtggagca

SEQ ID NO: 36130 - DNA, 20 bp, synthetic construct
  source 1..20: mol_type = other DNA
gattcatgccatgccagttc

SEQ ID NO: 36131 - DNA, 20 bp, synthetic construct
  source 1..20: mol_type = other DNA
ccacagccgagtgatcctgc

SEQ ID NO: 36132 - DNA, 20 bp, synthetic construct
  source 1..20: mol_type = other DNA
attctagatcagaaggagga

SEQ ID NO: 36133 - DNA, 20 bp, synthetic construct
  source 1..20: mol_type = other DNA
cagcgtggaggacctgtgga

SEQ ID NO: 36134 - DNA, 20 bp, synthetic construct
  source 1..20: mol_type = other DNA
aacaacttacgcaattcttc

SEQ ID NO: 36135 - DNA, 20 bp, synthetic construct
  source 1..20: mol_type = other DNA
ttcatgacttcatagactgc

SEQ ID NO: 36136 - DNA, 20 bp, synthetic construct
  source 1..20: mol_type = other DNA
aggagcagcagccccaggtc

SEQ ID NO: 36137 - DNA, 20 bp, synthetic construct
  source 1..20: mol_type = other DNA
gtaattaatgatcctatcca

SEQ ID NO: 36138 - DNA, 20 bp, synthetic construct
  source 1..20: mol_type = other DNA
tttgagtctaatttttcccc

SEQ ID NO: 36139 - DNA, 20 bp, synthetic construct
  source 1..20: mol_type = other DNA
gaggttggagcacagggaat

SEQ ID NO: 36140 - DNA, 20 bp, synthetic construct
  source 1..20: mol_type = other DNA
tcctgctttcccgtatcccc

SEQ ID NO: 36141 - DNA, 20 bp, synthetic construct
  source 1..20: mol_type = other DNA
tagagacatactaatgtaca

SEQ ID NO: 36142 - DNA, 20 bp, synthetic construct
  source 1..20: mol_type = other DNA
agccttgtcatagtagtggc

SEQ ID NO: 36143 - DNA, 20 bp, synthetic construct
  source 1..20: mol_type = other DNA
tggccgcctacctggagaac

SEQ ID NO: 36144 - DNA, 20 bp, synthetic construct
  source 1..20: mol_type = other DNA
agcaggtctaagatataagg

SEQ ID NO: 36145 - DNA, 20 bp, synthetic construct
  source 1..20: mol_type = other DNA
ggctgccgggcgtgctgtgt

SEQ ID NO: 36146 - DNA, 20 bp, synthetic construct
  source 1..20: mol_type = other DNA
gcacatacacctctgggaac

SEQ ID NO: 36147 - DNA, 20 bp, synthetic construct
  source 1..20: mol_type = other DNA
ggtcaactagtcctgtggct

SEQ ID NO: 36148 - DNA, 20 bp, synthetic construct
  source 1..20: mol_type = other DNA
gaagggaagagcatgtttgc

SEQ ID NO: 36149 - DNA, 20 bp, synthetic construct
  source 1..20: mol_type = other DNA
atgatctgcatggggctcag

SEQ ID NO: 36150 - DNA, 20 bp, synthetic construct
  source 1..20: mol_type = other DNA
caagtgccggaagcggaagc

SEQ ID NO: 36151 - DNA, 20 bp, synthetic construct
  source 1..20: mol_type = other DNA
gcagctcctccgccttggag

SEQ ID NO: 36152 - DNA, 20 bp, synthetic construct
  source 1..20: mol_type = other DNA
tttcttctaaaatagtccat

SEQ ID NO: 36153 - DNA, 20 bp, synthetic construct
  source 1..20: mol_type = other DNA
ctcgaaggtgtccgaggcgc

SEQ ID NO: 36154 - DNA, 20 bp, synthetic construct
  source 1..20: mol_type = other DNA
cccaggcctaccctctgaag

SEQ ID NO: 36155 - DNA, 20 bp, synthetic construct
  source 1..20: mol_type = other DNA
ctgctcacaccactgggaag

SEQ ID NO: 36156 - DNA, 20 bp, synthetic construct
  source 1..20: mol_type = other DNA
ttgcaccaagcagcggccct

SEQ ID NO: 36157 - DNA, 20 bp, synthetic construct
  source 1..20: mol_type = other DNA
ctagggaaaggggatttaat

SEQ ID NO: 36158 - DNA, 20 bp, synthetic construct
  source 1..20: mol_type = other DNA
tcgccctgtccgtggcccac

SEQ ID NO: 36159 - DNA, 20 bp, synthetic construct
  source 1..20: mol_type = other DNA
aaagagcggtggctgtagct

SEQ ID NO: 36160 - DNA, 20 bp, synthetic construct
  source 1..20: mol_type = other DNA
agtcccagggggctgagagc

SEQ ID NO: 36161 - DNA, 20 bp, synthetic construct
  source 1..20: mol_type = other DNA
cacgtaagtgggggcgaggg

SEQ ID NO: 36162 - DNA, 20 bp, synthetic construct
  source 1..20: mol_type = other DNA
agcaatatcaatggtatctg

SEQ ID NO: 36163 - DNA, 20 bp, synthetic construct
  source 1..20: mol_type = other DNA
gcatgagtacaagaaatggc

SEQ ID NO: 36164 - DNA, 20 bp, synthetic construct
  source 1..20: mol_type = other DNA
gcacagctccgtcttgtact

SEQ ID NO: 36165 - DNA, 20 bp, synthetic construct
  source 1..20: mol_type = other DNA
catgtcatccggggccagga

SEQ ID NO: 36166 - DNA, 20 bp, synthetic construct
  source 1..20: mol_type = other DNA
acctccttcttgggggaacc

SEQ ID NO: 36167 - DNA, 20 bp, synthetic construct
  source 1..20: mol_type = other DNA
gcagaagaagctacgcacag

SEQ ID NO: 36168 - DNA, 20 bp, synthetic construct
  source 1..20: mol_type = other DNA
ccgcgcgccgaacccgagtc

SEQ ID NO: 36169 - DNA, 20 bp, synthetic construct
  source 1..20: mol_type = other DNA
caccgacttccccggccgcc

SEQ ID NO: 36170 - DNA, 20 bp, synthetic construct
  source 1..20: mol_type = other DNA
gctgccatcaaggctggtaa

SEQ ID NO: 36171 - DNA, 20 bp, synthetic construct
  source 1..20: mol_type = other DNA
ggcagagcaggaggagatgg

SEQ ID NO: 36172 - DNA, 20 bp, synthetic construct
  source 1..20: mol_type = other DNA
tgagggagtttgaggtcctg

SEQ ID NO: 36173 - DNA, 20 bp, synthetic construct
  source 1..20: mol_type = other DNA
catcattcggaatgacctca

SEQ ID NO: 36174 - DNA, 20 bp, synthetic construct
  source 1..20: mol_type = other DNA
ccaggccaaggacccccggg

SEQ ID NO: 36175 - DNA, 20 bp, synthetic construct
  source 1..20: mol_type = other DNA
gcttcgttgaagcaggagaa

SEQ ID NO: 36176 - DNA, 20 bp, synthetic construct
  source 1..20: mol_type = other DNA
ttgaggtggggcaggagggg

SEQ ID NO: 36177 - DNA, 20 bp, synthetic construct
  source 1..20: mol_type = other DNA
ttgatatggtcttggggagt

SEQ ID NO: 36178 - DNA, 20 bp, synthetic construct
  source 1..20: mol_type = other DNA
cctccgctgtggcatgggca

SEQ ID NO: 36179 - DNA, 20 bp, synthetic construct
  source 1..20: mol_type = other DNA
ttcttgtatttacgaatctc

SEQ ID NO: 36180 - DNA, 20 bp, synthetic construct
  source 1..20: mol_type = other DNA
ctggggatcaaagtcaaaga

SEQ ID NO: 36181 - DNA, 20 bp, synthetic construct
  source 1..20: mol_type = other DNA
cgggctcggcactgagcagc

SEQ ID NO: 36182 - DNA, 20 bp, synthetic construct
  source 1..20: mol_type = other DNA
ccagacacaccatctccagt

SEQ ID NO: 36183 - DNA, 20 bp, synthetic construct
  source 1..20: mol_type = other DNA
atttatgatatgacaacgtc

SEQ ID NO: 36184 - DNA, 20 bp, synthetic construct
  source 1..20: mol_type = other DNA
tgaacttgagaaactattgc

SEQ ID NO: 36185 - DNA, 20 bp, synthetic construct
  source 1..20: mol_type = other DNA
tgacctggctgcacgcactg

SEQ ID NO: 36186 - DNA, 20 bp, synthetic construct
  source 1..20: mol_type = other DNA
tgatgacggcttccatttcg

SEQ ID NO: 36187 - DNA, 20 bp, synthetic construct
  source 1..20: mol_type = other DNA
tacggatgttttcatcaaac

SEQ ID NO: 36188 - DNA, 20 bp, synthetic construct
  source 1..20: mol_type = other DNA
tgaggagatgctagcagagc

SEQ ID NO: 36189 - DNA, 20 bp, synthetic construct
  source 1..20: mol_type = other DNA
tgagcagcttcatcttcctg

SEQ ID NO: 36190 - DNA, 20 bp, synthetic construct
  source 1..20: mol_type = other DNA
gcctagatcggctagaaaac

SEQ ID NO: 36191 - DNA, 20 bp, synthetic construct
  source 1..20: mol_type = other DNA
ataaagacagggtatttgca

SEQ ID NO: 36192 - DNA, 20 bp, synthetic construct
  source 1..20: mol_type = other DNA
ctggaggtaaaggaggaggt

SEQ ID NO: 36193 - DNA, 20 bp, synthetic construct
  source 1..20: mol_type = other DNA
cctaaaaagggcacaagaag

SEQ ID NO: 36194 - DNA, 20 bp, synthetic construct
  source 1..20: mol_type = other DNA
tcccccagtgggaggaagag

SEQ ID NO: 36195 - DNA, 20 bp, synthetic construct
  source 1..20: mol_type = other DNA
catgatgggcaggcagagaa

SEQ ID NO: 36196 - DNA, 20 bp, synthetic construct
  source 1..20: mol_type = other DNA
gacctgggcgtgaccaaggt

SEQ ID NO: 36197 - DNA, 20 bp, synthetic construct
  source 1..20: mol_type = other DNA
tctgagacatccgctctgct

SEQ ID NO: 36198 - DNA, 20 bp, synthetic construct
  source 1..20: mol_type = other DNA
gtgcccagaggcgggagaac

SEQ ID NO: 36199 - DNA, 20 bp, synthetic construct
  source 1..20: mol_type = other DNA
atgagaacgtgcggcacaag

SEQ ID NO: 36200 - DNA, 20 bp, synthetic construct
  source 1..20: mol_type = other DNA
ccttccagtggaggccatag

SEQ ID NO: 36201 - DNA, 20 bp, synthetic construct
  source 1..20: mol_type = other DNA
gtcatgtacaccatccacat

SEQ ID NO: 36202 - DNA, 20 bp, synthetic construct
  source 1..20: mol_type = other DNA
agtaggcctgcgagctgggg

SEQ ID NO: 36203 - DNA, 20 bp, synthetic construct
  source 1..20: mol_type = other DNA
gatcaggtcgcccttccctg

SEQ ID NO: 36204 - DNA, 20 bp, synthetic construct
  source 1..20: mol_type = other DNA
cgatgtagttcatctagact

SEQ ID NO: 36205 - DNA, 20 bp, synthetic construct
  source 1..20: mol_type = other DNA
gtgaggagctgcacctgact

SEQ ID NO: 36206 - DNA, 20 bp, synthetic construct
  source 1..20: mol_type = other DNA
tttccactgttgtctggtaa

SEQ ID NO: 36207 - DNA, 20 bp, synthetic construct
  source 1..20: mol_type = other DNA
ctcctttggctggttgtctc

SEQ ID NO: 36208 - DNA, 20 bp, synthetic construct
  source 1..20: mol_type = other DNA
gaagggtcctgccagcgtca

SEQ ID NO: 36209 - DNA, 20 bp, synthetic construct
  source 1..20: mol_type = other DNA
gtgcatcgcgacatcaagcc

SEQ ID NO: 36210 - DNA, 20 bp, synthetic construct
  source 1..20: mol_type = other DNA
ccctgtgccgctggaggaag

SEQ ID NO: 36211 - DNA, 20 bp, synthetic construct
  source 1..20: mol_type = other DNA
actccactgggcagttttgg

SEQ ID NO: 36212 - DNA, 20 bp, synthetic construct
  source 1..20: mol_type = other DNA
gggggcggcggcaggggggg

SEQ ID NO: 36213 - DNA, 20 bp, synthetic construct
  source 1..20: mol_type = other DNA
atacactaacctttgggttt

SEQ ID NO: 36214 - DNA, 20 bp, synthetic construct
  source 1..20: mol_type = other DNA
atctctcaggtttgaggtag

SEQ ID NO: 36215 - DNA, 20 bp, synthetic construct
  source 1..20: mol_type = other DNA
tacgtcattaagagttcaac

SEQ ID NO: 36216 - DNA, 20 bp, synthetic construct
  source 1..20: mol_type = other DNA
acaaggtcttagtgatgctg

SEQ ID NO: 36217 - DNA, 20 bp, synthetic construct
  source 1..20: mol_type = other DNA
gaccaggcccacaccaggcg

SEQ ID NO: 36218 - DNA, 20 bp, synthetic construct
  source 1..20: mol_type = other DNA
agatgagggacagtttggtt

SEQ ID NO: 36219 - DNA, 20 bp, synthetic construct
  source 1..20: mol_type = other DNA
gggtccctgggaaatggcga

SEQ ID NO: 36220 - DNA, 20 bp, synthetic construct
  source 1..20: mol_type = other DNA
atggagcccgaggccggcgc

SEQ ID NO: 36221 - DNA, 20 bp, synthetic construct
  source 1..20: mol_type = other DNA
gaacatggacgtcaggtggg

SEQ ID NO: 36222 - DNA, 20 bp, synthetic construct
  source 1..20: mol_type = other DNA
gaaaatactgtgtaagtctt

SEQ ID NO: 36223 - DNA, 20 bp, synthetic construct
  source 1..20: mol_type = other DNA
ctagggatttacaaggactt

SEQ ID NO: 36224 - DNA, 20 bp, synthetic construct
  source 1..20: mol_type = other DNA
ccccccacaatagggggccg

SEQ ID NO: 36225 - DNA, 20 bp, synthetic construct
  source 1..20: mol_type = other DNA
cagtggtgtgagtaggtaag

SEQ ID NO: 36226 - DNA, 20 bp, synthetic construct
  source 1..20: mol_type = other DNA
gctccaaaagtgggtgatga

SEQ ID NO: 36227 - DNA, 20 bp, synthetic construct
  source 1..20: mol_type = other DNA
gaatgcccacccttggtgga

SEQ ID NO: 36228 - DNA, 20 bp, synthetic construct
  source 1..20: mol_type = other DNA
tcacctgaaatgacaatgat

SEQ ID NO: 36229 - DNA, 20 bp, synthetic construct
  source 1..20: mol_type = other DNA
cacgctgttgaggtcgtcgt

SEQ ID NO: 36230 - DNA, 20 bp, synthetic construct
  source 1..20: mol_type = other DNA
atagagttatagatggccag

SEQ ID NO: 36231 - DNA, 20 bp, synthetic construct
  source 1..20: mol_type = other DNA
tccactgccttgacaatggc

SEQ ID NO: 36232 - DNA, 20 bp, synthetic construct
  source 1..20: mol_type = other DNA
aatattgttttggcaagtac

SEQ ID NO: 36233 - DNA, 20 bp, synthetic construct
  source 1..20: mol_type = other DNA
acagaagatagaaagggaga

SEQ ID NO: 36234 - DNA, 20 bp, synthetic construct
  source 1..20: mol_type = other DNA
cacctcctctgtgaagggtt

SEQ ID NO: 36235 - DNA, 20 bp, synthetic construct
  source 1..20: mol_type = other DNA
cactcagcatctggtcatgc

SEQ ID NO: 36236 - DNA, 20 bp, synthetic construct
  source 1..20: mol_type = other DNA
atggagtcagatatcaggat

SEQ ID NO: 36237 - DNA, 20 bp, synthetic construct
  source 1..20: mol_type = other DNA
gccctatgggtgggacagag

SEQ ID NO: 36238 - DNA, 20 bp, synthetic construct
  source 1..20: mol_type = other DNA
cttcaggcaagcactgagcg

SEQ ID NO: 36239 - DNA, 20 bp, synthetic construct
  source 1..20: mol_type = other DNA
cgagtccacctcaggaccag

SEQ ID NO: 36240 - DNA, 20 bp, synthetic construct
  source 1..20: mol_type = other DNA
ggagacacttacagatgtga

SEQ ID NO: 36241 - DNA, 20 bp, synthetic construct
  source 1..20: mol_type = other DNA
tacatagcctggcctgacca

SEQ ID NO: 36242 - DNA, 20 bp, synthetic construct
  source 1..20: mol_type = other DNA
tggtcggttctggataggaa

SEQ ID NO: 36243 - DNA, 20 bp, synthetic construct
  source 1..20: mol_type = other DNA
ctctgagtcgaagctgtcat

SEQ ID NO: 36244 - DNA, 20 bp, synthetic construct
  source 1..20: mol_type = other DNA
aagcttcctacccgaggtgt

SEQ ID NO: 36245 - DNA, 20 bp, synthetic construct
  source 1..20: mol_type = other DNA
cgtggaagacggccaactcg

SEQ ID NO: 36246 - DNA, 20 bp, synthetic construct
  source 1..20: mol_type = other DNA
cctcttcagggactatgtgg

SEQ ID NO: 36247 - DNA, 20 bp, synthetic construct
  source 1..20: mol_type = other DNA
cgtgccctgccaagaaggga

SEQ ID NO: 36248 - DNA, 20 bp, synthetic construct
  source 1..20: mol_type = other DNA
gtgccgacagctctcacagt

SEQ ID NO: 36249 - DNA, 20 bp, synthetic construct
  source 1..20: mol_type = other DNA
aacctctctcactccatctt

SEQ ID NO: 36250 - DNA, 20 bp, synthetic construct
  source 1..20: mol_type = other DNA
ttgatgaggtatgtgcattc

SEQ ID NO: 36251 - DNA, 20 bp, synthetic construct
  source 1..20: mol_type = other DNA
cttagaactggaatgatgaa

SEQ ID NO: 36252 - DNA, 20 bp, synthetic construct
  source 1..20: mol_type = other DNA
aacaggtaagattaaagggg

SEQ ID NO: 36253 - DNA, 20 bp, synthetic construct
  source 1..20: mol_type = other DNA
caggcaccgttttcctcaaa

SEQ ID NO: 36254 - DNA, 20 bp, synthetic construct
  source 1..20: mol_type = other DNA
acaggagaatatgaggctac

SEQ ID NO: 36255 - DNA, 20 bp, synthetic construct
  source 1..20: mol_type = other DNA
ccccgctggtgctgaccacg

SEQ ID NO: 36256 - DNA, 20 bp, synthetic construct
  source 1..20: mol_type = other DNA
atctagactaggatgaggct

SEQ ID NO: 36257 - DNA, 20 bp, synthetic construct
  source 1..20: mol_type = other DNA
ctagcatgtaccagcgccta

SEQ ID NO: 36258 - DNA, 20 bp, synthetic construct
  source 1..20: mol_type = other DNA
cagagacaaccagccaaagg

SEQ ID NO: 36259 - DNA, 20 bp, synthetic construct
  source 1..20: mol_type = other DNA
tcacctggggggctgtcgct

SEQ ID NO: 36260 - DNA, 20 bp, synthetic construct
  source 1..20: mol_type = other DNA
aatccaaggtacggcacgga

SEQ ID NO: 36261 - DNA, 20 bp, synthetic construct
  source 1..20: mol_type = other DNA
aaggagttacatcttaacac

SEQ ID NO: 36262 - DNA, 20 bp, synthetic construct
  source 1..20: mol_type = other DNA
gaatttacttgcctctccac

SEQ ID NO: 36263 - DNA, 20 bp, synthetic construct
  source 1..20: mol_type = other DNA
agccaagcagctcaccctgg

SEQ ID NO: 36264 - DNA, 20 bp, synthetic construct
  source 1..20: mol_type = other DNA
gcgcctccgggaagtgctcc

SEQ ID NO: 36265 - DNA, 20 bp, synthetic construct
  source 1..20: mol_type = other DNA
tgtcacacctagtggcccct

SEQ ID NO: 36266 - DNA, 20 bp, synthetic construct
  source 1..20: mol_type = other DNA
ttcagacatgagaacatcat

SEQ ID NO: 36267 - DNA, 20 bp, synthetic construct
  source 1..20: mol_type = other DNA
caggcgtgtgccaccatacc

SEQ ID NO: 36268 - DNA, 20 bp, synthetic construct
  source 1..20: mol_type = other DNA
tcccagtgaggaagggagaa

SEQ ID NO: 36269 - DNA, 20 bp, synthetic construct
  source 1..20: mol_type = other DNA
ggtcccctgtgctctgtttg

SEQ ID NO: 36270 - DNA, 20 bp, synthetic construct
  source 1..20: mol_type = other DNA
atccagctccaggtgaaccg

SEQ ID NO: 36271 - DNA, 20 bp, synthetic construct
  source 1..20: mol_type = other DNA
aaaagggaaagtccgaatta

SEQ ID NO: 36272 - DNA, 20 bp, synthetic construct
  source 1..20: mol_type = other DNA
cttgttagcctccaagggtg

SEQ ID NO: 36273 - DNA, 20 bp, synthetic construct
  source 1..20: mol_type = other DNA
ctcactcacagtccgcagcc

SEQ ID NO: 36274 - DNA, 20 bp, synthetic construct
  source 1..20: mol_type = other DNA
ctttttttatttatcgatcg

SEQ ID NO: 36275 - DNA, 20 bp, synthetic construct
  source 1..20: mol_type = other DNA
ggcctctgtggagggcggag

SEQ ID NO: 36276 - DNA, 20 bp, synthetic construct
  source 1..20: mol_type = other DNA
acgctaaagcaagtcatcgc

SEQ ID NO: 36277 - DNA, 20 bp, synthetic construct
  source 1..20: mol_type = other DNA
atacacccttacccatcccg

SEQ ID NO: 36278 - DNA, 20 bp, synthetic construct
  source 1..20: mol_type = other DNA
tcccagcggcaggctgagcg

SEQ ID NO: 36279 - DNA, 20 bp, synthetic construct
  source 1..20: mol_type = other DNA
atagagcttgtacagaaata

SEQ ID NO: 36280 - DNA, 20 bp, synthetic construct
  source 1..20: mol_type = other DNA
ccgtgttcgcgctgctgacc

SEQ ID NO: 36281 - DNA, 20 bp, synthetic construct
  source 1..20: mol_type = other DNA
ccccgcggccaccactggca

SEQ ID NO: 36282 - DNA, 20 bp, synthetic construct
  source 1..20: mol_type = other DNA
tgatgcacccagcaccccac

SEQ ID NO: 36283 - DNA, 20 bp, synthetic construct
  source 1..20: mol_type = other DNA
cagcgctcgcagggagccgt

SEQ ID NO: 36284 - DNA, 20 bp, synthetic construct
  source 1..20: mol_type = other DNA
cctcaccttgatggggatgc

SEQ ID NO: 36285 - DNA, 20 bp, synthetic construct
  source 1..20: mol_type = other DNA
ctcggccgggatcatccacc

SEQ ID NO: 36286 - DNA, 20 bp, synthetic construct
  source 1..20: mol_type = other DNA
attacaatctcttcattgaa

SEQ ID NO: 36287 - DNA, 20 bp, synthetic construct
  source 1..20: mol_type = other DNA
ctatgggactgaggagtacc

SEQ ID NO: 36288 - DNA, 20 bp, synthetic construct
  source 1..20: mol_type = other DNA
cggcccagcaggatctccta

SEQ ID NO: 36289 - DNA, 20 bp, synthetic construct
  source 1..20: mol_type = other DNA
cgcagtcagcactggcagca

SEQ ID NO: 36290 - DNA, 20 bp, synthetic construct
  source 1..20: mol_type = other DNA
aatatttagcctgctcttca

SEQ ID NO: 36291 - DNA, 20 bp, synthetic construct
  source 1..20: mol_type = other DNA
agcccagcaggctggggctc

SEQ ID NO: 36292 - DNA, 20 bp, synthetic construct
  source 1..20: mol_type = other DNA
tccaggatgttggccaggat

SEQ ID NO: 36293 - DNA, 20 bp, synthetic construct
  source 1..20: mol_type = other DNA
ggctcttgctaccattgtcc

SEQ ID NO: 36294 - DNA, 20 bp, synthetic construct
  source 1..20: mol_type = other DNA
catacaccatgtccatagag

SEQ ID NO: 36295 - DNA, 20 bp, synthetic construct
  source 1..20: mol_type = other DNA
ccagtccagctgccaggtgc

SEQ ID NO: 36296 - DNA, 20 bp, synthetic construct
  source 1..20: mol_type = other DNA
atatcgagcgaggggctggc

SEQ ID NO: 36297 - DNA, 20 bp, synthetic construct
  source 1..20: mol_type = other DNA
agacatgatctgggacttgg

SEQ ID NO: 36298 - DNA, 20 bp, synthetic construct
  source 1..20: mol_type = other DNA
ggtggagtgggagagaggtg

SEQ ID NO: 36299 - DNA, 20 bp, synthetic construct
  source 1..20: mol_type = other DNA
gttcaattctttgaatgagc

SEQ ID NO: 36300 - DNA, 20 bp, synthetic construct
  source 1..20: mol_type = other DNA
ccaggaccctaagctccaga

SEQ ID NO: 36301 - DNA, 20 bp, synthetic construct
  source 1..20: mol_type = other DNA
gatgacctgagttttcacaa

SEQ ID NO: 36302 - DNA, 20 bp, synthetic construct
  source 1..20: mol_type = other DNA
agcagtcaattcagtggatc

SEQ ID NO: 36303 - DNA, 20 bp, synthetic construct
  source 1..20: mol_type = other DNA
cactgtgagtgggaccctgc

SEQ ID NO: 36304 - DNA, 20 bp, synthetic construct
  source 1..20: mol_type = other DNA
tcaggcacacacccgagagc

SEQ ID NO: 36305 - DNA, 20 bp, synthetic construct
  source 1..20: mol_type = other DNA
tggttctgactcagagcccc

SEQ ID NO: 36306 - DNA, 20 bp, synthetic construct
  source 1..20: mol_type = other DNA
agttggatgggaagtactgc

SEQ ID NO: 36307 - DNA, 20 bp, synthetic construct
  source 1..20: mol_type = other DNA
tcactgttgaggaaggccag

SEQ ID NO: 36308 - DNA, 20 bp, synthetic construct
  source 1..20: mol_type = other DNA
gtcccctgtgctctgtttgg

SEQ ID NO: 36309 - DNA, 20 bp, synthetic construct
  source 1..20: mol_type = other DNA
acgcccttacgcttgcccag

SEQ ID NO: 36310 - DNA, 20 bp, synthetic construct
  source 1..20: mol_type = other DNA
ccgagcgacaagagaagcag

SEQ ID NO: 36311 - DNA, 20 bp, synthetic construct
  source 1..20: mol_type = other DNA
gagaagtggctcaacgatgc

SEQ ID NO: 36312 - DNA, 20 bp, synthetic construct
  source 1..20: mol_type = other DNA
cctgcgagggagagaagggt

SEQ ID NO: 36313 - DNA, 20 bp, synthetic construct
  source 1..20: mol_type = other DNA
acagaaccggagaacagcac

SEQ ID NO: 36314 - DNA, 20 bp, synthetic construct
  source 1..20: mol_type = other DNA
ccctgttgtcagagtggccg

SEQ ID NO: 36315 - DNA, 20 bp, synthetic construct
  source 1..20: mol_type = other DNA
aggccagggacctgtgacca

SEQ ID NO: 36316 - DNA, 20 bp, synthetic construct
  source 1..20: mol_type = other DNA
aggtcagtgcacctgaggct

SEQ ID NO: 36317 - DNA, 20 bp, synthetic construct
  source 1..20: mol_type = other DNA
agggtctcctagacatacct

SEQ ID NO: 36318 - DNA, 20 bp, synthetic construct
  source 1..20: mol_type = other DNA
agggattccagtgccaaggt

SEQ ID NO: 36319 - DNA, 20 bp, synthetic construct
  source 1..20: mol_type = other DNA
gttgcgggccttgtacacac

SEQ ID NO: 36320 - DNA, 20 bp, synthetic construct
  source 1..20: mol_type = other DNA
agtcccgggacctggaacag

SEQ ID NO: 36321 - DNA, 20 bp, synthetic construct
  source 1..20: mol_type = other DNA
cctgcaggaggtgagggcgg

SEQ ID NO: 36322 - DNA, 20 bp, synthetic construct
  source 1..20: mol_type = other DNA
tgatccgaggctgggaagaa

SEQ ID NO: 36323 - DNA, 20 bp, synthetic construct
  source 1..20: mol_type = other DNA
aaggtgaaggcagagtctct

SEQ ID NO: 36324 - DNA, 20 bp, synthetic construct
  source 1..20: mol_type = other DNA
ctccccttcaatcatttcga

SEQ ID NO: 36325 - DNA, 20 bp, synthetic construct
  source 1..20: mol_type = other DNA
cctctgtgtttgtccagctt

SEQ ID NO: 36326 - DNA, 20 bp, synthetic construct
  source 1..20: mol_type = other DNA
agactccagcaggtaagggg

SEQ ID NO: 36327 - DNA, 20 bp, synthetic construct
  source 1..20: mol_type = other DNA
aaactgttgatgatttctgg

SEQ ID NO: 36328 - DNA, 20 bp, synthetic construct
  source 1..20: mol_type = other DNA
caatcaacatttcggaagaa

SEQ ID NO: 36329 - DNA, 20 bp, synthetic construct
  source 1..20: mol_type = other DNA
tggaagaatttccagaagcc

SEQ ID NO: 36330 - DNA, 20 bp, synthetic construct
  source 1..20: mol_type = other DNA
cagcatctgtgaaggcaccg

SEQ ID NO: 36331 - DNA, 20 bp, synthetic construct
  source 1..20: mol_type = other DNA
aaatgtggagagccaccagg

SEQ ID NO: 36332 - DNA, 20 bp, synthetic construct
  source 1..20: mol_type = other DNA
caccgccacctcgcggatgg

SEQ ID NO: 36333 - DNA, 20 bp, synthetic construct
  source 1..20: mol_type = other DNA
gatgtgagggactgggacgg

SEQ ID NO: 36334 - DNA, 20 bp, synthetic construct
  source 1..20: mol_type = other DNA
aaatggtacgagagagtaac

SEQ ID NO: 36335 - DNA, 20 bp, synthetic construct
  source 1..20: mol_type = other DNA
tcgacggagtcctccccgca

SEQ ID NO: 36336 - DNA, 20 bp, synthetic construct
  source 1..20: mol_type = other DNA
tgggcaaccagtgttgggga

SEQ ID NO: 36337 - DNA, 20 bp, synthetic construct
  source 1..20: mol_type = other DNA
ttctatgaggatgatgagaa

SEQ ID NO: 36338 - DNA, 20 bp, synthetic construct
  source 1..20: mol_type = other DNA
ctggacacatccctccacca

SEQ ID NO: 36339 - DNA, 20 bp, synthetic construct
  source 1..20: mol_type = other DNA
tacgagtagaaccaccaacc

SEQ ID NO: 36340 - DNA, 20 bp, synthetic construct
  source 1..20: mol_type = other DNA
agagccagcatactgaggca

SEQ ID NO: 36341 - DNA, 20 bp, synthetic construct
  source 1..20: mol_type = other DNA
catggacaaagtcgtaggtg

SEQ ID NO: 36342 - DNA, 20 bp, synthetic construct
  source 1..20: mol_type = other DNA
gatgaagcccatgatgcacc

SEQ ID NO: 36343 - DNA, 20 bp, synthetic construct
  source 1..20: mol_type = other DNA
cgccaggcccagggctgccg

SEQ ID NO: 36344 - DNA, 20 bp, synthetic construct
  source 1..20: mol_type = other DNA
cgcacagtggcgaacaaatt

SEQ ID NO: 36345 - DNA, 20 bp, synthetic construct
  source 1..20: mol_type = other DNA
gcagcacgtggacgctgact

SEQ ID NO: 36346 - DNA, 20 bp, synthetic construct
  source 1..20: mol_type = other DNA
tcctaccattatgtacccaa

SEQ ID NO: 36347 - DNA, 20 bp, synthetic construct
  source 1..20: mol_type = other DNA
cagggctttgacaaagccgt

SEQ ID NO: 36348 - DNA, 20 bp, synthetic construct
  source 1..20: mol_type = other DNA
ctcagatccagtacatagcc

SEQ ID NO: 36349 - DNA, 20 bp, synthetic construct
  source 1..20: mol_type = other DNA
gccctgcaaggcacaaggat

SEQ ID NO: 36350 - DNA, 20 bp, synthetic construct
  source 1..20: mol_type = other DNA
cgggatgatgcccggtgtgg

SEQ ID NO: 36351 - DNA, 20 bp, synthetic construct
  source 1..20: mol_type = other DNA
gaatggcatatcagcaaacc

SEQ ID NO: 36352 - DNA, 20 bp, synthetic construct
  source 1..20: mol_type = other DNA
ttatcataaccaaaggaggt

SEQ ID NO: 36353 - DNA, 20 bp, synthetic construct
  source 1..20: mol_type = other DNA
tggtgcgttccacctccacg

SEQ ID NO: 36354 - DNA, 20 bp, synthetic construct
  source 1..20: mol_type = other DNA
acctcaccaaacgctgtctc

SEQ ID NO: 36355 - DNA, 20 bp, synthetic construct
  source 1..20: mol_type = other DNA
aaagaaattggtggagcggg

SEQ ID NO: 36356 - DNA, 20 bp, synthetic construct
  source 1..20: mol_type = other DNA
cggctgctcgggcacctcgg

SEQ ID NO: 36357 - DNA, 20 bp, synthetic construct
  source 1..20: mol_type = other DNA
actgagctgcagcttccgga

SEQ ID NO: 36358 - DNA, 20 bp, synthetic construct
  source 1..20: mol_type = other DNA
gtgctctgtttggggggagt

SEQ ID NO: 36359 - DNA, 20 bp, synthetic construct
  source 1..20: mol_type = other DNA
cagcccggtggcagcggcgg

SEQ ID NO: 36360 - DNA, 20 bp, synthetic construct
  source 1..20: mol_type = other DNA
tacatctgggcgcccttggc

SEQ ID NO: 36361 - DNA, 20 bp, synthetic construct
  source 1..20: mol_type = other DNA
atggtcatcgggtaccgctg

SEQ ID NO: 36362 - DNA, 20 bp, synthetic construct
  source 1..20: mol_type = other DNA
cgccgcctccgagaactcgc

SEQ ID NO: 36363 - DNA, 20 bp, synthetic construct
  source 1..20: mol_type = other DNA
ggcagcccctcgcccgggcc

SEQ ID NO: 36364 - DNA, 20 bp, synthetic construct
  source 1..20: mol_type = other DNA
gtcgttgtgctgcacaaggg

SEQ ID NO: 36365 - DNA, 20 bp, synthetic construct
  source 1..20: mol_type = other DNA
ttctgggggaccacagaagc

SEQ ID NO: 36366 - DNA, 20 bp, synthetic construct
  source 1..20: mol_type = other DNA
ccagggcactcatctgcatg

SEQ ID NO: 36367 - DNA, 20 bp, synthetic construct
  source 1..20: mol_type = other DNA
cagcgagtgtacagccgagg

SEQ ID NO: 36368 - DNA, 20 bp, synthetic construct
  source 1..20: mol_type = other DNA
cgagagtggtgagcctgtga

SEQ ID NO: 36369 - DNA, 20 bp, synthetic construct
  source 1..20: mol_type = other DNA
gaaccattaccagacaacag

SEQ ID NO: 36370 - DNA, 20 bp, synthetic construct
  source 1..20: mol_type = other DNA
cctggcggcggcgaggacgg

SEQ ID NO: 36371 - DNA, 20 bp, synthetic construct
  source 1..20: mol_type = other DNA
ggcgtactggaacagcttgt

SEQ ID NO: 36372 - DNA, 20 bp, synthetic construct
  source 1..20: mol_type = other DNA
cttggtggcccactggaagc

SEQ ID NO: 36373 - DNA, 20 bp, synthetic construct
  source 1..20: mol_type = other DNA
gttcccgagtgcttgagctg

SEQ ID NO: 36374 - DNA, 20 bp, synthetic construct
  source 1..20: mol_type = other DNA
ggcagcttaggaggtggctg

SEQ ID NO: 36375 - DNA, 20 bp, synthetic construct
  source 1..20: mol_type = other DNA
ttacccttctttaagcacga

SEQ ID NO: 36376 - DNA, 20 bp, synthetic construct
  source 1..20: mol_type = other DNA
gggggaatgagaagctgagg

SEQ ID NO: 36377 - DNA, 20 bp, synthetic construct
  source 1..20: mol_type = other DNA
tcagcctgtatatcccatca

SEQ ID NO: 36378 - DNA, 20 bp, synthetic construct
  source 1..20: mol_type = other DNA
tggaaaacggctcgatgcac

SEQ ID NO: 36379 - DNA, 20 bp, synthetic construct
  source 1..20: mol_type = other DNA
cagatcatttccagtaccca

SEQ ID NO: 36380 - DNA, 20 bp, synthetic construct
  source 1..20: mol_type = other DNA
ccagatcagcccggaggaag

SEQ ID NO: 36381 - DNA, 20 bp, synthetic construct
  source 1..20: mol_type = other DNA
tcaggagccctaccacgaca

SEQ ID NO: 36382 - DNA, 20 bp, synthetic construct
  source 1..20: mol_type = other DNA
cacgacgcgtgggtggcaag

SEQ ID NO: 36383 - DNA, 20 bp, synthetic construct
  source 1..20: mol_type = other DNA
aaaccaattcaaaaatgtga

SEQ ID NO: 36384 - DNA, 20 bp, synthetic construct
  source 1..20: mol_type = other DNA
caatgatgtcattcccacaa

SEQ ID NO: 36385 - DNA, 20 bp, synthetic construct
  source 1..20: mol_type = other DNA
aaccgcatcatcgaacggta

SEQ ID NO: 36386 - DNA, 20 bp, synthetic construct
  source 1..20: mol_type = other DNA
cctgtctcacccatacttcc

SEQ ID NO: 36387 - DNA, 20 bp, synthetic construct
  source 1..20: mol_type = other DNA
ctcaagtatgcaagcctgtg

SEQ ID NO: 36388 - DNA, 20 bp, synthetic construct
  source 1..20: mol_type = other DNA
ccggatcaccacggagaagc

SEQ ID NO: 36389 - DNA, 20 bp, synthetic construct
  source 1..20: mol_type = other DNA
ctgagtctgactgggggcac

SEQ ID NO: 36390 - DNA, 20 bp, synthetic construct
  source 1..20: mol_type = other DNA
ttcttcttgatttgatccca

SEQ ID NO: 36391 - DNA, 20 bp, synthetic construct
  source 1..20: mol_type = other DNA
atggatgttaaataacttgg

SEQ ID NO: 36392 - DNA, 20 bp, synthetic construct
  source 1..20: mol_type = other DNA
ccgaaagtgtctggagaagc

SEQ ID NO: 36393 - DNA, 20 bp, synthetic construct
  source 1..20: mol_type = other DNA
tctgggaaatctactccttt

SEQ ID NO: 36394 - DNA, 20 bp, synthetic construct
  source 1..20: mol_type = other DNA
tagagaacttggcgtatcac

SEQ ID NO: 36395 - DNA, 20 bp, synthetic construct
  source 1..20: mol_type = other DNA
cctgcagtcgccggttctca

SEQ ID NO: 36396 - DNA, 20 bp, synthetic construct
  source 1..20: mol_type = other DNA
ctagggaaaatccaattgtt

SEQ ID NO: 36397 - DNA, 20 bp, synthetic construct
  source 1..20: mol_type = other DNA
agcttccggtaccctgcgga

SEQ ID NO: 36398 - DNA, 20 bp, synthetic construct
  source 1..20: mol_type = other DNA
tggtcaacaaaatccacgtc

SEQ ID NO: 36399 - DNA, 20 bp, synthetic construct
  source 1..20: mol_type = other DNA
catctcttcggaaaaacctc

SEQ ID NO: 36400 - DNA, 20 bp, synthetic construct
  source 1..20: mol_type = other DNA
taaccctgaccagaacacag

SEQ ID NO: 36401 - DNA, 20 bp, synthetic construct
  source 1..20: mol_type = other DNA
tccttttgtggagattgagg

SEQ ID NO: 36402 - DNA, 20 bp, synthetic construct
  source 1..20: mol_type = other DNA
gaagctgttgcttatggtgc

SEQ ID NO: 36403 - DNA, 20 bp, synthetic construct
  source 1..20: mol_type = other DNA
ggcctgtcaactccccatgg

SEQ ID NO: 36404 - DNA, 20 bp, synthetic construct
  source 1..20: mol_type = other DNA
tttcctgcagaaagacttga

SEQ ID NO: 36405 - DNA, 20 bp, synthetic construct
  source 1..20: mol_type = other DNA
aaagagagaagaaggggaca

SEQ ID NO: 36406 - DNA, 20 bp, synthetic construct
  source 1..20: mol_type = other DNA
tcgctctcctggaggatgca

SEQ ID NO: 36407 - DNA, 20 bp, synthetic construct
  source 1..20: mol_type = other DNA
tctgctggtgagttggggac

SEQ ID NO: 36408 - DNA, 20 bp, synthetic construct
  source 1..20: mol_type = other DNA
aaacttatctttaaggaact

SEQ ID NO: 36409 - DNA, 20 bp, synthetic construct
  source 1..20: mol_type = other DNA
ttcatagaagccaggcaggc

SEQ ID NO: 36410 - DNA, 20 bp, synthetic construct
  source 1..20: mol_type = other DNA
ctggaagttgtacagatcac

SEQ ID NO: 36411 - DNA, 20 bp, synthetic construct
  source 1..20: mol_type = other DNA
cataaacactaagggaatga

SEQ ID NO: 36412 - DNA, 20 bp, synthetic construct
  source 1..20: mol_type = other DNA
actggcgcctcaccttgatg

SEQ ID NO: 36413 - DNA, 20 bp, synthetic construct
  source 1..20: mol_type = other DNA
ataaatggcattggcagatg

SEQ ID NO: 36414 - DNA, 20 bp, synthetic construct
  source 1..20: mol_type = other DNA
ttttacctcgtagggttctc

SEQ ID NO: 36415 - DNA, 20 bp, synthetic construct
  source 1..20: mol_type = other DNA
acaggatccagatctaactt

SEQ ID NO: 36416 - DNA, 20 bp, synthetic construct
  source 1..20: mol_type = other DNA
cagtcatgctgcaagtgtgc

SEQ ID NO: 36417 - DNA, 20 bp, synthetic construct
  source 1..20: mol_type = other DNA
gttgacctgctccaggtcgt

SEQ ID NO: 36418 - DNA, 20 bp, synthetic construct
  source 1..20: mol_type = other DNA
cccggcccagagggcggcgg

SEQ ID NO: 36419 - DNA, 20 bp, synthetic construct
  source 1..20: mol_type = other DNA
ggctgcgaagtcgcgtggtg

SEQ ID NO: 36420 - DNA, 20 bp, synthetic construct
  source 1..20: mol_type = other DNA
tcatgcgcccacctgtggga

SEQ ID NO: 36421 - DNA, 20 bp, synthetic construct
  source 1..20: mol_type = other DNA
tactagcaaattcaaatact

SEQ ID NO: 36422 - DNA, 20 bp, synthetic construct
  source 1..20: mol_type = other DNA
tgtagataaaggaccctggg

SEQ ID NO: 36423 - DNA, 20 bp, synthetic construct
  source 1..20: mol_type = other DNA
cctggctggagaaggccccc

SEQ ID NO: 36424 - DNA, 20 bp, synthetic construct
  source 1..20: mol_type = other DNA
ggtgggaatatacccctcag

SEQ ID NO: 36425 - DNA, 20 bp, synthetic construct
  source 1..20: mol_type = other DNA
tgcatggctgtgtctccagg

SEQ ID NO: 36426 - DNA, 20 bp, synthetic construct
  source 1..20: mol_type = other DNA
cctggcctaggaagccagtc

SEQ ID NO: 36427 - DNA, 20 bp, synthetic construct
  source 1..20: mol_type = other DNA
tcgcccacgccgtccccgca

SEQ ID NO: 36428 - DNA, 20 bp, synthetic construct
  source 1..20: mol_type = other DNA
ggcctccaccttgctcacct

SEQ ID NO: 36429 - DNA, 20 bp, synthetic construct
  source 1..20: mol_type = other DNA
tgcttatggtcagaagcagt

SEQ ID NO: 36430 - DNA, 20 bp, synthetic construct
  source 1..20: mol_type = other DNA
ctctgtaatgttggtgaggt

SEQ ID NO: 36431 - DNA, 20 bp, synthetic construct
  source 1..20: mol_type = other DNA
caagtagggattggcatctt

SEQ ID NO: 36432 - DNA, 20 bp, synthetic construct
  source 1..20: mol_type = other DNA
gcgctcggccgcctggaaca

SEQ ID NO: 36433 - DNA, 20 bp, synthetic construct
  source 1..20: mol_type = other DNA
aattacctgttgaagcatga

SEQ ID NO: 36434 - DNA, 20 bp, synthetic construct
  source 1..20: mol_type = other DNA
cagcaatttagatgaacagc

SEQ ID NO: 36435 - DNA, 20 bp, synthetic construct
  source 1..20: mol_type = other DNA
acctgcgtttgaactaatga

SEQ ID NO: 36436 - DNA, 20 bp, synthetic construct
  source 1..20: mol_type = other DNA
gtcaaaggtgatccaagact

SEQ ID NO: 36437 - DNA, 20 bp, synthetic construct
  source 1..20: mol_type = other DNA
gcaggttttatttccggaac

SEQ ID NO: 36438 - DNA, 20 bp, synthetic construct
  source 1..20: mol_type = other DNA
cagtaggcatctgccaagaa

SEQ ID NO: 36439 - DNA, 20 bp, synthetic construct
  source 1..20: mol_type = other DNA
cagctccgcagggaaccagc

SEQ ID NO: 36440 - DNA, 20 bp, synthetic construct
  source 1..20: mol_type = other DNA
tggtttcaggagccctgtaa

SEQ ID NO: 36441 - DNA, 20 bp, synthetic construct
  source 1..20: mol_type = other DNA
agttatgtttgaatgcgata

SEQ ID NO: 36442 - DNA, 20 bp, synthetic construct
  source 1..20: mol_type = other DNA
ttcagtgagagctcccggga

SEQ ID NO: 36443 - DNA, 20 bp, synthetic construct
  source 1..20: mol_type = other DNA
gcagcagctcaccgaggacg

SEQ ID NO: 36444 - DNA, 20 bp, synthetic construct
  source 1..20: mol_type = other DNA
tgatgaattcttcatacccc

SEQ ID NO: 36445 - DNA, 20 bp, synthetic construct
  source 1..20: mol_type = other DNA
gtgtgtgtcagcggacccac

SEQ ID NO: 36446 - DNA, 20 bp, synthetic construct
  source 1..20: mol_type = other DNA
caagtgtacttgatgggagg

SEQ ID NO: 36447 - DNA, 20 bp, synthetic construct
  source 1..20: mol_type = other DNA
ctgggccttgtgcagcctgg

SEQ ID NO: 36448 - DNA, 20 bp, synthetic construct
  source 1..20: mol_type = other DNA
acacatccctccaccaaggg

SEQ ID NO: 36449 - DNA, 20 bp, synthetic construct
  source 1..20: mol_type = other DNA
ggagtccccagaggagccac

SEQ ID NO: 36450 - DNA, 20 bp, synthetic construct
  source 1..20: mol_type = other DNA
cttcagtgaaactcccggta

SEQ ID NO: 36451 - DNA, 20 bp, synthetic construct
  source 1..20: mol_type = other DNA
catgtttctggatcccgcag

SEQ ID NO: 36452 - DNA, 20 bp, synthetic construct
  source 1..20: mol_type = other DNA
ttctactgaggactgtgaag

SEQ ID NO: 36453 - DNA, 20 bp, synthetic construct
  source 1..20: mol_type = other DNA
cccccacgccatcctgcgtc

SEQ ID NO: 36454 - DNA, 20 bp, synthetic construct
  source 1..20: mol_type = other DNA
tctgttcttcttacagagta

SEQ ID NO: 36455 - DNA, 20 bp, synthetic construct
  source 1..20: mol_type = other DNA
ccgcggcgggcgggctgagc

SEQ ID NO: 36456 - DNA, 20 bp, synthetic construct
  source 1..20: mol_type = other DNA
ggctctggagttgtggtggg

SEQ ID NO: 36457 - DNA, 20 bp, synthetic construct
  source 1..20: mol_type = other DNA
gcagcgcggcctgtgggcac

SEQ ID NO: 36458 - DNA, 20 bp, synthetic construct
  source 1..20: mol_type = other DNA
ccaaaatatcacggagaccc

SEQ ID NO: 36459 - DNA, 20 bp, synthetic construct
  source 1..20: mol_type = other DNA
aagaaaaaggaggagagaga

SEQ ID NO: 36460 - DNA, 20 bp, synthetic construct
  source 1..20: mol_type = other DNA
caaaaacaaggtgggccgtg

SEQ ID NO: 36461 - DNA, 20 bp, synthetic construct
  source 1..20: mol_type = other DNA
gtcaaggacggcgtgggcgt

SEQ ID NO: 36462 - DNA, 20 bp, synthetic construct
  source 1..20: mol_type = other DNA
tgtctttcgtggaagacata

SEQ ID NO: 36463 - DNA, 20 bp, synthetic construct
  source 1..20: mol_type = other DNA
gagaagaagaggtaggtgtc

SEQ ID NO: 36464 - DNA, 20 bp, synthetic construct
  source 1..20: mol_type = other DNA
tgcttcaggttggttctcag

SEQ ID NO: 36465 - DNA, 20 bp, synthetic construct
  source 1..20: mol_type = other DNA
gggctgcatcagaaggagag

SEQ ID NO: 36466 - DNA, 20 bp, synthetic construct
  source 1..20: mol_type = other DNA
ggacttggaaggtaggctgt

SEQ ID NO: 36467 - DNA, 20 bp, synthetic construct
  source 1..20: mol_type = other DNA
tgatgtctccacccttcaga

SEQ ID NO: 36468 - DNA, 20 bp, synthetic construct
  source 1..20: mol_type = other DNA
acactttgcacaggccaagt

SEQ ID NO: 36469 - DNA, 20 bp, synthetic construct
  source 1..20: mol_type = other DNA
agacctagagtccaagcaaa

SEQ ID NO: 36470 - DNA, 20 bp, synthetic construct
  source 1..20: mol_type = other DNA
acttgctcctcaaactgaga

SEQ ID NO: 36471 - DNA, 20 bp, synthetic construct
  source 1..20: mol_type = other DNA
gaaggctcaggacaccgagc

SEQ ID NO: 36472 - DNA, 20 bp, synthetic construct
  source 1..20: mol_type = other DNA
ctctcccagctgctatatgc

SEQ ID NO: 36473 - DNA, 20 bp, synthetic construct
  source 1..20: mol_type = other DNA
ttgcaaagaaacatggggaa

SEQ ID NO: 36474 - DNA, 20 bp, synthetic construct
  source 1..20: mol_type = other DNA
catggtttccaccaagatcc

SEQ ID NO: 36475 - DNA, 20 bp, synthetic construct
  source 1..20: mol_type = other DNA
cgcgggaggctgctggagcg

SEQ ID NO: 36476 - DNA, 20 bp, synthetic construct
  source 1..20: mol_type = other DNA
caggccgcgctgcaggtggg

SEQ ID NO: 36477 - DNA, 20 bp, synthetic construct
  source 1..20: mol_type = other DNA
ggctgtatgagggcctgagc

SEQ ID NO: 36478 - DNA, 20 bp, synthetic construct
  source 1..20: mol_type = other DNA
cacctcccagctcaccctgc

SEQ ID NO: 36479 - DNA, 20 bp, synthetic construct
  source 1..20: mol_type = other DNA
aggagtttccagaccctcag

SEQ ID NO: 36480 - DNA, 20 bp, synthetic construct
  source 1..20: mol_type = other DNA
caatctctgagtcgctgaag

SEQ ID NO: 36481 - DNA, 20 bp, synthetic construct
  source 1..20: mol_type = other DNA
tccaggaagcattgcatggc

SEQ ID NO: 36482 - DNA, 20 bp, synthetic construct
  source 1..20: mol_type = other DNA
gcgtaagctgggattggacc

SEQ ID NO: 36483 - DNA, 20 bp, synthetic construct
  source 1..20: mol_type = other DNA
acgctggcggggtgcaggtg

SEQ ID NO: 36484 - DNA, 20 bp, synthetic construct
  source 1..20: mol_type = other DNA
ggggaaaacaaggtggaccc

SEQ ID NO: 36485 - DNA, 20 bp, synthetic construct
  source 1..20: mol_type = other DNA
ttgctgaggtttgcgtagac

SEQ ID NO: 36486 - DNA, 20 bp, synthetic construct
  source 1..20: mol_type = other DNA
aatcatctgctacggacaac

SEQ ID NO: 36487 - DNA, 20 bp, synthetic construct
  source 1..20: mol_type = other DNA
gcctgagaggaagatgtggg

SEQ ID NO: 36488 - DNA, 20 bp, synthetic construct
  source 1..20: mol_type = other DNA
ggacgtagcgcggcgtgtgg

SEQ ID NO: 36489 - DNA, 20 bp, synthetic construct
  source 1..20: mol_type = other DNA
ttgggaacaaggctcctcta

SEQ ID NO: 36490 - DNA, 20 bp, synthetic construct
  source 1..20: mol_type = other DNA
cgaacatcttccgtgtccgg

SEQ ID NO: 36491 - DNA, 20 bp, synthetic construct
  source 1..20: mol_type = other DNA
gcctggaggaggccgtgtgg

SEQ ID NO: 36492 - DNA, 20 bp, synthetic construct
  source 1..20: mol_type = other DNA
gccgcaggtcacagctctcc

SEQ ID NO: 36493 - DNA, 20 bp, synthetic construct
  source 1..20: mol_type = other DNA
gcttccagaagggctcagag

SEQ ID NO: 36494 - DNA, 20 bp, synthetic construct
  source 1..20: mol_type = other DNA
gcctaagatgccggccatgc

SEQ ID NO: 36495 - DNA, 20 bp, synthetic construct
  source 1..20: mol_type = other DNA
gaaaatgtttatgctacact

SEQ ID NO: 36496 - DNA, 20 bp, synthetic construct
  source 1..20: mol_type = other DNA
gaagtgtctcagtgttggaa

SEQ ID NO: 36497 - DNA, 20 bp, synthetic construct
  source 1..20: mol_type = other DNA
cctttccccacgagcctaca

SEQ ID NO: 36498 - DNA, 20 bp, synthetic construct
  source 1..20: mol_type = other DNA
cagtactcacctggggcctc

SEQ ID NO: 36499 - DNA, 20 bp, synthetic construct
  source 1..20: mol_type = other DNA
agacttcgggctgtgcaagg

SEQ ID NO: 36500 - DNA, 20 bp, synthetic construct
  source 1..20: mol_type = other DNA
cctgtcagaacagcaggaga

SEQ ID NO: 36501 - DNA, 20 bp, synthetic construct
  source 1..20: mol_type = other DNA
ttataatgcaagccctttgc

SEQ ID NO: 36502 - DNA, 20 bp, synthetic construct
  source 1..20: mol_type = other DNA
atcctagacacagccgtggt

SEQ ID NO: 36503 - DNA, 20 bp, synthetic construct
  source 1..20: mol_type = other DNA
ggtgcagaaaggccatgccc

SEQ ID NO: 36504 - DNA, 20 bp, synthetic construct
  source 1..20: mol_type = other DNA
ttattcgcttttccttctca

SEQ ID NO: 36505 - DNA, 20 bp, synthetic construct
  source 1..20: mol_type = other DNA
agacagtgaccaacaccttc

SEQ ID NO: 36506 - DNA, 20 bp, synthetic construct
  source 1..20: mol_type = other DNA
tcatcttgtagtaccgctcc

SEQ ID NO: 36507 - DNA, 20 bp, synthetic construct
  source 1..20: mol_type = other DNA
agctgtggacaaggagggtc

SEQ ID NO: 36508 - DNA, 20 bp, synthetic construct
  source 1..20: mol_type = other DNA
aggagaagatgcccggtgcg

SEQ ID NO: 36509 - DNA, 20 bp, synthetic construct
  source 1..20: mol_type = other DNA
tccaccagtgaatattggct

SEQ ID NO: 36510 - DNA, 20 bp, synthetic construct
  source 1..20: mol_type = other DNA
tagaagtttggccaagctca

SEQ ID NO: 36511 - DNA, 20 bp, synthetic construct
  source 1..20: mol_type = other DNA
aaaatcaagccccagaaaag

SEQ ID NO: 36512 - DNA, 20 bp, synthetic construct
  source 1..20: mol_type = other DNA
tttgcaccaagcagcggccc

SEQ ID NO: 36513 - DNA, 20 bp, synthetic construct
  source 1..20: mol_type = other DNA
gcccagcaccatgaagatca

SEQ ID NO: 36514 - DNA, 20 bp, synthetic construct
  source 1..20: mol_type = other DNA
ctacacttagcctctatcca

SEQ ID NO: 36515 - DNA, 20 bp, synthetic construct
  source 1..20: mol_type = other DNA
gagatgagtccccgctacct

SEQ ID NO: 36516 - DNA, 20 bp, synthetic construct
  source 1..20: mol_type = other DNA
ttcagtgaaagccatctcgg

SEQ ID NO: 36517 - DNA, 20 bp, synthetic construct
  source 1..20: mol_type = other DNA
ggtgatcctggtgttggttg

SEQ ID NO: 36518 - DNA, 20 bp, synthetic construct
  source 1..20: mol_type = other DNA
gatcttgtggacgctgtgct

SEQ ID NO: 36519 - DNA, 20 bp, synthetic construct
  source 1..20: mol_type = other DNA
ggtgttctctggccttgtcg

SEQ ID NO: 36520 - DNA, 20 bp, synthetic construct
  source 1..20: mol_type = other DNA
ctccgtctgctcagggacac

SEQ ID NO: 36521 - DNA, 20 bp, synthetic construct
  source 1..20: mol_type = other DNA
ctgggatagatggaagatgg

SEQ ID NO: 36522 - DNA, 20 bp, synthetic construct
  source 1..20: mol_type = other DNA
ccaagcctgagcacgagaac

SEQ ID NO: 36523 - DNA, 20 bp, synthetic construct
  source 1..20: mol_type = other DNA
atgccaaagccactatcctg

SEQ ID NO: 36524 - DNA, 20 bp, synthetic construct
  source 1..20: mol_type = other DNA
tcagatgagccgtcttgcca

SEQ ID NO: 36525 - DNA, 20 bp, synthetic construct
  source 1..20: mol_type = other DNA
gctgtagaagccaaacaagt

SEQ ID NO: 36526 - DNA, 20 bp, synthetic construct
  source 1..20: mol_type = other DNA
tcttcttgaaatgctccacc

SEQ ID NO: 36527 - DNA, 20 bp, synthetic construct
  source 1..20: mol_type = other DNA
tctatgtggaagagtttgcc

SEQ ID NO: 36528 - DNA, 20 bp, synthetic construct
  source 1..20: mol_type = other DNA
tgatgggcagctgagcccgg

SEQ ID NO: 36529 - DNA, 20 bp, synthetic construct
  source 1..20: mol_type = other DNA
tgcactggcggattggtggg

SEQ ID NO: 36530 - DNA, 20 bp, synthetic construct
  source 1..20: mol_type = other DNA
cagcagcccctttcccacgt

SEQ ID NO: 36531 - DNA, 20 bp, synthetic construct
  source 1..20: mol_type = other DNA
ggaagcaactgggagtgagg

SEQ ID NO: 36532 - DNA, 20 bp, synthetic construct
  source 1..20: mol_type = other DNA
taggcccatgacttcttgaa

SEQ ID NO: 36533 - DNA, 20 bp, synthetic construct
  source 1..20: mol_type = other DNA
cagcatagtctataagaaag

SEQ ID NO: 36534 - DNA, 20 bp, synthetic construct
  source 1..20: mol_type = other DNA
acccttacctctgttctgca

SEQ ID NO: 36535 - DNA, 20 bp, synthetic construct
  source 1..20: mol_type = other DNA
caaggggcagggaaagacgc

SEQ ID NO: 36536 - DNA, 20 bp, synthetic construct
  source 1..20: mol_type = other DNA
ccgattctttctccacaatg

SEQ ID NO: 36537 - DNA, 20 bp, synthetic construct
  source 1..20: mol_type = other DNA
gagccatggtggccatgaag

SEQ ID NO: 36538 - DNA, 20 bp, synthetic construct
  source 1..20: mol_type = other DNA
gagagcggcacgtgcaagta

SEQ ID NO: 36539 - DNA, 20 bp, synthetic construct
  source 1..20: mol_type = other DNA
ccagttggggtcctggggag

SEQ ID NO: 36540 - DNA, 20 bp, synthetic construct
  source 1..20: mol_type = other DNA
ggagaaaggagagttcaggt

SEQ ID NO: 36541 - DNA, 20 bp, synthetic construct
  source 1..20: mol_type = other DNA
gacacctgaatcatttattg

SEQ ID NO: 36542 - DNA, 20 bp, synthetic construct
  source 1..20: mol_type = other DNA
gccagtggtcaaacacacac

SEQ ID NO: 36543 - DNA, 20 bp, synthetic construct
  source 1..20: mol_type = other DNA
agcgaggtcatcacagacac

SEQ ID NO: 36544 - DNA, 20 bp, synthetic construct
  source 1..20: mol_type = other DNA
gtttgacttgaacccggagt

SEQ ID NO: 36545 - DNA, 20 bp, synthetic construct
  source 1..20: mol_type = other DNA
gattcactggtggagagtcc

SEQ ID NO: 36546 - DNA, 20 bp, synthetic construct
  source 1..20: mol_type = other DNA
ccctggtcgggagcgcacga

SEQ ID NO: 36547 - DNA, 20 bp, synthetic construct
  source 1..20: mol_type = other DNA
ctggtggtaggggccgagga

SEQ ID NO: 36548 - DNA, 20 bp, synthetic construct
  source 1..20: mol_type = other DNA
atgggatgagaaaggacagg

SEQ ID NO: 36549 - DNA, 20 bp, synthetic construct
  source 1..20: mol_type = other DNA
cagcagcagctggcagggaa

SEQ ID NO: 36550 - DNA, 20 bp, synthetic construct
  source 1..20: mol_type = other DNA
gtcttggcaccaggctgagg

SEQ ID NO: 36551 - DNA, 20 bp, synthetic construct
  source 1..20: mol_type = other DNA
atatcaataccagaaccgca

SEQ ID NO: 36552 - DNA, 20 bp, synthetic construct
  source 1..20: mol_type = other DNA
cagatgcagtaaatcagggt

SEQ ID NO: 36553 - DNA, 20 bp, synthetic construct
  source 1..20: mol_type = other DNA
tgacaattcttcagtcattc

SEQ ID NO: 36554 - DNA, 20 bp, synthetic construct
  source 1..20: mol_type = other DNA
tggagccaccatgcatgcta

SEQ ID NO: 36555 - DNA, 20 bp, synthetic construct
  source 1..20: mol_type = other DNA
gtgtttgtgaaccccaagag

SEQ ID NO: 36556 - DNA, 20 bp, synthetic construct
  source 1..20: mol_type = other DNA
caggtgtcttcacttgggtc

SEQ ID NO: 36557 - DNA, 20 bp, synthetic construct
  source 1..20: mol_type = other DNA
cgaagctggggtagtgctga

SEQ ID NO: 36558 - DNA, 20 bp, synthetic construct
  source 1..20: mol_type = other DNA
caagccccggagaacctgca

SEQ ID NO: 36559 - DNA, 20 bp, synthetic construct
  source 1..20: mol_type = other DNA
tccaaatggtaacgttcatg

SEQ ID NO: 36560 - DNA, 20 bp, synthetic construct
  source 1..20: mol_type = other DNA
aagtgacagtcccggccctt

SEQ ID NO: 36561 - DNA, 20 bp, synthetic construct
  source 1..20: mol_type = other DNA
tgcagtaatgtcagcgagaa

SEQ ID NO: 36562 - DNA, 20 bp, synthetic construct
  source 1..20: mol_type = other DNA
ctctttcaaaatcatagaag

SEQ ID NO: 36563 - DNA, 20 bp, synthetic construct
  source 1..20: mol_type = other DNA
caagaagtttgcgcggctgc

SEQ ID NO: 36564 - DNA, 20 bp, synthetic construct
  source 1..20: mol_type = other DNA
cagaagcagcagcagcagtc

SEQ ID NO: 36565 - DNA, 20 bp, synthetic construct
  source 1..20: mol_type = other DNA
aactaaggcccagagaagtg

SEQ ID NO: 36566 - DNA, 20 bp, synthetic construct
  source 1..20: mol_type = other DNA
gaggtatgtcatcgccatga

SEQ ID NO: 36567 - DNA, 20 bp, synthetic construct
  source 1..20: mol_type = other DNA
tgttggcgtacaggtctttg

SEQ ID NO: 36568 - DNA, 20 bp, synthetic construct
  source 1..20: mol_type = other DNA
aaagccattgaccagggcct

SEQ ID NO: 36569 - DNA, 20 bp, synthetic construct
  source 1..20: mol_type = other DNA
gctctactacatcggagggg

SEQ ID NO: 36570 - DNA, 20 bp, synthetic construct
  source 1..20: mol_type = other DNA
aggccaagcagaagccgagg

SEQ ID NO: 36571 - DNA, 20 bp, synthetic construct
  source 1..20: mol_type = other DNA
gtcaaaacacatgaatctac

SEQ ID NO: 36572 - DNA, 20 bp, synthetic construct
  source 1..20: mol_type = other DNA
catatcctacccagctcttc

SEQ ID NO: 36573 - DNA, 20 bp, synthetic construct
  source 1..20: mol_type = other DNA
catccaaaactgatgacctg

SEQ ID NO: 36574 - DNA, 20 bp, synthetic construct
  source 1..20: mol_type = other DNA
ctgcgaggtgaagggcagtc

SEQ ID NO: 36575 - DNA, 20 bp, synthetic construct
  source 1..20: mol_type = other DNA
gtgacgggggcccccatgga

SEQ ID NO: 36576 - DNA, 20 bp, synthetic construct
  source 1..20: mol_type = other DNA
catccctgggcaggtcgccg

SEQ ID NO: 36577 - DNA, 20 bp, synthetic construct
  source 1..20: mol_type = other DNA
cacaaacttactttgacctg

SEQ ID NO: 36578 - DNA, 20 bp, synthetic construct
  source 1..20: mol_type = other DNA
catagacctggaccagccag

SEQ ID NO: 36579 - DNA, 20 bp, synthetic construct
  source 1..20: mol_type = other DNA
tgccagcaggatgccccggc

SEQ ID NO: 36580 - DNA, 20 bp, synthetic construct
  source 1..20: mol_type = other DNA
ctggaagagggggctggaag

SEQ ID NO: 36581 - DNA, 20 bp, synthetic construct
  source 1..20: mol_type = other DNA
gcagtgtctgctgagtgact

SEQ ID NO: 36582 - DNA, 20 bp, synthetic construct
  source 1..20: mol_type = other DNA
caaccagccagaaattgctg

SEQ ID NO: 36583 - DNA, 20 bp, synthetic construct
  source 1..20: mol_type = other DNA
tgtgcgggcaccatgccctg

SEQ ID NO: 36584 - DNA, 20 bp, synthetic construct
  source 1..20: mol_type = other DNA
caaatcttgggagaggctta

SEQ ID NO: 36585 - DNA, 20 bp, synthetic construct
  source 1..20: mol_type = other DNA
ttctgaatcatgtctgataa

SEQ ID NO: 36586 - DNA, 20 bp, synthetic construct
  source 1..20: mol_type = other DNA
aatctgggacacggctcggc

SEQ ID NO: 36587 - DNA, 20 bp, synthetic construct
  source 1..20: mol_type = other DNA
ggcttgatgggcctcttggc

SEQ ID NO: 36588 - DNA, 20 bp, synthetic construct
  source 1..20: mol_type = other DNA
agaatatcagttagtacaag

SEQ ID NO: 36589 - DNA, 20 bp, synthetic construct
  source 1..20: mol_type = other DNA
ttttacagaaacatgatcag

SEQ ID NO: 36590 - DNA, 20 bp, synthetic construct
  source 1..20: mol_type = other DNA
agctcacgcaggccgtgcag

SEQ ID NO: 36591 - DNA, 20 bp, synthetic construct
  source 1..20: mol_type = other DNA
agaaggtgggggccagggca

SEQ ID NO: 36592 - DNA, 20 bp, synthetic construct
  source 1..20: mol_type = other DNA
caaggagaacggcttcggcc

SEQ ID NO: 36593 - DNA, 20 bp, synthetic construct
  source 1..20: mol_type = other DNA
taaaacctgggcaagagaga

SEQ ID NO: 36594 - DNA, 20 bp, synthetic construct
  source 1..20: mol_type = other DNA
atagtttctcaagttcagct

SEQ ID NO: 36595 - DNA, 20 bp, synthetic construct
  source 1..20: mol_type = other DNA
ccaggagaggtgagtaagct

SEQ ID NO: 36596 - DNA, 20 bp, synthetic construct
  source 1..20: mol_type = other DNA
ctacatggaaaacaagcctc

SEQ ID NO: 36597 - DNA, 20 bp, synthetic construct
  source 1..20: mol_type = other DNA
ctgcagtgtacctgacgtcc

SEQ ID NO: 36598 - DNA, 20 bp, synthetic construct
  source 1..20: mol_type = other DNA
ggtcgttgaacctggccacc

SEQ ID NO: 36599 - DNA, 20 bp, synthetic construct
  source 1..20: mol_type = other DNA
ggcctcaggttctcggcccc

SEQ ID NO: 36600 - DNA, 20 bp, synthetic construct
  source 1..20: mol_type = other DNA
tcctgtacccgaataaccat

SEQ ID NO: 36601 - DNA, 20 bp, synthetic construct
  source 1..20: mol_type = other DNA
gggggctgaggtggtggtgg

SEQ ID NO: 36602 - DNA, 20 bp, synthetic construct
  source 1..20: mol_type = other DNA
ggtaggagaggtaagcgacc

SEQ ID NO: 36603 - DNA, 20 bp, synthetic construct
  source 1..20: mol_type = other DNA
agggatacgggtactggccc

SEQ ID NO: 36604 - DNA, 20 bp, synthetic construct
  source 1..20: mol_type = other DNA
tttcgtgccgatgtaacaca

SEQ ID NO: 36605 - DNA, 20 bp, synthetic construct
  source 1..20: mol_type = other DNA
aaacgctggaggaattagac

SEQ ID NO: 36606 - DNA, 20 bp, synthetic construct
  source 1..20: mol_type = other DNA
accagattcacaagctgctg

SEQ ID NO: 36607 - DNA, 20 bp, synthetic construct
  source 1..20: mol_type = other DNA
ctttaagcttaagcccaggt

SEQ ID NO: 36608 - DNA, 20 bp, synthetic construct
  source 1..20: mol_type = other DNA
tagcagtgacgaggatgatg

SEQ ID NO: 36609 - DNA, 20 bp, synthetic construct
  source 1..20: mol_type = other DNA
tcatggctgggctctccagg

SEQ ID NO: 36610 - DNA, 20 bp, synthetic construct
  source 1..20: mol_type = other DNA
ggcactgctggatgacagca

SEQ ID NO: 36611 - DNA, 20 bp, synthetic construct
  source 1..20: mol_type = other DNA
gtgagtggcggtgcgtttgc

SEQ ID NO: 36612 - DNA, 20 bp, synthetic construct
  source 1..20: mol_type = other DNA
ttcctccccggagtccctgc

SEQ ID NO: 36613 - DNA, 20 bp, synthetic construct
  source 1..20: mol_type = other DNA
gctggaaaagactgaaggtg

SEQ ID NO: 36614 - DNA, 20 bp, synthetic construct
  source 1..20: mol_type = other DNA
aacgacttggcccgagtact

SEQ ID NO: 36615 - DNA, 20 bp, synthetic construct
  source 1..20: mol_type = other DNA
gcaggctgccagtggctgca

SEQ ID NO: 36616 - DNA, 20 bp, synthetic construct
  source 1..20: mol_type = other DNA
cacaggctcactcgtaccac

SEQ ID NO: 36617 - DNA, 20 bp, synthetic construct
  source 1..20: mol_type = other DNA
agactactggcgagaactgg

SEQ ID NO: 36618 - DNA, 20 bp, synthetic construct
  source 1..20: mol_type = other DNA
tccagctgactttggcatct

SEQ ID NO: 36619 - DNA, 20 bp, synthetic construct
  source 1..20: mol_type = other DNA
gagacactgacttctgctgc

SEQ ID NO: 36620 - DNA, 20 bp, synthetic construct
  source 1..20: mol_type = other DNA
atcaacagctttagctgtca

SEQ ID NO: 36621 - DNA, 20 bp, synthetic construct
  source 1..20: mol_type = other DNA
gagaacagactccgcagatc

SEQ ID NO: 36622 - DNA, 20 bp, synthetic construct
  source 1..20: mol_type = other DNA
ttcacaaggcagggctttca

SEQ ID NO: 36623 - DNA, 20 bp, synthetic construct
  source 1..20: mol_type = other DNA
aggagcggaagacggagttg

SEQ ID NO: 36624 - DNA, 20 bp, synthetic construct
  source 1..20: mol_type = other DNA
ccagacaggcacgttgggtg

SEQ ID NO: 36625 - DNA, 20 bp, synthetic construct
  source 1..20: mol_type = other DNA
agggtaccggaagctggtga

SEQ ID NO: 36626 - DNA, 20 bp, synthetic construct
  source 1..20: mol_type = other DNA
ccaggatggcggcaaccgca

SEQ ID NO: 36627 - DNA, 20 bp, synthetic construct
  source 1..20: mol_type = other DNA
gctacaaggctgatggagaa

SEQ ID NO: 36628 - DNA, 20 bp, synthetic construct
  source 1..20: mol_type = other DNA
gggccatggcgcggcgggcg

SEQ ID NO: 36629 - DNA, 20 bp, synthetic construct
  source 1..20: mol_type = other DNA
gcagtttctgtttaagagat

SEQ ID NO: 36630 - DNA, 20 bp, synthetic construct
  source 1..20: mol_type = other DNA
gacacataccgtgacctcca

SEQ ID NO: 36631 - DNA, 20 bp, synthetic construct
  source 1..20: mol_type = other DNA
gcgagtgtccctttccttcc

SEQ ID NO: 36632 - DNA, 20 bp, synthetic construct
  source 1..20: mol_type = other DNA
atccgcaagaccaggcctga

SEQ ID NO: 36633 - DNA, 20 bp, synthetic construct
  source 1..20: mol_type = other DNA
ctttggcactcctgacaaat

SEQ ID NO: 36634 - DNA, 20 bp, synthetic construct
  source 1..20: mol_type = other DNA
atcatcatctgtgaggaggg

SEQ ID NO: 36635 - DNA, 20 bp, synthetic construct
  source 1..20: mol_type = other DNA
cacttcgactgaggaggagc

SEQ ID NO: 36636 - DNA, 20 bp, synthetic construct
  source 1..20: mol_type = other DNA
acagacagatcggtaagcct

SEQ ID NO: 36637 - DNA, 20 bp, synthetic construct
  source 1..20: mol_type = other DNA
tttcaaaacccaaaggacca

SEQ ID NO: 36638 - DNA, 20 bp, synthetic construct
  source 1..20: mol_type = other DNA
ttcaggagacatgaaacagc

SEQ ID NO: 36639 - DNA, 20 bp, synthetic construct
  source 1..20: mol_type = other DNA
caattctcggaggtgttgct

SEQ ID NO: 36640 - DNA, 20 bp, synthetic construct
  source 1..20: mol_type = other DNA
ccaccgctgccacccccgcg

SEQ ID NO: 36641 - DNA, 20 bp, synthetic construct
  source 1..20: mol_type = other DNA
caaaaatctgtacaagtgtg

SEQ ID NO: 36642 - DNA, 20 bp, synthetic construct
  source 1..20: mol_type = other DNA
gtagattataagtgtaaaaa

SEQ ID NO: 36643 - DNA, 20 bp, synthetic construct
  source 1..20: mol_type = other DNA
aaggctataaatacctcggc

SEQ ID NO: 36644 - DNA, 20 bp, synthetic construct
  source 1..20: mol_type = other DNA
catactattatctgatgtca

SEQ ID NO: 36645 - DNA, 20 bp, synthetic construct
  source 1..20: mol_type = other DNA
aggtatgccagtggcttctc

SEQ ID NO: 36646 - DNA, 20 bp, synthetic construct
  source 1..20: mol_type = other DNA
gcatgaggtcgcccccagct

SEQ ID NO: 36647 - DNA, 20 bp, synthetic construct
  source 1..20: mol_type = other DNA
gagccccttcatggccacca

SEQ ID NO: 36648 - DNA, 20 bp, synthetic construct
  source 1..20: mol_type = other DNA
tcggcccagtcgcaagaacc

SEQ ID NO: 36649 - DNA, 20 bp, synthetic construct
  source 1..20: mol_type = other DNA
aaagcccttgcagccctcgc

SEQ ID NO: 36650 - DNA, 20 bp, synthetic construct
  source 1..20: mol_type = other DNA
ccacaaccaccagctaaaag

SEQ ID NO: 36651 - DNA, 20 bp, synthetic construct
  source 1..20: mol_type = other DNA
attttcgtggagaaagcccc

SEQ ID NO: 36652 - DNA, 20 bp, synthetic construct
  source 1..20: mol_type = other DNA
ccaggacaccaaaggctgcc

SEQ ID NO: 36653 - DNA, 20 bp, synthetic construct
  source 1..20: mol_type = other DNA
ggcaagtacttacgcctcct

SEQ ID NO: 36654 - DNA, 20 bp, synthetic construct
  source 1..20: mol_type = other DNA
gtccttctatgcagcagact

SEQ ID NO: 36655 - DNA, 20 bp, synthetic construct
  source 1..20: mol_type = other DNA
ttctgttacagggacctgtg

SEQ ID NO: 36656 - DNA, 20 bp, synthetic construct
  source 1..20: mol_type = other DNA
gcagccatgagtctccaagg

SEQ ID NO: 36657 - DNA, 20 bp, synthetic construct
  source 1..20: mol_type = other DNA
ccagcgctacttctgccgcg

SEQ ID NO: 36658 - DNA, 20 bp, synthetic construct
  source 1..20: mol_type = other DNA
aagtgacaagagactggaag

SEQ ID NO: 36659 - DNA, 20 bp, synthetic construct
  source 1..20: mol_type = other DNA
acgaaggacccgaagcctgc

SEQ ID NO: 36660 - DNA, 20 bp, synthetic construct
  source 1..20: mol_type = other DNA
cccaataatcttaacaggta

SEQ ID NO: 36661 - DNA, 20 bp, synthetic construct
  source 1..20: mol_type = other DNA
ctggcactctttctccttgt

SEQ ID NO: 36662 - DNA, 20 bp, synthetic construct
  source 1..20: mol_type = other DNA
ccaactggcagcccgtgcag

SEQ ID NO: 36663 - DNA, 20 bp, synthetic construct
  source 1..20: mol_type = other DNA
cagagaaccaggacattgac

SEQ ID NO: 36664 - DNA, 20 bp, synthetic construct
  source 1..20: mol_type = other DNA
gcctagccaatattcactgg

SEQ ID NO: 36665 - DNA, 20 bp, synthetic construct
  source 1..20: mol_type = other DNA
cttgatgaccactatatact

SEQ ID NO: 36666 - DNA, 20 bp, synthetic construct
  source 1..20: mol_type = other DNA
accagtttcagaccgaggtc

SEQ ID NO: 36667 - DNA, 20 bp, synthetic construct
  source 1..20: mol_type = other DNA
ctgcttctaggcaccagaga

SEQ ID NO: 36668 - DNA, 20 bp, synthetic construct
  source 1..20: mol_type = other DNA
tgcccaccatgacgccctgc

SEQ ID NO: 36669 - DNA, 20 bp, synthetic construct
  source 1..20: mol_type = other DNA
cactcaccgtggcggacgcc

SEQ ID NO: 36670 - DNA, 20 bp, synthetic construct
  source 1..20: mol_type = other DNA
ccgcgcgccgggctctaccc

SEQ ID NO: 36671 - DNA, 20 bp, synthetic construct
  source 1..20: mol_type = other DNA
cctacattcatcgatccggg

SEQ ID NO: 36672 - DNA, 20 bp, synthetic construct
  source 1..20: mol_type = other DNA
gcggtgggaggaggtgtgcc

SEQ ID NO: 36673 - DNA, 20 bp, synthetic construct
  source 1..20: mol_type = other DNA
acggagaagttgtttaaggg

SEQ ID NO: 36674 - DNA, 20 bp, synthetic construct
  source 1..20: mol_type = other DNA
tccggaacacaatggcatac

SEQ ID NO: 36675 - DNA, 20 bp, synthetic construct
  source 1..20: mol_type = other DNA
ggtggcaaatgaaacatcat

SEQ ID NO: 36676 - DNA, 20 bp, synthetic construct
  source 1..20: mol_type = other DNA
ctcttcagcaggaagtaccg

SEQ ID NO: 36677 - DNA, 20 bp, synthetic construct
  source 1..20: mol_type = other DNA
gggacttactctttggggaa

SEQ ID NO: 36678 - DNA, 20 bp, synthetic construct
  source 1..20: mol_type = other DNA
gatcacaaactctgtatcac

SEQ ID NO: 36679 - DNA, 20 bp, synthetic construct
  source 1..20: mol_type = other DNA
tggtgttccaaatccacata

SEQ ID NO: 36680 - DNA, 20 bp, synthetic construct
  source 1..20: mol_type = other DNA
tgcagccagtaactgcaaaa

SEQ ID NO: 36681 - DNA, 20 bp, synthetic construct
  source 1..20: mol_type = other DNA
ccaggctgtgggcatgcagg

SEQ ID NO: 36682 - DNA, 20 bp, synthetic construct
  source 1..20: mol_type = other DNA
gtgctgcccgttgagcacgg

SEQ ID NO: 36683 - DNA, 20 bp, synthetic construct
  source 1..20: mol_type = other DNA
agaacacacgctcccgggac

SEQ ID NO: 36684 - DNA, 20 bp, synthetic construct
  source 1..20: mol_type = other DNA
aacgtaagggctgggagctg

SEQ ID NO: 36685 - DNA, 20 bp, synthetic construct
  source 1..20: mol_type = other DNA
caggtggtgcgggaagccgt

SEQ ID NO: 36686 - DNA, 20 bp, synthetic construct
  source 1..20: mol_type = other DNA
gaacggagaagagattcacg

SEQ ID NO: 36687 - DNA, 20 bp, synthetic construct
  source 1..20: mol_type = other DNA
aggcccagcatgtcctgtgg

SEQ ID NO: 36688 - DNA, 20 bp, synthetic construct
  source 1..20: mol_type = other DNA
cccagagcagccgaccagcc

SEQ ID NO: 36689 - DNA, 20 bp, synthetic construct
  source 1..20: mol_type = other DNA
ctgcccatcatgactttcag

SEQ ID NO: 36690 - DNA, 20 bp, synthetic construct
  source 1..20: mol_type = other DNA
ctcacctagatgaatgaaga

SEQ ID NO: 36691 - DNA, 20 bp, synthetic construct
  source 1..20: mol_type = other DNA
tgtgccacagcccctcagat

SEQ ID NO: 36692 - DNA, 20 bp, synthetic construct
  source 1..20: mol_type = other DNA
aggaggtgagggggtactga

SEQ ID NO: 36693 - DNA, 20 bp, synthetic construct
  source 1..20: mol_type = other DNA
tagaggagccaagtggcctg

SEQ ID NO: 36694 - DNA, 20 bp, synthetic construct
  source 1..20: mol_type = other DNA
cctgcgctggggcggatggt

SEQ ID NO: 36695 - DNA, 20 bp, synthetic construct
  source 1..20: mol_type = other DNA
aaatgcctgattgacatttt

SEQ ID NO: 36696 - DNA, 20 bp, synthetic construct
  source 1..20: mol_type = other DNA
ggaagggaagaaactggccc

SEQ ID NO: 36697 - DNA, 20 bp, synthetic construct
  source 1..20: mol_type = other DNA
ggtgtagctgatgagaaggc

SEQ ID NO: 36698 - DNA, 20 bp, synthetic construct
  source 1..20: mol_type = other DNA
tccaacaatgtgacccaggt

SEQ ID NO: 36699 - DNA, 20 bp, synthetic construct
  source 1..20: mol_type = other DNA
aggtgcagcagatgaaacag

SEQ ID NO: 36700 - DNA, 20 bp, synthetic construct
  source 1..20: mol_type = other DNA
gaagtagccgccctggggga

SEQ ID NO: 36701 - DNA, 20 bp, synthetic construct
  source 1..20: mol_type = other DNA
gagaaccaggacattgactg

SEQ ID NO: 36702 - DNA, 20 bp, synthetic construct
  source 1..20: mol_type = other DNA
gccacgaagtactgatgcag

SEQ ID NO: 36703 - DNA, 20 bp, synthetic construct
  source 1..20: mol_type = other DNA
agtttctcataattcatctt

SEQ ID NO: 36704 - DNA, 20 bp, synthetic construct
  source 1..20: mol_type = other DNA
tcagacagaggcgcgccacg

SEQ ID NO: 36705 - DNA, 20 bp, synthetic construct
  source 1..20: mol_type = other DNA
ggcccaagtgggacagctgc

SEQ ID NO: 36706 - DNA, 20 bp, synthetic construct
  source 1..20: mol_type = other DNA
gggcccgctctggttctgcg

SEQ ID NO: 36707 - DNA, 20 bp, synthetic construct
  source 1..20: mol_type = other DNA
gcagctggtgagagagtgta

SEQ ID NO: 36708 - DNA, 20 bp, synthetic construct
  source 1..20: mol_type = other DNA
aagcaccttcaggcctccca

SEQ ID NO: 36709 - DNA, 20 bp, synthetic construct
  source 1..20: mol_type = other DNA
ggccatggcgggctggatcc

SEQ ID NO: 36710 - DNA, 20 bp, synthetic construct
  source 1..20: mol_type = other DNA
cgacctgaaaaaccagatgc

SEQ ID NO: 36711 - DNA, 20 bp, synthetic construct
  source 1..20: mol_type = other DNA
cgtggggcgccccaggcacc

SEQ ID NO: 36712 - DNA, 20 bp, synthetic construct
  source 1..20: mol_type = other DNA
gcaagtttctcaatagtaga

SEQ ID NO: 36713 - DNA, 20 bp, synthetic construct
  source 1..20: mol_type = other DNA
gcaggcgtggcggtgtttac

SEQ ID NO: 36714 - DNA, 20 bp, synthetic construct
  source 1..20: mol_type = other DNA
ggcgcctcccgaggacgcag

SEQ ID NO: 36715 - DNA, 20 bp, synthetic construct
  source 1..20: mol_type = other DNA
cgaagcctgtcatttgtgcc

SEQ ID NO: 36716 - DNA, 20 bp, synthetic construct
  source 1..20: mol_type = other DNA
cctgtaaaataagcatgtct

SEQ ID NO: 36717 - DNA, 20 bp, synthetic construct
  source 1..20: mol_type = other DNA
caagctcatcgacttcgggt

SEQ ID NO: 36718 - DNA, 20 bp, synthetic construct
  source 1..20: mol_type = other DNA
atgcttgttctgtatccaga

SEQ ID NO: 36719 - DNA, 20 bp, synthetic construct
  source 1..20: mol_type = other DNA
acaggtagagttggctttgt

SEQ ID NO: 36720 - DNA, 20 bp, synthetic construct
  source 1..20: mol_type = other DNA
taaagcccacagccaaatga

SEQ ID NO: 36721 - DNA, 20 bp, synthetic construct
  source 1..20: mol_type = other DNA
gaggagtccacttggcagtg

SEQ ID NO: 36722 - DNA, 20 bp, synthetic construct
  source 1..20: mol_type = other DNA
cactagacaaagttcacctg

SEQ ID NO: 36723 - DNA, 20 bp, synthetic construct
  source 1..20: mol_type = other DNA
cccagggaggcccacgtgga

SEQ ID NO: 36724 - DNA, 20 bp, synthetic construct
  source 1..20: mol_type = other DNA
attttctagttggcgtttgg

SEQ ID NO: 36725 - DNA, 20 bp, synthetic construct
  source 1..20: mol_type = other DNA
ctcagttccactttaccagc

SEQ ID NO: 36726 - DNA, 20 bp, synthetic construct
  source 1..20: mol_type = other DNA
ggcctggagtggtgtgtcta

SEQ ID NO: 36727 - DNA, 20 bp, synthetic construct
  source 1..20: mol_type = other DNA
gtatgttgtggacgatcaac

SEQ ID NO: 36728 - DNA, 20 bp, synthetic construct
  source 1..20: mol_type = other DNA
cagcgcctatctttctcctt

SEQ ID NO: 36729 - DNA, 20 bp, synthetic construct
  source 1..20: mol_type = other DNA
tccacagatgtcgcaggcga

SEQ ID NO: 36730 - DNA, 20 bp, synthetic construct
  source 1..20: mol_type = other DNA
cttctccaccttgatgcgct

SEQ ID NO: 36731 - DNA, 20 bp, synthetic construct
  source 1..20: mol_type = other DNA
cacttaccccagaagactgc

SEQ ID NO: 36732 - DNA, 20 bp, synthetic construct
  source 1..20: mol_type = other DNA
tggcccccgagtttacctgg

SEQ ID NO: 36733 - DNA, 20 bp, synthetic construct
  source 1..20: mol_type = other DNA
cagcactagcagtggcacgg

SEQ ID NO: 36734 - DNA, 20 bp, synthetic construct
  source 1..20: mol_type = other DNA
ggcagaagtaccagtccaag

SEQ ID NO: 36735 - DNA, 20 bp, synthetic construct
  source 1..20: mol_type = other DNA
ctatgagtgcagtcgttaca

SEQ ID NO: 36736 - DNA, 20 bp, synthetic construct
  source 1..20: mol_type = other DNA
catgtcttctcatcatgatg

SEQ ID NO: 36737 - DNA, 20 bp, synthetic construct
  source 1..20: mol_type = other DNA
cacggttttcaggcctctct

SEQ ID NO: 36738 - DNA, 20 bp, synthetic construct
  source 1..20: mol_type = other DNA
tttgcatcttgaatccaggg

SEQ ID NO: 36739 - DNA, 20 bp, synthetic construct
  source 1..20: mol_type = other DNA
ttattatcccctcctccctc

SEQ ID NO: 36740 - DNA, 20 bp, synthetic construct
  source 1..20: mol_type = other DNA
ctctttagtattgattgtgc

SEQ ID NO: 36741 - DNA, 20 bp, synthetic construct
  source 1..20: mol_type = other DNA
cgggcgggccctgggagatg

SEQ ID NO: 36742 - DNA, 20 bp, synthetic construct
  source 1..20: mol_type = other DNA
ggaggctgtggaacatggtg

SEQ ID NO: 36743 - DNA, 20 bp, synthetic construct
  source 1..20: mol_type = other DNA
aagtcctgtaccttgatcac

SEQ ID NO: 36744 - DNA, 20 bp, synthetic construct
  source 1..20: mol_type = other DNA
tcacatcatcagatgagtcc

SEQ ID NO: 36745 - DNA, 20 bp, synthetic construct
  source 1..20: mol_type = other DNA
ttcttgtccttgagctcctc

SEQ ID NO: 36746 - DNA, 20 bp, synthetic construct
  source 1..20: mol_type = other DNA
gaagctggcccagttgcagg

SEQ ID NO: 36747 - DNA, 20 bp, synthetic construct
  source 1..20: mol_type = other DNA
gcactcggcgcaggagctgc

SEQ ID NO: 36748 - DNA, 20 bp, synthetic construct
  source 1..20: mol_type = other DNA
gctcccccacggctgacttg

SEQ ID NO: 36749 - DNA, 20 bp, synthetic construct
  source 1..20: mol_type = other DNA
gatctacaacctgcaggagg

SEQ ID NO: 36750 - DNA, 20 bp, synthetic construct
  source 1..20: mol_type = other DNA
tgggctggacgccatgatgc

SEQ ID NO: 36751 - DNA, 20 bp, synthetic construct
  source 1..20: mol_type = other DNA
gtaggaccttgtgcccacga

SEQ ID NO: 36752 - DNA, 20 bp, synthetic construct
  source 1..20: mol_type = other DNA
aattgaacaacccaggcaga

SEQ ID NO: 36753 - DNA, 20 bp, synthetic construct
  source 1..20: mol_type = other DNA
ctttcggccacagtagtcac

SEQ ID NO: 36754 - DNA, 20 bp, synthetic construct
  source 1..20: mol_type = other DNA
tcttgaagctgctgctgttg

SEQ ID NO: 36755 - DNA, 20 bp, synthetic construct
  source 1..20: mol_type = other DNA
ggataagaaaggtacctctt

SEQ ID NO: 36756 - DNA, 20 bp, synthetic construct
  source 1..20: mol_type = other DNA
ctgtatgtggagcggcttct

SEQ ID NO: 36757 - DNA, 20 bp, synthetic construct
  source 1..20: mol_type = other DNA
gccgctgcgcaagtgccgcc

SEQ ID NO: 36758 - DNA, 20 bp, synthetic construct
  source 1..20: mol_type = other DNA
cggcgaagagtagactcacc

SEQ ID NO: 36759 - DNA, 20 bp, synthetic construct
  source 1..20: mol_type = other DNA
cccttggaagagctttcgac

SEQ ID NO: 36760 - DNA, 20 bp, synthetic construct
  source 1..20: mol_type = other DNA
ctctccagtccagatcgacc

SEQ ID NO: 36761 - DNA, 20 bp, synthetic construct
  source 1..20: mol_type = other DNA
gggaagtgccgctgccaccc

SEQ ID NO: 36762 - DNA, 20 bp, synthetic construct
  source 1..20: mol_type = other DNA
tccattggccaggactgtgg

SEQ ID NO: 36763 - DNA, 20 bp, synthetic construct
  source 1..20: mol_type = other DNA
ggttctgggggtaacgacac

SEQ ID NO: 36764 - DNA, 20 bp, synthetic construct
  source 1..20: mol_type = other DNA
atgcaggaagatcaatggta

SEQ ID NO: 36765 - DNA, 20 bp, synthetic construct
  source 1..20: mol_type = other DNA
tcaagatctactgagtccct

SEQ ID NO: 36766 - DNA, 20 bp, synthetic construct
  source 1..20: mol_type = other DNA
ttgcacgtggccgctaccta

SEQ ID NO: 36767 - DNA, 20 bp, synthetic construct
  source 1..20: mol_type = other DNA
agatgtcctgcacaccatca

SEQ ID NO: 36768 - DNA, 20 bp, synthetic construct
  source 1..20: mol_type = other DNA
gaaggccgacaccctgcacc

SEQ ID NO: 36769 - DNA, 20 bp, synthetic construct
  source 1..20: mol_type = other DNA
acccttcgtgggagttctgc

SEQ ID NO: 36770 - DNA, 20 bp, synthetic construct
  source 1..20: mol_type = other DNA
gaagcacttcctggaaaaga

SEQ ID NO: 36771 - DNA, 20 bp, synthetic construct
  source 1..20: mol_type = other DNA
accccttgaccaagaagaga

SEQ ID NO: 36772 - DNA, 20 bp, synthetic construct
  source 1..20: mol_type = other DNA
catcgatggggctcgcttct

SEQ ID NO: 36773 - DNA, 20 bp, synthetic construct
  source 1..20: mol_type = other DNA
cactgccaggatgttctcga

SEQ ID NO: 36774 - DNA, 20 bp, synthetic construct
  source 1..20: mol_type = other DNA
ggtctatttgcctcgcgtgc

SEQ ID NO: 36775 - DNA, 20 bp, synthetic construct
  source 1..20: mol_type = other DNA
gagtagcatgtcagccagga

SEQ ID NO: 36776 - DNA, 20 bp, synthetic construct
  source 1..20: mol_type = other DNA
tcccgagtagctgggattac

SEQ ID NO: 36777 - DNA, 20 bp, synthetic construct
  source 1..20: mol_type = other DNA
gggcgggccctgggagatgc

SEQ ID NO: 36778 - DNA, 20 bp, synthetic construct
  source 1..20: mol_type = other DNA
gcttctccacctgcggggcc

SEQ ID NO: 36779 - DNA, 20 bp, synthetic construct
  source 1..20: mol_type = other DNA
cagcggcctcaccgggcagg

SEQ ID NO: 36780 - DNA, 20 bp, synthetic construct
  source 1..20: mol_type = other DNA
aacattcagaatatttcaac

SEQ ID NO: 36781 - DNA, 20 bp, synthetic construct
  source 1..20: mol_type = other DNA
gtcagtgctcgggcttcccc

SEQ ID NO: 36782 - DNA, 20 bp, synthetic construct
  source 1..20: mol_type = other DNA
actaggcaaagacctacttc

SEQ ID NO: 36783 - DNA, 20 bp, synthetic construct
  source 1..20: mol_type = other DNA
cactggcgcagcaaggggtg

SEQ ID NO: 36784 - DNA, 20 bp, synthetic construct
  source 1..20: mol_type = other DNA
ccccgagcggagaaccgtcc

SEQ ID NO: 36785 - DNA, 20 bp, synthetic construct
  source 1..20: mol_type = other DNA
tacacagagttatatgtcca

SEQ ID NO: 36786 - DNA, 20 bp, synthetic construct
  source 1..20: mol_type = other DNA
cgggagccagtcagtggagc

SEQ ID NO: 36787 - DNA, 20 bp, synthetic construct
  source 1..20: mol_type = other DNA
catctgcagctcctggagga

SEQ ID NO: 36788 - DNA, 20 bp, synthetic construct
  source 1..20: mol_type = other DNA
ggggatctgactgtgtggtg

SEQ ID NO: 36789 - DNA, 20 bp, synthetic construct
  source 1..20: mol_type = other DNA
cgggagtccaggttccgggg

SEQ ID NO: 36790 - DNA, 20 bp, synthetic construct
  source 1..20: mol_type = other DNA
cacagagggcccttgggcgt

SEQ ID NO: 36791 - DNA, 20 bp, synthetic construct
  source 1..20: mol_type = other DNA
gtcaaactcgtggaggcctg

SEQ ID NO: 36792 - DNA, 20 bp, synthetic construct
  source 1..20: mol_type = other DNA
ccccaccgccatctcgagga

SEQ ID NO: 36793 - DNA, 20 bp, synthetic construct
  source 1..20: mol_type = other DNA
gatgcagtccttgaagctgg

SEQ ID NO: 36794 - DNA, 20 bp, synthetic construct
  source 1..20: mol_type = other DNA
cacgacgacgcctacacccc

SEQ ID NO: 36795 - DNA, 20 bp, synthetic construct
  source 1..20: mol_type = other DNA
tccattaatacaaaacatct

SEQ ID NO: 36796 - DNA, 20 bp, synthetic construct
  source 1..20: mol_type = other DNA
tgatggcgaaggagcctacg

SEQ ID NO: 36797 - DNA, 20 bp, synthetic construct
  source 1..20: mol_type = other DNA
ggccaccgacgccatgctga

SEQ ID NO: 36798 - DNA, 20 bp, synthetic construct
  source 1..20: mol_type = other DNA
cttgctcactgctgctcctc

SEQ ID NO: 36799 - DNA, 20 bp, synthetic construct
  source 1..20: mol_type = other DNA
tgtactcccggaggtcgctc

SEQ ID NO: 36800 - DNA, 20 bp, synthetic construct
  source 1..20: mol_type = other DNA
cttcatgagcggggaggggg

SEQ ID NO: 36801 - DNA, 20 bp, synthetic construct
  source 1..20: mol_type = other DNA
tgactcactgaaagtgaccc

SEQ ID NO: 36802 - DNA, 20 bp, synthetic construct
  source 1..20: mol_type = other DNA
tggcaacaaagttgtgattc

SEQ ID NO: 36803 - DNA, 20 bp, synthetic construct
  source 1..20: mol_type = other DNA
tctggaaggacgctgagctt

SEQ ID NO: 36804 - DNA, 20 bp, synthetic construct
  source 1..20: mol_type = other DNA
cactccgttcatctggtcaa

SEQ ID NO: 36805 - DNA, 20 bp, synthetic construct
  source 1..20: mol_type = other DNA
ggggacaaaggtgatcgtca

SEQ ID NO: 36806 - DNA, 20 bp, synthetic construct
  source 1..20: mol_type = other DNA
cgtgcagataggccatgccc

SEQ ID NO: 36807 - DNA, 20 bp, synthetic construct
  source 1..20: mol_type = other DNA
aggcagatttgtcatgccca

SEQ ID NO: 36808 - DNA, 20 bp, synthetic construct
  source 1..20: mol_type = other DNA
tttaggataccatggccaag

SEQ ID NO: 36809 - DNA, 20 bp, synthetic construct
  source 1..20: mol_type = other DNA
tgcaggcttcgggtccttcg

SEQ ID NO: 36810 - DNA, 20 bp, synthetic construct
  source 1..20: mol_type = other DNA
gagggcacctgagaaggaac

SEQ ID NO: 36811 - DNA, 20 bp, synthetic construct
  source 1..20: mol_type = other DNA
cggagcagccaggagctgga

SEQ ID NO: 36812 - DNA, 20 bp, synthetic construct
  source 1..20: mol_type = other DNA
cgagtatatagtggtcatca

SEQ ID NO: 36813 - DNA, 20 bp, synthetic construct
  source 1..20: mol_type = other DNA
gtgtattgaagttctgtagt

SEQ ID NO: 36814 - DNA, 20 bp, synthetic construct
  source 1..20: mol_type = other DNA
tcgagcagatcgacaagtcc

SEQ ID NO: 36815 - DNA, 20 bp, synthetic construct
  source 1..20: mol_type = other DNA
tcaccagcatggagtttgtc

SEQ ID NO: 36816 - DNA, 20 bp, synthetic construct
  source 1..20: mol_type = other DNA
acaacagagtaccaggtagc

SEQ ID NO: 36817 - DNA, 20 bp, synthetic construct
  source 1..20: mol_type = other DNA
tggtgcccatatccaggtca

SEQ ID NO: 36818 - DNA, 20 bp, synthetic construct
  source 1..20: mol_type = other DNA
tcaaaccaagcacgaggagc

SEQ ID NO: 36819 - DNA, 20 bp, synthetic construct
  source 1..20: mol_type = other DNA
gcgagagcaggcccagcggc

SEQ ID NO: 36820 - DNA, 20 bp, synthetic construct
  source 1..20: mol_type = other DNA
tgcccgcagcgccagatgca

SEQ ID NO: 36821 - DNA, 20 bp, synthetic construct
  source 1..20: mol_type = other DNA
tccccttcatcacctaaaag

SEQ ID NO: 36822 - DNA, 20 bp, synthetic construct
  source 1..20: mol_type = other DNA
caatcctaagcgatactatg

SEQ ID NO: 36823 - DNA, 20 bp, synthetic construct
  source 1..20: mol_type = other DNA
tccacttacctcgcccactg

SEQ ID NO: 36824 - DNA, 20 bp, synthetic construct
  source 1..20: mol_type = other DNA
caccttctcccagcccttcg

SEQ ID NO: 36825 - DNA, 20 bp, synthetic construct
  source 1..20: mol_type = other DNA
gatttctatgacctgtatgg

SEQ ID NO: 36826 - DNA, 20 bp, synthetic construct
  source 1..20: mol_type = other DNA
cagaccatgtcggtgattgg

SEQ ID NO: 36827 - DNA, 20 bp, synthetic construct
  source 1..20: mol_type = other DNA
ggcccaccttggtcacgccc

SEQ ID NO: 36828 - DNA, 20 bp, synthetic construct
  source 1..20: mol_type = other DNA
aggtctggctggctcagggg

SEQ ID NO: 36829 - DNA, 20 bp, synthetic construct
  source 1..20: mol_type = other DNA
agtaaaacctcgccagcgcc

SEQ ID NO: 36830 - DNA, 20 bp, synthetic construct
  source 1..20: mol_type = other DNA
attactcacattgttgagat

SEQ ID NO: 36831 - DNA, 20 bp, synthetic construct
  source 1..20: mol_type = other DNA
ttctggatggtacatgacag

SEQ ID NO: 36832 - DNA, 20 bp, synthetic construct
  source 1..20: mol_type = other DNA
gcatggcatcgtcaccaact

SEQ ID NO: 36833 - DNA, 20 bp, synthetic construct
  source 1..20: mol_type = other DNA
tccactgggccaagtagtgc

SEQ ID NO: 36834 - DNA, 20 bp, synthetic construct
  source 1..20: mol_type = other DNA
tggagatccagatcatgaga

SEQ ID NO: 36835 - DNA, 20 bp, synthetic construct
  source 1..20: mol_type = other DNA
cacatcaagattcagaacac

SEQ ID NO: 36836 - DNA, 20 bp, synthetic construct
  source 1..20: mol_type = other DNA
aactttgaatttccatggtg

SEQ ID NO: 36837 - DNA, 20 bp, synthetic construct
  source 1..20: mol_type = other DNA
tcttgacaaagcagcctgga

SEQ ID NO: 36838 - DNA, 20 bp, synthetic construct
  source 1..20: mol_type = other DNA
agtcatacaccttaaccaag

SEQ ID NO: 36839 - DNA, 20 bp, synthetic construct
  source 1..20: mol_type = other DNA
agctggcattctgcaggcag

SEQ ID NO: 36840 - DNA, 20 bp, synthetic construct
  source 1..20: mol_type = other DNA
agaagcgggcggtgaatttg

SEQ ID NO: 36841 - DNA, 20 bp, synthetic construct
  source 1..20: mol_type = other DNA
cggaggggcaaggggcacga

SEQ ID NO: 36842 - DNA, 20 bp, synthetic construct
  source 1..20: mol_type = other DNA
caagcaggagtacgacgagt

SEQ ID NO: 36843 - DNA, 20 bp, synthetic construct
  source 1..20: mol_type = other DNA
caaccagcccctgattgtgg

SEQ ID NO: 36844 - DNA, 20 bp, synthetic construct
  source 1..20: mol_type = other DNA
ccagacggagccgtaggcgc

SEQ ID NO: 36845 - DNA, 20 bp, synthetic construct
  source 1..20: mol_type = other DNA
atggtgtcactggcctgcac

SEQ ID NO: 36846 - DNA, 20 bp, synthetic construct
  source 1..20: mol_type = other DNA
gaggcacaggagctggcatc

SEQ ID NO: 36847 - DNA, 20 bp, synthetic construct
  source 1..20: mol_type = other DNA
aagacccatttacctgttgg

SEQ ID NO: 36848 - DNA, 20 bp, synthetic construct
  source 1..20: mol_type = other DNA
gagaaggggctgagattcca

SEQ ID NO: 36849 - DNA, 20 bp, synthetic construct
  source 1..20: mol_type = other DNA
cttgggcctgtccccgtcct

SEQ ID NO: 36850 - DNA, 20 bp, synthetic construct
  source 1..20: mol_type = other DNA
atgtgcagaaagacctggag

SEQ ID NO: 36851 - DNA, 20 bp, synthetic construct
  source 1..20: mol_type = other DNA
tgccacccctcgaccgaagc

SEQ ID NO: 36852 - DNA, 20 bp, synthetic construct
  source 1..20: mol_type = other DNA
tgcgttcacaaacctgcaga

SEQ ID NO: 36853 - DNA, 20 bp, synthetic construct
  source 1..20: mol_type = other DNA
agcagctctgaggcccacgg

SEQ ID NO: 36854 - DNA, 20 bp, synthetic construct
  source 1..20: mol_type = other DNA
gctgcaggagaagcggcaga

SEQ ID NO: 36855 - DNA, 20 bp, synthetic construct
  source 1..20: mol_type = other DNA
aaggtacctgttccagttct

SEQ ID NO: 36856 - DNA, 20 bp, synthetic construct
  source 1..20: mol_type = other DNA
tctgggcacagaggttggac

SEQ ID NO: 36857 - DNA, 20 bp, synthetic construct
  source 1..20: mol_type = other DNA
aggagctggaaggaagctgc

SEQ ID NO: 36858 - DNA, 20 bp, synthetic construct
  source 1..20: mol_type = other DNA
ccagaccgcagtgcaagtgg

SEQ ID NO: 36859 - DNA, 20 bp, synthetic construct
  source 1..20: mol_type = other DNA
cgcgcgtcgtgctgcccgta

SEQ ID NO: 36860 - DNA, 20 bp, synthetic construct
  source 1..20: mol_type = other DNA
gttccagggcatgctggatg

SEQ ID NO: 36861 - DNA, 20 bp, synthetic construct
  source 1..20: mol_type = other DNA
ccaagacatcatggcctatc

SEQ ID NO: 36862 - DNA, 20 bp, synthetic construct
  source 1..20: mol_type = other DNA
ggaggaccaggagctgctgc

SEQ ID NO: 36863 - DNA, 20 bp, synthetic construct
  source 1..20: mol_type = other DNA
ccagctgtaccgccagtgga

SEQ ID NO: 36864 - DNA, 20 bp, synthetic construct
  source 1..20: mol_type = other DNA
gggacacattcacatactcc

SEQ ID NO: 36865 - DNA, 20 bp, synthetic construct
  source 1..20: mol_type = other DNA
acccacactcgaattcactc

SEQ ID NO: 36866 - DNA, 20 bp, synthetic construct
  source 1..20: mol_type = other DNA
ttccccaaggaagacagccc

SEQ ID NO: 36867 - DNA, 20 bp, synthetic construct
  source 1..20: mol_type = other DNA
acggatgccgtcctccagga

SEQ ID NO: 36868 - DNA, 20 bp, synthetic construct
  source 1..20: mol_type = other DNA
gccagcttttcagcagtctc

SEQ ID NO: 36869 - DNA, 20 bp, synthetic construct
  source 1..20: mol_type = other DNA
tctggaaggtgcagatgagg

SEQ ID NO: 36870 - DNA, 20 bp, synthetic construct
  source 1..20: mol_type = other DNA
caaatgggcaagccttgcgg

SEQ ID NO: 36871 - DNA, 20 bp, synthetic construct
  source 1..20: mol_type = other DNA
ctacgccttcgagctgagct

SEQ ID NO: 36872 - DNA, 20 bp, synthetic construct
  source 1..20: mol_type = other DNA
atcataaccaaaggaggtgg

SEQ ID NO: 36873 - DNA, 20 bp, synthetic construct
  source 1..20: mol_type = other DNA
taccgttcttggagacaaac

SEQ ID NO: 36874 - DNA, 20 bp, synthetic construct
  source 1..20: mol_type = other DNA
cggcggattggagccttcgt

SEQ ID NO: 36875 - DNA, 20 bp, synthetic construct
  source 1..20: mol_type = other DNA
ccactgggatgtgccagtcg

SEQ ID NO: 36876 - DNA, 20 bp, synthetic construct
  source 1..20: mol_type = other DNA
ccttgcggtggagtttattc

SEQ ID NO: 36877 - DNA, 20 bp, synthetic construct
  source 1..20: mol_type = other DNA
tcacagatgacatttgccaa

SEQ ID NO: 36878 - DNA, 20 bp, synthetic construct
  source 1..20: mol_type = other DNA
agccagtgttgagtttttgc

SEQ ID NO: 36879 - DNA, 20 bp, synthetic construct
  source 1..20: mol_type = other DNA
aggagctgagcttgccttcc

SEQ ID NO: 36880 - DNA, 20 bp, synthetic construct
  source 1..20: mol_type = other DNA
aggggttggtccgttgggat

SEQ ID NO: 36881 - DNA, 20 bp, synthetic construct
  source 1..20: mol_type = other DNA
caccacgttacagctggagg

SEQ ID NO: 36882 - DNA, 20 bp, synthetic construct
  source 1..20: mol_type = other DNA
ccacctggtactgcgactcc

SEQ ID NO: 36883 - DNA, 20 bp, synthetic construct
  source 1..20: mol_type = other DNA
aagcacctctcggagttcca

SEQ ID NO: 36884 - DNA, 20 bp, synthetic construct
  source 1..20: mol_type = other DNA
agtacatcctggacaaggtg

SEQ ID NO: 36885 - DNA, 20 bp, synthetic construct
  source 1..20: mol_type = other DNA
cagctgtgaggcattgaact

SEQ ID NO: 36886 - DNA, 20 bp, synthetic construct
  source 1..20: mol_type = other DNA
tttctatggggagaggatga

SEQ ID NO: 36887 - DNA, 20 bp, synthetic construct
  source 1..20: mol_type = other DNA
gcccaccatgacgccctgca

SEQ ID NO: 36888 - DNA, 20 bp, synthetic construct
  source 1..20: mol_type = other DNA
actagaaatacatctgtttg

SEQ ID NO: 36889 - DNA, 20 bp, synthetic construct
  source 1..20: mol_type = other DNA
atgtggccacacgttggtac

SEQ ID NO: 36890 - DNA, 20 bp, synthetic construct
  source 1..20: mol_type = other DNA
ttgttcgaatatttaaagac

SEQ ID NO: 36891 - DNA, 20 bp, synthetic construct
  source 1..20: mol_type = other DNA
cctcgaagaagacgagggtc

SEQ ID NO: 36892 - DNA, 20 bp, synthetic construct
  source 1..20: mol_type = other DNA
ctggatggctgccgaagagc

SEQ ID NO: 36893 - DNA, 20 bp, synthetic construct
  source 1..20: mol_type = other DNA
cctgaccgagtttccgtagt

SEQ ID NO: 36894 - DNA, 20 bp, synthetic construct
  source 1..20: mol_type = other DNA
tgggaccctcagcagagagg

SEQ ID NO: 36895 - DNA, 20 bp, synthetic construct
  source 1..20: mol_type = other DNA
tttgtggcctcagagtgagt

SEQ ID NO: 36896 - DNA, 20 bp, synthetic construct
  source 1..20: mol_type = other DNA
gcccacacgaggacgcacac

SEQ ID NO: 36897 - DNA, 20 bp, synthetic construct
  source 1..20: mol_type = other DNA
ggcccggtccagcaggaatt

SEQ ID NO: 36898 - DNA, 20 bp, synthetic construct
  source 1..20: mol_type = other DNA
catctctgtgctgtcactgt

SEQ ID NO: 36899 - DNA, 20 bp, synthetic construct
  source 1..20: mol_type = other DNA
caaaatgaagcctttgtggc

SEQ ID NO: 36900 - DNA, 20 bp, synthetic construct
  source 1..20: mol_type = other DNA
ggacatcttggatgagctcc

SEQ ID NO: 36901 - DNA, 20 bp, synthetic construct
  source 1..20: mol_type = other DNA
ttgttcctgagagtgaaggt

SEQ ID NO: 36902 - DNA, 20 bp, synthetic construct
  source 1..20: mol_type = other DNA
ttacttcttcttccacctcc

SEQ ID NO: 36903 - DNA, 20 bp, synthetic construct
  source 1..20: mol_type = other DNA
gcttcatcttgcggtatagc

SEQ ID NO: 36904 - DNA, 20 bp, synthetic construct
  source 1..20: mol_type = other DNA
agcaagcaagggagctgtac

SEQ ID NO: 36905 - DNA, 20 bp, synthetic construct
  source 1..20: mol_type = other DNA
agcctaaaggaagaacacat

SEQ ID NO: 36906 - DNA, 20 bp, synthetic construct
  source 1..20: mol_type = other DNA
cagcttgacagacactatgg

SEQ ID NO: 36907 - DNA, 20 bp, synthetic construct
  source 1..20: mol_type = other DNA
tcatcaagctcgctgcttcc

SEQ ID NO: 36908 - DNA, 20 bp, synthetic construct
  source 1..20: mol_type = other DNA
ggggcctcattcacccagaa

SEQ ID NO: 36909 - DNA, 20 bp, synthetic construct
  source 1..20: mol_type = other DNA
agacacccgaatattcccat

SEQ ID NO: 36910 - DNA, 20 bp, synthetic construct
  source 1..20: mol_type = other DNA
gcagcaaatctccaaaatga

SEQ ID NO: 36911 - DNA, 20 bp, synthetic construct
  source 1..20: mol_type = other DNA
gcgctgggcggcatatgctg

SEQ ID NO: 36912 - DNA, 20 bp, synthetic construct
  source 1..20: mol_type = other DNA
ctgatcaactgcaggaacac

SEQ ID NO: 36913 - DNA, 20 bp, synthetic construct
  source 1..20: mol_type = other DNA
ctggaagaacaagaagaaaa

SEQ ID NO: 36914 - DNA, 20 bp, synthetic construct
  source 1..20: mol_type = other DNA
ttatccggtccgtccactgg

SEQ ID NO: 36915 - DNA, 20 bp, synthetic construct
  source 1..20: mol_type = other DNA
cccaacactcctattcaggt

SEQ ID NO: 36916 - DNA, 20 bp, synthetic construct
  source 1..20: mol_type = other DNA
tacaacggccaggtctgcgg

SEQ ID NO: 36917 - DNA, 20 bp, synthetic construct
  source 1..20: mol_type = other DNA
ctctgggaaatctgctacaa

SEQ ID NO: 36918 - DNA, 20 bp, synthetic construct
  source 1..20: mol_type = other DNA
ggtggcggtgctgaggcacc

SEQ ID NO: 36919 - DNA, 20 bp, synthetic construct
  source 1..20: mol_type = other DNA
aaggggctcacctttgggtc

SEQ ID NO: 36920 - DNA, 20 bp, synthetic construct
  source 1..20: mol_type = other DNA
cagagtggacgaaaaccgct

SEQ ID NO: 36921 - DNA, 20 bp, synthetic construct
  source 1..20: mol_type = other DNA
gcaggtagtcaaaggtgggc

SEQ ID NO: 36922 - DNA, 20 bp, synthetic construct
  source 1..20: mol_type = other DNA
ctgatgctggaccgtctgag

SEQ ID NO: 36923 - DNA, 20 bp, synthetic construct
  source 1..20: mol_type = other DNA
gcctccggcccgagcggcgg

SEQ ID NO: 36924 - DNA, 20 bp, synthetic construct
  source 1..20: mol_type = other DNA
actcgtaagtggcggaggcc

SEQ ID NO: 36925 - DNA, 20 bp, synthetic construct
  source 1..20: mol_type = other DNA
agagtactggcttccaagaa

SEQ ID NO: 36926 - DNA, 20 bp, synthetic construct
  source 1..20: mol_type = other DNA
tgagggcttgaattctgcct

SEQ ID NO: 36927 - DNA, 20 bp, synthetic construct
  source 1..20: mol_type = other DNA
ggcaaggtaagctaatgcac

SEQ ID NO: 36928 - DNA, 20 bp, synthetic construct
  source 1..20: mol_type = other DNA
tttgagcacaccatccatgt

SEQ ID NO: 36929 - DNA, 20 bp, synthetic construct
  source 1..20: mol_type = other DNA
gagccgccgcgagaagtcca

SEQ ID NO: 36930 - DNA, 20 bp, synthetic construct
  source 1..20: mol_type = other DNA
ggggatatgctcagcaacgt

SEQ ID NO: 36931 - DNA, 20 bp, synthetic construct
  source 1..20: mol_type = other DNA
atcaacagctttagctgcca

SEQ ID NO: 36932 - DNA, 20 bp, synthetic construct
  source 1..20: mol_type = other DNA
gtgacagtcaggaaatggta

SEQ ID NO: 36933 - DNA, 20 bp, synthetic construct
  source 1..20: mol_type = other DNA
gttccaggagctcaacgagc

SEQ ID NO: 36934 - DNA, 20 bp, synthetic construct
  source 1..20: mol_type = other DNA
taggccatgccctggggacg

SEQ ID NO: 36935 - DNA, 20 bp, synthetic construct
  source 1..20: mol_type = other DNA
atggatttggagcatcaacg

SEQ ID NO: 36936 - DNA, 20 bp, synthetic construct
  source 1..20: mol_type = other DNA
tggggaaacccttagccacc

SEQ ID NO: 36937 - DNA, 20 bp, synthetic construct
  source 1..20: mol_type = other DNA
ggggagaggagaggtaggct

SEQ ID NO: 36938 - DNA, 20 bp, synthetic construct
  source 1..20: mol_type = other DNA
gggccgggcgcagagtgcca

SEQ ID NO: 36939 - DNA, 20 bp, synthetic construct
  source 1..20: mol_type = other DNA
caaagggaaatcaccctgaa

SEQ ID NO: 36940 - DNA, 20 bp, synthetic construct
  source 1..20: mol_type = other DNA
acttgtgtgcccgacggagc

SEQ ID NO: 36941 - DNA, 20 bp, synthetic construct
  source 1..20: mol_type = other DNA
gccccggcccacagtcaacg

SEQ ID NO: 36942 - DNA, 20 bp, synthetic construct
  source 1..20: mol_type = other DNA
acgggaatggcagtgctgga

SEQ ID NO: 36943 - DNA, 20 bp, synthetic construct
  source 1..20: mol_type = other DNA
tgtgctgccccttggggagc

SEQ ID NO: 36944 - DNA, 20 bp, synthetic construct
  source 1..20: mol_type = other DNA
caggtggtgtgggttatagg

SEQ ID NO: 36945 - DNA, 20 bp, synthetic construct
  source 1..20: mol_type = other DNA
ctcggtggggaagggcctgg

SEQ ID NO: 36946 - DNA, 20 bp, synthetic construct
  source 1..20: mol_type = other DNA
cgccctggccgacgcgggcg

SEQ ID NO: 36947 - DNA, 20 bp, synthetic construct
  source 1..20: mol_type = other DNA
ttaccctgctgataaggtgc

SEQ ID NO: 36948 - DNA, 20 bp, synthetic construct
  source 1..20: mol_type = other DNA
cggcattaagagcttcctgc

SEQ ID NO: 36949 - DNA, 20 bp, synthetic construct
  source 1..20: mol_type = other DNA
cctcatgtattggtctctca

SEQ ID NO: 36950 - DNA, 20 bp, synthetic construct
  source 1..20: mol_type = other DNA
gctgcagtctcaggaaatct

SEQ ID NO: 36951 - DNA, 20 bp, synthetic construct
  source 1..20: mol_type = other DNA
gtggacaaggtgcagatcat

SEQ ID NO: 36952 - DNA, 20 bp, synthetic construct
  source 1..20: mol_type = other DNA
gaatcctgttgactatatcc

SEQ ID NO: 36953 - DNA, 20 bp, synthetic construct
  source 1..20: mol_type = other DNA
ccgggaggtgctggagcagg

SEQ ID NO: 36954 - DNA, 20 bp, synthetic construct
  source 1..20: mol_type = other DNA
gcctcatagctgtggtcccg

SEQ ID NO: 36955 - DNA, 20 bp, synthetic construct
  source 1..20: mol_type = other DNA
gggtgacaatttccgtcagc

SEQ ID NO: 36956 - DNA, 20 bp, synthetic construct
  source 1..20: mol_type = other DNA
ccgtcggtggccctgcgctt

SEQ ID NO: 36957 - DNA, 20 bp, synthetic construct
  source 1..20: mol_type = other DNA
cagcgcagggcgatcttgat

SEQ ID NO: 36958 - DNA, 20 bp, synthetic construct
  source 1..20: mol_type = other DNA
ctacaaggaaaacggaagct

SEQ ID NO: 36959 - DNA, 20 bp, synthetic construct
  source 1..20: mol_type = other DNA
aaagatcatcagaagaaata

SEQ ID NO: 36960 - DNA, 20 bp, synthetic construct
  source 1..20: mol_type = other DNA
acgtgcatctcggagctgga

SEQ ID NO: 36961 - DNA, 20 bp, synthetic construct
  source 1..20: mol_type = other DNA
ttgtgaaggtatgagacttt

SEQ ID NO: 36962 - DNA, 20 bp, synthetic construct
  source 1..20: mol_type = other DNA
gaacagtatgctctccaatc

SEQ ID NO: 36963 - DNA, 20 bp, synthetic construct
  source 1..20: mol_type = other DNA
gctccgtgctgccctcgcac

SEQ ID NO: 36964 - DNA, 20 bp, synthetic construct
  source 1..20: mol_type = other DNA
gccttcctgaagcgtgcggc

SEQ ID NO: 36965 - DNA, 20 bp, synthetic construct
  source 1..20: mol_type = other DNA
gcgcagaggctgaggaagag

SEQ ID NO: 36966 - DNA, 20 bp, synthetic construct
  source 1..20: mol_type = other DNA
gcttcaaatagaaaagtcac

SEQ ID NO: 36967 - DNA, 20 bp, synthetic construct
  source 1..20: mol_type = other DNA
gctgagcctgagtgagcagg

SEQ ID NO: 36968 - DNA, 20 bp, synthetic construct
  source 1..20: mol_type = other DNA
ctcggctttcttcagctccg

SEQ ID NO: 36969 - DNA, 20 bp, synthetic construct
  source 1..20: mol_type = other DNA
gctcccttatgatctggttc

SEQ ID NO: 36970 - DNA, 20 bp, synthetic construct
  source 1..20: mol_type = other DNA
agccttctgtgtgctgcctg

SEQ ID NO: 36971 - DNA, 20 bp, synthetic construct
  source 1..20: mol_type = other DNA
tcacatccaagcagaggccc

SEQ ID NO: 36972 - DNA, 20 bp, synthetic construct
  source 1..20: mol_type = other DNA
ctgccccctcgctaacagcc

SEQ ID NO: 36973 - DNA, 20 bp, synthetic construct
  source 1..20: mol_type = other DNA
ctgatgtttcagttccttca

SEQ ID NO: 36974 - DNA, 20 bp, synthetic construct
  source 1..20: mol_type = other DNA
catgagggtgagtgggtgta

SEQ ID NO: 36975 - DNA, 20 bp, synthetic construct
  source 1..20: mol_type = other DNA
ggggagctggtggtgaagtt

SEQ ID NO: 36976 - DNA, 20 bp, synthetic construct
  source 1..20: mol_type = other DNA
gcgtctgggagaggaaagca

SEQ ID NO: 36977 - DNA, 20 bp, synthetic construct
  source 1..20: mol_type = other DNA
gaagtaggtggtgttctcat

SEQ ID NO: 36978 - DNA, 20 bp, synthetic construct
  source 1..20: mol_type = other DNA
tcccagtggaacaatgtaag

SEQ ID NO: 36979 - DNA, 20 bp, synthetic construct
  source 1..20: mol_type = other DNA
acctgtaaagctgcattgag

SEQ ID NO: 36980 - DNA, 20 bp, synthetic construct
  source 1..20: mol_type = other DNA
ggtggcttcttccctggcag

SEQ ID NO: 36981 - DNA, 20 bp, synthetic construct
  source 1..20: mol_type = other DNA
ctcacatccctctctttccg

SEQ ID NO: 36982 - DNA, 20 bp, synthetic construct
  source 1..20: mol_type = other DNA
ggcgcgcttctgctgccgcg

SEQ ID NO: 36983 - DNA, 20 bp, synthetic construct
  source 1..20: mol_type = other DNA
gtccatgccggtgcgtgacg

SEQ ID NO: 36984 - DNA, 20 bp, synthetic construct
  source 1..20: mol_type = other DNA
ccgggagcgtgtcttcacag

SEQ ID NO: 36985 - DNA, 20 bp, synthetic construct
  source 1..20: mol_type = other DNA
aggaataactttcacctggg

SEQ ID NO: 36986 - DNA, 20 bp, synthetic construct
  source 1..20: mol_type = other DNA
tcacgcaccttccggaccat

SEQ ID NO: 36987 - DNA, 20 bp, synthetic construct
  source 1..20: mol_type = other DNA
tcttttgtttttgatgcagg

SEQ ID NO: 36988 - DNA, 20 bp, synthetic construct
  source 1..20: mol_type = other DNA
cctgcacagccagaataagg

SEQ ID NO: 36989 - DNA, 20 bp, synthetic construct
  source 1..20: mol_type = other DNA
gacttaccttgagcaggctc

SEQ ID NO: 36990 - DNA, 20 bp, synthetic construct
  source 1..20: mol_type = other DNA
cacggtgaggagcagggggc

SEQ ID NO: 36991 - DNA, 20 bp, synthetic construct
  source 1..20: mol_type = other DNA
agcaggctgaggtgagaggc

SEQ ID NO: 36992 - DNA, 20 bp, synthetic construct
  source 1..20: mol_type = other DNA
tagttacagactcagcgggt

SEQ ID NO: 36993 - DNA, 20 bp, synthetic construct
  source 1..20: mol_type = other DNA
gtcaggcatggcttcataca

SEQ ID NO: 36994 - DNA, 20 bp, synthetic construct
  source 1..20: mol_type = other DNA
cgctgcattgagtgtgcgtg

SEQ ID NO: 36995 - DNA, 20 bp, synthetic construct
  source 1..20: mol_type = other DNA
atttcttgaagcccctgcaa

SEQ ID NO: 36996 - DNA, 20 bp, synthetic construct
  source 1..20: mol_type = other DNA
ccttctgcatcagagtcaag

SEQ ID NO: 36997 - DNA, 20 bp, synthetic construct
  source 1..20: mol_type = other DNA
agctcccccacggctgactt

SEQ ID NO: 36998 - DNA, 20 bp, synthetic construct
  source 1..20: mol_type = other DNA
ccggcgccctcgccctcgcc

SEQ ID NO: 36999 - DNA, 20 bp, synthetic construct
  source 1..20: mol_type = other DNA
agctgagcccctgcgggcgg

SEQ ID NO: 37000 - DNA, 20 bp, synthetic construct
  source 1..20: mol_type = other DNA
ggaggcctggttgcagcgtg

SEQ ID NO: 37001 - DNA, 20 bp, synthetic construct
  source 1..20: mol_type = other DNA
cttttggtgactggagcctt

SEQ ID NO: 37002 - DNA, 20 bp, synthetic construct
  source 1..20: mol_type = other DNA
gctggtaaggaggccctcgc

SEQ ID NO: 37003 - DNA, 20 bp, synthetic construct
  source 1..20: mol_type = other DNA
cctgcagccagaaagactcc

SEQ ID NO: 37004 - DNA, 20 bp, synthetic construct
  source 1..20: mol_type = other DNA
cgtggttgagacctggaaga

SEQ ID NO: 37005 - DNA, 20 bp, synthetic construct
  source 1..20: mol_type = other DNA
ccgagtgacctgtggagttc

SEQ ID NO: 37006 - DNA, 20 bp, synthetic construct
  source 1..20: mol_type = other DNA
gcggcggccctccttggagc

SEQ ID NO: 37007 - DNA, 20 bp, synthetic construct
  source 1..20: mol_type = other DNA
ggaggtgctcactttcgaga

SEQ ID NO: 37008 - DNA, 20 bp, synthetic construct
  source 1..20: mol_type = other DNA
ccagtatggcgttccgacca

SEQ ID NO: 37009 - DNA, 20 bp, synthetic construct
  source 1..20: mol_type = other DNA
acgagtcccccgatgtgatc

SEQ ID NO: 37010 - DNA, 20 bp, synthetic construct
  source 1..20: mol_type = other DNA
ggcaagcgtaagggcgttcg

SEQ ID NO: 37011 - DNA, 20 bp, synthetic construct
  source 1..20: mol_type = other DNA
ctaaaaccactatgatgata

SEQ ID NO: 37012 - DNA, 20 bp, synthetic construct
  source 1..20: mol_type = other DNA
cgctgctggggttttcccag

SEQ ID NO: 37013 - DNA, 20 bp, synthetic construct
  source 1..20: mol_type = other DNA
ctggggagagtggggaatag

SEQ ID NO: 37014 - DNA, 20 bp, synthetic construct
  source 1..20: mol_type = other DNA
cacgtgcgagtactgcggca

SEQ ID NO: 37015 - DNA, 20 bp, synthetic construct
  source 1..20: mol_type = other DNA
tcactggccagatgtcaatg

SEQ ID NO: 37016 - DNA, 20 bp, synthetic construct
  source 1..20: mol_type = other DNA
tcggatcctcaagaaggatc

SEQ ID NO: 37017 - DNA, 20 bp, synthetic construct
  source 1..20: mol_type = other DNA
attagggcacagcagtctgt

SEQ ID NO: 37018 - DNA, 20 bp, synthetic construct
  source 1..20: mol_type = other DNA
aggcactcacagcggtcagg

SEQ ID NO: 37019 - DNA, 20 bp, synthetic construct
  source 1..20: mol_type = other DNA
caccatctgggccacctgga

SEQ ID NO: 37020 - DNA, 20 bp, synthetic construct
  source 1..20: mol_type = other DNA
atgccacttctgctcattga

SEQ ID NO: 37021 - DNA, 20 bp, synthetic construct
  source 1..20: mol_type = other DNA
gagacaccatcattcggaac

SEQ ID NO: 37022 - DNA, 20 bp, synthetic construct
  source 1..20: mol_type = other DNA
agcactggcagaggttttca

SEQ ID NO: 37023 - DNA, 20 bp, synthetic construct
  source 1..20: mol_type = other DNA
ggatcttcatggcgtagtag

SEQ ID NO: 37024 - DNA, 20 bp, synthetic construct
  source 1..20: mol_type = other DNA
acaccgctggataaatccag

SEQ ID NO: 37025 - DNA, 20 bp, synthetic construct
  source 1..20: mol_type = other DNA
taagcccatgtaagtacttg

SEQ ID NO: 37026 - DNA, 20 bp, synthetic construct
  source 1..20: mol_type = other DNA
tggctgaagtccaagaaccc

SEQ ID NO: 37027 - DNA, 20 bp, synthetic construct
  source 1..20: mol_type = other DNA
cgcaggatggtgcggaatga

SEQ ID NO: 37028 - DNA, 20 bp, synthetic construct
  source 1..20: mol_type = other DNA
ggcagccccaacccgacggc

SEQ ID NO: 37029 - DNA, 20 bp, synthetic construct
  source 1..20: mol_type = other DNA
cttgagctcggcagtgttgg

SEQ ID NO: 37030 - DNA, 20 bp, synthetic construct
  source 1..20: mol_type = other DNA
ctcctgccaagcggcacgaa

SEQ ID NO: 37031 - DNA, 20 bp, synthetic construct
  source 1..20: mol_type = other DNA
tccagggttgagccgtagaa

SEQ ID NO: 37032 - DNA, 20 bp, synthetic construct
  source 1..20: mol_type = other DNA
ccccaatcaccgacatggtc

SEQ ID NO: 37033 - DNA, 20 bp, synthetic construct
  source 1..20: mol_type = other DNA
gtcccgctggcctttccgga

SEQ ID NO: 37034 - DNA, 20 bp, synthetic construct
  source 1..20: mol_type = other DNA
atacctgcagtgcacggtga

SEQ ID NO: 37035 - DNA, 20 bp, synthetic construct
  source 1..20: mol_type = other DNA
aatcaaagacttgcccaaag

SEQ ID NO: 37036 - DNA, 20 bp, synthetic construct
  source 1..20: mol_type = other DNA
tgcccaggtggggttctgcc

SEQ ID NO: 37037 - DNA, 20 bp, synthetic construct
  source 1..20: mol_type = other DNA
gaaaagaacttcgaggggtc

SEQ ID NO: 37038 - DNA, 20 bp, synthetic construct
  source 1..20: mol_type = other DNA
ggttccccaggcttactggc

SEQ ID NO: 37039 - DNA, 20 bp, synthetic construct
  source 1..20: mol_type = other DNA
cgccgtcacctccatggcct

SEQ ID NO: 37040 - DNA, 20 bp, synthetic construct
  source 1..20: mol_type = other DNA
agcagcagctgaaccagagt

SEQ ID NO: 37041 - DNA, 20 bp, synthetic construct
  source 1..20: mol_type = other DNA
gcccatccggaaaggccagc

SEQ ID NO: 37042 - DNA, 20 bp, synthetic construct
  source 1..20: mol_type = other DNA
tcgcccacaggccttcttcg

SEQ ID NO: 37043 - DNA, 20 bp, synthetic construct
  source 1..20: mol_type = other DNA
gctaaagctatgctggaggc

SEQ ID NO: 37044 - DNA, 20 bp, synthetic construct
  source 1..20: mol_type = other DNA
ctgaagagtcatcccgaacc

SEQ ID NO: 37045 - DNA, 20 bp, synthetic construct
  source 1..20: mol_type = other DNA
ttctttctaggactgattgt

SEQ ID NO: 37046 - DNA, 20 bp, synthetic construct
  source 1..20: mol_type = other DNA
ctcctcttccagcagtctgc

SEQ ID NO: 37047 - DNA, 20 bp, synthetic construct
  source 1..20: mol_type = other DNA
acttctcaaaccacagagtg

SEQ ID NO: 37048 - DNA, 20 bp, synthetic construct
  source 1..20: mol_type = other DNA
ggctggtaagttctcgggaa

SEQ ID NO: 37049 - DNA, 20 bp, synthetic construct
  source 1..20: mol_type = other DNA
cctggtgagtgggcagggcc

SEQ ID NO: 37050 - DNA, 20 bp, synthetic construct
  source 1..20: mol_type = other DNA
cgatccagggcctccctggg

SEQ ID NO: 37051 - DNA, 20 bp, synthetic construct
  source 1..20: mol_type = other DNA
gcatcctcacaggctggttc

SEQ ID NO: 37052 - DNA, 20 bp, synthetic construct
  source 1..20: mol_type = other DNA
gcgctcttcctcgagccgcg

SEQ ID NO: 37053 - DNA, 20 bp, synthetic construct
  source 1..20: mol_type = other DNA
gatgcttggacgaaaatgct

SEQ ID NO: 37054 - DNA, 20 bp, synthetic construct
  source 1..20: mol_type = other DNA
cccctggaaaccacctgggt

SEQ ID NO: 37055 - DNA, 20 bp, synthetic construct
  source 1..20: mol_type = other DNA
gctcagcgtgccagtgcgag

SEQ ID NO: 37056 - DNA, 20 bp, synthetic construct
  source 1..20: mol_type = other DNA
agcagcagcagcagcggggg

SEQ ID NO: 37057 - DNA, 20 bp, synthetic construct
  source 1..20: mol_type = other DNA
gccgcttcactcaggccagg

SEQ ID NO: 37058 - DNA, 20 bp, synthetic construct
  source 1..20: mol_type = other DNA
tatcctgcttcagtacaaca

SEQ ID NO: 37059 - DNA, 20 bp, synthetic construct
  source 1..20: mol_type = other DNA
accaagactgggctaggaca

SEQ ID NO: 37060 - DNA, 20 bp, synthetic construct
  source 1..20: mol_type = other DNA
ttgaagtgactaatggcagt

SEQ ID NO: 37061 - DNA, 20 bp, synthetic construct
  source 1..20: mol_type = other DNA
aggcggaggagctgctttcc

SEQ ID NO: 37062 - DNA, 20 bp, synthetic construct
  source 1..20: mol_type = other DNA
gaaggctgtctgggggttag

SEQ ID NO: 37063 - DNA, 20 bp, synthetic construct
  source 1..20: mol_type = other DNA
gagaacatgcagcccaaggc

SEQ ID NO: 37064 - DNA, 20 bp, synthetic construct
  source 1..20: mol_type = other DNA
cagagactgacatggaacag

SEQ ID NO: 37065 - DNA, 20 bp, synthetic construct
  source 1..20: mol_type = other DNA
gctggtaaaggccagtctag

SEQ ID NO: 37066 - DNA, 20 bp, synthetic construct
  source 1..20: mol_type = other DNA
ttagattctggattttggac

SEQ ID NO: 37067 - DNA, 20 bp, synthetic construct
  source 1..20: mol_type = other DNA
cagccctgcggatctgctgc

SEQ ID NO: 37068 - DNA, 20 bp, synthetic construct
  source 1..20: mol_type = other DNA
ctctgtggactatggggagc

SEQ ID NO: 37069 - DNA, 20 bp, synthetic construct
  source 1..20: mol_type = other DNA
ttacgacagcttcttgattg

SEQ ID NO: 37070 - DNA, 20 bp, synthetic construct
  source 1..20: mol_type = other DNA
ccagatggcgatccggctgc

SEQ ID NO: 37071 - DNA, 20 bp, synthetic construct
  source 1..20: mol_type = other DNA
tgcagtccgtatcctgcccc

SEQ ID NO: 37072 - DNA, 20 bp, synthetic construct
  source 1..20: mol_type = other DNA
catcccagtggaagttgtgc

SEQ ID NO: 37073 - DNA, 20 bp, synthetic construct
  source 1..20: mol_type = other DNA
ggccagccaggtccagacgc

SEQ ID NO: 37074 - DNA, 20 bp, synthetic construct
  source 1..20: mol_type = other DNA
gcatgaggatgtggcccagg

SEQ ID NO: 37075 - DNA, 20 bp, synthetic construct
  source 1..20: mol_type = other DNA
gcagctgtacgcggccgacg

SEQ ID NO: 37076 - DNA, 20 bp, synthetic construct
  source 1..20: mol_type = other DNA
ctactgccagagaaccctga

SEQ ID NO: 37077 - DNA, 20 bp, synthetic construct
  source 1..20: mol_type = other DNA
tgtccatctgaaagccagag

SEQ ID NO: 37078 - DNA, 20 bp, synthetic construct
  source 1..20: mol_type = other DNA
cgtcctcctcctccggctcg

SEQ ID NO: 37079 - DNA, 20 bp, synthetic construct
  source 1..20: mol_type = other DNA
aaccccaaaggtaaggggta

SEQ ID NO: 37080 - DNA, 20 bp, synthetic construct
  source 1..20: mol_type = other DNA
aaatgttactgacctttcag

SEQ ID NO: 37081 - DNA, 20 bp, synthetic construct
  source 1..20: mol_type = other DNA
tgacaacatctacccggtgg

SEQ ID NO: 37082 - DNA, 20 bp, synthetic construct
  source 1..20: mol_type = other DNA
acaatgcctcggccattctt

SEQ ID NO: 37083 - DNA, 20 bp, synthetic construct
  source 1..20: mol_type = other DNA
gaaacaaggaagaacagatg

SEQ ID NO: 37084 - DNA, 20 bp, synthetic construct
  source 1..20: mol_type = other DNA
tccaggtgggtgtaggctct

SEQ ID NO: 37085 - DNA, 20 bp, synthetic construct
  source 1..20: mol_type = other DNA
aatgcccatcatttatgtca

SEQ ID NO: 37086 - DNA, 20 bp, synthetic construct
  source 1..20: mol_type = other DNA
ggagctttggaaccacgctc

SEQ ID NO: 37087 - DNA, 20 bp, synthetic construct
  source 1..20: mol_type = other DNA
gatgctccgggaaaacacct

SEQ ID NO: 37088 - DNA, 20 bp, synthetic construct
  source 1..20: mol_type = other DNA
ccagaccatgtcggtgattg

SEQ ID NO: 37089 - DNA, 20 bp, synthetic construct
  source 1..20: mol_type = other DNA
aggaaaggcatgacaaaggc

SEQ ID NO: 37090 - DNA, 20 bp, synthetic construct
  source 1..20: mol_type = other DNA
tggataactcagaccccaac

SEQ ID NO: 37091 - DNA, 20 bp, synthetic construct
  source 1..20: mol_type = other DNA
caagctcgtgggggtgaggc

SEQ ID NO: 37092 - DNA, 20 bp, synthetic construct
  source 1..20: mol_type = other DNA
aaccgtgccccgtaggtgct

SEQ ID NO: 37093 - DNA, 20 bp, synthetic construct
  source 1..20: mol_type = other DNA
ttcacaggtgaggatgtcca

SEQ ID NO: 37094 - DNA, 20 bp, synthetic construct
  source 1..20: mol_type = other DNA
catgatgctgctgcggctcc

SEQ ID NO: 37095 - DNA, 20 bp, synthetic construct
  source 1..20: mol_type = other DNA
ccgctccctgccaagattcc

SEQ ID NO: 37096 - DNA, 20 bp, synthetic construct
  source 1..20: mol_type = other DNA
cggcgctgggggagccgagt

SEQ ID NO: 37097 - DNA, 20 bp, synthetic construct
  source 1..20: mol_type = other DNA
ctggcacacctgagagagga

SEQ ID NO: 37098 - DNA, 20 bp, synthetic construct
  source 1..20: mol_type = other DNA
agtggtttaaggcggagctt

SEQ ID NO: 37099 - DNA, 20 bp, synthetic construct
  source 1..20: mol_type = other DNA
aagccgtacgtgtctgaggg

SEQ ID NO: 37100 - DNA, 20 bp, synthetic construct
  source 1..20: mol_type = other DNA
gcgggtacctggctggcgct

SEQ ID NO: 37101 - DNA, 20 bp, synthetic construct
  source 1..20: mol_type = other DNA
gccataaagactcttaaacc

SEQ ID NO: 37102 - DNA, 20 bp, synthetic construct
  source 1..20: mol_type = other DNA
ttttggggacgaggcccacc

SEQ ID NO: 37103 - DNA, 20 bp, synthetic construct
  source 1..20: mol_type = other DNA
ggacgcgccccatcgcaggt

SEQ ID NO: 37104 - DNA, 20 bp, synthetic construct
  source 1..20: mol_type = other DNA
cacggtgggtgtgaagagca

SEQ ID NO: 37105 - DNA, 20 bp, synthetic construct
  source 1..20: mol_type = other DNA
ttacgaatgcttgatgcctc

SEQ ID NO: 37106 - DNA, 20 bp, synthetic construct
  source 1..20: mol_type = other DNA
atgtgaacatgtggtccacg

SEQ ID NO: 37107 - DNA, 20 bp, synthetic construct
  source 1..20: mol_type = other DNA
ccgggcccccgaagcggccg

SEQ ID NO: 37108 - DNA, 20 bp, synthetic construct
  source 1..20: mol_type = other DNA
gggctgagaccaccagcaag

SEQ ID NO: 37109 - DNA, 20 bp, synthetic construct
  source 1..20: mol_type = other DNA
tacggagaagttgtttaagg

SEQ ID NO: 37110 - DNA, 20 bp, synthetic construct
  source 1..20: mol_type = other DNA
tcccaatgtgcccatcatcc

SEQ ID NO: 37111 - DNA, 20 bp, synthetic construct
  source 1..20: mol_type = other DNA
ccgagtttacctggaggtaa

SEQ ID NO: 37112 - DNA, 20 bp, synthetic construct
  source 1..20: mol_type = other DNA
tgcatttccaagccagccag

SEQ ID NO: 37113 - DNA, 20 bp, synthetic construct
  source 1..20: mol_type = other DNA
tgtgtggaccgtggatgagc

SEQ ID NO: 37114 - DNA, 20 bp, synthetic construct
  source 1..20: mol_type = other DNA
tgatgttcttctcacacacc

SEQ ID NO: 37115 - DNA, 20 bp, synthetic construct
  source 1..20: mol_type = other DNA
ggccacacctgggagggagg

SEQ ID NO: 37116 - DNA, 20 bp, synthetic construct
  source 1..20: mol_type = other DNA
cctataacacaaatataagt

SEQ ID NO: 37117 - DNA, 20 bp, synthetic construct
  source 1..20: mol_type = other DNA
cgagctgcagcaggcgctcg

SEQ ID NO: 37118 - DNA, 20 bp, synthetic construct
  source 1..20: mol_type = other DNA
cttagtagccaccagcaggt

SEQ ID NO: 37119 - DNA, 20 bp, synthetic construct
  source 1..20: mol_type = other DNA
agccctcaccagtctctggt

SEQ ID NO: 37120 - DNA, 20 bp, synthetic construct
  source 1..20: mol_type = other DNA
ccaccagctcgtccatggtg

SEQ ID NO: 37121 - DNA, 20 bp, synthetic construct
  source 1..20: mol_type = other DNA
ctgtgccgctatgacccgct

SEQ ID NO: 37122 - DNA, 20 bp, synthetic construct
  source 1..20: mol_type = other DNA
cgtgccgatgacggtggaga

SEQ ID NO: 37123 - DNA, 20 bp, synthetic construct
  source 1..20: mol_type = other DNA
aacacagagctccagcaacc

SEQ ID NO: 37124 - DNA, 20 bp, synthetic construct
  source 1..20: mol_type = other DNA
gagggagtacagcaaactga

SEQ ID NO: 37125 - DNA, 20 bp, synthetic construct
  source 1..20: mol_type = other DNA
cctgccgcctggagctgcac

SEQ ID NO: 37126 - DNA, 20 bp, synthetic construct
  source 1..20: mol_type = other DNA
cagtgagcggtagaagtgga

SEQ ID NO: 37127 - DNA, 20 bp, synthetic construct
  source 1..20: mol_type = other DNA
tgaggaacaacgaagagttc

SEQ ID NO: 37128 - DNA, 20 bp, synthetic construct
  source 1..20: mol_type = other DNA
aggattggaagatactgtag

SEQ ID NO: 37129 - DNA, 20 bp, synthetic construct
  source 1..20: mol_type = other DNA
tgtaaatggaggtcatgaaa

SEQ ID NO: 37130 - DNA, 20 bp, synthetic construct
  source 1..20: mol_type = other DNA
gctgagccggtgagtccccg

SEQ ID NO: 37131 - DNA, 20 bp, synthetic construct
  source 1..20: mol_type = other DNA
cttacctcatgcctggcaat

SEQ ID NO: 37132 - DNA, 20 bp, synthetic construct
  source 1..20: mol_type = other DNA
cgcccaccaggtactcatcc

SEQ ID NO: 37133 - DNA, 20 bp, synthetic construct
  source 1..20: mol_type = other DNA
cactcccatcacagtagccc

SEQ ID NO: 37134 - DNA, 20 bp, synthetic construct
  source 1..20: mol_type = other DNA
acagccatctcccggcacac

SEQ ID NO: 37135 - DNA, 20 bp, synthetic construct
  source 1..20: mol_type = other DNA
catgggcatgaagtacttgg

SEQ ID NO: 37136 - DNA, 20 bp, synthetic construct
  source 1..20: mol_type = other DNA
ggggggttccagggcctgtc

SEQ ID NO: 37137 - DNA, 20 bp, synthetic construct
  source 1..20: mol_type = other DNA
tcaaatactcatagtcgaag

SEQ ID NO: 37138 - DNA, 20 bp, synthetic construct
  source 1..20: mol_type = other DNA
catgagctcatgcagagaga

SEQ ID NO: 37139 - DNA, 20 bp, synthetic construct
  source 1..20: mol_type = other DNA
tctgcttccaggtgacagtg

SEQ ID NO: 37140 - DNA, 20 bp, synthetic construct
  source 1..20: mol_type = other DNA
agttccccattacagccttg

SEQ ID NO: 37141 - DNA, 20 bp, synthetic construct
  source 1..20: mol_type = other DNA
caccctgaataattcacacc

SEQ ID NO: 37142 - DNA, 20 bp, synthetic construct
  source 1..20: mol_type = other DNA
ggcctggatccagcccgcca

SEQ ID NO: 37143 - DNA, 20 bp, synthetic construct
  source 1..20: mol_type = other DNA
tcacaggtgcacatcctcat

SEQ ID NO: 37144 - DNA, 20 bp, synthetic construct
  source 1..20: mol_type = other DNA
caattcaggtcttcttgtga

SEQ ID NO: 37145 - DNA, 20 bp, synthetic construct
  source 1..20: mol_type = other DNA
tcctgggccgcgtagacccg

SEQ ID NO: 37146 - DNA, 20 bp, synthetic construct
  source 1..20: mol_type = other DNA
tgataaaccacatgtgctag

SEQ ID NO: 37147 - DNA, 20 bp, synthetic construct
  source 1..20: mol_type = other DNA
tgttgctgccgactcacagg

SEQ ID NO: 37148 - DNA, 20 bp, synthetic construct
  source 1..20: mol_type = other DNA
taggaatcaaacacttttat

SEQ ID NO: 37149 - DNA, 20 bp, synthetic construct
  source 1..20: mol_type = other DNA
tctgatgtgttcaataagcc

SEQ ID NO: 37150 - DNA, 20 bp, synthetic construct
  source 1..20: mol_type = other DNA
cacacaaaaataaggtgcca

SEQ ID NO: 37151 - DNA, 20 bp, synthetic construct
  source 1..20: mol_type = other DNA
gggcaactcacagtgaggaa

SEQ ID NO: 37152 - DNA, 20 bp, synthetic construct
  source 1..20: mol_type = other DNA
gagctgtaaacagtacttcg

SEQ ID NO: 37153 - DNA, 20 bp, synthetic construct
  source 1..20: mol_type = other DNA
cggtggcggcggctcctcca

SEQ ID NO: 37154 - DNA, 20 bp, synthetic construct
  source 1..20: mol_type = other DNA
tccctacccggggggcgcct

SEQ ID NO: 37155 - DNA, 20 bp, synthetic construct
  source 1..20: mol_type = other DNA
agttattcacctgagccacc

SEQ ID NO: 37156 - DNA, 20 bp, synthetic construct
  source 1..20: mol_type = other DNA
caagatccctgctgacagcc

SEQ ID NO: 37157 - DNA, 20 bp, synthetic construct
  source 1..20: mol_type = other DNA
acgaatgccttggaaacctg

SEQ ID NO: 37158 - DNA, 20 bp, synthetic construct
  source 1..20: mol_type = other DNA
acggggacgggatggggaag

SEQ ID NO: 37159 - DNA, 20 bp, synthetic construct
  source 1..20: mol_type = other DNA
gttgctgtacatgatccaca

SEQ ID NO: 37160 - DNA, 20 bp, synthetic construct
  source 1..20: mol_type = other DNA
aagaagaggtcatcatcagc

SEQ ID NO: 37161 - DNA, 20 bp, synthetic construct
  source 1..20: mol_type = other DNA
cagtcctcgcttggtggtgg

SEQ ID NO: 37162 - DNA, 20 bp, synthetic construct
  source 1..20: mol_type = other DNA
ggcagacgcgggctgctgac

SEQ ID NO: 37163 - DNA, 20 bp, synthetic construct
  source 1..20: mol_type = other DNA
ctgacctcaagatcaaggaa

SEQ ID NO: 37164 - DNA, 20 bp, synthetic construct
  source 1..20: mol_type = other DNA
ccgatacaaagcaggggaaa

SEQ ID NO: 37165 - DNA, 20 bp, synthetic construct
  source 1..20: mol_type = other DNA
atcatttggaacagtctaca

SEQ ID NO: 37166 - DNA, 20 bp, synthetic construct
  source 1..20: mol_type = other DNA
actggggatcccaaaaggta

SEQ ID NO: 37167 - DNA, 20 bp, synthetic construct
  source 1..20: mol_type = other DNA
ctgagctgtgagtgcctccg

SEQ ID NO: 37168 - DNA, 20 bp, synthetic construct
  source 1..20: mol_type = other DNA
aaatacaaacaggacgtgga

SEQ ID NO: 37169 - DNA, 20 bp, synthetic construct
  source 1..20: mol_type = other DNA
cagatgtccagtgagtatag

SEQ ID NO: 37170 - DNA, 20 bp, synthetic construct
  source 1..20: mol_type = other DNA
gcgacgggagccccatggtc

SEQ ID NO: 37171 - DNA, 20 bp, synthetic construct
  source 1..20: mol_type = other DNA
tgtgaaggcccatcccatgg

SEQ ID NO: 37172 - DNA, 20 bp, synthetic construct
  source 1..20: mol_type = other DNA
tgtcaaggaagtgttcgccg

SEQ ID NO: 37173 - DNA, 20 bp, synthetic construct
  source 1..20: mol_type = other DNA
gcctcatcccgcatggtgct

SEQ ID NO: 37174 - DNA, 20 bp, synthetic construct
  source 1..20: mol_type = other DNA
aggcgacaatacaggtgccc

SEQ ID NO: 37175 - DNA, 20 bp, synthetic construct
  source 1..20: mol_type = other DNA
catgtctgcgttgtcaggga

SEQ ID NO: 37176 - DNA, 20 bp, synthetic construct
  source 1..20: mol_type = other DNA
ggagctcctgggccggccaa

SEQ ID NO: 37177 - DNA, 20 bp, synthetic construct
  source 1..20: mol_type = other DNA
gggacagctgcgggatcatg

SEQ ID NO: 37178 - DNA, 20 bp, synthetic construct
  source 1..20: mol_type = other DNA
tcatctgccacagagcgctg

SEQ ID NO: 37179 - DNA, 20 bp, synthetic construct
  source 1..20: mol_type = other DNA
accccatccttaccaggaga

SEQ ID NO: 37180 - DNA, 20 bp, synthetic construct
  source 1..20: mol_type = other DNA
ccaggggataagacttccag

SEQ ID NO: 37181 - DNA, 20 bp, synthetic construct
  source 1..20: mol_type = other DNA
ggggcccacggcctgtgtcc

SEQ ID NO: 37182 - DNA, 20 bp, synthetic construct
  source 1..20: mol_type = other DNA
acaagttcctggtcggcaag

SEQ ID NO: 37183 - DNA, 20 bp, synthetic construct
  source 1..20: mol_type = other DNA
gtgcagtggtgagtgggccc

SEQ ID NO: 37184 - DNA, 20 bp, synthetic construct
  source 1..20: mol_type = other DNA
cagggtcttctggtgcttct

SEQ ID NO: 37185 - DNA, 20 bp, synthetic construct
  source 1..20: mol_type = other DNA
ggacccaactgtcaattcct

SEQ ID NO: 37186 - DNA, 20 bp, synthetic construct
  source 1..20: mol_type = other DNA
agcctgtaacccgtgcacag

SEQ ID NO: 37187 - DNA, 20 bp, synthetic construct
  source 1..20: mol_type = other DNA
cgcatacgttgcagcggcac

SEQ ID NO: 37188 - DNA, 20 bp, synthetic construct
  source 1..20: mol_type = other DNA
acatccaggcccacatcgac

SEQ ID NO: 37189 - DNA, 20 bp, synthetic construct
  source 1..20: mol_type = other DNA
cgggcccactatgagacaga

SEQ ID NO: 37190 - DNA, 20 bp, synthetic construct
  source 1..20: mol_type = other DNA
gaagccgtggttatctctgt

SEQ ID NO: 37191 - DNA, 20 bp, synthetic construct
  source 1..20: mol_type = other DNA
tcactttctggctctctcac

SEQ ID NO: 37192 - DNA, 20 bp, synthetic construct
  source 1..20: mol_type = other DNA
agggaaatatccctgtggct

SEQ ID NO: 37193 - DNA, 20 bp, synthetic construct
  source 1..20: mol_type = other DNA
gaatttggtgcctgtggaac

SEQ ID NO: 37194 - DNA, 20 bp, synthetic construct
  source 1..20: mol_type = other DNA
gtccccgttcaggtagaccc

SEQ ID NO: 37195 - DNA, 20 bp, synthetic construct
  source 1..20: mol_type = other DNA
acgttgaggggcatcgtcgc

SEQ ID NO: 37196 - DNA, 20 bp, synthetic construct
  source 1..20: mol_type = other DNA
ggtacaccagaaggccagaa

SEQ ID NO: 37197 - DNA, 20 bp, synthetic construct
  source 1..20: mol_type = other DNA
tggacttagatcattcctgt

SEQ ID NO: 37198 - DNA, 20 bp, synthetic construct
  source 1..20: mol_type = other DNA
cagcttgtccgtctggttgc

SEQ ID NO: 37199 - DNA, 20 bp, synthetic construct
  source 1..20: mol_type = other DNA
actctctcatcatcacacca

SEQ ID NO: 37200 - DNA, 20 bp, synthetic construct
  source 1..20: mol_type = other DNA
tgaggaaaatgtcctcagta

SEQ ID NO: 37201 - DNA, 20 bp, synthetic construct
  source 1..20: mol_type = other DNA
agttctggtaaaagagaagg

SEQ ID NO: 37202 - DNA, 20 bp, synthetic construct
  source 1..20: mol_type = other DNA
ctacccagctgtgtccatgg

SEQ ID NO: 37203 - DNA, 20 bp, synthetic construct
  source 1..20: mol_type = other DNA
atgagctgcggagccgcatc

SEQ ID NO: 37204 - DNA, 20 bp, synthetic construct
  source 1..20: mol_type = other DNA
acgacctggccaagctgctg

SEQ ID NO: 37205 - DNA, 20 bp, synthetic construct
  source 1..20: mol_type = other DNA
tcccatgaagtcattcctgc

SEQ ID NO: 37206 - DNA, 20 bp, synthetic construct
  source 1..20: mol_type = other DNA
ggacttgaagatgaaggtga

SEQ ID NO: 37207 - DNA, 20 bp, synthetic construct
  source 1..20: mol_type = other DNA
gcttgcgcgacttcctgcag

SEQ ID NO: 37208 - DNA, 20 bp, synthetic construct
  source 1..20: mol_type = other DNA
ctgagaagaggctgggcgtg

SEQ ID NO: 37209 - DNA, 20 bp, synthetic construct
  source 1..20: mol_type = other DNA
gtgtggccacatattctgtc

SEQ ID NO: 37210 - DNA, 20 bp, synthetic construct
  source 1..20: mol_type = other DNA
ttcaccaggcttcggtgtag

SEQ ID NO: 37211 - DNA, 20 bp, synthetic construct
  source 1..20: mol_type = other DNA
ggtaagttttgtgtggatat

SEQ ID NO: 37212 - DNA, 20 bp, synthetic construct
  source 1..20: mol_type = other DNA
gcccgcctcccgtgaagaag

SEQ ID NO: 37213 - DNA, 20 bp, synthetic construct
  source 1..20: mol_type = other DNA
agactaagggaaaaacctcg

SEQ ID NO: 37214 - DNA, 20 bp, synthetic construct
  source 1..20: mol_type = other DNA
tggatggttcaaaaaagtac

SEQ ID NO: 37215 - DNA, 20 bp, synthetic construct
  source 1..20: mol_type = other DNA
tggtgcaggggcaggaccgg

SEQ ID NO: 37216 - DNA, 20 bp, synthetic construct
  source 1..20: mol_type = other DNA
ttcacgaatgtcaactagga

SEQ ID NO: 37217 - DNA, 20 bp, synthetic construct
  source 1..20: mol_type = other DNA
tggcaatgtctctgcccgga

SEQ ID NO: 37218 - DNA, 20 bp, synthetic construct
  source 1..20: mol_type = other DNA
tcatagtgggcccggtgatg

SEQ ID NO: 37219 - DNA, 20 bp, synthetic construct
  source 1..20: mol_type = other DNA
tatcaatagccgagaaacca

SEQ ID NO: 37220 - DNA, 20 bp, synthetic construct
  source 1..20: mol_type = other DNA
atacactggtgtcagagccc

SEQ ID NO: 37221 - DNA, 20 bp, synthetic construct
  source 1..20: mol_type = other DNA
gcatcacacattattatctc

SEQ ID NO: 37222 - DNA, 20 bp, synthetic construct
  source 1..20: mol_type = other DNA
gaaaaccagatcaacagctt

SEQ ID NO: 37223 - DNA, 20 bp, synthetic construct
  source 1..20: mol_type = other DNA
ctgaagtggaggccacagag

SEQ ID NO: 37224 - DNA, 20 bp, synthetic construct
  source 1..20: mol_type = other DNA
tctgcgctctccccgctctc

SEQ ID NO: 37225 - DNA, 20 bp, synthetic construct
  source 1..20: mol_type = other DNA
ccaagacaccttcttggcct

SEQ ID NO: 37226 - DNA, 20 bp, synthetic construct
  source 1..20: mol_type = other DNA
tggcaaggtaagctaatgca

SEQ ID NO: 37227 - DNA, 20 bp, synthetic construct
  source 1..20: mol_type = other DNA
tgtggctgctgctgatacga

SEQ ID NO: 37228 - DNA, 20 bp, synthetic construct
  source 1..20: mol_type = other DNA
ccatgtcttctcatcatgat

SEQ ID NO: 37229 - DNA, 20 bp, synthetic construct
  source 1..20: mol_type = other DNA
gagaactcctgggagcccgt

SEQ ID NO: 37230 - DNA, 20 bp, synthetic construct
  source 1..20: mol_type = other DNA
ctacgagctgcctgacggcc

SEQ ID NO: 37231 - DNA, 20 bp, synthetic construct
  source 1..20: mol_type = other DNA
ccccagactcagtgatggcg

SEQ ID NO: 37232 - DNA, 20 bp, synthetic construct
  source 1..20: mol_type = other DNA
cctcagcaaactcagcatcc

SEQ ID NO: 37233 - DNA, 20 bp, synthetic construct
  source 1..20: mol_type = other DNA
atttctggatggatgggaag

SEQ ID NO: 37234 - DNA, 20 bp, synthetic construct
  source 1..20: mol_type = other DNA
ctggaagcacgcgggcaagc

SEQ ID NO: 37235 - DNA, 20 bp, synthetic construct
  source 1..20: mol_type = other DNA
agcggacctgcaaggcggcg

SEQ ID NO: 37236 - DNA, 20 bp, synthetic construct
  source 1..20: mol_type = other DNA
gtggagcggtcccagaacgg

SEQ ID NO: 37237 - DNA, 20 bp, synthetic construct
  source 1..20: mol_type = other DNA
cgtgggcctggaaaagtaag

SEQ ID NO: 37238 - DNA, 20 bp, synthetic construct
  source 1..20: mol_type = other DNA
cctgcccgacagcatgaagc

SEQ ID NO: 37239 - DNA, 20 bp, synthetic construct
  source 1..20: mol_type = other DNA
atcgacagcggcaagtaccc

SEQ ID NO: 37240 - DNA, 20 bp, synthetic construct
  source 1..20: mol_type = other DNA
ctgtactcgggcacgtaggg

SEQ ID NO: 37241 - DNA, 20 bp, synthetic construct
  source 1..20: mol_type = other DNA
acgctgagcttaggtcaggc

SEQ ID NO: 37242 - DNA, 20 bp, synthetic construct
  source 1..20: mol_type = other DNA
tggtaatggttcgttttacc

SEQ ID NO: 37243 - DNA, 20 bp, synthetic construct
  source 1..20: mol_type = other DNA
cccagctgatggcccctacc

SEQ ID NO: 37244 - DNA, 20 bp, synthetic construct
  source 1..20: mol_type = other DNA
tcagtagaatgcatttcctg

SEQ ID NO: 37245 - DNA, 20 bp, synthetic construct
  source 1..20: mol_type = other DNA
aagcctgcgcgacctgatcc

SEQ ID NO: 37246 - DNA, 20 bp, synthetic construct
  source 1..20: mol_type = other DNA
cctcagggttctctggcagt

SEQ ID NO: 37247 - DNA, 20 bp, synthetic construct
  source 1..20: mol_type = other DNA
cgtgagtgctccaacggagg

SEQ ID NO: 37248 - DNA, 20 bp, synthetic construct
  source 1..20: mol_type = other DNA
tcccctgcagggcgtcatgg

SEQ ID NO: 37249 - DNA, 20 bp, synthetic construct
  source 1..20: mol_type = other DNA
cgccctcgccgatgtacgag

SEQ ID NO: 37250 - DNA, 20 bp, synthetic construct
  source 1..20: mol_type = other DNA
ccaggctctcattcttaaag

SEQ ID NO: 37251 - DNA, 20 bp, synthetic construct
  source 1..20: mol_type = other DNA
tcatctgctccacgttgccg

SEQ ID NO: 37252 - DNA, 20 bp, synthetic construct
  source 1..20: mol_type = other DNA
gcgcaggcggccgtggggcc

SEQ ID NO: 37253 - DNA, 20 bp, synthetic construct
  source 1..20: mol_type = other DNA
ggggcaggtcctggatgtgc

SEQ ID NO: 37254 - DNA, 20 bp, synthetic construct
  source 1..20: mol_type = other DNA
cacgccgcctgcgtccccgc

SEQ ID NO: 37255 - DNA, 20 bp, synthetic construct
  source 1..20: mol_type = other DNA
atggagaccagtcagtttcc

SEQ ID NO: 37256 - DNA, 20 bp, synthetic construct
  source 1..20: mol_type = other DNA
ctgggaggacctgcgcaagc

SEQ ID NO: 37257 - DNA, 20 bp, synthetic construct
  source 1..20: mol_type = other DNA
tgtaattgtcgaacacggtg

SEQ ID NO: 37258 - DNA, 20 bp, synthetic construct
  source 1..20: mol_type = other DNA
cctccgcagccacacatcca

SEQ ID NO: 37259 - DNA, 20 bp, synthetic construct
  source 1..20: mol_type = other DNA
atgaggagaaagaatatcat

SEQ ID NO: 37260 - DNA, 20 bp, synthetic construct
  source 1..20: mol_type = other DNA
cacgtggggttgggtgcggg

SEQ ID NO: 37261 - DNA, 20 bp, synthetic construct
  source 1..20: mol_type = other DNA
gccagcggcacggcctgagg

SEQ ID NO: 37262 - DNA, 20 bp, synthetic construct
  source 1..20: mol_type = other DNA
atgaatcaagggggcatgat

SEQ ID NO: 37263 - DNA, 20 bp, synthetic construct
  source 1..20: mol_type = other DNA
gccacgaggtggctccccca

SEQ ID NO: 37264 - DNA, 20 bp, synthetic construct
  source 1..20: mol_type = other DNA
actggcatcgtgatggactc

SEQ ID NO: 37265 - DNA, 20 bp, synthetic construct
  source 1..20: mol_type = other DNA
ttccttacccatcattccag

SEQ ID NO: 37266 - DNA, 20 bp, synthetic construct
  source 1..20: mol_type = other DNA
ttggtgaaggagttggtgat

SEQ ID NO: 37267 - DNA, 20 bp, synthetic construct
  source 1..20: mol_type = other DNA
gccaggtgcacgagcgcggc

SEQ ID NO: 37268 - DNA, 20 bp, synthetic construct
  source 1..20: mol_type = other DNA
gaccctggcacttggcttgg

SEQ ID NO: 37269 - DNA, 20 bp, synthetic construct
  source 1..20: mol_type = other DNA
tcagcagcagcacggtgctg

SEQ ID NO: 37270 - DNA, 20 bp, synthetic construct
  source 1..20: mol_type = other DNA
tacagaagcagtacgagaac

SEQ ID NO: 37271 - DNA, 20 bp, synthetic construct
  source 1..20: mol_type = other DNA
ccacttacctggggacgtac

SEQ ID NO: 37272 - DNA, 20 bp, synthetic construct
  source 1..20: mol_type = other DNA
cagggttgcgtccctcatac

SEQ ID NO: 37273 - DNA, 20 bp, synthetic construct
  source 1..20: mol_type = other DNA
ccagcaccgcgagctgcagc

SEQ ID NO: 37274 - DNA, 20 bp, synthetic construct
  source 1..20: mol_type = other DNA
gtggtagaggtacaagaccc

SEQ ID NO: 37275 - DNA, 20 bp, synthetic construct
  source 1..20: mol_type = other DNA
caagtacatgtgagtgcagg

SEQ ID NO: 37276 - DNA, 20 bp, synthetic construct
  source 1..20: mol_type = other DNA
tcaagcattgcccaagatcg

SEQ ID NO: 37277 - DNA, 20 bp, synthetic construct
  source 1..20: mol_type = other DNA
agaaatactcacaggcaagc

SEQ ID NO: 37278 - DNA, 20 bp, synthetic construct
  source 1..20: mol_type = other DNA
tcctcgacaaacagaaggtg

SEQ ID NO: 37279 - DNA, 20 bp, synthetic construct
  source 1..20: mol_type = other DNA
aaccaggatgatgggcacgt

SEQ ID NO: 37280 - DNA, 20 bp, synthetic construct
  source 1..20: mol_type = other DNA
ttcccccccagcagcctgct

SEQ ID NO: 37281 - DNA, 20 bp, synthetic construct
  source 1..20: mol_type = other DNA
agctgctaaccttccaggag

SEQ ID NO: 37282 - DNA, 20 bp, synthetic construct
  source 1..20: mol_type = other DNA
aaccctgtgtgatcatggtc

SEQ ID NO: 37283 - DNA, 20 bp, synthetic construct
  source 1..20: mol_type = other DNA
agcgcccctcgcacttgtag

SEQ ID NO: 37284 - DNA, 20 bp, synthetic construct
  source 1..20: mol_type = other DNA
ccatgcgatcaggtccgcct

SEQ ID NO: 37285 - DNA, 20 bp, synthetic construct
  source 1..20: mol_type = other DNA
ggacaccgagagcaacaacg

SEQ ID NO: 37286 - DNA, 20 bp, synthetic construct
  source 1..20: mol_type = other DNA
agatgaggctgcgcccctgc

SEQ ID NO: 37287 - DNA, 20 bp, synthetic construct
  source 1..20: mol_type = other DNA
cgtcccggatcagccacacc

SEQ ID NO: 37288 - DNA, 20 bp, synthetic construct
  source 1..20: mol_type = other DNA
ttaggtgagaatctgggagg

SEQ ID NO: 37289 - DNA, 20 bp, synthetic construct
  source 1..20: mol_type = other DNA
cagccactcctacatggacg

SEQ ID NO: 37290 - DNA, 20 bp, synthetic construct
  source 1..20: mol_type = other DNA
cagcctattactttgtgtag

SEQ ID NO: 37291 - DNA, 20 bp, synthetic construct
  source 1..20: mol_type = other DNA
gtggcctggggacagcgtcc

SEQ ID NO: 37292 - DNA, 20 bp, synthetic construct
  source 1..20: mol_type = other DNA
gctgagtgcaggagctgatg

SEQ ID NO: 37293 - DNA, 20 bp, synthetic construct
  source 1..20: mol_type = other DNA
atgccacctcaggttgggtc

SEQ ID NO: 37294 - DNA, 20 bp, synthetic construct
  source 1..20: mol_type = other DNA
tcgacgaacactacgagtac

SEQ ID NO: 37295 - DNA, 20 bp, synthetic construct
  source 1..20: mol_type = other DNA
atttctaccagaggcagcac

SEQ ID NO: 37296 - DNA, 20 bp, synthetic construct
  source 1..20: mol_type = other DNA
ggtatggtttctctccagaa

SEQ ID NO: 37297 - DNA, 20 bp, synthetic construct
  source 1..20: mol_type = other DNA
ttgccagggaaatatccctg

SEQ ID NO: 37298 - DNA, 20 bp, synthetic construct
  source 1..20: mol_type = other DNA
agcccggcaagttctcctga

SEQ ID NO: 37299 - DNA, 20 bp, synthetic construct
  source 1..20: mol_type = other DNA
caatccgtaactttaccctg

SEQ ID NO: 37300 - DNA, 20 bp, synthetic construct
  source 1..20: mol_type = other DNA
aaaggagttggaaagtagta

SEQ ID NO: 37301 - DNA, 20 bp, synthetic construct
  source 1..20: mol_type = other DNA
gtagaagcggctggcagtgg

SEQ ID NO: 37302 - DNA, 20 bp, synthetic construct
  source 1..20: mol_type = other DNA
cgctggccttcggctcctgt

SEQ ID NO: 37303 - DNA, 20 bp, synthetic construct
  source 1..20: mol_type = other DNA
gtaatgtctgatcttctttg

SEQ ID NO: 37304 - DNA, 20 bp, synthetic construct
  source 1..20: mol_type = other DNA
cccaggttagagccaagggc

SEQ ID NO: 37305 - DNA, 20 bp, synthetic construct
  source 1..20: mol_type = other DNA
tacgactccttctgcagcaa

SEQ ID NO: 37306 - DNA, 20 bp, synthetic construct
  source 1..20: mol_type = other DNA
actgcctacctaccaagaac

SEQ ID NO: 37307 - DNA, 20 bp, synthetic construct
  source 1..20: mol_type = other DNA
ggcctggagggaaatggagc

SEQ ID NO: 37308 - DNA, 20 bp, synthetic construct
  source 1..20: mol_type = other DNA
aaatgtgggctgtgggaaga

SEQ ID NO: 37309 - DNA, 20 bp, synthetic construct
  source 1..20: mol_type = other DNA
ccctacccaacgctgccgcc

SEQ ID NO: 37310 - DNA, 20 bp, synthetic construct
  source 1..20: mol_type = other DNA
acccttctgaatgacttgct

SEQ ID NO: 37311 - DNA, 20 bp, synthetic construct
  source 1..20: mol_type = other DNA
cctgcatcctcttgtgaccc

SEQ ID NO: 37312 - DNA, 20 bp, synthetic construct
  source 1..20: mol_type = other DNA
tccagaacctgctccttctt

SEQ ID NO: 37313 - DNA, 20 bp, synthetic construct
  source 1..20: mol_type = other DNA
ttggtccaggtaggggatgt

SEQ ID NO: 37314 - DNA, 20 bp, synthetic construct
  source 1..20: mol_type = other DNA
caattacctgttgaagcatg

SEQ ID NO: 37315 - DNA, 20 bp, synthetic construct
  source 1..20: mol_type = other DNA
agagctggaggatgaaggat

SEQ ID NO: 37316 - DNA, 20 bp, synthetic construct
  source 1..20: mol_type = other DNA
gaccaatcagcatttcataa

SEQ ID NO: 37317 - DNA, 20 bp, synthetic construct
  source 1..20: mol_type = other DNA
tgtcttggctgatgaggtag

SEQ ID NO: 37318 - DNA, 20 bp, synthetic construct
  source 1..20: mol_type = other DNA
actggagacaacagggggta

SEQ ID NO: 37319 - DNA, 20 bp, synthetic construct
  source 1..20: mol_type = other DNA
acctgcagtgcacggtgatg

SEQ ID NO: 37320 - DNA, 20 bp, synthetic construct
  source 1..20: mol_type = other DNA
gccgcagtacggcgagctcc

SEQ ID NO: 37321 - DNA, 20 bp, synthetic construct
  source 1..20: mol_type = other DNA
ccagcctccctctcctggta

SEQ ID NO: 37322 - DNA, 20 bp, synthetic construct
  source 1..20: mol_type = other DNA
aggcccaggccagctcgatg

SEQ ID NO: 37323 - DNA, 20 bp, synthetic construct
  source 1..20: mol_type = other DNA
ccccagacaacatgtgcatg

SEQ ID NO: 37324 - DNA, 20 bp, synthetic construct
  source 1..20: mol_type = other DNA
ggggtggctgaaaatccacc

SEQ ID NO: 37325 - DNA, 20 bp, synthetic construct
  source 1..20: mol_type = other DNA
ccattgattgcagatgaggc

SEQ ID NO: 37326 - DNA, 20 bp, synthetic construct
  source 1..20: mol_type = other DNA
tcgccaacagcctcaagcag

SEQ ID NO: 37327 - DNA, 20 bp, synthetic construct
  source 1..20: mol_type = other DNA
gttcaggaagctccgaggaa

SEQ ID NO: 37328 - DNA, 20 bp, synthetic construct
  source 1..20: mol_type = other DNA
tggggaggcccgaaagacag

SEQ ID NO: 37329 - DNA, 20 bp, synthetic construct
  source 1..20: mol_type = other DNA
agtcttcatctcctgaaagg

SEQ ID NO: 37330 - DNA, 20 bp, synthetic construct
  source 1..20: mol_type = other DNA
tggggagtccagctcctggt

SEQ ID NO: 37331 - DNA, 20 bp, synthetic construct
  source 1..20: mol_type = other DNA
gaaaacggcaataactgtgg

SEQ ID NO: 37332 - DNA, 20 bp, synthetic construct
  source 1..20: mol_type = other DNA
cgggtgctgcccgttgagca

SEQ ID NO: 37333 - DNA, 20 bp, synthetic construct
  source 1..20: mol_type = other DNA
atacatccctcgagggtcct

SEQ ID NO: 37334 - DNA, 20 bp, synthetic construct
  source 1..20: mol_type = other DNA
ccagcattccaagcgtgcac

SEQ ID NO: 37335 - DNA, 20 bp, synthetic construct
  source 1..20: mol_type = other DNA
tgaagagatggaggtgtccc

SEQ ID NO: 37336 - DNA, 20 bp, synthetic construct
  source 1..20: mol_type = other DNA
ccaacagctccaggagcacc

SEQ ID NO: 37337 - DNA, 20 bp, synthetic construct
  source 1..20: mol_type = other DNA
gtgttgagcagcaggttgga

SEQ ID NO: 37338 - DNA, 20 bp, synthetic construct
  source 1..20: mol_type = other DNA
ctgggccttgtagtcaaaga

SEQ ID NO: 37339 - DNA, 20 bp, synthetic construct
  source 1..20: mol_type = other DNA
attcctgaggtcatcaagca

SEQ ID NO: 37340 - DNA, 20 bp, synthetic construct
  source 1..20: mol_type = other DNA
ggctgaaacgcagaagccag

SEQ ID NO: 37341 - DNA, 20 bp, synthetic construct
  source 1..20: mol_type = other DNA
cgtagaaggcctgtggggac

SEQ ID NO: 37342 - DNA, 20 bp, synthetic construct
  source 1..20: mol_type = other DNA
ccacgtgggaaaggggctgc

SEQ ID NO: 37343 - DNA, 20 bp, synthetic construct
  source 1..20: mol_type = other DNA
agaagaagcgcacgctgaag

SEQ ID NO: 37344 - DNA, 20 bp, synthetic construct
  source 1..20: mol_type = other DNA
aggtggcttcttccctggca

SEQ ID NO: 37345 - DNA, 20 bp, synthetic construct
  source 1..20: mol_type = other DNA
ccaaagaaaggcacacatgg

SEQ ID NO: 37346 - DNA, 20 bp, synthetic construct
  source 1..20: mol_type = other DNA
gatcacggggttgcccccac

SEQ ID NO: 37347 - DNA, 20 bp, synthetic construct
  source 1..20: mol_type = other DNA
tggacttacacaaagaacag

SEQ ID NO: 37348 - DNA, 20 bp, synthetic construct
  source 1..20: mol_type = other DNA
gaagcgaaggtcgttgaacc

SEQ ID NO: 37349 - DNA, 20 bp, synthetic construct
  source 1..20: mol_type = other DNA
ccaggtgctacacctacagc

SEQ ID NO: 37350 - DNA, 20 bp, synthetic construct
  source 1..20: mol_type = other DNA
cctccagcacctgaggatgg

SEQ ID NO: 37351 - DNA, 20 bp, synthetic construct
  source 1..20: mol_type = other DNA
ttctggaggagatctccgaa

SEQ ID NO: 37352 - DNA, 20 bp, synthetic construct
  source 1..20: mol_type = other DNA
catggaggtgagatacagag

SEQ ID NO: 37353 - DNA, 20 bp, synthetic construct
  source 1..20: mol_type = other DNA
gatctcgccactagaagtgc

SEQ ID NO: 37354 - DNA, 20 bp, synthetic construct
  source 1..20: mol_type = other DNA
ccgcgtctttccctgcccct

SEQ ID NO: 37355 - DNA, 20 bp, synthetic construct
  source 1..20: mol_type = other DNA
tgaggtacttacttcccgga

SEQ ID NO: 37356 - DNA, 20 bp, synthetic construct
  source 1..20: mol_type = other DNA
ctctgcccggaaggtgctcc

SEQ ID NO: 37357 - DNA, 20 bp, synthetic construct
  source 1..20: mol_type = other DNA
ctccagaagggaaaagtagc

SEQ ID NO: 37358 - DNA, 20 bp, synthetic construct
  source 1..20: mol_type = other DNA
gcttattctcaaagagctct

SEQ ID NO: 37359 - DNA, 20 bp, synthetic construct
  source 1..20: mol_type = other DNA
gactttcagggtgtcgggga

SEQ ID NO: 37360 - DNA, 20 bp, synthetic construct
  source 1..20: mol_type = other DNA
gcgcgagagggacgcgtaca

SEQ ID NO: 37361 - DNA, 20 bp, synthetic construct
  source 1..20: mol_type = other DNA
tgctttcacacgctccagga

SEQ ID NO: 37362 - DNA, 20 bp, synthetic construct
  source 1..20: mol_type = other DNA
ggctggtcagtctcaccctc

SEQ ID NO: 37363 - DNA, 20 bp, synthetic construct
  source 1..20: mol_type = other DNA
tggtggtggctcacccagcg

SEQ ID NO: 37364 - DNA, 20 bp, synthetic construct
  source 1..20: mol_type = other DNA
gtcagaagaggacttcatag

SEQ ID NO: 37365 - DNA, 20 bp, synthetic construct
  source 1..20: mol_type = other DNA
cgtcctgccagttgatgctg

SEQ ID NO: 37366 - DNA, 20 bp, synthetic construct
  source 1..20: mol_type = other DNA
cggcgagggcgcctacggca

SEQ ID NO: 37367 - DNA, 20 bp, synthetic construct
  source 1..20: mol_type = other DNA
ctccagcatggtcaccgcca

SEQ ID NO: 37368 - DNA, 20 bp, synthetic construct
  source 1..20: mol_type = other DNA
atgcaggctatggcacctca

SEQ ID NO: 37369 - DNA, 20 bp, synthetic construct
  source 1..20: mol_type = other DNA
ccgaacatacccttctatcc

SEQ ID NO: 37370 - DNA, 20 bp, synthetic construct
  source 1..20: mol_type = other DNA
tcttttcaggctccttgaag

SEQ ID NO: 37371 - DNA, 20 bp, synthetic construct
  source 1..20: mol_type = other DNA
ctccaaggacagcaacaacc

SEQ ID NO: 37372 - DNA, 20 bp, synthetic construct
  source 1..20: mol_type = other DNA
agatgcccaagaggtagcca

SEQ ID NO: 37373 - DNA, 20 bp, synthetic construct
  source 1..20: mol_type = other DNA
agcagccgaccagcctggag

SEQ ID NO: 37374 - DNA, 20 bp, synthetic construct
  source 1..20: mol_type = other DNA
gtttgtgttaccttcagaat

SEQ ID NO: 37375 - DNA, 20 bp, synthetic construct
  source 1..20: mol_type = other DNA
cctttgctgcaacagaaacc

SEQ ID NO: 37376 - DNA, 20 bp, synthetic construct
  source 1..20: mol_type = other DNA
cctccgctggggcttactcc

SEQ ID NO: 37377 - DNA, 20 bp, synthetic construct
  source 1..20: mol_type = other DNA
tcctcatcctgcccgtggaa

SEQ ID NO: 37378 - DNA, 20 bp, synthetic construct
  source 1..20: mol_type = other DNA
agagaccaatacatgaggac

SEQ ID NO: 37379 - DNA, 20 bp, synthetic construct
  source 1..20: mol_type = other DNA
tccaggctgagaggcaggcc

SEQ ID NO: 37380 - DNA, 20 bp, synthetic construct
  source 1..20: mol_type = other DNA
ttctccttgcctagtgtgga

SEQ ID NO: 37381 - DNA, 20 bp, synthetic construct
  source 1..20: mol_type = other DNA
atctgcgtgtggtatttagg

SEQ ID NO: 37382 - DNA, 20 bp, synthetic construct
  source 1..20: mol_type = other DNA
tgtaccaagcagttatctgg

SEQ ID NO: 37383 - DNA, 20 bp, synthetic construct
  source 1..20: mol_type = other DNA
gtgtttgagttcatggagca

SEQ ID NO: 37384 - DNA, 20 bp, synthetic construct
  source 1..20: mol_type = other DNA
caagggacaaggtggagtca

SEQ ID NO: 37385 - DNA, 20 bp, synthetic construct
  source 1..20: mol_type = other DNA
attgtcgtacgctacaagca

SEQ ID NO: 37386 - DNA, 20 bp, synthetic construct
  source 1..20: mol_type = other DNA
ctagaaagaggttatctgta

SEQ ID NO: 37387 - DNA, 20 bp, synthetic construct
  source 1..20: mol_type = other DNA
ttcggcatttggagcagctg

SEQ ID NO: 37388 - DNA, 20 bp, synthetic construct
  source 1..20: mol_type = other DNA
ggatcatgtgagtaaccacc

SEQ ID NO: 37389 - DNA, 20 bp, synthetic construct
  source 1..20: mol_type = other DNA
gtgcatcaccatccccaggt

SEQ ID NO: 37390 - DNA, 20 bp, synthetic construct
  source 1..20: mol_type = other DNA
gtgcatggaattggggctgt

SEQ ID NO: 37391 - DNA, 20 bp, synthetic construct
  source 1..20: mol_type = other DNA
cggaaataaaacctgcagga

SEQ ID NO: 37392 - DNA, 20 bp, synthetic construct
  source 1..20: mol_type = other DNA
ctccaaccagtttcagaccg

SEQ ID NO: 37393 - DNA, 20 bp, synthetic construct
  source 1..20: mol_type = other DNA
caccaccaccacccgacggc

SEQ ID NO: 37394 - DNA, 20 bp, synthetic construct
  source 1..20: mol_type = other DNA
caagcccccaattggaacct

SEQ ID NO: 37395 - DNA, 20 bp, synthetic construct
  source 1..20: mol_type = other DNA
cagagcctggcattccttag

SEQ ID NO: 37396 - DNA, 20 bp, synthetic construct
  source 1..20: mol_type = other DNA
acctggtactgcgactccag

SEQ ID NO: 37397 - DNA, 20 bp, synthetic construct
  source 1..20: mol_type = other DNA
ctcacaggtgcacatcctca

SEQ ID NO: 37398 - DNA, 20 bp, synthetic construct
  source 1..20: mol_type = other DNA
ggagcagcttcagcacgtag

SEQ ID NO: 37399 - DNA, 20 bp, synthetic construct
  source 1..20: mol_type = other DNA
tgccataggacctatacatt

SEQ ID NO: 37400 - DNA, 20 bp, synthetic construct
  source 1..20: mol_type = other DNA
tacaggtagagttggctttg

SEQ ID NO: 37401 - DNA, 20 bp, synthetic construct
  source 1..20: mol_type = other DNA
acgaatgtggaaaccatgcc

SEQ ID NO: 37402 - DNA, 20 bp, synthetic construct
  source 1..20: mol_type = other DNA
gccctgatagtttaggtgag

SEQ ID NO: 37403 - DNA, 20 bp, synthetic construct
  source 1..20: mol_type = other DNA
gaaagcaagcagctctggtt

SEQ ID NO: 37404 - DNA, 20 bp, synthetic construct
  source 1..20: mol_type = other DNA
catccacattgtcgtcacaa

SEQ ID NO: 37405 - DNA, 20 bp, synthetic construct
  source 1..20: mol_type = other DNA
aaaaaacaaacaagtgttat

SEQ ID NO: 37406 - DNA, 20 bp, synthetic construct
  source 1..20: mol_type = other DNA
caggcacgggaagaggagcc

SEQ ID NO: 37407 - DNA, 20 bp, synthetic construct
  source 1..20: mol_type = other DNA
acttccacctgcgggcaggg

SEQ ID NO: 37408 - DNA, 20 bp, synthetic construct
  source 1..20: mol_type = other DNA
cctcaagtacatctcacagc

SEQ ID NO: 37409 - DNA, 20 bp, synthetic construct
  source 1..20: mol_type = other DNA
cacatgaccagggagagtat

SEQ ID NO: 37410 - DNA, 20 bp, synthetic construct
  source 1..20: mol_type = other DNA
ctggtatagaggcaatgctt

SEQ ID NO: 37411 - DNA, 20 bp, synthetic construct
  source 1..20: mol_type = other DNA
aaaaaagctgcagcagactc

SEQ ID NO: 37412 - DNA, 20 bp, synthetic construct
  source 1..20: mol_type = other DNA
gatattgagaacgagtgtct

SEQ ID NO: 37413 - DNA, 20 bp, synthetic construct
  source 1..20: mol_type = other DNA
catgaacaaccgggaggtgc

SEQ ID NO: 37414 - DNA, 20 bp, synthetic construct
  source 1..20: mol_type = other DNA
gcagaggaagaatcttctgg

SEQ ID NO: 37415 - DNA, 20 bp, synthetic construct
  source 1..20: mol_type = other DNA
accaatgctatggaggtgag

SEQ ID NO: 37416 - DNA, 20 bp, synthetic construct
  source 1..20: mol_type = other DNA
cctttcctcatgctgccata

SEQ ID NO: 37417 - DNA, 20 bp, synthetic construct
  source 1..20: mol_type = other DNA
ctgctgctcactgatgatgg

SEQ ID NO: 37418 - DNA, 20 bp, synthetic construct
  source 1..20: mol_type = other DNA
ctcacctcccaggtgtggcc

SEQ ID NO: 37419 - DNA, 20 bp, synthetic construct
  source 1..20: mol_type = other DNA
cggctcggaaggagggcctc

SEQ ID NO: 37420 - DNA, 20 bp, synthetic construct
  source 1..20: mol_type = other DNA
acatgcaggaacagaacggg

SEQ ID NO: 37421 - DNA, 20 bp, synthetic construct
  source 1..20: mol_type = other DNA
cgacttcaagatccccattc

SEQ ID NO: 37422 - DNA, 20 bp, synthetic construct
  source 1..20: mol_type = other DNA
atcctcatctgttgtagctg

SEQ ID NO: 37423 - DNA, 20 bp, synthetic construct
  source 1..20: mol_type = other DNA
tacgccaacacagtgctgtc

SEQ ID NO: 37424 - DNA, 20 bp, synthetic construct
  source 1..20: mol_type = other DNA
ccagctgaccttcatcactg

SEQ ID NO: 37425 - DNA, 20 bp, synthetic construct
  source 1..20: mol_type = other DNA
aacctcatgctggacaagga

SEQ ID NO: 37426 - DNA, 20 bp, synthetic construct
  source 1..20: mol_type = other DNA
accaggggtccagcatgccg

SEQ ID NO: 37427 - DNA, 20 bp, synthetic construct
  source 1..20: mol_type = other DNA
cagcagcagcccgacgctgg

SEQ ID NO: 37428 - DNA, 20 bp, synthetic construct
  source 1..20: mol_type = other DNA
ctcctttccctgtcgtctta

SEQ ID NO: 37429 - DNA, 20 bp, synthetic construct
  source 1..20: mol_type = other DNA
aaagcttaagggaagaagag

SEQ ID NO: 37430 - DNA, 20 bp, synthetic construct
  source 1..20: mol_type = other DNA
ccagggcgtgatggtgggca

SEQ ID NO: 37431 - DNA, 20 bp, synthetic construct
  source 1..20: mol_type = other DNA
tgaataagtccatcagacag

SEQ ID NO: 37432 - DNA, 20 bp, synthetic construct
  source 1..20: mol_type = other DNA
gaaggccaggggctggctcc

SEQ ID NO: 37433 - DNA, 20 bp, synthetic construct
  source 1..20: mol_type = other DNA
ggtacctcttgggtttccaa

SEQ ID NO: 37434 - DNA, 20 bp, synthetic construct
  source 1..20: mol_type = other DNA
tgtgccagagcaggatctac

SEQ ID NO: 37435 - DNA, 20 bp, synthetic construct
  source 1..20: mol_type = other DNA
cacctgtgaaggcagaaggt

SEQ ID NO: 37436 - DNA, 20 bp, synthetic construct
  source 1..20: mol_type = other DNA
tcagcagtctctggagtgat

SEQ ID NO: 37437 - DNA, 20 bp, synthetic construct
  source 1..20: mol_type = other DNA
accacctgaagacacggggc

SEQ ID NO: 37438 - DNA, 20 bp, synthetic construct
  source 1..20: mol_type = other DNA
caccagtagtccccgccact

SEQ ID NO: 37439 - DNA, 20 bp, synthetic construct
  source 1..20: mol_type = other DNA
gactaacttactgagacagc

SEQ ID NO: 37440 - DNA, 20 bp, synthetic construct
  source 1..20: mol_type = other DNA
ccttgtctttacagacaacc

SEQ ID NO: 37441 - DNA, 20 bp, synthetic construct
  source 1..20: mol_type = other DNA
gcacccggacacgcaccacc

SEQ ID NO: 37442 - DNA, 20 bp, synthetic construct
  source 1..20: mol_type = other DNA
ggccgcgtagaaacgggcat

SEQ ID NO: 37443 - DNA, 20 bp, synthetic construct
  source 1..20: mol_type = other DNA
cctgcactcggagaagaacg

SEQ ID NO: 37444 - DNA, 20 bp, synthetic construct
  source 1..20: mol_type = other DNA
ctccaaagactggatggtat

SEQ ID NO: 37445 - DNA, 20 bp, synthetic construct
  source 1..20: mol_type = other DNA
ctggcagcgctgcagagcgg

SEQ ID NO: 37446 - DNA, 20 bp, synthetic construct
  source 1..20: mol_type = other DNA
gctcctctgggtcgctgtag

SEQ ID NO: 37447 - DNA, 20 bp, synthetic construct
  source 1..20: mol_type = other DNA
gaatgtgctgcatgggacac

SEQ ID NO: 37448 - DNA, 20 bp, synthetic construct
  source 1..20: mol_type = other DNA
caggccgggctgccggggcg

SEQ ID NO: 37449 - DNA, 20 bp, synthetic construct
  source 1..20: mol_type = other DNA
caaaggtgactggagggata

SEQ ID NO: 37450 - DNA, 20 bp, synthetic construct
  source 1..20: mol_type = other DNA
tttcttcagtggtcccattg

SEQ ID NO: 37451 - DNA, 20 bp, synthetic construct
  source 1..20: mol_type = other DNA
gcagaagacccgagaggtga

SEQ ID NO: 37452 - DNA, 20 bp, synthetic construct
  source 1..20: mol_type = other DNA
atcatctgcagccatttacc

SEQ ID NO: 37453 - DNA, 20 bp, synthetic construct
  source 1..20: mol_type = other DNA
ggggaagccttatctggtcc

SEQ ID NO: 37454 - DNA, 20 bp, synthetic construct
  source 1..20: mol_type = other DNA
aaaggactgatcataaggat

SEQ ID NO: 37455 - DNA, 20 bp, synthetic construct
  source 1..20: mol_type = other DNA
agcctcatagctgtggtccc

SEQ ID NO: 37456 - DNA, 20 bp, synthetic construct
  source 1..20: mol_type = other DNA
ccgccatccagcctgtcctt

SEQ ID NO: 37457 - DNA, 20 bp, synthetic construct
  source 1..20: mol_type = other DNA
cagaatatgggactttcacc

SEQ ID NO: 37458 - DNA, 20 bp, synthetic construct
  source 1..20: mol_type = other DNA
ccccggtcagtcaaggtcag

SEQ ID NO: 37459 - DNA, 20 bp, synthetic construct
  source 1..20: mol_type = other DNA
ttagaggcttgaggaaaccg

SEQ ID NO: 37460 - DNA, 20 bp, synthetic construct
  source 1..20: mol_type = other DNA
ttacaaaataacagatcttc

SEQ ID NO: 37461 - DNA, 20 bp, synthetic construct
  source 1..20: mol_type = other DNA
aacagctgaggggaggggag

SEQ ID NO: 37462 - DNA, 20 bp, synthetic construct
  source 1..20: mol_type = other DNA
tggtggaaaggagcttgcca

SEQ ID NO: 37463 - DNA, 20 bp, synthetic construct
  source 1..20: mol_type = other DNA
attgagagcactcaacaggt

SEQ ID NO: 37464 - DNA, 20 bp, synthetic construct
  source 1..20: mol_type = other DNA
ttgtatatctgaaaagaaag

SEQ ID NO: 37465 - DNA, 20 bp, synthetic construct
  source 1..20: mol_type = other DNA
tgtaggaaatacagatgaag

SEQ ID NO: 37466 - DNA, 20 bp, synthetic construct
  source 1..20: mol_type = other DNA
tcatttcgtggtggggcaga

SEQ ID NO: 37467 - DNA, 20 bp, synthetic construct
  source 1..20: mol_type = other DNA
caaacaattcatctcctacc

SEQ ID NO: 37468 - DNA, 20 bp, synthetic construct
  source 1..20: mol_type = other DNA
gcgtgaccagatcccggagt

SEQ ID NO: 37469 - DNA, 20 bp, synthetic construct
  source 1..20: mol_type = other DNA
tgggcagaagattgtggtgc

SEQ ID NO: 37470 - DNA, 20 bp, synthetic construct
  source 1..20: mol_type = other DNA
cccggggacctccacgggcc

SEQ ID NO: 37471 - DNA, 20 bp, synthetic construct
  source 1..20: mol_type = other DNA
gtgtgcccgttgtagtaccc

SEQ ID NO: 37472 - DNA, 20 bp, synthetic construct
  source 1..20: mol_type = other DNA
taccacatttgagttgatca

SEQ ID NO: 37473 - DNA, 20 bp, synthetic construct
  source 1..20: mol_type = other DNA
cgcctacccgccgcgacccc

SEQ ID NO: 37474 - DNA, 20 bp, synthetic construct
  source 1..20: mol_type = other DNA
ctggatgctgagtttgctga

SEQ ID NO: 37475 - DNA, 20 bp, synthetic construct
  source 1..20: mol_type = other DNA
ggcagccatgctgatgtctg

SEQ ID NO: 37476 - DNA, 20 bp, synthetic construct
  source 1..20: mol_type = other DNA
gagatgtcaggaaaagactc

SEQ ID NO: 37477 - DNA, 20 bp, synthetic construct
  source 1..20: mol_type = other DNA
cgactacaagcggcggaagc

SEQ ID NO: 37478 - DNA, 20 bp, synthetic construct
  source 1..20: mol_type = other DNA
ggatgacacatgcctcttcc

SEQ ID NO: 37479 - DNA, 20 bp, synthetic construct
  source 1..20: mol_type = other DNA
tacctgccgggaagatgagg

SEQ ID NO: 37480 - DNA, 20 bp, synthetic construct
  source 1..20: mol_type = other DNA
ggccttgccagtggtggccg

SEQ ID NO: 37481 - DNA, 20 bp, synthetic construct
  source 1..20: mol_type = other DNA
ggccagcaaatgatcctcac

SEQ ID NO: 37482 - DNA, 20 bp, synthetic construct
  source 1..20: mol_type = other DNA
tccgctctttctgtctcagg

SEQ ID NO: 37483 - DNA, 20 bp, synthetic construct
  source 1..20: mol_type = other DNA
cccaaggcccggtccagcac

SEQ ID NO: 37484 - DNA, 20 bp, synthetic construct
  source 1..20: mol_type = other DNA
ttgatgatgctgctccggcg

SEQ ID NO: 37485 - DNA, 20 bp, synthetic construct
  source 1..20: mol_type = other DNA
gtcgctggttctcgtggtcc

SEQ ID NO: 37486 - DNA, 20 bp, synthetic construct
  source 1..20: mol_type = other DNA
gccggggcaggtagtctcgg

SEQ ID NO: 37487 - DNA, 20 bp, synthetic construct
  source 1..20: mol_type = other DNA
gttttagatacaaatgtgaa

SEQ ID NO: 37488 - DNA, 20 bp, synthetic construct
  source 1..20: mol_type = other DNA
cgaacttttatctctacctg

SEQ ID NO: 37489 - DNA, 20 bp, synthetic construct
  source 1..20: mol_type = other DNA
ttctccatgctatttcccat

SEQ ID NO: 37490 - DNA, 20 bp, synthetic construct
  source 1..20: mol_type = other DNA
tgtagagtttgacccacccc

SEQ ID NO: 37491 - DNA, 20 bp, synthetic construct
  source 1..20: mol_type = other DNA
cagacaaggcctgggggcga

SEQ ID NO: 37492 - DNA, 20 bp, synthetic construct
  source 1..20: mol_type = other DNA
cttggatcctcaggctctcc

SEQ ID NO: 37493 - DNA, 20 bp, synthetic construct
  source 1..20: mol_type = other DNA
ccgggagcgtgtgttctccg

SEQ ID NO: 37494 - DNA, 20 bp, synthetic construct
  source 1..20: mol_type = other DNA
ggacacaatccagcctgtct

SEQ ID NO: 37495 - DNA, 20 bp, synthetic construct
  source 1..20: mol_type = other DNA
gctttagtgactcagaaatc

SEQ ID NO: 37496 - DNA, 20 bp, synthetic construct
  source 1..20: mol_type = other DNA
aatctggtagacgtgtgtgg

SEQ ID NO: 37497 - DNA, 20 bp, synthetic construct
  source 1..20: mol_type = other DNA
tcaaaagtgacttcaatctg

SEQ ID NO: 37498 - DNA, 20 bp, synthetic construct
  source 1..20: mol_type = other DNA
cgtggaaggtaagctttctc

SEQ ID NO: 37499 - DNA, 20 bp, synthetic construct
  source 1..20: mol_type = other DNA
tcctcgtcgcagtagaaata

SEQ ID NO: 37500 - DNA, 20 bp, synthetic construct
  source 1..20: mol_type = other DNA
tcaggtaagcggctgtcctc

SEQ ID NO: 37501 - DNA, 20 bp, synthetic construct
  source 1..20: mol_type = other DNA
agctgcgggaaatcctggag

SEQ ID NO: 37502 - DNA, 20 bp, synthetic construct
  source 1..20: mol_type = other DNA
tcccattgggcccccactca

SEQ ID NO: 37503 - DNA, 20 bp, synthetic construct
  source 1..20: mol_type = other DNA
gtcccagacccagcctgacc

SEQ ID NO: 37504 - DNA, 20 bp, synthetic construct
  source 1..20: mol_type = other DNA
tgtgctcagtactggggaga

SEQ ID NO: 37505 - DNA, 20 bp, synthetic construct
  source 1..20: mol_type = other DNA
ggagtcgtaggtgactttca

SEQ ID NO: 37506 - DNA, 20 bp, synthetic construct
  source 1..20: mol_type = other DNA
ctcgcagtgcttaatcgaaa

SEQ ID NO: 37507 - DNA, 20 bp, synthetic construct
  source 1..20: mol_type = other DNA
acctgagagaggaaggataa

SEQ ID NO: 37508 - DNA, 20 bp, synthetic construct
  source 1..20: mol_type = other DNA
catccagaatgtcttcctgg

SEQ ID NO: 37509 - DNA, 20 bp, synthetic construct
  source 1..20: mol_type = other DNA
ggggtagtacacggggtgcg

SEQ ID NO: 37510 - DNA, 20 bp, synthetic construct
  source 1..20: mol_type = other DNA
accccaggaccacggctccc

SEQ ID NO: 37511 - DNA, 20 bp, synthetic construct
  source 1..20: mol_type = other DNA
aacctacccttcgttccaaa

SEQ ID NO: 37512 - DNA, 20 bp, synthetic construct
  source 1..20: mol_type = other DNA
acctggctgcgtgtcagaac

SEQ ID NO: 37513 - DNA, 20 bp, synthetic construct
  source 1..20: mol_type = other DNA
gtctgggtcttcaggacctg

SEQ ID NO: 37514 - DNA, 20 bp, synthetic construct
  source 1..20: mol_type = other DNA
tttggtgtttcataatctcc

SEQ ID NO: 37515 - DNA, 20 bp, synthetic construct
  source 1..20: mol_type = other DNA
gcagccatgctgatgtctga

SEQ ID NO: 37516 - DNA, 20 bp, synthetic construct
  source 1..20: mol_type = other DNA
cccccatgccatcctgcgtc

SEQ ID NO: 37517 - DNA, 20 bp, synthetic construct
  source 1..20: mol_type = other DNA
tgttatccatgtcacactcc

SEQ ID NO: 37518 - DNA, 20 bp, synthetic construct
  source 1..20: mol_type = other DNA
gccaggacccaaaggagccc

SEQ ID NO: 37519 - DNA, 20 bp, synthetic construct
  source 1..20: mol_type = other DNA
tcactgcgctggaccagatg

SEQ ID NO: 37520 - DNA, 20 bp, synthetic construct
  source 1..20: mol_type = other DNA
cgccagctccttgtagcgct

SEQ ID NO: 37521 - DNA, 20 bp, synthetic construct
  source 1..20: mol_type = other DNA
cgtggggaccctgcagtacc

SEQ ID NO: 37522 - DNA, 20 bp, synthetic construct
  source 1..20: mol_type = other DNA
ggcctgctgctcactgatga

SEQ ID NO: 37523 - DNA, 20 bp, synthetic construct
  source 1..20: mol_type = other DNA
cctccttccttacctcatct

SEQ ID NO: 37524 - DNA, 20 bp, synthetic construct
  source 1..20: mol_type = other DNA
acagaccatgacctggatat

SEQ ID NO: 37525 - DNA, 20 bp, synthetic construct
  source 1..20: mol_type = other DNA
ccctgatgtgcccatcctgc

SEQ ID NO: 37526 - DNA, 20 bp, synthetic construct
  source 1..20: mol_type = other DNA
acacatagatgagatagctc

SEQ ID NO: 37527 - DNA, 20 bp, synthetic construct
  source 1..20: mol_type = other DNA
tccagcatgcacggccccac

SEQ ID NO: 37528 - DNA, 20 bp, synthetic construct
  source 1..20: mol_type = other DNA
agctgagtaatctagagaga

SEQ ID NO: 37529 - DNA, 20 bp, synthetic construct
  source 1..20: mol_type = other DNA
aactcaaaaattgccatggg

SEQ ID NO: 37530 - DNA, 20 bp, synthetic construct
  source 1..20: mol_type = other DNA
gggacatgctgccctgcttc

SEQ ID NO: 37531 - DNA, 20 bp, synthetic construct
  source 1..20: mol_type = other DNA
cgatgataccattccaatct

SEQ ID NO: 37532 - DNA, 20 bp, synthetic construct
  source 1..20: mol_type = other DNA
gcaaacacactgggtgagca

SEQ ID NO: 37533 - DNA, 20 bp, synthetic construct
  source 1..20: mol_type = other DNA
tacctccgtgaacctcaaca

SEQ ID NO: 37534 - DNA, 20 bp, synthetic construct
  source 1..20: mol_type = other DNA
gttacagatctaggagaggc

SEQ ID NO: 37535 - DNA, 20 bp, synthetic construct
  source 1..20: mol_type = other DNA
cggcaacgtggagcagatga

SEQ ID NO: 37536 - DNA, 20 bp, synthetic construct
  source 1..20: mol_type = other DNA
gcctccgcgtcacgaagctc

SEQ ID NO: 37537 - DNA, 20 bp, synthetic construct
  source 1..20: mol_type = other DNA
tgctgtgaagatcctgaaga

SEQ ID NO: 37538 - DNA, 20 bp, synthetic construct
  source 1..20: mol_type = other DNA
caggtgggtgcgagggtggg

SEQ ID NO: 37539 - DNA, 20 bp, synthetic construct
  source 1..20: mol_type = other DNA
agggcttctccttctgggtc

SEQ ID NO: 37540 - DNA, 20 bp, synthetic construct
  source 1..20: mol_type = other DNA
tgctggccgagtaggagaac

SEQ ID NO: 37541 - DNA, 20 bp, synthetic construct
  source 1..20: mol_type = other DNA
aggcgcgtaccaggctgtag

SEQ ID NO: 37542 - DNA, 20 bp, synthetic construct
  source 1..20: mol_type = other DNA
gacatggcctcgcagtgttg

SEQ ID NO: 37543 - DNA, 20 bp, synthetic construct
  source 1..20: mol_type = other DNA
tcacagaagtaggcccacag

SEQ ID NO: 37544 - DNA, 20 bp, synthetic construct
  source 1..20: mol_type = other DNA
cggactctgcccatggaacc

SEQ ID NO: 37545 - DNA, 20 bp, synthetic construct
  source 1..20: mol_type = other DNA
gtcaatgagatcgtccaggc

SEQ ID NO: 37546 - DNA, 20 bp, synthetic construct
  source 1..20: mol_type = other DNA
gtcaaggtttggcagattac

SEQ ID NO: 37547 - DNA, 20 bp, synthetic construct
  source 1..20: mol_type = other DNA
ctccacgggaatggcagtgc

SEQ ID NO: 37548 - DNA, 20 bp, synthetic construct
  source 1..20: mol_type = other DNA
tgtaaaaccaatgtgctgcc

SEQ ID NO: 37549 - DNA, 20 bp, synthetic construct
  source 1..20: mol_type = other DNA
tggtccaggcacacagcaaa

SEQ ID NO: 37550 - DNA, 20 bp, synthetic construct
  source 1..20: mol_type = other DNA
gccaggggacagcagggggc

SEQ ID NO: 37551 - DNA, 20 bp, synthetic construct
  source 1..20: mol_type = other DNA
accaaaggagctttgagctt

SEQ ID NO: 37552 - DNA, 20 bp, synthetic construct
  source 1..20: mol_type = other DNA
tgggagagaaggtccccggg

SEQ ID NO: 37553 - DNA, 20 bp, synthetic construct
  source 1..20: mol_type = other DNA
ggcccccgtggggtcgggct

SEQ ID NO: 37554 - DNA, 20 bp, synthetic construct
  source 1..20: mol_type = other DNA
tcggggatgctgcagaggcc

SEQ ID NO: 37555 - DNA, 20 bp, synthetic construct
  source 1..20: mol_type = other DNA
actgtgaggatcaggcggta

SEQ ID NO: 37556 - DNA, 20 bp, synthetic construct
  source 1..20: mol_type = other DNA
cgacgatggcggcgatgttg

SEQ ID NO: 37557 - DNA, 20 bp, synthetic construct
  source 1..20: mol_type = other DNA
cagagatactcacttactac

SEQ ID NO: 37558 - DNA, 20 bp, synthetic construct
  source 1..20: mol_type = other DNA
gcatcctgtcggcaatgcca

SEQ ID NO: 37559 - DNA, 20 bp, synthetic construct
  source 1..20: mol_type = other DNA
ttctccaggttgcgcagtgt

SEQ ID NO: 37560 - DNA, 20 bp, synthetic construct
  source 1..20: mol_type = other DNA
ggtccgggaaataggggact

SEQ ID NO: 37561 - DNA, 20 bp, synthetic construct
  source 1..20: mol_type = other DNA
atttggagcataccagagct

SEQ ID NO: 37562 - DNA, 20 bp, synthetic construct
  source 1..20: mol_type = other DNA
tttgacaatcgtgagtagcg

SEQ ID NO: 37563 - DNA, 20 bp, synthetic construct
  source 1..20: mol_type = other DNA
tcacctgcccaggaggaaaa

SEQ ID NO: 37564 - DNA, 20 bp, synthetic construct
  source 1..20: mol_type = other DNA
gccttaaaaataagagaaac

SEQ ID NO: 37565 - DNA, 20 bp, synthetic construct
  source 1..20: mol_type = other DNA
gtggaggtcctcttcatcct

SEQ ID NO: 37566 - DNA, 20 bp, synthetic construct
  source 1..20: mol_type = other DNA
gcagcaatgctgagttcaca

SEQ ID NO: 37567 - DNA, 20 bp, synthetic construct
  source 1..20: mol_type = other DNA
gtgccaagcggacctcgtga

SEQ ID NO: 37568 - DNA, 20 bp, synthetic construct
  source 1..20: mol_type = other DNA
gtaccttggattggggtctg

SEQ ID NO: 37569 - DNA, 20 bp, synthetic construct
  source 1..20: mol_type = other DNA
tgtggccagctgtgggcagg

SEQ ID NO: 37570 - DNA, 20 bp, synthetic construct
  source 1..20: mol_type = other DNA
actaacagtctactgaaagg

SEQ ID NO: 37571 - DNA, 20 bp, synthetic construct
  source 1..20: mol_type = other DNA
aactccaactccatgtacat

SEQ ID NO: 37572 - DNA, 20 bp, synthetic construct
  source 1..20: mol_type = other DNA
caccaccaccaccacgccgc

SEQ ID NO: 37573 - DNA, 20 bp, synthetic construct
  source 1..20: mol_type = other DNA
gcacctgcaccagctgcagc

SEQ ID NO: 37574 - DNA, 20 bp, synthetic construct
  source 1..20: mol_type = other DNA
tgcctgtttgttccggagct

SEQ ID NO: 37575 - DNA, 20 bp, synthetic construct
  source 1..20: mol_type = other DNA
ggagaaggagaacctgcggc

SEQ ID NO: 37576 - DNA, 20 bp, synthetic construct
  source 1..20: mol_type = other DNA
acagcagagagaaaccaagg

SEQ ID NO: 37577 - DNA, 20 bp, synthetic construct
  source 1..20: mol_type = other DNA
gaacgctactggatcctggg

SEQ ID NO: 37578 - DNA, 20 bp, synthetic construct
  source 1..20: mol_type = other DNA
tcagtttgtcaagaagatcc

SEQ ID NO: 37579 - DNA, 20 bp, synthetic construct
  source 1..20: mol_type = other DNA
gacctcagtgggaggtagaa

SEQ ID NO: 37580 - DNA, 20 bp, synthetic construct
  source 1..20: mol_type = other DNA
caacaacagcagcagccacc

SEQ ID NO: 37581 - DNA, 20 bp, synthetic construct
  source 1..20: mol_type = other DNA
gtccaggaaggtgttttgcg

SEQ ID NO: 37582 - DNA, 20 bp, synthetic construct
  source 1..20: mol_type = other DNA
agccctcggccgggcacgcg

SEQ ID NO: 37583 - DNA, 20 bp, synthetic construct
  source 1..20: mol_type = other DNA
tctgcccgtggatgatggct

SEQ ID NO: 37584 - DNA, 20 bp, synthetic construct
  source 1..20: mol_type = other DNA
caggtaggaagtttgggccc

SEQ ID NO: 37585 - DNA, 20 bp, synthetic construct
  source 1..20: mol_type = other DNA
ggacaaggtgaagacgctca

SEQ ID NO: 37586 - DNA, 20 bp, synthetic construct
  source 1..20: mol_type = other DNA
cgccaacatctcggggcagt

SEQ ID NO: 37587 - DNA, 20 bp, synthetic construct
  source 1..20: mol_type = other DNA
tgcgtagttgtgctgatgtg

SEQ ID NO: 37588 - DNA, 20 bp, synthetic construct
  source 1..20: mol_type = other DNA
gtcagggtgaaactcttccc

SEQ ID NO: 37589 - DNA, 20 bp, synthetic construct
  source 1..20: mol_type = other DNA
gcagagccgctccctgcagc

SEQ ID NO: 37590 - DNA, 20 bp, synthetic construct
  source 1..20: mol_type = other DNA
aagcaagcaagaagaagaag

SEQ ID NO: 37591 - DNA, 20 bp, synthetic construct
  source 1..20: mol_type = other DNA
ggccatcacattcacatggg

SEQ ID NO: 37592 - DNA, 20 bp, synthetic construct
  source 1..20: mol_type = other DNA
gaagggcgagatgtggctca

SEQ ID NO: 37593 - DNA, 20 bp, synthetic construct
  source 1..20: mol_type = other DNA
cctgcacctggcggtgatca

SEQ ID NO: 37594 - DNA, 20 bp, synthetic construct
  source 1..20: mol_type = other DNA
accaggttcttgttctcctg

SEQ ID NO: 37595 - DNA, 20 bp, synthetic construct
  source 1..20: mol_type = other DNA
ggcccctttgaccagatgaa

SEQ ID NO: 37596 - DNA, 20 bp, synthetic construct
  source 1..20: mol_type = other DNA
ctccgcagggtaccggaagc

SEQ ID NO: 37597 - DNA, 20 bp, synthetic construct
  source 1..20: mol_type = other DNA
agccctggagatgcctgacc

SEQ ID NO: 37598 - DNA, 20 bp, synthetic construct
  source 1..20: mol_type = other DNA
gacaggtggaagaacagctg

SEQ ID NO: 37599 - DNA, 20 bp, synthetic construct
  source 1..20: mol_type = other DNA
gcgagaacctgagaagaggc

SEQ ID NO: 37600 - DNA, 20 bp, synthetic construct
  source 1..20: mol_type = other DNA
tgaaggagcctgaggacagg

SEQ ID NO: 37601 - DNA, 20 bp, synthetic construct
  source 1..20: mol_type = other DNA
cagcccctatgttgaccaca

SEQ ID NO: 37602 - DNA, 20 bp, synthetic construct
  source 1..20: mol_type = other DNA
ctgcactactgggcagatgt

SEQ ID NO: 37603 - DNA, 20 bp, synthetic construct
  source 1..20: mol_type = other DNA
gacgcagccagctggagaga

SEQ ID NO: 37604 - DNA, 20 bp, synthetic construct
  source 1..20: mol_type = other DNA
actcttctccacgtccagcg

SEQ ID NO: 37605 - DNA, 20 bp, synthetic construct
  source 1..20: mol_type = other DNA
tggcgtgcagatcaatgtcc

SEQ ID NO: 37606 - DNA, 20 bp, synthetic construct
  source 1..20: mol_type = other DNA
ttaagaaggaccccaagcag

SEQ ID NO: 37607 - DNA, 20 bp, synthetic construct
  source 1..20: mol_type = other DNA
gccaccacctcagagctcag

SEQ ID NO: 37608 - DNA, 20 bp, synthetic construct
  source 1..20: mol_type = other DNA
gacttctgttccctaaagtt

SEQ ID NO: 37609 - DNA, 20 bp, synthetic construct
  source 1..20: mol_type = other DNA
ctcaatcttcatcttgtgat

SEQ ID NO: 37610 - DNA, 20 bp, synthetic construct
  source 1..20: mol_type = other DNA
cttccgggcacactgtaccc

SEQ ID NO: 37611 - DNA, 20 bp, synthetic construct
  source 1..20: mol_type = other DNA
ccaagtcacggatcctcttt

SEQ ID NO: 37612 - DNA, 20 bp, synthetic construct
  source 1..20: mol_type = other DNA
tagaatctgcaaaagaaaac

SEQ ID NO: 37613 - DNA, 20 bp, synthetic construct
  source 1..20: mol_type = other DNA
tgctggggcattcaggtaag

SEQ ID NO: 37614 - DNA, 20 bp, synthetic construct
  source 1..20: mol_type = other DNA
ggtcatagtattctctgagc

SEQ ID NO: 37615 - DNA, 20 bp, synthetic construct
  source 1..20: mol_type = other DNA
acttcagagcagtctagcgt

SEQ ID NO: 37616 - DNA, 20 bp, synthetic construct
  source 1..20: mol_type = other DNA
ggggcagggcagccgccatg

SEQ ID NO: 37617 - DNA, 20 bp, synthetic construct
  source 1..20: mol_type = other DNA
tttgctcgctgtacttctcc

SEQ ID NO: 37618 - DNA, 20 bp, synthetic construct
  source 1..20: mol_type = other DNA
cctggcccgcagtgtcccac

SEQ ID NO: 37619 - DNA, 20 bp, synthetic construct
  source 1..20: mol_type = other DNA
tacctgaagttgttgtatcc

SEQ ID NO: 37620 - DNA, 20 bp, synthetic construct
  source 1..20: mol_type = other DNA
cacaagccccactggaatga

SEQ ID NO: 37621 - DNA, 20 bp, synthetic construct
  source 1..20: mol_type = other DNA
gctcaatctaggacgaagag

SEQ ID NO: 37622 - DNA, 20 bp, synthetic construct
  source 1..20: mol_type = other DNA
tgatcatcaccaagcaggga

SEQ ID NO: 37623 - DNA, 20 bp, synthetic construct
  source 1..20: mol_type = other DNA
gccttcctggcccgtggtca

SEQ ID NO: 37624 - DNA, 20 bp, synthetic construct
  source 1..20: mol_type = other DNA
gtcactaaagcgcaacaaga

SEQ ID NO: 37625 - DNA, 20 bp, synthetic construct
  source 1..20: mol_type = other DNA
cagcgcatccctgtgtcgag

SEQ ID NO: 37626 - DNA, 20 bp, synthetic construct
  source 1..20: mol_type = other DNA
tccaggctggtcggctgctc

SEQ ID NO: 37627 - DNA, 20 bp, synthetic construct
  source 1..20: mol_type = other DNA
tctatgagctttcctatgcc

SEQ ID NO: 37628 - DNA, 20 bp, synthetic construct
  source 1..20: mol_type = other DNA
aagggccgctacagtctgca

SEQ ID NO: 37629 - DNA, 20 bp, synthetic construct
  source 1..20: mol_type = other DNA
ccgccggcttccccactgca

SEQ ID NO: 37630 - DNA, 20 bp, synthetic construct
  source 1..20: mol_type = other DNA
cgagcgctacaaggagctgg

SEQ ID NO: 37631 - DNA, 20 bp, synthetic construct
  source 1..20: mol_type = other DNA
gcaccgcaggcgcgtcttcc

SEQ ID NO: 37632 - DNA, 20 bp, synthetic construct
  source 1..20: mol_type = other DNA
ccccactggaatgatgggta

SEQ ID NO: 37633 - DNA, 20 bp, synthetic construct
  source 1..20: mol_type = other DNA
ggtgacagagaagcaggcgc

SEQ ID NO: 37634 - DNA, 20 bp, synthetic construct
  source 1..20: mol_type = other DNA
gtctcaaacataatctgaga

SEQ ID NO: 37635 - DNA, 20 bp, synthetic construct
  source 1..20: mol_type = other DNA
ccctttcccacgtggggagc

SEQ ID NO: 37636 - DNA, 20 bp, synthetic construct
  source 1..20: mol_type = other DNA
gggcatggcgtccaggacct

SEQ ID NO: 37637 - DNA, 20 bp, synthetic construct
  source 1..20: mol_type = other DNA
gcccaagaaggagcaggttc

SEQ ID NO: 37638 - DNA, 20 bp, synthetic construct
  source 1..20: mol_type = other DNA
ccagatagtgcagattgcta

SEQ ID NO: 37639 - DNA, 20 bp, synthetic construct
  source 1..20: mol_type = other DNA
ggtccctggctgaccggctg

SEQ ID NO: 37640 - DNA, 20 bp, synthetic construct
  source 1..20: mol_type = other DNA
cgccggccgtcgggtggtgg

SEQ ID NO: 37641 - DNA, 20 bp, synthetic construct
  source 1..20: mol_type = other DNA
ggagaagttcaagtagggat

SEQ ID NO: 37642 - DNA, 20 bp, synthetic construct
  source 1..20: mol_type = other DNA
cagattatctacgcacccag

SEQ ID NO: 37643 - DNA, 20 bp, synthetic construct
  source 1..20: mol_type = other DNA
tgtggggctgcaggggagct

SEQ ID NO: 37644 - DNA, 20 bp, synthetic construct
  source 1..20: mol_type = other DNA
ttcagcaactttgtcctcaa

SEQ ID NO: 37645 - DNA, 20 bp, synthetic construct
  source 1..20: mol_type = other DNA
cgtttgaactggatgcccct

SEQ ID NO: 37646 - DNA, 20 bp, synthetic construct
  source 1..20: mol_type = other DNA
tttcccaatgccgaactggg

SEQ ID NO: 37647 - DNA, 20 bp, synthetic construct
  source 1..20: mol_type = other DNA
aacagatcctccacaatcag

SEQ ID NO: 37648 - DNA, 20 bp, synthetic construct
  source 1..20: mol_type = other DNA
tctgctgggttcttcgtggt

SEQ ID NO: 37649 - DNA, 20 bp, synthetic construct
  source 1..20: mol_type = other DNA
cagttaaaacacagaccttc

SEQ ID NO: 37650 - DNA, 20 bp, synthetic construct
  source 1..20: mol_type = other DNA
gacgaaaatgcttggtgagc

SEQ ID NO: 37651 - DNA, 20 bp, synthetic construct
  source 1..20: mol_type = other DNA
ctagtgtggacatgatgcgg

SEQ ID NO: 37652 - DNA, 20 bp, synthetic construct
  source 1..20: mol_type = other DNA
gaggtgctcggcgcaggcac

SEQ ID NO: 37653 - DNA, 20 bp, synthetic construct
  source 1..20: mol_type = other DNA
ggcgaacccaatgtctattg

SEQ ID NO: 37654 - DNA, 20 bp, synthetic construct
  source 1..20: mol_type = other DNA
ggcggcggcggcggctgtag

SEQ ID NO: 37655 - DNA, 20 bp, synthetic construct
  source 1..20: mol_type = other DNA
acaagtgagtgccagtgggg

SEQ ID NO: 37656 - DNA, 20 bp, synthetic construct
  source 1..20: mol_type = other DNA
catcactccgggcaaacttt

SEQ ID NO: 37657 - DNA, 20 bp, synthetic construct
  source 1..20: mol_type = other DNA
acacagctacgggatacggc

SEQ ID NO: 37658 - DNA, 20 bp, synthetic construct
  source 1..20: mol_type = other DNA
aatgcattgaacgaatccca

SEQ ID NO: 37659 - DNA, 20 bp, synthetic construct
  source 1..20: mol_type = other DNA
gcctggcaaatccaacagaa

SEQ ID NO: 37660 - DNA, 20 bp, synthetic construct
  source 1..20: mol_type = other DNA
atctcccaaatgacgtcgag

SEQ ID NO: 37661 - DNA, 20 bp, synthetic construct
  source 1..20: mol_type = other DNA
agaagtcccaggaccagata

SEQ ID NO: 37662 - DNA, 20 bp, synthetic construct
  source 1..20: mol_type = other DNA
gaggtgaaaagaccggcagg

SEQ ID NO: 37663 - DNA, 20 bp, synthetic construct
  source 1..20: mol_type = other DNA
ggagcggctaagactgagcc

SEQ ID NO: 37664 - DNA, 20 bp, synthetic construct
  source 1..20: mol_type = other DNA
attgaagaccttggagaagc

SEQ ID NO: 37665 - DNA, 20 bp, synthetic construct
  source 1..20: mol_type = other DNA
gagaatcctgccagtccaga

SEQ ID NO: 37666 - DNA, 20 bp, synthetic construct
  source 1..20: mol_type = other DNA
taccgtccaactacgtggag

SEQ ID NO: 37667 - DNA, 20 bp, synthetic construct
  source 1..20: mol_type = other DNA
ggagaaggatgacatccaga

SEQ ID NO: 37668 - DNA, 20 bp, synthetic construct
  source 1..20: mol_type = other DNA
cgcacctggaagactactac

SEQ ID NO: 37669 - DNA, 20 bp, synthetic construct
  source 1..20: mol_type = other DNA
ccctccatcgcaccccctca

SEQ ID NO: 37670 - DNA, 20 bp, synthetic construct
  source 1..20: mol_type = other DNA
agccacgaagaggacaatgg

SEQ ID NO: 37671 - DNA, 20 bp, synthetic construct
  source 1..20: mol_type = other DNA
gaacttgcaggccttgtttg

SEQ ID NO: 37672 - DNA, 20 bp, synthetic construct
  source 1..20: mol_type = other DNA
aaatcttggtgaaggaccca

SEQ ID NO: 37673 - DNA, 20 bp, synthetic construct
  source 1..20: mol_type = other DNA
gtctgcaactaacccagaca

SEQ ID NO: 37674 - DNA, 20 bp, synthetic construct
  source 1..20: mol_type = other DNA
ccacgtcgaacacctgcccg

SEQ ID NO: 37675 - DNA, 20 bp, synthetic construct
  source 1..20: mol_type = other DNA
catgcttccgaggggctggt

SEQ ID NO: 37676 - DNA, 20 bp, synthetic construct
  source 1..20: mol_type = other DNA
aacatcagcaaagacaagac

SEQ ID NO: 37677 - DNA, 20 bp, synthetic construct
  source 1..20: mol_type = other DNA
gtggaacaagcatgaggatg

SEQ ID NO: 37678 - DNA, 20 bp, synthetic construct
  source 1..20: mol_type = other DNA
cacggccgaccagctggaga

SEQ ID NO: 37679 - DNA, 20 bp, synthetic construct
  source 1..20: mol_type = other DNA
tcggatgagcagctgtggag

SEQ ID NO: 37680 - DNA, 20 bp, synthetic construct
  source 1..20: mol_type = other DNA
cccactgcttcatggggtcg

SEQ ID NO: 37681 - DNA, 20 bp, synthetic construct
  source 1..20: mol_type = other DNA
cagactgagctgattgctgg

SEQ ID NO: 37682 - DNA, 20 bp, synthetic construct
  source 1..20: mol_type = other DNA
tcctttttcacactgacaca

SEQ ID NO: 37683 - DNA, 20 bp, synthetic construct
  source 1..20: mol_type = other DNA
ctcttacactaaggtaagcc

SEQ ID NO: 37684 - DNA, 20 bp, synthetic construct
  source 1..20: mol_type = other DNA
cggctgcggcggccccacgg

SEQ ID NO: 37685 - DNA, 20 bp, synthetic construct
  source 1..20: mol_type = other DNA
accggtgtgggtgcggatat

SEQ ID NO: 37686 - DNA, 20 bp, synthetic construct
  source 1..20: mol_type = other DNA
atcatctggctcaagatcta

SEQ ID NO: 37687 - DNA, 20 bp, synthetic construct
  source 1..20: mol_type = other DNA
gaggatcctcaggcaccccg

SEQ ID NO: 37688 - DNA, 20 bp, synthetic construct
  source 1..20: mol_type = other DNA
cccccaggagtgggccatgg

SEQ ID NO: 37689 - DNA, 20 bp, synthetic construct
  source 1..20: mol_type = other DNA
taatcaacagtggctgtgta

SEQ ID NO: 37690 - DNA, 20 bp, synthetic construct
  source 1..20: mol_type = other DNA
tggctacaaggagcggccgc

SEQ ID NO: 37691 - DNA, 20 bp, synthetic construct
  source 1..20: mol_type = other DNA
ccctctgggacaagtgctgc

SEQ ID NO: 37692 - DNA, 20 bp, synthetic construct
  source 1..20: mol_type = other DNA
tcacttcaccaggcatggtc

SEQ ID NO: 37693 - DNA, 20 bp, synthetic construct
  source 1..20: mol_type = other DNA
acacgcatggggagatactc

SEQ ID NO: 37694 - DNA, 20 bp, synthetic construct
  source 1..20: mol_type = other DNA
caaaaggacacacaatgcct

SEQ ID NO: 37695 - DNA, 20 bp, synthetic construct
  source 1..20: mol_type = other DNA
caagcagacgagcctctgcc

SEQ ID NO: 37696 - DNA, 20 bp, synthetic construct
  source 1..20: mol_type = other DNA
ccacatacttgacagccttc

SEQ ID NO: 37697 - DNA, 20 bp, synthetic construct
  source 1..20: mol_type = other DNA
ccaaacctcccattttcatc

SEQ ID NO: 37698 - DNA, 20 bp, synthetic construct
  source 1..20: mol_type = other DNA
tcgtcctcctccttgtcggg

SEQ ID NO: 37699 - DNA, 20 bp, synthetic construct
  source 1..20: mol_type = other DNA
gcagcaggttggaaggcttg

SEQ ID NO: 37700 - DNA, 20 bp, synthetic construct
  source 1..20: mol_type = other DNA
tttacagggaaggagattgg

SEQ ID NO: 37701 - DNA, 20 bp, synthetic construct
  source 1..20: mol_type = other DNA
aacatgacatcgcggaggtg

SEQ ID NO: 37702 - DNA, 20 bp, synthetic construct
  source 1..20: mol_type = other DNA
aacgaggaataataacagtt

SEQ ID NO: 37703 - DNA, 20 bp, synthetic construct
  source 1..20: mol_type = other DNA
ggccattctttggcagatgt

SEQ ID NO: 37704 - DNA, 20 bp, synthetic construct
  source 1..20: mol_type = other DNA
tcacgtcggagactgacacc

SEQ ID NO: 37705 - DNA, 20 bp, synthetic construct
  source 1..20: mol_type = other DNA
cggcccccagcaacagcttc

SEQ ID NO: 37706 - DNA, 20 bp, synthetic construct
  source 1..20: mol_type = other DNA
actcgaccccagcaccctgc

SEQ ID NO: 37707 - DNA, 20 bp, synthetic construct
  source 1..20: mol_type = other DNA
tcctcagagcccgcgtcctc

SEQ ID NO: 37708 - DNA, 20 bp, synthetic construct
  source 1..20: mol_type = other DNA
tggccactcacaggtagcct

SEQ ID NO: 37709 - DNA, 20 bp, synthetic construct
  source 1..20: mol_type = other DNA
ggactgactgggaccacagc

SEQ ID NO: 37710 - DNA, 20 bp, synthetic construct
  source 1..20: mol_type = other DNA
gtccacagagaacacaggca

SEQ ID NO: 37711 - DNA, 20 bp, synthetic construct
  source 1..20: mol_type = other DNA
agcactgcagagagcggccc

SEQ ID NO: 37712 - DNA, 20 bp, synthetic construct
  source 1..20: mol_type = other DNA
ccagtgtctgatgcctgcag

SEQ ID NO: 37713 - DNA, 20 bp, synthetic construct
  source 1..20: mol_type = other DNA
cccgtagtagaggtggtagg

SEQ ID NO: 37714 - DNA, 20 bp, synthetic construct
  source 1..20: mol_type = other DNA
gaagaacagctgcaggagga

SEQ ID NO: 37715 - DNA, 20 bp, synthetic construct
  source 1..20: mol_type = other DNA
catgaggaagcggcatgtcg

SEQ ID NO: 37716 - DNA, 20 bp, synthetic construct
  source 1..20: mol_type = other DNA
gggaaaggagctgcaggacg

SEQ ID NO: 37717 - DNA, 20 bp, synthetic construct
  source 1..20: mol_type = other DNA
gcacgagggcccggaaggcc

SEQ ID NO: 37718 - DNA, 20 bp, synthetic construct
  source 1..20: mol_type = other DNA
gcaaggctgtaatggggaac

SEQ ID NO: 37719 - DNA, 20 bp, synthetic construct
  source 1..20: mol_type = other DNA
gtgtaccgcatgcgcaagta

SEQ ID NO: 37720 - DNA, 20 bp, synthetic construct
  source 1..20: mol_type = other DNA
ctttggtggtttcactctcg

SEQ ID NO: 37721 - DNA, 20 bp, synthetic construct
  source 1..20: mol_type = other DNA
ctccaggagctgggtggctt

SEQ ID NO: 37722 - DNA, 20 bp, synthetic construct
  source 1..20: mol_type = other DNA
cccggggctgggcagcggcg

SEQ ID NO: 37723 - DNA, 20 bp, synthetic construct
  source 1..20: mol_type = other DNA
gccgtggactggtgggccct

SEQ ID NO: 37724 - DNA, 20 bp, synthetic construct
  source 1..20: mol_type = other DNA
gggcagtggtggcacacctc

SEQ ID NO: 37725 - DNA, 20 bp, synthetic construct
  source 1..20: mol_type = other DNA
gcgatgtccttaccacacca

SEQ ID NO: 37726 - DNA, 20 bp, synthetic construct
  source 1..20: mol_type = other DNA
catgaaagaggtgagtcacc

SEQ ID NO: 37727 - DNA, 20 bp, synthetic construct
  source 1..20: mol_type = other DNA
cctccacatcgtggaaaaac

SEQ ID NO: 37728 - DNA, 20 bp, synthetic construct
  source 1..20: mol_type = other DNA
cgcggatggagccgtcaccg

SEQ ID NO: 37729 - DNA, 20 bp, synthetic construct
  source 1..20: mol_type = other DNA
tcatcactcatttgaaaact

SEQ ID NO: 37730 - DNA, 20 bp, synthetic construct
  source 1..20: mol_type = other DNA
cctgcaacgctgcgagctgc

SEQ ID NO: 37731 - DNA, 20 bp, synthetic construct
  source 1..20: mol_type = other DNA
ccagggttgagccgtagaaa

SEQ ID NO: 37732 - DNA, 20 bp, synthetic construct
  source 1..20: mol_type = other DNA
aggagccagatcccaagacg

SEQ ID NO: 37733 - DNA, 20 bp, synthetic construct
  source 1..20: mol_type = other DNA
gaccaggccagaaggcttgt

SEQ ID NO: 37734 - DNA, 20 bp, synthetic construct
  source 1..20: mol_type = other DNA
tgaagtagaccccaacagca

SEQ ID NO: 37735 - DNA, 20 bp, synthetic construct
  source 1..20: mol_type = other DNA
cgttccatctccttgtcacg

SEQ ID NO: 37736 - DNA, 20 bp, synthetic construct
  source 1..20: mol_type = other DNA
aaagatggcagaagaagtgg

SEQ ID NO: 37737 - DNA, 20 bp, synthetic construct
  source 1..20: mol_type = other DNA
tcacgttatcggccgcctcc

SEQ ID NO: 37738 - DNA, 20 bp, synthetic construct
  source 1..20: mol_type = other DNA
gcacaggtcctggcagcaag

SEQ ID NO: 37739 - DNA, 20 bp, synthetic construct
  source 1..20: mol_type = other DNA
aatacttcaagaaggtgctg

SEQ ID NO: 37740 - DNA, 20 bp, synthetic construct
  source 1..20: mol_type = other DNA
agctgtggtcccagtcagtc

SEQ ID NO: 37741 - DNA, 20 bp, synthetic construct
  source 1..20: mol_type = other DNA
gtcaggagccggggataggg

SEQ ID NO: 37742 - DNA, 20 bp, synthetic construct
  source 1..20: mol_type = other DNA
caacaactcaaaaattgcca

SEQ ID NO: 37743 - DNA, 20 bp, synthetic construct
  source 1..20: mol_type = other DNA
gccgggtgagggcagccacg

SEQ ID NO: 37744 - DNA, 20 bp, synthetic construct
  source 1..20: mol_type = other DNA
cacaccccccttcagccgcc

SEQ ID NO: 37745 - DNA, 20 bp, synthetic construct
  source 1..20: mol_type = other DNA
tcttggtggaccagcaccac

SEQ ID NO: 37746 - DNA, 20 bp, synthetic construct
  source 1..20: mol_type = other DNA
cgccatcctcgaagaagacg

SEQ ID NO: 37747 - DNA, 20 bp, synthetic construct
  source 1..20: mol_type = other DNA
cggcggcggcggctccgggg

SEQ ID NO: 37748 - DNA, 20 bp, synthetic construct
  source 1..20: mol_type = other DNA
tcctacctgggtcacattgt

SEQ ID NO: 37749 - DNA, 20 bp, synthetic construct
  source 1..20: mol_type = other DNA
tcattgcaagacccattcca

SEQ ID NO: 37750 - DNA, 20 bp, synthetic construct
  source 1..20: mol_type = other DNA
cgggggccgctccatggggc

SEQ ID NO: 37751 - DNA, 20 bp, synthetic construct
  source 1..20: mol_type = other DNA
gtatgaagggagcttccacc

SEQ ID NO: 37752 - DNA, 20 bp, synthetic construct
  source 1..20: mol_type = other DNA
cgttcaagaacagagacagg

SEQ ID NO: 37753 - DNA, 20 bp, synthetic construct
  source 1..20: mol_type = other DNA
gagccgaggtgaggccgctg

SEQ ID NO: 37754 - DNA, 20 bp, synthetic construct
  source 1..20: mol_type = other DNA
aagcgaacatcagattttca

SEQ ID NO: 37755 - DNA, 20 bp, synthetic construct
  source 1..20: mol_type = other DNA
ccctgctcactgtgcgggag

SEQ ID NO: 37756 - DNA, 20 bp, synthetic construct
  source 1..20: mol_type = other DNA
cgagcagtgggtgatgagat

SEQ ID NO: 37757 - DNA, 20 bp, synthetic construct
  source 1..20: mol_type = other DNA
caagtgccggaaccgacgcc

SEQ ID NO: 37758 - DNA, 20 bp, synthetic construct
  source 1..20: mol_type = other DNA
ccctcttgaagcggcaggac

SEQ ID NO: 37759 - DNA, 20 bp, synthetic construct
  source 1..20: mol_type = other DNA
caactgcagtggccagcgtc

SEQ ID NO: 37760 - DNA, 20 bp, synthetic construct
  source 1..20: mol_type = other DNA
gcacgccttgcccgcccagg

SEQ ID NO: 37761 - DNA, 20 bp, synthetic construct
  source 1..20: mol_type = other DNA
tgtatgttgtggacgatcaa

SEQ ID NO: 37762 - DNA, 20 bp, synthetic construct
  source 1..20: mol_type = other DNA
ctggcatggcatgaatcctc

SEQ ID NO: 37763 - DNA, 20 bp, synthetic construct
  source 1..20: mol_type = other DNA
ttcagcaaggtaagggcctc

SEQ ID NO: 37764 - DNA, 20 bp, synthetic construct
  source 1..20: mol_type = other DNA
cccgagccgcaaacaggtga

SEQ ID NO: 37765 - DNA, 20 bp, synthetic construct
  source 1..20: mol_type = other DNA
tgagctgccgctggaaggct

SEQ ID NO: 37766 - DNA, 20 bp, synthetic construct
  source 1..20: mol_type = other DNA
agcagttacagctgcagtgc

SEQ ID NO: 37767 - DNA, 20 bp, synthetic construct
  source 1..20: mol_type = other DNA
acggaactagtgacggcgac

SEQ ID NO: 37768 - DNA, 20 bp, synthetic construct
  source 1..20: mol_type = other DNA
catctggctcaagatctacg

SEQ ID NO: 37769 - DNA, 20 bp, synthetic construct
  source 1..20: mol_type = other DNA
cacatagcccctttgcccct

SEQ ID NO: 37770 - DNA, 20 bp, synthetic construct
  source 1..20: mol_type = other DNA
gcagagggctgacgaggatg

SEQ ID NO: 37771 - DNA, 20 bp, synthetic construct
  source 1..20: mol_type = other DNA
cagagagaagcttcctatgg

SEQ ID NO: 37772 - DNA, 20 bp, synthetic construct
  source 1..20: mol_type = other DNA
gttgagggtgggggtggcgg

SEQ ID NO: 37773 - DNA, 20 bp, synthetic construct
  source 1..20: mol_type = other DNA
gtacatcaagacgggaaggc

SEQ ID NO: 37774 - DNA, 20 bp, synthetic construct
  source 1..20: mol_type = other DNA
cataatctggtagacgtgtg

SEQ ID NO: 37775 - DNA, 20 bp, synthetic construct
  source 1..20: mol_type = other DNA
ttcacctgtttgcggctcgg

SEQ ID NO: 37776 - DNA, 20 bp, synthetic construct
  source 1..20: mol_type = other DNA
aagtcgacatactctcggct

SEQ ID NO: 37777 - DNA, 20 bp, synthetic construct
  source 1..20: mol_type = other DNA
gccgccgggcaggaaagcga

SEQ ID NO: 37778 - DNA, 20 bp, synthetic construct
  source 1..20: mol_type = other DNA
aacttctaaggaataagaaa

SEQ ID NO: 37779 - DNA, 20 bp, synthetic construct
  source 1..20: mol_type = other DNA
tggggatcagtcgcttctga

SEQ ID NO: 37780 - DNA, 20 bp, synthetic construct
  source 1..20: mol_type = other DNA
atctgctggatgctgtgggc

SEQ ID NO: 37781 - DNA, 20 bp, synthetic construct
  source 1..20: mol_type = other DNA
gggcactctaatcgtccgcc

SEQ ID NO: 37782 - DNA, 20 bp, synthetic construct
  source 1..20: mol_type = other DNA
gtataaccaaatcaacctca

SEQ ID NO: 37783 - DNA, 20 bp, synthetic construct
  source 1..20: mol_type = other DNA
gcggagctggcgcgctgtgg

SEQ ID NO: 37784 - DNA, 20 bp, synthetic construct
  source 1..20: mol_type = other DNA
tcatcctgcagacagactgc

SEQ ID NO: 37785 - DNA, 20 bp, synthetic construct
  source 1..20: mol_type = other DNA
ctcgtcttcttcgaggatgg

SEQ ID NO: 37786 - DNA, 20 bp, synthetic construct
  source 1..20: mol_type = other DNA
gcgcagggcgatcttgatgg

SEQ ID NO: 37787 - DNA, 20 bp, synthetic construct
  source 1..20: mol_type = other DNA
gtggatcggcggctccatcc

SEQ ID NO: 37788 - DNA, 20 bp, synthetic construct
  source 1..20: mol_type = other DNA
cacagaccatgacctggata

SEQ ID NO: 37789 - DNA, 20 bp, synthetic construct
  source 1..20: mol_type = other DNA
tatgtgccctgctccttccg

SEQ ID NO: 37790 - DNA, 20 bp, synthetic construct
  source 1..20: mol_type = other DNA
cacggcgcaggaggaaacgg

SEQ ID NO: 37791 - DNA, 20 bp, synthetic construct
  source 1..20: mol_type = other DNA
ctgcaggtacacgggccgcg

SEQ ID NO: 37792 - DNA, 20 bp, synthetic construct
  source 1..20: mol_type = other DNA
ctggagatagaggagccaag

SEQ ID NO: 37793 - DNA, 20 bp, synthetic construct
  source 1..20: mol_type = other DNA
tgtagacgctgaagggcatc

SEQ ID NO: 37794 - DNA, 20 bp, synthetic construct
  source 1..20: mol_type = other DNA
aggcgcagcggcaggccgag

SEQ ID NO: 37795 - DNA, 20 bp, synthetic construct
  source 1..20: mol_type = other DNA
ctgtcttcagaatgggtatg

SEQ ID NO: 37796 - DNA, 20 bp, synthetic construct
  source 1..20: mol_type = other DNA
tctggatgtcattttctgtc

SEQ ID NO: 37797 - DNA, 20 bp, synthetic construct
  source 1..20: mol_type = other DNA
cacggccaggtgaggctgca

SEQ ID NO: 37798 - DNA, 20 bp, synthetic construct
  source 1..20: mol_type = other DNA
cgcagccccccaacactgcg

SEQ ID NO: 37799 - DNA, 20 bp, synthetic construct
  source 1..20: mol_type = other DNA
acattctcacctcccaggtg

SEQ ID NO: 37800 - DNA, 20 bp, synthetic construct
  source 1..20: mol_type = other DNA
attcagccagtggtcacagc

SEQ ID NO: 37801 - DNA, 20 bp, synthetic construct
  source 1..20: mol_type = other DNA
aagaatgttgaccaatgcta

SEQ ID NO: 37802 - DNA, 20 bp, synthetic construct
  source 1..20: mol_type = other DNA
gcagcttcctgcagaaccca

SEQ ID NO: 37803 - DNA, 20 bp, synthetic construct
  source 1..20: mol_type = other DNA
ttttccagcagctcattcag

SEQ ID NO: 37804 - DNA, 20 bp, synthetic construct
  source 1..20: mol_type = other DNA
ctgacgtgtctgaaatgagt

SEQ ID NO: 37805 - DNA, 20 bp, synthetic construct
  source 1..20: mol_type = other DNA
tgccaaccagcccctgattg

SEQ ID NO: 37806 - DNA, 20 bp, synthetic construct
  source 1..20: mol_type = other DNA
actcgacagccccgcgttct

SEQ ID NO: 37807 - DNA, 20 bp, synthetic construct
  source 1..20: mol_type = other DNA
gtgcaaagtgttcaggtggc

SEQ ID NO: 37808 - DNA, 20 bp, synthetic construct
  source 1..20: mol_type = other DNA
gagggaaatggagcaggctg

SEQ ID NO: 37809 - DNA, 20 bp, synthetic construct
  source 1..20: mol_type = other DNA
aggaactgctcaagtccatc

SEQ ID NO: 37810 - DNA, 20 bp, synthetic construct
  source 1..20: mol_type = other DNA
ccccaagctcaaagctcctt

SEQ ID NO: 37811 - DNA, 20 bp, synthetic construct
  source 1..20: mol_type = other DNA
cttgaggattcgctgcacca

SEQ ID NO: 37812 - DNA, 20 bp, synthetic construct
  source 1..20: mol_type = other DNA
tgcgcagcggacctgcaagg

SEQ ID NO: 37813 - DNA, 20 bp, synthetic construct
  source 1..20: mol_type = other DNA
ttccgcggcctcagcctggc

SEQ ID NO: 37814 - DNA, 20 bp, synthetic construct
  source 1..20: mol_type = other DNA
gacaagtggccattgtgttc

SEQ ID NO: 37815 - DNA, 20 bp, synthetic construct
  source 1..20: mol_type = other DNA
gggccccgtagtcaggctcc

SEQ ID NO: 37816 - DNA, 20 bp, synthetic construct
  source 1..20: mol_type = other DNA
cctgcagacccctctcctgg

SEQ ID NO: 37817 - DNA, 20 bp, synthetic construct
  source 1..20: mol_type = other DNA
cccaggcggacctgatcgca

SEQ ID NO: 37818 - DNA, 20 bp, synthetic construct
  source 1..20: mol_type = other DNA
aactcggcctgcacttccac

SEQ ID NO: 37819 - DNA, 20 bp, synthetic construct
  source 1..20: mol_type = other DNA
cggatggcatctggtggcag

SEQ ID NO: 37820 - DNA, 20 bp, synthetic construct
  source 1..20: mol_type = other DNA
cattgtcaatggatctcatg

SEQ ID NO: 37821 - DNA, 20 bp, synthetic construct
  source 1..20: mol_type = other DNA
caggatgaggctgaagtcct

SEQ ID NO: 37822 - DNA, 20 bp, synthetic construct
  source 1..20: mol_type = other DNA
gcagaggtgagggctggcgt

SEQ ID NO: 37823 - DNA, 20 bp, synthetic construct
  source 1..20: mol_type = other DNA
ctggtttatgccacaaaggt

SEQ ID NO: 37824 - DNA, 20 bp, synthetic construct
  source 1..20: mol_type = other DNA
cacgcgcagctcgttgtaga

SEQ ID NO: 37825 - DNA, 20 bp, synthetic construct
  source 1..20: mol_type = other DNA
gggcctctggaccggctcat

SEQ ID NO: 37826 - DNA, 20 bp, synthetic construct
  source 1..20: mol_type = other DNA
ccaggttgggcaggacccgg

SEQ ID NO: 37827 - DNA, 20 bp, synthetic construct
  source 1..20: mol_type = other DNA
accgatccgattgaagaaga

SEQ ID NO: 37828 - DNA, 20 bp, synthetic construct
  source 1..20: mol_type = other DNA
cggggctaccagggctaccc

SEQ ID NO: 37829 - DNA, 20 bp, synthetic construct
  source 1..20: mol_type = other DNA
actcagcttgatgaaggggc

SEQ ID NO: 37830 - DNA, 20 bp, synthetic construct
  source 1..20: mol_type = other DNA
ctggagcaaacacatatagg

SEQ ID NO: 37831 - DNA, 20 bp, synthetic construct
  source 1..20: mol_type = other DNA
ggagtctctcaatgtgggca

SEQ ID NO: 37832 - DNA, 20 bp, synthetic construct
  source 1..20: mol_type = other DNA
cggtgggtcctgtagggcaa

SEQ ID NO: 37833 - DNA, 20 bp, synthetic construct
  source 1..20: mol_type = other DNA
tctttgatgtgcaccctctc

SEQ ID NO: 37834 - DNA, 20 bp, synthetic construct
  source 1..20: mol_type = other DNA
gcacagccaattcaaggtcc

SEQ ID NO: 37835 - DNA, 20 bp, synthetic construct
  source 1..20: mol_type = other DNA
gcgggcaggtgttcgacgtg

SEQ ID NO: 37836 - DNA, 20 bp, synthetic construct
  source 1..20: mol_type = other DNA
ggaagttgtgaggaaagccc

SEQ ID NO: 37837 - DNA, 20 bp, synthetic construct
  source 1..20: mol_type = other DNA
tgacaaggccagggacctgc

SEQ ID NO: 37838 - DNA, 20 bp, synthetic construct
  source 1..20: mol_type = other DNA
tgtgtacacctgctggatgc

SEQ ID NO: 37839 - DNA, 20 bp, synthetic construct
  source 1..20: mol_type = other DNA
cagcaacggtgagtaaagcc

SEQ ID NO: 37840 - DNA, 20 bp, synthetic construct
  source 1..20: mol_type = other DNA
atccaggatgggctgccgct

SEQ ID NO: 37841 - DNA, 20 bp, synthetic construct
  source 1..20: mol_type = other DNA
ctacgcgctacccgcgggac

SEQ ID NO: 37842 - DNA, 20 bp, synthetic construct
  source 1..20: mol_type = other DNA
agttgcagaaacactgttac

SEQ ID NO: 37843 - DNA, 20 bp, synthetic construct
  source 1..20: mol_type = other DNA
ccggcaggacaacaagtgcc

SEQ ID NO: 37844 - DNA, 20 bp, synthetic construct
  source 1..20: mol_type = other DNA
gaatgacaccatagatgaag

SEQ ID NO: 37845 - DNA, 20 bp, synthetic construct
  source 1..20: mol_type = other DNA
gcattcaagtgctgagctcc

SEQ ID NO: 37846 - DNA, 20 bp, synthetic construct
  source 1..20: mol_type = other DNA
aatctccaaaatgatggagc

SEQ ID NO: 37847 - DNA, 20 bp, synthetic construct
  source 1..20: mol_type = other DNA
ccgggccgcagcaggtgaac

SEQ ID NO: 37848 - DNA, 20 bp, synthetic construct
  source 1..20: mol_type = other DNA
gcagagccccccaaggtaca

SEQ ID NO: 37849 - DNA, 20 bp, synthetic construct
  source 1..20: mol_type = other DNA
tctgcccctgcccgctccat

SEQ ID NO: 37850 - DNA, 20 bp, synthetic construct
  source 1..20: mol_type = other DNA
ctgattgatggcttcaggga

SEQ ID NO: 37851 - DNA, 20 bp, synthetic construct
  source 1..20: mol_type = other DNA
gctggggaagaaggtaagat

SEQ ID NO: 37852 - DNA, 20 bp, synthetic construct
  source 1..20: mol_type = other DNA
ttggcagcgtggggaaggag

SEQ ID NO: 37853 - DNA, 20 bp, synthetic construct
  source 1..20: mol_type = other DNA
gactgctcactcgcggatgc

SEQ ID NO: 37854 - DNA, 20 bp, synthetic construct
  source 1..20: mol_type = other DNA
aatggaaccactggtctcgc

SEQ ID NO: 37855 - DNA, 20 bp, synthetic construct
  source 1..20: mol_type = other DNA
tcattacccgccatgcctcc

SEQ ID NO: 37856 - DNA, 20 bp, synthetic construct
  source 1..20: mol_type = other DNA
ccaggagttcctgcggatga

SEQ ID NO: 37857 - DNA, 20 bp, synthetic construct
  source 1..20: mol_type = other DNA
tgatgtgcccatcctgctgg

SEQ ID NO: 37858 - DNA, 20 bp, synthetic construct
  source 1..20: mol_type = other DNA
cagctaccgaggtacgggcc

SEQ ID NO: 37859 - DNA, 20 bp, synthetic construct
  source 1..20: mol_type = other DNA
acggacctcggtggcctgca

SEQ ID NO: 37860 - DNA, 20 bp, synthetic construct
  source 1..20: mol_type = other DNA
gttcctgaagtgggcactga

SEQ ID NO: 37861 - DNA, 20 bp, synthetic construct
  source 1..20: mol_type = other DNA
tgtgaaggaaaaccccacca

SEQ ID NO: 37862 - DNA, 20 bp, synthetic construct
  source 1..20: mol_type = other DNA
ctgcttgatggtgctgaggt

SEQ ID NO: 37863 - DNA, 20 bp, synthetic construct
  source 1..20: mol_type = other DNA
agagctgatggagctgctcc

SEQ ID NO: 37864 - DNA, 20 bp, synthetic construct
  source 1..20: mol_type = other DNA
gcacctacggtgaggcgccc

SEQ ID NO: 37865 - DNA, 20 bp, synthetic construct
  source 1..20: mol_type = other DNA
gaacgtccagtagctggagg

SEQ ID NO: 37866 - DNA, 20 bp, synthetic construct
  source 1..20: mol_type = other DNA
tcgctgcttccaggaatgac

SEQ ID NO: 37867 - DNA, 20 bp, synthetic construct
  source 1..20: mol_type = other DNA
gaatgacgtggcatcactgt

SEQ ID NO: 37868 - DNA, 20 bp, synthetic construct
  source 1..20: mol_type = other DNA
acaagcgctgctgctgcctg

SEQ ID NO: 37869 - DNA, 20 bp, synthetic construct
  source 1..20: mol_type = other DNA
attatgtcacccccgtgaac

SEQ ID NO: 37870 - DNA, 20 bp, synthetic construct
  source 1..20: mol_type = other DNA
taaggaggaatctgtaggaa

SEQ ID NO: 37871 - DNA, 20 bp, synthetic construct
  source 1..20: mol_type = other DNA
acttctcctccgaggcggcc

SEQ ID NO: 37872 - DNA, 20 bp, synthetic construct
  source 1..20: mol_type = other DNA
gtggccccccgacaaggagg

SEQ ID NO: 37873 - DNA, 20 bp, synthetic construct
  source 1..20: mol_type = other DNA
gcagcaccgctacttctacc

SEQ ID NO: 37874 - DNA, 20 bp, synthetic construct
  source 1..20: mol_type = other DNA
ctggcagcatcgactgtgcg

SEQ ID NO: 37875 - DNA, 20 bp, synthetic construct
  source 1..20: mol_type = other DNA
actcgctggctgagaggtgc

SEQ ID NO: 37876 - DNA, 20 bp, synthetic construct
  source 1..20: mol_type = other DNA
ttcatcaagctgagtgatcc

SEQ ID NO: 37877 - DNA, 20 bp, synthetic construct
  source 1..20: mol_type = other DNA
cccaggtatgtggagactct

SEQ ID NO: 37878 - DNA, 20 bp, synthetic construct
  source 1..20: mol_type = other DNA
gctgctcggtgagggggtcg

SEQ ID NO: 37879 - DNA, 20 bp, synthetic construct
  source 1..20: mol_type = other DNA
ggaagagctgaacggggcaa

SEQ ID NO: 37880 - DNA, 20 bp, synthetic construct
  source 1..20: mol_type = other DNA
tacaatccgtaactttaccc

SEQ ID NO: 37881 - DNA, 20 bp, synthetic construct
  source 1..20: mol_type = other DNA
ggaaggtggacagtgaggcc

SEQ ID NO: 37882 - DNA, 20 bp, synthetic construct
  source 1..20: mol_type = other DNA
ctgagctcggagcgtgagga

SEQ ID NO: 37883 - DNA, 20 bp, synthetic construct
  source 1..20: mol_type = other DNA
gggttaagccaagtaactgt

SEQ ID NO: 37884 - DNA, 20 bp, synthetic construct
  source 1..20: mol_type = other DNA
aaacccttacaacacaagaa

SEQ ID NO: 37885 - DNA, 20 bp, synthetic construct
  source 1..20: mol_type = other DNA
ggaggcgcagggggaagcca

SEQ ID NO: 37886 - DNA, 20 bp, synthetic construct
  source 1..20: mol_type = other DNA
cacaaacatcctgtagtggc

SEQ ID NO: 37887 - DNA, 20 bp, synthetic construct
  source 1..20: mol_type = other DNA
ttggctgaggtttcaatgaa

SEQ ID NO: 37888 - DNA, 20 bp, synthetic construct
  source 1..20: mol_type = other DNA
accaagtgccacaaaggtag

SEQ ID NO: 37889 - DNA, 20 bp, synthetic construct
  source 1..20: mol_type = other DNA
gccagtcctctacgatacgc

SEQ ID NO: 37890 - DNA, 20 bp, synthetic construct
  source 1..20: mol_type = other DNA
atggtcatcatcaaatggaa

SEQ ID NO: 37891 - DNA, 20 bp, synthetic construct
  source 1..20: mol_type = other DNA
tccgactgctccaagagctg

SEQ ID NO: 37892 - DNA, 20 bp, synthetic construct
  source 1..20: mol_type = other DNA
ttcttggggccctggacaga

SEQ ID NO: 37893 - DNA, 20 bp, synthetic construct
  source 1..20: mol_type = other DNA
tgtactctccactgcccagc

SEQ ID NO: 37894 - DNA, 20 bp, synthetic construct
  source 1..20: mol_type = other DNA
gccgcagtgggcgaggtaag

SEQ ID NO: 37895 - DNA, 20 bp, synthetic construct
  source 1..20: mol_type = other DNA
ctctgttggccttggggttc

SEQ ID NO: 37896 - DNA, 20 bp, synthetic construct
  source 1..20: mol_type = other DNA
cacctgggtacacacagaga

SEQ ID NO: 37897 - DNA, 20 bp, synthetic construct
  source 1..20: mol_type = other DNA
tgtggggccccatctcccgc

SEQ ID NO: 37898 - DNA, 20 bp, synthetic construct
  source 1..20: mol_type = other DNA
cgggctcgcggcctgcaggt

SEQ ID NO: 37899 - DNA, 20 bp, synthetic construct
  source 1..20: mol_type = other DNA
cgtggcgtacaggcacggca

SEQ ID NO: 37900 - DNA, 20 bp, synthetic construct
  source 1..20: mol_type = other DNA
tgtccctccggctccactac

SEQ ID NO: 37901 - DNA, 20 bp, synthetic construct
  source 1..20: mol_type = other DNA
ataatctgagaagggacaag

SEQ ID NO: 37902 - DNA, 20 bp, synthetic construct
  source 1..20: mol_type = other DNA
gattccagggggaggcggtg

SEQ ID NO: 37903 - DNA, 20 bp, synthetic construct
  source 1..20: mol_type = other DNA
tggggtggtcctggcccaga

SEQ ID NO: 37904 - DNA, 20 bp, synthetic construct
  source 1..20: mol_type = other DNA
caagatctactgagtcccta

SEQ ID NO: 37905 - DNA, 20 bp, synthetic construct
  source 1..20: mol_type = other DNA
ctgcagaaaggagcaggctg

SEQ ID NO: 37906 - DNA, 20 bp, synthetic construct
  source 1..20: mol_type = other DNA
agacacaacagcattctggc

SEQ ID NO: 37907 - DNA, 20 bp, synthetic construct
  source 1..20: mol_type = other DNA
tcttctgggcgctgtacatg

SEQ ID NO: 37908 - DNA, 20 bp, synthetic construct
  source 1..20: mol_type = other DNA
ggcgcagcggcagatgacca

SEQ ID NO: 37909 - DNA, 20 bp, synthetic construct
  source 1..20: mol_type = other DNA
cgaccacgagatcgatcggc

SEQ ID NO: 37910 - DNA, 20 bp, synthetic construct
  source 1..20: mol_type = other DNA
cggcagccccaacccgacgg

SEQ ID NO: 37911 - DNA, 20 bp, synthetic construct
  source 1..20: mol_type = other DNA
tttctttcaaaggatgcaga

SEQ ID NO: 37912 - DNA, 20 bp, synthetic construct
  source 1..20: mol_type = other DNA
caagcagttcgcactacagc

SEQ ID NO: 37913 - DNA, 20 bp, synthetic construct
  source 1..20: mol_type = other DNA
tgggggaggccctgacctcc

SEQ ID NO: 37914 - DNA, 20 bp, synthetic construct
  source 1..20: mol_type = other DNA
gacgatcgtctgggaaagta

SEQ ID NO: 37915 - DNA, 20 bp, synthetic construct
  source 1..20: mol_type = other DNA
gaacttggctgcggcaactt

SEQ ID NO: 37916 - DNA, 20 bp, synthetic construct
  source 1..20: mol_type = other DNA
gcccccaggcagcacacaga

SEQ ID NO: 37917 - DNA, 20 bp, synthetic construct
  source 1..20: mol_type = other DNA
tttgtaaggtgaggactgtc

SEQ ID NO: 37918 - DNA, 20 bp, synthetic construct
  source 1..20: mol_type = other DNA
tgtgtttcctgaccgcccca

SEQ ID NO: 37919 - DNA, 20 bp, synthetic construct
  source 1..20: mol_type = other DNA
acagcagctccagcaggccg

SEQ ID NO: 37920 - DNA, 20 bp, synthetic construct
  source 1..20: mol_type = other DNA
taccatagcctggaaacaaa

SEQ ID NO: 37921 - DNA, 20 bp, synthetic construct
  source 1..20: mol_type = other DNA
ttcatctgtgcaaacctgtg

SEQ ID NO: 37922 - DNA, 20 bp, synthetic construct
  source 1..20: mol_type = other DNA
aagtgcgaggggcgctccgc

SEQ ID NO: 37923 - DNA, 20 bp, synthetic construct
  source 1..20: mol_type = other DNA
gatcgttttcactgtcggtc

SEQ ID NO: 37924 - DNA, 20 bp, synthetic construct
  source 1..20: mol_type = other DNA
caggtagaccacaaggtagt

SEQ ID NO: 37925 - DNA, 20 bp, synthetic construct
  source 1..20: mol_type = other DNA
aagcgaaaaatggaacatga

SEQ ID NO: 37926 - DNA, 20 bp, synthetic construct
  source 1..20: mol_type = other DNA
ttggagaagacctcatcctt

SEQ ID NO: 37927 - DNA, 20 bp, synthetic construct
  source 1..20: mol_type = other DNA
ttctcacctgctgggctggg

SEQ ID NO: 37928 - DNA, 20 bp, synthetic construct
  source 1..20: mol_type = other DNA
gacggtgaggctcacactgg

SEQ ID NO: 37929 - DNA, 20 bp, synthetic construct
  source 1..20: mol_type = other DNA
ccttctgtgtctgcctctgt

SEQ ID NO: 37930 - DNA, 20 bp, synthetic construct
  source 1..20: mol_type = other DNA
agcaggtaatgccagggcgg

SEQ ID NO: 37931 - DNA, 20 bp, synthetic construct
  source 1..20: mol_type = other DNA
gagaaccctccccgaggccc

SEQ ID NO: 37932 - DNA, 20 bp, synthetic construct
  source 1..20: mol_type = other DNA
aggcactctggggcatacct

SEQ ID NO: 37933 - DNA, 20 bp, synthetic construct
  source 1..20: mol_type = other DNA
gaacacgttcaaatctaggt

SEQ ID NO: 37934 - DNA, 20 bp, synthetic construct
  source 1..20: mol_type = other DNA
tcgctttgaaaaaaaaagaa

SEQ ID NO: 37935 - DNA, 20 bp, synthetic construct
  source 1..20: mol_type = other DNA
aaagaaatggtagaaggaat

SEQ ID NO: 37936 - DNA, 20 bp, synthetic construct
  source 1..20: mol_type = other DNA
ccaaactggtgcagctgtat

SEQ ID NO: 37937 - DNA, 20 bp, synthetic construct
  source 1..20: mol_type = other DNA
tccgcatctacctggagccc

SEQ ID NO: 37938 - DNA, 20 bp, synthetic construct
  source 1..20: mol_type = other DNA
atcaagcaggccccgcgcgt

SEQ ID NO: 37939 - DNA, 20 bp, synthetic construct
  source 1..20: mol_type = other DNA
tggaagggacgctggcattg

SEQ ID NO: 37940 - DNA, 20 bp, synthetic construct
  source 1..20: mol_type = other DNA
gccctggccaaccgcaagat

SEQ ID NO: 37941 - DNA, 20 bp, synthetic construct
  source 1..20: mol_type = other DNA
tacggcttcgggcaacccta

SEQ ID NO: 37942 - DNA, 20 bp, synthetic construct
  source 1..20: mol_type = other DNA
aggcagagctggaaggacgg

SEQ ID NO: 37943 - DNA, 20 bp, synthetic construct
  source 1..20: mol_type = other DNA
gacattacaagactggacct

SEQ ID NO: 37944 - DNA, 20 bp, synthetic construct
  source 1..20: mol_type = other DNA
taaagcctccagccggacct

SEQ ID NO: 37945 - DNA, 20 bp, synthetic construct
  source 1..20: mol_type = other DNA
gcaggatctgcttcttgagg

SEQ ID NO: 37946 - DNA, 20 bp, synthetic construct
  source 1..20: mol_type = other DNA
cctcttcaggagacagctag

SEQ ID NO: 37947 - DNA, 20 bp, synthetic construct
  source 1..20: mol_type = other DNA
attcaggtcttcttgtgatg

SEQ ID NO: 37948 - DNA, 20 bp, synthetic construct
  source 1..20: mol_type = other DNA
ttgggacagatgcctttcgt

SEQ ID NO: 37949 - DNA, 20 bp, synthetic construct
  source 1..20: mol_type = other DNA
agccagctggaagctgcagg

SEQ ID NO: 37950 - DNA, 20 bp, synthetic construct
  source 1..20: mol_type = other DNA
catccacctcctccggcagc

SEQ ID NO: 37951 - DNA, 20 bp, synthetic construct
  source 1..20: mol_type = other DNA
agtgtgatattggcaaaaat

SEQ ID NO: 37952 - DNA, 20 bp, synthetic construct
  source 1..20: mol_type = other DNA
actgacccagtgcgggtgga

SEQ ID NO: 37953 - DNA, 20 bp, synthetic construct
  source 1..20: mol_type = other DNA
tctgtgtggtgagtgtcgct

SEQ ID NO: 37954 - DNA, 20 bp, synthetic construct
  source 1..20: mol_type = other DNA
gtgggcatttgcctgggcgt

SEQ ID NO: 37955 - DNA, 20 bp, synthetic construct
  source 1..20: mol_type = other DNA
ccagcttcgcaagcaattgg

SEQ ID NO: 37956 - DNA, 20 bp, synthetic construct
  source 1..20: mol_type = other DNA
atggggagctggatttccag

SEQ ID NO: 37957 - DNA, 20 bp, synthetic construct
  source 1..20: mol_type = other DNA
tggagctgagcactggacca

SEQ ID NO: 37958 - DNA, 20 bp, synthetic construct
  source 1..20: mol_type = other DNA
ggtggaacagggggagctgg

SEQ ID NO: 37959 - DNA, 20 bp, synthetic construct
  source 1..20: mol_type = other DNA
tgggattacctttaatgtca

SEQ ID NO: 37960 - DNA, 20 bp, synthetic construct
  source 1..20: mol_type = other DNA
gcggaatctacagtgggcca

SEQ ID NO: 37961 - DNA, 20 bp, synthetic construct
  source 1..20: mol_type = other DNA
gcagcccgtgcagtggtgag

SEQ ID NO: 37962 - DNA, 20 bp, synthetic construct
  source 1..20: mol_type = other DNA
tcgagcatcgcatcatgttg

SEQ ID NO: 37963 - DNA, 20 bp, synthetic construct
  source 1..20: mol_type = other DNA
ctgtcccaagtgccagtatc

SEQ ID NO: 37964 - DNA, 20 bp, synthetic construct
  source 1..20: mol_type = other DNA
tgccacgcggtcaccatctc

SEQ ID NO: 37965 - DNA, 20 bp, synthetic construct
  source 1..20: mol_type = other DNA
agacccttggtgagtgcctg

SEQ ID NO: 37966 - DNA, 20 bp, synthetic construct
  source 1..20: mol_type = other DNA
caacattctcatgtgtgact

SEQ ID NO: 37967 - DNA, 20 bp, synthetic construct
  source 1..20: mol_type = other DNA
ccctaggggacttgctgcgg

SEQ ID NO: 37968 - DNA, 20 bp, synthetic construct
  source 1..20: mol_type = other DNA
ccaatgggaggaaggcccgg

SEQ ID NO: 37969 - DNA, 20 bp, synthetic construct
  source 1..20: mol_type = other DNA
aatggcaccctgccctgaga

SEQ ID NO: 37970 - DNA, 20 bp, synthetic construct
  source 1..20: mol_type = other DNA
gtgagctggagcatctggac

SEQ ID NO: 37971 - DNA, 20 bp, synthetic construct
  source 1..20: mol_type = other DNA
ctgaatgatggccggtcctg

SEQ ID NO: 37972 - DNA, 20 bp, synthetic construct
  source 1..20: mol_type = other DNA
cacggacattatctcagccc

SEQ ID NO: 37973 - DNA, 20 bp, synthetic construct
  source 1..20: mol_type = other DNA
cttgacaccatcctgttgca

SEQ ID NO: 37974 - DNA, 20 bp, synthetic construct
  source 1..20: mol_type = other DNA
gtgtagggacgtcttcccct

SEQ ID NO: 37975 - DNA, 20 bp, synthetic construct
  source 1..20: mol_type = other DNA
acctgccacccacctgcgat

SEQ ID NO: 37976 - DNA, 20 bp, synthetic construct
  source 1..20: mol_type = other DNA
actccgatggtggaacacac

SEQ ID NO: 37977 - DNA, 20 bp, synthetic construct
  source 1..20: mol_type = other DNA
cccatacccgtaaggccctg

SEQ ID NO: 37978 - DNA, 20 bp, synthetic construct
  source 1..20: mol_type = other DNA
atggttcaaaaaagtacagg

SEQ ID NO: 37979 - DNA, 20 bp, synthetic construct
  source 1..20: mol_type = other DNA
gctgcccgtcctgagcgccc

SEQ ID NO: 37980 - DNA, 20 bp, synthetic construct
  source 1..20: mol_type = other DNA
gcacccaagtcctgctgtac

SEQ ID NO: 37981 - DNA, 20 bp, synthetic construct
  source 1..20: mol_type = other DNA
ttggaagggacgctggcatt

SEQ ID NO: 37982 - DNA, 20 bp, synthetic construct
  source 1..20: mol_type = other DNA
cacatggcgtgcatgtacgt

SEQ ID NO: 37983 - DNA, 20 bp, synthetic construct
  source 1..20: mol_type = other DNA
gcgtccgtgtcaggagcgat

SEQ ID NO: 37984 - DNA, 20 bp, synthetic construct
  source 1..20: mol_type = other DNA
ttgatgctccaaatccatat

SEQ ID NO: 37985 - DNA, 20 bp, synthetic construct
  source 1..20: mol_type = other DNA
acagaagaagcgcacgctga

SEQ ID NO: 37986 - DNA, 20 bp, synthetic construct
  source 1..20: mol_type = other DNA
ggaccgcacaggcctcattg

SEQ ID NO: 37987 - DNA, 20 bp, synthetic construct
  source 1..20: mol_type = other DNA
ggatctgtccagaaccgcag

SEQ ID NO: 37988 - DNA, 20 bp, synthetic construct
  source 1..20: mol_type = other DNA
acttcttgtgtggtattgtc

SEQ ID NO: 37989 - DNA, 20 bp, synthetic construct
  source 1..20: mol_type = other DNA
catgacagatactgggacag

SEQ ID NO: 37990 - DNA, 20 bp, synthetic construct
  source 1..20: mol_type = other DNA
ctggaagcgcaggtccatgt

SEQ ID NO: 37991 - DNA, 20 bp, synthetic construct
  source 1..20: mol_type = other DNA
gaggcgaacacacaacgtct

SEQ ID NO: 37992 - DNA, 20 bp, synthetic construct
  source 1..20: mol_type = other DNA
acttacggttgtcataaatt

SEQ ID NO: 37993 - DNA, 20 bp, synthetic construct
  source 1..20: mol_type = other DNA
gtgccatctctcaatgttga

SEQ ID NO: 37994 - DNA, 20 bp, synthetic construct
  source 1..20: mol_type = other DNA
gctcaccttttcttcagtag

SEQ ID NO: 37995 - DNA, 20 bp, synthetic construct
  source 1..20: mol_type = other DNA
ccattttagcagtcagctcc

SEQ ID NO: 37996 - DNA, 20 bp, synthetic construct
  source 1..20: mol_type = other DNA
gatgccccttggatacaaac

SEQ ID NO: 37997 - DNA, 20 bp, synthetic construct
  source 1..20: mol_type = other DNA
ctccctcataaaatcaaagg

SEQ ID NO: 37998 - DNA, 20 bp, synthetic construct
  source 1..20: mol_type = other DNA
aaacagtacatgcagctcgg

SEQ ID NO: 37999 - DNA, 20 bp, synthetic construct
  source 1..20: mol_type = other DNA
cagcgagtagagctccacgg

SEQ ID NO: 38000 - DNA, 20 bp, synthetic construct
  source 1..20: mol_type = other DNA
caagcctctaaaactagcat

SEQ ID NO: 38001 - DNA, 20 bp, synthetic construct
  source 1..20: mol_type = other DNA
cttccaaaagctcttcagac

SEQ ID NO: 38002 - DNA, 20 bp, synthetic construct
  source 1..20: mol_type = other DNA
cgtcctgcgccgtcagcagg

SEQ ID NO: 38003 - DNA, 20 bp, synthetic construct
  source 1..20: mol_type = other DNA
ccactacactcaacacgccg

SEQ ID NO: 38004 - DNA, 20 bp, synthetic construct
  source 1..20: mol_type = other DNA
agcatgtcctgtggagggaa

SEQ ID NO: 38005 - DNA, 20 bp, synthetic construct
  source 1..20: mol_type = other DNA
ttgcaataccagcatcacat

SEQ ID NO: 38006 - DNA, 20 bp, synthetic construct
  source 1..20: mol_type = other DNA
tgttcgcttcaggctgatgg

SEQ ID NO: 38007 - DNA, 20 bp, synthetic construct
  source 1..20: mol_type = other DNA
gcaaaccaggactcctccac

SEQ ID NO: 38008 - DNA, 20 bp, synthetic construct
  source 1..20: mol_type = other DNA
ctgcaaaatgaaaaagaggg

SEQ ID NO: 38009 - DNA, 20 bp, synthetic construct
  source 1..20: mol_type = other DNA
cccgacgatggaaggaaaca

SEQ ID NO: 38010 - DNA, 20 bp, synthetic construct
  source 1..20: mol_type = other DNA
aacagttgttctgtaaatgg

SEQ ID NO: 38011 - DNA, 20 bp, synthetic construct
  source 1..20: mol_type = other DNA
ttggcaactttgaatttcca

SEQ ID NO: 38012 - DNA, 20 bp, synthetic construct
  source 1..20: mol_type = other DNA
cactaaggaatgccaggctc

SEQ ID NO: 38013 - DNA, 20 bp, synthetic construct
  source 1..20: mol_type = other DNA
ggagctggagctgctgcagg

SEQ ID NO: 38014 - DNA, 20 bp, synthetic construct
  source 1..20: mol_type = other DNA
tggtacccaccttcactctc

SEQ ID NO: 38015 - DNA, 20 bp, synthetic construct
  source 1..20: mol_type = other DNA
gcaggatccagggcactgat

SEQ ID NO: 38016 - DNA, 20 bp, synthetic construct
  source 1..20: mol_type = other DNA
ggttacctgggatctgccca

SEQ ID NO: 38017 - DNA, 20 bp, synthetic construct
  source 1..20: mol_type = other DNA
gggcgggtcacggcctggtg

SEQ ID NO: 38018 - DNA, 20 bp, synthetic construct
  source 1..20: mol_type = other DNA
gggggcggccgagggcggca

SEQ ID NO: 38019 - DNA, 20 bp, synthetic construct
  source 1..20: mol_type = other DNA
caagtcccataaaatgctgt

SEQ ID NO: 38020 - DNA, 20 bp, synthetic construct
  source 1..20: mol_type = other DNA
ctggctcaacaaggacaagg

SEQ ID NO: 38021 - DNA, 20 bp, synthetic construct
  source 1..20: mol_type = other DNA
actccggggggctgtacact

SEQ ID NO: 38022 - DNA, 20 bp, synthetic construct
  source 1..20: mol_type = other DNA
aaacctcctcctggcccgtg

SEQ ID NO: 38023 - DNA, 20 bp, synthetic construct
  source 1..20: mol_type = other DNA
agctcagctcctgccagcca

SEQ ID NO: 38024 - DNA, 20 bp, synthetic construct
  source 1..20: mol_type = other DNA
cgagcaacagctccgggggc

SEQ ID NO: 38025 - DNA, 20 bp, synthetic construct
  source 1..20: mol_type = other DNA
cactacactcaacacgccgc

SEQ ID NO: 38026 - DNA, 20 bp, synthetic construct
  source 1..20: mol_type = other DNA
cccctatgatggcatccacc

SEQ ID NO: 38027 - DNA, 20 bp, synthetic construct
  source 1..20: mol_type = other DNA
tcagcagcgcttcggggcca

SEQ ID NO: 38028 - DNA, 20 bp, synthetic construct
  source 1..20: mol_type = other DNA
gcagctccagagtcaccagg

SEQ ID NO: 38029 - DNA, 20 bp, synthetic construct
  source 1..20: mol_type = other DNA
gaccaggatggggaggatga

SEQ ID NO: 38030 - DNA, 20 bp, synthetic construct
  source 1..20: mol_type = other DNA
acttaccagcttctggcacc

SEQ ID NO: 38031 - DNA, 20 bp, synthetic construct
  source 1..20: mol_type = other DNA
agcatgggctcagttgtgtg

SEQ ID NO: 38032 - DNA, 20 bp, synthetic construct
  source 1..20: mol_type = other DNA
actacgccatgaagatcctg

SEQ ID NO: 38033 - DNA, 20 bp, synthetic construct
  source 1..20: mol_type = other DNA
cttactgctggtgttccaga

SEQ ID NO: 38034 - DNA, 20 bp, synthetic construct
  source 1..20: mol_type = other DNA
cttaatagcaacaatctggc

SEQ ID NO: 38035 - DNA, 20 bp, synthetic construct
  source 1..20: mol_type = other DNA
gcacccagagaagtgcaggt

SEQ ID NO: 38036 - DNA, 20 bp, synthetic construct
  source 1..20: mol_type = other DNA
gctggtgggtggcctgtgag

SEQ ID NO: 38037 - DNA, 20 bp, synthetic construct
  source 1..20: mol_type = other DNA
gaagaccaggtgtctgggaa

SEQ ID NO: 38038 - DNA, 20 bp, synthetic construct
  source 1..20: mol_type = other DNA
ccattagcaaacacgtccag

SEQ ID NO: 38039 - DNA, 20 bp, synthetic construct
  source 1..20: mol_type = other DNA
cctgcagaaaggtaaatatg

SEQ ID NO: 38040 - DNA, 20 bp, synthetic construct
  source 1..20: mol_type = other DNA
atccttttgttcaatatcag

SEQ ID NO: 38041 - DNA, 20 bp, synthetic construct
  source 1..20: mol_type = other DNA
cacccgcaccacgccgccgg

SEQ ID NO: 38042 - DNA, 20 bp, synthetic construct
  source 1..20: mol_type = other DNA
ttacagatttttcaaataag

SEQ ID NO: 38043 - DNA, 20 bp, synthetic construct
  source 1..20: mol_type = other DNA
ctggcactggccaaggagat

SEQ ID NO: 38044 - DNA, 20 bp, synthetic construct
  source 1..20: mol_type = other DNA
cacgcatgccaggcctggtt

SEQ ID NO: 38045 - DNA, 20 bp, synthetic construct
  source 1..20: mol_type = other DNA
tcaacagctttagctgtcaa

SEQ ID NO: 38046 - DNA, 20 bp, synthetic construct
  source 1..20: mol_type = other DNA
catcttgtgcagatcgtcca

SEQ ID NO: 38047 - DNA, 20 bp, synthetic construct
  source 1..20: mol_type = other DNA
ctttggaacgaagggtaggt

SEQ ID NO: 38048 - DNA, 20 bp, synthetic construct
  source 1..20: mol_type = other DNA
caatcttcatcttgtgatag

SEQ ID NO: 38049 - DNA, 20 bp, synthetic construct
  source 1..20: mol_type = other DNA
gcagccgtgtccctatggta

SEQ ID NO: 38050 - DNA, 20 bp, synthetic construct
  source 1..20: mol_type = other DNA
cacggtcagccgcagcctcg

SEQ ID NO: 38051 - DNA, 20 bp, synthetic construct
  source 1..20: mol_type = other DNA
tttaaggataactaccttgg

SEQ ID NO: 38052 - DNA, 20 bp, synthetic construct
  source 1..20: mol_type = other DNA
tgtgcggaagtgcgtgtcgc

SEQ ID NO: 38053 - DNA, 20 bp, synthetic construct
  source 1..20: mol_type = other DNA
gcttcccaatttgaaggaag

SEQ ID NO: 38054 - DNA, 20 bp, synthetic construct
  source 1..20: mol_type = other DNA
ctcaagatctacggggagga

SEQ ID NO: 38055 - DNA, 20 bp, synthetic construct
  source 1..20: mol_type = other DNA
gcccgccgcggcgtcggggt

SEQ ID NO: 38056 - DNA, 20 bp, synthetic construct
  source 1..20: mol_type = other DNA
gatctggcagaacttcgact

SEQ ID NO: 38057 - DNA, 20 bp, synthetic construct
  source 1..20: mol_type = other DNA
ctcggtcgatcctgtagaag

SEQ ID NO: 38058 - DNA, 20 bp, synthetic construct
  source 1..20: mol_type = other DNA
aatggagattgcccggattg

SEQ ID NO: 38059 - DNA, 20 bp, synthetic construct
  source 1..20: mol_type = other DNA
ggcgctgcagtttcaccagg

SEQ ID NO: 38060 - DNA, 20 bp, synthetic construct
  source 1..20: mol_type = other DNA
gccacctcaatctccacaaa

SEQ ID NO: 38061 - DNA, 20 bp, synthetic construct
  source 1..20: mol_type = other DNA
cactcacagctgcatgtctc

SEQ ID NO: 38062 - DNA, 20 bp, synthetic construct
  source 1..20: mol_type = other DNA
cagggggcctgccctagggg

SEQ ID NO: 38063 - DNA, 20 bp, synthetic construct
  source 1..20: mol_type = other DNA
tcccagggtgggtacatggt

SEQ ID NO: 38064 - DNA, 20 bp, synthetic construct
  source 1..20: mol_type = other DNA
cggacgttctcataagaggc

SEQ ID NO: 38065 - DNA, 20 bp, synthetic construct
  source 1..20: mol_type = other DNA
cacagagcttgatctcccca

SEQ ID NO: 38066 - DNA, 20 bp, synthetic construct
  source 1..20: mol_type = other DNA
ggggatgtactctccgggaa

SEQ ID NO: 38067 - DNA, 20 bp, synthetic construct
  source 1..20: mol_type = other DNA
cgcagtgctgaccttgatgg

SEQ ID NO: 38068 - DNA, 20 bp, synthetic construct
  source 1..20: mol_type = other DNA
tggtgctgaggttggcattg

SEQ ID NO: 38069 - DNA, 20 bp, synthetic construct
  source 1..20: mol_type = other DNA
gcaaaaccacgaagagataa

SEQ ID NO: 38070 - DNA, 20 bp, synthetic construct
  source 1..20: mol_type = other DNA
cccaaacagtacatgcagct

SEQ ID NO: 38071 - DNA, 20 bp, synthetic construct
  source 1..20: mol_type = other DNA
agctcacttacagcactcaa

SEQ ID NO: 38072 - DNA, 20 bp, synthetic construct
  source 1..20: mol_type = other DNA
gctcatctgcctgcccgagg

SEQ ID NO: 38073 - DNA, 20 bp, synthetic construct
  source 1..20: mol_type = other DNA
cgaggtgctcaagagtgtgg

SEQ ID NO: 38074 - DNA, 20 bp, synthetic construct
  source 1..20: mol_type = other DNA
aaagccatggcctacaagga

SEQ ID NO: 38075 - DNA, 20 bp, synthetic construct
  source 1..20: mol_type = other DNA
cgaggagcacctgaagctgg

SEQ ID NO: 38076 - DNA, 20 bp, synthetic construct
  source 1..20: mol_type = other DNA
acagatcctgtgcttgatgc

SEQ ID NO: 38077 - DNA, 20 bp, synthetic construct
  source 1..20: mol_type = other DNA
tggcaggtcaaggatagcac

SEQ ID NO: 38078 - DNA, 20 bp, synthetic construct
  source 1..20: mol_type = other DNA
ctacaagcggcggaagcagg

SEQ ID NO: 38079 - DNA, 20 bp, synthetic construct
  source 1..20: mol_type = other DNA
ttcatcttttccttcttggg

SEQ ID NO: 38080 - DNA, 20 bp, synthetic construct
  source 1..20: mol_type = other DNA
cgcaggtgggtggcaggtga

SEQ ID NO: 38081 - DNA, 20 bp, synthetic construct
  source 1..20: mol_type = other DNA
accgatgagggagttgaggg

SEQ ID NO: 38082 - DNA, 20 bp, synthetic construct
  source 1..20: mol_type = other DNA
gctggaaaaccaaagtgaac

SEQ ID NO: 38083 - DNA, 20 bp, synthetic construct
  source 1..20: mol_type = other DNA
ctaaagctcacaaacaacaa

SEQ ID NO: 38084 - DNA, 20 bp, synthetic construct
  source 1..20: mol_type = other DNA
ctcagggcggctgtaaggga

SEQ ID NO: 38085 - DNA, 20 bp, synthetic construct
  source 1..20: mol_type = other DNA
aaacttcgagatacagcaga

SEQ ID NO: 38086 - DNA, 20 bp, synthetic construct
  source 1..20: mol_type = other DNA
gctggtcagtctcaccctca

SEQ ID NO: 38087 - DNA, 20 bp, synthetic construct
  source 1..20: mol_type = other DNA
caggcactcacagcggtcag

SEQ ID NO: 38088 - DNA, 20 bp, synthetic construct
  source 1..20: mol_type = other DNA
cagagaaaggacttttccac

SEQ ID NO: 38089 - DNA, 20 bp, synthetic construct
  source 1..20: mol_type = other DNA
gctctgcaggatggcgccgg

SEQ ID NO: 38090 - DNA, 20 bp, synthetic construct
  source 1..20: mol_type = other DNA
tatcataaccaaaggaggtg

SEQ ID NO: 38091 - DNA, 20 bp, synthetic construct
  source 1..20: mol_type = other DNA
ataggtagggctgtggttaa

SEQ ID NO: 38092 - DNA, 20 bp, synthetic construct
  source 1..20: mol_type = other DNA
tggggcctgcagcaacagga

SEQ ID NO: 38093 - DNA, 20 bp, synthetic construct
  source 1..20: mol_type = other DNA
cactcagacggtccagcatc

SEQ ID NO: 38094 - DNA, 20 bp, synthetic construct
  source 1..20: mol_type = other DNA
accttatttgaccttcttct

SEQ ID NO: 38095 - DNA, 20 bp, synthetic construct
  source 1..20: mol_type = other DNA
ctgttaagattattggggta

SEQ ID NO: 38096 - DNA, 20 bp, synthetic construct
  source 1..20: mol_type = other DNA
ggcccagaacttgaaggact

SEQ ID NO: 38097 - DNA, 20 bp, synthetic construct
  source 1..20: mol_type = other DNA
ctggagacaacagggggtag

SEQ ID NO: 38098 - DNA, 20 bp, synthetic construct
  source 1..20: mol_type = other DNA
taagacaagaccatcaaatc

SEQ ID NO: 38099 - DNA, 20 bp, synthetic construct
  source 1..20: mol_type = other DNA
tgggagatgcgggagcggct

SEQ ID NO: 38100 - DNA, 20 bp, synthetic construct
  source 1..20: mol_type = other DNA
ggagacagggactgcgctcc

SEQ ID NO: 38101 - DNA, 20 bp, synthetic construct
  source 1..20: mol_type = other DNA
gcatgaggttctccagctag

SEQ ID NO: 38102 - DNA, 20 bp, synthetic construct
  source 1..20: mol_type = other DNA
atatgccgttcagatttgta

SEQ ID NO: 38103 - DNA, 20 bp, synthetic construct
  source 1..20: mol_type = other DNA
acagacgttcccgaagccgc

SEQ ID NO: 38104 - DNA, 20 bp, synthetic construct
  source 1..20: mol_type = other DNA
taagccgcacgccttctacc

SEQ ID NO: 38105 - DNA, 20 bp, synthetic construct
  source 1..20: mol_type = other DNA
tccttaccattttcacaagc

SEQ ID NO: 38106 - DNA, 20 bp, synthetic construct
  source 1..20: mol_type = other DNA
ccgctcacctgacttgcaga

SEQ ID NO: 38107 - DNA, 20 bp, synthetic construct
  source 1..20: mol_type = other DNA
agccccggaacctgcaggta

SEQ ID NO: 38108 - DNA, 20 bp, synthetic construct
  source 1..20: mol_type = other DNA
ctcaccaatgcggccggact

SEQ ID NO: 38109 - DNA, 20 bp, synthetic construct
  source 1..20: mol_type = other DNA
ccgcagtgtcccacaggttc

SEQ ID NO: 38110 - DNA, 20 bp, synthetic construct
  source 1..20: mol_type = other DNA
tccatgtcttctcatcatga

SEQ ID NO: 38111 - DNA, 20 bp, synthetic construct
  source 1..20: mol_type = other DNA
ttgacaatcgtgagtagcga

SEQ ID NO: 38112 - DNA, 20 bp, synthetic construct
  source 1..20: mol_type = other DNA
gcagggaattcagctgaaca

SEQ ID NO: 38113 - DNA, 20 bp, synthetic construct
  source 1..20: mol_type = other DNA
ccgggaccgaaacctagccc

SEQ ID NO: 38114 - DNA, 20 bp, synthetic construct
  source 1..20: mol_type = other DNA
tttacccccagcagaggtga

SEQ ID NO: 38115 - DNA, 20 bp, synthetic construct
  source 1..20: mol_type = other DNA
ctcccaggtgtggccaaacg

SEQ ID NO: 38116 - DNA, 20 bp, synthetic construct
  source 1..20: mol_type = other DNA
tgccctgcgtgaccagatcc

SEQ ID NO: 38117 - DNA, 20 bp, synthetic construct
  source 1..20: mol_type = other DNA
attcattacctcacaggtca

SEQ ID NO: 38118 - DNA, 20 bp, synthetic construct
  source 1..20: mol_type = other DNA
aacctctgggaggggcagag

SEQ ID NO: 38119 - DNA, 20 bp, synthetic construct
  source 1..20: mol_type = other DNA
gtactcaggggtgccgcaca

SEQ ID NO: 38120 - DNA, 20 bp, synthetic construct
  source 1..20: mol_type = other DNA
tgtccttcataacctaggag

SEQ ID NO: 38121 - DNA, 20 bp, synthetic construct
  source 1..20: mol_type = other DNA
ctacaggatgtttgtggacg

SEQ ID NO: 38122 - DNA, 20 bp, synthetic construct
  source 1..20: mol_type = other DNA
gtcatggagtgcattgagta

SEQ ID NO: 38123 - DNA, 20 bp, synthetic construct
  source 1..20: mol_type = other DNA
gctgctggtggccaaggagg

SEQ ID NO: 38124 - DNA, 20 bp, synthetic construct
  source 1..20: mol_type = other DNA
ccccacagcagccgtggtga

SEQ ID NO: 38125 - DNA, 20 bp, synthetic construct
  source 1..20: mol_type = other DNA
cactgtctgtacatacattt

SEQ ID NO: 38126 - DNA, 20 bp, synthetic construct
  source 1..20: mol_type = other DNA
gctgccgcccaaggaggcgc

SEQ ID NO: 38127 - DNA, 20 bp, synthetic construct
  source 1..20: mol_type = other DNA
gcagccgggctagcgcctcc

SEQ ID NO: 38128 - DNA, 20 bp, synthetic construct
  source 1..20: mol_type = other DNA
aagatgggatgagaaaggac

SEQ ID NO: 38129 - DNA, 20 bp, synthetic construct
  source 1..20: mol_type = other DNA
ccaactaaatcatgaggatg

SEQ ID NO: 38130 - DNA, 20 bp, synthetic construct
  source 1..20: mol_type = other DNA
caggaggtgaataggtcagc

SEQ ID NO: 38131 - DNA, 20 bp, synthetic construct
  source 1..20: mol_type = other DNA
ggaggtgagcttgggtgagc

SEQ ID NO: 38132 - DNA, 20 bp, synthetic construct
  source 1..20: mol_type = other DNA
gtagtgctgcgcgtgcagat

SEQ ID NO: 38133 - DNA, 20 bp, synthetic construct
  source 1..20: mol_type = other DNA
gagggaggctggtaagccag

SEQ ID NO: 38134 - DNA, 20 bp, synthetic construct
  source 1..20: mol_type = other DNA
cctttccagagcgacgtaag

SEQ ID NO: 38135 - DNA, 20 bp, synthetic construct
  source 1..20: mol_type = other DNA
cctcatgctggtcatggaga

SEQ ID NO: 38136 - DNA, 20 bp, synthetic construct
  source 1..20: mol_type = other DNA
cccccgccgccgctgctccc

SEQ ID NO: 38137 - DNA, 20 bp, synthetic construct
  source 1..20: mol_type = other DNA
cttgtccctccaagaactcc

SEQ ID NO: 38138 - DNA, 20 bp, synthetic construct
  source 1..20: mol_type = other DNA
agccacctgcgaatccacac

SEQ ID NO: 38139 - DNA, 20 bp, synthetic construct
  source 1..20: mol_type = other DNA
tctacaattggtccaggtag

SEQ ID NO: 38140 - DNA, 20 bp, synthetic construct
  source 1..20: mol_type = other DNA
gtgctatccctgtacgcctc

SEQ ID NO: 38141 - DNA, 20 bp, synthetic construct
  source 1..20: mol_type = other DNA
tcttgatacaggtttaattc

SEQ ID NO: 38142 - DNA, 20 bp, synthetic construct
  source 1..20: mol_type = other DNA
gactaaagtcaaagacagag

SEQ ID NO: 38143 - DNA, 20 bp, synthetic construct
  source 1..20: mol_type = other DNA
gcaaggaggtggcaccgccg

SEQ ID NO: 38144 - DNA, 20 bp, synthetic construct
  source 1..20: mol_type = other DNA
atgcatccaattgagcctgg

SEQ ID NO: 38145 - DNA, 20 bp, synthetic construct
  source 1..20: mol_type = other DNA
atcatcaatggactccactg

SEQ ID NO: 38146 - DNA, 20 bp, synthetic construct
  source 1..20: mol_type = other DNA
cagctcgtcatccaggatga

SEQ ID NO: 38147 - DNA, 20 bp, synthetic construct
  source 1..20: mol_type = other DNA
agaggatgggagagggttca

SEQ ID NO: 38148 - DNA, 20 bp, synthetic construct
  source 1..20: mol_type = other DNA
cgggcagctcatcgactcca

SEQ ID NO: 38149 - DNA, 20 bp, synthetic construct
  source 1..20: mol_type = other DNA
tcatagtctgggttgggaac

SEQ ID NO: 38150 - DNA, 20 bp, synthetic construct
  source 1..20: mol_type = other DNA
tctttgactacaaggcccag

SEQ ID NO: 38151 - DNA, 20 bp, synthetic construct
  source 1..20: mol_type = other DNA
ctacggcgcctcaaggagca

SEQ ID NO: 38152 - DNA, 20 bp, synthetic construct
  source 1..20: mol_type = other DNA
gcaggccagcgtctgtgacc

SEQ ID NO: 38153 - DNA, 20 bp, synthetic construct
  source 1..20: mol_type = other DNA
gcggacctgcaaggcggcgg

SEQ ID NO: 38154 - DNA, 20 bp, synthetic construct
  source 1..20: mol_type = other DNA
cggaggtacagaccttctcc

SEQ ID NO: 38155 - DNA, 20 bp, synthetic construct
  source 1..20: mol_type = other DNA
gcacagggaggagtggatgc

SEQ ID NO: 38156 - DNA, 20 bp, synthetic construct
  source 1..20: mol_type = other DNA
gcgggtaggcgtaggctcca

SEQ ID NO: 38157 - DNA, 20 bp, synthetic construct
  source 1..20: mol_type = other DNA
acgggtctgagatgtccagc

SEQ ID NO: 38158 - DNA, 20 bp, synthetic construct
  source 1..20: mol_type = other DNA
ttaatctgcatctctagcca

SEQ ID NO: 38159 - DNA, 20 bp, synthetic construct
  source 1..20: mol_type = other DNA
gcaggccgagcggctgctgc

SEQ ID NO: 38160 - DNA, 20 bp, synthetic construct
  source 1..20: mol_type = other DNA
atggtgatgacctggccgtc

SEQ ID NO: 38161 - DNA, 20 bp, synthetic construct
  source 1..20: mol_type = other DNA
atgtcagggccatgtccacc

SEQ ID NO: 38162 - DNA, 20 bp, synthetic construct
  source 1..20: mol_type = other DNA
gcaggtgaggcccaaggccc

SEQ ID NO: 38163 - DNA, 20 bp, synthetic construct
  source 1..20: mol_type = other DNA
ggaggagaggaggaggtgag

SEQ ID NO: 38164 - DNA, 20 bp, synthetic construct
  source 1..20: mol_type = other DNA
ataagctggtagactactac

SEQ ID NO: 38165 - DNA, 20 bp, synthetic construct
  source 1..20: mol_type = other DNA
tggaggacctgggaaggagg

SEQ ID NO: 38166 - DNA, 20 bp, synthetic construct
  source 1..20: mol_type = other DNA
ggagcaggagcaattcagtt

SEQ ID NO: 38167 - DNA, 20 bp, synthetic construct
  source 1..20: mol_type = other DNA
ggcaacaagtcctttgccaa

SEQ ID NO: 38168 - DNA, 20 bp, synthetic construct
  source 1..20: mol_type = other DNA
tgcacattaacgcatgctgc

SEQ ID NO: 38169 - DNA, 20 bp, synthetic construct
  source 1..20: mol_type = other DNA
cggggcagcagctttctggg

SEQ ID NO: 38170 - DNA, 20 bp, synthetic construct
  source 1..20: mol_type = other DNA
tgcagactatgggaagggat

SEQ ID NO: 38171 - DNA, 20 bp, synthetic construct
  source 1..20: mol_type = other DNA
gaacttcaggcactcggcgc

SEQ ID NO: 38172 - DNA, 20 bp, synthetic construct
  source 1..20: mol_type = other DNA
acatccacctcctccggcag

SEQ ID NO: 38173 - DNA, 20 bp, synthetic construct
  source 1..20: mol_type = other DNA
gttcgggtggacactctggt

SEQ ID NO: 38174 - DNA, 20 bp, synthetic construct
  source 1..20: mol_type = other DNA
tgcgcgaggcggagcaggtg

SEQ ID NO: 38175 - DNA, 20 bp, synthetic construct
  source 1..20: mol_type = other DNA
ccaggcctgtaacctagaaa

SEQ ID NO: 38176 - DNA, 20 bp, synthetic construct
  source 1..20: mol_type = other DNA
agaggctaattttctggtgc

SEQ ID NO: 38177 - DNA, 20 bp, synthetic construct
  source 1..20: mol_type = other DNA
cacgtcgctcatggtgcccg

SEQ ID NO: 38178 - DNA, 20 bp, synthetic construct
  source 1..20: mol_type = other DNA
tcaccagggaaggggtgacc

SEQ ID NO: 38179 - DNA, 20 bp, synthetic construct
  source 1..20: mol_type = other DNA
ccctggatgtgtggctgcgg

SEQ ID NO: 38180 - DNA, 20 bp, synthetic construct
  source 1..20: mol_type = other DNA
ccatctcttgctcgaagtcc

SEQ ID NO: 38181 - DNA, 20 bp, synthetic construct
  source 1..20: mol_type = other DNA
aacatcctgtagtggctggt

SEQ ID NO: 38182 - DNA, 20 bp, synthetic construct
  source 1..20: mol_type = other DNA
cctggatagaagggtatgtt

SEQ ID NO: 38183 - DNA, 20 bp, synthetic construct
  source 1..20: mol_type = other DNA
tgccacctcaggttgggtca

SEQ ID NO: 38184 - DNA, 20 bp, synthetic construct
  source 1..20: mol_type = other DNA
ctggccctgctgcggtgtga

SEQ ID NO: 38185 - DNA, 20 bp, synthetic construct
  source 1..20: mol_type = other DNA
cacagccactcagctcctgc

SEQ ID NO: 38186 - DNA, 20 bp, synthetic construct
  source 1..20: mol_type = other DNA
tgacctcttaattcgtttca

SEQ ID NO: 38187 - DNA, 20 bp, synthetic construct
  source 1..20: mol_type = other DNA
ccaacgctgccgcctggcac

SEQ ID NO: 38188 - DNA, 20 bp, synthetic construct
  source 1..20: mol_type = other DNA
cgacaatacaggtgccctgg

SEQ ID NO: 38189 - DNA, 20 bp, synthetic construct
  source 1..20: mol_type = other DNA
acttaccagaaagacctgat

SEQ ID NO: 38190 - DNA, 20 bp, synthetic construct
  source 1..20: mol_type = other DNA
gggctgggggtgaaatagag

SEQ ID NO: 38191 - DNA, 20 bp, synthetic construct
  source 1..20: mol_type = other DNA
ctactggctcaacaaggaca

SEQ ID NO: 38192 - DNA, 20 bp, synthetic construct
  source 1..20: mol_type = other DNA
tctgatgtttcagttccttc

SEQ ID NO: 38193 - DNA, 20 bp, synthetic construct
  source 1..20: mol_type = other DNA
ctgtgttgggggagtccggg

SEQ ID NO: 38194 - DNA, 20 bp, synthetic construct
  source 1..20: mol_type = other DNA
attctccaggttgcgcagtg

SEQ ID NO: 38195 - DNA, 20 bp, synthetic construct
  source 1..20: mol_type = other DNA
cctggaggcccctgagccag

SEQ ID NO: 38196 - DNA, 20 bp, synthetic construct
  source 1..20: mol_type = other DNA
gtccaggcagccatcttgtc

SEQ ID NO: 38197 - DNA, 20 bp, synthetic construct
  source 1..20: mol_type = other DNA
gccagcaggtagtcggggca

SEQ ID NO: 38198 - DNA, 20 bp, synthetic construct
  source 1..20: mol_type = other DNA
tggagcagccctctgcgccc

SEQ ID NO: 38199 - DNA, 20 bp, synthetic construct
  source 1..20: mol_type = other DNA
ggactggcggcggcgccgcg

SEQ ID NO: 38200 - DNA, 20 bp, synthetic construct
  source 1..20: mol_type = other DNA
gtggattgactcaggtgagt

SEQ ID NO: 38201 - DNA, 20 bp, synthetic construct
  source 1..20: mol_type = other DNA
cgtccgaacggctgaaacgg

SEQ ID NO: 38202 - DNA, 20 bp, synthetic construct
  source 1..20: mol_type = other DNA
gcaggaaggaggatgaggga

SEQ ID NO: 38203 - DNA, 20 bp, synthetic construct
  source 1..20: mol_type = other DNA
gccatcaaggtgaccgtgga

SEQ ID NO: 38204 - DNA, 20 bp, synthetic construct
  source 1..20: mol_type = other DNA
caccaggttgggcaggaccc

SEQ ID NO: 38205 - DNA, 20 bp, synthetic construct
  source 1..20: mol_type = other DNA
gccaactcaccggctgctgt

SEQ ID NO: 38206 - DNA, 20 bp, synthetic construct
  source 1..20: mol_type = other DNA
tcctgtaggaatcctgagaa

SEQ ID NO: 38207 - DNA, 20 bp, synthetic construct
  source 1..20: mol_type = other DNA
atagcttggtacttagcagc

SEQ ID NO: 38208 - DNA, 20 bp, synthetic construct
  source 1..20: mol_type = other DNA
cttctgtcgtagaagagaat

SEQ ID NO: 38209 - DNA, 20 bp, synthetic construct
  source 1..20: mol_type = other DNA
gttccacacactgttctctt

SEQ ID NO: 38210 - DNA, 20 bp, synthetic construct
  source 1..20: mol_type = other DNA
cagttagagctgaaacctca

SEQ ID NO: 38211 - DNA, 20 bp, synthetic construct
  source 1..20: mol_type = other DNA
gcggaggcgtattcggagga

SEQ ID NO: 38212 - DNA, 20 bp, synthetic construct
  source 1..20: mol_type = other DNA
cagggctacctgtggaagcg

SEQ ID NO: 38213 - DNA, 20 bp, synthetic construct
  source 1..20: mol_type = other DNA
gttgaatgcagacattacca

SEQ ID NO: 38214 - DNA, 20 bp, synthetic construct
  source 1..20: mol_type = other DNA
gccagctgatgaagacggag

SEQ ID NO: 38215 - DNA, 20 bp, synthetic construct
  source 1..20: mol_type = other DNA
gcggtgagttctgtgttcca

SEQ ID NO: 38216 - DNA, 20 bp, synthetic construct
  source 1..20: mol_type = other DNA
ggaaggctcatctttacctg

SEQ ID NO: 38217 - DNA, 20 bp, synthetic construct
  source 1..20: mol_type = other DNA
ttgacatgccctcagtatcc

SEQ ID NO: 38218 - DNA, 20 bp, synthetic construct
  source 1..20: mol_type = other DNA
ccctttatgactatgaagca

SEQ ID NO: 38219 - DNA, 20 bp, synthetic construct
  source 1..20: mol_type = other DNA
agctccggcagctgttgaag

SEQ ID NO: 38220 - DNA, 20 bp, synthetic construct
  source 1..20: mol_type = other DNA
agaggactgagggacgaggc

SEQ ID NO: 38221 - DNA, 20 bp, synthetic construct
  source 1..20: mol_type = other DNA
tggggaactgggtgagaaag

SEQ ID NO: 38222 - DNA, 20 bp, synthetic construct
  source 1..20: mol_type = other DNA
tatcccattgattgcagatg

SEQ ID NO: 38223 - DNA, 20 bp, synthetic construct
  source 1..20: mol_type = other DNA
gtcacagtgggccccaaagg

SEQ ID NO: 38224 - DNA, 20 bp, synthetic construct
  source 1..20: mol_type = other DNA
tatatacttacacatcttga

SEQ ID NO: 38225 - DNA, 20 bp, synthetic construct
  source 1..20: mol_type = other DNA
cttcagcgtctacagcaccc

SEQ ID NO: 38226 - DNA, 20 bp, synthetic construct
  source 1..20: mol_type = other DNA
atgtacaaccaaagtccctc

SEQ ID NO: 38227 - DNA, 20 bp, synthetic construct
  source 1..20: mol_type = other DNA
cctgtggaaacccagggaac

SEQ ID NO: 38228 - DNA, 20 bp, synthetic construct
  source 1..20: mol_type = other DNA
acctggatgcacccgagggt

SEQ ID NO: 38229 - DNA, 20 bp, synthetic construct
  source 1..20: mol_type = other DNA
gcttctggtttatgccacaa

SEQ ID NO: 38230 - DNA, 20 bp, synthetic construct
  source 1..20: mol_type = other DNA
gaattcaaacacttggtatg

SEQ ID NO: 38231 - DNA, 20 bp, synthetic construct
  source 1..20: mol_type = other DNA
tttccccacaggccctccag

SEQ ID NO: 38232 - DNA, 20 bp, synthetic construct
  source 1..20: mol_type = other DNA
cgcaggaactcctggagcca

SEQ ID NO: 38233 - DNA, 20 bp, synthetic construct
  source 1..20: mol_type = other DNA
gactgagggacgaggccggc

SEQ ID NO: 38234 - DNA, 20 bp, synthetic construct
  source 1..20: mol_type = other DNA
agcaggctcataatcatcag

SEQ ID NO: 38235 - DNA, 20 bp, synthetic construct
  source 1..20: mol_type = other DNA
atctgtggggacagatcaga

SEQ ID NO: 38236 - DNA, 20 bp, synthetic construct
  source 1..20: mol_type = other DNA
gagccacatcttctccgtgg

SEQ ID NO: 38237 - DNA, 20 bp, synthetic construct
  source 1..20: mol_type = other DNA
ccgcccgcatcagggcaaag

SEQ ID NO: 38238 - DNA, 20 bp, synthetic construct
  source 1..20: mol_type = other DNA
acagcaggctctgtgcgggg

SEQ ID NO: 38239 - DNA, 20 bp, synthetic construct
  source 1..20: mol_type = other DNA
tgctgcttggagttaatagt

SEQ ID NO: 38240 - DNA, 20 bp, synthetic construct
  source 1..20: mol_type = other DNA
gcatggctgcgggagcgagc

SEQ ID NO: 38241 - DNA, 20 bp, synthetic construct
  source 1..20: mol_type = other DNA
tatcctcctgcagagtaaaa

SEQ ID NO: 38242 - DNA, 20 bp, synthetic construct
  source 1..20: mol_type = other DNA
gttttgtacattccagacca

SEQ ID NO: 38243 - DNA, 20 bp, synthetic construct
  source 1..20: mol_type = other DNA
ttccaggtgtggctcaccat

SEQ ID NO: 38244 - DNA, 20 bp, synthetic construct
  source 1..20: mol_type = other DNA
cgaccaacagtgtctcggtt

SEQ ID NO: 38245 - DNA, 20 bp, synthetic construct
  source 1..20: mol_type = other DNA
gcacctggatatcgaagaga

SEQ ID NO: 38246 - DNA, 20 bp, synthetic construct
  source 1..20: mol_type = other DNA
caggaatgggaacatccgcc

SEQ ID NO: 38247 - DNA, 20 bp, synthetic construct
  source 1..20: mol_type = other DNA
ttctaggttacaggcctgga

SEQ ID NO: 38248 - DNA, 20 bp, synthetic construct
  source 1..20: mol_type = other DNA
gtggtcctggaggagggtgg

SEQ ID NO: 38249 - DNA, 20 bp, synthetic construct
  source 1..20: mol_type = other DNA
tgacctgcttcaggacatct

SEQ ID NO: 38250 - DNA, 20 bp, synthetic construct
  source 1..20: mol_type = other DNA
tcctccttggcagtactcca

SEQ ID NO: 38251 - DNA, 20 bp, synthetic construct
  source 1..20: mol_type = other DNA
aggtgacagcggccgtcgtt

SEQ ID NO: 38252 - DNA, 20 bp, synthetic construct
  source 1..20: mol_type = other DNA
tcgtgccattgcagtgcaga

SEQ ID NO: 38253 - DNA, 20 bp, synthetic construct
  source 1..20: mol_type = other DNA
gacagcgccgcagcccggga

SEQ ID NO: 38254 - DNA, 20 bp, synthetic construct
  source 1..20: mol_type = other DNA
cacaacccacagcgacacgg

SEQ ID NO: 38255 - DNA, 20 bp, synthetic construct
  source 1..20: mol_type = other DNA
ccaacattctcatgtgtgac

SEQ ID NO: 38256 - DNA, 20 bp, synthetic construct
  source 1..20: mol_type = other DNA
taatgagagaaggtaggaac

SEQ ID NO: 38257 - DNA, 20 bp, synthetic construct
  source 1..20: mol_type = other DNA
aactggagacaacagggggt

SEQ ID NO: 38258 - DNA, 20 bp, synthetic construct
  source 1..20: mol_type = other DNA
cccgggggcgactacagtgg

SEQ ID NO: 38259 - DNA, 20 bp, synthetic construct
  source 1..20: mol_type = other DNA
atgtacctggtccaaggaac

SEQ ID NO: 38260 - DNA, 20 bp, synthetic construct
  source 1..20: mol_type = other DNA
cgcagcggggacatcaccta

SEQ ID NO: 38261 - DNA, 20 bp, synthetic construct
  source 1..20: mol_type = other DNA
caaagcgcctgtactcccgg

SEQ ID NO: 38262 - DNA, 20 bp, synthetic construct
  source 1..20: mol_type = other DNA
atttggtactaaaacaggag

SEQ ID NO: 38263 - DNA, 20 bp, synthetic construct
  source 1..20: mol_type = other DNA
tgctcaatgatctccacata

SEQ ID NO: 38264 - DNA, 20 bp, synthetic construct
  source 1..20: mol_type = other DNA
ccgagatcatctggcagaac

SEQ ID NO: 38265 - DNA, 20 bp, synthetic construct
  source 1..20: mol_type = other DNA
ctggaggtgagagcgcagcc

SEQ ID NO: 38266 - DNA, 20 bp, synthetic construct
  source 1..20: mol_type = other DNA
ggaacggaagaagccctgga

SEQ ID NO: 38267 - DNA, 20 bp, synthetic construct
  source 1..20: mol_type = other DNA
cgagtatatgaacaaaggtt

SEQ ID NO: 38268 - DNA, 20 bp, synthetic construct
  source 1..20: mol_type = other DNA
ctttaccaggtaggagctgc

SEQ ID NO: 38269 - DNA, 20 bp, synthetic construct
  source 1..20: mol_type = other DNA
acgctcgtgtccatgggcat

SEQ ID NO: 38270 - DNA, 20 bp, synthetic construct
  source 1..20: mol_type = other DNA
tgtgtatgacggcccggagc

SEQ ID NO: 38271 - DNA, 20 bp, synthetic construct
  source 1..20: mol_type = other DNA
atgatgtgagaagagttcag

SEQ ID NO: 38272 - DNA, 20 bp, synthetic construct
  source 1..20: mol_type = other DNA
acttttccttcatgaacccc

SEQ ID NO: 38273 - DNA, 20 bp, synthetic construct
  source 1..20: mol_type = other DNA
ggaagagctgcagcaggaga

SEQ ID NO: 38274 - DNA, 20 bp, synthetic construct
  source 1..20: mol_type = other DNA
ctcccggctcagacgctcct

SEQ ID NO: 38275 - DNA, 20 bp, synthetic construct
  source 1..20: mol_type = other DNA
ccaccggggggctcagcgtc

SEQ ID NO: 38276 - DNA, 20 bp, synthetic construct
  source 1..20: mol_type = other DNA
aactttggctcagtgcgcca

SEQ ID NO: 38277 - DNA, 20 bp, synthetic construct
  source 1..20: mol_type = other DNA
cagcttcagcacgtgcctga

SEQ ID NO: 38278 - DNA, 20 bp, synthetic construct
  source 1..20: mol_type = other DNA
atgtgagaagagttcagagg

SEQ ID NO: 38279 - DNA, 20 bp, synthetic construct
  source 1..20: mol_type = other DNA
gatgagattggaggtttctg

SEQ ID NO: 38280 - DNA, 20 bp, synthetic construct
  source 1..20: mol_type = other DNA
agatggtaggcaactgccaa

SEQ ID NO: 38281 - DNA, 20 bp, synthetic construct
  source 1..20: mol_type = other DNA
ctgctcaatgatctccacat

SEQ ID NO: 38282 - DNA, 20 bp, synthetic construct
  source 1..20: mol_type = other DNA
cattgagaagcagcctcctc

SEQ ID NO: 38283 - DNA, 20 bp, synthetic construct
  source 1..20: mol_type = other DNA
accgcggcgggcgggctgag

SEQ ID NO: 38284 - DNA, 20 bp, synthetic construct
  source 1..20: mol_type = other DNA
cgccacatccgcatccacac

SEQ ID NO: 38285 - DNA, 20 bp, synthetic construct
  source 1..20: mol_type = other DNA
tgcgccagctggcccaccga

SEQ ID NO: 38286 - DNA, 20 bp, synthetic construct
  source 1..20: mol_type = other DNA
gcagagccttgacccaactg

SEQ ID NO: 38287 - DNA, 20 bp, synthetic construct
  source 1..20: mol_type = other DNA
gcagatggtcaaggagctgc

SEQ ID NO: 38288 - DNA, 20 bp, synthetic construct
  source 1..20: mol_type = other DNA
gcccctacagcacaagaagc

SEQ ID NO: 38289 - DNA, 20 bp, synthetic construct
  source 1..20: mol_type = other DNA
ccctgacaacgcagacatgt

SEQ ID NO: 38290 - DNA, 20 bp, synthetic construct
  source 1..20: mol_type = other DNA
ggttctcgtggtcctggagg

SEQ ID NO: 38291 - DNA, 20 bp, synthetic construct
  source 1..20: mol_type = other DNA
atggttccacggactggatc

SEQ ID NO: 38292 - DNA, 20 bp, synthetic construct
  source 1..20: mol_type = other DNA
aggggcttcaagaaatgctg

SEQ ID NO: 38293 - DNA, 20 bp, synthetic construct
  source 1..20: mol_type = other DNA
ttgctgcttggagttaatag

SEQ ID NO: 38294 - DNA, 20 bp, synthetic construct
  source 1..20: mol_type = other DNA
tggagaacaggatgatcagt

SEQ ID NO: 38295 - DNA, 20 bp, synthetic construct
  source 1..20: mol_type = other DNA
ttgtccctccaagaactcca

SEQ ID NO: 38296 - DNA, 20 bp, synthetic construct
  source 1..20: mol_type = other DNA
ctggaaggcttgggactcct

SEQ ID NO: 38297 - DNA, 20 bp, synthetic construct
  source 1..20: mol_type = other DNA
ggggcctgatactggcactt

SEQ ID NO: 38298 - DNA, 20 bp, synthetic construct
  source 1..20: mol_type = other DNA
agggcaaagagattgaagca

SEQ ID NO: 38299 - DNA, 20 bp, synthetic construct
  source 1..20: mol_type = other DNA
tgggaagcttggcctggggg

SEQ ID NO: 38300 - DNA, 20 bp, synthetic construct
  source 1..20: mol_type = other DNA
agaaggaagaaccctcagga

SEQ ID NO: 38301 - DNA, 20 bp, synthetic construct
  source 1..20: mol_type = other DNA
ggcgtccaacaatgtgaccc

SEQ ID NO: 38302 - DNA, 20 bp, synthetic construct
  source 1..20: mol_type = other DNA
ttctgcagcggcgatggggt

SEQ ID NO: 38303 - DNA, 20 bp, synthetic construct
  source 1..20: mol_type = other DNA
ctgagagagaacagcacagc

SEQ ID NO: 38304 - DNA, 20 bp, synthetic construct
  source 1..20: mol_type = other DNA
acctggcacaggacttcagg

SEQ ID NO: 38305 - DNA, 20 bp, synthetic construct
  source 1..20: mol_type = other DNA
ggactctgaagatgtaccta

SEQ ID NO: 38306 - DNA, 20 bp, synthetic construct
  source 1..20: mol_type = other DNA
tatctatttggatgtctgca

SEQ ID NO: 38307 - DNA, 20 bp, synthetic construct
  source 1..20: mol_type = other DNA
gaggagggcgccgccgggtg

SEQ ID NO: 38308 - DNA, 20 bp, synthetic construct
  source 1..20: mol_type = other DNA
tcagaatcccgccgggaaga

SEQ ID NO: 38309 - DNA, 20 bp, synthetic construct
  source 1..20: mol_type = other DNA
ggttcttttcgcatgaatga

SEQ ID NO: 38310 - DNA, 20 bp, synthetic construct
  source 1..20: mol_type = other DNA
acagtaaccaacctcagtgt

SEQ ID NO: 38311 - DNA, 20 bp, synthetic construct
  source 1..20: mol_type = other DNA
tggactcttacttttcacct

SEQ ID NO: 38312 - DNA, 20 bp, synthetic construct
  source 1..20: mol_type = other DNA
catgtgctcagcctgtgctc

SEQ ID NO: 38313 - DNA, 20 bp, synthetic construct
  source 1..20: mol_type = other DNA
atatgcaagattgctgactt

SEQ ID NO: 38314 - DNA, 20 bp, synthetic construct
  source 1..20: mol_type = other DNA
cccctgcagggcgtcatggt

SEQ ID NO: 38315 - DNA, 20 bp, synthetic construct
  source 1..20: mol_type = other DNA
ctctgcccctgcccgctcca

SEQ ID NO: 38316 - DNA, 20 bp, synthetic construct
  source 1..20: mol_type = other DNA
gcaatttgggttggtgcatc

SEQ ID NO: 38317 - DNA, 20 bp, synthetic construct
  source 1..20: mol_type = other DNA
cttctcaggaggaaatcggc

SEQ ID NO: 38318 - DNA, 20 bp, synthetic construct
  source 1..20: mol_type = other DNA
aagaatgatggcaccttcat

SEQ ID NO: 38319 - DNA, 20 bp, synthetic construct
  source 1..20: mol_type = other DNA
cacccaggcatcatccgaca

SEQ ID NO: 38320 - DNA, 20 bp, synthetic construct
  source 1..20: mol_type = other DNA
gctgggggtgaaatagagag

SEQ ID NO: 38321 - DNA, 20 bp, synthetic construct
  source 1..20: mol_type = other DNA
ctgcacccgcaccacgccgc

SEQ ID NO: 38322 - DNA, 20 bp, synthetic construct
  source 1..20: mol_type = other DNA
ctccagtgcagctctccggc

SEQ ID NO: 38323 - DNA, 20 bp, synthetic construct
  source 1..20: mol_type = other DNA
ctaccagctgcctctgtgcc

SEQ ID NO: 38324 - DNA, 20 bp, synthetic construct
  source 1..20: mol_type = other DNA
tccattgacgctgccaagag

SEQ ID NO: 38325 - DNA, 20 bp, synthetic construct
  source 1..20: mol_type = other DNA
acaatcccacggaacccaaa

SEQ ID NO: 38326 - DNA, 20 bp, synthetic construct
  source 1..20: mol_type = other DNA
gagccttcgtaggtaaccag

SEQ ID NO: 38327 - DNA, 20 bp, synthetic construct
  source 1..20: mol_type = other DNA
cggaccccatgtcttgtagt

SEQ ID NO: 38328 - DNA, 20 bp, synthetic construct
  source 1..20: mol_type = other DNA
cggcttgggccttcacccag

SEQ ID NO: 38329 - DNA, 20 bp, synthetic construct
  source 1..20: mol_type = other DNA
gacagttctacctcctgtgt

SEQ ID NO: 38330 - DNA, 20 bp, synthetic construct
  source 1..20: mol_type = other DNA
ctagcaatggaatactgttc

SEQ ID NO: 38331 - DNA, 20 bp, synthetic construct
  source 1..20: mol_type = other DNA
aagtaccattgctgtgttac

SEQ ID NO: 38332 - DNA, 20 bp, synthetic construct
  source 1..20: mol_type = other DNA
ttccagaagttctgtatgaa

SEQ ID NO: 38333 - DNA, 20 bp, synthetic construct
  source 1..20: mol_type = other DNA
gcatggccccgggcgctcgg

SEQ ID NO: 38334 - DNA, 20 bp, synthetic construct
  source 1..20: mol_type = other DNA
agcttgtccgtctggttgct

SEQ ID NO: 38335 - DNA, 20 bp, synthetic construct
  source 1..20: mol_type = other DNA
acctctgtactgatggaggt

SEQ ID NO: 38336 - DNA, 20 bp, synthetic construct
  source 1..20: mol_type = other DNA
tgagaatcagacaggcacga

SEQ ID NO: 38337 - DNA, 20 bp, synthetic construct
  source 1..20: mol_type = other DNA
tgaattggtccagctgcaag

SEQ ID NO: 38338 - DNA, 20 bp, synthetic construct
  source 1..20: mol_type = other DNA
acaaagcaatgtgactggtc

SEQ ID NO: 38339 - DNA, 20 bp, synthetic construct
  source 1..20: mol_type = other DNA
cagatatcctcgctgggcgc

SEQ ID NO: 38340 - DNA, 20 bp, synthetic construct
  source 1..20: mol_type = other DNA
cctagcatgtaccagcgcct

SEQ ID NO: 38341 - DNA, 20 bp, synthetic construct
  source 1..20: mol_type = other DNA
ctggtgggaggtacaggctg

SEQ ID NO: 38342 - DNA, 20 bp, synthetic construct
  source 1..20: mol_type = other DNA
tctgttggccttggggttca

SEQ ID NO: 38343 - DNA, 20 bp, synthetic construct
  source 1..20: mol_type = other DNA
agatctccacaggggctgga

SEQ ID NO: 38344 - DNA, 20 bp, synthetic construct
  source 1..20: mol_type = other DNA
caagccgtgcaaccggccgt

SEQ ID NO: 38345 - DNA, 20 bp, synthetic construct
  source 1..20: mol_type = other DNA
tggatgacgagctgatccag

SEQ ID NO: 38346 - DNA, 20 bp, synthetic construct
  source 1..20: mol_type = other DNA
tgttaccatacagagaacat

SEQ ID NO: 38347 - DNA, 20 bp, synthetic construct
  source 1..20: mol_type = other DNA
gcccgaatgtcatagataat

SEQ ID NO: 38348 - DNA, 20 bp, synthetic construct
  source 1..20: mol_type = other DNA
agctggaggagatgcagcag

SEQ ID NO: 38349 - DNA, 20 bp, synthetic construct
  source 1..20: mol_type = other DNA
gaaatcgaatctgtaaagtg

SEQ ID NO: 38350 - DNA, 20 bp, synthetic construct
  source 1..20: mol_type = other DNA
aaaaccctcaagagtcaagg

SEQ ID NO: 38351 - DNA, 20 bp, synthetic construct
  source 1..20: mol_type = other DNA
cctgcgcctggtggcccgtg

SEQ ID NO: 38352 - DNA, 20 bp, synthetic construct
  source 1..20: mol_type = other DNA
caggtagtcggggcagggcc

SEQ ID NO: 38353 - DNA, 20 bp, synthetic construct
  source 1..20: mol_type = other DNA
gcagctggaggaggtggagc

SEQ ID NO: 38354 - DNA, 20 bp, synthetic construct
  source 1..20: mol_type = other DNA
atacacaaaattattgacct

SEQ ID NO: 38355 - DNA, 20 bp, synthetic construct
  source 1..20: mol_type = other DNA
ccagggcccgcacgatctgg

SEQ ID NO: 38356 - DNA, 20 bp, synthetic construct
  source 1..20: mol_type = other DNA
ccaggtgtctttcaaagtag

SEQ ID NO: 38357 - DNA, 20 bp, synthetic construct
  source 1..20: mol_type = other DNA
ggatggggagcaggtctggc

SEQ ID NO: 38358 - DNA, 20 bp, synthetic construct
  source 1..20: mol_type = other DNA
tccggaaggtgaggctccca

SEQ ID NO: 38359 - DNA, 20 bp, synthetic construct
  source 1..20: mol_type = other DNA
tttgacaggcattacgagat

SEQ ID NO: 38360 - DNA, 20 bp, synthetic construct
  source 1..20: mol_type = other DNA
gctcaccgacaggatcccct

SEQ ID NO: 38361 - DNA, 20 bp, synthetic construct
  source 1..20: mol_type = other DNA
gcagtggctggtgggctacg

SEQ ID NO: 38362 - DNA, 20 bp, synthetic construct
  source 1..20: mol_type = other DNA
gcaggctctttcagggacaa

SEQ ID NO: 38363 - DNA, 20 bp, synthetic construct
  source 1..20: mol_type = other DNA
accagtgttggcatgggctg

SEQ ID NO: 38364 - DNA, 20 bp, synthetic construct
  source 1..20: mol_type = other DNA
tgtccggccaggcatggact

SEQ ID NO: 38365 - DNA, 20 bp, synthetic construct
  source 1..20: mol_type = other DNA
gggagtcgttgtgctgcaca

SEQ ID NO: 38366 - DNA, 20 bp, synthetic construct
  source 1..20: mol_type = other DNA
ggcacgcggtttctggacct

SEQ ID NO: 38367 - DNA, 20 bp, synthetic construct
  source 1..20: mol_type = other DNA
tcacctgaaatgaggcagga

SEQ ID NO: 38368 - DNA, 20 bp, synthetic construct
  source 1..20: mol_type = other DNA
ccgcgggcaggtgttcgacg

SEQ ID NO: 38369 - DNA, 20 bp, synthetic construct
  source 1..20: mol_type = other DNA
ggggaagacgtccctacaca

SEQ ID NO: 38370 - DNA, 20 bp, synthetic construct
  source 1..20: mol_type = other DNA
cctgaggagcgaggtagggg

SEQ ID NO: 38371 - DNA, 20 bp, synthetic construct
  source 1..20: mol_type = other DNA
atggaggtgagatacagagt

SEQ ID NO: 38372 - DNA, 20 bp, synthetic construct
  source 1..20: mol_type = other DNA
cccgtacagggctgcctcgg

SEQ ID NO: 38373 - DNA, 20 bp, synthetic construct
  source 1..20: mol_type = other DNA
tccccatgcacatgttgtct

SEQ ID NO: 38374 - DNA, 20 bp, synthetic construct
  source 1..20: mol_type = other DNA
accccagacaacatgtgcat

SEQ ID NO: 38375 - DNA, 20 bp, synthetic construct
  source 1..20: mol_type = other DNA
ccacagggaccaaggcagct

SEQ ID NO: 38376 - DNA, 20 bp, synthetic construct
  source 1..20: mol_type = other DNA
gagaacgaaggtgaggaaga

SEQ ID NO: 38377 - DNA, 20 bp, synthetic construct
  source 1..20: mol_type = other DNA
catgttggcctgaggaaaca

SEQ ID NO: 38378 - DNA, 20 bp, synthetic construct
  source 1..20: mol_type = other DNA
cgaacgggcgcagcaggaga

SEQ ID NO: 38379 - DNA, 20 bp, synthetic construct
  source 1..20: mol_type = other DNA
ccatgaccagaactgtcctt

SEQ ID NO: 38380 - DNA, 20 bp, synthetic construct
  source 1..20: mol_type = other DNA
gtgcattgtgttgcaggatt

SEQ ID NO: 38381 - DNA, 20 bp, synthetic construct
  source 1..20: mol_type = other DNA
aacccaggaagaccacaatg

SEQ ID NO: 38382 - DNA, 20 bp, synthetic construct
  source 1..20: mol_type = other DNA
atagacagcgtgtgcgtggg

SEQ ID NO: 38383 - DNA, 20 bp, synthetic construct
  source 1..20: mol_type = other DNA
caccttccaggtgtccacca

SEQ ID NO: 38384 - DNA, 20 bp, synthetic construct
  source 1..20: mol_type = other DNA
acaacgtgtccaaagacaac

SEQ ID NO: 38385 - DNA, 20 bp, synthetic construct
  source 1..20: mol_type = other DNA
accacggcttctggggcttc

SEQ ID NO: 38386 - DNA, 20 bp, synthetic construct
  source 1..20: mol_type = other DNA
ttgatgacctctttatctac

SEQ ID NO: 38387 - DNA, 20 bp, synthetic construct
  source 1..20: mol_type = other DNA
caccacggtgagtgcgcccg

SEQ ID NO: 38388 - DNA, 20 bp, synthetic construct
  source 1..20: mol_type = other DNA
ggattcttacagaaaacaag

SEQ ID NO: 38389 - DNA, 20 bp, synthetic construct
  source 1..20: mol_type = other DNA
caaccgggaggtgctggagc

SEQ ID NO: 38390 - DNA, 20 bp, synthetic construct
  source 1..20: mol_type = other DNA
gctgcaagacacaagggagg

SEQ ID NO: 38391 - DNA, 20 bp, synthetic construct
  source 1..20: mol_type = other DNA
tgccgcacctttcataccat

SEQ ID NO: 38392 - DNA, 20 bp, synthetic construct
  source 1..20: mol_type = other DNA
actttggcccagtcaatcaa

SEQ ID NO: 38393 - DNA, 20 bp, synthetic construct
  source 1..20: mol_type = other DNA
atgaggtacaggccgtcctc

SEQ ID NO: 38394 - DNA, 20 bp, synthetic construct
  source 1..20: mol_type = other DNA
tctggtaccgccagtggtgc

SEQ ID NO: 38395 - DNA, 20 bp, synthetic construct
  source 1..20: mol_type = other DNA
ttccagaacctgctccttct

SEQ ID NO: 38396 - DNA, 20 bp, synthetic construct
  source 1..20: mol_type = other DNA
gaactttgtgcaccgtgacc

SEQ ID NO: 38397 - DNA, 20 bp, synthetic construct
  source 1..20: mol_type = other DNA
acgctgccaggccagagagc

SEQ ID NO: 38398 - DNA, 20 bp, synthetic construct
  source 1..20: mol_type = other DNA
catgtacccacagaagtagg

SEQ ID NO: 38399 - DNA, 20 bp, synthetic construct
  source 1..20: mol_type = other DNA
ccttcgccatcaagtcgctg

SEQ ID NO: 38400 - DNA, 20 bp, synthetic construct
  source 1..20: mol_type = other DNA
ctcaggaacctggccctggg

SEQ ID NO: 38401 - DNA, 20 bp, synthetic construct
  source 1..20: mol_type = other DNA
tcctcctccaactgcagtcc

SEQ ID NO: 38402 - DNA, 20 bp, synthetic construct
  source 1..20: mol_type = other DNA
tcctctgtaatgaacagata

SEQ ID NO: 38403 - DNA, 20 bp, synthetic construct
  source 1..20: mol_type = other DNA
cgttgctgtacatgatccac

SEQ ID NO: 38404 - DNA, 20 bp, synthetic construct
  source 1..20: mol_type = other DNA
cactgtgaggatcaggcggt

SEQ ID NO: 38405 - DNA, 20 bp, synthetic construct
  source 1..20: mol_type = other DNA
ccaacagtggggcggctggg

SEQ ID NO: 38406 - DNA, 20 bp, synthetic construct
  source 1..20: mol_type = other DNA
aaatctctgaagcctgagag

SEQ ID NO: 38407 - DNA, 20 bp, synthetic construct
  source 1..20: mol_type = other DNA
ccgcctcttggaactgctgg

SEQ ID NO: 38408 - DNA, 20 bp, synthetic construct
  source 1..20: mol_type = other DNA
gtgctggagcaggtggagcg

SEQ ID NO: 38409 - DNA, 20 bp, synthetic construct
  source 1..20: mol_type = other DNA
cattctgggtgtgcatctca

SEQ ID NO: 38410 - DNA, 20 bp, synthetic construct
  source 1..20: mol_type = other DNA
tccgacgcaacgcggccacg

SEQ ID NO: 38411 - DNA, 20 bp, synthetic construct
  source 1..20: mol_type = other DNA
tctgtgactttggggtcagc

SEQ ID NO: 38412 - DNA, 20 bp, synthetic construct
  source 1..20: mol_type = other DNA
agagctagatccctaaagga

SEQ ID NO: 38413 - DNA, 20 bp, synthetic construct
  source 1..20: mol_type = other DNA
tggaccatccagaggtgcag

SEQ ID NO: 38414 - DNA, 20 bp, synthetic construct
  source 1..20: mol_type = other DNA
ctctggaaaggtcgaacttg

SEQ ID NO: 38415 - DNA, 20 bp, synthetic construct
  source 1..20: mol_type = other DNA
tcgacagcggcaagtacccc

SEQ ID NO: 38416 - DNA, 20 bp, synthetic construct
  source 1..20: mol_type = other DNA
cgaggaacaggaggaggcgg

SEQ ID NO: 38417 - DNA, 20 bp, synthetic construct
  source 1..20: mol_type = other DNA
tgcaaggtccgagcccgggg

SEQ ID NO: 38418 - DNA, 20 bp, synthetic construct
  source 1..20: mol_type = other DNA
gtgccatctcgccgccacag

SEQ ID NO: 38419 - DNA, 20 bp, synthetic construct
  source 1..20: mol_type = other DNA
ggtagaaatgctccttctgt

SEQ ID NO: 38420 - DNA, 20 bp, synthetic construct
  source 1..20: mol_type = other DNA
ggtttgccagtgtagaatcc

SEQ ID NO: 38421 - DNA, 20 bp, synthetic construct
  source 1..20: mol_type = other DNA
cagcctgtaacgacaagaac

SEQ ID NO: 38422 - DNA, 20 bp, synthetic construct
  source 1..20: mol_type = other DNA
gcccccaccagtccacggcc

SEQ ID NO: 38423 - DNA, 20 bp, synthetic construct
  source 1..20: mol_type = other DNA
gatggggcagtcctgcgggc

SEQ ID NO: 38424 - DNA, 20 bp, synthetic construct
  source 1..20: mol_type = other DNA
aatgagatggaccacattgc

SEQ ID NO: 38425 - DNA, 20 bp, synthetic construct
  source 1..20: mol_type = other DNA
gggcgaagaccgctgcgcag

SEQ ID NO: 38426 - DNA, 20 bp, synthetic construct
  source 1..20: mol_type = other DNA
tgctcatcaacaagcccgac

SEQ ID NO: 38427 - DNA, 20 bp, synthetic construct
  source 1..20: mol_type = other DNA
gcaggaggccctgcaactag

SEQ ID NO: 38428 - DNA, 20 bp, synthetic construct
  source 1..20: mol_type = other DNA
gccggaagactacacgctgc

SEQ ID NO: 38429 - DNA, 20 bp, synthetic construct
  source 1..20: mol_type = other DNA
ccctggggccatactccggg

SEQ ID NO: 38430 - DNA, 20 bp, synthetic construct
  source 1..20: mol_type = other DNA
cacaaatgacaggcttcgaa

SEQ ID NO: 38431 - DNA, 20 bp, synthetic construct
  source 1..20: mol_type = other DNA
agagaacttactcatgggca

SEQ ID NO: 38432 - DNA, 20 bp, synthetic construct
  source 1..20: mol_type = other DNA
ctggaccaggtggggcggga

SEQ ID NO: 38433 - DNA, 20 bp, synthetic construct
  source 1..20: mol_type = other DNA
tgccaggagaccagacttga

SEQ ID NO: 38434 - DNA, 20 bp, synthetic construct
  source 1..20: mol_type = other DNA
gctctctgcagctaaaaggg

SEQ ID NO: 38435 - DNA, 20 bp, synthetic construct
  source 1..20: mol_type = other DNA
atgacgaaaacgttggtctg

SEQ ID NO: 38436 - DNA, 20 bp, synthetic construct
  source 1..20: mol_type = other DNA
ccagctctgagctaaggatt

SEQ ID NO: 38437 - DNA, 20 bp, synthetic construct
  source 1..20: mol_type = other DNA
cttcgtggttggtctggggt

SEQ ID NO: 38438 - DNA, 20 bp, synthetic construct
  source 1..20: mol_type = other DNA
cgttctctactacgaagtga

SEQ ID NO: 38439 - DNA, 20 bp, synthetic construct
  source 1..20: mol_type = other DNA
ctccctgtagtcccggatga

SEQ ID NO: 38440 - DNA, 20 bp, synthetic construct
  source 1..20: mol_type = other DNA
cagaggatctgaggaagcaa

SEQ ID NO: 38441 - DNA, 20 bp, synthetic construct
  source 1..20: mol_type = other DNA
ctagcatacctcatcagtat

SEQ ID NO: 38442 - DNA, 20 bp, synthetic construct
  source 1..20: mol_type = other DNA
caccaggtagctgagggcgc

SEQ ID NO: 38443 - DNA, 20 bp, synthetic construct
  source 1..20: mol_type = other DNA
tgtcccacatgaaatcaata

SEQ ID NO: 38444 - DNA, 20 bp, synthetic construct
  source 1..20: mol_type = other DNA
aacacgaagcaggtcctact

SEQ ID NO: 38445 - DNA, 20 bp, synthetic construct
  source 1..20: mol_type = other DNA
ccttgtatttgatgaagacc

SEQ ID NO: 38446 - DNA, 20 bp, synthetic construct
  source 1..20: mol_type = other DNA
gctgtcggagctgtgaggca

SEQ ID NO: 38447 - DNA, 20 bp, synthetic construct
  source 1..20: mol_type = other DNA
cccacagaaggttttcatgg

SEQ ID NO: 38448 - DNA, 20 bp, synthetic construct
  source 1..20: mol_type = other DNA
ctccggccgggccaacgcgc

SEQ ID NO: 38449 - DNA, 20 bp, synthetic construct
  source 1..20: mol_type = other DNA
tgacttctgttccctaaagt

SEQ ID NO: 38450 - DNA, 20 bp, synthetic construct
  source 1..20: mol_type = other DNA
cttactatcatgatgagttt

SEQ ID NO: 38451 - DNA, 20 bp, synthetic construct
  source 1..20: mol_type = other DNA
ggtcctgagttgggagccag

SEQ ID NO: 38452 - DNA, 20 bp, synthetic construct
  source 1..20: mol_type = other DNA
ttaccttaacaaaatcaaag

SEQ ID NO: 38453 - DNA, 20 bp, synthetic construct
  source 1..20: mol_type = other DNA
cagtacatgaggactgggga

SEQ ID NO: 38454 - DNA, 20 bp, synthetic construct
  source 1..20: mol_type = other DNA
gttcaactgtgatgggaaat

SEQ ID NO: 38455 - DNA, 20 bp, synthetic construct
  source 1..20: mol_type = other DNA
tgacttgccacagaagtccc

SEQ ID NO: 38456 - DNA, 20 bp, synthetic construct
  source 1..20: mol_type = other DNA
ggtatgaggttctcgaaggt

SEQ ID NO: 38457 - DNA, 20 bp, synthetic construct
  source 1..20: mol_type = other DNA
atggtggtgctgtgccaccc

SEQ ID NO: 38458 - DNA, 20 bp, synthetic construct
  source 1..20: mol_type = other DNA
gccaagttcagattttcctg

SEQ ID NO: 38459 - DNA, 20 bp, synthetic construct
  source 1..20: mol_type = other DNA
tgaactccatgtgccgccct

SEQ ID NO: 38460 - DNA, 20 bp, synthetic construct
  source 1..20: mol_type = other DNA
cttctgcactgggctggtcc

SEQ ID NO: 38461 - DNA, 20 bp, synthetic construct
  source 1..20: mol_type = other DNA
cccccggccccctattgtgg

SEQ ID NO: 38462 - DNA, 20 bp, synthetic construct
  source 1..20: mol_type = other DNA
aaagccaactctacctgtaa

SEQ ID NO: 38463 - DNA, 20 bp, synthetic construct
  source 1..20: mol_type = other DNA
gccattgtcaatgaccagcg

SEQ ID NO: 38464 - DNA, 20 bp, synthetic construct
  source 1..20: mol_type = other DNA
cgggcagcatcccaggcgag

SEQ ID NO: 38465 - DNA, 20 bp, synthetic construct
  source 1..20: mol_type = other DNA
tgcttctgctgggttcttcg

SEQ ID NO: 38466 - DNA, 20 bp, synthetic construct
  source 1..20: mol_type = other DNA
acctgaagacacggggcggg

SEQ ID NO: 38467 - DNA, 20 bp, synthetic construct
  source 1..20: mol_type = other DNA
gctgatggaggatacattgc

SEQ ID NO: 38468 - DNA, 20 bp, synthetic construct
  source 1..20: mol_type = other DNA
ctcaccgagcaacagctccg

SEQ ID NO: 38469 - DNA, 20 bp, synthetic construct
  source 1..20: mol_type = other DNA
cttggagaagacctcatcct

SEQ ID NO: 38470 - DNA, 20 bp, synthetic construct
  source 1..20: mol_type = other DNA
gcaccagccagctggtactg

SEQ ID NO: 38471 - DNA, 20 bp, synthetic construct
  source 1..20: mol_type = other DNA
ggtgaaaaagatccgtgaag

SEQ ID NO: 38472 - DNA, 20 bp, synthetic construct
  source 1..20: mol_type = other DNA
ccttgatgcgctgccgctgc

SEQ ID NO: 38473 - DNA, 20 bp, synthetic construct
  source 1..20: mol_type = other DNA
ctgtgaggatcaggcggtag

SEQ ID NO: 38474 - DNA, 20 bp, synthetic construct
  source 1..20: mol_type = other DNA
cgagttcaccgagcgcagca

SEQ ID NO: 38475 - DNA, 20 bp, synthetic construct
  source 1..20: mol_type = other DNA
gggggcggcggcgacggcgg

SEQ ID NO: 38476 - DNA, 20 bp, synthetic construct
  source 1..20: mol_type = other DNA
gcagccccggtgggtagtcg

SEQ ID NO: 38477 - DNA, 20 bp, synthetic construct
  source 1..20: mol_type = other DNA
tcctggaggtctgattccac

SEQ ID NO: 38478 - DNA, 20 bp, synthetic construct
  source 1..20: mol_type = other DNA
actccatgacatgtatctgc

SEQ ID NO: 38479 - DNA, 20 bp, synthetic construct
  source 1..20: mol_type = other DNA
gactacatcgccccagaggt

SEQ ID NO: 38480 - DNA, 20 bp, synthetic construct
  source 1..20: mol_type = other DNA
gagctgaaagggagcagagc

SEQ ID NO: 38481 - DNA, 20 bp, synthetic construct
  source 1..20: mol_type = other DNA
acttaatctgcaaggcaaga

SEQ ID NO: 38482 - DNA, 20 bp, synthetic construct
  source 1..20: mol_type = other DNA
tttcctcagacccccggcag

SEQ ID NO: 38483 - DNA, 20 bp, synthetic construct
  source 1..20: mol_type = other DNA
tcgtgagagccggcagcgct

SEQ ID NO: 38484 - DNA, 20 bp, synthetic construct
  source 1..20: mol_type = other DNA
ggagagactgcaggtgagct

SEQ ID NO: 38485 - DNA, 20 bp, synthetic construct
  source 1..20: mol_type = other DNA
gtgacttctcgctctccgtc

SEQ ID NO: 38486 - DNA, 20 bp, synthetic construct
  source 1..20: mol_type = other DNA
ggtagataaggaactgaaca

SEQ ID NO: 38487 - DNA, 20 bp, synthetic construct
  source 1..20: mol_type = other DNA
gaacaagcactcagagcagc

SEQ ID NO: 38488 - DNA, 20 bp, synthetic construct
  source 1..20: mol_type = other DNA
ctagctggagaacctcatgc

SEQ ID NO: 38489 - DNA, 20 bp, synthetic construct
  source 1..20: mol_type = other DNA
gcacctgcacagagacagga

SEQ ID NO: 38490 - DNA, 20 bp, synthetic construct
  source 1..20: mol_type = other DNA
cctggatgtgtggctgcgga

SEQ ID NO: 38491 - DNA, 20 bp, synthetic construct
  source 1..20: mol_type = other DNA
cgcctggtcaccagaacacg

SEQ ID NO: 38492 - DNA, 20 bp, synthetic construct
  source 1..20: mol_type = other DNA
gccattcctgcagccacctg

SEQ ID NO: 38493 - DNA, 20 bp, synthetic construct
  source 1..20: mol_type = other DNA
ctgaggtgtctggggttggt

SEQ ID NO: 38494 - DNA, 20 bp, synthetic construct
  source 1..20: mol_type = other DNA
ttgttgcagcgccagtgcga

SEQ ID NO: 38495 - DNA, 20 bp, synthetic construct
  source 1..20: mol_type = other DNA
aacttttccttcatgaaccc

SEQ ID NO: 38496 - DNA, 20 bp, synthetic construct
  source 1..20: mol_type = other DNA
gctcctctggacagttgtca

SEQ ID NO: 38497 - DNA, 20 bp, synthetic construct
  source 1..20: mol_type = other DNA
tgctggaaagaggtcagtgg

SEQ ID NO: 38498 - DNA, 20 bp, synthetic construct
  source 1..20: mol_type = other DNA
tgttgggaactggactccga

SEQ ID NO: 38499 - DNA, 20 bp, synthetic construct
  source 1..20: mol_type = other DNA
gcacttgatgctctgcatcg

SEQ ID NO: 38500 - DNA, 20 bp, synthetic construct
  source 1..20: mol_type = other DNA
gtggcgagatctcaggtgcc

SEQ ID NO: 38501 - DNA, 20 bp, synthetic construct
  source 1..20: mol_type = other DNA
ggactggcagaaaatcctta

SEQ ID NO: 38502 - DNA, 20 bp, synthetic construct
  source 1..20: mol_type = other DNA
tcttcttggtcaaggggtgg

SEQ ID NO: 38503 - DNA, 20 bp, synthetic construct
  source 1..20: mol_type = other DNA
aattcctgcaccatggtgcc

SEQ ID NO: 38504 - DNA, 20 bp, synthetic construct
  source 1..20: mol_type = other DNA
tggagcaggagcaattcagt

SEQ ID NO: 38505 - DNA, 20 bp, synthetic construct
  source 1..20: mol_type = other DNA
ctcccagcacttcttctgca

SEQ ID NO: 38506 - DNA, 20 bp, synthetic construct
  source 1..20: mol_type = other DNA
gcacgcggtttctggacctg

SEQ ID NO: 38507 - DNA, 20 bp, synthetic construct
  source 1..20: mol_type = other DNA
tctgagattgaggtcagcag

SEQ ID NO: 38508 - DNA, 20 bp, synthetic construct
  source 1..20: mol_type = other DNA
agtctgacctagaatgagag

SEQ ID NO: 38509 - DNA, 20 bp, synthetic construct
  source 1..20: mol_type = other DNA
tgcaggtcatatatggacag

SEQ ID NO: 38510 - DNA, 20 bp, synthetic construct
  source 1..20: mol_type = other DNA
caaactaatgttgtgtacaa

SEQ ID NO: 38511 - DNA, 20 bp, synthetic construct
  source 1..20: mol_type = other DNA
ggccctggatcaggtcgcgc

SEQ ID NO: 38512 - DNA, 20 bp, synthetic construct
  source 1..20: mol_type = other DNA
gtcccagttcaacagggtga

SEQ ID NO: 38513 - DNA, 20 bp, synthetic construct
  source 1..20: mol_type = other DNA
aaacatcctcgtggagagcg

SEQ ID NO: 38514 - DNA, 20 bp, synthetic construct
  source 1..20: mol_type = other DNA
tcaccctattgttcgaacac

SEQ ID NO: 38515 - DNA, 20 bp, synthetic construct
  source 1..20: mol_type = other DNA
gagcactgagggaatgaaag

SEQ ID NO: 38516 - DNA, 20 bp, synthetic construct
  source 1..20: mol_type = other DNA
ggcagttccacttccatggc

SEQ ID NO: 38517 - DNA, 20 bp, synthetic construct
  source 1..20: mol_type = other DNA
gaattcagccaagtttaaga

SEQ ID NO: 38518 - DNA, 20 bp, synthetic construct
  source 1..20: mol_type = other DNA
gcagagaaggaagaaccctc

SEQ ID NO: 38519 - DNA, 20 bp, synthetic construct
  source 1..20: mol_type = other DNA
tggccaggtatagtgtgtca

SEQ ID NO: 38520 - DNA, 20 bp, synthetic construct
  source 1..20: mol_type = other DNA
ctaatgcgcgtccctcgtga

SEQ ID NO: 38521 - DNA, 20 bp, synthetic construct
  source 1..20: mol_type = other DNA
cagcagcagctgaaccagag

SEQ ID NO: 38522 - DNA, 20 bp, synthetic construct
  source 1..20: mol_type = other DNA
ggactcagtacgcgggcacc

SEQ ID NO: 38523 - DNA, 20 bp, synthetic construct
  source 1..20: mol_type = other DNA
actcagggcggctgtaaggg

SEQ ID NO: 38524 - DNA, 20 bp, synthetic construct
  source 1..20: mol_type = other DNA
gcagggaaggcctcatcagc

SEQ ID NO: 38525 - DNA, 20 bp, synthetic construct
  source 1..20: mol_type = other DNA
gtcccgtagttaatggcttc

SEQ ID NO: 38526 - DNA, 20 bp, synthetic construct
  source 1..20: mol_type = other DNA
tgaggtcacgcaggatggtg

SEQ ID NO: 38527 - DNA, 20 bp, synthetic construct
  source 1..20: mol_type = other DNA
cagaagcagagccccctccc

SEQ ID NO: 38528 - DNA, 20 bp, synthetic construct
  source 1..20: mol_type = other DNA
cgtgctcaacgggcagcacc

SEQ ID NO: 38529 - DNA, 20 bp, synthetic construct
  source 1..20: mol_type = other DNA
caaggcagctcggctttgtc

SEQ ID NO: 38530 - DNA, 20 bp, synthetic construct
  source 1..20: mol_type = other DNA
taagagttcctccacgtgcc

SEQ ID NO: 38531 - DNA, 20 bp, synthetic construct
  source 1..20: mol_type = other DNA
tctgagcttcatctcgggag

SEQ ID NO: 38532 - DNA, 20 bp, synthetic construct
  source 1..20: mol_type = other DNA
aatgactggggaaggtggga

SEQ ID NO: 38533 - DNA, 20 bp, synthetic construct
  source 1..20: mol_type = other DNA
cacggatgagtgagggtggg

SEQ ID NO: 38534 - DNA, 20 bp, synthetic construct
  source 1..20: mol_type = other DNA
acaaagttagaataatcatc

SEQ ID NO: 38535 - DNA, 20 bp, synthetic construct
  source 1..20: mol_type = other DNA
gatccagttcagttcaccca

SEQ ID NO: 38536 - DNA, 20 bp, synthetic construct
  source 1..20: mol_type = other DNA
ggctgagaaatacgtgaaca

SEQ ID NO: 38537 - DNA, 20 bp, synthetic construct
  source 1..20: mol_type = other DNA
ggtgactctatgctttggag

SEQ ID NO: 38538 - DNA, 20 bp, synthetic construct
  source 1..20: mol_type = other DNA
cgccggcctcctccgggagc

SEQ ID NO: 38539 - DNA, 20 bp, synthetic construct
  source 1..20: mol_type = other DNA
cctctatcacttccacctgc

SEQ ID NO: 38540 - DNA, 20 bp, synthetic construct
  source 1..20: mol_type = other DNA
ccgctgtagctctggtgagt

SEQ ID NO: 38541 - DNA, 20 bp, synthetic construct
  source 1..20: mol_type = other DNA
gcggaagtggctctgtggag

SEQ ID NO: 38542 - DNA, 20 bp, synthetic construct
  source 1..20: mol_type = other DNA
ttccagctctacagccccgg

SEQ ID NO: 38543 - DNA, 20 bp, synthetic construct
  source 1..20: mol_type = other DNA
ggtggcaaaggaggagcccc

SEQ ID NO: 38544 - DNA, 20 bp, synthetic construct
  source 1..20: mol_type = other DNA
ggagagcagccatggcactg

SEQ ID NO: 38545 - DNA, 20 bp, synthetic construct
  source 1..20: mol_type = other DNA
ctggtcaacgttaagtttga

SEQ ID NO: 38546 - DNA, 20 bp, synthetic construct
  source 1..20: mol_type = other DNA
ccgccctggagaaggtcagt

SEQ ID NO: 38547 - DNA, 20 bp, synthetic construct
  source 1..20: mol_type = other DNA
ggagtacgagcagatggtca

SEQ ID NO: 38548 - DNA, 20 bp, synthetic construct
  source 1..20: mol_type = other DNA
cgcgccgggcccgcagccgt

SEQ ID NO: 38549 - DNA, 20 bp, synthetic construct
  source 1..20: mol_type = other DNA
gccagttgatatttggtcag

SEQ ID NO: 38550 - DNA, 20 bp, synthetic construct
  source 1..20: mol_type = other DNA
tcgtgcgagaacctgagaag

SEQ ID NO: 38551 - DNA, 20 bp, synthetic construct
  source 1..20: mol_type = other DNA
ccataagcaacagcttcatc

SEQ ID NO: 38552 - DNA, 20 bp, synthetic construct
  source 1..20: mol_type = other DNA
tccaagacgtccatccacca

SEQ ID NO: 38553 - DNA, 20 bp, synthetic construct
  source 1..20: mol_type = other DNA
cagaaagctctggaaaccat

SEQ ID NO: 38554 - DNA, 20 bp, synthetic construct
  source 1..20: mol_type = other DNA
acctgcaggctttgtcctga

SEQ ID NO: 38555 - DNA, 20 bp, synthetic construct
  source 1..20: mol_type = other DNA
gggcagtggtgccgcacttc

SEQ ID NO: 38556 - DNA, 20 bp, synthetic construct
  source 1..20: mol_type = other DNA
gcagccctcggggctggacg

SEQ ID NO: 38557 - DNA, 20 bp, synthetic construct
  source 1..20: mol_type = other DNA
aatcccagctagaactgaac

SEQ ID NO: 38558 - DNA, 20 bp, synthetic construct
  source 1..20: mol_type = other DNA
gcagaagcctcagtggtaca

SEQ ID NO: 38559 - DNA, 20 bp, synthetic construct
  source 1..20: mol_type = other DNA
cttcaagaacctgagccgca

SEQ ID NO: 38560 - DNA, 20 bp, synthetic construct
  source 1..20: mol_type = other DNA
agaagtaggtggtgttctca

SEQ ID NO: 38561 - DNA, 20 bp, synthetic construct
  source 1..20: mol_type = other DNA
actacactcctgtgctgggt

SEQ ID NO: 38562 - DNA, 20 bp, synthetic construct
  source 1..20: mol_type = other DNA
gctggcccttggggtagatg

SEQ ID NO: 38563 - DNA, 20 bp, synthetic construct
  source 1..20: mol_type = other DNA
ctggggagctctggctggcc

SEQ ID NO: 38564 - DNA, 20 bp, synthetic construct
  source 1..20: mol_type = other DNA
gcgctcgccctggccgacgc

SEQ ID NO: 38565 - DNA, 20 bp, synthetic construct
  source 1..20: mol_type = other DNA
ataactcagaccccaactgg

SEQ ID NO: 38566 - DNA, 20 bp, synthetic construct
  source 1..20: mol_type = other DNA
cacacggtgcccatctacga

SEQ ID NO: 38567 - DNA, 20 bp, synthetic construct
  source 1..20: mol_type = other DNA
agccacgaagtactgatgca

SEQ ID NO: 38568 - DNA, 20 bp, synthetic construct
  source 1..20: mol_type = other DNA
caagtcaatggcatcccttg

SEQ ID NO: 38569 - DNA, 20 bp, synthetic construct
  source 1..20: mol_type = other DNA
ctctggcagctgcctcggtg

SEQ ID NO: 38570 - DNA, 20 bp, synthetic construct
  source 1..20: mol_type = other DNA
tcacccacttttggagcatc

SEQ ID NO: 38571 - DNA, 20 bp, synthetic construct
  source 1..20: mol_type = other DNA
gggtcctatgcagagacaca

SEQ ID NO: 38572 - DNA, 20 bp, synthetic construct
  source 1..20: mol_type = other DNA
taagggccaggatggccgtg

SEQ ID NO: 38573 - DNA, 20 bp, synthetic construct
  source 1..20: mol_type = other DNA
acctcatcccccgcccgcag

SEQ ID NO: 38574 - DNA, 20 bp, synthetic construct
  source 1..20: mol_type = other DNA
aatgaacgacagcctgcacc

SEQ ID NO: 38575 - DNA, 20 bp, synthetic construct
  source 1..20: mol_type = other DNA
ctggcctcggtagtaggaca

SEQ ID NO: 38576 - DNA, 20 bp, synthetic construct
  source 1..20: mol_type = other DNA
aagcgagtgagtgcgaccac

SEQ ID NO: 38577 - DNA, 20 bp, synthetic construct
  source 1..20: mol_type = other DNA
agagatggaggagctggggt

SEQ ID NO: 38578 - DNA, 20 bp, synthetic construct
  source 1..20: mol_type = other DNA
gacaggcaggcaaatgctct

SEQ ID NO: 38579 - DNA, 20 bp, synthetic construct
  source 1..20: mol_type = other DNA
tcagctgccgacgatcatcg

SEQ ID NO: 38580 - DNA, 20 bp, synthetic construct
  source 1..20: mol_type = other DNA
ctcgcctgggatgctgcccg

SEQ ID NO: 38581 - DNA, 20 bp, synthetic construct
  source 1..20: mol_type = other DNA
gtcccctagagcaaggtccg

SEQ ID NO: 38582 - DNA, 20 bp, synthetic construct
  source 1..20: mol_type = other DNA
ccacccgcactgggtcagtg

SEQ ID NO: 38583 - DNA, 20 bp, synthetic construct
  source 1..20: mol_type = other DNA
cagcagcacctctgtctttc

SEQ ID NO: 38584 - DNA, 20 bp, synthetic construct
  source 1..20: mol_type = other DNA
ggaaacctggatgcacccga

SEQ ID NO: 38585 - DNA, 20 bp, synthetic construct
  source 1..20: mol_type = other DNA
cctcgaagatcgtggggtct

SEQ ID NO: 38586 - DNA, 20 bp, synthetic construct
  source 1..20: mol_type = other DNA
ggcagactttgggctggccc

SEQ ID NO: 38587 - DNA, 20 bp, synthetic construct
  source 1..20: mol_type = other DNA
ggatggcatctggtggcaga

SEQ ID NO: 38588 - DNA, 20 bp, synthetic construct
  source 1..20: mol_type = other DNA
cgtttgaggatgtctgagca

SEQ ID NO: 38589 - DNA, 20 bp, synthetic construct
  source 1..20: mol_type = other DNA
aaccccacgccgatcaagcg

SEQ ID NO: 38590 - DNA, 20 bp, synthetic construct
  source 1..20: mol_type = other DNA
cggccagcacttccccatcg

SEQ ID NO: 38591 - DNA, 20 bp, synthetic construct
  source 1..20: mol_type = other DNA
cacactgcacgccctcatcc

SEQ ID NO: 38592 - DNA, 20 bp, synthetic construct
  source 1..20: mol_type = other DNA
gataatagaggtcccaggct

SEQ ID NO: 38593 - DNA, 20 bp, synthetic construct
  source 1..20: mol_type = other DNA
gggaagtgtggtgtctagga

SEQ ID NO: 38594 - DNA, 20 bp, synthetic construct
  source 1..20: mol_type = other DNA
ggtcagctcgcagtccaggt

SEQ ID NO: 38595 - DNA, 20 bp, synthetic construct
  source 1..20: mol_type = other DNA
gacgatcttcaaagtatgcc

SEQ ID NO: 38596 - DNA, 20 bp, synthetic construct
  source 1..20: mol_type = other DNA
ttcctacagattcctcctta

SEQ ID NO: 38597 - DNA, 20 bp, synthetic construct
  source 1..20: mol_type = other DNA
agcagttctcaaactggttc

SEQ ID NO: 38598 - DNA, 20 bp, synthetic construct
  source 1..20: mol_type = other DNA
ggcttctctctgcaggcaca

SEQ ID NO: 38599 - DNA, 20 bp, synthetic construct
  source 1..20: mol_type = other DNA
tcagaccccaactggtggaa

SEQ ID NO: 38600 - DNA, 20 bp, synthetic construct
  source 1..20: mol_type = other DNA
cagccacagatgttgtccga

SEQ ID NO: 38601 - DNA, 20 bp, synthetic construct
  source 1..20: mol_type = other DNA
aggatgacagtattctcagc

SEQ ID NO: 38602 - DNA, 20 bp, synthetic construct
  source 1..20: mol_type = other DNA
gccaaacccccacttgtcca

SEQ ID NO: 38603 - DNA, 20 bp, synthetic construct
  source 1..20: mol_type = other DNA
gtcgcagctcctcaaatgtc

SEQ ID NO: 38604 - DNA, 20 bp, synthetic construct
  source 1..20: mol_type = other DNA
gtgctcacctcttgccgacc

SEQ ID NO: 38605 - DNA, 20 bp, synthetic construct
  source 1..20: mol_type = other DNA
agtgcctgcccgtcatgaag

SEQ ID NO: 38606 - DNA, 20 bp, synthetic construct
  source 1..20: mol_type = other DNA
tcagatcaaccagacatttg

SEQ ID NO: 38607 - DNA, 20 bp, synthetic construct
  source 1..20: mol_type = other DNA
gagagctcctggcaacctgc

SEQ ID NO: 38608 - DNA, 20 bp, synthetic construct
  source 1..20: mol_type = other DNA
gccgcggcaaccctatgcac

SEQ ID NO: 38609 - DNA, 20 bp, synthetic construct
  source 1..20: mol_type = other DNA
tcacagcggaacgcaacctg

SEQ ID NO: 38610 - DNA, 20 bp, synthetic construct
  source 1..20: mol_type = other DNA
gagcctgtgagtgtattcct

SEQ ID NO: 38611 - DNA, 20 bp, synthetic construct
  source 1..20: mol_type = other DNA
ccccaggccgaccgcacgct

SEQ ID NO: 38612 - DNA, 20 bp, synthetic construct
  source 1..20: mol_type = other DNA
tcaccatcccgccgccgctc

SEQ ID NO: 38613 - DNA, 20 bp, synthetic construct
  source 1..20: mol_type = other DNA
gcagggctttcatggcacac

SEQ ID NO: 38614 - DNA, 20 bp, synthetic construct
  source 1..20: mol_type = other DNA
gttccctgcgagtctgctac

SEQ ID NO: 38615 - DNA, 20 bp, synthetic construct
  source 1..20: mol_type = other DNA
gaaccactgtttggagcact

SEQ ID NO: 38616 - DNA, 20 bp, synthetic construct
  source 1..20: mol_type = other DNA
gaacgacaggaggacgcccc

SEQ ID NO: 38617 - DNA, 20 bp, synthetic construct
  source 1..20: mol_type = other DNA
tgaagggcatccaggtgcat

SEQ ID NO: 38618 - DNA, 20 bp, synthetic construct
  source 1..20: mol_type = other DNA
gtagaaggcctgtggggacc

SEQ ID NO: 38619 - DNA, 20 bp, synthetic construct
  source 1..20: mol_type = other DNA
gaccaacctcgcagatctgc

SEQ ID NO: 38620 - DNA, 20 bp, synthetic construct
  source 1..20: mol_type = other DNA
aggccaaactgaggttctcc

SEQ ID NO: 38621 - DNA, 20 bp, synthetic construct
  source 1..20: mol_type = other DNA
ccaggaccccttttccaccc

SEQ ID NO: 38622 - DNA, 20 bp, synthetic construct
  source 1..20: mol_type = other DNA
tcctcttccagcagtctgcc

SEQ ID NO: 38623 - DNA, 20 bp, synthetic construct
  source 1..20: mol_type = other DNA
gccagagccccattttctgg

SEQ ID NO: 38624 - DNA, 20 bp, synthetic construct
  source 1..20: mol_type = other DNA
cgtgtagagctccatatatc

SEQ ID NO: 38625 - DNA, 20 bp, synthetic construct
  source 1..20: mol_type = other DNA
ccgctacagtctgcacggtt

SEQ ID NO: 38626 - DNA, 20 bp, synthetic construct
  source 1..20: mol_type = other DNA
tggcatcagtggctacttgg

SEQ ID NO: 38627 - DNA, 20 bp, synthetic construct
  source 1..20: mol_type = other DNA
ggcgtgcagtgtgtcacagt

SEQ ID NO: 38628 - DNA, 20 bp, synthetic construct
  source 1..20: mol_type = other DNA
tgttttctgccagggagagc

SEQ ID NO: 38629 - DNA, 20 bp, synthetic construct
  source 1..20: mol_type = other DNA
tcagtgtatttcagacggca

SEQ ID NO: 38630 - DNA, 20 bp, synthetic construct
  source 1..20: mol_type = other DNA
tgcagagtccaccctgcacc

SEQ ID NO: 38631 - DNA, 20 bp, synthetic construct
  source 1..20: mol_type = other DNA
tgcatgtttgcgtctgcagg

SEQ ID NO: 38632 - DNA, 20 bp, synthetic construct
  source 1..20: mol_type = other DNA
gaagctgctgctgttggggt

SEQ ID NO: 38633 - DNA, 20 bp, synthetic construct
  source 1..20: mol_type = other DNA
atcctcatgcctggagatca

SEQ ID NO: 38634 - DNA, 20 bp, synthetic construct
  source 1..20: mol_type = other DNA
acttggtgaccagcagcagc

SEQ ID NO: 38635 - DNA, 20 bp, synthetic construct
  source 1..20: mol_type = other DNA
ttgagttcaagtctttccgg

SEQ ID NO: 38636 - DNA, 20 bp, synthetic construct
  source 1..20: mol_type = other DNA
ttgtccaccgatgccaacca

SEQ ID NO: 38637 - DNA, 20 bp, synthetic construct
  source 1..20: mol_type = other DNA
gggggcgttcatggcgcgca

SEQ ID NO: 38638 - DNA, 20 bp, synthetic construct
  source 1..20: mol_type = other DNA
ggaatcttggaatccagtgg

SEQ ID NO: 38639 - DNA, 20 bp, synthetic construct
  source 1..20: mol_type = other DNA
taccgcagccatgaagaacc

SEQ ID NO: 38640 - DNA, 20 bp, synthetic construct
  source 1..20: mol_type = other DNA
caggctgcgcgcaaagacag

SEQ ID NO: 38641 - DNA, 20 bp, synthetic construct
  source 1..20: mol_type = other DNA
cccaggacagagaacgctac

SEQ ID NO: 38642 - DNA, 20 bp, synthetic construct
  source 1..20: mol_type = other DNA
atacctcatccacagaagac

SEQ ID NO: 38643 - DNA, 20 bp, synthetic construct
  source 1..20: mol_type = other DNA
ttaataccttttcttcaaca

SEQ ID NO: 38644 - DNA, 20 bp, synthetic construct
  source 1..20: mol_type = other DNA
cccaaactggtgcagctgta

SEQ ID NO: 38645 - DNA, 20 bp, synthetic construct
  source 1..20: mol_type = other DNA
ggggctgaggacctgaagga

SEQ ID NO: 38646 - DNA, 20 bp, synthetic construct
  source 1..20: mol_type = other DNA
agcgtctgggagaggaaagc

SEQ ID NO: 38647 - DNA, 20 bp, synthetic construct
  source 1..20: mol_type = other DNA
ccacgtggaggaggggaacg

SEQ ID NO: 38648 - DNA, 20 bp, synthetic construct
  source 1..20: mol_type = other DNA
cccagtcatcctgtccattg

SEQ ID NO: 38649 - DNA, 20 bp, synthetic construct
  source 1..20: mol_type = other DNA
ttcttcagtagctactctgt

SEQ ID NO: 38650 - DNA, 20 bp, synthetic construct
  source 1..20: mol_type = other DNA
ggtgcagaacgttagctgaa

SEQ ID NO: 38651 - DNA, 20 bp, synthetic construct
  source 1..20: mol_type = other DNA
cccatcgagcgccagctcaa

SEQ ID NO: 38652 - DNA, 20 bp, synthetic construct
  source 1..20: mol_type = other DNA
ctttggcctctccaaagcac

SEQ ID NO: 38653 - DNA, 20 bp, synthetic construct
  source 1..20: mol_type = other DNA
ttgatcaggtaagtggtgag

SEQ ID NO: 38654 - DNA, 20 bp, synthetic construct
  source 1..20: mol_type = other DNA
cagctatagaagaatcctca

SEQ ID NO: 38655 - DNA, 20 bp, synthetic construct
  source 1..20: mol_type = other DNA
caggcaccaggtaggggagc

SEQ ID NO: 38656 - DNA, 20 bp, synthetic construct
  source 1..20: mol_type = other DNA
agtctgcaatcttgcagctc

SEQ ID NO: 38657 - DNA, 20 bp, synthetic construct
  source 1..20: mol_type = other DNA
cgccccagacaccaggtgag

SEQ ID NO: 38658 - DNA, 20 bp, synthetic construct
  source 1..20: mol_type = other DNA
tacgacctggtgttccaacc

SEQ ID NO: 38659 - DNA, 20 bp, synthetic construct
  source 1..20: mol_type = other DNA
ttcataccccgggtaagcaa

SEQ ID NO: 38660 - DNA, 20 bp, synthetic construct
  source 1..20: mol_type = other DNA
gcaggctgagatggagctga

SEQ ID NO: 38661 - DNA, 20 bp, synthetic construct
  source 1..20: mol_type = other DNA
cgatggagaaggagaacctg

SEQ ID NO: 38662 - DNA, 20 bp, synthetic construct
  source 1..20: mol_type = other DNA
ggaggagcttctggcccagg

SEQ ID NO: 38663 - DNA, 20 bp, synthetic construct
  source 1..20: mol_type = other DNA
cggctgggggctggacagtt

SEQ ID NO: 38664 - DNA, 20 bp, synthetic construct
  source 1..20: mol_type = other DNA
cctcaagaaggatctggtgc

SEQ ID NO: 38665 - DNA, 20 bp, synthetic construct
  source 1..20: mol_type = other DNA
tactcagtagcaggcggaca

SEQ ID NO: 38666 - DNA, 20 bp, synthetic construct
  source 1..20: mol_type = other DNA
tggtggatgaagagaaagaa

SEQ ID NO: 38667 - DNA, 20 bp, synthetic construct
  source 1..20: mol_type = other DNA
cgtcactgagtacatggcca

SEQ ID NO: 38668 - DNA, 20 bp, synthetic construct
  source 1..20: mol_type = other DNA
ttaccggggctgtcgccatg

SEQ ID NO: 38669 - DNA, 20 bp, synthetic construct
  source 1..20: mol_type = other DNA
gcaggtgagtttcttcagac

SEQ ID NO: 38670 - DNA, 20 bp, synthetic construct
  source 1..20: mol_type = other DNA
ctccatagtgtctgtcaagc

SEQ ID NO: 38671 - DNA, 20 bp, synthetic construct
  source 1..20: mol_type = other DNA
gggaaatatccctgtggctg

SEQ ID NO: 38672 - DNA, 20 bp, synthetic construct
  source 1..20: mol_type = other DNA
tccatcccccaagccagcca

SEQ ID NO: 38673 - DNA, 20 bp, synthetic construct
  source 1..20: mol_type = other DNA
gctcgtgaacctgaggggcg

SEQ ID NO: 38674 - DNA, 20 bp, synthetic construct
  source 1..20: mol_type = other DNA
gctgagcgggcctggggagg

SEQ ID NO: 38675 - DNA, 20 bp, synthetic construct
  source 1..20: mol_type = other DNA
ggatatcatcttggcagcct

SEQ ID NO: 38676 - DNA, 20 bp, synthetic construct
  source 1..20: mol_type = other DNA
tctttttaggttactgaaga

SEQ ID NO: 38677 - DNA, 20 bp, synthetic construct
  source 1..20: mol_type = other DNA
gccgccgtccagccagggta

SEQ ID NO: 38678 - DNA, 20 bp, synthetic construct
  source 1..20: mol_type = other DNA
ccagaaccgcgtgaccgagc

SEQ ID NO: 38679 - DNA, 20 bp, synthetic construct
  source 1..20: mol_type = other DNA
ccttcatggtaagggattcc

SEQ ID NO: 38680 - DNA, 20 bp, synthetic construct
  source 1..20: mol_type = other DNA
tgtcctccagcacctgagga

SEQ ID NO: 38681 - DNA, 20 bp, synthetic construct
  source 1..20: mol_type = other DNA
ggccacctggttcttcatga

SEQ ID NO: 38682 - DNA, 20 bp, synthetic construct
  source 1..20: mol_type = other DNA
tgcaggagaagatacaaaaa

SEQ ID NO: 38683 - DNA, 20 bp, synthetic construct
  source 1..20: mol_type = other DNA
ggagctggtgaaacacacgc

SEQ ID NO: 38684 - DNA, 20 bp, synthetic construct
  source 1..20: mol_type = other DNA
gggcacattcctcagtgcca

SEQ ID NO: 38685 - DNA, 20 bp, synthetic construct
  source 1..20: mol_type = other DNA
caaagacatccagtatctca

SEQ ID NO: 38686 - DNA, 20 bp, synthetic construct
  source 1..20: mol_type = other DNA
taatgaccataagactatca

SEQ ID NO: 38687 - DNA, 20 bp, synthetic construct
  source 1..20: mol_type = other DNA
tttcagaactacagttcctg

SEQ ID NO: 38688 - DNA, 20 bp, synthetic construct
  source 1..20: mol_type = other DNA
ggatgaggctggggaggagg

SEQ ID NO: 38689 - DNA, 20 bp, synthetic construct
  source 1..20: mol_type = other DNA
tggccaggggactggtgggc

SEQ ID NO: 38690 - DNA, 20 bp, synthetic construct
  source 1..20: mol_type = other DNA
tgcagttctgacacactgta

SEQ ID NO: 38691 - DNA, 20 bp, synthetic construct
  source 1..20: mol_type = other DNA
ggagggcagtgttagcctgg

SEQ ID NO: 38692 - DNA, 20 bp, synthetic construct
  source 1..20: mol_type = other DNA
atcgtgagagccggcagcgc

SEQ ID NO: 38693 - DNA, 20 bp, synthetic construct
  source 1..20: mol_type = other DNA
acacggttttcaggcctctc

SEQ ID NO: 38694 - DNA, 20 bp, synthetic construct
  source 1..20: mol_type = other DNA
ctttaccagtttgtatccaa

SEQ ID NO: 38695 - DNA, 20 bp, synthetic construct
  source 1..20: mol_type = other DNA
tactctttggggaatggaat

SEQ ID NO: 38696 - DNA, 20 bp, synthetic construct
  source 1..20: mol_type = other DNA
gtgggggaaggcggtggcgg

SEQ ID NO: 38697 - DNA, 20 bp, synthetic construct
  source 1..20: mol_type = other DNA
gcatctagccacagagatgg

SEQ ID NO: 38698 - DNA, 20 bp, synthetic construct
  source 1..20: mol_type = other DNA
ctcatacagggtcaccccga

SEQ ID NO: 38699 - DNA, 20 bp, synthetic construct
  source 1..20: mol_type = other DNA
ttcctcaaggaatgattcgg

SEQ ID NO: 38700 - DNA, 20 bp, synthetic construct
  source 1..20: mol_type = other DNA
ctaaggcagagacaagcaga

SEQ ID NO: 38701 - DNA, 20 bp, synthetic construct
  source 1..20: mol_type = other DNA
ctggacatctatctcatcat

SEQ ID NO: 38702 - DNA, 20 bp, synthetic construct
  source 1..20: mol_type = other DNA
ctcctctactcacattgtac

SEQ ID NO: 38703 - DNA, 20 bp, synthetic construct
  source 1..20: mol_type = other DNA
cgagcagcacaagattgtga

SEQ ID NO: 38704 - DNA, 20 bp, synthetic construct
  source 1..20: mol_type = other DNA
cagctcaatctattccaagc

SEQ ID NO: 38705 - DNA, 20 bp, synthetic construct
  source 1..20: mol_type = other DNA
gcttgttaatgagtaggtca

SEQ ID NO: 38706 - DNA, 20 bp, synthetic construct
  source 1..20: mol_type = other DNA
ccgggggccgctccatgggg

SEQ ID NO: 38707 - DNA, 20 bp, synthetic construct
  source 1..20: mol_type = other DNA
tgatgaagagagtaagggcc

SEQ ID NO: 38708 - DNA, 20 bp, synthetic construct
  source 1..20: mol_type = other DNA
attcagctgacataattcac

SEQ ID NO: 38709 - DNA, 20 bp, synthetic construct
  source 1..20: mol_type = other DNA
tgcccagccactgaggcctg

SEQ ID NO: 38710 - DNA, 20 bp, synthetic construct
  source 1..20: mol_type = other DNA
ggatcactcagcttgatgaa

SEQ ID NO: 38711 - DNA, 20 bp, synthetic construct
  source 1..20: mol_type = other DNA
ggcatatccaaacacaatat

SEQ ID NO: 38712 - DNA, 20 bp, synthetic construct
  source 1..20: mol_type = other DNA
agaaagccccagttacagca

SEQ ID NO: 38713 - DNA, 20 bp, synthetic construct
  source 1..20: mol_type = other DNA
cggtgaccatgctggagggg

SEQ ID NO: 38714 - DNA, 20 bp, synthetic construct
  source 1..20: mol_type = other DNA
ggctgcaactgatgctgatg

SEQ ID NO: 38715 - DNA, 20 bp, synthetic construct
  source 1..20: mol_type = other DNA
agcggcaagtgggtgcagtg

SEQ ID NO: 38716 - DNA, 20 bp, synthetic construct
  source 1..20: mol_type = other DNA
cagaggacaaagaattgctc

SEQ ID NO: 38717 - DNA, 20 bp, synthetic construct
  source 1..20: mol_type = other DNA
ggcgaaggatgtggttcccc

SEQ ID NO: 38718 - DNA, 20 bp, synthetic construct
  source 1..20: mol_type = other DNA
tccacctgctgtgagaagtt

SEQ ID NO: 38719 - DNA, 20 bp, synthetic construct
  source 1..20: mol_type = other DNA
gtgcagataggccatgccct

SEQ ID NO: 38720 - DNA, 20 bp, synthetic construct
  source 1..20: mol_type = other DNA
gctggtctagcaggtactca

SEQ ID NO: 38721 - DNA, 20 bp, synthetic construct
  source 1..20: mol_type = other DNA
cttcagatgggctgtgcaca

SEQ ID NO: 38722 - DNA, 20 bp, synthetic construct
  source 1..20: mol_type = other DNA
atgagacctcagccatatgg

SEQ ID NO: 38723 - DNA, 20 bp, synthetic construct
  source 1..20: mol_type = other DNA
ccaggaggccaggaaactgg

SEQ ID NO: 38724 - DNA, 20 bp, synthetic construct
  source 1..20: mol_type = other DNA
agtttgatgatgaagacctg

SEQ ID NO: 38725 - DNA, 20 bp, synthetic construct
  source 1..20: mol_type = other DNA
ggaacaggaggaggcggagg

SEQ ID NO: 38726 - DNA, 20 bp, synthetic construct
  source 1..20: mol_type = other DNA
gagcccagcctgacacccta

SEQ ID NO: 38727 - DNA, 20 bp, synthetic construct
  source 1..20: mol_type = other DNA
tgaagcagctggtcagcgag

SEQ ID NO: 38728 - DNA, 20 bp, synthetic construct
  source 1..20: mol_type = other DNA
ctgaaactcggagttgtcga

SEQ ID NO: 38729 - DNA, 20 bp, synthetic construct
  source 1..20: mol_type = other DNA
tggtggaccagcaccactgg

SEQ ID NO: 38730 - DNA, 20 bp, synthetic construct
  source 1..20: mol_type = other DNA
tggatggccacgtacatggc

SEQ ID NO: 38731 - DNA, 20 bp, synthetic construct
  source 1..20: mol_type = other DNA
gcatgctggcgacctggagg

SEQ ID NO: 38732 - DNA, 20 bp, synthetic construct
  source 1..20: mol_type = other DNA
ctgcatctctgaagagccaa

SEQ ID NO: 38733 - DNA, 20 bp, synthetic construct
  source 1..20: mol_type = other DNA
agtttgcccggagtgatgag

SEQ ID NO: 38734 - DNA, 20 bp, synthetic construct
  source 1..20: mol_type = other DNA
cgggggccgtccacttgatg

SEQ ID NO: 38735 - DNA, 20 bp, synthetic construct
  source 1..20: mol_type = other DNA
actgtgaaggcaacgacaaa

SEQ ID NO: 38736 - DNA, 20 bp, synthetic construct
  source 1..20: mol_type = other DNA
catccagctggcagcctgcg

SEQ ID NO: 38737 - DNA, 20 bp, synthetic construct
  source 1..20: mol_type = other DNA
agagcttcctcgtcattgga

SEQ ID NO: 38738 - DNA, 20 bp, synthetic construct
  source 1..20: mol_type = other DNA
taagaatgagagcctgggca

SEQ ID NO: 38739 - DNA, 20 bp, synthetic construct
  source 1..20: mol_type = other DNA
cctcaccttgagctgggact

SEQ ID NO: 38740 - DNA, 20 bp, synthetic construct
  source 1..20: mol_type = other DNA
agagtccagtttgtatctgt

SEQ ID NO: 38741 - DNA, 20 bp, synthetic construct
  source 1..20: mol_type = other DNA
aggaggtgaaagaccagagc

SEQ ID NO: 38742 - DNA, 20 bp, synthetic construct
  source 1..20: mol_type = other DNA
ggccactgtagtcctccagg

SEQ ID NO: 38743 - DNA, 20 bp, synthetic construct
  source 1..20: mol_type = other DNA
actatgaggaagaagaaatc

SEQ ID NO: 38744 - DNA, 20 bp, synthetic construct
  source 1..20: mol_type = other DNA
cctggctccctgtggggcaa

SEQ ID NO: 38745 - DNA, 20 bp, synthetic construct
  source 1..20: mol_type = other DNA
tggacagcaaatttgggaga

SEQ ID NO: 38746 - DNA, 20 bp, synthetic construct
  source 1..20: mol_type = other DNA
tcttgagctcggcagtgttg

SEQ ID NO: 38747 - DNA, 20 bp, synthetic construct
  source 1..20: mol_type = other DNA
tctggatgctgtgccagacc

SEQ ID NO: 38748 - DNA, 20 bp, synthetic construct
  source 1..20: mol_type = other DNA
gatgatctttaacctccttc

SEQ ID NO: 38749 - DNA, 20 bp, synthetic construct
  source 1..20: mol_type = other DNA
ccaggcacttgttgtcctgc

SEQ ID NO: 38750 - DNA, 20 bp, synthetic construct
  source 1..20: mol_type = other DNA
ctcactgaaccgcagcagga

SEQ ID NO: 38751 - DNA, 20 bp, synthetic construct
  source 1..20: mol_type = other DNA
tttcatagataagaaccccc

SEQ ID NO: 38752 - DNA, 20 bp, synthetic construct
  source 1..20: mol_type = other DNA
tttaattcaccagaagaact

SEQ ID NO: 38753 - DNA, 20 bp, synthetic construct
  source 1..20: mol_type = other DNA
aaaacccatcttcccccacc

SEQ ID NO: 38754 - DNA, 20 bp, synthetic construct
  source 1..20: mol_type = other DNA
cctctacgaggaggagatgc

SEQ ID NO: 38755 - DNA, 20 bp, synthetic construct
  source 1..20: mol_type = other DNA
tgaagtccaagaacccgggg

SEQ ID NO: 38756 - DNA, 20 bp, synthetic construct
  source 1..20: mol_type = other DNA
tcagcctggcaggggaaggg

SEQ ID NO: 38757 - DNA, 20 bp, synthetic construct
  source 1..20: mol_type = other DNA
agcttggaagctgacaagtg

SEQ ID NO: 38758 - DNA, 20 bp, synthetic construct
  source 1..20: mol_type = other DNA
acagagaaaaaggctttccg

SEQ ID NO: 38759 - DNA, 20 bp, synthetic construct
  source 1..20: mol_type = other DNA
gaaaaaggcagaaagaaata

SEQ ID NO: 38760 - DNA, 20 bp, synthetic construct
  source 1..20: mol_type = other DNA
gcaggatgctgagtggtact

SEQ ID NO: 38761 - DNA, 20 bp, synthetic construct
  source 1..20: mol_type = other DNA
catcatggcatagtgtgaga

SEQ ID NO: 38762 - DNA, 20 bp, synthetic construct
  source 1..20: mol_type = other DNA
ttagcaaacagcggcacgat

SEQ ID NO: 38763 - DNA, 20 bp, synthetic construct
  source 1..20: mol_type = other DNA
cgatgccctcacgggccagg

SEQ ID NO: 38764 - DNA, 20 bp, synthetic construct
  source 1..20: mol_type = other DNA
gtgtcgcagcgaatggagtc

SEQ ID NO: 38765 - DNA, 20 bp, synthetic construct
  source 1..20: mol_type = other DNA
ggcgtgcctgtgaaatgaat

SEQ ID NO: 38766 - DNA, 20 bp, synthetic construct
  source 1..20: mol_type = other DNA
cgacggccgctgtcacctgg

SEQ ID NO: 38767 - DNA, 20 bp, synthetic construct
  source 1..20: mol_type = other DNA
ggggcagtaaaagcatctac

SEQ ID NO: 38768 - DNA, 20 bp, synthetic construct
  source 1..20: mol_type = other DNA
cacagcgaattaaggctgga

SEQ ID NO: 38769 - DNA, 20 bp, synthetic construct
  source 1..20: mol_type = other DNA
ctcatagctgacattgaact

SEQ ID NO: 38770 - DNA, 20 bp, synthetic construct
  source 1..20: mol_type = other DNA
ttgagaacctggtgaggcgg

SEQ ID NO: 38771 - DNA, 20 bp, synthetic construct
  source 1..20: mol_type = other DNA
ccagaattcagctataaagc

SEQ ID NO: 38772 - DNA, 20 bp, synthetic construct
  source 1..20: mol_type = other DNA
accttccaccagagggtaat

SEQ ID NO: 38773 - DNA, 20 bp, synthetic construct
  source 1..20: mol_type = other DNA
ttttacctcagcatagtgga

SEQ ID NO: 38774 - DNA, 20 bp, synthetic construct
  source 1..20: mol_type = other DNA
ggaggaggaggaggacagcg

SEQ ID NO: 38775 - DNA, 20 bp, synthetic construct
  source 1..20: mol_type = other DNA
aacgttgaggggcatcgtcg

SEQ ID NO: 38776 - DNA, 20 bp, synthetic construct
  source 1..20: mol_type = other DNA
agcagtgccagcaacgcctc

SEQ ID NO: 38777 - DNA, 20 bp, synthetic construct
  source 1..20: mol_type = other DNA
aggtatgtctaggagaccct

SEQ ID NO: 38778 - DNA, 20 bp, synthetic construct
  source 1..20: mol_type = other DNA
ctccattcatacagaacttc

SEQ ID NO: 38779 - DNA, 20 bp, synthetic construct
  source 1..20: mol_type = other DNA
cttcgcttgggcttaatgag

SEQ ID NO: 38780 - DNA, 20 bp, synthetic construct
  source 1..20: mol_type = other DNA
caagcgatcccgaacgagga

SEQ ID NO: 38781 - DNA, 20 bp, synthetic construct
  source 1..20: mol_type = other DNA
gctgcaggccccagagctac

SEQ ID NO: 38782 - DNA, 20 bp, synthetic construct
  source 1..20: mol_type = other DNA
tgacgaaaacgttggtctga

SEQ ID NO: 38783 - DNA, 20 bp, synthetic construct
  source 1..20: mol_type = other DNA
ttgtagcccttctccacccg

SEQ ID NO: 38784 - DNA, 20 bp, synthetic construct
  source 1..20: mol_type = other DNA
atttgcggtggacgatggag

SEQ ID NO: 38785 - DNA, 20 bp, synthetic construct
  source 1..20: mol_type = other DNA
ggagtcagccagcaaacacc

SEQ ID NO: 38786 - DNA, 20 bp, synthetic construct
  source 1..20: mol_type = other DNA
ctcactctctcggataagaa

SEQ ID NO: 38787 - DNA, 20 bp, synthetic construct
  source 1..20: mol_type = other DNA
agtggaccagatgttggata

SEQ ID NO: 38788 - DNA, 20 bp, synthetic construct
  source 1..20: mol_type = other DNA
acccactccaggctgtcagc

SEQ ID NO: 38789 - DNA, 20 bp, synthetic construct
  source 1..20: mol_type = other DNA
agcaatacattcaaatacca

SEQ ID NO: 38790 - DNA, 20 bp, synthetic construct
  source 1..20: mol_type = other DNA
ccccctaccacctctactac

SEQ ID NO: 38791 - DNA, 20 bp, synthetic construct
  source 1..20: mol_type = other DNA
ccacggcttccaatgcaaac

SEQ ID NO: 38792 - DNA, 20 bp, synthetic construct
  source 1..20: mol_type = other DNA
cactgctggaaagaggtcag

SEQ ID NO: 38793 - DNA, 20 bp, synthetic construct
  source 1..20: mol_type = other DNA
cctcacagtgttttcccacc

SEQ ID NO: 38794 - DNA, 20 bp, synthetic construct
  source 1..20: mol_type = other DNA
ggatccgtgcccctctgtcg

SEQ ID NO: 38795 - DNA, 20 bp, synthetic construct
  source 1..20: mol_type = other DNA
gccaatgcccagcacatatg

SEQ ID NO: 38796 - DNA, 20 bp, synthetic construct
  source 1..20: mol_type = other DNA
ggatgcagtccttgaagctg

SEQ ID NO: 38797 - DNA, 20 bp, synthetic construct
  source 1..20: mol_type = other DNA
aatgtggagaagcaagaggg

SEQ ID NO: 38798 - DNA, 20 bp, synthetic construct
  source 1..20: mol_type = other DNA
atactctcacaggtacataa

SEQ ID NO: 38799 - DNA, 20 bp, synthetic construct
  source 1..20: mol_type = other DNA
cttctggcagtggtttgacg

SEQ ID NO: 38800 - DNA, 20 bp, synthetic construct
  source 1..20: mol_type = other DNA
cgggccaccaggcgcaggac

SEQ ID NO: 38801 - DNA, 20 bp, synthetic construct
  source 1..20: mol_type = other DNA
ctctccactgcccagccgga

SEQ ID NO: 38802 - DNA, 20 bp, synthetic construct
  source 1..20: mol_type = other DNA
atcaaactacgtggaagaga

SEQ ID NO: 38803 - DNA, 20 bp, synthetic construct
  source 1..20: mol_type = other DNA
caacgactggggatcccaaa

SEQ ID NO: 38804 - DNA, 20 bp, synthetic construct
  source 1..20: mol_type = other DNA
actctccatgtctctgggct

SEQ ID NO: 38805 - DNA, 20 bp, synthetic construct
  source 1..20: mol_type = other DNA
cctacagattttgacagagt

SEQ ID NO: 38806 - DNA, 20 bp, synthetic construct
  source 1..20: mol_type = other DNA
cttcagggaccggccccacg

SEQ ID NO: 38807 - DNA, 20 bp, synthetic construct
  source 1..20: mol_type = other DNA
agctctactcgctggctgag

SEQ ID NO: 38808 - DNA, 20 bp, synthetic construct
  source 1..20: mol_type = other DNA
tgagctgggtgagttggcag

SEQ ID NO: 38809 - DNA, 20 bp, synthetic construct
  source 1..20: mol_type = other DNA
cctccgtctgcgcctgggcc

SEQ ID NO: 38810 - DNA, 20 bp, synthetic construct
  source 1..20: mol_type = other DNA
catggttcctgatgaggtga

SEQ ID NO: 38811 - DNA, 20 bp, synthetic construct
  source 1..20: mol_type = other DNA
ggtagtaggagttgtactgg

SEQ ID NO: 38812 - DNA, 20 bp, synthetic construct
  source 1..20: mol_type = other DNA
ttgcagcctcacctggccgt

SEQ ID NO: 38813 - DNA, 20 bp, synthetic construct
  source 1..20: mol_type = other DNA
ggcattcatacttgctttcc

SEQ ID NO: 38814 - DNA, 20 bp, synthetic construct
  source 1..20: mol_type = other DNA
cctgcgcgtgtgccggctga

SEQ ID NO: 38815 - DNA, 20 bp, synthetic construct
  source 1..20: mol_type = other DNA
cttcgacatctagactgggg

SEQ ID NO: 38816 - DNA, 20 bp, synthetic construct
  source 1..20: mol_type = other DNA
tacactcaggtatcagagaa

SEQ ID NO: 38817 - DNA, 20 bp, synthetic construct
  source 1..20: mol_type = other DNA
ggaatgatgggtaaggaacg

SEQ ID NO: 38818 - DNA, 20 bp, synthetic construct
  source 1..20: mol_type = other DNA
tcagcatgggctcagttgtg

SEQ ID NO: 38819 - DNA, 20 bp, synthetic construct
  source 1..20: mol_type = other DNA
gccagatttctgctgaagcg

SEQ ID NO: 38820 - DNA, 20 bp, synthetic construct
  source 1..20: mol_type = other DNA
aacttcgagatacagcagac

SEQ ID NO: 38821 - DNA, 20 bp, synthetic construct
  source 1..20: mol_type = other DNA
tcatactgtccctaggagca

SEQ ID NO: 38822 - DNA, 20 bp, synthetic construct
  source 1..20: mol_type = other DNA
gtctatcttattggtgacct

SEQ ID NO: 38823 - DNA, 20 bp, synthetic construct
  source 1..20: mol_type = other DNA
ggtgcggcagaaccggcaga

SEQ ID NO: 38824 - DNA, 20 bp, synthetic construct
  source 1..20: mol_type = other DNA
tggagaagacctcatccttg

SEQ ID NO: 38825 - DNA, 20 bp, synthetic construct
  source 1..20: mol_type = other DNA
tcactgctgtcggagctgtg

SEQ ID NO: 38826 - DNA, 20 bp, synthetic construct
  source 1..20: mol_type = other DNA
tgtataaccaaatcaacctc

SEQ ID NO: 38827 - DNA, 20 bp, synthetic construct
  source 1..20: mol_type = other DNA
ttcctgtaggaatcctgaga

SEQ ID NO: 38828 - DNA, 20 bp, synthetic construct
  source 1..20: mol_type = other DNA
ggacggggccgagagcaatg

SEQ ID NO: 38829 - DNA, 20 bp, synthetic construct
  source 1..20: mol_type = other DNA
taggactctgtgatgaagct

SEQ ID NO: 38830 - DNA, 20 bp, synthetic construct
  source 1..20: mol_type = other DNA
gaagtaggtggcattcttgt

SEQ ID NO: 38831 - DNA, 20 bp, synthetic construct
  source 1..20: mol_type = other DNA
cacagacccagtgcagctcc

SEQ ID NO: 38832 - DNA, 20 bp, synthetic construct
  source 1..20: mol_type = other DNA
gctctcagacattacaagac

SEQ ID NO: 38833 - DNA, 20 bp, synthetic construct
  source 1..20: mol_type = other DNA
ccactgccagccgcttctac

SEQ ID NO: 38834 - DNA, 20 bp, synthetic construct
  source 1..20: mol_type = other DNA
caaaggagaaagataggcgc

SEQ ID NO: 38835 - DNA, 20 bp, synthetic construct
  source 1..20: mol_type = other DNA
gattctagaatggcaggggt

SEQ ID NO: 38836 - DNA, 20 bp, synthetic construct
  source 1..20: mol_type = other DNA
cctctcgggccgcagcggca

SEQ ID NO: 38837 - DNA, 20 bp, synthetic construct
  source 1..20: mol_type = other DNA
ttcaccaaaatcttgtttcc

SEQ ID NO: 38838 - DNA, 20 bp, synthetic construct
  source 1..20: mol_type = other DNA
ctgggagagggaggccgtca

SEQ ID NO: 38839 - DNA, 20 bp, synthetic construct
  source 1..20: mol_type = other DNA
ccttttattacctagaggaa

SEQ ID NO: 38840 - DNA, 20 bp, synthetic construct
  source 1..20: mol_type = other DNA
tgcacattcatgccacatgc

SEQ ID NO: 38841 - DNA, 20 bp, synthetic construct
  source 1..20: mol_type = other DNA
ctccttgggcggcagcggcg

SEQ ID NO: 38842 - DNA, 20 bp, synthetic construct
  source 1..20: mol_type = other DNA
tcagcggcctcacctggaac

SEQ ID NO: 38843 - DNA, 20 bp, synthetic construct
  source 1..20: mol_type = other DNA
cctcttggaactgctggagg

SEQ ID NO: 38844 - DNA, 20 bp, synthetic construct
  source 1..20: mol_type = other DNA
ctacctgctggcatctcttc

SEQ ID NO: 38845 - DNA, 20 bp, synthetic construct
  source 1..20: mol_type = other DNA
cctggcagcatcgactgtgc

SEQ ID NO: 38846 - DNA, 20 bp, synthetic construct
  source 1..20: mol_type = other DNA
cctggagcagtgttctctta

SEQ ID NO: 38847 - DNA, 20 bp, synthetic construct
  source 1..20: mol_type = other DNA
tgcatcctgtcggcaatgcc

SEQ ID NO: 38848 - DNA, 20 bp, synthetic construct
  source 1..20: mol_type = other DNA
cggccaccaccaccacccga

SEQ ID NO: 38849 - DNA, 20 bp, synthetic construct
  source 1..20: mol_type = other DNA
ccaggagctgctgcaggaag

SEQ ID NO: 38850 - DNA, 20 bp, synthetic construct
  source 1..20: mol_type = other DNA
gcctgaggcttctcttcacc

SEQ ID NO: 38851 - DNA, 20 bp, synthetic construct
  source 1..20: mol_type = other DNA
gcggcaggagatgaggcgcc

SEQ ID NO: 38852 - DNA, 20 bp, synthetic construct
  source 1..20: mol_type = other DNA
cgtcacttgcactgttctgg

SEQ ID NO: 38853 - DNA, 20 bp, synthetic construct
  source 1..20: mol_type = other DNA
gtggatctgcatggagctca

SEQ ID NO: 38854 - DNA, 20 bp, synthetic construct
  source 1..20: mol_type = other DNA
gtggaagtctgtgttgtata

SEQ ID NO: 38855 - DNA, 20 bp, synthetic construct
  source 1..20: mol_type = other DNA
tcagctactcacatctggtg

SEQ ID NO: 38856 - DNA, 20 bp, synthetic construct
  source 1..20: mol_type = other DNA
caagaagaagtccaagaagg

SEQ ID NO: 38857 - DNA, 20 bp, synthetic construct
  source 1..20: mol_type = other DNA
gacgcccccgcgtaccagca

SEQ ID NO: 38858 - DNA, 20 bp, synthetic construct
  source 1..20: mol_type = other DNA
cctttgaagaggctcggaga

SEQ ID NO: 38859 - DNA, 20 bp, synthetic construct
  source 1..20: mol_type = other DNA
gagtggcagctgaatctaca

SEQ ID NO: 38860 - DNA, 20 bp, synthetic construct
  source 1..20: mol_type = other DNA
gttggtaaacctcacaaatg

SEQ ID NO: 38861 - DNA, 20 bp, synthetic construct
  source 1..20: mol_type = other DNA
gcttctgggtctggcagggg

SEQ ID NO: 38862 - DNA, 20 bp, synthetic construct
  source 1..20: mol_type = other DNA
aacccaatgtctattgaggt

SEQ ID NO: 38863 - DNA, 20 bp, synthetic construct
  source 1..20: mol_type = other DNA
tcctgagaagaaggcgtggg

SEQ ID NO: 38864 - DNA, 20 bp, synthetic construct
  source 1..20: mol_type = other DNA
gccgcgctcttcaaggtctc

SEQ ID NO: 38865 - DNA, 20 bp, synthetic construct
  source 1..20: mol_type = other DNA
agactcagacaaggccatcc

SEQ ID NO: 38866 - DNA, 20 bp, synthetic construct
  source 1..20: mol_type = other DNA
tactacactcctgtgctggg

SEQ ID NO: 38867 - DNA, 20 bp, synthetic construct
  source 1..20: mol_type = other DNA
tcaatcttcatcttgtgata

SEQ ID NO: 38868 - DNA, 20 bp, synthetic construct
  source 1..20: mol_type = other DNA
tcgctcactcaccaggggcg

SEQ ID NO: 38869 - DNA, 20 bp, synthetic construct
  source 1..20: mol_type = other DNA
cagcggcggcgggcccggcg

SEQ ID NO: 38870 - DNA, 20 bp, synthetic construct
  source 1..20: mol_type = other DNA
tttcatccctgggacctagg

SEQ ID NO: 38871 - DNA, 20 bp, synthetic construct
  source 1..20: mol_type = other DNA
cccgcaccgcctcagtgccg

SEQ ID NO: 38872 - DNA, 20 bp, synthetic construct
  source 1..20: mol_type = other DNA
tactaaaatgacatgaagca

SEQ ID NO: 38873 - DNA, 20 bp, synthetic construct
  source 1..20: mol_type = other DNA
tgctgtcgggcaggggcacc

SEQ ID NO: 38874 - DNA, 20 bp, synthetic construct
  source 1..20: mol_type = other DNA
gcatttgaaatgtcaagaag

SEQ ID NO: 38875 - DNA, 20 bp, synthetic construct
  source 1..20: mol_type = other DNA
tgttactcatgtaacccaac

SEQ ID NO: 38876 - DNA, 20 bp, synthetic construct
  source 1..20: mol_type = other DNA
gatcaaagtcaaagagggcc

SEQ ID NO: 38877 - DNA, 20 bp, synthetic construct
  source 1..20: mol_type = other DNA
cagcattccaagcgtgcaca

SEQ ID NO: 38878 - DNA, 20 bp, synthetic construct
  source 1..20: mol_type = other DNA
tgtgatacaggtccttggtc

SEQ ID NO: 38879 - DNA, 20 bp, synthetic construct
  source 1..20: mol_type = other DNA
tgagaagtctgaggtcagtc

SEQ ID NO: 38880 - DNA, 20 bp, synthetic construct
  source 1..20: mol_type = other DNA
ccatgtctctgggctaggcc

SEQ ID NO: 38881 - DNA, 20 bp, synthetic construct
  source 1..20: mol_type = other DNA
acttacctgccgggaagatg

SEQ ID NO: 38882 - DNA, 20 bp, synthetic construct
  source 1..20: mol_type = other DNA
caagcacccagaacggaagc

SEQ ID NO: 38883 - DNA, 20 bp, synthetic construct
  source 1..20: mol_type = other DNA
acgaatgcgtggcggagatc

SEQ ID NO: 38884 - DNA, 20 bp, synthetic construct
  source 1..20: mol_type = other DNA
gcgagctgctggccaggttg

SEQ ID NO: 38885 - DNA, 20 bp, synthetic construct
  source 1..20: mol_type = other DNA
tttcttcagtagctactctg

SEQ ID NO: 38886 - DNA, 20 bp, synthetic construct
  source 1..20: mol_type = other DNA
gcccatgtcggccacatgga

SEQ ID NO: 38887 - DNA, 20 bp, synthetic construct
  source 1..20: mol_type = other DNA
aggtcttcgctctcctgtag

SEQ ID NO: 38888 - DNA, 20 bp, synthetic construct
  source 1..20: mol_type = other DNA
gctcagtgaggagaagaaca

SEQ ID NO: 38889 - DNA, 20 bp, synthetic construct
  source 1..20: mol_type = other DNA
aacctggatgcacccgaggg

SEQ ID NO: 38890 - DNA, 20 bp, synthetic construct
  source 1..20: mol_type = other DNA
gatggcaaagtccagactgt

SEQ ID NO: 38891 - DNA, 20 bp, synthetic construct
  source 1..20: mol_type = other DNA
tctgcaagtactcaaaagtg

SEQ ID NO: 38892 - DNA, 20 bp, synthetic construct
  source 1..20: mol_type = other DNA
accctcgtcttcttcgagga

SEQ ID NO: 38893 - DNA, 20 bp, synthetic construct
  source 1..20: mol_type = other DNA
ccccaaaacttctgatgtgc

SEQ ID NO: 38894 - DNA, 20 bp, synthetic construct
  source 1..20: mol_type = other DNA
aagaaggtagaaatcatcat

SEQ ID NO: 38895 - DNA, 20 bp, synthetic construct
  source 1..20: mol_type = other DNA
catcctccagctctgagcta

SEQ ID NO: 38896 - DNA, 20 bp, synthetic construct
  source 1..20: mol_type = other DNA
cccaaatgtgcagaaagacc

SEQ ID NO: 38897 - DNA, 20 bp, synthetic construct
  source 1..20: mol_type = other DNA
actgacctgtaacatgcacc

SEQ ID NO: 38898 - DNA, 20 bp, synthetic construct
  source 1..20: mol_type = other DNA
gcccttccaccttgctggcc

SEQ ID NO: 38899 - DNA, 20 bp, synthetic construct
  source 1..20: mol_type = other DNA
cagtgccagagagacctaca

SEQ ID NO: 38900 - DNA, 20 bp, synthetic construct
  source 1..20: mol_type = other DNA
tacctgttccagttcttggt

SEQ ID NO: 38901 - DNA, 20 bp, synthetic construct
  source 1..20: mol_type = other DNA
agtcacaccaacacctcctg

SEQ ID NO: 38902 - DNA, 20 bp, synthetic construct
  source 1..20: mol_type = other DNA
gaacagacaggtcctgagga

SEQ ID NO: 38903 - DNA, 20 bp, synthetic construct
  source 1..20: mol_type = other DNA
ggtaggccgagcccttggcc

SEQ ID NO: 38904 - DNA, 20 bp, synthetic construct
  source 1..20: mol_type = other DNA
ttacagctcacgattcctgg

SEQ ID NO: 38905 - DNA, 20 bp, synthetic construct
  source 1..20: mol_type = other DNA
aatactcacacggcttgcat

SEQ ID NO: 38906 - DNA, 20 bp, synthetic construct
  source 1..20: mol_type = other DNA
tggatcgttatggagtactg

SEQ ID NO: 38907 - DNA, 20 bp, synthetic construct
  source 1..20: mol_type = other DNA
cgttccggccgaaagtggta

SEQ ID NO: 38908 - DNA, 20 bp, synthetic construct
  source 1..20: mol_type = other DNA
actgcagatcatctcaaccc

SEQ ID NO: 38909 - DNA, 20 bp, synthetic construct
  source 1..20: mol_type = other DNA
gatcctgcagaagacccgag

SEQ ID NO: 38910 - DNA, 20 bp, synthetic construct
  source 1..20: mol_type = other DNA
tatgcagtccattattgaca

SEQ ID NO: 38911 - DNA, 20 bp, synthetic construct
  source 1..20: mol_type = other DNA
tggccagaccaggtacgggg

SEQ ID NO: 38912 - DNA, 20 bp, synthetic construct
  source 1..20: mol_type = other DNA
tagacgccagcagcatgggt

SEQ ID NO: 38913 - DNA, 20 bp, synthetic construct
  source 1..20: mol_type = other DNA
aacagtaaccaacctcagtg

SEQ ID NO: 38914 - DNA, 20 bp, synthetic construct
  source 1..20: mol_type = other DNA
cgaatgctcagccctgcaac

SEQ ID NO: 38915 - DNA, 20 bp, synthetic construct
  source 1..20: mol_type = other DNA
gagccaagtcagcgtcctgc

SEQ ID NO: 38916 - DNA, 20 bp, synthetic construct
  source 1..20: mol_type = other DNA
gcgcacctgcccttcttcta

SEQ ID NO: 38917 - DNA, 20 bp, synthetic construct
  source 1..20: mol_type = other DNA
ccagaaaggtaccggggttg

SEQ ID NO: 38918 - DNA, 20 bp, synthetic construct
  source 1..20: mol_type = other DNA
gtggaggtaaggagctggtc

SEQ ID NO: 38919 - DNA, 20 bp, synthetic construct
  source 1..20: mol_type = other DNA
tgagaagcaggaaggtacat

SEQ ID NO: 38920 - DNA, 20 bp, synthetic construct
  source 1..20: mol_type = other DNA
tgatcagtcctttgaaagca

SEQ ID NO: 38921 - DNA, 20 bp, synthetic construct
  source 1..20: mol_type = other DNA
ggccctttgcctaacacatg

SEQ ID NO: 38922 - DNA, 20 bp, synthetic construct
  source 1..20: mol_type = other DNA
tccctgacaacgcagacatg

SEQ ID NO: 38923 - DNA, 20 bp, synthetic construct
  source 1..20: mol_type = other DNA
gcgccgcgtccatgtaggag

SEQ ID NO: 38924 - DNA, 20 bp, synthetic construct
  source 1..20: mol_type = other DNA
gagcctcttgaaatagatat

SEQ ID NO: 38925 - DNA, 20 bp, synthetic construct
  source 1..20: mol_type = other DNA
ctccagttcaagagcccaag

SEQ ID NO: 38926 - DNA, 20 bp, synthetic construct
  source 1..20: mol_type = other DNA
ccaggtactccatgccctgc

SEQ ID NO: 38927 - DNA, 20 bp, synthetic construct
  source 1..20: mol_type = other DNA
caggtgagtttcttcagacc

SEQ ID NO: 38928 - DNA, 20 bp, synthetic construct
  source 1..20: mol_type = other DNA
ccagcagcgggaagtggacc

SEQ ID NO: 38929 - DNA, 20 bp, synthetic construct
  source 1..20: mol_type = other DNA
cgatgtaggggttgtccagc

SEQ ID NO: 38930 - DNA, 20 bp, synthetic construct
  source 1..20: mol_type = other DNA
caggatctgtccagaaccgc

SEQ ID NO: 38931 - DNA, 20 bp, synthetic construct
  source 1..20: mol_type = other DNA
ccacgcatgccaggcctggt

SEQ ID NO: 38932 - DNA, 20 bp, synthetic construct
  source 1..20: mol_type = other DNA
cgcgggcaggtgttcgacgt

SEQ ID NO: 38933 - DNA, 20 bp, synthetic construct
  source 1..20: mol_type = other DNA
acacaggcaggatgcctaca

SEQ ID NO: 38934 - DNA, 20 bp, synthetic construct
  source 1..20: mol_type = other DNA
cagcccatcacgaggtgcca

SEQ ID NO: 38935 - DNA, 20 bp, synthetic construct
  source 1..20: mol_type = other DNA
aacatggaagaatccaacaa

SEQ ID NO: 38936 - DNA, 20 bp, synthetic construct
  source 1..20: mol_type = other DNA
tctgctgggcaactggtccc

SEQ ID NO: 38937 - DNA, 20 bp, synthetic construct
  source 1..20: mol_type = other DNA
gactccaccatgtgcacgat

SEQ ID NO: 38938 - DNA, 20 bp, synthetic construct
  source 1..20: mol_type = other DNA
tcagaaactggagagcttgg

SEQ ID NO: 38939 - DNA, 20 bp, synthetic construct
  source 1..20: mol_type = other DNA
aaccagaccttcacttacat

SEQ ID NO: 38940 - DNA, 20 bp, synthetic construct
  source 1..20: mol_type = other DNA
ctccctctttgctctggcca

SEQ ID NO: 38941 - DNA, 20 bp, synthetic construct
  source 1..20: mol_type = other DNA
gcttgatgacctcgttcatc

SEQ ID NO: 38942 - DNA, 20 bp, synthetic construct
  source 1..20: mol_type = other DNA
tgctgcaacagaaaccaggc

SEQ ID NO: 38943 - DNA, 20 bp, synthetic construct
  source 1..20: mol_type = other DNA
ggacaatgcctttgctgagc

SEQ ID NO: 38944 - DNA, 20 bp, synthetic construct
  source 1..20: mol_type = other DNA
ccttgagactgaggcccacg

SEQ ID NO: 38945 - DNA, 20 bp, synthetic construct
  source 1..20: mol_type = other DNA
cggagagcttcgtgctaaac

SEQ ID NO: 38946 - DNA, 20 bp, synthetic construct
  source 1..20: mol_type = other DNA
tcttacactaaggtaagcca

SEQ ID NO: 38947 - DNA, 20 bp, synthetic construct
  source 1..20: mol_type = other DNA
tcagctcccggcggatcaac

SEQ ID NO: 38948 - DNA, 20 bp, synthetic construct
  source 1..20: mol_type = other DNA
catatactcccttgtctaaa

SEQ ID NO: 38949 - DNA, 20 bp, synthetic construct
  source 1..20: mol_type = other DNA
gccccgcactgtctgtgtcc

SEQ ID NO: 38950 - DNA, 20 bp, synthetic construct
  source 1..20: mol_type = other DNA
ctccaaggtgaggagggtta

SEQ ID NO: 38951 - DNA, 20 bp, synthetic construct
  source 1..20: mol_type = other DNA
ctaggcgagttatagcctca

SEQ ID NO: 38952 - DNA, 20 bp, synthetic construct
  source 1..20: mol_type = other DNA
cagcggccttcacttccacc

SEQ ID NO: 38953 - DNA, 20 bp, synthetic construct
  source 1..20: mol_type = other DNA
ccctagctggctacacaggt

SEQ ID NO: 38954 - DNA, 20 bp, synthetic construct
  source 1..20: mol_type = other DNA
gccggtcgcagtggtcacag

SEQ ID NO: 38955 - DNA, 20 bp, synthetic construct
  source 1..20: mol_type = other DNA
tttaccttcatgatgtcctc

SEQ ID NO: 38956 - DNA, 20 bp, synthetic construct
  source 1..20: mol_type = other DNA
ggggcagagggaccatatgg

SEQ ID NO: 38957 - DNA, 20 bp, synthetic construct
  source 1..20: mol_type = other DNA
aacgttcacgtaatcatcaa

SEQ ID NO: 38958 - DNA, 20 bp, synthetic construct
  source 1..20: mol_type = other DNA
gctggcgcccacagaaaagc

SEQ ID NO: 38959 - DNA, 20 bp, synthetic construct
  source 1..20: mol_type = other DNA
gatgctggagcagcaccttc

SEQ ID NO: 38960 - DNA, 20 bp, synthetic construct
  source 1..20: mol_type = other DNA
tgcacaaatggctccctgga

SEQ ID NO: 38961 - DNA, 20 bp, synthetic construct
  source 1..20: mol_type = other DNA
cctgcctgtaggtactgggc

SEQ ID NO: 38962 - DNA, 20 bp, synthetic construct
  source 1..20: mol_type = other DNA
ccccttcatcacctaaaaga

SEQ ID NO: 38963 - DNA, 20 bp, synthetic construct
  source 1..20: mol_type = other DNA
ccaaaaggaagtattacctg

SEQ ID NO: 38964 - DNA, 20 bp, synthetic construct
  source 1..20: mol_type = other DNA
ccaaaggacagttctggtca

SEQ ID NO: 38965 - DNA, 20 bp, synthetic construct
  source 1..20: mol_type = other DNA
actctccactgcccagccgg

SEQ ID NO: 38966 - DNA, 20 bp, synthetic construct
  source 1..20: mol_type = other DNA
agaagagggcatccttcaag

SEQ ID NO: 38967 - DNA, 20 bp, synthetic construct
  source 1..20: mol_type = other DNA
ctggtctggcggcggctcct

SEQ ID NO: 38968 - DNA, 20 bp, synthetic construct
  source 1..20: mol_type = other DNA
gggtgcctcttcctcctcat

SEQ ID NO: 38969 - DNA, 20 bp, synthetic construct
  source 1..20: mol_type = other DNA
caggatgccacgcttgctct

SEQ ID NO: 38970 - DNA, 20 bp, synthetic construct
  source 1..20: mol_type = other DNA
tgcctggcacctggagaagg

SEQ ID NO: 38971 - DNA, 20 bp, synthetic construct
  source 1..20: mol_type = other DNA
caagacacagaagatgatga

SEQ ID NO: 38972 - DNA, 20 bp, synthetic construct
  source 1..20: mol_type = other DNA
cttacaggttttcaccaggt

SEQ ID NO: 38973 - DNA, 20 bp, synthetic construct
  source 1..20: mol_type = other DNA
ggaggaggaacaggaccaag

SEQ ID NO: 38974 - DNA, 20 bp, synthetic construct
  source 1..20: mol_type = other DNA
caggtgacagcggccgtcgt

SEQ ID NO: 38975 - DNA, 20 bp, synthetic construct
  source 1..20: mol_type = other DNA
ccaccagtttcctggcctcc

SEQ ID NO: 38976 - DNA, 20 bp, synthetic construct
  source 1..20: mol_type = other DNA
ctccatcatcctccccatcc

SEQ ID NO: 38977 - DNA, 20 bp, synthetic construct
  source 1..20: mol_type = other DNA
acacgctgcaggtgaacggc

SEQ ID NO: 38978 - DNA, 20 bp, synthetic construct
  source 1..20: mol_type = other DNA
cgattacgaaataaaacggt

SEQ ID NO: 38979 - DNA, 20 bp, synthetic construct
  source 1..20: mol_type = other DNA
cggtgagtaaagcctggtct

SEQ ID NO: 38980 - DNA, 20 bp, synthetic construct
  source 1..20: mol_type = other DNA
tcatccccaagtcagccgtg

SEQ ID NO: 38981 - DNA, 20 bp, synthetic construct
  source 1..20: mol_type = other DNA
tccgcccagggaagacctca

SEQ ID NO: 38982 - DNA, 20 bp, synthetic construct
  source 1..20: mol_type = other DNA
catgcttgcattcccaggga

SEQ ID NO: 38983 - DNA, 20 bp, synthetic construct
  source 1..20: mol_type = other DNA
tgcccagagaaaactgcgcc

SEQ ID NO: 38984 - DNA, 20 bp, synthetic construct
  source 1..20: mol_type = other DNA
atcagagctgtcgctcaagg

SEQ ID NO: 38985 - DNA, 20 bp, synthetic construct
  source 1..20: mol_type = other DNA
gcctgaaggcaaacgggggc

SEQ ID NO: 38986 - DNA, 20 bp, synthetic construct
  source 1..20: mol_type = other DNA
agcaacaacctggaccaggt

SEQ ID NO: 38987 - DNA, 20 bp, synthetic construct
  source 1..20: mol_type = other DNA
ggactttcccgttccgcctg

SEQ ID NO: 38988 - DNA, 20 bp, synthetic construct
  source 1..20: mol_type = other DNA
gagcatcctggccaaccgct

SEQ ID NO: 38989 - DNA, 20 bp, synthetic construct
  source 1..20: mol_type = other DNA
accaggttgggcaggacccg

SEQ ID NO: 38990 - DNA, 20 bp, synthetic construct
  source 1..20: mol_type = other DNA
gtctacagcaatctcctcgg

SEQ ID NO: 38991 - DNA, 20 bp, synthetic construct
  source 1..20: mol_type = other DNA
tgtggttgctggagaaggca

SEQ ID NO: 38992 - DNA, 20 bp, synthetic construct
  source 1..20: mol_type = other DNA
gggtcccccaggactcgtaa

SEQ ID NO: 38993 - DNA, 20 bp, synthetic construct
  source 1..20: mol_type = other DNA
aaggaacgtgggcatgacct

SEQ ID NO: 38994 - DNA, 20 bp, synthetic construct
  source 1..20: mol_type = other DNA
actcagagtgatgaagagaa

SEQ ID NO: 38995 - DNA, 20 bp, synthetic construct
  source 1..20: mol_type = other DNA
acccggatgaagagcacgat

SEQ ID NO: 38996 - DNA, 20 bp, synthetic construct
  source 1..20: mol_type = other DNA
ccccaggcggccggcttccc

SEQ ID NO: 38997 - DNA, 20 bp, synthetic construct
  source 1..20: mol_type = other DNA
aggctgccacctgtggatac

SEQ ID NO: 38998 - DNA, 20 bp, synthetic construct
  source 1..20: mol_type = other DNA
gatctccttctgcatcctgt

SEQ ID NO: 38999 - DNA, 20 bp, synthetic construct
  source 1..20: mol_type = other DNA
tcggagatgacaggatgctg

SEQ ID NO: 39000 - DNA, 20 bp, synthetic construct
  source 1..20: mol_type = other DNA
aggaccccaagcagaggtga

SEQ ID NO: 39001 - DNA, 20 bp, synthetic construct
  source 1..20: mol_type = other DNA
tgtccagaccatgcagcaac

SEQ ID NO: 39002 - DNA, 20 bp, synthetic construct
  source 1..20: mol_type = other DNA
gctcagctgtgcgagtgtac

SEQ ID NO: 39003 - DNA, 20 bp, synthetic construct
  source 1..20: mol_type = other DNA
atggagacagtggtaaacag

SEQ ID NO: 39004 - DNA, 20 bp, synthetic construct
  source 1..20: mol_type = other DNA
ggcggagagcgaggtgacag

SEQ ID NO: 39005 - DNA, 20 bp, synthetic construct
  source 1..20: mol_type = other DNA
ggaaggagcgcccagaggac

SEQ ID NO: 39006 - DNA, 20 bp, synthetic construct
  source 1..20: mol_type = other DNA
tcaggttgtctttattggcc

SEQ ID NO: 39007 - DNA, 20 bp, synthetic construct
  source 1..20: mol_type = other DNA
gcagacatgcaagatctgaa

SEQ ID NO: 39008 - DNA, 20 bp, synthetic construct
  source 1..20: mol_type = other DNA
ctgggcctcaccaatgcggc

SEQ ID NO: 39009 - DNA, 20 bp, synthetic construct
  source 1..20: mol_type = other DNA
ctttaccgcagtagatctgg

SEQ ID NO: 39010 - DNA, 20 bp, synthetic construct
  source 1..20: mol_type = other DNA
aagcacatgggcacggaggt

SEQ ID NO: 39011 - DNA, 20 bp, synthetic construct
  source 1..20: mol_type = other DNA
acgggcgccatgggtgcggg

SEQ ID NO: 39012 - DNA, 20 bp, synthetic construct
  source 1..20: mol_type = other DNA
aggtctgtgccaccggccgg

SEQ ID NO: 39013 - DNA, 20 bp, synthetic construct
  source 1..20: mol_type = other DNA
tgatctgcgccttgggggcc

SEQ ID NO: 39014 - DNA, 20 bp, synthetic construct
  source 1..20: mol_type = other DNA
ccgcacctgaaactcatact

SEQ ID NO: 39015 - DNA, 20 bp, synthetic construct
  source 1..20: mol_type = other DNA
ggccctggatcgagccattg

SEQ ID NO: 39016 - DNA, 20 bp, synthetic construct
  source 1..20: mol_type = other DNA
gcaggtactggtgggcggca

SEQ ID NO: 39017 - DNA, 20 bp, synthetic construct
  source 1..20: mol_type = other DNA
aactcgtagtctccatcctg

SEQ ID NO: 39018 - DNA, 20 bp, synthetic construct
  source 1..20: mol_type = other DNA
ccgccatggccgttcaccta

SEQ ID NO: 39019 - DNA, 20 bp, synthetic construct
  source 1..20: mol_type = other DNA
tgtataaggggctataatcc

SEQ ID NO: 39020 - DNA, 20 bp, synthetic construct
  source 1..20: mol_type = other DNA
aacaccaggacgcagccagc

SEQ ID NO: 39021 - DNA, 20 bp, synthetic construct
  source 1..20: mol_type = other DNA
gaggtggccgagccacggaa

SEQ ID NO: 39022 - DNA, 20 bp, synthetic construct
  source 1..20: mol_type = other DNA
ccaccacggtgagtgcgccc

SEQ ID NO: 39023 - DNA, 20 bp, synthetic construct
  source 1..20: mol_type = other DNA
acccacatgtagacctgtgg

SEQ ID NO: 39024 - DNA, 20 bp, synthetic construct
  source 1..20: mol_type = other DNA
taatcggcaactgtgcctgc

SEQ ID NO: 39025 - DNA, 20 bp, synthetic construct
  source 1..20: mol_type = other DNA
tgaagctggtggagcggctg

SEQ ID NO: 39026 - DNA, 20 bp, synthetic construct
  source 1..20: mol_type = other DNA
cctgcagcaaggagaacaga

SEQ ID NO: 39027 - DNA, 20 bp, synthetic construct
  source 1..20: mol_type = other DNA
tacgagaggttggtgtagcg

SEQ ID NO: 39028 - DNA, 20 bp, synthetic construct
  source 1..20: mol_type = other DNA
cctcaggggtgtaccccagc

SEQ ID NO: 39029 - DNA, 20 bp, synthetic construct
  source 1..20: mol_type = other DNA
ggctgggggtgaaatagaga

SEQ ID NO: 39030 - DNA, 20 bp, synthetic construct
  source 1..20: mol_type = other DNA
agcccaggtagggtaacatc

SEQ ID NO: 39031 - DNA, 20 bp, synthetic construct
  source 1..20: mol_type = other DNA
tacacaggcaggatgcctac

SEQ ID NO: 39032 - DNA, 20 bp, synthetic construct
  source 1..20: mol_type = other DNA
cctcagcaagcagccctgca

SEQ ID NO: 39033 - DNA, 20 bp, synthetic construct
  source 1..20: mol_type = other DNA
gatgctgctgcggctccggg

SEQ ID NO: 39034 - DNA, 20 bp, synthetic construct
  source 1..20: mol_type = other DNA
ggggctgaactttgcagacg

SEQ ID NO: 39035 - DNA, 20 bp, synthetic construct
  source 1..20: mol_type = other DNA
cgatgaggtccagtgcgtat

SEQ ID NO: 39036 - DNA, 20 bp, synthetic construct
  source 1..20: mol_type = other DNA
ggccagaccaggtacggggt

SEQ ID NO: 39037 - DNA, 20 bp, synthetic construct
  source 1..20: mol_type = other DNA
tgccgcaccttccacaccat

SEQ ID NO: 39038 - DNA, 20 bp, synthetic construct
  source 1..20: mol_type = other DNA
gttccagcagctgaagcagg

SEQ ID NO: 39039 - DNA, 20 bp, synthetic construct
  source 1..20: mol_type = other DNA
cggtcttgatgacgaggggc

SEQ ID NO: 39040 - DNA, 20 bp, synthetic construct
  source 1..20: mol_type = other DNA
tccaagtttcaggaagcatc

SEQ ID NO: 39041 - DNA, 20 bp, synthetic construct
  source 1..20: mol_type = other DNA
gacccactggttacctacga

SEQ ID NO: 39042 - DNA, 20 bp, synthetic construct
  source 1..20: mol_type = other DNA
gaagcagttgatgcagctga

SEQ ID NO: 39043 - DNA, 20 bp, synthetic construct
  source 1..20: mol_type = other DNA
cacctgaagccaagagaaga

SEQ ID NO: 39044 - DNA, 20 bp, synthetic construct
  source 1..20: mol_type = other DNA
gacccaactgtcaattcctt

SEQ ID NO: 39045 - DNA, 20 bp, synthetic construct
  source 1..20: mol_type = other DNA
agagcacaaggacagtgtca

SEQ ID NO: 39046 - DNA, 20 bp, synthetic construct
  source 1..20: mol_type = other DNA
ccgggagcacacagcctggg

SEQ ID NO: 39047 - DNA, 20 bp, synthetic construct
  source 1..20: mol_type = other DNA
cagctgtccaggtgcgtggc

SEQ ID NO: 39048 - DNA, 20 bp, synthetic construct
  source 1..20: mol_type = other DNA
gccatcctcgaagaagacga

SEQ ID NO: 39049 - DNA, 20 bp, synthetic construct
  source 1..20: mol_type = other DNA
tgaaactgaaggtagccgag

SEQ ID NO: 39050 - DNA, 20 bp, synthetic construct
  source 1..20: mol_type = other DNA
tcaagacacagaagatgatg

SEQ ID NO: 39051 - DNA, 20 bp, synthetic construct
  source 1..20: mol_type = other DNA
ggtagttgtcatgcaccacc

SEQ ID NO: 39052 - DNA, 20 bp, synthetic construct
  source 1..20: mol_type = other DNA
atgagctggtctggtttggg

SEQ ID NO: 39053 - DNA, 20 bp, synthetic construct
  source 1..20: mol_type = other DNA
cacctgcagatgggaatggc

SEQ ID NO: 39054 - DNA, 20 bp, synthetic construct
  source 1..20: mol_type = other DNA
gaggtgacagaggtgcagaa

SEQ ID NO: 39055 - DNA, 20 bp, synthetic construct
  source 1..20: mol_type = other DNA
cagaatatgtggccacacgt

SEQ ID NO: 39056 - DNA, 20 bp, synthetic construct
  source 1..20: mol_type = other DNA
gctcatcgtccctgcaggga

SEQ ID NO: 39057 - DNA, 20 bp, synthetic construct
  source 1..20: mol_type = other DNA
ttgatgacgaggggccggtc

SEQ ID NO: 39058 - DNA, 20 bp, synthetic construct
  source 1..20: mol_type = other DNA
cccgcaggtggaagtgatag

SEQ ID NO: 39059 - DNA, 20 bp, synthetic construct
  source 1..20: mol_type = other DNA
ttggtgcccaccagcaggat

SEQ ID NO: 39060 - DNA, 20 bp, synthetic construct
  source 1..20: mol_type = other DNA
ccttggctgtcaacagtccc

SEQ ID NO: 39061 - DNA, 20 bp, synthetic construct
  source 1..20: mol_type = other DNA
cggtggggaggcagccatag

SEQ ID NO: 39062 - DNA, 20 bp, synthetic construct
  source 1..20: mol_type = other DNA
tttctatggcagttattccc

SEQ ID NO: 39063 - DNA, 20 bp, synthetic construct
  source 1..20: mol_type = other DNA
tcaacttatgaggaaatgct

SEQ ID NO: 39064 - DNA, 20 bp, synthetic construct
  source 1..20: mol_type = other DNA
ctgtggctgcagctcacacc

SEQ ID NO: 39065 - DNA, 20 bp, synthetic construct
  source 1..20: mol_type = other DNA
gagctctgcaacaaaaacag

SEQ ID NO: 39066 - DNA, 20 bp, synthetic construct
  source 1..20: mol_type = other DNA
atcctcacaggctggttctg

SEQ ID NO: 39067 - DNA, 20 bp, synthetic construct
  source 1..20: mol_type = other DNA
gcacacaaaagtgatgaaca

SEQ ID NO: 39068 - DNA, 20 bp, synthetic construct
  source 1..20: mol_type = other DNA
ggaactcaggaagggacact

SEQ ID NO: 39069 - DNA, 20 bp, synthetic construct
  source 1..20: mol_type = other DNA
tgacctatgagccaacccag

SEQ ID NO: 39070 - DNA, 20 bp, synthetic construct
  source 1..20: mol_type = other DNA
tggtgctggccacgtcatca

SEQ ID NO: 39071 - DNA, 20 bp, synthetic construct
  source 1..20: mol_type = other DNA
ccagggcggggtagtacacg

SEQ ID NO: 39072 - DNA, 20 bp, synthetic construct
  source 1..20: mol_type = other DNA
agctgggccccaccttgtcc

SEQ ID NO: 39073 - DNA, 20 bp, synthetic construct
  source 1..20: mol_type = other DNA
cttcaggccttctggaagca

SEQ ID NO: 39074 - DNA, 20 bp, synthetic construct
  source 1..20: mol_type = other DNA
ctccgcagccacacatccag

SEQ ID NO: 39075 - DNA, 20 bp, synthetic construct
  source 1..20: mol_type = other DNA
tcgtgatggactccggtgac

SEQ ID NO: 39076 - DNA, 20 bp, synthetic construct
  source 1..20: mol_type = other DNA
tggcccggacacagacagtg

SEQ ID NO: 39077 - DNA, 20 bp, synthetic construct
  source 1..20: mol_type = other DNA
atccacagctacaacagatg

SEQ ID NO: 39078 - DNA, 20 bp, synthetic construct
  source 1..20: mol_type = other DNA
cttccacctgcgggcaggga

SEQ ID NO: 39079 - DNA, 20 bp, synthetic construct
  source 1..20: mol_type = other DNA
cagagcttcctcgtcattgg

SEQ ID NO: 39080 - DNA, 20 bp, synthetic construct
  source 1..20: mol_type = other DNA
atgatattgacgatataaaa

SEQ ID NO: 39081 - DNA, 20 bp, synthetic construct
  source 1..20: mol_type = other DNA
atcagcgtcttgtctttcaa

SEQ ID NO: 39082 - DNA, 20 bp, synthetic construct
  source 1..20: mol_type = other DNA
gtcgcctattccaagaacaa

SEQ ID NO: 39083 - DNA, 20 bp, synthetic construct
  source 1..20: mol_type = other DNA
tgccaaggtatctgcagcag

SEQ ID NO: 39084 - DNA, 20 bp, synthetic construct
  source 1..20: mol_type = other DNA
ggccacccactggcgcagca

SEQ ID NO: 39085 - DNA, 20 bp, synthetic construct
  source 1..20: mol_type = other DNA
atccaggatgcctttaatga

SEQ ID NO: 39086 - DNA, 20 bp, synthetic construct
  source 1..20: mol_type = other DNA
attcagggtgtcagatcaca

SEQ ID NO: 39087 - DNA, 20 bp, synthetic construct
  source 1..20: mol_type = other DNA
gatccaggtgccgaaagggc

SEQ ID NO: 39088 - DNA, 20 bp, synthetic construct
  source 1..20: mol_type = other DNA
caacaagtacatcctggaca

SEQ ID NO: 39089 - DNA, 20 bp, synthetic construct
  source 1..20: mol_type = other DNA
gggtcgcggcgggtaggcgt

SEQ ID NO: 39090 - DNA, 20 bp, synthetic construct
  source 1..20: mol_type = other DNA
caaaagtgctgtcccagggt

SEQ ID NO: 39091 - DNA, 20 bp, synthetic construct
  source 1..20: mol_type = other DNA
gctggggttccacagcgggg

SEQ ID NO: 39092 - DNA, 20 bp, synthetic construct
  source 1..20: mol_type = other DNA
cagccatccagatggcgatc

SEQ ID NO: 39093 - DNA, 20 bp, synthetic construct
  source 1..20: mol_type = other DNA
accaccagctcctgccgaga

SEQ ID NO: 39094 - DNA, 20 bp, synthetic construct
  source 1..20: mol_type = other DNA
catccccgacaggaaggaac

SEQ ID NO: 39095 - DNA, 20 bp, synthetic construct
  source 1..20: mol_type = other DNA
tgaattcagccaagtttaag

SEQ ID NO: 39096 - DNA, 20 bp, synthetic construct
  source 1..20: mol_type = other DNA
tgctgccagcccaagccccg

SEQ ID NO: 39097 - DNA, 20 bp, synthetic construct
  source 1..20: mol_type = other DNA
catgaggtaaggccaagagc

SEQ ID NO: 39098 - DNA, 20 bp, synthetic construct
  source 1..20: mol_type = other DNA
cagcttaccttgtcagaaaa

SEQ ID NO: 39099 - DNA, 20 bp, synthetic construct
  source 1..20: mol_type = other DNA
tcctcggcactgaggcggtg

SEQ ID NO: 39100 - DNA, 20 bp, synthetic construct
  source 1..20: mol_type = other DNA
cttggccagcagtgggggca

SEQ ID NO: 39101 - DNA, 20 bp, synthetic construct
  source 1..20: mol_type = other DNA
ctttgacatggagttgacct

SEQ ID NO: 39102 - DNA, 20 bp, synthetic construct
  source 1..20: mol_type = other DNA
tgccaagaccctggcaggga

SEQ ID NO: 39103 - DNA, 20 bp, synthetic construct
  source 1..20: mol_type = other DNA
caagtttgacacgctctggc

SEQ ID NO: 39104 - DNA, 20 bp, synthetic construct
  source 1..20: mol_type = other DNA
agtggctgaatacctggatt

SEQ ID NO: 39105 - DNA, 20 bp, synthetic construct
  source 1..20: mol_type = other DNA
actgaacagatcttcagaga

SEQ ID NO: 39106 - DNA, 20 bp, synthetic construct
  source 1..20: mol_type = other DNA
agtacaagtggagcaaaaag

SEQ ID NO: 39107 - DNA, 20 bp, synthetic construct
  source 1..20: mol_type = other DNA
gccggaagtagccatctacc

SEQ ID NO: 39108 - DNA, 20 bp, synthetic construct
  source 1..20: mol_type = other DNA
cagccacgagcccctgtgct

SEQ ID NO: 39109 - DNA, 20 bp, synthetic construct
  source 1..20: mol_type = other DNA
ggcgctggggcatattgcgg

SEQ ID NO: 39110 - DNA, 20 bp, synthetic construct
  source 1..20: mol_type = other DNA
gcctcctttaccaccgacca

SEQ ID NO: 39111 - DNA, 20 bp, synthetic construct
  source 1..20: mol_type = other DNA
taatttcacgaatgtcaact

SEQ ID NO: 39112 - DNA, 20 bp, synthetic construct
  source 1..20: mol_type = other DNA
gcagcggggacatcacctac

SEQ ID NO: 39113 - DNA, 20 bp, synthetic construct
  source 1..20: mol_type = other DNA
cttggattgagagtcaagat

SEQ ID NO: 39114 - DNA, 20 bp, synthetic construct
  source 1..20: mol_type = other DNA
tctgcagcttgatctccccc

SEQ ID NO: 39115 - DNA, 20 bp, synthetic construct
  source 1..20: mol_type = other DNA
gcttccagtaactcagtgca

SEQ ID NO: 39116 - DNA, 20 bp, synthetic construct
  source 1..20: mol_type = other DNA
ttccttcatataggagctgg

SEQ ID NO: 39117 - DNA, 20 bp, synthetic construct
  source 1..20: mol_type = other DNA
gactgcagccactgcggccc

SEQ ID NO: 39118 - DNA, 20 bp, synthetic construct
  source 1..20: mol_type = other DNA
ccatgcctgagagggaaatg

SEQ ID NO: 39119 - DNA, 20 bp, synthetic construct
  source 1..20: mol_type = other DNA
ctcccggtgagtcggaccgc

SEQ ID NO: 39120 - DNA, 20 bp, synthetic construct
  source 1..20: mol_type = other DNA
caacctctcgtacatcggcg

SEQ ID NO: 39121 - DNA, 20 bp, synthetic construct
  source 1..20: mol_type = other DNA
agggcagcagcaggaatgac

SEQ ID NO: 39122 - DNA, 20 bp, synthetic construct
  source 1..20: mol_type = other DNA
actacctgtgcaacgcctgc

SEQ ID NO: 39123 - DNA, 20 bp, synthetic construct
  source 1..20: mol_type = other DNA
ggctccgaggatcaggttgc

SEQ ID NO: 39124 - DNA, 20 bp, synthetic construct
  source 1..20: mol_type = other DNA
gacagttaggtgggcacggc

SEQ ID NO: 39125 - DNA, 20 bp, synthetic construct
  source 1..20: mol_type = other DNA
cctaaggaaggaaggcaagc

SEQ ID NO: 39126 - DNA, 20 bp, synthetic construct
  source 1..20: mol_type = other DNA
gcctcgtcctcctccttgtc

SEQ ID NO: 39127 - DNA, 20 bp, synthetic construct
  source 1..20: mol_type = other DNA
ccagagcctgcggctggtca

SEQ ID NO: 39128 - DNA, 20 bp, synthetic construct
  source 1..20: mol_type = other DNA
ggtgagcttgggtgagctgg

SEQ ID NO: 39129 - DNA, 20 bp, synthetic construct
  source 1..20: mol_type = other DNA
tctgcgcttcgtggtgtatg

SEQ ID NO: 39130 - DNA, 20 bp, synthetic construct
  source 1..20: mol_type = other DNA
ctggctgaaagaaacaatac

SEQ ID NO: 39131 - DNA, 20 bp, synthetic construct
  source 1..20: mol_type = other DNA
gtcaccagcacctcgtgggt

SEQ ID NO: 39132 - DNA, 20 bp, synthetic construct
  source 1..20: mol_type = other DNA
cctcgagccgcgtggggtcc

SEQ ID NO: 39133 - DNA, 20 bp, synthetic construct
  source 1..20: mol_type = other DNA
gcatcgtcgcgggaggctgc

SEQ ID NO: 39134 - DNA, 20 bp, synthetic construct
  source 1..20: mol_type = other DNA
gtagactctgtccctacctg

SEQ ID NO: 39135 - DNA, 20 bp, synthetic construct
  source 1..20: mol_type = other DNA
tatgctcgctgcctgcggat

SEQ ID NO: 39136 - DNA, 20 bp, synthetic construct
  source 1..20: mol_type = other DNA
ttggggagatcagtaaatcc

SEQ ID NO: 39137 - DNA, 20 bp, synthetic construct
  source 1..20: mol_type = other DNA
gcccggatccgctgcaggga

SEQ ID NO: 39138 - DNA, 20 bp, synthetic construct
  source 1..20: mol_type = other DNA
agctacaacagatgaggatg

SEQ ID NO: 39139 - DNA, 20 bp, synthetic construct
  source 1..20: mol_type = other DNA
aggggcctgatactggcact

SEQ ID NO: 39140 - DNA, 20 bp, synthetic construct
  source 1..20: mol_type = other DNA
gcccaacttacagcactcga

SEQ ID NO: 39141 - DNA, 20 bp, synthetic construct
  source 1..20: mol_type = other DNA
tgcgctccagcttccgcttc

SEQ ID NO: 39142 - DNA, 20 bp, synthetic construct
  source 1..20: mol_type = other DNA
aagttcctggttggcaggga

SEQ ID NO: 39143 - DNA, 20 bp, synthetic construct
  source 1..20: mol_type = other DNA
accactttcggccggaacgg

SEQ ID NO: 39144 - DNA, 20 bp, synthetic construct
  source 1..20: mol_type = other DNA
ccctgagatggggggaaagc

SEQ ID NO: 39145 - DNA, 20 bp, synthetic construct
  source 1..20: mol_type = other DNA
ctcaatgatgaacgtgctgc

SEQ ID NO: 39146 - DNA, 20 bp, synthetic construct
  source 1..20: mol_type = other DNA
aagccccgctgaggcccacg

SEQ ID NO: 39147 - DNA, 20 bp, synthetic construct
  source 1..20: mol_type = other DNA
ggttaacatacaaattctgg

SEQ ID NO: 39148 - DNA, 20 bp, synthetic construct
  source 1..20: mol_type = other DNA
gcagtaccagccgggcctgc

SEQ ID NO: 39149 - DNA, 20 bp, synthetic construct
  source 1..20: mol_type = other DNA
ccctttgagaaccgtgagtg

SEQ ID NO: 39150 - DNA, 20 bp, synthetic construct
  source 1..20: mol_type = other DNA
gtcatgttccagacctggct

SEQ ID NO: 39151 - DNA, 20 bp, synthetic construct
  source 1..20: mol_type = other DNA
ccacgctgccaaagttgccc

SEQ ID NO: 39152 - DNA, 20 bp, synthetic construct
  source 1..20: mol_type = other DNA
ggaagatcctcatcaaggtg

SEQ ID NO: 39153 - DNA, 20 bp, synthetic construct
  source 1..20: mol_type = other DNA
gccctcgctttcctgcccgg

SEQ ID NO: 39154 - DNA, 20 bp, synthetic construct
  source 1..20: mol_type = other DNA
gagaaatcccgcgtggtgaa

SEQ ID NO: 39155 - DNA, 20 bp, synthetic construct
  source 1..20: mol_type = other DNA
gtcgctccccggcatcggct

SEQ ID NO: 39156 - DNA, 20 bp, synthetic construct
  source 1..20: mol_type = other DNA
ggtccgaatcagcagcatgg

SEQ ID NO: 39157 - DNA, 20 bp, synthetic construct
  source 1..20: mol_type = other DNA
gtctcggaagatccgcatca

SEQ ID NO: 39158 - DNA, 20 bp, synthetic construct
  source 1..20: mol_type = other DNA
ttccagatacctggtggaaa

SEQ ID NO: 39159 - DNA, 20 bp, synthetic construct
  source 1..20: mol_type = other DNA
gagtggaaaagtaagtccta

SEQ ID NO: 39160 - DNA, 20 bp, synthetic construct
  source 1..20: mol_type = other DNA
gaggtgaccgaaggccggaa

SEQ ID NO: 39161 - DNA, 20 bp, synthetic construct
  source 1..20: mol_type = other DNA
acacagctccaggtgggtgt

SEQ ID NO: 39162 - DNA, 20 bp, synthetic construct
  source 1..20: mol_type = other DNA
ccttaccaggagagggaggc

SEQ ID NO: 39163 - DNA, 20 bp, synthetic construct
  source 1..20: mol_type = other DNA
atgcgacggccactgttctc

SEQ ID NO: 39164 - DNA, 20 bp, synthetic construct
  source 1..20: mol_type = other DNA
gcccaggtggggttctgcct

SEQ ID NO: 39165 - DNA, 20 bp, synthetic construct
  source 1..20: mol_type = other DNA
ccaggcatgtcagccacgtg

SEQ ID NO: 39166 - DNA, 20 bp, synthetic construct
  source 1..20: mol_type = other DNA
gcttggtccactggctgcat

SEQ ID NO: 39167 - DNA, 20 bp, synthetic construct
  source 1..20: mol_type = other DNA
caggctactttcccagtaaa

SEQ ID NO: 39168 - DNA, 20 bp, synthetic construct
  source 1..20: mol_type = other DNA
gtggttcccatcaaactacg

SEQ ID NO: 39169 - DNA, 20 bp, synthetic construct
  source 1..20: mol_type = other DNA
cgtgatgcactcaaaggcca

SEQ ID NO: 39170 - DNA, 20 bp, synthetic construct
  source 1..20: mol_type = other DNA
tccgtcgtccttcagagtct

SEQ ID NO: 39171 - DNA, 20 bp, synthetic construct
  source 1..20: mol_type = other DNA
gatcatgtacagcaacgagg

SEQ ID NO: 39172 - DNA, 20 bp, synthetic construct
  source 1..20: mol_type = other DNA
cctccgcctcaggtgagctc

SEQ ID NO: 39173 - DNA, 20 bp, synthetic construct
  source 1..20: mol_type = other DNA
ttttgggtgctggtggtggt

SEQ ID NO: 39174 - DNA, 20 bp, synthetic construct
  source 1..20: mol_type = other DNA
gctggcgctcgatgggaaag

SEQ ID NO: 39175 - DNA, 20 bp, synthetic construct
  source 1..20: mol_type = other DNA
ctgagccggcatgtgctccc

SEQ ID NO: 39176 - DNA, 20 bp, synthetic construct
  source 1..20: mol_type = other DNA
caccaggtcactgcggtgct

SEQ ID NO: 39177 - DNA, 20 bp, synthetic construct
  source 1..20: mol_type = other DNA
cccggcgcgcgggtccgggg

SEQ ID NO: 39178 - DNA, 20 bp, synthetic construct
  source 1..20: mol_type = other DNA
cgagaagaaggagctcctgc

SEQ ID NO: 39179 - DNA, 20 bp, synthetic construct
  source 1..20: mol_type = other DNA
gctgctccacggcgtgtgca

SEQ ID NO: 39180 - DNA, 20 bp, synthetic construct
  source 1..20: mol_type = other DNA
atggtgatcatgtcgggctc

SEQ ID NO: 39181 - DNA, 20 bp, synthetic construct
  source 1..20: mol_type = other DNA
caccgtgtgtgactcctgtg

SEQ ID NO: 39182 - DNA, 20 bp, synthetic construct
  source 1..20: mol_type = other DNA
tttcaccgcggccatcctgc

SEQ ID NO: 39183 - DNA, 20 bp, synthetic construct
  source 1..20: mol_type = other DNA
cccaactgtcaattccttgg

SEQ ID NO: 39184 - DNA, 20 bp, synthetic construct
  source 1..20: mol_type = other DNA
ccacaatatccacatttgtg

SEQ ID NO: 39185 - DNA, 20 bp, synthetic construct
  source 1..20: mol_type = other DNA
ctggggcctgcagcaacagg

SEQ ID NO: 39186 - DNA, 20 bp, synthetic construct
  source 1..20: mol_type = other DNA
tgctgtatccccagacccaa

SEQ ID NO: 39187 - DNA, 20 bp, synthetic construct
  source 1..20: mol_type = other DNA
catggagatggctggggaca

SEQ ID NO: 39188 - DNA, 20 bp, synthetic construct
  source 1..20: mol_type = other DNA
agtgttgctcagtctcgctc

SEQ ID NO: 39189 - DNA, 20 bp, synthetic construct
  source 1..20: mol_type = other DNA
acaaggtttccccatgaagc

SEQ ID NO: 39190 - DNA, 20 bp, synthetic construct
  source 1..20: mol_type = other DNA
gccggagcaggttgcccttc

SEQ ID NO: 39191 - DNA, 20 bp, synthetic construct
  source 1..20: mol_type = other DNA
ttgctgcctgtaaggaacag

SEQ ID NO: 39192 - DNA, 20 bp, synthetic construct
  source 1..20: mol_type = other DNA
tacttacaggaaaacccaaa

SEQ ID NO: 39193 - DNA, 20 bp, synthetic construct
  source 1..20: mol_type = other DNA
cacctggaaggtgatctgca

SEQ ID NO: 39194 - DNA, 20 bp, synthetic construct
  source 1..20: mol_type = other DNA
gctggaggacctgggaagga

SEQ ID NO: 39195 - DNA, 20 bp, synthetic construct
  source 1..20: mol_type = other DNA
gtgccacaaagaccatcaag

SEQ ID NO: 39196 - DNA, 20 bp, synthetic construct
  source 1..20: mol_type = other DNA
tgcggatgtgagtggtgagg

SEQ ID NO: 39197 - DNA, 20 bp, synthetic construct
  source 1..20: mol_type = other DNA
acagcggcagaaaattgtgc

SEQ ID NO: 39198 - DNA, 20 bp, synthetic construct
  source 1..20: mol_type = other DNA
ggcgaactggagacaacagg

SEQ ID NO: 39199 - DNA, 20 bp, synthetic construct
  source 1..20: mol_type = other DNA
ggtcccgcttcttcacacac

SEQ ID NO: 39200 - DNA, 20 bp, synthetic construct
  source 1..20: mol_type = other DNA
gtgggtgggcctcacccgcc

SEQ ID NO: 39201 - DNA, 20 bp, synthetic construct
  source 1..20: mol_type = other DNA
caacagggatacctgagggc

SEQ ID NO: 39202 - DNA, 20 bp, synthetic construct
  source 1..20: mol_type = other DNA
gggcatagccgcggtttttc

SEQ ID NO: 39203 - DNA, 20 bp, synthetic construct
  source 1..20: mol_type = other DNA
tggcggcctaaggaagaaga

SEQ ID NO: 39204 - DNA, 20 bp, synthetic construct
  source 1..20: mol_type = other DNA
gtccagagctataaagagaa

SEQ ID NO: 39205 - DNA, 20 bp, synthetic construct
  source 1..20: mol_type = other DNA
tgtcgagatatgaagcagag

SEQ ID NO: 39206 - DNA, 20 bp, synthetic construct
  source 1..20: mol_type = other DNA
gcttccgctacaagtgcgag

SEQ ID NO: 39207 - DNA, 20 bp, synthetic construct
  source 1..20: mol_type = other DNA
ctctgaggctaaaggccaca

SEQ ID NO: 39208 - DNA, 20 bp, synthetic construct
  source 1..20: mol_type = other DNA
catgatccgagagagtgggc

SEQ ID NO: 39209 - DNA, 20 bp, synthetic construct
  source 1..20: mol_type = other DNA
aaggaatgccaggctctgga

SEQ ID NO: 39210 - DNA, 20 bp, synthetic construct
  source 1..20: mol_type = other DNA
gtgtaaacgggaggtggctc

SEQ ID NO: 39211 - DNA, 20 bp, synthetic construct
  source 1..20: mol_type = other DNA
gtccacagagccacctggat

SEQ ID NO: 39212 - DNA, 20 bp, synthetic construct
  source 1..20: mol_type = other DNA
cagccagctggtactgcgga

SEQ ID NO: 39213 - DNA, 20 bp, synthetic construct
  source 1..20: mol_type = other DNA
ctgctcatcaacaagcccga

SEQ ID NO: 39214 - DNA, 20 bp, synthetic construct
  source 1..20: mol_type = other DNA
gggcggcagacaccggcgag

SEQ ID NO: 39215 - DNA, 20 bp, synthetic construct
  source 1..20: mol_type = other DNA
ggggcttcaagaaatgctgc

SEQ ID NO: 39216 - DNA, 20 bp, synthetic construct
  source 1..20: mol_type = other DNA
cctcttaagctggttgggtg

SEQ ID NO: 39217 - DNA, 20 bp, synthetic construct
  source 1..20: mol_type = other DNA
cagagcgcaagtactcggtg

SEQ ID NO: 39218 - DNA, 20 bp, synthetic construct
  source 1..20: mol_type = other DNA
catcttggaacacgaccgca

SEQ ID NO: 39219 - DNA, 20 bp, synthetic construct
  source 1..20: mol_type = other DNA
ggaagctcaaaggcgtcgaa

SEQ ID NO: 39220 - DNA, 20 bp, synthetic construct
  source 1..20: mol_type = other DNA
aacatcctttaatcaggtat

SEQ ID NO: 39221 - DNA, 20 bp, synthetic construct
  source 1..20: mol_type = other DNA
aagacttacggaaggtatct

SEQ ID NO: 39222 - DNA, 20 bp, synthetic construct
  source 1..20: mol_type = other DNA
gctctctttgatctgcgcct

SEQ ID NO: 39223 - DNA, 20 bp, synthetic construct
  source 1..20: mol_type = other DNA
cccccatgaccccgtggccc

SEQ ID NO: 39224 - DNA, 20 bp, synthetic construct
  source 1..20: mol_type = other DNA
tgacagcagaaggactgtac

SEQ ID NO: 39225 - DNA, 20 bp, synthetic construct
  source 1..20: mol_type = other DNA
ggcgatgcattcgaacgcgt

SEQ ID NO: 39226 - DNA, 20 bp, synthetic construct
  source 1..20: mol_type = other DNA
tttcagttccaagaacccag

SEQ ID NO: 39227 - DNA, 20 bp, synthetic construct
  source 1..20: mol_type = other DNA
catcgagaacatcctggcag

SEQ ID NO: 39228 - DNA, 20 bp, synthetic construct
  source 1..20: mol_type = other DNA
agtttctgatagcagtactt

SEQ ID NO: 39229 - DNA, 20 bp, synthetic construct
  source 1..20: mol_type = other DNA
acgaaatccaaagcagaggc

SEQ ID NO: 39230 - DNA, 20 bp, synthetic construct
  source 1..20: mol_type = other DNA
aaaggaaaaaacagaggagt

SEQ ID NO: 39231 - DNA, 20 bp, synthetic construct
  source 1..20: mol_type = other DNA
agactgccgccgacctgcca

SEQ ID NO: 39232 - DNA, 20 bp, synthetic construct
  source 1..20: mol_type = other DNA
tgattcagttaccaaaacac

SEQ ID NO: 39233 - DNA, 20 bp, synthetic construct
  source 1..20: mol_type = other DNA
caaagtcctgggggctgcgg

SEQ ID NO: 39234 - DNA, 20 bp, synthetic construct
  source 1..20: mol_type = other DNA
ctgtgggtgaccatggcgca

SEQ ID NO: 39235 - DNA, 20 bp, synthetic construct
  source 1..20: mol_type = other DNA
catctaccaaggttagagaa

SEQ ID NO: 39236 - DNA, 20 bp, synthetic construct
  source 1..20: mol_type = other DNA
ctacagtgaggacctggagt

SEQ ID NO: 39237 - DNA, 20 bp, synthetic construct
  source 1..20: mol_type = other DNA
acctcagagctcagagggac

SEQ ID NO: 39238 - DNA, 20 bp, synthetic construct
  source 1..20: mol_type = other DNA
cataggtcaggcctagaaat

SEQ ID NO: 39239 - DNA, 20 bp, synthetic construct
  source 1..20: mol_type = other DNA
gacgatatctgcagagagag

SEQ ID NO: 39240 - DNA, 20 bp, synthetic construct
  source 1..20: mol_type = other DNA
aagtggccgaggtcctgagc

SEQ ID NO: 39241 - DNA, 20 bp, synthetic construct
  source 1..20: mol_type = other DNA
tagagagattgaaaagtttg

SEQ ID NO: 39242 - DNA, 20 bp, synthetic construct
  source 1..20: mol_type = other DNA
tccggccgggccaacgcgcg

SEQ ID NO: 39243 - DNA, 20 bp, synthetic construct
  source 1..20: mol_type = other DNA
tgagaccaaaaagctataca

SEQ ID NO: 39244 - DNA, 20 bp, synthetic construct
  source 1..20: mol_type = other DNA
gatatagtcaaagagatcct

SEQ ID NO: 39245 - DNA, 20 bp, synthetic construct
  source 1..20: mol_type = other DNA
cggccatcattcagcgccct

SEQ ID NO: 39246 - DNA, 20 bp, synthetic construct
  source 1..20: mol_type = other DNA
agtgaaggtctgtgtctgct

SEQ ID NO: 39247 - DNA, 20 bp, synthetic construct
  source 1..20: mol_type = other DNA
ccggcagcggcagcgcatca

SEQ ID NO: 39248 - DNA, 20 bp, synthetic construct
  source 1..20: mol_type = other DNA
ggcaagaaaccatggcctga

SEQ ID NO: 39249 - DNA, 20 bp, synthetic construct
  source 1..20: mol_type = other DNA
cagctcgttaaggatcaaca

SEQ ID NO: 39250 - DNA, 20 bp, synthetic construct
  source 1..20: mol_type = other DNA
gcaggcccgggacgtcacag

SEQ ID NO: 39251 - DNA, 20 bp, synthetic construct
  source 1..20: mol_type = other DNA
gccggcaggagctcagcccc

SEQ ID NO: 39252 - DNA, 20 bp, synthetic construct
  source 1..20: mol_type = other DNA
gttcacttctgggtcgcaca

SEQ ID NO: 39253 - DNA, 20 bp, synthetic construct
  source 1..20: mol_type = other DNA
cagacactggctggtgagtg

SEQ ID NO: 39254 - DNA, 20 bp, synthetic construct
  source 1..20: mol_type = other DNA
ccaccttggcttctctctgc

SEQ ID NO: 39255 - DNA, 20 bp, synthetic construct
  source 1..20: mol_type = other DNA
ctcccctgtattgtcccctt

SEQ ID NO: 39256 - DNA, 20 bp, synthetic construct
  source 1..20: mol_type = other DNA
cagggccgtcatcatcatct

SEQ ID NO: 39257 - DNA, 20 bp, synthetic construct
  source 1..20: mol_type = other DNA
gcgaagagagccacttctgg

SEQ ID NO: 39258 - DNA, 20 bp, synthetic construct
  source 1..20: mol_type = other DNA
cccagatgaggtaaggaagg

SEQ ID NO: 39259 - DNA, 20 bp, synthetic construct
  source 1..20: mol_type = other DNA
gcactcaccttgaaggcgac

SEQ ID NO: 39260 - DNA, 20 bp, synthetic construct
  source 1..20: mol_type = other DNA
ttgagatgcacacccagaat

SEQ ID NO: 39261 - DNA, 20 bp, synthetic construct
  source 1..20: mol_type = other DNA
acgggtatttatagtggcat

SEQ ID NO: 39262 - DNA, 20 bp, synthetic construct
  source 1..20: mol_type = other DNA
actgcccttctgcactgcaa

SEQ ID NO: 39263 - DNA, 20 bp, synthetic construct
  source 1..20: mol_type = other DNA
acgcctggggctctgcccca

SEQ ID NO: 39264 - DNA, 20 bp, synthetic construct
  source 1..20: mol_type = other DNA
aggcaaatgctctcggggta

SEQ ID NO: 39265 - DNA, 20 bp, synthetic construct
  source 1..20: mol_type = other DNA
tgaggataagctcatcagcg

SEQ ID NO: 39266 - DNA, 20 bp, synthetic construct
  source 1..20: mol_type = other DNA
tcccggcgggattctgatgg

SEQ ID NO: 39267 - DNA, 20 bp, synthetic construct
  source 1..20: mol_type = other DNA
gctgcagaagaaggtcactg

SEQ ID NO: 39268 - DNA, 20 bp, synthetic construct
  source 1..20: mol_type = other DNA
actatccacatgggctgcca

SEQ ID NO: 39269 - DNA, 20 bp, synthetic construct
  source 1..20: mol_type = other DNA
ttccagggagccatttgtgc

SEQ ID NO: 39270 - DNA, 20 bp, synthetic construct
  source 1..20: mol_type = other DNA
gtcctgacccaaggcacccc

SEQ ID NO: 39271 - DNA, 20 bp, synthetic construct
  source 1..20: mol_type = other DNA
ttcctcttgagccatcctac

SEQ ID NO: 39272 - DNA, 20 bp, synthetic construct
  source 1..20: mol_type = other DNA
tcagagctgtcgctcaagga

SEQ ID NO: 39273 - DNA, 20 bp, synthetic construct
  source 1..20: mol_type = other DNA
catcccgccgccgctcgggc

SEQ ID NO: 39274 - DNA, 20 bp, synthetic construct
  source 1..20: mol_type = other DNA
gctcaaccctggagacattg

SEQ ID NO: 39275 - DNA, 20 bp, synthetic construct
  source 1..20: mol_type = other DNA
cgacaccaaccaccagggtt

SEQ ID NO: 39276 - DNA, 20 bp, synthetic construct
  source 1..20: mol_type = other DNA
ctacccgctctgccagttcc

SEQ ID NO: 39277 - DNA, 20 bp, synthetic construct
  source 1..20: mol_type = other DNA
gcagcagccgacatacgtcc

SEQ ID NO: 39278 - DNA, 20 bp, synthetic construct
  source 1..20: mol_type = other DNA
cagccactacctgtgccacg

SEQ ID NO: 39279 - DNA, 20 bp, synthetic construct
  source 1..20: mol_type = other DNA
cggggcctcattcacccaga

SEQ ID NO: 39280 - DNA, 20 bp, synthetic construct
  source 1..20: mol_type = other DNA
actatccagtcctttgtgaa

SEQ ID NO: 39281 - DNA, 20 bp, synthetic construct
  source 1..20: mol_type = other DNA
tttcctggagaaaagagtaa

SEQ ID NO: 39282 - DNA, 20 bp, synthetic construct
  source 1..20: mol_type = other DNA
acctgaatggctgcggcagc

SEQ ID NO: 39283 - DNA, 20 bp, synthetic construct
  source 1..20: mol_type = other DNA
ctacctctttttcccggtgt

SEQ ID NO: 39284 - DNA, 20 bp, synthetic construct
  source 1..20: mol_type = other DNA
tggacggtgagtctactccc

SEQ ID NO: 39285 - DNA, 20 bp, synthetic construct
  source 1..20: mol_type = other DNA
cccctcagattccagcatgg

SEQ ID NO: 39286 - DNA, 20 bp, synthetic construct
  source 1..20: mol_type = other DNA
ctctttcactacaatggcca

SEQ ID NO: 39287 - DNA, 20 bp, synthetic construct
  source 1..20: mol_type = other DNA
ttctttacttcgccgagatc

SEQ ID NO: 39288 - DNA, 20 bp, synthetic construct
  source 1..20: mol_type = other DNA
ccagacgcaggatggcgtgg

SEQ ID NO: 39289 - DNA, 20 bp, synthetic construct
  source 1..20: mol_type = other DNA
cctcaggacggatggctggg

SEQ ID NO: 39290 - DNA, 20 bp, synthetic construct
  source 1..20: mol_type = other DNA
cggagattctccaccattgt

SEQ ID NO: 39291 - DNA, 20 bp, synthetic construct
  source 1..20: mol_type = other DNA
gagtggccaaggggatgcat

SEQ ID NO: 39292 - DNA, 20 bp, synthetic construct
  source 1..20: mol_type = other DNA
agatctccacgggcttggtg

SEQ ID NO: 39293 - DNA, 20 bp, synthetic construct
  source 1..20: mol_type = other DNA
gggagaaaaccaagtcatca

SEQ ID NO: 39294 - DNA, 20 bp, synthetic construct
  source 1..20: mol_type = other DNA
aaaccctatgccaactttca

SEQ ID NO: 39295 - DNA, 20 bp, synthetic construct
  source 1..20: mol_type = other DNA
taccaggtgcaccgaatcac

SEQ ID NO: 39296 - DNA, 20 bp, synthetic construct
  source 1..20: mol_type = other DNA
tcaggaagccacgctgtctg

SEQ ID NO: 39297 - DNA, 20 bp, synthetic construct
  source 1..20: mol_type = other DNA
tggtggtaagggtgtgccca

SEQ ID NO: 39298 - DNA, 20 bp, synthetic construct
  source 1..20: mol_type = other DNA
ttggctggtttccttgtaac

SEQ ID NO: 39299 - DNA, 20 bp, synthetic construct
  source 1..20: mol_type = other DNA
cggggacgcctcgcgctccg

SEQ ID NO: 39300 - DNA, 20 bp, synthetic construct
  source 1..20: mol_type = other DNA
cgagtgccggtctgcctggc

SEQ ID NO: 39301 - DNA, 20 bp, synthetic construct
  source 1..20: mol_type = other DNA
agaggagaagcagccagagg

SEQ ID NO: 39302 - DNA, 20 bp, synthetic construct
  source 1..20: mol_type = other DNA
atagcgtctgagagaagaaa

SEQ ID NO: 39303 - DNA, 20 bp, synthetic construct
  source 1..20: mol_type = other DNA
gctggtccagctctatgcag

SEQ ID NO: 39304 - DNA, 20 bp, synthetic construct
  source 1..20: mol_type = other DNA
tcctggtaacagtgaccagg

SEQ ID NO: 39305 - DNA, 20 bp, synthetic construct
  source 1..20: mol_type = other DNA
tgcacctggcggtgatcacg

SEQ ID NO: 39306 - DNA, 20 bp, synthetic construct
  source 1..20: mol_type = other DNA
tgcattcacaaacctgcaga

SEQ ID NO: 39307 - DNA, 20 bp, synthetic construct
  source 1..20: mol_type = other DNA
cagaataatccattaacttc

SEQ ID NO: 39308 - DNA, 20 bp, synthetic construct
  source 1..20: mol_type = other DNA
caccatggtaaatctcctgc

SEQ ID NO: 39309 - DNA, 20 bp, synthetic construct
  source 1..20: mol_type = other DNA
tatcctacagatgatgcgag

SEQ ID NO: 39310 - DNA, 20 bp, synthetic construct
  source 1..20: mol_type = other DNA
tgtcggacagggagcccctc

SEQ ID NO: 39311 - DNA, 20 bp, synthetic construct
  source 1..20: mol_type = other DNA
attcgggggcatacctggag

SEQ ID NO: 39312 - DNA, 20 bp, synthetic construct
  source 1..20: mol_type = other DNA
ttagatgcagaggaatcact

SEQ ID NO: 39313 - DNA, 20 bp, synthetic construct
  source 1..20: mol_type = other DNA
atccagatcatgagaaggtg

SEQ ID NO: 39314 - DNA, 20 bp, synthetic construct
  source 1..20: mol_type = other DNA
cagatgaacggagtggccgg

SEQ ID NO: 39315 - DNA, 20 bp, synthetic construct
  source 1..20: mol_type = other DNA
caggatggcctggaagttgg

SEQ ID NO: 39316 - DNA, 20 bp, synthetic construct
  source 1..20: mol_type = other DNA
acgatatcaagaaccacaag

SEQ ID NO: 39317 - DNA, 20 bp, synthetic construct
  source 1..20: mol_type = other DNA
gtggagaaggacggcaggat

SEQ ID NO: 39318 - DNA, 20 bp, synthetic construct
  source 1..20: mol_type = other DNA
cttctttaggttacacgcat

SEQ ID NO: 39319 - DNA, 20 bp, synthetic construct
  source 1..20: mol_type = other DNA
tcagccaggacactgtggag

SEQ ID NO: 39320 - DNA, 20 bp, synthetic construct
  source 1..20: mol_type = other DNA
gtgattatactcttacacta

SEQ ID NO: 39321 - DNA, 20 bp, synthetic construct
  source 1..20: mol_type = other DNA
tgaggaagcgttggctgcgc

SEQ ID NO: 39322 - DNA, 20 bp, synthetic construct
  source 1..20: mol_type = other DNA
ttccaaatccccctgtccca

SEQ ID NO: 39323 - DNA, 20 bp, synthetic construct
  source 1..20: mol_type = other DNA
agccactgtgcgcctgctgg

SEQ ID NO: 39324 - DNA, 20 bp, synthetic construct
  source 1..20: mol_type = other DNA
ctcttatcaggtgagtagga

SEQ ID NO: 39325 - DNA, 20 bp, synthetic construct
  source 1..20: mol_type = other DNA
gtccgggagagcagtaaaca

SEQ ID NO: 39326 - DNA, 20 bp, synthetic construct
  source 1..20: mol_type = other DNA
cctccttgcagaagaagtgc

SEQ ID NO: 39327 - DNA, 20 bp, synthetic construct
  source 1..20: mol_type = other DNA
ccaagtgccggaaccgacgc

SEQ ID NO: 39328 - DNA, 20 bp, synthetic construct
  source 1..20: mol_type = other DNA
ctatgaggctgagctctgcc

SEQ ID NO: 39329 - DNA, 20 bp, synthetic construct
  source 1..20: mol_type = other DNA
ggtggaagaacagctgcagg

SEQ ID NO: 39330 - DNA, 20 bp, synthetic construct
  source 1..20: mol_type = other DNA
ctggcaacctgctgggatgg

SEQ ID NO: 39331 - DNA, 20 bp, synthetic construct
  source 1..20: mol_type = other DNA
ccaagaccccacgatcttcg

SEQ ID NO: 39332 - DNA, 20 bp, synthetic construct
  source 1..20: mol_type = other DNA
ggaccgtgtggccgcagccc

SEQ ID NO: 39333 - DNA, 20 bp, synthetic construct
  source 1..20: mol_type = other DNA
atttctcgtactctataccc

SEQ ID NO: 39334 - DNA, 20 bp, synthetic construct
  source 1..20: mol_type = other DNA
tggccgggatgagtacctgg

SEQ ID NO: 39335 - DNA, 20 bp, synthetic construct
  source 1..20: mol_type = other DNA
atatacctaagacacagaaa

SEQ ID NO: 39336 - DNA, 20 bp, synthetic construct
  source 1..20: mol_type = other DNA
gtcagggtctgcaagagcaa

SEQ ID NO: 39337 - DNA, 20 bp, synthetic construct
  source 1..20: mol_type = other DNA
gccgtcttccaccaacaaca

SEQ ID NO: 39338 - DNA, 20 bp, synthetic construct
  source 1..20: mol_type = other DNA
tgttccagttcagttctagc

SEQ ID NO: 39339 - DNA, 20 bp, synthetic construct
  source 1..20: mol_type = other DNA
gatcacggggcagacgagtg

SEQ ID NO: 39340 - DNA, 20 bp, synthetic construct
  source 1..20: mol_type = other DNA
gagagagtgagagcgctcct

SEQ ID NO: 39341 - DNA, 20 bp, synthetic construct
  source 1..20: mol_type = other DNA
gccaatctctgggccaaaca

SEQ ID NO: 39342 - DNA, 20 bp, synthetic construct
  source 1..20: mol_type = other DNA
cccgccatggccgttcacct

SEQ ID NO: 39343 - DNA, 20 bp, synthetic construct
  source 1..20: mol_type = other DNA
ctcctagatctgtaactacg

SEQ ID NO: 39344 - DNA, 20 bp, synthetic construct
  source 1..20: mol_type = other DNA
ggcggccacagcttcaatgt

SEQ ID NO: 39345 - DNA, 20 bp, synthetic construct
  source 1..20: mol_type = other DNA
atatcactgcaaaagagaga

SEQ ID NO: 39346 - DNA, 20 bp, synthetic construct
  source 1..20: mol_type = other DNA
ataggactctgtgatgaagc

SEQ ID NO: 39347 - DNA, 20 bp, synthetic construct
  source 1..20: mol_type = other DNA
agaggtttcctacccacagc

SEQ ID NO: 39348 - DNA, 20 bp, synthetic construct
  source 1..20: mol_type = other DNA
acacttcagggacatggtgc

SEQ ID NO: 39349 - DNA, 20 bp, synthetic construct
  source 1..20: mol_type = other DNA
tacctcttcttggctggctc

SEQ ID NO: 39350 - DNA, 20 bp, synthetic construct
  source 1..20: mol_type = other DNA
caccatgcccatcagtgccc

SEQ ID NO: 39351 - DNA, 20 bp, synthetic construct
  source 1..20: mol_type = other DNA
ggtaccagagtgtcaccaca

SEQ ID NO: 39352 - DNA, 20 bp, synthetic construct
  source 1..20: mol_type = other DNA
cttcagaataggctccatgt

SEQ ID NO: 39353 - DNA, 20 bp, synthetic construct
  source 1..20: mol_type = other DNA
caaggacatgactgcccagt

SEQ ID NO: 39354 - DNA, 20 bp, synthetic construct
  source 1..20: mol_type = other DNA
acagtgacagtaggggtggc

SEQ ID NO: 39355 - DNA, 20 bp, synthetic construct
  source 1..20: mol_type = other DNA
catcaagcatggagtaggag

SEQ ID NO: 39356 - DNA, 20 bp, synthetic construct
  source 1..20: mol_type = other DNA
aatcacatgccacacagtga

SEQ ID NO: 39357 - DNA, 20 bp, synthetic construct
  source 1..20: mol_type = other DNA
cgcatctgcacctgcaggcc

SEQ ID NO: 39358 - DNA, 20 bp, synthetic construct
  source 1..20: mol_type = other DNA
cccagtatgccattgtgttc

SEQ ID NO: 39359 - DNA, 20 bp, synthetic construct
  source 1..20: mol_type = other DNA
ctggtggttggtgtcgtggg

SEQ ID NO: 39360 - DNA, 20 bp, synthetic construct
  source 1..20: mol_type = other DNA
actacgatcctttgcccatg

SEQ ID NO: 39361 - DNA, 20 bp, synthetic construct
  source 1..20: mol_type = other DNA
tgttgcagcaaaggaaaggc

SEQ ID NO: 39362 - DNA, 20 bp, synthetic construct
  source 1..20: mol_type = other DNA
tccggtgaggggtgtggcac

SEQ ID NO: 39363 - DNA, 20 bp, synthetic construct
  source 1..20: mol_type = other DNA
tttctttgattatctcctgg

SEQ ID NO: 39364 - DNA, 20 bp, synthetic construct
  source 1..20: mol_type = other DNA
ccttcgctcagcagcgcttc

SEQ ID NO: 39365 - DNA, 20 bp, synthetic construct
  source 1..20: mol_type = other DNA
tgagaggagctcatagtctg

SEQ ID NO: 39366 - DNA, 20 bp, synthetic construct
  source 1..20: mol_type = other DNA
cgaggtgagagcctgggtgt

SEQ ID NO: 39367 - DNA, 20 bp, synthetic construct
  source 1..20: mol_type = other DNA
gcccggagtgccacctctcg

SEQ ID NO: 39368 - DNA, 20 bp, synthetic construct
  source 1..20: mol_type = other DNA
tgtgtgggtgcggatgtggg

SEQ ID NO: 39369 - DNA, 20 bp, synthetic construct
  source 1..20: mol_type = other DNA
acagagcaaccagaactgga

SEQ ID NO: 39370 - DNA, 20 bp, synthetic construct
  source 1..20: mol_type = other DNA
cagggcatccttgttgaagg

SEQ ID NO: 39371 - DNA, 20 bp, synthetic construct
  source 1..20: mol_type = other DNA
gggagatgttctcacaccta

SEQ ID NO: 39372 - DNA, 20 bp, synthetic construct
  source 1..20: mol_type = other DNA
gctctcgcgccatccgggcc

SEQ ID NO: 39373 - DNA, 20 bp, synthetic construct
  source 1..20: mol_type = other DNA
tgtccgtcaacattgagaga

SEQ ID NO: 39374 - DNA, 20 bp, synthetic construct
  source 1..20: mol_type = other DNA
caaaatcctgcacatcgaag

SEQ ID NO: 39375 - DNA, 20 bp, synthetic construct
  source 1..20: mol_type = other DNA
cacaacccagcgtgagccga

SEQ ID NO: 39376 - DNA, 20 bp, synthetic construct
  source 1..20: mol_type = other DNA
gcgcgcgcagctcgaggtgt

SEQ ID NO: 39377 - DNA, 20 bp, synthetic construct
  source 1..20: mol_type = other DNA
ccttgacaccatcctgttgc

SEQ ID NO: 39378 - DNA, 20 bp, synthetic construct
  source 1..20: mol_type = other DNA
aggaggagctgctgggctct

SEQ ID NO: 39379 - DNA, 20 bp, synthetic construct
  source 1..20: mol_type = other DNA
tggaggcccgggcctgtgga

SEQ ID NO: 39380 - DNA, 20 bp, synthetic construct
  source 1..20: mol_type = other DNA
cgactttggtctcaccaagg

SEQ ID NO: 39381 - DNA, 20 bp, synthetic construct
  source 1..20: mol_type = other DNA
gcagcaggatcagcttgccc

SEQ ID NO: 39382 - DNA, 20 bp, synthetic construct
  source 1..20: mol_type = other DNA
tgttcttccagtcaacagct

SEQ ID NO: 39383 - DNA, 20 bp, synthetic construct
  source 1..20: mol_type = other DNA
ttcttcgcaggaatgggagg

SEQ ID NO: 39384 - DNA, 20 bp, synthetic construct
  source 1..20: mol_type = other DNA
cgccttcttccagctgagga

SEQ ID NO: 39385 - DNA, 20 bp, synthetic construct
  source 1..20: mol_type = other DNA
cccatgaacccggagcccgc

SEQ ID NO: 39386 - DNA, 20 bp, synthetic construct
  source 1..20: mol_type = other DNA
tcctcactcagctgtcctcc

SEQ ID NO: 39387 - DNA, 20 bp, synthetic construct
  source 1..20: mol_type = other DNA
tgaggtaaggccaagagcag

SEQ ID NO: 39388 - DNA, 20 bp, synthetic construct
  source 1..20: mol_type = other DNA
gctccaagatctgcaacaaa

SEQ ID NO: 39389 - DNA, 20 bp, synthetic construct
  source 1..20: mol_type = other DNA
aggcggaggggcctgcctga

SEQ ID NO: 39390 - DNA, 20 bp, synthetic construct
  source 1..20: mol_type = other DNA
agcgggagatggggccccac

SEQ ID NO: 39391 - DNA, 20 bp, synthetic construct
  source 1..20: mol_type = other DNA
aggttcctgtggggctgcgc

SEQ ID NO: 39392 - DNA, 20 bp, synthetic construct
  source 1..20: mol_type = other DNA
ctacccgccgcgaccccagg

SEQ ID NO: 39393 - DNA, 20 bp, synthetic construct
  source 1..20: mol_type = other DNA
cttacctggggacgtacagg

SEQ ID NO: 39394 - DNA, 20 bp, synthetic construct
  source 1..20: mol_type = other DNA
gctgcaggtggtcaaacagc

SEQ ID NO: 39395 - DNA, 20 bp, synthetic construct
  source 1..20: mol_type = other DNA
acctacccaggaaggaaggc

SEQ ID NO: 39396 - DNA, 20 bp, synthetic construct
  source 1..20: mol_type = other DNA
catagggctggtaatgcttg

SEQ ID NO: 39397 - DNA, 20 bp, synthetic construct
  source 1..20: mol_type = other DNA
gctccagcactatgtcacca

SEQ ID NO: 39398 - DNA, 20 bp, synthetic construct
  source 1..20: mol_type = other DNA
agaaccatcagcaggccagc

SEQ ID NO: 39399 - DNA, 20 bp, synthetic construct
  source 1..20: mol_type = other DNA
gtgaacagtgtgagatgcca

SEQ ID NO: 39400 - DNA, 20 bp, synthetic construct
  source 1..20: mol_type = other DNA
aggcagtttgatgaggtgct

SEQ ID NO: 39401 - DNA, 20 bp, synthetic construct
  source 1..20: mol_type = other DNA
caggcaaccagatgccacct

SEQ ID NO: 39402 - DNA, 20 bp, synthetic construct
  source 1..20: mol_type = other DNA
gcacaacatcgtcacacttc

SEQ ID NO: 39403 - DNA, 20 bp, synthetic construct
  source 1..20: mol_type = other DNA
tgaggatcaggcggtagggg

SEQ ID NO: 39404 - DNA, 20 bp, synthetic construct
  source 1..20: mol_type = other DNA
gcacctgtctacttgggctg

SEQ ID NO: 39405 - DNA, 20 bp, synthetic construct
  source 1..20: mol_type = other DNA
acactgtggccttcttccgc

SEQ ID NO: 39406 - DNA, 20 bp, synthetic construct
  source 1..20: mol_type = other DNA
gtgaagcaccgagtggcaga

SEQ ID NO: 39407 - DNA, 20 bp, synthetic construct
  source 1..20: mol_type = other DNA
ttggcggcatcaccattgct

SEQ ID NO: 39408 - DNA, 20 bp, synthetic construct
  source 1..20: mol_type = other DNA
ggctctgcagaccgacattg

SEQ ID NO: 39409 - DNA, 20 bp, synthetic construct
  source 1..20: mol_type = other DNA
ggaacagggcaatagtatga

SEQ ID NO: 39410 - DNA, 20 bp, synthetic construct
  source 1..20: mol_type = other DNA
ggctgctccaggactgggtg

SEQ ID NO: 39411 - DNA, 20 bp, synthetic construct
  source 1..20: mol_type = other DNA
tgatccgagtggccatcctc

SEQ ID NO: 39412 - DNA, 20 bp, synthetic construct
  source 1..20: mol_type = other DNA
catgtctccggccctcattg

SEQ ID NO: 39413 - DNA, 20 bp, synthetic construct
  source 1..20: mol_type = other DNA
gtacatctccacgcccgcgt

SEQ ID NO: 39414 - DNA, 20 bp, synthetic construct
  source 1..20: mol_type = other DNA
caacggctccggcatgtgca

SEQ ID NO: 39415 - DNA, 20 bp, synthetic construct
  source 1..20: mol_type = other DNA
gccttcgcttgggcttaatg

SEQ ID NO: 39416 - DNA, 20 bp, synthetic construct
  source 1..20: mol_type = other DNA
cagcggccttccaagccctg

SEQ ID NO: 39417 - DNA, 20 bp, synthetic construct
  source 1..20: mol_type = other DNA
ggcactcgcatacgttgcag

SEQ ID NO: 39418 - DNA, 20 bp, synthetic construct
  source 1..20: mol_type = other DNA
atccctttatcgaccaactc

SEQ ID NO: 39419 - DNA, 20 bp, synthetic construct
  source 1..20: mol_type = other DNA
tgaagacttctcctccattg

SEQ ID NO: 39420 - DNA, 20 bp, synthetic construct
  source 1..20: mol_type = other DNA
ggagaaggaagagctgcagc

SEQ ID NO: 39421 - DNA, 20 bp, synthetic construct
  source 1..20: mol_type = other DNA
gtacattgcgctcataccag

SEQ ID NO: 39422 - DNA, 20 bp, synthetic construct
  source 1..20: mol_type = other DNA
gctcacatcccatcatccgc

SEQ ID NO: 39423 - DNA, 20 bp, synthetic construct
  source 1..20: mol_type = other DNA
ggctgagataatgtccgtga

SEQ ID NO: 39424 - DNA, 20 bp, synthetic construct
  source 1..20: mol_type = other DNA
ataggacggcggactggcaa

SEQ ID NO: 39425 - DNA, 20 bp, synthetic construct
  source 1..20: mol_type = other DNA
gtagtcaaacagcatgaggt

SEQ ID NO: 39426 - DNA, 20 bp, synthetic construct
  source 1..20: mol_type = other DNA
tccacctgagacagaaagag

SEQ ID NO: 39427 - DNA, 20 bp, synthetic construct
  source 1..20: mol_type = other DNA
gggagctcaccctcaaagtc

SEQ ID NO: 39428 - DNA, 20 bp, synthetic construct
  source 1..20: mol_type = other DNA
ccctcaggaaaatctgaact

SEQ ID NO: 39429 - DNA, 20 bp, synthetic construct
  source 1..20: mol_type = other DNA
gttctccagcgccacctggg

SEQ ID NO: 39430 - DNA, 20 bp, synthetic construct
  source 1..20: mol_type = other DNA
cccgaggaccgcagccagcc

SEQ ID NO: 39431 - DNA, 20 bp, synthetic construct
  source 1..20: mol_type = other DNA
ttctctcctccagcatcggc

SEQ ID NO: 39432 - DNA, 20 bp, synthetic construct
  source 1..20: mol_type = other DNA
ttggccacacctgggaggga

SEQ ID NO: 39433 - DNA, 20 bp, synthetic construct
  source 1..20: mol_type = other DNA
tgcctgccattcccatctgc

SEQ ID NO: 39434 - DNA, 20 bp, synthetic construct
  source 1..20: mol_type = other DNA
gtagcaggtgagtggggcac

SEQ ID NO: 39435 - DNA, 20 bp, synthetic construct
  source 1..20: mol_type = other DNA
agtcctttcctacaagctcg

SEQ ID NO: 39436 - DNA, 20 bp, synthetic construct
  source 1..20: mol_type = other DNA
gcacaaagtacgggccaggg

SEQ ID NO: 39437 - DNA, 20 bp, synthetic construct
  source 1..20: mol_type = other DNA
gaggactctacctgtttgcc

SEQ ID NO: 39438 - DNA, 20 bp, synthetic construct
  source 1..20: mol_type = other DNA
tgaggctagctgcaaaagag

SEQ ID NO: 39439 - DNA, 20 bp, synthetic construct
  source 1..20: mol_type = other DNA
caggaaccacgcgctgttga

SEQ ID NO: 39440 - DNA, 20 bp, synthetic construct
  source 1..20: mol_type = other DNA
ctccagatcgaagtccccat

SEQ ID NO: 39441 - DNA, 20 bp, synthetic construct
  source 1..20: mol_type = other DNA
caagatgctgaatggtactg

SEQ ID NO: 39442 - DNA, 20 bp, synthetic construct
  source 1..20: mol_type = other DNA
cagaaagtagccccagggct

SEQ ID NO: 39443 - DNA, 20 bp, synthetic construct
  source 1..20: mol_type = other DNA
tggcccaagtgggacagctg

SEQ ID NO: 39444 - DNA, 20 bp, synthetic construct
  source 1..20: mol_type = other DNA
gctcatggccaagtacatca

SEQ ID NO: 39445 - DNA, 20 bp, synthetic construct
  source 1..20: mol_type = other DNA
caccaaaggagctttgagct

SEQ ID NO: 39446 - DNA, 20 bp, synthetic construct
  source 1..20: mol_type = other DNA
ggcaggcagcggcggcagcg

SEQ ID NO: 39447 - DNA, 20 bp, synthetic construct
  source 1..20: mol_type = other DNA
agacagaggcgcgccacgtg

SEQ ID NO: 39448 - DNA, 20 bp, synthetic construct
  source 1..20: mol_type = other DNA
tgaactgaatgaagatcaac

SEQ ID NO: 39449 - DNA, 20 bp, synthetic construct
  source 1..20: mol_type = other DNA
tgtcccgcaggaatatctgc

SEQ ID NO: 39450 - DNA, 20 bp, synthetic construct
  source 1..20: mol_type = other DNA
tataggtagggctgtggtta

SEQ ID NO: 39451 - DNA, 20 bp, synthetic construct
  source 1..20: mol_type = other DNA
aaggcaccttcgggtaaggc

SEQ ID NO: 39452 - DNA, 20 bp, synthetic construct
  source 1..20: mol_type = other DNA
ccttacccatcattccagag

SEQ ID NO: 39453 - DNA, 20 bp, synthetic construct
  source 1..20: mol_type = other DNA
ggtggggagaggggaagtgg

SEQ ID NO: 39454 - DNA, 20 bp, synthetic construct
  source 1..20: mol_type = other DNA
attggtcagtcgcctttcca

SEQ ID NO: 39455 - DNA, 20 bp, synthetic construct
  source 1..20: mol_type = other DNA
gcctgtgtgggtgcggatgt

SEQ ID NO: 39456 - DNA, 20 bp, synthetic construct
  source 1..20: mol_type = other DNA
tgtcaaagagcttgcaggtc

SEQ ID NO: 39457 - DNA, 20 bp, synthetic construct
  source 1..20: mol_type = other DNA
tcctatcactgtattccgct

SEQ ID NO: 39458 - DNA, 20 bp, synthetic construct
  source 1..20: mol_type = other DNA
tcaccaggggcggggggcaa

SEQ ID NO: 39459 - DNA, 20 bp, synthetic construct
  source 1..20: mol_type = other DNA
gttcaatgtcagctatgagg

SEQ ID NO: 39460 - DNA, 20 bp, synthetic construct
  source 1..20: mol_type = other DNA
gcagtttcaggtgcacaaac

SEQ ID NO: 39461 - DNA, 20 bp, synthetic construct
  source 1..20: mol_type = other DNA
aaggccataaatttgtgata

SEQ ID NO: 39462 - DNA, 20 bp, synthetic construct
  source 1..20: mol_type = other DNA
ggtctgagttatccatgaca

SEQ ID NO: 39463 - DNA, 20 bp, synthetic construct
  source 1..20: mol_type = other DNA
gggtggtaggtaaagtgctg

SEQ ID NO: 39464 - DNA, 20 bp, synthetic construct
  source 1..20: mol_type = other DNA
caggaagtaccgtggcctcc

SEQ ID NO: 39465 - DNA, 20 bp, synthetic construct
  source 1..20: mol_type = other DNA
tgtgccagggtctacctgaa

SEQ ID NO: 39466 - DNA, 20 bp, synthetic construct
  source 1..20: mol_type = other DNA
tcacatgaaaaactcgggag

SEQ ID NO: 39467 - DNA, 20 bp, synthetic construct
  source 1..20: mol_type = other DNA
attccaggtgtggctcacca

SEQ ID NO: 39468 - DNA, 20 bp, synthetic construct
  source 1..20: mol_type = other DNA
ctgccaggtgagtgggaaac

SEQ ID NO: 39469 - DNA, 20 bp, synthetic construct
  source 1..20: mol_type = other DNA
cacaacatcgtcacacttca

SEQ ID NO: 39470 - DNA, 20 bp, synthetic construct
  source 1..20: mol_type = other DNA
ctgcagttccttcattccaa

SEQ ID NO: 39471 - DNA, 20 bp, synthetic construct
  source 1..20: mol_type = other DNA
tgcaccacaagcacccagaa

SEQ ID NO: 39472 - DNA, 20 bp, synthetic construct
  source 1..20: mol_type = other DNA
gctgaagaaggagcggctac

SEQ ID NO: 39473 - DNA, 20 bp, synthetic construct
  source 1..20: mol_type = other DNA
gaagcgcttttcaaaatgtg

SEQ ID NO: 39474 - DNA, 20 bp, synthetic construct
  source 1..20: mol_type = other DNA
tggaggcccaagagtggtgc

SEQ ID NO: 39475 - DNA, 20 bp, synthetic construct
  source 1..20: mol_type = other DNA
acattgtacaggccttcctg

SEQ ID NO: 39476 - DNA, 20 bp, synthetic construct
  source 1..20: mol_type = other DNA
tactgtaaacccagagtcaa

SEQ ID NO: 39477 - DNA, 20 bp, synthetic construct
  source 1..20: mol_type = other DNA
acaaaagcaatgcccgtgac

SEQ ID NO: 39478 - DNA, 20 bp, synthetic construct
  source 1..20: mol_type = other DNA
agcaaaaagtttcctacaaa

SEQ ID NO: 39479 - DNA, 20 bp, synthetic construct
  source 1..20: mol_type = other DNA
ccaagcccccaattggaacc

SEQ ID NO: 39480 - DNA, 20 bp, synthetic construct
  source 1..20: mol_type = other DNA
acaggactccatgcctgaga

SEQ ID NO: 39481 - DNA, 20 bp, synthetic construct
  source 1..20: mol_type = other DNA
agaggcgtagagggacagca

SEQ ID NO: 39482 - DNA, 20 bp, synthetic construct
  source 1..20: mol_type = other DNA
tgttggcgatggtgtctgaa

SEQ ID NO: 39483 - DNA, 20 bp, synthetic construct
  source 1..20: mol_type = other DNA
caagatccatgtccaatgtg

SEQ ID NO: 39484 - DNA, 20 bp, synthetic construct
  source 1..20: mol_type = other DNA
cgcaagtactccgtgtggat

SEQ ID NO: 39485 - DNA, 20 bp, synthetic construct
  source 1..20: mol_type = other DNA
gtccatgaaggtgctgaagc

SEQ ID NO: 39486 - DNA, 20 bp, synthetic construct
  source 1..20: mol_type = other DNA
tattcaacttagaaaagaat

SEQ ID NO: 39487 - DNA, 20 bp, synthetic construct
  source 1..20: mol_type = other DNA
cggagatctgggctttgaga

SEQ ID NO: 39488 - DNA, 20 bp, synthetic construct
  source 1..20: mol_type = other DNA
aagcaggtatggcctccatc

SEQ ID NO: 39489 - DNA, 20 bp, synthetic construct
  source 1..20: mol_type = other DNA
gtcctttcctacaagctcgt

SEQ ID NO: 39490 - DNA, 20 bp, synthetic construct
  source 1..20: mol_type = other DNA
tgtggtcaacataggggctg

SEQ ID NO: 39491 - DNA, 20 bp, synthetic construct
  source 1..20: mol_type = other DNA
gtggaagaagggggtggggg

SEQ ID NO: 39492 - DNA, 20 bp, synthetic construct
  source 1..20: mol_type = other DNA
caggatgcagaatggtactg

SEQ ID NO: 39493 - DNA, 20 bp, synthetic construct
  source 1..20: mol_type = other DNA
ctgccgcctggagctgcact

SEQ ID NO: 39494 - DNA, 20 bp, synthetic construct
  source 1..20: mol_type = other DNA
cttcgggcacggccttggct

SEQ ID NO: 39495 - DNA, 20 bp, synthetic construct
  source 1..20: mol_type = other DNA
catgacttggagaaaagtta

SEQ ID NO: 39496 - DNA, 20 bp, synthetic construct
  source 1..20: mol_type = other DNA
cctcttgaagcggcaggact

SEQ ID NO: 39497 - DNA, 20 bp, synthetic construct
  source 1..20: mol_type = other DNA
tgagcgagtgccggtctgcc

SEQ ID NO: 39498 - DNA, 20 bp, synthetic construct
  source 1..20: mol_type = other DNA
ggtgcaggaatttgtacacc

SEQ ID NO: 39499 - DNA, 20 bp, synthetic construct
  source 1..20: mol_type = other DNA
agagaaaggacttttccact

SEQ ID NO: 39500 - DNA, 20 bp, synthetic construct
  source 1..20: mol_type = other DNA
gttgaggaagacgaaggacg

SEQ ID NO: 39501 - DNA, 20 bp, synthetic construct
  source 1..20: mol_type = other DNA
ggcactgtctcggatgccag

SEQ ID NO: 39502 - DNA, 20 bp, synthetic construct
  source 1..20: mol_type = other DNA
ccagaccctcgtcttcttcg

SEQ ID NO: 39503 - DNA, 20 bp, synthetic construct
  source 1..20: mol_type = other DNA
catcacatgggtagagggaa

SEQ ID NO: 39504 - DNA, 20 bp, synthetic construct
  source 1..20: mol_type = other DNA
cgggccgctgcacaagttcc

SEQ ID NO: 39505 - DNA, 20 bp, synthetic construct
  source 1..20: mol_type = other DNA
cgatcctgatgatgaaccag

SEQ ID NO: 39506 - DNA, 20 bp, synthetic construct
  source 1..20: mol_type = other DNA
ctacagcctggccagcaagg

SEQ ID NO: 39507 - DNA, 20 bp, synthetic construct
  source 1..20: mol_type = other DNA
ggcagtcacggcaatgaact

SEQ ID NO: 39508 - DNA, 20 bp, synthetic construct
  source 1..20: mol_type = other DNA
acgccgctgccagcccggcc

SEQ ID NO: 39509 - DNA, 20 bp, synthetic construct
  source 1..20: mol_type = other DNA
ggtggctcacccagcgcggc

SEQ ID NO: 39510 - DNA, 20 bp, synthetic construct
  source 1..20: mol_type = other DNA
tctgcaaaaggaagagaagt

SEQ ID NO: 39511 - DNA, 20 bp, synthetic construct
  source 1..20: mol_type = other DNA
ctcaatcaaagggatggcaa

SEQ ID NO: 39512 - DNA, 20 bp, synthetic construct
  source 1..20: mol_type = other DNA
agcctgcgcgacctgatcca

SEQ ID NO: 39513 - DNA, 20 bp, synthetic construct
  source 1..20: mol_type = other DNA
caacaatgtgagtgtcccat

SEQ ID NO: 39514 - DNA, 20 bp, synthetic construct
  source 1..20: mol_type = other DNA
aagtcatcacatccaagcag

SEQ ID NO: 39515 - DNA, 20 bp, synthetic construct
  source 1..20: mol_type = other DNA
aaagaacttcgaggggtctg

SEQ ID NO: 39516 - DNA, 20 bp, synthetic construct
  source 1..20: mol_type = other DNA
aatgaggtacaggccgtcct

SEQ ID NO: 39517 - DNA, 20 bp, synthetic construct
  source 1..20: mol_type = other DNA
catgagcagcttaccatcca

SEQ ID NO: 39518 - DNA, 20 bp, synthetic construct
  source 1..20: mol_type = other DNA
ttcagcaccagcctcagaag

SEQ ID NO: 39519 - DNA, 20 bp, synthetic construct
  source 1..20: mol_type = other DNA
gggatgagagagtttcctgg

SEQ ID NO: 39520 - DNA, 20 bp, synthetic construct
  source 1..20: mol_type = other DNA
caggtatggtggagggcact

SEQ ID NO: 39521 - DNA, 20 bp, synthetic construct
  source 1..20: mol_type = other DNA
aagtatagtttacaaaccac

SEQ ID NO: 39522 - DNA, 20 bp, synthetic construct
  source 1..20: mol_type = other DNA
gatgatctgcaaagacagcc

SEQ ID NO: 39523 - DNA, 20 bp, synthetic construct
  source 1..20: mol_type = other DNA
ttacagggaaggagattggt

SEQ ID NO: 39524 - DNA, 20 bp, synthetic construct
  source 1..20: mol_type = other DNA
tgagactggaaggctgtctg

SEQ ID NO: 39525 - DNA, 20 bp, synthetic construct
  source 1..20: mol_type = other DNA
gtggacagaaacccatgttc

SEQ ID NO: 39526 - DNA, 20 bp, synthetic construct
  source 1..20: mol_type = other DNA
gatcttcctactgtgtgaca

SEQ ID NO: 39527 - DNA, 20 bp, synthetic construct
  source 1..20: mol_type = other DNA
aggggtgagctgcaacaaag

SEQ ID NO: 39528 - DNA, 20 bp, synthetic construct
  source 1..20: mol_type = other DNA
acacactcaggagcaatcca

SEQ ID NO: 39529 - DNA, 20 bp, synthetic construct
  source 1..20: mol_type = other DNA
ccagtgcgagccgcaggccc

SEQ ID NO: 39530 - DNA, 20 bp, synthetic construct
  source 1..20: mol_type = other DNA
gaagtcattaacatattcca

SEQ ID NO: 39531 - DNA, 20 bp, synthetic construct
  source 1..20: mol_type = other DNA
ggagctaatgaacgatctag

SEQ ID NO: 39532 - DNA, 20 bp, synthetic construct
  source 1..20: mol_type = other DNA
tccatgtgccgccctagggt

SEQ ID NO: 39533 - DNA, 20 bp, synthetic construct
  source 1..20: mol_type = other DNA
agaccagtctctgcggggaa

SEQ ID NO: 39534 - DNA, 20 bp, synthetic construct
  source 1..20: mol_type = other DNA
gtacagtttccccctgcagc

SEQ ID NO: 39535 - DNA, 20 bp, synthetic construct
  source 1..20: mol_type = other DNA
ccccagtaccctcccaagat

SEQ ID NO: 39536 - DNA, 20 bp, synthetic construct
  source 1..20: mol_type = other DNA
cttacctgccgggaagatga

SEQ ID NO: 39537 - DNA, 20 bp, synthetic construct
  source 1..20: mol_type = other DNA
gcgaaggctggtaagttctc

SEQ ID NO: 39538 - DNA, 20 bp, synthetic construct
  source 1..20: mol_type = other DNA
caagacccaccccaccatca

SEQ ID NO: 39539 - DNA, 20 bp, synthetic construct
  source 1..20: mol_type = other DNA
tcaggtgccctcgcttccac

SEQ ID NO: 39540 - DNA, 20 bp, synthetic construct
  source 1..20: mol_type = other DNA
gccatacttcttcctggatg

SEQ ID NO: 39541 - DNA, 20 bp, synthetic construct
  source 1..20: mol_type = other DNA
gggaccagtacatgaggact

SEQ ID NO: 39542 - DNA, 20 bp, synthetic construct
  source 1..20: mol_type = other DNA
tgggggacatcctgttgtga

SEQ ID NO: 39543 - DNA, 20 bp, synthetic construct
  source 1..20: mol_type = other DNA
gccaagactgcctttgactc

SEQ ID NO: 39544 - DNA, 20 bp, synthetic construct
  source 1..20: mol_type = other DNA
acaatggactcaaccctgta

SEQ ID NO: 39545 - DNA, 20 bp, synthetic construct
  source 1..20: mol_type = other DNA
tttcaagagcgccaccacga

SEQ ID NO: 39546 - DNA, 20 bp, synthetic construct
  source 1..20: mol_type = other DNA
gcgccagtgcgagggcagca

SEQ ID NO: 39547 - DNA, 20 bp, synthetic construct
  source 1..20: mol_type = other DNA
tggccacgccgaagcccggg

SEQ ID NO: 39548 - DNA, 20 bp, synthetic construct
  source 1..20: mol_type = other DNA
agcacctggcacagggtagg

SEQ ID NO: 39549 - DNA, 20 bp, synthetic construct
  source 1..20: mol_type = other DNA
cccaaagtagcagaggcagc

SEQ ID NO: 39550 - DNA, 20 bp, synthetic construct
  source 1..20: mol_type = other DNA
ccggggtcttctctcgccac

SEQ ID NO: 39551 - DNA, 20 bp, synthetic construct
  source 1..20: mol_type = other DNA
acgtggccactaggtggtac

SEQ ID NO: 39552 - DNA, 20 bp, synthetic construct
  source 1..20: mol_type = other DNA
cctcagcgtcctgatgtggg

SEQ ID NO: 39553 - DNA, 20 bp, synthetic construct
  source 1..20: mol_type = other DNA
aaaatgataggcccaaccca

SEQ ID NO: 39554 - DNA, 20 bp, synthetic construct
  source 1..20: mol_type = other DNA
tgagccagctgagtttcgat

SEQ ID NO: 39555 - DNA, 20 bp, synthetic construct
  source 1..20: mol_type = other DNA
cgagctcatgaagctgtgct

SEQ ID NO: 39556 - DNA, 20 bp, synthetic construct
  source 1..20: mol_type = other DNA
actggaccaaggagcattgt

SEQ ID NO: 39557 - DNA, 20 bp, synthetic construct
  source 1..20: mol_type = other DNA
aggtgcggcagaaccggcag

SEQ ID NO: 39558 - DNA, 20 bp, synthetic construct
  source 1..20: mol_type = other DNA
ctgaaggcgatgagcagccc

SEQ ID NO: 39559 - DNA, 20 bp, synthetic construct
  source 1..20: mol_type = other DNA
gcaggagcgctacatcgaac

SEQ ID NO: 39560 - DNA, 20 bp, synthetic construct
  source 1..20: mol_type = other DNA
agcacttccccatcgaggtc

SEQ ID NO: 39561 - DNA, 20 bp, synthetic construct
  source 1..20: mol_type = other DNA
ctgagctttggggagtttgg

SEQ ID NO: 39562 - DNA, 20 bp, synthetic construct
  source 1..20: mol_type = other DNA
ctactacggaaactcggtca

SEQ ID NO: 39563 - DNA, 20 bp, synthetic construct
  source 1..20: mol_type = other DNA
cattccgaaaaccagagcta

SEQ ID NO: 39564 - DNA, 20 bp, synthetic construct
  source 1..20: mol_type = other DNA
gtcagctgctcggcgaagaa

SEQ ID NO: 39565 - DNA, 20 bp, synthetic construct
  source 1..20: mol_type = other DNA
ctatggtcgagatttaatgg

SEQ ID NO: 39566 - DNA, 20 bp, synthetic construct
  source 1..20: mol_type = other DNA
tcctcgtttctgaaacaggt

SEQ ID NO: 39567 - DNA, 20 bp, synthetic construct
  source 1..20: mol_type = other DNA
cccaaacaggccatccgtga

SEQ ID NO: 39568 - DNA, 20 bp, synthetic construct
  source 1..20: mol_type = other DNA
ctgcaaagttcagccccgct

SEQ ID NO: 39569 - DNA, 20 bp, synthetic construct
  source 1..20: mol_type = other DNA
aggcgaactggagacaacag

SEQ ID NO: 39570 - DNA, 20 bp, synthetic construct
  source 1..20: mol_type = other DNA
cagccgctcccgcatctccc

SEQ ID NO: 39571 - DNA, 20 bp, synthetic construct
  source 1..20: mol_type = other DNA
tcctggcaacctgctgggat

SEQ ID NO: 39572 - DNA, 20 bp, synthetic construct
  source 1..20: mol_type = other DNA
cctctgcctcctgggaactc

SEQ ID NO: 39573 - DNA, 20 bp, synthetic construct
  source 1..20: mol_type = other DNA
tccggtgagctgatcctgcc

SEQ ID NO: 39574 - DNA, 20 bp, synthetic construct
  source 1..20: mol_type = other DNA
actatcgggcagatagcaac

SEQ ID NO: 39575 - DNA, 20 bp, synthetic construct
  source 1..20: mol_type = other DNA
tctgcttgagagtcagcagg

SEQ ID NO: 39576 - DNA, 20 bp, synthetic construct
  source 1..20: mol_type = other DNA
agcaaaggaccttctggtga

SEQ ID NO: 39577 - DNA, 20 bp, synthetic construct
  source 1..20: mol_type = other DNA
tggatgcattacaaccagac

SEQ ID NO: 39578 - DNA, 20 bp, synthetic construct
  source 1..20: mol_type = other DNA
ctgtctcctatagaaataca

SEQ ID NO: 39579 - DNA, 20 bp, synthetic construct
  source 1..20: mol_type = other DNA
acagcgggagcaggagctgg

SEQ ID NO: 39580 - DNA, 20 bp, synthetic construct
  source 1..20: mol_type = other DNA
ttaagctgataattcaactc

SEQ ID NO: 39581 - DNA, 20 bp, synthetic construct
  source 1..20: mol_type = other DNA
atgtgcctggcacctggaga

SEQ ID NO: 39582 - DNA, 20 bp, synthetic construct
  source 1..20: mol_type = other DNA
ccctcacctcgcccagatct

SEQ ID NO: 39583 - DNA, 20 bp, synthetic construct
  source 1..20: mol_type = other DNA
gcgccggggtgccatcaagc

SEQ ID NO: 39584 - DNA, 20 bp, synthetic construct
  source 1..20: mol_type = other DNA
gctgaggccaaccagaagga

SEQ ID NO: 39585 - DNA, 20 bp, synthetic construct
  source 1..20: mol_type = other DNA
atcaacaagctcaagactgg

SEQ ID NO: 39586 - DNA, 20 bp, synthetic construct
  source 1..20: mol_type = other DNA
aaacccccacttgtccatgg

SEQ ID NO: 39587 - DNA, 20 bp, synthetic construct
  source 1..20: mol_type = other DNA
ctcgcagaattggcacatct

SEQ ID NO: 39588 - DNA, 20 bp, synthetic construct
  source 1..20: mol_type = other DNA
cctgaaaccattcaccacgc

SEQ ID NO: 39589 - DNA, 20 bp, synthetic construct
  source 1..20: mol_type = other DNA
agcacaggcggtcgtgggtc

SEQ ID NO: 39590 - DNA, 20 bp, synthetic construct
  source 1..20: mol_type = other DNA
tgcccacactcggtctgctt

SEQ ID NO: 39591 - DNA, 20 bp, synthetic construct
  source 1..20: mol_type = other DNA
gagtggtgtgtctaagggac

SEQ ID NO: 39592 - DNA, 20 bp, synthetic construct
  source 1..20: mol_type = other DNA
ttgacgagcacagcacagta

SEQ ID NO: 39593 - DNA, 20 bp, synthetic construct
  source 1..20: mol_type = other DNA
atgaccaggtgtttgagatc

SEQ ID NO: 39594 - DNA, 20 bp, synthetic construct
  source 1..20: mol_type = other DNA
ccaaactgccctcctgctga

SEQ ID NO: 39595 - DNA, 20 bp, synthetic construct
  source 1..20: mol_type = other DNA
cagcaaagctaaagctatgc

SEQ ID NO: 39596 - DNA, 20 bp, synthetic construct
  source 1..20: mol_type = other DNA
cccaagggatgccattgact

SEQ ID NO: 39597 - DNA, 20 bp, synthetic construct
  source 1..20: mol_type = other DNA
cggataagaaaggtacctct

SEQ ID NO: 39598 - DNA, 20 bp, synthetic construct
  source 1..20: mol_type = other DNA
ccgtccaggaagcaccactt

SEQ ID NO: 39599 - DNA, 20 bp, synthetic construct
  source 1..20: mol_type = other DNA
ggacaatgtgagcctaagga

SEQ ID NO: 39600 - DNA, 20 bp, synthetic construct
  source 1..20: mol_type = other DNA
tctactccctaaggtggaag

SEQ ID NO: 39601 - DNA, 20 bp, synthetic construct
  source 1..20: mol_type = other DNA
gctgtcccagggtgggtaca

SEQ ID NO: 39602 - DNA, 20 bp, synthetic construct
  source 1..20: mol_type = other DNA
caaccacatcaagagcagcg

SEQ ID NO: 39603 - DNA, 20 bp, synthetic construct
  source 1..20: mol_type = other DNA
cacactgctgcgtggaggtg

SEQ ID NO: 39604 - DNA, 20 bp, synthetic construct
  source 1..20: mol_type = other DNA
ctggccgacaagcagaagcg

SEQ ID NO: 39605 - DNA, 20 bp, synthetic construct
  source 1..20: mol_type = other DNA
agtccccaaagtcaatgtgc

SEQ ID NO: 39606 - DNA, 20 bp, synthetic construct
  source 1..20: mol_type = other DNA
ccttggctctaacctgggta

SEQ ID NO: 39607 - DNA, 20 bp, synthetic construct
  source 1..20: mol_type = other DNA
agaagatccccgcagcccct

SEQ ID NO: 39608 - DNA, 20 bp, synthetic construct
  source 1..20: mol_type = other DNA
tccccagcctctgcgtcctc

SEQ ID NO: 39609 - DNA, 20 bp, synthetic construct
  source 1..20: mol_type = other DNA
agaggcagcggctccgctct

SEQ ID NO: 39610 - DNA, 20 bp, synthetic construct
  source 1..20: mol_type = other DNA
gtgtgagcacagcaacaccc

SEQ ID NO: 39611 - DNA, 20 bp, synthetic construct
  source 1..20: mol_type = other DNA
ccccttagggcacatgatca

SEQ ID NO: 39612 - DNA, 20 bp, synthetic construct
  source 1..20: mol_type = other DNA
gtgcaggctgccaaggccag

SEQ ID NO: 39613 - DNA, 20 bp, synthetic construct
  source 1..20: mol_type = other DNA
agattgccatcaagcagtgc

SEQ ID NO: 39614 - DNA, 20 bp, synthetic construct
  source 1..20: mol_type = other DNA
caccccagacaacatgtgca

SEQ ID NO: 39615 - DNA, 20 bp, synthetic construct
  source 1..20: mol_type = other DNA
tcttctgcaggatctgctca

SEQ ID NO: 39616 - DNA, 20 bp, synthetic construct
  source 1..20: mol_type = other DNA
aattaccttcagatcttcgt

SEQ ID NO: 39617 - DNA, 20 bp, synthetic construct
  source 1..20: mol_type = other DNA
taaaatctggttgtctgtcc

SEQ ID NO: 39618 - DNA, 20 bp, synthetic construct
  source 1..20: mol_type = other DNA
ctcagccaagtggtccccaa

SEQ ID NO: 39619 - DNA, 20 bp, synthetic construct
  source 1..20: mol_type = other DNA
aacctgatcgtggtccagag

SEQ ID NO: 39620 - DNA, 20 bp, synthetic construct
  source 1..20: mol_type = other DNA
ctggttcatggtaatgtgtg

SEQ ID NO: 39621 - DNA, 20 bp, synthetic construct
  source 1..20: mol_type = other DNA
acaaagggcagcaatgtaag

SEQ ID NO: 39622 - DNA, 20 bp, synthetic construct
  source 1..20: mol_type = other DNA
tcctcatcaaggtggggtgg

SEQ ID NO: 39623 - DNA, 20 bp, synthetic construct
  source 1..20: mol_type = other DNA
tgctgctcagggaccactga

SEQ ID NO: 39624 - DNA, 20 bp, synthetic construct
  source 1..20: mol_type = other DNA
ccaggttccaattgggggct

SEQ ID NO: 39625 - DNA, 20 bp, synthetic construct
  source 1..20: mol_type = other DNA
ggtgatccagggccattttg

SEQ ID NO: 39626 - DNA, 20 bp, synthetic construct
  source 1..20: mol_type = other DNA
aatgatcagggagaaactga

SEQ ID NO: 39627 - DNA, 20 bp, synthetic construct
  source 1..20: mol_type = other DNA
ttctggcaccaggtgcagcc

SEQ ID NO: 39628 - DNA, 20 bp, synthetic construct
  source 1..20: mol_type = other DNA
cccactggatggcaagggca

SEQ ID NO: 39629 - DNA, 20 bp, synthetic construct
  source 1..20: mol_type = other DNA
ctcctgcacgagggcccgga

SEQ ID NO: 39630 - DNA, 20 bp, synthetic construct
  source 1..20: mol_type = other DNA
gctacgggccacagagggcg

SEQ ID NO: 39631 - DNA, 20 bp, synthetic construct
  source 1..20: mol_type = other DNA
actcagcagcatgagcttgg

SEQ ID NO: 39632 - DNA, 20 bp, synthetic construct
  source 1..20: mol_type = other DNA
cagtctagatcataatgatt

SEQ ID NO: 39633 - DNA, 20 bp, synthetic construct
  source 1..20: mol_type = other DNA
cactcaccacaccatgccgt

SEQ ID NO: 39634 - DNA, 20 bp, synthetic construct
  source 1..20: mol_type = other DNA
ccgcctgcccttctacaacc

SEQ ID NO: 39635 - DNA, 20 bp, synthetic construct
  source 1..20: mol_type = other DNA
ttggagtatacttcatcttt

SEQ ID NO: 39636 - DNA, 20 bp, synthetic construct
  source 1..20: mol_type = other DNA
gtgaggaaacttctggatgc

SEQ ID NO: 39637 - DNA, 20 bp, synthetic construct
  source 1..20: mol_type = other DNA
cagggcggtcatgctgccac

SEQ ID NO: 39638 - DNA, 20 bp, synthetic construct
  source 1..20: mol_type = other DNA
agggcacctgggagaacagg

SEQ ID NO: 39639 - DNA, 20 bp, synthetic construct
  source 1..20: mol_type = other DNA
gagcaggtatgagcagggct

SEQ ID NO: 39640 - DNA, 20 bp, synthetic construct
  source 1..20: mol_type = other DNA
gccactcagtgtatttcaga

SEQ ID NO: 39641 - DNA, 20 bp, synthetic construct
  source 1..20: mol_type = other DNA
gcacgtaccatccagatcta

SEQ ID NO: 39642 - DNA, 20 bp, synthetic construct
  source 1..20: mol_type = other DNA
acaaggatgcctgtttgttc

SEQ ID NO: 39643 - DNA, 20 bp, synthetic construct
  source 1..20: mol_type = other DNA
ggctgggggctggacagttc

SEQ ID NO: 39644 - DNA, 20 bp, synthetic construct
  source 1..20: mol_type = other DNA
atcctggccaaccgctcgga

SEQ ID NO: 39645 - DNA, 20 bp, synthetic construct
  source 1..20: mol_type = other DNA
tgaatccagcacactctccc

SEQ ID NO: 39646 - DNA, 20 bp, synthetic construct
  source 1..20: mol_type = other DNA
taactggcacatacaagtaa

SEQ ID NO: 39647 - DNA, 20 bp, synthetic construct
  source 1..20: mol_type = other DNA
gggtgccagccgctcgagtg

SEQ ID NO: 39648 - DNA, 20 bp, synthetic construct
  source 1..20: mol_type = other DNA
ccatccttaccaggagaggg

SEQ ID NO: 39649 - DNA, 20 bp, synthetic construct
  source 1..20: mol_type = other DNA
aagaacttacggcaaactca

SEQ ID NO: 39650 - DNA, 20 bp, synthetic construct
  source 1..20: mol_type = other DNA
tcaattcgggccgctgcctg

SEQ ID NO: 39651 - DNA, 20 bp, synthetic construct
  source 1..20: mol_type = other DNA
tgcacctggcagctggactg

SEQ ID NO: 39652 - DNA, 20 bp, synthetic construct
  source 1..20: mol_type = other DNA
gcgccatgaacgcccccgag

SEQ ID NO: 39653 - DNA, 20 bp, synthetic construct
  source 1..20: mol_type = other DNA
ccgtttcaggtaagtccatc

SEQ ID NO: 39654 - DNA, 20 bp, synthetic construct
  source 1..20: mol_type = other DNA
atgagcatcttgcgcaggaa

SEQ ID NO: 39655 - DNA, 20 bp, synthetic construct
  source 1..20: mol_type = other DNA
ccaactgcgcgaggcggagc

SEQ ID NO: 39656 - DNA, 20 bp, synthetic construct
  source 1..20: mol_type = other DNA
aaccagtttgagaactgctg

SEQ ID NO: 39657 - DNA, 20 bp, synthetic construct
  source 1..20: mol_type = other DNA
ccaggctggtcggctgctct

SEQ ID NO: 39658 - DNA, 20 bp, synthetic construct
  source 1..20: mol_type = other DNA
gatggtggccttcacctggg

SEQ ID NO: 39659 - DNA, 20 bp, synthetic construct
  source 1..20: mol_type = other DNA
tatcagcgctgaggtctaca

SEQ ID NO: 39660 - DNA, 20 bp, synthetic construct
  source 1..20: mol_type = other DNA
actgtcatctggccatgggt

SEQ ID NO: 39661 - DNA, 20 bp, synthetic construct
  source 1..20: mol_type = other DNA
cctcctcacgctccgagctc

SEQ ID NO: 39662 - DNA, 20 bp, synthetic construct
  source 1..20: mol_type = other DNA
cgtgcacctggccgctgccc

SEQ ID NO: 39663 - DNA, 20 bp, synthetic construct
  source 1..20: mol_type = other DNA
tcgatgaggtccagtgcgta

SEQ ID NO: 39664 - DNA, 20 bp, synthetic construct
  source 1..20: mol_type = other DNA
gcatgcccatgcatcctgac

SEQ ID NO: 39665 - DNA, 20 bp, synthetic construct
  source 1..20: mol_type = other DNA
cagagccgaggtccggctgg

SEQ ID NO: 39666 - DNA, 20 bp, synthetic construct
  source 1..20: mol_type = other DNA
actacaagatgaaggaagag

SEQ ID NO: 39667 - DNA, 20 bp, synthetic construct
  source 1..20: mol_type = other DNA
tggcttcatacagggagatg

SEQ ID NO: 39668 - DNA, 20 bp, synthetic construct
  source 1..20: mol_type = other DNA
gcaagttctcctgagggccc

SEQ ID NO: 39669 - DNA, 20 bp, synthetic construct
  source 1..20: mol_type = other DNA
ctccaggactacccatcggt

SEQ ID NO: 39670 - DNA, 20 bp, synthetic construct
  source 1..20: mol_type = other DNA
cccaccatgtcctactaccg

SEQ ID NO: 39671 - DNA, 20 bp, synthetic construct
  source 1..20: mol_type = other DNA
ggtaggtgaaacgctggtac

SEQ ID NO: 39672 - DNA, 20 bp, synthetic construct
  source 1..20: mol_type = other DNA
tattacctttcgatgccgta

SEQ ID NO: 39673 - DNA, 20 bp, synthetic construct
  source 1..20: mol_type = other DNA
gctgcaggagggcgacattc

SEQ ID NO: 39674 - DNA, 20 bp, synthetic construct
  source 1..20: mol_type = other DNA
tgcagctgtgagtgtctaca

SEQ ID NO: 39675 - DNA, 20 bp, synthetic construct
  source 1..20: mol_type = other DNA
aggagaagctcaagtcccag

SEQ ID NO: 39676 - DNA, 20 bp, synthetic construct
  source 1..20: mol_type = other DNA
gctctggggcctgcagcaac

SEQ ID NO: 39677 - DNA, 20 bp, synthetic construct
  source 1..20: mol_type = other DNA
cagatctgcccccatgagat

SEQ ID NO: 39678 - DNA, 20 bp, synthetic construct
  source 1..20: mol_type = other DNA
tccagatcatgagaaggtga

SEQ ID NO: 39679 - DNA, 20 bp, synthetic construct
  source 1..20: mol_type = other DNA
tacatggaaagctcatctta

SEQ ID NO: 39680 - DNA, 20 bp, synthetic construct
  source 1..20: mol_type = other DNA
gctcatagccctgggcacct

SEQ ID NO: 39681 - DNA, 20 bp, synthetic construct
  source 1..20: mol_type = other DNA
aacgaggaggcaggcagcgg

SEQ ID NO: 39682 - DNA, 20 bp, synthetic construct
  source 1..20: mol_type = other DNA
ctctgcctcctgggaactca

SEQ ID NO: 39683 - DNA, 20 bp, synthetic construct
  source 1..20: mol_type = other DNA
gtgaagagtgcaaagagaaa

SEQ ID NO: 39684 - DNA, 20 bp, synthetic construct
  source 1..20: mol_type = other DNA
ggacagtggtgagttatctc

SEQ ID NO: 39685 - DNA, 20 bp, synthetic construct
  source 1..20: mol_type = other DNA
ctaaatgcaggaaccggcgg

SEQ ID NO: 39686 - DNA, 20 bp, synthetic construct
  source 1..20: mol_type = other DNA
agacccaagccaagatggcc

SEQ ID NO: 39687 - DNA, 20 bp, synthetic construct
  source 1..20: mol_type = other DNA
ccaagatgatatccttctgc

SEQ ID NO: 39688 - DNA, 20 bp, synthetic construct
  source 1..20: mol_type = other DNA
tgtgagaagagttcagagga

SEQ ID NO: 39689 - DNA, 20 bp, synthetic construct
  source 1..20: mol_type = other DNA
ttgatggcctgcatcgtgtc

SEQ ID NO: 39690 - DNA, 20 bp, synthetic construct
  source 1..20: mol_type = other DNA
cacccctcgaccgaagctgg

SEQ ID NO: 39691 - DNA, 20 bp, synthetic construct
  source 1..20: mol_type = other DNA
gccccaccagggcgagcagt

SEQ ID NO: 39692 - DNA, 20 bp, synthetic construct
  source 1..20: mol_type = other DNA
agttctgccagatcctgccg

SEQ ID NO: 39693 - DNA, 20 bp, synthetic construct
  source 1..20: mol_type = other DNA
tatggacaacaaggccccag

SEQ ID NO: 39694 - DNA, 20 bp, synthetic construct
  source 1..20: mol_type = other DNA
cctgcgagaccacgtggaga

SEQ ID NO: 39695 - DNA, 20 bp, synthetic construct
  source 1..20: mol_type = other DNA
atcctctaggttcttcaggg

SEQ ID NO: 39696 - DNA, 20 bp, synthetic construct
  source 1..20: mol_type = other DNA
ctcactcacgatgctctggt

SEQ ID NO: 39697 - DNA, 20 bp, synthetic construct
  source 1..20: mol_type = other DNA
cgagggctaccagccgggcg

SEQ ID NO: 39698 - DNA, 20 bp, synthetic construct
  source 1..20: mol_type = other DNA
cacactcacgatgtggccgt

SEQ ID NO: 39699 - DNA, 20 bp, synthetic construct
  source 1..20: mol_type = other DNA
cctgcagaatggagacagtg

SEQ ID NO: 39700 - DNA, 20 bp, synthetic construct
  source 1..20: mol_type = other DNA
tcagtggctgggcactccga

SEQ ID NO: 39701 - DNA, 20 bp, synthetic construct
  source 1..20: mol_type = other DNA
tgctattaagcaagttcctg

SEQ ID NO: 39702 - DNA, 20 bp, synthetic construct
  source 1..20: mol_type = other DNA
tctggatgtgtgtgagggca

SEQ ID NO: 39703 - DNA, 20 bp, synthetic construct
  source 1..20: mol_type = other DNA
tggacaacccgtacatcgtg

SEQ ID NO: 39704 - DNA, 20 bp, synthetic construct
  source 1..20: mol_type = other DNA
tctgatcatggttcctgatg

SEQ ID NO: 39705 - DNA, 20 bp, synthetic construct
  source 1..20: mol_type = other DNA
atagtcccactggatggcaa

SEQ ID NO: 39706 - DNA, 20 bp, synthetic construct
  source 1..20: mol_type = other DNA
aatacctagccacactcgag

SEQ ID NO: 39707 - DNA, 20 bp, synthetic construct
  source 1..20: mol_type = other DNA
gaaactctctcatcccaaac

SEQ ID NO: 39708 - DNA, 20 bp, synthetic construct
  source 1..20: mol_type = other DNA
ggggaagggcctggggggtc

SEQ ID NO: 39709 - DNA, 20 bp, synthetic construct
  source 1..20: mol_type = other DNA
tcccagacctggggacccag

SEQ ID NO: 39710 - DNA, 20 bp, synthetic construct
  source 1..20: mol_type = other DNA
acccagtatatgcacagcag

SEQ ID NO: 39711 - DNA, 20 bp, synthetic construct
  source 1..20: mol_type = other DNA
ggcctccgggaaggtctcgg

SEQ ID NO: 39712 - DNA, 20 bp, synthetic construct
  source 1..20: mol_type = other DNA
ggagaacctgcaggggagcg

SEQ ID NO: 39713 - DNA, 20 bp, synthetic construct
  source 1..20: mol_type = other DNA
ctgctcggagctgcggcgtg

SEQ ID NO: 39714 - DNA, 20 bp, synthetic construct
  source 1..20: mol_type = other DNA
tggccgagtaggagaactgg

SEQ ID NO: 39715 - DNA, 20 bp, synthetic construct
  source 1..20: mol_type = other DNA
cttcacttgtttttcagctg

SEQ ID NO: 39716 - DNA, 20 bp, synthetic construct
  source 1..20: mol_type = other DNA
cctgctgaggtgagcgccgc

SEQ ID NO: 39717 - DNA, 20 bp, synthetic construct
  source 1..20: mol_type = other DNA
cacaggactccatgcctgag

SEQ ID NO: 39718 - DNA, 20 bp, synthetic construct
  source 1..20: mol_type = other DNA
ctccatcgtcagacgctaca

SEQ ID NO: 39719 - DNA, 20 bp, synthetic construct
  source 1..20: mol_type = other DNA
gcccccggaaccgagagcgg

SEQ ID NO: 39720 - DNA, 20 bp, synthetic construct
  source 1..20: mol_type = other DNA
accagcagatccaggcactc

SEQ ID NO: 39721 - DNA, 20 bp, synthetic construct
  source 1..20: mol_type = other DNA
gtgtctccatgcagctgcgg

SEQ ID NO: 39722 - DNA, 20 bp, synthetic construct
  source 1..20: mol_type = other DNA
gtggaccagatgttggatat

SEQ ID NO: 39723 - DNA, 20 bp, synthetic construct
  source 1..20: mol_type = other DNA
gctcttccactccatccgca

SEQ ID NO: 39724 - DNA, 20 bp, synthetic construct
  source 1..20: mol_type = other DNA
ccccggggagccgtggtgga

SEQ ID NO: 39725 - DNA, 20 bp, synthetic construct
  source 1..20: mol_type = other DNA
ctcctggtagacctcgtgga

SEQ ID NO: 39726 - DNA, 20 bp, synthetic construct
  source 1..20: mol_type = other DNA
ctcctagggacagtatgatt

SEQ ID NO: 39727 - DNA, 20 bp, synthetic construct
  source 1..20: mol_type = other DNA
tcagatctgcccccatgaga

SEQ ID NO: 39728 - DNA, 20 bp, synthetic construct
  source 1..20: mol_type = other DNA
tttgaatcccagttcagtgt

SEQ ID NO: 39729 - DNA, 20 bp, synthetic construct
  source 1..20: mol_type = other DNA
cctggctgcagactgagagt

SEQ ID NO: 39730 - DNA, 20 bp, synthetic construct
  source 1..20: mol_type = other DNA
gaaggtcctctcgatgactg

SEQ ID NO: 39731 - DNA, 20 bp, synthetic construct
  source 1..20: mol_type = other DNA
gcagtttgatgatgaagacc

SEQ ID NO: 39732 - DNA, 20 bp, synthetic construct
  source 1..20: mol_type = other DNA
cgcaagtgccgcccgggctt

SEQ ID NO: 39733 - DNA, 20 bp, synthetic construct
  source 1..20: mol_type = other DNA
tgaaaccaagaaagaagccc

SEQ ID NO: 39734 - DNA, 20 bp, synthetic construct
  source 1..20: mol_type = other DNA
attcccaaggaggaggcatt

SEQ ID NO: 39735 - DNA, 20 bp, synthetic construct
  source 1..20: mol_type = other DNA
cctgtaaggaacagtgggag

SEQ ID NO: 39736 - DNA, 20 bp, synthetic construct
  source 1..20: mol_type = other DNA
cggggcgcagcagctggccg

SEQ ID NO: 39737 - DNA, 20 bp, synthetic construct
  source 1..20: mol_type = other DNA
agagatgcagggacacacga

SEQ ID NO: 39738 - DNA, 20 bp, synthetic construct
  source 1..20: mol_type = other DNA
gagctggaggatgaaggatc

SEQ ID NO: 39739 - DNA, 20 bp, synthetic construct
  source 1..20: mol_type = other DNA
gctgatgcaagtgaagactg

SEQ ID NO: 39740 - DNA, 20 bp, synthetic construct
  source 1..20: mol_type = other DNA
gacgttggagatcaccacaa

SEQ ID NO: 39741 - DNA, 20 bp, synthetic construct
  source 1..20: mol_type = other DNA
cctcacaaatgtggatattg

SEQ ID NO: 39742 - DNA, 20 bp, synthetic construct
  source 1..20: mol_type = other DNA
gcagcctatcgctcctgaca

SEQ ID NO: 39743 - DNA, 20 bp, synthetic construct
  source 1..20: mol_type = other DNA
cctctttgccctgatgcggg

SEQ ID NO: 39744 - DNA, 20 bp, synthetic construct
  source 1..20: mol_type = other DNA
agcctgcaaggtgggagtta

SEQ ID NO: 39745 - DNA, 20 bp, synthetic construct
  source 1..20: mol_type = other DNA
cccgagccaggagcaccttc

SEQ ID NO: 39746 - DNA, 20 bp, synthetic construct
  source 1..20: mol_type = other DNA
tagtgcccacttcaggaata

SEQ ID NO: 39747 - DNA, 20 bp, synthetic construct
  source 1..20: mol_type = other DNA
gatctgcttcctgcccgacc

SEQ ID NO: 39748 - DNA, 20 bp, synthetic construct
  source 1..20: mol_type = other DNA
taaggaggaggaggcggtgg

SEQ ID NO: 39749 - DNA, 20 bp, synthetic construct
  source 1..20: mol_type = other DNA
ctttgaccagatgaacggag

SEQ ID NO: 39750 - DNA, 20 bp, synthetic construct
  source 1..20: mol_type = other DNA
tctggtgacccatctcatgg

SEQ ID NO: 39751 - DNA, 20 bp, synthetic construct
  source 1..20: mol_type = other DNA
ggccagccacgatgagtgag

SEQ ID NO: 39752 - DNA, 20 bp, synthetic construct
  source 1..20: mol_type = other DNA
tacgagaacgagggtgcgtc

SEQ ID NO: 39753 - DNA, 20 bp, synthetic construct
  source 1..20: mol_type = other DNA
ctggtgaggggatggcggca

SEQ ID NO: 39754 - DNA, 20 bp, synthetic construct
  source 1..20: mol_type = other DNA
cagctatcagtaccatagac

SEQ ID NO: 39755 - DNA, 20 bp, synthetic construct
  source 1..20: mol_type = other DNA
tggtgcagtaccggactgac

SEQ ID NO: 39756 - DNA, 20 bp, synthetic construct
  source 1..20: mol_type = other DNA
agggagtttatcaccagccc

SEQ ID NO: 39757 - DNA, 20 bp, synthetic construct
  source 1..20: mol_type = other DNA
agcgaaggctggtaagttct

SEQ ID NO: 39758 - DNA, 20 bp, synthetic construct
  source 1..20: mol_type = other DNA
ccgcgggactggaggtgtcg

SEQ ID NO: 39759 - DNA, 20 bp, synthetic construct
  source 1..20: mol_type = other DNA
tgtgtctgaagcagcccccc

SEQ ID NO: 39760 - DNA, 20 bp, synthetic construct
  source 1..20: mol_type = other DNA
ccaacctttgttcatatact

SEQ ID NO: 39761 - DNA, 20 bp, synthetic construct
  source 1..20: mol_type = other DNA
ccagatcctgccgaggcaga

SEQ ID NO: 39762 - DNA, 20 bp, synthetic construct
  source 1..20: mol_type = other DNA
ccagggcagctgggcagagc

SEQ ID NO: 39763 - DNA, 20 bp, synthetic construct
  source 1..20: mol_type = other DNA
gctggatgcacactgctgcg

SEQ ID NO: 39764 - DNA, 20 bp, synthetic construct
  source 1..20: mol_type = other DNA
gtgagctgtaaacagtactt

SEQ ID NO: 39765 - DNA, 20 bp, synthetic construct
  source 1..20: mol_type = other DNA
ctctccaggcttaacacagc

SEQ ID NO: 39766 - DNA, 20 bp, synthetic construct
  source 1..20: mol_type = other DNA
tccctgcagaagcgtcccga

SEQ ID NO: 39767 - DNA, 20 bp, synthetic construct
  source 1..20: mol_type = other DNA
catcctggtcccctgcgtgc

SEQ ID NO: 39768 - DNA, 20 bp, synthetic construct
  source 1..20: mol_type = other DNA
ctccctccaagttgtccacg

SEQ ID NO: 39769 - DNA, 20 bp, synthetic construct
  source 1..20: mol_type = other DNA
cctcagcctcccaaagtgct

SEQ ID NO: 39770 - DNA, 20 bp, synthetic construct
  source 1..20: mol_type = other DNA
aaaacggggttcaactgtga

SEQ ID NO: 39771 - DNA, 20 bp, synthetic construct
  source 1..20: mol_type = other DNA
gaccctgtccctgccagtgg

SEQ ID NO: 39772 - DNA, 20 bp, synthetic construct
  source 1..20: mol_type = other DNA
cctcagtgtagtaaagatcc

SEQ ID NO: 39773 - DNA, 20 bp, synthetic construct
  source 1..20: mol_type = other DNA
gatggggccgtggcactgct

SEQ ID NO: 39774 - DNA, 20 bp, synthetic construct
  source 1..20: mol_type = other DNA
ggaagaaggccacagtgttc

SEQ ID NO: 39775 - DNA, 20 bp, synthetic construct
  source 1..20: mol_type = other DNA
actcctggcacagaggcagc

SEQ ID NO: 39776 - DNA, 20 bp, synthetic construct
  source 1..20: mol_type = other DNA
cggcacgggctccttcgggc

SEQ ID NO: 39777 - DNA, 20 bp, synthetic construct
  source 1..20: mol_type = other DNA
tccgggcagagacattgcca

SEQ ID NO: 39778 - DNA, 20 bp, synthetic construct
  source 1..20: mol_type = other DNA
ggccgccacggtgcccagca

SEQ ID NO: 39779 - DNA, 20 bp, synthetic construct
  source 1..20: mol_type = other DNA
agtatctcaaggtatgtgcc

SEQ ID NO: 39780 - DNA, 20 bp, synthetic construct
  source 1..20: mol_type = other DNA
tagcgtcagggcctccatgc

SEQ ID NO: 39781 - DNA, 20 bp, synthetic construct
  source 1..20: mol_type = other DNA
ccatgggtgcgggcggggtc

SEQ ID NO: 39782 - DNA, 20 bp, synthetic construct
  source 1..20: mol_type = other DNA
ccactttcggccggaacggt

SEQ ID NO: 39783 - DNA, 20 bp, synthetic construct
  source 1..20: mol_type = other DNA
gccgtggtgggaggacgagt

SEQ ID NO: 39784 - DNA, 20 bp, synthetic construct
  source 1..20: mol_type = other DNA
taaccagtgagcggtagaag

SEQ ID NO: 39785 - DNA, 20 bp, synthetic construct
  source 1..20: mol_type = other DNA
gaaggagcaggctctgcggg

SEQ ID NO: 39786 - DNA, 20 bp, synthetic construct
  source 1..20: mol_type = other DNA
ttgctccaggtaaagggtga

SEQ ID NO: 39787 - DNA, 20 bp, synthetic construct
  source 1..20: mol_type = other DNA
ggaggagaagtgagtcagcg

SEQ ID NO: 39788 - DNA, 20 bp, synthetic construct
  source 1..20: mol_type = other DNA
atcatctttaagaacgggga

SEQ ID NO: 39789 - DNA, 20 bp, synthetic construct
  source 1..20: mol_type = other DNA
caccccactcacctcctcct

SEQ ID NO: 39790 - DNA, 20 bp, synthetic construct
  source 1..20: mol_type = other DNA
cacaatgataaaaacatagg

SEQ ID NO: 39791 - DNA, 20 bp, synthetic construct
  source 1..20: mol_type = other DNA
gccaaaaaaccacctaagga

SEQ ID NO: 39792 - DNA, 20 bp, synthetic construct
  source 1..20: mol_type = other DNA
tttctgaccaagactgggct

SEQ ID NO: 39793 - DNA, 20 bp, synthetic construct
  source 1..20: mol_type = other DNA
ccgcccggggacctgctgga

SEQ ID NO: 39794 - DNA, 20 bp, synthetic construct
  source 1..20: mol_type = other DNA
tgaggaccggcagcagctgc

SEQ ID NO: 39795 - DNA, 20 bp, synthetic construct
  source 1..20: mol_type = other DNA
acaaagaggagagatacctg

SEQ ID NO: 39796 - DNA, 20 bp, synthetic construct
  source 1..20: mol_type = other DNA
cacgctgccaaagttgccct

SEQ ID NO: 39797 - DNA, 20 bp, synthetic construct
  source 1..20: mol_type = other DNA
gctcagaccaggtaggcctg

SEQ ID NO: 39798 - DNA, 20 bp, synthetic construct
  source 1..20: mol_type = other DNA
ccatcaagatcgccctgcgc

SEQ ID NO: 39799 - DNA, 20 bp, synthetic construct
  source 1..20: mol_type = other DNA
cctggaagggccaagggagg

SEQ ID NO: 39800 - DNA, 20 bp, synthetic construct
  source 1..20: mol_type = other DNA
ctgagagtctccgtcatcca

SEQ ID NO: 39801 - DNA, 20 bp, synthetic construct
  source 1..20: mol_type = other DNA
cgctctccacgaggatgttt

SEQ ID NO: 39802 - DNA, 20 bp, synthetic construct
  source 1..20: mol_type = other DNA
cccatgccctccacctctga

SEQ ID NO: 39803 - DNA, 20 bp, synthetic construct
  source 1..20: mol_type = other DNA
gcagctgcccctgctgggag

SEQ ID NO: 39804 - DNA, 20 bp, synthetic construct
  source 1..20: mol_type = other DNA
tgggtagtcctggagagagg

SEQ ID NO: 39805 - DNA, 20 bp, synthetic construct
  source 1..20: mol_type = other DNA
attgcggcaagaaggaagcg

SEQ ID NO: 39806 - DNA, 20 bp, synthetic construct
  source 1..20: mol_type = other DNA
ccaatttgttcgccactgtg

SEQ ID NO: 39807 - DNA, 20 bp, synthetic construct
  source 1..20: mol_type = other DNA
aagggctggaggacctggga

SEQ ID NO: 39808 - DNA, 20 bp, synthetic construct
  source 1..20: mol_type = other DNA
ccagcttaacgcacttcaag

SEQ ID NO: 39809 - DNA, 20 bp, synthetic construct
  source 1..20: mol_type = other DNA
agcacagccaccaacagcaa

SEQ ID NO: 39810 - DNA, 20 bp, synthetic construct
  source 1..20: mol_type = other DNA
tctttagctgtggaatctga

SEQ ID NO: 39811 - DNA, 20 bp, synthetic construct
  source 1..20: mol_type = other DNA
tcagcagcacctctgtcttt

SEQ ID NO: 39812 - DNA, 20 bp, synthetic construct
  source 1..20: mol_type = other DNA
attcaaaggcatagagacac

SEQ ID NO: 39813 - DNA, 20 bp, synthetic construct
  source 1..20: mol_type = other DNA
tcctggaaacaggacacaat

SEQ ID NO: 39814 - DNA, 20 bp, synthetic construct
  source 1..20: mol_type = other DNA
gctcacgaatgtcaagacgc

SEQ ID NO: 39815 - DNA, 20 bp, synthetic construct
  source 1..20: mol_type = other DNA
tgagagattctagaatggca

SEQ ID NO: 39816 - DNA, 20 bp, synthetic construct
  source 1..20: mol_type = other DNA
ggtggaccagctgcgcatgc

SEQ ID NO: 39817 - DNA, 20 bp, synthetic construct
  source 1..20: mol_type = other DNA
tgggatgaggtcatcatcac

SEQ ID NO: 39818 - DNA, 20 bp, synthetic construct
  source 1..20: mol_type = other DNA
ctgcagcgaggtatggactc

SEQ ID NO: 39819 - DNA, 20 bp, synthetic construct
  source 1..20: mol_type = other DNA
gtagattttaagtaaccaag

SEQ ID NO: 39820 - DNA, 20 bp, synthetic construct
  source 1..20: mol_type = other DNA
ggaccaaggtgggcgggacc

SEQ ID NO: 39821 - DNA, 20 bp, synthetic construct
  source 1..20: mol_type = other DNA
tgcagctagcctcataggag

SEQ ID NO: 39822 - DNA, 20 bp, synthetic construct
  source 1..20: mol_type = other DNA
ttccctgctgagcgggcctg

SEQ ID NO: 39823 - DNA, 20 bp, synthetic construct
  source 1..20: mol_type = other DNA
atagggggtcatcctaggca

SEQ ID NO: 39824 - DNA, 20 bp, synthetic construct
  source 1..20: mol_type = other DNA
gactccgcagatctgggtcg

SEQ ID NO: 39825 - DNA, 20 bp, synthetic construct
  source 1..20: mol_type = other DNA
cagctgagtgagtggctctg

SEQ ID NO: 39826 - DNA, 20 bp, synthetic construct
  source 1..20: mol_type = other DNA
gctgtatgatccaaatctga

SEQ ID NO: 39827 - DNA, 20 bp, synthetic construct
  source 1..20: mol_type = other DNA
gctcaatgatctccacatag

SEQ ID NO: 39828 - DNA, 20 bp, synthetic construct
  source 1..20: mol_type = other DNA
atctgcacacaaggagtgtc

SEQ ID NO: 39829 - DNA, 20 bp, synthetic construct
  source 1..20: mol_type = other DNA
gagatctccgaaaggtagtg

SEQ ID NO: 39830 - DNA, 20 bp, synthetic construct
  source 1..20: mol_type = other DNA
aacatacagaatggctgtca

SEQ ID NO: 39831 - DNA, 20 bp, synthetic construct
  source 1..20: mol_type = other DNA
cattcccatcgagaacatcc

SEQ ID NO: 39832 - DNA, 20 bp, synthetic construct
  source 1..20: mol_type = other DNA
gccactgtgcgcctgctggt

SEQ ID NO: 39833 - DNA, 20 bp, synthetic construct
  source 1..20: mol_type = other DNA
gttcatttgacactggccac

SEQ ID NO: 39834 - DNA, 20 bp, synthetic construct
  source 1..20: mol_type = other DNA
tacttactctggaagctctc

SEQ ID NO: 39835 - DNA, 20 bp, synthetic construct
  source 1..20: mol_type = other DNA
ggacttccaggctgagaggc

SEQ ID NO: 39836 - DNA, 20 bp, synthetic construct
  source 1..20: mol_type = other DNA
tctgataatcagagaactgc

SEQ ID NO: 39837 - DNA, 20 bp, synthetic construct
  source 1..20: mol_type = other DNA
gcagcataaaacctggggga

SEQ ID NO: 39838 - DNA, 20 bp, synthetic construct
  source 1..20: mol_type = other DNA
gctcgagggccaactgcgcg

SEQ ID NO: 39839 - DNA, 20 bp, synthetic construct
  source 1..20: mol_type = other DNA
agctatgagccctctcacga

SEQ ID NO: 39840 - DNA, 20 bp, synthetic construct
  source 1..20: mol_type = other DNA
gaccccccagtgcgagccgc

SEQ ID NO: 39841 - DNA, 20 bp, synthetic construct
  source 1..20: mol_type = other DNA
ctccaggtaggccgagccct

SEQ ID NO: 39842 - DNA, 20 bp, synthetic construct
  source 1..20: mol_type = other DNA
tgccacggctactgtgctgt

SEQ ID NO: 39843 - DNA, 20 bp, synthetic construct
  source 1..20: mol_type = other DNA
aaagatgcatatgtaaatgg

SEQ ID NO: 39844 - DNA, 20 bp, synthetic construct
  source 1..20: mol_type = other DNA
aactccatgtacatcggtaa

SEQ ID NO: 39845 - DNA, 20 bp, synthetic construct
  source 1..20: mol_type = other DNA
tcccaaaacaaactggatac

SEQ ID NO: 39846 - DNA, 20 bp, synthetic construct
  source 1..20: mol_type = other DNA
ttgaactgtgaatgcaagag

SEQ ID NO: 39847 - DNA, 20 bp, synthetic construct
  source 1..20: mol_type = other DNA
aggaggaggctgcccggcag

SEQ ID NO: 39848 - DNA, 20 bp, synthetic construct
  source 1..20: mol_type = other DNA
agcattcaagtgctgagctc

SEQ ID NO: 39849 - DNA, 20 bp, synthetic construct
  source 1..20: mol_type = other DNA
ccccgaatgcctaccaggtg

SEQ ID NO: 39850 - DNA, 20 bp, synthetic construct
  source 1..20: mol_type = other DNA
tcttcacacactggattccc

SEQ ID NO: 39851 - DNA, 20 bp, synthetic construct
  source 1..20: mol_type = other DNA
agcagagccgcacagcattc

SEQ ID NO: 39852 - DNA, 20 bp, synthetic construct
  source 1..20: mol_type = other DNA
gtctgacctagaatgagaga

SEQ ID NO: 39853 - DNA, 20 bp, synthetic construct
  source 1..20: mol_type = other DNA
gtaccgatttatctatatgg

SEQ ID NO: 39854 - DNA, 20 bp, synthetic construct
  source 1..20: mol_type = other DNA
aggaggaggaacaggaccaa

SEQ ID NO: 39855 - DNA, 20 bp, synthetic construct
  source 1..20: mol_type = other DNA
tccacgtggccgcgttgcgt

SEQ ID NO: 39856 - DNA, 20 bp, synthetic construct
  source 1..20: mol_type = other DNA
ggaagggcttatgcccagtg

SEQ ID NO: 39857 - DNA, 20 bp, synthetic construct
  source 1..20: mol_type = other DNA
ggtggcggcggcggcggagg

SEQ ID NO: 39858 - DNA, 20 bp, synthetic construct
  source 1..20: mol_type = other DNA
ctcacgcaggttgatggcat

SEQ ID NO: 39859 - DNA, 20 bp, synthetic construct
  source 1..20: mol_type = other DNA
caggtagtgtttctgcaggt

SEQ ID NO: 39860 - DNA, 20 bp, synthetic construct
  source 1..20: mol_type = other DNA
gtctctcccaccagatctgg

SEQ ID NO: 39861 - DNA, 20 bp, synthetic construct
  source 1..20: mol_type = other DNA
acaggatgttatctagcttc

SEQ ID NO: 39862 - DNA, 20 bp, synthetic construct
  source 1..20: mol_type = other DNA
gccgcagaagtttctgagcg

SEQ ID NO: 39863 - DNA, 20 bp, synthetic construct
  source 1..20: mol_type = other DNA
tgtgttaaccaaagccagcc

SEQ ID NO: 39864 - DNA, 20 bp, synthetic construct
  source 1..20: mol_type = other DNA
ccctttcacagaccatgacc

SEQ ID NO: 39865 - DNA, 20 bp, synthetic construct
  source 1..20: mol_type = other DNA
cgctggaaagcaagcagctc

SEQ ID NO: 39866 - DNA, 20 bp, synthetic construct
  source 1..20: mol_type = other DNA
cctgtggttgtcatcgtcca

SEQ ID NO: 39867 - DNA, 20 bp, synthetic construct
  source 1..20: mol_type = other DNA
gcccaccagcaggcgtacgg

SEQ ID NO: 39868 - DNA, 20 bp, synthetic construct
  source 1..20: mol_type = other DNA
aggagaagcgaagggtgcgc

SEQ ID NO: 39869 - DNA, 20 bp, synthetic construct
  source 1..20: mol_type = other DNA
ccaccaggagaggggtctgc

SEQ ID NO: 39870 - DNA, 20 bp, synthetic construct
  source 1..20: mol_type = other DNA
cacacacattaccatgaacc

SEQ ID NO: 39871 - DNA, 20 bp, synthetic construct
  source 1..20: mol_type = other DNA
cagggcccagcaggagcgca

SEQ ID NO: 39872 - DNA, 20 bp, synthetic construct
  source 1..20: mol_type = other DNA
gggaggcccacacctcagtg

SEQ ID NO: 39873 - DNA, 20 bp, synthetic construct
  source 1..20: mol_type = other DNA
ggtgccggaggtcaaatgca

SEQ ID NO: 39874 - DNA, 20 bp, synthetic construct
  source 1..20: mol_type = other DNA
ccgtgtggccgcagcccggg

SEQ ID NO: 39875 - DNA, 20 bp, synthetic construct
  source 1..20: mol_type = other DNA
attgcagagaatggaaccac

SEQ ID NO: 39876 - DNA, 20 bp, synthetic construct
  source 1..20: mol_type = other DNA
agtcctgtaccttgatcaca

SEQ ID NO: 39877 - DNA, 20 bp, synthetic construct
  source 1..20: mol_type = other DNA
ggtcaacttacccaggggat

SEQ ID NO: 39878 - DNA, 20 bp, synthetic construct
  source 1..20: mol_type = other DNA
tgttggccttggggttcagg

SEQ ID NO: 39879 - DNA, 20 bp, synthetic construct
  source 1..20: mol_type = other DNA
cctcttcagtgactgcaggg

SEQ ID NO: 39880 - DNA, 20 bp, synthetic construct
  source 1..20: mol_type = other DNA
cagcctcttgatggtctttg

SEQ ID NO: 39881 - DNA, 20 bp, synthetic construct
  source 1..20: mol_type = other DNA
aggatgggttggagctatcc

SEQ ID NO: 39882 - DNA, 20 bp, synthetic construct
  source 1..20: mol_type = other DNA
aaagaaagatgtggtcttga

SEQ ID NO: 39883 - DNA, 20 bp, synthetic construct
  source 1..20: mol_type = other DNA
ctcaaagaggtactcaaatg

SEQ ID NO: 39884 - DNA, 20 bp, synthetic construct
  source 1..20: mol_type = other DNA
gtctgtggacaagacatcct

SEQ ID NO: 39885 - DNA, 20 bp, synthetic construct
  source 1..20: mol_type = other DNA
cagttccttcaccctttacc

SEQ ID NO: 39886 - DNA, 20 bp, synthetic construct
  source 1..20: mol_type = other DNA
caaccgcgagaagatgaccc

SEQ ID NO: 39887 - DNA, 20 bp, synthetic construct
  source 1..20: mol_type = other DNA
cggctcacaatgaaagacat

SEQ ID NO: 39888 - DNA, 20 bp, synthetic construct
  source 1..20: mol_type = other DNA
tccggcactacttggcccag

SEQ ID NO: 39889 - DNA, 20 bp, synthetic construct
  source 1..20: mol_type = other DNA
tttcaccttcaggtcatgcg

SEQ ID NO: 39890 - DNA, 20 bp, synthetic construct
  source 1..20: mol_type = other DNA
gctggccgagtaggagaact

SEQ ID NO: 39891 - DNA, 20 bp, synthetic construct
  source 1..20: mol_type = other DNA
cccagtgtgagtgccggtgc

SEQ ID NO: 39892 - DNA, 20 bp, synthetic construct
  source 1..20: mol_type = other DNA
atacaccgagatatcaaggc

SEQ ID NO: 39893 - DNA, 20 bp, synthetic construct
  source 1..20: mol_type = other DNA
tgctcgacctgagagaccca

SEQ ID NO: 39894 - DNA, 20 bp, synthetic construct
  source 1..20: mol_type = other DNA
cagcctggcaggggaaggga

SEQ ID NO: 39895 - DNA, 20 bp, synthetic construct
  source 1..20: mol_type = other DNA
cggtcagggccacggtgcag

SEQ ID NO: 39896 - DNA, 20 bp, synthetic construct
  source 1..20: mol_type = other DNA
ctcaccattgtatgtggagg

SEQ ID NO: 39897 - DNA, 20 bp, synthetic construct
  source 1..20: mol_type = other DNA
tggctccctgtggggcaacg

SEQ ID NO: 39898 - DNA, 20 bp, synthetic construct
  source 1..20: mol_type = other DNA
ctagaagagaaacaaccctt

SEQ ID NO: 39899 - DNA, 20 bp, synthetic construct
  source 1..20: mol_type = other DNA
gctgagggcacagcacggcc

SEQ ID NO: 39900 - DNA, 20 bp, synthetic construct
  source 1..20: mol_type = other DNA
tccacagcatgtccagctgg

SEQ ID NO: 39901 - DNA, 20 bp, synthetic construct
  source 1..20: mol_type = other DNA
attacaccagtgagcccgac

SEQ ID NO: 39902 - DNA, 20 bp, synthetic construct
  source 1..20: mol_type = other DNA
aggcccaaccgctcgggagc

SEQ ID NO: 39903 - DNA, 20 bp, synthetic construct
  source 1..20: mol_type = other DNA
cagacggtccagcatcaggt

SEQ ID NO: 39904 - DNA, 20 bp, synthetic construct
  source 1..20: mol_type = other DNA
cctcagtgaccgaaagaacc

SEQ ID NO: 39905 - DNA, 20 bp, synthetic construct
  source 1..20: mol_type = other DNA
atgccacggctactgtgctg

SEQ ID NO: 39906 - DNA, 20 bp, synthetic construct
  source 1..20: mol_type = other DNA
ctcacagctgatcacccagc

SEQ ID NO: 39907 - DNA, 20 bp, synthetic construct
  source 1..20: mol_type = other DNA
tggtgagatctacctgcagg

SEQ ID NO: 39908 - DNA, 20 bp, synthetic construct
  source 1..20: mol_type = other DNA
ggagtggcagccaacaaacg

SEQ ID NO: 39909 - DNA, 20 bp, synthetic construct
  source 1..20: mol_type = other DNA
aaagtccagactgtggggga

SEQ ID NO: 39910 - DNA, 20 bp, synthetic construct
  source 1..20: mol_type = other DNA
ggaacagcgcctccggacac

SEQ ID NO: 39911 - DNA, 20 bp, synthetic construct
  source 1..20: mol_type = other DNA
attctggagcataccttgaa

SEQ ID NO: 39912 - DNA, 20 bp, synthetic construct
  source 1..20: mol_type = other DNA
tgctgtatgatccaaatctg

SEQ ID NO: 39913 - DNA, 20 bp, synthetic construct
  source 1..20: mol_type = other DNA
aaacatccagctgtgaccac

SEQ ID NO: 39914 - DNA, 20 bp, synthetic construct
  source 1..20: mol_type = other DNA
agccccaccagggcgagcag

SEQ ID NO: 39915 - DNA, 20 bp, synthetic construct
  source 1..20: mol_type = other DNA
ttgcgaagcggctcgtcttg

SEQ ID NO: 39916 - DNA, 20 bp, synthetic construct
  source 1..20: mol_type = other DNA
ctcaaactcattacagcgca

SEQ ID NO: 39917 - DNA, 20 bp, synthetic construct
  source 1..20: mol_type = other DNA
caaacgaatggtcgaggagc

SEQ ID NO: 39918 - DNA, 20 bp, synthetic construct
  source 1..20: mol_type = other DNA
cctacactctcctcctcggt

SEQ ID NO: 39919 - DNA, 20 bp, synthetic construct
  source 1..20: mol_type = other DNA
atttggcatctgacagatgt

SEQ ID NO: 39920 - DNA, 20 bp, synthetic construct
  source 1..20: mol_type = other DNA
cgcttcttaccttcaccaga

SEQ ID NO: 39921 - DNA, 20 bp, synthetic construct
  source 1..20: mol_type = other DNA
tttgcacagcgctgagcagt

SEQ ID NO: 39922 - DNA, 20 bp, synthetic construct
  source 1..20: mol_type = other DNA
ggcactaaccttgggattgt

SEQ ID NO: 39923 - DNA, 20 bp, synthetic construct
  source 1..20: mol_type = other DNA
ccacgacagcactatcccta

SEQ ID NO: 39924 - DNA, 20 bp, synthetic construct
  source 1..20: mol_type = other DNA
cgacctcagtgggaggtaga

SEQ ID NO: 39925 - DNA, 20 bp, synthetic construct
  source 1..20: mol_type = other DNA
agccctcgattccagcggga

SEQ ID NO: 39926 - DNA, 20 bp, synthetic construct
  source 1..20: mol_type = other DNA
tcagaggcaaagtggaggtg

SEQ ID NO: 39927 - DNA, 20 bp, synthetic construct
  source 1..20: mol_type = other DNA
ggcctcctgcgtcaatgcca

SEQ ID NO: 39928 - DNA, 20 bp, synthetic construct
  source 1..20: mol_type = other DNA
agagtccaaggcagagaagg

SEQ ID NO: 39929 - DNA, 20 bp, synthetic construct
  source 1..20: mol_type = other DNA
tagccgtggcattgtggtcc

SEQ ID NO: 39930 - DNA, 20 bp, synthetic construct
  source 1..20: mol_type = other DNA
cgctctttcagagtatacac

SEQ ID NO: 39931 - DNA, 20 bp, synthetic construct
  source 1..20: mol_type = other DNA
ctccttaccctgtaccactg

SEQ ID NO: 39932 - DNA, 20 bp, synthetic construct
  source 1..20: mol_type = other DNA
cgagggagagcagccccacc

SEQ ID NO: 39933 - DNA, 20 bp, synthetic construct
  source 1..20: mol_type = other DNA
ctgccaggagaccagacttg

SEQ ID NO: 39934 - DNA, 20 bp, synthetic construct
  source 1..20: mol_type = other DNA
caccctacgccccggagccc

SEQ ID NO: 39935 - DNA, 20 bp, synthetic construct
  source 1..20: mol_type = other DNA
ctccatctcagcctgcatgg

SEQ ID NO: 39936 - DNA, 20 bp, synthetic construct
  source 1..20: mol_type = other DNA
cagcttcatgctgtcgggca

SEQ ID NO: 39937 - DNA, 20 bp, synthetic construct
  source 1..20: mol_type = other DNA
tgagtgtggctgctgacaag

SEQ ID NO: 39938 - DNA, 20 bp, synthetic construct
  source 1..20: mol_type = other DNA
gggtcgagacaacactcgca

SEQ ID NO: 39939 - DNA, 20 bp, synthetic construct
  source 1..20: mol_type = other DNA
cagcaaccagacggacaagc

SEQ ID NO: 39940 - DNA, 20 bp, synthetic construct
  source 1..20: mol_type = other DNA
cacagccccacaatgctcct

SEQ ID NO: 39941 - DNA, 20 bp, synthetic construct
  source 1..20: mol_type = other DNA
catgctccttgatggtgtgc

SEQ ID NO: 39942 - DNA, 20 bp, synthetic construct
  source 1..20: mol_type = other DNA
caggcacacggccaccaggt

SEQ ID NO: 39943 - DNA, 20 bp, synthetic construct
  source 1..20: mol_type = other DNA
gagctgcagcaggcgctcga

SEQ ID NO: 39944 - DNA, 20 bp, synthetic construct
  source 1..20: mol_type = other DNA
ccgcccggatcgatgaatgt

SEQ ID NO: 39945 - DNA, 20 bp, synthetic construct
  source 1..20: mol_type = other DNA
aagcagggtgtcttgaccca

SEQ ID NO: 39946 - DNA, 20 bp, synthetic construct
  source 1..20: mol_type = other DNA
ccaagaaggcggtgggtccc

SEQ ID NO: 39947 - DNA, 20 bp, synthetic construct
  source 1..20: mol_type = other DNA
cacctcctcgatatctggca

SEQ ID NO: 39948 - DNA, 20 bp, synthetic construct
  source 1..20: mol_type = other DNA
tcaagaaggaccccaagcag

SEQ ID NO: 39949 - DNA, 20 bp, synthetic construct
  source 1..20: mol_type = other DNA
gtacacatcccacagcccag

SEQ ID NO: 39950 - DNA, 20 bp, synthetic construct
  source 1..20: mol_type = other DNA
cgtagtgccggttaaccagc

SEQ ID NO: 39951 - DNA, 20 bp, synthetic construct
  source 1..20: mol_type = other DNA
acctggtctagagcagcgag

SEQ ID NO: 39952 - DNA, 20 bp, synthetic construct
  source 1..20: mol_type = other DNA
gcaggcccagcagcagctgg

SEQ ID NO: 39953 - DNA, 20 bp, synthetic construct
  source 1..20: mol_type = other DNA
accttctgccttcacaggtg

SEQ ID NO: 39954 - DNA, 20 bp, synthetic construct
  source 1..20: mol_type = other DNA
tcacgcaggttgatggcatg

SEQ ID NO: 39955 - DNA, 20 bp, synthetic construct
  source 1..20: mol_type = other DNA
ccttcattggctacaaggag

SEQ ID NO: 39956 - DNA, 20 bp, synthetic construct
  source 1..20: mol_type = other DNA
ctgggaatcttggaatccag

SEQ ID NO: 39957 - DNA, 20 bp, synthetic construct
  source 1..20: mol_type = other DNA
ctccagtccgacggccagcg

SEQ ID NO: 39958 - DNA, 20 bp, synthetic construct
  source 1..20: mol_type = other DNA
ccccaagttcccgaacgctg

SEQ ID NO: 39959 - DNA, 20 bp, synthetic construct
  source 1..20: mol_type = other DNA
gcgccagctggcccaccgat

SEQ ID NO: 39960 - DNA, 20 bp, synthetic construct
  source 1..20: mol_type = other DNA
tgaaagtcccaatgatgacc

SEQ ID NO: 39961 - DNA, 20 bp, synthetic construct
  source 1..20: mol_type = other DNA
aagtaaccgcagttctctgt

SEQ ID NO: 39962 - DNA, 20 bp, synthetic construct
  source 1..20: mol_type = other DNA
cactcggcagatcttgagct

SEQ ID NO: 39963 - DNA, 20 bp, synthetic construct
  source 1..20: mol_type = other DNA
ggggaaactgtactgcagcc

SEQ ID NO: 39964 - DNA, 20 bp, synthetic construct
  source 1..20: mol_type = other DNA
gggctccaggctgttcgctt

SEQ ID NO: 39965 - DNA, 20 bp, synthetic construct
  source 1..20: mol_type = other DNA
gtcaggaagaaatctagatt

SEQ ID NO: 39966 - DNA, 20 bp, synthetic construct
  source 1..20: mol_type = other DNA
ccggggctgtcgccatgagg

SEQ ID NO: 39967 - DNA, 20 bp, synthetic construct
  source 1..20: mol_type = other DNA
tttgatgaggtgctcggcgc

SEQ ID NO: 39968 - DNA, 20 bp, synthetic construct
  source 1..20: mol_type = other DNA
gagcaaagtaggcatgtgca

SEQ ID NO: 39969 - DNA, 20 bp, synthetic construct
  source 1..20: mol_type = other DNA
gatccagggcctccctgggt

SEQ ID NO: 39970 - DNA, 20 bp, synthetic construct
  source 1..20: mol_type = other DNA
ctccagccatgcacacgccg

SEQ ID NO: 39971 - DNA, 20 bp, synthetic construct
  source 1..20: mol_type = other DNA
tgaggaccagcagcataagc

SEQ ID NO: 39972 - DNA, 20 bp, synthetic construct
  source 1..20: mol_type = other DNA
ctcatcattggcatatgtgg

SEQ ID NO: 39973 - DNA, 20 bp, synthetic construct
  source 1..20: mol_type = other DNA
ctcctggcaacctgctggga

SEQ ID NO: 39974 - DNA, 20 bp, synthetic construct
  source 1..20: mol_type = other DNA
ggtactcaccctccctggag

SEQ ID NO: 39975 - DNA, 20 bp, synthetic construct
  source 1..20: mol_type = other DNA
cagctgctgcatcttctgcc

SEQ ID NO: 39976 - DNA, 20 bp, synthetic construct
  source 1..20: mol_type = other DNA
agttccttcttgactaccag

SEQ ID NO: 39977 - DNA, 20 bp, synthetic construct
  source 1..20: mol_type = other DNA
cgaagggcttctcaccggtg

SEQ ID NO: 39978 - DNA, 20 bp, synthetic construct
  source 1..20: mol_type = other DNA
agcccagaatatctccaaga

SEQ ID NO: 39979 - DNA, 20 bp, synthetic construct
  source 1..20: mol_type = other DNA
gtggccagctgtgggcagga

SEQ ID NO: 39980 - DNA, 20 bp, synthetic construct
  source 1..20: mol_type = other DNA
gccatggagtactgccaagg

SEQ ID NO: 39981 - DNA, 20 bp, synthetic construct
  source 1..20: mol_type = other DNA
acccctgtcttcaagaccag

SEQ ID NO: 39982 - DNA, 20 bp, synthetic construct
  source 1..20: mol_type = other DNA
gaagatcttgcactcattga

SEQ ID NO: 39983 - DNA, 20 bp, synthetic construct
  source 1..20: mol_type = other DNA
gaagaccttccaggtcaagc

SEQ ID NO: 39984 - DNA, 20 bp, synthetic construct
  source 1..20: mol_type = other DNA
ccccagaagaattcctctga

SEQ ID NO: 39985 - DNA, 20 bp, synthetic construct
  source 1..20: mol_type = other DNA
gaactccatgtgccgcccta

SEQ ID NO: 39986 - DNA, 20 bp, synthetic construct
  source 1..20: mol_type = other DNA
cctggacacagacagtgagg

SEQ ID NO: 39987 - DNA, 20 bp, synthetic construct
  source 1..20: mol_type = other DNA
tcttgtgcggaatctacagt

SEQ ID NO: 39988 - DNA, 20 bp, synthetic construct
  source 1..20: mol_type = other DNA
atgcctgactatctggagga

SEQ ID NO: 39989 - DNA, 20 bp, synthetic construct
  source 1..20: mol_type = other DNA
ggcccgggtggtgcgtgtcc

SEQ ID NO: 39990 - DNA, 20 bp, synthetic construct
  source 1..20: mol_type = other DNA
gggcttgtacaaccgaaatc

SEQ ID NO: 39991 - DNA, 20 bp, synthetic construct
  source 1..20: mol_type = other DNA
gcccggccacagtaaatgac

SEQ ID NO: 39992 - DNA, 20 bp, synthetic construct
  source 1..20: mol_type = other DNA
ctcggcccaggacagcgccg

SEQ ID NO: 39993 - DNA, 20 bp, synthetic construct
  source 1..20: mol_type = other DNA
ctcgtcgtcgacaacggctc

SEQ ID NO: 39994 - DNA, 20 bp, synthetic construct
  source 1..20: mol_type = other DNA
gggcatcatctttaagaacg

SEQ ID NO: 39995 - DNA, 20 bp, synthetic construct
  source 1..20: mol_type = other DNA
gtttgatgatgaagacctgg

SEQ ID NO: 39996 - DNA, 20 bp, synthetic construct
  source 1..20: mol_type = other DNA
tgaaggtaacacaaaccgag

SEQ ID NO: 39997 - DNA, 20 bp, synthetic construct
  source 1..20: mol_type = other DNA
cactcacatgtacttgccac

SEQ ID NO: 39998 - DNA, 20 bp, synthetic construct
  source 1..20: mol_type = other DNA
gaagcctatctgaggggctg

SEQ ID NO: 39999 - DNA, 20 bp, synthetic construct
  source 1..20: mol_type = other DNA
gccccgggggccgctccatg

SEQ ID NO: 40000 - DNA, 20 bp, synthetic construct
  source 1..20: mol_type = other DNA
cactgctgcgtggaggtgag

SEQ ID NO: 40001 - DNA, 20 bp, synthetic construct
  source 1..20: mol_type = other DNA
ggaacacaatggccacttgt

SEQ ID NO: 40002 - DNA, 20 bp, synthetic construct
  source 1..20: mol_type = other DNA
gtgccgggcatctgcacaca

SEQ ID NO: 40003 - DNA, 20 bp, synthetic construct
  source 1..20: mol_type = other DNA
agagccttacctgaaggagc

SEQ ID NO: 40004 - DNA, 20 bp, synthetic construct
  source 1..20: mol_type = other DNA
ggcacttggaggcggcgatg

SEQ ID NO: 40005 - DNA, 20 bp, synthetic construct
  source 1..20: mol_type = other DNA
ataaacaggtacccagggct

SEQ ID NO: 40006 - DNA, 20 bp, synthetic construct
  source 1..20: mol_type = other DNA
actggcatggcatgaatcct

SEQ ID NO: 40007 - DNA, 20 bp, synthetic construct
  source 1..20: mol_type = other DNA
gcagccattgggcccatacg

SEQ ID NO: 40008 - DNA, 20 bp, synthetic construct
  source 1..20: mol_type = other DNA
ttcacgcaccttccggacca

SEQ ID NO: 40009 - DNA, 20 bp, synthetic construct
  source 1..20: mol_type = other DNA
ctgagagatggagagaggtg

SEQ ID NO: 40010 - DNA, 20 bp, synthetic construct
  source 1..20: mol_type = other DNA
gtcctccagatagtcaggca

SEQ ID NO: 40011 - DNA, 20 bp, synthetic construct
  source 1..20: mol_type = other DNA
gcagtcacagttatgattgg

SEQ ID NO: 40012 - DNA, 20 bp, synthetic construct
  source 1..20: mol_type = other DNA
taccagcatcgggtgaggcg

SEQ ID NO: 40013 - DNA, 20 bp, synthetic construct
  source 1..20: mol_type = other DNA
actccttgtgtgcagatgcc

SEQ ID NO: 40014 - DNA, 20 bp, synthetic construct
  source 1..20: mol_type = other DNA
cggatggcctgcgtgggaaa

SEQ ID NO: 40015 - DNA, 20 bp, synthetic construct
  source 1..20: mol_type = other DNA
aactggactccgagggaaag

SEQ ID NO: 40016 - DNA, 20 bp, synthetic construct
  source 1..20: mol_type = other DNA
cctccgcccagctctctgtc

SEQ ID NO: 40017 - DNA, 20 bp, synthetic construct
  source 1..20: mol_type = other DNA
atgtgtctggatgtgtgtga

SEQ ID NO: 40018 - DNA, 20 bp, synthetic construct
  source 1..20: mol_type = other DNA
ccaactcactgtggacttgg

SEQ ID NO: 40019 - DNA, 20 bp, synthetic construct
  source 1..20: mol_type = other DNA
catcacaccgcagcagggcc

SEQ ID NO: 40020 - DNA, 20 bp, synthetic construct
  source 1..20: mol_type = other DNA
tgggaatgctgtagagaggc

SEQ ID NO: 40021 - DNA, 20 bp, synthetic construct
  source 1..20: mol_type = other DNA
caggtcggcccaggcccagg

SEQ ID NO: 40022 - DNA, 20 bp, synthetic construct
  source 1..20: mol_type = other DNA
ctggctgcagactgagagtg

SEQ ID NO: 40023 - DNA, 20 bp, synthetic construct
  source 1..20: mol_type = other DNA
tcacagaacatttaccacca

SEQ ID NO: 40024 - DNA, 20 bp, synthetic construct
  source 1..20: mol_type = other DNA
tcagggtactccatcagcat

SEQ ID NO: 40025 - DNA, 20 bp, synthetic construct
  source 1..20: mol_type = other DNA
gcctacctgaataggagtgt

SEQ ID NO: 40026 - DNA, 20 bp, synthetic construct
  source 1..20: mol_type = other DNA
gggggcatgggcggcagcgg

SEQ ID NO: 40027 - DNA, 20 bp, synthetic construct
  source 1..20: mol_type = other DNA
acagctgggcaaggtaaggt

SEQ ID NO: 40028 - DNA, 20 bp, synthetic construct
  source 1..20: mol_type = other DNA
ccacatgctcagtggccccg

SEQ ID NO: 40029 - DNA, 20 bp, synthetic construct
  source 1..20: mol_type = other DNA
cgagatgccggtacgacact

SEQ ID NO: 40030 - DNA, 20 bp, synthetic construct
  source 1..20: mol_type = other DNA
gttccccattacagccttgc

SEQ ID NO: 40031 - DNA, 20 bp, synthetic construct
  source 1..20: mol_type = other DNA
ctgacggcgcaggacgagaa

SEQ ID NO: 40032 - DNA, 20 bp, synthetic construct
  source 1..20: mol_type = other DNA
caataatacttacaaatgct

SEQ ID NO: 40033 - DNA, 20 bp, synthetic construct
  source 1..20: mol_type = other DNA
tggctctctgagaacattcc

SEQ ID NO: 40034 - DNA, 20 bp, synthetic construct
  source 1..20: mol_type = other DNA
tcccaccctgaagaacctag

SEQ ID NO: 40035 - DNA, 20 bp, synthetic construct
  source 1..20: mol_type = other DNA
gctggagggtgcaattgaga

SEQ ID NO: 40036 - DNA, 20 bp, synthetic construct
  source 1..20: mol_type = other DNA
gcatcaggacctcttctcct

SEQ ID NO: 40037 - DNA, 20 bp, synthetic construct
  source 1..20: mol_type = other DNA
gtgagcataagggcaaggtg

SEQ ID NO: 40038 - DNA, 20 bp, synthetic construct
  source 1..20: mol_type = other DNA
accccatcgtgctcttcatc

SEQ ID NO: 40039 - DNA, 20 bp, synthetic construct
  source 1..20: mol_type = other DNA
agcagctgccggcccccaag

SEQ ID NO: 40040 - DNA, 20 bp, synthetic construct
  source 1..20: mol_type = other DNA
cggacctcggctctgctctc

SEQ ID NO: 40041 - DNA, 20 bp, synthetic construct
  source 1..20: mol_type = other DNA
taccttgagcaagaggttga

SEQ ID NO: 40042 - DNA, 20 bp, synthetic construct
  source 1..20: mol_type = other DNA
ggaaaaggtggggaatacat

SEQ ID NO: 40043 - DNA, 20 bp, synthetic construct
  source 1..20: mol_type = other DNA
agcagcacggggtgctcctc

SEQ ID NO: 40044 - DNA, 20 bp, synthetic construct
  source 1..20: mol_type = other DNA
ccacccactggcgcagcaag

SEQ ID NO: 40045 - DNA, 20 bp, synthetic construct
  source 1..20: mol_type = other DNA
gagccctcggctcaaacctg

SEQ ID NO: 40046 - DNA, 20 bp, synthetic construct
  source 1..20: mol_type = other DNA
cccgaagcctgcagggcaca

SEQ ID NO: 40047 - DNA, 20 bp, synthetic construct
  source 1..20: mol_type = other DNA
accagcaggatgggcacatc

SEQ ID NO: 40048 - DNA, 20 bp, synthetic construct
  source 1..20: mol_type = other DNA
ctttccgggggcttacggta

SEQ ID NO: 40049 - DNA, 20 bp, synthetic construct
  source 1..20: mol_type = other DNA
gcccagctgctgccggcggg

SEQ ID NO: 40050 - DNA, 20 bp, synthetic construct
  source 1..20: mol_type = other DNA
gaagaagtccaagaaggcgg

SEQ ID NO: 40051 - DNA, 20 bp, synthetic construct
  source 1..20: mol_type = other DNA
agcttccccgattgccacgt

SEQ ID NO: 40052 - DNA, 20 bp, synthetic construct
  source 1..20: mol_type = other DNA
agagaaaccataccaatgca

SEQ ID NO: 40053 - DNA, 20 bp, synthetic construct
  source 1..20: mol_type = other DNA
gcaggaactgcacaagctca

SEQ ID NO: 40054 - DNA, 20 bp, synthetic construct
  source 1..20: mol_type = other DNA
tccctctgggacaagtgctg

SEQ ID NO: 40055 - DNA, 20 bp, synthetic construct
  source 1..20: mol_type = other DNA
tccacaggtgaggtccctgc

SEQ ID NO: 40056 - DNA, 20 bp, synthetic construct
  source 1..20: mol_type = other DNA
ctttgcaggcatgaacaacc

SEQ ID NO: 40057 - DNA, 20 bp, synthetic construct
  source 1..20: mol_type = other DNA
ggctctgaagaaggtgctga

SEQ ID NO: 40058 - DNA, 20 bp, synthetic construct
  source 1..20: mol_type = other DNA
tgagctgtgctggacgctga

SEQ ID NO: 40059 - DNA, 20 bp, synthetic construct
  source 1..20: mol_type = other DNA
tccttcacgagttcctgggg

SEQ ID NO: 40060 - DNA, 20 bp, synthetic construct
  source 1..20: mol_type = other DNA
cagcgctgaggtctacacgg

SEQ ID NO: 40061 - DNA, 20 bp, synthetic construct
  source 1..20: mol_type = other DNA
caagtgcgaggggcgctccg

SEQ ID NO: 40062 - DNA, 20 bp, synthetic construct
  source 1..20: mol_type = other DNA
gaagtaaaagctgtgaggag

SEQ ID NO: 40063 - DNA, 20 bp, synthetic construct
  source 1..20: mol_type = other DNA
ggagctcaccatggcgaagc

SEQ ID NO: 40064 - DNA, 20 bp, synthetic construct
  source 1..20: mol_type = other DNA
ccaccaggttgggcaggacc

SEQ ID NO: 40065 - DNA, 20 bp, synthetic construct
  source 1..20: mol_type = other DNA
agagttttataaaaaacaac

SEQ ID NO: 40066 - DNA, 20 bp, synthetic construct
  source 1..20: mol_type = other DNA
tgagaagtccatgtccgcaa

SEQ ID NO: 40067 - DNA, 20 bp, synthetic construct
  source 1..20: mol_type = other DNA
cttatctaccaaattctccg

SEQ ID NO: 40068 - DNA, 20 bp, synthetic construct
  source 1..20: mol_type = other DNA
cagccttggattggcagtga

SEQ ID NO: 40069 - DNA, 20 bp, synthetic construct
  source 1..20: mol_type = other DNA
taggagatctccacaggggc

SEQ ID NO: 40070 - DNA, 20 bp, synthetic construct
  source 1..20: mol_type = other DNA
ctacagcagctgtgtactct

SEQ ID NO: 40071 - DNA, 20 bp, synthetic construct
  source 1..20: mol_type = other DNA
cggccctgaagctgttgctg

SEQ ID NO: 40072 - DNA, 20 bp, synthetic construct
  source 1..20: mol_type = other DNA
cgccgtcctatgagaacgtg

SEQ ID NO: 40073 - DNA, 20 bp, synthetic construct
  source 1..20: mol_type = other DNA
gcacacatcatggccagatg

SEQ ID NO: 40074 - DNA, 20 bp, synthetic construct
  source 1..20: mol_type = other DNA
agccacttctggtgggagaa

SEQ ID NO: 40075 - DNA, 20 bp, synthetic construct
  source 1..20: mol_type = other DNA
cagccccgctgtgttaagcc

SEQ ID NO: 40076 - DNA, 20 bp, synthetic construct
  source 1..20: mol_type = other DNA
accattcagcatgagaacct

SEQ ID NO: 40077 - DNA, 20 bp, synthetic construct
  source 1..20: mol_type = other DNA
aatgtggcgtgtgggatctc

SEQ ID NO: 40078 - DNA, 20 bp, synthetic construct
  source 1..20: mol_type = other DNA
gcagtgcagaagggcagtat

SEQ ID NO: 40079 - DNA, 20 bp, synthetic construct
  source 1..20: mol_type = other DNA
tccactcccggcaagatgct

SEQ ID NO: 40080 - DNA, 20 bp, synthetic construct
  source 1..20: mol_type = other DNA
agcaaagtaggcatgtgcaa

SEQ ID NO: 40081 - DNA, 20 bp, synthetic construct
  source 1..20: mol_type = other DNA
gactccaaagtcaggccatg

SEQ ID NO: 40082 - DNA, 20 bp, synthetic construct
  source 1..20: mol_type = other DNA
tacctaccaagaactggaac

SEQ ID NO: 40083 - DNA, 20 bp, synthetic construct
  source 1..20: mol_type = other DNA
gcacagagtaatgagtcccc

SEQ ID NO: 40084 - DNA, 20 bp, synthetic construct
  source 1..20: mol_type = other DNA
aaaaggaatcagaggcaaag

SEQ ID NO: 40085 - DNA, 20 bp, synthetic construct
  source 1..20: mol_type = other DNA
ggtccagcaggccatgatgg

SEQ ID NO: 40086 - DNA, 20 bp, synthetic construct
  source 1..20: mol_type = other DNA
cccagaagaattcctctgaa

SEQ ID NO: 40087 - DNA, 20 bp, synthetic construct
  source 1..20: mol_type = other DNA
ccacactgtgcccatctacg

SEQ ID NO: 40088 - DNA, 20 bp, synthetic construct
  source 1..20: mol_type = other DNA
tctgcttcaggtccttgtgt

SEQ ID NO: 40089 - DNA, 20 bp, synthetic construct
  source 1..20: mol_type = other DNA
tgagcatgaactcctgcacc

SEQ ID NO: 40090 - DNA, 20 bp, synthetic construct
  source 1..20: mol_type = other DNA
agtttacctggaggtaaagg

SEQ ID NO: 40091 - DNA, 20 bp, synthetic construct
  source 1..20: mol_type = other DNA
tcaccaaaatcttgtttcct

SEQ ID NO: 40092 - DNA, 20 bp, synthetic construct
  source 1..20: mol_type = other DNA
ttacctgcaccttcatctca

SEQ ID NO: 40093 - DNA, 20 bp, synthetic construct
  source 1..20: mol_type = other DNA
ttcaaagccaccagtagtag

SEQ ID NO: 40094 - DNA, 20 bp, synthetic construct
  source 1..20: mol_type = other DNA
cctgtgctgaatcaggtggc

SEQ ID NO: 40095 - DNA, 20 bp, synthetic construct
  source 1..20: mol_type = other DNA
agagcagcaccacctcagct

SEQ ID NO: 40096 - DNA, 20 bp, synthetic construct
  source 1..20: mol_type = other DNA
ggtgtatgttcctgcagtcc

SEQ ID NO: 40097 - DNA, 20 bp, synthetic construct
  source 1..20: mol_type = other DNA
tgccagcagctgcccatccc

SEQ ID NO: 40098 - DNA, 20 bp, synthetic construct
  source 1..20: mol_type = other DNA
ggtccagtgttcgaacaata

SEQ ID NO: 40099 - DNA, 20 bp, synthetic construct
  source 1..20: mol_type = other DNA
tacagccgccctgagttccc

SEQ ID NO: 40100 - DNA, 20 bp, synthetic construct
  source 1..20: mol_type = other DNA
gcacggcttccgcatctacc

SEQ ID NO: 40101 - DNA, 20 bp, synthetic construct
  source 1..20: mol_type = other DNA
cctactacggaaactcggtc

SEQ ID NO: 40102 - DNA, 20 bp, synthetic construct
  source 1..20: mol_type = other DNA
cgaagcggctcgtcttgcgg

SEQ ID NO: 40103 - DNA, 20 bp, synthetic construct
  source 1..20: mol_type = other DNA
gatcggtaagtactgagctg

SEQ ID NO: 40104 - DNA, 20 bp, synthetic construct
  source 1..20: mol_type = other DNA
atggaggcccgggcctgtgg

SEQ ID NO: 40105 - DNA, 20 bp, synthetic construct
  source 1..20: mol_type = other DNA
gcccgttgagcacggcgggg

SEQ ID NO: 40106 - DNA, 20 bp, synthetic construct
  source 1..20: mol_type = other DNA
ctgcaggagctgagtggctg

SEQ ID NO: 40107 - DNA, 20 bp, synthetic construct
  source 1..20: mol_type = other DNA
gttgtatgttacctttcaca

SEQ ID NO: 40108 - DNA, 20 bp, synthetic construct
  source 1..20: mol_type = other DNA
gttccccaggcttactggct

SEQ ID NO: 40109 - DNA, 20 bp, synthetic construct
  source 1..20: mol_type = other DNA
ggggagagggcgcgaggaga

SEQ ID NO: 40110 - DNA, 20 bp, synthetic construct
  source 1..20: mol_type = other DNA
cgagcgcaaactttactctg

SEQ ID NO: 40111 - DNA, 20 bp, synthetic construct
  source 1..20: mol_type = other DNA
acctattaccctctggtgga

SEQ ID NO: 40112 - DNA, 20 bp, synthetic construct
  source 1..20: mol_type = other DNA
gctgagattccagggggagg

SEQ ID NO: 40113 - DNA, 20 bp, synthetic construct
  source 1..20: mol_type = other DNA
ccagggcccagcaggagcgc

SEQ ID NO: 40114 - DNA, 20 bp, synthetic construct
  source 1..20: mol_type = other DNA
tgtcagggccatgtccacca

SEQ ID NO: 40115 - DNA, 20 bp, synthetic construct
  source 1..20: mol_type = other DNA
cttaacaagaagggacagca

SEQ ID NO: 40116 - DNA, 20 bp, synthetic construct
  source 1..20: mol_type = other DNA
atctagaggaaagaatgttt

SEQ ID NO: 40117 - DNA, 20 bp, synthetic construct
  source 1..20: mol_type = other DNA
ggagtccgtccaggacaggc

SEQ ID NO: 40118 - DNA, 20 bp, synthetic construct
  source 1..20: mol_type = other DNA
cctcgtggatggccatgctg

SEQ ID NO: 40119 - DNA, 20 bp, synthetic construct
  source 1..20: mol_type = other DNA
gttgaccacatggcacccga

SEQ ID NO: 40120 - DNA, 20 bp, synthetic construct
  source 1..20: mol_type = other DNA
gaaaccagcagatattcctg

SEQ ID NO: 40121 - DNA, 20 bp, synthetic construct
  source 1..20: mol_type = other DNA
gctcctgccgagagggagaa

SEQ ID NO: 40122 - DNA, 20 bp, synthetic construct
  source 1..20: mol_type = other DNA
tatacaaagctctccaccaa

SEQ ID NO: 40123 - DNA, 20 bp, synthetic construct
  source 1..20: mol_type = other DNA
ttttaccttgaaactagaga

SEQ ID NO: 40124 - DNA, 20 bp, synthetic construct
  source 1..20: mol_type = other DNA
ttcactctcgcggataagaa

SEQ ID NO: 40125 - DNA, 20 bp, synthetic construct
  source 1..20: mol_type = other DNA
ggccagcaggggcaggtcat

SEQ ID NO: 40126 - DNA, 20 bp, synthetic construct
  source 1..20: mol_type = other DNA
gctggaaggaagctgccgga

SEQ ID NO: 40127 - DNA, 20 bp, synthetic construct
  source 1..20: mol_type = other DNA
gccgccgagaccttccacgt

SEQ ID NO: 40128 - DNA, 20 bp, synthetic construct
  source 1..20: mol_type = other DNA
tgcagtaagacagttccccc

SEQ ID NO: 40129 - DNA, 20 bp, synthetic construct
  source 1..20: mol_type = other DNA
gaaggaactgggccgaacgc

SEQ ID NO: 40130 - DNA, 20 bp, synthetic construct
  source 1..20: mol_type = other DNA
tcatcacccgtaagtgtctg

SEQ ID NO: 40131 - DNA, 20 bp, synthetic construct
  source 1..20: mol_type = other DNA
gacatttgaggagctgcgac

SEQ ID NO: 40132 - DNA, 20 bp, synthetic construct
  source 1..20: mol_type = other DNA
atgttcagctaaggattaaa

SEQ ID NO: 40133 - DNA, 20 bp, synthetic construct
  source 1..20: mol_type = other DNA
ctgacctgtgaggtaatgaa

SEQ ID NO: 40134 - DNA, 20 bp, synthetic construct
  source 1..20: mol_type = other DNA
gccgcctatgcaacaagata

SEQ ID NO: 40135 - DNA, 20 bp, synthetic construct
  source 1..20: mol_type = other DNA
cttctacaaaaaataatctg

SEQ ID NO: 40136 - DNA, 20 bp, synthetic construct
  source 1..20: mol_type = other DNA
gtcaggattcctgtaagttg

SEQ ID NO: 40137 - DNA, 20 bp, synthetic construct
  source 1..20: mol_type = other DNA
ctggcgcctatggctctgtg

SEQ ID NO: 40138 - DNA, 20 bp, synthetic construct
  source 1..20: mol_type = other DNA
tggatgatggctaggtgcag

SEQ ID NO: 40139 - DNA, 20 bp, synthetic construct
  source 1..20: mol_type = other DNA
gtttctctctggcctggtac

SEQ ID NO: 40140 - DNA, 20 bp, synthetic construct
  source 1..20: mol_type = other DNA
tccacttttcacagcactgc

SEQ ID NO: 40141 - DNA, 20 bp, synthetic construct
  source 1..20: mol_type = other DNA
agagcagagtgcccgcatgc

SEQ ID NO: 40142 - DNA, 20 bp, synthetic construct
  source 1..20: mol_type = other DNA
ggaagcgagggcacctgaga

SEQ ID NO: 40143 - DNA, 20 bp, synthetic construct
  source 1..20: mol_type = other DNA
cctgacaacgcagacatgtg

SEQ ID NO: 40144 - DNA, 20 bp, synthetic construct
  source 1..20: mol_type = other DNA
gatcaagctgccatactacc

SEQ ID NO: 40145 - DNA, 20 bp, synthetic construct
  source 1..20: mol_type = other DNA
cagcatgttcttcaggtcct

SEQ ID NO: 40146 - DNA, 20 bp, synthetic construct
  source 1..20: mol_type = other DNA
ttatcaacattgaggtgagc

SEQ ID NO: 40147 - DNA, 20 bp, synthetic construct
  source 1..20: mol_type = other DNA
cagcctcatagaagccatcc

SEQ ID NO: 40148 - DNA, 20 bp, synthetic construct
  source 1..20: mol_type = other DNA
gcctaaagacagatatgtcc

SEQ ID NO: 40149 - DNA, 20 bp, synthetic construct
  source 1..20: mol_type = other DNA
tgcagcgaggtatggactcc

SEQ ID NO: 40150 - DNA, 20 bp, synthetic construct
  source 1..20: mol_type = other DNA
gcagtggtttgacggggtga

SEQ ID NO: 40151 - DNA, 20 bp, synthetic construct
  source 1..20: mol_type = other DNA
gagctgtaaataattaccaa

SEQ ID NO: 40152 - DNA, 20 bp, synthetic construct
  source 1..20: mol_type = other DNA
ggagccgcaccacctaacgc

SEQ ID NO: 40153 - DNA, 20 bp, synthetic construct
  source 1..20: mol_type = other DNA
cacctgaagacacggggcgg

SEQ ID NO: 40154 - DNA, 20 bp, synthetic construct
  source 1..20: mol_type = other DNA
gatgcgtctactaaaatgca

SEQ ID NO: 40155 - DNA, 20 bp, synthetic construct
  source 1..20: mol_type = other DNA
acgaagccctccgtgagagc

SEQ ID NO: 40156 - DNA, 20 bp, synthetic construct
  source 1..20: mol_type = other DNA
gtactcactctgatttgcct

SEQ ID NO: 40157 - DNA, 20 bp, synthetic construct
  source 1..20: mol_type = other DNA
gcccgtgtggaagcagcggc

SEQ ID NO: 40158 - DNA, 20 bp, synthetic construct
  source 1..20: mol_type = other DNA
gccccagcagtcaaatgcct

SEQ ID NO: 40159 - DNA, 20 bp, synthetic construct
  source 1..20: mol_type = other DNA
gttcagccccactcccagca

SEQ ID NO: 40160 - DNA, 20 bp, synthetic construct
  source 1..20: mol_type = other DNA
cagcatgtcctgtggaggga

SEQ ID NO: 40161 - DNA, 20 bp, synthetic construct
  source 1..20: mol_type = other DNA
agatgtccccaacaaagtct

SEQ ID NO: 40162 - DNA, 20 bp, synthetic construct
  source 1..20: mol_type = other DNA
cagtgccgacgtaagtaaga

SEQ ID NO: 40163 - DNA, 20 bp, synthetic construct
  source 1..20: mol_type = other DNA
cacctgctctcacccacgaa

SEQ ID NO: 40164 - DNA, 20 bp, synthetic construct
  source 1..20: mol_type = other DNA
gggcgccccaggcaccaggt

SEQ ID NO: 40165 - DNA, 20 bp, synthetic construct
  source 1..20: mol_type = other DNA
ggcaggagtgacactctttg

SEQ ID NO: 40166 - DNA, 20 bp, synthetic construct
  source 1..20: mol_type = other DNA
gctgcccgttgagcacggcg

SEQ ID NO: 40167 - DNA, 20 bp, synthetic construct
  source 1..20: mol_type = other DNA
cgggcaggcctggcccaccg

SEQ ID NO: 40168 - DNA, 20 bp, synthetic construct
  source 1..20: mol_type = other DNA
ccagcgcctcaggaatttcg

SEQ ID NO: 40169 - DNA, 20 bp, synthetic construct
  source 1..20: mol_type = other DNA
ggacagcaacaacctggacc

SEQ ID NO: 40170 - DNA, 20 bp, synthetic construct
  source 1..20: mol_type = other DNA
tcctcttgagccatcctacc

SEQ ID NO: 40171 - DNA, 20 bp, synthetic construct
  source 1..20: mol_type = other DNA
catgcgatcaggtccgcctg

SEQ ID NO: 40172 - DNA, 20 bp, synthetic construct
  source 1..20: mol_type = other DNA
cctcaaacgtctggttgatc

SEQ ID NO: 40173 - DNA, 20 bp, synthetic construct
  source 1..20: mol_type = other DNA
ggcgcaggcactggttacat

SEQ ID NO: 40174 - DNA, 20 bp, synthetic construct
  source 1..20: mol_type = other DNA
cggccagagtgatggcgtgg

SEQ ID NO: 40175 - DNA, 20 bp, synthetic construct
  source 1..20: mol_type = other DNA
agacttctcaaagcaggtga

SEQ ID NO: 40176 - DNA, 20 bp, synthetic construct
  source 1..20: mol_type = other DNA
ggaggcgcagacacttagct

SEQ ID NO: 40177 - DNA, 20 bp, synthetic construct
  source 1..20: mol_type = other DNA
ggcataagcccttccagtgt

SEQ ID NO: 40178 - DNA, 20 bp, synthetic construct
  source 1..20: mol_type = other DNA
agagcaatctcatcgtgcac

SEQ ID NO: 40179 - DNA, 20 bp, synthetic construct
  source 1..20: mol_type = other DNA
ggaaagagtccctgaatctc

SEQ ID NO: 40180 - DNA, 20 bp, synthetic construct
  source 1..20: mol_type = other DNA
gtttccatccctaaataagc

SEQ ID NO: 40181 - DNA, 20 bp, synthetic construct
  source 1..20: mol_type = other DNA
gaccagcctggagaggtgta

SEQ ID NO: 40182 - DNA, 20 bp, synthetic construct
  source 1..20: mol_type = other DNA
tccacccaaggcaccccttc

SEQ ID NO: 40183 - DNA, 20 bp, synthetic construct
  source 1..20: mol_type = other DNA
gacgtttgaggagctgcgac

SEQ ID NO: 40184 - DNA, 20 bp, synthetic construct
  source 1..20: mol_type = other DNA
caaggagctctagcaaccct

SEQ ID NO: 40185 - DNA, 20 bp, synthetic construct
  source 1..20: mol_type = other DNA
ggtgatcgataagctgaagg

SEQ ID NO: 40186 - DNA, 20 bp, synthetic construct
  source 1..20: mol_type = other DNA
ctgtatttctgttactgatg

SEQ ID NO: 40187 - DNA, 20 bp, synthetic construct
  source 1..20: mol_type = other DNA
ggccgggcgcagagtgccat

SEQ ID NO: 40188 - DNA, 20 bp, synthetic construct
  source 1..20: mol_type = other DNA
acaagatgctgaatggtact

SEQ ID NO: 40189 - DNA, 20 bp, synthetic construct
  source 1..20: mol_type = other DNA
ttctctgctaggaaagacaa

SEQ ID NO: 40190 - DNA, 20 bp, synthetic construct
  source 1..20: mol_type = other DNA
ggcccaggatgcttgactca

SEQ ID NO: 40191 - DNA, 20 bp, synthetic construct
  source 1..20: mol_type = other DNA
ctgcctcttatcaggtgagt

SEQ ID NO: 40192 - DNA, 20 bp, synthetic construct
  source 1..20: mol_type = other DNA
ctgatcgaccagatcgacag

SEQ ID NO: 40193 - DNA, 20 bp, synthetic construct
  source 1..20: mol_type = other DNA
tgccttccttcttcatagtc

SEQ ID NO: 40194 - DNA, 20 bp, synthetic construct
  source 1..20: mol_type = other DNA
cgaggcagctgccagagttt

SEQ ID NO: 40195 - DNA, 20 bp, synthetic construct
  source 1..20: mol_type = other DNA
cccttcttccacaccttcgc

SEQ ID NO: 40196 - DNA, 20 bp, synthetic construct
  source 1..20: mol_type = other DNA
agcctgcaggtactggtggg

SEQ ID NO: 40197 - DNA, 20 bp, synthetic construct
  source 1..20: mol_type = other DNA
atctcagcggcataaaacct

SEQ ID NO: 40198 - DNA, 20 bp, synthetic construct
  source 1..20: mol_type = other DNA
agaggagtacagtgcaatga

SEQ ID NO: 40199 - DNA, 20 bp, synthetic construct
  source 1..20: mol_type = other DNA
cagtggagacaccaggatat

SEQ ID NO: 40200 - DNA, 20 bp, synthetic construct
  source 1..20: mol_type = other DNA
accccacgccgatcaagcgt

SEQ ID NO: 40201 - DNA, 20 bp, synthetic construct
  source 1..20: mol_type = other DNA
acttgaactcaaggtaggtg

SEQ ID NO: 40202 - DNA, 20 bp, synthetic construct
  source 1..20: mol_type = other DNA
tggcagccaacaaacgtgga

SEQ ID NO: 40203 - DNA, 20 bp, synthetic construct
  source 1..20: mol_type = other DNA
ctggagtgggtaagaggccc

SEQ ID NO: 40204 - DNA, 20 bp, synthetic construct
  source 1..20: mol_type = other DNA
tgaatggtttcaggttccac

SEQ ID NO: 40205 - DNA, 20 bp, synthetic construct
  source 1..20: mol_type = other DNA
gagggagagcagccccacca

SEQ ID NO: 40206 - DNA, 20 bp, synthetic construct
  source 1..20: mol_type = other DNA
gcttaaacggccaaggaagc

SEQ ID NO: 40207 - DNA, 20 bp, synthetic construct
  source 1..20: mol_type = other DNA
cagctgaacaaggtgaggac

SEQ ID NO: 40208 - DNA, 20 bp, synthetic construct
  source 1..20: mol_type = other DNA
tcgcctgcccttctacaacc

SEQ ID NO: 40209 - DNA, 20 bp, synthetic construct
  source 1..20: mol_type = other DNA
gtggggcctgcaaatatccg

SEQ ID NO: 40210 - DNA, 20 bp, synthetic construct
  source 1..20: mol_type = other DNA
atcattggcatatgtggagg

SEQ ID NO: 40211 - DNA, 20 bp, synthetic construct
  source 1..20: mol_type = other DNA
ttttaagtaaccaagaggag

SEQ ID NO: 40212 - DNA, 20 bp, synthetic construct
  source 1..20: mol_type = other DNA
acttctgggaaccactgggc

SEQ ID NO: 40213 - DNA, 20 bp, synthetic construct
  source 1..20: mol_type = other DNA
ccacggcttctggggcttct

SEQ ID NO: 40214 - DNA, 20 bp, synthetic construct
  source 1..20: mol_type = other DNA
cttaccagagtcgctgctgg

SEQ ID NO: 40215 - DNA, 20 bp, synthetic construct
  source 1..20: mol_type = other DNA
acatccacagaaacaaggtg

SEQ ID NO: 40216 - DNA, 20 bp, synthetic construct
  source 1..20: mol_type = other DNA
agggcctggttcatctgcat

SEQ ID NO: 40217 - DNA, 20 bp, synthetic construct
  source 1..20: mol_type = other DNA
caatatcctggtgtctccac

SEQ ID NO: 40218 - DNA, 20 bp, synthetic construct
  source 1..20: mol_type = other DNA
gcagcactgggtgctcctcc

SEQ ID NO: 40219 - DNA, 20 bp, synthetic construct
  source 1..20: mol_type = other DNA
actcttccagccttccttcc

SEQ ID NO: 40220 - DNA, 20 bp, synthetic construct
  source 1..20: mol_type = other DNA
tgcactttttttaaagctac

SEQ ID NO: 40221 - DNA, 20 bp, synthetic construct
  source 1..20: mol_type = other DNA
tggagaagtcaagctcgtct

SEQ ID NO: 40222 - DNA, 20 bp, synthetic construct
  source 1..20: mol_type = other DNA
gtgtgcccatggtaaataac

SEQ ID NO: 40223 - DNA, 20 bp, synthetic construct
  source 1..20: mol_type = other DNA
catctcggaagtgttcctcc

SEQ ID NO: 40224 - DNA, 20 bp, synthetic construct
  source 1..20: mol_type = other DNA
aggcacacggccaccaggtt

SEQ ID NO: 40225 - DNA, 20 bp, synthetic construct
  source 1..20: mol_type = other DNA
acctcatccggtagtggagc

SEQ ID NO: 40226 - DNA, 20 bp, synthetic construct
  source 1..20: mol_type = other DNA
catccacagaaacaaggtgg

SEQ ID NO: 40227 - DNA, 20 bp, synthetic construct
  source 1..20: mol_type = other DNA
gcttgccagggtcttcaaca

SEQ ID NO: 40228 - DNA, 20 bp, synthetic construct
  source 1..20: mol_type = other DNA
aactggtgggaggtacaggc

SEQ ID NO: 40229 - DNA, 20 bp, synthetic construct
  source 1..20: mol_type = other DNA
cggaggagaagtgagtcagc

SEQ ID NO: 40230 - DNA, 20 bp, synthetic construct
  source 1..20: mol_type = other DNA
gccaccagtagtagtggact

SEQ ID NO: 40231 - DNA, 20 bp, synthetic construct
  source 1..20: mol_type = other DNA
caccgtggagctctactcgc

SEQ ID NO: 40232 - DNA, 20 bp, synthetic construct
  source 1..20: mol_type = other DNA
agcccttggctctgacatcc

SEQ ID NO: 40233 - DNA, 20 bp, synthetic construct
  source 1..20: mol_type = other DNA
tcctccactgggccggggat

SEQ ID NO: 40234 - DNA, 20 bp, synthetic construct
  source 1..20: mol_type = other DNA
ggctgccttctgtctcatag

SEQ ID NO: 40235 - DNA, 20 bp, synthetic construct
  source 1..20: mol_type = other DNA
gagtcaggaccgtgtgctca

SEQ ID NO: 40236 - DNA, 20 bp, synthetic construct
  source 1..20: mol_type = other DNA
tggcccggtgacctgggatg

SEQ ID NO: 40237 - DNA, 20 bp, synthetic construct
  source 1..20: mol_type = other DNA
catagaaatcccctgagttc

SEQ ID NO: 40238 - DNA, 20 bp, synthetic construct
  source 1..20: mol_type = other DNA
tgatgatttgaaaggggact

SEQ ID NO: 40239 - DNA, 20 bp, synthetic construct
  source 1..20: mol_type = other DNA
tgcacaagcgtctgcacacc

SEQ ID NO: 40240 - DNA, 20 bp, synthetic construct
  source 1..20: mol_type = other DNA
tgatgagccaagtgtcgtac

SEQ ID NO: 40241 - DNA, 20 bp, synthetic construct
  source 1..20: mol_type = other DNA
gggtgcggatatgggtggtg

SEQ ID NO: 40242 - DNA, 20 bp, synthetic construct
  source 1..20: mol_type = other DNA
tgagaagaggctgggcgtga

SEQ ID NO: 40243 - DNA, 20 bp, synthetic construct
  source 1..20: mol_type = other DNA
ctgatcatccagaacgaacc

SEQ ID NO: 40244 - DNA, 20 bp, synthetic construct
  source 1..20: mol_type = other DNA
gacacaacagcattctggct

SEQ ID NO: 40245 - DNA, 20 bp, synthetic construct
  source 1..20: mol_type = other DNA
cagtggagagtacacagcag

SEQ ID NO: 40246 - DNA, 20 bp, synthetic construct
  source 1..20: mol_type = other DNA
tccatcttgggcagacctgg

SEQ ID NO: 40247 - DNA, 20 bp, synthetic construct
  source 1..20: mol_type = other DNA
ccatagtccacagagaacac

SEQ ID NO: 40248 - DNA, 20 bp, synthetic construct
  source 1..20: mol_type = other DNA
tccggctgaagcagaagagg

SEQ ID NO: 40249 - DNA, 20 bp, synthetic construct
  source 1..20: mol_type = other DNA
ctgcccctgcccgctccatg

SEQ ID NO: 40250 - DNA, 20 bp, synthetic construct
  source 1..20: mol_type = other DNA
gctggtacttatggagggac

SEQ ID NO: 40251 - DNA, 20 bp, synthetic construct
  source 1..20: mol_type = other DNA
ggccctcaggagaacttgcc

SEQ ID NO: 40252 - DNA, 20 bp, synthetic construct
  source 1..20: mol_type = other DNA
ggccgtggtggcggcagtgg

SEQ ID NO: 40253 - DNA, 20 bp, synthetic construct
  source 1..20: mol_type = other DNA
gatggaggaggaatgtaagc

SEQ ID NO: 40254 - DNA, 20 bp, synthetic construct
  source 1..20: mol_type = other DNA
ggcagaaaatccttatggtg

SEQ ID NO: 40255 - DNA, 20 bp, synthetic construct
  source 1..20: mol_type = other DNA
tgagccatgctgctgccggc

SEQ ID NO: 40256 - DNA, 20 bp, synthetic construct
  source 1..20: mol_type = other DNA
gaccccaagaccgagcagga

SEQ ID NO: 40257 - DNA, 20 bp, synthetic construct
  source 1..20: mol_type = other DNA
gctcagcgtctggcagttcc

SEQ ID NO: 40258 - DNA, 20 bp, synthetic construct
  source 1..20: mol_type = other DNA
caccagcacctcgtgggttg

SEQ ID NO: 40259 - DNA, 20 bp, synthetic construct
  source 1..20: mol_type = other DNA
ggcagagcaaccagattctg

SEQ ID NO: 40260 - DNA, 20 bp, synthetic construct
  source 1..20: mol_type = other DNA
ccgttatctggccttcactg

SEQ ID NO: 40261 - DNA, 20 bp, synthetic construct
  source 1..20: mol_type = other DNA
cccggtggggaggcagccat

SEQ ID NO: 40262 - DNA, 20 bp, synthetic construct
  source 1..20: mol_type = other DNA
cagcaggcggccgcgggcat

SEQ ID NO: 40263 - DNA, 20 bp, synthetic construct
  source 1..20: mol_type = other DNA
cctccgtcccaggtcggccc

SEQ ID NO: 40264 - DNA, 20 bp, synthetic construct
  source 1..20: mol_type = other DNA
ccggaagcagttttactcag

SEQ ID NO: 40265 - DNA, 20 bp, synthetic construct
  source 1..20: mol_type = other DNA
atcaggcctcgattcagccc

SEQ ID NO: 40266 - DNA, 20 bp, synthetic construct
  source 1..20: mol_type = other DNA
agcaacagccaccagctcca

SEQ ID NO: 40267 - DNA, 20 bp, synthetic construct
  source 1..20: mol_type = other DNA
aacatgactccccgccgccc

SEQ ID NO: 40268 - DNA, 20 bp, synthetic construct
  source 1..20: mol_type = other DNA
gtgcaagacggtgtccagct

SEQ ID NO: 40269 - DNA, 20 bp, synthetic construct
  source 1..20: mol_type = other DNA
gttgacttcctgctgcccac

SEQ ID NO: 40270 - DNA, 20 bp, synthetic construct
  source 1..20: mol_type = other DNA
tccccctaccacctctacta

SEQ ID NO: 40271 - DNA, 20 bp, synthetic construct
  source 1..20: mol_type = other DNA
taaagctcacaaacaacaag

SEQ ID NO: 40272 - DNA, 20 bp, synthetic construct
  source 1..20: mol_type = other DNA
accgcagtgacctggtgagt

SEQ ID NO: 40273 - DNA, 20 bp, synthetic construct
  source 1..20: mol_type = other DNA
gaaatacttacttgacagag

SEQ ID NO: 40274 - DNA, 20 bp, synthetic construct
  source 1..20: mol_type = other DNA
ccctccataagtaccagccc

SEQ ID NO: 40275 - DNA, 20 bp, synthetic construct
  source 1..20: mol_type = other DNA
cccgccaggccccggccctc

SEQ ID NO: 40276 - DNA, 20 bp, synthetic construct
  source 1..20: mol_type = other DNA
gagtggctgaatacctggat

SEQ ID NO: 40277 - DNA, 20 bp, synthetic construct
  source 1..20: mol_type = other DNA
ccctcaagggattttcattg

SEQ ID NO: 40278 - DNA, 20 bp, synthetic construct
  source 1..20: mol_type = other DNA
gtcgatcctgtagaagcggc

SEQ ID NO: 40279 - DNA, 20 bp, synthetic construct
  source 1..20: mol_type = other DNA
cagactccattcagaatcat

SEQ ID NO: 40280 - DNA, 20 bp, synthetic construct
  source 1..20: mol_type = other DNA
ctatggccgctactgcagcc

SEQ ID NO: 40281 - DNA, 20 bp, synthetic construct
  source 1..20: mol_type = other DNA
ccacacggtgcccatctacg

SEQ ID NO: 40282 - DNA, 20 bp, synthetic construct
  source 1..20: mol_type = other DNA
tcgggagtggaaggcctgcc

SEQ ID NO: 40283 - DNA, 20 bp, synthetic construct
  source 1..20: mol_type = other DNA
caagaaggcggtgggtccca

SEQ ID NO: 40284 - DNA, 20 bp, synthetic construct
  source 1..20: mol_type = other DNA
ccaacttacagcactcgatg

SEQ ID NO: 40285 - DNA, 20 bp, synthetic construct
  source 1..20: mol_type = other DNA
ctccatgcagttcttgtgct

SEQ ID NO: 40286 - DNA, 20 bp, synthetic construct
  source 1..20: mol_type = other DNA
tgcaggcatgaacaaccggg

SEQ ID NO: 40287 - DNA, 20 bp, synthetic construct
  source 1..20: mol_type = other DNA
ggggctgcacgtagatgggg

SEQ ID NO: 40288 - DNA, 20 bp, synthetic construct
  source 1..20: mol_type = other DNA
agccttccttcctgggtgag

SEQ ID NO: 40289 - DNA, 20 bp, synthetic construct
  source 1..20: mol_type = other DNA
tccctctccagcacttctag

SEQ ID NO: 40290 - DNA, 20 bp, synthetic construct
  source 1..20: mol_type = other DNA
gaggagctgcgagacaaggt

SEQ ID NO: 40291 - DNA, 20 bp, synthetic construct
  source 1..20: mol_type = other DNA
tcttactatcaagaaaaatg

SEQ ID NO: 40292 - DNA, 20 bp, synthetic construct
  source 1..20: mol_type = other DNA
gagcaggctgtggagctctg

SEQ ID NO: 40293 - DNA, 20 bp, synthetic construct
  source 1..20: mol_type = other DNA
cggctgctccagggaccaca

SEQ ID NO: 40294 - DNA, 20 bp, synthetic construct
  source 1..20: mol_type = other DNA
ggaagcaggaggccgtcatg

SEQ ID NO: 40295 - DNA, 20 bp, synthetic construct
  source 1..20: mol_type = other DNA
atagttcctgggaaatctac

SEQ ID NO: 40296 - DNA, 20 bp, synthetic construct
  source 1..20: mol_type = other DNA
tctggaaattcttccagttt

SEQ ID NO: 40297 - DNA, 20 bp, synthetic construct
  source 1..20: mol_type = other DNA
tccttggctgtcaacagtcc

SEQ ID NO: 40298 - DNA, 20 bp, synthetic construct
  source 1..20: mol_type = other DNA
tgggtatggcactcttcctt

SEQ ID NO: 40299 - DNA, 20 bp, synthetic construct
  source 1..20: mol_type = other DNA
ggcgagaatgaaagccgtca

SEQ ID NO: 40300 - DNA, 20 bp, synthetic construct
  source 1..20: mol_type = other DNA
gagggtcgcgccggccggag

SEQ ID NO: 40301 - DNA, 20 bp, synthetic construct
  source 1..20: mol_type = other DNA
agaagaggaggatgcggcgg

SEQ ID NO: 40302 - DNA, 20 bp, synthetic construct
  source 1..20: mol_type = other DNA
caaagtcacaaaaactatga

SEQ ID NO: 40303 - DNA, 20 bp, synthetic construct
  source 1..20: mol_type = other DNA
ccccaccagggcgagcagtg

SEQ ID NO: 40304 - DNA, 20 bp, synthetic construct
  source 1..20: mol_type = other DNA
cacgagggcccggaaggcct

SEQ ID NO: 40305 - DNA, 20 bp, synthetic construct
  source 1..20: mol_type = other DNA
accttggaaggggttgttgt

SEQ ID NO: 40306 - DNA, 20 bp, synthetic construct
  source 1..20: mol_type = other DNA
gttccttcttgactaccagg

SEQ ID NO: 40307 - DNA, 20 bp, synthetic construct
  source 1..20: mol_type = other DNA
ggttcttcgtggttggtctg

SEQ ID NO: 40308 - DNA, 20 bp, synthetic construct
  source 1..20: mol_type = other DNA
acgagctgatccagtggaag

SEQ ID NO: 40309 - DNA, 20 bp, synthetic construct
  source 1..20: mol_type = other DNA
gtacctgctgcagctggtgc

SEQ ID NO: 40310 - DNA, 20 bp, synthetic construct
  source 1..20: mol_type = other DNA
atggtgcctggttggcagca

SEQ ID NO: 40311 - DNA, 20 bp, synthetic construct
  source 1..20: mol_type = other DNA
cagcaaggacatgggtaccc

SEQ ID NO: 40312 - DNA, 20 bp, synthetic construct
  source 1..20: mol_type = other DNA
gcacacaagatgaattagca

SEQ ID NO: 40313 - DNA, 20 bp, synthetic construct
  source 1..20: mol_type = other DNA
ggaggagctggaagcagccg

SEQ ID NO: 40314 - DNA, 20 bp, synthetic construct
  source 1..20: mol_type = other DNA
catggtgcctggttggcagc

SEQ ID NO: 40315 - DNA, 20 bp, synthetic construct
  source 1..20: mol_type = other DNA
ccacgcgatggtgtctgtga

SEQ ID NO: 40316 - DNA, 20 bp, synthetic construct
  source 1..20: mol_type = other DNA
gcatgtccagctgggggccc

SEQ ID NO: 40317 - DNA, 20 bp, synthetic construct
  source 1..20: mol_type = other DNA
gggccaaactgagctagagg

SEQ ID NO: 40318 - DNA, 20 bp, synthetic construct
  source 1..20: mol_type = other DNA
cacccggactcccccaacac

SEQ ID NO: 40319 - DNA, 20 bp, synthetic construct
  source 1..20: mol_type = other DNA
gcaggacttggaggtggagc

SEQ ID NO: 40320 - DNA, 20 bp, synthetic construct
  source 1..20: mol_type = other DNA
ccattgacgctgccaagaga

SEQ ID NO: 40321 - DNA, 20 bp, synthetic construct
  source 1..20: mol_type = other DNA
gaggcaaagtggaggtgagg

SEQ ID NO: 40322 - DNA, 20 bp, synthetic construct
  source 1..20: mol_type = other DNA
cacacgcagctcattgtaga

SEQ ID NO: 40323 - DNA, 20 bp, synthetic construct
  source 1..20: mol_type = other DNA
ttgataaggcctctgtgatg

SEQ ID NO: 40324 - DNA, 20 bp, synthetic construct
  source 1..20: mol_type = other DNA
gcatccagcaggtgtacaca

SEQ ID NO: 40325 - DNA, 20 bp, synthetic construct
  source 1..20: mol_type = other DNA
cccttcgcctgtgactactg

SEQ ID NO: 40326 - DNA, 20 bp, synthetic construct
  source 1..20: mol_type = other DNA
ctattcctcgcagatctgca

SEQ ID NO: 40327 - DNA, 20 bp, synthetic construct
  source 1..20: mol_type = other DNA
ggtacggccagaggcgtaca

SEQ ID NO: 40328 - DNA, 20 bp, synthetic construct
  source 1..20: mol_type = other DNA
gtcggaacacatgataatag

SEQ ID NO: 40329 - DNA, 20 bp, synthetic construct
  source 1..20: mol_type = other DNA
tggatgtacagcgcacgctc

SEQ ID NO: 40330 - DNA, 20 bp, synthetic construct
  source 1..20: mol_type = other DNA
agaagaacatcaagaggttc

SEQ ID NO: 40331 - DNA, 20 bp, synthetic construct
  source 1..20: mol_type = other DNA
gggaatttcaagaccaagtt

SEQ ID NO: 40332 - DNA, 20 bp, synthetic construct
  source 1..20: mol_type = other DNA
attccgcttccgcaccagga

SEQ ID NO: 40333 - DNA, 20 bp, synthetic construct
  source 1..20: mol_type = other DNA
tgcagcggaccagctccagg

SEQ ID NO: 40334 - DNA, 20 bp, synthetic construct
  source 1..20: mol_type = other DNA
ccagaacttgaaggacttgg

SEQ ID NO: 40335 - DNA, 20 bp, synthetic construct
  source 1..20: mol_type = other DNA
tgatggggcagcagtgctag

SEQ ID NO: 40336 - DNA, 20 bp, synthetic construct
  source 1..20: mol_type = other DNA
cgagctgcgcgcgcgggtag

SEQ ID NO: 40337 - DNA, 20 bp, synthetic construct
  source 1..20: mol_type = other DNA
ctcatcccgcatggcgagga

SEQ ID NO: 40338 - DNA, 20 bp, synthetic construct
  source 1..20: mol_type = other DNA
acagccttggattggcagtg

SEQ ID NO: 40339 - DNA, 20 bp, synthetic construct
  source 1..20: mol_type = other DNA
agaaggcagagcaccaggtg

SEQ ID NO: 40340 - DNA, 20 bp, synthetic construct
  source 1..20: mol_type = other DNA
aggctggtaagccagtggtg

SEQ ID NO: 40341 - DNA, 20 bp, synthetic construct
  source 1..20: mol_type = other DNA
ctaggatggccctgggtgca

SEQ ID NO: 40342 - DNA, 20 bp, synthetic construct
  source 1..20: mol_type = other DNA
gcagctcctcagtcacaatc

SEQ ID NO: 40343 - DNA, 20 bp, synthetic construct
  source 1..20: mol_type = other DNA
ctccagcagcaggtggtgca

SEQ ID NO: 40344 - DNA, 20 bp, synthetic construct
  source 1..20: mol_type = other DNA
ccctcatcgtccttcagccc

SEQ ID NO: 40345 - DNA, 20 bp, synthetic construct
  source 1..20: mol_type = other DNA
ctcttcagtgactgcagggt

SEQ ID NO: 40346 - DNA, 20 bp, synthetic construct
  source 1..20: mol_type = other DNA
cagcctcatcccctacagcc

SEQ ID NO: 40347 - DNA, 20 bp, synthetic construct
  source 1..20: mol_type = other DNA
gaacgtgctgcaggggacac

SEQ ID NO: 40348 - DNA, 20 bp, synthetic construct
  source 1..20: mol_type = other DNA
catcgacctgtactatctga

SEQ ID NO: 40349 - DNA, 20 bp, synthetic construct
  source 1..20: mol_type = other DNA
gcccatcctggccatgttga

SEQ ID NO: 40350 - DNA, 20 bp, synthetic construct
  source 1..20: mol_type = other DNA
catattctccttgcattgtg

SEQ ID NO: 40351 - DNA, 20 bp, synthetic construct
  source 1..20: mol_type = other DNA
ctacagtgggccaaggctca

SEQ ID NO: 40352 - DNA, 20 bp, synthetic construct
  source 1..20: mol_type = other DNA
gcccgcagaaactctcctcc

SEQ ID NO: 40353 - DNA, 20 bp, synthetic construct
  source 1..20: mol_type = other DNA
tattaccttggcaatcagac

SEQ ID NO: 40354 - DNA, 20 bp, synthetic construct
  source 1..20: mol_type = other DNA
tgaagcagtgaaatcaaact

SEQ ID NO: 40355 - DNA, 20 bp, synthetic construct
  source 1..20: mol_type = other DNA
gacttcaagatccccattct

SEQ ID NO: 40356 - DNA, 20 bp, synthetic construct
  source 1..20: mol_type = other DNA
cccggagctgttgctcggtg

SEQ ID NO: 40357 - DNA, 20 bp, synthetic construct
  source 1..20: mol_type = other DNA
agaaactgccatagctggat

SEQ ID NO: 40358 - DNA, 20 bp, synthetic construct
  source 1..20: mol_type = other DNA
gccggggctggtacttatgg

SEQ ID NO: 40359 - DNA, 20 bp, synthetic construct
  source 1..20: mol_type = other DNA
tcagattccacagctaaaga

SEQ ID NO: 40360 - DNA, 20 bp, synthetic construct
  source 1..20: mol_type = other DNA
tgagaagctgatagaggaga

SEQ ID NO: 40361 - DNA, 20 bp, synthetic construct
  source 1..20: mol_type = other DNA
catcacagtcacctctgggc

SEQ ID NO: 40362 - DNA, 20 bp, synthetic construct
  source 1..20: mol_type = other DNA
cctggcgttcctcgtggggc

SEQ ID NO: 40363 - DNA, 20 bp, synthetic construct
  source 1..20: mol_type = other DNA
tccagtgcagctctccggct

SEQ ID NO: 40364 - DNA, 20 bp, synthetic construct
  source 1..20: mol_type = other DNA
cagcactgggtgctcctccg

SEQ ID NO: 40365 - DNA, 20 bp, synthetic construct
  source 1..20: mol_type = other DNA
aaccagagaaaaggtatcca

SEQ ID NO: 40366 - DNA, 20 bp, synthetic construct
  source 1..20: mol_type = other DNA
caggtcgatggggtagccct

SEQ ID NO: 40367 - DNA, 20 bp, synthetic construct
  source 1..20: mol_type = other DNA
gcccacactcggtctgcttc

SEQ ID NO: 40368 - DNA, 20 bp, synthetic construct
  source 1..20: mol_type = other DNA
ggtgtccgccgtgatcgccg

SEQ ID NO: 40369 - DNA, 20 bp, synthetic construct
  source 1..20: mol_type = other DNA
ggtatccagtttgttttggg

SEQ ID NO: 40370 - DNA, 20 bp, synthetic construct
  source 1..20: mol_type = other DNA
cgagcgggtccgcatcatct

SEQ ID NO: 40371 - DNA, 20 bp, synthetic construct
  source 1..20: mol_type = other DNA
acactgttggcttcaaagag

SEQ ID NO: 40372 - DNA, 20 bp, synthetic construct
  source 1..20: mol_type = other DNA
tcacaggcagctgaaaaagt

SEQ ID NO: 40373 - DNA, 20 bp, synthetic construct
  source 1..20: mol_type = other DNA
gtgacagcggccgtcgttgg

SEQ ID NO: 40374 - DNA, 20 bp, synthetic construct
  source 1..20: mol_type = other DNA
gaactcaaacaccaggcaga

SEQ ID NO: 40375 - DNA, 20 bp, synthetic construct
  source 1..20: mol_type = other DNA
ctgggcctctgggacacagc

SEQ ID NO: 40376 - DNA, 20 bp, synthetic construct
  source 1..20: mol_type = other DNA
cctgctgattcaacagtgca

SEQ ID NO: 40377 - DNA, 20 bp, synthetic construct
  source 1..20: mol_type = other DNA
agctttcagaaccttattga

SEQ ID NO: 40378 - DNA, 20 bp, synthetic construct
  source 1..20: mol_type = other DNA
aagatgaaggtaggtgatgg

SEQ ID NO: 40379 - DNA, 20 bp, synthetic construct
  source 1..20: mol_type = other DNA
cctgggaagaagagcgcacc

SEQ ID NO: 40380 - DNA, 20 bp, synthetic construct
  source 1..20: mol_type = other DNA
cacagataaacttggtcttc

SEQ ID NO: 40381 - DNA, 20 bp, synthetic construct
  source 1..20: mol_type = other DNA
ctcgaggtgaggggtgccca

SEQ ID NO: 40382 - DNA, 20 bp, synthetic construct
  source 1..20: mol_type = other DNA
ggttctccttggtcaggccc

SEQ ID NO: 40383 - DNA, 20 bp, synthetic construct
  source 1..20: mol_type = other DNA
gcagcacgtcaacctgctga

SEQ ID NO: 40384 - DNA, 20 bp, synthetic construct
  source 1..20: mol_type = other DNA
ccagcgaaggtgtggaagaa

SEQ ID NO: 40385 - DNA, 20 bp, synthetic construct
  source 1..20: mol_type = other DNA
ggaactgaaagaaaggcaga

SEQ ID NO: 40386 - DNA, 20 bp, synthetic construct
  source 1..20: mol_type = other DNA
gcctcccagagcgggtggag

SEQ ID NO: 40387 - DNA, 20 bp, synthetic construct
  source 1..20: mol_type = other DNA
tccacctctttgccctgatg

SEQ ID NO: 40388 - DNA, 20 bp, synthetic construct
  source 1..20: mol_type = other DNA
gatgctcagtcctcgcttgg

SEQ ID NO: 40389 - DNA, 20 bp, synthetic construct
  source 1..20: mol_type = other DNA
gttacagctggaggaggagg

SEQ ID NO: 40390 - DNA, 20 bp, synthetic construct
  source 1..20: mol_type = other DNA
cgggtagggtggcgggaggt

SEQ ID NO: 40391 - DNA, 20 bp, synthetic construct
  source 1..20: mol_type = other DNA
cacctccgagaccttcccgg

SEQ ID NO: 40392 - DNA, 20 bp, synthetic construct
  source 1..20: mol_type = other DNA
acaaggagctctagcaaccc

SEQ ID NO: 40393 - DNA, 20 bp, synthetic construct
  source 1..20: mol_type = other DNA
gattaaacttggaccacaac

SEQ ID NO: 40394 - DNA, 20 bp, synthetic construct
  source 1..20: mol_type = other DNA
ggtcggcaagaggtgagcac

SEQ ID NO: 40395 - DNA, 20 bp, synthetic construct
  source 1..20: mol_type = other DNA
tccactgactgtccattggc

SEQ ID NO: 40396 - DNA, 20 bp, synthetic construct
  source 1..20: mol_type = other DNA
ttggtgtagacagatggcca

SEQ ID NO: 40397 - DNA, 20 bp, synthetic construct
  source 1..20: mol_type = other DNA
caggccagcgtctgtgaccg

SEQ ID NO: 40398 - DNA, 20 bp, synthetic construct
  source 1..20: mol_type = other DNA
ctacactgtcaccttctacg

SEQ ID NO: 40399 - DNA, 20 bp, synthetic construct
  source 1..20: mol_type = other DNA
catggcgtgcagctcctcag

SEQ ID NO: 40400 - DNA, 20 bp, synthetic construct
  source 1..20: mol_type = other DNA
gcgggtacctggaggcgcag

SEQ ID NO: 40401 - DNA, 20 bp, synthetic construct
  source 1..20: mol_type = other DNA
gagctgaaccggcagctgcg

SEQ ID NO: 40402 - DNA, 20 bp, synthetic construct
  source 1..20: mol_type = other DNA
ttaattccaaccaaatcccg

SEQ ID NO: 40403 - DNA, 20 bp, synthetic construct
  source 1..20: mol_type = other DNA
gatcgtggaacagcctaagc

SEQ ID NO: 40404 - DNA, 20 bp, synthetic construct
  source 1..20: mol_type = other DNA
gagtgatgtggcccaggctc

SEQ ID NO: 40405 - DNA, 20 bp, synthetic construct
  source 1..20: mol_type = other DNA
ccgccggcagcagctgggct

SEQ ID NO: 40406 - DNA, 20 bp, synthetic construct
  source 1..20: mol_type = other DNA
gggatccatgaagcagaggc

SEQ ID NO: 40407 - DNA, 20 bp, synthetic construct
  source 1..20: mol_type = other DNA
atgtgatcagaactggtaca

SEQ ID NO: 40408 - DNA, 20 bp, synthetic construct
  source 1..20: mol_type = other DNA
gtgccagagcaggatctact

SEQ ID NO: 40409 - DNA, 20 bp, synthetic construct
  source 1..20: mol_type = other DNA
ggacctgcagaagaagctgg

SEQ ID NO: 40410 - DNA, 20 bp, synthetic construct
  source 1..20: mol_type = other DNA
gacgcggacgagcgtcgcgg

SEQ ID NO: 40411 - DNA, 20 bp, synthetic construct
  source 1..20: mol_type = other DNA
gcggtggacgatggaggggc

SEQ ID NO: 40412 - DNA, 20 bp, synthetic construct
  source 1..20: mol_type = other DNA
cgtggcccacagctcttccc

SEQ ID NO: 40413 - DNA, 20 bp, synthetic construct
  source 1..20: mol_type = other DNA
acatcaagtagaaaaagggc

SEQ ID NO: 40414 - DNA, 20 bp, synthetic construct
  source 1..20: mol_type = other DNA
gctccggccaggagcacagc

SEQ ID NO: 40415 - DNA, 20 bp, synthetic construct
  source 1..20: mol_type = other DNA
aagtactacactcctgtgct

SEQ ID NO: 40416 - DNA, 20 bp, synthetic construct
  source 1..20: mol_type = other DNA
cagacagaggcgcgccacgt

SEQ ID NO: 40417 - DNA, 20 bp, synthetic construct
  source 1..20: mol_type = other DNA
ctttcactacaatggccacg

SEQ ID NO: 40418 - DNA, 20 bp, synthetic construct
  source 1..20: mol_type = other DNA
gccgcacttctgggaaccac

SEQ ID NO: 40419 - DNA, 20 bp, synthetic construct
  source 1..20: mol_type = other DNA
tccaacgtgtaagtaaagct

SEQ ID NO: 40420 - DNA, 20 bp, synthetic construct
  source 1..20: mol_type = other DNA
ccccacaggaaccttccttc

SEQ ID NO: 40421 - DNA, 20 bp, synthetic construct
  source 1..20: mol_type = other DNA
gggcccactcaccactgcac

SEQ ID NO: 40422 - DNA, 20 bp, synthetic construct
  source 1..20: mol_type = other DNA
ctccagtttctgaactgcaa

SEQ ID NO: 40423 - DNA, 20 bp, synthetic construct
  source 1..20: mol_type = other DNA
acccctgcagcctctgtcag

SEQ ID NO: 40424 - DNA, 20 bp, synthetic construct
  source 1..20: mol_type = other DNA
ctccttgcagaagaagtgct

SEQ ID NO: 40425 - DNA, 20 bp, synthetic construct
  source 1..20: mol_type = other DNA
gatacctgagtgtatcctgg

SEQ ID NO: 40426 - DNA, 20 bp, synthetic construct
  source 1..20: mol_type = other DNA
aaacatcctgtagtggctgg

SEQ ID NO: 40427 - DNA, 20 bp, synthetic construct
  source 1..20: mol_type = other DNA
tcaagttcaggaatgagtta

SEQ ID NO: 40428 - DNA, 20 bp, synthetic construct
  source 1..20: mol_type = other DNA
gcaccagcagcttgtcgatg

SEQ ID NO: 40429 - DNA, 20 bp, synthetic construct
  source 1..20: mol_type = other DNA
catagagaggatggctatgg

SEQ ID NO: 40430 - DNA, 20 bp, synthetic construct
  source 1..20: mol_type = other DNA
tacccttctctcgcaaggta

SEQ ID NO: 40431 - DNA, 20 bp, synthetic construct
  source 1..20: mol_type = other DNA
catagttcctgggaaatcta

SEQ ID NO: 40432 - DNA, 20 bp, synthetic construct
  source 1..20: mol_type = other DNA
cctacaagctcgtgggggtg

SEQ ID NO: 40433 - DNA, 20 bp, synthetic construct
  source 1..20: mol_type = other DNA
tctgcagctgcctgcacagt

SEQ ID NO: 40434 - DNA, 20 bp, synthetic construct
  source 1..20: mol_type = other DNA
gacgtacaggcggtttcctg

SEQ ID NO: 40435 - DNA, 20 bp, synthetic construct
  source 1..20: mol_type = other DNA
ccccaggcctgtgatcccac

SEQ ID NO: 40436 - DNA, 20 bp, synthetic construct
  source 1..20: mol_type = other DNA
aggaggacgcgccccatcgc

SEQ ID NO: 40437 - DNA, 20 bp, synthetic construct
  source 1..20: mol_type = other DNA
gcaaacattctagtggggaa

SEQ ID NO: 40438 - DNA, 20 bp, synthetic construct
  source 1..20: mol_type = other DNA
tgaatgatggccggtcctgt

SEQ ID NO: 40439 - DNA, 20 bp, synthetic construct
  source 1..20: mol_type = other DNA
cggaatgatggcctctgggt

SEQ ID NO: 40440 - DNA, 20 bp, synthetic construct
  source 1..20: mol_type = other DNA
accacgactttgagccccag

SEQ ID NO: 40441 - DNA, 20 bp, synthetic construct
  source 1..20: mol_type = other DNA
ctgggacttggtcttcaatg

SEQ ID NO: 40442 - DNA, 20 bp, synthetic construct
  source 1..20: mol_type = other DNA
agggctacctgtggaagcga

SEQ ID NO: 40443 - DNA, 20 bp, synthetic construct
  source 1..20: mol_type = other DNA
ggcgctcaacatgaaattca

SEQ ID NO: 40444 - DNA, 20 bp, synthetic construct
  source 1..20: mol_type = other DNA
cttgccctcagcccttcaca

SEQ ID NO: 40445 - DNA, 20 bp, synthetic construct
  source 1..20: mol_type = other DNA
tgaagaacagaaggcgatca

SEQ ID NO: 40446 - DNA, 20 bp, synthetic construct
  source 1..20: mol_type = other DNA
tgctattacaactgtaagcc

SEQ ID NO: 40447 - DNA, 20 bp, synthetic construct
  source 1..20: mol_type = other DNA
ttcctcagatcctctgtcga

SEQ ID NO: 40448 - DNA, 20 bp, synthetic construct
  source 1..20: mol_type = other DNA
ccggctggaggctttaagct

SEQ ID NO: 40449 - DNA, 20 bp, synthetic construct
  source 1..20: mol_type = other DNA
aggctgtgagggcagagaga

SEQ ID NO: 40450 - DNA, 20 bp, synthetic construct
  source 1..20: mol_type = other DNA
gggccttacaggttttcacc

SEQ ID NO: 40451 - DNA, 20 bp, synthetic construct
  source 1..20: mol_type = other DNA
gcctacctgtgtagccagct

SEQ ID NO: 40452 - DNA, 20 bp, synthetic construct
  source 1..20: mol_type = other DNA
gtaagggattccaggactgc

SEQ ID NO: 40453 - DNA, 20 bp, synthetic construct
  source 1..20: mol_type = other DNA
ggccctggtggccaaacagg

SEQ ID NO: 40454 - DNA, 20 bp, synthetic construct
  source 1..20: mol_type = other DNA
gtactcaccctccctggaga

SEQ ID NO: 40455 - DNA, 20 bp, synthetic construct
  source 1..20: mol_type = other DNA
gcagcgctgcagagcggcgg

SEQ ID NO: 40456 - DNA, 20 bp, synthetic construct
  source 1..20: mol_type = other DNA
cccggaatcctttggcaaag

SEQ ID NO: 40457 - DNA, 20 bp, synthetic construct
  source 1..20: mol_type = other DNA
gccgggggccccggcggcgg

SEQ ID NO: 40458 - DNA, 20 bp, synthetic construct
  source 1..20: mol_type = other DNA
acagaagaatgatccatttg

SEQ ID NO: 40459 - DNA, 20 bp, synthetic construct
  source 1..20: mol_type = other DNA
catgcagatgcggcactgga

SEQ ID NO: 40460 - DNA, 20 bp, synthetic construct
  source 1..20: mol_type = other DNA
agcattgaagagatccctga

SEQ ID NO: 40461 - DNA, 20 bp, synthetic construct
  source 1..20: mol_type = other DNA
tggcgagatcagtatctgca

SEQ ID NO: 40462 - DNA, 20 bp, synthetic construct
  source 1..20: mol_type = other DNA
gtgatccaggaagaccctgg

SEQ ID NO: 40463 - DNA, 20 bp, synthetic construct
  source 1..20: mol_type = other DNA
ggagctgaacaacaaatgtt

SEQ ID NO: 40464 - DNA, 20 bp, synthetic construct
  source 1..20: mol_type = other DNA
tctgccagtgctatattggc

SEQ ID NO: 40465 - DNA, 20 bp, synthetic construct
  source 1..20: mol_type = other DNA
caagacggtgtccagctcgg

SEQ ID NO: 40466 - DNA, 20 bp, synthetic construct
  source 1..20: mol_type = other DNA
tactgtccctaggagcaagg

SEQ ID NO: 40467 - DNA, 20 bp, synthetic construct
  source 1..20: mol_type = other DNA
cacactgtgcccatctacga

SEQ ID NO: 40468 - DNA, 20 bp, synthetic construct
  source 1..20: mol_type = other DNA
caagtcccagctcaaggtga

SEQ ID NO: 40469 - DNA, 20 bp, synthetic construct
  source 1..20: mol_type = other DNA
atcagtctgaagcacctgta

SEQ ID NO: 40470 - DNA, 20 bp, synthetic construct
  source 1..20: mol_type = other DNA
caccgtcttcccatagatga

SEQ ID NO: 40471 - DNA, 20 bp, synthetic construct
  source 1..20: mol_type = other DNA
gctgtctcgtagaaggcctg

SEQ ID NO: 40472 - DNA, 20 bp, synthetic construct
  source 1..20: mol_type = other DNA
gcagcagcacagcgtgcagg

SEQ ID NO: 40473 - DNA, 20 bp, synthetic construct
  source 1..20: mol_type = other DNA
gtgcagcacctcggcgtccg

SEQ ID NO: 40474 - DNA, 20 bp, synthetic construct
  source 1..20: mol_type = other DNA
gctcatgaggtctcccaagc

SEQ ID NO: 40475 - DNA, 20 bp, synthetic construct
  source 1..20: mol_type = other DNA
gggtcactgagcttgatgaa

SEQ ID NO: 40476 - DNA, 20 bp, synthetic construct
  source 1..20: mol_type = other DNA
caaaagaagccacactggta

SEQ ID NO: 40477 - DNA, 20 bp, synthetic construct
  source 1..20: mol_type = other DNA
ttgcctaggatgacccccta

SEQ ID NO: 40478 - DNA, 20 bp, synthetic construct
  source 1..20: mol_type = other DNA
cagtcctcacgtggttcaca

SEQ ID NO: 40479 - DNA, 20 bp, synthetic construct
  source 1..20: mol_type = other DNA
ctcgtggaggcctgcggggt

SEQ ID NO: 40480 - DNA, 20 bp, synthetic construct
  source 1..20: mol_type = other DNA
ctcacctgctgggctgggcg

SEQ ID NO: 40481 - DNA, 20 bp, synthetic construct
  source 1..20: mol_type = other DNA
ccccatacaggcatcagctg

SEQ ID NO: 40482 - DNA, 20 bp, synthetic construct
  source 1..20: mol_type = other DNA
ggctctgagaactccgatgg

SEQ ID NO: 40483 - DNA, 20 bp, synthetic construct
  source 1..20: mol_type = other DNA
catagagctggaagatgacc

SEQ ID NO: 40484 - DNA, 20 bp, synthetic construct
  source 1..20: mol_type = other DNA
gccacaggtaagcctcatca

SEQ ID NO: 40485 - DNA, 20 bp, synthetic construct
  source 1..20: mol_type = other DNA
aggaatcagaggcaaagtgg

SEQ ID NO: 40486 - DNA, 20 bp, synthetic construct
  source 1..20: mol_type = other DNA
catgcagaaatgtgtcagtc

SEQ ID NO: 40487 - DNA, 20 bp, synthetic construct
  source 1..20: mol_type = other DNA
cctcacccccacgagcttgt

SEQ ID NO: 40488 - DNA, 20 bp, synthetic construct
  source 1..20: mol_type = other DNA
atcaaggtcagcactgcgcc

SEQ ID NO: 40489 - DNA, 20 bp, synthetic construct
  source 1..20: mol_type = other DNA
acgcatgccaggcctggttg

SEQ ID NO: 40490 - DNA, 20 bp, synthetic construct
  source 1..20: mol_type = other DNA
atggcaaagtccagactgtg

SEQ ID NO: 40491 - DNA, 20 bp, synthetic construct
  source 1..20: mol_type = other DNA
tccaacccatcctggtggac

SEQ ID NO: 40492 - DNA, 20 bp, synthetic construct
  source 1..20: mol_type = other DNA
tgaactgagggcctggtgag

SEQ ID NO: 40493 - DNA, 20 bp, synthetic construct
  source 1..20: mol_type = other DNA
aagatctactgagtccctag

SEQ ID NO: 40494 - DNA, 20 bp, synthetic construct
  source 1..20: mol_type = other DNA
gcatgtcctgtggagggaag

SEQ ID NO: 40495 - DNA, 20 bp, synthetic construct
  source 1..20: mol_type = other DNA
atctgcatgtttgcgtctgc

SEQ ID NO: 40496 - DNA, 20 bp, synthetic construct
  source 1..20: mol_type = other DNA
actctccaggcttaacacag

SEQ ID NO: 40497 - DNA, 20 bp, synthetic construct
  source 1..20: mol_type = other DNA
acacatgagaatgttggccc

SEQ ID NO: 40498 - DNA, 20 bp, synthetic construct
  source 1..20: mol_type = other DNA
agggtctacctgaacgggga

SEQ ID NO: 40499 - DNA, 20 bp, synthetic construct
  source 1..20: mol_type = other DNA
cccgcacctgaaactcatac

SEQ ID NO: 40500 - DNA, 20 bp, synthetic construct
  source 1..20: mol_type = other DNA
gccacagtagtcacaggcga

SEQ ID NO: 40501 - DNA, 20 bp, synthetic construct
  source 1..20: mol_type = other DNA
cccaccagggcgagcagtgg

SEQ ID NO: 40502 - DNA, 20 bp, synthetic construct
  source 1..20: mol_type = other DNA
aacgctacacgtttcgtgtt

SEQ ID NO: 40503 - DNA, 20 bp, synthetic construct
  source 1..20: mol_type = other DNA
aggtcgttctgtaggaaatg

SEQ ID NO: 40504 - DNA, 20 bp, synthetic construct
  source 1..20: mol_type = other DNA
tccacaggtggctgcaggaa

SEQ ID NO: 40505 - DNA, 20 bp, synthetic construct
  source 1..20: mol_type = other DNA
tgggctttatcagtaaggag

SEQ ID NO: 40506 - DNA, 20 bp, synthetic construct
  source 1..20: mol_type = other DNA
tccagatgcttcctgaaact

SEQ ID NO: 40507 - DNA, 20 bp, synthetic construct
  source 1..20: mol_type = other DNA
gttcactgaaaaacaagaaa

SEQ ID NO: 40508 - DNA, 20 bp, synthetic construct
  source 1..20: mol_type = other DNA
cctgaggcttctcttcacct

SEQ ID NO: 40509 - DNA, 20 bp, synthetic construct
  source 1..20: mol_type = other DNA
tcagaataggctccatgtag

SEQ ID NO: 40510 - DNA, 20 bp, synthetic construct
  source 1..20: mol_type = other DNA
gaaacagatgacgaaaacgt

SEQ ID NO: 40511 - DNA, 20 bp, synthetic construct
  source 1..20: mol_type = other DNA
tggcagtcctgcacatacct

SEQ ID NO: 40512 - DNA, 20 bp, synthetic construct
  source 1..20: mol_type = other DNA
gaaggcagagcaccaggtgg

SEQ ID NO: 40513 - DNA, 20 bp, synthetic construct
  source 1..20: mol_type = other DNA
agcaggagcgctacatcgaa

SEQ ID NO: 40514 - DNA, 20 bp, synthetic construct
  source 1..20: mol_type = other DNA
ggagcgtctgagccgggaga

SEQ ID NO: 40515 - DNA, 20 bp, synthetic construct
  source 1..20: mol_type = other DNA
cggcgcgccctcggacgccg

SEQ ID NO: 40516 - DNA, 20 bp, synthetic construct
  source 1..20: mol_type = other DNA
tgcagcgacagcccatgcgc

SEQ ID NO: 40517 - DNA, 20 bp, synthetic construct
  source 1..20: mol_type = other DNA
ggagtacaggcgctttgaga

SEQ ID NO: 40518 - DNA, 20 bp, synthetic construct
  source 1..20: mol_type = other DNA
gaagtttttcagctttgtct

SEQ ID NO: 40519 - DNA, 20 bp, synthetic construct
  source 1..20: mol_type = other DNA
tgtccaagtcccctatttcc

SEQ ID NO: 40520 - DNA, 20 bp, synthetic construct
  source 1..20: mol_type = other DNA
aggagatgcagaagcctcag

SEQ ID NO: 40521 - DNA, 20 bp, synthetic construct
  source 1..20: mol_type = other DNA
tgagattgggatgaaaggcg

SEQ ID NO: 40522 - DNA, 20 bp, synthetic construct
  source 1..20: mol_type = other DNA
caggtaagtggcccccgcgg

SEQ ID NO: 40523 - DNA, 20 bp, synthetic construct
  source 1..20: mol_type = other DNA
agaaaagtccaacctgatcg

SEQ ID NO: 40524 - DNA, 20 bp, synthetic construct
  source 1..20: mol_type = other DNA
atggcatatgtcattaatgg

SEQ ID NO: 40525 - DNA, 20 bp, synthetic construct
  source 1..20: mol_type = other DNA
cattgtggtcctggctgccg

SEQ ID NO: 40526 - DNA, 20 bp, synthetic construct
  source 1..20: mol_type = other DNA
gccaagcaccatgcgggatg

SEQ ID NO: 40527 - DNA, 20 bp, synthetic construct
  source 1..20: mol_type = other DNA
cagggtacacgcagagaggt

SEQ ID NO: 40528 - DNA, 20 bp, synthetic construct
  source 1..20: mol_type = other DNA
cggatcaacagggatacctg

SEQ ID NO: 40529 - DNA, 20 bp, synthetic construct
  source 1..20: mol_type = other DNA
agtagtgccggacctcgatg

SEQ ID NO: 40530 - DNA, 20 bp, synthetic construct
  source 1..20: mol_type = other DNA
cggaggcctacagtgagatt

SEQ ID NO: 40531 - DNA, 20 bp, synthetic construct
  source 1..20: mol_type = other DNA
ggctgacttggggatgatct

SEQ ID NO: 40532 - DNA, 20 bp, synthetic construct
  source 1..20: mol_type = other DNA
ttctaagcccttttgggtgc

SEQ ID NO: 40533 - DNA, 20 bp, synthetic construct
  source 1..20: mol_type = other DNA
acaataggagccaggcgcac

SEQ ID NO: 40534 - DNA, 20 bp, synthetic construct
  source 1..20: mol_type = other DNA
ttaccttccattgcagagaa

SEQ ID NO: 40535 - DNA, 20 bp, synthetic construct
  source 1..20: mol_type = other DNA
aagaggagtacagtgcaatg

SEQ ID NO: 40536 - DNA, 20 bp, synthetic construct
  source 1..20: mol_type = other DNA
aggacggggccgagagcaat

SEQ ID NO: 40537 - DNA, 20 bp, synthetic construct
  source 1..20: mol_type = other DNA
tctgtggaagtgctcagcat

SEQ ID NO: 40538 - DNA, 20 bp, synthetic construct
  source 1..20: mol_type = other DNA
gtgacctgcagagcctgctg

SEQ ID NO: 40539 - DNA, 20 bp, synthetic construct
  source 1..20: mol_type = other DNA
tcagcaaggcaccatgtggc

SEQ ID NO: 40540 - DNA, 20 bp, synthetic construct
  source 1..20: mol_type = other DNA
cagggccccaacggcgggat

SEQ ID NO: 40541 - DNA, 20 bp, synthetic construct
  source 1..20: mol_type = other DNA
gggcaccttggtcctcgatc

SEQ ID NO: 40542 - DNA, 20 bp, synthetic construct
  source 1..20: mol_type = other DNA
gttgcagggctgagcattcg

SEQ ID NO: 40543 - DNA, 20 bp, synthetic construct
  source 1..20: mol_type = other DNA
ctccaacacgacttcatcca

SEQ ID NO: 40544 - DNA, 20 bp, synthetic construct
  source 1..20: mol_type = other DNA
tcaccaaggaccctcctcac

SEQ ID NO: 40545 - DNA, 20 bp, synthetic construct
  source 1..20: mol_type = other DNA
ctacaaaggctatttggttg

SEQ ID NO: 40546 - DNA, 20 bp, synthetic construct
  source 1..20: mol_type = other DNA
tacataccaaaataatcaga

SEQ ID NO: 40547 - DNA, 20 bp, synthetic construct
  source 1..20: mol_type = other DNA
gaagttctatatctgaattg

SEQ ID NO: 40548 - DNA, 20 bp, synthetic construct
  source 1..20: mol_type = other DNA
cagaggtaaaacccctcccc

SEQ ID NO: 40549 - DNA, 20 bp, synthetic construct
  source 1..20: mol_type = other DNA
cagtcagacgtctggagctt

SEQ ID NO: 40550 - DNA, 20 bp, synthetic construct
  source 1..20: mol_type = other DNA
gactgctgggacggcccgga

SEQ ID NO: 40551 - DNA, 20 bp, synthetic construct
  source 1..20: mol_type = other DNA
ctgttgcagcaaaggaaagg

SEQ ID NO: 40552 - DNA, 20 bp, synthetic construct
  source 1..20: mol_type = other DNA
aatacttacgggctgagggg

SEQ ID NO: 40553 - DNA, 20 bp, synthetic construct
  source 1..20: mol_type = other DNA
cagtcagctcccggatttga

SEQ ID NO: 40554 - DNA, 20 bp, synthetic construct
  source 1..20: mol_type = other DNA
cggctcctaccagttctcca

SEQ ID NO: 40555 - DNA, 20 bp, synthetic construct
  source 1..20: mol_type = other DNA
ttccgaccttctgccttcac

SEQ ID NO: 40556 - DNA, 20 bp, synthetic construct
  source 1..20: mol_type = other DNA
gcagcgcttccctccaccgc

SEQ ID NO: 40557 - DNA, 20 bp, synthetic construct
  source 1..20: mol_type = other DNA
tggagaaacacatgaaaaag

SEQ ID NO: 40558 - DNA, 20 bp, synthetic construct
  source 1..20: mol_type = other DNA
cagacacctagtccttccga

SEQ ID NO: 40559 - DNA, 20 bp, synthetic construct
  source 1..20: mol_type = other DNA
tttgcaggcattcaaaagtg

SEQ ID NO: 40560 - DNA, 20 bp, synthetic construct
  source 1..20: mol_type = other DNA
gggcttaacttggctgatgg

SEQ ID NO: 40561 - DNA, 20 bp, synthetic construct
  source 1..20: mol_type = other DNA
agtccctgtaagtatccacg

SEQ ID NO: 40562 - DNA, 20 bp, synthetic construct
  source 1..20: mol_type = other DNA
cagaagaagcgcacgctgaa

SEQ ID NO: 40563 - DNA, 20 bp, synthetic construct
  source 1..20: mol_type = other DNA
tgcttggctttcaatccact

SEQ ID NO: 40564 - DNA, 20 bp, synthetic construct
  source 1..20: mol_type = other DNA
gctcttcctcgagccgcgtg

SEQ ID NO: 40565 - DNA, 20 bp, synthetic construct
  source 1..20: mol_type = other DNA
ggatcaacagggatacctga

SEQ ID NO: 40566 - DNA, 20 bp, synthetic construct
  source 1..20: mol_type = other DNA
ctgtttcagtttcaccacct

SEQ ID NO: 40567 - DNA, 20 bp, synthetic construct
  source 1..20: mol_type = other DNA
agtgcattgtgttgcaggat

SEQ ID NO: 40568 - DNA, 20 bp, synthetic construct
  source 1..20: mol_type = other DNA
agagggtcatcacacacaag

SEQ ID NO: 40569 - DNA, 20 bp, synthetic construct
  source 1..20: mol_type = other DNA
gtgcagtggtctgggggttg

SEQ ID NO: 40570 - DNA, 20 bp, synthetic construct
  source 1..20: mol_type = other DNA
tggaggtaaggagctggtcg

SEQ ID NO: 40571 - DNA, 20 bp, synthetic construct
  source 1..20: mol_type = other DNA
gcagcgggagctggagcaag

SEQ ID NO: 40572 - DNA, 20 bp, synthetic construct
  source 1..20: mol_type = other DNA
gagggagtcagtgggcatag

SEQ ID NO: 40573 - DNA, 20 bp, synthetic construct
  source 1..20: mol_type = other DNA
ggtgacagcggccgtcgttg

SEQ ID NO: 40574 - DNA, 20 bp, synthetic construct
  source 1..20: mol_type = other DNA
ttaacaggtggtgtattcga

SEQ ID NO: 40575 - DNA, 20 bp, synthetic construct
  source 1..20: mol_type = other DNA
aaccaccaccagcacccaaa

SEQ ID NO: 40576 - DNA, 20 bp, synthetic construct
  source 1..20: mol_type = other DNA
cggccgcctgcacaacaagc

SEQ ID NO: 40577 - DNA, 20 bp, synthetic construct
  source 1..20: mol_type = other DNA
gcagttgatgcagctgaagg

SEQ ID NO: 40578 - DNA, 20 bp, synthetic construct
  source 1..20: mol_type = other DNA
cttatcttctgaagatacac

SEQ ID NO: 40579 - DNA, 20 bp, synthetic construct
  source 1..20: mol_type = other DNA
caagtactacactcctgtgc

SEQ ID NO: 40580 - DNA, 20 bp, synthetic construct
  source 1..20: mol_type = other DNA
agcttctttgatattactga

SEQ ID NO: 40581 - DNA, 20 bp, synthetic construct
  source 1..20: mol_type = other DNA
accgagcgcagcacgggccg

SEQ ID NO: 40582 - DNA, 20 bp, synthetic construct
  source 1..20: mol_type = other DNA
caagtacatcctggacaagg

SEQ ID NO: 40583 - DNA, 20 bp, synthetic construct
  source 1..20: mol_type = other DNA
gcagaagggctggaggacct

SEQ ID NO: 40584 - DNA, 20 bp, synthetic construct
  source 1..20: mol_type = other DNA
cctcatctggacagttaggt

SEQ ID NO: 40585 - DNA, 20 bp, synthetic construct
  source 1..20: mol_type = other DNA
tccctaccctggctggacgg

SEQ ID NO: 40586 - DNA, 20 bp, synthetic construct
  source 1..20: mol_type = other DNA
caggcctgcccagctgccag

SEQ ID NO: 40587 - DNA, 20 bp, synthetic construct
  source 1..20: mol_type = other DNA
caggttccaccgtggcgtac

SEQ ID NO: 40588 - DNA, 20 bp, synthetic construct
  source 1..20: mol_type = other DNA
actgggaccaggacacggac

SEQ ID NO: 40589 - DNA, 20 bp, synthetic construct
  source 1..20: mol_type = other DNA
ccaaagtagcagaggcagct

SEQ ID NO: 40590 - DNA, 20 bp, synthetic construct
  source 1..20: mol_type = other DNA
gacccaccatcatggcctgc

SEQ ID NO: 40591 - DNA, 20 bp, synthetic construct
  source 1..20: mol_type = other DNA
ctgaaaattccttcagtgac

SEQ ID NO: 40592 - DNA, 20 bp, synthetic construct
  source 1..20: mol_type = other DNA
caacaggatctacaacctgc

SEQ ID NO: 40593 - DNA, 20 bp, synthetic construct
  source 1..20: mol_type = other DNA
cccgcaggtggcaatggtgg

SEQ ID NO: 40594 - DNA, 20 bp, synthetic construct
  source 1..20: mol_type = other DNA
gcgggagatggggccccaca

SEQ ID NO: 40595 - DNA, 20 bp, synthetic construct
  source 1..20: mol_type = other DNA
ttccgagcggccgtcgcggc

SEQ ID NO: 40596 - DNA, 20 bp, synthetic construct
  source 1..20: mol_type = other DNA
catctggggctccgaggatc

SEQ ID NO: 40597 - DNA, 20 bp, synthetic construct
  source 1..20: mol_type = other DNA
caacaaggccccagcgggta

SEQ ID NO: 40598 - DNA, 20 bp, synthetic construct
  source 1..20: mol_type = other DNA
cagctccatctcagcctgca

SEQ ID NO: 40599 - DNA, 20 bp, synthetic construct
  source 1..20: mol_type = other DNA
acccaccatggggagttgac

SEQ ID NO: 40600 - DNA, 20 bp, synthetic construct
  source 1..20: mol_type = other DNA
gaagccggagagcagagccg

SEQ ID NO: 40601 - DNA, 20 bp, synthetic construct
  source 1..20: mol_type = other DNA
ctcggcgtccgagggcgcgc

SEQ ID NO: 40602 - DNA, 20 bp, synthetic construct
  source 1..20: mol_type = other DNA
gaaggagcaggttctggaac

SEQ ID NO: 40603 - DNA, 20 bp, synthetic construct
  source 1..20: mol_type = other DNA
tctttcactacaatggccac

SEQ ID NO: 40604 - DNA, 20 bp, synthetic construct
  source 1..20: mol_type = other DNA
gtaaatggccgcccagctcc

SEQ ID NO: 40605 - DNA, 20 bp, synthetic construct
  source 1..20: mol_type = other DNA
gcagtggtttgatggtgtcc

SEQ ID NO: 40606 - DNA, 20 bp, synthetic construct
  source 1..20: mol_type = other DNA
gacgaggcccagagcaagcg

SEQ ID NO: 40607 - DNA, 20 bp, synthetic construct
  source 1..20: mol_type = other DNA
ggtgagccacacctggaatg

SEQ ID NO: 40608 - DNA, 20 bp, synthetic construct
  source 1..20: mol_type = other DNA
caacaaccccttccaaggtg

SEQ ID NO: 40609 - DNA, 20 bp, synthetic construct
  source 1..20: mol_type = other DNA
ctcaaggctgaggctggtac

SEQ ID NO: 40610 - DNA, 20 bp, synthetic construct
  source 1..20: mol_type = other DNA
cccacagttgcgtctgatcc

SEQ ID NO: 40611 - DNA, 20 bp, synthetic construct
  source 1..20: mol_type = other DNA
cggccaggcatggacttggc

SEQ ID NO: 40612 - DNA, 20 bp, synthetic construct
  source 1..20: mol_type = other DNA
gggcgccatgggtgcgggcg

SEQ ID NO: 40613 - DNA, 20 bp, synthetic construct
  source 1..20: mol_type = other DNA
ctgcactgggctggtccagg

SEQ ID NO: 40614 - DNA, 20 bp, synthetic construct
  source 1..20: mol_type = other DNA
ttgaggggcatcgtcgcggg

SEQ ID NO: 40615 - DNA, 20 bp, synthetic construct
  source 1..20: mol_type = other DNA
gcccttggctctgacatcct

SEQ ID NO: 40616 - DNA, 20 bp, synthetic construct
  source 1..20: mol_type = other DNA
tacagccagcctttctacac

SEQ ID NO: 40617 - DNA, 20 bp, synthetic construct
  source 1..20: mol_type = other DNA
tccgtggtcggtggtaaagg

SEQ ID NO: 40618 - DNA, 20 bp, synthetic construct
  source 1..20: mol_type = other DNA
tttctggctttagatcccga

SEQ ID NO: 40619 - DNA, 20 bp, synthetic construct
  source 1..20: mol_type = other DNA
tcagggcagggccccaacgg

SEQ ID NO: 40620 - DNA, 20 bp, synthetic construct
  source 1..20: mol_type = other DNA
tgcctgactatctggaggac

SEQ ID NO: 40621 - DNA, 20 bp, synthetic construct
  source 1..20: mol_type = other DNA
accaccaccagcacccaaaa

SEQ ID NO: 40622 - DNA, 20 bp, synthetic construct
  source 1..20: mol_type = other DNA
ctggggatgcccacttcacc

SEQ ID NO: 40623 - DNA, 20 bp, synthetic construct
  source 1..20: mol_type = other DNA
gcaacaccggctctccacca

SEQ ID NO: 40624 - DNA, 20 bp, synthetic construct
  source 1..20: mol_type = other DNA
gtcacgaggcaacaacctcc

SEQ ID NO: 40625 - DNA, 20 bp, synthetic construct
  source 1..20: mol_type = other DNA
gacgcaggatggcgtggggg

SEQ ID NO: 40626 - DNA, 20 bp, synthetic construct
  source 1..20: mol_type = other DNA
ccagtgccgacgtaagtaag

SEQ ID NO: 40627 - DNA, 20 bp, synthetic construct
  source 1..20: mol_type = other DNA
catacctgggctgggagcga

SEQ ID NO: 40628 - DNA, 20 bp, synthetic construct
  source 1..20: mol_type = other DNA
caacgacggccgctgtcacc

SEQ ID NO: 40629 - DNA, 20 bp, synthetic construct
  source 1..20: mol_type = other DNA
ggcatccaggtgcatgggtg

SEQ ID NO: 40630 - DNA, 20 bp, synthetic construct
  source 1..20: mol_type = other DNA
caggacatcactttagatga

SEQ ID NO: 40631 - DNA, 20 bp, synthetic construct
  source 1..20: mol_type = other DNA
ggccctcgggcgcctgatcc

SEQ ID NO: 40632 - DNA, 20 bp, synthetic construct
  source 1..20: mol_type = other DNA
agtgctcagcccttagcaat

SEQ ID NO: 40633 - DNA, 20 bp, synthetic construct
  source 1..20: mol_type = other DNA
atgccaggtgcgcgcgcccc

SEQ ID NO: 40634 - DNA, 20 bp, synthetic construct
  source 1..20: mol_type = other DNA
gaggaggaggtgagtggggt

SEQ ID NO: 40635 - DNA, 20 bp, synthetic construct
  source 1..20: mol_type = other DNA
tttgtacaggtgagcagagt

SEQ ID NO: 40636 - DNA, 20 bp, synthetic construct
  source 1..20: mol_type = other DNA
aagaaggcctgtgggcgagc

SEQ ID NO: 40637 - DNA, 20 bp, synthetic construct
  source 1..20: mol_type = other DNA
tactcggtgacgatgtagat

SEQ ID NO: 40638 - DNA, 20 bp, synthetic construct
  source 1..20: mol_type = other DNA
cacatcaagagcagcgtggt

SEQ ID NO: 40639 - DNA, 20 bp, synthetic construct
  source 1..20: mol_type = other DNA
gaaggtggggctcctgggat

SEQ ID NO: 40640 - DNA, 20 bp, synthetic construct
  source 1..20: mol_type = other DNA
acagcactgtgttggcgtac

SEQ ID NO: 40641 - DNA, 20 bp, synthetic construct
  source 1..20: mol_type = other DNA
gagtccttaccactttcggc

SEQ ID NO: 40642 - DNA, 20 bp, synthetic construct
  source 1..20: mol_type = other DNA
gcagcgggagcggcgccggg

SEQ ID NO: 40643 - DNA, 20 bp, synthetic construct
  source 1..20: mol_type = other DNA
ccggcagcagctgggctggg

SEQ ID NO: 40644 - DNA, 20 bp, synthetic construct
  source 1..20: mol_type = other DNA
cacagaaatctccaacctgc

SEQ ID NO: 40645 - DNA, 20 bp, synthetic construct
  source 1..20: mol_type = other DNA
cgcagatctgcaaggtgcga

SEQ ID NO: 40646 - DNA, 20 bp, synthetic construct
  source 1..20: mol_type = other DNA
cttggagatcatgctggctt

SEQ ID NO: 40647 - DNA, 20 bp, synthetic construct
  source 1..20: mol_type = other DNA
gggagattttatccatgtca

SEQ ID NO: 40648 - DNA, 20 bp, synthetic construct
  source 1..20: mol_type = other DNA
gggcaacctcgaccccactg

SEQ ID NO: 40649 - DNA, 20 bp, synthetic construct
  source 1..20: mol_type = other DNA
gactgtgctgcaagacacaa

SEQ ID NO: 40650 - DNA, 20 bp, synthetic construct
  source 1..20: mol_type = other DNA
ttgtgtctacaggaagagag

SEQ ID NO: 40651 - DNA, 20 bp, synthetic construct
  source 1..20: mol_type = other DNA
ggtgcatcatggcagagatg

SEQ ID NO: 40652 - DNA, 20 bp, synthetic construct
  source 1..20: mol_type = other DNA
cctgcaccaccagctgtaga

SEQ ID NO: 40653 - DNA, 20 bp, synthetic construct
  source 1..20: mol_type = other DNA
ctcacacactgtggggggtg

SEQ ID NO: 40654 - DNA, 20 bp, synthetic construct
  source 1..20: mol_type = other DNA
ccagcagagggactttcagc

SEQ ID NO: 40655 - DNA, 20 bp, synthetic construct
  source 1..20: mol_type = other DNA
actgcccagaggccgagcag

SEQ ID NO: 40656 - DNA, 20 bp, synthetic construct
  source 1..20: mol_type = other DNA
gctgtcaggagtcggccagg

SEQ ID NO: 40657 - DNA, 20 bp, synthetic construct
  source 1..20: mol_type = other DNA
gcagtgggcatggaagagaa

SEQ ID NO: 40658 - DNA, 20 bp, synthetic construct
  source 1..20: mol_type = other DNA
ctcacggcacagcaccctca

SEQ ID NO: 40659 - DNA, 20 bp, synthetic construct
  source 1..20: mol_type = other DNA
ccccagggccttacgggtat

SEQ ID NO: 40660 - DNA, 20 bp, synthetic construct
  source 1..20: mol_type = other DNA
ccaggtgcgtgtgggagacc

SEQ ID NO: 40661 - DNA, 20 bp, synthetic construct
  source 1..20: mol_type = other DNA
ggccaaactgagctagagga

SEQ ID NO: 40662 - DNA, 20 bp, synthetic construct
  source 1..20: mol_type = other DNA
gagcaccgcgggtgagcggg

SEQ ID NO: 40663 - DNA, 20 bp, synthetic construct
  source 1..20: mol_type = other DNA
gagatttctgtggaagagat

SEQ ID NO: 40664 - DNA, 20 bp, synthetic construct
  source 1..20: mol_type = other DNA
cctggcgggcctcctcctgc

SEQ ID NO: 40665 - DNA, 20 bp, synthetic construct
  source 1..20: mol_type = other DNA
ctgcttgagagtcagcaggg

SEQ ID NO: 40666 - DNA, 20 bp, synthetic construct
  source 1..20: mol_type = other DNA
cagaaaacatcccagaaaag

SEQ ID NO: 40667 - DNA, 20 bp, synthetic construct
  source 1..20: mol_type = other DNA
ccccaaacaggccatccgtg

SEQ ID NO: 40668 - DNA, 20 bp, synthetic construct
  source 1..20: mol_type = other DNA
gctttgaaaaaaaaagaaag

SEQ ID NO: 40669 - DNA, 20 bp, synthetic construct
  source 1..20: mol_type = other DNA
gcctagacagcaccgtaatg

SEQ ID NO: 40670 - DNA, 20 bp, synthetic construct
  source 1..20: mol_type = other DNA
agggtgtagatgacctgtga

SEQ ID NO: 40671 - DNA, 20 bp, synthetic construct
  source 1..20: mol_type = other DNA
cgtccacaaacatcctgtag

SEQ ID NO: 40672 - DNA, 20 bp, synthetic construct
  source 1..20: mol_type = other DNA
cccgggagcagatgacggcc

SEQ ID NO: 40673 - DNA, 20 bp, synthetic construct
  source 1..20: mol_type = other DNA
ggggatcttctgggagtcaa

SEQ ID NO: 40674 - DNA, 20 bp, synthetic construct
  source 1..20: mol_type = other DNA
attcctacaatctcttctca

SEQ ID NO: 40675 - DNA, 20 bp, synthetic construct
  source 1..20: mol_type = other DNA
cctgatggagaaatcccgcg

SEQ ID NO: 40676 - DNA, 20 bp, synthetic construct
  source 1..20: mol_type = other DNA
tgtggaggacgtattctcca

SEQ ID NO: 40677 - DNA, 20 bp, synthetic construct
  source 1..20: mol_type = other DNA
agagccaaaggtgacctatc

SEQ ID NO: 40678 - DNA, 20 bp, synthetic construct
  source 1..20: mol_type = other DNA
atcagcaccaagcaggtcat

SEQ ID NO: 40679 - DNA, 20 bp, synthetic construct
  source 1..20: mol_type = other DNA
ggtgtgggtgcggatatggg

SEQ ID NO: 40680 - DNA, 20 bp, synthetic construct
  source 1..20: mol_type = other DNA
acctcatctggacagttagg

SEQ ID NO: 40681 - DNA, 20 bp, synthetic construct
  source 1..20: mol_type = other DNA
agcgcggcccagacggcgac

SEQ ID NO: 40682 - DNA, 20 bp, synthetic construct
  source 1..20: mol_type = other DNA
cctcttacttacgtcggcac

SEQ ID NO: 40683 - DNA, 20 bp, synthetic construct
  source 1..20: mol_type = other DNA
tgcaggtgagtcacggctgc

SEQ ID NO: 40684 - DNA, 20 bp, synthetic construct
  source 1..20: mol_type = other DNA
ctggccctgctggtacgcgg

SEQ ID NO: 40685 - DNA, 20 bp, synthetic construct
  source 1..20: mol_type = other DNA
ctttaagaacggggatggtg

SEQ ID NO: 40686 - DNA, 20 bp, synthetic construct
  source 1..20: mol_type = other DNA
ctgcccacgcatgccaggcc

SEQ ID NO: 40687 - DNA, 20 bp, synthetic construct
  source 1..20: mol_type = other DNA
gacagtcgagaacgaaggtg

SEQ ID NO: 40688 - DNA, 20 bp, synthetic construct
  source 1..20: mol_type = other DNA
ggctcctacctgtgctggac

SEQ ID NO: 40689 - DNA, 20 bp, synthetic construct
  source 1..20: mol_type = other DNA
gccgggctcgggggagctgg

SEQ ID NO: 40690 - DNA, 20 bp, synthetic construct
  source 1..20: mol_type = other DNA
agatctgcgaggaatagaga

SEQ ID NO: 40691 - DNA, 20 bp, synthetic construct
  source 1..20: mol_type = other DNA
caagtaggcatcagtgttca

SEQ ID NO: 40692 - DNA, 20 bp, synthetic construct
  source 1..20: mol_type = other DNA
tgggctgggagcgaagggta

SEQ ID NO: 40693 - DNA, 20 bp, synthetic construct
  source 1..20: mol_type = other DNA
tcataaaaaatacaatgccc

SEQ ID NO: 40694 - DNA, 20 bp, synthetic construct
  source 1..20: mol_type = other DNA
cagagagtcctcttcaccga

SEQ ID NO: 40695 - DNA, 20 bp, synthetic construct
  source 1..20: mol_type = other DNA
gctgaaagaaacaatacagg

SEQ ID NO: 40696 - DNA, 20 bp, synthetic construct
  source 1..20: mol_type = other DNA
acatttgagttgtgtcaatc

SEQ ID NO: 40697 - DNA, 20 bp, synthetic construct
  source 1..20: mol_type = other DNA
gcaggacgttgcgggccgcc

SEQ ID NO: 40698 - DNA, 20 bp, synthetic construct
  source 1..20: mol_type = other DNA
tcagcagaagcgagcagtcc

SEQ ID NO: 40699 - DNA, 20 bp, synthetic construct
  source 1..20: mol_type = other DNA
atttctggaaagtcgcagaa

SEQ ID NO: 40700 - DNA, 20 bp, synthetic construct
  source 1..20: mol_type = other DNA
ccgcggtgctctcgctctcc

SEQ ID NO: 40701 - DNA, 20 bp, synthetic construct
  source 1..20: mol_type = other DNA
gacccactccttgccagttg

SEQ ID NO: 40702 - DNA, 20 bp, synthetic construct
  source 1..20: mol_type = other DNA
cctcccagctcaccctgctg

SEQ ID NO: 40703 - DNA, 20 bp, synthetic construct
  source 1..20: mol_type = other DNA
ggagcacctctttgcccagg

SEQ ID NO: 40704 - DNA, 20 bp, synthetic construct
  source 1..20: mol_type = other DNA
ttacatggaaagctcatctt

SEQ ID NO: 40705 - DNA, 20 bp, synthetic construct
  source 1..20: mol_type = other DNA
aggtgaataggtcagccggg

SEQ ID NO: 40706 - DNA, 20 bp, synthetic construct
  source 1..20: mol_type = other DNA
tccaccaccatcccagctcc

SEQ ID NO: 40707 - DNA, 20 bp, synthetic construct
  source 1..20: mol_type = other DNA
tgcagaagcctcagtggtac

SEQ ID NO: 40708 - DNA, 20 bp, synthetic construct
  source 1..20: mol_type = other DNA
gctgaccttgagatcacagg

SEQ ID NO: 40709 - DNA, 20 bp, synthetic construct
  source 1..20: mol_type = other DNA
tggtggtgtagctgatgaga

SEQ ID NO: 40710 - DNA, 20 bp, synthetic construct
  source 1..20: mol_type = other DNA
acgccctcactggccacctg

SEQ ID NO: 40711 - DNA, 20 bp, synthetic construct
  source 1..20: mol_type = other DNA
aatacttacagaaaagaagc

SEQ ID NO: 40712 - DNA, 20 bp, synthetic construct
  source 1..20: mol_type = other DNA
cgcagaagggctggaggacc

SEQ ID NO: 40713 - DNA, 20 bp, synthetic construct
  source 1..20: mol_type = other DNA
ctacaagatgaaggaagagc

SEQ ID NO: 40714 - DNA, 20 bp, synthetic construct
  source 1..20: mol_type = other DNA
ggccagcgggacctgtattc

SEQ ID NO: 40715 - DNA, 20 bp, synthetic construct
  source 1..20: mol_type = other DNA
cagccatgcatctggcgctg

SEQ ID NO: 40716 - DNA, 20 bp, synthetic construct
  source 1..20: mol_type = other DNA
tgcaggactgccccattgcc

SEQ ID NO: 40717 - DNA, 20 bp, synthetic construct
  source 1..20: mol_type = other DNA
ccaggtatagtgtgtcaggg

SEQ ID NO: 40718 - DNA, 20 bp, synthetic construct
  source 1..20: mol_type = other DNA
taaaggatacggtctgtacc

SEQ ID NO: 40719 - DNA, 20 bp, synthetic construct
  source 1..20: mol_type = other DNA
tacaggatgcttgccaaaag

SEQ ID NO: 40720 - DNA, 20 bp, synthetic construct
  source 1..20: mol_type = other DNA
gataccttttctctggttct

SEQ ID NO: 40721 - DNA, 20 bp, synthetic construct
  source 1..20: mol_type = other DNA
agcctggccagcaaggtgga

SEQ ID NO: 40722 - DNA, 20 bp, synthetic construct
  source 1..20: mol_type = other DNA
tcagaaaacggcaataactg

SEQ ID NO: 40723 - DNA, 20 bp, synthetic construct
  source 1..20: mol_type = other DNA
aaactctagccactcgtcct

SEQ ID NO: 40724 - DNA, 20 bp, synthetic construct
  source 1..20: mol_type = other DNA
gaaggctggaagagtgcctc

SEQ ID NO: 40725 - DNA, 20 bp, synthetic construct
  source 1..20: mol_type = other DNA
tgaagcaggtcaggcaagct

SEQ ID NO: 40726 - DNA, 20 bp, synthetic construct
  source 1..20: mol_type = other DNA
gagctcgtgaacctgagggg

SEQ ID NO: 40727 - DNA, 20 bp, synthetic construct
  source 1..20: mol_type = other DNA
agtaggagaactgggggaag

SEQ ID NO: 40728 - DNA, 20 bp, synthetic construct
  source 1..20: mol_type = other DNA
tctactcgcgcgaccccgac

SEQ ID NO: 40729 - DNA, 20 bp, synthetic construct
  source 1..20: mol_type = other DNA
ggggaactgggtgagaaaga

SEQ ID NO: 40730 - DNA, 20 bp, synthetic construct
  source 1..20: mol_type = other DNA
cagatcttcaggcaaagtcc

SEQ ID NO: 40731 - DNA, 20 bp, synthetic construct
  source 1..20: mol_type = other DNA
gtttccaagaccagtctctg

SEQ ID NO: 40732 - DNA, 20 bp, synthetic construct
  source 1..20: mol_type = other DNA
ggcagaccggcactcgctca

SEQ ID NO: 40733 - DNA, 20 bp, synthetic construct
  source 1..20: mol_type = other DNA
ccaagcatggtaggtgaaca

SEQ ID NO: 40734 - DNA, 20 bp, synthetic construct
  source 1..20: mol_type = other DNA
tcaacagctttagctgccaa

SEQ ID NO: 40735 - DNA, 20 bp, synthetic construct
  source 1..20: mol_type = other DNA
agaaatctccaacctgctgg

SEQ ID NO: 40736 - DNA, 20 bp, synthetic construct
  source 1..20: mol_type = other DNA
ctcaaacaccaggcagatgg

SEQ ID NO: 40737 - DNA, 20 bp, synthetic construct
  source 1..20: mol_type = other DNA
ccactacctgtgccacgagg

SEQ ID NO: 40738 - DNA, 20 bp, synthetic construct
  source 1..20: mol_type = other DNA
cggagcccgtgtggaagcag

SEQ ID NO: 40739 - DNA, 20 bp, synthetic construct
  source 1..20: mol_type = other DNA
gctgcggtcctcggggaagg

SEQ ID NO: 40740 - DNA, 20 bp, synthetic construct
  source 1..20: mol_type = other DNA
tatcctgcagcagatggctg

SEQ ID NO: 40741 - DNA, 20 bp, synthetic construct
  source 1..20: mol_type = other DNA
attttagagaggagcaagca

SEQ ID NO: 40742 - DNA, 20 bp, synthetic construct
  source 1..20: mol_type = other DNA
aatgtgctgcatgggacaca

SEQ ID NO: 40743 - DNA, 20 bp, synthetic construct
  source 1..20: mol_type = other DNA
tctgcgaaaacgtggccacc

SEQ ID NO: 40744 - DNA, 20 bp, synthetic construct
  source 1..20: mol_type = other DNA
aggacctggagcagcgcagc

SEQ ID NO: 40745 - DNA, 20 bp, synthetic construct
  source 1..20: mol_type = other DNA
agagaacacaggcacggctg

SEQ ID NO: 40746 - DNA, 20 bp, synthetic construct
  source 1..20: mol_type = other DNA
ggctgcgccaggggtgccca

SEQ ID NO: 40747 - DNA, 20 bp, synthetic construct
  source 1..20: mol_type = other DNA
atccccctgttctgggcgat

SEQ ID NO: 40748 - DNA, 20 bp, synthetic construct
  source 1..20: mol_type = other DNA
agtgatgtcctgcagaccaa

SEQ ID NO: 40749 - DNA, 20 bp, synthetic construct
  source 1..20: mol_type = other DNA
gctcagggacacagggcacg

SEQ ID NO: 40750 - DNA, 20 bp, synthetic construct
  source 1..20: mol_type = other DNA
ggggcgggcacgccccctgc

SEQ ID NO: 40751 - DNA, 20 bp, synthetic construct
  source 1..20: mol_type = other DNA
cagtctctgcggggaaagga

SEQ ID NO: 40752 - DNA, 20 bp, synthetic construct
  source 1..20: mol_type = other DNA
gccttcacttcaggtaatgg

SEQ ID NO: 40753 - DNA, 20 bp, synthetic construct
  source 1..20: mol_type = other DNA
gccgcagagctgactgatga

SEQ ID NO: 40754 - DNA, 20 bp, synthetic construct
  source 1..20: mol_type = other DNA
cttggctctaacctgggtaa

SEQ ID NO: 40755 - DNA, 20 bp, synthetic construct
  source 1..20: mol_type = other DNA
gtacgagaactggcagccaa

SEQ ID NO: 40756 - DNA, 20 bp, synthetic construct
  source 1..20: mol_type = other DNA
cagccacgaagtactgatgc

SEQ ID NO: 40757 - DNA, 20 bp, synthetic construct
  source 1..20: mol_type = other DNA
catgctggctgcctcgaaga

SEQ ID NO: 40758 - DNA, 20 bp, synthetic construct
  source 1..20: mol_type = other DNA
ctcctccgcggcggcagcgg

SEQ ID NO: 40759 - DNA, 20 bp, synthetic construct
  source 1..20: mol_type = other DNA
tttagtgactcagaaatcgg

SEQ ID NO: 40760 - DNA, 20 bp, synthetic construct
  source 1..20: mol_type = other DNA
aggacagatacacacaggca

SEQ ID NO: 40761 - DNA, 20 bp, synthetic construct
  source 1..20: mol_type = other DNA
tattaactaaaacaaaagga

SEQ ID NO: 40762 - DNA, 20 bp, synthetic construct
  source 1..20: mol_type = other DNA
ggcatgtgagaggatgggag

SEQ ID NO: 40763 - DNA, 20 bp, synthetic construct
  source 1..20: mol_type = other DNA
gacatgatcaccatcttcat

SEQ ID NO: 40764 - DNA, 20 bp, synthetic construct
  source 1..20: mol_type = other DNA
gtggaagagcggctcatact

SEQ ID NO: 40765 - DNA, 20 bp, synthetic construct
  source 1..20: mol_type = other DNA
atagttgaggtgctcctgtg

SEQ ID NO: 40766 - DNA, 20 bp, synthetic construct
  source 1..20: mol_type = other DNA
tggacaagggattaatagta

SEQ ID NO: 40767 - DNA, 20 bp, synthetic construct
  source 1..20: mol_type = other DNA
cggggaactcaagatcacct

SEQ ID NO: 40768 - DNA, 20 bp, synthetic construct
  source 1..20: mol_type = other DNA
cgactgcatctttgtttcat

SEQ ID NO: 40769 - DNA, 20 bp, synthetic construct
  source 1..20: mol_type = other DNA
gcaaattgtggtagctcttg

SEQ ID NO: 40770 - DNA, 20 bp, synthetic construct
  source 1..20: mol_type = other DNA
acagagagtcctcttcaccg

SEQ ID NO: 40771 - DNA, 20 bp, synthetic construct
  source 1..20: mol_type = other DNA
gtatgcccccgaatccctct

SEQ ID NO: 40772 - DNA, 20 bp, synthetic construct
  source 1..20: mol_type = other DNA
ggtcatgctgcagctggagg

SEQ ID NO: 40773 - DNA, 20 bp, synthetic construct
  source 1..20: mol_type = other DNA
tggggcttctgggtctggca

SEQ ID NO: 40774 - DNA, 20 bp, synthetic construct
  source 1..20: mol_type = other DNA
gagcagagccgaggtccggc

SEQ ID NO: 40775 - DNA, 20 bp, synthetic construct
  source 1..20: mol_type = other DNA
cgccgccgcccccgggctcg

SEQ ID NO: 40776 - DNA, 20 bp, synthetic construct
  source 1..20: mol_type = other DNA
gcttccaatgcaaacaggaa

SEQ ID NO: 40777 - DNA, 20 bp, synthetic construct
  source 1..20: mol_type = other DNA
gaaaacatcgtcctgcagca

SEQ ID NO: 40778 - DNA, 20 bp, synthetic construct
  source 1..20: mol_type = other DNA
atagaaagtgaataggcacc

SEQ ID NO: 40779 - DNA, 20 bp, synthetic construct
  source 1..20: mol_type = other DNA
cagacattttggcttattag

SEQ ID NO: 40780 - DNA, 20 bp, synthetic construct
  source 1..20: mol_type = other DNA
cagcgcatgtttcaagacat

SEQ ID NO: 40781 - DNA, 20 bp, synthetic construct
  source 1..20: mol_type = other DNA
cgctctgccagttccaggtg

SEQ ID NO: 40782 - DNA, 20 bp, synthetic construct
  source 1..20: mol_type = other DNA
tgccatacccaggtaagagc

SEQ ID NO: 40783 - DNA, 20 bp, synthetic construct
  source 1..20: mol_type = other DNA
cctcgttcacgcactgagcc

SEQ ID NO: 40784 - DNA, 20 bp, synthetic construct
  source 1..20: mol_type = other DNA
tggccgccacggtgcccagc

SEQ ID NO: 40785 - DNA, 20 bp, synthetic construct
  source 1..20: mol_type = other DNA
tgtctggtgctgattaaact

SEQ ID NO: 40786 - DNA, 20 bp, synthetic construct
  source 1..20: mol_type = other DNA
gcttccttctccagccaccg

SEQ ID NO: 40787 - DNA, 20 bp, synthetic construct
  source 1..20: mol_type = other DNA
ctctcctcctcggtggggaa

SEQ ID NO: 40788 - DNA, 20 bp, synthetic construct
  source 1..20: mol_type = other DNA
agctctaggtcactgtctcc

SEQ ID NO: 40789 - DNA, 20 bp, synthetic construct
  source 1..20: mol_type = other DNA
tgccagcaggtagtcggggc

SEQ ID NO: 40790 - DNA, 20 bp, synthetic construct
  source 1..20: mol_type = other DNA
acacactgggtgagcagggc

SEQ ID NO: 40791 - DNA, 20 bp, synthetic construct
  source 1..20: mol_type = other DNA
gttgcccttctgggtgaatg

SEQ ID NO: 40792 - DNA, 20 bp, synthetic construct
  source 1..20: mol_type = other DNA
gaccacagcagttctcaaac

SEQ ID NO: 40793 - DNA, 20 bp, synthetic construct
  source 1..20: mol_type = other DNA
ggatgatggactgcagctcc

SEQ ID NO: 40794 - DNA, 20 bp, synthetic construct
  source 1..20: mol_type = other DNA
cagcgcggcccagacggcga

SEQ ID NO: 40795 - DNA, 20 bp, synthetic construct
  source 1..20: mol_type = other DNA
gagatccattgacaatgtaa

SEQ ID NO: 40796 - DNA, 20 bp, synthetic construct
  source 1..20: mol_type = other DNA
tgactaggctccggacaacc

SEQ ID NO: 40797 - DNA, 20 bp, synthetic construct
  source 1..20: mol_type = other DNA
tgcagcacctcggcgtccga

SEQ ID NO: 40798 - DNA, 20 bp, synthetic construct
  source 1..20: mol_type = other DNA
tccacatggtcagcctctgc

SEQ ID NO: 40799 - DNA, 20 bp, synthetic construct
  source 1..20: mol_type = other DNA
aggtaccctccgacccacca

SEQ ID NO: 40800 - DNA, 20 bp, synthetic construct
  source 1..20: mol_type = other DNA
cgtgatggtggcgttgacct

SEQ ID NO: 40801 - DNA, 20 bp, synthetic construct
  source 1..20: mol_type = other DNA
atgagagattctagaatggc

SEQ ID NO: 40802 - DNA, 20 bp, synthetic construct
  source 1..20: mol_type = other DNA
gcttggcagcatgcttccat

SEQ ID NO: 40803 - DNA, 20 bp, synthetic construct
  source 1..20: mol_type = other DNA
accaggtgcatcgaatcact

SEQ ID NO: 40804 - DNA, 20 bp, synthetic construct
  source 1..20: mol_type = other DNA
acagcaccggccgatgctgg

SEQ ID NO: 40805 - DNA, 20 bp, synthetic construct
  source 1..20: mol_type = other DNA
agcctggagaggtgtagggt

SEQ ID NO: 40806 - DNA, 20 bp, synthetic construct
  source 1..20: mol_type = other DNA
tccgtctgctcagggacaca

SEQ ID NO: 40807 - DNA, 20 bp, synthetic construct
  source 1..20: mol_type = other DNA
gaaggccagctgtcaggagt

SEQ ID NO: 40808 - DNA, 20 bp, synthetic construct
  source 1..20: mol_type = other DNA
cagcggcaagtaccccgggc

SEQ ID NO: 40809 - DNA, 20 bp, synthetic construct
  source 1..20: mol_type = other DNA
gcaggccccgcgcgttggcc

SEQ ID NO: 40810 - DNA, 20 bp, synthetic construct
  source 1..20: mol_type = other DNA
agggggtcatcctaggcaag

SEQ ID NO: 40811 - DNA, 20 bp, synthetic construct
  source 1..20: mol_type = other DNA
ggacagggtcttccccatga

SEQ ID NO: 40812 - DNA, 20 bp, synthetic construct
  source 1..20: mol_type = other DNA
actcctcaatggctcgatcc

SEQ ID NO: 40813 - DNA, 20 bp, synthetic construct
  source 1..20: mol_type = other DNA
gggactcaccggctcagcaa

SEQ ID NO: 40814 - DNA, 20 bp, synthetic construct
  source 1..20: mol_type = other DNA
agccagcttcttgtgctgta

SEQ ID NO: 40815 - DNA, 20 bp, synthetic construct
  source 1..20: mol_type = other DNA
taccctggaagggccaaggg

SEQ ID NO: 40816 - DNA, 20 bp, synthetic construct
  source 1..20: mol_type = other DNA
gtactgcgcgctgagcaagc

SEQ ID NO: 40817 - DNA, 20 bp, synthetic construct
  source 1..20: mol_type = other DNA
ggctgctgcaaaacaggagc

SEQ ID NO: 40818 - DNA, 20 bp, synthetic construct
  source 1..20: mol_type = other DNA
cagccaacatgcccatcact

SEQ ID NO: 40819 - DNA, 20 bp, synthetic construct
  source 1..20: mol_type = other DNA
acacccggaagatgactgga

SEQ ID NO: 40820 - DNA, 20 bp, synthetic construct
  source 1..20: mol_type = other DNA
caccaaaagaggtctcaatg

SEQ ID NO: 40821 - DNA, 20 bp, synthetic construct
  source 1..20: mol_type = other DNA
attgagtgtgcgtggggtcc

SEQ ID NO: 40822 - DNA, 20 bp, synthetic construct
  source 1..20: mol_type = other DNA
gcggcggtgagacagccacg

SEQ ID NO: 40823 - DNA, 20 bp, synthetic construct
  source 1..20: mol_type = other DNA
atcacttccacctgcgggca

SEQ ID NO: 40824 - DNA, 20 bp, synthetic construct
  source 1..20: mol_type = other DNA
ggtctgtgccaccggccggt

SEQ ID NO: 40825 - DNA, 20 bp, synthetic construct
  source 1..20: mol_type = other DNA
ccagggctatgaatcacaac

SEQ ID NO: 40826 - DNA, 20 bp, synthetic construct
  source 1..20: mol_type = other DNA
catcaaaagtgccacctccc

SEQ ID NO: 40827 - DNA, 20 bp, synthetic construct
  source 1..20: mol_type = other DNA
gcttgctaatccacatctgc

SEQ ID NO: 40828 - DNA, 20 bp, synthetic construct
  source 1..20: mol_type = other DNA
aggatggccttgtctgagtc

SEQ ID NO: 40829 - DNA, 20 bp, synthetic construct
  source 1..20: mol_type = other DNA
gcactggcagaggttttcat

SEQ ID NO: 40830 - DNA, 20 bp, synthetic construct
  source 1..20: mol_type = other DNA
cccatactggatggcaccag

SEQ ID NO: 40831 - DNA, 20 bp, synthetic construct
  source 1..20: mol_type = other DNA
ccacacgcgccgcccttcgc

SEQ ID NO: 40832 - DNA, 20 bp, synthetic construct
  source 1..20: mol_type = other DNA
tgtgtggccacatatgtgct

SEQ ID NO: 40833 - DNA, 20 bp, synthetic construct
  source 1..20: mol_type = other DNA
ctgaggatgaagtgaacatg

SEQ ID NO: 40834 - DNA, 20 bp, synthetic construct
  source 1..20: mol_type = other DNA
agaggtccatcagatagtac

SEQ ID NO: 40835 - DNA, 20 bp, synthetic construct
  source 1..20: mol_type = other DNA
aattcgtacacatccaccaa

SEQ ID NO: 40836 - DNA, 20 bp, synthetic construct
  source 1..20: mol_type = other DNA
cttggggcacaggaactggg

SEQ ID NO: 40837 - DNA, 20 bp, synthetic construct
  source 1..20: mol_type = other DNA
gaaggggctgagattccagg

SEQ ID NO: 40838 - DNA, 20 bp, synthetic construct
  source 1..20: mol_type = other DNA
tatgatatggaggaacttca

SEQ ID NO: 40839 - DNA, 20 bp, synthetic construct
  source 1..20: mol_type = other DNA
actggagatgttttgaaggt

SEQ ID NO: 40840 - DNA, 20 bp, synthetic construct
  source 1..20: mol_type = other DNA
aagctggctacaaatttaca

SEQ ID NO: 40841 - DNA, 20 bp, synthetic construct
  source 1..20: mol_type = other DNA
tggccgctcaggtaggcgga

SEQ ID NO: 40842 - DNA, 20 bp, synthetic construct
  source 1..20: mol_type = other DNA
aaccagtgcagtttgaagat

SEQ ID NO: 40843 - DNA, 20 bp, synthetic construct
  source 1..20: mol_type = other DNA
ggccctgcagttcatagaag

SEQ ID NO: 40844 - DNA, 20 bp, synthetic construct
  source 1..20: mol_type = other DNA
cggaagaaactggtgattgt

SEQ ID NO: 40845 - DNA, 20 bp, synthetic construct
  source 1..20: mol_type = other DNA
ggcacccgtggaagatgacg

SEQ ID NO: 40846 - DNA, 20 bp, synthetic construct
  source 1..20: mol_type = other DNA
gcaaagagattgaagcaagg

SEQ ID NO: 40847 - DNA, 20 bp, synthetic construct
  source 1..20: mol_type = other DNA
gacacctcgagctgcgcgcg

SEQ ID NO: 40848 - DNA, 20 bp, synthetic construct
  source 1..20: mol_type = other DNA
acaagaagttcctggttggc

SEQ ID NO: 40849 - DNA, 20 bp, synthetic construct
  source 1..20: mol_type = other DNA
ctctgtgtccctgtggtccc

SEQ ID NO: 40850 - DNA, 20 bp, synthetic construct
  source 1..20: mol_type = other DNA
ctgtcagctgtccaggtgcg

SEQ ID NO: 40851 - DNA, 20 bp, synthetic construct
  source 1..20: mol_type = other DNA
aacatggatccaatgacagt

SEQ ID NO: 40852 - DNA, 20 bp, synthetic construct
  source 1..20: mol_type = other DNA
gctgggccacctgctcccgg

SEQ ID NO: 40853 - DNA, 20 bp, synthetic construct
  source 1..20: mol_type = other DNA
caaggtggggcccagcttgt

SEQ ID NO: 40854 - DNA, 20 bp, synthetic construct
  source 1..20: mol_type = other DNA
cattgccccggcatctattc

SEQ ID NO: 40855 - DNA, 20 bp, synthetic construct
  source 1..20: mol_type = other DNA
caagtcatcctgatctccgt

SEQ ID NO: 40856 - DNA, 20 bp, synthetic construct
  source 1..20: mol_type = other DNA
gccatctcgccgccacagtg

SEQ ID NO: 40857 - DNA, 20 bp, synthetic construct
  source 1..20: mol_type = other DNA
ggctcttctggaaagagaag

SEQ ID NO: 40858 - DNA, 20 bp, synthetic construct
  source 1..20: mol_type = other DNA
caatgtcactcagcaaggtg

SEQ ID NO: 40859 - DNA, 20 bp, synthetic construct
  source 1..20: mol_type = other DNA
tgccacggccccatcacgta

SEQ ID NO: 40860 - DNA, 20 bp, synthetic construct
  source 1..20: mol_type = other DNA
tgcagcggaccagctccatg

SEQ ID NO: 40861 - DNA, 20 bp, synthetic construct
  source 1..20: mol_type = other DNA
gtcctcccaccacggcttct

SEQ ID NO: 40862 - DNA, 20 bp, synthetic construct
  source 1..20: mol_type = other DNA
tctggatggctgccgaagag

SEQ ID NO: 40863 - DNA, 20 bp, synthetic construct
  source 1..20: mol_type = other DNA
cctggggtggcggggaaggc

SEQ ID NO: 40864 - DNA, 20 bp, synthetic construct
  source 1..20: mol_type = other DNA
catcagatagtacaggtcga

SEQ ID NO: 40865 - DNA, 20 bp, synthetic construct
  source 1..20: mol_type = other DNA
atacactcaggtatcagaga

SEQ ID NO: 40866 - DNA, 20 bp, synthetic construct
  source 1..20: mol_type = other DNA
ggcaccaccgctctcggttc

SEQ ID NO: 40867 - DNA, 20 bp, synthetic construct
  source 1..20: mol_type = other DNA
gcaggagctgcagaagaagg

SEQ ID NO: 40868 - DNA, 20 bp, synthetic construct
  source 1..20: mol_type = other DNA
cctcgcgccatggcggcccc

SEQ ID NO: 40869 - DNA, 20 bp, synthetic construct
  source 1..20: mol_type = other DNA
ctccgcctcaggtgagctca

SEQ ID NO: 40870 - DNA, 20 bp, synthetic construct
  source 1..20: mol_type = other DNA
aaaggagatgaaggaagccc

SEQ ID NO: 40871 - DNA, 20 bp, synthetic construct
  source 1..20: mol_type = other DNA
ggaggcctgcatcgtcaacc

SEQ ID NO: 40872 - DNA, 20 bp, synthetic construct
  source 1..20: mol_type = other DNA
ggcagtggagaagctggagg

SEQ ID NO: 40873 - DNA, 20 bp, synthetic construct
  source 1..20: mol_type = other DNA
ggacagttggtggccagcac

SEQ ID NO: 40874 - DNA, 20 bp, synthetic construct
  source 1..20: mol_type = other DNA
cgcgtcggccagggcgagcg

SEQ ID NO: 40875 - DNA, 20 bp, synthetic construct
  source 1..20: mol_type = other DNA
ggacattgaggtgtatttca

SEQ ID NO: 40876 - DNA, 20 bp, synthetic construct
  source 1..20: mol_type = other DNA
aagatgtccccaacaaagtc

SEQ ID NO: 40877 - DNA, 20 bp, synthetic construct
  source 1..20: mol_type = other DNA
ctttcagagtatacactgga

SEQ ID NO: 40878 - DNA, 20 bp, synthetic construct
  source 1..20: mol_type = other DNA
caggatgttggtggaaaggt

SEQ ID NO: 40879 - DNA, 20 bp, synthetic construct
  source 1..20: mol_type = other DNA
accagaaggaaggttcctgt

SEQ ID NO: 40880 - DNA, 20 bp, synthetic construct
  source 1..20: mol_type = other DNA
cttgcgcagggccatggctg

SEQ ID NO: 40881 - DNA, 20 bp, synthetic construct
  source 1..20: mol_type = other DNA
ttttgtcctgcggaggaagg

SEQ ID NO: 40882 - DNA, 20 bp, synthetic construct
  source 1..20: mol_type = other DNA
atgttggcctgaggaaacaa

SEQ ID NO: 40883 - DNA, 20 bp, synthetic construct
  source 1..20: mol_type = other DNA
ggggcctcggtcagcagcac

SEQ ID NO: 40884 - DNA, 20 bp, synthetic construct
  source 1..20: mol_type = other DNA
gttccagtacctgctgcagc

SEQ ID NO: 40885 - DNA, 20 bp, synthetic construct
  source 1..20: mol_type = other DNA
ccagatacaggtacacagct

SEQ ID NO: 40886 - DNA, 20 bp, synthetic construct
  source 1..20: mol_type = other DNA
caacgatatgcagccggggc

SEQ ID NO: 40887 - DNA, 20 bp, synthetic construct
  source 1..20: mol_type = other DNA
caactccatgtacatcggta

SEQ ID NO: 40888 - DNA, 20 bp, synthetic construct
  source 1..20: mol_type = other DNA
atgatgctgctgcggctccg

SEQ ID NO: 40889 - DNA, 20 bp, synthetic construct
  source 1..20: mol_type = other DNA
tgatagctccaagccaggtc

SEQ ID NO: 40890 - DNA, 20 bp, synthetic construct
  source 1..20: mol_type = other DNA
gcagcgcttcggggccatgg

SEQ ID NO: 40891 - DNA, 20 bp, synthetic construct
  source 1..20: mol_type = other DNA
tgtatagatgatcatgacat

SEQ ID NO: 40892 - DNA, 20 bp, synthetic construct
  source 1..20: mol_type = other DNA
gatagctcaggtcccccagc

SEQ ID NO: 40893 - DNA, 20 bp, synthetic construct
  source 1..20: mol_type = other DNA
tttggtactaaaacaggagg

SEQ ID NO: 40894 - DNA, 20 bp, synthetic construct
  source 1..20: mol_type = other DNA
ggctgaagtccaagaacccg

SEQ ID NO: 40895 - DNA, 20 bp, synthetic construct
  source 1..20: mol_type = other DNA
catgagcgccacggtgaggc

SEQ ID NO: 40896 - DNA, 20 bp, synthetic construct
  source 1..20: mol_type = other DNA
ctactcattaacaagccaga

SEQ ID NO: 40897 - DNA, 20 bp, synthetic construct
  source 1..20: mol_type = other DNA
cagacaggtattactcgcct

SEQ ID NO: 40898 - DNA, 20 bp, synthetic construct
  source 1..20: mol_type = other DNA
ctacatgcaggacttggagg

SEQ ID NO: 40899 - DNA, 20 bp, synthetic construct
  source 1..20: mol_type = other DNA
ccagatcaaccagacgtttg

SEQ ID NO: 40900 - DNA, 20 bp, synthetic construct
  source 1..20: mol_type = other DNA
caccttggtcctcgatcagg

SEQ ID NO: 40901 - DNA, 20 bp, synthetic construct
  source 1..20: mol_type = other DNA
acacaggtattgcactgcac

SEQ ID NO: 40902 - DNA, 20 bp, synthetic construct
  source 1..20: mol_type = other DNA
tgcaggtgaggcccgggacg

SEQ ID NO: 40903 - DNA, 20 bp, synthetic construct
  source 1..20: mol_type = other DNA
tgtccgtctggggagaagac

SEQ ID NO: 40904 - DNA, 20 bp, synthetic construct
  source 1..20: mol_type = other DNA
ccaggtagtgtttctgcagg

SEQ ID NO: 40905 - DNA, 20 bp, synthetic construct
  source 1..20: mol_type = other DNA
gtggcgccgcaggatggtgt

SEQ ID NO: 40906 - DNA, 20 bp, synthetic construct
  source 1..20: mol_type = other DNA
ccgagcgcaaactttactct

SEQ ID NO: 40907 - DNA, 20 bp, synthetic construct
  source 1..20: mol_type = other DNA
ccaaggaggagatctccgga

SEQ ID NO: 40908 - DNA, 20 bp, synthetic construct
  source 1..20: mol_type = other DNA
aatgccagtggtgcgcccag

SEQ ID NO: 40909 - DNA, 20 bp, synthetic construct
  source 1..20: mol_type = other DNA
tcctacagaaacagcacagt

SEQ ID NO: 40910 - DNA, 20 bp, synthetic construct
  source 1..20: mol_type = other DNA
ccagggccccaagaaggact

SEQ ID NO: 40911 - DNA, 20 bp, synthetic construct
  source 1..20: mol_type = other DNA
ggcgttcatggcgcgcaggg

SEQ ID NO: 40912 - DNA, 20 bp, synthetic construct
  source 1..20: mol_type = other DNA
tgcagccactgtgcgcctgc

SEQ ID NO: 40913 - DNA, 20 bp, synthetic construct
  source 1..20: mol_type = other DNA
cactgttggcttcaaagaga

SEQ ID NO: 40914 - DNA, 20 bp, synthetic construct
  source 1..20: mol_type = other DNA
cggactcggtgatctcgttg

SEQ ID NO: 40915 - DNA, 20 bp, synthetic construct
  source 1..20: mol_type = other DNA
gggccccccggcggcggcgg

SEQ ID NO: 40916 - DNA, 20 bp, synthetic construct
  source 1..20: mol_type = other DNA
tcatttagttattacttaat

SEQ ID NO: 40917 - DNA, 20 bp, synthetic construct
  source 1..20: mol_type = other DNA
agcttctcacagacattggt

SEQ ID NO: 40918 - DNA, 20 bp, synthetic construct
  source 1..20: mol_type = other DNA
gtactaccccgccctggaga

SEQ ID NO: 40919 - DNA, 20 bp, synthetic construct
  source 1..20: mol_type = other DNA
gaaggtggcgttgtcccctt

SEQ ID NO: 40920 - DNA, 20 bp, synthetic construct
  source 1..20: mol_type = other DNA
agaagacctcatccttgggg

SEQ ID NO: 40921 - DNA, 20 bp, synthetic construct
  source 1..20: mol_type = other DNA
tggctgccgaagagcgggag

SEQ ID NO: 40922 - DNA, 20 bp, synthetic construct
  source 1..20: mol_type = other DNA
ggaggtgagagcgcagcctg

SEQ ID NO: 40923 - DNA, 20 bp, synthetic construct
  source 1..20: mol_type = other DNA
tggaaactcaagcctgcact

SEQ ID NO: 40924 - DNA, 20 bp, synthetic construct
  source 1..20: mol_type = other DNA
catccaagatgtcctgaagc

SEQ ID NO: 40925 - DNA, 20 bp, synthetic construct
  source 1..20: mol_type = other DNA
aaaatggccctggatcacca

SEQ ID NO: 40926 - DNA, 20 bp, synthetic construct
  source 1..20: mol_type = other DNA
gcacacgctcacctccgagc

SEQ ID NO: 40927 - DNA, 20 bp, synthetic construct
  source 1..20: mol_type = other DNA
tccccagaacttcacagggc

SEQ ID NO: 40928 - DNA, 20 bp, synthetic construct
  source 1..20: mol_type = other DNA
cagcagcgcttcggggccat

SEQ ID NO: 40929 - DNA, 20 bp, synthetic construct
  source 1..20: mol_type = other DNA
atacctgtggttgctggaga

SEQ ID NO: 40930 - DNA, 20 bp, synthetic construct
  source 1..20: mol_type = other DNA
gagggagaggtgagaagcca

SEQ ID NO: 40931 - DNA, 20 bp, synthetic construct
  source 1..20: mol_type = other DNA
catcacctacccgcagggcc

SEQ ID NO: 40932 - DNA, 20 bp, synthetic construct
  source 1..20: mol_type = other DNA
cggggtcacgattgtgcgtg

SEQ ID NO: 40933 - DNA, 20 bp, synthetic construct
  source 1..20: mol_type = other DNA
caacacaaccctgacctgtg

SEQ ID NO: 40934 - DNA, 20 bp, synthetic construct
  source 1..20: mol_type = other DNA
cctatgcaggatctgcagga

SEQ ID NO: 40935 - DNA, 20 bp, synthetic construct
  source 1..20: mol_type = other DNA
ctcaccgaaatataggggtg

SEQ ID NO: 40936 - DNA, 20 bp, synthetic construct
  source 1..20: mol_type = other DNA
gcccacgtggaaggtctcgg

SEQ ID NO: 40937 - DNA, 20 bp, synthetic construct
  source 1..20: mol_type = other DNA
cgggaacggcgggccccccg

SEQ ID NO: 40938 - DNA, 20 bp, synthetic construct
  source 1..20: mol_type = other DNA
tgcaacaccggctctccacc

SEQ ID NO: 40939 - DNA, 20 bp, synthetic construct
  source 1..20: mol_type = other DNA
ggagctaagcgcgcgggccc

SEQ ID NO: 40940 - DNA, 20 bp, synthetic construct
  source 1..20: mol_type = other DNA
cacagcttcaatgttggcag

SEQ ID NO: 40941 - DNA, 20 bp, synthetic construct
  source 1..20: mol_type = other DNA
ctgcttcaggtccttgtgta

SEQ ID NO: 40942 - DNA, 20 bp, synthetic construct
  source 1..20: mol_type = other DNA
ggacagatacacacaggcat

SEQ ID NO: 40943 - DNA, 20 bp, synthetic construct
  source 1..20: mol_type = other DNA
gagcatatcatcgcgggcgc

SEQ ID NO: 40944 - DNA, 20 bp, synthetic construct
  source 1..20: mol_type = other DNA
tacatctccttcaagatatg

SEQ ID NO: 40945 - DNA, 20 bp, synthetic construct
  source 1..20: mol_type = other DNA
cgaccagggtcacttcggca

SEQ ID NO: 40946 - DNA, 20 bp, synthetic construct
  source 1..20: mol_type = other DNA
cagtttgatgatgaagacct

SEQ ID NO: 40947 - DNA, 20 bp, synthetic construct
  source 1..20: mol_type = other DNA
agcttgtatccacacagcca

SEQ ID NO: 40948 - DNA, 20 bp, synthetic construct
  source 1..20: mol_type = other DNA
aaagctcacaaacaacaagg

SEQ ID NO: 40949 - DNA, 20 bp, synthetic construct
  source 1..20: mol_type = other DNA
gaacgaacctgggaagagag

SEQ ID NO: 40950 - DNA, 20 bp, synthetic construct
  source 1..20: mol_type = other DNA
ttgcagaacctatggccgca

SEQ ID NO: 40951 - DNA, 20 bp, synthetic construct
  source 1..20: mol_type = other DNA
cagactgatcaagaattgta

SEQ ID NO: 40952 - DNA, 20 bp, synthetic construct
  source 1..20: mol_type = other DNA
tagttgaggtgctcctgtgg

SEQ ID NO: 40953 - DNA, 20 bp, synthetic construct
  source 1..20: mol_type = other DNA
tgcacttacacaggtaagaa

SEQ ID NO: 40954 - DNA, 20 bp, synthetic construct
  source 1..20: mol_type = other DNA
agcattttcccattgaggtg

SEQ ID NO: 40955 - DNA, 20 bp, synthetic construct
  source 1..20: mol_type = other DNA
caccagcaggaggaggctgg

SEQ ID NO: 40956 - DNA, 20 bp, synthetic construct
  source 1..20: mol_type = other DNA
ggcagtcctgcacatacctt

SEQ ID NO: 40957 - DNA, 20 bp, synthetic construct
  source 1..20: mol_type = other DNA
agtgttcctccagggccacg

SEQ ID NO: 40958 - DNA, 20 bp, synthetic construct
  source 1..20: mol_type = other DNA
caatactgatgaggtatgct

SEQ ID NO: 40959 - DNA, 20 bp, synthetic construct
  source 1..20: mol_type = other DNA
ccacggccttgttgtagccc

SEQ ID NO: 40960 - DNA, 20 bp, synthetic construct
  source 1..20: mol_type = other DNA
ggcaggtgcgccgcggggtc

SEQ ID NO: 40961 - DNA, 20 bp, synthetic construct
  source 1..20: mol_type = other DNA
gtaatgccatcaagcagatg

SEQ ID NO: 40962 - DNA, 20 bp, synthetic construct
  source 1..20: mol_type = other DNA
cctgttaagattattggggt

SEQ ID NO: 40963 - DNA, 20 bp, synthetic construct
  source 1..20: mol_type = other DNA
caccacaactggcaaggagt

SEQ ID NO: 40964 - DNA, 20 bp, synthetic construct
  source 1..20: mol_type = other DNA
gcaggtgggagagggcctct

SEQ ID NO: 40965 - DNA, 20 bp, synthetic construct
  source 1..20: mol_type = other DNA
cgcaacaagaaggtcccgtc

SEQ ID NO: 40966 - DNA, 20 bp, synthetic construct
  source 1..20: mol_type = other DNA
ctacgacaaggagcagctca

SEQ ID NO: 40967 - DNA, 20 bp, synthetic construct
  source 1..20: mol_type = other DNA
gagtatctgtttgctcaggt

SEQ ID NO: 40968 - DNA, 20 bp, synthetic construct
  source 1..20: mol_type = other DNA
cagcttgacgaagtcattca

SEQ ID NO: 40969 - DNA, 20 bp, synthetic construct
  source 1..20: mol_type = other DNA
aaaggagaaagataggcgct

SEQ ID NO: 40970 - DNA, 20 bp, synthetic construct
  source 1..20: mol_type = other DNA
ccattccacagcccatcacg

SEQ ID NO: 40971 - DNA, 20 bp, synthetic construct
  source 1..20: mol_type = other DNA
cagcatgcgttaatgtgcac

SEQ ID NO: 40972 - DNA, 20 bp, synthetic construct
  source 1..20: mol_type = other DNA
cctggtctagagcagcgaga

SEQ ID NO: 40973 - DNA, 20 bp, synthetic construct
  source 1..20: mol_type = other DNA
caggacgggggcgccggcaa

SEQ ID NO: 40974 - DNA, 20 bp, synthetic construct
  source 1..20: mol_type = other DNA
gccgagcgcaaactttactc

SEQ ID NO: 40975 - DNA, 20 bp, synthetic construct
  source 1..20: mol_type = other DNA
ccgcacctggtgcaggtggt

SEQ ID NO: 40976 - DNA, 20 bp, synthetic construct
  source 1..20: mol_type = other DNA
cccctgggcagcccttggga

SEQ ID NO: 40977 - DNA, 20 bp, synthetic construct
  source 1..20: mol_type = other DNA
ccagacggcgacgggcgcca

SEQ ID NO: 40978 - DNA, 20 bp, synthetic construct
  source 1..20: mol_type = other DNA
gccgtgtcagctcgtcagag

SEQ ID NO: 40979 - DNA, 20 bp, synthetic construct
  source 1..20: mol_type = other DNA
caatgagggaccagtacatg

SEQ ID NO: 40980 - DNA, 20 bp, synthetic construct
  source 1..20: mol_type = other DNA
tcagatagtacaggtcgatg

SEQ ID NO: 40981 - DNA, 20 bp, synthetic construct
  source 1..20: mol_type = other DNA
ctacgaaggctccaatccgc

SEQ ID NO: 40982 - DNA, 20 bp, synthetic construct
  source 1..20: mol_type = other DNA
tgacagtcccggcccttagg

SEQ ID NO: 40983 - DNA, 20 bp, synthetic construct
  source 1..20: mol_type = other DNA
cccgcatcagggcaaagagg

SEQ ID NO: 40984 - DNA, 20 bp, synthetic construct
  source 1..20: mol_type = other DNA
gctgagtaatctagagagaa

SEQ ID NO: 40985 - DNA, 20 bp, synthetic construct
  source 1..20: mol_type = other DNA
ccacgttgactcatgtgagt

SEQ ID NO: 40986 - DNA, 20 bp, synthetic construct
  source 1..20: mol_type = other DNA
gtcatcttgggctgagagcg

SEQ ID NO: 40987 - DNA, 20 bp, synthetic construct
  source 1..20: mol_type = other DNA
ctcggtagctgtggatgcgg

SEQ ID NO: 40988 - DNA, 20 bp, synthetic construct
  source 1..20: mol_type = other DNA
agcccatccggaaaggccag

SEQ ID NO: 40989 - DNA, 20 bp, synthetic construct
  source 1..20: mol_type = other DNA
cagacggcgacgggcgccat

SEQ ID NO: 40990 - DNA, 20 bp, synthetic construct
  source 1..20: mol_type = other DNA
acatgcagcgctttccgtcg

SEQ ID NO: 40991 - DNA, 20 bp, synthetic construct
  source 1..20: mol_type = other DNA
cttggtgttcactctcaaca

SEQ ID NO: 40992 - DNA, 20 bp, synthetic construct
  source 1..20: mol_type = other DNA
aatgtttcaccacctctccc

SEQ ID NO: 40993 - DNA, 20 bp, synthetic construct
  source 1..20: mol_type = other DNA
cctgcaaggtgggagttaag

SEQ ID NO: 40994 - DNA, 20 bp, synthetic construct
  source 1..20: mol_type = other DNA
agaatcaaacttccaagcaa

SEQ ID NO: 40995 - DNA, 20 bp, synthetic construct
  source 1..20: mol_type = other DNA
accatgaagaaggtaccgtt

SEQ ID NO: 40996 - DNA, 20 bp, synthetic construct
  source 1..20: mol_type = other DNA
acagggatacctgagggcag

SEQ ID NO: 40997 - DNA, 20 bp, synthetic construct
  source 1..20: mol_type = other DNA
gcggaggcggcaggaggagg

SEQ ID NO: 40998 - DNA, 20 bp, synthetic construct
  source 1..20: mol_type = other DNA
tccccatcccgtccccgttc

SEQ ID NO: 40999 - DNA, 20 bp, synthetic construct
  source 1..20: mol_type = other DNA
ttacttatacaccaggtacg

SEQ ID NO: 41000 - DNA, 20 bp, synthetic construct
  source 1..20: mol_type = other DNA
tgtgatagggtcatgttcgt

SEQ ID NO: 41001 - DNA, 20 bp, synthetic construct
  source 1..20: mol_type = other DNA
acccgcctccttctgaaggc

SEQ ID NO: 41002 - DNA, 20 bp, synthetic construct
  source 1..20: mol_type = other DNA
cctctgtggggccatctccc

SEQ ID NO: 41003 - DNA, 20 bp, synthetic construct
  source 1..20: mol_type = other DNA
gcaggatcttcccactcaga

SEQ ID NO: 41004 - DNA, 20 bp, synthetic construct
  source 1..20: mol_type = other DNA
cctggaatggttagaaagaa

SEQ ID NO: 41005 - DNA, 20 bp, synthetic construct
  source 1..20: mol_type = other DNA
acttgcaaccaacctcaatg

SEQ ID NO: 41006 - DNA, 20 bp, synthetic construct
  source 1..20: mol_type = other DNA
ggccgccgagaccttccacg

SEQ ID NO: 41007 - DNA, 20 bp, synthetic construct
  source 1..20: mol_type = other DNA
ctcctcctccagctgtaacg

SEQ ID NO: 41008 - DNA, 20 bp, synthetic construct
  source 1..20: mol_type = other DNA
cttacaggtgattggtctgt

SEQ ID NO: 41009 - DNA, 20 bp, synthetic construct
  source 1..20: mol_type = other DNA
cgcaccaggctcactgccca

SEQ ID NO: 41010 - DNA, 20 bp, synthetic construct
  source 1..20: mol_type = other DNA
gctccatgaactcaaacacc

SEQ ID NO: 41011 - DNA, 20 bp, synthetic construct
  source 1..20: mol_type = other DNA
gagaatcagacaggcacgaa

SEQ ID NO: 41012 - DNA, 20 bp, synthetic construct
  source 1..20: mol_type = other DNA
tggaaggtgaagctctcctg

SEQ ID NO: 41013 - DNA, 20 bp, synthetic construct
  source 1..20: mol_type = other DNA
tatagttgtctggctagcag

SEQ ID NO: 41014 - DNA, 20 bp, synthetic construct
  source 1..20: mol_type = other DNA
ccagtcacacatgagaatgt

SEQ ID NO: 41015 - DNA, 20 bp, synthetic construct
  source 1..20: mol_type = other DNA
tcatacctgcaggagctgag

SEQ ID NO: 41016 - DNA, 20 bp, synthetic construct
  source 1..20: mol_type = other DNA
gcagcgcatcaaggagctgg

SEQ ID NO: 41017 - DNA, 20 bp, synthetic construct
  source 1..20: mol_type = other DNA
ccagggcaactttggcagcg

SEQ ID NO: 41018 - DNA, 20 bp, synthetic construct
  source 1..20: mol_type = other DNA
gtgtaaggtcattgatgagc

SEQ ID NO: 41019 - DNA, 20 bp, synthetic construct
  source 1..20: mol_type = other DNA
agcaaggacatgggtaccca

SEQ ID NO: 41020 - DNA, 20 bp, synthetic construct
  source 1..20: mol_type = other DNA
atacaagctcagcagctcca

SEQ ID NO: 41021 - DNA, 20 bp, synthetic construct
  source 1..20: mol_type = other DNA
agcagggaacaaagtcagca

SEQ ID NO: 41022 - DNA, 20 bp, synthetic construct
  source 1..20: mol_type = other DNA
tttcagatcgaggtgcagaa

SEQ ID NO: 41023 - DNA, 20 bp, synthetic construct
  source 1..20: mol_type = other DNA
acagcttcccaatggagctg

SEQ ID NO: 41024 - DNA, 20 bp, synthetic construct
  source 1..20: mol_type = other DNA
gctgtgggacactgctgggc

SEQ ID NO: 41025 - DNA, 20 bp, synthetic construct
  source 1..20: mol_type = other DNA
gccacccactggcgcagcaa

SEQ ID NO: 41026 - DNA, 20 bp, synthetic construct
  source 1..20: mol_type = other DNA
cgtggccactaggtggtaca

SEQ ID NO: 41027 - DNA, 20 bp, synthetic construct
  source 1..20: mol_type = other DNA
ggggctcacctttgggtctg

SEQ ID NO: 41028 - DNA, 20 bp, synthetic construct
  source 1..20: mol_type = other DNA
ccagctgcggtcgtgctctg

SEQ ID NO: 41029 - DNA, 20 bp, synthetic construct
  source 1..20: mol_type = other DNA
gccgggaagatggcgtccgg

SEQ ID NO: 41030 - DNA, 20 bp, synthetic construct
  source 1..20: mol_type = other DNA
gaaagaccagagcaggaaca

SEQ ID NO: 41031 - DNA, 20 bp, synthetic construct
  source 1..20: mol_type = other DNA
aacaggcctttgaagaggct

SEQ ID NO: 41032 - DNA, 20 bp, synthetic construct
  source 1..20: mol_type = other DNA
gggcaagtggctcggaacac

SEQ ID NO: 41033 - DNA, 20 bp, synthetic construct
  source 1..20: mol_type = other DNA
ggaggagaatcagagcgttg

SEQ ID NO: 41034 - DNA, 20 bp, synthetic construct
  source 1..20: mol_type = other DNA
ttacctgatagagttataga

SEQ ID NO: 41035 - DNA, 20 bp, synthetic construct
  source 1..20: mol_type = other DNA
gacaattaagtgtgttgttg

SEQ ID NO: 41036 - DNA, 20 bp, synthetic construct
  source 1..20: mol_type = other DNA
cggatgagcagctgtggagt

SEQ ID NO: 41037 - DNA, 20 bp, synthetic construct
  source 1..20: mol_type = other DNA
agcagaggctgaccatgtgg

SEQ ID NO: 41038 - DNA, 20 bp, synthetic construct
  source 1..20: mol_type = other DNA
atcctctgtaatgaacagat

SEQ ID NO: 41039 - DNA, 20 bp, synthetic construct
  source 1..20: mol_type = other DNA
agcagaagactcccaaagca

SEQ ID NO: 41040 - DNA, 20 bp, synthetic construct
  source 1..20: mol_type = other DNA
gcccagcaagtcattcagaa

SEQ ID NO: 41041 - DNA, 20 bp, synthetic construct
  source 1..20: mol_type = other DNA
actcacatgtacttgccaca

SEQ ID NO: 41042 - DNA, 20 bp, synthetic construct
  source 1..20: mol_type = other DNA
ctcccaagctggggaagctg

SEQ ID NO: 41043 - DNA, 20 bp, synthetic construct
  source 1..20: mol_type = other DNA
tacgagtaagcaaagtgctc

SEQ ID NO: 41044 - DNA, 20 bp, synthetic construct
  source 1..20: mol_type = other DNA
gcaatagatcgctccatggt

SEQ ID NO: 41045 - DNA, 20 bp, synthetic construct
  source 1..20: mol_type = other DNA
ttagaccctgtccctgccag

SEQ ID NO: 41046 - DNA, 20 bp, synthetic construct
  source 1..20: mol_type = other DNA
gccatctaccagggacacaa

SEQ ID NO: 41047 - DNA, 20 bp, synthetic construct
  source 1..20: mol_type = other DNA
cactaaagaacagcaacgac

SEQ ID NO: 41048 - DNA, 20 bp, synthetic construct
  source 1..20: mol_type = other DNA
ttttagtacacacatttcca

SEQ ID NO: 41049 - DNA, 20 bp, synthetic construct
  source 1..20: mol_type = other DNA
gtcccacagcacagtagccg

SEQ ID NO: 41050 - DNA, 20 bp, synthetic construct
  source 1..20: mol_type = other DNA
gatcctgtcggtgagcactg

SEQ ID NO: 41051 - DNA, 20 bp, synthetic construct
  source 1..20: mol_type = other DNA
ccccaggaggatggagagct

SEQ ID NO: 41052 - DNA, 20 bp, synthetic construct
  source 1..20: mol_type = other DNA
ggtggacagcgaggccagga

SEQ ID NO: 41053 - DNA, 20 bp, synthetic construct
  source 1..20: mol_type = other DNA
ttttcgcagatacatgtcta

SEQ ID NO: 41054 - DNA, 20 bp, synthetic construct
  source 1..20: mol_type = other DNA
agccatgcatctggcgctgc

SEQ ID NO: 41055 - DNA, 20 bp, synthetic construct
  source 1..20: mol_type = other DNA
attataagggctgcctcatc

SEQ ID NO: 41056 - DNA, 20 bp, synthetic construct
  source 1..20: mol_type = other DNA
cctgcgcaagatgctcatcc

SEQ ID NO: 41057 - DNA, 20 bp, synthetic construct
  source 1..20: mol_type = other DNA
tgggtttctgtccactgccg

SEQ ID NO: 41058 - DNA, 20 bp, synthetic construct
  source 1..20: mol_type = other DNA
tcatggcgcgcagggcggga

SEQ ID NO: 41059 - DNA, 20 bp, synthetic construct
  source 1..20: mol_type = other DNA
ctcaagtacatctcacagct

SEQ ID NO: 41060 - DNA, 20 bp, synthetic construct
  source 1..20: mol_type = other DNA
gcctcctgcctgccctgctg

SEQ ID NO: 41061 - DNA, 20 bp, synthetic construct
  source 1..20: mol_type = other DNA
acaccgtcttcccatagatg

SEQ ID NO: 41062 - DNA, 20 bp, synthetic construct
  source 1..20: mol_type = other DNA
gtgggagatgggtaggtacc

SEQ ID NO: 41063 - DNA, 20 bp, synthetic construct
  source 1..20: mol_type = other DNA
catctcccgctggtcagtct

SEQ ID NO: 41064 - DNA, 20 bp, synthetic construct
  source 1..20: mol_type = other DNA
ggcagcgttgggtagggctg

SEQ ID NO: 41065 - DNA, 20 bp, synthetic construct
  source 1..20: mol_type = other DNA
gggccagcaagggaggaagg

SEQ ID NO: 41066 - DNA, 20 bp, synthetic construct
  source 1..20: mol_type = other DNA
agcttgcgaaaaggagcctc

SEQ ID NO: 41067 - DNA, 20 bp, synthetic construct
  source 1..20: mol_type = other DNA
cagagaacgctactggatcc

SEQ ID NO: 41068 - DNA, 20 bp, synthetic construct
  source 1..20: mol_type = other DNA
cttcatcaagttcatccagg

SEQ ID NO: 41069 - DNA, 20 bp, synthetic construct
  source 1..20: mol_type = other DNA
gcctggagtggtgtgtctaa

SEQ ID NO: 41070 - DNA, 20 bp, synthetic construct
  source 1..20: mol_type = other DNA
cttctcagatttaacaacct

SEQ ID NO: 41071 - DNA, 20 bp, synthetic construct
  source 1..20: mol_type = other DNA
ctcatacacgctcgtgtcca

SEQ ID NO: 41072 - DNA, 20 bp, synthetic construct
  source 1..20: mol_type = other DNA
ccaggaatgactggggaagg

SEQ ID NO: 41073 - DNA, 20 bp, synthetic construct
  source 1..20: mol_type = other DNA
tccggctccactaccggatg

SEQ ID NO: 41074 - DNA, 20 bp, synthetic construct
  source 1..20: mol_type = other DNA
tcccagctgagctcagagca

SEQ ID NO: 41075 - DNA, 20 bp, synthetic construct
  source 1..20: mol_type = other DNA
ccgcaggtggaagtgataga

SEQ ID NO: 41076 - DNA, 20 bp, synthetic construct
  source 1..20: mol_type = other DNA
ttacaggggcctgaacaaac

SEQ ID NO: 41077 - DNA, 20 bp, synthetic construct
  source 1..20: mol_type = other DNA
gccacctggtgccagccagc

SEQ ID NO: 41078 - DNA, 20 bp, synthetic construct
  source 1..20: mol_type = other DNA
caccgcccagacgactggcc

SEQ ID NO: 41079 - DNA, 20 bp, synthetic construct
  source 1..20: mol_type = other DNA
aagcaggagtacgacgagtc

SEQ ID NO: 41080 - DNA, 20 bp, synthetic construct
  source 1..20: mol_type = other DNA
gataatattcataaattgag

SEQ ID NO: 41081 - DNA, 20 bp, synthetic construct
  source 1..20: mol_type = other DNA
ggtgcccctcaccttgagct

SEQ ID NO: 41082 - DNA, 20 bp, synthetic construct
  source 1..20: mol_type = other DNA
gttgatgtcccagccatgct

SEQ ID NO: 41083 - DNA, 20 bp, synthetic construct
  source 1..20: mol_type = other DNA
ctcatgcgcatccgagtgat

SEQ ID NO: 41084 - DNA, 20 bp, synthetic construct
  source 1..20: mol_type = other DNA
tctgtactagagggagaagt

SEQ ID NO: 41085 - DNA, 20 bp, synthetic construct
  source 1..20: mol_type = other DNA
tataaaaccctcaagagtca

SEQ ID NO: 41086 - DNA, 20 bp, synthetic construct
  source 1..20: mol_type = other DNA
cggcgggtacctggaggcgc

SEQ ID NO: 41087 - DNA, 20 bp, synthetic construct
  source 1..20: mol_type = other DNA
agcagtcaaatgccttggtg

SEQ ID NO: 41088 - DNA, 20 bp, synthetic construct
  source 1..20: mol_type = other DNA
tcgaggtgaggggtgcccaa

SEQ ID NO: 41089 - DNA, 20 bp, synthetic construct
  source 1..20: mol_type = other DNA
tgtagaaaggctggctgtaa

SEQ ID NO: 41090 - DNA, 20 bp, synthetic construct
  source 1..20: mol_type = other DNA
cttgcaggtccgctgcgcag

SEQ ID NO: 41091 - DNA, 20 bp, synthetic construct
  source 1..20: mol_type = other DNA
ccacctggaagacgcgcctg

SEQ ID NO: 41092 - DNA, 20 bp, synthetic construct
  source 1..20: mol_type = other DNA
tacacctgcaaggtctctgg

SEQ ID NO: 41093 - DNA, 20 bp, synthetic construct
  source 1..20: mol_type = other DNA
tctgacagcgacgaatccta

SEQ ID NO: 41094 - DNA, 20 bp, synthetic construct
  source 1..20: mol_type = other DNA
actgggaccaggacacagac

SEQ ID NO: 41095 - DNA, 20 bp, synthetic construct
  source 1..20: mol_type = other DNA
aaacagaggagtcggagaaa

SEQ ID NO: 41096 - DNA, 20 bp, synthetic construct
  source 1..20: mol_type = other DNA
gcctgcgggagccgctgctg

SEQ ID NO: 41097 - DNA, 20 bp, synthetic construct
  source 1..20: mol_type = other DNA
atcaactatcaccaacataa

SEQ ID NO: 41098 - DNA, 20 bp, synthetic construct
  source 1..20: mol_type = other DNA
acactgtgggaccctgctgt

SEQ ID NO: 41099 - DNA, 20 bp, synthetic construct
  source 1..20: mol_type = other DNA
ccagatgaggtaaggaagga

SEQ ID NO: 41100 - DNA, 20 bp, synthetic construct
  source 1..20: mol_type = other DNA
caacccctgcagcctctgtc

SEQ ID NO: 41101 - DNA, 20 bp, synthetic construct
  source 1..20: mol_type = other DNA
tcaaaaccagcagtcttctg

SEQ ID NO: 41102 - DNA, 20 bp, synthetic construct
  source 1..20: mol_type = other DNA
tgcgagacaaggtgggagtg

SEQ ID NO: 41103 - DNA, 20 bp, synthetic construct
  source 1..20: mol_type = other DNA
gggcaggcctggcccaccgt

SEQ ID NO: 41104 - DNA, 20 bp, synthetic construct
  source 1..20: mol_type = other DNA
ggctaccttcagtttcataa

SEQ ID NO: 41105 - DNA, 20 bp, synthetic construct
  source 1..20: mol_type = other DNA
ctggctcaagatctacgggg

SEQ ID NO: 41106 - DNA, 20 bp, synthetic construct
  source 1..20: mol_type = other DNA
acaatatatggcggatgcag

SEQ ID NO: 41107 - DNA, 20 bp, synthetic construct
  source 1..20: mol_type = other DNA
aagtacatcctggacaaggt

SEQ ID NO: 41108 - DNA, 20 bp, synthetic construct
  source 1..20: mol_type = other DNA
cgccagcttgacagacacta

SEQ ID NO: 41109 - DNA, 20 bp, synthetic construct
  source 1..20: mol_type = other DNA
gcacagctgtgagggggctg

SEQ ID NO: 41110 - DNA, 20 bp, synthetic construct
  source 1..20: mol_type = other DNA
gagcaccaggtgggggaaga

SEQ ID NO: 41111 - DNA, 20 bp, synthetic construct
  source 1..20: mol_type = other DNA
gaacctgagccgcaaggacg

SEQ ID NO: 41112 - DNA, 20 bp, synthetic construct
  source 1..20: mol_type = other DNA
agccgcagagctgactgatg

SEQ ID NO: 41113 - DNA, 20 bp, synthetic construct
  source 1..20: mol_type = other DNA
tcctatagacatgattccta

SEQ ID NO: 41114 - DNA, 20 bp, synthetic construct
  source 1..20: mol_type = other DNA
gagaggtgcaggaagaacaa

SEQ ID NO: 41115 - DNA, 20 bp, synthetic construct
  source 1..20: mol_type = other DNA
cgagagagtgagagcgctcc

SEQ ID NO: 41116 - DNA, 20 bp, synthetic construct
  source 1..20: mol_type = other DNA
caggtcactgcggtgctggg

SEQ ID NO: 41117 - DNA, 20 bp, synthetic construct
  source 1..20: mol_type = other DNA
cccgccaccccaccttgatg

SEQ ID NO: 41118 - DNA, 20 bp, synthetic construct
  source 1..20: mol_type = other DNA
ccggccccacgaggaacgcc

SEQ ID NO: 41119 - DNA, 20 bp, synthetic construct
  source 1..20: mol_type = other DNA
tactcattaacaagccagat

SEQ ID NO: 41120 - DNA, 20 bp, synthetic construct
  source 1..20: mol_type = other DNA
gcagaaggagatcaccgccc

SEQ ID NO: 41121 - DNA, 20 bp, synthetic construct
  source 1..20: mol_type = other DNA
tcttgctcagtgcttctcca

SEQ ID NO: 41122 - DNA, 20 bp, synthetic construct
  source 1..20: mol_type = other DNA
tcatccgcatcctcacaggc

SEQ ID NO: 41123 - DNA, 20 bp, synthetic construct
  source 1..20: mol_type = other DNA
ctcaggtatcagagaaggga

SEQ ID NO: 41124 - DNA, 20 bp, synthetic construct
  source 1..20: mol_type = other DNA
aaagaccagagcaggaacaa

SEQ ID NO: 41125 - DNA, 20 bp, synthetic construct
  source 1..20: mol_type = other DNA
ggggggccacgtcggtgcag

SEQ ID NO: 41126 - DNA, 20 bp, synthetic construct
  source 1..20: mol_type = other DNA
ctcgtgaacctgaggggcgg

SEQ ID NO: 41127 - DNA, 20 bp, synthetic construct
  source 1..20: mol_type = other DNA
ctggatgcgaagacaggaaa

SEQ ID NO: 41128 - DNA, 20 bp, synthetic construct
  source 1..20: mol_type = other DNA
actgtgcatcagggctgcac

SEQ ID NO: 41129 - DNA, 20 bp, synthetic construct
  source 1..20: mol_type = other DNA
cttcactcccaaagtagcag

SEQ ID NO: 41130 - DNA, 20 bp, synthetic construct
  source 1..20: mol_type = other DNA
caccagcttctcacagacat

SEQ ID NO: 41131 - DNA, 20 bp, synthetic construct
  source 1..20: mol_type = other DNA
ttattaatccagatgagccc

SEQ ID NO: 41132 - DNA, 20 bp, synthetic construct
  source 1..20: mol_type = other DNA
tggtcggctgctctgggaac

SEQ ID NO: 41133 - DNA, 20 bp, synthetic construct
  source 1..20: mol_type = other DNA
ccacggagaagatgtggctc

SEQ ID NO: 41134 - DNA, 20 bp, synthetic construct
  source 1..20: mol_type = other DNA
attacaccgtcaaggatgac

SEQ ID NO: 41135 - DNA, 20 bp, synthetic construct
  source 1..20: mol_type = other DNA
ccagcatgccatcgctactg

SEQ ID NO: 41136 - DNA, 20 bp, synthetic construct
  source 1..20: mol_type = other DNA
cagccaagcagagaaactga

SEQ ID NO: 41137 - DNA, 20 bp, synthetic construct
  source 1..20: mol_type = other DNA
ctcgtagctcttctccaggg

SEQ ID NO: 41138 - DNA, 20 bp, synthetic construct
  source 1..20: mol_type = other DNA
ttatctacgtgtttcctgat

SEQ ID NO: 41139 - DNA, 20 bp, synthetic construct
  source 1..20: mol_type = other DNA
tgttggggcaggcctccttc

SEQ ID NO: 41140 - DNA, 20 bp, synthetic construct
  source 1..20: mol_type = other DNA
gacggccaagaagaactatc

SEQ ID NO: 41141 - DNA, 20 bp, synthetic construct
  source 1..20: mol_type = other DNA
cacctgctcccggaggaggc

SEQ ID NO: 41142 - DNA, 20 bp, synthetic construct
  source 1..20: mol_type = other DNA
gccctcaccttctcatgatc

SEQ ID NO: 41143 - DNA, 20 bp, synthetic construct
  source 1..20: mol_type = other DNA
tgatcttggatggcagcata

SEQ ID NO: 41144 - DNA, 20 bp, synthetic construct
  source 1..20: mol_type = other DNA
atcaggatgccttccgcctc

SEQ ID NO: 41145 - DNA, 20 bp, synthetic construct
  source 1..20: mol_type = other DNA
tcagctgctcggcgaagaac

SEQ ID NO: 41146 - DNA, 20 bp, synthetic construct
  source 1..20: mol_type = other DNA
ccatcatccgcaggaactcc

SEQ ID NO: 41147 - DNA, 20 bp, synthetic construct
  source 1..20: mol_type = other DNA
accttgatcacagggactcg

SEQ ID NO: 41148 - DNA, 20 bp, synthetic construct
  source 1..20: mol_type = other DNA
ctctgcaaaaggaagagaag

SEQ ID NO: 41149 - DNA, 20 bp, synthetic construct
  source 1..20: mol_type = other DNA
ttgcggcagttgacagcacg

SEQ ID NO: 41150 - DNA, 20 bp, synthetic construct
  source 1..20: mol_type = other DNA
agatcctcatcaaggtgggg

SEQ ID NO: 41151 - DNA, 20 bp, synthetic construct
  source 1..20: mol_type = other DNA
aatcctttagagagttctgc

SEQ ID NO: 41152 - DNA, 20 bp, synthetic construct
  source 1..20: mol_type = other DNA
tggagcatacctggtcttct

SEQ ID NO: 41153 - DNA, 20 bp, synthetic construct
  source 1..20: mol_type = other DNA
gcagcgatgtctggagctat

SEQ ID NO: 41154 - DNA, 20 bp, synthetic construct
  source 1..20: mol_type = other DNA
gccggtcgcagccttctgct

SEQ ID NO: 41155 - DNA, 20 bp, synthetic construct
  source 1..20: mol_type = other DNA
ggcggacaggcagagctgga

SEQ ID NO: 41156 - DNA, 20 bp, synthetic construct
  source 1..20: mol_type = other DNA
acagactccattcagaatca

SEQ ID NO: 41157 - DNA, 20 bp, synthetic construct
  source 1..20: mol_type = other DNA
ctgcattattggtatgagaa

SEQ ID NO: 41158 - DNA, 20 bp, synthetic construct
  source 1..20: mol_type = other DNA
catctagagatcctgcagaa

SEQ ID NO: 41159 - DNA, 20 bp, synthetic construct
  source 1..20: mol_type = other DNA
cccccgaggcagccctgtac

SEQ ID NO: 41160 - DNA, 20 bp, synthetic construct
  source 1..20: mol_type = other DNA
gcacctcaatgggaaaatgc

SEQ ID NO: 41161 - DNA, 20 bp, synthetic construct
  source 1..20: mol_type = other DNA
ctgatgtccttgggcagttc

SEQ ID NO: 41162 - DNA, 20 bp, synthetic construct
  source 1..20: mol_type = other DNA
tttgaagtgactaatggcag

SEQ ID NO: 41163 - DNA, 20 bp, synthetic construct
  source 1..20: mol_type = other DNA
gatccaggcactcagggctt

SEQ ID NO: 41164 - DNA, 20 bp, synthetic construct
  source 1..20: mol_type = other DNA
gtacttcatcatccagtacc

SEQ ID NO: 41165 - DNA, 20 bp, synthetic construct
  source 1..20: mol_type = other DNA
gagtactggcttccaagaag

SEQ ID NO: 41166 - DNA, 20 bp, synthetic construct
  source 1..20: mol_type = other DNA
gagaacacaggcacggctga

SEQ ID NO: 41167 - DNA, 20 bp, synthetic construct
  source 1..20: mol_type = other DNA
taacctgcaaaatgaaaaag

SEQ ID NO: 41168 - DNA, 20 bp, synthetic construct
  source 1..20: mol_type = other DNA
ctccttgtagcgtctgacga

SEQ ID NO: 41169 - DNA, 20 bp, synthetic construct
  source 1..20: mol_type = other DNA
ctgccggaggtctgtgccac

SEQ ID NO: 41170 - DNA, 20 bp, synthetic construct
  source 1..20: mol_type = other DNA
ccgggaagatggcgtccggt

SEQ ID NO: 41171 - DNA, 20 bp, synthetic construct
  source 1..20: mol_type = other DNA
gggcttcaagaaatgctgcg

SEQ ID NO: 41172 - DNA, 20 bp, synthetic construct
  source 1..20: mol_type = other DNA
ccttacccatcattccagtg

SEQ ID NO: 41173 - DNA, 20 bp, synthetic construct
  source 1..20: mol_type = other DNA
tcccctcgaatcacttttcc

SEQ ID NO: 41174 - DNA, 20 bp, synthetic construct
  source 1..20: mol_type = other DNA
ctgtgatggccacatcatcc

SEQ ID NO: 41175 - DNA, 20 bp, synthetic construct
  source 1..20: mol_type = other DNA
tctgcaggtatgaccccgaa

SEQ ID NO: 41176 - DNA, 20 bp, synthetic construct
  source 1..20: mol_type = other DNA
gccccagggccttacgggta

SEQ ID NO: 41177 - DNA, 20 bp, synthetic construct
  source 1..20: mol_type = other DNA
tctgcaggtcacacacaaag

SEQ ID NO: 41178 - DNA, 20 bp, synthetic construct
  source 1..20: mol_type = other DNA
ttcatgagctcgtgaacctg

SEQ ID NO: 41179 - DNA, 20 bp, synthetic construct
  source 1..20: mol_type = other DNA
aggttcagctgcttgagcga

SEQ ID NO: 41180 - DNA, 20 bp, synthetic construct
  source 1..20: mol_type = other DNA
ggtgctggggggccgccaca

SEQ ID NO: 41181 - DNA, 20 bp, synthetic construct
  source 1..20: mol_type = other DNA
tattaccctctggtggaagg

SEQ ID NO: 41182 - DNA, 20 bp, synthetic construct
  source 1..20: mol_type = other DNA
cttctccatgtcgtcccagt

SEQ ID NO: 41183 - DNA, 20 bp, synthetic construct
  source 1..20: mol_type = other DNA
tatccaaaacaggtaaggcc

SEQ ID NO: 41184 - DNA, 20 bp, synthetic construct
  source 1..20: mol_type = other DNA
cactgtcagtgggtagatga

SEQ ID NO: 41185 - DNA, 20 bp, synthetic construct
  source 1..20: mol_type = other DNA
agccatgcctgactatctgg

SEQ ID NO: 41186 - DNA, 20 bp, synthetic construct
  source 1..20: mol_type = other DNA
gctcacacccggaagatgac

SEQ ID NO: 41187 - DNA, 20 bp, synthetic construct
  source 1..20: mol_type = other DNA
gtccctcaagtctggtctcc

SEQ ID NO: 41188 - DNA, 20 bp, synthetic construct
  source 1..20: mol_type = other DNA
acggtctgggaagtgtttag

SEQ ID NO: 41189 - DNA, 20 bp, synthetic construct
  source 1..20: mol_type = other DNA
ggatccgatcgaaactcagc

SEQ ID NO: 41190 - DNA, 20 bp, synthetic construct
  source 1..20: mol_type = other DNA
agggggattatgtatccacg

SEQ ID NO: 41191 - DNA, 20 bp, synthetic construct
  source 1..20: mol_type = other DNA
gggtggcccccgagtgtctc

SEQ ID NO: 41192 - DNA, 20 bp, synthetic construct
  source 1..20: mol_type = other DNA
tgctatattggctggtgagt

SEQ ID NO: 41193 - DNA, 20 bp, synthetic construct
  source 1..20: mol_type = other DNA
tggacgagaacagcccccta

SEQ ID NO: 41194 - DNA, 20 bp, synthetic construct
  source 1..20: mol_type = other DNA
ccgtgtcagctcgtcagagc

SEQ ID NO: 41195 - DNA, 20 bp, synthetic construct
  source 1..20: mol_type = other DNA
catcttgtcatcaacggtga

SEQ ID NO: 41196 - DNA, 20 bp, synthetic construct
  source 1..20: mol_type = other DNA
ccttggcagcctgcacgcac

SEQ ID NO: 41197 - DNA, 20 bp, synthetic construct
  source 1..20: mol_type = other DNA
tgctggccccccccaagacg

SEQ ID NO: 41198 - DNA, 20 bp, synthetic construct
  source 1..20: mol_type = other DNA
tcctgaacttgaagaacaag

SEQ ID NO: 41199 - DNA, 20 bp, synthetic construct
  source 1..20: mol_type = other DNA
gcacaagcgtctgcacaccc

SEQ ID NO: 41200 - DNA, 20 bp, synthetic construct
  source 1..20: mol_type = other DNA
cacctgaggcagtgaaaaca

SEQ ID NO: 41201 - DNA, 20 bp, synthetic construct
  source 1..20: mol_type = other DNA
acatacaaattgacatgcag

SEQ ID NO: 41202 - DNA, 20 bp, synthetic construct
  source 1..20: mol_type = other DNA
ctctctccaggactacccat

SEQ ID NO: 41203 - DNA, 20 bp, synthetic construct
  source 1..20: mol_type = other DNA
caagtcttgtgactgtcatc

SEQ ID NO: 41204 - DNA, 20 bp, synthetic construct
  source 1..20: mol_type = other DNA
ccactgagtaaaactgcttc

SEQ ID NO: 41205 - DNA, 20 bp, synthetic construct
  source 1..20: mol_type = other DNA
ctcctctaggtacaagaact

SEQ ID NO: 41206 - DNA, 20 bp, synthetic construct
  source 1..20: mol_type = other DNA
ccttataatcaggaccaagg

SEQ ID NO: 41207 - DNA, 20 bp, synthetic construct
  source 1..20: mol_type = other DNA
cttcagacaggacttgctgg

SEQ ID NO: 41208 - DNA, 20 bp, synthetic construct
  source 1..20: mol_type = other DNA
cgtgtgcctcgctctccacg

SEQ ID NO: 41209 - DNA, 20 bp, synthetic construct
  source 1..20: mol_type = other DNA
gctctaggtcactgtctcct

SEQ ID NO: 41210 - DNA, 20 bp, synthetic construct
  source 1..20: mol_type = other DNA
atcttcatcttgtgataggg

SEQ ID NO: 41211 - DNA, 20 bp, synthetic construct
  source 1..20: mol_type = other DNA
tcagctgtccaggtgcgtgg

SEQ ID NO: 41212 - DNA, 20 bp, synthetic construct
  source 1..20: mol_type = other DNA
cattgtacaggccttcctga

SEQ ID NO: 41213 - DNA, 20 bp, synthetic construct
  source 1..20: mol_type = other DNA
gttgaccatcaacaaactcc

SEQ ID NO: 41214 - DNA, 20 bp, synthetic construct
  source 1..20: mol_type = other DNA
aggccaggggctggctccag

SEQ ID NO: 41215 - DNA, 20 bp, synthetic construct
  source 1..20: mol_type = other DNA
gaggcccacgtggaaggtct

SEQ ID NO: 41216 - DNA, 20 bp, synthetic construct
  source 1..20: mol_type = other DNA
ggtgcttcctgacagcaccc

SEQ ID NO: 41217 - DNA, 20 bp, synthetic construct
  source 1..20: mol_type = other DNA
agaagaacatggcggtcatg

SEQ ID NO: 41218 - DNA, 20 bp, synthetic construct
  source 1..20: mol_type = other DNA
cacaaactctgtcttctgct

SEQ ID NO: 41219 - DNA, 20 bp, synthetic construct
  source 1..20: mol_type = other DNA
gactcacttctcctccgagg

SEQ ID NO: 41220 - DNA, 20 bp, synthetic construct
  source 1..20: mol_type = other DNA
agcgtttccccgctgtcttg

SEQ ID NO: 41221 - DNA, 20 bp, synthetic construct
  source 1..20: mol_type = other DNA
tgccatcctgcgtctggacc

SEQ ID NO: 41222 - DNA, 20 bp, synthetic construct
  source 1..20: mol_type = other DNA
ctccggatagatgttggagc

SEQ ID NO: 41223 - DNA, 20 bp, synthetic construct
  source 1..20: mol_type = other DNA
gctgtggccacagctgtgtg

SEQ ID NO: 41224 - DNA, 20 bp, synthetic construct
  source 1..20: mol_type = other DNA
actacgaagtgatggtgact

SEQ ID NO: 41225 - DNA, 20 bp, synthetic construct
  source 1..20: mol_type = other DNA
tccttacctccaccatggtc

SEQ ID NO: 41226 - DNA, 20 bp, synthetic construct
  source 1..20: mol_type = other DNA
cggcagcagctggccgggaa

SEQ ID NO: 41227 - DNA, 20 bp, synthetic construct
  source 1..20: mol_type = other DNA
tttgcagaaaaagaaagaag

SEQ ID NO: 41228 - DNA, 20 bp, synthetic construct
  source 1..20: mol_type = other DNA
tcttgtccttgagctcctct

SEQ ID NO: 41229 - DNA, 20 bp, synthetic construct
  source 1..20: mol_type = other DNA
aacctgcaaaatgaaaaaga

SEQ ID NO: 41230 - DNA, 20 bp, synthetic construct
  source 1..20: mol_type = other DNA
aagctgcaagacatgttgga

SEQ ID NO: 41231 - DNA, 20 bp, synthetic construct
  source 1..20: mol_type = other DNA
agcttcatctcgggagtgga

SEQ ID NO: 41232 - DNA, 20 bp, synthetic construct
  source 1..20: mol_type = other DNA
cactatccagtcctttgtga

SEQ ID NO: 41233 - DNA, 20 bp, synthetic construct
  source 1..20: mol_type = other DNA
agtctgtggacaagacatcc

SEQ ID NO: 41234 - DNA, 20 bp, synthetic construct
  source 1..20: mol_type = other DNA
cacactccaaaccatgaaga

SEQ ID NO: 41235 - DNA, 20 bp, synthetic construct
  source 1..20: mol_type = other DNA
gaggaatgagctgggtgagt

SEQ ID NO: 41236 - DNA, 20 bp, synthetic construct
  source 1..20: mol_type = other DNA
accgagtacttgcgctctgg

SEQ ID NO: 41237 - DNA, 20 bp, synthetic construct
  source 1..20: mol_type = other DNA
tggcagggcacaccttgcat

SEQ ID NO: 41238 - DNA, 20 bp, synthetic construct
  source 1..20: mol_type = other DNA
gagcctgaggatccaaggtg

SEQ ID NO: 41239 - DNA, 20 bp, synthetic construct
  source 1..20: mol_type = other DNA
tcagggcggctgtaagggag

SEQ ID NO: 41240 - DNA, 20 bp, synthetic construct
  source 1..20: mol_type = other DNA
ctcgcggttgattccaaact

SEQ ID NO: 41241 - DNA, 20 bp, synthetic construct
  source 1..20: mol_type = other DNA
aaccagaaggaaggttcctg

SEQ ID NO: 41242 - DNA, 20 bp, synthetic construct
  source 1..20: mol_type = other DNA
gcttcaccaccacggccgag

SEQ ID NO: 41243 - DNA, 20 bp, synthetic construct
  source 1..20: mol_type = other DNA
cactgtggccttcttccgca

SEQ ID NO: 41244 - DNA, 20 bp, synthetic construct
  source 1..20: mol_type = other DNA
gggataagggagggccggtg

SEQ ID NO: 41245 - DNA, 20 bp, synthetic construct
  source 1..20: mol_type = other DNA
ccaaccaggcaccatggtgc

SEQ ID NO: 41246 - DNA, 20 bp, synthetic construct
  source 1..20: mol_type = other DNA
gccccaccttcttgttgtct

SEQ ID NO: 41247 - DNA, 20 bp, synthetic construct
  source 1..20: mol_type = other DNA
ccagcaggatgggcacatca

SEQ ID NO: 41248 - DNA, 20 bp, synthetic construct
  source 1..20: mol_type = other DNA
cacacagacgccatgcacga

SEQ ID NO: 41249 - DNA, 20 bp, synthetic construct
  source 1..20: mol_type = other DNA
cagtttcaggtgcacaaact

SEQ ID NO: 41250 - DNA, 20 bp, synthetic construct
  source 1..20: mol_type = other DNA
tcccagggcccgcccgcgcc

SEQ ID NO: 41251 - DNA, 20 bp, synthetic construct
  source 1..20: mol_type = other DNA
actttctggcaatggtttga

SEQ ID NO: 41252 - DNA, 20 bp, synthetic construct
  source 1..20: mol_type = other DNA
ccccatgacatttacgtgat

SEQ ID NO: 41253 - DNA, 20 bp, synthetic construct
  source 1..20: mol_type = other DNA
ctaaagaggatccgtgactt

SEQ ID NO: 41254 - DNA, 20 bp, synthetic construct
  source 1..20: mol_type = other DNA
gttcagctaaggattaaaag

SEQ ID NO: 41255 - DNA, 20 bp, synthetic construct
  source 1..20: mol_type = other DNA
tgagactgaggcccacgggg

SEQ ID NO: 41256 - DNA, 20 bp, synthetic construct
  source 1..20: mol_type = other DNA
gatgggcatctgctgtgagc

SEQ ID NO: 41257 - DNA, 20 bp, synthetic construct
  source 1..20: mol_type = other DNA
ctgccagaaactcattgaag

SEQ ID NO: 41258 - DNA, 20 bp, synthetic construct
  source 1..20: mol_type = other DNA
ccagtggcgagagaagaccc

SEQ ID NO: 41259 - DNA, 20 bp, synthetic construct
  source 1..20: mol_type = other DNA
tcaaaaagtccaagagtata

SEQ ID NO: 41260 - DNA, 20 bp, synthetic construct
  source 1..20: mol_type = other DNA
atggacaacaaggccccagc

SEQ ID NO: 41261 - DNA, 20 bp, synthetic construct
  source 1..20: mol_type = other DNA
ttccacagaaagccacgaag

SEQ ID NO: 41262 - DNA, 20 bp, synthetic construct
  source 1..20: mol_type = other DNA
caggttcagcacctggagca

SEQ ID NO: 41263 - DNA, 20 bp, synthetic construct
  source 1..20: mol_type = other DNA
agctctgtccacttgggggc

SEQ ID NO: 41264 - DNA, 20 bp, synthetic construct
  source 1..20: mol_type = other DNA
atgaaggtatctaagcgcag

SEQ ID NO: 41265 - DNA, 20 bp, synthetic construct
  source 1..20: mol_type = other DNA
acaggaaccttccttctggt

SEQ ID NO: 41266 - DNA, 20 bp, synthetic construct
  source 1..20: mol_type = other DNA
ttcgggggcatacctggaga

SEQ ID NO: 41267 - DNA, 20 bp, synthetic construct
  source 1..20: mol_type = other DNA
cgggggccgaggagcaccag

SEQ ID NO: 41268 - DNA, 20 bp, synthetic construct
  source 1..20: mol_type = other DNA
gttgaactgggaccaggaca

SEQ ID NO: 41269 - DNA, 20 bp, synthetic construct
  source 1..20: mol_type = other DNA
attcatcttgtaaatcttcc

SEQ ID NO: 41270 - DNA, 20 bp, synthetic construct
  source 1..20: mol_type = other DNA
gaggtgtttcaggaatacta

SEQ ID NO: 41271 - DNA, 20 bp, synthetic construct
  source 1..20: mol_type = other DNA
caggtgagtatcagtgcctg

SEQ ID NO: 41272 - DNA, 20 bp, synthetic construct
  source 1..20: mol_type = other DNA
cagtcaggtcccggccagcc

SEQ ID NO: 41273 - DNA, 20 bp, synthetic construct
  source 1..20: mol_type = other DNA
ctacctcaacaagtacatcc

SEQ ID NO: 41274 - DNA, 20 bp, synthetic construct
  source 1..20: mol_type = other DNA
gacagaggaaccttctcacc

SEQ ID NO: 41275 - DNA, 20 bp, synthetic construct
  source 1..20: mol_type = other DNA
gcctgtctcctgggttcccg

SEQ ID NO: 41276 - DNA, 20 bp, synthetic construct
  source 1..20: mol_type = other DNA
ggtcaggaagaaatctagat

SEQ ID NO: 41277 - DNA, 20 bp, synthetic construct
  source 1..20: mol_type = other DNA
ggaaactcaagcctgcactc

SEQ ID NO: 41278 - DNA, 20 bp, synthetic construct
  source 1..20: mol_type = other DNA
ccagggtcacaagaggatgc

SEQ ID NO: 41279 - DNA, 20 bp, synthetic construct
  source 1..20: mol_type = other DNA
ggagctgcagctggagcccg

SEQ ID NO: 41280 - DNA, 20 bp, synthetic construct
  source 1..20: mol_type = other DNA
gctgcggcggccttccgacc

SEQ ID NO: 41281 - DNA, 20 bp, synthetic construct
  source 1..20: mol_type = other DNA
ctgttctcgtccaagtgctg

SEQ ID NO: 41282 - DNA, 20 bp, synthetic construct
  source 1..20: mol_type = other DNA
gctcgcagaagtcgaacacc

SEQ ID NO: 41283 - DNA, 20 bp, synthetic construct
  source 1..20: mol_type = other DNA
atttccgggatctgaatcac

SEQ ID NO: 41284 - DNA, 20 bp, synthetic construct
  source 1..20: mol_type = other DNA
cagcgctttccgtcgcggtc

SEQ ID NO: 41285 - DNA, 20 bp, synthetic construct
  source 1..20: mol_type = other DNA
ggggcttctgggtctggcag

SEQ ID NO: 41286 - DNA, 20 bp, synthetic construct
  source 1..20: mol_type = other DNA
aactatcgggcagatagcaa

SEQ ID NO: 41287 - DNA, 20 bp, synthetic construct
  source 1..20: mol_type = other DNA
acgtgctacagtcctggtaa

SEQ ID NO: 41288 - DNA, 20 bp, synthetic construct
  source 1..20: mol_type = other DNA
tcctggccaggcgaaggatg

SEQ ID NO: 41289 - DNA, 20 bp, synthetic construct
  source 1..20: mol_type = other DNA
ggcttctctataaagaggag

SEQ ID NO: 41290 - DNA, 20 bp, synthetic construct
  source 1..20: mol_type = other DNA
actgaaacgcaagcgaggag

SEQ ID NO: 41291 - DNA, 20 bp, synthetic construct
  source 1..20: mol_type = other DNA
ctacagtgacagcttcccaa

SEQ ID NO: 41292 - DNA, 20 bp, synthetic construct
  source 1..20: mol_type = other DNA
cccacttcaggaacatggtg

SEQ ID NO: 41293 - DNA, 20 bp, synthetic construct
  source 1..20: mol_type = other DNA
ggtagaagggaagataatca

SEQ ID NO: 41294 - DNA, 20 bp, synthetic construct
  source 1..20: mol_type = other DNA
ccggtgagctgatcctgccg

SEQ ID NO: 41295 - DNA, 20 bp, synthetic construct
  source 1..20: mol_type = other DNA
cgagggccaactgcgcgagg

SEQ ID NO: 41296 - DNA, 20 bp, synthetic construct
  source 1..20: mol_type = other DNA
agtaggtgaagagctcgtac

SEQ ID NO: 41297 - DNA, 20 bp, synthetic construct
  source 1..20: mol_type = other DNA
gcaggaccgtgtacaggttg

SEQ ID NO: 41298 - DNA, 20 bp, synthetic construct
  source 1..20: mol_type = other DNA
gatgcagagcatcaagtgcg

SEQ ID NO: 41299 - DNA, 20 bp, synthetic construct
  source 1..20: mol_type = other DNA
cggacaacaaagccctggcc

SEQ ID NO: 41300 - DNA, 20 bp, synthetic construct
  source 1..20: mol_type = other DNA
ctccgtcaccacggctgctg

SEQ ID NO: 41301 - DNA, 20 bp, synthetic construct
  source 1..20: mol_type = other DNA
agtcgtaggtgaggatgaat

SEQ ID NO: 41302 - DNA, 20 bp, synthetic construct
  source 1..20: mol_type = other DNA
cactcgtacttcctattgac

SEQ ID NO: 41303 - DNA, 20 bp, synthetic construct
  source 1..20: mol_type = other DNA
tgaaatccagcattctggat

SEQ ID NO: 41304 - DNA, 20 bp, synthetic construct
  source 1..20: mol_type = other DNA
cattcatgccacatgctgga

SEQ ID NO: 41305 - DNA, 20 bp, synthetic construct
  source 1..20: mol_type = other DNA
gaggaagctggcccagttgc

SEQ ID NO: 41306 - DNA, 20 bp, synthetic construct
  source 1..20: mol_type = other DNA
gccatacccaggtaagagca

SEQ ID NO: 41307 - DNA, 20 bp, synthetic construct
  source 1..20: mol_type = other DNA
gctggttctcgtggtcctgg

SEQ ID NO: 41308 - DNA, 20 bp, synthetic construct
  source 1..20: mol_type = other DNA
agcttcatcttgcggtatag

SEQ ID NO: 41309 - DNA, 20 bp, synthetic construct
  source 1..20: mol_type = other DNA
caagacagttatagtcaaca

SEQ ID NO: 41310 - DNA, 20 bp, synthetic construct
  source 1..20: mol_type = other DNA
gcggcagcgcatcaaggagc

SEQ ID NO: 41311 - DNA, 20 bp, synthetic construct
  source 1..20: mol_type = other DNA
aatgctgaagaccaaaaacc

SEQ ID NO: 41312 - DNA, 20 bp, synthetic construct
  source 1..20: mol_type = other DNA
gtcacacttatactcatgtt

SEQ ID NO: 41313 - DNA, 20 bp, synthetic construct
  source 1..20: mol_type = other DNA
catgggtttctgtccactgc

SEQ ID NO: 41314 - DNA, 20 bp, synthetic construct
  source 1..20: mol_type = other DNA
ggtcgaacttgtggcagctt

SEQ ID NO: 41315 - DNA, 20 bp, synthetic construct
  source 1..20: mol_type = other DNA
ggagatcaagcagctcacag

SEQ ID NO: 41316 - DNA, 20 bp, synthetic construct
  source 1..20: mol_type = other DNA
caggcgaactggagacaaca

SEQ ID NO: 41317 - DNA, 20 bp, synthetic construct
  source 1..20: mol_type = other DNA
ggacgatgacaaccacaggt

SEQ ID NO: 41318 - DNA, 20 bp, synthetic construct
  source 1..20: mol_type = other DNA
caggttctcatgtcttcatg

SEQ ID NO: 41319 - DNA, 20 bp, synthetic construct
  source 1..20: mol_type = other DNA
cccgggcggcacttgcgcag

SEQ ID NO: 41320 - DNA, 20 bp, synthetic construct
  source 1..20: mol_type = other DNA
tttcagagtatacactggaa

SEQ ID NO: 41321 - DNA, 20 bp, synthetic construct
  source 1..20: mol_type = other DNA
cttgtagtaccgctcctgga

SEQ ID NO: 41322 - DNA, 20 bp, synthetic construct
  source 1..20: mol_type = other DNA
atacacccagctctggaact

SEQ ID NO: 41323 - DNA, 20 bp, synthetic construct
  source 1..20: mol_type = other DNA
acagaacgcggctctacgca

SEQ ID NO: 41324 - DNA, 20 bp, synthetic construct
  source 1..20: mol_type = other DNA
gcttctctataaagaggaga

SEQ ID NO: 41325 - DNA, 20 bp, synthetic construct
  source 1..20: mol_type = other DNA
cggagctggaaggtgaaggg

SEQ ID NO: 41326 - DNA, 20 bp, synthetic construct
  source 1..20: mol_type = other DNA
cgagccaagtcagcgtcctg

SEQ ID NO: 41327 - DNA, 20 bp, synthetic construct
  source 1..20: mol_type = other DNA
tgagtcccaacaagcaagaa

SEQ ID NO: 41328 - DNA, 20 bp, synthetic construct
  source 1..20: mol_type = other DNA
agttagctggctgaaccccg

SEQ ID NO: 41329 - DNA, 20 bp, synthetic construct
  source 1..20: mol_type = other DNA
gccagtgaacctggggctgt

SEQ ID NO: 41330 - DNA, 20 bp, synthetic construct
  source 1..20: mol_type = other DNA
ggcggcgaggacggcggcgg

SEQ ID NO: 41331 - DNA, 20 bp, synthetic construct
  source 1..20: mol_type = other DNA
agtgttccggcagccgctgg

SEQ ID NO: 41332 - DNA, 20 bp, synthetic construct
  source 1..20: mol_type = other DNA
acaagggtaattactttctg

SEQ ID NO: 41333 - DNA, 20 bp, synthetic construct
  source 1..20: mol_type = other DNA
aggatgtacttgttgaggta

SEQ ID NO: 41334 - DNA, 20 bp, synthetic construct
  source 1..20: mol_type = other DNA
cattgccaatggtgatgacc

SEQ ID NO: 41335 - DNA, 20 bp, synthetic construct
  source 1..20: mol_type = other DNA
ttcttccagatatcctcgct

SEQ ID NO: 41336 - DNA, 20 bp, synthetic construct
  source 1..20: mol_type = other DNA
ctcgtacactgtgggcttgt

SEQ ID NO: 41337 - DNA, 20 bp, synthetic construct
  source 1..20: mol_type = other DNA
ggggcacgcccagaatccca

SEQ ID NO: 41338 - DNA, 20 bp, synthetic construct
  source 1..20: mol_type = other DNA
gctcttgttgagttggatgt

SEQ ID NO: 41339 - DNA, 20 bp, synthetic construct
  source 1..20: mol_type = other DNA
gatgtgccaattctgcgagg

SEQ ID NO: 41340 - DNA, 20 bp, synthetic construct
  source 1..20: mol_type = other DNA
tcaagcagttcgcactacag

SEQ ID NO: 41341 - DNA, 20 bp, synthetic construct
  source 1..20: mol_type = other DNA
acctcaagcaggagatctcc

SEQ ID NO: 41342 - DNA, 20 bp, synthetic construct
  source 1..20: mol_type = other DNA
gcaccaccgctctcggttcc

SEQ ID NO: 41343 - DNA, 20 bp, synthetic construct
  source 1..20: mol_type = other DNA
gcctggagatctcctgcttg

SEQ ID NO: 41344 - DNA, 20 bp, synthetic construct
  source 1..20: mol_type = other DNA
agcaggctgtggagctctgt

SEQ ID NO: 41345 - DNA, 20 bp, synthetic construct
  source 1..20: mol_type = other DNA
gagttcaccctctcctgtgc

SEQ ID NO: 41346 - DNA, 20 bp, synthetic construct
  source 1..20: mol_type = other DNA
gatggaggggaagacggccc

SEQ ID NO: 41347 - DNA, 20 bp, synthetic construct
  source 1..20: mol_type = other DNA
agtctccaagtcccagctca

SEQ ID NO: 41348 - DNA, 20 bp, synthetic construct
  source 1..20: mol_type = other DNA
aagtatcgtggtgtcagcta

SEQ ID NO: 41349 - DNA, 20 bp, synthetic construct
  source 1..20: mol_type = other DNA
gtcgagcctgtcagctgtcc

SEQ ID NO: 41350 - DNA, 20 bp, synthetic construct
  source 1..20: mol_type = other DNA
tcacaagaaacctgtctcct

SEQ ID NO: 41351 - DNA, 20 bp, synthetic construct
  source 1..20: mol_type = other DNA
gccgcgctcgtcgtcgacaa

SEQ ID NO: 41352 - DNA, 20 bp, synthetic construct
  source 1..20: mol_type = other DNA
catactgtccctaggagcaa

SEQ ID NO: 41353 - DNA, 20 bp, synthetic construct
  source 1..20: mol_type = other DNA
tccagcgaaggtgtggaaga

SEQ ID NO: 41354 - DNA, 20 bp, synthetic construct
  source 1..20: mol_type = other DNA
caaactctacatcatatccc

SEQ ID NO: 41355 - DNA, 20 bp, synthetic construct
  source 1..20: mol_type = other DNA
gtcgctgcattgagtgtgcg

SEQ ID NO: 41356 - DNA, 20 bp, synthetic construct
  source 1..20: mol_type = other DNA
gaaggcctgccagggagaag

SEQ ID NO: 41357 - DNA, 20 bp, synthetic construct
  source 1..20: mol_type = other DNA
cttctccttcagtttctcga

SEQ ID NO: 41358 - DNA, 20 bp, synthetic construct
  source 1..20: mol_type = other DNA
cttctccacattctggatga

SEQ ID NO: 41359 - DNA, 20 bp, synthetic construct
  source 1..20: mol_type = other DNA
tatcaaaaccattcgggaag

SEQ ID NO: 41360 - DNA, 20 bp, synthetic construct
  source 1..20: mol_type = other DNA
gctgactcacttctcctccg

SEQ ID NO: 41361 - DNA, 20 bp, synthetic construct
  source 1..20: mol_type = other DNA
aatagatggacgacctcagt

SEQ ID NO: 41362 - DNA, 20 bp, synthetic construct
  source 1..20: mol_type = other DNA
atgtgggaggccttgtccta

SEQ ID NO: 41363 - DNA, 20 bp, synthetic construct
  source 1..20: mol_type = other DNA
caggcccgggacgtcacagt

SEQ ID NO: 41364 - DNA, 20 bp, synthetic construct
  source 1..20: mol_type = other DNA
atgaccccttgctgaactgg

SEQ ID NO: 41365 - DNA, 20 bp, synthetic construct
  source 1..20: mol_type = other DNA
gcgctacgcacagctcagtg

SEQ ID NO: 41366 - DNA, 20 bp, synthetic construct
  source 1..20: mol_type = other DNA
acgaaccattcgaacccttg

SEQ ID NO: 41367 - DNA, 20 bp, synthetic construct
  source 1..20: mol_type = other DNA
gctagcccgggcttcgtccc

SEQ ID NO: 41368 - DNA, 20 bp, synthetic construct
  source 1..20: mol_type = other DNA
gtgggacactgcgggccagg

SEQ ID NO: 41369 - DNA, 20 bp, synthetic construct
  source 1..20: mol_type = other DNA
ccattgagaacctggtgagg

SEQ ID NO: 41370 - DNA, 20 bp, synthetic construct
  source 1..20: mol_type = other DNA
accagaagaagtcgtggttg

SEQ ID NO: 41371 - DNA, 20 bp, synthetic construct
  source 1..20: mol_type = other DNA
agcagcggcggcggcggcgg

SEQ ID NO: 41372 - DNA, 20 bp, synthetic construct
  source 1..20: mol_type = other DNA
cagcatactctgaggtacga

SEQ ID NO: 41373 - DNA, 20 bp, synthetic construct
  source 1..20: mol_type = other DNA
tttgtcctgcggaggaagga

SEQ ID NO: 41374 - DNA, 20 bp, synthetic construct
  source 1..20: mol_type = other DNA
ccagggcctcctcggcctgc

SEQ ID NO: 41375 - DNA, 20 bp, synthetic construct
  source 1..20: mol_type = other DNA
atgaggcagcccttataatc

SEQ ID NO: 41376 - DNA, 20 bp, synthetic construct
  source 1..20: mol_type = other DNA
tcaatgatgaacgtgctgca

SEQ ID NO: 41377 - DNA, 20 bp, synthetic construct
  source 1..20: mol_type = other DNA
gggacttctccatctctgtc

SEQ ID NO: 41378 - DNA, 20 bp, synthetic construct
  source 1..20: mol_type = other DNA
gggccacctgctcccggagg

SEQ ID NO: 41379 - DNA, 20 bp, synthetic construct
  source 1..20: mol_type = other DNA
cgtgttggagaacgtccccg

SEQ ID NO: 41380 - DNA, 20 bp, synthetic construct
  source 1..20: mol_type = other DNA
aaatgacccacgggaagaca

SEQ ID NO: 41381 - DNA, 20 bp, synthetic construct
  source 1..20: mol_type = other DNA
gcagagcatcaagtgcgtgg

SEQ ID NO: 41382 - DNA, 20 bp, synthetic construct
  source 1..20: mol_type = other DNA
acaagtaggcatcagtgttc

SEQ ID NO: 41383 - DNA, 20 bp, synthetic construct
  source 1..20: mol_type = other DNA
gcgcatgcacagtttgtacc

SEQ ID NO: 41384 - DNA, 20 bp, synthetic construct
  source 1..20: mol_type = other DNA
tgtggagctcacgaaggctg

SEQ ID NO: 41385 - DNA, 20 bp, synthetic construct
  source 1..20: mol_type = other DNA
ggcacatccgaatccacact

SEQ ID NO: 41386 - DNA, 20 bp, synthetic construct
  source 1..20: mol_type = other DNA
tgtggccctccgtcccaggt

SEQ ID NO: 41387 - DNA, 20 bp, synthetic construct
  source 1..20: mol_type = other DNA
acagggacacagaggaaggc

SEQ ID NO: 41388 - DNA, 20 bp, synthetic construct
  source 1..20: mol_type = other DNA
gttcatggcacagcgaaagt

SEQ ID NO: 41389 - DNA, 20 bp, synthetic construct
  source 1..20: mol_type = other DNA
caaagcaattgaaaccgata

SEQ ID NO: 41390 - DNA, 20 bp, synthetic construct
  source 1..20: mol_type = other DNA
tcagcttcccgcccaccagc

SEQ ID NO: 41391 - DNA, 20 bp, synthetic construct
  source 1..20: mol_type = other DNA
cgatcgtctgggaaagtaag

SEQ ID NO: 41392 - DNA, 20 bp, synthetic construct
  source 1..20: mol_type = other DNA
gccctctcacgacggagatc

SEQ ID NO: 41393 - DNA, 20 bp, synthetic construct
  source 1..20: mol_type = other DNA
tcacacattattatctccgg

SEQ ID NO: 41394 - DNA, 20 bp, synthetic construct
  source 1..20: mol_type = other DNA
cttcgaccagaaccagggag

SEQ ID NO: 41395 - DNA, 20 bp, synthetic construct
  source 1..20: mol_type = other DNA
agcagcactgggtgctcctc

SEQ ID NO: 41396 - DNA, 20 bp, synthetic construct
  source 1..20: mol_type = other DNA
ggatggcctgcgtgggaaag

SEQ ID NO: 41397 - DNA, 20 bp, synthetic construct
  source 1..20: mol_type = other DNA
acaccaacattcccagctgc

SEQ ID NO: 41398 - DNA, 20 bp, synthetic construct
  source 1..20: mol_type = other DNA
cctgatgagagattctagaa

SEQ ID NO: 41399 - DNA, 20 bp, synthetic construct
  source 1..20: mol_type = other DNA
ttatacagctgcgtaaagtg

SEQ ID NO: 41400 - DNA, 20 bp, synthetic construct
  source 1..20: mol_type = other DNA
gatgcagcagcggttgcagg

SEQ ID NO: 41401 - DNA, 20 bp, synthetic construct
  source 1..20: mol_type = other DNA
cagcgggccagaccagcaga

SEQ ID NO: 41402 - DNA, 20 bp, synthetic construct
  source 1..20: mol_type = other DNA
cgagcccattatgaaactga

SEQ ID NO: 41403 - DNA, 20 bp, synthetic construct
  source 1..20: mol_type = other DNA
gtcccccagccggtcagcca

SEQ ID NO: 41404 - DNA, 20 bp, synthetic construct
  source 1..20: mol_type = other DNA
cctacctgaataggagtgtt

SEQ ID NO: 41405 - DNA, 20 bp, synthetic construct
  source 1..20: mol_type = other DNA
gaagagtgcaaagagaaaag

SEQ ID NO: 41406 - DNA, 20 bp, synthetic construct
  source 1..20: mol_type = other DNA
tggaccaggtggggcgggac

SEQ ID NO: 41407 - DNA, 20 bp, synthetic construct
  source 1..20: mol_type = other DNA
cttcaaagtggtttcactgt

SEQ ID NO: 41408 - DNA, 20 bp, synthetic construct
  source 1..20: mol_type = other DNA
gtgtacaaattcctgcacca

SEQ ID NO: 41409 - DNA, 20 bp, synthetic construct
  source 1..20: mol_type = other DNA
ccacagtgatcgcagaaggt

SEQ ID NO: 41410 - DNA, 20 bp, synthetic construct
  source 1..20: mol_type = other DNA
tttttggagcagttctgcag

SEQ ID NO: 41411 - DNA, 20 bp, synthetic construct
  source 1..20: mol_type = other DNA
catgggcaaaggatcgtagt

SEQ ID NO: 41412 - DNA, 20 bp, synthetic construct
  source 1..20: mol_type = other DNA
aggacctacctcttcttggc

SEQ ID NO: 41413 - DNA, 20 bp, synthetic construct
  source 1..20: mol_type = other DNA
tggctttgaatgtggcgtgt

SEQ ID NO: 41414 - DNA, 20 bp, synthetic construct
  source 1..20: mol_type = other DNA
tccaaccaggagaatttacc

SEQ ID NO: 41415 - DNA, 20 bp, synthetic construct
  source 1..20: mol_type = other DNA
agagctttacctgtctcttc

SEQ ID NO: 41416 - DNA, 20 bp, synthetic construct
  source 1..20: mol_type = other DNA
cgtcctaaacaaaattggag

SEQ ID NO: 41417 - DNA, 20 bp, synthetic construct
  source 1..20: mol_type = other DNA
cggagctggcggggagtcgc

SEQ ID NO: 41418 - DNA, 20 bp, synthetic construct
  source 1..20: mol_type = other DNA
tgcataggcttgtctggaag

SEQ ID NO: 41419 - DNA, 20 bp, synthetic construct
  source 1..20: mol_type = other DNA
ttttccactcatctataagg

SEQ ID NO: 41420 - DNA, 20 bp, synthetic construct
  source 1..20: mol_type = other DNA
atcactgaatacatggagaa

SEQ ID NO: 41421 - DNA, 20 bp, synthetic construct
  source 1..20: mol_type = other DNA
gctcagtcctcgcttggtgg

SEQ ID NO: 41422 - DNA, 20 bp, synthetic construct
  source 1..20: mol_type = other DNA
cctcacctcggcattctggt

SEQ ID NO: 41423 - DNA, 20 bp, synthetic construct
  source 1..20: mol_type = other DNA
gctgcgagacaaggtgggag

SEQ ID NO: 41424 - DNA, 20 bp, synthetic construct
  source 1..20: mol_type = other DNA
ttcttccccagtgtgagtgc

SEQ ID NO: 41425 - DNA, 20 bp, synthetic construct
  source 1..20: mol_type = other DNA
caagagtgacaatattctgt

SEQ ID NO: 41426 - DNA, 20 bp, synthetic construct
  source 1..20: mol_type = other DNA
cagtttggaaataatggtga

SEQ ID NO: 41427 - DNA, 20 bp, synthetic construct
  source 1..20: mol_type = other DNA
tgagcaggtatgagcagggc

SEQ ID NO: 41428 - DNA, 20 bp, synthetic construct
  source 1..20: mol_type = other DNA
ccaagccaagatggcccgga

SEQ ID NO: 41429 - DNA, 20 bp, synthetic construct
  source 1..20: mol_type = other DNA
tcgcagatctgcaaggtgcg

SEQ ID NO: 41430 - DNA, 20 bp, synthetic construct
  source 1..20: mol_type = other DNA
ccaggaactgcatcctggag

SEQ ID NO: 41431 - DNA, 20 bp, synthetic construct
  source 1..20: mol_type = other DNA
ggctggcggccaccaagtgc

SEQ ID NO: 41432 - DNA, 20 bp, synthetic construct
  source 1..20: mol_type = other DNA
ctctccagaccagcgaactg

SEQ ID NO: 41433 - DNA, 20 bp, synthetic construct
  source 1..20: mol_type = other DNA
gacggccagcgcggcccaga

SEQ ID NO: 41434 - DNA, 20 bp, synthetic construct
  source 1..20: mol_type = other DNA
cgcctttaccgcgctggacg

SEQ ID NO: 41435 - DNA, 20 bp, synthetic construct
  source 1..20: mol_type = other DNA
gacctcaccgtccatggccg

SEQ ID NO: 41436 - DNA, 20 bp, synthetic construct
  source 1..20: mol_type = other DNA
ccatcacgatgccagtggta

SEQ ID NO: 41437 - DNA, 20 bp, synthetic construct
  source 1..20: mol_type = other DNA
tcctttgtgtccctggtaga

SEQ ID NO: 41438 - DNA, 20 bp, synthetic construct
  source 1..20: mol_type = other DNA
gccaaactgagctagaggag

SEQ ID NO: 41439 - DNA, 20 bp, synthetic construct
  source 1..20: mol_type = other DNA
agctgtgagtgtctacaggg

SEQ ID NO: 41440 - DNA, 20 bp, synthetic construct
  source 1..20: mol_type = other DNA
tgttctcgtccaagtgctgt

SEQ ID NO: 41441 - DNA, 20 bp, synthetic construct
  source 1..20: mol_type = other DNA
tagccccggaacctgcaggt

SEQ ID NO: 41442 - DNA, 20 bp, synthetic construct
  source 1..20: mol_type = other DNA
actttgtcaggcacggcaaa

SEQ ID NO: 41443 - DNA, 20 bp, synthetic construct
  source 1..20: mol_type = other DNA
ccggccgcctggggtcgcgg

SEQ ID NO: 41444 - DNA, 20 bp, synthetic construct
  source 1..20: mol_type = other DNA
ccaaagacaacaggcagtag

SEQ ID NO: 41445 - DNA, 20 bp, synthetic construct
  source 1..20: mol_type = other DNA
ttacaaggcgaccctctaac

SEQ ID NO: 41446 - DNA, 20 bp, synthetic construct
  source 1..20: mol_type = other DNA
actagaagagaaacaaccct

SEQ ID NO: 41447 - DNA, 20 bp, synthetic construct
  source 1..20: mol_type = other DNA
cacagattcgcgcacaccgt

SEQ ID NO: 41448 - DNA, 20 bp, synthetic construct
  source 1..20: mol_type = other DNA
agccaatatagcactggcag

SEQ ID NO: 41449 - DNA, 20 bp, synthetic construct
  source 1..20: mol_type = other DNA
tgaatagttgtcaaacctgt

SEQ ID NO: 41450 - DNA, 20 bp, synthetic construct
  source 1..20: mol_type = other DNA
ctggtcgtcctttgtgagta

SEQ ID NO: 41451 - DNA, 20 bp, synthetic construct
  source 1..20: mol_type = other DNA
gaattcagctgaacaaggtg

SEQ ID NO: 41452 - DNA, 20 bp, synthetic construct
  source 1..20: mol_type = other DNA
tgaccagaagggcccggttc

SEQ ID NO: 41453 - DNA, 20 bp, synthetic construct
  source 1..20: mol_type = other DNA
cactgggctggtccaggcgg

SEQ ID NO: 41454 - DNA, 20 bp, synthetic construct
  source 1..20: mol_type = other DNA
gcgagcataggcttccaagg

SEQ ID NO: 41455 - DNA, 20 bp, synthetic construct
  source 1..20: mol_type = other DNA
ccaagaacacgttcaaatct

SEQ ID NO: 41456 - DNA, 20 bp, synthetic construct
  source 1..20: mol_type = other DNA
agctgaaccggcagctgcgc

SEQ ID NO: 41457 - DNA, 20 bp, synthetic construct
  source 1..20: mol_type = other DNA
ctcagtggatcggaatcgtg

SEQ ID NO: 41458 - DNA, 20 bp, synthetic construct
  source 1..20: mol_type = other DNA
tggacttggtgtagccctgc

SEQ ID NO: 41459 - DNA, 20 bp, synthetic construct
  source 1..20: mol_type = other DNA
ggaggacggtggctcggccc

SEQ ID NO: 41460 - DNA, 20 bp, synthetic construct
  source 1..20: mol_type = other DNA
cactgagtacatggccaagg

SEQ ID NO: 41461 - DNA, 20 bp, synthetic construct
  source 1..20: mol_type = other DNA
gtggtaggtaaattcatggt

SEQ ID NO: 41462 - DNA, 20 bp, synthetic construct
  source 1..20: mol_type = other DNA
gcacatcccccatgaccccg

SEQ ID NO: 41463 - DNA, 20 bp, synthetic construct
  source 1..20: mol_type = other DNA
cccgccctactacggaaact

SEQ ID NO: 41464 - DNA, 20 bp, synthetic construct
  source 1..20: mol_type = other DNA
ccgcaggcaagcctgggacc

SEQ ID NO: 41465 - DNA, 20 bp, synthetic construct
  source 1..20: mol_type = other DNA
atcctcccacctgtggggcg

SEQ ID NO: 41466 - DNA, 20 bp, synthetic construct
  source 1..20: mol_type = other DNA
cctgcaacaggatggtgtca

SEQ ID NO: 41467 - DNA, 20 bp, synthetic construct
  source 1..20: mol_type = other DNA
gacgcaggatggcatggggg

SEQ ID NO: 41468 - DNA, 20 bp, synthetic construct
  source 1..20: mol_type = other DNA
agtccaggagcacttcccgg

SEQ ID NO: 41469 - DNA, 20 bp, synthetic construct
  source 1..20: mol_type = other DNA
acagatcttcagagaaggtc

SEQ ID NO: 41470 - DNA, 20 bp, synthetic construct
  source 1..20: mol_type = other DNA
ctatgccacacagctccagg

SEQ ID NO: 41471 - DNA, 20 bp, synthetic construct
  source 1..20: mol_type = other DNA
tgaggtcacgaatgacggct

SEQ ID NO: 41472 - DNA, 20 bp, synthetic construct
  source 1..20: mol_type = other DNA
aaacagcatgaggttggccc

SEQ ID NO: 41473 - DNA, 20 bp, synthetic construct
  source 1..20: mol_type = other DNA
agagctcaaccttcccaaag

SEQ ID NO: 41474 - DNA, 20 bp, synthetic construct
  source 1..20: mol_type = other DNA
acatgactccccgccgcccc

SEQ ID NO: 41475 - DNA, 20 bp, synthetic construct
  source 1..20: mol_type = other DNA
cggtccagcatcaggttgga

SEQ ID NO: 41476 - DNA, 20 bp, synthetic construct
  source 1..20: mol_type = other DNA
gcagatctgcaaggtgcgag

SEQ ID NO: 41477 - DNA, 20 bp, synthetic construct
  source 1..20: mol_type = other DNA
ggctggggcgcggccacggc

SEQ ID NO: 41478 - DNA, 20 bp, synthetic construct
  source 1..20: mol_type = other DNA
ggatcaagcgtgctgaccgg

SEQ ID NO: 41479 - DNA, 20 bp, synthetic construct
  source 1..20: mol_type = other DNA
tatacagctgcgtaaagtgt

SEQ ID NO: 41480 - DNA, 20 bp, synthetic construct
  source 1..20: mol_type = other DNA
gctgcctcgaagaaggcctg

SEQ ID NO: 41481 - DNA, 20 bp, synthetic construct
  source 1..20: mol_type = other DNA
tcccatcaacgaggaggcac

SEQ ID NO: 41482 - DNA, 20 bp, synthetic construct
  source 1..20: mol_type = other DNA
tgcaaggcgagttcacgacc

SEQ ID NO: 41483 - DNA, 20 bp, synthetic construct
  source 1..20: mol_type = other DNA
accaccccgccgtgctcaac

SEQ ID NO: 41484 - DNA, 20 bp, synthetic construct
  source 1..20: mol_type = other DNA
agagtccatgacaatgccag

SEQ ID NO: 41485 - DNA, 20 bp, synthetic construct
  source 1..20: mol_type = other DNA
catgaccagcatgagggcct

SEQ ID NO: 41486 - DNA, 20 bp, synthetic construct
  source 1..20: mol_type = other DNA
cgaggagccatacttcttcc

SEQ ID NO: 41487 - DNA, 20 bp, synthetic construct
  source 1..20: mol_type = other DNA
gtgggacacggcgggccagg

SEQ ID NO: 41488 - DNA, 20 bp, synthetic construct
  source 1..20: mol_type = other DNA
ctgtcctggtaacagtgacc

SEQ ID NO: 41489 - DNA, 20 bp, synthetic construct
  source 1..20: mol_type = other DNA
gaagtccaagaacccggggt

SEQ ID NO: 41490 - DNA, 20 bp, synthetic construct
  source 1..20: mol_type = other DNA
gatttctggaaagtcgcaga

SEQ ID NO: 41491 - DNA, 20 bp, synthetic construct
  source 1..20: mol_type = other DNA
gtatgtgcaggactgccaag

SEQ ID NO: 41492 - DNA, 20 bp, synthetic construct
  source 1..20: mol_type = other DNA
caaaaactgaaatggacaag

SEQ ID NO: 41493 - DNA, 20 bp, synthetic construct
  source 1..20: mol_type = other DNA
caggtggcccagaccaccgg

SEQ ID NO: 41494 - DNA, 20 bp, synthetic construct
  source 1..20: mol_type = other DNA
cagcatgcttccatgggatc

SEQ ID NO: 41495 - DNA, 20 bp, synthetic construct
  source 1..20: mol_type = other DNA
agcacagttgtcacaaaaag

SEQ ID NO: 41496 - DNA, 20 bp, synthetic construct
  source 1..20: mol_type = other DNA
catttgccaatccagaatgc

SEQ ID NO: 41497 - DNA, 20 bp, synthetic construct
  source 1..20: mol_type = other DNA
ctatgatacaaaaacttcag

SEQ ID NO: 41498 - DNA, 20 bp, synthetic construct
  source 1..20: mol_type = other DNA
agtggaggtgaggaggccac

SEQ ID NO: 41499 - DNA, 20 bp, synthetic construct
  source 1..20: mol_type = other DNA
ccagacgcccctgcacctgg

SEQ ID NO: 41500 - DNA, 20 bp, synthetic construct
  source 1..20: mol_type = other DNA
tgtgcgcccaacaccagcac

SEQ ID NO: 41501 - DNA, 20 bp, synthetic construct
  source 1..20: mol_type = other DNA
ttgtcctgaaggccaggggc

SEQ ID NO: 41502 - DNA, 20 bp, synthetic construct
  source 1..20: mol_type = other DNA
cagctccagagtcaccaggt

SEQ ID NO: 41503 - DNA, 20 bp, synthetic construct
  source 1..20: mol_type = other DNA
ccagatcagcctgggcctct

SEQ ID NO: 41504 - DNA, 20 bp, synthetic construct
  source 1..20: mol_type = other DNA
ggcgcggacgttctcataag

SEQ ID NO: 41505 - DNA, 20 bp, synthetic construct
  source 1..20: mol_type = other DNA
atcatggttgaactatatga

SEQ ID NO: 41506 - DNA, 20 bp, synthetic construct
  source 1..20: mol_type = other DNA
cctgcacagcttccaggttc

SEQ ID NO: 41507 - DNA, 20 bp, synthetic construct
  source 1..20: mol_type = other DNA
ctgtaatgaacagataggga

SEQ ID NO: 41508 - DNA, 20 bp, synthetic construct
  source 1..20: mol_type = other DNA
acattctcaccaagtagctc

SEQ ID NO: 41509 - DNA, 20 bp, synthetic construct
  source 1..20: mol_type = other DNA
gtgaaacagctgcagcacag

SEQ ID NO: 41510 - DNA, 20 bp, synthetic construct
  source 1..20: mol_type = other DNA
cccacaaacatatgcatcca

SEQ ID NO: 41511 - DNA, 20 bp, synthetic construct
  source 1..20: mol_type = other DNA
aggcggccagcttgtccgtc

SEQ ID NO: 41512 - DNA, 20 bp, synthetic construct
  source 1..20: mol_type = other DNA
agccgatcccagcctccagc

SEQ ID NO: 41513 - DNA, 20 bp, synthetic construct
  source 1..20: mol_type = other DNA
atggccggcccaagatcgac

SEQ ID NO: 41514 - DNA, 20 bp, synthetic construct
  source 1..20: mol_type = other DNA
ctgcagggacaataggagcc

SEQ ID NO: 41515 - DNA, 20 bp, synthetic construct
  source 1..20: mol_type = other DNA
ccagcagtcaaatgccttgg

SEQ ID NO: 41516 - DNA, 20 bp, synthetic construct
  source 1..20: mol_type = other DNA
gcccctcaccctgttgaact

SEQ ID NO: 41517 - DNA, 20 bp, synthetic construct
  source 1..20: mol_type = other DNA
cttaccatggagcagatctt

SEQ ID NO: 41518 - DNA, 20 bp, synthetic construct
  source 1..20: mol_type = other DNA
cgaaggacccgaagcctgca

SEQ ID NO: 41519 - DNA, 20 bp, synthetic construct
  source 1..20: mol_type = other DNA
caggcaggcaaatgctctcg

SEQ ID NO: 41520 - DNA, 20 bp, synthetic construct
  source 1..20: mol_type = other DNA
tggccagcattttcccattg

SEQ ID NO: 41521 - DNA, 20 bp, synthetic construct
  source 1..20: mol_type = other DNA
tgctcagccctgcaacagga

SEQ ID NO: 41522 - DNA, 20 bp, synthetic construct
  source 1..20: mol_type = other DNA
aaaatccactagactccctg

SEQ ID NO: 41523 - DNA, 20 bp, synthetic construct
  source 1..20: mol_type = other DNA
caatgatgaacgtgctgcag

SEQ ID NO: 41524 - DNA, 20 bp, synthetic construct
  source 1..20: mol_type = other DNA
cctgcagatgatccagctca

SEQ ID NO: 41525 - DNA, 20 bp, synthetic construct
  source 1..20: mol_type = other DNA
ggcaatgtcccgccgcaaac

SEQ ID NO: 41526 - DNA, 20 bp, synthetic construct
  source 1..20: mol_type = other DNA
ttttagagaggagcaagcaa

SEQ ID NO: 41527 - DNA, 20 bp, synthetic construct
  source 1..20: mol_type = other DNA
ccgctgcgcaagtgccgccc

SEQ ID NO: 41528 - DNA, 20 bp, synthetic construct
  source 1..20: mol_type = other DNA
ggtgcagtgtggaaaggccg

SEQ ID NO: 41529 - DNA, 20 bp, synthetic construct
  source 1..20: mol_type = other DNA
cgctcgtggacggctacttc

SEQ ID NO: 41530 - DNA, 20 bp, synthetic construct
  source 1..20: mol_type = other DNA
cagcatcggatgcttaggag

SEQ ID NO: 41531 - DNA, 20 bp, synthetic construct
  source 1..20: mol_type = other DNA
ctgagggcaggggtgaagag

SEQ ID NO: 41532 - DNA, 20 bp, synthetic construct
  source 1..20: mol_type = other DNA
tctggtcaacgttaagtttg

SEQ ID NO: 41533 - DNA, 20 bp, synthetic construct
  source 1..20: mol_type = other DNA
cctttcgagtgtaacatgtg

SEQ ID NO: 41534 - DNA, 20 bp, synthetic construct
  source 1..20: mol_type = other DNA
ttttccatccagtcatcttc

SEQ ID NO: 41535 - DNA, 20 bp, synthetic construct
  source 1..20: mol_type = other DNA
tccagctcatggacgtcctg

SEQ ID NO: 41536 - DNA, 20 bp, synthetic construct
  source 1..20: mol_type = other DNA
cgctccgtcttcacaaagtc

SEQ ID NO: 41537 - DNA, 20 bp, synthetic construct
  source 1..20: mol_type = other DNA
ccctgcgatgtagtttgtcc

SEQ ID NO: 41538 - DNA, 20 bp, synthetic construct
  source 1..20: mol_type = other DNA
ggaattacactttctggcaa

SEQ ID NO: 41539 - DNA, 20 bp, synthetic construct
  source 1..20: mol_type = other DNA
ggcggcggcggcgggggcgg

SEQ ID NO: 41540 - DNA, 20 bp, synthetic construct
  source 1..20: mol_type = other DNA
cagtactctgaggtttggtt

SEQ ID NO: 41541 - DNA, 20 bp, synthetic construct
  source 1..20: mol_type = other DNA
ggagcaggccatcatcagcc

SEQ ID NO: 41542 - DNA, 20 bp, synthetic construct
  source 1..20: mol_type = other DNA
cagtggggaagccggcggat

SEQ ID NO: 41543 - DNA, 20 bp, synthetic construct
  source 1..20: mol_type = other DNA
gagatgcagggacacacgat

SEQ ID NO: 41544 - DNA, 20 bp, synthetic construct
  source 1..20: mol_type = other DNA
cctcagcatggccatccacg

SEQ ID NO: 41545 - DNA, 20 bp, synthetic construct
  source 1..20: mol_type = other DNA
gcccccaccgcctactggca

SEQ ID NO: 41546 - DNA, 20 bp, synthetic construct
  source 1..20: mol_type = other DNA
catcctaatttctggatgga

SEQ ID NO: 41547 - DNA, 20 bp, synthetic construct
  source 1..20: mol_type = other DNA
gaaagtcgcagaagggctgg

SEQ ID NO: 41548 - DNA, 20 bp, synthetic construct
  source 1..20: mol_type = other DNA
acgcaccaggctcactgccc

SEQ ID NO: 41549 - DNA, 20 bp, synthetic construct
  source 1..20: mol_type = other DNA
aaccactggtagtgaggaat

SEQ ID NO: 41550 - DNA, 20 bp, synthetic construct
  source 1..20: mol_type = other DNA
taagaggaagatcctcatca

SEQ ID NO: 41551 - DNA, 20 bp, synthetic construct
  source 1..20: mol_type = other DNA
gaggaatatataggtgtaat

SEQ ID NO: 41552 - DNA, 20 bp, synthetic construct
  source 1..20: mol_type = other DNA
ttgttgcagatcttggagct

SEQ ID NO: 41553 - DNA, 20 bp, synthetic construct
  source 1..20: mol_type = other DNA
atggccatctcaatctgcag

SEQ ID NO: 41554 - DNA, 20 bp, synthetic construct
  source 1..20: mol_type = other DNA
cggcacatccgaatccacac

SEQ ID NO: 41555 - DNA, 20 bp, synthetic construct
  source 1..20: mol_type = other DNA
ctcttaagctggttgggtga

SEQ ID NO: 41556 - DNA, 20 bp, synthetic construct
  source 1..20: mol_type = other DNA
gcgggactagagggagctga

SEQ ID NO: 41557 - DNA, 20 bp, synthetic construct
  source 1..20: mol_type = other DNA
ccagcccagctgctgccggc

SEQ ID NO: 41558 - DNA, 20 bp, synthetic construct
  source 1..20: mol_type = other DNA
cattgagcagcccaagcagc

SEQ ID NO: 41559 - DNA, 20 bp, synthetic construct
  source 1..20: mol_type = other DNA
ccaggttctcaatggacagc

SEQ ID NO: 41560 - DNA, 20 bp, synthetic construct
  source 1..20: mol_type = other DNA
tggctctaggacatccctac

SEQ ID NO: 41561 - DNA, 20 bp, synthetic construct
  source 1..20: mol_type = other DNA
ttccccacaggccctccagt

SEQ ID NO: 41562 - DNA, 20 bp, synthetic construct
  source 1..20: mol_type = other DNA
aggcggtagccatggagctg

SEQ ID NO: 41563 - DNA, 20 bp, synthetic construct
  source 1..20: mol_type = other DNA
gtggaggtgaggggcaggat

SEQ ID NO: 41564 - DNA, 20 bp, synthetic construct
  source 1..20: mol_type = other DNA
tgcagccccccatgattcgg

SEQ ID NO: 41565 - DNA, 20 bp, synthetic construct
  source 1..20: mol_type = other DNA
tcaactcaagcacaaagtac

SEQ ID NO: 41566 - DNA, 20 bp, synthetic construct
  source 1..20: mol_type = other DNA
caaagcctgcaggtactggt

SEQ ID NO: 41567 - DNA, 20 bp, synthetic construct
  source 1..20: mol_type = other DNA
tctgtcgttcgtggcgctcg

SEQ ID NO: 41568 - DNA, 20 bp, synthetic construct
  source 1..20: mol_type = other DNA
gattcagttaccaaaacaca

SEQ ID NO: 41569 - DNA, 20 bp, synthetic construct
  source 1..20: mol_type = other DNA
aggtttcagctctaactggt

SEQ ID NO: 41570 - DNA, 20 bp, synthetic construct
  source 1..20: mol_type = other DNA
caagcatctcaaagagtcgc

SEQ ID NO: 41571 - DNA, 20 bp, synthetic construct
  source 1..20: mol_type = other DNA
cgagatgcacgtgccgtcgg

SEQ ID NO: 41572 - DNA, 20 bp, synthetic construct
  source 1..20: mol_type = other DNA
cctgtagaagcggctggcag

SEQ ID NO: 41573 - DNA, 20 bp, synthetic construct
  source 1..20: mol_type = other DNA
cggttgagggtcgcgccggc

SEQ ID NO: 41574 - DNA, 20 bp, synthetic construct
  source 1..20: mol_type = other DNA
tcaggatgccacgcttgctc

SEQ ID NO: 41575 - DNA, 20 bp, synthetic construct
  source 1..20: mol_type = other DNA
ccagagtgtcaccacacggt

SEQ ID NO: 41576 - DNA, 20 bp, synthetic construct
  source 1..20: mol_type = other DNA
gatgtcctagagccaaacac

SEQ ID NO: 41577 - DNA, 20 bp, synthetic construct
  source 1..20: mol_type = other DNA
gccagcaggggcaggtcatt

SEQ ID NO: 41578 - DNA, 20 bp, synthetic construct
  source 1..20: mol_type = other DNA
tgagggccaccagctgctgc

SEQ ID NO: 41579 - DNA, 20 bp, synthetic construct
  source 1..20: mol_type = other DNA
ccgtaccactggcatcgtga

SEQ ID NO: 41580 - DNA, 20 bp, synthetic construct
  source 1..20: mol_type = other DNA
ggccttgtagctgcaggggt

SEQ ID NO: 41581 - DNA, 20 bp, synthetic construct
  source 1..20: mol_type = other DNA
cattgacgcaggaggccctg

SEQ ID NO: 41582 - DNA, 20 bp, synthetic construct
  source 1..20: mol_type = other DNA
gcagatgtggattagcaagc

SEQ ID NO: 41583 - DNA, 20 bp, synthetic construct
  source 1..20: mol_type = other DNA
agttccaggtgaggccgctg

SEQ ID NO: 41584 - DNA, 20 bp, synthetic construct
  source 1..20: mol_type = other DNA
ctagcaagctatagcaagcc

SEQ ID NO: 41585 - DNA, 20 bp, synthetic construct
  source 1..20: mol_type = other DNA
tccaaggctgtgattcagtc

SEQ ID NO: 41586 - DNA, 20 bp, synthetic construct
  source 1..20: mol_type = other DNA
tggccaagacgctggtgcag

SEQ ID NO: 41587 - DNA, 20 bp, synthetic construct
  source 1..20: mol_type = other DNA
ggcccctcaccctgttgaac

SEQ ID NO: 41588 - DNA, 20 bp, synthetic construct
  source 1..20: mol_type = other DNA
ttgtaaggcgtattgtaccc

SEQ ID NO: 41589 - DNA, 20 bp, synthetic construct
  source 1..20: mol_type = other DNA
gaccacctgcagcttccagc

SEQ ID NO: 41590 - DNA, 20 bp, synthetic construct
  source 1..20: mol_type = other DNA
cgaggtgaggaaagagtcag

SEQ ID NO: 41591 - DNA, 20 bp, synthetic construct
  source 1..20: mol_type = other DNA
acggtggaacctgacatgtg

SEQ ID NO: 41592 - DNA, 20 bp, synthetic construct
  source 1..20: mol_type = other DNA
agctgatgtgcaccgacaag

SEQ ID NO: 41593 - DNA, 20 bp, synthetic construct
  source 1..20: mol_type = other DNA
agtgctggtgttgggcgcac

SEQ ID NO: 41594 - DNA, 20 bp, synthetic construct
  source 1..20: mol_type = other DNA
gcccacgaaggagttggcca

SEQ ID NO: 41595 - DNA, 20 bp, synthetic construct
  source 1..20: mol_type = other DNA
acaggcgaagggcttctcac

SEQ ID NO: 41596 - DNA, 20 bp, synthetic construct
  source 1..20: mol_type = other DNA
gcttgtccgtctggttgctg

SEQ ID NO: 41597 - DNA, 20 bp, synthetic construct
  source 1..20: mol_type = other DNA
aaaaaccacctaaggaagga

SEQ ID NO: 41598 - DNA, 20 bp, synthetic construct
  source 1..20: mol_type = other DNA
tgacgagcacagcacagtaa

SEQ ID NO: 41599 - DNA, 20 bp, synthetic construct
  source 1..20: mol_type = other DNA
gtccaaaatccagaatctaa

SEQ ID NO: 41600 - DNA, 20 bp, synthetic construct
  source 1..20: mol_type = other DNA
acaggcaggagctggtcaac

SEQ ID NO: 41601 - DNA, 20 bp, synthetic construct
  source 1..20: mol_type = other DNA
cgtggaggtgaggggcagga

SEQ ID NO: 41602 - DNA, 20 bp, synthetic construct
  source 1..20: mol_type = other DNA
gtttgcagtagtcatcggcg

SEQ ID NO: 41603 - DNA, 20 bp, synthetic construct
  source 1..20: mol_type = other DNA
cagacgctatatatatgagg

SEQ ID NO: 41604 - DNA, 20 bp, synthetic construct
  source 1..20: mol_type = other DNA
ctacaggatgccctgcccgc

SEQ ID NO: 41605 - DNA, 20 bp, synthetic construct
  source 1..20: mol_type = other DNA
atctgagaagagagaatcgg

SEQ ID NO: 41606 - DNA, 20 bp, synthetic construct
  source 1..20: mol_type = other DNA
cggaacacaatggcatactg

SEQ ID NO: 41607 - DNA, 20 bp, synthetic construct
  source 1..20: mol_type = other DNA
aacatctaaaactttctcag

SEQ ID NO: 41608 - DNA, 20 bp, synthetic construct
  source 1..20: mol_type = other DNA
ccaggatgagcagcagccct

SEQ ID NO: 41609 - DNA, 20 bp, synthetic construct
  source 1..20: mol_type = other DNA
gtcattcagagccacaaaca

SEQ ID NO: 41610 - DNA, 20 bp, synthetic construct
  source 1..20: mol_type = other DNA
tcatcttgggctgagagcga

SEQ ID NO: 41611 - DNA, 20 bp, synthetic construct
  source 1..20: mol_type = other DNA
tgacaggctacgtggccact

SEQ ID NO: 41612 - DNA, 20 bp, synthetic construct
  source 1..20: mol_type = other DNA
tagcaaacagcggcacgatg

SEQ ID NO: 41613 - DNA, 20 bp, synthetic construct
  source 1..20: mol_type = other DNA
aggagcctacgtggcaatcg

SEQ ID NO: 41614 - DNA, 20 bp, synthetic construct
  source 1..20: mol_type = other DNA
atattacctttcgatgccgt

SEQ ID NO: 41615 - DNA, 20 bp, synthetic construct
  source 1..20: mol_type = other DNA
ttcacaaatcagcaccaagc

SEQ ID NO: 41616 - DNA, 20 bp, synthetic construct
  source 1..20: mol_type = other DNA
ctccatgacatgtatctgca

SEQ ID NO: 41617 - DNA, 20 bp, synthetic construct
  source 1..20: mol_type = other DNA
gagaacattgtgaagtacaa

SEQ ID NO: 41618 - DNA, 20 bp, synthetic construct
  source 1..20: mol_type = other DNA
aatcacatggacaaagtcgt

SEQ ID NO: 41619 - DNA, 20 bp, synthetic construct
  source 1..20: mol_type = other DNA
tgttcagctaaggattaaaa

SEQ ID NO: 41620 - DNA, 20 bp, synthetic construct
  source 1..20: mol_type = other DNA
catcaagtggacggcccccg

SEQ ID NO: 41621 - DNA, 20 bp, synthetic construct
  source 1..20: mol_type = other DNA
agtcagatccccccattgcc

SEQ ID NO: 41622 - DNA, 20 bp, synthetic construct
  source 1..20: mol_type = other DNA
attcgaggtagcgcacagcg

SEQ ID NO: 41623 - DNA, 20 bp, synthetic construct
  source 1..20: mol_type = other DNA
ggtgaggcccgggacgagga

SEQ ID NO: 41624 - DNA, 20 bp, synthetic construct
  source 1..20: mol_type = other DNA
aggtgcagtggtctgggggt

SEQ ID NO: 41625 - DNA, 20 bp, synthetic construct
  source 1..20: mol_type = other DNA
cccactccaggctgtcagca

SEQ ID NO: 41626 - DNA, 20 bp, synthetic construct
  source 1..20: mol_type = other DNA
gggcgtctggggatgaaagc

SEQ ID NO: 41627 - DNA, 20 bp, synthetic construct
  source 1..20: mol_type = other DNA
catcaacaagctcaagactg

SEQ ID NO: 41628 - DNA, 20 bp, synthetic construct
  source 1..20: mol_type = other DNA
tctttctgttcttcaggttg

SEQ ID NO: 41629 - DNA, 20 bp, synthetic construct
  source 1..20: mol_type = other DNA
acgatcgtctgggaaagtaa

SEQ ID NO: 41630 - DNA, 20 bp, synthetic construct
  source 1..20: mol_type = other DNA
cgacctggacacagacagtg

SEQ ID NO: 41631 - DNA, 20 bp, synthetic construct
  source 1..20: mol_type = other DNA
atctgcagggtgtccatatc

SEQ ID NO: 41632 - DNA, 20 bp, synthetic construct
  source 1..20: mol_type = other DNA
agcagaggaactgtgcatca

SEQ ID NO: 41633 - DNA, 20 bp, synthetic construct
  source 1..20: mol_type = other DNA
cttaccactttcggccggaa

SEQ ID NO: 41634 - DNA, 20 bp, synthetic construct
  source 1..20: mol_type = other DNA
gagagtaagggccagggccc

SEQ ID NO: 41635 - DNA, 20 bp, synthetic construct
  source 1..20: mol_type = other DNA
ccgagagagtgggcaggtac

SEQ ID NO: 41636 - DNA, 20 bp, synthetic construct
  source 1..20: mol_type = other DNA
ctgcttccaggtgacagtgc

SEQ ID NO: 41637 - DNA, 20 bp, synthetic construct
  source 1..20: mol_type = other DNA
tgctgaccccgcgcagctgc

SEQ ID NO: 41638 - DNA, 20 bp, synthetic construct
  source 1..20: mol_type = other DNA
attgcagaagatgacctggg

SEQ ID NO: 41639 - DNA, 20 bp, synthetic construct
  source 1..20: mol_type = other DNA
tttctccatgtcgtcccagt

SEQ ID NO: 41640 - DNA, 20 bp, synthetic construct
  source 1..20: mol_type = other DNA
gcagctggagagtgagcgcg

SEQ ID NO: 41641 - DNA, 20 bp, synthetic construct
  source 1..20: mol_type = other DNA
gggaacccagttccagagct

SEQ ID NO: 41642 - DNA, 20 bp, synthetic construct
  source 1..20: mol_type = other DNA
cagggtgctgtagacgctga

SEQ ID NO: 41643 - DNA, 20 bp, synthetic construct
  source 1..20: mol_type = other DNA
aatggcggaccagttcatgc

SEQ ID NO: 41644 - DNA, 20 bp, synthetic construct
  source 1..20: mol_type = other DNA
tacaaaccccaaaatggccc

SEQ ID NO: 41645 - DNA, 20 bp, synthetic construct
  source 1..20: mol_type = other DNA
ttcagctgacataattcaca

SEQ ID NO: 41646 - DNA, 20 bp, synthetic construct
  source 1..20: mol_type = other DNA
ccttggatacaaactggtaa

SEQ ID NO: 41647 - DNA, 20 bp, synthetic construct
  source 1..20: mol_type = other DNA
agtccgcctagaagcatttg

SEQ ID NO: 41648 - DNA, 20 bp, synthetic construct
  source 1..20: mol_type = other DNA
ttcctacagaaacagcacag

SEQ ID NO: 41649 - DNA, 20 bp, synthetic construct
  source 1..20: mol_type = other DNA
gcctcaaatgtggcaaagac

SEQ ID NO: 41650 - DNA, 20 bp, synthetic construct
  source 1..20: mol_type = other DNA
cgtgagtgaggaagccaggg

SEQ ID NO: 41651 - DNA, 20 bp, synthetic construct
  source 1..20: mol_type = other DNA
gcagcccctcggccgtgagt

SEQ ID NO: 41652 - DNA, 20 bp, synthetic construct
  source 1..20: mol_type = other DNA
agagcggctcatactgggcg

SEQ ID NO: 41653 - DNA, 20 bp, synthetic construct
  source 1..20: mol_type = other DNA
gagatgccagcaggtagtcg

SEQ ID NO: 41654 - DNA, 20 bp, synthetic construct
  source 1..20: mol_type = other DNA
agcagttttactcagtggat

SEQ ID NO: 41655 - DNA, 20 bp, synthetic construct
  source 1..20: mol_type = other DNA
ccataggcgccagagcccac

SEQ ID NO: 41656 - DNA, 20 bp, synthetic construct
  source 1..20: mol_type = other DNA
tggattcatacctgctgatg

SEQ ID NO: 41657 - DNA, 20 bp, synthetic construct
  source 1..20: mol_type = other DNA
gtaccagcatcgggtgaggc

SEQ ID NO: 41658 - DNA, 20 bp, synthetic construct
  source 1..20: mol_type = other DNA
gaaacatgccggtctgcccg

SEQ ID NO: 41659 - DNA, 20 bp, synthetic construct
  source 1..20: mol_type = other DNA
cctccaaaaatatttcctgt

SEQ ID NO: 41660 - DNA, 20 bp, synthetic construct
  source 1..20: mol_type = other DNA
caaggacttcagcctcatcc

SEQ ID NO: 41661 - DNA, 20 bp, synthetic construct
  source 1..20: mol_type = other DNA
atgaaaacagaatcatccat

SEQ ID NO: 41662 - DNA, 20 bp, synthetic construct
  source 1..20: mol_type = other DNA
ggctcagtcttagccgctcc

SEQ ID NO: 41663 - DNA, 20 bp, synthetic construct
  source 1..20: mol_type = other DNA
cgcctggacccagggagaac

SEQ ID NO: 41664 - DNA, 20 bp, synthetic construct
  source 1..20: mol_type = other DNA
gcggcaggaggcctacctag

SEQ ID NO: 41665 - DNA, 20 bp, synthetic construct
  source 1..20: mol_type = other DNA
tactcacgctgtccactgcg

SEQ ID NO: 41666 - DNA, 20 bp, synthetic construct
  source 1..20: mol_type = other DNA
tctacataccaaggggcaaa

SEQ ID NO: 41667 - DNA, 20 bp, synthetic construct
  source 1..20: mol_type = other DNA
caagtgggtgcagtgtggaa

SEQ ID NO: 41668 - DNA, 20 bp, synthetic construct
  source 1..20: mol_type = other DNA
ctcgaagactgctgtggggt

SEQ ID NO: 41669 - DNA, 20 bp, synthetic construct
  source 1..20: mol_type = other DNA
ggctctacgctgtggtcacc

SEQ ID NO: 41670 - DNA, 20 bp, synthetic construct
  source 1..20: mol_type = other DNA
aactgaaacgcaagcgagga

SEQ ID NO: 41671 - DNA, 20 bp, synthetic construct
  source 1..20: mol_type = other DNA
aaagcacttacccacaatgg

SEQ ID NO: 41672 - DNA, 20 bp, synthetic construct
  source 1..20: mol_type = other DNA
attccacctggagcaggaga

SEQ ID NO: 41673 - DNA, 20 bp, synthetic construct
  source 1..20: mol_type = other DNA
ccatgtggccgacatgggca

SEQ ID NO: 41674 - DNA, 20 bp, synthetic construct
  source 1..20: mol_type = other DNA
tacactggcagagaaactct

SEQ ID NO: 41675 - DNA, 20 bp, synthetic construct
  source 1..20: mol_type = other DNA
atccagttgagcatgatctc

SEQ ID NO: 41676 - DNA, 20 bp, synthetic construct
  source 1..20: mol_type = other DNA
gatgaagatgatggtatgtt

SEQ ID NO: 41677 - DNA, 20 bp, synthetic construct
  source 1..20: mol_type = other DNA
tcaaacacttggtatgtggg

SEQ ID NO: 41678 - DNA, 20 bp, synthetic construct
  source 1..20: mol_type = other DNA
gctcactgaagggaagataa

SEQ ID NO: 41679 - DNA, 20 bp, synthetic construct
  source 1..20: mol_type = other DNA
aacgcaccctcagaggccgc

SEQ ID NO: 41680 - DNA, 20 bp, synthetic construct
  source 1..20: mol_type = other DNA
ctataaaagacatcagtcag

SEQ ID NO: 41681 - DNA, 20 bp, synthetic construct
  source 1..20: mol_type = other DNA
tgtcgcctagcgggtcatag

SEQ ID NO: 41682 - DNA, 20 bp, synthetic construct
  source 1..20: mol_type = other DNA
gcagtgcatgtaaaagatgc

SEQ ID NO: 41683 - DNA, 20 bp, synthetic construct
  source 1..20: mol_type = other DNA
gcacctccttggtctccacc

SEQ ID NO: 41684 - DNA, 20 bp, synthetic construct
  source 1..20: mol_type = other DNA
cccacctaactgtccagatg

SEQ ID NO: 41685 - DNA, 20 bp, synthetic construct
  source 1..20: mol_type = other DNA
cacactcaggagcaatccat

SEQ ID NO: 41686 - DNA, 20 bp, synthetic construct
  source 1..20: mol_type = other DNA
agaccaaatatcaatggact

SEQ ID NO: 41687 - DNA, 20 bp, synthetic construct
  source 1..20: mol_type = other DNA
tgacatagccccttcccgaa

SEQ ID NO: 41688 - DNA, 20 bp, synthetic construct
  source 1..20: mol_type = other DNA
cagcacacccatcatcctgg

SEQ ID NO: 41689 - DNA, 20 bp, synthetic construct
  source 1..20: mol_type = other DNA
cagtattccattgctagaag

SEQ ID NO: 41690 - DNA, 20 bp, synthetic construct
  source 1..20: mol_type = other DNA
gcaggagctggagctgctgc

SEQ ID NO: 41691 - DNA, 20 bp, synthetic construct
  source 1..20: mol_type = other DNA
acgaggtgctatcagcgctg

SEQ ID NO: 41692 - DNA, 20 bp, synthetic construct
  source 1..20: mol_type = other DNA
ttttaccttacaaatctgaa

SEQ ID NO: 41693 - DNA, 20 bp, synthetic construct
  source 1..20: mol_type = other DNA
tgcagttgttcagctgtacc

SEQ ID NO: 41694 - DNA, 20 bp, synthetic construct
  source 1..20: mol_type = other DNA
ttccaagaggcggcagaggg

SEQ ID NO: 41695 - DNA, 20 bp, synthetic construct
  source 1..20: mol_type = other DNA
atgcagatgcggcactggaa

SEQ ID NO: 41696 - DNA, 20 bp, synthetic construct
  source 1..20: mol_type = other DNA
gctgctgtagctgattccat

SEQ ID NO: 41697 - DNA, 20 bp, synthetic construct
  source 1..20: mol_type = other DNA
ggccgtcttcccctccatcg

SEQ ID NO: 41698 - DNA, 20 bp, synthetic construct
  source 1..20: mol_type = other DNA
ggtgcagtggtctgggggtt

SEQ ID NO: 41699 - DNA, 20 bp, synthetic construct
  source 1..20: mol_type = other DNA
ctgacagccgttgctgacgt

SEQ ID NO: 41700 - DNA, 20 bp, synthetic construct
  source 1..20: mol_type = other DNA
tcctggtcccctgcgtgctg

SEQ ID NO: 41701 - DNA, 20 bp, synthetic construct
  source 1..20: mol_type = other DNA
cgcagcagtgtgcatccagc

SEQ ID NO: 41702 - DNA, 20 bp, synthetic construct
  source 1..20: mol_type = other DNA
ggcgtccgcgggcggcggga

SEQ ID NO: 41703 - DNA, 20 bp, synthetic construct
  source 1..20: mol_type = other DNA
gttcattccgcttccgcacc

SEQ ID NO: 41704 - DNA, 20 bp, synthetic construct
  source 1..20: mol_type = other DNA
tctgggccttgtagtcaaag

SEQ ID NO: 41705 - DNA, 20 bp, synthetic construct
  source 1..20: mol_type = other DNA
caggacggggccgagagcaa

SEQ ID NO: 41706 - DNA, 20 bp, synthetic construct
  source 1..20: mol_type = other DNA
caagtgaaaattggagactt

SEQ ID NO: 41707 - DNA, 20 bp, synthetic construct
  source 1..20: mol_type = other DNA
cccccaacacaggagcgcac

SEQ ID NO: 41708 - DNA, 20 bp, synthetic construct
  source 1..20: mol_type = other DNA
cctacagaaacagcacagtg

SEQ ID NO: 41709 - DNA, 20 bp, synthetic construct
  source 1..20: mol_type = other DNA
cacttccgagatgatgatga

SEQ ID NO: 41710 - DNA, 20 bp, synthetic construct
  source 1..20: mol_type = other DNA
gtgtgtgaagaagcgggacc

SEQ ID NO: 41711 - DNA, 20 bp, synthetic construct
  source 1..20: mol_type = other DNA
ccgactgcatctttgtttca

SEQ ID NO: 41712 - DNA, 20 bp, synthetic construct
  source 1..20: mol_type = other DNA
tcccctgtattgtccccttc

SEQ ID NO: 41713 - DNA, 20 bp, synthetic construct
  source 1..20: mol_type = other DNA
ggtcgttctgtaggaaatgg

SEQ ID NO: 41714 - DNA, 20 bp, synthetic construct
  source 1..20: mol_type = other DNA
ggcctacctgattgtgccat

SEQ ID NO: 41715 - DNA, 20 bp, synthetic construct
  source 1..20: mol_type = other DNA
agattctagaatggcagggg

SEQ ID NO: 41716 - DNA, 20 bp, synthetic construct
  source 1..20: mol_type = other DNA
ttctttaggttacacgcatg

SEQ ID NO: 41717 - DNA, 20 bp, synthetic construct
  source 1..20: mol_type = other DNA
ccccgccgccgctgctcccg

SEQ ID NO: 41718 - DNA, 20 bp, synthetic construct
  source 1..20: mol_type = other DNA
gaatcctgtacagcaggact

SEQ ID NO: 41719 - DNA, 20 bp, synthetic construct
  source 1..20: mol_type = other DNA
attacagatactgatggcaa

SEQ ID NO: 41720 - DNA, 20 bp, synthetic construct
  source 1..20: mol_type = other DNA
catctgtagacagagcaaga

SEQ ID NO: 41721 - DNA, 20 bp, synthetic construct
  source 1..20: mol_type = other DNA
gaagagcagcgtgccgatga

SEQ ID NO: 41722 - DNA, 20 bp, synthetic construct
  source 1..20: mol_type = other DNA
cctttttcagatcagctatg

SEQ ID NO: 41723 - DNA, 20 bp, synthetic construct
  source 1..20: mol_type = other DNA
accgtctgtggataggagag

SEQ ID NO: 41724 - DNA, 20 bp, synthetic construct
  source 1..20: mol_type = other DNA
gatcgataagctgaaggagg

SEQ ID NO: 41725 - DNA, 20 bp, synthetic construct
  source 1..20: mol_type = other DNA
gttcaagaactttcagatcg

SEQ ID NO: 41726 - DNA, 20 bp, synthetic construct
  source 1..20: mol_type = other DNA
cattgatggggaccgtgaga

SEQ ID NO: 41727 - DNA, 20 bp, synthetic construct
  source 1..20: mol_type = other DNA
tgtaccccagcaggctctgc

SEQ ID NO: 41728 - DNA, 20 bp, synthetic construct
  source 1..20: mol_type = other DNA
ccactgtcagtgggtagatg

SEQ ID NO: 41729 - DNA, 20 bp, synthetic construct
  source 1..20: mol_type = other DNA
tatcagaatgtggagagtaa

SEQ ID NO: 41730 - DNA, 20 bp, synthetic construct
  source 1..20: mol_type = other DNA
ctccacccacctgtccatct

SEQ ID NO: 41731 - DNA, 20 bp, synthetic construct
  source 1..20: mol_type = other DNA
cttgaggttcccaaagcgct

SEQ ID NO: 41732 - DNA, 20 bp, synthetic construct
  source 1..20: mol_type = other DNA
caatcctgtacactttgtac

SEQ ID NO: 41733 - DNA, 20 bp, synthetic construct
  source 1..20: mol_type = other DNA
gtatttcaccgagtctggtt

SEQ ID NO: 41734 - DNA, 20 bp, synthetic construct
  source 1..20: mol_type = other DNA
ggcctgtacaatgtgagtag

SEQ ID NO: 41735 - DNA, 20 bp, synthetic construct
  source 1..20: mol_type = other DNA
ggtacgcaggccccatggag

SEQ ID NO: 41736 - DNA, 20 bp, synthetic construct
  source 1..20: mol_type = other DNA
cctgcagccggatcgccatc

SEQ ID NO: 41737 - DNA, 20 bp, synthetic construct
  source 1..20: mol_type = other DNA
ccccctgttctgggcgatcg

SEQ ID NO: 41738 - DNA, 20 bp, synthetic construct
  source 1..20: mol_type = other DNA
tcgcagccttctgctgggca

SEQ ID NO: 41739 - DNA, 20 bp, synthetic construct
  source 1..20: mol_type = other DNA
ttgattttggccactttctg

SEQ ID NO: 41740 - DNA, 20 bp, synthetic construct
  source 1..20: mol_type = other DNA
caccatcttggtgaaggagt

SEQ ID NO: 41741 - DNA, 20 bp, synthetic construct
  source 1..20: mol_type = other DNA
cctgggcaaagaggtgctcc

SEQ ID NO: 41742 - DNA, 20 bp, synthetic construct
  source 1..20: mol_type = other DNA
ggcaggactgggcatagccg

SEQ ID NO: 41743 - DNA, 20 bp, synthetic construct
  source 1..20: mol_type = other DNA
ccacttacggttcgggctcc

SEQ ID NO: 41744 - DNA, 20 bp, synthetic construct
  source 1..20: mol_type = other DNA
gtgcagccccccatcccagc

SEQ ID NO: 41745 - DNA, 20 bp, synthetic construct
  source 1..20: mol_type = other DNA
ggatggactatttgggttct

SEQ ID NO: 41746 - DNA, 20 bp, synthetic construct
  source 1..20: mol_type = other DNA
cagtacagatgtggctgatc

SEQ ID NO: 41747 - DNA, 20 bp, synthetic construct
  source 1..20: mol_type = other DNA
tctgcagttcctgcagaaga

SEQ ID NO: 41748 - DNA, 20 bp, synthetic construct
  source 1..20: mol_type = other DNA
gcagtcctgcacataccttg

SEQ ID NO: 41749 - DNA, 20 bp, synthetic construct
  source 1..20: mol_type = other DNA
attgaaaatcagaaggaagc

SEQ ID NO: 41750 - DNA, 20 bp, synthetic construct
  source 1..20: mol_type = other DNA
gtgctcagcattggagtgaa

SEQ ID NO: 41751 - DNA, 20 bp, synthetic construct
  source 1..20: mol_type = other DNA
gccctgagggaagaagcaga

SEQ ID NO: 41752 - DNA, 20 bp, synthetic construct
  source 1..20: mol_type = other DNA
ctcaaggtaggtgaggtgct

SEQ ID NO: 41753 - DNA, 20 bp, synthetic construct
  source 1..20: mol_type = other DNA
gtggaccagctgcgcatgca

SEQ ID NO: 41754 - DNA, 20 bp, synthetic construct
  source 1..20: mol_type = other DNA
agacattgtggagctcacga

SEQ ID NO: 41755 - DNA, 20 bp, synthetic construct
  source 1..20: mol_type = other DNA
ttgaccagaagggcccggtt

SEQ ID NO: 41756 - DNA, 20 bp, synthetic construct
  source 1..20: mol_type = other DNA
gctgagaagacagaggaatg

SEQ ID NO: 41757 - DNA, 20 bp, synthetic construct
  source 1..20: mol_type = other DNA
cctcaggtgacggcagcagg

SEQ ID NO: 41758 - DNA, 20 bp, synthetic construct
  source 1..20: mol_type = other DNA
taaggaacgtgggcatgacc

SEQ ID NO: 41759 - DNA, 20 bp, synthetic construct
  source 1..20: mol_type = other DNA
gttttagctcgttcctcctc

SEQ ID NO: 41760 - DNA, 20 bp, synthetic construct
  source 1..20: mol_type = other DNA
gagctaaaaagagaaagaac

SEQ ID NO: 41761 - DNA, 20 bp, synthetic construct
  source 1..20: mol_type = other DNA
aacgggtatttatagtggca

SEQ ID NO: 41762 - DNA, 20 bp, synthetic construct
  source 1..20: mol_type = other DNA
gccgtaaaggcggatgaagt

SEQ ID NO: 41763 - DNA, 20 bp, synthetic construct
  source 1..20: mol_type = other DNA
ctcggatgcgcatgagaccc

SEQ ID NO: 41764 - DNA, 20 bp, synthetic construct
  source 1..20: mol_type = other DNA
cctccatggcccactcctgg

SEQ ID NO: 41765 - DNA, 20 bp, synthetic construct
  source 1..20: mol_type = other DNA
cgaaatcatggtgcttcctt

SEQ ID NO: 41766 - DNA, 20 bp, synthetic construct
  source 1..20: mol_type = other DNA
cagccaggaccacaatgcca

SEQ ID NO: 41767 - DNA, 20 bp, synthetic construct
  source 1..20: mol_type = other DNA
gaatccagtgtgtgaagaag

SEQ ID NO: 41768 - DNA, 20 bp, synthetic construct
  source 1..20: mol_type = other DNA
ctgtgcgaatcgctcagacc

SEQ ID NO: 41769 - DNA, 20 bp, synthetic construct
  source 1..20: mol_type = other DNA
cagcgcaggatgaacctgaa

SEQ ID NO: 41770 - DNA, 20 bp, synthetic construct
  source 1..20: mol_type = other DNA
tacaaaaacttcagaggcag

SEQ ID NO: 41771 - DNA, 20 bp, synthetic construct
  source 1..20: mol_type = other DNA
taaataactggcatcccatc

SEQ ID NO: 41772 - DNA, 20 bp, synthetic construct
  source 1..20: mol_type = other DNA
ttacctgtagactattcctt

SEQ ID NO: 41773 - DNA, 20 bp, synthetic construct
  source 1..20: mol_type = other DNA
ggagctggaaggtgaaggga

SEQ ID NO: 41774 - DNA, 20 bp, synthetic construct
  source 1..20: mol_type = other DNA
acaggcaccgggccacaatc

SEQ ID NO: 41775 - DNA, 20 bp, synthetic construct
  source 1..20: mol_type = other DNA
ggtactggggagatatctcg

SEQ ID NO: 41776 - DNA, 20 bp, synthetic construct
  source 1..20: mol_type = other DNA
gcagccccccatgattcggc

SEQ ID NO: 41777 - DNA, 20 bp, synthetic construct
  source 1..20: mol_type = other DNA
tcctactcctgaagacaaca

SEQ ID NO: 41778 - DNA, 20 bp, synthetic construct
  source 1..20: mol_type = other DNA
atgtacagcaacgaggaggc

SEQ ID NO: 41779 - DNA, 20 bp, synthetic construct
  source 1..20: mol_type = other DNA
cctacctgtgtagccagcta

SEQ ID NO: 41780 - DNA, 20 bp, synthetic construct
  source 1..20: mol_type = other DNA
aatggaccatggtcaggtga

SEQ ID NO: 41781 - DNA, 20 bp, synthetic construct
  source 1..20: mol_type = other DNA
actgcagatcaaagcagaac

SEQ ID NO: 41782 - DNA, 20 bp, synthetic construct
  source 1..20: mol_type = other DNA
caggggagctcggagcaggc

SEQ ID NO: 41783 - DNA, 20 bp, synthetic construct
  source 1..20: mol_type = other DNA
ggcgcgtcttccaggtggga

SEQ ID NO: 41784 - DNA, 20 bp, synthetic construct
  source 1..20: mol_type = other DNA
gaaatagtcagcaaggctgt

SEQ ID NO: 41785 - DNA, 20 bp, synthetic construct
  source 1..20: mol_type = other DNA
tggtgatgatcatctctgtc

SEQ ID NO: 41786 - DNA, 20 bp, synthetic construct
  source 1..20: mol_type = other DNA
gggacagcgccacctgctga

SEQ ID NO: 41787 - DNA, 20 bp, synthetic construct
  source 1..20: mol_type = other DNA
gagttcttggagggacaagt

SEQ ID NO: 41788 - DNA, 20 bp, synthetic construct
  source 1..20: mol_type = other DNA
agcgcaagcggctgcggaac

SEQ ID NO: 41789 - DNA, 20 bp, synthetic construct
  source 1..20: mol_type = other DNA
gtgagctggcatcaaggaga

SEQ ID NO: 41790 - DNA, 20 bp, synthetic construct
  source 1..20: mol_type = other DNA
gttgacccctcacctgacca

SEQ ID NO: 41791 - DNA, 20 bp, synthetic construct
  source 1..20: mol_type = other DNA
ccatgaccccgtggccctgg

SEQ ID NO: 41792 - DNA, 20 bp, synthetic construct
  source 1..20: mol_type = other DNA
ggccctttggaacgaagggt

SEQ ID NO: 41793 - DNA, 20 bp, synthetic construct
  source 1..20: mol_type = other DNA
ctgtctcgtagaaggcctgt

SEQ ID NO: 41794 - DNA, 20 bp, synthetic construct
  source 1..20: mol_type = other DNA
catccgggccaggtccaaca

SEQ ID NO: 41795 - DNA, 20 bp, synthetic construct
  source 1..20: mol_type = other DNA
gccctagaaaaggagaggcg

SEQ ID NO: 41796 - DNA, 20 bp, synthetic construct
  source 1..20: mol_type = other DNA
atccgatggcacaatcaggt

SEQ ID NO: 41797 - DNA, 20 bp, synthetic construct
  source 1..20: mol_type = other DNA
ggtgaagctgtagccgcgct

SEQ ID NO: 41798 - DNA, 20 bp, synthetic construct
  source 1..20: mol_type = other DNA
ccatcaagtctctgcaacac

SEQ ID NO: 41799 - DNA, 20 bp, synthetic construct
  source 1..20: mol_type = other DNA
cccggagtgcccgcagggtg

SEQ ID NO: 41800 - DNA, 20 bp, synthetic construct
  source 1..20: mol_type = other DNA
gtttgatgaggagcgagccc

SEQ ID NO: 41801 - DNA, 20 bp, synthetic construct
  source 1..20: mol_type = other DNA
ccagggcaacgaggatgagg

SEQ ID NO: 41802 - DNA, 20 bp, synthetic construct
  source 1..20: mol_type = other DNA
cagcttctttgatattactg

SEQ ID NO: 41803 - DNA, 20 bp, synthetic construct
  source 1..20: mol_type = other DNA
tgacgcggaggcgtattcgg

SEQ ID NO: 41804 - DNA, 20 bp, synthetic construct
  source 1..20: mol_type = other DNA
tctaggccgatacaaagcag

SEQ ID NO: 41805 - DNA, 20 bp, synthetic construct
  source 1..20: mol_type = other DNA
aggcctcaagattgacctag

SEQ ID NO: 41806 - DNA, 20 bp, synthetic construct
  source 1..20: mol_type = other DNA
gggtcgagcacttgagctcc

SEQ ID NO: 41807 - DNA, 20 bp, synthetic construct
  source 1..20: mol_type = other DNA
cgatgggtagtcctggagag

SEQ ID NO: 41808 - DNA, 20 bp, synthetic construct
  source 1..20: mol_type = other DNA
ggtccccaaaggagaaagat

SEQ ID NO: 41809 - DNA, 20 bp, synthetic construct
  source 1..20: mol_type = other DNA
cggggtctggcatcgcccct

SEQ ID NO: 41810 - DNA, 20 bp, synthetic construct
  source 1..20: mol_type = other DNA
cctgcagggaaggaaggcgc

SEQ ID NO: 41811 - DNA, 20 bp, synthetic construct
  source 1..20: mol_type = other DNA
atgtgcaaggccggcttcgc

SEQ ID NO: 41812 - DNA, 20 bp, synthetic construct
  source 1..20: mol_type = other DNA
gggcgccgacaagatcgagg

SEQ ID NO: 41813 - DNA, 20 bp, synthetic construct
  source 1..20: mol_type = other DNA
agacagtcaagatagcaaga

SEQ ID NO: 41814 - DNA, 20 bp, synthetic construct
  source 1..20: mol_type = other DNA
ctgtgaagttgaggtaacaa

SEQ ID NO: 41815 - DNA, 20 bp, synthetic construct
  source 1..20: mol_type = other DNA
ccctcaccagcagcagctgg

SEQ ID NO: 41816 - DNA, 20 bp, synthetic construct
  source 1..20: mol_type = other DNA
gctcagcgagctcctggatc

SEQ ID NO: 41817 - DNA, 20 bp, synthetic construct
  source 1..20: mol_type = other DNA
gctgccgctccgcgtccttg

SEQ ID NO: 41818 - DNA, 20 bp, synthetic construct
  source 1..20: mol_type = other DNA
gatgccccgtctgattgcca

SEQ ID NO: 41819 - DNA, 20 bp, synthetic construct
  source 1..20: mol_type = other DNA
gtacattccagaccaaggta

SEQ ID NO: 41820 - DNA, 20 bp, synthetic construct
  source 1..20: mol_type = other DNA
gaaagacaagacgctgattg

SEQ ID NO: 41821 - DNA, 20 bp, synthetic construct
  source 1..20: mol_type = other DNA
cgaggccatggaggtgacgg

SEQ ID NO: 41822 - DNA, 20 bp, synthetic construct
  source 1..20: mol_type = other DNA
catcagccaggccccgcagg

SEQ ID NO: 41823 - DNA, 20 bp, synthetic construct
  source 1..20: mol_type = other DNA
cagcatccaggacaacaatg

SEQ ID NO: 41824 - DNA, 20 bp, synthetic construct
  source 1..20: mol_type = other DNA
gtgcaggccgggcttttcca

SEQ ID NO: 41825 - DNA, 20 bp, synthetic construct
  source 1..20: mol_type = other DNA
tcccgcccccaccagccggc

SEQ ID NO: 41826 - DNA, 20 bp, synthetic construct
  source 1..20: mol_type = other DNA
tcacaaagtctggaaggaaa

SEQ ID NO: 41827 - DNA, 20 bp, synthetic construct
  source 1..20: mol_type = other DNA
actggagtatctgtttgctc

SEQ ID NO: 41828 - DNA, 20 bp, synthetic construct
  source 1..20: mol_type = other DNA
tgacctatcgggacaagcaa

SEQ ID NO: 41829 - DNA, 20 bp, synthetic construct
  source 1..20: mol_type = other DNA
cttacctgttaagattattg

SEQ ID NO: 41830 - DNA, 20 bp, synthetic construct
  source 1..20: mol_type = other DNA
ggaatcgagggctgcaagac

SEQ ID NO: 41831 - DNA, 20 bp, synthetic construct
  source 1..20: mol_type = other DNA
gagggctaccagccgggcga

SEQ ID NO: 41832 - DNA, 20 bp, synthetic construct
  source 1..20: mol_type = other DNA
aatgtcctctgcaggagatg

SEQ ID NO: 41833 - DNA, 20 bp, synthetic construct
  source 1..20: mol_type = other DNA
gcagcagctgcagggtcttc

SEQ ID NO: 41834 - DNA, 20 bp, synthetic construct
  source 1..20: mol_type = other DNA
ggtggaagctgagctggctg

SEQ ID NO: 41835 - DNA, 20 bp, synthetic construct
  source 1..20: mol_type = other DNA
aggatggacgcccaggcatt

SEQ ID NO: 41836 - DNA, 20 bp, synthetic construct
  source 1..20: mol_type = other DNA
cccccagcaccgcagtgacc

SEQ ID NO: 41837 - DNA, 20 bp, synthetic construct
  source 1..20: mol_type = other DNA
aacgtgcccatcatcctggt

SEQ ID NO: 41838 - DNA, 20 bp, synthetic construct
  source 1..20: mol_type = other DNA
gctgctgacctgtcagggga

SEQ ID NO: 41839 - DNA, 20 bp, synthetic construct
  source 1..20: mol_type = other DNA
cggcggccctccttggagct

SEQ ID NO: 41840 - DNA, 20 bp, synthetic construct
  source 1..20: mol_type = other DNA
accagcagtgctgtgaaaag

SEQ ID NO: 41841 - DNA, 20 bp, synthetic construct
  source 1..20: mol_type = other DNA
gatcaagcgtgctgaccggc

SEQ ID NO: 41842 - DNA, 20 bp, synthetic construct
  source 1..20: mol_type = other DNA
cgagaaagcagtctttaccc

SEQ ID NO: 41843 - DNA, 20 bp, synthetic construct
  source 1..20: mol_type = other DNA
cagggacccccatattccat

SEQ ID NO: 41844 - DNA, 20 bp, synthetic construct
  source 1..20: mol_type = other DNA
ccctacatcgtgcggctcat

SEQ ID NO: 41845 - DNA, 20 bp, synthetic construct
  source 1..20: mol_type = other DNA
tggcgtaggtgccgttgagc

SEQ ID NO: 41846 - DNA, 20 bp, synthetic construct
  source 1..20: mol_type = other DNA
gaggagactggcggagctgg

SEQ ID NO: 41847 - DNA, 20 bp, synthetic construct
  source 1..20: mol_type = other DNA
ggggcagggcctgcatgtga

SEQ ID NO: 41848 - DNA, 20 bp, synthetic construct
  source 1..20: mol_type = other DNA
cacttccacccctggctcag

SEQ ID NO: 41849 - DNA, 20 bp, synthetic construct
  source 1..20: mol_type = other DNA
atggggcagtcctgcgggca

SEQ ID NO: 41850 - DNA, 20 bp, synthetic construct
  source 1..20: mol_type = other DNA
gacaggcagagctggaagga

SEQ ID NO: 41851 - DNA, 20 bp, synthetic construct
  source 1..20: mol_type = other DNA
gctcttcacacccaccgtgc

SEQ ID NO: 41852 - DNA, 20 bp, synthetic construct
  source 1..20: mol_type = other DNA
cagggaccacagggacacag

SEQ ID NO: 41853 - DNA, 20 bp, synthetic construct
  source 1..20: mol_type = other DNA
gatcagagggccaaccacga

SEQ ID NO: 41854 - DNA, 20 bp, synthetic construct
  source 1..20: mol_type = other DNA
ccttggtccagaattccatg

SEQ ID NO: 41855 - DNA, 20 bp, synthetic construct
  source 1..20: mol_type = other DNA
gaacaagagcaatgactttg

SEQ ID NO: 41856 - DNA, 20 bp, synthetic construct
  source 1..20: mol_type = other DNA
tggcatcaacagtatggact

SEQ ID NO: 41857 - DNA, 20 bp, synthetic construct
  source 1..20: mol_type = other DNA
cggagagcagagccgaggtc

SEQ ID NO: 41858 - DNA, 20 bp, synthetic construct
  source 1..20: mol_type = other DNA
cagcaaggaccagttcccag

SEQ ID NO: 41859 - DNA, 20 bp, synthetic construct
  source 1..20: mol_type = other DNA
aaggaagccctgggcacccc

SEQ ID NO: 41860 - DNA, 20 bp, synthetic construct
  source 1..20: mol_type = other DNA
aggtcctaggaagcaaatac

SEQ ID NO: 41861 - DNA, 20 bp, synthetic construct
  source 1..20: mol_type = other DNA
gcaggtacaaggcgcgttcc

SEQ ID NO: 41862 - DNA, 20 bp, synthetic construct
  source 1..20: mol_type = other DNA
ctccaggtgggtgtaggctc

SEQ ID NO: 41863 - DNA, 20 bp, synthetic construct
  source 1..20: mol_type = other DNA
caagatgtgccaattctgcg

SEQ ID NO: 41864 - DNA, 20 bp, synthetic construct
  source 1..20: mol_type = other DNA
cgtcccgccccacctggtcc

SEQ ID NO: 41865 - DNA, 20 bp, synthetic construct
  source 1..20: mol_type = other DNA
actcacctgactgaggttga

SEQ ID NO: 41866 - DNA, 20 bp, synthetic construct
  source 1..20: mol_type = other DNA
cttgagatgcacacccagaa

SEQ ID NO: 41867 - DNA, 20 bp, synthetic construct
  source 1..20: mol_type = other DNA
cttgggtcaggacatcaact

SEQ ID NO: 41868 - DNA, 20 bp, synthetic construct
  source 1..20: mol_type = other DNA
caggcccttccccaccgagg

SEQ ID NO: 41869 - DNA, 20 bp, synthetic construct
  source 1..20: mol_type = other DNA
tctgcaccttgtcacacagt

SEQ ID NO: 41870 - DNA, 20 bp, synthetic construct
  source 1..20: mol_type = other DNA
gacgctccatcccatcagct

SEQ ID NO: 41871 - DNA, 20 bp, synthetic construct
  source 1..20: mol_type = other DNA
caagatgtatacaaccagta

SEQ ID NO: 41872 - DNA, 20 bp, synthetic construct
  source 1..20: mol_type = other DNA
caagccacccagctcctgga

SEQ ID NO: 41873 - DNA, 20 bp, synthetic construct
  source 1..20: mol_type = other DNA
caaggggcaaaggggctatg

SEQ ID NO: 41874 - DNA, 20 bp, synthetic construct
  source 1..20: mol_type = other DNA
ggcccccagcaacagcttca

SEQ ID NO: 41875 - DNA, 20 bp, synthetic construct
  source 1..20: mol_type = other DNA
tattaatccagatgagcccc

SEQ ID NO: 41876 - DNA, 20 bp, synthetic construct
  source 1..20: mol_type = other DNA
gaaaaggggattatcctggt

SEQ ID NO: 41877 - DNA, 20 bp, synthetic construct
  source 1..20: mol_type = other DNA
tatttcaccgagtctggttg

SEQ ID NO: 41878 - DNA, 20 bp, synthetic construct
  source 1..20: mol_type = other DNA
gcctggccagcaaggtggaa

SEQ ID NO: 41879 - DNA, 20 bp, synthetic construct
  source 1..20: mol_type = other DNA
gagactggaaggctgtctgg

SEQ ID NO: 41880 - DNA, 20 bp, synthetic construct
  source 1..20: mol_type = other DNA
atggctttgaatgtggcgtg

SEQ ID NO: 41881 - DNA, 20 bp, synthetic construct
  source 1..20: mol_type = other DNA
cttcatcttggagtccatga

SEQ ID NO: 41882 - DNA, 20 bp, synthetic construct
  source 1..20: mol_type = other DNA
aagcgagccctggaatggct

SEQ ID NO: 41883 - DNA, 20 bp, synthetic construct
  source 1..20: mol_type = other DNA
gagcatcaagtgcgtggtgg

SEQ ID NO: 41884 - DNA, 20 bp, synthetic construct
  source 1..20: mol_type = other DNA
aagtcccagctcaaggtgag

SEQ ID NO: 41885 - DNA, 20 bp, synthetic construct
  source 1..20: mol_type = other DNA
cactgtgggaccctgctgtg

SEQ ID NO: 41886 - DNA, 20 bp, synthetic construct
  source 1..20: mol_type = other DNA
gctctgaaaatgcaagctgg

SEQ ID NO: 41887 - DNA, 20 bp, synthetic construct
  source 1..20: mol_type = other DNA
catggcggacaacaaagccc

SEQ ID NO: 41888 - DNA, 20 bp, synthetic construct
  source 1..20: mol_type = other DNA
gaacaagcactgcctgctgg

SEQ ID NO: 41889 - DNA, 20 bp, synthetic construct
  source 1..20: mol_type = other DNA
ccttcttcagagccaccttc

SEQ ID NO: 41890 - DNA, 20 bp, synthetic construct
  source 1..20: mol_type = other DNA
cttctgcccttctctctgga

SEQ ID NO: 41891 - DNA, 20 bp, synthetic construct
  source 1..20: mol_type = other DNA
cttgccctgtacccctgtgc

SEQ ID NO: 41892 - DNA, 20 bp, synthetic construct
  source 1..20: mol_type = other DNA
ggaggtgaggggcaggatgg

SEQ ID NO: 41893 - DNA, 20 bp, synthetic construct
  source 1..20: mol_type = other DNA
tgcaaacgccatgcggccat

SEQ ID NO: 41894 - DNA, 20 bp, synthetic construct
  source 1..20: mol_type = other DNA
gaagctttacctgatgtcct

SEQ ID NO: 41895 - DNA, 20 bp, synthetic construct
  source 1..20: mol_type = other DNA
ccaacctcactctgcattat

SEQ ID NO: 41896 - DNA, 20 bp, synthetic construct
  source 1..20: mol_type = other DNA
gaatcccagttcagtgttgg

SEQ ID NO: 41897 - DNA, 20 bp, synthetic construct
  source 1..20: mol_type = other DNA
gggactgctcacgttcatca

SEQ ID NO: 41898 - DNA, 20 bp, synthetic construct
  source 1..20: mol_type = other DNA
ctgcagtacctggtaagaag

SEQ ID NO: 41899 - DNA, 20 bp, synthetic construct
  source 1..20: mol_type = other DNA
tccagcttaacgcacttcaa

SEQ ID NO: 41900 - DNA, 20 bp, synthetic construct
  source 1..20: mol_type = other DNA
atgaagacgcacgggcagat

SEQ ID NO: 41901 - DNA, 20 bp, synthetic construct
  source 1..20: mol_type = other DNA
cctccagggccacggggtca

SEQ ID NO: 41902 - DNA, 20 bp, synthetic construct
  source 1..20: mol_type = other DNA
cggagaatgccaccgccaac

SEQ ID NO: 41903 - DNA, 20 bp, synthetic construct
  source 1..20: mol_type = other DNA
aaactgcttccggagccacc

SEQ ID NO: 41904 - DNA, 20 bp, synthetic construct
  source 1..20: mol_type = other DNA
tggtgaggcaggaggtgaat

SEQ ID NO: 41905 - DNA, 20 bp, synthetic construct
  source 1..20: mol_type = other DNA
ggaactacaccttctggcag

SEQ ID NO: 41906 - DNA, 20 bp, synthetic construct
  source 1..20: mol_type = other DNA
gccatcaacaagctcaagac

SEQ ID NO: 41907 - DNA, 20 bp, synthetic construct
  source 1..20: mol_type = other DNA
tgtcatggagtgcattgagt

SEQ ID NO: 41908 - DNA, 20 bp, synthetic construct
  source 1..20: mol_type = other DNA
gtactcacattgacctccat

SEQ ID NO: 41909 - DNA, 20 bp, synthetic construct
  source 1..20: mol_type = other DNA
ccaccgcttcgggctacgca

SEQ ID NO: 41910 - DNA, 20 bp, synthetic construct
  source 1..20: mol_type = other DNA
caaactcgtggaggcctgcg

SEQ ID NO: 41911 - DNA, 20 bp, synthetic construct
  source 1..20: mol_type = other DNA
ggccgctccatggggcggga

SEQ ID NO: 41912 - DNA, 20 bp, synthetic construct
  source 1..20: mol_type = other DNA
agaacttgatcttggtggta

SEQ ID NO: 41913 - DNA, 20 bp, synthetic construct
  source 1..20: mol_type = other DNA
cagctggacatgctgtggag

SEQ ID NO: 41914 - DNA, 20 bp, synthetic construct
  source 1..20: mol_type = other DNA
catcacgccctgggaaggaa

SEQ ID NO: 41915 - DNA, 20 bp, synthetic construct
  source 1..20: mol_type = other DNA
cagcagtcaaatgccttggt

SEQ ID NO: 41916 - DNA, 20 bp, synthetic construct
  source 1..20: mol_type = other DNA
gcagccgctggtggagcagc

SEQ ID NO: 41917 - DNA, 20 bp, synthetic construct
  source 1..20: mol_type = other DNA
agctgtgcagagcgataacc

SEQ ID NO: 41918 - DNA, 20 bp, synthetic construct
  source 1..20: mol_type = other DNA
gcagaagcggtgcccacact

SEQ ID NO: 41919 - DNA, 20 bp, synthetic construct
  source 1..20: mol_type = other DNA
tttaaaggaaagttccgaga

SEQ ID NO: 41920 - DNA, 20 bp, synthetic construct
  source 1..20: mol_type = other DNA
aagtgaggtcaagaggcgtg

SEQ ID NO: 41921 - DNA, 20 bp, synthetic construct
  source 1..20: mol_type = other DNA
catgcaccacctgctgctgg

SEQ ID NO: 41922 - DNA, 20 bp, synthetic construct
  source 1..20: mol_type = other DNA
cagatacaggtacacagctg

SEQ ID NO: 41923 - DNA, 20 bp, synthetic construct
  source 1..20: mol_type = other DNA
agtaggcatgtgcaagggct

SEQ ID NO: 41924 - DNA, 20 bp, synthetic construct
  source 1..20: mol_type = other DNA
agtgcctgccgggcaagatg

SEQ ID NO: 41925 - DNA, 20 bp, synthetic construct
  source 1..20: mol_type = other DNA
cagccggatcgccatctgga

SEQ ID NO: 41926 - DNA, 20 bp, synthetic construct
  source 1..20: mol_type = other DNA
gaaggcggagcaccaggtgg

SEQ ID NO: 41927 - DNA, 20 bp, synthetic construct
  source 1..20: mol_type = other DNA
cccaccgttccggccgaaag

SEQ ID NO: 41928 - DNA, 20 bp, synthetic construct
  source 1..20: mol_type = other DNA
gacacacagcagttcttgtc

SEQ ID NO: 41929 - DNA, 20 bp, synthetic construct
  source 1..20: mol_type = other DNA
cacggaagagatgatgcgcg

SEQ ID NO: 41930 - DNA, 20 bp, synthetic construct
  source 1..20: mol_type = other DNA
gtccacgtcacacttcatga

SEQ ID NO: 41931 - DNA, 20 bp, synthetic construct
  source 1..20: mol_type = other DNA
atgagcagctcaacttgcgt

SEQ ID NO: 41932 - DNA, 20 bp, synthetic construct
  source 1..20: mol_type = other DNA
ggggagcacgttccacgcga

SEQ ID NO: 41933 - DNA, 20 bp, synthetic construct
  source 1..20: mol_type = other DNA
tactcacattgacctccata

SEQ ID NO: 41934 - DNA, 20 bp, synthetic construct
  source 1..20: mol_type = other DNA
ccacggtggtttcagagatg

SEQ ID NO: 41935 - DNA, 20 bp, synthetic construct
  source 1..20: mol_type = other DNA
cccaggccagctcgatgtgg

SEQ ID NO: 41936 - DNA, 20 bp, synthetic construct
  source 1..20: mol_type = other DNA
gggaccaccacagtgcccag

SEQ ID NO: 41937 - DNA, 20 bp, synthetic construct
  source 1..20: mol_type = other DNA
tctgcccgtgcgtcttcatg

SEQ ID NO: 41938 - DNA, 20 bp, synthetic construct
  source 1..20: mol_type = other DNA
aagtaggcatcagtgttcag

SEQ ID NO: 41939 - DNA, 20 bp, synthetic construct
  source 1..20: mol_type = other DNA
ccaccagggcgagcagtggg

SEQ ID NO: 41940 - DNA, 20 bp, synthetic construct
  source 1..20: mol_type = other DNA
gcgcacgtagtcacgcacca

SEQ ID NO: 41941 - DNA, 20 bp, synthetic construct
  source 1..20: mol_type = other DNA
gacgatgacaaccacaggta

SEQ ID NO: 41942 - DNA, 20 bp, synthetic construct
  source 1..20: mol_type = other DNA
gaaggaggcggctggcatcg

SEQ ID NO: 41943 - DNA, 20 bp, synthetic construct
  source 1..20: mol_type = other DNA
ttacccacggtggctggaga

SEQ ID NO: 41944 - DNA, 20 bp, synthetic construct
  source 1..20: mol_type = other DNA
cgaccttctgtgaacactgt

SEQ ID NO: 41945 - DNA, 20 bp, synthetic construct
  source 1..20: mol_type = other DNA
gagcccaggtgagcgattgc

SEQ ID NO: 41946 - DNA, 20 bp, synthetic construct
  source 1..20: mol_type = other DNA
gaggatcaggttgcaggccc

SEQ ID NO: 41947 - DNA, 20 bp, synthetic construct
  source 1..20: mol_type = other DNA
acttgtcagcagccacactc

SEQ ID NO: 41948 - DNA, 20 bp, synthetic construct
  source 1..20: mol_type = other DNA
aagagacaggtaaagctctc

SEQ ID NO: 41949 - DNA, 20 bp, synthetic construct
  source 1..20: mol_type = other DNA
aaatccactagactccctgt

SEQ ID NO: 41950 - DNA, 20 bp, synthetic construct
  source 1..20: mol_type = other DNA
tgcagtcatggcgcaggaag

SEQ ID NO: 41951 - DNA, 20 bp, synthetic construct
  source 1..20: mol_type = other DNA
ctccgtggccagagcaaaga

SEQ ID NO: 41952 - DNA, 20 bp, synthetic construct
  source 1..20: mol_type = other DNA
caggaggcagaaggcaatgc

SEQ ID NO: 41953 - DNA, 20 bp, synthetic construct
  source 1..20: mol_type = other DNA
ggggccagtggaggcagcga

SEQ ID NO: 41954 - DNA, 20 bp, synthetic construct
  source 1..20: mol_type = other DNA
cggcagactgctggaagagg

SEQ ID NO: 41955 - DNA, 20 bp, synthetic construct
  source 1..20: mol_type = other DNA
ggtgctgaggttggcattgc

SEQ ID NO: 41956 - DNA, 20 bp, synthetic construct
  source 1..20: mol_type = other DNA
agagtcaagtggtcatagtc

SEQ ID NO: 41957 - DNA, 20 bp, synthetic construct
  source 1..20: mol_type = other DNA
gatttcagcagcataaaacc

SEQ ID NO: 41958 - DNA, 20 bp, synthetic construct
  source 1..20: mol_type = other DNA
cagccattgggcccatacgt

SEQ ID NO: 41959 - DNA, 20 bp, synthetic construct
  source 1..20: mol_type = other DNA
ggtggaagaacagctgcggg

SEQ ID NO: 41960 - DNA, 20 bp, synthetic construct
  source 1..20: mol_type = other DNA
gaggcagaaggcaatgcagg

SEQ ID NO: 41961 - DNA, 20 bp, synthetic construct
  source 1..20: mol_type = other DNA
ggcaggggcagagagcatcc

SEQ ID NO: 41962 - DNA, 20 bp, synthetic construct
  source 1..20: mol_type = other DNA
gttgtccgagagggattcgg

SEQ ID NO: 41963 - DNA, 20 bp, synthetic construct
  source 1..20: mol_type = other DNA
tagtctgggttgggaacagg

SEQ ID NO: 41964 - DNA, 20 bp, synthetic construct
  source 1..20: mol_type = other DNA
cctccaccccctggagccat

SEQ ID NO: 41965 - DNA, 20 bp, synthetic construct
  source 1..20: mol_type = other DNA
tggctcctcgatctctcgta

SEQ ID NO: 41966 - DNA, 20 bp, synthetic construct
  source 1..20: mol_type = other DNA
ggcgtcgcggcacttcatga

SEQ ID NO: 41967 - DNA, 20 bp, synthetic construct
  source 1..20: mol_type = other DNA
ccagtccggcgcgggcccca

SEQ ID NO: 41968 - DNA, 20 bp, synthetic construct
  source 1..20: mol_type = other DNA
agttgaggtgctcctgtggg

SEQ ID NO: 41969 - DNA, 20 bp, synthetic construct
  source 1..20: mol_type = other DNA
cctgaggaaacaagggccag

SEQ ID NO: 41970 - DNA, 20 bp, synthetic construct
  source 1..20: mol_type = other DNA
aaaaattgttccactcttcc

SEQ ID NO: 41971 - DNA, 20 bp, synthetic construct
  source 1..20: mol_type = other DNA
tacatttccactataccaca

SEQ ID NO: 41972 - DNA, 20 bp, synthetic construct
  source 1..20: mol_type = other DNA
ccaggtcgcggtgcacgcag

SEQ ID NO: 41973 - DNA, 20 bp, synthetic construct
  source 1..20: mol_type = other DNA
ataatagtgagaaatttgaa

SEQ ID NO: 41974 - DNA, 20 bp, synthetic construct
  source 1..20: mol_type = other DNA
gatggctaggtgcagtggtc

SEQ ID NO: 41975 - DNA, 20 bp, synthetic construct
  source 1..20: mol_type = other DNA
gaactccctgccagatatcg

SEQ ID NO: 41976 - DNA, 20 bp, synthetic construct
  source 1..20: mol_type = other DNA
gatctggtgcaggtgagtca

SEQ ID NO: 41977 - DNA, 20 bp, synthetic construct
  source 1..20: mol_type = other DNA
gggccgctccatggggcggg

SEQ ID NO: 41978 - DNA, 20 bp, synthetic construct
  source 1..20: mol_type = other DNA
gtgacagtcccggcccttag

SEQ ID NO: 41979 - DNA, 20 bp, synthetic construct
  source 1..20: mol_type = other DNA
gcacctgggatagagtagag

SEQ ID NO: 41980 - DNA, 20 bp, synthetic construct
  source 1..20: mol_type = other DNA
tctagctcagtttggcccgc

SEQ ID NO: 41981 - DNA, 20 bp, synthetic construct
  source 1..20: mol_type = other DNA
tgaccaggtgtttgagatcc

SEQ ID NO: 41982 - DNA, 20 bp, synthetic construct
  source 1..20: mol_type = other DNA
aagacaagaccatcaaatcc

SEQ ID NO: 41983 - DNA, 20 bp, synthetic construct
  source 1..20: mol_type = other DNA
cacggtggaacctgacatgt

SEQ ID NO: 41984 - DNA, 20 bp, synthetic construct
  source 1..20: mol_type = other DNA
ctctgaccttagcaggatcc

SEQ ID NO: 41985 - DNA, 20 bp, synthetic construct
  source 1..20: mol_type = other DNA
gcgaatcgctcagaccaggt

SEQ ID NO: 41986 - DNA, 20 bp, synthetic construct
  source 1..20: mol_type = other DNA
ggagtcacacacggtgtccg

SEQ ID NO: 41987 - DNA, 20 bp, synthetic construct
  source 1..20: mol_type = other DNA
aaagggcctacaccatcctg

SEQ ID NO: 41988 - DNA, 20 bp, synthetic construct
  source 1..20: mol_type = other DNA
ttattatattatgcaggaca

SEQ ID NO: 41989 - DNA, 20 bp, synthetic construct
  source 1..20: mol_type = other DNA
ctacaggatcgaccgagccc

SEQ ID NO: 41990 - DNA, 20 bp, synthetic construct
  source 1..20: mol_type = other DNA
ccgccaggtgcaggggcgtc

SEQ ID NO: 41991 - DNA, 20 bp, synthetic construct
  source 1..20: mol_type = other DNA
agtggcatgtgattctttgc

SEQ ID NO: 41992 - DNA, 20 bp, synthetic construct
  source 1..20: mol_type = other DNA
cagccatagggggtcatcct

SEQ ID NO: 41993 - DNA, 20 bp, synthetic construct
  source 1..20: mol_type = other DNA
ccaggtgggtgtgggctctg

SEQ ID NO: 41994 - DNA, 20 bp, synthetic construct
  source 1..20: mol_type = other DNA
gtccttcaccaagatttacc

SEQ ID NO: 41995 - DNA, 20 bp, synthetic construct
  source 1..20: mol_type = other DNA
tatctgtgtgacaccgtaag

SEQ ID NO: 41996 - DNA, 20 bp, synthetic construct
  source 1..20: mol_type = other DNA
caacccaggctacctgtgag

SEQ ID NO: 41997 - DNA, 20 bp, synthetic construct
  source 1..20: mol_type = other DNA
cttcgctcagcagcgcttcg

SEQ ID NO: 41998 - DNA, 20 bp, synthetic construct
  source 1..20: mol_type = other DNA
ggccttgcagaagaagctgg

SEQ ID NO: 41999 - DNA, 20 bp, synthetic construct
  source 1..20: mol_type = other DNA
cagcgacgaatcctatggta

SEQ ID NO: 42000 - DNA, 20 bp, synthetic construct
  source 1..20: mol_type = other DNA
ggtgacgatgccgtgctcga

SEQ ID NO: 42001 - DNA, 20 bp, synthetic construct
  source 1..20: mol_type = other DNA
gcaggagagccagagtcgct

SEQ ID NO: 42002 - DNA, 20 bp, synthetic construct
  source 1..20: mol_type = other DNA
ctgcctcgaagaaggcctgt

SEQ ID NO: 42003 - DNA, 20 bp, synthetic construct
  source 1..20: mol_type = other DNA
gatgagccccgggatttggt

SEQ ID NO: 42004 - DNA, 20 bp, synthetic construct
  source 1..20: mol_type = other DNA
ggcccagcatgtcctgtgga

SEQ ID NO: 42005 - DNA, 20 bp, synthetic construct
  source 1..20: mol_type = other DNA
ggcgcaaagaagaagaggag

SEQ ID NO: 42006 - DNA, 20 bp, synthetic construct
  source 1..20: mol_type = other DNA
gttttacagtgtgttgctgt

SEQ ID NO: 42007 - DNA, 20 bp, synthetic construct
  source 1..20: mol_type = other DNA
acacttgtacttgtcctcca

SEQ ID NO: 42008 - DNA, 20 bp, synthetic construct
  source 1..20: mol_type = other DNA
ccaatatacaaactggagtg

SEQ ID NO: 42009 - DNA, 20 bp, synthetic construct
  source 1..20: mol_type = other DNA
tcctctaggttcttcagggt

SEQ ID NO: 42010 - DNA, 20 bp, synthetic construct
  source 1..20: mol_type = other DNA
atctgcagctgcctgcacag

SEQ ID NO: 42011 - DNA, 20 bp, synthetic construct
  source 1..20: mol_type = other DNA
tccgtcctggtaaattctcc

SEQ ID NO: 42012 - DNA, 20 bp, synthetic construct
  source 1..20: mol_type = other DNA
caggttcgggatgactcttc

SEQ ID NO: 42013 - DNA, 20 bp, synthetic construct
  source 1..20: mol_type = other DNA
ggcgccgcagcttgctctcc

SEQ ID NO: 42014 - DNA, 20 bp, synthetic construct
  source 1..20: mol_type = other DNA
caaggtgcgagggggcgccc

SEQ ID NO: 42015 - DNA, 20 bp, synthetic construct
  source 1..20: mol_type = other DNA
gtgaactgggaagtgcctgc

SEQ ID NO: 42016 - DNA, 20 bp, synthetic construct
  source 1..20: mol_type = other DNA
acgcagcagtgtgcatccag

SEQ ID NO: 42017 - DNA, 20 bp, synthetic construct
  source 1..20: mol_type = other DNA
ccagctccaccttccaccag

SEQ ID NO: 42018 - DNA, 20 bp, synthetic construct
  source 1..20: mol_type = other DNA
aagagggcctggacgtatgt

SEQ ID NO: 42019 - DNA, 20 bp, synthetic construct
  source 1..20: mol_type = other DNA
tcttcccctgctgaatcaca

SEQ ID NO: 42020 - DNA, 20 bp, synthetic construct
  source 1..20: mol_type = other DNA
gagcctgcgggcagagctca

SEQ ID NO: 42021 - DNA, 20 bp, synthetic construct
  source 1..20: mol_type = other DNA
gcagtgctgaccttgatggt

SEQ ID NO: 42022 - DNA, 20 bp, synthetic construct
  source 1..20: mol_type = other DNA
tcagggacccccatattcca

SEQ ID NO: 42023 - DNA, 20 bp, synthetic construct
  source 1..20: mol_type = other DNA
ccctctcacgacggagatct

SEQ ID NO: 42024 - DNA, 20 bp, synthetic construct
  source 1..20: mol_type = other DNA
ctgggcaaggacacaatggg

SEQ ID NO: 42025 - DNA, 20 bp, synthetic construct
  source 1..20: mol_type = other DNA
tccttacatgatggtgtcac

SEQ ID NO: 42026 - DNA, 20 bp, synthetic construct
  source 1..20: mol_type = other DNA
agctgcaagattgcagactt

SEQ ID NO: 42027 - DNA, 20 bp, synthetic construct
  source 1..20: mol_type = other DNA
gtcctctgcaggagatgcgg

SEQ ID NO: 42028 - DNA, 20 bp, synthetic construct
  source 1..20: mol_type = other DNA
gggcaaagaaggagccttca

SEQ ID NO: 42029 - DNA, 20 bp, synthetic construct
  source 1..20: mol_type = other DNA
gagcaggagggcttcgccga

SEQ ID NO: 42030 - DNA, 20 bp, synthetic construct
  source 1..20: mol_type = other DNA
ctgctaaaggagtgcaggag

SEQ ID NO: 42031 - DNA, 20 bp, synthetic construct
  source 1..20: mol_type = other DNA
gccgcggccgccgcgcagag

SEQ ID NO: 42032 - DNA, 20 bp, synthetic construct
  source 1..20: mol_type = other DNA
cgccagcttcaggtgctcct

SEQ ID NO: 42033 - DNA, 20 bp, synthetic construct
  source 1..20: mol_type = other DNA
cagctgagctcagagcatgg

SEQ ID NO: 42034 - DNA, 20 bp, synthetic construct
  source 1..20: mol_type = other DNA
ggccctgaagctgttgctgg

SEQ ID NO: 42035 - DNA, 20 bp, synthetic construct
  source 1..20: mol_type = other DNA
gtcgtcccgcaggtccagct

SEQ ID NO: 42036 - DNA, 20 bp, synthetic construct
  source 1..20: mol_type = other DNA
ccgtaggcgccggagcccac

SEQ ID NO: 42037 - DNA, 20 bp, synthetic construct
  source 1..20: mol_type = other DNA
tacgccacgcagctccaggt

SEQ ID NO: 42038 - DNA, 20 bp, synthetic construct
  source 1..20: mol_type = other DNA
gtcctggtaatggtgtgggg

SEQ ID NO: 42039 - DNA, 20 bp, synthetic construct
  source 1..20: mol_type = other DNA
ggagactggcggagctggcg

SEQ ID NO: 42040 - DNA, 20 bp, synthetic construct
  source 1..20: mol_type = other DNA
agacaaggcctgcggatccc

SEQ ID NO: 42041 - DNA, 20 bp, synthetic construct
  source 1..20: mol_type = other DNA
caatttgggttggtgcatct

SEQ ID NO: 42042 - DNA, 20 bp, synthetic construct
  source 1..20: mol_type = other DNA
cgtgatggactccggtgacg

SEQ ID NO: 42043 - DNA, 20 bp, synthetic construct
  source 1..20: mol_type = other DNA
caagttgatgtcctgaccca

SEQ ID NO: 42044 - DNA, 20 bp, synthetic construct
  source 1..20: mol_type = other DNA
agcacaaagtacgggccagg

SEQ ID NO: 42045 - DNA, 20 bp, synthetic construct
  source 1..20: mol_type = other DNA
aaaaactttaaagaattttg

SEQ ID NO: 42046 - DNA, 20 bp, synthetic construct
  source 1..20: mol_type = other DNA
cttccttctccagccaccgt

SEQ ID NO: 42047 - DNA, 20 bp, synthetic construct
  source 1..20: mol_type = other DNA
ataacctagaaaagaactga

SEQ ID NO: 42048 - DNA, 20 bp, synthetic construct
  source 1..20: mol_type = other DNA
ccaggtcccaggcttgcctg

SEQ ID NO: 42049 - DNA, 20 bp, synthetic construct
  source 1..20: mol_type = other DNA
ccctggatcaccaaggacaa

SEQ ID NO: 42050 - DNA, 20 bp, synthetic construct
  source 1..20: mol_type = other DNA
tgccatctctttccggtgag

SEQ ID NO: 42051 - DNA, 20 bp, synthetic construct
  source 1..20: mol_type = other DNA
ggcaagcaatgctcggagct

SEQ ID NO: 42052 - DNA, 20 bp, synthetic construct
  source 1..20: mol_type = other DNA
cgtccaggaagcaccacttg

SEQ ID NO: 42053 - DNA, 20 bp, synthetic construct
  source 1..20: mol_type = other DNA
ccgagtatatgaacaaaggt

SEQ ID NO: 42054 - DNA, 20 bp, synthetic construct
  source 1..20: mol_type = other DNA
gctaccctgggaacatatgg

SEQ ID NO: 42055 - DNA, 20 bp, synthetic construct
  source 1..20: mol_type = other DNA
accattcccccaaggcctcg

SEQ ID NO: 42056 - DNA, 20 bp, synthetic construct
  source 1..20: mol_type = other DNA
acactcactgatcccaaact

SEQ ID NO: 42057 - DNA, 20 bp, synthetic construct
  source 1..20: mol_type = other DNA
gagccacagctcaagcactc

SEQ ID NO: 42058 - DNA, 20 bp, synthetic construct
  source 1..20: mol_type = other DNA
gtcatgtacgagatgatgtg

SEQ ID NO: 42059 - DNA, 20 bp, synthetic construct
  source 1..20: mol_type = other DNA
tgtgaccctggcacttggct

SEQ ID NO: 42060 - DNA, 20 bp, synthetic construct
  source 1..20: mol_type = other DNA
ctgccagacgctgagccccc

SEQ ID NO: 42061 - DNA, 20 bp, synthetic construct
  source 1..20: mol_type = other DNA
tcatttctatttaagggagg

SEQ ID NO: 42062 - DNA, 20 bp, synthetic construct
  source 1..20: mol_type = other DNA
ccatgagctggatcatctgc

SEQ ID NO: 42063 - DNA, 20 bp, synthetic construct
  source 1..20: mol_type = other DNA
aatttcaggtggccaggaga

SEQ ID NO: 42064 - DNA, 20 bp, synthetic construct
  source 1..20: mol_type = other DNA
cctcactcacggttctcaaa

SEQ ID NO: 42065 - DNA, 20 bp, synthetic construct
  source 1..20: mol_type = other DNA
gccgaggctgctggaggaag

SEQ ID NO: 42066 - DNA, 20 bp, synthetic construct
  source 1..20: mol_type = other DNA
tcggccagcgttaggtggtg

SEQ ID NO: 42067 - DNA, 20 bp, synthetic construct
  source 1..20: mol_type = other DNA
acgcagctccaggtgggtgt

SEQ ID NO: 42068 - DNA, 20 bp, synthetic construct
  source 1..20: mol_type = other DNA
tcatctcttcaggtgcccgc

SEQ ID NO: 42069 - DNA, 20 bp, synthetic construct
  source 1..20: mol_type = other DNA
atcgatctgtaacaggacaa

SEQ ID NO: 42070 - DNA, 20 bp, synthetic construct
  source 1..20: mol_type = other DNA
cctcctccatcctcgccatg

SEQ ID NO: 42071 - DNA, 20 bp, synthetic construct
  source 1..20: mol_type = other DNA
cagctcaccggaggagtgga

SEQ ID NO: 42072 - DNA, 20 bp, synthetic construct
  source 1..20: mol_type = other DNA
agccagcgagtagagctcca

SEQ ID NO: 42073 - DNA, 20 bp, synthetic construct
  source 1..20: mol_type = other DNA
taaggagtattacaccgtca

SEQ ID NO: 42074 - DNA, 20 bp, synthetic construct
  source 1..20: mol_type = other DNA
aaagggcttgaagtcctgga

SEQ ID NO: 42075 - DNA, 20 bp, synthetic construct
  source 1..20: mol_type = other DNA
gtgtccttttgtggagattg

SEQ ID NO: 42076 - DNA, 20 bp, synthetic construct
  source 1..20: mol_type = other DNA
ctttgtgcaccgtgacctgg

SEQ ID NO: 42077 - DNA, 20 bp, synthetic construct
  source 1..20: mol_type = other DNA
catgacaccagtaggttcct

SEQ ID NO: 42078 - DNA, 20 bp, synthetic construct
  source 1..20: mol_type = other DNA
agaccgtcgtggggcagagt

SEQ ID NO: 42079 - DNA, 20 bp, synthetic construct
  source 1..20: mol_type = other DNA
cctctcaatctgcaggggtg

SEQ ID NO: 42080 - DNA, 20 bp, synthetic construct
  source 1..20: mol_type = other DNA
gaagttagaagtcgggtcgt

SEQ ID NO: 42081 - DNA, 20 bp, synthetic construct
  source 1..20: mol_type = other DNA
atgcagatccgacactggaa

SEQ ID NO: 42082 - DNA, 20 bp, synthetic construct
  source 1..20: mol_type = other DNA
caggctacgtggccactagg

SEQ ID NO: 42083 - DNA, 20 bp, synthetic construct
  source 1..20: mol_type = other DNA
gcccaaggacggaagcgctt

SEQ ID NO: 42084 - DNA, 20 bp, synthetic construct
  source 1..20: mol_type = other DNA
accctggtggttggtgtcgt

SEQ ID NO: 42085 - DNA, 20 bp, synthetic construct
  source 1..20: mol_type = other DNA
ccagagacacctgcttctgc

SEQ ID NO: 42086 - DNA, 20 bp, synthetic construct
  source 1..20: mol_type = other DNA
gcaatacgttcaccgggact

SEQ ID NO: 42087 - DNA, 20 bp, synthetic construct
  source 1..20: mol_type = other DNA
ggtcccagttcaacagggtg

SEQ ID NO: 42088 - DNA, 20 bp, synthetic construct
  source 1..20: mol_type = other DNA
agctcaaggtgaggggcacc

SEQ ID NO: 42089 - DNA, 20 bp, synthetic construct
  source 1..20: mol_type = other DNA
gtagaaaggctggctgtaaa

SEQ ID NO: 42090 - DNA, 20 bp, synthetic construct
  source 1..20: mol_type = other DNA
cagcagctggccgggaacgg

SEQ ID NO: 42091 - DNA, 20 bp, synthetic construct
  source 1..20: mol_type = other DNA
ttgtaccctggaagggccaa

SEQ ID NO: 42092 - DNA, 20 bp, synthetic construct
  source 1..20: mol_type = other DNA
ccagggtccacagagccacc

SEQ ID NO: 42093 - DNA, 20 bp, synthetic construct
  source 1..20: mol_type = other DNA
gttgatgcaggtgaacacat

SEQ ID NO: 42094 - DNA, 20 bp, synthetic construct
  source 1..20: mol_type = other DNA
tgccagagtttcggttcact

SEQ ID NO: 42095 - DNA, 20 bp, synthetic construct
  source 1..20: mol_type = other DNA
tgtccagatgaggtatctat

SEQ ID NO: 42096 - DNA, 20 bp, synthetic construct
  source 1..20: mol_type = other DNA
gcagcagtcacctggtcacc

SEQ ID NO: 42097 - DNA, 20 bp, synthetic construct
  source 1..20: mol_type = other DNA
tagggggtcatcctaggcaa

SEQ ID NO: 42098 - DNA, 20 bp, synthetic construct
  source 1..20: mol_type = other DNA
atactgtccctaggagcaag

SEQ ID NO: 42099 - DNA, 20 bp, synthetic construct
  source 1..20: mol_type = other DNA
acaggaggagctgcaggact

SEQ ID NO: 42100 - DNA, 20 bp, synthetic construct
  source 1..20: mol_type = other DNA
agatgtgagtagcccaccca

SEQ ID NO: 42101 - DNA, 20 bp, synthetic construct
  source 1..20: mol_type = other DNA
cataaaattggagtttctga

SEQ ID NO: 42102 - DNA, 20 bp, synthetic construct
  source 1..20: mol_type = other DNA
caagcctatgcagatgaacc

SEQ ID NO: 42103 - DNA, 20 bp, synthetic construct
  source 1..20: mol_type = other DNA
tccaccgtggcgtacaggca

SEQ ID NO: 42104 - DNA, 20 bp, synthetic construct
  source 1..20: mol_type = other DNA
tcctgagctcatgaggaggc

SEQ ID NO: 42105 - DNA, 20 bp, synthetic construct
  source 1..20: mol_type = other DNA
ttgcagaagatgacctggga

SEQ ID NO: 42106 - DNA, 20 bp, synthetic construct
  source 1..20: mol_type = other DNA
cgcagccttctgctgggcac

SEQ ID NO: 42107 - DNA, 20 bp, synthetic construct
  source 1..20: mol_type = other DNA
acagaacttcaatacactga

SEQ ID NO: 42108 - DNA, 20 bp, synthetic construct
  source 1..20: mol_type = other DNA
tcagcgtcttgtctttcaag

SEQ ID NO: 42109 - DNA, 20 bp, synthetic construct
  source 1..20: mol_type = other DNA
cagtggccagcgtctgggag

SEQ ID NO: 42110 - DNA, 20 bp, synthetic construct
  source 1..20: mol_type = other DNA
tccttcgctcagcagcgctt

SEQ ID NO: 42111 - DNA, 20 bp, synthetic construct
  source 1..20: mol_type = other DNA
tcgcagagaaccatggagtc

SEQ ID NO: 42112 - DNA, 20 bp, synthetic construct
  source 1..20: mol_type = other DNA
caaggcctctgtgaaagccc

SEQ ID NO: 42113 - DNA, 20 bp, synthetic construct
  source 1..20: mol_type = other DNA
gcagctggatgcagtatgcc

SEQ ID NO: 42114 - DNA, 20 bp, synthetic construct
  source 1..20: mol_type = other DNA
aaggccacccagctcctgga

SEQ ID NO: 42115 - DNA, 20 bp, synthetic construct
  source 1..20: mol_type = other DNA
gtgcaggaatttgtacacct

SEQ ID NO: 42116 - DNA, 20 bp, synthetic construct
  source 1..20: mol_type = other DNA
caatctcaacacatttgatt

SEQ ID NO: 42117 - DNA, 20 bp, synthetic construct
  source 1..20: mol_type = other DNA
aagatacctgctctataagt

SEQ ID NO: 42118 - DNA, 20 bp, synthetic construct
  source 1..20: mol_type = other DNA
caccaaattcccggtgaagt

SEQ ID NO: 42119 - DNA, 20 bp, synthetic construct
  source 1..20: mol_type = other DNA
tcctgacattcccaaggagg

SEQ ID NO: 42120 - DNA, 20 bp, synthetic construct
  source 1..20: mol_type = other DNA
atttcagcagcataaaacct

SEQ ID NO: 42121 - DNA, 20 bp, synthetic construct
  source 1..20: mol_type = other DNA
atcttgcattcattagcatt

SEQ ID NO: 42122 - DNA, 20 bp, synthetic construct
  source 1..20: mol_type = other DNA
acactgatggctgtgatagg

SEQ ID NO: 42123 - DNA, 20 bp, synthetic construct
  source 1..20: mol_type = other DNA
ttcccctacccagaggacaa

SEQ ID NO: 42124 - DNA, 20 bp, synthetic construct
  source 1..20: mol_type = other DNA
cgctgccaaagttgccctgg

SEQ ID NO: 42125 - DNA, 20 bp, synthetic construct
  source 1..20: mol_type = other DNA
tatttgagaactcgctgcat

SEQ ID NO: 42126 - DNA, 20 bp, synthetic construct
  source 1..20: mol_type = other DNA
gtcgagtggggactgcaggt

SEQ ID NO: 42127 - DNA, 20 bp, synthetic construct
  source 1..20: mol_type = other DNA
gcagctctgaggcccacggt

SEQ ID NO: 42128 - DNA, 20 bp, synthetic construct
  source 1..20: mol_type = other DNA
tcctggtaaattctcctggt

SEQ ID NO: 42129 - DNA, 20 bp, synthetic construct
  source 1..20: mol_type = other DNA
gcagcgaggtatggactccg

SEQ ID NO: 42130 - DNA, 20 bp, synthetic construct
  source 1..20: mol_type = other DNA
ccggttgaataagatggagg

SEQ ID NO: 42131 - DNA, 20 bp, synthetic construct
  source 1..20: mol_type = other DNA
ggacaagtaccctctgatca

SEQ ID NO: 42132 - DNA, 20 bp, synthetic construct
  source 1..20: mol_type = other DNA
aacggagtaccacctcaatg

SEQ ID NO: 42133 - DNA, 20 bp, synthetic construct
  source 1..20: mol_type = other DNA
ttggccagctccttcaggta

SEQ ID NO: 42134 - DNA, 20 bp, synthetic construct
  source 1..20: mol_type = other DNA
cggcaaggactcaagtgtga

SEQ ID NO: 42135 - DNA, 20 bp, synthetic construct
  source 1..20: mol_type = other DNA
ctggccaaggagattggtat

SEQ ID NO: 42136 - DNA, 20 bp, synthetic construct
  source 1..20: mol_type = other DNA
aagatccgtaatctggacaa

SEQ ID NO: 42137 - DNA, 20 bp, synthetic construct
  source 1..20: mol_type = other DNA
gccccggtaaatcttggtga

SEQ ID NO: 42138 - DNA, 20 bp, synthetic construct
  source 1..20: mol_type = other DNA
tcggggggaaccagcaggac

SEQ ID NO: 42139 - DNA, 20 bp, synthetic construct
  source 1..20: mol_type = other DNA
gcctgagctcccgctgccca

SEQ ID NO: 42140 - DNA, 20 bp, synthetic construct
  source 1..20: mol_type = other DNA
cgaactggaggagaagaggg

SEQ ID NO: 42141 - DNA, 20 bp, synthetic construct
  source 1..20: mol_type = other DNA
cggcaggagatgaggcgcca

SEQ ID NO: 42142 - DNA, 20 bp, synthetic construct
  source 1..20: mol_type = other DNA
cgcgccaaggtgagctggac

SEQ ID NO: 42143 - DNA, 20 bp, synthetic construct
  source 1..20: mol_type = other DNA
agaggtaggaatgcagtgac

SEQ ID NO: 42144 - DNA, 20 bp, synthetic construct
  source 1..20: mol_type = other DNA
agtgagctggcatcaaggag

SEQ ID NO: 42145 - DNA, 20 bp, synthetic construct
  source 1..20: mol_type = other DNA
agggatgtgaatggtaatga

SEQ ID NO: 42146 - DNA, 20 bp, synthetic construct
  source 1..20: mol_type = other DNA
cttcaggaatatggtgaggg

SEQ ID NO: 42147 - DNA, 20 bp, synthetic construct
  source 1..20: mol_type = other DNA
ggcaggcatgagtacctgta

SEQ ID NO: 42148 - DNA, 20 bp, synthetic construct
  source 1..20: mol_type = other DNA
gccagcaacgcctcaggtga

SEQ ID NO: 42149 - DNA, 20 bp, synthetic construct
  source 1..20: mol_type = other DNA
gcggcaagaaggaagcgagg

SEQ ID NO: 42150 - DNA, 20 bp, synthetic construct
  source 1..20: mol_type = other DNA
ccagcagaagcaggtgtctc

SEQ ID NO: 42151 - DNA, 20 bp, synthetic construct
  source 1..20: mol_type = other DNA
agcagaggcggtcgtgggtc

SEQ ID NO: 42152 - DNA, 20 bp, synthetic construct
  source 1..20: mol_type = other DNA
gcagggccccaacggcggga

SEQ ID NO: 42153 - DNA, 20 bp, synthetic construct
  source 1..20: mol_type = other DNA
aactacacttcccagacctg

SEQ ID NO: 42154 - DNA, 20 bp, synthetic construct
  source 1..20: mol_type = other DNA
ggagtcaaacttccaggcga

SEQ ID NO: 42155 - DNA, 20 bp, synthetic construct
  source 1..20: mol_type = other DNA
caggaagttgagcctctgga

SEQ ID NO: 42156 - DNA, 20 bp, synthetic construct
  source 1..20: mol_type = other DNA
gctcaaggtgaggggcaccc

SEQ ID NO: 42157 - DNA, 20 bp, synthetic construct
  source 1..20: mol_type = other DNA
aggaggcgtcactttcactt

SEQ ID NO: 42158 - DNA, 20 bp, synthetic construct
  source 1..20: mol_type = other DNA
cactacctgtgcaacgcctg

SEQ ID NO: 42159 - DNA, 20 bp, synthetic construct
  source 1..20: mol_type = other DNA
ggcagtaaaagcatctactg

SEQ ID NO: 42160 - DNA, 20 bp, synthetic construct
  source 1..20: mol_type = other DNA
atgaggttggcccaggcaat

SEQ ID NO: 42161 - DNA, 20 bp, synthetic construct
  source 1..20: mol_type = other DNA
ccgtgcctgacaaagtgctg

SEQ ID NO: 42162 - DNA, 20 bp, synthetic construct
  source 1..20: mol_type = other DNA
gaggctctgaaaatgcaagc

SEQ ID NO: 42163 - DNA, 20 bp, synthetic construct
  source 1..20: mol_type = other DNA
ccactgtgggacggaagaga

SEQ ID NO: 42164 - DNA, 20 bp, synthetic construct
  source 1..20: mol_type = other DNA
tgacggccaagaagaactat

SEQ ID NO: 42165 - DNA, 20 bp, synthetic construct
  source 1..20: mol_type = other DNA
gggcagggcctgcatgtgaa

SEQ ID NO: 42166 - DNA, 20 bp, synthetic construct
  source 1..20: mol_type = other DNA
agccgtgcctgtgttctctg

SEQ ID NO: 42167 - DNA, 20 bp, synthetic construct
  source 1..20: mol_type = other DNA
aatgaggcctgtgcggtccc

SEQ ID NO: 42168 - DNA, 20 bp, synthetic construct
  source 1..20: mol_type = other DNA
agtacctggcagtgtgatat

SEQ ID NO: 42169 - DNA, 20 bp, synthetic construct
  source 1..20: mol_type = other DNA
tcaccttgatagagacaatg

SEQ ID NO: 42170 - DNA, 20 bp, synthetic construct
  source 1..20: mol_type = other DNA
cattaaggccacccagctcc

SEQ ID NO: 42171 - DNA, 20 bp, synthetic construct
  source 1..20: mol_type = other DNA
gaaccagggtacacgcagag

SEQ ID NO: 42172 - DNA, 20 bp, synthetic construct
  source 1..20: mol_type = other DNA
ctccctgccagatatcgagg

SEQ ID NO: 42173 - DNA, 20 bp, synthetic construct
  source 1..20: mol_type = other DNA
gtgaagaggactctctgtcg

SEQ ID NO: 42174 - DNA, 20 bp, synthetic construct
  source 1..20: mol_type = other DNA
cttggagcgccgttccaccg

SEQ ID NO: 42175 - DNA, 20 bp, synthetic construct
  source 1..20: mol_type = other DNA
ctatgcaggatctgcaggaa

SEQ ID NO: 42176 - DNA, 20 bp, synthetic construct
  source 1..20: mol_type = other DNA
caactacctgggtcagcttc

SEQ ID NO: 42177 - DNA, 20 bp, synthetic construct
  source 1..20: mol_type = other DNA
acgccggtcttgatgacgag

SEQ ID NO: 42178 - DNA, 20 bp, synthetic construct
  source 1..20: mol_type = other DNA
gcactgcagtgcaccacaac

SEQ ID NO: 42179 - DNA, 20 bp, synthetic construct
  source 1..20: mol_type = other DNA
atgcagttctgacacactgt

SEQ ID NO: 42180 - DNA, 20 bp, synthetic construct
  source 1..20: mol_type = other DNA
cgcggttggccttggggttc

SEQ ID NO: 42181 - DNA, 20 bp, synthetic construct
  source 1..20: mol_type = other DNA
accagcatcacatgggtaga

SEQ ID NO: 42182 - DNA, 20 bp, synthetic construct
  source 1..20: mol_type = other DNA
gggtgagagctgagcactcc

SEQ ID NO: 42183 - DNA, 20 bp, synthetic construct
  source 1..20: mol_type = other DNA
gaagtacgagtgtgagtagg

SEQ ID NO: 42184 - DNA, 20 bp, synthetic construct
  source 1..20: mol_type = other DNA
ctagagggagaagtaggcaa

SEQ ID NO: 42185 - DNA, 20 bp, synthetic construct
  source 1..20: mol_type = other DNA
caatgagctgaggtataacc

SEQ ID NO: 42186 - DNA, 20 bp, synthetic construct
  source 1..20: mol_type = other DNA
tccggaaagacttgaactca

SEQ ID NO: 42187 - DNA, 20 bp, synthetic construct
  source 1..20: mol_type = other DNA
tcaaactcattacagcgcag

SEQ ID NO: 42188 - DNA, 20 bp, synthetic construct
  source 1..20: mol_type = other DNA
cactcagtttgtgaagtgtt

SEQ ID NO: 42189 - DNA, 20 bp, synthetic construct
  source 1..20: mol_type = other DNA
cctttcctacaagctcgtgg

SEQ ID NO: 42190 - DNA, 20 bp, synthetic construct
  source 1..20: mol_type = other DNA
aatacactgatggctgtgat

SEQ ID NO: 42191 - DNA, 20 bp, synthetic construct
  source 1..20: mol_type = other DNA
ccatgcagctctcgcagaag

SEQ ID NO: 42192 - DNA, 20 bp, synthetic construct
  source 1..20: mol_type = other DNA
tcagtcgcctttccacgggc

SEQ ID NO: 42193 - DNA, 20 bp, synthetic construct
  source 1..20: mol_type = other DNA
tagaggctatctgcagagaa

SEQ ID NO: 42194 - DNA, 20 bp, synthetic construct
  source 1..20: mol_type = other DNA
cgagagcaccgcgggtgagc

SEQ ID NO: 42195 - DNA, 20 bp, synthetic construct
  source 1..20: mol_type = other DNA
gcagaggaagtggaggaaga

SEQ ID NO: 42196 - DNA, 20 bp, synthetic construct
  source 1..20: mol_type = other DNA
actaaagaacagcaacgact

SEQ ID NO: 42197 - DNA, 20 bp, synthetic construct
  source 1..20: mol_type = other DNA
aaagacgcgggacgactctg

SEQ ID NO: 42198 - DNA, 20 bp, synthetic construct
  source 1..20: mol_type = other DNA
ttagaaggtccgggaaatag

SEQ ID NO: 42199 - DNA, 20 bp, synthetic construct
  source 1..20: mol_type = other DNA
gcttcatcagcaccttcatg

SEQ ID NO: 42200 - DNA, 20 bp, synthetic construct
  source 1..20: mol_type = other DNA
tcaccgagcaacagctccgg

SEQ ID NO: 42201 - DNA, 20 bp, synthetic construct
  source 1..20: mol_type = other DNA
ggcggatgaagtaggacttc

SEQ ID NO: 42202 - DNA, 20 bp, synthetic construct
  source 1..20: mol_type = other DNA
aggcggaggcatccttacca

SEQ ID NO: 42203 - DNA, 20 bp, synthetic construct
  source 1..20: mol_type = other DNA
tcacaaacaatgcaaagatc

SEQ ID NO: 42204 - DNA, 20 bp, synthetic construct
  source 1..20: mol_type = other DNA
caagtggggcttcggcgcca

SEQ ID NO: 42205 - DNA, 20 bp, synthetic construct
  source 1..20: mol_type = other DNA
ctactcggagggaagggtga

SEQ ID NO: 42206 - DNA, 20 bp, synthetic construct
  source 1..20: mol_type = other DNA
actcaaacaccaggcagatg

SEQ ID NO: 42207 - DNA, 20 bp, synthetic construct
  source 1..20: mol_type = other DNA
ccaattctcatcagtgacac

SEQ ID NO: 42208 - DNA, 20 bp, synthetic construct
  source 1..20: mol_type = other DNA
tccagtgcctcctcgttgat

SEQ ID NO: 42209 - DNA, 20 bp, synthetic construct
  source 1..20: mol_type = other DNA
tgagggtcgcgccggccgga

SEQ ID NO: 42210 - DNA, 20 bp, synthetic construct
  source 1..20: mol_type = other DNA
caactcactgtggacttgga

SEQ ID NO: 42211 - DNA, 20 bp, synthetic construct
  source 1..20: mol_type = other DNA
cctggatctttactacactg

SEQ ID NO: 42212 - DNA, 20 bp, synthetic construct
  source 1..20: mol_type = other DNA
tggctcctaccagttctcca

SEQ ID NO: 42213 - DNA, 20 bp, synthetic construct
  source 1..20: mol_type = other DNA
gctgctctcgcggatgagga

SEQ ID NO: 42214 - DNA, 20 bp, synthetic construct
  source 1..20: mol_type = other DNA
ctctctgcagctaaaaggga

SEQ ID NO: 42215 - DNA, 20 bp, synthetic construct
  source 1..20: mol_type = other DNA
cagcagtgtcccacagcccc

SEQ ID NO: 42216 - DNA, 20 bp, synthetic construct
  source 1..20: mol_type = other DNA
gcatcatagatgccagacaa

SEQ ID NO: 42217 - DNA, 20 bp, synthetic construct
  source 1..20: mol_type = other DNA
gtgggccaaggctcatggta

SEQ ID NO: 42218 - DNA, 20 bp, synthetic construct
  source 1..20: mol_type = other DNA
gccagtgacaccatcatgta

SEQ ID NO: 42219 - DNA, 20 bp, synthetic construct
  source 1..20: mol_type = other DNA
gatggtaagcctcatcacag

SEQ ID NO: 42220 - DNA, 20 bp, synthetic construct
  source 1..20: mol_type = other DNA
ggtcggaccagaagaagtcg

SEQ ID NO: 42221 - DNA, 20 bp, synthetic construct
  source 1..20: mol_type = other DNA
ggctccggcatgtgcaaggc

SEQ ID NO: 42222 - DNA, 20 bp, synthetic construct
  source 1..20: mol_type = other DNA
tgccatgagtgcaacttgcc

SEQ ID NO: 42223 - DNA, 20 bp, synthetic construct
  source 1..20: mol_type = other DNA
ctgtgatgtggcgatctaca

SEQ ID NO: 42224 - DNA, 20 bp, synthetic construct
  source 1..20: mol_type = other DNA
ttctgatgaaatcagtaaca

SEQ ID NO: 42225 - DNA, 20 bp, synthetic construct
  source 1..20: mol_type = other DNA
gctggcccagctgagccccc

SEQ ID NO: 42226 - DNA, 20 bp, synthetic construct
  source 1..20: mol_type = other DNA
caagcggcagcagcttagct

SEQ ID NO: 42227 - DNA, 20 bp, synthetic construct
  source 1..20: mol_type = other DNA
cgggcctgcaggtgcagatg

SEQ ID NO: 42228 - DNA, 20 bp, synthetic construct
  source 1..20: mol_type = other DNA
tctgtagagaatagtgacag

SEQ ID NO: 42229 - DNA, 20 bp, synthetic construct
  source 1..20: mol_type = other DNA
cttgggcagacctggaggac

SEQ ID NO: 42230 - DNA, 20 bp, synthetic construct
  source 1..20: mol_type = other DNA
gctaaagctcagctctgtga

SEQ ID NO: 42231 - DNA, 20 bp, synthetic construct
  source 1..20: mol_type = other DNA
ggtgtggaagaagggggtgg

SEQ ID NO: 42232 - DNA, 20 bp, synthetic construct
  source 1..20: mol_type = other DNA
caccagtcaaaccaagcacg

SEQ ID NO: 42233 - DNA, 20 bp, synthetic construct
  source 1..20: mol_type = other DNA
gtacatggccggggtgttga

SEQ ID NO: 42234 - DNA, 20 bp, synthetic construct
  source 1..20: mol_type = other DNA
tttaccaatgtcactcagca

SEQ ID NO: 42235 - DNA, 20 bp, synthetic construct
  source 1..20: mol_type = other DNA
gccttccacgtcttgggatc

SEQ ID NO: 42236 - DNA, 20 bp, synthetic construct
  source 1..20: mol_type = other DNA
tccaccattgccacctgcgg

SEQ ID NO: 42237 - DNA, 20 bp, synthetic construct
  source 1..20: mol_type = other DNA
gcaagtcgaccacctcaagc

SEQ ID NO: 42238 - DNA, 20 bp, synthetic construct
  source 1..20: mol_type = other DNA
gccgtcttcccctccatcgt

SEQ ID NO: 42239 - DNA, 20 bp, synthetic construct
  source 1..20: mol_type = other DNA
accactggtagtgaggaata

SEQ ID NO: 42240 - DNA, 20 bp, synthetic construct
  source 1..20: mol_type = other DNA
aagtggagcgcaagcggctg

SEQ ID NO: 42241 - DNA, 20 bp, synthetic construct
  source 1..20: mol_type = other DNA
ttctgctcggagctgcggcg

SEQ ID NO: 42242 - DNA, 20 bp, synthetic construct
  source 1..20: mol_type = other DNA
cgctgcttccaggaatgact

SEQ ID NO: 42243 - DNA, 20 bp, synthetic construct
  source 1..20: mol_type = other DNA
atgggcaaggtacgagtggg

SEQ ID NO: 42244 - DNA, 20 bp, synthetic construct
  source 1..20: mol_type = other DNA
agcagaaacggcgcgagcag

SEQ ID NO: 42245 - DNA, 20 bp, synthetic construct
  source 1..20: mol_type = other DNA
tcacggctccttcctcatcc

SEQ ID NO: 42246 - DNA, 20 bp, synthetic construct
  source 1..20: mol_type = other DNA
ccccctgcagctggagccct

SEQ ID NO: 42247 - DNA, 20 bp, synthetic construct
  source 1..20: mol_type = other DNA
gtcgaacatcaagtagaaaa

SEQ ID NO: 42248 - DNA, 20 bp, synthetic construct
  source 1..20: mol_type = other DNA
gccagcgtatcgtagaggac

SEQ ID NO: 42249 - DNA, 20 bp, synthetic construct
  source 1..20: mol_type = other DNA
gtttgctggctgactccacc

SEQ ID NO: 42250 - DNA, 20 bp, synthetic construct
  source 1..20: mol_type = other DNA
gcgcaacaagaaggtcccgt

SEQ ID NO: 42251 - DNA, 20 bp, synthetic construct
  source 1..20: mol_type = other DNA
gagcacctctttgcccaggt

SEQ ID NO: 42252 - DNA, 20 bp, synthetic construct
  source 1..20: mol_type = other DNA
caccaccgctctcggttccg

SEQ ID NO: 42253 - DNA, 20 bp, synthetic construct
  source 1..20: mol_type = other DNA
tagccagaccgcagtgcaag

SEQ ID NO: 42254 - DNA, 20 bp, synthetic construct
  source 1..20: mol_type = other DNA
tcccaggcatgtcagccacg

SEQ ID NO: 42255 - DNA, 20 bp, synthetic construct
  source 1..20: mol_type = other DNA
tccaggtcggtctactgcta

SEQ ID NO: 42256 - DNA, 20 bp, synthetic construct
  source 1..20: mol_type = other DNA
tcacactttagttttccgtt

SEQ ID NO: 42257 - DNA, 20 bp, synthetic construct
  source 1..20: mol_type = other DNA
ttatgggcgaagtcctttgg

SEQ ID NO: 42258 - DNA, 20 bp, synthetic construct
  source 1..20: mol_type = other DNA
cgccagtgcctgcgctcgct

SEQ ID NO: 42259 - DNA, 20 bp, synthetic construct
  source 1..20: mol_type = other DNA
ttctcacctccagcagcagg

SEQ ID NO: 42260 - DNA, 20 bp, synthetic construct
  source 1..20: mol_type = other DNA
ccaggtggcccagaccaccg

SEQ ID NO: 42261 - DNA, 20 bp, synthetic construct
  source 1..20: mol_type = other DNA
tgtcctggtcccagttcaac

SEQ ID NO: 42262 - DNA, 20 bp, synthetic construct
  source 1..20: mol_type = other DNA
taaggccacccagctcctgg

SEQ ID NO: 42263 - DNA, 20 bp, synthetic construct
  source 1..20: mol_type = other DNA
acctgcaggccgcgagcccg

SEQ ID NO: 42264 - DNA, 20 bp, synthetic construct
  source 1..20: mol_type = other DNA
actgagtacatggccaaggt

SEQ ID NO: 42265 - DNA, 20 bp, synthetic construct
  source 1..20: mol_type = other DNA
aatctcaacacatttgattc

SEQ ID NO: 42266 - DNA, 20 bp, synthetic construct
  source 1..20: mol_type = other DNA
gcgagagcaccgcgggtgag

SEQ ID NO: 42267 - DNA, 20 bp, synthetic construct
  source 1..20: mol_type = other DNA
atgcctgggcgtccatcctg

SEQ ID NO: 42268 - DNA, 20 bp, synthetic construct
  source 1..20: mol_type = other DNA
gagcaggcgaccgcgcagcg

SEQ ID NO: 42269 - DNA, 20 bp, synthetic construct
  source 1..20: mol_type = other DNA
gccttccttcttcatagtca

SEQ ID NO: 42270 - DNA, 20 bp, synthetic construct
  source 1..20: mol_type = other DNA
cccgccggcagcagctgggc

SEQ ID NO: 42271 - DNA, 20 bp, synthetic construct
  source 1..20: mol_type = other DNA
gtattcttagggccctcctc

SEQ ID NO: 42272 - DNA, 20 bp, synthetic construct
  source 1..20: mol_type = other DNA
tatttcctggatgcgaagac

SEQ ID NO: 42273 - DNA, 20 bp, synthetic construct
  source 1..20: mol_type = other DNA
gctcagcgcgcagtaccagc

SEQ ID NO: 42274 - DNA, 20 bp, synthetic construct
  source 1..20: mol_type = other DNA
cccactgaccttctccaggg

SEQ ID NO: 42275 - DNA, 20 bp, synthetic construct
  source 1..20: mol_type = other DNA
tgtcggtgcgcgagctgaac

SEQ ID NO: 42276 - DNA, 20 bp, synthetic construct
  source 1..20: mol_type = other DNA
tcagggacacagggcacggg

SEQ ID NO: 42277 - DNA, 20 bp, synthetic construct
  source 1..20: mol_type = other DNA
ctagagattcattccggtag

SEQ ID NO: 42278 - DNA, 20 bp, synthetic construct
  source 1..20: mol_type = other DNA
ggacgccggtcttgatgacg

SEQ ID NO: 42279 - DNA, 20 bp, synthetic construct
  source 1..20: mol_type = other DNA
ttgggaaggacaccattccg

SEQ ID NO: 42280 - DNA, 20 bp, synthetic construct
  source 1..20: mol_type = other DNA
tgtgctgcaagacacaaggg

SEQ ID NO: 42281 - DNA, 20 bp, synthetic construct
  source 1..20: mol_type = other DNA
ttcagtttcaccacctggga

SEQ ID NO: 42282 - DNA, 20 bp, synthetic construct
  source 1..20: mol_type = other DNA
ctcgtagctcgccacactgt

SEQ ID NO: 42283 - DNA, 20 bp, synthetic construct
  source 1..20: mol_type = other DNA
aggacaaagcctgcaggtac

SEQ ID NO: 42284 - DNA, 20 bp, synthetic construct
  source 1..20: mol_type = other DNA
ggtctagagcagcgagaggg

SEQ ID NO: 42285 - DNA, 20 bp, synthetic construct
  source 1..20: mol_type = other DNA
gcaaaggtagctctgccgag

SEQ ID NO: 42286 - DNA, 20 bp, synthetic construct
  source 1..20: mol_type = other DNA
ccagtggtggtgatcgttca

SEQ ID NO: 42287 - DNA, 20 bp, synthetic construct
  source 1..20: mol_type = other DNA
ccctttctacggctcaaccc

SEQ ID NO: 42288 - DNA, 20 bp, synthetic construct
  source 1..20: mol_type = other DNA
catggctccgacgctggggg

SEQ ID NO: 42289 - DNA, 20 bp, synthetic construct
  source 1..20: mol_type = other DNA
atcctgcacccactaaaatc

SEQ ID NO: 42290 - DNA, 20 bp, synthetic construct
  source 1..20: mol_type = other DNA
ctgtgtgaatggcccagctc

SEQ ID NO: 42291 - DNA, 20 bp, synthetic construct
  source 1..20: mol_type = other DNA
gtgccaattctgcgaggagg

SEQ ID NO: 42292 - DNA, 20 bp, synthetic construct
  source 1..20: mol_type = other DNA
ccatcatggcctgctggacc

SEQ ID NO: 42293 - DNA, 20 bp, synthetic construct
  source 1..20: mol_type = other DNA
caagcaggacaacaagaaaa

SEQ ID NO: 42294 - DNA, 20 bp, synthetic construct
  source 1..20: mol_type = other DNA
ccgccatgcccgccagcttc

SEQ ID NO: 42295 - DNA, 20 bp, synthetic construct
  source 1..20: mol_type = other DNA
gtgcactgccacagactgcc

SEQ ID NO: 42296 - DNA, 20 bp, synthetic construct
  source 1..20: mol_type = other DNA
tgcctggggtcaccttgcag

SEQ ID NO: 42297 - DNA, 20 bp, synthetic construct
  source 1..20: mol_type = other DNA
gaacagctcatcgtccctgc

SEQ ID NO: 42298 - DNA, 20 bp, synthetic construct
  source 1..20: mol_type = other DNA
tggatagcaacgtacatggc

SEQ ID NO: 42299 - DNA, 20 bp, synthetic construct
  source 1..20: mol_type = other DNA
tcttcaggatgttggtggaa

SEQ ID NO: 42300 - DNA, 20 bp, synthetic construct
  source 1..20: mol_type = other DNA
tcgagaccccaagaccgagc

SEQ ID NO: 42301 - DNA, 20 bp, synthetic construct
  source 1..20: mol_type = other DNA
aggaactcctggagccaagg

SEQ ID NO: 42302 - DNA, 20 bp, synthetic construct
  source 1..20: mol_type = other DNA
aaccactgggcaggtgggtg

SEQ ID NO: 42303 - DNA, 20 bp, synthetic construct
  source 1..20: mol_type = other DNA
cagggccagctctgtccact

SEQ ID NO: 42304 - DNA, 20 bp, synthetic construct
  source 1..20: mol_type = other DNA
tcccggctcagacgctcctg

SEQ ID NO: 42305 - DNA, 20 bp, synthetic construct
  source 1..20: mol_type = other DNA
agcagcgcttcggggccatg

SEQ ID NO: 42306 - DNA, 20 bp, synthetic construct
  source 1..20: mol_type = other DNA
attgggccatgtttctctgc

SEQ ID NO: 42307 - DNA, 20 bp, synthetic construct
  source 1..20: mol_type = other DNA
tgcttgcccgcgtgcttcca

SEQ ID NO: 42308 - DNA, 20 bp, synthetic construct
  source 1..20: mol_type = other DNA
atcctcatccgcatcctcac

SEQ ID NO: 42309 - DNA, 20 bp, synthetic construct
  source 1..20: mol_type = other DNA
catgcacctggatgcccttc

SEQ ID NO: 42310 - DNA, 20 bp, synthetic construct
  source 1..20: mol_type = other DNA
tacaagatgctgaatggtac

SEQ ID NO: 42311 - DNA, 20 bp, synthetic construct
  source 1..20: mol_type = other DNA
aactccaattttatgaggac

SEQ ID NO: 42312 - DNA, 20 bp, synthetic construct
  source 1..20: mol_type = other DNA
gccgcatatgccctaggaaa

SEQ ID NO: 42313 - DNA, 20 bp, synthetic construct
  source 1..20: mol_type = other DNA
ctccttgaaggggaactgca

SEQ ID NO: 42314 - DNA, 20 bp, synthetic construct
  source 1..20: mol_type = other DNA
cagaatctaaagggcagaag

SEQ ID NO: 42315 - DNA, 20 bp, synthetic construct
  source 1..20: mol_type = other DNA
ccgggcagagacattgccat

SEQ ID NO: 42316 - DNA, 20 bp, synthetic construct
  source 1..20: mol_type = other DNA
attgttccttgaggagaaag

SEQ ID NO: 42317 - DNA, 20 bp, synthetic construct
  source 1..20: mol_type = other DNA
gcagaagaaggcagagcacc

SEQ ID NO: 42318 - DNA, 20 bp, synthetic construct
  source 1..20: mol_type = other DNA
ttcattagcattcggccttg

SEQ ID NO: 42319 - DNA, 20 bp, synthetic construct
  source 1..20: mol_type = other DNA
gctggccccagactttgttg

SEQ ID NO: 42320 - DNA, 20 bp, synthetic construct
  source 1..20: mol_type = other DNA
tcatccaggtgagggcctgg

SEQ ID NO: 42321 - DNA, 20 bp, synthetic construct
  source 1..20: mol_type = other DNA
tgccacctgtggatacaggc

SEQ ID NO: 42322 - DNA, 20 bp, synthetic construct
  source 1..20: mol_type = other DNA
tttcccaggaactatgaaga

SEQ ID NO: 42323 - DNA, 20 bp, synthetic construct
  source 1..20: mol_type = other DNA
gctggagacagaaagaagaa

SEQ ID NO: 42324 - DNA, 20 bp, synthetic construct
  source 1..20: mol_type = other DNA
gacctgtggagttcaggaaa

SEQ ID NO: 42325 - DNA, 20 bp, synthetic construct
  source 1..20: mol_type = other DNA
agcatcaagtgcgtggtggt

SEQ ID NO: 42326 - DNA, 20 bp, synthetic construct
  source 1..20: mol_type = other DNA
taaaagccctaacacacgga

SEQ ID NO: 42327 - DNA, 20 bp, synthetic construct
  source 1..20: mol_type = other DNA
gcggttctgttcccgagtgc

SEQ ID NO: 42328 - DNA, 20 bp, synthetic construct
  source 1..20: mol_type = other DNA
gagactgaccagccttcaga

SEQ ID NO: 42329 - DNA, 20 bp, synthetic construct
  source 1..20: mol_type = other DNA
gtctgtaccagcatcgggtg

SEQ ID NO: 42330 - DNA, 20 bp, synthetic construct
  source 1..20: mol_type = other DNA
gttacttggcttaacccttc

SEQ ID NO: 42331 - DNA, 20 bp, synthetic construct
  source 1..20: mol_type = other DNA
gctgcaggaggcgcagcggc

SEQ ID NO: 42332 - DNA, 20 bp, synthetic construct
  source 1..20: mol_type = other DNA
aaaaactcactggagctctg

SEQ ID NO: 42333 - DNA, 20 bp, synthetic construct
  source 1..20: mol_type = other DNA
actgcacccacttgccgctc

SEQ ID NO: 42334 - DNA, 20 bp, synthetic construct
  source 1..20: mol_type = other DNA
cagcccggagccgagtcgga

SEQ ID NO: 42335 - DNA, 20 bp, synthetic construct
  source 1..20: mol_type = other DNA
acaggttgtgggacagcacc

SEQ ID NO: 42336 - DNA, 20 bp, synthetic construct
  source 1..20: mol_type = other DNA
tcagcaggccagcaggtagg

SEQ ID NO: 42337 - DNA, 20 bp, synthetic construct
  source 1..20: mol_type = other DNA
gtcgttctgtaggaaatggg

SEQ ID NO: 42338 - DNA, 20 bp, synthetic construct
  source 1..20: mol_type = other DNA
ggcctaaaagacataaaata

SEQ ID NO: 42339 - DNA, 20 bp, synthetic construct
  source 1..20: mol_type = other DNA
gtacgcaggccccatggagc

SEQ ID NO: 42340 - DNA, 20 bp, synthetic construct
  source 1..20: mol_type = other DNA
ggggccgccattacatccac

SEQ ID NO: 42341 - DNA, 20 bp, synthetic construct
  source 1..20: mol_type = other DNA
tccagcgacccacaatccca

SEQ ID NO: 42342 - DNA, 20 bp, synthetic construct
  source 1..20: mol_type = other DNA
agtggattgaaagccaagca

SEQ ID NO: 42343 - DNA, 20 bp, synthetic construct
  source 1..20: mol_type = other DNA
ccttaccaatctcctagctc

SEQ ID NO: 42344 - DNA, 20 bp, synthetic construct
  source 1..20: mol_type = other DNA
gtgatggagtacctcaacgg

SEQ ID NO: 42345 - DNA, 20 bp, synthetic construct
  source 1..20: mol_type = other DNA
atgagccgcatttaccccaa

SEQ ID NO: 42346 - DNA, 20 bp, synthetic construct
  source 1..20: mol_type = other DNA
agatacaaaaaaggaatcag

SEQ ID NO: 42347 - DNA, 20 bp, synthetic construct
  source 1..20: mol_type = other DNA
ttggggaagtaaaagctgtg

SEQ ID NO: 42348 - DNA, 20 bp, synthetic construct
  source 1..20: mol_type = other DNA
ctgtaaacaagaggggcaca

SEQ ID NO: 42349 - DNA, 20 bp, synthetic construct
  source 1..20: mol_type = other DNA
ctggctcaggggtgggtagg

SEQ ID NO: 42350 - DNA, 20 bp, synthetic construct
  source 1..20: mol_type = other DNA
tttcctatgcccgggaacca

SEQ ID NO: 42351 - DNA, 20 bp, synthetic construct
  source 1..20: mol_type = other DNA
ggttctcatgctgaatggtg

SEQ ID NO: 42352 - DNA, 20 bp, synthetic construct
  source 1..20: mol_type = other DNA
gggcacaccttgcattggta

SEQ ID NO: 42353 - DNA, 20 bp, synthetic construct
  source 1..20: mol_type = other DNA
ctggaccaaggagcattgtg

SEQ ID NO: 42354 - DNA, 20 bp, synthetic construct
  source 1..20: mol_type = other DNA
tggcaaagtccagactgtgg

SEQ ID NO: 42355 - DNA, 20 bp, synthetic construct
  source 1..20: mol_type = other DNA
ccgcacatgttgcactcaaa

SEQ ID NO: 42356 - DNA, 20 bp, synthetic construct
  source 1..20: mol_type = other DNA
gtccagcttaacgcacttca

SEQ ID NO: 42357 - DNA, 20 bp, synthetic construct
  source 1..20: mol_type = other DNA
gcccactcaccaggtcactg

SEQ ID NO: 42358 - DNA, 20 bp, synthetic construct
  source 1..20: mol_type = other DNA
tgatgccaagtttcttctcc

SEQ ID NO: 42359 - DNA, 20 bp, synthetic construct
  source 1..20: mol_type = other DNA
gggttccccaccagaaaatg

SEQ ID NO: 42360 - DNA, 20 bp, synthetic construct
  source 1..20: mol_type = other DNA
gaaataggaaggtcactcct

SEQ ID NO: 42361 - DNA, 20 bp, synthetic construct
  source 1..20: mol_type = other DNA
agaggtactcaaatgaggct

SEQ ID NO: 42362 - DNA, 20 bp, synthetic construct
  source 1..20: mol_type = other DNA
gtcagacgtctggagcttcg

SEQ ID NO: 42363 - DNA, 20 bp, synthetic construct
  source 1..20: mol_type = other DNA
tgtccattgagaacctggtg

SEQ ID NO: 42364 - DNA, 20 bp, synthetic construct
  source 1..20: mol_type = other DNA
acctgtttatgcacatctgt

SEQ ID NO: 42365 - DNA, 20 bp, synthetic construct
  source 1..20: mol_type = other DNA
gccccggttgctctgcactt

SEQ ID NO: 42366 - DNA, 20 bp, synthetic construct
  source 1..20: mol_type = other DNA
gggctaccagggctaccccg

SEQ ID NO: 42367 - DNA, 20 bp, synthetic construct
  source 1..20: mol_type = other DNA
ttcctggagaaaagagtaat

SEQ ID NO: 42368 - DNA, 20 bp, synthetic construct
  source 1..20: mol_type = other DNA
cctcaccgagcaacagctcc

SEQ ID NO: 42369 - DNA, 20 bp, synthetic construct
  source 1..20: mol_type = other DNA
ggtactccatgccctgcggg

SEQ ID NO: 42370 - DNA, 20 bp, synthetic construct
  source 1..20: mol_type = other DNA
gagcggcagctcctggcgcc

SEQ ID NO: 42371 - DNA, 20 bp, synthetic construct
  source 1..20: mol_type = other DNA
cgtggtgtcagctatggccc

SEQ ID NO: 42372 - DNA, 20 bp, synthetic construct
  source 1..20: mol_type = other DNA
ctgtcaggagtcggccaggt

SEQ ID NO: 42373 - DNA, 20 bp, synthetic construct
  source 1..20: mol_type = other DNA
cggtgaggtccccactgacc

SEQ ID NO: 42374 - DNA, 20 bp, synthetic construct
  source 1..20: mol_type = other DNA
ttacatctccagcgaaggtg

SEQ ID NO: 42375 - DNA, 20 bp, synthetic construct
  source 1..20: mol_type = other DNA
ccactactttgaaagacacc

SEQ ID NO: 42376 - DNA, 20 bp, synthetic construct
  source 1..20: mol_type = other DNA
gtggagctctgtgggcgggt

SEQ ID NO: 42377 - DNA, 20 bp, synthetic construct
  source 1..20: mol_type = other DNA
ggccgggaaaagtgattcga

SEQ ID NO: 42378 - DNA, 20 bp, synthetic construct
  source 1..20: mol_type = other DNA
caagaagcagatcctgcgca

SEQ ID NO: 42379 - DNA, 20 bp, synthetic construct
  source 1..20: mol_type = other DNA
tggaggtgaggaggccacag

SEQ ID NO: 42380 - DNA, 20 bp, synthetic construct
  source 1..20: mol_type = other DNA
caaaggtagctctgccgagt

SEQ ID NO: 42381 - DNA, 20 bp, synthetic construct
  source 1..20: mol_type = other DNA
ccaaccaggcctggcatgcg

SEQ ID NO: 42382 - DNA, 20 bp, synthetic construct
  source 1..20: mol_type = other DNA
cggagctgggccattcacac

SEQ ID NO: 42383 - DNA, 20 bp, synthetic construct
  source 1..20: mol_type = other DNA
ctcaccgatgagggagttga

SEQ ID NO: 42384 - DNA, 20 bp, synthetic construct
  source 1..20: mol_type = other DNA
acaggcagagctggaaggac

SEQ ID NO: 42385 - DNA, 20 bp, synthetic construct
  source 1..20: mol_type = other DNA
caagggattaatagtatggc

SEQ ID NO: 42386 - DNA, 20 bp, synthetic construct
  source 1..20: mol_type = other DNA
acctgcagaattgttggcca

SEQ ID NO: 42387 - DNA, 20 bp, synthetic construct
  source 1..20: mol_type = other DNA
cagttgatctcccgaaacaa

SEQ ID NO: 42388 - DNA, 20 bp, synthetic construct
  source 1..20: mol_type = other DNA
cgtgatccaggaagagcacc

SEQ ID NO: 42389 - DNA, 20 bp, synthetic construct
  source 1..20: mol_type = other DNA
caccgtgctggccaagacgc

SEQ ID NO: 42390 - DNA, 20 bp, synthetic construct
  source 1..20: mol_type = other DNA
tgcagtccatcatccaggtg

SEQ ID NO: 42391 - DNA, 20 bp, synthetic construct
  source 1..20: mol_type = other DNA
cgccgcagtgcgagttcctg

SEQ ID NO: 42392 - DNA, 20 bp, synthetic construct
  source 1..20: mol_type = other DNA
ggcaaggagtgggtctgcgg

SEQ ID NO: 42393 - DNA, 20 bp, synthetic construct
  source 1..20: mol_type = other DNA
agcccagagctccagtccga

SEQ ID NO: 42394 - DNA, 20 bp, synthetic construct
  source 1..20: mol_type = other DNA
ccgtgccagtccccacagca

SEQ ID NO: 42395 - DNA, 20 bp, synthetic construct
  source 1..20: mol_type = other DNA
gcatgctgccaagcatggct

SEQ ID NO: 42396 - DNA, 20 bp, synthetic construct
  source 1..20: mol_type = other DNA
atcaacagcaacagcaggtg

SEQ ID NO: 42397 - DNA, 20 bp, synthetic construct
  source 1..20: mol_type = other DNA
tttccgggatctgaatcaca

SEQ ID NO: 42398 - DNA, 20 bp, synthetic construct
  source 1..20: mol_type = other DNA
tcataaaattggagtttctg

SEQ ID NO: 42399 - DNA, 20 bp, synthetic construct
  source 1..20: mol_type = other DNA
gtggaggtgaggaggccaca

SEQ ID NO: 42400 - DNA, 20 bp, synthetic construct
  source 1..20: mol_type = other DNA
ctccacgtccagcgcggtaa

SEQ ID NO: 42401 - DNA, 20 bp, synthetic construct
  source 1..20: mol_type = other DNA
gcagcatgttggggatcccg

SEQ ID NO: 42402 - DNA, 20 bp, synthetic construct
  source 1..20: mol_type = other DNA
gcaggtgagtcacggctgca

SEQ ID NO: 42403 - DNA, 20 bp, synthetic construct
  source 1..20: mol_type = other DNA
gacggccctccagcagaagc

SEQ ID NO: 42404 - DNA, 20 bp, synthetic construct
  source 1..20: mol_type = other DNA
tatctcatcattggcatatg

SEQ ID NO: 42405 - DNA, 20 bp, synthetic construct
  source 1..20: mol_type = other DNA
gggagtccgggtggacgtac

SEQ ID NO: 42406 - DNA, 20 bp, synthetic construct
  source 1..20: mol_type = other DNA
ccgcagctgcagctgctgag

SEQ ID NO: 42407 - DNA, 20 bp, synthetic construct
  source 1..20: mol_type = other DNA
ggcacggtaagaggcgagac

SEQ ID NO: 42408 - DNA, 20 bp, synthetic construct
  source 1..20: mol_type = other DNA
agcccgaagcagaccgagtg

SEQ ID NO: 42409 - DNA, 20 bp, synthetic construct
  source 1..20: mol_type = other DNA
atttcaggtggccaggagat

SEQ ID NO: 42410 - DNA, 20 bp, synthetic construct
  source 1..20: mol_type = other DNA
tagagcactgcagtgagggc

SEQ ID NO: 42411 - DNA, 20 bp, synthetic construct
  source 1..20: mol_type = other DNA
gcggagctggcggggagtcg

SEQ ID NO: 42412 - DNA, 20 bp, synthetic construct
  source 1..20: mol_type = other DNA
atcaccgagtccggccgcat

SEQ ID NO: 42413 - DNA, 20 bp, synthetic construct
  source 1..20: mol_type = other DNA
ggaaggtgaagctctcctgt

SEQ ID NO: 42414 - DNA, 20 bp, synthetic construct
  source 1..20: mol_type = other DNA
gaacgatcaccaccactggc

SEQ ID NO: 42415 - DNA, 20 bp, synthetic construct
  source 1..20: mol_type = other DNA
acctgaggacgcactccggt

SEQ ID NO: 42416 - DNA, 20 bp, synthetic construct
  source 1..20: mol_type = other DNA
cgagagagtgggcaggtaca

SEQ ID NO: 42417 - DNA, 20 bp, synthetic construct
  source 1..20: mol_type = other DNA
ggtgagtgggcgcctccccg

SEQ ID NO: 42418 - DNA, 20 bp, synthetic construct
  source 1..20: mol_type = other DNA
atcaagcgtgctgaccggcg

SEQ ID NO: 42419 - DNA, 20 bp, synthetic construct
  source 1..20: mol_type = other DNA
actcaccgatgagggagttg

SEQ ID NO: 42420 - DNA, 20 bp, synthetic construct
  source 1..20: mol_type = other DNA
cagtctgcagccaggagagc

SEQ ID NO: 42421 - DNA, 20 bp, synthetic construct
  source 1..20: mol_type = other DNA
tggcgtgtgggatctctggc

SEQ ID NO: 42422 - DNA, 20 bp, synthetic construct
  source 1..20: mol_type = other DNA
cagcgtcttggccagcacgg

SEQ ID NO: 42423 - DNA, 20 bp, synthetic construct
  source 1..20: mol_type = other DNA
cagttccttgcgcagggcca

SEQ ID NO: 42424 - DNA, 20 bp, synthetic construct
  source 1..20: mol_type = other DNA
ccaaggggcagggaaagacg

SEQ ID NO: 42425 - DNA, 20 bp, synthetic construct
  source 1..20: mol_type = other DNA
ccaaggctgtgattcagtct

SEQ ID NO: 42426 - DNA, 20 bp, synthetic construct
  source 1..20: mol_type = other DNA
gaaggtgaagctctcctgtg

SEQ ID NO: 42427 - DNA, 20 bp, synthetic construct
  source 1..20: mol_type = other DNA
caggaactggtgaaagctaa

SEQ ID NO: 42428 - DNA, 20 bp, synthetic construct
  source 1..20: mol_type = other DNA
gcccagatgaaaacgagaag

SEQ ID NO: 42429 - DNA, 20 bp, synthetic construct
  source 1..20: mol_type = other DNA
tcagccacatagtatcgctt

SEQ ID NO: 42430 - DNA, 20 bp, synthetic construct
  source 1..20: mol_type = other DNA
tgaggatccaaggtgaggcg

SEQ ID NO: 42431 - DNA, 20 bp, synthetic construct
  source 1..20: mol_type = other DNA
ggtgcctcttcctcctcatt

SEQ ID NO: 42432 - DNA, 20 bp, synthetic construct
  source 1..20: mol_type = other DNA
gtcctccagctcctatatga

SEQ ID NO: 42433 - DNA, 20 bp, synthetic construct
  source 1..20: mol_type = other DNA
catccacagctaccgaggta

SEQ ID NO: 42434 - DNA, 20 bp, synthetic construct
  source 1..20: mol_type = other DNA
acttcctccagcagcctcgg

SEQ ID NO: 42435 - DNA, 20 bp, synthetic construct
  source 1..20: mol_type = other DNA
cgagtgagtgctcaggcctg

SEQ ID NO: 42436 - DNA, 20 bp, synthetic construct
  source 1..20: mol_type = other DNA
agcagtaccgcgtggtgagt

SEQ ID NO: 42437 - DNA, 20 bp, synthetic construct
  source 1..20: mol_type = other DNA
agcgcttttcaaaatgtgtg

SEQ ID NO: 42438 - DNA, 20 bp, synthetic construct
  source 1..20: mol_type = other DNA
ctccagtgcctcctcgttga

SEQ ID NO: 42439 - DNA, 20 bp, synthetic construct
  source 1..20: mol_type = other DNA
gaggaagatcctcatcaagg

SEQ ID NO: 42440 - DNA, 20 bp, synthetic construct
  source 1..20: mol_type = other DNA
tcttccccagcgaccacttt

SEQ ID NO: 42441 - DNA, 20 bp, synthetic construct
  source 1..20: mol_type = other DNA
tctgttatccaatacctaca

SEQ ID NO: 42442 - DNA, 20 bp, synthetic construct
  source 1..20: mol_type = other DNA
aaaggaagtggccgatcttg

SEQ ID NO: 42443 - DNA, 20 bp, synthetic construct
  source 1..20: mol_type = other DNA
tcaccttggtgctgcaagtg

SEQ ID NO: 42444 - DNA, 20 bp, synthetic construct
  source 1..20: mol_type = other DNA
ggcccggatggcgcgagagc

SEQ ID NO: 42445 - DNA, 20 bp, synthetic construct
  source 1..20: mol_type = other DNA
gggagtggatacggcagtgc

SEQ ID NO: 42446 - DNA, 20 bp, synthetic construct
  source 1..20: mol_type = other DNA
atcatatcagtactcaggat

SEQ ID NO: 42447 - DNA, 20 bp, synthetic construct
  source 1..20: mol_type = other DNA
ctgcagggaaggaaggcgct

SEQ ID NO: 42448 - DNA, 20 bp, synthetic construct
  source 1..20: mol_type = other DNA
ggctgagatggagctgaagg

SEQ ID NO: 42449 - DNA, 20 bp, synthetic construct
  source 1..20: mol_type = other DNA
gggcatggcctacctggaag

SEQ ID NO: 42450 - DNA, 20 bp, synthetic construct
  source 1..20: mol_type = other DNA
ctcatcagccaagacaaggc

SEQ ID NO: 42451 - DNA, 20 bp, synthetic construct
  source 1..20: mol_type = other DNA
cttgaggtttcagctctaac

SEQ ID NO: 42452 - DNA, 20 bp, synthetic construct
  source 1..20: mol_type = other DNA
tgaaaaggggattatcctgg

SEQ ID NO: 42453 - DNA, 20 bp, synthetic construct
  source 1..20: mol_type = other DNA
gcagcagcagcacagcgtgc

SEQ ID NO: 42454 - DNA, 20 bp, synthetic construct
  source 1..20: mol_type = other DNA
acagcactcaacgggtatag

SEQ ID NO: 42455 - DNA, 20 bp, synthetic construct
  source 1..20: mol_type = other DNA
aacgatcctgaatgaatgaa

SEQ ID NO: 42456 - DNA, 20 bp, synthetic construct
  source 1..20: mol_type = other DNA
acattctgaaggattgtcca

SEQ ID NO: 42457 - DNA, 20 bp, synthetic construct
  source 1..20: mol_type = other DNA
ggggctaccagggctacccc

SEQ ID NO: 42458 - DNA, 20 bp, synthetic construct
  source 1..20: mol_type = other DNA
gcggggtctggcatcgcccc

SEQ ID NO: 42459 - DNA, 20 bp, synthetic construct
  source 1..20: mol_type = other DNA
tgaatttccatggtgtggta

SEQ ID NO: 42460 - DNA, 20 bp, synthetic construct
  source 1..20: mol_type = other DNA
gctacaggccctgccgccct

SEQ ID NO: 42461 - DNA, 20 bp, synthetic construct
  source 1..20: mol_type = other DNA
ttctcatgctgaatggtgag

SEQ ID NO: 42462 - DNA, 20 bp, synthetic construct
  source 1..20: mol_type = other DNA
cacgtaggcaacagagggcc

SEQ ID NO: 42463 - DNA, 20 bp, synthetic construct
  source 1..20: mol_type = other DNA
cagccgagatgctaagagca

SEQ ID NO: 42464 - DNA, 20 bp, synthetic construct
  source 1..20: mol_type = other DNA
gcaccatacccagctacagc

SEQ ID NO: 42465 - DNA, 20 bp, synthetic construct
  source 1..20: mol_type = other DNA
cacccagctcctggagggcc

SEQ ID NO: 42466 - DNA, 20 bp, synthetic construct
  source 1..20: mol_type = other DNA
tgggaccctgctgtggggac

SEQ ID NO: 42467 - DNA, 20 bp, synthetic construct
  source 1..20: mol_type = other DNA
catgcagatccgacactgga

SEQ ID NO: 42468 - DNA, 20 bp, synthetic construct
  source 1..20: mol_type = other DNA
tgtgactgtcatctggccat

SEQ ID NO: 42469 - DNA, 20 bp, synthetic construct
  source 1..20: mol_type = other DNA
tgaagttagaagtcgggtcg

SEQ ID NO: 42470 - DNA, 20 bp, synthetic construct
  source 1..20: mol_type = other DNA
caggatgtacttgttgaggt

SEQ ID NO: 42471 - DNA, 20 bp, synthetic construct
  source 1..20: mol_type = other DNA
gcccagtccactactactgg

SEQ ID NO: 42472 - DNA, 20 bp, synthetic construct
  source 1..20: mol_type = other DNA
ctacctgcagtgcaccacaa

SEQ ID NO: 42473 - DNA, 20 bp, synthetic construct
  source 1..20: mol_type = other DNA
ttgctcagcaaggcaccatg

SEQ ID NO: 42474 - DNA, 20 bp, synthetic construct
  source 1..20: mol_type = other DNA
ggcagtggtgccgcacttct

SEQ ID NO: 42475 - DNA, 20 bp, synthetic construct
  source 1..20: mol_type = other DNA
tgaatatgatcccaccatag

SEQ ID NO: 42476 - DNA, 20 bp, synthetic construct
  source 1..20: mol_type = other DNA
tgccactctgctccttgctt

SEQ ID NO: 42477 - DNA, 20 bp, synthetic construct
  source 1..20: mol_type = other DNA
tacaaggaccagcttaagac

SEQ ID NO: 42478 - DNA, 20 bp, synthetic construct
  source 1..20: mol_type = other DNA
agaacacaggcacggctgag

SEQ ID NO: 42479 - DNA, 20 bp, synthetic construct
  source 1..20: mol_type = other DNA
aattgaacttcaccacccag

SEQ ID NO: 42480 - DNA, 20 bp, synthetic construct
  source 1..20: mol_type = other DNA
cttgagcagttccttgcgca

SEQ ID NO: 42481 - DNA, 20 bp, synthetic construct
  source 1..20: mol_type = other DNA
atctcggaagtgttcctcca

SEQ ID NO: 42482 - DNA, 20 bp, synthetic construct
  source 1..20: mol_type = other DNA
acaaaaagtgggcttcaggt

SEQ ID NO: 42483 - DNA, 20 bp, synthetic construct
  source 1..20: mol_type = other DNA
tagccttaccttgcgagaga

SEQ ID NO: 42484 - DNA, 20 bp, synthetic construct
  source 1..20: mol_type = other DNA
gctcttccgagctgatggga

SEQ ID NO: 42485 - DNA, 20 bp, synthetic construct
  source 1..20: mol_type = other DNA
atgagtccttcagcagctcc

SEQ ID NO: 42486 - DNA, 20 bp, synthetic construct
  source 1..20: mol_type = other DNA
tcaaaccacacctagaacac

SEQ ID NO: 42487 - DNA, 20 bp, synthetic construct
  source 1..20: mol_type = other DNA
cacaccgagtacttgcgctc

SEQ ID NO: 42488 - DNA, 20 bp, synthetic construct
  source 1..20: mol_type = other DNA
accaaggctgttgtaaggta

SEQ ID NO: 42489 - DNA, 20 bp, synthetic construct
  source 1..20: mol_type = other DNA
gggggtcatcctaggcaagg

SEQ ID NO: 42490 - DNA, 20 bp, synthetic construct
  source 1..20: mol_type = other DNA
gcccaggatgcttgactcac

SEQ ID NO: 42491 - DNA, 20 bp, synthetic construct
  source 1..20: mol_type = other DNA
aagctcctttccaccagttg

SEQ ID NO: 42492 - DNA, 20 bp, synthetic construct
  source 1..20: mol_type = other DNA
tcttggaagccagtactctg

SEQ ID NO: 42493 - DNA, 20 bp, synthetic construct
  source 1..20: mol_type = other DNA
ccacctctttgccctgatgc

SEQ ID NO: 42494 - DNA, 20 bp, synthetic construct
  source 1..20: mol_type = other DNA
atccagtgcgctcctgtgtt

SEQ ID NO: 42495 - DNA, 20 bp, synthetic construct
  source 1..20: mol_type = other DNA
caactgaaacgcaagcgagg

SEQ ID NO: 42496 - DNA, 20 bp, synthetic construct
  source 1..20: mol_type = other DNA
gcagtaaaagcatctactgg

SEQ ID NO: 42497 - DNA, 20 bp, synthetic construct
  source 1..20: mol_type = other DNA
acagttcacctattaccctc

SEQ ID NO: 42498 - DNA, 20 bp, synthetic construct
  source 1..20: mol_type = other DNA
gcaagcaatgctcggagctg

SEQ ID NO: 42499 - DNA, 20 bp, synthetic construct
  source 1..20: mol_type = other DNA
catcatggcctgctggacca

SEQ ID NO: 42500 - DNA, 20 bp, synthetic construct
  source 1..20: mol_type = other DNA
ggctgggggccggggaagca

SEQ ID NO: 42501 - DNA, 20 bp, synthetic construct
  source 1..20: mol_type = other DNA
ctacgccacgcagctccagg

SEQ ID NO: 42502 - DNA, 20 bp, synthetic construct
  source 1..20: mol_type = other DNA
gggaccccattgtacagcac

SEQ ID NO: 42503 - DNA, 20 bp, synthetic construct
  source 1..20: mol_type = other DNA
agtgacaatgatgccagcca

SEQ ID NO: 42504 - DNA, 20 bp, synthetic construct
  source 1..20: mol_type = other DNA
aaaaaccaggatgtccccca

SEQ ID NO: 42505 - DNA, 20 bp, synthetic construct
  source 1..20: mol_type = other DNA
cagactccccagacaggccc

SEQ ID NO: 42506 - DNA, 20 bp, synthetic construct
  source 1..20: mol_type = other DNA
tcaaggtcagcactgcgcca

SEQ ID NO: 42507 - DNA, 20 bp, synthetic construct
  source 1..20: mol_type = other DNA
ccctggcgctgtgcaacgac

SEQ ID NO: 42508 - DNA, 20 bp, synthetic construct
  source 1..20: mol_type = other DNA
ttctatatgaaaatcaagac

SEQ ID NO: 42509 - DNA, 20 bp, synthetic construct
  source 1..20: mol_type = other DNA
ctcaagcctcattggaatga

SEQ ID NO: 42510 - DNA, 20 bp, synthetic construct
  source 1..20: mol_type = other DNA
cagtatctcaaggtatgtgc

SEQ ID NO: 42511 - DNA, 20 bp, synthetic construct
  source 1..20: mol_type = other DNA
ttctactcgcgcgaccccga

SEQ ID NO: 42512 - DNA, 20 bp, synthetic construct
  source 1..20: mol_type = other DNA
tcacggactctgcaccccgc

SEQ ID NO: 42513 - DNA, 20 bp, synthetic construct
  source 1..20: mol_type = other DNA
gttgtgcaaatgtagctgga

SEQ ID NO: 42514 - DNA, 20 bp, synthetic construct
  source 1..20: mol_type = other DNA
ccgaccttctgtgaacactg

SEQ ID NO: 42515 - DNA, 20 bp, synthetic construct
  source 1..20: mol_type = other DNA
cagcgactctttgagatgct

SEQ ID NO: 42516 - DNA, 20 bp, synthetic construct
  source 1..20: mol_type = other DNA
acaggtgggtggagtcaaca

SEQ ID NO: 42517 - DNA, 20 bp, synthetic construct
  source 1..20: mol_type = other DNA
tgcaactagaggtgaaagct

SEQ ID NO: 42518 - DNA, 20 bp, synthetic construct
  source 1..20: mol_type = other DNA
cccaggtgacgtccttgctc

SEQ ID NO: 42519 - DNA, 20 bp, synthetic construct
  source 1..20: mol_type = other DNA
tccagatgagccccgggatt

SEQ ID NO: 42520 - DNA, 20 bp, synthetic construct
  source 1..20: mol_type = other DNA
taaacaggtacccagggcta

SEQ ID NO: 42521 - DNA, 20 bp, synthetic construct
  source 1..20: mol_type = other DNA
cgcggtgccacagcagctgg

SEQ ID NO: 42522 - DNA, 20 bp, synthetic construct
  source 1..20: mol_type = other DNA
tcctggccctttggaacgaa

SEQ ID NO: 42523 - DNA, 20 bp, synthetic construct
  source 1..20: mol_type = other DNA
cagctgtccactcctggcgc

SEQ ID NO: 42524 - DNA, 20 bp, synthetic construct
  source 1..20: mol_type = other DNA
gctgtggccgcagctgtgtg

SEQ ID NO: 42525 - DNA, 20 bp, synthetic construct
  source 1..20: mol_type = other DNA
gatcttctggtctctggaga

SEQ ID NO: 42526 - DNA, 20 bp, synthetic construct
  source 1..20: mol_type = other DNA
aggcgctcatctcatacgtg

SEQ ID NO: 42527 - DNA, 20 bp, synthetic construct
  source 1..20: mol_type = other DNA
accgggacagccctgtgttt

SEQ ID NO: 42528 - DNA, 20 bp, synthetic construct
  source 1..20: mol_type = other DNA
aaacttggcccctaaggagg

SEQ ID NO: 42529 - DNA, 20 bp, synthetic construct
  source 1..20: mol_type = other DNA
cgtgttggacctggcccgga

SEQ ID NO: 42530 - DNA, 20 bp, synthetic construct
  source 1..20: mol_type = other DNA
tggcgaggatggaggaggaa

SEQ ID NO: 42531 - DNA, 20 bp, synthetic construct
  source 1..20: mol_type = other DNA
cagcaaggcaccatgtggca

SEQ ID NO: 42532 - DNA, 20 bp, synthetic construct
  source 1..20: mol_type = other DNA
aggctacagcttcaccacca

SEQ ID NO: 42533 - DNA, 20 bp, synthetic construct
  source 1..20: mol_type = other DNA
gctgtcccacaacctgtaca

SEQ ID NO: 42534 - DNA, 20 bp, synthetic construct
  source 1..20: mol_type = other DNA
gacgccggtcttgatgacga

SEQ ID NO: 42535 - DNA, 20 bp, synthetic construct
  source 1..20: mol_type = other DNA
cgaaaatgcttggtgagctg

SEQ ID NO: 42536 - DNA, 20 bp, synthetic construct
  source 1..20: mol_type = other DNA
caaagcaggtgacggtcatg

SEQ ID NO: 42537 - DNA, 20 bp, synthetic construct
  source 1..20: mol_type = other DNA
agaaccccacctgggcaaag

SEQ ID NO: 42538 - DNA, 20 bp, synthetic construct
  source 1..20: mol_type = other DNA
attaccttggcaatcagacg

SEQ ID NO: 42539 - DNA, 20 bp, synthetic construct
  source 1..20: mol_type = other DNA
gaaaccacagatcaagcaag

SEQ ID NO: 42540 - DNA, 20 bp, synthetic construct
  source 1..20: mol_type = other DNA
gagttcaccatctgcaagtc

SEQ ID NO: 42541 - DNA, 20 bp, synthetic construct
  source 1..20: mol_type = other DNA
ggcctgtgcggtccccggtg

SEQ ID NO: 42542 - DNA, 20 bp, synthetic construct
  source 1..20: mol_type = other DNA
gaagcccagtccactactac

SEQ ID NO: 42543 - DNA, 20 bp, synthetic construct
  source 1..20: mol_type = other DNA
gtggcctcagagtgagtcgg

SEQ ID NO: 42544 - DNA, 20 bp, synthetic construct
  source 1..20: mol_type = other DNA
gatggccaggtcatcaccat

SEQ ID NO: 42545 - DNA, 20 bp, synthetic construct
  source 1..20: mol_type = other DNA
aatatgacagccacctccct

SEQ ID NO: 42546 - DNA, 20 bp, synthetic construct
  source 1..20: mol_type = other DNA
cctcgggcaggcagatgagc

SEQ ID NO: 42547 - DNA, 20 bp, synthetic construct
  source 1..20: mol_type = other DNA
tggggacccggtagttgacc

SEQ ID NO: 42548 - DNA, 20 bp, synthetic construct
  source 1..20: mol_type = other DNA
gcatcagggcaaagaggtgg

SEQ ID NO: 42549 - DNA, 20 bp, synthetic construct
  source 1..20: mol_type = other DNA
tcctgggttcccgtgggtcc

SEQ ID NO: 42550 - DNA, 20 bp, synthetic construct
  source 1..20: mol_type = other DNA
cccagtgtaggagtccgtcc

SEQ ID NO: 42551 - DNA, 20 bp, synthetic construct
  source 1..20: mol_type = other DNA
gatttctgtggaagagattg

SEQ ID NO: 42552 - DNA, 20 bp, synthetic construct
  source 1..20: mol_type = other DNA
gaggcctgtgcggtccccgg

SEQ ID NO: 42553 - DNA, 20 bp, synthetic construct
  source 1..20: mol_type = other DNA
caggatgctgagtggtactg

SEQ ID NO: 42554 - DNA, 20 bp, synthetic construct
  source 1..20: mol_type = other DNA
tcatccagtagtagtcttcc

SEQ ID NO: 42555 - DNA, 20 bp, synthetic construct
  source 1..20: mol_type = other DNA
cgaaaaggagaaactgatat

SEQ ID NO: 42556 - DNA, 20 bp, synthetic construct
  source 1..20: mol_type = other DNA
cgggcgccatgggtgcgggc

SEQ ID NO: 42557 - DNA, 20 bp, synthetic construct
  source 1..20: mol_type = other DNA
tgcaggaatttgtacacctg

SEQ ID NO: 42558 - DNA, 20 bp, synthetic construct
  source 1..20: mol_type = other DNA
agttcatgcagcgggtcatg

SEQ ID NO: 42559 - DNA, 20 bp, synthetic construct
  source 1..20: mol_type = other DNA
ccgccttgtagatatccgcc

SEQ ID NO: 42560 - DNA, 20 bp, synthetic construct
  source 1..20: mol_type = other DNA
ccgctgcgtgcaccgcgacc

SEQ ID NO: 42561 - DNA, 20 bp, synthetic construct
  source 1..20: mol_type = other DNA
atctgaggagggaaggggac

SEQ ID NO: 42562 - DNA, 20 bp, synthetic construct
  source 1..20: mol_type = other DNA
catatttacaacagagtacc

SEQ ID NO: 42563 - DNA, 20 bp, synthetic construct
  source 1..20: mol_type = other DNA
cactgaccttctccagggcg

SEQ ID NO: 42564 - DNA, 20 bp, synthetic construct
  source 1..20: mol_type = other DNA
ctcgatgtgaagaaggaaac

SEQ ID NO: 42565 - DNA, 20 bp, synthetic construct
  source 1..20: mol_type = other DNA
atccaggactgtatgtggag

SEQ ID NO: 42566 - DNA, 20 bp, synthetic construct
  source 1..20: mol_type = other DNA
ggaactccttctcctccctc

SEQ ID NO: 42567 - DNA, 20 bp, synthetic construct
  source 1..20: mol_type = other DNA
aagttagaagtcgggtcgtg

SEQ ID NO: 42568 - DNA, 20 bp, synthetic construct
  source 1..20: mol_type = other DNA
acagtcggtacatattccga

SEQ ID NO: 42569 - DNA, 20 bp, synthetic construct
  source 1..20: mol_type = other DNA
gggactcttacccctagagg

SEQ ID NO: 42570 - DNA, 20 bp, synthetic construct
  source 1..20: mol_type = other DNA
tgtaaggccgctcgccggtg

SEQ ID NO: 42571 - DNA, 20 bp, synthetic construct
  source 1..20: mol_type = other DNA
ctgcggcgctcacctcagca

SEQ ID NO: 42572 - DNA, 20 bp, synthetic construct
  source 1..20: mol_type = other DNA
cagcagcctgacgcgtgagg

SEQ ID NO: 42573 - DNA, 20 bp, synthetic construct
  source 1..20: mol_type = other DNA
gctagctgcaaaagagagga

SEQ ID NO: 42574 - DNA, 20 bp, synthetic construct
  source 1..20: mol_type = other DNA
tcgggggcatacctggagag

SEQ ID NO: 42575 - DNA, 20 bp, synthetic construct
  source 1..20: mol_type = other DNA
ctcctgtgctggctattgtg

SEQ ID NO: 42576 - DNA, 20 bp, synthetic construct
  source 1..20: mol_type = other DNA
acaccagcagttacttggcg

SEQ ID NO: 42577 - DNA, 20 bp, synthetic construct
  source 1..20: mol_type = other DNA
tcaccagacttcagccagca

SEQ ID NO: 42578 - DNA, 20 bp, synthetic construct
  source 1..20: mol_type = other DNA
acccggcagactgctggaag

SEQ ID NO: 42579 - DNA, 20 bp, synthetic construct
  source 1..20: mol_type = other DNA
ccaagaaggactcgggtcaa

SEQ ID NO: 42580 - DNA, 20 bp, synthetic construct
  source 1..20: mol_type = other DNA
cgctgccggctctcacgatc

SEQ ID NO: 42581 - DNA, 20 bp, synthetic construct
  source 1..20: mol_type = other DNA
ctgcatgtgaagggcgtcgt

SEQ ID NO: 42582 - DNA, 20 bp, synthetic construct
  source 1..20: mol_type = other DNA
gtaggcggacgggtggtaga

SEQ ID NO: 42583 - DNA, 20 bp, synthetic construct
  source 1..20: mol_type = other DNA
aaggcgtattgtaccctgga

SEQ ID NO: 42584 - DNA, 20 bp, synthetic construct
  source 1..20: mol_type = other DNA
gggcagtaaaagcatctact

SEQ ID NO: 42585 - DNA, 20 bp, synthetic construct
  source 1..20: mol_type = other DNA
gtggttcaaaatgaataaag

SEQ ID NO: 42586 - DNA, 20 bp, synthetic construct
  source 1..20: mol_type = other DNA
cctaggcgctggtacatgct

SEQ ID NO: 42587 - DNA, 20 bp, synthetic construct
  source 1..20: mol_type = other DNA
tcacctggagaaagcaaaga

SEQ ID NO: 42588 - DNA, 20 bp, synthetic construct
  source 1..20: mol_type = other DNA
tgcctcttcctcctcattgg

SEQ ID NO: 42589 - DNA, 20 bp, synthetic construct
  source 1..20: mol_type = other DNA
tccccaggcttactggctgg

SEQ ID NO: 42590 - DNA, 20 bp, synthetic construct
  source 1..20: mol_type = other DNA
gcaaggagtgggtctgcgga

SEQ ID NO: 42591 - DNA, 20 bp, synthetic construct
  source 1..20: mol_type = other DNA
ggtcctaggaagcaaataca

SEQ ID NO: 42592 - DNA, 20 bp, synthetic construct
  source 1..20: mol_type = other DNA
tggaacaccaaggaacctac

SEQ ID NO: 42593 - DNA, 20 bp, synthetic construct
  source 1..20: mol_type = other DNA
acctgaggcagtgaaaacaa

SEQ ID NO: 42594 - DNA, 20 bp, synthetic construct
  source 1..20: mol_type = other DNA
catttcttgctgccaagtcc

SEQ ID NO: 42595 - DNA, 20 bp, synthetic construct
  source 1..20: mol_type = other DNA
gagcgggtccgcatcatctc

SEQ ID NO: 42596 - DNA, 20 bp, synthetic construct
  source 1..20: mol_type = other DNA
cctgtttgcattggaagccg

SEQ ID NO: 42597 - DNA, 20 bp, synthetic construct
  source 1..20: mol_type = other DNA
ttgagatgtccaaacaccca

SEQ ID NO: 42598 - DNA, 20 bp, synthetic construct
  source 1..20: mol_type = other DNA
tggctcttcagatctattgt

SEQ ID NO: 42599 - DNA, 20 bp, synthetic construct
  source 1..20: mol_type = other DNA
tagcggtcatgtcaatggtt

SEQ ID NO: 42600 - DNA, 20 bp, synthetic construct
  source 1..20: mol_type = other DNA
ccggaagtagccatctacca

SEQ ID NO: 42601 - DNA, 20 bp, synthetic construct
  source 1..20: mol_type = other DNA
ctaggctccggacaacctgg

SEQ ID NO: 42602 - DNA, 20 bp, synthetic construct
  source 1..20: mol_type = other DNA
catccatataaggtctgatg

SEQ ID NO: 42603 - DNA, 20 bp, synthetic construct
  source 1..20: mol_type = other DNA
ccagggcctcgccctagaaa

SEQ ID NO: 42604 - DNA, 20 bp, synthetic construct
  source 1..20: mol_type = other DNA
tccacccacatcttcctctc

SEQ ID NO: 42605 - DNA, 20 bp, synthetic construct
  source 1..20: mol_type = other DNA
agaaggaggcgggtgagggt

SEQ ID NO: 42606 - DNA, 20 bp, synthetic construct
  source 1..20: mol_type = other DNA
gagagacagattggttcctg

SEQ ID NO: 42607 - DNA, 20 bp, synthetic construct
  source 1..20: mol_type = other DNA
gacctacctttggagcctgt

SEQ ID NO: 42608 - DNA, 20 bp, synthetic construct
  source 1..20: mol_type = other DNA
cagagccccattttctggtg

SEQ ID NO: 42609 - DNA, 20 bp, synthetic construct
  source 1..20: mol_type = other DNA
gtaattgtcgtagtttctgg

SEQ ID NO: 42610 - DNA, 20 bp, synthetic construct
  source 1..20: mol_type = other DNA
gagggtaggagagtgtacgg

SEQ ID NO: 42611 - DNA, 20 bp, synthetic construct
  source 1..20: mol_type = other DNA
cgtacagggatagcacagcc

SEQ ID NO: 42612 - DNA, 20 bp, synthetic construct
  source 1..20: mol_type = other DNA
ggcaatcagttctccaccca

SEQ ID NO: 42613 - DNA, 20 bp, synthetic construct
  source 1..20: mol_type = other DNA
gtgggtaggcaggtggccag

SEQ ID NO: 42614 - DNA, 20 bp, synthetic construct
  source 1..20: mol_type = other DNA
gtatgatttggtgaaatgcc

SEQ ID NO: 42615 - DNA, 20 bp, synthetic construct
  source 1..20: mol_type = other DNA
cagaaacccatgttcgggac

SEQ ID NO: 42616 - DNA, 20 bp, synthetic construct
  source 1..20: mol_type = other DNA
ctacatcatcactgaataca

SEQ ID NO: 42617 - DNA, 20 bp, synthetic construct
  source 1..20: mol_type = other DNA
gctatattggctggtgagtg

SEQ ID NO: 42618 - DNA, 20 bp, synthetic construct
  source 1..20: mol_type = other DNA
cattcttggttggatcatat

SEQ ID NO: 42619 - DNA, 20 bp, synthetic construct
  source 1..20: mol_type = other DNA
ccgcagggcatggagtacct

SEQ ID NO: 42620 - DNA, 20 bp, synthetic construct
  source 1..20: mol_type = other DNA
cgaatatgatccaacaatag

SEQ ID NO: 42621 - DNA, 20 bp, synthetic construct
  source 1..20: mol_type = other DNA
catgtgtctggatgtgtgtg

SEQ ID NO: 42622 - DNA, 20 bp, synthetic construct
  source 1..20: mol_type = other DNA
ggcgggtacctggaggcgca

SEQ ID NO: 42623 - DNA, 20 bp, synthetic construct
  source 1..20: mol_type = other DNA
gctcctacctgtgctggacc

SEQ ID NO: 42624 - DNA, 20 bp, synthetic construct
  source 1..20: mol_type = other DNA
ctcgtggatggccatgctga

SEQ ID NO: 42625 - DNA, 20 bp, synthetic construct
  source 1..20: mol_type = other DNA
tgcgcatgcagatccgacac

SEQ ID NO: 42626 - DNA, 20 bp, synthetic construct
  source 1..20: mol_type = other DNA
tgcttgttctgcgggcacag

SEQ ID NO: 42627 - DNA, 20 bp, synthetic construct
  source 1..20: mol_type = other DNA
ctcgagctacgggccacaga

SEQ ID NO: 42628 - DNA, 20 bp, synthetic construct
  source 1..20: mol_type = other DNA
tggagatctcctgcttgagg

SEQ ID NO: 42629 - DNA, 20 bp, synthetic construct
  source 1..20: mol_type = other DNA
aaatagtcagcaaggctgtc

SEQ ID NO: 42630 - DNA, 20 bp, synthetic construct
  source 1..20: mol_type = other DNA
agaaggcggagcaccaggtg

SEQ ID NO: 42631 - DNA, 20 bp, synthetic construct
  source 1..20: mol_type = other DNA
tgcgacggccactgttctct

SEQ ID NO: 42632 - DNA, 20 bp, synthetic construct
  source 1..20: mol_type = other DNA
aacgaaggtgaggaagatgg

SEQ ID NO: 42633 - DNA, 20 bp, synthetic construct
  source 1..20: mol_type = other DNA
ctgaagagatgaggctattg

SEQ ID NO: 42634 - DNA, 20 bp, synthetic construct
  source 1..20: mol_type = other DNA
ctggagacagaaagaagaaa

SEQ ID NO: 42635 - DNA, 20 bp, synthetic construct
  source 1..20: mol_type = other DNA
ccagaaggaaggttcctgtg

SEQ ID NO: 42636 - DNA, 20 bp, synthetic construct
  source 1..20: mol_type = other DNA
gcaggtattccacctggagc

SEQ ID NO: 42637 - DNA, 20 bp, synthetic construct
  source 1..20: mol_type = other DNA
ccttacctcatgcctggcaa

SEQ ID NO: 42638 - DNA, 20 bp, synthetic construct
  source 1..20: mol_type = other DNA
cagaaaatggggctctggcc

SEQ ID NO: 42639 - DNA, 20 bp, synthetic construct
  source 1..20: mol_type = other DNA
cctggatgcgaagacaggaa

SEQ ID NO: 42640 - DNA, 20 bp, synthetic construct
  source 1..20: mol_type = other DNA
ccagcgcaggatgaacctga

SEQ ID NO: 42641 - DNA, 20 bp, synthetic construct
  source 1..20: mol_type = other DNA
tgtgtagagccctgtatccc

SEQ ID NO: 42642 - DNA, 20 bp, synthetic construct
  source 1..20: mol_type = other DNA
gacccccaagccccagacca

SEQ ID NO: 42643 - DNA, 20 bp, synthetic construct
  source 1..20: mol_type = other DNA
ctcccagtgggtacaactga

SEQ ID NO: 42644 - DNA, 20 bp, synthetic construct
  source 1..20: mol_type = other DNA
ggggctgcggcggagaacat

SEQ ID NO: 42645 - DNA, 20 bp, synthetic construct
  source 1..20: mol_type = other DNA
cacggatactcacagtctag

SEQ ID NO: 42646 - DNA, 20 bp, synthetic construct
  source 1..20: mol_type = other DNA
gcagcagatggctgaggaca

SEQ ID NO: 42647 - DNA, 20 bp, synthetic construct
  source 1..20: mol_type = other DNA
cccataagtgtcaatttccg

SEQ ID NO: 42648 - DNA, 20 bp, synthetic construct
  source 1..20: mol_type = other DNA
ggattcatacctgctgatgt

SEQ ID NO: 42649 - DNA, 20 bp, synthetic construct
  source 1..20: mol_type = other DNA
tcaggatggagaattcgacc

SEQ ID NO: 42650 - DNA, 20 bp, synthetic construct
  source 1..20: mol_type = other DNA
ttacctccctctccggctcc

SEQ ID NO: 42651 - DNA, 20 bp, synthetic construct
  source 1..20: mol_type = other DNA
tttcatcttctgctcaagcc

SEQ ID NO: 42652 - DNA, 20 bp, synthetic construct
  source 1..20: mol_type = other DNA
accaccgctctcggttccgg

SEQ ID NO: 42653 - DNA, 20 bp, synthetic construct
  source 1..20: mol_type = other DNA
aaggagttacttaatgctga

SEQ ID NO: 42654 - DNA, 20 bp, synthetic construct
  source 1..20: mol_type = other DNA
ccttgccagtggtggccgcg

SEQ ID NO: 42655 - DNA, 20 bp, synthetic construct
  source 1..20: mol_type = other DNA
cagctatgattttctcacac

SEQ ID NO: 42656 - DNA, 20 bp, synthetic construct
  source 1..20: mol_type = other DNA
ctgcagctggaaccagcgtt

SEQ ID NO: 42657 - DNA, 20 bp, synthetic construct
  source 1..20: mol_type = other DNA
ccgcccagggaagacctcac

SEQ ID NO: 42658 - DNA, 20 bp, synthetic construct
  source 1..20: mol_type = other DNA
ccagctgtcaggagtcggcc

SEQ ID NO: 42659 - DNA, 20 bp, synthetic construct
  source 1..20: mol_type = other DNA
gcactcaccattgtatgtgg

SEQ ID NO: 42660 - DNA, 20 bp, synthetic construct
  source 1..20: mol_type = other DNA
gcaacttgacggtgcaccgg

SEQ ID NO: 42661 - DNA, 20 bp, synthetic construct
  source 1..20: mol_type = other DNA
tgccctggatgagctcgatg

SEQ ID NO: 42662 - DNA, 20 bp, synthetic construct
  source 1..20: mol_type = other DNA
tgtaccagcatcgggtgagg

SEQ ID NO: 42663 - DNA, 20 bp, synthetic construct
  source 1..20: mol_type = other DNA
gcccccagctggacatgctg

SEQ ID NO: 42664 - DNA, 20 bp, synthetic construct
  source 1..20: mol_type = other DNA
ctccgagatgcacgtgccgt

SEQ ID NO: 42665 - DNA, 20 bp, synthetic construct
  source 1..20: mol_type = other DNA
acaggtaggagcatgtgccg

SEQ ID NO: 42666 - DNA, 20 bp, synthetic construct
  source 1..20: mol_type = other DNA
aatacatctactaatgaaat

SEQ ID NO: 42667 - DNA, 20 bp, synthetic construct
  source 1..20: mol_type = other DNA
gtcctgcagaaggacagggc

SEQ ID NO: 42668 - DNA, 20 bp, synthetic construct
  source 1..20: mol_type = other DNA
ggagatgctgcagcgaggta

SEQ ID NO: 42669 - DNA, 20 bp, synthetic construct
  source 1..20: mol_type = other DNA
aaagcaccggttgaataaga

SEQ ID NO: 42670 - DNA, 20 bp, synthetic construct
  source 1..20: mol_type = other DNA
acctcatgcctggcaatggg

SEQ ID NO: 42671 - DNA, 20 bp, synthetic construct
  source 1..20: mol_type = other DNA
cttacgactcaaagttctcc

SEQ ID NO: 42672 - DNA, 20 bp, synthetic construct
  source 1..20: mol_type = other DNA
gtgactacgtgcgccagacg

SEQ ID NO: 42673 - DNA, 20 bp, synthetic construct
  source 1..20: mol_type = other DNA
agatccccgcagccccttgg

SEQ ID NO: 42674 - DNA, 20 bp, synthetic construct
  source 1..20: mol_type = other DNA
ggccaagtacatcatggacc

SEQ ID NO: 42675 - DNA, 20 bp, synthetic construct
  source 1..20: mol_type = other DNA
gccttgccagtggtggccgc

SEQ ID NO: 42676 - DNA, 20 bp, synthetic construct
  source 1..20: mol_type = other DNA
ggtagacggtgaggcgcttc

SEQ ID NO: 42677 - DNA, 20 bp, synthetic construct
  source 1..20: mol_type = other DNA
tcctgcagattctcgtaatc

SEQ ID NO: 42678 - DNA, 20 bp, synthetic construct
  source 1..20: mol_type = other DNA
gctgcttccaggaatgactg

SEQ ID NO: 42679 - DNA, 20 bp, synthetic construct
  source 1..20: mol_type = other DNA
gcgccagtgcctgcgctcgc

SEQ ID NO: 42680 - DNA, 20 bp, synthetic construct
  source 1..20: mol_type = other DNA
cagtccggcgcgggccccat

SEQ ID NO: 42681 - DNA, 20 bp, synthetic construct
  source 1..20: mol_type = other DNA
aggagccctgtaccacctag

SEQ ID NO: 42682 - DNA, 20 bp, synthetic construct
  source 1..20: mol_type = other DNA
caggcctggtgactcgactc

SEQ ID NO: 42683 - DNA, 20 bp, synthetic construct
  source 1..20: mol_type = other DNA
ccttgtgaaaaagtacatcc

SEQ ID NO: 42684 - DNA, 20 bp, synthetic construct
  source 1..20: mol_type = other DNA
cgatctctcgtaaggggtct

SEQ ID NO: 42685 - DNA, 20 bp, synthetic construct
  source 1..20: mol_type = other DNA
caaaaggaagagaagtggga

SEQ ID NO: 42686 - DNA, 20 bp, synthetic construct
  source 1..20: mol_type = other DNA
acaggtggaagaacagctgc

SEQ ID NO: 42687 - DNA, 20 bp, synthetic construct
  source 1..20: mol_type = other DNA
cctggggaatcagagaacaa

SEQ ID NO: 42688 - DNA, 20 bp, synthetic construct
  source 1..20: mol_type = other DNA
caccatcatcagtgagcagc

SEQ ID NO: 42689 - DNA, 20 bp, synthetic construct
  source 1..20: mol_type = other DNA
tcctaggaggaggaaaagcc

SEQ ID NO: 42690 - DNA, 20 bp, synthetic construct
  source 1..20: mol_type = other DNA
cgttacctcatagtctgggt

SEQ ID NO: 42691 - DNA, 20 bp, synthetic construct
  source 1..20: mol_type = other DNA
tgcctgagctcccgctgccc

SEQ ID NO: 42692 - DNA, 20 bp, synthetic construct
  source 1..20: mol_type = other DNA
caggatctacaacctgcagg

SEQ ID NO: 42693 - DNA, 20 bp, synthetic construct
  source 1..20: mol_type = other DNA
accctgggtcggggaaggga

SEQ ID NO: 42694 - DNA, 20 bp, synthetic construct
  source 1..20: mol_type = other DNA
aaccatgaagaaggtaccgt

SEQ ID NO: 42695 - DNA, 20 bp, synthetic construct
  source 1..20: mol_type = other DNA
agcctggatagcaacgtaca

SEQ ID NO: 42696 - DNA, 20 bp, synthetic construct
  source 1..20: mol_type = other DNA
tggagagtccaggacaggaa

SEQ ID NO: 42697 - DNA, 20 bp, synthetic construct
  source 1..20: mol_type = other DNA
ctctaggccgatacaaagca

SEQ ID NO: 42698 - DNA, 20 bp, synthetic construct
  source 1..20: mol_type = other DNA
aagagctggaggacgagcaa

SEQ ID NO: 42699 - DNA, 20 bp, synthetic construct
  source 1..20: mol_type = other DNA
aatacgccatcaataaattg

SEQ ID NO: 42700 - DNA, 20 bp, synthetic construct
  source 1..20: mol_type = other DNA
ccgacagaggcagacacaga

SEQ ID NO: 42701 - DNA, 20 bp, synthetic construct
  source 1..20: mol_type = other DNA
ccgagccaggagcaccttcc

SEQ ID NO: 42702 - DNA, 20 bp, synthetic construct
  source 1..20: mol_type = other DNA
gacggccaggtcatcaccat

SEQ ID NO: 42703 - DNA, 20 bp, synthetic construct
  source 1..20: mol_type = other DNA
gcaaggaggccctggaggac

SEQ ID NO: 42704 - DNA, 20 bp, synthetic construct
  source 1..20: mol_type = other DNA
tgcggatatgggtggtgagg

SEQ ID NO: 42705 - DNA, 20 bp, synthetic construct
  source 1..20: mol_type = other DNA
tctggacagttaggtgggca

SEQ ID NO: 42706 - DNA, 20 bp, synthetic construct
  source 1..20: mol_type = other DNA
ggtaaaagggattgtccatg

SEQ ID NO: 42707 - DNA, 20 bp, synthetic construct
  source 1..20: mol_type = other DNA
tgatcaccttgtaccagctg

SEQ ID NO: 42708 - DNA, 20 bp, synthetic construct
  source 1..20: mol_type = other DNA
caggaaaacatggctggcaa

SEQ ID NO: 42709 - DNA, 20 bp, synthetic construct
  source 1..20: mol_type = other DNA
cacccctgagccaggtgagc

SEQ ID NO: 42710 - DNA, 20 bp, synthetic construct
  source 1..20: mol_type = other DNA
ccagtgcagctccaggcggc

SEQ ID NO: 42711 - DNA, 20 bp, synthetic construct
  source 1..20: mol_type = other DNA
tgaggcgcttctggttgcac

SEQ ID NO: 42712 - DNA, 20 bp, synthetic construct
  source 1..20: mol_type = other DNA
tggcaagggcttctccttct

SEQ ID NO: 42713 - DNA, 20 bp, synthetic construct
  source 1..20: mol_type = other DNA
agacagcgtgtccatggctg

SEQ ID NO: 42714 - DNA, 20 bp, synthetic construct
  source 1..20: mol_type = other DNA
tctgcccgctcacctggctc

SEQ ID NO: 42715 - DNA, 20 bp, synthetic construct
  source 1..20: mol_type = other DNA
gagaaagcagtctttaccca

SEQ ID NO: 42716 - DNA, 20 bp, synthetic construct
  source 1..20: mol_type = other DNA
ccggcggcgctcgcagtaga

SEQ ID NO: 42717 - DNA, 20 bp, synthetic construct
  source 1..20: mol_type = other DNA
tgctctcgctctcccggatg

SEQ ID NO: 42718 - DNA, 20 bp, synthetic construct
  source 1..20: mol_type = other DNA
cccgtatggctcaacttcga

SEQ ID NO: 42719 - DNA, 20 bp, synthetic construct
  source 1..20: mol_type = other DNA
ccgtcttcccctccatcgtg

SEQ ID NO: 42720 - DNA, 20 bp, synthetic construct
  source 1..20: mol_type = other DNA
atcctggaggcctactgcag

SEQ ID NO: 42721 - DNA, 20 bp, synthetic construct
  source 1..20: mol_type = other DNA
gactcccaggaaatgccctg

SEQ ID NO: 42722 - DNA, 20 bp, synthetic construct
  source 1..20: mol_type = other DNA
taagacccagatccagtccg

SEQ ID NO: 42723 - DNA, 20 bp, synthetic construct
  source 1..20: mol_type = other DNA
ctgccagagcgtgtcaaact

SEQ ID NO: 42724 - DNA, 20 bp, synthetic construct
  source 1..20: mol_type = other DNA
tcctcaccgagcaacagctc

SEQ ID NO: 42725 - DNA, 20 bp, synthetic construct
  source 1..20: mol_type = other DNA
caatagatggacgacctcag

SEQ ID NO: 42726 - DNA, 20 bp, synthetic construct
  source 1..20: mol_type = other DNA
ttgcagaaaaagaaagaaga

SEQ ID NO: 42727 - DNA, 20 bp, synthetic construct
  source 1..20: mol_type = other DNA
gaatagttgtcaaacctgtg

SEQ ID NO: 42728 - DNA, 20 bp, synthetic construct
  source 1..20: mol_type = other DNA
gtccaggaagcaccacttgg

SEQ ID NO: 42729 - DNA, 20 bp, synthetic construct
  source 1..20: mol_type = other DNA
acagtcctggtaatggtgtg

SEQ ID NO: 42730 - DNA, 20 bp, synthetic construct
  source 1..20: mol_type = other DNA
tgaagtgaacatgtggatca

SEQ ID NO: 42731 - DNA, 20 bp, synthetic construct
  source 1..20: mol_type = other DNA
cacttgggacagcagaagtc

SEQ ID NO: 42732 - DNA, 20 bp, synthetic construct
  source 1..20: mol_type = other DNA
gccccggctgcatatcgttg

SEQ ID NO: 42733 - DNA, 20 bp, synthetic construct
  source 1..20: mol_type = other DNA
cctaaggaggaggcagagtg

SEQ ID NO: 42734 - DNA, 20 bp, synthetic construct
  source 1..20: mol_type = other DNA
acgacaatgagcagtcagtg

SEQ ID NO: 42735 - DNA, 20 bp, synthetic construct
  source 1..20: mol_type = other DNA
gtccagacgcaggatggcat

SEQ ID NO: 42736 - DNA, 20 bp, synthetic construct
  source 1..20: mol_type = other DNA
ctgaggcttctcttcacctg

SEQ ID NO: 42737 - DNA, 20 bp, synthetic construct
  source 1..20: mol_type = other DNA
gactgggtacctgcgggatg

SEQ ID NO: 42738 - DNA, 20 bp, synthetic construct
  source 1..20: mol_type = other DNA
gccgacgagcggatgaaggt

SEQ ID NO: 42739 - DNA, 20 bp, synthetic construct
  source 1..20: mol_type = other DNA
caacctacccttcgttccaa

SEQ ID NO: 42740 - DNA, 20 bp, synthetic construct
  source 1..20: mol_type = other DNA
tccactcacctccatagcat

SEQ ID NO: 42741 - DNA, 20 bp, synthetic construct
  source 1..20: mol_type = other DNA
aatcttgactctcaatccaa

SEQ ID NO: 42742 - DNA, 20 bp, synthetic construct
  source 1..20: mol_type = other DNA
atatgagatgcgtaatgctg

SEQ ID NO: 42743 - DNA, 20 bp, synthetic construct
  source 1..20: mol_type = other DNA
ctcctgagatcatgctgaac

SEQ ID NO: 42744 - DNA, 20 bp, synthetic construct
  source 1..20: mol_type = other DNA
caccctgcagatacatgtca

SEQ ID NO: 42745 - DNA, 20 bp, synthetic construct
  source 1..20: mol_type = other DNA
ggaagtgcgtgaggccctcg

SEQ ID NO: 42746 - DNA, 20 bp, synthetic construct
  source 1..20: mol_type = other DNA
ggagctgcgactggtcacgc

SEQ ID NO: 42747 - DNA, 20 bp, synthetic construct
  source 1..20: mol_type = other DNA
gagctctcgaagactgctgt

SEQ ID NO: 42748 - DNA, 20 bp, synthetic construct
  source 1..20: mol_type = other DNA
ggagctcttgattctcctcc

SEQ ID NO: 42749 - DNA, 20 bp, synthetic construct
  source 1..20: mol_type = other DNA
ttaggtaaagcttccctcac

SEQ ID NO: 42750 - DNA, 20 bp, synthetic construct
  source 1..20: mol_type = other DNA
catttggtttatgcctccac

SEQ ID NO: 42751 - DNA, 20 bp, synthetic construct
  source 1..20: mol_type = other DNA
gtgcacatcagcttgcgaaa

SEQ ID NO: 42752 - DNA, 20 bp, synthetic construct
  source 1..20: mol_type = other DNA
agccgctttaacccactctg

SEQ ID NO: 42753 - DNA, 20 bp, synthetic construct
  source 1..20: mol_type = other DNA
cctgttgtgccaaggagaag

SEQ ID NO: 42754 - DNA, 20 bp, synthetic construct
  source 1..20: mol_type = other DNA
tcttctggtttgcttcctct

SEQ ID NO: 42755 - DNA, 20 bp, synthetic construct
  source 1..20: mol_type = other DNA
gagaagcaggaaggtacatg

SEQ ID NO: 42756 - DNA, 20 bp, synthetic construct
  source 1..20: mol_type = other DNA
gcccaggtgggtgactcgcg

SEQ ID NO: 42757 - DNA, 20 bp, synthetic construct
  source 1..20: mol_type = other DNA
cagctcctcagtcacaatca

SEQ ID NO: 42758 - DNA, 20 bp, synthetic construct
  source 1..20: mol_type = other DNA
gacaagcaggaagtgaatgt

SEQ ID NO: 42759 - DNA, 20 bp, synthetic construct
  source 1..20: mol_type = other DNA
cctcctccagcagttccaag

SEQ ID NO: 42760 - DNA, 20 bp, synthetic construct
  source 1..20: mol_type = other DNA
cccgaaacaaagggtgctgg

SEQ ID NO: 42761 - DNA, 20 bp, synthetic construct
  source 1..20: mol_type = other DNA
cccgcagcagctgaaccccg

SEQ ID NO: 42762 - DNA, 20 bp, synthetic construct
  source 1..20: mol_type = other DNA
gggtgcggatgtgggtggtg

SEQ ID NO: 42763 - DNA, 20 bp, synthetic construct
  source 1..20: mol_type = other DNA
gtttctgcgccaggaacacg

SEQ ID NO: 42764 - DNA, 20 bp, synthetic construct
  source 1..20: mol_type = other DNA
gcatgtgctcccgggctccg

SEQ ID NO: 42765 - DNA, 20 bp, synthetic construct
  source 1..20: mol_type = other DNA
ccgtgtcgctgtgggttgtg

SEQ ID NO: 42766 - DNA, 20 bp, synthetic construct
  source 1..20: mol_type = other DNA
gcattcatacttgctttcca

SEQ ID NO: 42767 - DNA, 20 bp, synthetic construct
  source 1..20: mol_type = other DNA
tcaaccgagcaggtaacctt

SEQ ID NO: 42768 - DNA, 20 bp, synthetic construct
  source 1..20: mol_type = other DNA
agacagaacccgagaagacc

SEQ ID NO: 42769 - DNA, 20 bp, synthetic construct
  source 1..20: mol_type = other DNA
gcacggcttgcgcaggttgc

SEQ ID NO: 42770 - DNA, 20 bp, synthetic construct
  source 1..20: mol_type = other DNA
ccagccaatgaggcccgagt

SEQ ID NO: 42771 - DNA, 20 bp, synthetic construct
  source 1..20: mol_type = other DNA
ggttgatggcatggggtagc

SEQ ID NO: 42772 - DNA, 20 bp, synthetic construct
  source 1..20: mol_type = other DNA
gggcctcagtctcaaggagc

SEQ ID NO: 42773 - DNA, 20 bp, synthetic construct
  source 1..20: mol_type = other DNA
gggatccactgactgtccat

SEQ ID NO: 42774 - DNA, 20 bp, synthetic construct
  source 1..20: mol_type = other DNA
tggatcggaatcgtgaggat

SEQ ID NO: 42775 - DNA, 20 bp, synthetic construct
  source 1..20: mol_type = other DNA
aacaaccccttccaaggtga

SEQ ID NO: 42776 - DNA, 20 bp, synthetic construct
  source 1..20: mol_type = other DNA
cttgcaaccaacctcaatgt

SEQ ID NO: 42777 - DNA, 20 bp, synthetic construct
  source 1..20: mol_type = other DNA
tgactgggaaagagcccact

SEQ ID NO: 42778 - DNA, 20 bp, synthetic construct
  source 1..20: mol_type = other DNA
gaatgtccaacagccggcct

SEQ ID NO: 42779 - DNA, 20 bp, synthetic construct
  source 1..20: mol_type = other DNA
tcttgaaattccccagaaag

SEQ ID NO: 42780 - DNA, 20 bp, synthetic construct
  source 1..20: mol_type = other DNA
gaactgccagctcaggacct

SEQ ID NO: 42781 - DNA, 20 bp, synthetic construct
  source 1..20: mol_type = other DNA
tggcagacagagcaaaatgt

SEQ ID NO: 42782 - DNA, 20 bp, synthetic construct
  source 1..20: mol_type = other DNA
cgcagcgatgtctggagcta

SEQ ID NO: 42783 - DNA, 20 bp, synthetic construct
  source 1..20: mol_type = other DNA
gttctctttggagaacagga

SEQ ID NO: 42784 - DNA, 20 bp, synthetic construct
  source 1..20: mol_type = other DNA
aggtgaacacataggcctcg

SEQ ID NO: 42785 - DNA, 20 bp, synthetic construct
  source 1..20: mol_type = other DNA
cagattcttgaaccactgtt

SEQ ID NO: 42786 - DNA, 20 bp, synthetic construct
  source 1..20: mol_type = other DNA
caccaccccgccgtgctcaa

SEQ ID NO: 42787 - DNA, 20 bp, synthetic construct
  source 1..20: mol_type = other DNA
agtgattccggccggctggt

SEQ ID NO: 42788 - DNA, 20 bp, synthetic construct
  source 1..20: mol_type = other DNA
gctgaaccggcagctgcgcg

SEQ ID NO: 42789 - DNA, 20 bp, synthetic construct
  source 1..20: mol_type = other DNA
ctaccagaatgccgaggtga

SEQ ID NO: 42790 - DNA, 20 bp, synthetic construct
  source 1..20: mol_type = other DNA
gtccaccaatggcagtctgg

SEQ ID NO: 42791 - DNA, 20 bp, synthetic construct
  source 1..20: mol_type = other DNA
gcggatgatgggatgtgagc

SEQ ID NO: 42792 - DNA, 20 bp, synthetic construct
  source 1..20: mol_type = other DNA
ctgggtcatcttctcgcggt

SEQ ID NO: 42793 - DNA, 20 bp, synthetic construct
  source 1..20: mol_type = other DNA
atggaccatggtcaggtgag

SEQ ID NO: 42794 - DNA, 20 bp, synthetic construct
  source 1..20: mol_type = other DNA
caagcaggagatctccaggc

SEQ ID NO: 42795 - DNA, 20 bp, synthetic construct
  source 1..20: mol_type = other DNA
acctaaacaggaaaaaacac

SEQ ID NO: 42796 - DNA, 20 bp, synthetic construct
  source 1..20: mol_type = other DNA
aacctcctcctggcccgtga

SEQ ID NO: 42797 - DNA, 20 bp, synthetic construct
  source 1..20: mol_type = other DNA
agtccctgaaacgaattaag

SEQ ID NO: 42798 - DNA, 20 bp, synthetic construct
  source 1..20: mol_type = other DNA
tccctgccggcagatgacca

SEQ ID NO: 42799 - DNA, 20 bp, synthetic construct
  source 1..20: mol_type = other DNA
acgctgccaaagttgccctg

SEQ ID NO: 42800 - DNA, 20 bp, synthetic construct
  source 1..20: mol_type = other DNA
agctgatccagtggaagcgg

SEQ ID NO: 42801 - DNA, 20 bp, synthetic construct
  source 1..20: mol_type = other DNA
cacctgcatcaaccagacag

SEQ ID NO: 42802 - DNA, 20 bp, synthetic construct
  source 1..20: mol_type = other DNA
caccgacaggatcccctggg

SEQ ID NO: 42803 - DNA, 20 bp, synthetic construct
  source 1..20: mol_type = other DNA
ctgccaccatacttctctca

SEQ ID NO: 42804 - DNA, 20 bp, synthetic construct
  source 1..20: mol_type = other DNA
agcaaggcaccatgtggcag

SEQ ID NO: 42805 - DNA, 20 bp, synthetic construct
  source 1..20: mol_type = other DNA
acttcttaccaggtactgca

SEQ ID NO: 42806 - DNA, 20 bp, synthetic construct
  source 1..20: mol_type = other DNA
ccgatgactactgcaaactg

SEQ ID NO: 42807 - DNA, 20 bp, synthetic construct
  source 1..20: mol_type = other DNA
gtagcagactcgcagggaac

SEQ ID NO: 42808 - DNA, 20 bp, synthetic construct
  source 1..20: mol_type = other DNA
tcacgtcaaatccattctgg

SEQ ID NO: 42809 - DNA, 20 bp, synthetic construct
  source 1..20: mol_type = other DNA
ggtgggtaggaggtgacagg

SEQ ID NO: 42810 - DNA, 20 bp, synthetic construct
  source 1..20: mol_type = other DNA
gacatgtatctgcgaaaacg

SEQ ID NO: 42811 - DNA, 20 bp, synthetic construct
  source 1..20: mol_type = other DNA
tgcagcacatctgagctgtc

SEQ ID NO: 42812 - DNA, 20 bp, synthetic construct
  source 1..20: mol_type = other DNA
cacctgcaggccgcgagccc

SEQ ID NO: 42813 - DNA, 20 bp, synthetic construct
  source 1..20: mol_type = other DNA
gtgcaacggcatctcccagt

SEQ ID NO: 42814 - DNA, 20 bp, synthetic construct
  source 1..20: mol_type = other DNA
ctcgtgacaaggagatggaa

SEQ ID NO: 42815 - DNA, 20 bp, synthetic construct
  source 1..20: mol_type = other DNA
tgagctggcatcaaggagag

SEQ ID NO: 42816 - DNA, 20 bp, synthetic construct
  source 1..20: mol_type = other DNA
ggtacaaggtgatcagaagc

SEQ ID NO: 42817 - DNA, 20 bp, synthetic construct
  source 1..20: mol_type = other DNA
acttgagcagttccttgcgc

SEQ ID NO: 42818 - DNA, 20 bp, synthetic construct
  source 1..20: mol_type = other DNA
cctcttcaacttcctgtctg

SEQ ID NO: 42819 - DNA, 20 bp, synthetic construct
  source 1..20: mol_type = other DNA
agcccctcacccaggccagc

SEQ ID NO: 42820 - DNA, 20 bp, synthetic construct
  source 1..20: mol_type = other DNA
atccgtaatctggacaacgg

SEQ ID NO: 42821 - DNA, 20 bp, synthetic construct
  source 1..20: mol_type = other DNA
cgctgaggcccacgaggagg

SEQ ID NO: 42822 - DNA, 20 bp, synthetic construct
  source 1..20: mol_type = other DNA
gttagaagtcgggtcgtggg

SEQ ID NO: 42823 - DNA, 20 bp, synthetic construct
  source 1..20: mol_type = other DNA
agcgacgaatcctatggtaa

SEQ ID NO: 42824 - DNA, 20 bp, synthetic construct
  source 1..20: mol_type = other DNA
ggagaacgtccccggggcac

SEQ ID NO: 42825 - DNA, 20 bp, synthetic construct
  source 1..20: mol_type = other DNA
tgcggatgtgggtggtgagg

SEQ ID NO: 42826 - DNA, 20 bp, synthetic construct
  source 1..20: mol_type = other DNA
gcacagttgtcacaaaaagt

SEQ ID NO: 42827 - DNA, 20 bp, synthetic construct
  source 1..20: mol_type = other DNA
cgaccagcctggagaggtgt

SEQ ID NO: 42828 - DNA, 20 bp, synthetic construct
  source 1..20: mol_type = other DNA
ctgttgagtgctctcaatca

SEQ ID NO: 42829 - DNA, 20 bp, synthetic construct
  source 1..20: mol_type = other DNA
gaggcccataccaatctcct

SEQ ID NO: 42830 - DNA, 20 bp, synthetic construct
  source 1..20: mol_type = other DNA
tccccatcctggtcatcatt

SEQ ID NO: 42831 - DNA, 20 bp, synthetic construct
  source 1..20: mol_type = other DNA
tcctccttctttgaggagaa

SEQ ID NO: 42832 - DNA, 20 bp, synthetic construct
  source 1..20: mol_type = other DNA
cccacttcaggaatatggtg

SEQ ID NO: 42833 - DNA, 20 bp, synthetic construct
  source 1..20: mol_type = other DNA
cccaggcatgtcagccacgt

SEQ ID NO: 42834 - DNA, 20 bp, synthetic construct
  source 1..20: mol_type = other DNA
aggagcagcgcaagaccatc

SEQ ID NO: 42835 - DNA, 20 bp, synthetic construct
  source 1..20: mol_type = other DNA
ctcccagctcaccctgctgg

SEQ ID NO: 42836 - DNA, 20 bp, synthetic construct
  source 1..20: mol_type = other DNA
catgcagatccggcactgga

SEQ ID NO: 42837 - DNA, 20 bp, synthetic construct
  source 1..20: mol_type = other DNA
gacattgaggtgtatttcac

SEQ ID NO: 42838 - DNA, 20 bp, synthetic construct
  source 1..20: mol_type = other DNA
ctccaggtccatgatgtact

SEQ ID NO: 42839 - DNA, 20 bp, synthetic construct
  source 1..20: mol_type = other DNA
ttgtgctgaaataaagaaaa

SEQ ID NO: 42840 - DNA, 20 bp, synthetic construct
  source 1..20: mol_type = other DNA
gcaggcctttgtcctcctaa

SEQ ID NO: 42841 - DNA, 20 bp, synthetic construct
  source 1..20: mol_type = other DNA
cccttggtgagtgcctgggg

SEQ ID NO: 42842 - DNA, 20 bp, synthetic construct
  source 1..20: mol_type = other DNA
ggtgcagaaaggtatacatc

SEQ ID NO: 42843 - DNA, 20 bp, synthetic construct
  source 1..20: mol_type = other DNA
tccctctacccatgtgatgc

SEQ ID NO: 42844 - DNA, 20 bp, synthetic construct
  source 1..20: mol_type = other DNA
ctcagtgtagtaaagatcca

SEQ ID NO: 42845 - DNA, 20 bp, synthetic construct
  source 1..20: mol_type = other DNA
atcttgactctcaatccaag

SEQ ID NO: 42846 - DNA, 20 bp, synthetic construct
  source 1..20: mol_type = other DNA
cagaggaagtggaggaagag

SEQ ID NO: 42847 - DNA, 20 bp, synthetic construct
  source 1..20: mol_type = other DNA
ctggggcgccccacgatgga

SEQ ID NO: 42848 - DNA, 20 bp, synthetic construct
  source 1..20: mol_type = other DNA
cgtaagtggggacccgtcgt

SEQ ID NO: 42849 - DNA, 20 bp, synthetic construct
  source 1..20: mol_type = other DNA
cagactgaccagcgggagat

SEQ ID NO: 42850 - DNA, 20 bp, synthetic construct
  source 1..20: mol_type = other DNA
tcaccaggtcactgcggtgc

SEQ ID NO: 42851 - DNA, 20 bp, synthetic construct
  source 1..20: mol_type = other DNA
tgggctgagagcgaggggag

SEQ ID NO: 42852 - DNA, 20 bp, synthetic construct
  source 1..20: mol_type = other DNA
tgtctgtgcgcgagctgaac

SEQ ID NO: 42853 - DNA, 20 bp, synthetic construct
  source 1..20: mol_type = other DNA
acctgcagcttccagctggc

SEQ ID NO: 42854 - DNA, 20 bp, synthetic construct
  source 1..20: mol_type = other DNA
gggcagaagattgtggtgca

SEQ ID NO: 42855 - DNA, 20 bp, synthetic construct
  source 1..20: mol_type = other DNA
gtcaggcctagaaattggga

SEQ ID NO: 42856 - DNA, 20 bp, synthetic construct
  source 1..20: mol_type = other DNA
gtgcagatgcccggcaccga

SEQ ID NO: 42857 - DNA, 20 bp, synthetic construct
  source 1..20: mol_type = other DNA
agggagcagagatgtgggaa

SEQ ID NO: 42858 - DNA, 20 bp, synthetic construct
  source 1..20: mol_type = other DNA
gagcgccatcatccagaatg

SEQ ID NO: 42859 - DNA, 20 bp, synthetic construct
  source 1..20: mol_type = other DNA
tttcagcagcataaaacctg

SEQ ID NO: 42860 - DNA, 20 bp, synthetic construct
  source 1..20: mol_type = other DNA
agtgtacgagaacacagggg

SEQ ID NO: 42861 - DNA, 20 bp, synthetic construct
  source 1..20: mol_type = other DNA
cctcaaatgtggcaaagaca

SEQ ID NO: 42862 - DNA, 20 bp, synthetic construct
  source 1..20: mol_type = other DNA
gctcctgctgctgcccatcc

SEQ ID NO: 42863 - DNA, 20 bp, synthetic construct
  source 1..20: mol_type = other DNA
gccagtgcctggccctgctg

SEQ ID NO: 42864 - DNA, 20 bp, synthetic construct
  source 1..20: mol_type = other DNA
agcacctctttgcccaggtg

SEQ ID NO: 42865 - DNA, 20 bp, synthetic construct
  source 1..20: mol_type = other DNA
gcagccaggttttgctcccg

SEQ ID NO: 42866 - DNA, 20 bp, synthetic construct
  source 1..20: mol_type = other DNA
cctgcaggccgcgagcccgg

SEQ ID NO: 42867 - DNA, 20 bp, synthetic construct
  source 1..20: mol_type = other DNA
gaagcagcagaccatcatcc

SEQ ID NO: 42868 - DNA, 20 bp, synthetic construct
  source 1..20: mol_type = other DNA
cctcttcctccgcgggggat

SEQ ID NO: 42869 - DNA, 20 bp, synthetic construct
  source 1..20: mol_type = other DNA
atacttcaagaaggtgctgg

SEQ ID NO: 42870 - DNA, 20 bp, synthetic construct
  source 1..20: mol_type = other DNA
gacggagaagcagcagatgc

SEQ ID NO: 42871 - DNA, 20 bp, synthetic construct
  source 1..20: mol_type = other DNA
cggagcgtgatgaatccagt

SEQ ID NO: 42872 - DNA, 20 bp, synthetic construct
  source 1..20: mol_type = other DNA
caacgggcacacgaaggtgg

SEQ ID NO: 42873 - DNA, 20 bp, synthetic construct
  source 1..20: mol_type = other DNA
gctcactcaccaggggcggg

SEQ ID NO: 42874 - DNA, 20 bp, synthetic construct
  source 1..20: mol_type = other DNA
gggagatctatggccgggtg

SEQ ID NO: 42875 - DNA, 20 bp, synthetic construct
  source 1..20: mol_type = other DNA
tcttcagatcgagcttctcc

SEQ ID NO: 42876 - DNA, 20 bp, synthetic construct
  source 1..20: mol_type = other DNA
tcttctaagattgaagaatt

SEQ ID NO: 42877 - DNA, 20 bp, synthetic construct
  source 1..20: mol_type = other DNA
gctaccggaggtgccagaaa

SEQ ID NO: 42878 - DNA, 20 bp, synthetic construct
  source 1..20: mol_type = other DNA
ggccttcctccactgtggag

SEQ ID NO: 42879 - DNA, 20 bp, synthetic construct
  source 1..20: mol_type = other DNA
tccaaaatccagaatctaaa

SEQ ID NO: 42880 - DNA, 20 bp, synthetic construct
  source 1..20: mol_type = other DNA
catgcagaatcacattcctc

SEQ ID NO: 42881 - DNA, 20 bp, synthetic construct
  source 1..20: mol_type = other DNA
tataggtcagtgggacagca

SEQ ID NO: 42882 - DNA, 20 bp, synthetic construct
  source 1..20: mol_type = other DNA
cttaaacggccaaggaagca

SEQ ID NO: 42883 - DNA, 20 bp, synthetic construct
  source 1..20: mol_type = other DNA
cactctcaggacggccttcg

SEQ ID NO: 42884 - DNA, 20 bp, synthetic construct
  source 1..20: mol_type = other DNA
ctcccttgagaagagattgt

SEQ ID NO: 42885 - DNA, 20 bp, synthetic construct
  source 1..20: mol_type = other DNA
cactcacccgcagggaggag

SEQ ID NO: 42886 - DNA, 20 bp, synthetic construct
  source 1..20: mol_type = other DNA
tggaggagaactgccagctc

SEQ ID NO: 42887 - DNA, 20 bp, synthetic construct
  source 1..20: mol_type = other DNA
ttaccttcttcatagttcct

SEQ ID NO: 42888 - DNA, 20 bp, synthetic construct
  source 1..20: mol_type = other DNA
agttagaacaagagggccca

SEQ ID NO: 42889 - DNA, 20 bp, synthetic construct
  source 1..20: mol_type = other DNA
tcatcaggaaccatgatcag

SEQ ID NO: 42890 - DNA, 20 bp, synthetic construct
  source 1..20: mol_type = other DNA
ctacctgctgtgtataagag

SEQ ID NO: 42891 - DNA, 20 bp, synthetic construct
  source 1..20: mol_type = other DNA
catacacccagctctggaac

SEQ ID NO: 42892 - DNA, 20 bp, synthetic construct
  source 1..20: mol_type = other DNA
ggtgtatgtgctgtcctcac

SEQ ID NO: 42893 - DNA, 20 bp, synthetic construct
  source 1..20: mol_type = other DNA
ccaccacctctgagttgctt

SEQ ID NO: 42894 - DNA, 20 bp, synthetic construct
  source 1..20: mol_type = other DNA
ttcacaaagtctggaaggaa

SEQ ID NO: 42895 - DNA, 20 bp, synthetic construct
  source 1..20: mol_type = other DNA
ctccagggccacggggtcat

SEQ ID NO: 42896 - DNA, 20 bp, synthetic construct
  source 1..20: mol_type = other DNA
tgtatagggccagtagctta

SEQ ID NO: 42897 - DNA, 20 bp, synthetic construct
  source 1..20: mol_type = other DNA
ctgcaggtatgaccccgaag

SEQ ID NO: 42898 - DNA, 20 bp, synthetic construct
  source 1..20: mol_type = other DNA
aggccgaagtgcagagcaac

SEQ ID NO: 42899 - DNA, 20 bp, synthetic construct
  source 1..20: mol_type = other DNA
cgtcggtgcagaggtaatga

SEQ ID NO: 42900 - DNA, 20 bp, synthetic construct
  source 1..20: mol_type = other DNA
cgaccgcaaggaggccctgg

SEQ ID NO: 42901 - DNA, 20 bp, synthetic construct
  source 1..20: mol_type = other DNA
ggaccgaatggagaagtctc

SEQ ID NO: 42902 - DNA, 20 bp, synthetic construct
  source 1..20: mol_type = other DNA
ttcacacactccctgccttc

SEQ ID NO: 42903 - DNA, 20 bp, synthetic construct
  source 1..20: mol_type = other DNA
cgcctcctacctttaaccac

SEQ ID NO: 42904 - DNA, 20 bp, synthetic construct
  source 1..20: mol_type = other DNA
cctcctccatcttattcaac

SEQ ID NO: 42905 - DNA, 20 bp, synthetic construct
  source 1..20: mol_type = other DNA
atctcttctcaagggagttc

SEQ ID NO: 42906 - DNA, 20 bp, synthetic construct
  source 1..20: mol_type = other DNA
cttcagaaggaggcgggtga

SEQ ID NO: 42907 - DNA, 20 bp, synthetic construct
  source 1..20: mol_type = other DNA
ctggggcgcccgacgatgga

SEQ ID NO: 42908 - DNA, 20 bp, synthetic construct
  source 1..20: mol_type = other DNA
gtaggcatgtgcaagggctt

SEQ ID NO: 42909 - DNA, 20 bp, synthetic construct
  source 1..20: mol_type = other DNA
tgtatccctggctggacaca

SEQ ID NO: 42910 - DNA, 20 bp, synthetic construct
  source 1..20: mol_type = other DNA
gctcacttacagcactcaac

SEQ ID NO: 42911 - DNA, 20 bp, synthetic construct
  source 1..20: mol_type = other DNA
tgccacttctgctcattgat

SEQ ID NO: 42912 - DNA, 20 bp, synthetic construct
  source 1..20: mol_type = other DNA
cgatctattgctctgtgcaa

SEQ ID NO: 42913 - DNA, 20 bp, synthetic construct
  source 1..20: mol_type = other DNA
ccccagcacacccatcatcc

SEQ ID NO: 42914 - DNA, 20 bp, synthetic construct
  source 1..20: mol_type = other DNA
caggtgagtgagcaaaaggg

SEQ ID NO: 42915 - DNA, 20 bp, synthetic construct
  source 1..20: mol_type = other DNA
gagggattcgggggcatacc

SEQ ID NO: 42916 - DNA, 20 bp, synthetic construct
  source 1..20: mol_type = other DNA
atcaatgtggaacagctgag

SEQ ID NO: 42917 - DNA, 20 bp, synthetic construct
  source 1..20: mol_type = other DNA
ccattatcccatagtcccac

SEQ ID NO: 42918 - DNA, 20 bp, synthetic construct
  source 1..20: mol_type = other DNA
gcaccaaattcccggtgaag

SEQ ID NO: 42919 - DNA, 20 bp, synthetic construct
  source 1..20: mol_type = other DNA
gggagaatgtggagtgtaac

SEQ ID NO: 42920 - DNA, 20 bp, synthetic construct
  source 1..20: mol_type = other DNA
ctcctcaatggctcgatcca

SEQ ID NO: 42921 - DNA, 20 bp, synthetic construct
  source 1..20: mol_type = other DNA
aatcagacaggcacgaaggg

SEQ ID NO: 42922 - DNA, 20 bp, synthetic construct
  source 1..20: mol_type = other DNA
gcttgcccgcgtgcttccag

SEQ ID NO: 42923 - DNA, 20 bp, synthetic construct
  source 1..20: mol_type = other DNA
ttgagggtcgcgccggccgg

SEQ ID NO: 42924 - DNA, 20 bp, synthetic construct
  source 1..20: mol_type = other DNA
cctaaagggaaaggagaatg

SEQ ID NO: 42925 - DNA, 20 bp, synthetic construct
  source 1..20: mol_type = other DNA
caatagatcgctccatggtg

SEQ ID NO: 42926 - DNA, 20 bp, synthetic construct
  source 1..20: mol_type = other DNA
cccccacgagcttgtaggaa

SEQ ID NO: 42927 - DNA, 20 bp, synthetic construct
  source 1..20: mol_type = other DNA
ggtaggagagtgtacggagg

SEQ ID NO: 42928 - DNA, 20 bp, synthetic construct
  source 1..20: mol_type = other DNA
gaatggaccatggtcaggtg

SEQ ID NO: 42929 - DNA, 20 bp, synthetic construct
  source 1..20: mol_type = other DNA
agcccagctctccatcctcc

SEQ ID NO: 42930 - DNA, 20 bp, synthetic construct
  source 1..20: mol_type = other DNA
ttgcaggactccctggcact

SEQ ID NO: 42931 - DNA, 20 bp, synthetic construct
  source 1..20: mol_type = other DNA
atctgaagctgaaggcggac

SEQ ID NO: 42932 - DNA, 20 bp, synthetic construct
  source 1..20: mol_type = other DNA
gattgctcctgagtgtgttg

SEQ ID NO: 42933 - DNA, 20 bp, synthetic construct
  source 1..20: mol_type = other DNA
acgaggaggtggccgagcca

SEQ ID NO: 42934 - DNA, 20 bp, synthetic construct
  source 1..20: mol_type = other DNA
gccaccattgtctttcctag

SEQ ID NO: 42935 - DNA, 20 bp, synthetic construct
  source 1..20: mol_type = other DNA
cggacgggtggtagacggtg

SEQ ID NO: 42936 - DNA, 20 bp, synthetic construct
  source 1..20: mol_type = other DNA
gaatgctccaggcatgtgag

SEQ ID NO: 42937 - DNA, 20 bp, synthetic construct
  source 1..20: mol_type = other DNA
tcctcccagttctgccggaa

SEQ ID NO: 42938 - DNA, 20 bp, synthetic construct
  source 1..20: mol_type = other DNA
tctgtctacaccaagtgagt

SEQ ID NO: 42939 - DNA, 20 bp, synthetic construct
  source 1..20: mol_type = other DNA
atagtggacatctgcatcac

SEQ ID NO: 42940 - DNA, 20 bp, synthetic construct
  source 1..20: mol_type = other DNA
gcgtgacttccacatgagcg

SEQ ID NO: 42941 - DNA, 20 bp, synthetic construct
  source 1..20: mol_type = other DNA
aaatccttacctctttccct

SEQ ID NO: 42942 - DNA, 20 bp, synthetic construct
  source 1..20: mol_type = other DNA
ccgcccagaagagccgacag

SEQ ID NO: 42943 - DNA, 20 bp, synthetic construct
  source 1..20: mol_type = other DNA
atagctccaacccatcctgg

SEQ ID NO: 42944 - DNA, 20 bp, synthetic construct
  source 1..20: mol_type = other DNA
ctgcccgacccggccacggg

SEQ ID NO: 42945 - DNA, 20 bp, synthetic construct
  source 1..20: mol_type = other DNA
cgaggcagatggccacccac

SEQ ID NO: 42946 - DNA, 20 bp, synthetic construct
  source 1..20: mol_type = other DNA
actgggtacctgcgggatgg

SEQ ID NO: 42947 - DNA, 20 bp, synthetic construct
  source 1..20: mol_type = other DNA
aacttacctctcccaagtca

SEQ ID NO: 42948 - DNA, 20 bp, synthetic construct
  source 1..20: mol_type = other DNA
ctacgggagggtaaaggaaa

SEQ ID NO: 42949 - DNA, 20 bp, synthetic construct
  source 1..20: mol_type = other DNA
ttgtgcaagagattggcagt

SEQ ID NO: 42950 - DNA, 20 bp, synthetic construct
  source 1..20: mol_type = other DNA
cgcggtaaaggcgtaccaga

SEQ ID NO: 42951 - DNA, 20 bp, synthetic construct
  source 1..20: mol_type = other DNA
ccatgcccaccatcacgccc

SEQ ID NO: 42952 - DNA, 20 bp, synthetic construct
  source 1..20: mol_type = other DNA
tggtgatagttgatgagaag

SEQ ID NO: 42953 - DNA, 20 bp, synthetic construct
  source 1..20: mol_type = other DNA
ccaccattgccacctgcggg

SEQ ID NO: 42954 - DNA, 20 bp, synthetic construct
  source 1..20: mol_type = other DNA
gctggtcatggagatggctg

SEQ ID NO: 42955 - DNA, 20 bp, synthetic construct
  source 1..20: mol_type = other DNA
ttggtgcccaccaggatgat

SEQ ID NO: 42956 - DNA, 20 bp, synthetic construct
  source 1..20: mol_type = other DNA
cctggatgagcatcttgcgc

SEQ ID NO: 42957 - DNA, 20 bp, synthetic construct
  source 1..20: mol_type = other DNA
ttctgccaggaagacctaga

SEQ ID NO: 42958 - DNA, 20 bp, synthetic construct
  source 1..20: mol_type = other DNA
agctcctgatggggtaggga

SEQ ID NO: 42959 - DNA, 20 bp, synthetic construct
  source 1..20: mol_type = other DNA
ctccaggtgggtgtgggctc

SEQ ID NO: 42960 - DNA, 20 bp, synthetic construct
  source 1..20: mol_type = other DNA
taatccacaggagaacatta

SEQ ID NO: 42961 - DNA, 20 bp, synthetic construct
  source 1..20: mol_type = other DNA
gacaattaccggcgagccta

SEQ ID NO: 42962 - DNA, 20 bp, synthetic construct
  source 1..20: mol_type = other DNA
caaggtcatgcgagacaaca

SEQ ID NO: 42963 - DNA, 20 bp, synthetic construct
  source 1..20: mol_type = other DNA
catggaacaggggaagggcc

SEQ ID NO: 42964 - DNA, 20 bp, synthetic construct
  source 1..20: mol_type = other DNA
ggtcccacagtgttcacaga

SEQ ID NO: 42965 - DNA, 20 bp, synthetic construct
  source 1..20: mol_type = other DNA
cctgcaccagatccttcttg

SEQ ID NO: 42966 - DNA, 20 bp, synthetic construct
  source 1..20: mol_type = other DNA
gactgaaagagaaaacctct

SEQ ID NO: 42967 - DNA, 20 bp, synthetic construct
  source 1..20: mol_type = other DNA
caggcagagctggaaggacg

SEQ ID NO: 42968 - DNA, 20 bp, synthetic construct
  source 1..20: mol_type = other DNA
acttctcacagcaggtggac

SEQ ID NO: 42969 - DNA, 20 bp, synthetic construct
  source 1..20: mol_type = other DNA
tagggcttcaccctgttaca

SEQ ID NO: 42970 - DNA, 20 bp, synthetic construct
  source 1..20: mol_type = other DNA
gattcatacctgctgatgtg

SEQ ID NO: 42971 - DNA, 20 bp, synthetic construct
  source 1..20: mol_type = other DNA
tgccatcaagcagtgccggc

SEQ ID NO: 42972 - DNA, 20 bp, synthetic construct
  source 1..20: mol_type = other DNA
tccatgcctgaaatgaatta

SEQ ID NO: 42973 - DNA, 20 bp, synthetic construct
  source 1..20: mol_type = other DNA
caaggaccagcttaagaccg

SEQ ID NO: 42974 - DNA, 20 bp, synthetic construct
  source 1..20: mol_type = other DNA
gtgggagagggcctctaggt

SEQ ID NO: 42975 - DNA, 20 bp, synthetic construct
  source 1..20: mol_type = other DNA
gctcgcttcttggtaagctc

SEQ ID NO: 42976 - DNA, 20 bp, synthetic construct
  source 1..20: mol_type = other DNA
gcttcttgaggtggctcatg

SEQ ID NO: 42977 - DNA, 20 bp, synthetic construct
  source 1..20: mol_type = other DNA
tccccctgttctgggcgatc

SEQ ID NO: 42978 - DNA, 20 bp, synthetic construct
  source 1..20: mol_type = other DNA
ccggaaggtgctcctggctc

SEQ ID NO: 42979 - DNA, 20 bp, synthetic construct
  source 1..20: mol_type = other DNA
aacagctcatcgtccctgca

SEQ ID NO: 42980 - DNA, 20 bp, synthetic construct
  source 1..20: mol_type = other DNA
aggcgtattgtaccctggaa

SEQ ID NO: 42981 - DNA, 20 bp, synthetic construct
  source 1..20: mol_type = other DNA
cagcgaaggtgtggaagaag

SEQ ID NO: 42982 - DNA, 20 bp, synthetic construct
  source 1..20: mol_type = other DNA
atgatggtggccttcacctg

SEQ ID NO: 42983 - DNA, 20 bp, synthetic construct
  source 1..20: mol_type = other DNA
atcacttacatctccagcga

SEQ ID NO: 42984 - DNA, 20 bp, synthetic construct
  source 1..20: mol_type = other DNA
agatactttctggaaatgag

SEQ ID NO: 42985 - DNA, 20 bp, synthetic construct
  source 1..20: mol_type = other DNA
gccccggctctcaagagcac

SEQ ID NO: 42986 - DNA, 20 bp, synthetic construct
  source 1..20: mol_type = other DNA
gggccaagtttcccattaag

SEQ ID NO: 42987 - DNA, 20 bp, synthetic construct
  source 1..20: mol_type = other DNA
cggctgtgtcccagaggccc

SEQ ID NO: 42988 - DNA, 20 bp, synthetic construct
  source 1..20: mol_type = other DNA
accaaaatcttgtttcctgg

SEQ ID NO: 42989 - DNA, 20 bp, synthetic construct
  source 1..20: mol_type = other DNA
agcgcaggtccatgtcggct

SEQ ID NO: 42990 - DNA, 20 bp, synthetic construct
  source 1..20: mol_type = other DNA
ctgctggaaggtggacagtg

SEQ ID NO: 42991 - DNA, 20 bp, synthetic construct
  source 1..20: mol_type = other DNA
catagccctggattctacac

SEQ ID NO: 42992 - DNA, 20 bp, synthetic construct
  source 1..20: mol_type = other DNA
tggtggcgaggggagatcta

SEQ ID NO: 42993 - DNA, 20 bp, synthetic construct
  source 1..20: mol_type = other DNA
gaagggcctggggggtcagg

SEQ ID NO: 42994 - DNA, 20 bp, synthetic construct
  source 1..20: mol_type = other DNA
aaacacatcgtgtacctcta

SEQ ID NO: 42995 - DNA, 20 bp, synthetic construct
  source 1..20: mol_type = other DNA
aaatcaacaagaacgaagag

SEQ ID NO: 42996 - DNA, 20 bp, synthetic construct
  source 1..20: mol_type = other DNA
ggattctacactggcaaacc

SEQ ID NO: 42997 - DNA, 20 bp, synthetic construct
  source 1..20: mol_type = other DNA
tcaccacaactggcaaggag

SEQ ID NO: 42998 - DNA, 20 bp, synthetic construct
  source 1..20: mol_type = other DNA
aggctggctgtaaagggaca

SEQ ID NO: 42999 - DNA, 20 bp, synthetic construct
  source 1..20: mol_type = other DNA
acatggaaagctcatcttag

SEQ ID NO: 43000 - DNA, 20 bp, synthetic construct
  source 1..20: mol_type = other DNA
cccgctgaaagtccctctgc

SEQ ID NO: 43001 - DNA, 20 bp, synthetic construct
  source 1..20: mol_type = other DNA
cccactggcacacctgagag

SEQ ID NO: 43002 - DNA, 20 bp, synthetic construct
  source 1..20: mol_type = other DNA
acttctactcactctcatga

SEQ ID NO: 43003 - DNA, 20 bp, synthetic construct
  source 1..20: mol_type = other DNA
ttccctcagtgctcaccgac

SEQ ID NO: 43004 - DNA, 20 bp, synthetic construct
  source 1..20: mol_type = other DNA
caggtagggtggctcccttc

SEQ ID NO: 43005 - DNA, 20 bp, synthetic construct
  source 1..20: mol_type = other DNA
tcaggtccacattgttgtcc

SEQ ID NO: 43006 - DNA, 20 bp, synthetic construct
  source 1..20: mol_type = other DNA
aatcttcatcttgtgatagg

SEQ ID NO: 43007 - DNA, 20 bp, synthetic construct
  source 1..20: mol_type = other DNA
caggcctttgtcctcctaag

SEQ ID NO: 43008 - DNA, 20 bp, synthetic construct
  source 1..20: mol_type = other DNA
ccaaacaaccagcgccggag

SEQ ID NO: 43009 - DNA, 20 bp, synthetic construct
  source 1..20: mol_type = other DNA
gctgaccacgtccagccccg

SEQ ID NO: 43010 - DNA, 20 bp, synthetic construct
  source 1..20: mol_type = other DNA
gaactgtacaaactggtgac

SEQ ID NO: 43011 - DNA, 20 bp, synthetic construct
  source 1..20: mol_type = other DNA
gccagcttcctcctgaggaa

SEQ ID NO: 43012 - DNA, 20 bp, synthetic construct
  source 1..20: mol_type = other DNA
cgccgacgagcggatgaagg

SEQ ID NO: 43013 - DNA, 20 bp, synthetic construct
  source 1..20: mol_type = other DNA
catcaggaaccatgatcaga

SEQ ID NO: 43014 - DNA, 20 bp, synthetic construct
  source 1..20: mol_type = other DNA
gacagcggagcagcaagagc

SEQ ID NO: 43015 - DNA, 20 bp, synthetic construct
  source 1..20: mol_type = other DNA
tgccagggtctacctgaacg

SEQ ID NO: 43016 - DNA, 20 bp, synthetic construct
  source 1..20: mol_type = other DNA
gggctctggggagcgaagag

SEQ ID NO: 43017 - DNA, 20 bp, synthetic construct
  source 1..20: mol_type = other DNA
ctcttcctccgcgggggatg

SEQ ID NO: 43018 - DNA, 20 bp, synthetic construct
  source 1..20: mol_type = other DNA
caccttgcagttccccttca

SEQ ID NO: 43019 - DNA, 20 bp, synthetic construct
  source 1..20: mol_type = other DNA
cccagcccagctgctgccgg

SEQ ID NO: 43020 - DNA, 20 bp, synthetic construct
  source 1..20: mol_type = other DNA
cggacagacggtgagtccac

SEQ ID NO: 43021 - DNA, 20 bp, synthetic construct
  source 1..20: mol_type = other DNA
gttacctcatagtctgggtt

SEQ ID NO: 43022 - DNA, 20 bp, synthetic construct
  source 1..20: mol_type = other DNA
acacttcatgatggagttga

SEQ ID NO: 43023 - DNA, 20 bp, synthetic construct
  source 1..20: mol_type = other DNA
cgccaggtgcaggggcgtct

SEQ ID NO: 43024 - DNA, 20 bp, synthetic construct
  source 1..20: mol_type = other DNA
gggagcagagatgtgggaat

SEQ ID NO: 43025 - DNA, 20 bp, synthetic construct
  source 1..20: mol_type = other DNA
cggggaggcgcccactcacc

SEQ ID NO: 43026 - DNA, 20 bp, synthetic construct
  source 1..20: mol_type = other DNA
cggagagtaagggcataggt

SEQ ID NO: 43027 - DNA, 20 bp, synthetic construct
  source 1..20: mol_type = other DNA
ccttcattgggtacaaggag

SEQ ID NO: 43028 - DNA, 20 bp, synthetic construct
  source 1..20: mol_type = other DNA
tgctgcttaggtgagaatct

SEQ ID NO: 43029 - DNA, 20 bp, synthetic construct
  source 1..20: mol_type = other DNA
ggtcgagtggggactgcagg

SEQ ID NO: 43030 - DNA, 20 bp, synthetic construct
  source 1..20: mol_type = other DNA
cctggtgcaggtggttggtg

SEQ ID NO: 43031 - DNA, 20 bp, synthetic construct
  source 1..20: mol_type = other DNA
cagagaaaaaggctttccgg

SEQ ID NO: 43032 - DNA, 20 bp, synthetic construct
  source 1..20: mol_type = other DNA
ccaactcaacaagagcaaca

SEQ ID NO: 43033 - DNA, 20 bp, synthetic construct
  source 1..20: mol_type = other DNA
gcagtcagacatctggagca

SEQ ID NO: 43034 - DNA, 20 bp, synthetic construct
  source 1..20: mol_type = other DNA
atggactgaatgcgaatgat

SEQ ID NO: 43035 - DNA, 20 bp, synthetic construct
  source 1..20: mol_type = other DNA
acacccatccaacctgatgc

SEQ ID NO: 43036 - DNA, 20 bp, synthetic construct
  source 1..20: mol_type = other DNA
gcttacctcactctgtcata

SEQ ID NO: 43037 - DNA, 20 bp, synthetic construct
  source 1..20: mol_type = other DNA
ggtaaaggccagtctagtgg

SEQ ID NO: 43038 - DNA, 20 bp, synthetic construct
  source 1..20: mol_type = other DNA
gcagctccttgatatcctgc

SEQ ID NO: 43039 - DNA, 20 bp, synthetic construct
  source 1..20: mol_type = other DNA
gatctgcgccttgggggcca

SEQ ID NO: 43040 - DNA, 20 bp, synthetic construct
  source 1..20: mol_type = other DNA
gtcctttgtgagtatggtgt

SEQ ID NO: 43041 - DNA, 20 bp, synthetic construct
  source 1..20: mol_type = other DNA
catctgtaggtctgagattg

SEQ ID NO: 43042 - DNA, 20 bp, synthetic construct
  source 1..20: mol_type = other DNA
gaccttacactgacgcaggt

SEQ ID NO: 43043 - DNA, 20 bp, synthetic construct
  source 1..20: mol_type = other DNA
aagactagatgttcctgaaa

SEQ ID NO: 43044 - DNA, 20 bp, synthetic construct
  source 1..20: mol_type = other DNA
gcttcaggtttactcaaaaa

SEQ ID NO: 43045 - DNA, 20 bp, synthetic construct
  source 1..20: mol_type = other DNA
caaactggtgcagctgtatg

SEQ ID NO: 43046 - DNA, 20 bp, synthetic construct
  source 1..20: mol_type = other DNA
ggtggagtatctgaagctga

SEQ ID NO: 43047 - DNA, 20 bp, synthetic construct
  source 1..20: mol_type = other DNA
atacaggtacacagctgggg

SEQ ID NO: 43048 - DNA, 20 bp, synthetic construct
  source 1..20: mol_type = other DNA
gcagctgaaccccgaggcgc

SEQ ID NO: 43049 - DNA, 20 bp, synthetic construct
  source 1..20: mol_type = other DNA
ccatggctgaggcgcccgcc

SEQ ID NO: 43050 - DNA, 20 bp, synthetic construct
  source 1..20: mol_type = other DNA
cagcgacccagaggagctca

SEQ ID NO: 43051 - DNA, 20 bp, synthetic construct
  source 1..20: mol_type = other DNA
tcatccggtagtggagccgg

SEQ ID NO: 43052 - DNA, 20 bp, synthetic construct
  source 1..20: mol_type = other DNA
ctctctttctgtaaacaaga

SEQ ID NO: 43053 - DNA, 20 bp, synthetic construct
  source 1..20: mol_type = other DNA
atcgtgatggactccggtga

SEQ ID NO: 43054 - DNA, 20 bp, synthetic construct
  source 1..20: mol_type = other DNA
gtagtgctttggcatatgct

SEQ ID NO: 43055 - DNA, 20 bp, synthetic construct
  source 1..20: mol_type = other DNA
caggcatgagcgccacggtg

SEQ ID NO: 43056 - DNA, 20 bp, synthetic construct
  source 1..20: mol_type = other DNA
ccaagactgcctttgactct

SEQ ID NO: 43057 - DNA, 20 bp, synthetic construct
  source 1..20: mol_type = other DNA
ttacctgaagtgaaggccct

SEQ ID NO: 43058 - DNA, 20 bp, synthetic construct
  source 1..20: mol_type = other DNA
caccaagtggaacaagcatg

SEQ ID NO: 43059 - DNA, 20 bp, synthetic construct
  source 1..20: mol_type = other DNA
gtccttgctcggggagctgc

SEQ ID NO: 43060 - DNA, 20 bp, synthetic construct
  source 1..20: mol_type = other DNA
caggacgcggacgagcgtcg

SEQ ID NO: 43061 - DNA, 20 bp, synthetic construct
  source 1..20: mol_type = other DNA
tcacctttgaattcagccag

SEQ ID NO: 43062 - DNA, 20 bp, synthetic construct
  source 1..20: mol_type = other DNA
ccagtcaaccagcagttcca

SEQ ID NO: 43063 - DNA, 20 bp, synthetic construct
  source 1..20: mol_type = other DNA
tcggtggggaagggcctggg

SEQ ID NO: 43064 - DNA, 20 bp, synthetic construct
  source 1..20: mol_type = other DNA
ctcaccagacttcagccagc

SEQ ID NO: 43065 - DNA, 20 bp, synthetic construct
  source 1..20: mol_type = other DNA
ctacgggccacagagggcgt

SEQ ID NO: 43066 - DNA, 20 bp, synthetic construct
  source 1..20: mol_type = other DNA
ttgctacgacggcccacgag

SEQ ID NO: 43067 - DNA, 20 bp, synthetic construct
  source 1..20: mol_type = other DNA
aaggagaaagataggcgctg

SEQ ID NO: 43068 - DNA, 20 bp, synthetic construct
  source 1..20: mol_type = other DNA
caagctgcagcagcagatga

SEQ ID NO: 43069 - DNA, 20 bp, synthetic construct
  source 1..20: mol_type = other DNA
gatcaacgggggggccacgt

SEQ ID NO: 43070 - DNA, 20 bp, synthetic construct
  source 1..20: mol_type = other DNA
gagaaggctggccgatcttc

SEQ ID NO: 43071 - DNA, 20 bp, synthetic construct
  source 1..20: mol_type = other DNA
ggcacaggcctacaacccga

SEQ ID NO: 43072 - DNA, 20 bp, synthetic construct
  source 1..20: mol_type = other DNA
ggatcaggcgcccgagggcc

SEQ ID NO: 43073 - DNA, 20 bp, synthetic construct
  source 1..20: mol_type = other DNA
gcaagtaccccgggctggtg

SEQ ID NO: 43074 - DNA, 20 bp, synthetic construct
  source 1..20: mol_type = other DNA
ggcactgaggaaagagaaga

SEQ ID NO: 43075 - DNA, 20 bp, synthetic construct
  source 1..20: mol_type = other DNA
ctggcgcccgggaacactca

SEQ ID NO: 43076 - DNA, 20 bp, synthetic construct
  source 1..20: mol_type = other DNA
ctgaccttattgatttcatg

SEQ ID NO: 43077 - DNA, 20 bp, synthetic construct
  source 1..20: mol_type = other DNA
cgaagctcaggccctggatc

SEQ ID NO: 43078 - DNA, 20 bp, synthetic construct
  source 1..20: mol_type = other DNA
ccagggccacggggtcatgg

SEQ ID NO: 43079 - DNA, 20 bp, synthetic construct
  source 1..20: mol_type = other DNA
gcggttggccttggggttca

SEQ ID NO: 43080 - DNA, 20 bp, synthetic construct
  source 1..20: mol_type = other DNA
acaagaagggacagcaaggc

SEQ ID NO: 43081 - DNA, 20 bp, synthetic construct
  source 1..20: mol_type = other DNA
atccaggtgcatgggtgtgg

SEQ ID NO: 43082 - DNA, 20 bp, synthetic construct
  source 1..20: mol_type = other DNA
atctcggagctggaaggtga

SEQ ID NO: 43083 - DNA, 20 bp, synthetic construct
  source 1..20: mol_type = other DNA
caaagagtcgctggttctcg

SEQ ID NO: 43084 - DNA, 20 bp, synthetic construct
  source 1..20: mol_type = other DNA
gcgatgcattcgaacgcgtt

SEQ ID NO: 43085 - DNA, 20 bp, synthetic construct
  source 1..20: mol_type = other DNA
gccttccactgtggggagat

SEQ ID NO: 43086 - DNA, 20 bp, synthetic construct
  source 1..20: mol_type = other DNA
tcgtcccccctgccgctctg

SEQ ID NO: 43087 - DNA, 20 bp, synthetic construct
  source 1..20: mol_type = other DNA
agaaggtggcagtgaactcg

SEQ ID NO: 43088 - DNA, 20 bp, synthetic construct
  source 1..20: mol_type = other DNA
tggatgccatgagggtgagt

SEQ ID NO: 43089 - DNA, 20 bp, synthetic construct
  source 1..20: mol_type = other DNA
ggcccagcaggagcgcaggg

SEQ ID NO: 43090 - DNA, 20 bp, synthetic construct
  source 1..20: mol_type = other DNA
agaattcattaaatgaagag

SEQ ID NO: 43091 - DNA, 20 bp, synthetic construct
  source 1..20: mol_type = other DNA
ttgtagatgacattgaggtt

SEQ ID NO: 43092 - DNA, 20 bp, synthetic construct
  source 1..20: mol_type = other DNA
agcgaaggtgtggaagaagg

SEQ ID NO: 43093 - DNA, 20 bp, synthetic construct
  source 1..20: mol_type = other DNA
ggaagttgaagaggcaccag

SEQ ID NO: 43094 - DNA, 20 bp, synthetic construct
  source 1..20: mol_type = other DNA
agtacttgcccgccttgtct

SEQ ID NO: 43095 - DNA, 20 bp, synthetic construct
  source 1..20: mol_type = other DNA
tgtcaaggacaagatcggcg

SEQ ID NO: 43096 - DNA, 20 bp, synthetic construct
  source 1..20: mol_type = other DNA
agagatgatcatcaccaagc

SEQ ID NO: 43097 - DNA, 20 bp, synthetic construct
  source 1..20: mol_type = other DNA
caggggccggatgcttctga

SEQ ID NO: 43098 - DNA, 20 bp, synthetic construct
  source 1..20: mol_type = other DNA
acatcacccagtcccgaaca

SEQ ID NO: 43099 - DNA, 20 bp, synthetic construct
  source 1..20: mol_type = other DNA
tggcctagcacgcctcattg

SEQ ID NO: 43100 - DNA, 20 bp, synthetic construct
  source 1..20: mol_type = other DNA
gggccctgaccacgctcatg

SEQ ID NO: 43101 - DNA, 20 bp, synthetic construct
  source 1..20: mol_type = other DNA
agctgtggagtgggggatga

SEQ ID NO: 43102 - DNA, 20 bp, synthetic construct
  source 1..20: mol_type = other DNA
cacctgcagtgaatgagtag

SEQ ID NO: 43103 - DNA, 20 bp, synthetic construct
  source 1..20: mol_type = other DNA
ccccgctgaggcccacgagg

SEQ ID NO: 43104 - DNA, 20 bp, synthetic construct
  source 1..20: mol_type = other DNA
ggcgtctggggatgaaagca

SEQ ID NO: 43105 - DNA, 20 bp, synthetic construct
  source 1..20: mol_type = other DNA
cagagacattgccatggggc

SEQ ID NO: 43106 - DNA, 20 bp, synthetic construct
  source 1..20: mol_type = other DNA
ccaggtacgaggagtcatga

SEQ ID NO: 43107 - DNA, 20 bp, synthetic construct
  source 1..20: mol_type = other DNA
tattgacctaggatatgcca

SEQ ID NO: 43108 - DNA, 20 bp, synthetic construct
  source 1..20: mol_type = other DNA
tgctgcctgtaaggaacagt

SEQ ID NO: 43109 - DNA, 20 bp, synthetic construct
  source 1..20: mol_type = other DNA
acattaagtcccctccgttg

SEQ ID NO: 43110 - DNA, 20 bp, synthetic construct
  source 1..20: mol_type = other DNA
ctacagtcctggtaatggtg

SEQ ID NO: 43111 - DNA, 20 bp, synthetic construct
  source 1..20: mol_type = other DNA
agaccaggtgccccagcatg

SEQ ID NO: 43112 - DNA, 20 bp, synthetic construct
  source 1..20: mol_type = other DNA
ggggacccggtagttgacct

SEQ ID NO: 43113 - DNA, 20 bp, synthetic construct
  source 1..20: mol_type = other DNA
cacccgtccgcctacctgag

SEQ ID NO: 43114 - DNA, 20 bp, synthetic construct
  source 1..20: mol_type = other DNA
cgatgcattcgaacgcgttg

SEQ ID NO: 43115 - DNA, 20 bp, synthetic construct
  source 1..20: mol_type = other DNA
atctctcagactccccagac

SEQ ID NO: 43116 - DNA, 20 bp, synthetic construct
  source 1..20: mol_type = other DNA
ggtacaggaagttgagcctc

SEQ ID NO: 43117 - DNA, 20 bp, synthetic construct
  source 1..20: mol_type = other DNA
gctcctgcaccaggccctcc

SEQ ID NO: 43118 - DNA, 20 bp, synthetic construct
  source 1..20: mol_type = other DNA
gatgtccccaacaaagtctg

SEQ ID NO: 43119 - DNA, 20 bp, synthetic construct
  source 1..20: mol_type = other DNA
ttacaccgtcaaggatgacc

SEQ ID NO: 43120 - DNA, 20 bp, synthetic construct
  source 1..20: mol_type = other DNA
caggaagcagatccgcgagc

SEQ ID NO: 43121 - DNA, 20 bp, synthetic construct
  source 1..20: mol_type = other DNA
gcagaaggagatcactgccc

SEQ ID NO: 43122 - DNA, 20 bp, synthetic construct
  source 1..20: mol_type = other DNA
tgaggtagtcggtcaggtcc

SEQ ID NO: 43123 - DNA, 20 bp, synthetic construct
  source 1..20: mol_type = other DNA
gctctccacgaggatgtttc

SEQ ID NO: 43124 - DNA, 20 bp, synthetic construct
  source 1..20: mol_type = other DNA
ccgccttaaaccactcctct

SEQ ID NO: 43125 - DNA, 20 bp, synthetic construct
  source 1..20: mol_type = other DNA
tattgaagttctgtagttgg

SEQ ID NO: 43126 - DNA, 20 bp, synthetic construct
  source 1..20: mol_type = other DNA
agaagaggacttcatagagg

SEQ ID NO: 43127 - DNA, 20 bp, synthetic construct
  source 1..20: mol_type = other DNA
cctgagctcacctgaggcgg

SEQ ID NO: 43128 - DNA, 20 bp, synthetic construct
  source 1..20: mol_type = other DNA
tgggtgccacgtagttggca

SEQ ID NO: 43129 - DNA, 20 bp, synthetic construct
  source 1..20: mol_type = other DNA
ccaagtaaggagactgggga

SEQ ID NO: 43130 - DNA, 20 bp, synthetic construct
  source 1..20: mol_type = other DNA
cctgagctcccgctgcccag

SEQ ID NO: 43131 - DNA, 20 bp, synthetic construct
  source 1..20: mol_type = other DNA
ctggtaaaggagacacagct

SEQ ID NO: 43132 - DNA, 20 bp, synthetic construct
  source 1..20: mol_type = other DNA
agggaccagtacatgaggac

SEQ ID NO: 43133 - DNA, 20 bp, synthetic construct
  source 1..20: mol_type = other DNA
acccacatccgcacccacac

SEQ ID NO: 43134 - DNA, 20 bp, synthetic construct
  source 1..20: mol_type = other DNA
ctgagactgcaagggaagga

SEQ ID NO: 43135 - DNA, 20 bp, synthetic construct
  source 1..20: mol_type = other DNA
cttcaggtttactcaaaaac

SEQ ID NO: 43136 - DNA, 20 bp, synthetic construct
  source 1..20: mol_type = other DNA
ggctcccatcacctacccgc

SEQ ID NO: 43137 - DNA, 20 bp, synthetic construct
  source 1..20: mol_type = other DNA
ctcccgctggtcagtctggg

SEQ ID NO: 43138 - DNA, 20 bp, synthetic construct
  source 1..20: mol_type = other DNA
gaagcagatccgcgagctgg

SEQ ID NO: 43139 - DNA, 20 bp, synthetic construct
  source 1..20: mol_type = other DNA
agcaccaggtgggggaagat

SEQ ID NO: 43140 - DNA, 20 bp, synthetic construct
  source 1..20: mol_type = other DNA
cctccttctttgaggagaaa

SEQ ID NO: 43141 - DNA, 20 bp, synthetic construct
  source 1..20: mol_type = other DNA
ggaggaggcccgccaggcag

SEQ ID NO: 43142 - DNA, 20 bp, synthetic construct
  source 1..20: mol_type = other DNA
tggaagcatgctgccaagca

SEQ ID NO: 43143 - DNA, 20 bp, synthetic construct
  source 1..20: mol_type = other DNA
gaaagtggccaaaatcaatg

SEQ ID NO: 43144 - DNA, 20 bp, synthetic construct
  source 1..20: mol_type = other DNA
actgggccagcttcctcctg

SEQ ID NO: 43145 - DNA, 20 bp, synthetic construct
  source 1..20: mol_type = other DNA
caagtgagtgccagtgggga

SEQ ID NO: 43146 - DNA, 20 bp, synthetic construct
  source 1..20: mol_type = other DNA
catctcttcaggtgcccgct

SEQ ID NO: 43147 - DNA, 20 bp, synthetic construct
  source 1..20: mol_type = other DNA
agcacccacctcaatagaga

SEQ ID NO: 43148 - DNA, 20 bp, synthetic construct
  source 1..20: mol_type = other DNA
cagcgaggtgagcccatgcg

SEQ ID NO: 43149 - DNA, 20 bp, synthetic construct
  source 1..20: mol_type = other DNA
gcgctggacgtggagaagag

SEQ ID NO: 43150 - DNA, 20 bp, synthetic construct
  source 1..20: mol_type = other DNA
ctgagcgcaagtactccgtg

SEQ ID NO: 43151 - DNA, 20 bp, synthetic construct
  source 1..20: mol_type = other DNA
tgttcatgtagtcactgtgc

SEQ ID NO: 43152 - DNA, 20 bp, synthetic construct
  source 1..20: mol_type = other DNA
ctatagcttgctagtaacag

SEQ ID NO: 43153 - DNA, 20 bp, synthetic construct
  source 1..20: mol_type = other DNA
ctgaatagttgtcaaacctg

SEQ ID NO: 43154 - DNA, 20 bp, synthetic construct
  source 1..20: mol_type = other DNA
gtggcagacagagcaaaatg

SEQ ID NO: 43155 - DNA, 20 bp, synthetic construct
  source 1..20: mol_type = other DNA
ccagggcgctgaatgatggc

SEQ ID NO: 43156 - DNA, 20 bp, synthetic construct
  source 1..20: mol_type = other DNA
cgagaggcagagtgtcccgt

SEQ ID NO: 43157 - DNA, 20 bp, synthetic construct
  source 1..20: mol_type = other DNA
ttcataaaggagaaccccga

SEQ ID NO: 43158 - DNA, 20 bp, synthetic construct
  source 1..20: mol_type = other DNA
caagaagttcctggttggca

SEQ ID NO: 43159 - DNA, 20 bp, synthetic construct
  source 1..20: mol_type = other DNA
gcccaggtgacgtccttgct

SEQ ID NO: 43160 - DNA, 20 bp, synthetic construct
  source 1..20: mol_type = other DNA
catccagtgcgctcctgtgt

SEQ ID NO: 43161 - DNA, 20 bp, synthetic construct
  source 1..20: mol_type = other DNA
ccaagcagggacggtgagtg

SEQ ID NO: 43162 - DNA, 20 bp, synthetic construct
  source 1..20: mol_type = other DNA
cctgctggtagtgcgtgatg

SEQ ID NO: 43163 - DNA, 20 bp, synthetic construct
  source 1..20: mol_type = other DNA
gccacgaacgacagagcctc

SEQ ID NO: 43164 - DNA, 20 bp, synthetic construct
  source 1..20: mol_type = other DNA
taaatctgagaagagagaat

SEQ ID NO: 43165 - DNA, 20 bp, synthetic construct
  source 1..20: mol_type = other DNA
gcagtcggacatctggagca

SEQ ID NO: 43166 - DNA, 20 bp, synthetic construct
  source 1..20: mol_type = other DNA
ttccaagaccagtctctgcg

SEQ ID NO: 43167 - DNA, 20 bp, synthetic construct
  source 1..20: mol_type = other DNA
gccgtgccagtccccacagc

SEQ ID NO: 43168 - DNA, 20 bp, synthetic construct
  source 1..20: mol_type = other DNA
catacgggcagcacgacgcg

SEQ ID NO: 43169 - DNA, 20 bp, synthetic construct
  source 1..20: mol_type = other DNA
acaaggaccagcttaagacc

SEQ ID NO: 43170 - DNA, 20 bp, synthetic construct
  source 1..20: mol_type = other DNA
gtactctccgggaaaggcgt

SEQ ID NO: 43171 - DNA, 20 bp, synthetic construct
  source 1..20: mol_type = other DNA
cacttcaaggtgctccgaga

SEQ ID NO: 43172 - DNA, 20 bp, synthetic construct
  source 1..20: mol_type = other DNA
ggcaagaaggaagcgaggag

SEQ ID NO: 43173 - DNA, 20 bp, synthetic construct
  source 1..20: mol_type = other DNA
tgcggcattatttatcccag

SEQ ID NO: 43174 - DNA, 20 bp, synthetic construct
  source 1..20: mol_type = other DNA
ccaccaggcgcaggacgggc

SEQ ID NO: 43175 - DNA, 20 bp, synthetic construct
  source 1..20: mol_type = other DNA
cggagtcgagtcaccaggcc

SEQ ID NO: 43176 - DNA, 20 bp, synthetic construct
  source 1..20: mol_type = other DNA
caaaggactggatagtgctg

SEQ ID NO: 43177 - DNA, 20 bp, synthetic construct
  source 1..20: mol_type = other DNA
ttacctctaggtcaatcttg

SEQ ID NO: 43178 - DNA, 20 bp, synthetic construct
  source 1..20: mol_type = other DNA
cagcaaaaagtttcctacaa

SEQ ID NO: 43179 - DNA, 20 bp, synthetic construct
  source 1..20: mol_type = other DNA
tggaggctttaagcttggcg

SEQ ID NO: 43180 - DNA, 20 bp, synthetic construct
  source 1..20: mol_type = other DNA
ttcaagaaatgctgcgggga

SEQ ID NO: 43181 - DNA, 20 bp, synthetic construct
  source 1..20: mol_type = other DNA
gcgagtgagtgcgaccactg

SEQ ID NO: 43182 - DNA, 20 bp, synthetic construct
  source 1..20: mol_type = other DNA
tcaggaggagcaatgatctg

SEQ ID NO: 43183 - DNA, 20 bp, synthetic construct
  source 1..20: mol_type = other DNA
gctgggctccatccagcagg

SEQ ID NO: 43184 - DNA, 20 bp, synthetic construct
  source 1..20: mol_type = other DNA
gtcgtttcccgggggctcgg

SEQ ID NO: 43185 - DNA, 20 bp, synthetic construct
  source 1..20: mol_type = other DNA
acttcccaaaagctgatgcc

SEQ ID NO: 43186 - DNA, 20 bp, synthetic construct
  source 1..20: mol_type = other DNA
ctacagctggtggtgcaggc

SEQ ID NO: 43187 - DNA, 20 bp, synthetic construct
  source 1..20: mol_type = other DNA
agtcagacaccttgatgact

SEQ ID NO: 43188 - DNA, 20 bp, synthetic construct
  source 1..20: mol_type = other DNA
atcaggtgagtaggatggag

SEQ ID NO: 43189 - DNA, 20 bp, synthetic construct
  source 1..20: mol_type = other DNA
ccagacgctgagccccccgg

SEQ ID NO: 43190 - DNA, 20 bp, synthetic construct
  source 1..20: mol_type = other DNA
ggacggagggccacatgtag

SEQ ID NO: 43191 - DNA, 20 bp, synthetic construct
  source 1..20: mol_type = other DNA
cacttaccgtcagccgctct

SEQ ID NO: 43192 - DNA, 20 bp, synthetic construct
  source 1..20: mol_type = other DNA
agtcccaatgatgaccagga

SEQ ID NO: 43193 - DNA, 20 bp, synthetic construct
  source 1..20: mol_type = other DNA
cacctggagaaagcaaagat

SEQ ID NO: 43194 - DNA, 20 bp, synthetic construct
  source 1..20: mol_type = other DNA
ggtagggatccatgaagcag

SEQ ID NO: 43195 - DNA, 20 bp, synthetic construct
  source 1..20: mol_type = other DNA
tctgtgatgtggcgatctac

SEQ ID NO: 43196 - DNA, 20 bp, synthetic construct
  source 1..20: mol_type = other DNA
tccaggacccacgggaaccc

SEQ ID NO: 43197 - DNA, 20 bp, synthetic construct
  source 1..20: mol_type = other DNA
cccgcagctgcagctgctga

SEQ ID NO: 43198 - DNA, 20 bp, synthetic construct
  source 1..20: mol_type = other DNA
ggctctcacttgaatccact

SEQ ID NO: 43199 - DNA, 20 bp, synthetic construct
  source 1..20: mol_type = other DNA
atcttctggtttgcttcctc

SEQ ID NO: 43200 - DNA, 20 bp, synthetic construct
  source 1..20: mol_type = other DNA
ttttcagcaggtattccacc

SEQ ID NO: 43201 - DNA, 20 bp, synthetic construct
  source 1..20: mol_type = other DNA
cgggcagagctcagggtgac

SEQ ID NO: 43202 - DNA, 20 bp, synthetic construct
  source 1..20: mol_type = other DNA
ttctgggagtcaaaggtcag

SEQ ID NO: 43203 - DNA, 20 bp, synthetic construct
  source 1..20: mol_type = other DNA
gacaagccaatccgaagaaa

SEQ ID NO: 43204 - DNA, 20 bp, synthetic construct
  source 1..20: mol_type = other DNA
cagcttgttgtgcaggcggc

SEQ ID NO: 43205 - DNA, 20 bp, synthetic construct
  source 1..20: mol_type = other DNA
aggaacgtgggcatgacctg

SEQ ID NO: 43206 - DNA, 20 bp, synthetic construct
  source 1..20: mol_type = other DNA
tattactgtggttccagaga

SEQ ID NO: 43207 - DNA, 20 bp, synthetic construct
  source 1..20: mol_type = other DNA
accaggtcactgcggtgctg

SEQ ID NO: 43208 - DNA, 20 bp, synthetic construct
  source 1..20: mol_type = other DNA
tacaagcttcacaatgtaag

SEQ ID NO: 43209 - DNA, 20 bp, synthetic construct
  source 1..20: mol_type = other DNA
gatggcaagggcacggtaag

SEQ ID NO: 43210 - DNA, 20 bp, synthetic construct
  source 1..20: mol_type = other DNA
ctttgagcttggggtgctcc

SEQ ID NO: 43211 - DNA, 20 bp, synthetic construct
  source 1..20: mol_type = other DNA
cctcagacaggaagttgaag

SEQ ID NO: 43212 - DNA, 20 bp, synthetic construct
  source 1..20: mol_type = other DNA
aagcttgtagtagagcccac

SEQ ID NO: 43213 - DNA, 20 bp, synthetic construct
  source 1..20: mol_type = other DNA
cactgatggctgtgataggt

SEQ ID NO: 43214 - DNA, 20 bp, synthetic construct
  source 1..20: mol_type = other DNA
ccatcaacaagctcaagact

SEQ ID NO: 43215 - DNA, 20 bp, synthetic construct
  source 1..20: mol_type = other DNA
gcactgaggaaagagaagat

SEQ ID NO: 43216 - DNA, 20 bp, synthetic construct
  source 1..20: mol_type = other DNA
catctggcttgttaatgagt

SEQ ID NO: 43217 - DNA, 20 bp, synthetic construct
  source 1..20: mol_type = other DNA
cgtcagagcgggagaaccgc

SEQ ID NO: 43218 - DNA, 20 bp, synthetic construct
  source 1..20: mol_type = other DNA
gaaatgataaattctctctg

SEQ ID NO: 43219 - DNA, 20 bp, synthetic construct
  source 1..20: mol_type = other DNA
ggagccacagctcaagcact

SEQ ID NO: 43220 - DNA, 20 bp, synthetic construct
  source 1..20: mol_type = other DNA
gacaatgatgccagccacgg

SEQ ID NO: 43221 - DNA, 20 bp, synthetic construct
  source 1..20: mol_type = other DNA
acctccaccattgccacctg

SEQ ID NO: 43222 - DNA, 20 bp, synthetic construct
  source 1..20: mol_type = other DNA
tgagatgcacacccagaatg

SEQ ID NO: 43223 - DNA, 20 bp, synthetic construct
  source 1..20: mol_type = other DNA
gtgcactgcagtgcaggcat

SEQ ID NO: 43224 - DNA, 20 bp, synthetic construct
  source 1..20: mol_type = other DNA
tatgtgcaggactgccaagc

SEQ ID NO: 43225 - DNA, 20 bp, synthetic construct
  source 1..20: mol_type = other DNA
agacccagtgcagctccagg

SEQ ID NO: 43226 - DNA, 20 bp, synthetic construct
  source 1..20: mol_type = other DNA
ttcagggtgtcagatcacat

SEQ ID NO: 43227 - DNA, 20 bp, synthetic construct
  source 1..20: mol_type = other DNA
gctaatccacatctgctgga

SEQ ID NO: 43228 - DNA, 20 bp, synthetic construct
  source 1..20: mol_type = other DNA
tcattgtctaggtaaggagg

SEQ ID NO: 43229 - DNA, 20 bp, synthetic construct
  source 1..20: mol_type = other DNA
cccaccgaggaggagagtgt

SEQ ID NO: 43230 - DNA, 20 bp, synthetic construct
  source 1..20: mol_type = other DNA
aagagccaaaggtgacctat

SEQ ID NO: 43231 - DNA, 20 bp, synthetic construct
  source 1..20: mol_type = other DNA
acgcaggatggcatggggga

SEQ ID NO: 43232 - DNA, 20 bp, synthetic construct
  source 1..20: mol_type = other DNA
tacctcggtagctgtggatg

SEQ ID NO: 43233 - DNA, 20 bp, synthetic construct
  source 1..20: mol_type = other DNA
tccaaggtgaggcgcggtgg

SEQ ID NO: 43234 - DNA, 20 bp, synthetic construct
  source 1..20: mol_type = other DNA
ctcattgatgggaaaaaccg

SEQ ID NO: 43235 - DNA, 20 bp, synthetic construct
  source 1..20: mol_type = other DNA
tccacggagaagatgtggct

SEQ ID NO: 43236 - DNA, 20 bp, synthetic construct
  source 1..20: mol_type = other DNA
cgatcttctggtctctggag

SEQ ID NO: 43237 - DNA, 20 bp, synthetic construct
  source 1..20: mol_type = other DNA
acagcaacagcaggtgagga

SEQ ID NO: 43238 - DNA, 20 bp, synthetic construct
  source 1..20: mol_type = other DNA
cgccccatggagcggccccc

SEQ ID NO: 43239 - DNA, 20 bp, synthetic construct
  source 1..20: mol_type = other DNA
ccgcaggacaaaacaaggag

SEQ ID NO: 43240 - DNA, 20 bp, synthetic construct
  source 1..20: mol_type = other DNA
ttcctacaatctcttctcaa

SEQ ID NO: 43241 - DNA, 20 bp, synthetic construct
  source 1..20: mol_type = other DNA
tcatagatgccagacaaagg

SEQ ID NO: 43242 - DNA, 20 bp, synthetic construct
  source 1..20: mol_type = other DNA
ccccggctctcaagagcacc

SEQ ID NO: 43243 - DNA, 20 bp, synthetic construct
  source 1..20: mol_type = other DNA
tggagtgggtaagaggccct

SEQ ID NO: 43244 - DNA, 20 bp, synthetic construct
  source 1..20: mol_type = other DNA
gccccatggagcggcccccg

SEQ ID NO: 43245 - DNA, 20 bp, synthetic construct
  source 1..20: mol_type = other DNA
atgtatccctggctggacac

SEQ ID NO: 43246 - DNA, 20 bp, synthetic construct
  source 1..20: mol_type = other DNA
tgtggcgagctacgagaacg

SEQ ID NO: 43247 - DNA, 20 bp, synthetic construct
  source 1..20: mol_type = other DNA
ctgcagatcaaagcagaaca

SEQ ID NO: 43248 - DNA, 20 bp, synthetic construct
  source 1..20: mol_type = other DNA
ttgccaggcggatatctaca

SEQ ID NO: 43249 - DNA, 20 bp, synthetic construct
  source 1..20: mol_type = other DNA
tgaggtagggcatgtatccc

SEQ ID NO: 43250 - DNA, 20 bp, synthetic construct
  source 1..20: mol_type = other DNA
acctcttcctccgcggggga

SEQ ID NO: 43251 - DNA, 20 bp, synthetic construct
  source 1..20: mol_type = other DNA
cttcgagcaagagatggcca

SEQ ID NO: 43252 - DNA, 20 bp, synthetic construct
  source 1..20: mol_type = other DNA
cttgcatctagccacagaga

SEQ ID NO: 43253 - DNA, 20 bp, synthetic construct
  source 1..20: mol_type = other DNA
agcggagcagcaagagctgg

SEQ ID NO: 43254 - DNA, 20 bp, synthetic construct
  source 1..20: mol_type = other DNA
ggatgccagttatttaccat

SEQ ID NO: 43255 - DNA, 20 bp, synthetic construct
  source 1..20: mol_type = other DNA
tgcagtacctggtaagaagt

SEQ ID NO: 43256 - DNA, 20 bp, synthetic construct
  source 1..20: mol_type = other DNA
ggtggcccccgagtgtctcc

SEQ ID NO: 43257 - DNA, 20 bp, synthetic construct
  source 1..20: mol_type = other DNA
ggtttcagctctaactggtt

SEQ ID NO: 43258 - DNA, 20 bp, synthetic construct
  source 1..20: mol_type = other DNA
ccaagaggcggcagagggcg

SEQ ID NO: 43259 - DNA, 20 bp, synthetic construct
  source 1..20: mol_type = other DNA
gtgcctcttcctcctcattg

SEQ ID NO: 43260 - DNA, 20 bp, synthetic construct
  source 1..20: mol_type = other DNA
aggttgcagggcagcccgtc

SEQ ID NO: 43261 - DNA, 20 bp, synthetic construct
  source 1..20: mol_type = other DNA
gagcctgggaaagagagggc

SEQ ID NO: 43262 - DNA, 20 bp, synthetic construct
  source 1..20: mol_type = other DNA
tgatgctgctgcggctccgg

SEQ ID NO: 43263 - DNA, 20 bp, synthetic construct
  source 1..20: mol_type = other DNA
cctgcagcctctgtcagggg

SEQ ID NO: 43264 - DNA, 20 bp, synthetic construct
  source 1..20: mol_type = other DNA
ggacggtgagtgcggcgcgc

SEQ ID NO: 43265 - DNA, 20 bp, synthetic construct
  source 1..20: mol_type = other DNA
gtcctcacaggagtcacaca

SEQ ID NO: 43266 - DNA, 20 bp, synthetic construct
  source 1..20: mol_type = other DNA
cacccagaggaagtacttcc

SEQ ID NO: 43267 - DNA, 20 bp, synthetic construct
  source 1..20: mol_type = other DNA
cgacagcactatccctatgg

SEQ ID NO: 43268 - DNA, 20 bp, synthetic construct
  source 1..20: mol_type = other DNA
cacctggagagagaagcctg

SEQ ID NO: 43269 - DNA, 20 bp, synthetic construct
  source 1..20: mol_type = other DNA
gctccagccggagcatccca

SEQ ID NO: 43270 - DNA, 20 bp, synthetic construct
  source 1..20: mol_type = other DNA
acatcatgatccgagagagt

SEQ ID NO: 43271 - DNA, 20 bp, synthetic construct
  source 1..20: mol_type = other DNA
ccctgccaacattgaagctg

SEQ ID NO: 43272 - DNA, 20 bp, synthetic construct
  source 1..20: mol_type = other DNA
tcgatgaaggccatgacctc

SEQ ID NO: 43273 - DNA, 20 bp, synthetic construct
  source 1..20: mol_type = other DNA
ttatctcagccctggtgacc

SEQ ID NO: 43274 - DNA, 20 bp, synthetic construct
  source 1..20: mol_type = other DNA
ggagaaggtgggggggttcc

SEQ ID NO: 43275 - DNA, 20 bp, synthetic construct
  source 1..20: mol_type = other DNA
gtcggccagggcgagcgcgg

SEQ ID NO: 43276 - DNA, 20 bp, synthetic construct
  source 1..20: mol_type = other DNA
ttccagtacctgccagatac

SEQ ID NO: 43277 - DNA, 20 bp, synthetic construct
  source 1..20: mol_type = other DNA
ctccaaagcatagagtcacc

SEQ ID NO: 43278 - DNA, 20 bp, synthetic construct
  source 1..20: mol_type = other DNA
tgagccaggtgagcgggcag

SEQ ID NO: 43279 - DNA, 20 bp, synthetic construct
  source 1..20: mol_type = other DNA
ggacagctacaatgacgagc

SEQ ID NO: 43280 - DNA, 20 bp, synthetic construct
  source 1..20: mol_type = other DNA
agcccctaccagtccggcgc

SEQ ID NO: 43281 - DNA, 20 bp, synthetic construct
  source 1..20: mol_type = other DNA
ggcaccgccgaggctgctgg

SEQ ID NO: 43282 - DNA, 20 bp, synthetic construct
  source 1..20: mol_type = other DNA
ggatgtgcaggaccgtgtac

SEQ ID NO: 43283 - DNA, 20 bp, synthetic construct
  source 1..20: mol_type = other DNA
attcaagtctcccaagcggt

SEQ ID NO: 43284 - DNA, 20 bp, synthetic construct
  source 1..20: mol_type = other DNA
cagctccagggcggcttcga

SEQ ID NO: 43285 - DNA, 20 bp, synthetic construct
  source 1..20: mol_type = other DNA
cctaccgaatcctgtacagc

SEQ ID NO: 43286 - DNA, 20 bp, synthetic construct
  source 1..20: mol_type = other DNA
gggggttccagggcctgtct

SEQ ID NO: 43287 - DNA, 20 bp, synthetic construct
  source 1..20: mol_type = other DNA
ggcgcagcagctggccgcgg

SEQ ID NO: 43288 - DNA, 20 bp, synthetic construct
  source 1..20: mol_type = other DNA
gcaggcagcggcggcagcgt

SEQ ID NO: 43289 - DNA, 20 bp, synthetic construct
  source 1..20: mol_type = other DNA
ggacgccttgtgggagaatg

SEQ ID NO: 43290 - DNA, 20 bp, synthetic construct
  source 1..20: mol_type = other DNA
gtcacccacctgggcgggca

SEQ ID NO: 43291 - DNA, 20 bp, synthetic construct
  source 1..20: mol_type = other DNA
tacacccacctggagctgcg

SEQ ID NO: 43292 - DNA, 20 bp, synthetic construct
  source 1..20: mol_type = other DNA
tcagtttcaccacctgggaa

SEQ ID NO: 43293 - DNA, 20 bp, synthetic construct
  source 1..20: mol_type = other DNA
gcagagacacgtcctggagt

SEQ ID NO: 43294 - DNA, 20 bp, synthetic construct
  source 1..20: mol_type = other DNA
actgaccagccttcagaagg

SEQ ID NO: 43295 - DNA, 20 bp, synthetic construct
  source 1..20: mol_type = other DNA
attaagaggtcagaccgtcg

SEQ ID NO: 43296 - DNA, 20 bp, synthetic construct
  source 1..20: mol_type = other DNA
gtcctgcaaacaaatcacag

SEQ ID NO: 43297 - DNA, 20 bp, synthetic construct
  source 1..20: mol_type = other DNA
tccagggccacggggtcatg

SEQ ID NO: 43298 - DNA, 20 bp, synthetic construct
  source 1..20: mol_type = other DNA
ggtctggctggctcaggggt

SEQ ID NO: 43299 - DNA, 20 bp, synthetic construct
  source 1..20: mol_type = other DNA
atactcccggctgccatctg

SEQ ID NO: 43300 - DNA, 20 bp, synthetic construct
  source 1..20: mol_type = other DNA
tgccgccgtcaccagccacg

SEQ ID NO: 43301 - DNA, 20 bp, synthetic construct
  source 1..20: mol_type = other DNA
gatcgtctgggaaagtaagg

SEQ ID NO: 43302 - DNA, 20 bp, synthetic construct
  source 1..20: mol_type = other DNA
tcccaggtcggcccaggccc

SEQ ID NO: 43303 - DNA, 20 bp, synthetic construct
  source 1..20: mol_type = other DNA
ccatggggcgggagggcaag

SEQ ID NO: 43304 - DNA, 20 bp, synthetic construct
  source 1..20: mol_type = other DNA
ctacctctctgcgtgtaccc

SEQ ID NO: 43305 - DNA, 20 bp, synthetic construct
  source 1..20: mol_type = other DNA
atacctgcttgatggtgctg

SEQ ID NO: 43306 - DNA, 20 bp, synthetic construct
  source 1..20: mol_type = other DNA
caccaaaatcttgtttcctg

SEQ ID NO: 43307 - DNA, 20 bp, synthetic construct
  source 1..20: mol_type = other DNA
ggtgatagttgatgagaaga

SEQ ID NO: 43308 - DNA, 20 bp, synthetic construct
  source 1..20: mol_type = other DNA
aatacaaccactctgtggac

SEQ ID NO: 43309 - DNA, 20 bp, synthetic construct
  source 1..20: mol_type = other DNA
tggagaagcaagagggaggc

SEQ ID NO: 43310 - DNA, 20 bp, synthetic construct
  source 1..20: mol_type = other DNA
gaaccactgggcaggtgggt

SEQ ID NO: 43311 - DNA, 20 bp, synthetic construct
  source 1..20: mol_type = other DNA
gtgacgatatctgcagagag

SEQ ID NO: 43312 - DNA, 20 bp, synthetic construct
  source 1..20: mol_type = other DNA
cggcatctcgtgctgctcca

SEQ ID NO: 43313 - DNA, 20 bp, synthetic construct
  source 1..20: mol_type = other DNA
caggcagatgagcagggcag

SEQ ID NO: 43314 - DNA, 20 bp, synthetic construct
  source 1..20: mol_type = other DNA
gcagagtgaggttggtaggc

SEQ ID NO: 43315 - DNA, 20 bp, synthetic construct
  source 1..20: mol_type = other DNA
ccttaccattttcacaagct

SEQ ID NO: 43316 - DNA, 20 bp, synthetic construct
  source 1..20: mol_type = other DNA
tctgctcggagctgcggcgt

SEQ ID NO: 43317 - DNA, 20 bp, synthetic construct
  source 1..20: mol_type = other DNA
tctgagactgcaagggaagg

SEQ ID NO: 43318 - DNA, 20 bp, synthetic construct
  source 1..20: mol_type = other DNA
gtggatggagcagtttgaga

SEQ ID NO: 43319 - DNA, 20 bp, synthetic construct
  source 1..20: mol_type = other DNA
aaattactcacctatctccc

SEQ ID NO: 43320 - DNA, 20 bp, synthetic construct
  source 1..20: mol_type = other DNA
cggaatgcagcttgatgtgc

SEQ ID NO: 43321 - DNA, 20 bp, synthetic construct
  source 1..20: mol_type = other DNA
cagacccgtacaaagtgtac

SEQ ID NO: 43322 - DNA, 20 bp, synthetic construct
  source 1..20: mol_type = other DNA
cgctcaacaaccacctgttg

SEQ ID NO: 43323 - DNA, 20 bp, synthetic construct
  source 1..20: mol_type = other DNA
tacttacatccaccatcctc

SEQ ID NO: 43324 - DNA, 20 bp, synthetic construct
  source 1..20: mol_type = other DNA
gatgccagtggtacggccag

SEQ ID NO: 43325 - DNA, 20 bp, synthetic construct
  source 1..20: mol_type = other DNA
tccaaaagaccagacgtcag

SEQ ID NO: 43326 - DNA, 20 bp, synthetic construct
  source 1..20: mol_type = other DNA
gagaagaggctgggcgtgag

SEQ ID NO: 43327 - DNA, 20 bp, synthetic construct
  source 1..20: mol_type = other DNA
cagcatctgacaggccttgc

SEQ ID NO: 43328 - DNA, 20 bp, synthetic construct
  source 1..20: mol_type = other DNA
cgcgaccctcaaccgcctgc

SEQ ID NO: 43329 - DNA, 20 bp, synthetic construct
  source 1..20: mol_type = other DNA
cctaccagaatgccgaggtg

SEQ ID NO: 43330 - DNA, 20 bp, synthetic construct
  source 1..20: mol_type = other DNA
tgagctcctggtagacctcg

SEQ ID NO: 43331 - DNA, 20 bp, synthetic construct
  source 1..20: mol_type = other DNA
ctcgcaggacgcgctccgcg

SEQ ID NO: 43332 - DNA, 20 bp, synthetic construct
  source 1..20: mol_type = other DNA
gtgctcagcccttagcaatc

SEQ ID NO: 43333 - DNA, 20 bp, synthetic construct
  source 1..20: mol_type = other DNA
ggcgctcagtttccagaacc

SEQ ID NO: 43334 - DNA, 20 bp, synthetic construct
  source 1..20: mol_type = other DNA
ggagaaggtaaaaataaatg

SEQ ID NO: 43335 - DNA, 20 bp, synthetic construct
  source 1..20: mol_type = other DNA
tcagaaatacaaccactctg

SEQ ID NO: 43336 - DNA, 20 bp, synthetic construct
  source 1..20: mol_type = other DNA
tgctttcactgaatcttagc

SEQ ID NO: 43337 - DNA, 20 bp, synthetic construct
  source 1..20: mol_type = other DNA
caactcaaatgtgagtgtca

SEQ ID NO: 43338 - DNA, 20 bp, synthetic construct
  source 1..20: mol_type = other DNA
cccagaggcccaggctgatc

SEQ ID NO: 43339 - DNA, 20 bp, synthetic construct
  source 1..20: mol_type = other DNA
ggggcgccgacaagatcgag

SEQ ID NO: 43340 - DNA, 20 bp, synthetic construct
  source 1..20: mol_type = other DNA
atacccagctacagccggtg

SEQ ID NO: 43341 - DNA, 20 bp, synthetic construct
  source 1..20: mol_type = other DNA
gttaaccagcaggacgttgc

SEQ ID NO: 43342 - DNA, 20 bp, synthetic construct
  source 1..20: mol_type = other DNA
cagcagtcttcgagagctcc

SEQ ID NO: 43343 - DNA, 20 bp, synthetic construct
  source 1..20: mol_type = other DNA
gtcgcagctcctcaaacgtc

SEQ ID NO: 43344 - DNA, 20 bp, synthetic construct
  source 1..20: mol_type = other DNA
ctgtctacaccaagtgagtt

SEQ ID NO: 43345 - DNA, 20 bp, synthetic construct
  source 1..20: mol_type = other DNA
cctgcatcgtgtccggagcc

SEQ ID NO: 43346 - DNA, 20 bp, synthetic construct
  source 1..20: mol_type = other DNA
catcctggaggcctactgca

SEQ ID NO: 43347 - DNA, 20 bp, synthetic construct
  source 1..20: mol_type = other DNA
catgagccccagcaaccaga

SEQ ID NO: 43348 - DNA, 20 bp, synthetic construct
  source 1..20: mol_type = other DNA
gatgccaagtttcttctcca

SEQ ID NO: 43349 - DNA, 20 bp, synthetic construct
  source 1..20: mol_type = other DNA
agcattgtcccagagaacag

SEQ ID NO: 43350 - DNA, 20 bp, synthetic construct
  source 1..20: mol_type = other DNA
atgccaggggtgctgagtgc

SEQ ID NO: 43351 - DNA, 20 bp, synthetic construct
  source 1..20: mol_type = other DNA
aggatcactcagcttgatga

SEQ ID NO: 43352 - DNA, 20 bp, synthetic construct
  source 1..20: mol_type = other DNA
atcatcttcatcctgggaag

SEQ ID NO: 43353 - DNA, 20 bp, synthetic construct
  source 1..20: mol_type = other DNA
gcagatgacgctgacgcgcg

SEQ ID NO: 43354 - DNA, 20 bp, synthetic construct
  source 1..20: mol_type = other DNA
tctgggaaccactgggcagg

SEQ ID NO: 43355 - DNA, 20 bp, synthetic construct
  source 1..20: mol_type = other DNA
cagagcaaaatgtgggctgt

SEQ ID NO: 43356 - DNA, 20 bp, synthetic construct
  source 1..20: mol_type = other DNA
cctaaagaggatccgtgact

SEQ ID NO: 43357 - DNA, 20 bp, synthetic construct
  source 1..20: mol_type = other DNA
ctgctggaaggtggacagcg

SEQ ID NO: 43358 - DNA, 20 bp, synthetic construct
  source 1..20: mol_type = other DNA
cacctgctttgagaagtctg

SEQ ID NO: 43359 - DNA, 20 bp, synthetic construct
  source 1..20: mol_type = other DNA
gaagatccccgcagcccctt

SEQ ID NO: 43360 - DNA, 20 bp, synthetic construct
  source 1..20: mol_type = other DNA
tggctggtttccttgtaaca

SEQ ID NO: 43361 - DNA, 20 bp, synthetic construct
  source 1..20: mol_type = other DNA
caggttgtgggacagcacct

SEQ ID NO: 43362 - DNA, 20 bp, synthetic construct
  source 1..20: mol_type = other DNA
gagacctccaactcgaggtg

SEQ ID NO: 43363 - DNA, 20 bp, synthetic construct
  source 1..20: mol_type = other DNA
gctcactttcgagatggcag

SEQ ID NO: 43364 - DNA, 20 bp, synthetic construct
  source 1..20: mol_type = other DNA
ggtggctgggcggcagcacc

SEQ ID NO: 43365 - DNA, 20 bp, synthetic construct
  source 1..20: mol_type = other DNA
gtagtcatcggcgtggccca

SEQ ID NO: 43366 - DNA, 20 bp, synthetic construct
  source 1..20: mol_type = other DNA
gcgcaggaaaggcatgacaa

SEQ ID NO: 43367 - DNA, 20 bp, synthetic construct
  source 1..20: mol_type = other DNA
gtcttccaccaacaacatgg

SEQ ID NO: 43368 - DNA, 20 bp, synthetic construct
  source 1..20: mol_type = other DNA
atagctcttctggttccaga

SEQ ID NO: 43369 - DNA, 20 bp, synthetic construct
  source 1..20: mol_type = other DNA
aggtagggcgtgagcttggc

SEQ ID NO: 43370 - DNA, 20 bp, synthetic construct
  source 1..20: mol_type = other DNA
cctccagggccactttggga

SEQ ID NO: 43371 - DNA, 20 bp, synthetic construct
  source 1..20: mol_type = other DNA
aacagcccacagctcctgat

SEQ ID NO: 43372 - DNA, 20 bp, synthetic construct
  source 1..20: mol_type = other DNA
tacgtgaacgttccggagag

SEQ ID NO: 43373 - DNA, 20 bp, synthetic construct
  source 1..20: mol_type = other DNA
ggcattcctcctccagagtg

SEQ ID NO: 43374 - DNA, 20 bp, synthetic construct
  source 1..20: mol_type = other DNA
caggggtgtgtttcccgcaa

SEQ ID NO: 43375 - DNA, 20 bp, synthetic construct
  source 1..20: mol_type = other DNA
acatgcgcttcctccgagag

SEQ ID NO: 43376 - DNA, 20 bp, synthetic construct
  source 1..20: mol_type = other DNA
tccctcagggcgagcacctt

SEQ ID NO: 43377 - DNA, 20 bp, synthetic construct
  source 1..20: mol_type = other DNA
gcactgctctgtatcctagg

SEQ ID NO: 43378 - DNA, 20 bp, synthetic construct
  source 1..20: mol_type = other DNA
agaactggtctgacacgctg

SEQ ID NO: 43379 - DNA, 20 bp, synthetic construct
  source 1..20: mol_type = other DNA
agtagtcatcggcgtggccc

SEQ ID NO: 43380 - DNA, 20 bp, synthetic construct
  source 1..20: mol_type = other DNA
agattcagtgactcagaaat

SEQ ID NO: 43381 - DNA, 20 bp, synthetic construct
  source 1..20: mol_type = other DNA
catgccacatctcatgccag

SEQ ID NO: 43382 - DNA, 20 bp, synthetic construct
  source 1..20: mol_type = other DNA
gcaatgtcccgccgcaaaca

SEQ ID NO: 43383 - DNA, 20 bp, synthetic construct
  source 1..20: mol_type = other DNA
gtcatggagtacctgcccag

SEQ ID NO: 43384 - DNA, 20 bp, synthetic construct
  source 1..20: mol_type = other DNA
ggagccaacagagataacca

SEQ ID NO: 43385 - DNA, 20 bp, synthetic construct
  source 1..20: mol_type = other DNA
tgacccagatgaggtaagga

SEQ ID NO: 43386 - DNA, 20 bp, synthetic construct
  source 1..20: mol_type = other DNA
tcaagatcacctcggtggaa

SEQ ID NO: 43387 - DNA, 20 bp, synthetic construct
  source 1..20: mol_type = other DNA
tggccagctcacggagaacc

SEQ ID NO: 43388 - DNA, 20 bp, synthetic construct
  source 1..20: mol_type = other DNA
tcactgagctcccggtcgga

SEQ ID NO: 43389 - DNA, 20 bp, synthetic construct
  source 1..20: mol_type = other DNA
ccagcttcctcctgaggaaa

SEQ ID NO: 43390 - DNA, 20 bp, synthetic construct
  source 1..20: mol_type = other DNA
tacctcatgcctggcaatgg

SEQ ID NO: 43391 - DNA, 20 bp, synthetic construct
  source 1..20: mol_type = other DNA
gtacagctgaacaactgcag

SEQ ID NO: 43392 - DNA, 20 bp, synthetic construct
  source 1..20: mol_type = other DNA
gccccagtcccaggcggcgg

SEQ ID NO: 43393 - DNA, 20 bp, synthetic construct
  source 1..20: mol_type = other DNA
ttccatggcattgacgcagg

SEQ ID NO: 43394 - DNA, 20 bp, synthetic construct
  source 1..20: mol_type = other DNA
cccacagaaggtattcgtct

SEQ ID NO: 43395 - DNA, 20 bp, synthetic construct
  source 1..20: mol_type = other DNA
cacggagaagatgtggctcg

SEQ ID NO: 43396 - DNA, 20 bp, synthetic construct
  source 1..20: mol_type = other DNA
gtcacttttgggagatggtg

SEQ ID NO: 43397 - DNA, 20 bp, synthetic construct
  source 1..20: mol_type = other DNA
gtttgccctcaccttggaag

SEQ ID NO: 43398 - DNA, 20 bp, synthetic construct
  source 1..20: mol_type = other DNA
agttgtagaagcatgtgaac

SEQ ID NO: 43399 - DNA, 20 bp, synthetic construct
  source 1..20: mol_type = other DNA
ggcccagctccggaacaaac

SEQ ID NO: 43400 - DNA, 20 bp, synthetic construct
  source 1..20: mol_type = other DNA
ctgctgcaccaggtgtccat

SEQ ID NO: 43401 - DNA, 20 bp, synthetic construct
  source 1..20: mol_type = other DNA
aagacgagggagaagctcta

SEQ ID NO: 43402 - DNA, 20 bp, synthetic construct
  source 1..20: mol_type = other DNA
cagcgatgtctggagctatg

SEQ ID NO: 43403 - DNA, 20 bp, synthetic construct
  source 1..20: mol_type = other DNA
ccagcccctcctgcttccac

SEQ ID NO: 43404 - DNA, 20 bp, synthetic construct
  source 1..20: mol_type = other DNA
cggcatgtgctcccgggctc

SEQ ID NO: 43405 - DNA, 20 bp, synthetic construct
  source 1..20: mol_type = other DNA
ggtttgccctcaccttggaa

SEQ ID NO: 43406 - DNA, 20 bp, synthetic construct
  source 1..20: mol_type = other DNA
gctcaactcgggaggtgcca

SEQ ID NO: 43407 - DNA, 20 bp, synthetic construct
  source 1..20: mol_type = other DNA
gtcactgaatctcaggagga

SEQ ID NO: 43408 - DNA, 20 bp, synthetic construct
  source 1..20: mol_type = other DNA
cactcaccacacagagccat

SEQ ID NO: 43409 - DNA, 20 bp, synthetic construct
  source 1..20: mol_type = other DNA
cctgtggggagcaggcaagg

SEQ ID NO: 43410 - DNA, 20 bp, synthetic construct
  source 1..20: mol_type = other DNA
cataagaggctgggctgacg

SEQ ID NO: 43411 - DNA, 20 bp, synthetic construct
  source 1..20: mol_type = other DNA
gcaggaatttgtacacctgg

SEQ ID NO: 43412 - DNA, 20 bp, synthetic construct
  source 1..20: mol_type = other DNA
ttccagatggtcaaagagca

SEQ ID NO: 43413 - DNA, 20 bp, synthetic construct
  source 1..20: mol_type = other DNA
acctggaattcagcctctag

SEQ ID NO: 43414 - DNA, 20 bp, synthetic construct
  source 1..20: mol_type = other DNA
gggcacggagaaggcagaca

SEQ ID NO: 43415 - DNA, 20 bp, synthetic construct
  source 1..20: mol_type = other DNA
ttatcagtaaggagcgggag

SEQ ID NO: 43416 - DNA, 20 bp, synthetic construct
  source 1..20: mol_type = other DNA
cgatgtgcaggattttggca

SEQ ID NO: 43417 - DNA, 20 bp, synthetic construct
  source 1..20: mol_type = other DNA
cggttggccttggggttcag

SEQ ID NO: 43418 - DNA, 20 bp, synthetic construct
  source 1..20: mol_type = other DNA
accttcttcgcaggaatggg

SEQ ID NO: 43419 - DNA, 20 bp, synthetic construct
  source 1..20: mol_type = other DNA
ggacctggagcagcgcagcg

SEQ ID NO: 43420 - DNA, 20 bp, synthetic construct
  source 1..20: mol_type = other DNA
ggtccagcatcaggttggat

SEQ ID NO: 43421 - DNA, 20 bp, synthetic construct
  source 1..20: mol_type = other DNA
cacctgtggatgcagcggtc

SEQ ID NO: 43422 - DNA, 20 bp, synthetic construct
  source 1..20: mol_type = other DNA
tcaatcaccgccgagccccc

SEQ ID NO: 43423 - DNA, 20 bp, synthetic construct
  source 1..20: mol_type = other DNA
ggaaggtggacagcgaggcc

SEQ ID NO: 43424 - DNA, 20 bp, synthetic construct
  source 1..20: mol_type = other DNA
ttcaaggtaagggcctacta

SEQ ID NO: 43425 - DNA, 20 bp, synthetic construct
  source 1..20: mol_type = other DNA
cctccagcttctccactgcc

SEQ ID NO: 43426 - DNA, 20 bp, synthetic construct
  source 1..20: mol_type = other DNA
cggtacatgcccaggaactg

SEQ ID NO: 43427 - DNA, 20 bp, synthetic construct
  source 1..20: mol_type = other DNA
tggtagagattggctgcgcc

SEQ ID NO: 43428 - DNA, 20 bp, synthetic construct
  source 1..20: mol_type = other DNA
tggccaaggcaagcagcgcg

SEQ ID NO: 43429 - DNA, 20 bp, synthetic construct
  source 1..20: mol_type = other DNA
cgagcagcccggagccgagt

SEQ ID NO: 43430 - DNA, 20 bp, synthetic construct
  source 1..20: mol_type = other DNA
gcagaagaaggcggagcacc

SEQ ID NO: 43431 - DNA, 20 bp, synthetic construct
  source 1..20: mol_type = other DNA
gaagaaggcggagcaccagg

SEQ ID NO: 43432 - DNA, 20 bp, synthetic construct
  source 1..20: mol_type = other DNA
tggcagtgggcaatttgggt

SEQ ID NO: 43433 - DNA, 20 bp, synthetic construct
  source 1..20: mol_type = other DNA
gaagccacagatcaagcaag

SEQ ID NO: 43434 - DNA, 20 bp, synthetic construct
  source 1..20: mol_type = other DNA
ttacctgttttggatagagt

SEQ ID NO: 43435 - DNA, 20 bp, synthetic construct
  source 1..20: mol_type = other DNA
ctcctccagctgtaacgtgg

SEQ ID NO: 43436 - DNA, 20 bp, synthetic construct
  source 1..20: mol_type = other DNA
cctcccagcccagctgctgc

SEQ ID NO: 43437 - DNA, 20 bp, synthetic construct
  source 1..20: mol_type = other DNA
agacctccaactcgaggtga

SEQ ID NO: 43438 - DNA, 20 bp, synthetic construct
  source 1..20: mol_type = other DNA
cgaaggcctctctcgacacc

SEQ ID NO: 43439 - DNA, 20 bp, synthetic construct
  source 1..20: mol_type = other DNA
gcggtgccacagcagctgga

SEQ ID NO: 43440 - DNA, 20 bp, synthetic construct
  source 1..20: mol_type = other DNA
ttcagcagcataaaacctgg

SEQ ID NO: 43441 - DNA, 20 bp, synthetic construct
  source 1..20: mol_type = other DNA
agggctggggagaaggtggg

SEQ ID NO: 43442 - DNA, 20 bp, synthetic construct
  source 1..20: mol_type = other DNA
ctatcctgacattcccaagg

SEQ ID NO: 43443 - DNA, 20 bp, synthetic construct
  source 1..20: mol_type = other DNA
gacggacaggatgtatgctg

SEQ ID NO: 43444 - DNA, 20 bp, synthetic construct
  source 1..20: mol_type = other DNA
cccagtatgagtttcaggtg

SEQ ID NO: 43445 - DNA, 20 bp, synthetic construct
  source 1..20: mol_type = other DNA
gcaaagaggttgtgacaaag

SEQ ID NO: 43446 - DNA, 20 bp, synthetic construct
  source 1..20: mol_type = other DNA
ctggtacgcctttaccgcgc

SEQ ID NO: 43447 - DNA, 20 bp, synthetic construct
  source 1..20: mol_type = other DNA
ggaccgcagccagcccggcc

SEQ ID NO: 43448 - DNA, 20 bp, synthetic construct
  source 1..20: mol_type = other DNA
ggagtagaacaaagtcatga

SEQ ID NO: 43449 - DNA, 20 bp, synthetic construct
  source 1..20: mol_type = other DNA
gcccagctctccatcctcct

SEQ ID NO: 43450 - DNA, 20 bp, synthetic construct
  source 1..20: mol_type = other DNA
agactatgagtcccccaatg

SEQ ID NO: 43451 - DNA, 20 bp, synthetic construct
  source 1..20: mol_type = other DNA
cctccgtggccagagcaaag

SEQ ID NO: 43452 - DNA, 20 bp, synthetic construct
  source 1..20: mol_type = other DNA
agagcagctgaccatcatcc

SEQ ID NO: 43453 - DNA, 20 bp, synthetic construct
  source 1..20: mol_type = other DNA
caaccttcccaaagtggccc

SEQ ID NO: 43454 - DNA, 20 bp, synthetic construct
  source 1..20: mol_type = other DNA
catgtagaggcagcgttccc

SEQ ID NO: 43455 - DNA, 20 bp, synthetic construct
  source 1..20: mol_type = other DNA
gatgtagtttaatccgacta

SEQ ID NO: 43456 - DNA, 20 bp, synthetic construct
  source 1..20: mol_type = other DNA
tggaagtctgtgttgtatat

SEQ ID NO: 43457 - DNA, 20 bp, synthetic construct
  source 1..20: mol_type = other DNA
gaagcagtgtggcggcagct

SEQ ID NO: 43458 - DNA, 20 bp, synthetic construct
  source 1..20: mol_type = other DNA
cctacctttggagcctgtag

SEQ ID NO: 43459 - DNA, 20 bp, synthetic construct
  source 1..20: mol_type = other DNA
cgctcaggtaggcggacggg

SEQ ID NO: 43460 - DNA, 20 bp, synthetic construct
  source 1..20: mol_type = other DNA
tgcaggctttgcagaaccta

SEQ ID NO: 43461 - DNA, 20 bp, synthetic construct
  source 1..20: mol_type = other DNA
gtcaatcaccgccgagcccc

SEQ ID NO: 43462 - DNA, 20 bp, synthetic construct
  source 1..20: mol_type = other DNA
caagctgcggcgcctctcca

SEQ ID NO: 43463 - DNA, 20 bp, synthetic construct
  source 1..20: mol_type = other DNA
tgacgatgccgtgctcgatg

SEQ ID NO: 43464 - DNA, 20 bp, synthetic construct
  source 1..20: mol_type = other DNA
cggggcgcagatggccgcca

SEQ ID NO: 43465 - DNA, 20 bp, synthetic construct
  source 1..20: mol_type = other DNA
ccaagtcccagctcaaggtg

SEQ ID NO: 43466 - DNA, 20 bp, synthetic construct
  source 1..20: mol_type = other DNA
taggaagtacgagtgtgagt

SEQ ID NO: 43467 - DNA, 20 bp, synthetic construct
  source 1..20: mol_type = other DNA
ggctcctcgatctctcgtaa

SEQ ID NO: 43468 - DNA, 20 bp, synthetic construct
  source 1..20: mol_type = other DNA
gaaaagcagattccttggta

SEQ ID NO: 43469 - DNA, 20 bp, synthetic construct
  source 1..20: mol_type = other DNA
gaacatcaagaggttcaggt

SEQ ID NO: 43470 - DNA, 20 bp, synthetic construct
  source 1..20: mol_type = other DNA
tggacttcagccagttgagc

SEQ ID NO: 43471 - DNA, 20 bp, synthetic construct
  source 1..20: mol_type = other DNA
aaagctccaataatcaacag

SEQ ID NO: 43472 - DNA, 20 bp, synthetic construct
  source 1..20: mol_type = other DNA
ttacctcatgcctggcaatg

SEQ ID NO: 43473 - DNA, 20 bp, synthetic construct
  source 1..20: mol_type = other DNA
gtcccaatgatgaccaggat

SEQ ID NO: 43474 - DNA, 20 bp, synthetic construct
  source 1..20: mol_type = other DNA
ctgagtcactgaatctcagg

SEQ ID NO: 43475 - DNA, 20 bp, synthetic construct
  source 1..20: mol_type = other DNA
cagtactccatggccagcag

SEQ ID NO: 43476 - DNA, 20 bp, synthetic construct
  source 1..20: mol_type = other DNA
aagctttacttacacgttgg

SEQ ID NO: 43477 - DNA, 20 bp, synthetic construct
  source 1..20: mol_type = other DNA
ggttggccttggggttcagg

SEQ ID NO: 43478 - DNA, 20 bp, synthetic construct
  source 1..20: mol_type = other DNA
aggagaccgagacaacaaga

SEQ ID NO: 43479 - DNA, 20 bp, synthetic construct
  source 1..20: mol_type = other DNA
tcccaccgtgtgcatgctgg

SEQ ID NO: 43480 - DNA, 20 bp, synthetic construct
  source 1..20: mol_type = other DNA
ggcggagccacaccggcgag

SEQ ID NO: 43481 - DNA, 20 bp, synthetic construct
  source 1..20: mol_type = other DNA
tacacctcaatgtcctctgc

SEQ ID NO: 43482 - DNA, 20 bp, synthetic construct
  source 1..20: mol_type = other DNA
gatgagaaaggacaggcggc

SEQ ID NO: 43483 - DNA, 20 bp, synthetic construct
  source 1..20: mol_type = other DNA
agggtcactcagcttgatga

SEQ ID NO: 43484 - DNA, 20 bp, synthetic construct
  source 1..20: mol_type = other DNA
cttcccatagatgagggaca

SEQ ID NO: 43485 - DNA, 20 bp, synthetic construct
  source 1..20: mol_type = other DNA
gcaatgatctgaggagggaa

SEQ ID NO: 43486 - DNA, 20 bp, synthetic construct
  source 1..20: mol_type = other DNA
tctggagcccaggggatcac

SEQ ID NO: 43487 - DNA, 20 bp, synthetic construct
  source 1..20: mol_type = other DNA
ctgggtaagggatgcggccg

SEQ ID NO: 43488 - DNA, 20 bp, synthetic construct
  source 1..20: mol_type = other DNA
ggatgaagtggaccagatgt

SEQ ID NO: 43489 - DNA, 20 bp, synthetic construct
  source 1..20: mol_type = other DNA
cctgtgggcgagcaggacat

SEQ ID NO: 43490 - DNA, 20 bp, synthetic construct
  source 1..20: mol_type = other DNA
tgatggagaagacgaagagc

SEQ ID NO: 43491 - DNA, 20 bp, synthetic construct
  source 1..20: mol_type = other DNA
cagcaggagcttgttgaaag

SEQ ID NO: 43492 - DNA, 20 bp, synthetic construct
  source 1..20: mol_type = other DNA
gtgacgatgccgtgctcgat

SEQ ID NO: 43493 - DNA, 20 bp, synthetic construct
  source 1..20: mol_type = other DNA
ggaggaggtggagcgggagc

SEQ ID NO: 43494 - DNA, 20 bp, synthetic construct
  source 1..20: mol_type = other DNA
ggcccgtacctcggtagctg

SEQ ID NO: 43495 - DNA, 20 bp, synthetic construct
  source 1..20: mol_type = other DNA
ctcaccgaccctccagagcc

SEQ ID NO: 43496 - DNA, 20 bp, synthetic construct
  source 1..20: mol_type = other DNA
cccaccagaaaatggggctc

SEQ ID NO: 43497 - DNA, 20 bp, synthetic construct
  source 1..20: mol_type = other DNA
gaccacagggacacagagga

SEQ ID NO: 43498 - DNA, 20 bp, synthetic construct
  source 1..20: mol_type = other DNA
aggaagtctcactctcagga

SEQ ID NO: 43499 - DNA, 20 bp, synthetic construct
  source 1..20: mol_type = other DNA
tcaggaactggtgaaagcta

SEQ ID NO: 43500 - DNA, 20 bp, synthetic construct
  source 1..20: mol_type = other DNA
cgaggatggcggcctccaca

SEQ ID NO: 43501 - DNA, 20 bp, synthetic construct
  source 1..20: mol_type = other DNA
ccaccagctgtagaaggtgc

SEQ ID NO: 43502 - DNA, 20 bp, synthetic construct
  source 1..20: mol_type = other DNA
tggagcacttggtgcagtac

SEQ ID NO: 43503 - DNA, 20 bp, synthetic construct
  source 1..20: mol_type = other DNA
tcctcaatggacaggatgac

SEQ ID NO: 43504 - DNA, 20 bp, synthetic construct
  source 1..20: mol_type = other DNA
ttcttatattacccgaccag

SEQ ID NO: 43505 - DNA, 20 bp, synthetic construct
  source 1..20: mol_type = other DNA
ccggggctggaggagactgg

SEQ ID NO: 43506 - DNA, 20 bp, synthetic construct
  source 1..20: mol_type = other DNA
aaccaatccatatgtcctca

SEQ ID NO: 43507 - DNA, 20 bp, synthetic construct
  source 1..20: mol_type = other DNA
caggatgaggccgaagcgca

SEQ ID NO: 43508 - DNA, 20 bp, synthetic construct
  source 1..20: mol_type = other DNA
cgcaggaggccgagttccca

SEQ ID NO: 43509 - DNA, 20 bp, synthetic construct
  source 1..20: mol_type = other DNA
catggataaaatctccccgg

SEQ ID NO: 43510 - DNA, 20 bp, synthetic construct
  source 1..20: mol_type = other DNA
gaaactctagccactcgtcc

SEQ ID NO: 43511 - DNA, 20 bp, synthetic construct
  source 1..20: mol_type = other DNA
aatagggtttcaaagaaccc

SEQ ID NO: 43512 - DNA, 20 bp, synthetic construct
  source 1..20: mol_type = other DNA
ctgggccgacctgggacgga

SEQ ID NO: 43513 - DNA, 20 bp, synthetic construct
  source 1..20: mol_type = other DNA
agtccctccagcttcggtcg

SEQ ID NO: 43514 - DNA, 20 bp, synthetic construct
  source 1..20: mol_type = other DNA
atcccctcaccagcagcagc

SEQ ID NO: 43515 - DNA, 20 bp, synthetic construct
  source 1..20: mol_type = other DNA
ctgtactccccgattgctaa

SEQ ID NO: 43516 - DNA, 20 bp, synthetic construct
  source 1..20: mol_type = other DNA
ctcacgtcaaatccattctg

SEQ ID NO: 43517 - DNA, 20 bp, synthetic construct
  source 1..20: mol_type = other DNA
ctttctgggaggagacacgc

SEQ ID NO: 43518 - DNA, 20 bp, synthetic construct
  source 1..20: mol_type = other DNA
atgactgggtacctgcggga

SEQ ID NO: 43519 - DNA, 20 bp, synthetic construct
  source 1..20: mol_type = other DNA
caggttcccaaagtggtcgc

SEQ ID NO: 43520 - DNA, 20 bp, synthetic construct
  source 1..20: mol_type = other DNA
gacctcagacttctcaaagc

SEQ ID NO: 43521 - DNA, 20 bp, synthetic construct
  source 1..20: mol_type = other DNA
aactgtacaaactggtgact

SEQ ID NO: 43522 - DNA, 20 bp, synthetic construct
  source 1..20: mol_type = other DNA
gcatcttgtagcgatagaac

SEQ ID NO: 43523 - DNA, 20 bp, synthetic construct
  source 1..20: mol_type = other DNA
aggacgagtgggaggttccc

SEQ ID NO: 43524 - DNA, 20 bp, synthetic construct
  source 1..20: mol_type = other DNA
agccggtgaggccagaatca

SEQ ID NO: 43525 - DNA, 20 bp, synthetic construct
  source 1..20: mol_type = other DNA
ctgttgtcttcaggagtagg

SEQ ID NO: 43526 - DNA, 20 bp, synthetic construct
  source 1..20: mol_type = other DNA
cagggaggcccacacctcag

SEQ ID NO: 43527 - DNA, 20 bp, synthetic construct
  source 1..20: mol_type = other DNA
tcgttcgtggcgctcgtgga

SEQ ID NO: 43528 - DNA, 20 bp, synthetic construct
  source 1..20: mol_type = other DNA
tgaccttattgatttcatgt

SEQ ID NO: 43529 - DNA, 20 bp, synthetic construct
  source 1..20: mol_type = other DNA
agaggacccagctttccggc

SEQ ID NO: 43530 - DNA, 20 bp, synthetic construct
  source 1..20: mol_type = other DNA
gttcttacctctcaatctgc

SEQ ID NO: 43531 - DNA, 20 bp, synthetic construct
  source 1..20: mol_type = other DNA
tgggtggccaccaccagcac

SEQ ID NO: 43532 - DNA, 20 bp, synthetic construct
  source 1..20: mol_type = other DNA
ccaggtgacgtccttgctcg

SEQ ID NO: 43533 - DNA, 20 bp, synthetic construct
  source 1..20: mol_type = other DNA
accgagtgattccggccggc

SEQ ID NO: 43534 - DNA, 20 bp, synthetic construct
  source 1..20: mol_type = other DNA
cgtcctcccaccacggcttc

SEQ ID NO: 43535 - DNA, 20 bp, synthetic construct
  source 1..20: mol_type = other DNA
cctggggcgccccacgatgg

SEQ ID NO: 43536 - DNA, 20 bp, synthetic construct
  source 1..20: mol_type = other DNA
cacagtgttcacagaaggtc

SEQ ID NO: 43537 - DNA, 20 bp, synthetic construct
  source 1..20: mol_type = other DNA
ttgatctgtccaaagtacag

SEQ ID NO: 43538 - DNA, 20 bp, synthetic construct
  source 1..20: mol_type = other DNA
ggaggacgccgcgctcttca

SEQ ID NO: 43539 - DNA, 20 bp, synthetic construct
  source 1..20: mol_type = other DNA
atccacagctaccgaggtac

SEQ ID NO: 43540 - DNA, 20 bp, synthetic construct
  source 1..20: mol_type = other DNA
gaaagtcccgtccgagcggt

SEQ ID NO: 43541 - DNA, 20 bp, synthetic construct
  source 1..20: mol_type = other DNA
cttctacaatgagctgcgtg

SEQ ID NO: 43542 - DNA, 20 bp, synthetic construct
  source 1..20: mol_type = other DNA
tcacagatcagcctcctcat

SEQ ID NO: 43543 - DNA, 20 bp, synthetic construct
  source 1..20: mol_type = other DNA
catagtcccactggatggca

SEQ ID NO: 43544 - DNA, 20 bp, synthetic construct
  source 1..20: mol_type = other DNA
gtagtctaccagcttattta

SEQ ID NO: 43545 - DNA, 20 bp, synthetic construct
  source 1..20: mol_type = other DNA
gttccagatggtcaaagagc

SEQ ID NO: 43546 - DNA, 20 bp, synthetic construct
  source 1..20: mol_type = other DNA
aaggctggaagagtgcctca

SEQ ID NO: 43547 - DNA, 20 bp, synthetic construct
  source 1..20: mol_type = other DNA
tgaggcttctcttcacctgg

SEQ ID NO: 43548 - DNA, 20 bp, synthetic construct
  source 1..20: mol_type = other DNA
gcgcgaccctcaaccgcctg

SEQ ID NO: 43549 - DNA, 20 bp, synthetic construct
  source 1..20: mol_type = other DNA
taagaacgacgccactgccc

SEQ ID NO: 43550 - DNA, 20 bp, synthetic construct
  source 1..20: mol_type = other DNA
acagagcaaaatgtgggctg

SEQ ID NO: 43551 - DNA, 20 bp, synthetic construct
  source 1..20: mol_type = other DNA
agctccagggcgctcaggac

SEQ ID NO: 43552 - DNA, 20 bp, synthetic construct
  source 1..20: mol_type = other DNA
gggctgccagcgtatcgtag

SEQ ID NO: 43553 - DNA, 20 bp, synthetic construct
  source 1..20: mol_type = other DNA
catccaggtaaccgaggtga

SEQ ID NO: 43554 - DNA, 20 bp, synthetic construct
  source 1..20: mol_type = other DNA
acagtgcatggcctatgagc

SEQ ID NO: 43555 - DNA, 20 bp, synthetic construct
  source 1..20: mol_type = other DNA
gctcccctacctggtgcctg

SEQ ID NO: 43556 - DNA, 20 bp, synthetic construct
  source 1..20: mol_type = other DNA
gaggaagctgtcaaagtcct

SEQ ID NO: 43557 - DNA, 20 bp, synthetic construct
  source 1..20: mol_type = other DNA
ggccctggaggatgacgagc

SEQ ID NO: 43558 - DNA, 20 bp, synthetic construct
  source 1..20: mol_type = other DNA
tcccgcagctgcagctgctg

SEQ ID NO: 43559 - DNA, 20 bp, synthetic construct
  source 1..20: mol_type = other DNA
atacctgggctgggagcgaa

SEQ ID NO: 43560 - DNA, 20 bp, synthetic construct
  source 1..20: mol_type = other DNA
gcgagggccatgtcgctgtt

SEQ ID NO: 43561 - DNA, 20 bp, synthetic construct
  source 1..20: mol_type = other DNA
gtctggttggggagatggac

SEQ ID NO: 43562 - DNA, 20 bp, synthetic construct
  source 1..20: mol_type = other DNA
tgtagacagatggccagggt

SEQ ID NO: 43563 - DNA, 20 bp, synthetic construct
  source 1..20: mol_type = other DNA
gcaggttctggaactggagc

SEQ ID NO: 43564 - DNA, 20 bp, synthetic construct
  source 1..20: mol_type = other DNA
gaaagacttgaactcaaggt

SEQ ID NO: 43565 - DNA, 20 bp, synthetic construct
  source 1..20: mol_type = other DNA
agaagaccctgcagctgctg

SEQ ID NO: 43566 - DNA, 20 bp, synthetic construct
  source 1..20: mol_type = other DNA
catcatcagccaggccccgc

SEQ ID NO: 43567 - DNA, 20 bp, synthetic construct
  source 1..20: mol_type = other DNA
ctccaggccgccagagcctg

SEQ ID NO: 43568 - DNA, 20 bp, synthetic construct
  source 1..20: mol_type = other DNA
gctgtcccaggtcaactacc

SEQ ID NO: 43569 - DNA, 20 bp, synthetic construct
  source 1..20: mol_type = other DNA
ggcctcagtctcaaggagca

SEQ ID NO: 43570 - DNA, 20 bp, synthetic construct
  source 1..20: mol_type = other DNA
gatcaggttggacttttcta

SEQ ID NO: 43571 - DNA, 20 bp, synthetic construct
  source 1..20: mol_type = other DNA
atcaggttggacttttctat

SEQ ID NO: 43572 - DNA, 20 bp, synthetic construct
  source 1..20: mol_type = other DNA
ggtaattcaagtctcccaag

SEQ ID NO: 43573 - DNA, 20 bp, synthetic construct
  source 1..20: mol_type = other DNA
gcccaacggtaccttcttca

SEQ ID NO: 43574 - DNA, 20 bp, synthetic construct
  source 1..20: mol_type = other DNA
tgggtaggcaggtggccagg

SEQ ID NO: 43575 - DNA, 20 bp, synthetic construct
  source 1..20: mol_type = other DNA
gtttgctcagtgcttccccc

SEQ ID NO: 43576 - DNA, 20 bp, synthetic construct
  source 1..20: mol_type = other DNA
cgttgggcagttgtgtgaca

SEQ ID NO: 43577 - DNA, 20 bp, synthetic construct
  source 1..20: mol_type = other DNA
caaggcaccccaggtttcca

SEQ ID NO: 43578 - DNA, 20 bp, synthetic construct
  source 1..20: mol_type = other DNA
ggccgcccgaaacatcctcg

SEQ ID NO: 43579 - DNA, 20 bp, synthetic construct
  source 1..20: mol_type = other DNA
accggctttccccccatctc

SEQ ID NO: 43580 - DNA, 20 bp, synthetic construct
  source 1..20: mol_type = other DNA
ctggtcatggagatggctgg

SEQ ID NO: 43581 - DNA, 20 bp, synthetic construct
  source 1..20: mol_type = other DNA
tggaaggtggagctgggctg

SEQ ID NO: 43582 - DNA, 20 bp, synthetic construct
  source 1..20: mol_type = other DNA
tcccaatgatgaccaggatg

SEQ ID NO: 43583 - DNA, 20 bp, synthetic construct
  source 1..20: mol_type = other DNA
cagctccaccttccaccaga

SEQ ID NO: 43584 - DNA, 20 bp, synthetic construct
  source 1..20: mol_type = other DNA
tacaggggcctgaacaaaca

SEQ ID NO: 43585 - DNA, 20 bp, synthetic construct
  source 1..20: mol_type = other DNA
ctcaggtgacggcagcaggc

SEQ ID NO: 43586 - DNA, 20 bp, synthetic construct
  source 1..20: mol_type = other DNA
cttctggtttgcttcctctg

SEQ ID NO: 43587 - DNA, 20 bp, synthetic construct
  source 1..20: mol_type = other DNA
tcgatgtgaagaaggaaaca

SEQ ID NO: 43588 - DNA, 20 bp, synthetic construct
  source 1..20: mol_type = other DNA
ttggcagctaaagctgttga

SEQ ID NO: 43589 - DNA, 20 bp, synthetic construct
  source 1..20: mol_type = other DNA
gtgaagggttctctatcaaa

SEQ ID NO: 43590 - DNA, 20 bp, synthetic construct
  source 1..20: mol_type = other DNA
gcacttactgatccaataca

SEQ ID NO: 43591 - DNA, 20 bp, synthetic construct
  source 1..20: mol_type = other DNA
acagtagccccggaacctgc

SEQ ID NO: 43592 - DNA, 20 bp, synthetic construct
  source 1..20: mol_type = other DNA
atccagttcagcatgatctc

SEQ ID NO: 43593 - DNA, 20 bp, synthetic construct
  source 1..20: mol_type = other DNA
ctcctccatcctcgccatgc

SEQ ID NO: 43594 - DNA, 20 bp, synthetic construct
  source 1..20: mol_type = other DNA
ggggcaggaggaggatgagg

SEQ ID NO: 43595 - DNA, 20 bp, synthetic construct
  source 1..20: mol_type = other DNA
cttggtgcccaccaggatga

SEQ ID NO: 43596 - DNA, 20 bp, synthetic construct
  source 1..20: mol_type = other DNA
taccaggtgcatcgaatcac

SEQ ID NO: 43597 - DNA, 20 bp, synthetic construct
  source 1..20: mol_type = other DNA
gggcaaaggatcgtagttgg

SEQ ID NO: 43598 - DNA, 20 bp, synthetic construct
  source 1..20: mol_type = other DNA
cggaggtctgtgccaccggc

SEQ ID NO: 43599 - DNA, 20 bp, synthetic construct
  source 1..20: mol_type = other DNA
aacgatcaccaccactggca

SEQ ID NO: 43600 - DNA, 20 bp, synthetic construct
  source 1..20: mol_type = other DNA
tgtttcgggcggccaggtcg

SEQ ID NO: 43601 - DNA, 20 bp, synthetic construct
  source 1..20: mol_type = other DNA
gagcctgtttgcctttggta

SEQ ID NO: 43602 - DNA, 20 bp, synthetic construct
  source 1..20: mol_type = other DNA
ccagctgataaaagactgac

SEQ ID NO: 43603 - DNA, 20 bp, synthetic construct
  source 1..20: mol_type = other DNA
ccctatggctgcctccccac

SEQ ID NO: 43604 - DNA, 20 bp, synthetic construct
  source 1..20: mol_type = other DNA
ccatctgcaagtcaggtgag

SEQ ID NO: 43605 - DNA, 20 bp, synthetic construct
  source 1..20: mol_type = other DNA
cctggaggagaaggaggacc

SEQ ID NO: 43606 - DNA, 20 bp, synthetic construct
  source 1..20: mol_type = other DNA
gttctcatgctgaatggtga

SEQ ID NO: 43607 - DNA, 20 bp, synthetic construct
  source 1..20: mol_type = other DNA
ggagaagctcattgctacga

SEQ ID NO: 43608 - DNA, 20 bp, synthetic construct
  source 1..20: mol_type = other DNA
ccggaaccgctcattgccaa

SEQ ID NO: 43609 - DNA, 20 bp, synthetic construct
  source 1..20: mol_type = other DNA
gaacttgatcttggtggtaa

SEQ ID NO: 43610 - DNA, 20 bp, synthetic construct
  source 1..20: mol_type = other DNA
tacacacatttccatggacc

SEQ ID NO: 43611 - DNA, 20 bp, synthetic construct
  source 1..20: mol_type = other DNA
agcagcaccttcaggatgtc

SEQ ID NO: 43612 - DNA, 20 bp, synthetic construct
  source 1..20: mol_type = other DNA
ccgcatcccctggaagcacg

SEQ ID NO: 43613 - DNA, 20 bp, synthetic construct
  source 1..20: mol_type = other DNA
tggacaacccctacatcgtg

SEQ ID NO: 43614 - DNA, 20 bp, synthetic construct
  source 1..20: mol_type = other DNA
aatactcacaggcaagctgg

SEQ ID NO: 43615 - DNA, 20 bp, synthetic construct
  source 1..20: mol_type = other DNA
ggggatttctatgacctgta

SEQ ID NO: 43616 - DNA, 20 bp, synthetic construct
  source 1..20: mol_type = other DNA
gttatccaatacctacaagg

SEQ ID NO: 43617 - DNA, 20 bp, synthetic construct
  source 1..20: mol_type = other DNA
gtctctcctcgaagatcgtg

SEQ ID NO: 43618 - DNA, 20 bp, synthetic construct
  source 1..20: mol_type = other DNA
catcaacaaactcctggaca

SEQ ID NO: 43619 - DNA, 20 bp, synthetic construct
  source 1..20: mol_type = other DNA
tcatcaagctgagtgaccct

SEQ ID NO: 43620 - DNA, 20 bp, synthetic construct
  source 1..20: mol_type = other DNA
cgttctcctgggacggagag

SEQ ID NO: 43621 - DNA, 20 bp, synthetic construct
  source 1..20: mol_type = other DNA
cacacttactctccacgtcg

SEQ ID NO: 43622 - DNA, 20 bp, synthetic construct
  source 1..20: mol_type = other DNA
ggtgaagctctcctgtgggg

SEQ ID NO: 43623 - DNA, 20 bp, synthetic construct
  source 1..20: mol_type = other DNA
acccatatccgcacccacac

SEQ ID NO: 43624 - DNA, 20 bp, synthetic construct
  source 1..20: mol_type = other DNA
ggcccccaggtttgagccga

SEQ ID NO: 43625 - DNA, 20 bp, synthetic construct
  source 1..20: mol_type = other DNA
ctagacaatgagaagagcaa

SEQ ID NO: 43626 - DNA, 20 bp, synthetic construct
  source 1..20: mol_type = other DNA
acctgtggatgcagcggtcc

SEQ ID NO: 43627 - DNA, 20 bp, synthetic construct
  source 1..20: mol_type = other DNA
tactgtaccagacaaactcg

SEQ ID NO: 43628 - DNA, 20 bp, synthetic construct
  source 1..20: mol_type = other DNA
aggccctgcgggtaggtgat

SEQ ID NO: 43629 - DNA, 20 bp, synthetic construct
  source 1..20: mol_type = other DNA
gagccggcagcgctgggtgc

SEQ ID NO: 43630 - DNA, 20 bp, synthetic construct
  source 1..20: mol_type = other DNA
gcacagcaggtagagcatct

SEQ ID NO: 43631 - DNA, 20 bp, synthetic construct
  source 1..20: mol_type = other DNA
cttctgggagtcaaaggtca

SEQ ID NO: 43632 - DNA, 20 bp, synthetic construct
  source 1..20: mol_type = other DNA
tgaaatagaacctggaaggc

SEQ ID NO: 43633 - DNA, 20 bp, synthetic construct
  source 1..20: mol_type = other DNA
ggctcctcaccctgttgaac

SEQ ID NO: 43634 - DNA, 20 bp, synthetic construct
  source 1..20: mol_type = other DNA
cgcggacacagacgccatag

SEQ ID NO: 43635 - DNA, 20 bp, synthetic construct
  source 1..20: mol_type = other DNA
gcttcgggcaaccctacggc

SEQ ID NO: 43636 - DNA, 20 bp, synthetic construct
  source 1..20: mol_type = other DNA
gagagaagatgttgtccgag

SEQ ID NO: 43637 - DNA, 20 bp, synthetic construct
  source 1..20: mol_type = other DNA
tggtgctgctaaatctcttg

SEQ ID NO: 43638 - DNA, 20 bp, synthetic construct
  source 1..20: mol_type = other DNA
cccattcctgtcatttactg

SEQ ID NO: 43639 - DNA, 20 bp, synthetic construct
  source 1..20: mol_type = other DNA
tggttttccagctctcacgg

SEQ ID NO: 43640 - DNA, 20 bp, synthetic construct
  source 1..20: mol_type = other DNA
gcaaagagggagtggtacac

SEQ ID NO: 43641 - DNA, 20 bp, synthetic construct
  source 1..20: mol_type = other DNA
tgccatcaacatggccagga

SEQ ID NO: 43642 - DNA, 20 bp, synthetic construct
  source 1..20: mol_type = other DNA
gcagtaccacagccatctcc

SEQ ID NO: 43643 - DNA, 20 bp, synthetic construct
  source 1..20: mol_type = other DNA
gaattactcccagcagcttc

SEQ ID NO: 43644 - DNA, 20 bp, synthetic construct
  source 1..20: mol_type = other DNA
gggtcactcagcttgatgaa

SEQ ID NO: 43645 - DNA, 20 bp, synthetic construct
  source 1..20: mol_type = other DNA
cacaggcatgccgtgagtac

SEQ ID NO: 43646 - DNA, 20 bp, synthetic construct
  source 1..20: mol_type = other DNA
agcacccaaaagggcttaga

SEQ ID NO: 43647 - DNA, 20 bp, synthetic construct
  source 1..20: mol_type = other DNA
agttgaagaggcaccagagg

SEQ ID NO: 43648 - DNA, 20 bp, synthetic construct
  source 1..20: mol_type = other DNA
ttctacataccaaggggcaa

SEQ ID NO: 43649 - DNA, 20 bp, synthetic construct
  source 1..20: mol_type = other DNA
atcttcaaagtatgccaggc

SEQ ID NO: 43650 - DNA, 20 bp, synthetic construct
  source 1..20: mol_type = other DNA
ggtgaagtgggcatccccag

SEQ ID NO: 43651 - DNA, 20 bp, synthetic construct
  source 1..20: mol_type = other DNA
ccacaggtagccctgccagc

SEQ ID NO: 43652 - DNA, 20 bp, synthetic construct
  source 1..20: mol_type = other DNA
gtgacacgaggagcgggtgc

SEQ ID NO: 43653 - DNA, 20 bp, synthetic construct
  source 1..20: mol_type = other DNA
gcacgcagcggcgggagccc

SEQ ID NO: 43654 - DNA, 20 bp, synthetic construct
  source 1..20: mol_type = other DNA
cacaaaggcatgctccttga

SEQ ID NO: 43655 - DNA, 20 bp, synthetic construct
  source 1..20: mol_type = other DNA
caggaggagctgctgggctc

SEQ ID NO: 43656 - DNA, 20 bp, synthetic construct
  source 1..20: mol_type = other DNA
tatgccatctctttccggtg

SEQ ID NO: 43657 - DNA, 20 bp, synthetic construct
  source 1..20: mol_type = other DNA
ccacggaggacctgtcctgc

SEQ ID NO: 43658 - DNA, 20 bp, synthetic construct
  source 1..20: mol_type = other DNA
cattctcaccaagtagctca

SEQ ID NO: 43659 - DNA, 20 bp, synthetic construct
  source 1..20: mol_type = other DNA
ctctgcaggtatgaccccga

SEQ ID NO: 43660 - DNA, 20 bp, synthetic construct
  source 1..20: mol_type = other DNA
ccaggaagacctagaaggag

SEQ ID NO: 43661 - DNA, 20 bp, synthetic construct
  source 1..20: mol_type = other DNA
tggtccagtgctcagctcca

SEQ ID NO: 43662 - DNA, 20 bp, synthetic construct
  source 1..20: mol_type = other DNA
tgtgtcacagctcaatctcg

SEQ ID NO: 43663 - DNA, 20 bp, synthetic construct
  source 1..20: mol_type = other DNA
ctattcagccaatgtgatgg

SEQ ID NO: 43664 - DNA, 20 bp, synthetic construct
  source 1..20: mol_type = other DNA
gctcggtgaggatcttcatg

SEQ ID NO: 43665 - DNA, 20 bp, synthetic construct
  source 1..20: mol_type = other DNA
gaagttcaggtagacccctg

SEQ ID NO: 43666 - DNA, 20 bp, synthetic construct
  source 1..20: mol_type = other DNA
gcagcatgaccgtgttcatg

SEQ ID NO: 43667 - DNA, 20 bp, synthetic construct
  source 1..20: mol_type = other DNA
aacttctactcactctcatg

SEQ ID NO: 43668 - DNA, 20 bp, synthetic construct
  source 1..20: mol_type = other DNA
ccacatctcatgccagagga

SEQ ID NO: 43669 - DNA, 20 bp, synthetic construct
  source 1..20: mol_type = other DNA
ttggtccagtgctcagctcc

SEQ ID NO: 43670 - DNA, 20 bp, synthetic construct
  source 1..20: mol_type = other DNA
agttagaagtcgggtcgtgg

SEQ ID NO: 43671 - DNA, 20 bp, synthetic construct
  source 1..20: mol_type = other DNA
caccaagtagctcagggcac

SEQ ID NO: 43672 - DNA, 20 bp, synthetic construct
  source 1..20: mol_type = other DNA
ctcaggaggaaggtcccatc

SEQ ID NO: 43673 - DNA, 20 bp, synthetic construct
  source 1..20: mol_type = other DNA
cgacaagttcagagagctcc

SEQ ID NO: 43674 - DNA, 20 bp, synthetic construct
  source 1..20: mol_type = other DNA
cgcatgcacagtttgtaccc

SEQ ID NO: 43675 - DNA, 20 bp, synthetic construct
  source 1..20: mol_type = other DNA
ctggctgcggtcctcgggga

SEQ ID NO: 43676 - DNA, 20 bp, synthetic construct
  source 1..20: mol_type = other DNA
gcaagatctgcacaaccaaa

SEQ ID NO: 43677 - DNA, 20 bp, synthetic construct
  source 1..20: mol_type = other DNA
tacctgtttatgcacatctg

SEQ ID NO: 43678 - DNA, 20 bp, synthetic construct
  source 1..20: mol_type = other DNA
cagctgaaccccgaggcgct

SEQ ID NO: 43679 - DNA, 20 bp, synthetic construct
  source 1..20: mol_type = other DNA
gagcagggcatccttgttga

SEQ ID NO: 43680 - DNA, 20 bp, synthetic construct
  source 1..20: mol_type = other DNA
ttcttgactaccagggggta

SEQ ID NO: 43681 - DNA, 20 bp, synthetic construct
  source 1..20: mol_type = other DNA
ggtccagtgctcagctccag

SEQ ID NO: 43682 - DNA, 20 bp, synthetic construct
  source 1..20: mol_type = other DNA
ctaccaaaccaatgatcctc

SEQ ID NO: 43683 - DNA, 20 bp, synthetic construct
  source 1..20: mol_type = other DNA
cagaatggggatcttgaagt

SEQ ID NO: 43684 - DNA, 20 bp, synthetic construct
  source 1..20: mol_type = other DNA
aggaccaccagtccacagag

SEQ ID NO: 43685 - DNA, 20 bp, synthetic construct
  source 1..20: mol_type = other DNA
tcaagcctcattggaatgat

SEQ ID NO: 43686 - DNA, 20 bp, synthetic construct
  source 1..20: mol_type = other DNA
aaaggtatacatcaggaggc

SEQ ID NO: 43687 - DNA, 20 bp, synthetic construct
  source 1..20: mol_type = other DNA
cacacggagtacttgcgctc

SEQ ID NO: 43688 - DNA, 20 bp, synthetic construct
  source 1..20: mol_type = other DNA
cagtcggacatctggagcat

SEQ ID NO: 43689 - DNA, 20 bp, synthetic construct
  source 1..20: mol_type = other DNA
ccttcccagggcgtgatggt

SEQ ID NO: 43690 - DNA, 20 bp, synthetic construct
  source 1..20: mol_type = other DNA
gaagtcatgcccgttggcgg

SEQ ID NO: 43691 - DNA, 20 bp, synthetic construct
  source 1..20: mol_type = other DNA
acgccctgtccctcatctat

SEQ ID NO: 43692 - DNA, 20 bp, synthetic construct
  source 1..20: mol_type = other DNA
cctgcaccatggtgcctggt

SEQ ID NO: 43693 - DNA, 20 bp, synthetic construct
  source 1..20: mol_type = other DNA
actcaccagctgtccactcc

SEQ ID NO: 43694 - DNA, 20 bp, synthetic construct
  source 1..20: mol_type = other DNA
tccgcatgcagatccggcac

SEQ ID NO: 43695 - DNA, 20 bp, synthetic construct
  source 1..20: mol_type = other DNA
gaagccacactggtaaggcc

SEQ ID NO: 43696 - DNA, 20 bp, synthetic construct
  source 1..20: mol_type = other DNA
agaccctgcggataggtgat

SEQ ID NO: 43697 - DNA, 20 bp, synthetic construct
  source 1..20: mol_type = other DNA
aggtgtttcaggaatactac

SEQ ID NO: 43698 - DNA, 20 bp, synthetic construct
  source 1..20: mol_type = other DNA
acatgggtagagggaacggt

SEQ ID NO: 43699 - DNA, 20 bp, synthetic construct
  source 1..20: mol_type = other DNA
ctttcccagacgatcgtcac

SEQ ID NO: 43700 - DNA, 20 bp, synthetic construct
  source 1..20: mol_type = other DNA
cagctggacaggagatggct

SEQ ID NO: 43701 - DNA, 20 bp, synthetic construct
  source 1..20: mol_type = other DNA
cctggaggacaggcaggagc

SEQ ID NO: 43702 - DNA, 20 bp, synthetic construct
  source 1..20: mol_type = other DNA
gctgtcccggtcatccttga

SEQ ID NO: 43703 - DNA, 20 bp, synthetic construct
  source 1..20: mol_type = other DNA
acgtgaacgttccggagagc

SEQ ID NO: 43704 - DNA, 20 bp, synthetic construct
  source 1..20: mol_type = other DNA
tggcctcaccggctgtagct

SEQ ID NO: 43705 - DNA, 20 bp, synthetic construct
  source 1..20: mol_type = other DNA
ggccttcgtgaaaccatctg

SEQ ID NO: 43706 - DNA, 20 bp, synthetic construct
  source 1..20: mol_type = other DNA
gaagaggcaccagaggcgga

SEQ ID NO: 43707 - DNA, 20 bp, synthetic construct
  source 1..20: mol_type = other DNA
cagttcggggaggtgtggat

SEQ ID NO: 43708 - DNA, 20 bp, synthetic construct
  source 1..20: mol_type = other DNA
ttccatcaagtgcgtgttgg

SEQ ID NO: 43709 - DNA, 20 bp, synthetic construct
  source 1..20: mol_type = other DNA
tacctgcagtgcaccacaat

SEQ ID NO: 43710 - DNA, 20 bp, synthetic construct
  source 1..20: mol_type = other DNA
ctgtacccctgtgctggtgg

SEQ ID NO: 43711 - DNA, 20 bp, synthetic construct
  source 1..20: mol_type = other DNA
gcggaggctcagcgagctcc

SEQ ID NO: 43712 - DNA, 20 bp, synthetic construct
  source 1..20: mol_type = other DNA
aattatgagaaactgagccg

SEQ ID NO: 43713 - DNA, 20 bp, synthetic construct
  source 1..20: mol_type = other DNA
gagggtacttgtcctcagac

SEQ ID NO: 43714 - DNA, 20 bp, synthetic construct
  source 1..20: mol_type = other DNA
tgctggtcatggagatggct

SEQ ID NO: 43715 - DNA, 20 bp, synthetic construct
  source 1..20: mol_type = other DNA
gcagctgcgcggggtcagca

SEQ ID NO: 43716 - DNA, 20 bp, synthetic construct
  source 1..20: mol_type = other DNA
acacgaggagcgggtgctgg

SEQ ID NO: 43717 - DNA, 20 bp, synthetic construct
  source 1..20: mol_type = other DNA
cccaagtaaggagactgggg

SEQ ID NO: 43718 - DNA, 20 bp, synthetic construct
  source 1..20: mol_type = other DNA
ctcggagctgcggcgtgggg

SEQ ID NO: 43719 - DNA, 20 bp, synthetic construct
  source 1..20: mol_type = other DNA
gaggcggaaggcatcctgat

SEQ ID NO: 43720 - DNA, 20 bp, synthetic construct
  source 1..20: mol_type = other DNA
catcttgggctgagagcgag

SEQ ID NO: 43721 - DNA, 20 bp, synthetic construct
  source 1..20: mol_type = other DNA
tcttcctccacgtagttggc

SEQ ID NO: 43722 - DNA, 20 bp, synthetic construct
  source 1..20: mol_type = other DNA
gcaggtgaacacataggcct

SEQ ID NO: 43723 - DNA, 20 bp, synthetic construct
  source 1..20: mol_type = other DNA
ttctgcccttctctctggaa

SEQ ID NO: 43724 - DNA, 20 bp, synthetic construct
  source 1..20: mol_type = other DNA
tcatttggtgagtgtcatgc

SEQ ID NO: 43725 - DNA, 20 bp, synthetic construct
  source 1..20: mol_type = other DNA
tatccaatacctacaaggag

SEQ ID NO: 43726 - DNA, 20 bp, synthetic construct
  source 1..20: mol_type = other DNA
catcaagctgagtgaccctg

SEQ ID NO: 43727 - DNA, 20 bp, synthetic construct
  source 1..20: mol_type = other DNA
ctcgtggccttcctccactg

SEQ ID NO: 43728 - DNA, 20 bp, synthetic construct
  source 1..20: mol_type = other DNA
ttgcacagctcgcacttgta

SEQ ID NO: 43729 - DNA, 20 bp, synthetic construct
  source 1..20: mol_type = other DNA
tcggagattctccaccattg

SEQ ID NO: 43730 - DNA, 20 bp, synthetic construct
  source 1..20: mol_type = other DNA
tcaggaagcaccaccctgaa

SEQ ID NO: 43731 - DNA, 20 bp, synthetic construct
  source 1..20: mol_type = other DNA
gggggaacagctccgcatcc

SEQ ID NO: 43732 - DNA, 20 bp, synthetic construct
  source 1..20: mol_type = other DNA
tagtcatttctatttaaggg

SEQ ID NO: 43733 - DNA, 20 bp, synthetic construct
  source 1..20: mol_type = other DNA
taaacttggaccacaacagg

SEQ ID NO: 43734 - DNA, 20 bp, synthetic construct
  source 1..20: mol_type = other DNA
gtgctatattggctggtgag

SEQ ID NO: 43735 - DNA, 20 bp, synthetic construct
  source 1..20: mol_type = other DNA
tggtgaaggacccatggccc

SEQ ID NO: 43736 - DNA, 20 bp, synthetic construct
  source 1..20: mol_type = other DNA
tgaactcgtggcacttgacg

SEQ ID NO: 43737 - DNA, 20 bp, synthetic construct
  source 1..20: mol_type = other DNA
gggtcacctgaaggccgtaa

SEQ ID NO: 43738 - DNA, 20 bp, synthetic construct
  source 1..20: mol_type = other DNA
aaatcaatgtggaacagctg

SEQ ID NO: 43739 - DNA, 20 bp, synthetic construct
  source 1..20: mol_type = other DNA
atccaatacctacaaggagg

SEQ ID NO: 43740 - DNA, 20 bp, synthetic construct
  source 1..20: mol_type = other DNA
cagcgagcagaaggcgcacc

SEQ ID NO: 43741 - DNA, 20 bp, synthetic construct
  source 1..20: mol_type = other DNA
ccatgcactgttgaatcagc

SEQ ID NO: 43742 - DNA, 20 bp, synthetic construct
  source 1..20: mol_type = other DNA
gatgaagccttcctggcccg

SEQ ID NO: 43743 - DNA, 20 bp, synthetic construct
  source 1..20: mol_type = other DNA
cgccttccactgtggggaga

SEQ ID NO: 43744 - DNA, 20 bp, synthetic construct
  source 1..20: mol_type = other DNA
gagaaggtaaaaataaatgt

SEQ ID NO: 43745 - DNA, 20 bp, synthetic construct
  source 1..20: mol_type = other DNA
cggggagcagctcacaggtt

SEQ ID NO: 43746 - DNA, 20 bp, synthetic construct
  source 1..20: mol_type = other DNA
ctgaccacgtccagccccga

SEQ ID NO: 43747 - DNA, 20 bp, synthetic construct
  source 1..20: mol_type = other DNA
gcaccggttgaataagatgg

SEQ ID NO: 43748 - DNA, 20 bp, synthetic construct
  source 1..20: mol_type = other DNA
cacagcctgtgttgaagcag

SEQ ID NO: 43749 - DNA, 20 bp, synthetic construct
  source 1..20: mol_type = other DNA
tcgcaggaggccgagttccc

SEQ ID NO: 43750 - DNA, 20 bp, synthetic construct
  source 1..20: mol_type = other DNA
cggcccctcgtcatcaagac

SEQ ID NO: 43751 - DNA, 20 bp, synthetic construct
  source 1..20: mol_type = other DNA
cagctgcagatgtactgaga

SEQ ID NO: 43752 - DNA, 20 bp, synthetic construct
  source 1..20: mol_type = other DNA
gtgaactgagtctggtatag

SEQ ID NO: 43753 - DNA, 20 bp, synthetic construct
  source 1..20: mol_type = other DNA
aacactgtgggaccctgctg

SEQ ID NO: 43754 - DNA, 20 bp, synthetic construct
  source 1..20: mol_type = other DNA
ccatacagctgcaccagttt

SEQ ID NO: 43755 - DNA, 20 bp, synthetic construct
  source 1..20: mol_type = other DNA
tctttacctggggaaacaca

SEQ ID NO: 43756 - DNA, 20 bp, synthetic construct
  source 1..20: mol_type = other DNA
ccccttcaagatacctatag

SEQ ID NO: 43757 - DNA, 20 bp, synthetic construct
  source 1..20: mol_type = other DNA
ctcgtgcaggtgtgagaagt

SEQ ID NO: 43758 - DNA, 20 bp, synthetic construct
  source 1..20: mol_type = other DNA
cgatggaggggaagacggcc

SEQ ID NO: 43759 - DNA, 20 bp, synthetic construct
  source 1..20: mol_type = other DNA
gaccaggtgccccagcatgc

SEQ ID NO: 43760 - DNA, 20 bp, synthetic construct
  source 1..20: mol_type = other DNA
ggtactccatgaccagccgc

SEQ ID NO: 43761 - DNA, 20 bp, synthetic construct
  source 1..20: mol_type = other DNA
cccggctcagacgctcctgg

SEQ ID NO: 43762 - DNA, 20 bp, synthetic construct
  source 1..20: mol_type = other DNA
agggccagctctgtccactt

SEQ ID NO: 43763 - DNA, 20 bp, synthetic construct
  source 1..20: mol_type = other DNA
ggccaaggcaagcagcgcgc

SEQ ID NO: 43764 - DNA, 20 bp, synthetic construct
  source 1..20: mol_type = other DNA
tactcacgattgtcaaagat

SEQ ID NO: 43765 - DNA, 20 bp, synthetic construct
  source 1..20: mol_type = other DNA
atgctcataccaagtctctg

SEQ ID NO: 43766 - DNA, 20 bp, synthetic construct
  source 1..20: mol_type = other DNA
tgaccagccgcaggctctgg

SEQ ID NO: 43767 - DNA, 20 bp, synthetic construct
  source 1..20: mol_type = other DNA
tccagattacgagaatctgc

SEQ ID NO: 43768 - DNA, 20 bp, synthetic construct
  source 1..20: mol_type = other DNA
gaaatcatggtgcttccttc

SEQ ID NO: 43769 - DNA, 20 bp, synthetic construct
  source 1..20: mol_type = other DNA
tactctggggcgcagaccga

SEQ ID NO: 43770 - DNA, 20 bp, synthetic construct
  source 1..20: mol_type = other DNA
aaacctgtggggagcaggca

SEQ ID NO: 43771 - DNA, 20 bp, synthetic construct
  source 1..20: mol_type = other DNA
ggtcgcggtgcacgcagcgg

SEQ ID NO: 43772 - DNA, 20 bp, synthetic construct
  source 1..20: mol_type = other DNA
acattacaagatccgtaatc

SEQ ID NO: 43773 - DNA, 20 bp, synthetic construct
  source 1..20: mol_type = other DNA
ctctccgggaaaggcgttgg

SEQ ID NO: 43774 - DNA, 20 bp, synthetic construct
  source 1..20: mol_type = other DNA
ccagcagctcgcagcgttgc

SEQ ID NO: 43775 - DNA, 20 bp, synthetic construct
  source 1..20: mol_type = other DNA
gtgcatcagctccttggtct

SEQ ID NO: 43776 - DNA, 20 bp, synthetic construct
  source 1..20: mol_type = other DNA
gattgaaagccaagcatggt

SEQ ID NO: 43777 - DNA, 20 bp, synthetic construct
  source 1..20: mol_type = other DNA
ctgttggccttggggttcag

SEQ ID NO: 43778 - DNA, 20 bp, synthetic construct
  source 1..20: mol_type = other DNA
ggaaggctcgcttggtccac

SEQ ID NO: 43779 - DNA, 20 bp, synthetic construct
  source 1..20: mol_type = other DNA
ggcaggcctttgtcctccta

SEQ ID NO: 43780 - DNA, 20 bp, synthetic construct
  source 1..20: mol_type = other DNA
ggcttccaaggaggactcac

SEQ ID NO: 43781 - DNA, 20 bp, synthetic construct
  source 1..20: mol_type = other DNA
tgcccagtgtgttccaccat

SEQ ID NO: 43782 - DNA, 20 bp, synthetic construct
  source 1..20: mol_type = other DNA
caagctcaaagctcctttgg

SEQ ID NO: 43783 - DNA, 20 bp, synthetic construct
  source 1..20: mol_type = other DNA
ctcacagcaggtggacagga

SEQ ID NO: 43784 - DNA, 20 bp, synthetic construct
  source 1..20: mol_type = other DNA
ggcggtaccagagcggcaag

SEQ ID NO: 43785 - DNA, 20 bp, synthetic construct
  source 1..20: mol_type = other DNA
ccacttcaggaatatggtga

SEQ ID NO: 43786 - DNA, 20 bp, synthetic construct
  source 1..20: mol_type = other DNA
aacggcgctccaagatggac

SEQ ID NO: 43787 - DNA, 20 bp, synthetic construct
  source 1..20: mol_type = other DNA
tgccgagtgaaccgaaactc

SEQ ID NO: 43788 - DNA, 20 bp, synthetic construct
  source 1..20: mol_type = other DNA
cgggcagagacattgccatg

SEQ ID NO: 43789 - DNA, 20 bp, synthetic construct
  source 1..20: mol_type = other DNA
agttccattcattacctcac

SEQ ID NO: 43790 - DNA, 20 bp, synthetic construct
  source 1..20: mol_type = other DNA
cgactgaaagagaaaacctc

SEQ ID NO: 43791 - DNA, 20 bp, synthetic construct
  source 1..20: mol_type = other DNA
gcagaagcaggtgtctctgg

SEQ ID NO: 43792 - DNA, 20 bp, synthetic construct
  source 1..20: mol_type = other DNA
aggcggaccctgaaaaaccg

SEQ ID NO: 43793 - DNA, 20 bp, synthetic construct
  source 1..20: mol_type = other DNA
gggtttctgtccactgccgg

SEQ ID NO: 43794 - DNA, 20 bp, synthetic construct
  source 1..20: mol_type = other DNA
agaaggtaaaaataaatgtg

SEQ ID NO: 43795 - DNA, 20 bp, synthetic construct
  source 1..20: mol_type = other DNA
gcggaaccgctcattgccaa

SEQ ID NO: 43796 - DNA, 20 bp, synthetic construct
  source 1..20: mol_type = other DNA
cccaggtggggttctgcctg

SEQ ID NO: 43797 - DNA, 20 bp, synthetic construct
  source 1..20: mol_type = other DNA
gctgggggctggacagttcg

SEQ ID NO: 43798 - DNA, 20 bp, synthetic construct
  source 1..20: mol_type = other DNA
gagtagggccggccagtgca

SEQ ID NO: 43799 - DNA, 20 bp, synthetic construct
  source 1..20: mol_type = other DNA
aagttcaggtagacccctgt

SEQ ID NO: 43800 - DNA, 20 bp, synthetic construct
  source 1..20: mol_type = other DNA
ttgtagctgcaggggttgga

SEQ ID NO: 43801 - DNA, 20 bp, synthetic construct
  source 1..20: mol_type = other DNA
ccgacgagcggatgaaggtg

SEQ ID NO: 43802 - DNA, 20 bp, synthetic construct
  source 1..20: mol_type = other DNA
tggctaggtgcagtggtctg

SEQ ID NO: 43803 - DNA, 20 bp, synthetic construct
  source 1..20: mol_type = other DNA
atacaagtccaggagatctt

SEQ ID NO: 43804 - DNA, 20 bp, synthetic construct
  source 1..20: mol_type = other DNA
ccaagcttaaagcctccagc

SEQ ID NO: 43805 - DNA, 20 bp, synthetic construct
  source 1..20: mol_type = other DNA
ggcacagagctttggcctgc

SEQ ID NO: 43806 - DNA, 20 bp, synthetic construct
  source 1..20: mol_type = other DNA
cttcaggtgctcctcggcct

SEQ ID NO: 43807 - DNA, 20 bp, synthetic construct
  source 1..20: mol_type = other DNA
ccgtggacgatgacaaccac

SEQ ID NO: 43808 - DNA, 20 bp, synthetic construct
  source 1..20: mol_type = other DNA
gacgaggcccagagcaagag

SEQ ID NO: 43809 - DNA, 20 bp, synthetic construct
  source 1..20: mol_type = other DNA
tcttccaccatgatatctgt

SEQ ID NO: 43810 - DNA, 20 bp, synthetic construct
  source 1..20: mol_type = other DNA
gagctccatatatctggact

SEQ ID NO: 43811 - DNA, 20 bp, synthetic construct
  source 1..20: mol_type = other DNA
ttcgctcagaggtcctgggc

SEQ ID NO: 43812 - DNA, 20 bp, synthetic construct
  source 1..20: mol_type = other DNA
gttgtagaagcatgtgaact

SEQ ID NO: 43813 - DNA, 20 bp, synthetic construct
  source 1..20: mol_type = other DNA
tgatggtggccttcacctgg

SEQ ID NO: 43814 - DNA, 20 bp, synthetic construct
  source 1..20: mol_type = other DNA
gttctccagtgagtcctcct

SEQ ID NO: 43815 - DNA, 20 bp, synthetic construct
  source 1..20: mol_type = other DNA
acggagcagcccaagcagcg

SEQ ID NO: 43816 - DNA, 20 bp, synthetic construct
  source 1..20: mol_type = other DNA
agtgaccaggcggtgctctc

SEQ ID NO: 43817 - DNA, 20 bp, synthetic construct
  source 1..20: mol_type = other DNA
ccagctccttctccttcagc

SEQ ID NO: 43818 - DNA, 20 bp, synthetic construct
  source 1..20: mol_type = other DNA
taaacttggtcttcaggtat

SEQ ID NO: 43819 - DNA, 20 bp, synthetic construct
  source 1..20: mol_type = other DNA
cacgatttcccgctcggccg

SEQ ID NO: 43820 - DNA, 20 bp, synthetic construct
  source 1..20: mol_type = other DNA
aatgtggaacagctgagggg

SEQ ID NO: 43821 - DNA, 20 bp, synthetic construct
  source 1..20: mol_type = other DNA
ccaggtcactgcggtgctgg

SEQ ID NO: 43822 - DNA, 20 bp, synthetic construct
  source 1..20: mol_type = other DNA
gcccgaagcagaccgagtgt

SEQ ID NO: 43823 - DNA, 20 bp, synthetic construct
  source 1..20: mol_type = other DNA
tagccaggtatcaatctgga

SEQ ID NO: 43824 - DNA, 20 bp, synthetic construct
  source 1..20: mol_type = other DNA
tcttcaggtgcccgctggga

SEQ ID NO: 43825 - DNA, 20 bp, synthetic construct
  source 1..20: mol_type = other DNA
gccctattcctcactaccag

SEQ ID NO: 43826 - DNA, 20 bp, synthetic construct
  source 1..20: mol_type = other DNA
acagttcatcccgcagtctg

SEQ ID NO: 43827 - DNA, 20 bp, synthetic construct
  source 1..20: mol_type = other DNA
gatggagtacctcaacggag

SEQ ID NO: 43828 - DNA, 20 bp, synthetic construct
  source 1..20: mol_type = other DNA
acctgactttagtagtgaac

SEQ ID NO: 43829 - DNA, 20 bp, synthetic construct
  source 1..20: mol_type = other DNA
cagaaagccccagttacagc

SEQ ID NO: 43830 - DNA, 20 bp, synthetic construct
  source 1..20: mol_type = other DNA
gggatgccagttatttacca

SEQ ID NO: 43831 - DNA, 20 bp, synthetic construct
  source 1..20: mol_type = other DNA
catcgagcagctgactacac

SEQ ID NO: 43832 - DNA, 20 bp, synthetic construct
  source 1..20: mol_type = other DNA
gttcccatacccctgccgcc

SEQ ID NO: 43833 - DNA, 20 bp, synthetic construct
  source 1..20: mol_type = other DNA
ttatccaatacctacaagga

SEQ ID NO: 43834 - DNA, 20 bp, synthetic construct
  source 1..20: mol_type = other DNA
gccaggtgcaggggcgtctg

SEQ ID NO: 43835 - DNA, 20 bp, synthetic construct
  source 1..20: mol_type = other DNA
caaccaggcctggcatgcgt

SEQ ID NO: 43836 - DNA, 20 bp, synthetic construct
  source 1..20: mol_type = other DNA
ccttgcccatgtcggccaca

SEQ ID NO: 43837 - DNA, 20 bp, synthetic construct
  source 1..20: mol_type = other DNA
agagcctgcgggcagagctc

SEQ ID NO: 43838 - DNA, 20 bp, synthetic construct
  source 1..20: mol_type = other DNA
acggagcgtgatgaatccag

SEQ ID NO: 43839 - DNA, 20 bp, synthetic construct
  source 1..20: mol_type = other DNA
tgatgtgagtgctcagaaca

SEQ ID NO: 43840 - DNA, 20 bp, synthetic construct
  source 1..20: mol_type = other DNA
tcacctgaaggccgtaaagg

SEQ ID NO: 43841 - DNA, 20 bp, synthetic construct
  source 1..20: mol_type = other DNA
ctccagcttcggtcgagggg

SEQ ID NO: 43842 - DNA, 20 bp, synthetic construct
  source 1..20: mol_type = other DNA
ggtgcagtaccggactgact

SEQ ID NO: 43843 - DNA, 20 bp, synthetic construct
  source 1..20: mol_type = other DNA
aacatcaagaggttcaggta

SEQ ID NO: 43844 - DNA, 20 bp, synthetic construct
  source 1..20: mol_type = other DNA
ttcagctgctgctttgtgta

SEQ ID NO: 43845 - DNA, 20 bp, synthetic construct
  source 1..20: mol_type = other DNA
tccacaggacgtccatgagc

SEQ ID NO: 43846 - DNA, 20 bp, synthetic construct
  source 1..20: mol_type = other DNA
tttcctggaggaaaaagaca

SEQ ID NO: 43847 - DNA, 20 bp, synthetic construct
  source 1..20: mol_type = other DNA
tgcagtaggcctccaggatg

SEQ ID NO: 43848 - DNA, 20 bp, synthetic construct
  source 1..20: mol_type = other DNA
caggccctgcgggtaggtga

SEQ ID NO: 43849 - DNA, 20 bp, synthetic construct
  source 1..20: mol_type = other DNA
caccaaatcatactgtccct

SEQ ID NO: 43850 - DNA, 20 bp, synthetic construct
  source 1..20: mol_type = other DNA
acgagaacgagggtgcgtct

SEQ ID NO: 43851 - DNA, 20 bp, synthetic construct
  source 1..20: mol_type = other DNA
atccagggcactgatgggca

SEQ ID NO: 43852 - DNA, 20 bp, synthetic construct
  source 1..20: mol_type = other DNA
cttggtgcggcagagggtga

SEQ ID NO: 43853 - DNA, 20 bp, synthetic construct
  source 1..20: mol_type = other DNA
agcgcaggcactggcgcagc

SEQ ID NO: 43854 - DNA, 20 bp, synthetic construct
  source 1..20: mol_type = other DNA
cctgctggtaggacaggggc

SEQ ID NO: 43855 - DNA, 20 bp, synthetic construct
  source 1..20: mol_type = other DNA
cggacgggactttcttggtg

SEQ ID NO: 43856 - DNA, 20 bp, synthetic construct
  source 1..20: mol_type = other DNA
agtctctggctcactatggc

SEQ ID NO: 43857 - DNA, 20 bp, synthetic construct
  source 1..20: mol_type = other DNA
gaagccgactcacggccgag

SEQ ID NO: 43858 - DNA, 20 bp, synthetic construct
  source 1..20: mol_type = other DNA
cactcagccttaccagcccc

SEQ ID NO: 43859 - DNA, 20 bp, synthetic construct
  source 1..20: mol_type = other DNA
acgaatgacggctcggaagg

SEQ ID NO: 43860 - DNA, 20 bp, synthetic construct
  source 1..20: mol_type = other DNA
gattctacactggcaaaccc

SEQ ID NO: 43861 - DNA, 20 bp, synthetic construct
  source 1..20: mol_type = other DNA
ccgccttgtcttggctgatg

SEQ ID NO: 43862 - DNA, 20 bp, synthetic construct
  source 1..20: mol_type = other DNA
tgactaccagggggtatggc

SEQ ID NO: 43863 - DNA, 20 bp, synthetic construct
  source 1..20: mol_type = other DNA
agcacagcaggtagagcatc

SEQ ID NO: 43864 - DNA, 20 bp, synthetic construct
  source 1..20: mol_type = other DNA
ctctggatctcttcatgcac

SEQ ID NO: 43865 - DNA, 20 bp, synthetic construct
  source 1..20: mol_type = other DNA
gatgtgatgacttgcaaaga

SEQ ID NO: 43866 - DNA, 20 bp, synthetic construct
  source 1..20: mol_type = other DNA
gatacatgtctatggccccc

SEQ ID NO: 43867 - DNA, 20 bp, synthetic construct
  source 1..20: mol_type = other DNA
tggatagctccaacccatcc

SEQ ID NO: 43868 - DNA, 20 bp, synthetic construct
  source 1..20: mol_type = other DNA
tccagaatggagtcgcaggt

SEQ ID NO: 43869 - DNA, 20 bp, synthetic construct
  source 1..20: mol_type = other DNA
atctgtccaaaagagaagac

SEQ ID NO: 43870 - DNA, 20 bp, synthetic construct
  source 1..20: mol_type = other DNA
cgcggcgatatcatcatcca

SEQ ID NO: 43871 - DNA, 20 bp, synthetic construct
  source 1..20: mol_type = other DNA
gctggccaggctgtagtaac

SEQ ID NO: 43872 - DNA, 20 bp, synthetic construct
  source 1..20: mol_type = other DNA
tgatcatccagaacgaacct

SEQ ID NO: 43873 - DNA, 20 bp, synthetic construct
  source 1..20: mol_type = other DNA
atgtgcaggactgccaagcg

SEQ ID NO: 43874 - DNA, 20 bp, synthetic construct
  source 1..20: mol_type = other DNA
ggccacacaatagccagcac

SEQ ID NO: 43875 - DNA, 20 bp, synthetic construct
  source 1..20: mol_type = other DNA
gaagccagtactctgaggtt

SEQ ID NO: 43876 - DNA, 20 bp, synthetic construct
  source 1..20: mol_type = other DNA
taagcccttttgggtgctgg

SEQ ID NO: 43877 - DNA, 20 bp, synthetic construct
  source 1..20: mol_type = other DNA
aaccctggtggttggtgtcg

SEQ ID NO: 43878 - DNA, 20 bp, synthetic construct
  source 1..20: mol_type = other DNA
ctgtggggctgcgccggatg

SEQ ID NO: 43879 - DNA, 20 bp, synthetic construct
  source 1..20: mol_type = other DNA
acaacgggaggttcaccctg

SEQ ID NO: 43880 - DNA, 20 bp, synthetic construct
  source 1..20: mol_type = other DNA
aagcaggagtatgacgagtc

SEQ ID NO: 43881 - DNA, 20 bp, synthetic construct
  source 1..20: mol_type = other DNA
cccagtcctgccgcttcaag

SEQ ID NO: 43882 - DNA, 20 bp, synthetic construct
  source 1..20: mol_type = other DNA
ccgccattacatccacaggg

SEQ ID NO: 43883 - DNA, 20 bp, synthetic construct
  source 1..20: mol_type = other DNA
cagagctacctttgccgatg

SEQ ID NO: 43884 - DNA, 20 bp, synthetic construct
  source 1..20: mol_type = other DNA
ctgcaactgaaacgcaagcg

SEQ ID NO: 43885 - DNA, 20 bp, synthetic construct
  source 1..20: mol_type = other DNA
gcagttccttcttgactacc

SEQ ID NO: 43886 - DNA, 20 bp, synthetic construct
  source 1..20: mol_type = other DNA
gttctcagagagccaacaac

SEQ ID NO: 43887 - DNA, 20 bp, synthetic construct
  source 1..20: mol_type = other DNA
gcacttgtaaggccgctcgc

SEQ ID NO: 43888 - DNA, 20 bp, synthetic construct
  source 1..20: mol_type = other DNA
cagctcgtagctcttctcca

SEQ ID NO: 43889 - DNA, 20 bp, synthetic construct
  source 1..20: mol_type = other DNA
ccctcattaagcccaagcga

SEQ ID NO: 43890 - DNA, 20 bp, synthetic construct
  source 1..20: mol_type = other DNA
cctcgtctttcatggagtcc

SEQ ID NO: 43891 - DNA, 20 bp, synthetic construct
  source 1..20: mol_type = other DNA
aggaagattatgatcgcctg

SEQ ID NO: 43892 - DNA, 20 bp, synthetic construct
  source 1..20: mol_type = other DNA
tccgcctcttctgcttcagc

SEQ ID NO: 43893 - DNA, 20 bp, synthetic construct
  source 1..20: mol_type = other DNA
tcatacacgctcgtgtccat

SEQ ID NO: 43894 - DNA, 20 bp, synthetic construct
  source 1..20: mol_type = other DNA
gtcttacctgtcacaggaca

SEQ ID NO: 43895 - DNA, 20 bp, synthetic construct
  source 1..20: mol_type = other DNA
cgcacaggtcctcagccaag

SEQ ID NO: 43896 - DNA, 20 bp, synthetic construct
  source 1..20: mol_type = other DNA
cttcacaatgtaagtggact

SEQ ID NO: 43897 - DNA, 20 bp, synthetic construct
  source 1..20: mol_type = other DNA
cagggtgacgatgtcaactg

SEQ ID NO: 43898 - DNA, 20 bp, synthetic construct
  source 1..20: mol_type = other DNA
ctccaagatggacaggtggg

SEQ ID NO: 43899 - DNA, 20 bp, synthetic construct
  source 1..20: mol_type = other DNA
tagaccctgcggataggtga

SEQ ID NO: 43900 - DNA, 20 bp, synthetic construct
  source 1..20: mol_type = other DNA
gcagcaacttgacggtgcac

SEQ ID NO: 43901 - DNA, 20 bp, synthetic construct
  source 1..20: mol_type = other DNA
gatgatggtggccttcacct

SEQ ID NO: 43902 - DNA, 20 bp, synthetic construct
  source 1..20: mol_type = other DNA
gagcgggcagcagcacatgc

SEQ ID NO: 43903 - DNA, 20 bp, synthetic construct
  source 1..20: mol_type = other DNA
caccagctgtagaaggtgcc

SEQ ID NO: 43904 - DNA, 20 bp, synthetic construct
  source 1..20: mol_type = other DNA
ttctcattgtctaggtaagg

SEQ ID NO: 43905 - DNA, 20 bp, synthetic construct
  source 1..20: mol_type = other DNA
gcgacctcaccgtccatggc

SEQ ID NO: 43906 - DNA, 20 bp, synthetic construct
  source 1..20: mol_type = other DNA
gggggcctcggtcagcagca

SEQ ID NO: 43907 - DNA, 20 bp, synthetic construct
  source 1..20: mol_type = other DNA
acgagctggggttccacagc

SEQ ID NO: 43908 - DNA, 20 bp, synthetic construct
  source 1..20: mol_type = other DNA
cccaggatgcttgactcacg

SEQ ID NO: 43909 - DNA, 20 bp, synthetic construct
  source 1..20: mol_type = other DNA
ggtccaaaacgtgtgccctt

SEQ ID NO: 43910 - DNA, 20 bp, synthetic construct
  source 1..20: mol_type = other DNA
gcccatctgaagcatctgcg

SEQ ID NO: 43911 - DNA, 20 bp, synthetic construct
  source 1..20: mol_type = other DNA
gatgcggaacggctgctcca

SEQ ID NO: 43912 - DNA, 20 bp, synthetic construct
  source 1..20: mol_type = other DNA
tccccagtggactgctggga

SEQ ID NO: 43913 - DNA, 20 bp, synthetic construct
  source 1..20: mol_type = other DNA
tgtgcaacggcatctcccag

SEQ ID NO: 43914 - DNA, 20 bp, synthetic construct
  source 1..20: mol_type = other DNA
gaagaaggcagagcaccagg

SEQ ID NO: 43915 - DNA, 20 bp, synthetic construct
  source 1..20: mol_type = other DNA
tatgccacacagctccaggt

SEQ ID NO: 43916 - DNA, 20 bp, synthetic construct
  source 1..20: mol_type = other DNA
ataccccctggtagtcaaga

SEQ ID NO: 43917 - DNA, 20 bp, synthetic construct
  source 1..20: mol_type = other DNA
cctgccgtgcctgtacgcca

SEQ ID NO: 43918 - DNA, 20 bp, synthetic construct
  source 1..20: mol_type = other DNA
gcggatgaagtaggacttct

SEQ ID NO: 43919 - DNA, 20 bp, synthetic construct
  source 1..20: mol_type = other DNA
ccttccttcttcatagtcag

SEQ ID NO: 43920 - DNA, 20 bp, synthetic construct
  source 1..20: mol_type = other DNA
tcattgagcagcccaagcag

SEQ ID NO: 43921 - DNA, 20 bp, synthetic construct
  source 1..20: mol_type = other DNA
tgaggctgaacagaactggt

SEQ ID NO: 43922 - DNA, 20 bp, synthetic construct
  source 1..20: mol_type = other DNA
agctctaactggttgggaga

SEQ ID NO: 43923 - DNA, 20 bp, synthetic construct
  source 1..20: mol_type = other DNA
aaaaccaggatgtcccccaa

SEQ ID NO: 43924 - DNA, 20 bp, synthetic construct
  source 1..20: mol_type = other DNA
gccccggaacctgcaggtag

SEQ ID NO: 43925 - DNA, 20 bp, synthetic construct
  source 1..20: mol_type = other DNA
cgtcagaaacggatgctccc

SEQ ID NO: 43926 - DNA, 20 bp, synthetic construct
  source 1..20: mol_type = other DNA
tcgaacatcaagtagaaaaa

SEQ ID NO: 43927 - DNA, 20 bp, synthetic construct
  source 1..20: mol_type = other DNA
gctgtactccccgattgcta

SEQ ID NO: 43928 - DNA, 20 bp, synthetic construct
  source 1..20: mol_type = other DNA
ccccaccttcatccgctcgt

SEQ ID NO: 43929 - DNA, 20 bp, synthetic construct
  source 1..20: mol_type = other DNA
ctcgcagctcctctgcctgg

SEQ ID NO: 43930 - DNA, 20 bp, synthetic construct
  source 1..20: mol_type = other DNA
aatcaatgtggaacagctga

SEQ ID NO: 43931 - DNA, 20 bp, synthetic construct
  source 1..20: mol_type = other DNA
catctacctggagcccgggc

SEQ ID NO: 43932 - DNA, 20 bp, synthetic construct
  source 1..20: mol_type = other DNA
tgtgctgaaataaagaaaaa

SEQ ID NO: 43933 - DNA, 20 bp, synthetic construct
  source 1..20: mol_type = other DNA
cgtgtgcaggagtttgacag

SEQ ID NO: 43934 - DNA, 20 bp, synthetic construct
  source 1..20: mol_type = other DNA
ccgaagcgcagggccaccga

SEQ ID NO: 43935 - DNA, 20 bp, synthetic construct
  source 1..20: mol_type = other DNA
gacactgcagcagtaccgcg

SEQ ID NO: 43936 - DNA, 20 bp, synthetic construct
  source 1..20: mol_type = other DNA
ctctttgatctgcgccttgg

SEQ ID NO: 43937 - DNA, 20 bp, synthetic construct
  source 1..20: mol_type = other DNA
tgaggttggcccaggcaatg

SEQ ID NO: 43938 - DNA, 20 bp, synthetic construct
  source 1..20: mol_type = other DNA
gccacagactgccaggtgag

SEQ ID NO: 43939 - DNA, 20 bp, synthetic construct
  source 1..20: mol_type = other DNA
gtcccaccttggtgaccaga

SEQ ID NO: 43940 - DNA, 20 bp, synthetic construct
  source 1..20: mol_type = other DNA
tgaagaagtaccacatcgat

SEQ ID NO: 43941 - DNA, 20 bp, synthetic construct
  source 1..20: mol_type = other DNA
taggcaggccttgtagctgc

SEQ ID NO: 43942 - DNA, 20 bp, synthetic construct
  source 1..20: mol_type = other DNA
cagctcaatctcgaggctca

SEQ ID NO: 43943 - DNA, 20 bp, synthetic construct
  source 1..20: mol_type = other DNA
cagggagtgtgtgaactgtg

SEQ ID NO: 43944 - DNA, 20 bp, synthetic construct
  source 1..20: mol_type = other DNA
cccccaacagcgagtgcggt

SEQ ID NO: 43945 - DNA, 20 bp, synthetic construct
  source 1..20: mol_type = other DNA
ggcaggatgcctacagggga

SEQ ID NO: 43946 - DNA, 20 bp, synthetic construct
  source 1..20: mol_type = other DNA
gtcttccaggtgggagggtc

SEQ ID NO: 43947 - DNA, 20 bp, synthetic construct
  source 1..20: mol_type = other DNA
ggaagaaaggcctctgattg

SEQ ID NO: 43948 - DNA, 20 bp, synthetic construct
  source 1..20: mol_type = other DNA
tcacctgaatcagtagtttg

SEQ ID NO: 43949 - DNA, 20 bp, synthetic construct
  source 1..20: mol_type = other DNA
gatgaactgagctttcacac

SEQ ID NO: 43950 - DNA, 20 bp, synthetic construct
  source 1..20: mol_type = other DNA
cccggagcttggggaacttc

SEQ ID NO: 43951 - DNA, 20 bp, synthetic construct
  source 1..20: mol_type = other DNA
tgccccactcacctgctacc

SEQ ID NO: 43952 - DNA, 20 bp, synthetic construct
  source 1..20: mol_type = other DNA
aggagaaagataggcgctgg

SEQ ID NO: 43953 - DNA, 20 bp, synthetic construct
  source 1..20: mol_type = other DNA
gcaaggtacgagtgggaggg

SEQ ID NO: 43954 - DNA, 20 bp, synthetic construct
  source 1..20: mol_type = other DNA
agttgacatcgtcaccctga

SEQ ID NO: 43955 - DNA, 20 bp, synthetic construct
  source 1..20: mol_type = other DNA
ggcacttggtggccgccagc

SEQ ID NO: 43956 - DNA, 20 bp, synthetic construct
  source 1..20: mol_type = other DNA
aaaggacaaggcctcctcgt

SEQ ID NO: 43957 - DNA, 20 bp, synthetic construct
  source 1..20: mol_type = other DNA
ggctgaacagaactggtggg

SEQ ID NO: 43958 - DNA, 20 bp, synthetic construct
  source 1..20: mol_type = other DNA
caggcgcaggacgggcagga

SEQ ID NO: 43959 - DNA, 20 bp, synthetic construct
  source 1..20: mol_type = other DNA
atcctaatttctggatggat

SEQ ID NO: 43960 - DNA, 20 bp, synthetic construct
  source 1..20: mol_type = other DNA
gtgtcacacaactgcccaac

SEQ ID NO: 43961 - DNA, 20 bp, synthetic construct
  source 1..20: mol_type = other DNA
cccagctctccatcctcctg

SEQ ID NO: 43962 - DNA, 20 bp, synthetic construct
  source 1..20: mol_type = other DNA
gtacatggctggggtgttga

SEQ ID NO: 43963 - DNA, 20 bp, synthetic construct
  source 1..20: mol_type = other DNA
ctacaacgggcacacgaagg

SEQ ID NO: 43964 - DNA, 20 bp, synthetic construct
  source 1..20: mol_type = other DNA
tctagaacagaaaatgaaag

SEQ ID NO: 43965 - DNA, 20 bp, synthetic construct
  source 1..20: mol_type = other DNA
ggatgagcagctgtggagtg

SEQ ID NO: 43966 - DNA, 20 bp, synthetic construct
  source 1..20: mol_type = other DNA
gttccagttcagttctagct

SEQ ID NO: 43967 - DNA, 20 bp, synthetic construct
  source 1..20: mol_type = other DNA
gctcatatgcacaggtgaaa

SEQ ID NO: 43968 - DNA, 20 bp, synthetic construct
  source 1..20: mol_type = other DNA
ctgtaagaaaagaaaaaggc

SEQ ID NO: 43969 - DNA, 20 bp, synthetic construct
  source 1..20: mol_type = other DNA
gctgacccaccccaatgtgg

SEQ ID NO: 43970 - DNA, 20 bp, synthetic construct
  source 1..20: mol_type = other DNA
tcgtggtgtcagctatggcc

SEQ ID NO: 43971 - DNA, 20 bp, synthetic construct
  source 1..20: mol_type = other DNA
cagcagaactctcacgacca

SEQ ID NO: 43972 - DNA, 20 bp, synthetic construct
  source 1..20: mol_type = other DNA
gtccagtgctcagctccagg

SEQ ID NO: 43973 - DNA, 20 bp, synthetic construct
  source 1..20: mol_type = other DNA
atgcagggcaccagcctccg

SEQ ID NO: 43974 - DNA, 20 bp, synthetic construct
  source 1..20: mol_type = other DNA
ctcactgtctgtgtccaggt

SEQ ID NO: 43975 - DNA, 20 bp, synthetic construct
  source 1..20: mol_type = other DNA
cagagcaggatctactggga

SEQ ID NO: 43976 - DNA, 20 bp, synthetic construct
  source 1..20: mol_type = other DNA
agctctcgaagactgctgtg

SEQ ID NO: 43977 - DNA, 20 bp, synthetic construct
  source 1..20: mol_type = other DNA
ttttcaaatacagacagaaa

SEQ ID NO: 43978 - DNA, 20 bp, synthetic construct
  source 1..20: mol_type = other DNA
acctccatcttgggcagacc

SEQ ID NO: 43979 - DNA, 20 bp, synthetic construct
  source 1..20: mol_type = other DNA
gtcaggctgctgtggtacca

SEQ ID NO: 43980 - DNA, 20 bp, synthetic construct
  source 1..20: mol_type = other DNA
gtgtagacagatggccaggg

SEQ ID NO: 43981 - DNA, 20 bp, synthetic construct
  source 1..20: mol_type = other DNA
acgggtgatgagctccctct

SEQ ID NO: 43982 - DNA, 20 bp, synthetic construct
  source 1..20: mol_type = other DNA
tggcctatgagccggtccag

SEQ ID NO: 43983 - DNA, 20 bp, synthetic construct
  source 1..20: mol_type = other DNA
ttgggatgacaaggtaaaag

SEQ ID NO: 43984 - DNA, 20 bp, synthetic construct
  source 1..20: mol_type = other DNA
cggatgaagtaggacttctg

SEQ ID NO: 43985 - DNA, 20 bp, synthetic construct
  source 1..20: mol_type = other DNA
tgttgcagatcttggagctg

SEQ ID NO: 43986 - DNA, 20 bp, synthetic construct
  source 1..20: mol_type = other DNA
tgcgggagccgctgctgcgg

SEQ ID NO: 43987 - DNA, 20 bp, synthetic construct
  source 1..20: mol_type = other DNA
cgactcacaggaggagctgc

SEQ ID NO: 43988 - DNA, 20 bp, synthetic construct
  source 1..20: mol_type = other DNA
ttacccagaactgtacaaac

SEQ ID NO: 43989 - DNA, 20 bp, synthetic construct
  source 1..20: mol_type = other DNA
gggtcagaaggattcctatg

SEQ ID NO: 43990 - DNA, 20 bp, synthetic construct
  source 1..20: mol_type = other DNA
caccaccactggcagggaca

SEQ ID NO: 43991 - DNA, 20 bp, synthetic construct
  source 1..20: mol_type = other DNA
caccctgcgggacctgctga

SEQ ID NO: 43992 - DNA, 20 bp, synthetic construct
  source 1..20: mol_type = other DNA
cattcatacttgctttccag

SEQ ID NO: 43993 - DNA, 20 bp, synthetic construct
  source 1..20: mol_type = other DNA
gtcactcagcaaggtgagga

SEQ ID NO: 43994 - DNA, 20 bp, synthetic construct
  source 1..20: mol_type = other DNA
cctgaagctggcgggcatgg

SEQ ID NO: 43995 - DNA, 20 bp, synthetic construct
  source 1..20: mol_type = other DNA
gcccaggttctcatgctgaa

SEQ ID NO: 43996 - DNA, 20 bp, synthetic construct
  source 1..20: mol_type = other DNA
gtaggaggtgacaggtgggt

SEQ ID NO: 43997 - DNA, 20 bp, synthetic construct
  source 1..20: mol_type = other DNA
ctatggctgcctccccaccg

SEQ ID NO: 43998 - DNA, 20 bp, synthetic construct
  source 1..20: mol_type = other DNA
aggcgcaggacgggcaggaa

SEQ ID NO: 43999 - DNA, 20 bp, synthetic construct
  source 1..20: mol_type = other DNA
cgtcctttgtgagtatggtg

SEQ ID NO: 44000 - DNA, 20 bp, synthetic construct
  source 1..20: mol_type = other DNA
cgaaggtgaggaagatggag

SEQ ID NO: 44001 - DNA, 20 bp, synthetic construct
  source 1..20: mol_type = other DNA
agagtgaggttggtaggctg

SEQ ID NO: 44002 - DNA, 20 bp, synthetic construct
  source 1..20: mol_type = other DNA
cagggcgagcaccttgggag

SEQ ID NO: 44003 - DNA, 20 bp, synthetic construct
  source 1..20: mol_type = other DNA
cactcagcttgatgaagggc

SEQ ID NO: 44004 - DNA, 20 bp, synthetic construct
  source 1..20: mol_type = other DNA
ctagcagctccagggcgctc

SEQ ID NO: 44005 - DNA, 20 bp, synthetic construct
  source 1..20: mol_type = other DNA
gtaccaggtagtgtttctgc

SEQ ID NO: 44006 - DNA, 20 bp, synthetic construct
  source 1..20: mol_type = other DNA
tgcggccacagcactttgtc

SEQ ID NO: 44007 - DNA, 20 bp, synthetic construct
  source 1..20: mol_type = other DNA
tgccaggtgcgcgcgcccct

SEQ ID NO: 44008 - DNA, 20 bp, synthetic construct
  source 1..20: mol_type = other DNA
aaacgcatcctggacccacg

SEQ ID NO: 44009 - DNA, 20 bp, synthetic construct
  source 1..20: mol_type = other DNA
ctgaagtaccccatcgagca

SEQ ID NO: 44010 - DNA, 20 bp, synthetic construct
  source 1..20: mol_type = other DNA
ccactgaccttctccagggc

SEQ ID NO: 44011 - DNA, 20 bp, synthetic construct
  source 1..20: mol_type = other DNA
ctggctctcccggatgagga

SEQ ID NO: 44012 - DNA, 20 bp, synthetic construct
  source 1..20: mol_type = other DNA
acttggccatgagcgagtgc

SEQ ID NO: 44013 - DNA, 20 bp, synthetic construct
  source 1..20: mol_type = other DNA
cacggcttgcgcaggttgca

SEQ ID NO: 44014 - DNA, 20 bp, synthetic construct
  source 1..20: mol_type = other DNA
cctcttacgtcgctctggaa

SEQ ID NO: 44015 - DNA, 20 bp, synthetic construct
  source 1..20: mol_type = other DNA
ctcagccatggccctgcgca

SEQ ID NO: 44016 - DNA, 20 bp, synthetic construct
  source 1..20: mol_type = other DNA
atctgaggatgtgctgtcgt

SEQ ID NO: 44017 - DNA, 20 bp, synthetic construct
  source 1..20: mol_type = other DNA
tcccccaacagcgagtgcgg

SEQ ID NO: 44018 - DNA, 20 bp, synthetic construct
  source 1..20: mol_type = other DNA
gggtctgtaagaaaagaaaa

SEQ ID NO: 44019 - DNA, 20 bp, synthetic construct
  source 1..20: mol_type = other DNA
gcatgaactcctgcacctgg

SEQ ID NO: 44020 - DNA, 20 bp, synthetic construct
  source 1..20: mol_type = other DNA
tacgcctctggccgtaccac

SEQ ID NO: 44021 - DNA, 20 bp, synthetic construct
  source 1..20: mol_type = other DNA
ggagtatgtgaatgtgtccc

SEQ ID NO: 44022 - DNA, 20 bp, synthetic construct
  source 1..20: mol_type = other DNA
gtgagctccacaatgtctcc

SEQ ID NO: 44023 - DNA, 20 bp, synthetic construct
  source 1..20: mol_type = other DNA
gtccctccagcttcggtcga

SEQ ID NO: 44024 - DNA, 20 bp, synthetic construct
  source 1..20: mol_type = other DNA
agcccccattgtcctcttcg

SEQ ID NO: 44025 - DNA, 20 bp, synthetic construct
  source 1..20: mol_type = other DNA
tctggggacagagaaaaagc

SEQ ID NO: 44026 - DNA, 20 bp, synthetic construct
  source 1..20: mol_type = other DNA
ggaggaagctgtcaaagtcc

SEQ ID NO: 44027 - DNA, 20 bp, synthetic construct
  source 1..20: mol_type = other DNA
tgtaggaatacttgcagcta

SEQ ID NO: 44028 - DNA, 20 bp, synthetic construct
  source 1..20: mol_type = other DNA
tccagggggaggcggtgtgg

SEQ ID NO: 44029 - DNA, 20 bp, synthetic construct
  source 1..20: mol_type = other DNA
caaacggcctcgtgagtaca

SEQ ID NO: 44030 - DNA, 20 bp, synthetic construct
  source 1..20: mol_type = other DNA
cgcacctggcatgctgccct

SEQ ID NO: 44031 - DNA, 20 bp, synthetic construct
  source 1..20: mol_type = other DNA
gaggaggcactggagaagat

SEQ ID NO: 44032 - DNA, 20 bp, synthetic construct
  source 1..20: mol_type = other DNA
aggcggccggtccaccagga

SEQ ID NO: 44033 - DNA, 20 bp, synthetic construct
  source 1..20: mol_type = other DNA
cttgatacaggtttaattcg

SEQ ID NO: 44034 - DNA, 20 bp, synthetic construct
  source 1..20: mol_type = other DNA
tgggccatcctgctaaaatc

SEQ ID NO: 44035 - DNA, 20 bp, synthetic construct
  source 1..20: mol_type = other DNA
ggacttcagccagttgagca

SEQ ID NO: 44036 - DNA, 20 bp, synthetic construct
  source 1..20: mol_type = other DNA
tggacatggcagcccaagta

SEQ ID NO: 44037 - DNA, 20 bp, synthetic construct
  source 1..20: mol_type = other DNA
agccaggtccagacgcagga

SEQ ID NO: 44038 - DNA, 20 bp, synthetic construct
  source 1..20: mol_type = other DNA
cattcattacctcacaggtc

SEQ ID NO: 44039 - DNA, 20 bp, synthetic construct
  source 1..20: mol_type = other DNA
ctggcccaggccctccggga

SEQ ID NO: 44040 - DNA, 20 bp, synthetic construct
  source 1..20: mol_type = other DNA
tgcacagcatctcgttgccg

SEQ ID NO: 44041 - DNA, 20 bp, synthetic construct
  source 1..20: mol_type = other DNA
cctgtacctgcccactctct

SEQ ID NO: 44042 - DNA, 20 bp, synthetic construct
  source 1..20: mol_type = other DNA
gtgtactaaaaacctcctcc

SEQ ID NO: 44043 - DNA, 20 bp, synthetic construct
  source 1..20: mol_type = other DNA
gccgcccgacagcaccgtgt

SEQ ID NO: 44044 - DNA, 20 bp, synthetic construct
  source 1..20: mol_type = other DNA
gagccgagacctccaactcg

SEQ ID NO: 44045 - DNA, 20 bp, synthetic construct
  source 1..20: mol_type = other DNA
cctccagcagttccaagagg

SEQ ID NO: 44046 - DNA, 20 bp, synthetic construct
  source 1..20: mol_type = other DNA
aggtgaggagtaagaggagc

SEQ ID NO: 44047 - DNA, 20 bp, synthetic construct
  source 1..20: mol_type = other DNA
tcattacctctgcaccgacg

SEQ ID NO: 44048 - DNA, 20 bp, synthetic construct
  source 1..20: mol_type = other DNA
accagactcggtgaaatacc

SEQ ID NO: 44049 - DNA, 20 bp, synthetic construct
  source 1..20: mol_type = other DNA
tgcaggcttgagtttccacc

SEQ ID NO: 44050 - DNA, 20 bp, synthetic construct
  source 1..20: mol_type = other DNA
tgctcagctctcacccagag

SEQ ID NO: 44051 - DNA, 20 bp, synthetic construct
  source 1..20: mol_type = other DNA
ctggaaagtcgcagaagggc

SEQ ID NO: 44052 - DNA, 20 bp, synthetic construct
  source 1..20: mol_type = other DNA
ccctcactctttgctctcgt

SEQ ID NO: 44053 - DNA, 20 bp, synthetic construct
  source 1..20: mol_type = other DNA
aacatcatgatccgagagag

SEQ ID NO: 44054 - DNA, 20 bp, synthetic construct
  source 1..20: mol_type = other DNA
tcaccacctctccctggttc

SEQ ID NO: 44055 - DNA, 20 bp, synthetic construct
  source 1..20: mol_type = other DNA
tccatggccaactccttcgt

SEQ ID NO: 44056 - DNA, 20 bp, synthetic construct
  source 1..20: mol_type = other DNA
cacgtcaagatcgctgactt

SEQ ID NO: 44057 - DNA, 20 bp, synthetic construct
  source 1..20: mol_type = other DNA
gcccaccagcaggcgcacag

SEQ ID NO: 44058 - DNA, 20 bp, synthetic construct
  source 1..20: mol_type = other DNA
caacagcccacagctcctga

SEQ ID NO: 44059 - DNA, 20 bp, synthetic construct
  source 1..20: mol_type = other DNA
gcggtaccagagcggcaagt

SEQ ID NO: 44060 - DNA, 20 bp, synthetic construct
  source 1..20: mol_type = other DNA
ccacacaagaagttcctggt

SEQ ID NO: 44061 - DNA, 20 bp, synthetic construct
  source 1..20: mol_type = other DNA
gccgtgcctgtacgccacgg

SEQ ID NO: 44062 - DNA, 20 bp, synthetic construct
  source 1..20: mol_type = other DNA
ggatggcctcctccatctgc

SEQ ID NO: 44063 - DNA, 20 bp, synthetic construct
  source 1..20: mol_type = other DNA
acagccactcgtgcctgtcc

SEQ ID NO: 44064 - DNA, 20 bp, synthetic construct
  source 1..20: mol_type = other DNA
agctgtagccgcgctcggtg

SEQ ID NO: 44065 - DNA, 20 bp, synthetic construct
  source 1..20: mol_type = other DNA
cctgctgtacaggattcggt

SEQ ID NO: 44066 - DNA, 20 bp, synthetic construct
  source 1..20: mol_type = other DNA
gctttgactgcacactgcag

SEQ ID NO: 44067 - DNA, 20 bp, synthetic construct
  source 1..20: mol_type = other DNA
agagggagtggtacacaggc

SEQ ID NO: 44068 - DNA, 20 bp, synthetic construct
  source 1..20: mol_type = other DNA
gccaggcaggtaagggcctg

SEQ ID NO: 44069 - DNA, 20 bp, synthetic construct
  source 1..20: mol_type = other DNA
catggctaaggagattggta

SEQ ID NO: 44070 - DNA, 20 bp, synthetic construct
  source 1..20: mol_type = other DNA
tgaactatgaccccaatcag

SEQ ID NO: 44071 - DNA, 20 bp, synthetic construct
  source 1..20: mol_type = other DNA
tcactgtagttgttcttcaa

SEQ ID NO: 44072 - DNA, 20 bp, synthetic construct
  source 1..20: mol_type = other DNA
cccctaaaagccctaacaca

SEQ ID NO: 44073 - DNA, 20 bp, synthetic construct
  source 1..20: mol_type = other DNA
gttctcggcaatacgttcac

SEQ ID NO: 44074 - DNA, 20 bp, synthetic construct
  source 1..20: mol_type = other DNA
tttgtgcaagagattggcag

SEQ ID NO: 44075 - DNA, 20 bp, synthetic construct
  source 1..20: mol_type = other DNA
ccgcactcaccgtccctgct

SEQ ID NO: 44076 - DNA, 20 bp, synthetic construct
  source 1..20: mol_type = other DNA
gcaccagctgcagcaggtac

SEQ ID NO: 44077 - DNA, 20 bp, synthetic construct
  source 1..20: mol_type = other DNA
ccgtcaacaaattaagaaac

SEQ ID NO: 44078 - DNA, 20 bp, synthetic construct
  source 1..20: mol_type = other DNA
agggcatacccctcgtagat

SEQ ID NO: 44079 - DNA, 20 bp, synthetic construct
  source 1..20: mol_type = other DNA
gactgcctaccagaatgccg

SEQ ID NO: 44080 - DNA, 20 bp, synthetic construct
  source 1..20: mol_type = other DNA
ttgcagaggtggcatttgaa

SEQ ID NO: 44081 - DNA, 20 bp, synthetic construct
  source 1..20: mol_type = other DNA
gacagcaagccagtgaacct

SEQ ID NO: 44082 - DNA, 20 bp, synthetic construct
  source 1..20: mol_type = other DNA
caggtgagtgggaaactggt

SEQ ID NO: 44083 - DNA, 20 bp, synthetic construct
  source 1..20: mol_type = other DNA
cccgaacctggaagctgtgc

SEQ ID NO: 44084 - DNA, 20 bp, synthetic construct
  source 1..20: mol_type = other DNA
cccagagtcaaaggcagtct

SEQ ID NO: 44085 - DNA, 20 bp, synthetic construct
  source 1..20: mol_type = other DNA
ggtcagaaggattcctatgt

SEQ ID NO: 44086 - DNA, 20 bp, synthetic construct
  source 1..20: mol_type = other DNA
catcctggcagtggagaagc

SEQ ID NO: 44087 - DNA, 20 bp, synthetic construct
  source 1..20: mol_type = other DNA
cttccagatgttctcctttg

SEQ ID NO: 44088 - DNA, 20 bp, synthetic construct
  source 1..20: mol_type = other DNA
tgtcctctaggaagcccagg

SEQ ID NO: 44089 - DNA, 20 bp, synthetic construct
  source 1..20: mol_type = other DNA
ctcaatggacagctggaaat

SEQ ID NO: 44090 - DNA, 20 bp, synthetic construct
  source 1..20: mol_type = other DNA
agcaggtctggctggctcag

SEQ ID NO: 44091 - DNA, 20 bp, synthetic construct
  source 1..20: mol_type = other DNA
ctcatgaggtctcccaagct

SEQ ID NO: 44092 - DNA, 20 bp, synthetic construct
  source 1..20: mol_type = other DNA
ctgctccgcgtggctggtga

SEQ ID NO: 44093 - DNA, 20 bp, synthetic construct
  source 1..20: mol_type = other DNA
ctgaggctgaacagaactgg

SEQ ID NO: 44094 - DNA, 20 bp, synthetic construct
  source 1..20: mol_type = other DNA
gggcccaccgcactcgctgt

SEQ ID NO: 44095 - DNA, 20 bp, synthetic construct
  source 1..20: mol_type = other DNA
gccctggccagtcgtctggg

SEQ ID NO: 44096 - DNA, 20 bp, synthetic construct
  source 1..20: mol_type = other DNA
gttcagctcgcgcacagaca

SEQ ID NO: 44097 - DNA, 20 bp, synthetic construct
  source 1..20: mol_type = other DNA
caggcaccgggccacaatcc

SEQ ID NO: 44098 - DNA, 20 bp, synthetic construct
  source 1..20: mol_type = other DNA
atcatggtgcttccttcggg

SEQ ID NO: 44099 - DNA, 20 bp, synthetic construct
  source 1..20: mol_type = other DNA
ccatgaccagccgcaggctc

SEQ ID NO: 44100 - DNA, 20 bp, synthetic construct
  source 1..20: mol_type = other DNA
gctctccaggttgacgatgc

SEQ ID NO: 44101 - DNA, 20 bp, synthetic construct
  source 1..20: mol_type = other DNA
tagccaagtatttcaccttc

SEQ ID NO: 44102 - DNA, 20 bp, synthetic construct
  source 1..20: mol_type = other DNA
gaaccggcagcagatccgca

SEQ ID NO: 44103 - DNA, 20 bp, synthetic construct
  source 1..20: mol_type = other DNA
ccatgaacgatcaccaccac

SEQ ID NO: 44104 - DNA, 20 bp, synthetic construct
  source 1..20: mol_type = other DNA
cttcagcttctcagcccccc

SEQ ID NO: 44105 - DNA, 20 bp, synthetic construct
  source 1..20: mol_type = other DNA
accaaaacacagggctgtcc

SEQ ID NO: 44106 - DNA, 20 bp, synthetic construct
  source 1..20: mol_type = other DNA
cacagcaggtagagcatctg

SEQ ID NO: 44107 - DNA, 20 bp, synthetic construct
  source 1..20: mol_type = other DNA
gctgaagctggtggagcggc

SEQ ID NO: 44108 - DNA, 20 bp, synthetic construct
  source 1..20: mol_type = other DNA
cccggacgccttcctggccg

SEQ ID NO: 44109 - DNA, 20 bp, synthetic construct
  source 1..20: mol_type = other DNA
gtaggagaagcgcagctggt

SEQ ID NO: 44110 - DNA, 20 bp, synthetic construct
  source 1..20: mol_type = other DNA
ccctcccaggtggctacccc

SEQ ID NO: 44111 - DNA, 20 bp, synthetic construct
  source 1..20: mol_type = other DNA
aataccacacaagaagttcc

SEQ ID NO: 44112 - DNA, 20 bp, synthetic construct
  source 1..20: mol_type = other DNA
cctggagcgaggctaccgca

SEQ ID NO: 44113 - DNA, 20 bp, synthetic construct
  source 1..20: mol_type = other DNA
tgtctcgcagctcctctgcc

SEQ ID NO: 44114 - DNA, 20 bp, synthetic construct
  source 1..20: mol_type = other DNA
ggagcaggtctggctggctc

SEQ ID NO: 44115 - DNA, 20 bp, synthetic construct
  source 1..20: mol_type = other DNA
tttaccagtttgtatccaag

SEQ ID NO: 44116 - DNA, 20 bp, synthetic construct
  source 1..20: mol_type = other DNA
tgccagctccaacatctatc

SEQ ID NO: 44117 - DNA, 20 bp, synthetic construct
  source 1..20: mol_type = other DNA
caggaagacctagaaggaga

SEQ ID NO: 44118 - DNA, 20 bp, synthetic construct
  source 1..20: mol_type = other DNA
agtggcctacctcggagctg

SEQ ID NO: 44119 - DNA, 20 bp, synthetic construct
  source 1..20: mol_type = other DNA
gcggtcggctagggaccgaa

SEQ ID NO: 44120 - DNA, 20 bp, synthetic construct
  source 1..20: mol_type = other DNA
tcatcaaggtgtctgacttt

SEQ ID NO: 44121 - DNA, 20 bp, synthetic construct
  source 1..20: mol_type = other DNA
gaatgtgccctttcgctcag

SEQ ID NO: 44122 - DNA, 20 bp, synthetic construct
  source 1..20: mol_type = other DNA
gcagcagcagatgaaggcca

SEQ ID NO: 44123 - DNA, 20 bp, synthetic construct
  source 1..20: mol_type = other DNA
ttctgggaggagacacgcag

SEQ ID NO: 44124 - DNA, 20 bp, synthetic construct
  source 1..20: mol_type = other DNA
ggcagtactccatggccagc

SEQ ID NO: 44125 - DNA, 20 bp, synthetic construct
  source 1..20: mol_type = other DNA
gcaatgagcttctccacctg

SEQ ID NO: 44126 - DNA, 20 bp, synthetic construct
  source 1..20: mol_type = other DNA
tctacctgtttgccaggggg

SEQ ID NO: 44127 - DNA, 20 bp, synthetic construct
  source 1..20: mol_type = other DNA
aggccctttcacagtagccc

SEQ ID NO: 44128 - DNA, 20 bp, synthetic construct
  source 1..20: mol_type = other DNA
cagttgacatcgtcaccctg

SEQ ID NO: 44129 - DNA, 20 bp, synthetic construct
  source 1..20: mol_type = other DNA
tgctgtgccctcagcccacg

SEQ ID NO: 44130 - DNA, 20 bp, synthetic construct
  source 1..20: mol_type = other DNA
gctcagtgaggatcttcatg

SEQ ID NO: 44131 - DNA, 20 bp, synthetic construct
  source 1..20: mol_type = other DNA
agcacttactgatccaatac

SEQ ID NO: 44132 - DNA, 20 bp, synthetic construct
  source 1..20: mol_type = other DNA
gctgacttacgttatagagc

SEQ ID NO: 44133 - DNA, 20 bp, synthetic construct
  source 1..20: mol_type = other DNA
cggcacatcaagctgcattc

SEQ ID NO: 44134 - DNA, 20 bp, synthetic construct
  source 1..20: mol_type = other DNA
aagcagtgtggcggcagctt

SEQ ID NO: 44135 - DNA, 20 bp, synthetic construct
  source 1..20: mol_type = other DNA
gtcctggtcgcagttcaaca

SEQ ID NO: 44136 - DNA, 20 bp, synthetic construct
  source 1..20: mol_type = other DNA
agctacagcagcttgacaca

SEQ ID NO: 44137 - DNA, 20 bp, synthetic construct
  source 1..20: mol_type = other DNA
ggccgaagtgcagagcaacc

SEQ ID NO: 44138 - DNA, 20 bp, synthetic construct
  source 1..20: mol_type = other DNA
acctgcagcgtgtagtcttc

SEQ ID NO: 44139 - DNA, 20 bp, synthetic construct
  source 1..20: mol_type = other DNA
ggtcgcgcaggcttgggggt

SEQ ID NO: 44140 - DNA, 20 bp, synthetic construct
  source 1..20: mol_type = other DNA
gccagccagctggaagctgc

SEQ ID NO: 44141 - DNA, 20 bp, synthetic construct
  source 1..20: mol_type = other DNA
aagattggcacagctgtgag

SEQ ID NO: 44142 - DNA, 20 bp, synthetic construct
  source 1..20: mol_type = other DNA
cgaaactcagctggctcatg

SEQ ID NO: 44143 - DNA, 20 bp, synthetic construct
  source 1..20: mol_type = other DNA
accttacactgacgcaggta

SEQ ID NO: 44144 - DNA, 20 bp, synthetic construct
  source 1..20: mol_type = other DNA
tggacccacgaggaatatat

SEQ ID NO: 44145 - DNA, 20 bp, synthetic construct
  source 1..20: mol_type = other DNA
ctccagaatggagtcgcagg

SEQ ID NO: 44146 - DNA, 20 bp, synthetic construct
  source 1..20: mol_type = other DNA
aggcggacttccaggctgag

SEQ ID NO: 44147 - DNA, 20 bp, synthetic construct
  source 1..20: mol_type = other DNA
actcccggctgccatctgtg

SEQ ID NO: 44148 - DNA, 20 bp, synthetic construct
  source 1..20: mol_type = other DNA
actggtcctatgcagtaggc

SEQ ID NO: 44149 - DNA, 20 bp, synthetic construct
  source 1..20: mol_type = other DNA
gcagggcaggcaggaggcgc

SEQ ID NO: 44150 - DNA, 20 bp, synthetic construct
  source 1..20: mol_type = other DNA
ggcacgagtggctgtgcgcg

SEQ ID NO: 44151 - DNA, 20 bp, synthetic construct
  source 1..20: mol_type = other DNA
gggccgtcccagcagtccac

SEQ ID NO: 44152 - DNA, 20 bp, synthetic construct
  source 1..20: mol_type = other DNA
ggtggggaggcagccatagg

SEQ ID NO: 44153 - DNA, 20 bp, synthetic construct
  source 1..20: mol_type = other DNA
ggatagcaacgtacatggct

SEQ ID NO: 44154 - DNA, 20 bp, synthetic construct
  source 1..20: mol_type = other DNA
gagggccatgtcgctgttgg

SEQ ID NO: 44155 - DNA, 20 bp, synthetic construct
  source 1..20: mol_type = other DNA
tcccccaggaaacaagattt

SEQ ID NO: 44156 - DNA, 20 bp, synthetic construct
  source 1..20: mol_type = other DNA
ccatcagcaggccagcaggt

SEQ ID NO: 44157 - DNA, 20 bp, synthetic construct
  source 1..20: mol_type = other DNA
gcccgagccctactcgacta

SEQ ID NO: 44158 - DNA, 20 bp, synthetic construct
  source 1..20: mol_type = other DNA
tgtggactggtggtccttcg

SEQ ID NO: 44159 - DNA, 20 bp, synthetic construct
  source 1..20: mol_type = other DNA
tatctctacctgagggcaag

SEQ ID NO: 44160 - DNA, 20 bp, synthetic construct
  source 1..20: mol_type = other DNA
cgatttccgagcggccgtcg

SEQ ID NO: 44161 - DNA, 20 bp, synthetic construct
  source 1..20: mol_type = other DNA
tatatattcctcgtgggtcc

SEQ ID NO: 44162 - DNA, 20 bp, synthetic construct
  source 1..20: mol_type = other DNA
ttgaacgtcatcctcatgcc

SEQ ID NO: 44163 - DNA, 20 bp, synthetic construct
  source 1..20: mol_type = other DNA
gcagctggagggacagtcac

SEQ ID NO: 44164 - DNA, 20 bp, synthetic construct
  source 1..20: mol_type = other DNA
gtggccttaatgttctcctg

SEQ ID NO: 44165 - DNA, 20 bp, synthetic construct
  source 1..20: mol_type = other DNA
gaccccggccatggacggtg

SEQ ID NO: 44166 - DNA, 20 bp, synthetic construct
  source 1..20: mol_type = other DNA
cctagaggagaaaggttgga

SEQ ID NO: 44167 - DNA, 20 bp, synthetic construct
  source 1..20: mol_type = other DNA
aggaggaatggaccatggtc

SEQ ID NO: 44168 - DNA, 20 bp, synthetic construct
  source 1..20: mol_type = other DNA
tacatgtggccctccgtccc

SEQ ID NO: 44169 - DNA, 20 bp, synthetic construct
  source 1..20: mol_type = other DNA
gcagggtcagcatgtcctgc

SEQ ID NO: 44170 - DNA, 20 bp, synthetic construct
  source 1..20: mol_type = other DNA
caggaatgactggggaaggt

SEQ ID NO: 44171 - DNA, 20 bp, synthetic construct
  source 1..20: mol_type = other DNA
tgcccacttcaccgggaatt

SEQ ID NO: 44172 - DNA, 20 bp, synthetic construct
  source 1..20: mol_type = other DNA
taccagggacacaaaggaca

SEQ ID NO: 44173 - DNA, 20 bp, synthetic construct
  source 1..20: mol_type = other DNA
ccagtatgagtttcaggtgc

SEQ ID NO: 44174 - DNA, 20 bp, synthetic construct
  source 1..20: mol_type = other DNA
gcaaaaagtttcctacaaag

SEQ ID NO: 44175 - DNA, 20 bp, synthetic construct
  source 1..20: mol_type = other DNA
agaaggggaggtccatctgc

SEQ ID NO: 44176 - DNA, 20 bp, synthetic construct
  source 1..20: mol_type = other DNA
tgcttaggtgagaatctggg

SEQ ID NO: 44177 - DNA, 20 bp, synthetic construct
  source 1..20: mol_type = other DNA
atactcacaggcaagctgga

SEQ ID NO: 44178 - DNA, 20 bp, synthetic construct
  source 1..20: mol_type = other DNA
ggacagcaagccagtgaacc

SEQ ID NO: 44179 - DNA, 20 bp, synthetic construct
  source 1..20: mol_type = other DNA
cagcccctaccagtccggcg

SEQ ID NO: 44180 - DNA, 20 bp, synthetic construct
  source 1..20: mol_type = other DNA
cagaaagtgtaattccgtcc

SEQ ID NO: 44181 - DNA, 20 bp, synthetic construct
  source 1..20: mol_type = other DNA
tcacaatgttctcatgatag

SEQ ID NO: 44182 - DNA, 20 bp, synthetic construct
  source 1..20: mol_type = other DNA
gtgcagtgtggaaaggccga

SEQ ID NO: 44183 - DNA, 20 bp, synthetic construct
  source 1..20: mol_type = other DNA
caaatgtcagacttgcaaca

SEQ ID NO: 44184 - DNA, 20 bp, synthetic construct
  source 1..20: mol_type = other DNA
ggatgaagtaggacttctgg

SEQ ID NO: 44185 - DNA, 20 bp, synthetic construct
  source 1..20: mol_type = other DNA
gagatgatcatcaccaagca

SEQ ID NO: 44186 - DNA, 20 bp, synthetic construct
  source 1..20: mol_type = other DNA
ccctcaccatattcctgaag

SEQ ID NO: 44187 - DNA, 20 bp, synthetic construct
  source 1..20: mol_type = other DNA
ccaggatgaggccgaagcgc

SEQ ID NO: 44188 - DNA, 20 bp, synthetic construct
  source 1..20: mol_type = other DNA
tgggaactcggcctcctgcg

SEQ ID NO: 44189 - DNA, 20 bp, synthetic construct
  source 1..20: mol_type = other DNA
atggagccacccaatccact

SEQ ID NO: 44190 - DNA, 20 bp, synthetic construct
  source 1..20: mol_type = other DNA
tttcaggaaccccggaggca

SEQ ID NO: 44191 - DNA, 20 bp, synthetic construct
  source 1..20: mol_type = other DNA
ttaagaggtcagaccgtcgt

SEQ ID NO: 44192 - DNA, 20 bp, synthetic construct
  source 1..20: mol_type = other DNA
acagcaagccagtgaacctg

SEQ ID NO: 44193 - DNA, 20 bp, synthetic construct
  source 1..20: mol_type = other DNA
cagtgaggagaagaacatgg

SEQ ID NO: 44194 - DNA, 20 bp, synthetic construct
  source 1..20: mol_type = other DNA
agacctggaggacagggtac

SEQ ID NO: 44195 - DNA, 20 bp, synthetic construct
  source 1..20: mol_type = other DNA
tcacatgatccccctgttct

SEQ ID NO: 44196 - DNA, 20 bp, synthetic construct
  source 1..20: mol_type = other DNA
gcagctcgttgtagaaggtg

SEQ ID NO: 44197 - DNA, 20 bp, synthetic construct
  source 1..20: mol_type = other DNA
gatcttggatggcagcatag

SEQ ID NO: 44198 - DNA, 20 bp, synthetic construct
  source 1..20: mol_type = other DNA
gattctatgaaagccggtgc

SEQ ID NO: 44199 - DNA, 20 bp, synthetic construct
  source 1..20: mol_type = other DNA
atgtgggaagttttcagtga

SEQ ID NO: 44200 - DNA, 20 bp, synthetic construct
  source 1..20: mol_type = other DNA
gctccaggcggcaggggtat

SEQ ID NO: 44201 - DNA, 20 bp, synthetic construct
  source 1..20: mol_type = other DNA
caggtatcttgagaagccaa

SEQ ID NO: 44202 - DNA, 20 bp, synthetic construct
  source 1..20: mol_type = other DNA
tctgaggtcagtcaggacac

SEQ ID NO: 44203 - DNA, 20 bp, synthetic construct
  source 1..20: mol_type = other DNA
ccagtcctgccgcttcaaga

SEQ ID NO: 44204 - DNA, 20 bp, synthetic construct
  source 1..20: mol_type = other DNA
ctgtcatggtccaatctggt

SEQ ID NO: 44205 - DNA, 20 bp, synthetic construct
  source 1..20: mol_type = other DNA
ccgtcttcacaaagtctgga

SEQ ID NO: 44206 - DNA, 20 bp, synthetic construct
  source 1..20: mol_type = other DNA
ctactcaccagagctacagc

SEQ ID NO: 44207 - DNA, 20 bp, synthetic construct
  source 1..20: mol_type = other DNA
cacaggtggcgaggggacta

SEQ ID NO: 44208 - DNA, 20 bp, synthetic construct
  source 1..20: mol_type = other DNA
tcgccgctcctgcgccacgg

SEQ ID NO: 44209 - DNA, 20 bp, synthetic construct
  source 1..20: mol_type = other DNA
cctcaaagtcatacagcgcc

SEQ ID NO: 44210 - DNA, 20 bp, synthetic construct
  source 1..20: mol_type = other DNA
aggatgaagaggacgccttg

SEQ ID NO: 44211 - DNA, 20 bp, synthetic construct
  source 1..20: mol_type = other DNA
tctgaccttagcaggatcca

SEQ ID NO: 44212 - DNA, 20 bp, synthetic construct
  source 1..20: mol_type = other DNA
gcttgctgatccacatctgc

SEQ ID NO: 44213 - DNA, 20 bp, synthetic construct
  source 1..20: mol_type = other DNA
ttggagtttctgagggtgag

SEQ ID NO: 44214 - DNA, 20 bp, synthetic construct
  source 1..20: mol_type = other DNA
ggagccacccaatccactgg

SEQ ID NO: 44215 - DNA, 20 bp, synthetic construct
  source 1..20: mol_type = other DNA
ccagtgcgctcctgtgttgg

SEQ ID NO: 44216 - DNA, 20 bp, synthetic construct
  source 1..20: mol_type = other DNA
tgccccctcgctaacagcca

SEQ ID NO: 44217 - DNA, 20 bp, synthetic construct
  source 1..20: mol_type = other DNA
tccagacgcaggatggcatg

SEQ ID NO: 44218 - DNA, 20 bp, synthetic construct
  source 1..20: mol_type = other DNA
ccctacctataaggatgctt

SEQ ID NO: 44219 - DNA, 20 bp, synthetic construct
  source 1..20: mol_type = other DNA
ggccagggcgagcgcggcgg

SEQ ID NO: 44220 - DNA, 20 bp, synthetic construct
  source 1..20: mol_type = other DNA
acgttggagatcaccacaac

SEQ ID NO: 44221 - DNA, 20 bp, synthetic construct
  source 1..20: mol_type = other DNA
ggactttcttggtgcggcag

SEQ ID NO: 44222 - DNA, 20 bp, synthetic construct
  source 1..20: mol_type = other DNA
ctcgccgaatagattcaaca

SEQ ID NO: 44223 - DNA, 20 bp, synthetic construct
  source 1..20: mol_type = other DNA
ggtgcagcagagacacgtcc

SEQ ID NO: 44224 - DNA, 20 bp, synthetic construct
  source 1..20: mol_type = other DNA
cgtgtcaaacttggtgccct

SEQ ID NO: 44225 - DNA, 20 bp, synthetic construct
  source 1..20: mol_type = other DNA
tggccagagcaaagagggag

SEQ ID NO: 44226 - DNA, 20 bp, synthetic construct
  source 1..20: mol_type = other DNA
acgacagcacatcctcagat

SEQ ID NO: 44227 - DNA, 20 bp, synthetic construct
  source 1..20: mol_type = other DNA
ccacagtgttcacagaaggt

SEQ ID NO: 44228 - DNA, 20 bp, synthetic construct
  source 1..20: mol_type = other DNA
gaggacgactatcacaaccc

SEQ ID NO: 44229 - DNA, 20 bp, synthetic construct
  source 1..20: mol_type = other DNA
aacttacatcacaattggct

SEQ ID NO: 44230 - DNA, 20 bp, synthetic construct
  source 1..20: mol_type = other DNA
agaaccggcagcagatccgc

SEQ ID NO: 44231 - DNA, 20 bp, synthetic construct
  source 1..20: mol_type = other DNA
acttctagtggcgagatctc

SEQ ID NO: 44232 - DNA, 20 bp, synthetic construct
  source 1..20: mol_type = other DNA
gggctggggagaaggtgggg

SEQ ID NO: 44233 - DNA, 20 bp, synthetic construct
  source 1..20: mol_type = other DNA
gtggaaggtctcggcggccc

SEQ ID NO: 44234 - DNA, 20 bp, synthetic construct
  source 1..20: mol_type = other DNA
gataaagcccatgatgtacc

SEQ ID NO: 44235 - DNA, 20 bp, synthetic construct
  source 1..20: mol_type = other DNA
aagatccccgcagccccttg

SEQ ID NO: 44236 - DNA, 20 bp, synthetic construct
  source 1..20: mol_type = other DNA
tgggtggagaaggacatcag

SEQ ID NO: 44237 - DNA, 20 bp, synthetic construct
  source 1..20: mol_type = other DNA
gcagtactccatggccagca

SEQ ID NO: 44238 - DNA, 20 bp, synthetic construct
  source 1..20: mol_type = other DNA
atagcagcaagtccgatgtg

SEQ ID NO: 44239 - DNA, 20 bp, synthetic construct
  source 1..20: mol_type = other DNA
tgagcggttccgctgccctg

SEQ ID NO: 44240 - DNA, 20 bp, synthetic construct
  source 1..20: mol_type = other DNA
cctcgtagatgggcaccgtg

SEQ ID NO: 44241 - DNA, 20 bp, synthetic construct
  source 1..20: mol_type = other DNA
cgcatcccctggaagcacgc

SEQ ID NO: 44242 - DNA, 20 bp, synthetic construct
  source 1..20: mol_type = other DNA
tccagcagaggctgaccatg

SEQ ID NO: 44243 - DNA, 20 bp, synthetic construct
  source 1..20: mol_type = other DNA
ctcgtcgcacataacgcgag

SEQ ID NO: 44244 - DNA, 20 bp, synthetic construct
  source 1..20: mol_type = other DNA
cttcaccaccacggccgagc

SEQ ID NO: 44245 - DNA, 20 bp, synthetic construct
  source 1..20: mol_type = other DNA
ggaggtgccagaaaaggaag

SEQ ID NO: 44246 - DNA, 20 bp, synthetic construct
  source 1..20: mol_type = other DNA
ctccagccgctgcttccaca

SEQ ID NO: 44247 - DNA, 20 bp, synthetic construct
  source 1..20: mol_type = other DNA
agggcccggcgcaatgacag

SEQ ID NO: 44248 - DNA, 20 bp, synthetic construct
  source 1..20: mol_type = other DNA
tgtctggaagaggcagatta

SEQ ID NO: 44249 - DNA, 20 bp, synthetic construct
  source 1..20: mol_type = other DNA
cctactcaccagagctacag

SEQ ID NO: 44250 - DNA, 20 bp, synthetic construct
  source 1..20: mol_type = other DNA
cacgctgggctccatccagc

SEQ ID NO: 44251 - DNA, 20 bp, synthetic construct
  source 1..20: mol_type = other DNA
ctgacggaaattgtcaccca

SEQ ID NO: 44252 - DNA, 20 bp, synthetic construct
  source 1..20: mol_type = other DNA
cactgggggcttgctgctgc

SEQ ID NO: 44253 - DNA, 20 bp, synthetic construct
  source 1..20: mol_type = other DNA
cgtagagggacagcacggcc

SEQ ID NO: 44254 - DNA, 20 bp, synthetic construct
  source 1..20: mol_type = other DNA
gggagatattcaccatctgt

SEQ ID NO: 44255 - DNA, 20 bp, synthetic construct
  source 1..20: mol_type = other DNA
ggagatggatgtgatgtcgg

SEQ ID NO: 44256 - DNA, 20 bp, synthetic construct
  source 1..20: mol_type = other DNA
cgagggccatgtcgctgttg

SEQ ID NO: 44257 - DNA, 20 bp, synthetic construct
  source 1..20: mol_type = other DNA
caacctcgaccccactgtgg

SEQ ID NO: 44258 - DNA, 20 bp, synthetic construct
  source 1..20: mol_type = other DNA
gaagaagtgctgggagtccg

SEQ ID NO: 44259 - DNA, 20 bp, synthetic construct
  source 1..20: mol_type = other DNA
tcctggggacagagcaagcg

SEQ ID NO: 44260 - DNA, 20 bp, synthetic construct
  source 1..20: mol_type = other DNA
ttccctcagggcgagcacct

SEQ ID NO: 44261 - DNA, 20 bp, synthetic construct
  source 1..20: mol_type = other DNA
atcagtgcgtccagggatac

SEQ ID NO: 44262 - DNA, 20 bp, synthetic construct
  source 1..20: mol_type = other DNA
gtgaagaagtaccacatcga

SEQ ID NO: 44263 - DNA, 20 bp, synthetic construct
  source 1..20: mol_type = other DNA
ggagctctcgaagactgctg

SEQ ID NO: 44264 - DNA, 20 bp, synthetic construct
  source 1..20: mol_type = other DNA
cccaggtactccatgccctg

SEQ ID NO: 44265 - DNA, 20 bp, synthetic construct
  source 1..20: mol_type = other DNA
gctcctcgatctctcgtaag

SEQ ID NO: 44266 - DNA, 20 bp, synthetic construct
  source 1..20: mol_type = other DNA
ttggtgaaatagaacctgga

SEQ ID NO: 44267 - DNA, 20 bp, synthetic construct
  source 1..20: mol_type = other DNA
gggcctcggtcagcagcacg

SEQ ID NO: 44268 - DNA, 20 bp, synthetic construct
  source 1..20: mol_type = other DNA
tggctataagatgtgtgcca

SEQ ID NO: 44269 - DNA, 20 bp, synthetic construct
  source 1..20: mol_type = other DNA
gttaccagtagcagactcgc

SEQ ID NO: 44270 - DNA, 20 bp, synthetic construct
  source 1..20: mol_type = other DNA
gcacaaagttcttctcctcc

SEQ ID NO: 44271 - DNA, 20 bp, synthetic construct
  source 1..20: mol_type = other DNA
cacgtatgaccgctgcccca

SEQ ID NO: 44272 - DNA, 20 bp, synthetic construct
  source 1..20: mol_type = other DNA
caaccaccagggtttggaac

SEQ ID NO: 44273 - DNA, 20 bp, synthetic construct
  source 1..20: mol_type = other DNA
tgacgagctggtcaaggtga

SEQ ID NO: 44274 - DNA, 20 bp, synthetic construct
  source 1..20: mol_type = other DNA
ggctgaggacctgtgcgtgc

SEQ ID NO: 44275 - DNA, 20 bp, synthetic construct
  source 1..20: mol_type = other DNA
tgcggcccgggagcagatga

SEQ ID NO: 44276 - DNA, 20 bp, synthetic construct
  source 1..20: mol_type = other DNA
agctgcatggagacacgcac

SEQ ID NO: 44277 - DNA, 20 bp, synthetic construct
  source 1..20: mol_type = other DNA
caacatggttccttccttgt

SEQ ID NO: 44278 - DNA, 20 bp, synthetic construct
  source 1..20: mol_type = other DNA
ggctaggtgcagtggtctgg

SEQ ID NO: 44279 - DNA, 20 bp, synthetic construct
  source 1..20: mol_type = other DNA
ctcaaagtcatacagcgccc

SEQ ID NO: 44280 - DNA, 20 bp, synthetic construct
  source 1..20: mol_type = other DNA
ccaaccaggaacttcttgtg

SEQ ID NO: 44281 - DNA, 20 bp, synthetic construct
  source 1..20: mol_type = other DNA
actccaagatgaagcccctg

SEQ ID NO: 44282 - DNA, 20 bp, synthetic construct
  source 1..20: mol_type = other DNA
gcagatgtggatcagcaagc

SEQ ID NO: 44283 - DNA, 20 bp, synthetic construct
  source 1..20: mol_type = other DNA
ggaaagctcatcttaggggt

SEQ ID NO: 44284 - DNA, 20 bp, synthetic construct
  source 1..20: mol_type = other DNA
gagaaaggacaggcggcagg

SEQ ID NO: 44285 - DNA, 20 bp, synthetic construct
  source 1..20: mol_type = other DNA
tcaccgactctgccccacga

SEQ ID NO: 44286 - DNA, 20 bp, synthetic construct
  source 1..20: mol_type = other DNA
gtgcaccggcggagccacac

SEQ ID NO: 44287 - DNA, 20 bp, synthetic construct
  source 1..20: mol_type = other DNA
tgacgaactggaggagaaga

SEQ ID NO: 44288 - DNA, 20 bp, synthetic construct
  source 1..20: mol_type = other DNA
caagacgagccgcttcgcaa

SEQ ID NO: 44289 - DNA, 20 bp, synthetic construct
  source 1..20: mol_type = other DNA
cagcgactttggtctcacca

SEQ ID NO: 44290 - DNA, 20 bp, synthetic construct
  source 1..20: mol_type = other DNA
actgcagggaacctccacca

SEQ ID NO: 44291 - DNA, 20 bp, synthetic construct
  source 1..20: mol_type = other DNA
tgactgggtacctgcgggat

SEQ ID NO: 44292 - DNA, 20 bp, synthetic construct
  source 1..20: mol_type = other DNA
tgtccaggatgtacttgttg

SEQ ID NO: 44293 - DNA, 20 bp, synthetic construct
  source 1..20: mol_type = other DNA
ctaaagaacagcaacgactg

SEQ ID NO: 44294 - DNA, 20 bp, synthetic construct
  source 1..20: mol_type = other DNA
gtggaccaagcgagccttcc

SEQ ID NO: 44295 - DNA, 20 bp, synthetic construct
  source 1..20: mol_type = other DNA
gtgggccagccagttcactt

SEQ ID NO: 44296 - DNA, 20 bp, synthetic construct
  source 1..20: mol_type = other DNA
gccctacctgcgtcagtgta

SEQ ID NO: 44297 - DNA, 20 bp, synthetic construct
  source 1..20: mol_type = other DNA
gagcactcaccagatagttg

SEQ ID NO: 44298 - DNA, 20 bp, synthetic construct
  source 1..20: mol_type = other DNA
agccaccgttgtccagatta

SEQ ID NO: 44299 - DNA, 20 bp, synthetic construct
  source 1..20: mol_type = other DNA
tggtccctgagtaagtgtcc

SEQ ID NO: 44300 - DNA, 20 bp, synthetic construct
  source 1..20: mol_type = other DNA
agaagccaatggagattgcc

SEQ ID NO: 44301 - DNA, 20 bp, synthetic construct
  source 1..20: mol_type = other DNA
tttctgggaggagacacgca

SEQ ID NO: 44302 - DNA, 20 bp, synthetic construct
  source 1..20: mol_type = other DNA
gatgaaagggccggaggtca

SEQ ID NO: 44303 - DNA, 20 bp, synthetic construct
  source 1..20: mol_type = other DNA
cgtcaggctgctgtggtacc

SEQ ID NO: 44304 - DNA, 20 bp, synthetic construct
  source 1..20: mol_type = other DNA
gggaactcggcctcctgcga

SEQ ID NO: 44305 - DNA, 20 bp, synthetic construct
  source 1..20: mol_type = other DNA
cctcacccaaccagcttaag

SEQ ID NO: 44306 - DNA, 20 bp, synthetic construct
  source 1..20: mol_type = other DNA
ttggacttttctatggggag

SEQ ID NO: 44307 - DNA, 20 bp, synthetic construct
  source 1..20: mol_type = other DNA
tgccttgttcctgagagtga

SEQ ID NO: 44308 - DNA, 20 bp, synthetic construct
  source 1..20: mol_type = other DNA
ttccactgtggggagatggg

SEQ ID NO: 44309 - DNA, 20 bp, synthetic construct
  source 1..20: mol_type = other DNA
tggccgtcgcattgttgtcc

SEQ ID NO: 44310 - DNA, 20 bp, synthetic construct
  source 1..20: mol_type = other DNA
cttgtagctgcaggggttgg

SEQ ID NO: 44311 - DNA, 20 bp, synthetic construct
  source 1..20: mol_type = other DNA
actaaacacttcccagaccg

SEQ ID NO: 44312 - DNA, 20 bp, synthetic construct
  source 1..20: mol_type = other DNA
cgtgacctgggatggggctc

SEQ ID NO: 44313 - DNA, 20 bp, synthetic construct
  source 1..20: mol_type = other DNA
tcgctgcattgagtgtgcgt

SEQ ID NO: 44314 - DNA, 20 bp, synthetic construct
  source 1..20: mol_type = other DNA
cgtacagcgcaaagcagaga

SEQ ID NO: 44315 - DNA, 20 bp, synthetic construct
  source 1..20: mol_type = other DNA
aacagcgacatggccctcgc

SEQ ID NO: 44316 - DNA, 20 bp, synthetic construct
  source 1..20: mol_type = other DNA
tccagttcactactaaagtc

SEQ ID NO: 44317 - DNA, 20 bp, synthetic construct
  source 1..20: mol_type = other DNA
gtccaggtcggtctactgct

SEQ ID NO: 44318 - DNA, 20 bp, synthetic construct
  source 1..20: mol_type = other DNA
agattggcacagctgtgagg

SEQ ID NO: 44319 - DNA, 20 bp, synthetic construct
  source 1..20: mol_type = other DNA
gcttcacaatgtaagtggac

SEQ ID NO: 44320 - DNA, 20 bp, synthetic construct
  source 1..20: mol_type = other DNA
gcccacgacaccaaccacca

SEQ ID NO: 44321 - DNA, 20 bp, synthetic construct
  source 1..20: mol_type = other DNA
ggcgccccaggcaccaggta

SEQ ID NO: 44322 - DNA, 20 bp, synthetic construct
  source 1..20: mol_type = other DNA
ggatgtccggaagagagtgc

SEQ ID NO: 44323 - DNA, 20 bp, synthetic construct
  source 1..20: mol_type = other DNA
cagccagtggccgctcaggt

SEQ ID NO: 44324 - DNA, 20 bp, synthetic construct
  source 1..20: mol_type = other DNA
gacaccatcatgtaaggagc

SEQ ID NO: 44325 - DNA, 20 bp, synthetic construct
  source 1..20: mol_type = other DNA
tgtagctgcaggggttggag

SEQ ID NO: 44326 - DNA, 20 bp, synthetic construct
  source 1..20: mol_type = other DNA
gatccacaggggcttcatct

SEQ ID NO: 44327 - DNA, 20 bp, synthetic construct
  source 1..20: mol_type = other DNA
catgtccagctgggggccca

SEQ ID NO: 44328 - DNA, 20 bp, synthetic construct
  source 1..20: mol_type = other DNA
cgaagctccagacgtctgac

SEQ ID NO: 44329 - DNA, 20 bp, synthetic construct
  source 1..20: mol_type = other DNA
caggctacctgtgagtggcc

SEQ ID NO: 44330 - DNA, 20 bp, synthetic construct
  source 1..20: mol_type = other DNA
tctgatacctgagtgtatcc

SEQ ID NO: 44331 - DNA, 20 bp, synthetic construct
  source 1..20: mol_type = other DNA
tggatgagctcgatgcggaa

SEQ ID NO: 44332 - DNA, 20 bp, synthetic construct
  source 1..20: mol_type = other DNA
ggagctgcagtccatcatcc

SEQ ID NO: 44333 - DNA, 20 bp, synthetic construct
  source 1..20: mol_type = other DNA
tccctgaccacgggccagga

SEQ ID NO: 44334 - DNA, 20 bp, synthetic construct
  source 1..20: mol_type = other DNA
tattcagtgatgatgtagat

SEQ ID NO: 44335 - DNA, 20 bp, synthetic construct
  source 1..20: mol_type = other DNA
caggcggttgagggtcgcgc

SEQ ID NO: 44336 - DNA, 20 bp, synthetic construct
  source 1..20: mol_type = other DNA
tggaggggaagacggcccgg

SEQ ID NO: 44337 - DNA, 20 bp, synthetic construct
  source 1..20: mol_type = other DNA
tctgacacactgtagggaaa

SEQ ID NO: 44338 - DNA, 20 bp, synthetic construct
  source 1..20: mol_type = other DNA
cctccaccattgccacctgc

SEQ ID NO: 44339 - DNA, 20 bp, synthetic construct
  source 1..20: mol_type = other DNA
acggagtacttgcgctcagg

SEQ ID NO: 44340 - DNA, 20 bp, synthetic construct
  source 1..20: mol_type = other DNA
tgctaagggctgagcactcc

SEQ ID NO: 44341 - DNA, 20 bp, synthetic construct
  source 1..20: mol_type = other DNA
cactggaagggccgttctcc

SEQ ID NO: 44342 - DNA, 20 bp, synthetic construct
  source 1..20: mol_type = other DNA
cagcaggtagagcatctggg

SEQ ID NO: 44343 - DNA, 20 bp, synthetic construct
  source 1..20: mol_type = other DNA
cccagcttatgttgcatctg

SEQ ID NO: 44344 - DNA, 20 bp, synthetic construct
  source 1..20: mol_type = other DNA
gcgcaggcttgggggtaggc

SEQ ID NO: 44345 - DNA, 20 bp, synthetic construct
  source 1..20: mol_type = other DNA
tgcaggactccctggcactg

SEQ ID NO: 44346 - DNA, 20 bp, synthetic construct
  source 1..20: mol_type = other DNA
ccacatgtcaggttccaccg

SEQ ID NO: 44347 - DNA, 20 bp, synthetic construct
  source 1..20: mol_type = other DNA
ttctaatgttcttaaggcac

SEQ ID NO: 44348 - DNA, 20 bp, synthetic construct
  source 1..20: mol_type = other DNA
ctcccaaggtgctcgccctg

SEQ ID NO: 44349 - DNA, 20 bp, synthetic construct
  source 1..20: mol_type = other DNA
gcagttgccagaactgccca

SEQ ID NO: 44350 - DNA, 20 bp, synthetic construct
  source 1..20: mol_type = other DNA
ggaggcgcccacctgctgga

SEQ ID NO: 44351 - DNA, 20 bp, synthetic construct
  source 1..20: mol_type = other DNA
cacaggcaggatgcctacag

SEQ ID NO: 44352 - DNA, 20 bp, synthetic construct
  source 1..20: mol_type = other DNA
acagcagttcttgtcaggta

SEQ ID NO: 44353 - DNA, 20 bp, synthetic construct
  source 1..20: mol_type = other DNA
tcgttctcccacaccagccc

SEQ ID NO: 44354 - DNA, 20 bp, synthetic construct
  source 1..20: mol_type = other DNA
ggcatcccttcacaaaggac

SEQ ID NO: 44355 - DNA, 20 bp, synthetic construct
  source 1..20: mol_type = other DNA
aggtggcgaggggactacgg

SEQ ID NO: 44356 - DNA, 20 bp, synthetic construct
  source 1..20: mol_type = other DNA
acagcaggtagagcatctgg

SEQ ID NO: 44357 - DNA, 20 bp, synthetic construct
  source 1..20: mol_type = other DNA
tcaccaccactggcagggac

SEQ ID NO: 44358 - DNA, 20 bp, synthetic construct
  source 1..20: mol_type = other DNA
caaaggacaaggcctcctcg

SEQ ID NO: 44359 - DNA, 20 bp, synthetic construct
  source 1..20: mol_type = other DNA
atgtggaacagctgagggga

SEQ ID NO: 44360 - DNA, 20 bp, synthetic construct
  source 1..20: mol_type = other DNA
tcgctgtgggttgtgaggtc

SEQ ID NO: 44361 - DNA, 20 bp, synthetic construct
  source 1..20: mol_type = other DNA
tgttaggttctctggagccc

SEQ ID NO: 44362 - DNA, 20 bp, synthetic construct
  source 1..20: mol_type = other DNA
gagcaggtctggctggctca

SEQ ID NO: 44363 - DNA, 20 bp, synthetic construct
  source 1..20: mol_type = other DNA
aagcgcagaaaggcaaattc

SEQ ID NO: 44364 - DNA, 20 bp, synthetic construct
  source 1..20: mol_type = other DNA
ggaggccctggaggacaggc

SEQ ID NO: 44365 - DNA, 20 bp, synthetic construct
  source 1..20: mol_type = other DNA
gactctacctgtttgccagg

SEQ ID NO: 44366 - DNA, 20 bp, synthetic construct
  source 1..20: mol_type = other DNA
tgagtcggcagcaacatcca

SEQ ID NO: 44367 - DNA, 20 bp, synthetic construct
  source 1..20: mol_type = other DNA
caatgatgaccaggatgggg

SEQ ID NO: 44368 - DNA, 20 bp, synthetic construct
  source 1..20: mol_type = other DNA
tctggaggaggaatgccaat

SEQ ID NO: 44369 - DNA, 20 bp, synthetic construct
  source 1..20: mol_type = other DNA
cattgctcttctcattgtct

SEQ ID NO: 44370 - DNA, 20 bp, synthetic construct
  source 1..20: mol_type = other DNA
gccttcgtgaaaccatctgt

SEQ ID NO: 44371 - DNA, 20 bp, synthetic construct
  source 1..20: mol_type = other DNA
caactattcagccaatgtga

SEQ ID NO: 44372 - DNA, 20 bp, synthetic construct
  source 1..20: mol_type = other DNA
tggggcgccccacgatggag

SEQ ID NO: 44373 - DNA, 20 bp, synthetic construct
  source 1..20: mol_type = other DNA
ggagaaagataggcgctggg

SEQ ID NO: 44374 - DNA, 20 bp, synthetic construct
  source 1..20: mol_type = other DNA
aaggtcatgcgagacaacaa

SEQ ID NO: 44375 - DNA, 20 bp, synthetic construct
  source 1..20: mol_type = other DNA
ctccactgtgcactctcagg

SEQ ID NO: 44376 - DNA, 20 bp, synthetic construct
  source 1..20: mol_type = other DNA
accgagtctggttggggaga

SEQ ID NO: 44377 - DNA, 20 bp, synthetic construct
  source 1..20: mol_type = other DNA
aagaaggcagagcaccaggt

SEQ ID NO: 44378 - DNA, 20 bp, synthetic construct
  source 1..20: mol_type = other DNA
ggaagctgtcaaagtcctgg

SEQ ID NO: 44379 - DNA, 20 bp, synthetic construct
  source 1..20: mol_type = other DNA
catcagcaccttcatgtggt

SEQ ID NO: 44380 - DNA, 20 bp, synthetic construct
  source 1..20: mol_type = other DNA
gccgaagctccagtagtcga

SEQ ID NO: 44381 - DNA, 20 bp, synthetic construct
  source 1..20: mol_type = other DNA
gactccgagggaaagaggta

SEQ ID NO: 44382 - DNA, 20 bp, synthetic construct
  source 1..20: mol_type = other DNA
atgccatctctttccggtga

SEQ ID NO: 44383 - DNA, 20 bp, synthetic construct
  source 1..20: mol_type = other DNA
cccagaagggcaacctgctc

SEQ ID NO: 44384 - DNA, 20 bp, synthetic construct
  source 1..20: mol_type = other DNA
gtgtctctcctcgaagatcg

SEQ ID NO: 44385 - DNA, 20 bp, synthetic construct
  source 1..20: mol_type = other DNA
aaaccaggatgtcccccaag

SEQ ID NO: 44386 - DNA, 20 bp, synthetic construct
  source 1..20: mol_type = other DNA
tccaagaggcggcagagggc

SEQ ID NO: 44387 - DNA, 20 bp, synthetic construct
  source 1..20: mol_type = other DNA
gacctccaactcgaggtgag

SEQ ID NO: 44388 - DNA, 20 bp, synthetic construct
  source 1..20: mol_type = other DNA
aagatgatctcaatgtcttg

SEQ ID NO: 44389 - DNA, 20 bp, synthetic construct
  source 1..20: mol_type = other DNA
gcgaggggagatctatggcc

SEQ ID NO: 44390 - DNA, 20 bp, synthetic construct
  source 1..20: mol_type = other DNA
atcgatctgaaataccccaa

SEQ ID NO: 44391 - DNA, 20 bp, synthetic construct
  source 1..20: mol_type = other DNA
gcatgcgctgctccacggtc

SEQ ID NO: 44392 - DNA, 20 bp, synthetic construct
  source 1..20: mol_type = other DNA
agtaccaggtagcaggtgag

SEQ ID NO: 44393 - DNA, 20 bp, synthetic construct
  source 1..20: mol_type = other DNA
tttccatccagtcatcttcc

SEQ ID NO: 44394 - DNA, 20 bp, synthetic construct
  source 1..20: mol_type = other DNA
tgacgatatctgcagagaga

SEQ ID NO: 44395 - DNA, 20 bp, synthetic construct
  source 1..20: mol_type = other DNA
agagcgcggcgtcctcctcg

SEQ ID NO: 44396 - DNA, 20 bp, synthetic construct
  source 1..20: mol_type = other DNA
ttccgggcatcccttcacaa

SEQ ID NO: 44397 - DNA, 20 bp, synthetic construct
  source 1..20: mol_type = other DNA
gtggcgtgtgggatctctgg

SEQ ID NO: 44398 - DNA, 20 bp, synthetic construct
  source 1..20: mol_type = other DNA
ggaccagctccagggggcag

SEQ ID NO: 44399 - DNA, 20 bp, synthetic construct
  source 1..20: mol_type = other DNA
gtgagtgggcgcctccccgt

SEQ ID NO: 44400 - DNA, 20 bp, synthetic construct
  source 1..20: mol_type = other DNA
cttcctccgagagcggctga

SEQ ID NO: 44401 - DNA, 20 bp, synthetic construct
  source 1..20: mol_type = other DNA
tcaggtatgatgagaaactg

SEQ ID NO: 44402 - DNA, 20 bp, synthetic construct
  source 1..20: mol_type = other DNA
agaaaagccacatgaatgcc

SEQ ID NO: 44403 - DNA, 20 bp, synthetic construct
  source 1..20: mol_type = other DNA
gggctctatcacaaaatgaa

SEQ ID NO: 44404 - DNA, 20 bp, synthetic construct
  source 1..20: mol_type = other DNA
agaccacctatcagagccga

SEQ ID NO: 44405 - DNA, 20 bp, synthetic construct
  source 1..20: mol_type = other DNA
tcactcagcttgatgaaggg

SEQ ID NO: 44406 - DNA, 20 bp, synthetic construct
  source 1..20: mol_type = other DNA
ggatccaaggtgaggcgcgg

SEQ ID NO: 44407 - DNA, 20 bp, synthetic construct
  source 1..20: mol_type = other DNA
ctcctactcctgaagacaac

SEQ ID NO: 44408 - DNA, 20 bp, synthetic construct
  source 1..20: mol_type = other DNA
ccagctcactcacgatgctc

SEQ ID NO: 44409 - DNA, 20 bp, synthetic construct
  source 1..20: mol_type = other DNA
gcctggctgccaggcaggta

SEQ ID NO: 44410 - DNA, 20 bp, synthetic construct
  source 1..20: mol_type = other DNA
catccttacctctgacggca

SEQ ID NO: 44411 - DNA, 20 bp, synthetic construct
  source 1..20: mol_type = other DNA
catcgtcagacgctacaagg

SEQ ID NO: 44412 - DNA, 20 bp, synthetic construct
  source 1..20: mol_type = other DNA
acgacggacagcacatgtgg

SEQ ID NO: 44413 - DNA, 20 bp, synthetic construct
  source 1..20: mol_type = other DNA
gcagaaaactctcacggacg

SEQ ID NO: 44414 - DNA, 20 bp, synthetic construct
  source 1..20: mol_type = other DNA
ccagctcctgcctgtcctcc

SEQ ID NO: 44415 - DNA, 20 bp, synthetic construct
  source 1..20: mol_type = other DNA
gggccgccattacatccaca

SEQ ID NO: 44416 - DNA, 20 bp, synthetic construct
  source 1..20: mol_type = other DNA
ctccacgaggatgtttcggg

SEQ ID NO: 44417 - DNA, 20 bp, synthetic construct
  source 1..20: mol_type = other DNA
tggaggaggcagcctcttga

SEQ ID NO: 44418 - DNA, 20 bp, synthetic construct
  source 1..20: mol_type = other DNA
tgaggtagtcagtcaggtcc

SEQ ID NO: 44419 - DNA, 20 bp, synthetic construct
  source 1..20: mol_type = other DNA
tgtcatctgcagagggacga

SEQ ID NO: 44420 - DNA, 20 bp, synthetic construct
  source 1..20: mol_type = other DNA
cacccctcacctcgagttgg

SEQ ID NO: 44421 - DNA, 20 bp, synthetic construct
  source 1..20: mol_type = other DNA
agctacctttgccgatgagg

SEQ ID NO: 44422 - DNA, 20 bp, synthetic construct
  source 1..20: mol_type = other DNA
gcagggcctggcactggcca

SEQ ID NO: 44423 - DNA, 20 bp, synthetic construct
  source 1..20: mol_type = other DNA
ccctcacctcctgttctccc

SEQ ID NO: 44424 - DNA, 20 bp, synthetic construct
  source 1..20: mol_type = other DNA
gttgagttggatgttggcga

SEQ ID NO: 44425 - DNA, 20 bp, synthetic construct
  source 1..20: mol_type = other DNA
aggcaggccttgtagctgca

SEQ ID NO: 44426 - DNA, 20 bp, synthetic construct
  source 1..20: mol_type = other DNA
tcacctcgagttggaggtct

SEQ ID NO: 44427 - DNA, 20 bp, synthetic construct
  source 1..20: mol_type = other DNA
ccactgggcaggtgggtggg

SEQ ID NO: 44428 - DNA, 20 bp, synthetic construct
  source 1..20: mol_type = other DNA
cagtcagacatctggagcat

SEQ ID NO: 44429 - DNA, 20 bp, synthetic construct
  source 1..20: mol_type = other DNA
aatagtcagcaaggctgtcg

SEQ ID NO: 44430 - DNA, 20 bp, synthetic construct
  source 1..20: mol_type = other DNA
agagtgaaggtgggtaccac

SEQ ID NO: 44431 - DNA, 20 bp, synthetic construct
  source 1..20: mol_type = other DNA
tttgcaggactccctggcac

SEQ ID NO: 44432 - DNA, 20 bp, synthetic construct
  source 1..20: mol_type = other DNA
gagaagtctctggtggtaaa

SEQ ID NO: 44433 - DNA, 20 bp, synthetic construct
  source 1..20: mol_type = other DNA
tactcacatctggggctccg

SEQ ID NO: 44434 - DNA, 20 bp, synthetic construct
  source 1..20: mol_type = other DNA
gggccaggtccaacacggcc

SEQ ID NO: 44435 - DNA, 20 bp, synthetic construct
  source 1..20: mol_type = other DNA
ggtccaggatgcgttttccc

SEQ ID NO: 44436 - DNA, 20 bp, synthetic construct
  source 1..20: mol_type = other DNA
gggccagccagagctcccca

SEQ ID NO: 44437 - DNA, 20 bp, synthetic construct
  source 1..20: mol_type = other DNA
agaagattggcacagctgtg

SEQ ID NO: 44438 - DNA, 20 bp, synthetic construct
  source 1..20: mol_type = other DNA
gatcaggcgcccgagggccg

SEQ ID NO: 44439 - DNA, 20 bp, synthetic construct
  source 1..20: mol_type = other DNA
gcacgagtggctgtgcgcgc

SEQ ID NO: 44440 - DNA, 20 bp, synthetic construct
  source 1..20: mol_type = other DNA
cgtagtcccctcgccacctg

SEQ ID NO: 44441 - DNA, 20 bp, synthetic construct
  source 1..20: mol_type = other DNA
gagaacgtccccggggcaca

SEQ ID NO: 44442 - DNA, 20 bp, synthetic construct
  source 1..20: mol_type = other DNA
ccgcggcctcagcctggcag

SEQ ID NO: 44443 - DNA, 20 bp, synthetic construct
  source 1..20: mol_type = other DNA
gttcattgtacaatatatgg

SEQ ID NO: 44444 - DNA, 20 bp, synthetic construct
  source 1..20: mol_type = other DNA
ctgacgaactggaggagaag

SEQ ID NO: 44445 - DNA, 20 bp, synthetic construct
  source 1..20: mol_type = other DNA
gcccccgcacctggtgcagg

SEQ ID NO: 44446 - DNA, 20 bp, synthetic construct
  source 1..20: mol_type = other DNA
tgctttcagttgcctagacc

SEQ ID NO: 44447 - DNA, 20 bp, synthetic construct
  source 1..20: mol_type = other DNA
gcagttccaagaggcggcag

SEQ ID NO: 44448 - DNA, 20 bp, synthetic construct
  source 1..20: mol_type = other DNA
tgcatctgtgggtctccacg

SEQ ID NO: 44449 - DNA, 20 bp, synthetic construct
  source 1..20: mol_type = other DNA
gcctgtgggatctgcatgcc

SEQ ID NO: 44450 - DNA, 20 bp, synthetic construct
  source 1..20: mol_type = other DNA
cgtgcgccagacgtggaagc

SEQ ID NO: 44451 - DNA, 20 bp, synthetic construct
  source 1..20: mol_type = other DNA
tccagctggctggcaccagg

SEQ ID NO: 44452 - DNA, 20 bp, synthetic construct
  source 1..20: mol_type = other DNA
ggaggagcaatgatctgagg

SEQ ID NO: 44453 - DNA, 20 bp, synthetic construct
  source 1..20: mol_type = other DNA
cccgagccacatcttctccg

SEQ ID NO: 44454 - DNA, 20 bp, synthetic construct
  source 1..20: mol_type = other DNA
gcaggtacaggggctggtgc

SEQ ID NO: 44455 - DNA, 20 bp, synthetic construct
  source 1..20: mol_type = other DNA
agatggaacggaagaagccc

SEQ ID NO: 44456 - DNA, 20 bp, synthetic construct
  source 1..20: mol_type = other DNA
tacgccctgtccctcatcta

SEQ ID NO: 44457 - DNA, 20 bp, synthetic construct
  source 1..20: mol_type = other DNA
agagaagtatggtggcaggg

SEQ ID NO: 44458 - DNA, 20 bp, synthetic construct
  source 1..20: mol_type = other DNA
gtgtgaagagcacgggccgg

SEQ ID NO: 44459 - DNA, 20 bp, synthetic construct
  source 1..20: mol_type = other DNA
cccaggatgagcagcagccc

SEQ ID NO: 44460 - DNA, 20 bp, synthetic construct
  source 1..20: mol_type = other DNA
gctgctgacaagtggagctt

SEQ ID NO: 44461 - DNA, 20 bp, synthetic construct
  source 1..20: mol_type = other DNA
aggttcccaaagtggtcgct

SEQ ID NO: 44462 - DNA, 20 bp, synthetic construct
  source 1..20: mol_type = other DNA
tctgcgaggaatagagaagg

SEQ ID NO: 44463 - DNA, 20 bp, synthetic construct
  source 1..20: mol_type = other DNA
ctacataccaaggggcaaag

SEQ ID NO: 44464 - DNA, 20 bp, synthetic construct
  source 1..20: mol_type = other DNA
ataaacttggtcttcaggta

SEQ ID NO: 44465 - DNA, 20 bp, synthetic construct
  source 1..20: mol_type = other DNA
tcttctgggagtcaaaggtc

SEQ ID NO: 44466 - DNA, 20 bp, synthetic construct
  source 1..20: mol_type = other DNA
tgggatgacaaggtaaaaga

SEQ ID NO: 44467 - DNA, 20 bp, synthetic construct
  source 1..20: mol_type = other DNA
atatccaaacacaatattgg

SEQ ID NO: 44468 - DNA, 20 bp, synthetic construct
  source 1..20: mol_type = other DNA
gaacctgggaagagagtgga

SEQ ID NO: 44469 - DNA, 20 bp, synthetic construct
  source 1..20: mol_type = other DNA
acagcgagtgcggtgggccc

SEQ ID NO: 44470 - DNA, 20 bp, synthetic construct
  source 1..20: mol_type = other DNA
actggccaaggagattggta

SEQ ID NO: 44471 - DNA, 20 bp, synthetic construct
  source 1..20: mol_type = other DNA
gcagggagtgtgtgaactgt

SEQ ID NO: 44472 - DNA, 20 bp, synthetic construct
  source 1..20: mol_type = other DNA
tcccaccttggtgaccagat

SEQ ID NO: 44473 - DNA, 20 bp, synthetic construct
  source 1..20: mol_type = other DNA
acgtagtagtctttgtcaag

SEQ ID NO: 44474 - DNA, 20 bp, synthetic construct
  source 1..20: mol_type = other DNA
acccgtagggatgaccaacc

SEQ ID NO: 44475 - DNA, 20 bp, synthetic construct
  source 1..20: mol_type = other DNA
gcaatggtttgacggtgtga

SEQ ID NO: 44476 - DNA, 20 bp, synthetic construct
  source 1..20: mol_type = other DNA
gcatctggcagatgtcgcag

SEQ ID NO: 44477 - DNA, 20 bp, synthetic construct
  source 1..20: mol_type = other DNA
gttcctgggaaatctacggg

SEQ ID NO: 44478 - DNA, 20 bp, synthetic construct
  source 1..20: mol_type = other DNA
ccaggtcttcgctctcctgt

SEQ ID NO: 44479 - DNA, 20 bp, synthetic construct
  source 1..20: mol_type = other DNA
ggaggacgtgcagatgaagc

SEQ ID NO: 44480 - DNA, 20 bp, synthetic construct
  source 1..20: mol_type = other DNA
tttgacacgctctggcaggt

SEQ ID NO: 44481 - DNA, 20 bp, synthetic construct
  source 1..20: mol_type = other DNA
acgttatatctggaaccaga

SEQ ID NO: 44482 - DNA, 20 bp, synthetic construct
  source 1..20: mol_type = other DNA
ggccgcctgcacaacaagct

SEQ ID NO: 44483 - DNA, 20 bp, synthetic construct
  source 1..20: mol_type = other DNA
ggaagcgcatgttggggacc

SEQ ID NO: 44484 - DNA, 20 bp, synthetic construct
  source 1..20: mol_type = other DNA
ctgtggcggcgagatggcac

SEQ ID NO: 44485 - DNA, 20 bp, synthetic construct
  source 1..20: mol_type = other DNA
aaacagatactccagtgagc

SEQ ID NO: 44486 - DNA, 20 bp, synthetic construct
  source 1..20: mol_type = other DNA
gctcctcaccctgttgaact

SEQ ID NO: 44487 - DNA, 20 bp, synthetic construct
  source 1..20: mol_type = other DNA
ggttcccaaagtggtcgctg

SEQ ID NO: 44488 - DNA, 20 bp, synthetic construct
  source 1..20: mol_type = other DNA
cattacaccagtgagcccga

SEQ ID NO: 44489 - DNA, 20 bp, synthetic construct
  source 1..20: mol_type = other DNA
ccgaatggagaagtctctgg

SEQ ID NO: 44490 - DNA, 20 bp, synthetic construct
  source 1..20: mol_type = other DNA
tgggcaccaagctggacctg

SEQ ID NO: 44491 - DNA, 20 bp, synthetic construct
  source 1..20: mol_type = other DNA
ttccagaacgcctgccgcga

SEQ ID NO: 44492 - DNA, 20 bp, synthetic construct
  source 1..20: mol_type = other DNA
gggtcagcatgtcctgccgg

SEQ ID NO: 44493 - DNA, 20 bp, synthetic construct
  source 1..20: mol_type = other DNA
actcatgaggctgtgctgga

SEQ ID NO: 44494 - DNA, 20 bp, synthetic construct
  source 1..20: mol_type = other DNA
gcccagatctccgtcgtgag

SEQ ID NO: 44495 - DNA, 20 bp, synthetic construct
  source 1..20: mol_type = other DNA
aggagattggtatgggcctc

SEQ ID NO: 44496 - DNA, 20 bp, synthetic construct
  source 1..20: mol_type = other DNA
attgtccagccagacccaga

SEQ ID NO: 44497 - DNA, 20 bp, synthetic construct
  source 1..20: mol_type = other DNA
cctatggctgcctccccacc

SEQ ID NO: 44498 - DNA, 20 bp, synthetic construct
  source 1..20: mol_type = other DNA
tgatgtacctggagccaagg

SEQ ID NO: 44499 - DNA, 20 bp, synthetic construct
  source 1..20: mol_type = other DNA
gactttcttggtgcggcaga

SEQ ID NO: 44500 - DNA, 20 bp, synthetic construct
  source 1..20: mol_type = other DNA
gcatctctggtcctcttcaa

SEQ ID NO: 44501 - DNA, 20 bp, synthetic construct
  source 1..20: mol_type = other DNA
catgcccaccatcacgccct

SEQ ID NO: 44502 - DNA, 20 bp, synthetic construct
  source 1..20: mol_type = other DNA
ccaccgcgtgacctgggatg

SEQ ID NO: 44503 - DNA, 20 bp, synthetic construct
  source 1..20: mol_type = other DNA
gcagatcgacgtggccatca

SEQ ID NO: 44504 - DNA, 20 bp, synthetic construct
  source 1..20: mol_type = other DNA
cgggctggctgcggtcctcg

SEQ ID NO: 44505 - DNA, 20 bp, synthetic construct
  source 1..20: mol_type = other DNA
tcacactggagatgttttga

SEQ ID NO: 44506 - DNA, 20 bp, synthetic construct
  source 1..20: mol_type = other DNA
ctccgcgtggctggtgacgg

SEQ ID NO: 44507 - DNA, 20 bp, synthetic construct
  source 1..20: mol_type = other DNA
tccaggtgcatgggtgtgga

SEQ ID NO: 44508 - DNA, 20 bp, synthetic construct
  source 1..20: mol_type = other DNA
ggacccagactagcagcacc

SEQ ID NO: 44509 - DNA, 20 bp, synthetic construct
  source 1..20: mol_type = other DNA
gaaacaaccagtcagtgacc

SEQ ID NO: 44510 - DNA, 20 bp, synthetic construct
  source 1..20: mol_type = other DNA
cgtgcagatgaagctggagg

SEQ ID NO: 44511 - DNA, 20 bp, synthetic construct
  source 1..20: mol_type = other DNA
catgagctggatcatctgca

SEQ ID NO: 44512 - DNA, 20 bp, synthetic construct
  source 1..20: mol_type = other DNA
ccgcagcgacttgatggcga

SEQ ID NO: 44513 - DNA, 20 bp, synthetic construct
  source 1..20: mol_type = other DNA
caccagggtttggaactggc

SEQ ID NO: 44514 - DNA, 20 bp, synthetic construct
  source 1..20: mol_type = other DNA
gatcgatctgaaatacccca

SEQ ID NO: 44515 - DNA, 20 bp, synthetic construct
  source 1..20: mol_type = other DNA
caagtaccccgggctggtgt

SEQ ID NO: 44516 - DNA, 20 bp, synthetic construct
  source 1..20: mol_type = other DNA
ctgcagcgcctgatgcaccg

SEQ ID NO: 44517 - DNA, 20 bp, synthetic construct
  source 1..20: mol_type = other DNA
aggaaccacgcgctgttgaa

SEQ ID NO: 44518 - DNA, 20 bp, synthetic construct
  source 1..20: mol_type = other DNA
ggtgcagaggctgctcaact

SEQ ID NO: 44519 - DNA, 20 bp, synthetic construct
  source 1..20: mol_type = other DNA
tgacttacccattcctgtcc

SEQ ID NO: 44520 - DNA, 20 bp, synthetic construct
  source 1..20: mol_type = other DNA
caggccccatggagcgggca

SEQ ID NO: 44521 - DNA, 20 bp, synthetic construct
  source 1..20: mol_type = other DNA
acctacccggagtgcccgca

SEQ ID NO: 44522 - DNA, 20 bp, synthetic construct
  source 1..20: mol_type = other DNA
ccttaagagaacactgctcc

SEQ ID NO: 44523 - DNA, 20 bp, synthetic construct
  source 1..20: mol_type = other DNA
aaactctgctacctgctgga

SEQ ID NO: 44524 - DNA, 20 bp, synthetic construct
  source 1..20: mol_type = other DNA
gagtcaaaggcagtcttggc

SEQ ID NO: 44525 - DNA, 20 bp, synthetic construct
  source 1..20: mol_type = other DNA
ggcacatcaagctgcattcc

SEQ ID NO: 44526 - DNA, 20 bp, synthetic construct
  source 1..20: mol_type = other DNA
gaacttactcatgggcaagg

SEQ ID NO: 44527 - DNA, 20 bp, synthetic construct
  source 1..20: mol_type = other DNA
attgacgcaggaggccctgt

SEQ ID NO: 44528 - DNA, 20 bp, synthetic construct
  source 1..20: mol_type = other DNA
taagaggtcagaccgtcgtg

SEQ ID NO: 44529 - DNA, 20 bp, synthetic construct
  source 1..20: mol_type = other DNA
ggtcggaatgcagccaagcg

SEQ ID NO: 44530 - DNA, 20 bp, synthetic construct
  source 1..20: mol_type = other DNA
ggatgaagaggacgccttgt

SEQ ID NO: 44531 - DNA, 20 bp, synthetic construct
  source 1..20: mol_type = other DNA
cgtgaacgttccggagagcg

SEQ ID NO: 44532 - DNA, 20 bp, synthetic construct
  source 1..20: mol_type = other DNA
ggacaaaaagaggaatgagc

SEQ ID NO: 44533 - DNA, 20 bp, synthetic construct
  source 1..20: mol_type = other DNA
tcatgaggtctcccaagctg

SEQ ID NO: 44534 - DNA, 20 bp, synthetic construct
  source 1..20: mol_type = other DNA
ttcagtgactcagaaattgg

SEQ ID NO: 44535 - DNA, 20 bp, synthetic construct
  source 1..20: mol_type = other DNA
gaagattggcacagctgtga

SEQ ID NO: 44536 - DNA, 20 bp, synthetic construct
  source 1..20: mol_type = other DNA
gagtgattccggccggctgg

SEQ ID NO: 44537 - DNA, 20 bp, synthetic construct
  source 1..20: mol_type = other DNA
cacggccgcatcccttaccc

SEQ ID NO: 44538 - DNA, 20 bp, synthetic construct
  source 1..20: mol_type = other DNA
cagcagtcacctggtcacca

SEQ ID NO: 44539 - DNA, 20 bp, synthetic construct
  source 1..20: mol_type = other DNA
catctactaatgaaattggc

SEQ ID NO: 44540 - DNA, 20 bp, synthetic construct
  source 1..20: mol_type = other DNA
catgccgcagcttccacacc

SEQ ID NO: 44541 - DNA, 20 bp, synthetic construct
  source 1..20: mol_type = other DNA
acatgagcgtggtcagggcc

SEQ ID NO: 44542 - DNA, 20 bp, synthetic construct
  source 1..20: mol_type = other DNA
gtctaaaaagacacaagaga

SEQ ID NO: 44543 - DNA, 20 bp, synthetic construct
  source 1..20: mol_type = other DNA
gcagctcattgtagaaggtg

SEQ ID NO: 44544 - DNA, 20 bp, synthetic construct
  source 1..20: mol_type = other DNA
ggtggaggaagagaagcccg

SEQ ID NO: 44545 - DNA, 20 bp, synthetic construct
  source 1..20: mol_type = other DNA
gcggaccagttcatgcaggc

SEQ ID NO: 44546 - DNA, 20 bp, synthetic construct
  source 1..20: mol_type = other DNA
ctgcttcatgaggttggcct

SEQ ID NO: 44547 - DNA, 20 bp, synthetic construct
  source 1..20: mol_type = other DNA
atcccaggtcacgcggtggc

SEQ ID NO: 44548 - DNA, 20 bp, synthetic construct
  source 1..20: mol_type = other DNA
ccagcagatccaggcactca

SEQ ID NO: 44549 - DNA, 20 bp, synthetic construct
  source 1..20: mol_type = other DNA
gcttgtagcgtacgacaatg

SEQ ID NO: 44550 - DNA, 20 bp, synthetic construct
  source 1..20: mol_type = other DNA
accgaaagaacccggtgtgc

SEQ ID NO: 44551 - DNA, 20 bp, synthetic construct
  source 1..20: mol_type = other DNA
gtgacccgctttttattctg

SEQ ID NO: 44552 - DNA, 20 bp, synthetic construct
  source 1..20: mol_type = other DNA
ccacggtggaacctgacatg

SEQ ID NO: 44553 - DNA, 20 bp, synthetic construct
  source 1..20: mol_type = other DNA
cagcacgcgcagaacacgca

SEQ ID NO: 44554 - DNA, 20 bp, synthetic construct
  source 1..20: mol_type = other DNA
cttcccaaagtggccctgga

SEQ ID NO: 44555 - DNA, 20 bp, synthetic construct
  source 1..20: mol_type = other DNA
ttgggcagacctggaggaca

SEQ ID NO: 44556 - DNA, 20 bp, synthetic construct
  source 1..20: mol_type = other DNA
ttatgagaacgtccgcgcca

SEQ ID NO: 44557 - DNA, 20 bp, synthetic construct
  source 1..20: mol_type = other DNA
gcagcttgatgtgccggagc

SEQ ID NO: 44558 - DNA, 20 bp, synthetic construct
  source 1..20: mol_type = other DNA
ttcaggtttactcaaaaacg

SEQ ID NO: 44559 - DNA, 20 bp, synthetic construct
  source 1..20: mol_type = other DNA
tgctcagtgcttccccctgg

SEQ ID NO: 44560 - DNA, 20 bp, synthetic construct
  source 1..20: mol_type = other DNA
aagtggaaaatcagtaacgt

SEQ ID NO: 44561 - DNA, 20 bp, synthetic construct
  source 1..20: mol_type = other DNA
gcgccccaggcaccaggtag

SEQ ID NO: 44562 - DNA, 20 bp, synthetic construct
  source 1..20: mol_type = other DNA
taacttcagcagacacaggc

SEQ ID NO: 44563 - DNA, 20 bp, synthetic construct
  source 1..20: mol_type = other DNA
ggaccacgcccctctccagg

SEQ ID NO: 44564 - DNA, 20 bp, synthetic construct
  source 1..20: mol_type = other DNA
acggcaaagcgtgagtacaa

SEQ ID NO: 44565 - DNA, 20 bp, synthetic construct
  source 1..20: mol_type = other DNA
tcttcccatagatgagggac

SEQ ID NO: 44566 - DNA, 20 bp, synthetic construct
  source 1..20: mol_type = other DNA
gcttggcagggttgatatag

SEQ ID NO: 44567 - DNA, 20 bp, synthetic construct
  source 1..20: mol_type = other DNA
acactccacattctcccaca

SEQ ID NO: 44568 - DNA, 20 bp, synthetic construct
  source 1..20: mol_type = other DNA
tggcagggaaccagccaacc

SEQ ID NO: 44569 - DNA, 20 bp, synthetic construct
  source 1..20: mol_type = other DNA
aaactccaccagctcctaga

SEQ ID NO: 44570 - DNA, 20 bp, synthetic construct
  source 1..20: mol_type = other DNA
ccttgcagtggggaagccgg

SEQ ID NO: 44571 - DNA, 20 bp, synthetic construct
  source 1..20: mol_type = other DNA
ccccacgatggaggggaaga

SEQ ID NO: 44572 - DNA, 20 bp, synthetic construct
  source 1..20: mol_type = other DNA
gcaggtatcagccagacaga

SEQ ID NO: 44573 - DNA, 20 bp, synthetic construct
  source 1..20: mol_type = other DNA
cagcagtaccgcgtggtgag

SEQ ID NO: 44574 - DNA, 20 bp, synthetic construct
  source 1..20: mol_type = other DNA
tccccagacgcccctgcacc

SEQ ID NO: 44575 - DNA, 20 bp, synthetic construct
  source 1..20: mol_type = other DNA
gaggcatggctgaaatcttc

SEQ ID NO: 44576 - DNA, 20 bp, synthetic construct
  source 1..20: mol_type = other DNA
cccaagcaggagaacattgc

SEQ ID NO: 44577 - DNA, 20 bp, synthetic construct
  source 1..20: mol_type = other DNA
cggctacttccggctgacca

SEQ ID NO: 44578 - DNA, 20 bp, synthetic construct
  source 1..20: mol_type = other DNA
agtactcgcacgtgtcgctg

SEQ ID NO: 44579 - DNA, 20 bp, synthetic construct
  source 1..20: mol_type = other DNA
tgcgcaggatctgcttcttg

SEQ ID NO: 44580 - DNA, 20 bp, synthetic construct
  source 1..20: mol_type = other DNA
ttatatgctggggagaaaga

SEQ ID NO: 44581 - DNA, 20 bp, synthetic construct
  source 1..20: mol_type = other DNA
acgcgccacatgaagacgca

SEQ ID NO: 44582 - DNA, 20 bp, synthetic construct
  source 1..20: mol_type = other DNA
gacatctcaaagtcattgcc

SEQ ID NO: 44583 - DNA, 20 bp, synthetic construct
  source 1..20: mol_type = other DNA
gtggcgagctacgagaacga

SEQ ID NO: 44584 - DNA, 20 bp, synthetic construct
  source 1..20: mol_type = other DNA
gctcgccggtgtggctccgc

SEQ ID NO: 44585 - DNA, 20 bp, synthetic construct
  source 1..20: mol_type = other DNA
ctgaaggaacttcttgcctt

SEQ ID NO: 44586 - DNA, 20 bp, synthetic construct
  source 1..20: mol_type = other DNA
ccaaggtgagctggacaggg

SEQ ID NO: 44587 - DNA, 20 bp, synthetic construct
  source 1..20: mol_type = other DNA
tcgcaccttgcagatctgcg

SEQ ID NO: 44588 - DNA, 20 bp, synthetic construct
  source 1..20: mol_type = other DNA
tgcggcagtttctggcccct

SEQ ID NO: 44589 - DNA, 20 bp, synthetic construct
  source 1..20: mol_type = other DNA
acaggccactgtagtcctcc

SEQ ID NO: 44590 - DNA, 20 bp, synthetic construct
  source 1..20: mol_type = other DNA
agtgtttgaattctgcagag

SEQ ID NO: 44591 - DNA, 20 bp, synthetic construct
  source 1..20: mol_type = other DNA
gtgagtcggcagcaacatcc

SEQ ID NO: 44592 - DNA, 20 bp, synthetic construct
  source 1..20: mol_type = other DNA
ggatgaatgggacacgctcg

SEQ ID NO: 44593 - DNA, 20 bp, synthetic construct
  source 1..20: mol_type = other DNA
aaatacgtgaacaaggccaa

SEQ ID NO: 44594 - DNA, 20 bp, synthetic construct
  source 1..20: mol_type = other DNA
agcactcaccagatagttga

SEQ ID NO: 44595 - DNA, 20 bp, synthetic construct
  source 1..20: mol_type = other DNA
gttctccactgtgcactctc

SEQ ID NO: 44596 - DNA, 20 bp, synthetic construct
  source 1..20: mol_type = other DNA
ccagctgctcgtcggagaag

SEQ ID NO: 44597 - DNA, 20 bp, synthetic construct
  source 1..20: mol_type = other DNA
ctggccgatcttctggtctc

SEQ ID NO: 44598 - DNA, 20 bp, synthetic construct
  source 1..20: mol_type = other DNA
tattccttaaggcttcccga

SEQ ID NO: 44599 - DNA, 20 bp, synthetic construct
  source 1..20: mol_type = other DNA
gactcaccgtctgtccggcc

SEQ ID NO: 44600 - DNA, 20 bp, synthetic construct
  source 1..20: mol_type = other DNA
gtctcccaagcggtcggcta

SEQ ID NO: 44601 - DNA, 20 bp, synthetic construct
  source 1..20: mol_type = other DNA
taccagcatcacatgggtag

SEQ ID NO: 44602 - DNA, 20 bp, synthetic construct
  source 1..20: mol_type = other DNA
atactttgaagatcgtcatg

SEQ ID NO: 44603 - DNA, 20 bp, synthetic construct
  source 1..20: mol_type = other DNA
acctcaatagagatggcaca

SEQ ID NO: 44604 - DNA, 20 bp, synthetic construct
  source 1..20: mol_type = other DNA
atgcagatccggcactggaa

SEQ ID NO: 44605 - DNA, 20 bp, synthetic construct
  source 1..20: mol_type = other DNA
acgaaggtgaggaagatgga

SEQ ID NO: 44606 - DNA, 20 bp, synthetic construct
  source 1..20: mol_type = other DNA
cctcaccatattcctgaagt

SEQ ID NO: 44607 - DNA, 20 bp, synthetic construct
  source 1..20: mol_type = other DNA
cagttctcacacactgtggg

SEQ ID NO: 44608 - DNA, 20 bp, synthetic construct
  source 1..20: mol_type = other DNA
gtcatcaaggtgtctgactt

SEQ ID NO: 44609 - DNA, 20 bp, synthetic construct
  source 1..20: mol_type = other DNA
agcagtgcacgcagcagctc

SEQ ID NO: 44610 - DNA, 20 bp, synthetic construct
  source 1..20: mol_type = other DNA
ccatgatgtacctggagcca

SEQ ID NO: 44611 - DNA, 20 bp, synthetic construct
  source 1..20: mol_type = other DNA
cttccaggaatgactgggga

SEQ ID NO: 44612 - DNA, 20 bp, synthetic construct
  source 1..20: mol_type = other DNA
gcaccaagtgctccaaacag

SEQ ID NO: 44613 - DNA, 20 bp, synthetic construct
  source 1..20: mol_type = other DNA
ggagagggtgaactcctcaa

SEQ ID NO: 44614 - DNA, 20 bp, synthetic construct
  source 1..20: mol_type = other DNA
cggagacacgtaggcaacag

SEQ ID NO: 44615 - DNA, 20 bp, synthetic construct
  source 1..20: mol_type = other DNA
aggcatggctgaaatcttcc

SEQ ID NO: 44616 - DNA, 20 bp, synthetic construct
  source 1..20: mol_type = other DNA
cacccggatgaagagcacga

SEQ ID NO: 44617 - DNA, 20 bp, synthetic construct
  source 1..20: mol_type = other DNA
catcaggtaaagcttcccac

SEQ ID NO: 44618 - DNA, 20 bp, synthetic construct
  source 1..20: mol_type = other DNA
cagaggctgctcaactcggg

SEQ ID NO: 44619 - DNA, 20 bp, synthetic construct
  source 1..20: mol_type = other DNA
ctatgagtcccccaatgagg

SEQ ID NO: 44620 - DNA, 20 bp, synthetic construct
  source 1..20: mol_type = other DNA
tggcccagtcaatcaaaggt

SEQ ID NO: 44621 - DNA, 20 bp, synthetic construct
  source 1..20: mol_type = other DNA
tgctgagcgggcctggggag

SEQ ID NO: 44622 - DNA, 20 bp, synthetic construct
  source 1..20: mol_type = other DNA
gggcccagggcgctgaatga

SEQ ID NO: 44623 - DNA, 20 bp, synthetic construct
  source 1..20: mol_type = other DNA
cccgcagcacttgtcccaga

SEQ ID NO: 44624 - DNA, 20 bp, synthetic construct
  source 1..20: mol_type = other DNA
ttccacagagtgggttaaag

SEQ ID NO: 44625 - DNA, 20 bp, synthetic construct
  source 1..20: mol_type = other DNA
cgacctcaccgtccatggcc

SEQ ID NO: 44626 - DNA, 20 bp, synthetic construct
  source 1..20: mol_type = other DNA
gttacctttcacatggataa

SEQ ID NO: 44627 - DNA, 20 bp, synthetic construct
  source 1..20: mol_type = other DNA
tcaacaaattaagaaactgg

SEQ ID NO: 44628 - DNA, 20 bp, synthetic construct
  source 1..20: mol_type = other DNA
gaaggcgcagtccctgacca

SEQ ID NO: 44629 - DNA, 20 bp, synthetic construct
  source 1..20: mol_type = other DNA
tgttttgaaggtaggtgacc

SEQ ID NO: 44630 - DNA, 20 bp, synthetic construct
  source 1..20: mol_type = other DNA
tacaccaccaacgcctttcc

SEQ ID NO: 44631 - DNA, 20 bp, synthetic construct
  source 1..20: mol_type = other DNA
cacggtggggatgtactctc

SEQ ID NO: 44632 - DNA, 20 bp, synthetic construct
  source 1..20: mol_type = other DNA
gcccagcaggagcgcaggga

SEQ ID NO: 44633 - DNA, 20 bp, synthetic construct
  source 1..20: mol_type = other DNA
gcatttgcggtggacgatgg

SEQ ID NO: 44634 - DNA, 20 bp, synthetic construct
  source 1..20: mol_type = other DNA
atcgagggctgcaagacagg

SEQ ID NO: 44635 - DNA, 20 bp, synthetic construct
  source 1..20: mol_type = other DNA
agggagatgcgcactgtccc

SEQ ID NO: 44636 - DNA, 20 bp, synthetic construct
  source 1..20: mol_type = other DNA
gacctacccggagtgcccgc

SEQ ID NO: 44637 - DNA, 20 bp, synthetic construct
  source 1..20: mol_type = other DNA
tccagtgcgctcctgtgttg

SEQ ID NO: 44638 - DNA, 20 bp, synthetic construct
  source 1..20: mol_type = other DNA
cctggttctggtcgaagtcc

SEQ ID NO: 44639 - DNA, 20 bp, synthetic construct
  source 1..20: mol_type = other DNA
tcacctggaactggcagagc

SEQ ID NO: 44640 - DNA, 20 bp, synthetic construct
  source 1..20: mol_type = other DNA
actgtggcggcgagatggca

SEQ ID NO: 44641 - DNA, 20 bp, synthetic construct
  source 1..20: mol_type = other DNA
agtgcatcagctccttggtc

SEQ ID NO: 44642 - DNA, 20 bp, synthetic construct
  source 1..20: mol_type = other DNA
accaggcggtgctctccggc

SEQ ID NO: 44643 - DNA, 20 bp, synthetic construct
  source 1..20: mol_type = other DNA
gtagtcccctcgccacctgt

SEQ ID NO: 44644 - DNA, 20 bp, synthetic construct
  source 1..20: mol_type = other DNA
gctcatccgaaatggctctg

SEQ ID NO: 44645 - DNA, 20 bp, synthetic construct
  source 1..20: mol_type = other DNA
gccttgcagattaagtacac

SEQ ID NO: 44646 - DNA, 20 bp, synthetic construct
  source 1..20: mol_type = other DNA
cgtctgggcggtgctacaac

SEQ ID NO: 44647 - DNA, 20 bp, synthetic construct
  source 1..20: mol_type = other DNA
aaggcgcagtccctgaccac

SEQ ID NO: 44648 - DNA, 20 bp, synthetic construct
  source 1..20: mol_type = other DNA
tcagtgcctttgtggtggag

SEQ ID NO: 44649 - DNA, 20 bp, synthetic construct
  source 1..20: mol_type = other DNA
cacggtaagaggcgagacag

SEQ ID NO: 44650 - DNA, 20 bp, synthetic construct
  source 1..20: mol_type = other DNA
ctcaccagccaatatagcac

SEQ ID NO: 44651 - DNA, 20 bp, synthetic construct
  source 1..20: mol_type = other DNA
gaaacacacgcaggaggcga

SEQ ID NO: 44652 - DNA, 20 bp, synthetic construct
  source 1..20: mol_type = other DNA
acttaccaggtgcagggtgt

SEQ ID NO: 44653 - DNA, 20 bp, synthetic construct
  source 1..20: mol_type = other DNA
tggctggctcaggggtgggt

SEQ ID NO: 44654 - DNA, 20 bp, synthetic construct
  source 1..20: mol_type = other DNA
caggtgaacacataggcctc

SEQ ID NO: 44655 - DNA, 20 bp, synthetic construct
  source 1..20: mol_type = other DNA
cgatgatcaggatatctaca

SEQ ID NO: 44656 - DNA, 20 bp, synthetic construct
  source 1..20: mol_type = other DNA
ccctgaaaaacaaaatagag

SEQ ID NO: 44657 - DNA, 20 bp, synthetic construct
  source 1..20: mol_type = other DNA
tgactatcaagaagatggtt

SEQ ID NO: 44658 - DNA, 20 bp, synthetic construct
  source 1..20: mol_type = other DNA
ggagcggtactacaagatga

SEQ ID NO: 44659 - DNA, 20 bp, synthetic construct
  source 1..20: mol_type = other DNA
gcgggacttggggtctgcaa

SEQ ID NO: 44660 - DNA, 20 bp, synthetic construct
  source 1..20: mol_type = other DNA
tgtggaacagctgaggggag

SEQ ID NO: 44661 - DNA, 20 bp, synthetic construct
  source 1..20: mol_type = other DNA
ctacaggacccaccgacccc

SEQ ID NO: 44662 - DNA, 20 bp, synthetic construct
  source 1..20: mol_type = other DNA
ccaggtcctccttctcctcc

SEQ ID NO: 44663 - DNA, 20 bp, synthetic construct
  source 1..20: mol_type = other DNA
tcatcagcaccttcatgtgg

SEQ ID NO: 44664 - DNA, 20 bp, synthetic construct
  source 1..20: mol_type = other DNA
gagcagcttctgcctctggt

SEQ ID NO: 44665 - DNA, 20 bp, synthetic construct
  source 1..20: mol_type = other DNA
ccacgtagttggcagggaag

SEQ ID NO: 44666 - DNA, 20 bp, synthetic construct
  source 1..20: mol_type = other DNA
gccgctctcctatccacaga

SEQ ID NO: 44667 - DNA, 20 bp, synthetic construct
  source 1..20: mol_type = other DNA
gatgcggagagtaagggcat

SEQ ID NO: 44668 - DNA, 20 bp, synthetic construct
  source 1..20: mol_type = other DNA
cggaccagttcatgcaggcc

SEQ ID NO: 44669 - DNA, 20 bp, synthetic construct
  source 1..20: mol_type = other DNA
gccacatatgtgctgggcat

SEQ ID NO: 44670 - DNA, 20 bp, synthetic construct
  source 1..20: mol_type = other DNA
ccaggcggtgctctccggcc

SEQ ID NO: 44671 - DNA, 20 bp, synthetic construct
  source 1..20: mol_type = other DNA
gcacgggcagatcggcaagg

SEQ ID NO: 44672 - DNA, 20 bp, synthetic construct
  source 1..20: mol_type = other DNA
tccagtttgtatattggtac

SEQ ID NO: 44673 - DNA, 20 bp, synthetic construct
  source 1..20: mol_type = other DNA
gagggcatacccctcgtaga

SEQ ID NO: 44674 - DNA, 20 bp, synthetic construct
  source 1..20: mol_type = other DNA
aacctgaagaacagaaagaa

SEQ ID NO: 44675 - DNA, 20 bp, synthetic construct
  source 1..20: mol_type = other DNA
agcacacccatcatcctggt

SEQ ID NO: 44676 - DNA, 20 bp, synthetic construct
  source 1..20: mol_type = other DNA
atatcatcctaatttctgga

SEQ ID NO: 44677 - DNA, 20 bp, synthetic construct
  source 1..20: mol_type = other DNA
gaggacaaaggcctgcccca

SEQ ID NO: 44678 - DNA, 20 bp, synthetic construct
  source 1..20: mol_type = other DNA
caggagctatgaaaaggaca

SEQ ID NO: 44679 - DNA, 20 bp, synthetic construct
  source 1..20: mol_type = other DNA
cctccagctcggacagcatg

SEQ ID NO: 44680 - DNA, 20 bp, synthetic construct
  source 1..20: mol_type = other DNA
caatatgatccaaccaagaa

SEQ ID NO: 44681 - DNA, 20 bp, synthetic construct
  source 1..20: mol_type = other DNA
ccagtggccgctcaggtagg

SEQ ID NO: 44682 - DNA, 20 bp, synthetic construct
  source 1..20: mol_type = other DNA
ctcacatgatccccctgttc

SEQ ID NO: 44683 - DNA, 20 bp, synthetic construct
  source 1..20: mol_type = other DNA
ctgcaggagctccttcttct

SEQ ID NO: 44684 - DNA, 20 bp, synthetic construct
  source 1..20: mol_type = other DNA
gcagggactggaaggggaaa

SEQ ID NO: 44685 - DNA, 20 bp, synthetic construct
  source 1..20: mol_type = other DNA
gccctgtacccctgtgctgg

SEQ ID NO: 44686 - DNA, 20 bp, synthetic construct
  source 1..20: mol_type = other DNA
cccatggcaatgtctctgcc

SEQ ID NO: 44687 - DNA, 20 bp, synthetic construct
  source 1..20: mol_type = other DNA
gctgtaggggcaaccagaac

SEQ ID NO: 44688 - DNA, 20 bp, synthetic construct
  source 1..20: mol_type = other DNA
tgggtcttcaggacctgagg

SEQ ID NO: 44689 - DNA, 20 bp, synthetic construct
  source 1..20: mol_type = other DNA
acttccacatgagcgtggtc

SEQ ID NO: 44690 - DNA, 20 bp, synthetic construct
  source 1..20: mol_type = other DNA
acaggaaaacccaaaaggtc

SEQ ID NO: 44691 - DNA, 20 bp, synthetic construct
  source 1..20: mol_type = other DNA
gccacatgctggaaggaaga

SEQ ID NO: 44692 - DNA, 20 bp, synthetic construct
  source 1..20: mol_type = other DNA
gtgtcaaacttggtgccctc

SEQ ID NO: 44693 - DNA, 20 bp, synthetic construct
  source 1..20: mol_type = other DNA
ctcacctcagcagggcaggc

SEQ ID NO: 44694 - DNA, 20 bp, synthetic construct
  source 1..20: mol_type = other DNA
gtggggactgcaggtgggag

SEQ ID NO: 44695 - DNA, 20 bp, synthetic construct
  source 1..20: mol_type = other DNA
ccttcgtgaaaccatctgtg

SEQ ID NO: 44696 - DNA, 20 bp, synthetic construct
  source 1..20: mol_type = other DNA
caaggtgctgaagcagggca

SEQ ID NO: 44697 - DNA, 20 bp, synthetic construct
  source 1..20: mol_type = other DNA
tgtacagcaccggccgatgc

SEQ ID NO: 44698 - DNA, 20 bp, synthetic construct
  source 1..20: mol_type = other DNA
accaggagaatttaccagga

SEQ ID NO: 44699 - DNA, 20 bp, synthetic construct
  source 1..20: mol_type = other DNA
gtatgactttgaggccctgg

SEQ ID NO: 44700 - DNA, 20 bp, synthetic construct
  source 1..20: mol_type = other DNA
tcttcaaggtctccggcctc

SEQ ID NO: 44701 - DNA, 20 bp, synthetic construct
  source 1..20: mol_type = other DNA
tacgggtgatgagctccctc

SEQ ID NO: 44702 - DNA, 20 bp, synthetic construct
  source 1..20: mol_type = other DNA
tgtctctcctcgaagatcgt

SEQ ID NO: 44703 - DNA, 20 bp, synthetic construct
  source 1..20: mol_type = other DNA
tggaaaggtaccccagtgaa

SEQ ID NO: 44704 - DNA, 20 bp, synthetic construct
  source 1..20: mol_type = other DNA
acggagaagatgtggctcgg

SEQ ID NO: 44705 - DNA, 20 bp, synthetic construct
  source 1..20: mol_type = other DNA
acagtgccatcaacatggcc

SEQ ID NO: 44706 - DNA, 20 bp, synthetic construct
  source 1..20: mol_type = other DNA
cagatgaggtaaggaaggag

SEQ ID NO: 44707 - DNA, 20 bp, synthetic construct
  source 1..20: mol_type = other DNA
ccgttgtagtaccctgggtc

SEQ ID NO: 44708 - DNA, 20 bp, synthetic construct
  source 1..20: mol_type = other DNA
ccacactcacgtgttgtgcg

SEQ ID NO: 44709 - DNA, 20 bp, synthetic construct
  source 1..20: mol_type = other DNA
gggggctggacagttcgggg

SEQ ID NO: 44710 - DNA, 20 bp, synthetic construct
  source 1..20: mol_type = other DNA
gtcaccagtttgtacagttc

SEQ ID NO: 44711 - DNA, 20 bp, synthetic construct
  source 1..20: mol_type = other DNA
ctactcacgattgtcaaaga

SEQ ID NO: 44712 - DNA, 20 bp, synthetic construct
  source 1..20: mol_type = other DNA
gcgtggtaccacctgagaac

SEQ ID NO: 44713 - DNA, 20 bp, synthetic construct
  source 1..20: mol_type = other DNA
caccttgatcttcattgtgc

SEQ ID NO: 44714 - DNA, 20 bp, synthetic construct
  source 1..20: mol_type = other DNA
gacctgtataaccaaaccaa

SEQ ID NO: 44715 - DNA, 20 bp, synthetic construct
  source 1..20: mol_type = other DNA
ccaaaagggcttagaaggtc

SEQ ID NO: 44716 - DNA, 20 bp, synthetic construct
  source 1..20: mol_type = other DNA
aacacaaaacactgaacctc

SEQ ID NO: 44717 - DNA, 20 bp, synthetic construct
  source 1..20: mol_type = other DNA
cttcaggtgcccgctgggac

SEQ ID NO: 44718 - DNA, 20 bp, synthetic construct
  source 1..20: mol_type = other DNA
gtgattcttcccacaggcac

SEQ ID NO: 44719 - DNA, 20 bp, synthetic construct
  source 1..20: mol_type = other DNA
gctgtatgactttgaggccc

SEQ ID NO: 44720 - DNA, 20 bp, synthetic construct
  source 1..20: mol_type = other DNA
atcctcaggaactcgcactg

SEQ ID NO: 44721 - DNA, 20 bp, synthetic construct
  source 1..20: mol_type = other DNA
ggaacctacagggagaagac

SEQ ID NO: 44722 - DNA, 20 bp, synthetic construct
  source 1..20: mol_type = other DNA
ggctttagctcatgtggaag

SEQ ID NO: 44723 - DNA, 20 bp, synthetic construct
  source 1..20: mol_type = other DNA
tgatgatggtggccttcacc

SEQ ID NO: 44724 - DNA, 20 bp, synthetic construct
  source 1..20: mol_type = other DNA
gagaacactgctccaggtct

SEQ ID NO: 44725 - DNA, 20 bp, synthetic construct
  source 1..20: mol_type = other DNA
gctatgaaaaggacagggag

SEQ ID NO: 44726 - DNA, 20 bp, synthetic construct
  source 1..20: mol_type = other DNA
gagagagtgggcaggtacag

SEQ ID NO: 44727 - DNA, 20 bp, synthetic construct
  source 1..20: mol_type = other DNA
ctcgcagcgttgcaggtcct

SEQ ID NO: 44728 - DNA, 20 bp, synthetic construct
  source 1..20: mol_type = other DNA
accccactgtggcggcgaga

SEQ ID NO: 44729 - DNA, 20 bp, synthetic construct
  source 1..20: mol_type = other DNA
ctcttctcattgtctaggta

SEQ ID NO: 44730 - DNA, 20 bp, synthetic construct
  source 1..20: mol_type = other DNA
cccgccatggctccgacgct

SEQ ID NO: 44731 - DNA, 20 bp, synthetic construct
  source 1..20: mol_type = other DNA
cctcctcactgtctgtgtcc

SEQ ID NO: 44732 - DNA, 20 bp, synthetic construct
  source 1..20: mol_type = other DNA
gaggagcaatgatctgagga

SEQ ID NO: 44733 - DNA, 20 bp, synthetic construct
  source 1..20: mol_type = other DNA
ctcactggagaactggtccc

SEQ ID NO: 44734 - DNA, 20 bp, synthetic construct
  source 1..20: mol_type = other DNA
cgcggcatcttcccgccctg

SEQ ID NO: 44735 - DNA, 20 bp, synthetic construct
  source 1..20: mol_type = other DNA
cacacccacctggagctgtg

SEQ ID NO: 44736 - DNA, 20 bp, synthetic construct
  source 1..20: mol_type = other DNA
gacaaaaagaggaatgagct

SEQ ID NO: 44737 - DNA, 20 bp, synthetic construct
  source 1..20: mol_type = other DNA
cgtggagcagcacgagatgc

SEQ ID NO: 44738 - DNA, 20 bp, synthetic construct
  source 1..20: mol_type = other DNA
catgcctgagagggaaatga

SEQ ID NO: 44739 - DNA, 20 bp, synthetic construct
  source 1..20: mol_type = other DNA
cggagaagatgtggctcggg

SEQ ID NO: 44740 - DNA, 20 bp, synthetic construct
  source 1..20: mol_type = other DNA
ggcgccctggccagtcgtct

SEQ ID NO: 44741 - DNA, 20 bp, synthetic construct
  source 1..20: mol_type = other DNA
gactaccagggggtatggct

SEQ ID NO: 44742 - DNA, 20 bp, synthetic construct
  source 1..20: mol_type = other DNA
gcaccatcagcaggtcccgc

SEQ ID NO: 44743 - DNA, 20 bp, synthetic construct
  source 1..20: mol_type = other DNA
ttgtcaaacctgtggggagc

SEQ ID NO: 44744 - DNA, 20 bp, synthetic construct
  source 1..20: mol_type = other DNA
actgcgcaggtagtcaaagg

SEQ ID NO: 44745 - DNA, 20 bp, synthetic construct
  source 1..20: mol_type = other DNA
agcagcccttcaacagcgcg

SEQ ID NO: 44746 - DNA, 20 bp, synthetic construct
  source 1..20: mol_type = other DNA
ggagagctggccgaaagtct

SEQ ID NO: 44747 - DNA, 20 bp, synthetic construct
  source 1..20: mol_type = other DNA
actcgcacgtgtcgctgcgg

SEQ ID NO: 44748 - DNA, 20 bp, synthetic construct
  source 1..20: mol_type = other DNA
tcaaggagaggggttgcatc

SEQ ID NO: 44749 - DNA, 20 bp, synthetic construct
  source 1..20: mol_type = other DNA
ccccatcgtgctcttcatcc

SEQ ID NO: 44750 - DNA, 20 bp, synthetic construct
  source 1..20: mol_type = other DNA
gcagcccaagtaaggagact

SEQ ID NO: 44751 - DNA, 20 bp, synthetic construct
  source 1..20: mol_type = other DNA
ggcagaggagctgcgagaca

SEQ ID NO: 44752 - DNA, 20 bp, synthetic construct
  source 1..20: mol_type = other DNA
gagctgcaaagagaagggga

SEQ ID NO: 44753 - DNA, 20 bp, synthetic construct
  source 1..20: mol_type = other DNA
ccaggccgaggccctcatgc

SEQ ID NO: 44754 - DNA, 20 bp, synthetic construct
  source 1..20: mol_type = other DNA
acgaagaggacaatgggggc

SEQ ID NO: 44755 - DNA, 20 bp, synthetic construct
  source 1..20: mol_type = other DNA
ccgaagcaactcagaggtgg

SEQ ID NO: 44756 - DNA, 20 bp, synthetic construct
  source 1..20: mol_type = other DNA
tgctggtcagaacaaagtag

SEQ ID NO: 44757 - DNA, 20 bp, synthetic construct
  source 1..20: mol_type = other DNA
ccgcaggtttcgggaggccc

SEQ ID NO: 44758 - DNA, 20 bp, synthetic construct
  source 1..20: mol_type = other DNA
atagatagtggctgcacttc

SEQ ID NO: 44759 - DNA, 20 bp, synthetic construct
  source 1..20: mol_type = other DNA
gctgtgtacctgtatctggc

SEQ ID NO: 44760 - DNA, 20 bp, synthetic construct
  source 1..20: mol_type = other DNA
aatgctgcagtggtcctcaa

SEQ ID NO: 44761 - DNA, 20 bp, synthetic construct
  source 1..20: mol_type = other DNA
aggactctacctgtttgcca

SEQ ID NO: 44762 - DNA, 20 bp, synthetic construct
  source 1..20: mol_type = other DNA
acttactctggaagctctct

SEQ ID NO: 44763 - DNA, 20 bp, synthetic construct
  source 1..20: mol_type = other DNA
ccttacccaggttagagcca

SEQ ID NO: 44764 - DNA, 20 bp, synthetic construct
  source 1..20: mol_type = other DNA
gcaggccccatggagcgggc

SEQ ID NO: 44765 - DNA, 20 bp, synthetic construct
  source 1..20: mol_type = other DNA
cccagatctccgtcgtgaga

SEQ ID NO: 44766 - DNA, 20 bp, synthetic construct
  source 1..20: mol_type = other DNA
gaagaagcgggacctggagc

SEQ ID NO: 44767 - DNA, 20 bp, synthetic construct
  source 1..20: mol_type = other DNA
gaagggccgttctcctggga

SEQ ID NO: 44768 - DNA, 20 bp, synthetic construct
  source 1..20: mol_type = other DNA
gtcaaatgaacttccccttg

SEQ ID NO: 44769 - DNA, 20 bp, synthetic construct
  source 1..20: mol_type = other DNA
tcttctgcagctcctgcacc

SEQ ID NO: 44770 - DNA, 20 bp, synthetic construct
  source 1..20: mol_type = other DNA
cccctgtattgtccccttcg

SEQ ID NO: 44771 - DNA, 20 bp, synthetic construct
  source 1..20: mol_type = other DNA
gtccaactgccccgagatgt

SEQ ID NO: 44772 - DNA, 20 bp, synthetic construct
  source 1..20: mol_type = other DNA
gagacagctggacttcaaag

SEQ ID NO: 44773 - DNA, 20 bp, synthetic construct
  source 1..20: mol_type = other DNA
ttccaggtgactctatgctt

SEQ ID NO: 44774 - DNA, 20 bp, synthetic construct
  source 1..20: mol_type = other DNA
ctctcaatctgcaggggtgt

SEQ ID NO: 44775 - DNA, 20 bp, synthetic construct
  source 1..20: mol_type = other DNA
cagagtgaggttggtaggct

SEQ ID NO: 44776 - DNA, 20 bp, synthetic construct
  source 1..20: mol_type = other DNA
ttctcggcaatacgttcacc

SEQ ID NO: 44777 - DNA, 20 bp, synthetic construct
  source 1..20: mol_type = other DNA
aaacacatgaaaaagtggca

SEQ ID NO: 44778 - DNA, 20 bp, synthetic construct
  source 1..20: mol_type = other DNA
cacgcacctggacagctgac

SEQ ID NO: 44779 - DNA, 20 bp, synthetic construct
  source 1..20: mol_type = other DNA
tgactacggggccctgtatg

SEQ ID NO: 44780 - DNA, 20 bp, synthetic construct
  source 1..20: mol_type = other DNA
cctacaggagagcgaagacc

SEQ ID NO: 44781 - DNA, 20 bp, synthetic construct
  source 1..20: mol_type = other DNA
tccctccagcttcggtcgag

SEQ ID NO: 44782 - DNA, 20 bp, synthetic construct
  source 1..20: mol_type = other DNA
tcaccagtttgtacagttct

SEQ ID NO: 44783 - DNA, 20 bp, synthetic construct
  source 1..20: mol_type = other DNA
tcaacaagaacgaagagagg

SEQ ID NO: 44784 - DNA, 20 bp, synthetic construct
  source 1..20: mol_type = other DNA
ctctctccagtttgttgggc

SEQ ID NO: 44785 - DNA, 20 bp, synthetic construct
  source 1..20: mol_type = other DNA
caggcagaagatgcagcagc

SEQ ID NO: 44786 - DNA, 20 bp, synthetic construct
  source 1..20: mol_type = other DNA
acagttcggggaggtgtgga

SEQ ID NO: 44787 - DNA, 20 bp, synthetic construct
  source 1..20: mol_type = other DNA
atgttggagatcaccacaac

SEQ ID NO: 44788 - DNA, 20 bp, synthetic construct
  source 1..20: mol_type = other DNA
agtacatcatggacctggag

SEQ ID NO: 44789 - DNA, 20 bp, synthetic construct
  source 1..20: mol_type = other DNA
cggccagctctccaatctga

SEQ ID NO: 44790 - DNA, 20 bp, synthetic construct
  source 1..20: mol_type = other DNA
gtcatggagatggctggggg

SEQ ID NO: 44791 - DNA, 20 bp, synthetic construct
  source 1..20: mol_type = other DNA
gatggaggaggaatggacca

SEQ ID NO: 44792 - DNA, 20 bp, synthetic construct
  source 1..20: mol_type = other DNA
aggaggggatgtacgtgctg

SEQ ID NO: 44793 - DNA, 20 bp, synthetic construct
  source 1..20: mol_type = other DNA
gttgcagaggtggcatttga

SEQ ID NO: 44794 - DNA, 20 bp, synthetic construct
  source 1..20: mol_type = other DNA
ctccaccattgccacctgcg

SEQ ID NO: 44795 - DNA, 20 bp, synthetic construct
  source 1..20: mol_type = other DNA
tgtaccaggacaggcacgag

SEQ ID NO: 44796 - DNA, 20 bp, synthetic construct
  source 1..20: mol_type = other DNA
cacaatagccagcacaggag

SEQ ID NO: 44797 - DNA, 20 bp, synthetic construct
  source 1..20: mol_type = other DNA
cggaaggagggcctctggac

SEQ ID NO: 44798 - DNA, 20 bp, synthetic construct
  source 1..20: mol_type = other DNA
gcaaggtgaccccaggcagc

SEQ ID NO: 44799 - DNA, 20 bp, synthetic construct
  source 1..20: mol_type = other DNA
gtaggtacctgtttattcag

SEQ ID NO: 44800 - DNA, 20 bp, synthetic construct
  source 1..20: mol_type = other DNA
gatacctcatctggacagtt

SEQ ID NO: 44801 - DNA, 20 bp, synthetic construct
  source 1..20: mol_type = other DNA
gctgctccagctgctcctgc

SEQ ID NO: 44802 - DNA, 20 bp, synthetic construct
  source 1..20: mol_type = other DNA
ggtgccgctgtcattgcgcc

SEQ ID NO: 44803 - DNA, 20 bp, synthetic construct
  source 1..20: mol_type = other DNA
actccagtgagctggcatca

SEQ ID NO: 44804 - DNA, 20 bp, synthetic construct
  source 1..20: mol_type = other DNA
ctgtatgagggacgcaaccc

SEQ ID NO: 44805 - DNA, 20 bp, synthetic construct
  source 1..20: mol_type = other DNA
ggagagtccaggacaggaat

SEQ ID NO: 44806 - DNA, 20 bp, synthetic construct
  source 1..20: mol_type = other DNA
cgagggatgtatcagtgtaa

SEQ ID NO: 44807 - DNA, 20 bp, synthetic construct
  source 1..20: mol_type = other DNA
agtgtacaggattgttcctg

SEQ ID NO: 44808 - DNA, 20 bp, synthetic construct
  source 1..20: mol_type = other DNA
gcagtccatcatccaggtga

SEQ ID NO: 44809 - DNA, 20 bp, synthetic construct
  source 1..20: mol_type = other DNA
agcaatgatctgaggaggga

SEQ ID NO: 44810 - DNA, 20 bp, synthetic construct
  source 1..20: mol_type = other DNA
gtcctggtcccagttcaaca

SEQ ID NO: 44811 - DNA, 20 bp, synthetic construct
  source 1..20: mol_type = other DNA
gactacggggccctgtatga

SEQ ID NO: 44812 - DNA, 20 bp, synthetic construct
  source 1..20: mol_type = other DNA
agcaggttctggaactggag

SEQ ID NO: 44813 - DNA, 20 bp, synthetic construct
  source 1..20: mol_type = other DNA
atagttgatgagaagaggga

SEQ ID NO: 44814 - DNA, 20 bp, synthetic construct
  source 1..20: mol_type = other DNA
atccagcaggtagcagagtt

SEQ ID NO: 44815 - DNA, 20 bp, synthetic construct
  source 1..20: mol_type = other DNA
caaaagggcttagaaggtcc

SEQ ID NO: 44816 - DNA, 20 bp, synthetic construct
  source 1..20: mol_type = other DNA
aagctttacctgatgtcctt

SEQ ID NO: 44817 - DNA, 20 bp, synthetic construct
  source 1..20: mol_type = other DNA
acagctgacaggctcgacac

SEQ ID NO: 44818 - DNA, 20 bp, synthetic construct
  source 1..20: mol_type = other DNA
attgagcagcccaagcagcg

SEQ ID NO: 44819 - DNA, 20 bp, synthetic construct
  source 1..20: mol_type = other DNA
ccagctgcacaagccgctcg

SEQ ID NO: 44820 - DNA, 20 bp, synthetic construct
  source 1..20: mol_type = other DNA
gcgaggaatagagaaggagg

SEQ ID NO: 44821 - DNA, 20 bp, synthetic construct
  source 1..20: mol_type = other DNA
caggaacacgaggttctcct

SEQ ID NO: 44822 - DNA, 20 bp, synthetic construct
  source 1..20: mol_type = other DNA
acagtggaggaaggccacga

SEQ ID NO: 44823 - DNA, 20 bp, synthetic construct
  source 1..20: mol_type = other DNA
ctgggaaccactgggcaggt

SEQ ID NO: 44824 - DNA, 20 bp, synthetic construct
  source 1..20: mol_type = other DNA
gcagctcgtagctcttctcc

SEQ ID NO: 44825 - DNA, 20 bp, synthetic construct
  source 1..20: mol_type = other DNA
ggactctacctgtttgccag

SEQ ID NO: 44826 - DNA, 20 bp, synthetic construct
  source 1..20: mol_type = other DNA
acctcatccaggaagaagta

SEQ ID NO: 44827 - DNA, 20 bp, synthetic construct
  source 1..20: mol_type = other DNA
cagccagcttcttgtgctgt

SEQ ID NO: 44828 - DNA, 20 bp, synthetic construct
  source 1..20: mol_type = other DNA
ggaagcctacagtaacgaga

SEQ ID NO: 44829 - DNA, 20 bp, synthetic construct
  source 1..20: mol_type = other DNA
atgagtgcgtacagttcggg

SEQ ID NO: 44830 - DNA, 20 bp, synthetic construct
  source 1..20: mol_type = other DNA
ggttttccagctctcacgga

SEQ ID NO: 44831 - DNA, 20 bp, synthetic construct
  source 1..20: mol_type = other DNA
gcaggtttcgggaggcccag

SEQ ID NO: 44832 - DNA, 20 bp, synthetic construct
  source 1..20: mol_type = other DNA
tttgcggcgggacattgccc

SEQ ID NO: 44833 - DNA, 20 bp, synthetic construct
  source 1..20: mol_type = other DNA
ttaccagtagcagactcgca

SEQ ID NO: 44834 - DNA, 20 bp, synthetic construct
  source 1..20: mol_type = other DNA
ataatccgcgtcatcttcca

SEQ ID NO: 44835 - DNA, 20 bp, synthetic construct
  source 1..20: mol_type = other DNA
tggaccagatgcggagagta

SEQ ID NO: 44836 - DNA, 20 bp, synthetic construct
  source 1..20: mol_type = other DNA
ggtcgtgttccaagatgtcc

SEQ ID NO: 44837 - DNA, 20 bp, synthetic construct
  source 1..20: mol_type = other DNA
gctgctgcaccaggtgtcca

SEQ ID NO: 44838 - DNA, 20 bp, synthetic construct
  source 1..20: mol_type = other DNA
ctcaccttcttcgcaggaat

SEQ ID NO: 44839 - DNA, 20 bp, synthetic construct
  source 1..20: mol_type = other DNA
tcttgaagaaccagctgtgc

SEQ ID NO: 44840 - DNA, 20 bp, synthetic construct
  source 1..20: mol_type = other DNA
tagaagatcacttccacccc

SEQ ID NO: 44841 - DNA, 20 bp, synthetic construct
  source 1..20: mol_type = other DNA
ccacagactgccaggtgagt

SEQ ID NO: 44842 - DNA, 20 bp, synthetic construct
  source 1..20: mol_type = other DNA
aagaaggcggagcaccaggt

SEQ ID NO: 44843 - DNA, 20 bp, synthetic construct
  source 1..20: mol_type = other DNA
accctgagggagcagagatg

SEQ ID NO: 44844 - DNA, 20 bp, synthetic construct
  source 1..20: mol_type = other DNA
tacgccaagatcagcgactt

SEQ ID NO: 44845 - DNA, 20 bp, synthetic construct
  source 1..20: mol_type = other DNA
caggtgccaggcacatctct

SEQ ID NO: 44846 - DNA, 20 bp, synthetic construct
  source 1..20: mol_type = other DNA
tggtcaacttgatgcctgaa

SEQ ID NO: 44847 - DNA, 20 bp, synthetic construct
  source 1..20: mol_type = other DNA
ttgggccatgtttctctgct

SEQ ID NO: 44848 - DNA, 20 bp, synthetic construct
  source 1..20: mol_type = other DNA
tacagtcctggtaatggtgt

SEQ ID NO: 44849 - DNA, 20 bp, synthetic construct
  source 1..20: mol_type = other DNA
tatggccggcccaagatcga

SEQ ID NO: 44850 - DNA, 20 bp, synthetic construct
  source 1..20: mol_type = other DNA
gctcagtgcttccccctggt

SEQ ID NO: 44851 - DNA, 20 bp, synthetic construct
  source 1..20: mol_type = other DNA
agttcctgcagaagagggcg

SEQ ID NO: 44852 - DNA, 20 bp, synthetic construct
  source 1..20: mol_type = other DNA
cagccaggacaacaatgcga

SEQ ID NO: 44853 - DNA, 20 bp, synthetic construct
  source 1..20: mol_type = other DNA
ggtccagcttggtgcccacc

SEQ ID NO: 44854 - DNA, 20 bp, synthetic construct
  source 1..20: mol_type = other DNA
tatatgctggggagaaagaa

SEQ ID NO: 44855 - DNA, 20 bp, synthetic construct
  source 1..20: mol_type = other DNA
agactgaccagcgggagatg

SEQ ID NO: 44856 - DNA, 20 bp, synthetic construct
  source 1..20: mol_type = other DNA
gccttcctccactgtggaga

SEQ ID NO: 44857 - DNA, 20 bp, synthetic construct
  source 1..20: mol_type = other DNA
atctggaaccagatggtcac

SEQ ID NO: 44858 - DNA, 20 bp, synthetic construct
  source 1..20: mol_type = other DNA
ctgctctgtatcctaggagg

SEQ ID NO: 44859 - DNA, 20 bp, synthetic construct
  source 1..20: mol_type = other DNA
gtcgcgcacgatttcccgct

SEQ ID NO: 44860 - DNA, 20 bp, synthetic construct
  source 1..20: mol_type = other DNA
ctcacctggaactggcagag

SEQ ID NO: 44861 - DNA, 20 bp, synthetic construct
  source 1..20: mol_type = other DNA
gcagtaccgcgtggtgagtg

SEQ ID NO: 44862 - DNA, 20 bp, synthetic construct
  source 1..20: mol_type = other DNA
gttttgaaggtaggtgacct

SEQ ID NO: 44863 - DNA, 20 bp, synthetic construct
  source 1..20: mol_type = other DNA
acgaacctcggggcttgggc

SEQ ID NO: 44864 - DNA, 20 bp, synthetic construct
  source 1..20: mol_type = other DNA
cgcaggcagtcgaagacccc

SEQ ID NO: 44865 - DNA, 20 bp, synthetic construct
  source 1..20: mol_type = other DNA
gtcacgcacgatttcccgct

SEQ ID NO: 44866 - DNA, 20 bp, synthetic construct
  source 1..20: mol_type = other DNA
gtgcagaggctgctcaactc

SEQ ID NO: 44867 - DNA, 20 bp, synthetic construct
  source 1..20: mol_type = other DNA
cctgctgagcgggcctgggg

SEQ ID NO: 44868 - DNA, 20 bp, synthetic construct
  source 1..20: mol_type = other DNA
ggcgctccaagatggacagg

SEQ ID NO: 44869 - DNA, 20 bp, synthetic construct
  source 1..20: mol_type = other DNA
gatgcaggccatcaagtgtg

SEQ ID NO: 44870 - DNA, 20 bp, synthetic construct
  source 1..20: mol_type = other DNA
cgtccgaactgccgtcaacc

SEQ ID NO: 44871 - DNA, 20 bp, synthetic construct
  source 1..20: mol_type = other DNA
cccactggctcatccagtgc

SEQ ID NO: 44872 - DNA, 20 bp, synthetic construct
  source 1..20: mol_type = other DNA
tccagccgctgcttccacac

SEQ ID NO: 44873 - DNA, 20 bp, synthetic construct
  source 1..20: mol_type = other DNA
ggggacgttgcagctctcag

SEQ ID NO: 44874 - DNA, 20 bp, synthetic construct
  source 1..20: mol_type = other DNA
caggagagcctgaggatcca

SEQ ID NO: 44875 - DNA, 20 bp, synthetic construct
  source 1..20: mol_type = other DNA
gtgtcaaatgaacttcccct

SEQ ID NO: 44876 - DNA, 20 bp, synthetic construct
  source 1..20: mol_type = other DNA
ttgatcccaggttccaattg

SEQ ID NO: 44877 - DNA, 20 bp, synthetic construct
  source 1..20: mol_type = other DNA
agaagggacagcaaggctgg

SEQ ID NO: 44878 - DNA, 20 bp, synthetic construct
  source 1..20: mol_type = other DNA
gcccgccatggctccgacgc

SEQ ID NO: 44879 - DNA, 20 bp, synthetic construct
  source 1..20: mol_type = other DNA
tctacagactgcagccactg

SEQ ID NO: 44880 - DNA, 20 bp, synthetic construct
  source 1..20: mol_type = other DNA
tccgggttggtcatccctac

SEQ ID NO: 44881 - DNA, 20 bp, synthetic construct
  source 1..20: mol_type = other DNA
tggccacaggtgagcaggtc

SEQ ID NO: 44882 - DNA, 20 bp, synthetic construct
  source 1..20: mol_type = other DNA
gcgccagaagccattaacta

SEQ ID NO: 44883 - DNA, 20 bp, synthetic construct
  source 1..20: mol_type = other DNA
tctgtggataggagagcggc

SEQ ID NO: 44884 - DNA, 20 bp, synthetic construct
  source 1..20: mol_type = other DNA
ggccagccagagctccccag

SEQ ID NO: 44885 - DNA, 20 bp, synthetic construct
  source 1..20: mol_type = other DNA
caagctggccgccttccccg

SEQ ID NO: 44886 - DNA, 20 bp, synthetic construct
  source 1..20: mol_type = other DNA
tttcaggtggccaggagatg

SEQ ID NO: 44887 - DNA, 20 bp, synthetic construct
  source 1..20: mol_type = other DNA
tccgcggcctcagcctggca

SEQ ID NO: 44888 - DNA, 20 bp, synthetic construct
  source 1..20: mol_type = other DNA
tgattcttcccacaggcacc

SEQ ID NO: 44889 - DNA, 20 bp, synthetic construct
  source 1..20: mol_type = other DNA
ggagcagagatgtgggaatg

SEQ ID NO: 44890 - DNA, 20 bp, synthetic construct
  source 1..20: mol_type = other DNA
gagggacagcacggcctgga

SEQ ID NO: 44891 - DNA, 20 bp, synthetic construct
  source 1..20: mol_type = other DNA
ttttctcagtatatcagcca

SEQ ID NO: 44892 - DNA, 20 bp, synthetic construct
  source 1..20: mol_type = other DNA
cacgcacttcctgatgaacg

SEQ ID NO: 44893 - DNA, 20 bp, synthetic construct
  source 1..20: mol_type = other DNA
ggggcggactcacctatctg

SEQ ID NO: 44894 - DNA, 20 bp, synthetic construct
  source 1..20: mol_type = other DNA
agagagaatttatcatttcg

SEQ ID NO: 44895 - DNA, 20 bp, synthetic construct
  source 1..20: mol_type = other DNA
ccaattggtgaaatagaacc

SEQ ID NO: 44896 - DNA, 20 bp, synthetic construct
  source 1..20: mol_type = other DNA
cccatggaaccacttctcat

SEQ ID NO: 44897 - DNA, 20 bp, synthetic construct
  source 1..20: mol_type = other DNA
accaggactgtagcacgtcc

SEQ ID NO: 44898 - DNA, 20 bp, synthetic construct
  source 1..20: mol_type = other DNA
tccctttgatgaagagagta

SEQ ID NO: 44899 - DNA, 20 bp, synthetic construct
  source 1..20: mol_type = other DNA
cgtaggagcctgggaaagag

SEQ ID NO: 44900 - DNA, 20 bp, synthetic construct
  source 1..20: mol_type = other DNA
cgtaatagtagcgtaggcca

SEQ ID NO: 44901 - DNA, 20 bp, synthetic construct
  source 1..20: mol_type = other DNA
gggccatcctgctaaaatca

SEQ ID NO: 44902 - DNA, 20 bp, synthetic construct
  source 1..20: mol_type = other DNA
caccctgttgaactgggacc

SEQ ID NO: 44903 - DNA, 20 bp, synthetic construct
  source 1..20: mol_type = other DNA
accaggatgatgggtgtgct

SEQ ID NO: 44904 - DNA, 20 bp, synthetic construct
  source 1..20: mol_type = other DNA
ccaggatgatgggtgtgctg

SEQ ID NO: 44905 - DNA, 20 bp, synthetic construct
  source 1..20: mol_type = other DNA
atcacttccacccctggctc

SEQ ID NO: 44906 - DNA, 20 bp, synthetic construct
  source 1..20: mol_type = other DNA
ctgcacctagccatcatcca

SEQ ID NO: 44907 - DNA, 20 bp, synthetic construct
  source 1..20: mol_type = other DNA
cttgtagatatcctgatcat

SEQ ID NO: 44908 - DNA, 20 bp, synthetic construct
  source 1..20: mol_type = other DNA
ctcctccagccccggccctc

SEQ ID NO: 44909 - DNA, 20 bp, synthetic construct
  source 1..20: mol_type = other DNA
actcacgctttgccgttttg

SEQ ID NO: 44910 - DNA, 20 bp, synthetic construct
  source 1..20: mol_type = other DNA
tatttctgccctaaacaccc

SEQ ID NO: 44911 - DNA, 20 bp, synthetic construct
  source 1..20: mol_type = other DNA
ctgcacgtcctcccgggctg

SEQ ID NO: 44912 - DNA, 20 bp, synthetic construct
  source 1..20: mol_type = other DNA
tctgcctgctggtaggacag

SEQ ID NO: 44913 - DNA, 20 bp, synthetic construct
  source 1..20: mol_type = other DNA
ctcgctctcccggatgagga

SEQ ID NO: 44914 - DNA, 20 bp, synthetic construct
  source 1..20: mol_type = other DNA
taatgtctctcatgatggct

SEQ ID NO: 44915 - DNA, 20 bp, synthetic construct
  source 1..20: mol_type = other DNA
cggaagaaaggcctctgatt

SEQ ID NO: 44916 - DNA, 20 bp, synthetic construct
  source 1..20: mol_type = other DNA
tccatcaagtgcgtgttggt

SEQ ID NO: 44917 - DNA, 20 bp, synthetic construct
  source 1..20: mol_type = other DNA
acaatagccagcacaggaga

SEQ ID NO: 44918 - DNA, 20 bp, synthetic construct
  source 1..20: mol_type = other DNA
tgattgacatgatgctgctg

SEQ ID NO: 44919 - DNA, 20 bp, synthetic construct
  source 1..20: mol_type = other DNA
ttgggaaggttgagctctgc

SEQ ID NO: 44920 - DNA, 20 bp, synthetic construct
  source 1..20: mol_type = other DNA
aggaataagagggatgtgaa

SEQ ID NO: 44921 - DNA, 20 bp, synthetic construct
  source 1..20: mol_type = other DNA
ctctcggaggaagcgcatgt

SEQ ID NO: 44922 - DNA, 20 bp, synthetic construct
  source 1..20: mol_type = other DNA
cagctccagggcgctcagga

SEQ ID NO: 44923 - DNA, 20 bp, synthetic construct
  source 1..20: mol_type = other DNA
tcgagtacatgaattgcact

SEQ ID NO: 44924 - DNA, 20 bp, synthetic construct
  source 1..20: mol_type = other DNA
gcaggactacaaccgcgagg

SEQ ID NO: 44925 - DNA, 20 bp, synthetic construct
  source 1..20: mol_type = other DNA
cctcatcacgcactaccagc

SEQ ID NO: 44926 - DNA, 20 bp, synthetic construct
  source 1..20: mol_type = other DNA
gtcggtgcagaggtaatgat

SEQ ID NO: 44927 - DNA, 20 bp, synthetic construct
  source 1..20: mol_type = other DNA
ggagacacgtaggcaacaga

SEQ ID NO: 44928 - DNA, 20 bp, synthetic construct
  source 1..20: mol_type = other DNA
gggcaccaagctggacctgc

SEQ ID NO: 44929 - DNA, 20 bp, synthetic construct
  source 1..20: mol_type = other DNA
taccaggtagcaggtgagtg

SEQ ID NO: 44930 - DNA, 20 bp, synthetic construct
  source 1..20: mol_type = other DNA
aggtcagctcgtcctccctc

SEQ ID NO: 44931 - DNA, 20 bp, synthetic construct
  source 1..20: mol_type = other DNA
gataccggagtcgagtcacc

SEQ ID NO: 44932 - DNA, 20 bp, synthetic construct
  source 1..20: mol_type = other DNA
ttccgggatctgaatcacag

SEQ ID NO: 44933 - DNA, 20 bp, synthetic construct
  source 1..20: mol_type = other DNA
gcacggtaagaggcgagaca

SEQ ID NO: 44934 - DNA, 20 bp, synthetic construct
  source 1..20: mol_type = other DNA
ccattccagtgtaatcagtg

SEQ ID NO: 44935 - DNA, 20 bp, synthetic construct
  source 1..20: mol_type = other DNA
agcgggtccgcatcatctcg

SEQ ID NO: 44936 - DNA, 20 bp, synthetic construct
  source 1..20: mol_type = other DNA
caagcaggactacaaccgcg

SEQ ID NO: 44937 - DNA, 20 bp, synthetic construct
  source 1..20: mol_type = other DNA
ctgcagcttctccaacacat

SEQ ID NO: 44938 - DNA, 20 bp, synthetic construct
  source 1..20: mol_type = other DNA
gacaattactttggcacagg

SEQ ID NO: 44939 - DNA, 20 bp, synthetic construct
  source 1..20: mol_type = other DNA
ccaggttgtctgtaaagaca

SEQ ID NO: 44940 - DNA, 20 bp, synthetic construct
  source 1..20: mol_type = other DNA
catcacccagtcccgaacat

SEQ ID NO: 44941 - DNA, 20 bp, synthetic construct
  source 1..20: mol_type = other DNA
gaagccggccttgcacatgc

SEQ ID NO: 44942 - DNA, 20 bp, synthetic construct
  source 1..20: mol_type = other DNA
cattgcccagcagagaaaca

SEQ ID NO: 44943 - DNA, 20 bp, synthetic construct
  source 1..20: mol_type = other DNA
tcagtgcgtccagggataca

SEQ ID NO: 44944 - DNA, 20 bp, synthetic construct
  source 1..20: mol_type = other DNA
gggacgttgcagctctcaga

SEQ ID NO: 44945 - DNA, 20 bp, synthetic construct
  source 1..20: mol_type = other DNA
cagtcagtttccaggtaggg

SEQ ID NO: 44946 - DNA, 20 bp, synthetic construct
  source 1..20: mol_type = other DNA
atcaggtcgcgcaggcttgg

SEQ ID NO: 44947 - DNA, 20 bp, synthetic construct
  source 1..20: mol_type = other DNA
ggtcaacttgatgcctgaag

SEQ ID NO: 44948 - DNA, 20 bp, synthetic construct
  source 1..20: mol_type = other DNA
cggggcgccgacaagatcga

SEQ ID NO: 44949 - DNA, 20 bp, synthetic construct
  source 1..20: mol_type = other DNA
ctgcaagcgtttgctcacca

SEQ ID NO: 44950 - DNA, 20 bp, synthetic construct
  source 1..20: mol_type = other DNA
acacgaccgcaaggaggccc

SEQ ID NO: 44951 - DNA, 20 bp, synthetic construct
  source 1..20: mol_type = other DNA
ccgatcagagctgtcgctca

SEQ ID NO: 44952 - DNA, 20 bp, synthetic construct
  source 1..20: mol_type = other DNA
tcgccgaatagattcaacaa

SEQ ID NO: 44953 - DNA, 20 bp, synthetic construct
  source 1..20: mol_type = other DNA
tgacacggaagcggcagtcc

SEQ ID NO: 44954 - DNA, 20 bp, synthetic construct
  source 1..20: mol_type = other DNA
actggaagggccgttctcct

SEQ ID NO: 44955 - DNA, 20 bp, synthetic construct
  source 1..20: mol_type = other DNA
caggagaacattgcaggtat

SEQ ID NO: 44956 - DNA, 20 bp, synthetic construct
  source 1..20: mol_type = other DNA
acacgaggttctccttggtc

SEQ ID NO: 44957 - DNA, 20 bp, synthetic construct
  source 1..20: mol_type = other DNA
cctgccacccacctgcgatg

SEQ ID NO: 44958 - DNA, 20 bp, synthetic construct
  source 1..20: mol_type = other DNA
tcccagggtagctctccagc

SEQ ID NO: 44959 - DNA, 20 bp, synthetic construct
  source 1..20: mol_type = other DNA
ctgctgagcgggcctgggga

SEQ ID NO: 44960 - DNA, 20 bp, synthetic construct
  source 1..20: mol_type = other DNA
tgctgaccttgatggtgggg

SEQ ID NO: 44961 - DNA, 20 bp, synthetic construct
  source 1..20: mol_type = other DNA
aacttcagcagacacaggct

SEQ ID NO: 44962 - DNA, 20 bp, synthetic construct
  source 1..20: mol_type = other DNA
ccaggcggatatctacaagg

SEQ ID NO: 44963 - DNA, 20 bp, synthetic construct
  source 1..20: mol_type = other DNA
ccttcctccactgtggagag

SEQ ID NO: 44964 - DNA, 20 bp, synthetic construct
  source 1..20: mol_type = other DNA
catttgcggtggacgatgga

SEQ ID NO: 44965 - DNA, 20 bp, synthetic construct
  source 1..20: mol_type = other DNA
acaggacgtccctgctctcc

SEQ ID NO: 44966 - DNA, 20 bp, synthetic construct
  source 1..20: mol_type = other DNA
ccctttgatgaagagagtaa

SEQ ID NO: 44967 - DNA, 20 bp, synthetic construct
  source 1..20: mol_type = other DNA
ctcccagcaggggcagctgc

SEQ ID NO: 44968 - DNA, 20 bp, synthetic construct
  source 1..20: mol_type = other DNA
gaggttggcctcggccagga

SEQ ID NO: 44969 - DNA, 20 bp, synthetic construct
  source 1..20: mol_type = other DNA
cctgcaatgttctcctgctt

SEQ ID NO: 44970 - DNA, 20 bp, synthetic construct
  source 1..20: mol_type = other DNA
tgaccactggctgaattcaa

SEQ ID NO: 44971 - DNA, 20 bp, synthetic construct
  source 1..20: mol_type = other DNA
ggagatcaccacaactggca

SEQ ID NO: 44972 - DNA, 20 bp, synthetic construct
  source 1..20: mol_type = other DNA
gcagcttgacacacggtacc

SEQ ID NO: 44973 - DNA, 20 bp, synthetic construct
  source 1..20: mol_type = other DNA
ggagtctgagagatggagag

SEQ ID NO: 44974 - DNA, 20 bp, synthetic construct
  source 1..20: mol_type = other DNA
ccaggacaaactacatcgca

SEQ ID NO: 44975 - DNA, 20 bp, synthetic construct
  source 1..20: mol_type = other DNA
caagttcaatgtcagctatg

SEQ ID NO: 44976 - DNA, 20 bp, synthetic construct
  source 1..20: mol_type = other DNA
ccatgagggtgagtgggtgt

SEQ ID NO: 44977 - DNA, 20 bp, synthetic construct
  source 1..20: mol_type = other DNA
ctactcatctgtaagcgcag

SEQ ID NO: 44978 - DNA, 20 bp, synthetic construct
  source 1..20: mol_type = other DNA
ccacagcactttgtcaggca

SEQ ID NO: 44979 - DNA, 20 bp, synthetic construct
  source 1..20: mol_type = other DNA
gtgctgaaataaagaaaaag

SEQ ID NO: 44980 - DNA, 20 bp, synthetic construct
  source 1..20: mol_type = other DNA
ggtggtctgacagttcgcac

SEQ ID NO: 44981 - DNA, 20 bp, synthetic construct
  source 1..20: mol_type = other DNA
ggatcaggtcgcgcaggctt

SEQ ID NO: 44982 - DNA, 20 bp, synthetic construct
  source 1..20: mol_type = other DNA
agtctcccaagcggtcggct

SEQ ID NO: 44983 - DNA, 20 bp, synthetic construct
  source 1..20: mol_type = other DNA
tatctgaagctgaaggcgga

SEQ ID NO: 44984 - DNA, 20 bp, synthetic construct
  source 1..20: mol_type = other DNA
ctaaaggcggggcattgccc

SEQ ID NO: 44985 - DNA, 20 bp, synthetic construct
  source 1..20: mol_type = other DNA
cctgtggggcaacggggaaa

SEQ ID NO: 44986 - DNA, 20 bp, synthetic construct
  source 1..20: mol_type = other DNA
tccacagtgcgctttgccgc

SEQ ID NO: 44987 - DNA, 20 bp, synthetic construct
  source 1..20: mol_type = other DNA
gaagcagggcagcatgtccc

SEQ ID NO: 44988 - DNA, 20 bp, synthetic construct
  source 1..20: mol_type = other DNA
ccattaacttcagcagacac

SEQ ID NO: 44989 - DNA, 20 bp, synthetic construct
  source 1..20: mol_type = other DNA
ggttcttaggtaggtggggt

SEQ ID NO: 44990 - DNA, 20 bp, synthetic construct
  source 1..20: mol_type = other DNA
cgaaacctgcgggttcacag

SEQ ID NO: 44991 - DNA, 20 bp, synthetic construct
  source 1..20: mol_type = other DNA
cttgcctccttgactcttga

SEQ ID NO: 44992 - DNA, 20 bp, synthetic construct
  source 1..20: mol_type = other DNA
catttggtgagtgtcatgct

SEQ ID NO: 44993 - DNA, 20 bp, synthetic construct
  source 1..20: mol_type = other DNA
tcttgttcaaagcgcaccgc

SEQ ID NO: 44994 - DNA, 20 bp, synthetic construct
  source 1..20: mol_type = other DNA
gcaggagaacattgcaggta

SEQ ID NO: 44995 - DNA, 20 bp, synthetic construct
  source 1..20: mol_type = other DNA
gcccaccaacacgcacttga

SEQ ID NO: 44996 - DNA, 20 bp, synthetic construct
  source 1..20: mol_type = other DNA
gacgatggagtcgtttcccg

SEQ ID NO: 44997 - DNA, 20 bp, synthetic construct
  source 1..20: mol_type = other DNA
cccgttgtagtaccctgggt

SEQ ID NO: 44998 - DNA, 20 bp, synthetic construct
  source 1..20: mol_type = other DNA
caactataaggactgtgaga

SEQ ID NO: 44999 - DNA, 20 bp, synthetic construct
  source 1..20: mol_type = other DNA
tggcaggtactggaattcca

SEQ ID NO: 45000 - DNA, 20 bp, synthetic construct
  source 1..20: mol_type = other DNA
ttgtgtatggttccacggac

SEQ ID NO: 45001 - DNA, 20 bp, synthetic construct
  source 1..20: mol_type = other DNA
tcccaccaccacacacttga

SEQ ID NO: 45002 - DNA, 20 bp, synthetic construct
  source 1..20: mol_type = other DNA
ggtctcaaacatgatctgta

SEQ ID NO: 45003 - DNA, 20 bp, synthetic construct
  source 1..20: mol_type = other DNA
agagcccgcaggcgttgcac

SEQ ID NO: 45004 - DNA, 20 bp, synthetic construct
  source 1..20: mol_type = other DNA
ccaccacaaccacactctgg

SEQ ID NO: 45005 - DNA, 20 bp, synthetic construct
  source 1..20: mol_type = other DNA
ctagaaaaggagaggcgagg

SEQ ID NO: 45006 - DNA, 20 bp, synthetic construct
  source 1..20: mol_type = other DNA
tgtcaaatgaacttcccctt

SEQ ID NO: 45007 - DNA, 20 bp, synthetic construct
  source 1..20: mol_type = other DNA
cgcggcgcagtacccgctgc

SEQ ID NO: 45008 - DNA, 20 bp, synthetic construct
  source 1..20: mol_type = other DNA
ccttcatcgagcagggcaag

SEQ ID NO: 45009 - DNA, 20 bp, synthetic construct
  source 1..20: mol_type = other DNA
gctccttctttgccctggaa

SEQ ID NO: 45010 - DNA, 20 bp, synthetic construct
  source 1..20: mol_type = other DNA
gaagcatttgcggtggacga

SEQ ID NO: 45011 - DNA, 20 bp, synthetic construct
  source 1..20: mol_type = other DNA
agcactgcctgctggaggct

SEQ ID NO: 45012 - DNA, 20 bp, synthetic construct
  source 1..20: mol_type = other DNA
tgcagaagtaaatatctgtt

SEQ ID NO: 45013 - DNA, 20 bp, synthetic construct
  source 1..20: mol_type = other DNA
tttgcagaccccaagtcccg

SEQ ID NO: 45014 - DNA, 20 bp, synthetic construct
  source 1..20: mol_type = other DNA
caatgagcttctccacctgc

SEQ ID NO: 45015 - DNA, 20 bp, synthetic construct
  source 1..20: mol_type = other DNA
ccaggaggcagaggaagtgg

SEQ ID NO: 45016 - DNA, 20 bp, synthetic construct
  source 1..20: mol_type = other DNA
ggggtcacgattgtgcgtgc

SEQ ID NO: 45017 - DNA, 20 bp, synthetic construct
  source 1..20: mol_type = other DNA
tttggacagatctattccag

SEQ ID NO: 45018 - DNA, 20 bp, synthetic construct
  source 1..20: mol_type = other DNA
tgaaaaccgaagcaactcag

SEQ ID NO: 45019 - DNA, 20 bp, synthetic construct
  source 1..20: mol_type = other DNA
acctgcaatgttctcctgct

SEQ ID NO: 45020 - DNA, 20 bp, synthetic construct
  source 1..20: mol_type = other DNA
cttggaacacgaccgcaagg

SEQ ID NO: 45021 - DNA, 20 bp, synthetic construct
  source 1..20: mol_type = other DNA
ccgctcctgcgccacggagg

SEQ ID NO: 45022 - DNA, 20 bp, synthetic construct
  source 1..20: mol_type = other DNA
gtccatggccggggtcccgg

SEQ ID NO: 45023 - DNA, 20 bp, synthetic construct
  source 1..20: mol_type = other DNA
ctggaaaggtaccccagtga

SEQ ID NO: 45024 - DNA, 20 bp, synthetic construct
  source 1..20: mol_type = other DNA
ggaagatctcatccccaccg

SEQ ID NO: 45025 - DNA, 20 bp, synthetic construct
  source 1..20: mol_type = other DNA
ggaaggttctaatgttctta

SEQ ID NO: 45026 - DNA, 20 bp, synthetic construct
  source 1..20: mol_type = other DNA
ccctgagggagcagagatgt

SEQ ID NO: 45027 - DNA, 20 bp, synthetic construct
  source 1..20: mol_type = other DNA
ctccatgccctgcgggcggg

SEQ ID NO: 45028 - DNA, 20 bp, synthetic construct
  source 1..20: mol_type = other DNA
catgaggatgttgtcaaagt

SEQ ID NO: 45029 - DNA, 20 bp, synthetic construct
  source 1..20: mol_type = other DNA
gtacagcaggacttgggtgc

SEQ ID NO: 45030 - DNA, 20 bp, synthetic construct
  source 1..20: mol_type = other DNA
gctccgcgtccttgcggctc

SEQ ID NO: 45031 - DNA, 20 bp, synthetic construct
  source 1..20: mol_type = other DNA
gtgaactggcccaggccctc

SEQ ID NO: 45032 - DNA, 20 bp, synthetic construct
  source 1..20: mol_type = other DNA
tggggactgcaggtgggaga

SEQ ID NO: 45033 - DNA, 20 bp, synthetic construct
  source 1..20: mol_type = other DNA
tctggttgctggggctcatg

SEQ ID NO: 45034 - DNA, 20 bp, synthetic construct
  source 1..20: mol_type = other DNA
taatccgcgtcatcttccac

SEQ ID NO: 45035 - DNA, 20 bp, synthetic construct
  source 1..20: mol_type = other DNA
cagcagtgaccagggcaacg

SEQ ID NO: 45036 - DNA, 20 bp, synthetic construct
  source 1..20: mol_type = other DNA
ggctgtaggggatgaggctg

SEQ ID NO: 45037 - DNA, 20 bp, synthetic construct
  source 1..20: mol_type = other DNA
gggccagctctgtccacttg

SEQ ID NO: 45038 - DNA, 20 bp, synthetic construct
  source 1..20: mol_type = other DNA
caccagatagttgagggcgt

SEQ ID NO: 45039 - DNA, 20 bp, synthetic construct
  source 1..20: mol_type = other DNA
ttgggacagcagaagtcagg

SEQ ID NO: 45040 - DNA, 20 bp, synthetic construct
  source 1..20: mol_type = other DNA
acccgcagcacttgtcccag

SEQ ID NO: 45041 - DNA, 20 bp, synthetic construct
  source 1..20: mol_type = other DNA
cagctggactgtgagtgact

SEQ ID NO: 45042 - DNA, 20 bp, synthetic construct
  source 1..20: mol_type = other DNA
ccagactgaccagcgggaga

SEQ ID NO: 45043 - DNA, 20 bp, synthetic construct
  source 1..20: mol_type = other DNA
cactttcacttgggtggaga

SEQ ID NO: 45044 - DNA, 20 bp, synthetic construct
  source 1..20: mol_type = other DNA
gtgacaccatgtaccaggac

SEQ ID NO: 45045 - DNA, 20 bp, synthetic construct
  source 1..20: mol_type = other DNA
caacgagtacacagccaggg

SEQ ID NO: 45046 - DNA, 20 bp, synthetic construct
  source 1..20: mol_type = other DNA
gcattgccgtgtccagcaag

SEQ ID NO: 45047 - DNA, 20 bp, synthetic construct
  source 1..20: mol_type = other DNA
tcttacctgtcacaggacat

SEQ ID NO: 45048 - DNA, 20 bp, synthetic construct
  source 1..20: mol_type = other DNA
tataaagcattatcacatca

SEQ ID NO: 45049 - DNA, 20 bp, synthetic construct
  source 1..20: mol_type = other DNA
accccgatcgcccagaacag

SEQ ID NO: 45050 - DNA, 20 bp, synthetic construct
  source 1..20: mol_type = other DNA
cgtatcctcctgcctagcgc

SEQ ID NO: 45051 - DNA, 20 bp, synthetic construct
  source 1..20: mol_type = other DNA
accactgggcaggtgggtgg

SEQ ID NO: 45052 - DNA, 20 bp, synthetic construct
  source 1..20: mol_type = other DNA
gccgaagtgcagagcaaccg

SEQ ID NO: 45053 - DNA, 20 bp, synthetic construct
  source 1..20: mol_type = other DNA
cggtgctacaactgggctgg

SEQ ID NO: 45054 - DNA, 20 bp, synthetic construct
  source 1..20: mol_type = other DNA
tcaggttggacttttctatg

SEQ ID NO: 45055 - DNA, 20 bp, synthetic construct
  source 1..20: mol_type = other DNA
gcaactacgcctgccgccgg

SEQ ID NO: 45056 - DNA, 20 bp, synthetic construct
  source 1..20: mol_type = other DNA
ctgcagggaacctccaccat

SEQ ID NO: 45057 - DNA, 20 bp, synthetic construct
  source 1..20: mol_type = other DNA
tcacttcctaaaggagatga

SEQ ID NO: 45058 - DNA, 20 bp, synthetic construct
  source 1..20: mol_type = other DNA
cgaatgacggctcggaagga

SEQ ID NO: 45059 - DNA, 20 bp, synthetic construct
  source 1..20: mol_type = other DNA
ggtcagctgctgcacagtgt

SEQ ID NO: 45060 - DNA, 20 bp, synthetic construct
  source 1..20: mol_type = other DNA
caatcttgactctcaatcca

SEQ ID NO: 45061 - DNA, 20 bp, synthetic construct
  source 1..20: mol_type = other DNA
gaagaagtaccacatcgatg

SEQ ID NO: 45062 - DNA, 20 bp, synthetic construct
  source 1..20: mol_type = other DNA
ctgaagcatctgcgaggacg

SEQ ID NO: 45063 - DNA, 20 bp, synthetic construct
  source 1..20: mol_type = other DNA
tgtccactgccgggggtctg

SEQ ID NO: 45064 - DNA, 20 bp, synthetic construct
  source 1..20: mol_type = other DNA
ggtgcaggagctgcagaaga

SEQ ID NO: 45065 - DNA, 20 bp, synthetic construct
  source 1..20: mol_type = other DNA
aaatgtcagacttgcaacaa

SEQ ID NO: 45066 - DNA, 20 bp, synthetic construct
  source 1..20: mol_type = other DNA
gccatgagtgcaacttgcct

SEQ ID NO: 45067 - DNA, 20 bp, synthetic construct
  source 1..20: mol_type = other DNA
cctgagagggaaatgagggc

SEQ ID NO: 45068 - DNA, 20 bp, synthetic construct
  source 1..20: mol_type = other DNA
ggcgaggggagatctatggc

SEQ ID NO: 45069 - DNA, 20 bp, synthetic construct
  source 1..20: mol_type = other DNA
tccactaccggatgaggtat

SEQ ID NO: 45070 - DNA, 20 bp, synthetic construct
  source 1..20: mol_type = other DNA
ttcatgatccagttcttgaa

SEQ ID NO: 45071 - DNA, 20 bp, synthetic construct
  source 1..20: mol_type = other DNA
aatggagccacccaatccac

SEQ ID NO: 45072 - DNA, 20 bp, synthetic construct
  source 1..20: mol_type = other DNA
tctactcatctgtaagcgca

SEQ ID NO: 45073 - DNA, 20 bp, synthetic construct
  source 1..20: mol_type = other DNA
agcgggcagcagcacatgca

SEQ ID NO: 45074 - DNA, 20 bp, synthetic construct
  source 1..20: mol_type = other DNA
tcacttccacccctggctca

SEQ ID NO: 45075 - DNA, 20 bp, synthetic construct
  source 1..20: mol_type = other DNA
tgatcccaggttccaattgg

SEQ ID NO: 45076 - DNA, 20 bp, synthetic construct
  source 1..20: mol_type = other DNA
tgcacctagccatcatccac

SEQ ID NO: 45077 - DNA, 20 bp, synthetic construct
  source 1..20: mol_type = other DNA
ggaactgcagaaagataaga

SEQ ID NO: 45078 - DNA, 20 bp, synthetic construct
  source 1..20: mol_type = other DNA
acggtggggatgtactctcc

SEQ ID NO: 45079 - DNA, 20 bp, synthetic construct
  source 1..20: mol_type = other DNA
tgtctggggagtctgagaga

SEQ ID NO: 45080 - DNA, 20 bp, synthetic construct
  source 1..20: mol_type = other DNA
gcagaagtcatagcgggctt

SEQ ID NO: 45081 - DNA, 20 bp, synthetic construct
  source 1..20: mol_type = other DNA
ctgtcctcaagttcctctat

SEQ ID NO: 45082 - DNA, 20 bp, synthetic construct
  source 1..20: mol_type = other DNA
gaggccaaagtcgctgatct

SEQ ID NO: 45083 - DNA, 20 bp, synthetic construct
  source 1..20: mol_type = other DNA
cttgaaggggaactgcaagg

SEQ ID NO: 45084 - DNA, 20 bp, synthetic construct
  source 1..20: mol_type = other DNA
cgcgccacatgaagacgcac

SEQ ID NO: 45085 - DNA, 20 bp, synthetic construct
  source 1..20: mol_type = other DNA
acttgcctccttgactcttg

SEQ ID NO: 45086 - DNA, 20 bp, synthetic construct
  source 1..20: mol_type = other DNA
gcaggcagtgcttgttctgc

SEQ ID NO: 45087 - DNA, 20 bp, synthetic construct
  source 1..20: mol_type = other DNA
caggcacagttgccgattac

SEQ ID NO: 45088 - DNA, 20 bp, synthetic construct
  source 1..20: mol_type = other DNA
caggtgggtcttgagattgc

SEQ ID NO: 45089 - DNA, 20 bp, synthetic construct
  source 1..20: mol_type = other DNA
accttgatcttcattgtgct

SEQ ID NO: 45090 - DNA, 20 bp, synthetic construct
  source 1..20: mol_type = other DNA
cctgcgggttcacagagggt

SEQ ID NO: 45091 - DNA, 20 bp, synthetic construct
  source 1..20: mol_type = other DNA
ggcccaccgcactcgctgtt

SEQ ID NO: 45092 - DNA, 20 bp, synthetic construct
  source 1..20: mol_type = other DNA
ctatggggtcaccatgtggg

SEQ ID NO: 45093 - DNA, 20 bp, synthetic construct
  source 1..20: mol_type = other DNA
tccctgagtaagtgtccagg

SEQ ID NO: 45094 - DNA, 20 bp, synthetic construct
  source 1..20: mol_type = other DNA
acagaactggtgggaggtac

SEQ ID NO: 45095 - DNA, 20 bp, synthetic construct
  source 1..20: mol_type = other DNA
tttctccaggaaaacatggc

SEQ ID NO: 45096 - DNA, 20 bp, synthetic construct
  source 1..20: mol_type = other DNA
gatcaggtcgcgcaggcttg

SEQ ID NO: 45097 - DNA, 20 bp, synthetic construct
  source 1..20: mol_type = other DNA
cccggaggtgattcagaacc

SEQ ID NO: 45098 - DNA, 20 bp, synthetic construct
  source 1..20: mol_type = other DNA
gggtgtagatgacctgtgac

SEQ ID NO: 45099 - DNA, 20 bp, synthetic construct
  source 1..20: mol_type = other DNA
cagcggcacctacctctgtg

SEQ ID NO: 45100 - DNA, 20 bp, synthetic construct
  source 1..20: mol_type = other DNA
tcatggagatggctgggggc

SEQ ID NO: 45101 - DNA, 20 bp, synthetic construct
  source 1..20: mol_type = other DNA
ccgtaagtggggacccgtcg

SEQ ID NO: 45102 - DNA, 20 bp, synthetic construct
  source 1..20: mol_type = other DNA
ctcgggcaggcagatgagca

SEQ ID NO: 45103 - DNA, 20 bp, synthetic construct
  source 1..20: mol_type = other DNA
caaggtgagctggacagggt

SEQ ID NO: 45104 - DNA, 20 bp, synthetic construct
  source 1..20: mol_type = other DNA
ggagcagcgcaagaccatct

SEQ ID NO: 45105 - DNA, 20 bp, synthetic construct
  source 1..20: mol_type = other DNA
ggaaccattatccatgtgaa

SEQ ID NO: 45106 - DNA, 20 bp, synthetic construct
  source 1..20: mol_type = other DNA
ccagcttatgttgcatctgt

SEQ ID NO: 45107 - DNA, 20 bp, synthetic construct
  source 1..20: mol_type = other DNA
ccaataatgcagagtgaggt

SEQ ID NO: 45108 - DNA, 20 bp, synthetic construct
  source 1..20: mol_type = other DNA
agtgcagctccaggcggcag

SEQ ID NO: 45109 - DNA, 20 bp, synthetic construct
  source 1..20: mol_type = other DNA
cacgcactgagccaggtcct

SEQ ID NO: 45110 - DNA, 20 bp, synthetic construct
  source 1..20: mol_type = other DNA
ggcgcaggttgacctcacgc

SEQ ID NO: 45111 - DNA, 20 bp, synthetic construct
  source 1..20: mol_type = other DNA
cgttctcccacaccagcccg

SEQ ID NO: 45112 - DNA, 20 bp, synthetic construct
  source 1..20: mol_type = other DNA
ttgaaggagcagggactgga

SEQ ID NO: 45113 - DNA, 20 bp, synthetic construct
  source 1..20: mol_type = other DNA
agcgggcacctgaagagatg

SEQ ID NO: 45114 - DNA, 20 bp, synthetic construct
  source 1..20: mol_type = other DNA
gtcgaaggcctcatcccgca

SEQ ID NO: 45115 - DNA, 20 bp, synthetic construct
  source 1..20: mol_type = other DNA
aagagagattctatgaaagc

SEQ ID NO: 45116 - DNA, 20 bp, synthetic construct
  source 1..20: mol_type = other DNA
cgtgtcacacaactgcccaa

SEQ ID NO: 45117 - DNA, 20 bp, synthetic construct
  source 1..20: mol_type = other DNA
gccgacttacgatttccgag

SEQ ID NO: 45118 - DNA, 20 bp, synthetic construct
  source 1..20: mol_type = other DNA
cctggagcacctctttgccc

SEQ ID NO: 45119 - DNA, 20 bp, synthetic construct
  source 1..20: mol_type = other DNA
ctgagctgtaccttgaaagt

SEQ ID NO: 45120 - DNA, 20 bp, synthetic construct
  source 1..20: mol_type = other DNA
gcttccagctggctggcacc

SEQ ID NO: 45121 - DNA, 20 bp, synthetic construct
  source 1..20: mol_type = other DNA
caaaccaaacctcagagtac

SEQ ID NO: 45122 - DNA, 20 bp, synthetic construct
  source 1..20: mol_type = other DNA
ctatgctcgctgcctgcgga

SEQ ID NO: 45123 - DNA, 20 bp, synthetic construct
  source 1..20: mol_type = other DNA
gcagcgcaagaccatctggg

SEQ ID NO: 45124 - DNA, 20 bp, synthetic construct
  source 1..20: mol_type = other DNA
agcagcttctgcctctggtc

SEQ ID NO: 45125 - DNA, 20 bp, synthetic construct
  source 1..20: mol_type = other DNA
catggagatggatgtgatgt

SEQ ID NO: 45126 - DNA, 20 bp, synthetic construct
  source 1..20: mol_type = other DNA
tggcccagacagcagacgcc

SEQ ID NO: 45127 - DNA, 20 bp, synthetic construct
  source 1..20: mol_type = other DNA
gatgatgtagatgggctcct

SEQ ID NO: 45128 - DNA, 20 bp, synthetic construct
  source 1..20: mol_type = other DNA
tcggaagaaaggcctctgat

SEQ ID NO: 45129 - DNA, 20 bp, synthetic construct
  source 1..20: mol_type = other DNA
tgagctccacaatgtctcca

SEQ ID NO: 45130 - DNA, 20 bp, synthetic construct
  source 1..20: mol_type = other DNA
acgccagggtgagattctgc

SEQ ID NO: 45131 - DNA, 20 bp, synthetic construct
  source 1..20: mol_type = other DNA
tgctgtcccaggtcaactac

SEQ ID NO: 45132 - DNA, 20 bp, synthetic construct
  source 1..20: mol_type = other DNA
tcgctcagaggtcctgggct

SEQ ID NO: 45133 - DNA, 20 bp, synthetic construct
  source 1..20: mol_type = other DNA
actgagctgtgcgtagcgca

SEQ ID NO: 45134 - DNA, 20 bp, synthetic construct
  source 1..20: mol_type = other DNA
ggaggagctgctgggctctg

SEQ ID NO: 45135 - DNA, 20 bp, synthetic construct
  source 1..20: mol_type = other DNA
gtcagtttctgagactgcaa

SEQ ID NO: 45136 - DNA, 20 bp, synthetic construct
  source 1..20: mol_type = other DNA
tggccagtgccaggccctgc

SEQ ID NO: 45137 - DNA, 20 bp, synthetic construct
  source 1..20: mol_type = other DNA
cggtgaggccagaatcaggg

SEQ ID NO: 45138 - DNA, 20 bp, synthetic construct
  source 1..20: mol_type = other DNA
tcgccgccacagtggggtcg

SEQ ID NO: 45139 - DNA, 20 bp, synthetic construct
  source 1..20: mol_type = other DNA
ggaatagagaaggaggcggc

SEQ ID NO: 45140 - DNA, 20 bp, synthetic construct
  source 1..20: mol_type = other DNA
aggtgagcaggtcagggtcg

SEQ ID NO: 45141 - DNA, 20 bp, synthetic construct
  source 1..20: mol_type = other DNA
tcccacagccccaggttcac

SEQ ID NO: 45142 - DNA, 20 bp, synthetic construct
  source 1..20: mol_type = other DNA
gaccccgatcgcccagaaca

SEQ ID NO: 45143 - DNA, 20 bp, synthetic construct
  source 1..20: mol_type = other DNA
ctgcagggtgtccatatcag

SEQ ID NO: 45144 - DNA, 20 bp, synthetic construct
  source 1..20: mol_type = other DNA
gccatagacgaggaacctac

SEQ ID NO: 45145 - DNA, 20 bp, synthetic construct
  source 1..20: mol_type = other DNA
ggcagggagtgtgtgaactg

SEQ ID NO: 45146 - DNA, 20 bp, synthetic construct
  source 1..20: mol_type = other DNA
gaggcactcacatggacata

SEQ ID NO: 45147 - DNA, 20 bp, synthetic construct
  source 1..20: mol_type = other DNA
aggtgccgctgtcattgcgc

SEQ ID NO: 45148 - DNA, 20 bp, synthetic construct
  source 1..20: mol_type = other DNA
cttccagtgcaatcagtgcg

SEQ ID NO: 45149 - DNA, 20 bp, synthetic construct
  source 1..20: mol_type = other DNA
gtgattcagaacctggagcg

SEQ ID NO: 45150 - DNA, 20 bp, synthetic construct
  source 1..20: mol_type = other DNA
ctggaggagactggcggagc

SEQ ID NO: 45151 - DNA, 20 bp, synthetic construct
  source 1..20: mol_type = other DNA
ttcgtgcttctgtctattga

SEQ ID NO: 45152 - DNA, 20 bp, synthetic construct
  source 1..20: mol_type = other DNA
cccagagtaaagtttgcgct

SEQ ID NO: 45153 - DNA, 20 bp, synthetic construct
  source 1..20: mol_type = other DNA
tggatcaggtcgcgcaggct

SEQ ID NO: 45154 - DNA, 20 bp, synthetic construct
  source 1..20: mol_type = other DNA
catgaggttggcccaggcaa

SEQ ID NO: 45155 - DNA, 20 bp, synthetic construct
  source 1..20: mol_type = other DNA
agccaacctggaaacagacg

SEQ ID NO: 45156 - DNA, 20 bp, synthetic construct
  source 1..20: mol_type = other DNA
gcacctctgccgcagcctcg

SEQ ID NO: 45157 - DNA, 20 bp, synthetic construct
  source 1..20: mol_type = other DNA
cctggctgccaggcaggtaa

SEQ ID NO: 45158 - DNA, 20 bp, synthetic construct
  source 1..20: mol_type = other DNA
tgacaggcttcgaatggtat

SEQ ID NO: 45159 - DNA, 20 bp, synthetic construct
  source 1..20: mol_type = other DNA
caatgaccttacactgacgc

SEQ ID NO: 45160 - DNA, 20 bp, synthetic construct
  source 1..20: mol_type = other DNA
agtgaaagcagcaaagaagg

SEQ ID NO: 45161 - DNA, 20 bp, synthetic construct
  source 1..20: mol_type = other DNA
gtctgcctgctggtaggaca

SEQ ID NO: 45162 - DNA, 20 bp, synthetic construct
  source 1..20: mol_type = other DNA
accagttttctagccgatct

SEQ ID NO: 45163 - DNA, 20 bp, synthetic construct
  source 1..20: mol_type = other DNA
tatagcggctgagcatgtgc

SEQ ID NO: 45164 - DNA, 20 bp, synthetic construct
  source 1..20: mol_type = other DNA
ggaacagatgctcactgcgc

SEQ ID NO: 45165 - DNA, 20 bp, synthetic construct
  source 1..20: mol_type = other DNA
gcacttcttctgcaaggagg

SEQ ID NO: 45166 - DNA, 20 bp, synthetic construct
  source 1..20: mol_type = other DNA
ggccacaggtgagcaggtca

SEQ ID NO: 45167 - DNA, 20 bp, synthetic construct
  source 1..20: mol_type = other DNA
tgtgcccccccagagaccga

SEQ ID NO: 45168 - DNA, 20 bp, synthetic construct
  source 1..20: mol_type = other DNA
caggttgtctgtaaagacaa

SEQ ID NO: 45169 - DNA, 20 bp, synthetic construct
  source 1..20: mol_type = other DNA
gcagtgttctcttaaggtac

SEQ ID NO: 45170 - DNA, 20 bp, synthetic construct
  source 1..20: mol_type = other DNA
ttacccctagaggaggctgc

SEQ ID NO: 45171 - DNA, 20 bp, synthetic construct
  source 1..20: mol_type = other DNA
agcacagccagtggccgctc

SEQ ID NO: 45172 - DNA, 20 bp, synthetic construct
  source 1..20: mol_type = other DNA
ccccactgcaaggtgacccc

SEQ ID NO: 45173 - DNA, 20 bp, synthetic construct
  source 1..20: mol_type = other DNA
gtcttttgggatcctgctga

SEQ ID NO: 45174 - DNA, 20 bp, synthetic construct
  source 1..20: mol_type = other DNA
catgagctcgtgaacctgag

SEQ ID NO: 45175 - DNA, 20 bp, synthetic construct
  source 1..20: mol_type = other DNA
gtacgtgcagaaaactctca

SEQ ID NO: 45176 - DNA, 20 bp, synthetic construct
  source 1..20: mol_type = other DNA
gtgggacactgctgggcagg

SEQ ID NO: 45177 - DNA, 20 bp, synthetic construct
  source 1..20: mol_type = other DNA
gggaaacttggcccctaagg

SEQ ID NO: 45178 - DNA, 20 bp, synthetic construct
  source 1..20: mol_type = other DNA
gaagcggactttaaagttcg

SEQ ID NO: 45179 - DNA, 20 bp, synthetic construct
  source 1..20: mol_type = other DNA
ctgagggcaagaggtaatcc

SEQ ID NO: 45180 - DNA, 20 bp, synthetic construct
  source 1..20: mol_type = other DNA
cgccagaagccattaactac

SEQ ID NO: 45181 - DNA, 20 bp, synthetic construct
  source 1..20: mol_type = other DNA
agaccaccacaaccacactc

SEQ ID NO: 45182 - DNA, 20 bp, synthetic construct
  source 1..20: mol_type = other DNA
ccaggtcttcatcaaataca

SEQ ID NO: 45183 - DNA, 20 bp, synthetic construct
  source 1..20: mol_type = other DNA
ggatacagtcctaaggatgc

SEQ ID NO: 45184 - DNA, 20 bp, synthetic construct
  source 1..20: mol_type = other DNA
agtggactgctgggacggcc

SEQ ID NO: 45185 - DNA, 20 bp, synthetic construct
  source 1..20: mol_type = other DNA
cgtccatggccggggtcccg

SEQ ID NO: 45186 - DNA, 20 bp, synthetic construct
  source 1..20: mol_type = other DNA
gcgctcagtttccagaacct

SEQ ID NO: 45187 - DNA, 20 bp, synthetic construct
  source 1..20: mol_type = other DNA
gacggtatgttatgcaaggc

SEQ ID NO: 45188 - DNA, 20 bp, synthetic construct
  source 1..20: mol_type = other DNA
ttcaggaaaccacttggtta

SEQ ID NO: 45189 - DNA, 20 bp, synthetic construct
  source 1..20: mol_type = other DNA
gcagaaaggtatacatcagg

SEQ ID NO: 45190 - DNA, 20 bp, synthetic construct
  source 1..20: mol_type = other DNA
ccggggcgccgacaagatcg

SEQ ID NO: 45191 - DNA, 20 bp, synthetic construct
  source 1..20: mol_type = other DNA
caccaccagcacaggggtac

SEQ ID NO: 45192 - DNA, 20 bp, synthetic construct
  source 1..20: mol_type = other DNA
agtctcttaccattcttggt

SEQ ID NO: 45193 - DNA, 20 bp, synthetic construct
  source 1..20: mol_type = other DNA
ggacgtgcagatgaagctgg

SEQ ID NO: 45194 - DNA, 20 bp, synthetic construct
  source 1..20: mol_type = other DNA
tgtcccaggtgagccctccg

SEQ ID NO: 45195 - DNA, 20 bp, synthetic construct
  source 1..20: mol_type = other DNA
tcaaatgaacttccccttgg

SEQ ID NO: 45196 - DNA, 20 bp, synthetic construct
  source 1..20: mol_type = other DNA
ccaccaggtatctggaaaga

SEQ ID NO: 45197 - DNA, 20 bp, synthetic construct
  source 1..20: mol_type = other DNA
agggcacagcacggcccgga

SEQ ID NO: 45198 - DNA, 20 bp, synthetic construct
  source 1..20: mol_type = other DNA
ccagagcatcgtgagtgagc

SEQ ID NO: 45199 - DNA, 20 bp, synthetic construct
  source 1..20: mol_type = other DNA
ggaggcctaccgagtgattc

SEQ ID NO: 45200 - DNA, 20 bp, synthetic construct
  source 1..20: mol_type = other DNA
tgcatcagctccttggtctg

SEQ ID NO: 45201 - DNA, 20 bp, synthetic construct
  source 1..20: mol_type = other DNA
ccacctgcagaaacactacc

SEQ ID NO: 45202 - DNA, 20 bp, synthetic construct
  source 1..20: mol_type = other DNA
ggctctctgagaacattcct

SEQ ID NO: 45203 - DNA, 20 bp, synthetic construct
  source 1..20: mol_type = other DNA
ccttccagtgcaatcagtgc

SEQ ID NO: 45204 - DNA, 20 bp, synthetic construct
  source 1..20: mol_type = other DNA
caacagattgcctgcattgg

SEQ ID NO: 45205 - DNA, 20 bp, synthetic construct
  source 1..20: mol_type = other DNA
ggccacccagactgaccagc

SEQ ID NO: 45206 - DNA, 20 bp, synthetic construct
  source 1..20: mol_type = other DNA
gtgttccaagatgtccagga

SEQ ID NO: 45207 - DNA, 20 bp, synthetic construct
  source 1..20: mol_type = other DNA
tcacctgggtcatcttctcg

SEQ ID NO: 45208 - DNA, 20 bp, synthetic construct
  source 1..20: mol_type = other DNA
gcgccaaggtgagctggaca

SEQ ID NO: 45209 - DNA, 20 bp, synthetic construct
  source 1..20: mol_type = other DNA
gctggttcggctctacgctg

SEQ ID NO: 45210 - DNA, 20 bp, synthetic construct
  source 1..20: mol_type = other DNA
ctaccccaagggccagcgac

SEQ ID NO: 45211 - DNA, 20 bp, synthetic construct
  source 1..20: mol_type = other DNA
ccaatacttcaagaaggtgc

SEQ ID NO: 45212 - DNA, 20 bp, synthetic construct
  source 1..20: mol_type = other DNA
ggcaggtactggaattccat

SEQ ID NO: 45213 - DNA, 20 bp, synthetic construct
  source 1..20: mol_type = other DNA
tctgcagggtgtccatatca

SEQ ID NO: 45214 - DNA, 20 bp, synthetic construct
  source 1..20: mol_type = other DNA
catgcactgttgaatcagca

SEQ ID NO: 45215 - DNA, 20 bp, synthetic construct
  source 1..20: mol_type = other DNA
tgcccacggccctgaaagac

SEQ ID NO: 45216 - DNA, 20 bp, synthetic construct
  source 1..20: mol_type = other DNA
tgctcagcccttagcaatcg

SEQ ID NO: 45217 - DNA, 20 bp, synthetic construct
  source 1..20: mol_type = other DNA
cctcacctcctgttctccct

SEQ ID NO: 45218 - DNA, 20 bp, synthetic construct
  source 1..20: mol_type = other DNA
cggcaacagattgcctgcat

SEQ ID NO: 45219 - DNA, 20 bp, synthetic construct
  source 1..20: mol_type = other DNA
gcagttctcacacactgtgg

SEQ ID NO: 45220 - DNA, 20 bp, synthetic construct
  source 1..20: mol_type = other DNA
ggcccaggatgtcagagcca

SEQ ID NO: 45221 - DNA, 20 bp, synthetic construct
  source 1..20: mol_type = other DNA
ttcctggaacagaccaaaga

SEQ ID NO: 45222 - DNA, 20 bp, synthetic construct
  source 1..20: mol_type = other DNA
cgttcatcaggaagtgcgtg

SEQ ID NO: 45223 - DNA, 20 bp, synthetic construct
  source 1..20: mol_type = other DNA
ttcacctgtgcatatgagct

SEQ ID NO: 45224 - DNA, 20 bp, synthetic construct
  source 1..20: mol_type = other DNA
tgtctgtcaagaagaacttg

SEQ ID NO: 45225 - DNA, 20 bp, synthetic construct
  source 1..20: mol_type = other DNA
cgtcgggctcactggtgtaa

SEQ ID NO: 45226 - DNA, 20 bp, synthetic construct
  source 1..20: mol_type = other DNA
gccggttgcacggcttgcgc

SEQ ID NO: 45227 - DNA, 20 bp, synthetic construct
  source 1..20: mol_type = other DNA
taccggagtgcgtcctcagg

SEQ ID NO: 45228 - DNA, 20 bp, synthetic construct
  source 1..20: mol_type = other DNA
tggaggaggtggagcgggag

SEQ ID NO: 45229 - DNA, 20 bp, synthetic construct
  source 1..20: mol_type = other DNA
tcttacccagaaaataataa

SEQ ID NO: 45230 - DNA, 20 bp, synthetic construct
  source 1..20: mol_type = other DNA
ctcctgcagctccccgagca

SEQ ID NO: 45231 - DNA, 20 bp, synthetic construct
  source 1..20: mol_type = other DNA
cttaaggtactggagcctga

SEQ ID NO: 45232 - DNA, 20 bp, synthetic construct
  source 1..20: mol_type = other DNA
ggaaatctacgggagggtaa

SEQ ID NO: 45233 - DNA, 20 bp, synthetic construct
  source 1..20: mol_type = other DNA
gaaacctgcgggttcacaga

SEQ ID NO: 45234 - DNA, 20 bp, synthetic construct
  source 1..20: mol_type = other DNA
atgtccaacagccggcctag

SEQ ID NO: 45235 - DNA, 20 bp, synthetic construct
  source 1..20: mol_type = other DNA
ggaccagatgcggagagtaa

SEQ ID NO: 45236 - DNA, 20 bp, synthetic construct
  source 1..20: mol_type = other DNA
aggccctcttcatgacgggc

SEQ ID NO: 45237 - DNA, 20 bp, synthetic construct
  source 1..20: mol_type = other DNA
cgccccggctccacgtgatc

SEQ ID NO: 45238 - DNA, 20 bp, synthetic construct
  source 1..20: mol_type = other DNA
cttactaatgaagtaatccg

SEQ ID NO: 45239 - DNA, 20 bp, synthetic construct
  source 1..20: mol_type = other DNA
ggcattctccggatagatgt

SEQ ID NO: 45240 - DNA, 20 bp, synthetic construct
  source 1..20: mol_type = other DNA
cagtgctgaccttgatggtg

SEQ ID NO: 45241 - DNA, 20 bp, synthetic construct
  source 1..20: mol_type = other DNA
gcagtacccgctgccggagg

SEQ ID NO: 45242 - DNA, 20 bp, synthetic construct
  source 1..20: mol_type = other DNA
acctaccggagtgcgtcctc

SEQ ID NO: 45243 - DNA, 20 bp, synthetic construct
  source 1..20: mol_type = other DNA
gctgaagcagggcacggaga

SEQ ID NO: 45244 - DNA, 20 bp, synthetic construct
  source 1..20: mol_type = other DNA
ttcaggatcgttttcactgt

SEQ ID NO: 45245 - DNA, 20 bp, synthetic construct
  source 1..20: mol_type = other DNA
gatgagcagctgtggagtgg

SEQ ID NO: 45246 - DNA, 20 bp, synthetic construct
  source 1..20: mol_type = other DNA
tcctgcaggtgaggagtaag

SEQ ID NO: 45247 - DNA, 20 bp, synthetic construct
  source 1..20: mol_type = other DNA
ccccgagcaaggacgtcacc

SEQ ID NO: 45248 - DNA, 20 bp, synthetic construct
  source 1..20: mol_type = other DNA
ctccgggttggtcatcccta

SEQ ID NO: 45249 - DNA, 20 bp, synthetic construct
  source 1..20: mol_type = other DNA
gagaatttatcatttcgtgg

SEQ ID NO: 45250 - DNA, 20 bp, synthetic construct
  source 1..20: mol_type = other DNA
catggcccaatacttcaaga

SEQ ID NO: 45251 - DNA, 20 bp, synthetic construct
  source 1..20: mol_type = other DNA
gcctgcggatccctggctgt

SEQ ID NO: 45252 - DNA, 20 bp, synthetic construct
  source 1..20: mol_type = other DNA
gttcacaaaagaagccacac

SEQ ID NO: 45253 - DNA, 20 bp, synthetic construct
  source 1..20: mol_type = other DNA
tggagccacccaatccactg

SEQ ID NO: 45254 - DNA, 20 bp, synthetic construct
  source 1..20: mol_type = other DNA
cccggatgaagagcacgatg

SEQ ID NO: 45255 - DNA, 20 bp, synthetic construct
  source 1..20: mol_type = other DNA
gatgaagagagtaagggcca

SEQ ID NO: 45256 - DNA, 20 bp, synthetic construct
  source 1..20: mol_type = other DNA
ggaccagctccatggggcag

SEQ ID NO: 45257 - DNA, 20 bp, synthetic construct
  source 1..20: mol_type = other DNA
gctcctggatcaggcgcccg

SEQ ID NO: 45258 - DNA, 20 bp, synthetic construct
  source 1..20: mol_type = other DNA
ggacgagtgggaggttccca

SEQ ID NO: 45259 - DNA, 20 bp, synthetic construct
  source 1..20: mol_type = other DNA
caatttctggcagcctggag

SEQ ID NO: 45260 - DNA, 20 bp, synthetic construct
  source 1..20: mol_type = other DNA
gaggataaagacctggtcca

SEQ ID NO: 45261 - DNA, 20 bp, synthetic construct
  source 1..20: mol_type = other DNA
cctgcgggagatccagcaga

SEQ ID NO: 45262 - DNA, 20 bp, synthetic construct
  source 1..20: mol_type = other DNA
ttcaggtaagtccatcaggt

SEQ ID NO: 45263 - DNA, 20 bp, synthetic construct
  source 1..20: mol_type = other DNA
ggaaaggtaccccagtgaag

SEQ ID NO: 45264 - DNA, 20 bp, synthetic construct
  source 1..20: mol_type = other DNA
ggaggggaagacggcccggg

SEQ ID NO: 45265 - DNA, 20 bp, synthetic construct
  source 1..20: mol_type = other DNA
gaggccgaacttctcacagc

SEQ ID NO: 45266 - DNA, 20 bp, synthetic construct
  source 1..20: mol_type = other DNA
cgacatgggcaaggtacgag

SEQ ID NO: 45267 - DNA, 20 bp, synthetic construct
  source 1..20: mol_type = other DNA
caaggtacagctcaggcctc

SEQ ID NO: 45268 - DNA, 20 bp, synthetic construct
  source 1..20: mol_type = other DNA
gtagtcaggctcctggaaac

SEQ ID NO: 45269 - DNA, 20 bp, synthetic construct
  source 1..20: mol_type = other DNA
caccacgtctgcctgctggt

SEQ ID NO: 45270 - DNA, 20 bp, synthetic construct
  source 1..20: mol_type = other DNA
catcctactcacctgataag

SEQ ID NO: 45271 - DNA, 20 bp, synthetic construct
  source 1..20: mol_type = other DNA
ggcagcccaagtaaggagac

SEQ ID NO: 45272 - DNA, 20 bp, synthetic construct
  source 1..20: mol_type = other DNA
tgtctgactttgggatgaca

SEQ ID NO: 45273 - DNA, 20 bp, synthetic construct
  source 1..20: mol_type = other DNA
gcagaaagataagatggcgg

SEQ ID NO: 45274 - DNA, 20 bp, synthetic construct
  source 1..20: mol_type = other DNA
tacaaggcaggcgcgggcag

SEQ ID NO: 45275 - DNA, 20 bp, synthetic construct
  source 1..20: mol_type = other DNA
cacctgtaggcagacaaaga

SEQ ID NO: 45276 - DNA, 20 bp, synthetic construct
  source 1..20: mol_type = other DNA
gcgcactcaccgtggtgggt

SEQ ID NO: 45277 - DNA, 20 bp, synthetic construct
  source 1..20: mol_type = other DNA
cccgagcaaggacgtcacct

SEQ ID NO: 45278 - DNA, 20 bp, synthetic construct
  source 1..20: mol_type = other DNA
atgcccttactctccgcatc

SEQ ID NO: 45279 - DNA, 20 bp, synthetic construct
  source 1..20: mol_type = other DNA
acaggtgagcaggtcagggt

SEQ ID NO: 45280 - DNA, 20 bp, synthetic construct
  source 1..20: mol_type = other DNA
gccccagcacgcaggggacc

SEQ ID NO: 45281 - DNA, 20 bp, synthetic construct
  source 1..20: mol_type = other DNA
cagcccaagtaaggagactg

SEQ ID NO: 45282 - DNA, 20 bp, synthetic construct
  source 1..20: mol_type = other DNA
tactcccggctgccatctgt

SEQ ID NO: 45283 - DNA, 20 bp, synthetic construct
  source 1..20: mol_type = other DNA
cgccatggctccgacgctgg

SEQ ID NO: 45284 - DNA, 20 bp, synthetic construct
  source 1..20: mol_type = other DNA
ctggtcctatgcagtaggca

SEQ ID NO: 45285 - DNA, 20 bp, synthetic construct
  source 1..20: mol_type = other DNA
cactcacgtgttgtgcgagg

SEQ ID NO: 45286 - DNA, 20 bp, synthetic construct
  source 1..20: mol_type = other DNA
gtaccactccctctttgctc

SEQ ID NO: 45287 - DNA, 20 bp, synthetic construct
  source 1..20: mol_type = other DNA
tttcaggtaagtccatcagg

SEQ ID NO: 45288 - DNA, 20 bp, synthetic construct
  source 1..20: mol_type = other DNA
accaggggtctggaagttga

SEQ ID NO: 45289 - DNA, 20 bp, synthetic construct
  source 1..20: mol_type = other DNA
ctcaccaaatgaccacacat

SEQ ID NO: 45290 - DNA, 20 bp, synthetic construct
  source 1..20: mol_type = other DNA
gcagcaccaccatttccacc

SEQ ID NO: 45291 - DNA, 20 bp, synthetic construct
  source 1..20: mol_type = other DNA
acttcatccccatggacacc

SEQ ID NO: 45292 - DNA, 20 bp, synthetic construct
  source 1..20: mol_type = other DNA
tccgcagcagcggctcccgc

SEQ ID NO: 45293 - DNA, 20 bp, synthetic construct
  source 1..20: mol_type = other DNA
agcaaagagaaagccagata

SEQ ID NO: 45294 - DNA, 20 bp, synthetic construct
  source 1..20: mol_type = other DNA
tatgtagaatgtccaacagc

SEQ ID NO: 45295 - DNA, 20 bp, synthetic construct
  source 1..20: mol_type = other DNA
ggcgctcacctcagcagggc

SEQ ID NO: 45296 - DNA, 20 bp, synthetic construct
  source 1..20: mol_type = other DNA
agtcactcacagtccagctg

SEQ ID NO: 45297 - DNA, 20 bp, synthetic construct
  source 1..20: mol_type = other DNA
atcagcacacctacaagaaa

SEQ ID NO: 45298 - DNA, 20 bp, synthetic construct
  source 1..20: mol_type = other DNA
atcgaggaccaaggtgccca

SEQ ID NO: 45299 - DNA, 20 bp, synthetic construct
  source 1..20: mol_type = other DNA
gacactggccacaggtgagc

SEQ ID NO: 45300 - DNA, 20 bp, synthetic construct
  source 1..20: mol_type = other DNA
gaggatgcctctcttgctct

SEQ ID NO: 45301 - DNA, 20 bp, synthetic construct
  source 1..20: mol_type = other DNA
gagcacaaaaggaagcagtg

SEQ ID NO: 45302 - DNA, 20 bp, synthetic construct
  source 1..20: mol_type = other DNA
ccgccatggctccgacgctg

SEQ ID NO: 45303 - DNA, 20 bp, synthetic construct
  source 1..20: mol_type = other DNA
gcctggtgtctgctgagctc

SEQ ID NO: 45304 - DNA, 20 bp, synthetic construct
  source 1..20: mol_type = other DNA
ttggacagatctattccaga

SEQ ID NO: 45305 - DNA, 20 bp, synthetic construct
  source 1..20: mol_type = other DNA
gtattcagtgatgatgtaga

SEQ ID NO: 45306 - DNA, 20 bp, synthetic construct
  source 1..20: mol_type = other DNA
ccggctttccccccatctca

SEQ ID NO: 45307 - DNA, 20 bp, synthetic construct
  source 1..20: mol_type = other DNA
gcagctcaccatcttggtga

SEQ ID NO: 45308 - DNA, 20 bp, synthetic construct
  source 1..20: mol_type = other DNA
aatccacatctgctggaagg

SEQ ID NO: 45309 - DNA, 20 bp, synthetic construct
  source 1..20: mol_type = other DNA
ttcacagtacctggaggaga

SEQ ID NO: 45310 - DNA, 20 bp, synthetic construct
  source 1..20: mol_type = other DNA
ccagctgtgagatgtacttg

SEQ ID NO: 45311 - DNA, 20 bp, synthetic construct
  source 1..20: mol_type = other DNA
ccgggacttcgaccagaacc

SEQ ID NO: 45312 - DNA, 20 bp, synthetic construct
  source 1..20: mol_type = other DNA
caaaacactgaacctctggg

SEQ ID NO: 45313 - DNA, 20 bp, synthetic construct
  source 1..20: mol_type = other DNA
ggcgcagtacccgctgccgg

SEQ ID NO: 45314 - DNA, 20 bp, synthetic construct
  source 1..20: mol_type = other DNA
cattgccgtgtccagcaaga

SEQ ID NO: 45315 - DNA, 20 bp, synthetic construct
  source 1..20: mol_type = other DNA
tattgtaccacctgaaagca

SEQ ID NO: 45316 - DNA, 20 bp, synthetic construct
  source 1..20: mol_type = other DNA
tcttgatgagctgttcttcc

SEQ ID NO: 45317 - DNA, 20 bp, synthetic construct
  source 1..20: mol_type = other DNA
tagaactcgcagagctctgc

SEQ ID NO: 45318 - DNA, 20 bp, synthetic construct
  source 1..20: mol_type = other DNA
ggtatttcaccgagtctggt

SEQ ID NO: 45319 - DNA, 20 bp, synthetic construct
  source 1..20: mol_type = other DNA
ggcgcagatcatgcaccagc

SEQ ID NO: 45320 - DNA, 20 bp, synthetic construct
  source 1..20: mol_type = other DNA
ccagcacttcttctgcaagg

SEQ ID NO: 45321 - DNA, 20 bp, synthetic construct
  source 1..20: mol_type = other DNA
ctgaatacatggagaatggt

SEQ ID NO: 45322 - DNA, 20 bp, synthetic construct
  source 1..20: mol_type = other DNA
tgaggcactcacatggacat

SEQ ID NO: 45323 - DNA, 20 bp, synthetic construct
  source 1..20: mol_type = other DNA
caacgggaggttcaccctgc

SEQ ID NO: 45324 - DNA, 20 bp, synthetic construct
  source 1..20: mol_type = other DNA
ccagcaggacaggtcctccg

SEQ ID NO: 45325 - DNA, 20 bp, synthetic construct
  source 1..20: mol_type = other DNA
cggtgcatgaagagatccag

SEQ ID NO: 45326 - DNA, 20 bp, synthetic construct
  source 1..20: mol_type = other DNA
atccccaccgtgtgagttcc

SEQ ID NO: 45327 - DNA, 20 bp, synthetic construct
  source 1..20: mol_type = other DNA
gctcagcctgtgctctggtc

SEQ ID NO: 45328 - DNA, 20 bp, synthetic construct
  source 1..20: mol_type = other DNA
ggaaccactgggcaggtggg

SEQ ID NO: 45329 - DNA, 20 bp, synthetic construct
  source 1..20: mol_type = other DNA
cacaggaggagctgcaggac

SEQ ID NO: 45330 - DNA, 20 bp, synthetic construct
  source 1..20: mol_type = other DNA
ccacaaccacactctggagg

SEQ ID NO: 45331 - DNA, 20 bp, synthetic construct
  source 1..20: mol_type = other DNA
cacaggctggggcttccttc

SEQ ID NO: 45332 - DNA, 20 bp, synthetic construct
  source 1..20: mol_type = other DNA
ttcactgaatcttagcagga

SEQ ID NO: 45333 - DNA, 20 bp, synthetic construct
  source 1..20: mol_type = other DNA
gaaggagccgtgagtgttcc

SEQ ID NO: 45334 - DNA, 20 bp, synthetic construct
  source 1..20: mol_type = other DNA
agatcgatcagctaaagcac

SEQ ID NO: 45335 - DNA, 20 bp, synthetic construct
  source 1..20: mol_type = other DNA
cgggtgaggcaggcagggct

SEQ ID NO: 45336 - DNA, 20 bp, synthetic construct
  source 1..20: mol_type = other DNA
gtccatggggatgaagtacc

SEQ ID NO: 45337 - DNA, 20 bp, synthetic construct
  source 1..20: mol_type = other DNA
gctgaccttgatggtggggt

SEQ ID NO: 45338 - DNA, 20 bp, synthetic construct
  source 1..20: mol_type = other DNA
gccagctcctgagggaaggg

SEQ ID NO: 45339 - DNA, 20 bp, synthetic construct
  source 1..20: mol_type = other DNA
gagcacgatggggtagatgt

SEQ ID NO: 45340 - DNA, 20 bp, synthetic construct
  source 1..20: mol_type = other DNA
ctcatgatggctcggaagaa

SEQ ID NO: 45341 - DNA, 20 bp, synthetic construct
  source 1..20: mol_type = other DNA
tccataccttacaacagcct

SEQ ID NO: 45342 - DNA, 20 bp, synthetic construct
  source 1..20: mol_type = other DNA
cagtgcagctccaggcggca

SEQ ID NO: 45343 - DNA, 20 bp, synthetic construct
  source 1..20: mol_type = other DNA
ggacagatcaatggctacac

SEQ ID NO: 45344 - DNA, 20 bp, synthetic construct
  source 1..20: mol_type = other DNA
ccaatgagccgcacgatgta

SEQ ID NO: 45345 - DNA, 20 bp, synthetic construct
  source 1..20: mol_type = other DNA
gccccagaagccgtggtggg

SEQ ID NO: 45346 - DNA, 20 bp, synthetic construct
  source 1..20: mol_type = other DNA
atttcagatccaggatactg

SEQ ID NO: 45347 - DNA, 20 bp, synthetic construct
  source 1..20: mol_type = other DNA
cctcccgggctgcggccaca

SEQ ID NO: 45348 - DNA, 20 bp, synthetic construct
  source 1..20: mol_type = other DNA
cagctctccaatctgaaggt

SEQ ID NO: 45349 - DNA, 20 bp, synthetic construct
  source 1..20: mol_type = other DNA
cccagtggttcccagaagtg

SEQ ID NO: 45350 - DNA, 20 bp, synthetic construct
  source 1..20: mol_type = other DNA
tgactacaaggcccagaggg

SEQ ID NO: 45351 - DNA, 20 bp, synthetic construct
  source 1..20: mol_type = other DNA
taaaatctacatggaagaaa

SEQ ID NO: 45352 - DNA, 20 bp, synthetic construct
  source 1..20: mol_type = other DNA
ctcctggatcaggcgcccga

SEQ ID NO: 45353 - DNA, 20 bp, synthetic construct
  source 1..20: mol_type = other DNA
tgagagtgcacagtggagaa

SEQ ID NO: 45354 - DNA, 20 bp, synthetic construct
  source 1..20: mol_type = other DNA
attcctggaacagaccaaag

SEQ ID NO: 45355 - DNA, 20 bp, synthetic construct
  source 1..20: mol_type = other DNA
gctggacctgcgggacgaca

SEQ ID NO: 45356 - DNA, 20 bp, synthetic construct
  source 1..20: mol_type = other DNA
cctcacgcgtcaggctgctg

SEQ ID NO: 45357 - DNA, 20 bp, synthetic construct
  source 1..20: mol_type = other DNA
cgccacctgtgggagccaca

SEQ ID NO: 45358 - DNA, 20 bp, synthetic construct
  source 1..20: mol_type = other DNA
tcaagaaatgctgcggggaa

SEQ ID NO: 45359 - DNA, 20 bp, synthetic construct
  source 1..20: mol_type = other DNA
cacagtggaggaaggccacg

SEQ ID NO: 45360 - DNA, 20 bp, synthetic construct
  source 1..20: mol_type = other DNA
ctgttataggagctcaatct

SEQ ID NO: 45361 - DNA, 20 bp, synthetic construct
  source 1..20: mol_type = other DNA
cctgtggaagacacagagtg

SEQ ID NO: 45362 - DNA, 20 bp, synthetic construct
  source 1..20: mol_type = other DNA
gcagaagatgaaagggccgg

SEQ ID NO: 45363 - DNA, 20 bp, synthetic construct
  source 1..20: mol_type = other DNA
gcagcacaccgtctgtggat

SEQ ID NO: 45364 - DNA, 20 bp, synthetic construct
  source 1..20: mol_type = other DNA
gacgcacgggcagatcggca

SEQ ID NO: 45365 - DNA, 20 bp, synthetic construct
  source 1..20: mol_type = other DNA
aggcgccctggccagtcgtc

SEQ ID NO: 45366 - DNA, 20 bp, synthetic construct
  source 1..20: mol_type = other DNA
cgggccagccagagctcccc

SEQ ID NO: 45367 - DNA, 20 bp, synthetic construct
  source 1..20: mol_type = other DNA
cggtgtcacacagataaact

SEQ ID NO: 45368 - DNA, 20 bp, synthetic construct
  source 1..20: mol_type = other DNA
ccctcagggaccatgggctg

SEQ ID NO: 45369 - DNA, 20 bp, synthetic construct
  source 1..20: mol_type = other DNA
cgcgcaagcagccgctgggc

SEQ ID NO: 45370 - DNA, 20 bp, synthetic construct
  source 1..20: mol_type = other DNA
ggccgaggagcacctgaagc

SEQ ID NO: 45371 - DNA, 20 bp, synthetic construct
  source 1..20: mol_type = other DNA
ccaagaggagtggtttaagg

SEQ ID NO: 45372 - DNA, 20 bp, synthetic construct
  source 1..20: mol_type = other DNA
ctcacctgggccttcagcac

SEQ ID NO: 45373 - DNA, 20 bp, synthetic construct
  source 1..20: mol_type = other DNA
tcttcacacgcaagtgagtg

SEQ ID NO: 45374 - DNA, 20 bp, synthetic construct
  source 1..20: mol_type = other DNA
gagccgtagaaagggtccaa

SEQ ID NO: 45375 - DNA, 20 bp, synthetic construct
  source 1..20: mol_type = other DNA
gccgccagacagcactgtgt

SEQ ID NO: 45376 - DNA, 20 bp, synthetic construct
  source 1..20: mol_type = other DNA
ctgtcagatgccaaatgcct

SEQ ID NO: 45377 - DNA, 20 bp, synthetic construct
  source 1..20: mol_type = other DNA
gcgccagatcacgtggagcc

SEQ ID NO: 45378 - DNA, 20 bp, synthetic construct
  source 1..20: mol_type = other DNA
gaaggagcagggactggaag

SEQ ID NO: 45379 - DNA, 20 bp, synthetic construct
  source 1..20: mol_type = other DNA
gctaccgctgccatcggtgc

SEQ ID NO: 45380 - DNA, 20 bp, synthetic construct
  source 1..20: mol_type = other DNA
cctggccgtcatctgctccc

SEQ ID NO: 45381 - DNA, 20 bp, synthetic construct
  source 1..20: mol_type = other DNA
agagactggtcctatgcagt

SEQ ID NO: 45382 - DNA, 20 bp, synthetic construct
  source 1..20: mol_type = other DNA
gatcgaggaccaaggtgccc

SEQ ID NO: 45383 - DNA, 20 bp, synthetic construct
  source 1..20: mol_type = other DNA
gcagcagcggctcccgcagg

SEQ ID NO: 45384 - DNA, 20 bp, synthetic construct
  source 1..20: mol_type = other DNA
ggcacctacgccattgccgg

SEQ ID NO: 45385 - DNA, 20 bp, synthetic construct
  source 1..20: mol_type = other DNA
cctcatcagccaagacaagg

SEQ ID NO: 45386 - DNA, 20 bp, synthetic construct
  source 1..20: mol_type = other DNA
ggtcagctcgtcctccctct

SEQ ID NO: 45387 - DNA, 20 bp, synthetic construct
  source 1..20: mol_type = other DNA
tccctgcagagaaacacact

SEQ ID NO: 45388 - DNA, 20 bp, synthetic construct
  source 1..20: mol_type = other DNA
tcgctgagcctccgcagcag

SEQ ID NO: 45389 - DNA, 20 bp, synthetic construct
  source 1..20: mol_type = other DNA
caccaggatgatgggtgtgc

SEQ ID NO: 45390 - DNA, 20 bp, synthetic construct
  source 1..20: mol_type = other DNA
gctcctgcactcagcacccc

SEQ ID NO: 45391 - DNA, 20 bp, synthetic construct
  source 1..20: mol_type = other DNA
gttcacttcatcctcagatg

SEQ ID NO: 45392 - DNA, 20 bp, synthetic construct
  source 1..20: mol_type = other DNA
tcatacagggccccgtagtc

SEQ ID NO: 45393 - DNA, 20 bp, synthetic construct
  source 1..20: mol_type = other DNA
ttgatcttggatggcagcat

SEQ ID NO: 45394 - DNA, 20 bp, synthetic construct
  source 1..20: mol_type = other DNA
gacaaggtaaaagagggatg

SEQ ID NO: 45395 - DNA, 20 bp, synthetic construct
  source 1..20: mol_type = other DNA
cgaggaatatataggtgtaa

SEQ ID NO: 45396 - DNA, 20 bp, synthetic construct
  source 1..20: mol_type = other DNA
ccctgcagagaaacacactt

SEQ ID NO: 45397 - DNA, 20 bp, synthetic construct
  source 1..20: mol_type = other DNA
ttcaggtatggggcagcgcc

SEQ ID NO: 45398 - DNA, 20 bp, synthetic construct
  source 1..20: mol_type = other DNA
ctccactaccggatgaggta

SEQ ID NO: 45399 - DNA, 20 bp, synthetic construct
  source 1..20: mol_type = other DNA
ctgtaggggcaaccagaaca

SEQ ID NO: 45400 - DNA, 20 bp, synthetic construct
  source 1..20: mol_type = other DNA
acgagaactcgtaccggtcc

SEQ ID NO: 45401 - DNA, 20 bp, synthetic construct
  source 1..20: mol_type = other DNA
ggagctggatccagccaccg

SEQ ID NO: 45402 - DNA, 20 bp, synthetic construct
  source 1..20: mol_type = other DNA
actccacctggctgcagtag

SEQ ID NO: 45403 - DNA, 20 bp, synthetic construct
  source 1..20: mol_type = other DNA
catctgcgaggacgagggag

SEQ ID NO: 45404 - DNA, 20 bp, synthetic construct
  source 1..20: mol_type = other DNA
tggccacccagactgaccag

SEQ ID NO: 45405 - DNA, 20 bp, synthetic construct
  source 1..20: mol_type = other DNA
gacctcacctgtggatgcag

SEQ ID NO: 45406 - DNA, 20 bp, synthetic construct
  source 1..20: mol_type = other DNA
ggctggccctggatgccatg

SEQ ID NO: 45407 - DNA, 20 bp, synthetic construct
  source 1..20: mol_type = other DNA
aacggcaaagcgtgagtaca

SEQ ID NO: 45408 - DNA, 20 bp, synthetic construct
  source 1..20: mol_type = other DNA
ggtcagtttctgagactgca

SEQ ID NO: 45409 - DNA, 20 bp, synthetic construct
  source 1..20: mol_type = other DNA
tgtcctccagggcctccttg

SEQ ID NO: 45410 - DNA, 20 bp, synthetic construct
  source 1..20: mol_type = other DNA
actgaatacatggagaatgg

SEQ ID NO: 45411 - DNA, 20 bp, synthetic construct
  source 1..20: mol_type = other DNA
catcgagcagggcaagcgga

SEQ ID NO: 45412 - DNA, 20 bp, synthetic construct
  source 1..20: mol_type = other DNA
gaggacagccaaggggcacg

SEQ ID NO: 45413 - DNA, 20 bp, synthetic construct
  source 1..20: mol_type = other DNA
tcccaaagcaaggagcagag

SEQ ID NO: 45414 - DNA, 20 bp, synthetic construct
  source 1..20: mol_type = other DNA
gccaatgagccgcacgatgt

SEQ ID NO: 45415 - DNA, 20 bp, synthetic construct
  source 1..20: mol_type = other DNA
ggccacccaggggatcctgt

SEQ ID NO: 45416 - DNA, 20 bp, synthetic construct
  source 1..20: mol_type = other DNA
cgttgtagtaccctgggtcg

SEQ ID NO: 45417 - DNA, 20 bp, synthetic construct
  source 1..20: mol_type = other DNA
tggatcaggcgcccgagggc

SEQ ID NO: 45418 - DNA, 20 bp, synthetic construct
  source 1..20: mol_type = other DNA
ctcccagccatccgtcctga

SEQ ID NO: 45419 - DNA, 20 bp, synthetic construct
  source 1..20: mol_type = other DNA
cgcccacgacaccaaccacc

SEQ ID NO: 45420 - DNA, 20 bp, synthetic construct
  source 1..20: mol_type = other DNA
caccagcgtcttggccagca

SEQ ID NO: 45421 - DNA, 20 bp, synthetic construct
  source 1..20: mol_type = other DNA
acgcactccggtaggtcccc

SEQ ID NO: 45422 - DNA, 20 bp, synthetic construct
  source 1..20: mol_type = other DNA
ggcaggccttgtagctgcag

SEQ ID NO: 45423 - DNA, 20 bp, synthetic construct
  source 1..20: mol_type = other DNA
aatataataaccctgaaaag

SEQ ID NO: 45424 - DNA, 20 bp, synthetic construct
  source 1..20: mol_type = other DNA
tccgaaatggctctgaggtg

SEQ ID NO: 45425 - DNA, 20 bp, synthetic construct
  source 1..20: mol_type = other DNA
ctggataggcaaggagaggc

SEQ ID NO: 45426 - DNA, 20 bp, synthetic construct
  source 1..20: mol_type = other DNA
cagttccaaaccctggtggt

SEQ ID NO: 45427 - DNA, 20 bp, synthetic construct
  source 1..20: mol_type = other DNA
gccccctcgctaacagccag

SEQ ID NO: 45428 - DNA, 20 bp, synthetic construct
  source 1..20: mol_type = other DNA
agcatctgcgaggacgaggg

SEQ ID NO: 45429 - DNA, 20 bp, synthetic construct
  source 1..20: mol_type = other DNA
aggggaagttcatttgacac

SEQ ID NO: 45430 - DNA, 20 bp, synthetic construct
  source 1..20: mol_type = other DNA
cagtgccaggccctgcgggt

SEQ ID NO: 45431 - DNA, 20 bp, synthetic construct
  source 1..20: mol_type = other DNA
gagcagagatgtgggaatgg

SEQ ID NO: 45432 - DNA, 20 bp, synthetic construct
  source 1..20: mol_type = other DNA
tctgtcagatgccaaatgcc

SEQ ID NO: 45433 - DNA, 20 bp, synthetic construct
  source 1..20: mol_type = other DNA
accagcgccggaggggcaag

SEQ ID NO: 45434 - DNA, 20 bp, synthetic construct
  source 1..20: mol_type = other DNA
ggccagtttcttcccttcca

SEQ ID NO: 45435 - DNA, 20 bp, synthetic construct
  source 1..20: mol_type = other DNA
tcaggaaaccgcgggacttg

SEQ ID NO: 45436 - DNA, 20 bp, synthetic construct
  source 1..20: mol_type = other DNA
gaaccaggccctcttcatga

SEQ ID NO: 45437 - DNA, 20 bp, synthetic construct
  source 1..20: mol_type = other DNA
tgtggccacagcactttgtc

SEQ ID NO: 45438 - DNA, 20 bp, synthetic construct
  source 1..20: mol_type = other DNA
ggtttattatcagtgcgtcc

SEQ ID NO: 45439 - DNA, 20 bp, synthetic construct
  source 1..20: mol_type = other DNA
tgtggcagacctacagtgta

SEQ ID NO: 45440 - DNA, 20 bp, synthetic construct
  source 1..20: mol_type = other DNA
gccggagaccttgaagagcg

SEQ ID NO: 45441 - DNA, 20 bp, synthetic construct
  source 1..20: mol_type = other DNA
ccctgtggggcaacggggaa

SEQ ID NO: 45442 - DNA, 20 bp, synthetic construct
  source 1..20: mol_type = other DNA
cacaaaaggaagcagtgtgg

SEQ ID NO: 45443 - DNA, 20 bp, synthetic construct
  source 1..20: mol_type = other DNA
acagcaaggctggtggcgag

SEQ ID NO: 45444 - DNA, 20 bp, synthetic construct
  source 1..20: mol_type = other DNA
atcctccagctgccgcaacc

SEQ ID NO: 45445 - DNA, 20 bp, synthetic construct
  source 1..20: mol_type = other DNA
cctgctcggttgatcttgga

SEQ ID NO: 45446 - DNA, 20 bp, synthetic construct
  source 1..20: mol_type = other DNA
ggccatcctgctaaaatcag

SEQ ID NO: 45447 - DNA, 20 bp, synthetic construct
  source 1..20: mol_type = other DNA
ttggacattctacataccaa

SEQ ID NO: 45448 - DNA, 20 bp, synthetic construct
  source 1..20: mol_type = other DNA
accctgttgtcttcaggagt

SEQ ID NO: 45449 - DNA, 20 bp, synthetic construct
  source 1..20: mol_type = other DNA
cgtctgcctgctggtaggac

SEQ ID NO: 45450 - DNA, 20 bp, synthetic construct
  source 1..20: mol_type = other DNA
cccctgactatgaagaagga

SEQ ID NO: 45451 - DNA, 20 bp, synthetic construct
  source 1..20: mol_type = other DNA
aaaccgaagcaactcagagg

SEQ ID NO: 45452 - DNA, 20 bp, synthetic construct
  source 1..20: mol_type = other DNA
cggctacagcttcaccacca

SEQ ID NO: 45453 - DNA, 20 bp, synthetic construct
  source 1..20: mol_type = other DNA
acgcaggtagggcgtgagct

SEQ ID NO: 45454 - DNA, 20 bp, synthetic construct
  source 1..20: mol_type = other DNA
ggagaaggacatcagcggta

SEQ ID NO: 45455 - DNA, 20 bp, synthetic construct
  source 1..20: mol_type = other DNA
ctacctgtgagtggccaggt

SEQ ID NO: 45456 - DNA, 20 bp, synthetic construct
  source 1..20: mol_type = other DNA
ccagaatgtggagaagcaag

SEQ ID NO: 45457 - DNA, 20 bp, synthetic construct
  source 1..20: mol_type = other DNA
acacctgcacgagagcccca

SEQ ID NO: 45458 - DNA, 20 bp, synthetic construct
  source 1..20: mol_type = other DNA
cagggtgaacctcccgttgt

SEQ ID NO: 45459 - DNA, 20 bp, synthetic construct
  source 1..20: mol_type = other DNA
ttcatcaagctgagtgaccc

SEQ ID NO: 45460 - DNA, 20 bp, synthetic construct
  source 1..20: mol_type = other DNA
ttgacgcaggaggccctgtg

SEQ ID NO: 45461 - DNA, 20 bp, synthetic construct
  source 1..20: mol_type = other DNA
agaatttatcatttcgtggt

SEQ ID NO: 45462 - DNA, 20 bp, synthetic construct
  source 1..20: mol_type = other DNA
ctcggccagctcctgaggga

SEQ ID NO: 45463 - DNA, 20 bp, synthetic construct
  source 1..20: mol_type = other DNA
ggaacatgtggctccactgc

SEQ ID NO: 45464 - DNA, 20 bp, synthetic construct
  source 1..20: mol_type = other DNA
gcagcagggcctgaaagaca

SEQ ID NO: 45465 - DNA, 20 bp, synthetic construct
  source 1..20: mol_type = other DNA
gaagctgaaaagagaaaaac

SEQ ID NO: 45466 - DNA, 20 bp, synthetic construct
  source 1..20: mol_type = other DNA
tatcagtaaggagcgggagc

SEQ ID NO: 45467 - DNA, 20 bp, synthetic construct
  source 1..20: mol_type = other DNA
aatgtccaacagccggccta

SEQ ID NO: 45468 - DNA, 20 bp, synthetic construct
  source 1..20: mol_type = other DNA
tgagccgcaaggacgcggag

SEQ ID NO: 45469 - DNA, 20 bp, synthetic construct
  source 1..20: mol_type = other DNA
ttctgaaatgaagacacata

SEQ ID NO: 45470 - DNA, 20 bp, synthetic construct
  source 1..20: mol_type = other DNA
cggggaggtggtggaggtcc

SEQ ID NO: 45471 - DNA, 20 bp, synthetic construct
  source 1..20: mol_type = other DNA
aagcggactttaaagttcga

SEQ ID NO: 45472 - DNA, 20 bp, synthetic construct
  source 1..20: mol_type = other DNA
actgcagaaagataagatgg

SEQ ID NO: 45473 - DNA, 20 bp, synthetic construct
  source 1..20: mol_type = other DNA
tcctggccgtcatctgctcc

SEQ ID NO: 45474 - DNA, 20 bp, synthetic construct
  source 1..20: mol_type = other DNA
gagaaggcaggtcttgccca

SEQ ID NO: 45475 - DNA, 20 bp, synthetic construct
  source 1..20: mol_type = other DNA
acacaaggagtgtctgggga

SEQ ID NO: 45476 - DNA, 20 bp, synthetic construct
  source 1..20: mol_type = other DNA
tcttaagctggttgggtgag

SEQ ID NO: 45477 - DNA, 20 bp, synthetic construct
  source 1..20: mol_type = other DNA
atgaagctggaggtgggcgc

SEQ ID NO: 45478 - DNA, 20 bp, synthetic construct
  source 1..20: mol_type = other DNA
aatcttagcaggaaggtgcc

SEQ ID NO: 45479 - DNA, 20 bp, synthetic construct
  source 1..20: mol_type = other DNA
tttcacctgtgcatatgagc

SEQ ID NO: 45480 - DNA, 20 bp, synthetic construct
  source 1..20: mol_type = other DNA
tcggtcaccacgagcagggc

SEQ ID NO: 45481 - DNA, 20 bp, synthetic construct
  source 1..20: mol_type = other DNA
tcctcaggctctcctggtac

SEQ ID NO: 45482 - DNA, 20 bp, synthetic construct
  source 1..20: mol_type = other DNA
tgacgagggagaagcagatg

SEQ ID NO: 45483 - DNA, 20 bp, synthetic construct
  source 1..20: mol_type = other DNA
acagcggcacctacctctgt

SEQ ID NO: 45484 - DNA, 20 bp, synthetic construct
  source 1..20: mol_type = other DNA
ctgcaaggtgggagttaagg

SEQ ID NO: 45485 - DNA, 20 bp, synthetic construct
  source 1..20: mol_type = other DNA
cctggctcagtgcgtgaacg

SEQ ID NO: 45486 - DNA, 20 bp, synthetic construct
  source 1..20: mol_type = other DNA
accaccagcacaggggtaca

SEQ ID NO: 45487 - DNA, 20 bp, synthetic construct
  source 1..20: mol_type = other DNA
tcgccacctgtgggagccac

SEQ ID NO: 45488 - DNA, 20 bp, synthetic construct
  source 1..20: mol_type = other DNA
ccggagaatgccaccgccaa

SEQ ID NO: 45489 - DNA, 20 bp, synthetic construct
  source 1..20: mol_type = other DNA
gcatcacctgcactctcttc

SEQ ID NO: 45490 - DNA, 20 bp, synthetic construct
  source 1..20: mol_type = other DNA
gcagttgtgtgacacggaag

SEQ ID NO: 45491 - DNA, 20 bp, synthetic construct
  source 1..20: mol_type = other DNA
gaccctgacctgctcacctg

SEQ ID NO: 45492 - DNA, 20 bp, synthetic construct
  source 1..20: mol_type = other DNA
gcgccagacgtggaagctgg

SEQ ID NO: 45493 - DNA, 20 bp, synthetic construct
  source 1..20: mol_type = other DNA
gggaccacttgcttgatctg

SEQ ID NO: 45494 - DNA, 20 bp, synthetic construct
  source 1..20: mol_type = other DNA
ggcccagcttgttgtgcagg

SEQ ID NO: 45495 - DNA, 20 bp, synthetic construct
  source 1..20: mol_type = other DNA
atcttgaaggggctcactaa

SEQ ID NO: 45496 - DNA, 20 bp, synthetic construct
  source 1..20: mol_type = other DNA
tggttccacggactggatct

SEQ ID NO: 45497 - DNA, 20 bp, synthetic construct
  source 1..20: mol_type = other DNA
ccggcccctgtcctaccagc

SEQ ID NO: 45498 - DNA, 20 bp, synthetic construct
  source 1..20: mol_type = other DNA
caatacttcaagaaggtgct

SEQ ID NO: 45499 - DNA, 20 bp, synthetic construct
  source 1..20: mol_type = other DNA
cacactcctcaccaagcccg

SEQ ID NO: 45500 - DNA, 20 bp, synthetic construct
  source 1..20: mol_type = other DNA
ctccaccagctgcagggagc

SEQ ID NO: 45501 - DNA, 20 bp, synthetic construct
  source 1..20: mol_type = other DNA
cacgggatggggagcaggtc

SEQ ID NO: 45502 - DNA, 20 bp, synthetic construct
  source 1..20: mol_type = other DNA
tcctcaccatgttcctgaag

SEQ ID NO: 45503 - DNA, 20 bp, synthetic construct
  source 1..20: mol_type = other DNA
tgtggggaaaacctctctgt

SEQ ID NO: 45504 - DNA, 20 bp, synthetic construct
  source 1..20: mol_type = other DNA
gttgacctcacgcaggttga

SEQ ID NO: 45505 - DNA, 20 bp, synthetic construct
  source 1..20: mol_type = other DNA
atcctgaatgaatgaatgga

SEQ ID NO: 45506 - DNA, 20 bp, synthetic construct
  source 1..20: mol_type = other DNA
cctcaccatgttcctgaagt

SEQ ID NO: 45507 - DNA, 20 bp, synthetic construct
  source 1..20: mol_type = other DNA
ctgaggtttggtttggagtg

SEQ ID NO: 45508 - DNA, 20 bp, synthetic construct
  source 1..20: mol_type = other DNA
cttcgtgaaaccatctgtgg

SEQ ID NO: 45509 - DNA, 20 bp, synthetic construct
  source 1..20: mol_type = other DNA
gcctggggtcaccttgcagt

SEQ ID NO: 45510 - DNA, 20 bp, synthetic construct
  source 1..20: mol_type = other DNA
tggacagatctattccagag

SEQ ID NO: 45511 - DNA, 20 bp, synthetic construct
  source 1..20: mol_type = other DNA
ttactcatgggcaaggaggt

SEQ ID NO: 45512 - DNA, 20 bp, synthetic construct
  source 1..20: mol_type = other DNA
ctttcatcttctgctcaagc

SEQ ID NO: 45513 - DNA, 20 bp, synthetic construct
  source 1..20: mol_type = other DNA
agggccagacagtgatgcta

SEQ ID NO: 45514 - DNA, 20 bp, synthetic construct
  source 1..20: mol_type = other DNA
gaagaaccagctgtgcaggg

SEQ ID NO: 45515 - DNA, 20 bp, synthetic construct
  source 1..20: mol_type = other DNA
agcaggcagtgcttgttctg

SEQ ID NO: 45516 - DNA, 20 bp, synthetic construct
  source 1..20: mol_type = other DNA
agaagccccagaagccgtgg

SEQ ID NO: 45517 - DNA, 20 bp, synthetic construct
  source 1..20: mol_type = other DNA
gctccaggactggcaggtca

SEQ ID NO: 45518 - DNA, 20 bp, synthetic construct
  source 1..20: mol_type = other DNA
tctgaggtttggtttggagt

SEQ ID NO: 45519 - DNA, 20 bp, synthetic construct
  source 1..20: mol_type = other DNA
atctgctcccgggccgcacg

SEQ ID NO: 45520 - DNA, 20 bp, synthetic construct
  source 1..20: mol_type = other DNA
tccacttgttcttcaagttc

SEQ ID NO: 45521 - DNA, 20 bp, synthetic construct
  source 1..20: mol_type = other DNA
tgttaagcagctgacacaga

SEQ ID NO: 45522 - DNA, 20 bp, synthetic construct
  source 1..20: mol_type = other DNA
gtcacgaatgacggctcgga

SEQ ID NO: 45523 - DNA, 20 bp, synthetic construct
  source 1..20: mol_type = other DNA
ttgacgcagcagtctggaga

SEQ ID NO: 45524 - DNA, 20 bp, synthetic construct
  source 1..20: mol_type = other DNA
cgacggcaagttcctgtatg

SEQ ID NO: 45525 - DNA, 20 bp, synthetic construct
  source 1..20: mol_type = other DNA
atgagttggtacagctcctc

SEQ ID NO: 45526 - DNA, 20 bp, synthetic construct
  source 1..20: mol_type = other DNA
ttgcctctacatagaagcca

SEQ ID NO: 45527 - DNA, 20 bp, synthetic construct
  source 1..20: mol_type = other DNA
gacagcaaggctggtggcga

SEQ ID NO: 45528 - DNA, 20 bp, synthetic construct
  source 1..20: mol_type = other DNA
gaggcttacctcttcactgt

SEQ ID NO: 45529 - DNA, 20 bp, synthetic construct
  source 1..20: mol_type = other DNA
cttctccccagccctgctcg

SEQ ID NO: 45530 - DNA, 20 bp, synthetic construct
  source 1..20: mol_type = other DNA
tttcctcagtgcctttgtgg

SEQ ID NO: 45531 - DNA, 20 bp, synthetic construct
  source 1..20: mol_type = other DNA
cttgaagaaccagctgtgca

SEQ ID NO: 45532 - DNA, 20 bp, synthetic construct
  source 1..20: mol_type = other DNA
agaggcccagcttgttgtgc

SEQ ID NO: 45533 - DNA, 20 bp, synthetic construct
  source 1..20: mol_type = other DNA
ataagaggctgggctgacga

SEQ ID NO: 45534 - DNA, 20 bp, synthetic construct
  source 1..20: mol_type = other DNA
gcgagcctgttactacagcc

SEQ ID NO: 45535 - DNA, 20 bp, synthetic construct
  source 1..20: mol_type = other DNA
gcaggccatcaagtgtgtgg

SEQ ID NO: 45536 - DNA, 20 bp, synthetic construct
  source 1..20: mol_type = other DNA
ggctgatatactgagaaaac

SEQ ID NO: 45537 - DNA, 20 bp, synthetic construct
  source 1..20: mol_type = other DNA
gatccacatctgctggaagg

SEQ ID NO: 45538 - DNA, 20 bp, synthetic construct
  source 1..20: mol_type = other DNA
agaccagtcagtttccaggt

SEQ ID NO: 45539 - DNA, 20 bp, synthetic construct
  source 1..20: mol_type = other DNA
cctcgtagatgggcacagtg

SEQ ID NO: 45540 - DNA, 20 bp, synthetic construct
  source 1..20: mol_type = other DNA
ctacggccagaagccctaca

SEQ ID NO: 45541 - DNA, 20 bp, synthetic construct
  source 1..20: mol_type = other DNA
gccgggaaaagtgattcgag

SEQ ID NO: 45542 - DNA, 20 bp, synthetic construct
  source 1..20: mol_type = other DNA
tcggccagctcctgagggaa

SEQ ID NO: 45543 - DNA, 20 bp, synthetic construct
  source 1..20: mol_type = other DNA
tggtcagtacctgacagaga

SEQ ID NO: 45544 - DNA, 20 bp, synthetic construct
  source 1..20: mol_type = other DNA
gggtggccaccaccagcaca

SEQ ID NO: 45545 - DNA, 20 bp, synthetic construct
  source 1..20: mol_type = other DNA
gtagcagatttcccagagcg

SEQ ID NO: 45546 - DNA, 20 bp, synthetic construct
  source 1..20: mol_type = other DNA
cttcctccacgtagttggca

SEQ ID NO: 45547 - DNA, 20 bp, synthetic construct
  source 1..20: mol_type = other DNA
gatcagtacaccagttccac

SEQ ID NO: 45548 - DNA, 20 bp, synthetic construct
  source 1..20: mol_type = other DNA
ctgactgccacagatccaca

SEQ ID NO: 45549 - DNA, 20 bp, synthetic construct
  source 1..20: mol_type = other DNA
tcagcaccacgtctgcctgc

SEQ ID NO: 45550 - DNA, 20 bp, synthetic construct
  source 1..20: mol_type = other DNA
cctgcgcccccagatgtccc

SEQ ID NO: 45551 - DNA, 20 bp, synthetic construct
  source 1..20: mol_type = other DNA
gcttacctcttcactgttgg

SEQ ID NO: 45552 - DNA, 20 bp, synthetic construct
  source 1..20: mol_type = other DNA
tcttaggtaggtggggtcgg

SEQ ID NO: 45553 - DNA, 20 bp, synthetic construct
  source 1..20: mol_type = other DNA
aaggaagatctgcttctgtc

SEQ ID NO: 45554 - DNA, 20 bp, synthetic construct
  source 1..20: mol_type = other DNA
gagaaggacatcagcggtaa

SEQ ID NO: 45555 - DNA, 20 bp, synthetic construct
  source 1..20: mol_type = other DNA
aaggagatgaaggaagccct

SEQ ID NO: 45556 - DNA, 20 bp, synthetic construct
  source 1..20: mol_type = other DNA
acgtggtcagctccttcacg

SEQ ID NO: 45557 - DNA, 20 bp, synthetic construct
  source 1..20: mol_type = other DNA
caggtgagcaggtcagggtc

SEQ ID NO: 45558 - DNA, 20 bp, synthetic construct
  source 1..20: mol_type = other DNA
atgcccggcaccgatggcag

SEQ ID NO: 45559 - DNA, 20 bp, synthetic construct
  source 1..20: mol_type = other DNA
gcgggagcgggaccaggtac

SEQ ID NO: 45560 - DNA, 20 bp, synthetic construct
  source 1..20: mol_type = other DNA
gcatataaagtctccatctc

SEQ ID NO: 45561 - DNA, 20 bp, synthetic construct
  source 1..20: mol_type = other DNA
catctgcaggaaacagaacc

SEQ ID NO: 45562 - DNA, 20 bp, synthetic construct
  source 1..20: mol_type = other DNA
agaccacacatctgacttga

SEQ ID NO: 45563 - DNA, 20 bp, synthetic construct
  source 1..20: mol_type = other DNA
gaacatgtggctccactgca

SEQ ID NO: 45564 - DNA, 20 bp, synthetic construct
  source 1..20: mol_type = other DNA
gtctgggcggtgctacaact

SEQ ID NO: 45565 - DNA, 20 bp, synthetic construct
  source 1..20: mol_type = other DNA
gagggccagacagtgatgct

SEQ ID NO: 45566 - DNA, 20 bp, synthetic construct
  source 1..20: mol_type = other DNA
ggtttccgcagaataaaaag

SEQ ID NO: 45567 - DNA, 20 bp, synthetic construct
  source 1..20: mol_type = other DNA
cagtgcctgcgctcgctggg

SEQ ID NO: 45568 - DNA, 20 bp, synthetic construct
  source 1..20: mol_type = other DNA
tcaaggtaagggcctactag

SEQ ID NO: 45569 - DNA, 20 bp, synthetic construct
  source 1..20: mol_type = other DNA
gtagtaccctgggtcgggga

SEQ ID NO: 45570 - DNA, 20 bp, synthetic construct
  source 1..20: mol_type = other DNA
caggagcggcgagtggtgga

SEQ ID NO: 45571 - DNA, 20 bp, synthetic construct
  source 1..20: mol_type = other DNA
aagaaggtaagactttcccg

SEQ ID NO: 45572 - DNA, 20 bp, synthetic construct
  source 1..20: mol_type = other DNA
tccagtaccaggagagcctg

SEQ ID NO: 45573 - DNA, 20 bp, synthetic construct
  source 1..20: mol_type = other DNA
gctgatatactgagaaaaca

SEQ ID NO: 45574 - DNA, 20 bp, synthetic construct
  source 1..20: mol_type = other DNA
cgagatgctgccgtagaaga

SEQ ID NO: 45575 - DNA, 20 bp, synthetic construct
  source 1..20: mol_type = other DNA
tcccaaggtgctcgccctga

SEQ ID NO: 45576 - DNA, 20 bp, synthetic construct
  source 1..20: mol_type = other DNA
tgtgcgacgagaactcgtac

SEQ ID NO: 45577 - DNA, 20 bp, synthetic construct
  source 1..20: mol_type = other DNA
ttgagtgtgcgtggggtcca

SEQ ID NO: 45578 - DNA, 20 bp, synthetic construct
  source 1..20: mol_type = other DNA
cagatacttacttgggaaac

SEQ ID NO: 45579 - DNA, 20 bp, synthetic construct
  source 1..20: mol_type = other DNA
ttctctcaaggtttgtactc

SEQ ID NO: 45580 - DNA, 20 bp, synthetic construct
  source 1..20: mol_type = other DNA
agctggactgtgagtgacta

SEQ ID NO: 45581 - DNA, 20 bp, synthetic construct
  source 1..20: mol_type = other DNA
ggtgaatgtcccgtagttaa

SEQ ID NO: 45582 - DNA, 20 bp, synthetic construct
  source 1..20: mol_type = other DNA
gttaggttctctggagccca

SEQ ID NO: 45583 - DNA, 20 bp, synthetic construct
  source 1..20: mol_type = other DNA
gagaaggtgggggggttcca

SEQ ID NO: 45584 - DNA, 20 bp, synthetic construct
  source 1..20: mol_type = other DNA
cagcagcacggggtgctcct

SEQ ID NO: 45585 - DNA, 20 bp, synthetic construct
  source 1..20: mol_type = other DNA
ttcttacctctcaatctgca

SEQ ID NO: 45586 - DNA, 20 bp, synthetic construct
  source 1..20: mol_type = other DNA
actggggagcaacatcacca

SEQ ID NO: 45587 - DNA, 20 bp, synthetic construct
  source 1..20: mol_type = other DNA
ggcggcccgcaacgtcctgc

SEQ ID NO: 45588 - DNA, 20 bp, synthetic construct
  source 1..20: mol_type = other DNA
aaagagaaagccagatatgg

SEQ ID NO: 45589 - DNA, 20 bp, synthetic construct
  source 1..20: mol_type = other DNA
tgtaggagtccgtccaggac

SEQ ID NO: 45590 - DNA, 20 bp, synthetic construct
  source 1..20: mol_type = other DNA
acataccatcatcttcatcc

SEQ ID NO: 45591 - DNA, 20 bp, synthetic construct
  source 1..20: mol_type = other DNA
tgctcccccagtggattggg

SEQ ID NO: 45592 - DNA, 20 bp, synthetic construct
  source 1..20: mol_type = other DNA
tagagctttgtcgagcagga

SEQ ID NO: 45593 - DNA, 20 bp, synthetic construct
  source 1..20: mol_type = other DNA
gtccctccatgtggccgaca

SEQ ID NO: 45594 - DNA, 20 bp, synthetic construct
  source 1..20: mol_type = other DNA
tggccgctactgcagccagg

SEQ ID NO: 45595 - DNA, 20 bp, synthetic construct
  source 1..20: mol_type = other DNA
gcagatgaggaagacgtcct

SEQ ID NO: 45596 - DNA, 20 bp, synthetic construct
  source 1..20: mol_type = other DNA
gattctcagtaagttaagtc

SEQ ID NO: 45597 - DNA, 20 bp, synthetic construct
  source 1..20: mol_type = other DNA
cctggaatcccttaccatga

SEQ ID NO: 45598 - DNA, 20 bp, synthetic construct
  source 1..20: mol_type = other DNA
ggagcatacctggtcttctc

SEQ ID NO: 45599 - DNA, 20 bp, synthetic construct
  source 1..20: mol_type = other DNA
caactaggaaggtagcaaag

SEQ ID NO: 45600 - DNA, 20 bp, synthetic construct
  source 1..20: mol_type = other DNA
aggatggttcttaggtaggt

SEQ ID NO: 45601 - DNA, 20 bp, synthetic construct
  source 1..20: mol_type = other DNA
gcagctgcaacaccagcggc

SEQ ID NO: 45602 - DNA, 20 bp, synthetic construct
  source 1..20: mol_type = other DNA
gagatccagtagtgggaaag

SEQ ID NO: 45603 - DNA, 20 bp, synthetic construct
  source 1..20: mol_type = other DNA
cagttccttcttgactacca

SEQ ID NO: 45604 - DNA, 20 bp, synthetic construct
  source 1..20: mol_type = other DNA
tgaggaggttatcgcgcttc

SEQ ID NO: 45605 - DNA, 20 bp, synthetic construct
  source 1..20: mol_type = other DNA
gacgagctggggttccacag

SEQ ID NO: 45606 - DNA, 20 bp, synthetic construct
  source 1..20: mol_type = other DNA
gatccagctccacacagctc

SEQ ID NO: 45607 - DNA, 20 bp, synthetic construct
  source 1..20: mol_type = other DNA
ggtggcgaggggactacgga

SEQ ID NO: 45608 - DNA, 20 bp, synthetic construct
  source 1..20: mol_type = other DNA
gccaggtgagcgggcagagg

SEQ ID NO: 45609 - DNA, 20 bp, synthetic construct
  source 1..20: mol_type = other DNA
cttcctgcccgacccggcca

SEQ ID NO: 45610 - DNA, 20 bp, synthetic construct
  source 1..20: mol_type = other DNA
ctacaactgggctggcggcc

SEQ ID NO: 45611 - DNA, 20 bp, synthetic construct
  source 1..20: mol_type = other DNA
gatgtccactatgacaattg

SEQ ID NO: 45612 - DNA, 20 bp, synthetic construct
  source 1..20: mol_type = other DNA
catctgccaaagaatggccg

SEQ ID NO: 45613 - DNA, 20 bp, synthetic construct
  source 1..20: mol_type = other DNA
ccagcatgagggcctcggcc

SEQ ID NO: 45614 - DNA, 20 bp, synthetic construct
  source 1..20: mol_type = other DNA
ctggacagttcggggaggtg

SEQ ID NO: 45615 - DNA, 20 bp, synthetic construct
  source 1..20: mol_type = other DNA
tctgcaggggagctcggagc

SEQ ID NO: 45616 - DNA, 20 bp, synthetic construct
  source 1..20: mol_type = other DNA
ctcacgttcatcatggtgcc

SEQ ID NO: 45617 - DNA, 20 bp, synthetic construct
  source 1..20: mol_type = other DNA
agaaggtacctctgagatgc

SEQ ID NO: 45618 - DNA, 20 bp, synthetic construct
  source 1..20: mol_type = other DNA
tcacctgtgcatatgagctg

SEQ ID NO: 45619 - DNA, 20 bp, synthetic construct
  source 1..20: mol_type = other DNA
gccctggaggatgacgagct

SEQ ID NO: 45620 - DNA, 20 bp, synthetic construct
  source 1..20: mol_type = other DNA
ctcactctctcgcacgagga

SEQ ID NO: 45621 - DNA, 20 bp, synthetic construct
  source 1..20: mol_type = other DNA
tccaggtatttcaccgagtc

SEQ ID NO: 45622 - DNA, 20 bp, synthetic construct
  source 1..20: mol_type = other DNA
ttggccagtgccaggccctg

SEQ ID NO: 45623 - DNA, 20 bp, synthetic construct
  source 1..20: mol_type = other DNA
gggtgcgtagataatctgac

SEQ ID NO: 45624 - DNA, 20 bp, synthetic construct
  source 1..20: mol_type = other DNA
gccaccgcgtgacctgggat

SEQ ID NO: 45625 - DNA, 20 bp, synthetic construct
  source 1..20: mol_type = other DNA
acagcccacagctcctgatg

SEQ ID NO: 45626 - DNA, 20 bp, synthetic construct
  source 1..20: mol_type = other DNA
gaactgctggaactcaggaa

SEQ ID NO: 45627 - DNA, 20 bp, synthetic construct
  source 1..20: mol_type = other DNA
ttaccagcagaactctctaa

SEQ ID NO: 45628 - DNA, 20 bp, synthetic construct
  source 1..20: mol_type = other DNA
ctgaagggaagataatggaa

SEQ ID NO: 45629 - DNA, 20 bp, synthetic construct
  source 1..20: mol_type = other DNA
tttgattcgggagagctcaa

SEQ ID NO: 45630 - DNA, 20 bp, synthetic construct
  source 1..20: mol_type = other DNA
catgagtcaacgtggatggg

SEQ ID NO: 45631 - DNA, 20 bp, synthetic construct
  source 1..20: mol_type = other DNA
tgcaacaccagcggctggtt

SEQ ID NO: 45632 - DNA, 20 bp, synthetic construct
  source 1..20: mol_type = other DNA
caactacgcctgccgccgga

SEQ ID NO: 45633 - DNA, 20 bp, synthetic construct
  source 1..20: mol_type = other DNA
cggccactgtcaatagagag

SEQ ID NO: 45634 - DNA, 20 bp, synthetic construct
  source 1..20: mol_type = other DNA
ggctcgcatgcgctgctcca

SEQ ID NO: 45635 - DNA, 20 bp, synthetic construct
  source 1..20: mol_type = other DNA
tccccaccgtgtgagttcct

SEQ ID NO: 45636 - DNA, 20 bp, synthetic construct
  source 1..20: mol_type = other DNA
caaaggtgggccggtcctct

SEQ ID NO: 45637 - DNA, 20 bp, synthetic construct
  source 1..20: mol_type = other DNA
acaaactgtccagaaacatg

SEQ ID NO: 45638 - DNA, 20 bp, synthetic construct
  source 1..20: mol_type = other DNA
ccatccaagatcaaccgagc

SEQ ID NO: 45639 - DNA, 20 bp, synthetic construct
  source 1..20: mol_type = other DNA
ggagcagccccagcccgtcg

SEQ ID NO: 45640 - DNA, 20 bp, synthetic construct
  source 1..20: mol_type = other DNA
agaattgaagaagaagtgga

SEQ ID NO: 45641 - DNA, 20 bp, synthetic construct
  source 1..20: mol_type = other DNA
acccacctgcgactccattc

SEQ ID NO: 45642 - DNA, 20 bp, synthetic construct
  source 1..20: mol_type = other DNA
cagtgccatggctgctctcc

SEQ ID NO: 45643 - DNA, 20 bp, synthetic construct
  source 1..20: mol_type = other DNA
gataggagagcggccggaga

SEQ ID NO: 45644 - DNA, 20 bp, synthetic construct
  source 1..20: mol_type = other DNA
cgggagtggaaggcctgcca

SEQ ID NO: 45645 - DNA, 20 bp, synthetic construct
  source 1..20: mol_type = other DNA
ggtcaccacgagcagggctg

SEQ ID NO: 45646 - DNA, 20 bp, synthetic construct
  source 1..20: mol_type = other DNA
gaccagtcagtttccaggta

SEQ ID NO: 45647 - DNA, 20 bp, synthetic construct
  source 1..20: mol_type = other DNA
gttacctgctcggttgatct

SEQ ID NO: 45648 - DNA, 20 bp, synthetic construct
  source 1..20: mol_type = other DNA
tcaccggctgtagctgggta

SEQ ID NO: 45649 - DNA, 20 bp, synthetic construct
  source 1..20: mol_type = other DNA
ctctggaggaggaatgccaa

SEQ ID NO: 45650 - DNA, 20 bp, synthetic construct
  source 1..20: mol_type = other DNA
aagcagaagacagagtttgt

SEQ ID NO: 45651 - DNA, 20 bp, synthetic construct
  source 1..20: mol_type = other DNA
agccaccgcgtgacctggga

SEQ ID NO: 45652 - DNA, 20 bp, synthetic construct
  source 1..20: mol_type = other DNA
caccaggggtctggaagttg

SEQ ID NO: 45653 - DNA, 20 bp, synthetic construct
  source 1..20: mol_type = other DNA
agcggcagctcctggcgccc

SEQ ID NO: 45654 - DNA, 20 bp, synthetic construct
  source 1..20: mol_type = other DNA
tgtttctaggaacgccgagg

SEQ ID NO: 45655 - DNA, 20 bp, synthetic construct
  source 1..20: mol_type = other DNA
ggtagggcgtgagcttggca

SEQ ID NO: 45656 - DNA, 20 bp, synthetic construct
  source 1..20: mol_type = other DNA
caggccctccaggagctggg

SEQ ID NO: 45657 - DNA, 20 bp, synthetic construct
  source 1..20: mol_type = other DNA
ggtgaagcgcaccaacagag

SEQ ID NO: 45658 - DNA, 20 bp, synthetic construct
  source 1..20: mol_type = other DNA
ccacagatccacatgggcaa

SEQ ID NO: 45659 - DNA, 20 bp, synthetic construct
  source 1..20: mol_type = other DNA
cgatgtgttggagaagctgc

SEQ ID NO: 45660 - DNA, 20 bp, synthetic construct
  source 1..20: mol_type = other DNA
cggggcgatcctcccacctg

SEQ ID NO: 45661 - DNA, 20 bp, synthetic construct
  source 1..20: mol_type = other DNA
tgttgcactcaaaaggatca

SEQ ID NO: 45662 - DNA, 20 bp, synthetic construct
  source 1..20: mol_type = other DNA
gtaccaggtagcaggtgagt

SEQ ID NO: 45663 - DNA, 20 bp, synthetic construct
  source 1..20: mol_type = other DNA
ggccgtcccagcagtccact

SEQ ID NO: 45664 - DNA, 20 bp, synthetic construct
  source 1..20: mol_type = other DNA
aggcgtcactttcacttggg

SEQ ID NO: 45665 - DNA, 20 bp, synthetic construct
  source 1..20: mol_type = other DNA
gtaccacaggatggacgccc

SEQ ID NO: 45666 - DNA, 20 bp, synthetic construct
  source 1..20: mol_type = other DNA
tctggaaccagatggtcacc

SEQ ID NO: 45667 - DNA, 20 bp, synthetic construct
  source 1..20: mol_type = other DNA
ctcacatgagtcaacgtgga

SEQ ID NO: 45668 - DNA, 20 bp, synthetic construct
  source 1..20: mol_type = other DNA
actggccccctcgatcttgt

SEQ ID NO: 45669 - DNA, 20 bp, synthetic construct
  source 1..20: mol_type = other DNA
tggggctcaggtgtgtgaac

SEQ ID NO: 45670 - DNA, 20 bp, synthetic construct
  source 1..20: mol_type = other DNA
gtgagaagttcggcctcaag

SEQ ID NO: 45671 - DNA, 20 bp, synthetic construct
  source 1..20: mol_type = other DNA
cctgaaacgggtatttatag

SEQ ID NO: 45672 - DNA, 20 bp, synthetic construct
  source 1..20: mol_type = other DNA
gtctgcaatcttgcagctca

SEQ ID NO: 45673 - DNA, 20 bp, synthetic construct
  source 1..20: mol_type = other DNA
tcacctaagcagcatctgac

SEQ ID NO: 45674 - DNA, 20 bp, synthetic construct
  source 1..20: mol_type = other DNA
gcaaagaggtgctccaggac

SEQ ID NO: 45675 - DNA, 20 bp, synthetic construct
  source 1..20: mol_type = other DNA
tcacatgagtcaacgtggat

SEQ ID NO: 45676 - DNA, 20 bp, synthetic construct
  source 1..20: mol_type = other DNA
ctgtaaagacaaggggcatc

SEQ ID NO: 45677 - DNA, 20 bp, synthetic construct
  source 1..20: mol_type = other DNA
ttcatcaagctcagtgaccc

SEQ ID NO: 45678 - DNA, 20 bp, synthetic construct
  source 1..20: mol_type = other DNA
caagcagaagacagagtttg

SEQ ID NO: 45679 - DNA, 20 bp, synthetic construct
  source 1..20: mol_type = other DNA
ttcctgcccgacccggccac

SEQ ID NO: 45680 - DNA, 20 bp, synthetic construct
  source 1..20: mol_type = other DNA
ctttggttaacacaaagaag

SEQ ID NO: 45681 - DNA, 20 bp, synthetic construct
  source 1..20: mol_type = other DNA
ttgctccagatcgtgagagc

SEQ ID NO: 45682 - DNA, 20 bp, synthetic construct
  source 1..20: mol_type = other DNA
tggtcctatgcagtaggcag

SEQ ID NO: 45683 - DNA, 20 bp, synthetic construct
  source 1..20: mol_type = other DNA
cccttactctcttcatcaaa

SEQ ID NO: 45684 - DNA, 20 bp, synthetic construct
  source 1..20: mol_type = other DNA
gagtccattgtccactgtga

SEQ ID NO: 45685 - DNA, 20 bp, synthetic construct
  source 1..20: mol_type = other DNA
catccagatccgttatcaga

SEQ ID NO: 45686 - DNA, 20 bp, synthetic construct
  source 1..20: mol_type = other DNA
gctggtcagaacaaagtagt

SEQ ID NO: 45687 - DNA, 20 bp, synthetic construct
  source 1..20: mol_type = other DNA
acatacttctgtaatacact

SEQ ID NO: 45688 - DNA, 20 bp, synthetic construct
  source 1..20: mol_type = other DNA
gctctacgctgtggtcaccc

SEQ ID NO: 45689 - DNA, 20 bp, synthetic construct
  source 1..20: mol_type = other DNA
agcagatgaggaagacgtcc

SEQ ID NO: 45690 - DNA, 20 bp, synthetic construct
  source 1..20: mol_type = other DNA
tgaccagggcaacgaggatg

SEQ ID NO: 45691 - DNA, 20 bp, synthetic construct
  source 1..20: mol_type = other DNA
gatttcggttgtacaagccc

SEQ ID NO: 45692 - DNA, 20 bp, synthetic construct
  source 1..20: mol_type = other DNA
cccacagtgtacgagaacac

SEQ ID NO: 45693 - DNA, 20 bp, synthetic construct
  source 1..20: mol_type = other DNA
ttcctggaggaaaaagacaa

SEQ ID NO: 45694 - DNA, 20 bp, synthetic construct
  source 1..20: mol_type = other DNA
tcccatacctcatccggtag

SEQ ID NO: 45695 - DNA, 20 bp, synthetic construct
  source 1..20: mol_type = other DNA
gcatctgcgaggacgaggga

SEQ ID NO: 45696 - DNA, 20 bp, synthetic construct
  source 1..20: mol_type = other DNA
tgcccgctcacctggctcag

SEQ ID NO: 45697 - DNA, 20 bp, synthetic construct
  source 1..20: mol_type = other DNA
tagtggacatctgcatcact

SEQ ID NO: 45698 - DNA, 20 bp, synthetic construct
  source 1..20: mol_type = other DNA
tacctccctctccggctcca

SEQ ID NO: 45699 - DNA, 20 bp, synthetic construct
  source 1..20: mol_type = other DNA
agaccgagacaacaagaagg

SEQ ID NO: 45700 - DNA, 20 bp, synthetic construct
  source 1..20: mol_type = other DNA
cttcctccactgtggagagg

SEQ ID NO: 45701 - DNA, 20 bp, synthetic construct
  source 1..20: mol_type = other DNA
cagctgagcaaactgcccgt

SEQ ID NO: 45702 - DNA, 20 bp, synthetic construct
  source 1..20: mol_type = other DNA
tagtaccctgggtcggggaa

SEQ ID NO: 45703 - DNA, 20 bp, synthetic construct
  source 1..20: mol_type = other DNA
ggtggccaccaccagcacag

SEQ ID NO: 45704 - DNA, 20 bp, synthetic construct
  source 1..20: mol_type = other DNA
cagctggagaagcttgcaac

SEQ ID NO: 45705 - DNA, 20 bp, synthetic construct
  source 1..20: mol_type = other DNA
gccgccaccctccaatgacg

SEQ ID NO: 45706 - DNA, 20 bp, synthetic construct
  source 1..20: mol_type = other DNA
aaacactgaacctctgggag

SEQ ID NO: 45707 - DNA, 20 bp, synthetic construct
  source 1..20: mol_type = other DNA
ccatgtcagtctctgtcctc

SEQ ID NO: 45708 - DNA, 20 bp, synthetic construct
  source 1..20: mol_type = other DNA
ctggttccctgccaactacg

SEQ ID NO: 45709 - DNA, 20 bp, synthetic construct
  source 1..20: mol_type = other DNA
ggacagcaaggctggtggcg

SEQ ID NO: 45710 - DNA, 20 bp, synthetic construct
  source 1..20: mol_type = other DNA
aaccaggccctcttcatgac

SEQ ID NO: 45711 - DNA, 20 bp, synthetic construct
  source 1..20: mol_type = other DNA
ggccagctctgtccacttgg

SEQ ID NO: 45712 - DNA, 20 bp, synthetic construct
  source 1..20: mol_type = other DNA
ggaccccgatcgcccagaac

SEQ ID NO: 45713 - DNA, 20 bp, synthetic construct
  source 1..20: mol_type = other DNA
ctggtcagaacaaagtagtg

SEQ ID NO: 45714 - DNA, 20 bp, synthetic construct
  source 1..20: mol_type = other DNA
taatgcagagtgaggttggt

SEQ ID NO: 45715 - DNA, 20 bp, synthetic construct
  source 1..20: mol_type = other DNA
agcccacaggcattgcagac

SEQ ID NO: 45716 - DNA, 20 bp, synthetic construct
  source 1..20: mol_type = other DNA
ccatagacgaggaacctaca

SEQ ID NO: 45717 - DNA, 20 bp, synthetic construct
  source 1..20: mol_type = other DNA
caaccagcgccggaggggca

SEQ ID NO: 45718 - DNA, 20 bp, synthetic construct
  source 1..20: mol_type = other DNA
gctccagacacaggagatgt

SEQ ID NO: 45719 - DNA, 20 bp, synthetic construct
  source 1..20: mol_type = other DNA
tcctcccaccacggcttctg

SEQ ID NO: 45720 - DNA, 20 bp, synthetic construct
  source 1..20: mol_type = other DNA
atgacgagaacaccaagctc

SEQ ID NO: 45721 - DNA, 20 bp, synthetic construct
  source 1..20: mol_type = other DNA
ttgagcgcctcacacagctg

SEQ ID NO: 45722 - DNA, 20 bp, synthetic construct
  source 1..20: mol_type = other DNA
tggcggccaggatggttctt

SEQ ID NO: 45723 - DNA, 20 bp, synthetic construct
  source 1..20: mol_type = other DNA
ccacagctgctcatccgaaa

SEQ ID NO: 45724 - DNA, 20 bp, synthetic construct
  source 1..20: mol_type = other DNA
ccgggacatgtcatccttcc

SEQ ID NO: 45725 - DNA, 20 bp, synthetic construct
  source 1..20: mol_type = other DNA
gacggcaagttcctgtatgt

SEQ ID NO: 45726 - DNA, 20 bp, synthetic construct
  source 1..20: mol_type = other DNA
caccgtgtctgttttcacca

SEQ ID NO: 45727 - DNA, 20 bp, synthetic construct
  source 1..20: mol_type = other DNA
gtttccgcagaataaaaagc

SEQ ID NO: 45728 - DNA, 20 bp, synthetic construct
  source 1..20: mol_type = other DNA
cagacccctgactatgaaga

SEQ ID NO: 45729 - DNA, 20 bp, synthetic construct
  source 1..20: mol_type = other DNA
cattgccggctgtgtcccag

SEQ ID NO: 45730 - DNA, 20 bp, synthetic construct
  source 1..20: mol_type = other DNA
ccatctccatgaccagcatg

SEQ ID NO: 45731 - DNA, 20 bp, synthetic construct
  source 1..20: mol_type = other DNA
caaggtaaggctactccagg

SEQ ID NO: 45732 - DNA, 20 bp, synthetic construct
  source 1..20: mol_type = other DNA
gtggcttcattttcccatgg

SEQ ID NO: 45733 - DNA, 20 bp, synthetic construct
  source 1..20: mol_type = other DNA
ctaccgggaaatcctcgtga

SEQ ID NO: 45734 - DNA, 20 bp, synthetic construct
  source 1..20: mol_type = other DNA
ctccatcagcatggcgtcgg

SEQ ID NO: 45735 - DNA, 20 bp, synthetic construct
  source 1..20: mol_type = other DNA
agccttaccttgcgagagaa

SEQ ID NO: 45736 - DNA, 20 bp, synthetic construct
  source 1..20: mol_type = other DNA
aagcctcaggcaagccccga

SEQ ID NO: 45737 - DNA, 20 bp, synthetic construct
  source 1..20: mol_type = other DNA
caatgagccgcacgatgtag

SEQ ID NO: 45738 - DNA, 20 bp, synthetic construct
  source 1..20: mol_type = other DNA
gcccaggatgtcagagccaa

SEQ ID NO: 45739 - DNA, 20 bp, synthetic construct
  source 1..20: mol_type = other DNA
gctgccagaaattgtttggt

SEQ ID NO: 45740 - DNA, 20 bp, synthetic construct
  source 1..20: mol_type = other DNA
ctcgtagatgggcaccgtgt

SEQ ID NO: 45741 - DNA, 20 bp, synthetic construct
  source 1..20: mol_type = other DNA
ctgaagctggtggagcggct

SEQ ID NO: 45742 - DNA, 20 bp, synthetic construct
  source 1..20: mol_type = other DNA
gttcaggaatgagttatggt

SEQ ID NO: 45743 - DNA, 20 bp, synthetic construct
  source 1..20: mol_type = other DNA
gacagccattctgtatgttg

SEQ ID NO: 45744 - DNA, 20 bp, synthetic construct
  source 1..20: mol_type = other DNA
tggacattctacataccaag

SEQ ID NO: 45745 - DNA, 20 bp, synthetic construct
  source 1..20: mol_type = other DNA
acaccctgtctgctctgtcc

SEQ ID NO: 45746 - DNA, 20 bp, synthetic construct
  source 1..20: mol_type = other DNA
ttttgaaggtaggtgacctg

SEQ ID NO: 45747 - DNA, 20 bp, synthetic construct
  source 1..20: mol_type = other DNA
tgtaaagacaaggggcatca

SEQ ID NO: 45748 - DNA, 20 bp, synthetic construct
  source 1..20: mol_type = other DNA
aactatcaccaacataatgg

SEQ ID NO: 45749 - DNA, 20 bp, synthetic construct
  source 1..20: mol_type = other DNA
cactggagaaggcactgtct

SEQ ID NO: 45750 - DNA, 20 bp, synthetic construct
  source 1..20: mol_type = other DNA
cagatgaggaagacgtcctg

SEQ ID NO: 45751 - DNA, 20 bp, synthetic construct
  source 1..20: mol_type = other DNA
gtcccaggtgagccctccgc

SEQ ID NO: 45752 - DNA, 20 bp, synthetic construct
  source 1..20: mol_type = other DNA
ccccaccgtgtgagttcctg

SEQ ID NO: 45753 - DNA, 20 bp, synthetic construct
  source 1..20: mol_type = other DNA
tgaaggagcagggactggaa

SEQ ID NO: 45754 - DNA, 20 bp, synthetic construct
  source 1..20: mol_type = other DNA
ccatgagtgcaacttgcctg

SEQ ID NO: 45755 - DNA, 20 bp, synthetic construct
  source 1..20: mol_type = other DNA
tgcagttctcacacactgtg

SEQ ID NO: 45756 - DNA, 20 bp, synthetic construct
  source 1..20: mol_type = other DNA
tgatgatgtagatgggctcc

SEQ ID NO: 45757 - DNA, 20 bp, synthetic construct
  source 1..20: mol_type = other DNA
ttctactcttcctcctgtag

SEQ ID NO: 45758 - DNA, 20 bp, synthetic construct
  source 1..20: mol_type = other DNA
ccacagctcctgatggggta

SEQ ID NO: 45759 - DNA, 20 bp, synthetic construct
  source 1..20: mol_type = other DNA
aggagctgtaccaactcatg

SEQ ID NO: 45760 - DNA, 20 bp, synthetic construct
  source 1..20: mol_type = other DNA
ccccgatcgcccagaacagg

SEQ ID NO: 45761 - DNA, 20 bp, synthetic construct
  source 1..20: mol_type = other DNA
ccacagtgtacgagaacaca

SEQ ID NO: 45762 - DNA, 20 bp, synthetic construct
  source 1..20: mol_type = other DNA
aacgagtacacagccaggga

SEQ ID NO: 45763 - DNA, 20 bp, synthetic construct
  source 1..20: mol_type = other DNA
ggaagagtgcctcagggcag

SEQ ID NO: 45764 - DNA, 20 bp, synthetic construct
  source 1..20: mol_type = other DNA
ggcggccggtccaccaggat

SEQ ID NO: 45765 - DNA, 20 bp, synthetic construct
  source 1..20: mol_type = other DNA
tgctccacggtcaggaagtc

SEQ ID NO: 45766 - DNA, 20 bp, synthetic construct
  source 1..20: mol_type = other DNA
agccagttgacgcagcagtc

SEQ ID NO: 45767 - DNA, 20 bp, synthetic construct
  source 1..20: mol_type = other DNA
ctcctagaaggcggaccaca

SEQ ID NO: 45768 - DNA, 20 bp, synthetic construct
  source 1..20: mol_type = other DNA
tcctggaggaaaaagacaag

SEQ ID NO: 45769 - DNA, 20 bp, synthetic construct
  source 1..20: mol_type = other DNA
gggcagctgcaggaataaga

SEQ ID NO: 45770 - DNA, 20 bp, synthetic construct
  source 1..20: mol_type = other DNA
tcccactcgtcctcccacca

SEQ ID NO: 45771 - DNA, 20 bp, synthetic construct
  source 1..20: mol_type = other DNA
aaaacactgaacctctggga

SEQ ID NO: 45772 - DNA, 20 bp, synthetic construct
  source 1..20: mol_type = other DNA
gtgcaggcggccggtccacc

SEQ ID NO: 45773 - DNA, 20 bp, synthetic construct
  source 1..20: mol_type = other DNA
tctgtggcttcattttccca

SEQ ID NO: 45774 - DNA, 20 bp, synthetic construct
  source 1..20: mol_type = other DNA
ctcggaggaagcgcatgttg

SEQ ID NO: 45775 - DNA, 20 bp, synthetic construct
  source 1..20: mol_type = other DNA
accaactcatgaggctgtgc

SEQ ID NO: 45776 - DNA, 20 bp, synthetic construct
  source 1..20: mol_type = other DNA
gcctcgccctagaaaaggag

SEQ ID NO: 45777 - DNA, 20 bp, synthetic construct
  source 1..20: mol_type = other DNA
cagaatgtggagaagcaaga

SEQ ID NO: 45778 - DNA, 20 bp, synthetic construct
  source 1..20: mol_type = other DNA
ctggaagggcacaaaggtca

SEQ ID NO: 45779 - DNA, 20 bp, synthetic construct
  source 1..20: mol_type = other DNA
gcacatcaagctgcattccg

SEQ ID NO: 45780 - DNA, 20 bp, synthetic construct
  source 1..20: mol_type = other DNA
ggtgtagatgacctgtgacg

SEQ ID NO: 45781 - DNA, 20 bp, synthetic construct
  source 1..20: mol_type = other DNA
ggagaagctgcaggtgaagg

SEQ ID NO: 45782 - DNA, 20 bp, synthetic construct
  source 1..20: mol_type = other DNA
atgagtcaacgtggatgggt

SEQ ID NO: 45783 - DNA, 20 bp, synthetic construct
  source 1..20: mol_type = other DNA
ctccactcacccaggaagga

SEQ ID NO: 45784 - DNA, 20 bp, synthetic construct
  source 1..20: mol_type = other DNA
cccttccatggcattgacgc

SEQ ID NO: 45785 - DNA, 20 bp, synthetic construct
  source 1..20: mol_type = other DNA
ggggcgatcctcccacctgt

SEQ ID NO: 45786 - DNA, 20 bp, synthetic construct
  source 1..20: mol_type = other DNA
ggaggttccctgcagtgacc

SEQ ID NO: 45787 - DNA, 20 bp, synthetic construct
  source 1..20: mol_type = other DNA
gccagcttcttgtgctgtag

SEQ ID NO: 45788 - DNA, 20 bp, synthetic construct
  source 1..20: mol_type = other DNA
cccttccagtgcaatcagtg

SEQ ID NO: 45789 - DNA, 20 bp, synthetic construct
  source 1..20: mol_type = other DNA
aggccccgcactgattgcac

SEQ ID NO: 45790 - DNA, 20 bp, synthetic construct
  source 1..20: mol_type = other DNA
ggaaggcatacctggaagga

SEQ ID NO: 45791 - DNA, 20 bp, synthetic construct
  source 1..20: mol_type = other DNA
gttggacattctacatacca

SEQ ID NO: 45792 - DNA, 20 bp, synthetic construct
  source 1..20: mol_type = other DNA
ccctgctcgtggtgaccgaa

SEQ ID NO: 45793 - DNA, 20 bp, synthetic construct
  source 1..20: mol_type = other DNA
cggtcaccacgagcagggct

SEQ ID NO: 45794 - DNA, 20 bp, synthetic construct
  source 1..20: mol_type = other DNA
tctaccagcttatttaggga

SEQ ID NO: 45795 - DNA, 20 bp, synthetic construct
  source 1..20: mol_type = other DNA
gcagcggtagccctgataga

SEQ ID NO: 45796 - DNA, 20 bp, synthetic construct
  source 1..20: mol_type = other DNA
gtggcagacctacagtgtag

SEQ ID NO: 45797 - DNA, 20 bp, synthetic construct
  source 1..20: mol_type = other DNA
gtgcagatgaagctggaggt

SEQ ID NO: 45798 - DNA, 20 bp, synthetic construct
  source 1..20: mol_type = other DNA
catccagacacatgcccagc

SEQ ID NO: 45799 - DNA, 20 bp, synthetic construct
  source 1..20: mol_type = other DNA
tggtcatccctacgggttga

SEQ ID NO: 45800 - DNA, 20 bp, synthetic construct
  source 1..20: mol_type = other DNA
gccgttgtcgacgacgagcg

SEQ ID NO: 45801 - DNA, 20 bp, synthetic construct
  source 1..20: mol_type = other DNA
caccctgaaaggaagtgaaa

SEQ ID NO: 45802 - DNA, 20 bp, synthetic construct
  source 1..20: mol_type = other DNA
gcttcattttcccatggtgg

SEQ ID NO: 45803 - DNA, 20 bp, synthetic construct
  source 1..20: mol_type = other DNA
ggcttcaaagagagggtgag

SEQ ID NO: 45804 - DNA, 20 bp, synthetic construct
  source 1..20: mol_type = other DNA
tccagcaggtagcagagttt

SEQ ID NO: 45805 - DNA, 20 bp, synthetic construct
  source 1..20: mol_type = other DNA
caagtaaggagactggggag

SEQ ID NO: 45806 - DNA, 20 bp, synthetic construct
  source 1..20: mol_type = other DNA
atgcagttctcacacactgt

SEQ ID NO: 45807 - DNA, 20 bp, synthetic construct
  source 1..20: mol_type = other DNA
ttgtggcagacctacagtgt

SEQ ID NO: 45808 - DNA, 20 bp, synthetic construct
  source 1..20: mol_type = other DNA
cctcctccagagtgtggttg

SEQ ID NO: 45809 - DNA, 20 bp, synthetic construct
  source 1..20: mol_type = other DNA
ggaactgctggaactcagga

SEQ ID NO: 45810 - DNA, 20 bp, synthetic construct
  source 1..20: mol_type = other DNA
tctacaagtgagtgccagtg

SEQ ID NO: 45811 - DNA, 20 bp, synthetic construct
  source 1..20: mol_type = other DNA
acggcctcgtgagtacaagg

SEQ ID NO: 45812 - DNA, 20 bp, synthetic construct
  source 1..20: mol_type = other DNA
tcacctccagcttccacgtc

SEQ ID NO: 45813 - DNA, 20 bp, synthetic construct
  source 1..20: mol_type = other DNA
tgaggatgcctctcttgctc

SEQ ID NO: 45814 - DNA, 20 bp, synthetic construct
  source 1..20: mol_type = other DNA
gacatgggcaaggtacgagt

SEQ ID NO: 45815 - DNA, 20 bp, synthetic construct
  source 1..20: mol_type = other DNA
gcaaagtccaatgcagccag

SEQ ID NO: 45816 - DNA, 20 bp, synthetic construct
  source 1..20: mol_type = other DNA
ggcaagaggtgagcaccggg

SEQ ID NO: 45817 - DNA, 20 bp, synthetic construct
  source 1..20: mol_type = other DNA
ccccatcccaggtcacgcgg

SEQ ID NO: 45818 - DNA, 20 bp, synthetic construct
  source 1..20: mol_type = other DNA
ttcagtgaaagcagcaaaga

SEQ ID NO: 45819 - DNA, 20 bp, synthetic construct
  source 1..20: mol_type = other DNA
tgctatgttccatctcccag

SEQ ID NO: 45820 - DNA, 20 bp, synthetic construct
  source 1..20: mol_type = other DNA
cataccatcatcttcatcct

SEQ ID NO: 45821 - DNA, 20 bp, synthetic construct
  source 1..20: mol_type = other DNA
accagattatgaatcactgc

SEQ ID NO: 45822 - DNA, 20 bp, synthetic construct
  source 1..20: mol_type = other DNA
acctgtaggcagacaaagaa

SEQ ID NO: 45823 - DNA, 20 bp, synthetic construct
  source 1..20: mol_type = other DNA
ggggcagctgcaggaataag

SEQ ID NO: 45824 - DNA, 20 bp, synthetic construct
  source 1..20: mol_type = other DNA
agtcctccagcacactgcgc

SEQ ID NO: 45825 - DNA, 20 bp, synthetic construct
  source 1..20: mol_type = other DNA
cgttgcgggccgccaggtca

SEQ ID NO: 45826 - DNA, 20 bp, synthetic construct
  source 1..20: mol_type = other DNA
ggtgtcagacaccagaatgt

SEQ ID NO: 45827 - DNA, 20 bp, synthetic construct
  source 1..20: mol_type = other DNA
gcttcatctgcacgtcctcc

SEQ ID NO: 45828 - DNA, 20 bp, synthetic construct
  source 1..20: mol_type = other DNA
tgaactggcccaggccctcc

SEQ ID NO: 45829 - DNA, 20 bp, synthetic construct
  source 1..20: mol_type = other DNA
ccgtgcccttgccatccagt

SEQ ID NO: 45830 - DNA, 20 bp, synthetic construct
  source 1..20: mol_type = other DNA
ttctcaccgaaaagttcccg

SEQ ID NO: 45831 - DNA, 20 bp, synthetic construct
  source 1..20: mol_type = other DNA
caggtaggaggtctcagact

SEQ ID NO: 45832 - DNA, 20 bp, synthetic construct
  source 1..20: mol_type = other DNA
aggggaacaggacctggtcc

SEQ ID NO: 45833 - DNA, 20 bp, synthetic construct
  source 1..20: mol_type = other DNA
ctgcagggctggggagcggc

SEQ ID NO: 45834 - DNA, 20 bp, synthetic construct
  source 1..20: mol_type = other DNA
aggcctgtcagatgctgctt

SEQ ID NO: 45835 - DNA, 20 bp, synthetic construct
  source 1..20: mol_type = other DNA
gctcggcctcctcacgcgtc

SEQ ID NO: 45836 - DNA, 20 bp, synthetic construct
  source 1..20: mol_type = other DNA
gtgtacaggattgttcctga

SEQ ID NO: 45837 - DNA, 20 bp, synthetic construct
  source 1..20: mol_type = other DNA
ctgctccacggtcaggaagt

SEQ ID NO: 45838 - DNA, 20 bp, synthetic construct
  source 1..20: mol_type = other DNA
gctctcccgcatctacccca

SEQ ID NO: 45839 - DNA, 20 bp, synthetic construct
  source 1..20: mol_type = other DNA
tcaggtgtgtgaactggccc

SEQ ID NO: 45840 - DNA, 20 bp, synthetic construct
  source 1..20: mol_type = other DNA
ccatgcggtagcctcgctcc

SEQ ID NO: 45841 - DNA, 20 bp, synthetic construct
  source 1..20: mol_type = other DNA
tgaaggctccttctttgccc

SEQ ID NO: 45842 - DNA, 20 bp, synthetic construct
  source 1..20: mol_type = other DNA
ccatcatcttcatcctggga

SEQ ID NO: 45843 - DNA, 20 bp, synthetic construct
  source 1..20: mol_type = other DNA
cttgcagatggtgaactcca

SEQ ID NO: 45844 - DNA, 20 bp, synthetic construct
  source 1..20: mol_type = other DNA
ccgcttgccctgctcgatga

SEQ ID NO: 45845 - DNA, 20 bp, synthetic construct
  source 1..20: mol_type = other DNA
gtgccagagctgtgtggagc

SEQ ID NO: 45846 - DNA, 20 bp, synthetic construct
  source 1..20: mol_type = other DNA
aaccagcgccggaggggcaa

SEQ ID NO: 45847 - DNA, 20 bp, synthetic construct
  source 1..20: mol_type = other DNA
tcggttgtacaagccccggc

SEQ ID NO: 45848 - DNA, 20 bp, synthetic construct
  source 1..20: mol_type = other DNA
aaacagtgcccaagcctggt

SEQ ID NO: 45849 - DNA, 20 bp, synthetic construct
  source 1..20: mol_type = other DNA
cccacagctcctgatggggt

SEQ ID NO: 45850 - DNA, 20 bp, synthetic construct
  source 1..20: mol_type = other DNA
gtaggagcctgggaaagaga

SEQ ID NO: 45851 - DNA, 20 bp, synthetic construct
  source 1..20: mol_type = other DNA
tcaccatcaagtcagatgtg

SEQ ID NO: 45852 - DNA, 20 bp, synthetic construct
  source 1..20: mol_type = other DNA
tgctgcagccaagcaccatg

SEQ ID NO: 45853 - DNA, 20 bp, synthetic construct
  source 1..20: mol_type = other DNA
accccagctcgtcatcctcc

SEQ ID NO: 45854 - DNA, 20 bp, synthetic construct
  source 1..20: mol_type = other DNA
cgcaggcgcgtcttccaggt

SEQ ID NO: 45855 - DNA, 20 bp, synthetic construct
  source 1..20: mol_type = other DNA
ctcgtagatgggcacagtgt

SEQ ID NO: 45856 - DNA, 20 bp, synthetic construct
  source 1..20: mol_type = other DNA
cttagcaggaaggtgcctgg

SEQ ID NO: 45857 - DNA, 20 bp, synthetic construct
  source 1..20: mol_type = other DNA
ctgtggaagacacagagtga

SEQ ID NO: 45858 - DNA, 20 bp, synthetic construct
  source 1..20: mol_type = other DNA
gctccaggcatgtgagagga

SEQ ID NO: 45859 - DNA, 20 bp, synthetic construct
  source 1..20: mol_type = other DNA
ttcttgtaggtgtgctgatg

SEQ ID NO: 45860 - DNA, 20 bp, synthetic construct
  source 1..20: mol_type = other DNA
actgaaagagaaaacctctg

SEQ ID NO: 45861 - DNA, 20 bp, synthetic construct
  source 1..20: mol_type = other DNA
ccccggtcaggtacctggat

SEQ ID NO: 45862 - DNA, 20 bp, synthetic construct
  source 1..20: mol_type = other DNA
gctgccaggtgagcccactc

SEQ ID NO: 45863 - DNA, 20 bp, synthetic construct
  source 1..20: mol_type = other DNA
ccagctgtccattgagaacc

SEQ ID NO: 45864 - DNA, 20 bp, synthetic construct
  source 1..20: mol_type = other DNA
caccaggccctccaggagct

SEQ ID NO: 45865 - DNA, 20 bp, synthetic construct
  source 1..20: mol_type = other DNA
accgtgcccttgccatccag

SEQ ID NO: 45866 - DNA, 20 bp, synthetic construct
  source 1..20: mol_type = other DNA
cttacattctctcttctgtc

SEQ ID NO: 45867 - DNA, 20 bp, synthetic construct
  source 1..20: mol_type = other DNA
ccatgccttctgcaatctgc

SEQ ID NO: 45868 - DNA, 20 bp, synthetic construct
  source 1..20: mol_type = other DNA
ggcgctcgatgggaaagtgg

SEQ ID NO: 45869 - DNA, 20 bp, synthetic construct
  source 1..20: mol_type = other DNA
gtcctaccagcaggcagacg

SEQ ID NO: 45870 - DNA, 20 bp, synthetic construct
  source 1..20: mol_type = other DNA
ccaggtgagtgggaaactgg

SEQ ID NO: 45871 - DNA, 20 bp, synthetic construct
  source 1..20: mol_type = other DNA
ggtcctatgcagtaggcagg

SEQ ID NO: 45872 - DNA, 20 bp, synthetic construct
  source 1..20: mol_type = other DNA
cactgagccaggtcctgggg

SEQ ID NO: 45873 - DNA, 20 bp, synthetic construct
  source 1..20: mol_type = other DNA
gagatgctgccgtagaagaa

SEQ ID NO: 45874 - DNA, 20 bp, synthetic construct
  source 1..20: mol_type = other DNA
tgtccacttaatgggaaact

SEQ ID NO: 45875 - DNA, 20 bp, synthetic construct
  source 1..20: mol_type = other DNA
tcctcccacctgtggggcgt

SEQ ID NO: 45876 - DNA, 20 bp, synthetic construct
  source 1..20: mol_type = other DNA
attgcagacagggtccccat

SEQ ID NO: 45877 - DNA, 20 bp, synthetic construct
  source 1..20: mol_type = other DNA
tccacagaccggcccccctc

SEQ ID NO: 45878 - DNA, 20 bp, synthetic construct
  source 1..20: mol_type = other DNA
caggtgagcgggcagaggtg

SEQ ID NO: 45879 - DNA, 20 bp, synthetic construct
  source 1..20: mol_type = other DNA
gcgacagctctgatcggtct

SEQ ID NO: 45880 - DNA, 20 bp, synthetic construct
  source 1..20: mol_type = other DNA
gctgcagccaagcaccatgc

SEQ ID NO: 45881 - DNA, 20 bp, synthetic construct
  source 1..20: mol_type = other DNA
gccgtcccagcagtccactg

SEQ ID NO: 45882 - DNA, 20 bp, synthetic construct
  source 1..20: mol_type = other DNA
gtacctgcaaagagacacca

SEQ ID NO: 45883 - DNA, 20 bp, synthetic construct
  source 1..20: mol_type = other DNA
tgagccaggtcctggggagg

SEQ ID NO: 45884 - DNA, 20 bp, synthetic construct
  source 1..20: mol_type = other DNA
ccacagcagcctgacgcgtg

SEQ ID NO: 45885 - DNA, 20 bp, synthetic construct
  source 1..20: mol_type = other DNA
accaccatcagaatcccgcc

SEQ ID NO: 45886 - DNA, 20 bp, synthetic construct
  source 1..20: mol_type = other DNA
gacagcggcacctacctctg

SEQ ID NO: 45887 - DNA, 20 bp, synthetic construct
  source 1..20: mol_type = other DNA
gaagccctacaaggcaggcg

SEQ ID NO: 45888 - DNA, 20 bp, synthetic construct
  source 1..20: mol_type = other DNA
catccggtagtggagccgga

SEQ ID NO: 45889 - DNA, 20 bp, synthetic construct
  source 1..20: mol_type = other DNA
caacttccagacccctggtg

SEQ ID NO: 45890 - DNA, 20 bp, synthetic construct
  source 1..20: mol_type = other DNA
aagcctatgctcgctgcctg

SEQ ID NO: 45891 - DNA, 20 bp, synthetic construct
  source 1..20: mol_type = other DNA
cagcaggttggagatttctg

SEQ ID NO: 45892 - DNA, 20 bp, synthetic construct
  source 1..20: mol_type = other DNA
gcccgacatctgccaaagaa

SEQ ID NO: 45893 - DNA, 20 bp, synthetic construct
  source 1..20: mol_type = other DNA
tgcactggtatctggaacct

SEQ ID NO: 45894 - DNA, 20 bp, synthetic construct
  source 1..20: mol_type = other DNA
ggtagagattggctgcgcca

SEQ ID NO: 45895 - DNA, 20 bp, synthetic construct
  source 1..20: mol_type = other DNA
gcccaccgcactcgctgttg

SEQ ID NO: 45896 - DNA, 20 bp, synthetic construct
  source 1..20: mol_type = other DNA
ccaggttctgaatcacctcc

SEQ ID NO: 45897 - DNA, 20 bp, synthetic construct
  source 1..20: mol_type = other DNA
cacagtgtacgagaacacag

SEQ ID NO: 45898 - DNA, 20 bp, synthetic construct
  source 1..20: mol_type = other DNA
ttctctctggaagggcacaa

SEQ ID NO: 45899 - DNA, 20 bp, synthetic construct
  source 1..20: mol_type = other DNA
gccatcaacatggccaggat

SEQ ID NO: 45900 - DNA, 20 bp, synthetic construct
  source 1..20: mol_type = other DNA
acttcagcagacacaggctg

SEQ ID NO: 45901 - DNA, 20 bp, synthetic construct
  source 1..20: mol_type = other DNA
actgtccagaaacatgtgga

SEQ ID NO: 45902 - DNA, 20 bp, synthetic construct
  source 1..20: mol_type = other DNA
gtttattatcagtgcgtcca

SEQ ID NO: 45903 - DNA, 20 bp, synthetic construct
  source 1..20: mol_type = other DNA
cagggctggggagaaggtgg

SEQ ID NO: 45904 - DNA, 20 bp, synthetic construct
  source 1..20: mol_type = other DNA
cgctgtgggttgtgaggtca

SEQ ID NO: 45905 - DNA, 20 bp, synthetic construct
  source 1..20: mol_type = other DNA
tacagcgcaggggcacctgc

SEQ ID NO: 45906 - DNA, 20 bp, synthetic construct
  source 1..20: mol_type = other DNA
gcgggagatccagcagacgg

SEQ ID NO: 45907 - DNA, 20 bp, synthetic construct
  source 1..20: mol_type = other DNA
tcaaaggtgggccggtcctc

SEQ ID NO: 45908 - DNA, 20 bp, synthetic construct
  source 1..20: mol_type = other DNA
cgacagctctgatcggtctc

SEQ ID NO: 45909 - DNA, 20 bp, synthetic construct
  source 1..20: mol_type = other DNA
cagcaaacacctggaccgtg

SEQ ID NO: 45910 - DNA, 20 bp, synthetic construct
  source 1..20: mol_type = other DNA
cgctcctgcgccacggaggt

SEQ ID NO: 45911 - DNA, 20 bp, synthetic construct
  source 1..20: mol_type = other DNA
agttgtcagggcgcaccatg

SEQ ID NO: 45912 - DNA, 20 bp, synthetic construct
  source 1..20: mol_type = other DNA
acggcaagttcctgtatgtg

SEQ ID NO: 45913 - DNA, 20 bp, synthetic construct
  source 1..20: mol_type = other DNA
ggacacctggtgcagcagct

SEQ ID NO: 45914 - DNA, 20 bp, synthetic construct
  source 1..20: mol_type = other DNA
cggtatgttatgcaaggctg

SEQ ID NO: 45915 - DNA, 20 bp, synthetic construct
  source 1..20: mol_type = other DNA
gcgtcctcaggtggccagtg

SEQ ID NO: 45916 - DNA, 20 bp, synthetic construct
  source 1..20: mol_type = other DNA
cacttactgtctccgctgcc

SEQ ID NO: 45917 - DNA, 20 bp, synthetic construct
  source 1..20: mol_type = other DNA
ctctcttcatcaaagggaac

SEQ ID NO: 45918 - DNA, 20 bp, synthetic construct
  source 1..20: mol_type = other DNA
ttacgttatagagctggttc

SEQ ID NO: 45919 - DNA, 20 bp, synthetic construct
  source 1..20: mol_type = other DNA
ggccatcaaggtgctgaagc

SEQ ID NO: 45920 - DNA, 20 bp, synthetic construct
  source 1..20: mol_type = other DNA
ccctggaggatgacgagctg

SEQ ID NO: 45921 - DNA, 20 bp, synthetic construct
  source 1..20: mol_type = other DNA
cctgaagaacatgctgtccc

SEQ ID NO: 45922 - DNA, 20 bp, synthetic construct
  source 1..20: mol_type = other DNA
gccctttcgctcagaggtcc

SEQ ID NO: 45923 - DNA, 20 bp, synthetic construct
  source 1..20: mol_type = other DNA
gatggcctcctccatctgca

SEQ ID NO: 45924 - DNA, 20 bp, synthetic construct
  source 1..20: mol_type = other DNA
cgggacttcgaccagaacca

SEQ ID NO: 45925 - DNA, 20 bp, synthetic construct
  source 1..20: mol_type = other DNA
gcgctccaagatggacaggt

SEQ ID NO: 45926 - DNA, 20 bp, synthetic construct
  source 1..20: mol_type = other DNA
tgagcactccaggtagccct

SEQ ID NO: 45927 - DNA, 20 bp, synthetic construct
  source 1..20: mol_type = other DNA
ggagtatctgaagctgaagg

SEQ ID NO: 45928 - DNA, 20 bp, synthetic construct
  source 1..20: mol_type = other DNA
acggtatgttatgcaaggct

SEQ ID NO: 45929 - DNA, 20 bp, synthetic construct
  source 1..20: mol_type = other DNA
catagagtcacctggaatct

SEQ ID NO: 45930 - DNA, 20 bp, synthetic construct
  source 1..20: mol_type = other DNA
ccacacccctgcagattgag

SEQ ID NO: 45931 - DNA, 20 bp, synthetic construct
  source 1..20: mol_type = other DNA
agaaggaactgctggaactc

SEQ ID NO: 45932 - DNA, 20 bp, synthetic construct
  source 1..20: mol_type = other DNA
ctgtccagaaacatgtggaa

SEQ ID NO: 45933 - DNA, 20 bp, synthetic construct
  source 1..20: mol_type = other DNA
agtccaggccgctgtcgtgg

SEQ ID NO: 45934 - DNA, 20 bp, synthetic construct
  source 1..20: mol_type = other DNA
cactcaccgtggtgggtcgg

SEQ ID NO: 45935 - DNA, 20 bp, synthetic construct
  source 1..20: mol_type = other DNA
tgttcatactcacttcctaa

SEQ ID NO: 45936 - DNA, 20 bp, synthetic construct
  source 1..20: mol_type = other DNA
catctggaagtcatgcccgt

SEQ ID NO: 45937 - DNA, 20 bp, synthetic construct
  source 1..20: mol_type = other DNA
cgcaggtttcgggaggccca

SEQ ID NO: 45938 - DNA, 20 bp, synthetic construct
  source 1..20: mol_type = other DNA
cggaagcggcagtcctggcc

SEQ ID NO: 45939 - DNA, 20 bp, synthetic construct
  source 1..20: mol_type = other DNA
gctcatctactgcctgaagg

SEQ ID NO: 45940 - DNA, 20 bp, synthetic construct
  source 1..20: mol_type = other DNA
gttggagaagctgcaggtga

SEQ ID NO: 45941 - DNA, 20 bp, synthetic construct
  source 1..20: mol_type = other DNA
accagatcgagtgagtgctc

SEQ ID NO: 45942 - DNA, 20 bp, synthetic construct
  source 1..20: mol_type = other DNA
agaacttaccagccttcgct

SEQ ID NO: 45943 - DNA, 20 bp, synthetic construct
  source 1..20: mol_type = other DNA
acggaagcggcagtcctggc

SEQ ID NO: 45944 - DNA, 20 bp, synthetic construct
  source 1..20: mol_type = other DNA
ttcccatcaatgagcagaag

SEQ ID NO: 45945 - DNA, 20 bp, synthetic construct
  source 1..20: mol_type = other DNA
gagatggagactttatatgc

SEQ ID NO: 45946 - DNA, 20 bp, synthetic construct
  source 1..20: mol_type = other DNA
gagtggctagaaaatataga

SEQ ID NO: 45947 - DNA, 20 bp, synthetic construct
  source 1..20: mol_type = other DNA
ctccctgcagggctggggag

SEQ ID NO: 45948 - DNA, 20 bp, synthetic construct
  source 1..20: mol_type = other DNA
tccctccatgtggccgacat

SEQ ID NO: 45949 - DNA, 20 bp, synthetic construct
  source 1..20: mol_type = other DNA
cctctgccgcagcctcgagg

SEQ ID NO: 45950 - DNA, 20 bp, synthetic construct
  source 1..20: mol_type = other DNA
gctggccctggatgccatga

SEQ ID NO: 45951 - DNA, 20 bp, synthetic construct
  source 1..20: mol_type = other DNA
gggtccaggacagagcagac

SEQ ID NO: 45952 - DNA, 20 bp, synthetic construct
  source 1..20: mol_type = other DNA
gctctctgagaacattcctg

SEQ ID NO: 45953 - DNA, 20 bp, synthetic construct
  source 1..20: mol_type = other DNA
taccaccatcagaatcccgc

SEQ ID NO: 45954 - DNA, 20 bp, synthetic construct
  source 1..20: mol_type = other DNA
cttaaggcacaggaactgtg

SEQ ID NO: 45955 - DNA, 20 bp, synthetic construct
  source 1..20: mol_type = other DNA
gagccccatcccaggtcacg

SEQ ID NO: 45956 - DNA, 20 bp, synthetic construct
  source 1..20: mol_type = other DNA
tcctgcctcgtcacaacaac

SEQ ID NO: 45957 - DNA, 20 bp, synthetic construct
  source 1..20: mol_type = other DNA
atccagacacatgcccagca

SEQ ID NO: 45958 - DNA, 20 bp, synthetic construct
  source 1..20: mol_type = other DNA
ctctcaggcatggagtcctg

SEQ ID NO: 45959 - DNA, 20 bp, synthetic construct
  source 1..20: mol_type = other DNA
actcaccgtggtgggtcgga

SEQ ID NO: 45960 - DNA, 20 bp, synthetic construct
  source 1..20: mol_type = other DNA
cataccaataatgcagagtg

SEQ ID NO: 45961 - DNA, 20 bp, synthetic construct
  source 1..20: mol_type = other DNA
acgcactcatgagtgactgc

SEQ ID NO: 45962 - DNA, 20 bp, synthetic construct
  source 1..20: mol_type = other DNA
cggcctcgtgagtacaagga

SEQ ID NO: 45963 - DNA, 20 bp, synthetic construct
  source 1..20: mol_type = other DNA
cccaggacctctgagcgaaa

SEQ ID NO: 45964 - DNA, 20 bp, synthetic construct
  source 1..20: mol_type = other DNA
ccctttcgctcagaggtcct

SEQ ID NO: 45965 - DNA, 20 bp, synthetic construct
  source 1..20: mol_type = other DNA
cctcaatggacaggatgact

SEQ ID NO: 45966 - DNA, 20 bp, synthetic construct
  source 1..20: mol_type = other DNA
tcgcaaggtaaggctactcc

SEQ ID NO: 45967 - DNA, 20 bp, synthetic construct
  source 1..20: mol_type = other DNA
gctatcaaaaccattcggga

SEQ ID NO: 45968 - DNA, 20 bp, synthetic construct
  source 1..20: mol_type = other DNA
gcgagagagtgagaccttcg

SEQ ID NO: 45969 - DNA, 20 bp, synthetic construct
  source 1..20: mol_type = other DNA
cctgctcgtggtgaccgaag

SEQ ID NO: 45970 - DNA, 20 bp, synthetic construct
  source 1..20: mol_type = other DNA
tccatgctgtaacgtgaagc

SEQ ID NO: 45971 - DNA, 20 bp, synthetic construct
  source 1..20: mol_type = other DNA
caggatggttcttaggtagg

SEQ ID NO: 45972 - DNA, 20 bp, synthetic construct
  source 1..20: mol_type = other DNA
ccgccagtctcctccagccc

SEQ ID NO: 45973 - DNA, 20 bp, synthetic construct
  source 1..20: mol_type = other DNA
ggcggtgaagagcctgaagc

SEQ ID NO: 45974 - DNA, 20 bp, synthetic construct
  source 1..20: mol_type = other DNA
gagtgaaggtgggtaccact

SEQ ID NO: 45975 - DNA, 20 bp, synthetic construct
  source 1..20: mol_type = other DNA
cggccacttccctgctgagc

SEQ ID NO: 45976 - DNA, 20 bp, synthetic construct
  source 1..20: mol_type = other DNA
gagcactcactcgatctggt

SEQ ID NO: 45977 - DNA, 20 bp, synthetic construct
  source 1..20: mol_type = other DNA
ctcagatgtggctgtgagca

SEQ ID NO: 45978 - DNA, 20 bp, synthetic construct
  source 1..20: mol_type = other DNA
gttctgaatcacctccgggt

SEQ ID NO: 45979 - DNA, 20 bp, synthetic construct
  source 1..20: mol_type = other DNA
gccatcaagtgtgtggtggt

SEQ ID NO: 45980 - DNA, 20 bp, synthetic construct
  source 1..20: mol_type = other DNA
gggccagcacccagcgctgc

SEQ ID NO: 45981 - DNA, 20 bp, synthetic construct
  source 1..20: mol_type = other DNA
ctcggccaggaaggcgtccg

SEQ ID NO: 45982 - DNA, 20 bp, synthetic construct
  source 1..20: mol_type = other DNA
ccaggcaggtaagggcctgt

SEQ ID NO: 45983 - DNA, 20 bp, synthetic construct
  source 1..20: mol_type = other DNA
caagagaattgaagaagaag

SEQ ID NO: 45984 - DNA, 20 bp, synthetic construct
  source 1..20: mol_type = other DNA
cggcacccagtgctttggag

SEQ ID NO: 45985 - DNA, 20 bp, synthetic construct
  source 1..20: mol_type = other DNA
ctgcgcacctggcattcatg

SEQ ID NO: 45986 - DNA, 20 bp, synthetic construct
  source 1..20: mol_type = other DNA
tcactcaccctgttgtcttc

SEQ ID NO: 45987 - DNA, 20 bp, synthetic construct
  source 1..20: mol_type = other DNA
gaggtttcaggaaccgttgc

SEQ ID NO: 45988 - DNA, 20 bp, synthetic construct
  source 1..20: mol_type = other DNA
gctgatccacatctgctgga

SEQ ID NO: 45989 - DNA, 20 bp, synthetic construct
  source 1..20: mol_type = other DNA
ccgaaatggctctgaggtgc

SEQ ID NO: 45990 - DNA, 20 bp, synthetic construct
  source 1..20: mol_type = other DNA
catagccgcccagcgagcgc

SEQ ID NO: 45991 - DNA, 20 bp, synthetic construct
  source 1..20: mol_type = other DNA
ctcagagagccaacaacggg

SEQ ID NO: 45992 - DNA, 20 bp, synthetic construct
  source 1..20: mol_type = other DNA
gtagagattggctgcgccag

SEQ ID NO: 45993 - DNA, 20 bp, synthetic construct
  source 1..20: mol_type = other DNA
ggccatcaagtgtgtggtgg

SEQ ID NO: 45994 - DNA, 20 bp, synthetic construct
  source 1..20: mol_type = other DNA
cctcggccaggaaggcgtcc

SEQ ID NO: 45995 - DNA, 20 bp, synthetic construct
  source 1..20: mol_type = other DNA
tcccaaactctgctacctgc

SEQ ID NO: 45996 - DNA, 20 bp, synthetic construct
  source 1..20: mol_type = other DNA
ggtcatccctacgggttgat

SEQ ID NO: 45997 - DNA, 20 bp, synthetic construct
  source 1..20: mol_type = other DNA
gcttacctcctccattatgt

SEQ ID NO: 45998 - DNA, 20 bp, synthetic construct
  source 1..20: mol_type = other DNA
accctgaaaggaagtgaaaa

SEQ ID NO: 45999 - DNA, 20 bp, synthetic construct
  source 1..20: mol_type = other DNA
cctcttccctgccaactacg

SEQ ID NO: 46000 - DNA, 20 bp, synthetic construct
  source 1..20: mol_type = other DNA
tctggaagggcacaaaggtc

SEQ ID NO: 46001 - DNA, 20 bp, synthetic construct
  source 1..20: mol_type = other DNA
ttcatcttctgctcaagccg

SEQ ID NO: 46002 - DNA, 20 bp, synthetic construct
  source 1..20: mol_type = other DNA
gatgaagacctggtagagat

SEQ ID NO: 46003 - DNA, 20 bp, synthetic construct
  source 1..20: mol_type = other DNA
tcctgaaatgagaaaagccg

SEQ ID NO: 46004 - DNA, 20 bp, synthetic construct
  source 1..20: mol_type = other DNA
tgaagcatctgcgaggacga

SEQ ID NO: 46005 - DNA, 20 bp, synthetic construct
  source 1..20: mol_type = other DNA
cttcgtcttctccatcagca

SEQ ID NO: 46006 - DNA, 20 bp, synthetic construct
  source 1..20: mol_type = other DNA
cctggggtcaccttgcagtg

SEQ ID NO: 46007 - DNA, 20 bp, synthetic construct
  source 1..20: mol_type = other DNA
cccaccgcactcgctgttgg

SEQ ID NO: 46008 - DNA, 20 bp, synthetic construct
  source 1..20: mol_type = other DNA
gcagcgagcataggcttcca

SEQ ID NO: 46009 - DNA, 20 bp, synthetic construct
  source 1..20: mol_type = other DNA
agatgaacagacaggtcctg

SEQ ID NO: 46010 - DNA, 20 bp, synthetic construct
  source 1..20: mol_type = other DNA
agcactgccgtatccactcc

SEQ ID NO: 46011 - DNA, 20 bp, synthetic construct
  source 1..20: mol_type = other DNA
gtgctctggtcaggctcgcg

SEQ ID NO: 46012 - DNA, 20 bp, synthetic construct
  source 1..20: mol_type = other DNA
gtgagctggtgacacacaca

SEQ ID NO: 46013 - DNA, 20 bp, synthetic construct
  source 1..20: mol_type = other DNA
cggccagttccaaaccctgg

SEQ ID NO: 46014 - DNA, 20 bp, synthetic construct
  source 1..20: mol_type = other DNA
catgcagttctcacacactg

SEQ ID NO: 46015 - DNA, 20 bp, synthetic construct
  source 1..20: mol_type = other DNA
agacttggtatgagcatgca

SEQ ID NO: 46016 - DNA, 20 bp, synthetic construct
  source 1..20: mol_type = other DNA
caacacaatgataaaaacat

SEQ ID NO: 46017 - DNA, 20 bp, synthetic construct
  source 1..20: mol_type = other DNA
tgcagatcccacaggcgccc

SEQ ID NO: 46018 - DNA, 20 bp, synthetic construct
  source 1..20: mol_type = other DNA
cgtcccagtagatcctgctc

SEQ ID NO: 46019 - DNA, 20 bp, synthetic construct
  source 1..20: mol_type = other DNA
ccctgtaggttcctcgtcta

SEQ ID NO: 46020 - DNA, 20 bp, synthetic construct
  source 1..20: mol_type = other DNA
taaacagtgcccaagcctgg

SEQ ID NO: 46021 - DNA, 20 bp, synthetic construct
  source 1..20: mol_type = other DNA
ccccacagatggtttcacga

SEQ ID NO: 46022 - DNA, 20 bp, synthetic construct
  source 1..20: mol_type = other DNA
ttacttgggctgccatgtcc

SEQ ID NO: 46023 - DNA, 20 bp, synthetic construct
  source 1..20: mol_type = other DNA
ctctcccgcatctaccccaa

SEQ ID NO: 46024 - DNA, 20 bp, synthetic construct
  source 1..20: mol_type = other DNA
cttgagagaagtatggtggc

SEQ ID NO: 46025 - DNA, 20 bp, synthetic construct
  source 1..20: mol_type = other DNA
aaagtatgccaggctggctt

SEQ ID NO: 46026 - DNA, 20 bp, synthetic construct
  source 1..20: mol_type = other DNA
agaaggtggggctttgacgc

SEQ ID NO: 46027 - DNA, 20 bp, synthetic construct
  source 1..20: mol_type = other DNA
tgatgagctgttcttccagg

SEQ ID NO: 46028 - DNA, 20 bp, synthetic construct
  source 1..20: mol_type = other DNA
cccagaagccccagaagccg

SEQ ID NO: 46029 - DNA, 20 bp, synthetic construct
  source 1..20: mol_type = other DNA
cgttaatgtgcactggtatc

SEQ ID NO: 46030 - DNA, 20 bp, synthetic construct
  source 1..20: mol_type = other DNA
gcatggcattcattgaagag

SEQ ID NO: 46031 - DNA, 20 bp, synthetic construct
  source 1..20: mol_type = other DNA
acagttgccgattacaggta

SEQ ID NO: 46032 - DNA, 20 bp, synthetic construct
  source 1..20: mol_type = other DNA
cgggcccttaccgatgtaca

SEQ ID NO: 46033 - DNA, 20 bp, synthetic construct
  source 1..20: mol_type = other DNA
tacagtgtagtagctgtcgt

SEQ ID NO: 46034 - DNA, 20 bp, synthetic construct
  source 1..20: mol_type = other DNA
tgacccttaccgtaagcccc

SEQ ID NO: 46035 - DNA, 20 bp, synthetic construct
  source 1..20: mol_type = other DNA
gatgtacatggagttggagt

SEQ ID NO: 46036 - DNA, 20 bp, synthetic construct
  source 1..20: mol_type = other DNA
gatctacaagtgagtgccag

SEQ ID NO: 46037 - DNA, 20 bp, synthetic construct
  source 1..20: mol_type = other DNA
ccgcctagaagcatttgcgg

SEQ ID NO: 46038 - DNA, 20 bp, synthetic construct
  source 1..20: mol_type = other DNA
tatcaccaacataatggagg

SEQ ID NO: 46039 - DNA, 20 bp, synthetic construct
  source 1..20: mol_type = other DNA
cacgaagctctccgatgtgt

SEQ ID NO: 46040 - DNA, 20 bp, synthetic construct
  source 1..20: mol_type = other DNA
tcagccagctccttacatga

SEQ ID NO: 46041 - DNA, 20 bp, synthetic construct
  source 1..20: mol_type = other DNA
attggttgtcccaggacgag

SEQ ID NO: 46042 - DNA, 20 bp, synthetic construct
  source 1..20: mol_type = other DNA
cgctgcggctggagaacttg

SEQ ID NO: 46043 - DNA, 20 bp, synthetic construct
  source 1..20: mol_type = other DNA
caccttcactctcaggaaca

SEQ ID NO: 46044 - DNA, 20 bp, synthetic construct
  source 1..20: mol_type = other DNA
gggcgatcctcccacctgtg

SEQ ID NO: 46045 - DNA, 20 bp, synthetic construct
  source 1..20: mol_type = other DNA
ccgacccagggtactacaac

SEQ ID NO: 46046 - DNA, 20 bp, synthetic construct
  source 1..20: mol_type = other DNA
agccggccagttccaaaccc

SEQ ID NO: 46047 - DNA, 20 bp, synthetic construct
  source 1..20: mol_type = other DNA
atggcctcctccatctgcag

SEQ ID NO: 46048 - DNA, 20 bp, synthetic construct
  source 1..20: mol_type = other DNA
aaggagccgtgagtgttccc

SEQ ID NO: 46049 - DNA, 20 bp, synthetic construct
  source 1..20: mol_type = other DNA
ggctgccagaaattgtttgg

SEQ ID NO: 46050 - DNA, 20 bp, synthetic construct
  source 1..20: mol_type = other DNA
ctgcagctcctcctgtgagt

SEQ ID NO: 46051 - DNA, 20 bp, synthetic construct
  source 1..20: mol_type = other DNA
caaatatcacctccttctcc

SEQ ID NO: 46052 - DNA, 20 bp, synthetic construct
  source 1..20: mol_type = other DNA
tgctgccgtagaagaagggc

SEQ ID NO: 46053 - DNA, 20 bp, synthetic construct
  source 1..20: mol_type = other DNA
tcagatactccaccagctgc

SEQ ID NO: 46054 - DNA, 20 bp, synthetic construct
  source 1..20: mol_type = other DNA
gaggaggtaagctctagagc

SEQ ID NO: 46055 - DNA, 20 bp, synthetic construct
  source 1..20: mol_type = other DNA
atcatacccacctagtgtga

SEQ ID NO: 46056 - DNA, 20 bp, synthetic construct
  source 1..20: mol_type = other DNA
atgtacatggagttggagtt

SEQ ID NO: 46057 - DNA, 20 bp, synthetic construct
  source 1..20: mol_type = other DNA
agaagtcccctggggagctc

SEQ ID NO: 46058 - DNA, 20 bp, synthetic construct
  source 1..20: mol_type = other DNA
attttgcagacgctctcagc

SEQ ID NO: 46059 - DNA, 20 bp, synthetic construct
  source 1..20: mol_type = other DNA
ccagaatgttggcagcccga

SEQ ID NO: 46060 - DNA, 20 bp, synthetic construct
  source 1..20: mol_type = other DNA
tcatacccacctagtgtgaa

SEQ ID NO: 46061 - DNA, 20 bp, synthetic construct
  source 1..20: mol_type = other DNA
ggaatccagtcgctggccct

SEQ ID NO: 46062 - DNA, 20 bp, synthetic construct
  source 1..20: mol_type = other DNA
gcaccaggccctccaggagc

SEQ ID NO: 46063 - DNA, 20 bp, synthetic construct
  source 1..20: mol_type = other DNA
catctccatgaccagcatga

SEQ ID NO: 46064 - DNA, 20 bp, synthetic construct
  source 1..20: mol_type = other DNA
cagatactccaccagctgca

SEQ ID NO: 46065 - DNA, 20 bp, synthetic construct
  source 1..20: mol_type = other DNA
cccgcactgattgcactgga

SEQ ID NO: 46066 - DNA, 20 bp, synthetic construct
  source 1..20: mol_type = other DNA
tcaggtatggggcagcgcct

SEQ ID NO: 46067 - DNA, 20 bp, synthetic construct
  source 1..20: mol_type = other DNA
gcctcggccaggaaggcgtc

SEQ ID NO: 46068 - DNA, 20 bp, synthetic construct
  source 1..20: mol_type = other DNA
atgggagatccggcagccct

SEQ ID NO: 46069 - DNA, 20 bp, synthetic construct
  source 1..20: mol_type = other DNA
cgagctggggttccacagcg

SEQ ID NO: 46070 - DNA, 20 bp, synthetic construct
  source 1..20: mol_type = other DNA
gcaagaggtgagcaccgggt

SEQ ID NO: 46071 - DNA, 20 bp, synthetic construct
  source 1..20: mol_type = other DNA
ggcccagacagcagacgcca

SEQ ID NO: 46072 - DNA, 20 bp, synthetic construct
  source 1..20: mol_type = other DNA
tggccggcccaagatcgacg

SEQ ID NO: 46073 - DNA, 20 bp, synthetic construct
  source 1..20: mol_type = other DNA
cactcgtaccttgcccatgt

SEQ ID NO: 46074 - DNA, 20 bp, synthetic construct
  source 1..20: mol_type = other DNA
gcccaggacctctgagcgaa

SEQ ID NO: 46075 - DNA, 20 bp, synthetic construct
  source 1..20: mol_type = other DNA
gcatttgaagggcttctccc

SEQ ID NO: 46076 - DNA, 20 bp, synthetic construct
  source 1..20: mol_type = other DNA
cttctccatcagcatggcgt

SEQ ID NO: 46077 - DNA, 20 bp, synthetic construct
  source 1..20: mol_type = other DNA
catactttgaagatcgtcat

SEQ ID NO: 46078 - DNA, 20 bp, synthetic construct
  source 1..20: mol_type = other DNA
ggtcctgcatggtatagagc

SEQ ID NO: 46079 - DNA, 20 bp, synthetic construct
  source 1..20: mol_type = other DNA
catgtccaggagtttgttga

SEQ ID NO: 46080 - DNA, 20 bp, synthetic construct
  source 1..20: mol_type = other DNA
caaggtgaccccaggcagca

SEQ ID NO: 46081 - DNA, 20 bp, synthetic construct
  source 1..20: mol_type = other DNA
cagggaagtggccgctcaag

SEQ ID NO: 46082 - DNA, 20 bp, synthetic construct
  source 1..20: mol_type = other DNA
cgcacgaggaaggagccgtc

SEQ ID NO: 46083 - DNA, 20 bp, synthetic construct
  source 1..20: mol_type = other DNA
tgtacttctcctccgtctgc

SEQ ID NO: 46084 - DNA, 20 bp, synthetic construct
  source 1..20: mol_type = other DNA
cctttgcccatgtggatctg

SEQ ID NO: 46085 - DNA, 20 bp, synthetic construct
  source 1..20: mol_type = other DNA
tgtggcgccaatgcacccac

SEQ ID NO: 46086 - DNA, 20 bp, synthetic construct
  source 1..20: mol_type = other DNA
ggaggtaagctctagagcag

SEQ ID NO: 46087 - DNA, 20 bp, synthetic construct
  source 1..20: mol_type = other DNA
caaccctggcttctatgtag

SEQ ID NO: 46088 - DNA, 20 bp, synthetic construct
  source 1..20: mol_type = other DNA
caggatgactgggtacctgc

SEQ ID NO: 46089 - DNA, 20 bp, synthetic construct
  source 1..20: mol_type = other DNA
agaccccttacgagagatcg

SEQ ID NO: 46090 - DNA, 20 bp, synthetic construct
  source 1..20: mol_type = other DNA
cgcccagccaccgcgtgacc

SEQ ID NO: 46091 - DNA, 20 bp, synthetic construct
  source 1..20: mol_type = other DNA
tccaggacaaactacatcgc

SEQ ID NO: 46092 - DNA, 20 bp, synthetic construct
  source 1..20: mol_type = other DNA
gtgtcccaggaactgcatcc

SEQ ID NO: 46093 - DNA, 20 bp, synthetic construct
  source 1..20: mol_type = other DNA
gcttcaaagagagggtgaga

SEQ ID NO: 46094 - DNA, 20 bp, synthetic construct
  source 1..20: mol_type = other DNA
ccccagctcgtcatcctcca

SEQ ID NO: 46095 - DNA, 20 bp, synthetic construct
  source 1..20: mol_type = other DNA
cagagatggagaagtcccct

SEQ ID NO: 46096 - DNA, 20 bp, synthetic construct
  source 1..20: mol_type = other DNA
gcagggctcaggacaaaaag

SEQ ID NO: 46097 - DNA, 20 bp, synthetic construct
  source 1..20: mol_type = other DNA
ctctgaggtttggtttggag

SEQ ID NO: 46098 - DNA, 20 bp, synthetic construct
  source 1..20: mol_type = other DNA
ctccaggcatgtgagaggat

SEQ ID NO: 46099 - DNA, 20 bp, synthetic construct
  source 1..20: mol_type = other DNA
cagcacgcaggggaccagga

SEQ ID NO: 46100 - DNA, 20 bp, synthetic construct
  source 1..20: mol_type = other DNA
tcactctatatgctctgtac

SEQ ID NO: 46101 - DNA, 20 bp, synthetic construct
  source 1..20: mol_type = other DNA
ctacctcatcagccaagaca

SEQ ID NO: 46102 - DNA, 20 bp, synthetic construct
  source 1..20: mol_type = other DNA
gcaggtttacaaagtccttg

SEQ ID NO: 46103 - DNA, 20 bp, synthetic construct
  source 1..20: mol_type = other DNA
ccgggagagcgagagcaccg

SEQ ID NO: 46104 - DNA, 20 bp, synthetic construct
  source 1..20: mol_type = other DNA
cccaccatcacgccctggga

SEQ ID NO: 46105 - DNA, 20 bp, synthetic construct
  source 1..20: mol_type = other DNA
ctctactcatctgtaagcgc

SEQ ID NO: 46106 - DNA, 20 bp, synthetic construct
  source 1..20: mol_type = other DNA
tacaaaccttgagagaagta

SEQ ID NO: 46107 - DNA, 20 bp, synthetic construct
  source 1..20: mol_type = other DNA
cctacgggttgatgggtgaa

SEQ ID NO: 46108 - DNA, 20 bp, synthetic construct
  source 1..20: mol_type = other DNA
tgctcttagaaagataaacc

SEQ ID NO: 46109 - DNA, 20 bp, synthetic construct
  source 1..20: mol_type = other DNA
ggcaagtactgcattcccga

SEQ ID NO: 46110 - DNA, 20 bp, synthetic construct
  source 1..20: mol_type = other DNA
catggggatgaagtacctgg

SEQ ID NO: 46111 - DNA, 20 bp, synthetic construct
  source 1..20: mol_type = other DNA
tgccatagtatttcagatcc

SEQ ID NO: 46112 - DNA, 20 bp, synthetic construct
  source 1..20: mol_type = other DNA
gcccttactctcttcatcaa

SEQ ID NO: 46113 - DNA, 20 bp, synthetic construct
  source 1..20: mol_type = other DNA
aactgggctggcggccagga

SEQ ID NO: 46114 - DNA, 20 bp, synthetic construct
  source 1..20: mol_type = other DNA
tcttgtaggtgtgctgatgt

SEQ ID NO: 46115 - DNA, 20 bp, synthetic construct
  source 1..20: mol_type = other DNA
ccttcccaggatgaagatga

SEQ ID NO: 46116 - DNA, 20 bp, synthetic construct
  source 1..20: mol_type = other DNA
gggagatccggcagccctcg

SEQ ID NO: 46117 - DNA, 20 bp, synthetic construct
  source 1..20: mol_type = other DNA
ctggaggaggaatgccaatg

SEQ ID NO: 46118 - DNA, 20 bp, synthetic construct
  source 1..20: mol_type = other DNA
ctaccttcagattggagagc

SEQ ID NO: 46119 - DNA, 20 bp, synthetic construct
  source 1..20: mol_type = other DNA
gctacctgtgagtggccagg

SEQ ID NO: 46120 - DNA, 20 bp, synthetic construct
  source 1..20: mol_type = other DNA
ttcctgggaaatctacggga

SEQ ID NO: 46121 - DNA, 20 bp, synthetic construct
  source 1..20: mol_type = other DNA
actcacgaggccgtttgaac

SEQ ID NO: 46122 - DNA, 20 bp, synthetic construct
  source 1..20: mol_type = other DNA
acacgccacattcaaagcca

SEQ ID NO: 46123 - DNA, 20 bp, synthetic construct
  source 1..20: mol_type = other DNA
ccttgctgactatttcaaga

SEQ ID NO: 46124 - DNA, 20 bp, synthetic construct
  source 1..20: mol_type = other DNA
tctaacctgggtaagggatg

SEQ ID NO: 46125 - DNA, 20 bp, synthetic construct
  source 1..20: mol_type = other DNA
gaccagtctctggctcacta

SEQ ID NO: 46126 - DNA, 20 bp, synthetic construct
  source 1..20: mol_type = other DNA
tccaggttctgaatcacctc

SEQ ID NO: 46127 - DNA, 20 bp, synthetic construct
  source 1..20: mol_type = other DNA
cttctgtaatacacttggag

SEQ ID NO: 46128 - DNA, 20 bp, synthetic construct
  source 1..20: mol_type = other DNA
ccaactcacatgagtcaacg

SEQ ID NO: 46129 - DNA, 20 bp, synthetic construct
  source 1..20: mol_type = other DNA
ggatggttcttaggtaggtg

SEQ ID NO: 46130 - DNA, 20 bp, synthetic construct
  source 1..20: mol_type = other DNA
tccagcagtgattcataatc

SEQ ID NO: 46131 - DNA, 20 bp, synthetic construct
  source 1..20: mol_type = other DNA
cctgtctcttcaggaaaccg

SEQ ID NO: 46132 - DNA, 20 bp, synthetic construct
  source 1..20: mol_type = other DNA
tctattgaaggagcagggac

SEQ ID NO: 46133 - DNA, 20 bp, synthetic construct
  source 1..20: mol_type = other DNA
cgggctcatctactgcctga

SEQ ID NO: 46134 - DNA, 20 bp, synthetic construct
  source 1..20: mol_type = other DNA
cgggagagcgagagcaccgc

SEQ ID NO: 46135 - DNA, 20 bp, synthetic construct
  source 1..20: mol_type = other DNA
cttcatctgcacgtcctccc

SEQ ID NO: 46136 - DNA, 20 bp, synthetic construct
  source 1..20: mol_type = other DNA
ggagaagtacactgacacgc

SEQ ID NO: 46137 - DNA, 20 bp, synthetic construct
  source 1..20: mol_type = other DNA
gcccagccaccgcgtgacct

SEQ ID NO: 46138 - DNA, 20 bp, synthetic construct
  source 1..20: mol_type = other DNA
caggcagagaacttactcat

SEQ ID NO: 46139 - DNA, 20 bp, synthetic construct
  source 1..20: mol_type = other DNA
gagacttggtatgagcatgc

SEQ ID NO: 46140 - DNA, 20 bp, synthetic construct
  source 1..20: mol_type = other DNA
gtcgggcccccagcacctgt

SEQ ID NO: 46141 - DNA, 20 bp, synthetic construct
  source 1..20: mol_type = other DNA
ttgcaagtctgacatttgaa

SEQ ID NO: 46142 - DNA, 20 bp, synthetic construct
  source 1..20: mol_type = other DNA
tgagtagagctttgtcgagc

SEQ ID NO: 46143 - DNA, 20 bp, synthetic construct
  source 1..20: mol_type = other DNA
ggactcactgctccaggatg

SEQ ID NO: 46144 - DNA, 20 bp, synthetic construct
  source 1..20: mol_type = other DNA
ccagggggcaaccgtgtctg

SEQ ID NO: 46145 - DNA, 20 bp, synthetic construct
  source 1..20: mol_type = other DNA
ccgcaggcgcgtcttccagg

SEQ ID NO: 46146 - DNA, 20 bp, synthetic construct
  source 1..20: mol_type = other DNA
atctacaagtgagtgccagt

SEQ ID NO: 46147 - DNA, 20 bp, synthetic construct
  source 1..20: mol_type = other DNA
cgccagatcacgtggagccg

SEQ ID NO: 46148 - DNA, 20 bp, synthetic construct
  source 1..20: mol_type = other DNA
ctcctggaaacaggacacaa

SEQ ID NO: 46149 - DNA, 20 bp, synthetic construct
  source 1..20: mol_type = other DNA
tcctcgcagatgcttcagat

SEQ ID NO: 46150 - DNA, 20 bp, synthetic construct
  source 1..20: mol_type = other DNA
tggcatccagggccagccgc

SEQ ID NO: 46151 - DNA, 20 bp, synthetic construct
  source 1..20: mol_type = other DNA
cagagcttgtgcattgacat

SEQ ID NO: 46152 - DNA, 20 bp, synthetic construct
  source 1..20: mol_type = other DNA
tttcagatccaggatactga

SEQ ID NO: 46153 - DNA, 20 bp, synthetic construct
  source 1..20: mol_type = other DNA
cctcgatcaggaggaacatg

SEQ ID NO: 46154 - DNA, 20 bp, synthetic construct
  source 1..20: mol_type = other DNA
ggtccaggacagagcagaca

SEQ ID NO: 46155 - DNA, 20 bp, synthetic construct
  source 1..20: mol_type = other DNA
gagggctcacctgggacatc

SEQ ID NO: 46156 - DNA, 20 bp, synthetic construct
  source 1..20: mol_type = other DNA
ctatcaaaaccattcgggaa

SEQ ID NO: 46157 - DNA, 20 bp, synthetic construct
  source 1..20: mol_type = other DNA
tgtactcgttgtcctcaatg

SEQ ID NO: 46158 - DNA, 20 bp, synthetic construct
  source 1..20: mol_type = other DNA
gcgtctgcaaaatgacccac

SEQ ID NO: 46159 - DNA, 20 bp, synthetic construct
  source 1..20: mol_type = other DNA
gccctcaacttccagacccc

SEQ ID NO: 46160 - DNA, 20 bp, synthetic construct
  source 1..20: mol_type = other DNA
ccaggcagagaacttactca

SEQ ID NO: 46161 - DNA, 20 bp, synthetic construct
  source 1..20: mol_type = other DNA
gcatactttgaagatcgtca

SEQ ID NO: 46162 - DNA, 20 bp, synthetic construct
  source 1..20: mol_type = other DNA
agggctcacctgggacatct

SEQ ID NO: 46163 - DNA, 20 bp, synthetic construct
  source 1..20: mol_type = other DNA
tcttcgtggctttctgtgga

SEQ ID NO: 46164 - DNA, 20 bp, synthetic construct
  source 1..20: mol_type = other DNA
tgttctcagagagccaacaa

SEQ ID NO: 46165 - DNA, 20 bp, synthetic construct
  source 1..20: mol_type = other DNA
ctctccagagaccagaagat

SEQ ID NO: 46166 - DNA, 20 bp, synthetic construct
  source 1..20: mol_type = other DNA
cttacccaggttagagccaa

SEQ ID NO: 46167 - DNA, 20 bp, synthetic construct
  source 1..20: mol_type = other DNA
cctcccagccatccgtcctg

SEQ ID NO: 46168 - DNA, 20 bp, synthetic construct
  source 1..20: mol_type = other DNA
tagttgagctgcaaagagaa

SEQ ID NO: 46169 - DNA, 20 bp, synthetic construct
  source 1..20: mol_type = other DNA
ccatgagtaagttctctgcc

SEQ ID NO: 46170 - DNA, 20 bp, synthetic construct
  source 1..20: mol_type = other DNA
cctgcagagaaacacacttg

SEQ ID NO: 46171 - DNA, 20 bp, synthetic construct
  source 1..20: mol_type = other DNA
cggtgcccacctcgaggctg

SEQ ID NO: 46172 - DNA, 20 bp, synthetic construct
  source 1..20: mol_type = other DNA
ttgcagctgcttcatgaggt

SEQ ID NO: 46173 - DNA, 20 bp, synthetic construct
  source 1..20: mol_type = other DNA
gaaggtacctctgagatgca

SEQ ID NO: 46174 - DNA, 20 bp, synthetic construct
  source 1..20: mol_type = other DNA
cagccccagctcatatgcac

SEQ ID NO: 46175 - DNA, 20 bp, synthetic construct
  source 1..20: mol_type = other DNA
gtccctcatctatgggaaga

SEQ ID NO: 46176 - DNA, 20 bp, synthetic construct
  source 1..20: mol_type = other DNA
atcagggctaccgctgccat

SEQ ID NO: 46177 - DNA, 20 bp, synthetic construct
  source 1..20: mol_type = other DNA
gccagaccacggggtgcctg

SEQ ID NO: 46178 - DNA, 20 bp, synthetic construct
  source 1..20: mol_type = other DNA
acttacggcacccggagctt

SEQ ID NO: 46179 - DNA, 20 bp, synthetic construct
  source 1..20: mol_type = other DNA
cgtagggatgaccaacccgg

SEQ ID NO: 46180 - DNA, 20 bp, synthetic construct
  source 1..20: mol_type = other DNA
cacgcaggaggcgatggaga

SEQ ID NO: 46181 - DNA, 20 bp, synthetic construct
  source 1..20: mol_type = other DNA
ctgcagttttagcatctgtg

SEQ ID NO: 46182 - DNA, 20 bp, synthetic construct
  source 1..20: mol_type = other DNA
tacactgatacatccctcga

SEQ ID NO: 46183 - DNA, 20 bp, synthetic construct
  source 1..20: mol_type = other DNA
catcatcttcatcctgggaa

SEQ ID NO: 46184 - DNA, 20 bp, synthetic construct
  source 1..20: mol_type = other DNA
cccttacctgcctggcagcc

SEQ ID NO: 46185 - DNA, 20 bp, synthetic construct
  source 1..20: mol_type = other DNA
tacagttcgggtggacactc

SEQ ID NO: 46186 - DNA, 20 bp, synthetic construct
  source 1..20: mol_type = other DNA
cctccatctgcaggggagct

SEQ ID NO: 46187 - DNA, 20 bp, synthetic construct
  source 1..20: mol_type = other DNA
cttcctgcccacacagtgat

SEQ ID NO: 46188 - DNA, 20 bp, synthetic construct
  source 1..20: mol_type = other DNA
ctcatgagtgcgtacagttc

SEQ ID NO: 46189 - DNA, 20 bp, synthetic construct
  source 1..20: mol_type = other DNA
tgactgccacagatccacat

SEQ ID NO: 46190 - DNA, 20 bp, synthetic construct
  source 1..20: mol_type = other DNA
ccgctgcacaagttcctggt

SEQ ID NO: 46191 - DNA, 20 bp, synthetic construct
  source 1..20: mol_type = other DNA
ttcctgcccacacagtgata

SEQ ID NO: 46192 - DNA, 20 bp, synthetic construct
  source 1..20: mol_type = other DNA
gaagccccagaagccgtggt

SEQ ID NO: 46193 - DNA, 20 bp, synthetic construct
  source 1..20: mol_type = other DNA
gcaggtaggaggtctcagac

SEQ ID NO: 46194 - DNA, 20 bp, synthetic construct
  source 1..20: mol_type = other DNA
cgtagagccgaaccagccgc

SEQ ID NO: 46195 - DNA, 20 bp, synthetic construct
  source 1..20: mol_type = other DNA
cttgtagggcttctggccgt

SEQ ID NO: 46196 - DNA, 20 bp, synthetic construct
  source 1..20: mol_type = other DNA
aagccctacaaggcaggcgc

SEQ ID NO: 46197 - DNA, 20 bp, synthetic construct
  source 1..20: mol_type = other DNA
cactcaccctcatggcatcc

SEQ ID NO: 46198 - DNA, 20 bp, synthetic construct
  source 1..20: mol_type = other DNA
cgcagatcaaagagagcctg

SEQ ID NO: 46199 - DNA, 20 bp, synthetic construct
  source 1..20: mol_type = other DNA
gggcaagtactgcattcccg

SEQ ID NO: 46200 - DNA, 20 bp, synthetic construct
  source 1..20: mol_type = other DNA
actcatgagtgcgtacagtt

SEQ ID NO: 46201 - DNA, 20 bp, synthetic construct
  source 1..20: mol_type = other DNA
gcaggtcctactcggaggga

SEQ ID NO: 46202 - DNA, 20 bp, synthetic construct
  source 1..20: mol_type = other DNA
atgtggaagtcacgcccgtt

SEQ ID NO: 46203 - DNA, 20 bp, synthetic construct
  source 1..20: mol_type = other DNA
atagttgagctgcaaagaga

SEQ ID NO: 46204 - DNA, 20 bp, synthetic construct
  source 1..20: mol_type = other DNA
ttgagagaagtatggtggca

SEQ ID NO: 46205 - DNA, 20 bp, synthetic construct
  source 1..20: mol_type = other DNA
ctgagccaggtcctggggag

SEQ ID NO: 46206 - DNA, 20 bp, synthetic construct
  source 1..20: mol_type = other DNA
gccctgctcgtggtgaccga

SEQ ID NO: 46207 - DNA, 20 bp, synthetic construct
  source 1..20: mol_type = other DNA
gttccctgccaactacgtgg

SEQ ID NO: 46208 - DNA, 20 bp, synthetic construct
  source 1..20: mol_type = other DNA
ccagaagttccccaagctcc

SEQ ID NO: 46209 - DNA, 20 bp, synthetic construct
  source 1..20: mol_type = other DNA
tctgtgccaagagataaagc

SEQ ID NO: 46210 - DNA, 20 bp, synthetic construct
  source 1..20: mol_type = other DNA
agcgtctgcaaaatgaccca

SEQ ID NO: 46211 - DNA, 20 bp, synthetic construct
  source 1..20: mol_type = other DNA
tgaagcagctgcaacaccag

SEQ ID NO: 46212 - DNA, 20 bp, synthetic construct
  source 1..20: mol_type = other DNA
ccatgccatcaacctgcgtg

SEQ ID NO: 46213 - DNA, 20 bp, synthetic construct
  source 1..20: mol_type = other DNA
ggccggtctgtggaaacaca

SEQ ID NO: 46214 - DNA, 20 bp, synthetic construct
  source 1..20: mol_type = other DNA
gccacagcccatggtccctg

SEQ ID NO: 46215 - DNA, 20 bp, synthetic construct
  source 1..20: mol_type = other DNA
ctgcccgctcacctggctca

SEQ ID NO: 46216 - DNA, 20 bp, synthetic construct
  source 1..20: mol_type = other DNA
aggacctgtctgttcatctc

SEQ ID NO: 46217 - DNA, 20 bp, synthetic construct
  source 1..20: mol_type = other DNA
gcgccctgacaactgtccag

SEQ ID NO: 46218 - DNA, 20 bp, synthetic construct
  source 1..20: mol_type = other DNA
tgggagatccggcagccctc

SEQ ID NO: 46219 - DNA, 20 bp, synthetic construct
  source 1..20: mol_type = other DNA
tgtacatggagttggagttg

SEQ ID NO: 46220 - DNA, 20 bp, synthetic construct
  source 1..20: mol_type = other DNA
cagtgagggcgtccctccgg

SEQ ID NO: 46221 - DNA, 20 bp, synthetic construct
  source 1..20: mol_type = other DNA
gctccagacatcgctgcggc

SEQ ID NO: 46222 - DNA, 20 bp, synthetic construct
  source 1..20: mol_type = other DNA
aagggaagataatggaacgg

SEQ ID NO: 46223 - DNA, 20 bp, synthetic construct
  source 1..20: mol_type = other DNA
cgcgccagatcacgtggagc

SEQ ID NO: 46224 - DNA, 20 bp, synthetic construct
  source 1..20: mol_type = other DNA
tgagctgcagccacagccca

SEQ ID NO: 46225 - DNA, 20 bp, synthetic construct
  source 1..20: mol_type = other DNA
actcacccaggaaggaaggc

SEQ ID NO: 46226 - DNA, 20 bp, synthetic construct
  source 1..20: mol_type = other DNA
gaatttatcatttcgtggtg

SEQ ID NO: 46227 - DNA, 20 bp, synthetic construct
  source 1..20: mol_type = other DNA
ggttccttccttgtaggcca

SEQ ID NO: 46228 - DNA, 20 bp, synthetic construct
  source 1..20: mol_type = other DNA
accgagacaacaagaaggtg

SEQ ID NO: 46229 - DNA, 20 bp, synthetic construct
  source 1..20: mol_type = other DNA
agatggagactttatatgct

SEQ ID NO: 46230 - DNA, 20 bp, synthetic construct
  source 1..20: mol_type = other DNA
ggcagcggagacagtaagtg

SEQ ID NO: 46231 - DNA, 20 bp, synthetic construct
  source 1..20: mol_type = other DNA
gatggagccgccgatccaca

SEQ ID NO: 46232 - DNA, 20 bp, synthetic construct
  source 1..20: mol_type = other DNA
ctccaccagctcctagaagg

SEQ ID NO: 46233 - DNA, 20 bp, synthetic construct
  source 1..20: mol_type = other DNA
cagatacctggtggaaatgg

SEQ ID NO: 46234 - DNA, 20 bp, synthetic construct
  source 1..20: mol_type = other DNA
caggtcctactcggagggaa

SEQ ID NO: 46235 - DNA, 20 bp, synthetic construct
  source 1..20: mol_type = other DNA
caggttgcagggcagcccgt

SEQ ID NO: 46236 - DNA, 20 bp, synthetic construct
  source 1..20: mol_type = other DNA
gtaggacaaggcctcccaca

SEQ ID NO: 46237 - DNA, 20 bp, synthetic construct
  source 1..20: mol_type = other DNA
gactgacatggaacagggga

SEQ ID NO: 46238 - DNA, 20 bp, synthetic construct
  source 1..20: mol_type = other DNA
tcttacctctcaatctgcag

SEQ ID NO: 46239 - DNA, 20 bp, synthetic construct
  source 1..20: mol_type = other DNA
aaaccttgagagaagtatgg

SEQ ID NO: 46240 - DNA, 20 bp, synthetic construct
  source 1..20: mol_type = other DNA
tacttacggcacccggagct

SEQ ID NO: 46241 - DNA, 20 bp, synthetic construct
  source 1..20: mol_type = other DNA
ctctggcacactgtggggga

SEQ ID NO: 46242 - DNA, 20 bp, synthetic construct
  source 1..20: mol_type = other DNA
agctcaccaatctgacaagc

SEQ ID NO: 46243 - DNA, 20 bp, synthetic construct
  source 1..20: mol_type = other DNA
agaagggcaggtgcgccgcg

SEQ ID NO: 46244 - DNA, 20 bp, synthetic construct
  source 1..20: mol_type = other DNA
tcatgaggttggcctcggcc

SEQ ID NO: 46245 - DNA, 20 bp, synthetic construct
  source 1..20: mol_type = other DNA
acggaggaagaagattgccc

SEQ ID NO: 46246 - DNA, 20 bp, synthetic construct
  source 1..20: mol_type = other DNA
aggaggtaagctctagagca

SEQ ID NO: 46247 - DNA, 20 bp, synthetic construct
  source 1..20: mol_type = other DNA
actgacatggaacaggggaa

SEQ ID NO: 46248 - DNA, 20 bp, synthetic construct
  source 1..20: mol_type = other DNA
tcttcatcaaatacaaggag

SEQ ID NO: 46249 - DNA, 20 bp, synthetic construct
  source 1..20: mol_type = other DNA
cgctgatcttggcgtagtgc

SEQ ID NO: 46250 - DNA, 20 bp, synthetic construct
  source 1..20: mol_type = other DNA
ccacagcccatggtccctga

SEQ ID NO: 46251 - DNA, 20 bp, synthetic construct
  source 1..20: mol_type = other DNA
tcaccttgcagtggggaagc

SEQ ID NO: 46252 - DNA, 20 bp, synthetic construct
  source 1..20: mol_type = other DNA
ggcaggcgtagttgcagagg

SEQ ID NO: 46253 - DNA, 20 bp, synthetic construct
  source 1..20: mol_type = other DNA
gtctgtcaagaagaacttgg

SEQ ID NO: 46254 - DNA, 20 bp, synthetic construct
  source 1..20: mol_type = other DNA
ccgcctcaccaggttctcaa

SEQ ID NO: 46255 - DNA, 20 bp, synthetic construct
  source 1..20: mol_type = other DNA
gcggcagaggtgcagcacct

SEQ ID NO: 46256 - DNA, 20 bp, synthetic construct
  source 1..20: mol_type = other DNA
gaatccagtcgctggccctt

SEQ ID NO: 46257 - DNA, 20 bp, synthetic construct
  source 1..20: mol_type = other DNA
ctctgccgcagcctcgaggt

SEQ ID NO: 46258 - DNA, 20 bp, synthetic construct
  source 1..20: mol_type = other DNA
gcccacaggcattgcagaca

SEQ ID NO: 46259 - DNA, 20 bp, synthetic construct
  source 1..20: mol_type = other DNA
gacagaaatggctgcaacca

SEQ ID NO: 46260 - DNA, 20 bp, synthetic construct
  source 1..20: mol_type = other DNA
agcgcagaaaggcaaattca

SEQ ID NO: 46261 - DNA, 20 bp, synthetic construct
  source 1..20: mol_type = other DNA
caggtcacgcggtggctggg

SEQ ID NO: 46262 - DNA, 20 bp, synthetic construct
  source 1..20: mol_type = other DNA
gcggccacttccctgctgag

SEQ ID NO: 46263 - DNA, 20 bp, synthetic construct
  source 1..20: mol_type = other DNA
gtactacaacgggcacacga

SEQ ID NO: 46264 - DNA, 20 bp, synthetic construct
  source 1..20: mol_type = other DNA
ctcgtcacaacaacaggtgc

SEQ ID NO: 46265 - DNA, 20 bp, synthetic construct
  source 1..20: mol_type = other DNA
ttgcagccctcgattccagc

SEQ ID NO: 46266 - DNA, 20 bp, synthetic construct
  source 1..20: mol_type = other DNA
actgagccaggtcctgggga

SEQ ID NO: 46267 - DNA, 20 bp, synthetic construct
  source 1..20: mol_type = other DNA
agatccagtagtgggaaaga

SEQ ID NO: 46268 - DNA, 20 bp, synthetic construct
  source 1..20: mol_type = other DNA
ctgaacttgtcgtctactgc

SEQ ID NO: 46269 - DNA, 20 bp, synthetic construct
  source 1..20: mol_type = other DNA
cactcgccgctcctgcgcca

SEQ ID NO: 46270 - DNA, 20 bp, synthetic construct
  source 1..20: mol_type = other DNA
ggagctatggggtcaccatg

SEQ ID NO: 46271 - DNA, 20 bp, synthetic construct
  source 1..20: mol_type = other DNA
cgagagagtgagaccttcgt

SEQ ID NO: 46272 - DNA, 20 bp, synthetic construct
  source 1..20: mol_type = other DNA
tacaacaccatgaggacata

SEQ ID NO: 46273 - DNA, 20 bp, synthetic construct
  source 1..20: mol_type = other DNA
tgaagaacagctcatagccc

SEQ ID NO: 46274 - DNA, 20 bp, synthetic construct
  source 1..20: mol_type = other DNA
cgcagcagtctggagaaggc

SEQ ID NO: 46275 - DNA, 20 bp, synthetic construct
  source 1..20: mol_type = other DNA
tcttgaaggggctcactaaa

SEQ ID NO: 46276 - DNA, 20 bp, synthetic construct
  source 1..20: mol_type = other DNA
ctggaagtcatgcccgttgg

SEQ ID NO: 46277 - DNA, 20 bp, synthetic construct
  source 1..20: mol_type = other DNA
cctatccaggtacctgaccg

SEQ ID NO: 46278 - DNA, 20 bp, synthetic construct
  source 1..20: mol_type = other DNA
ttctgtctattgaaggagca

SEQ ID NO: 46279 - DNA, 20 bp, synthetic construct
  source 1..20: mol_type = other DNA
ccgtctgctggatctcccgc

SEQ ID NO: 46280 - DNA, 20 bp, synthetic construct
  source 1..20: mol_type = other DNA
ccaggtgagcgggcagaggt

SEQ ID NO: 46281 - DNA, 20 bp, synthetic construct
  source 1..20: mol_type = other DNA
acagcacaagaagctggctg

SEQ ID NO: 46282 - DNA, 20 bp, synthetic construct
  source 1..20: mol_type = other DNA
cgaggaggagatccagtagt

SEQ ID NO: 46283 - DNA, 20 bp, synthetic construct
  source 1..20: mol_type = other DNA
gaccgagacaacaagaaggt

SEQ ID NO: 46284 - DNA, 20 bp, synthetic construct
  source 1..20: mol_type = other DNA
ggccagaagccctacaaggc

SEQ ID NO: 46285 - DNA, 20 bp, synthetic construct
  source 1..20: mol_type = other DNA
ggcggcaggcgtagttgcag

SEQ ID NO: 46286 - DNA, 20 bp, synthetic construct
  source 1..20: mol_type = other DNA
cctcgtcacaacaacaggtg

SEQ ID NO: 46287 - DNA, 20 bp, synthetic construct
  source 1..20: mol_type = other DNA
caccatgaggacatatggat

SEQ ID NO: 46288 - DNA, 20 bp, synthetic construct
  source 1..20: mol_type = other DNA
ttacactgatacatccctcg

SEQ ID NO: 46289 - DNA, 20 bp, synthetic construct
  source 1..20: mol_type = other DNA
ggccacctgaggacgcactc

SEQ ID NO: 46290 - DNA, 20 bp, synthetic construct
  source 1..20: mol_type = other DNA
tccagaagttccccaagctc

SEQ ID NO: 46291 - DNA, 20 bp, synthetic construct
  source 1..20: mol_type = other DNA
cctccaccacctccccgctg

SEQ ID NO: 46292 - DNA, 20 bp, synthetic construct
  source 1..20: mol_type = other DNA
tccatggctaccgcctgccc

SEQ ID NO: 46293 - DNA, 20 bp, synthetic construct
  source 1..20: mol_type = other DNA
ccactggctcatccagtgcc

SEQ ID NO: 46294 - DNA, 20 bp, synthetic construct
  source 1..20: mol_type = other DNA
tggagtccaggccgctgtcg

SEQ ID NO: 46295 - DNA, 20 bp, synthetic construct
  source 1..20: mol_type = other DNA
catccgcaggcagcgagcat

SEQ ID NO: 46296 - DNA, 20 bp, synthetic construct
  source 1..20: mol_type = other DNA
ggcacagaggcacagagctt

SEQ ID NO: 46297 - DNA, 20 bp, synthetic construct
  source 1..20: mol_type = other DNA
ttcctctataggtatcttga

SEQ ID NO: 46298 - DNA, 20 bp, synthetic construct
  source 1..20: mol_type = other DNA
caccatcagcaggtcccgca

SEQ ID NO: 46299 - DNA, 20 bp, synthetic construct
  source 1..20: mol_type = other DNA
aatgagcttctccacctgcg

SEQ ID NO: 46300 - DNA, 20 bp, synthetic construct
  source 1..20: mol_type = other DNA
gaacttaccagccttcgctt

SEQ ID NO: 46301 - DNA, 20 bp, synthetic construct
  source 1..20: mol_type = other DNA
ggccactgtcaatagagaga

SEQ ID NO: 46302 - DNA, 20 bp, synthetic construct
  source 1..20: mol_type = other DNA
tacacctatatattcctcgt

SEQ ID NO: 46303 - DNA, 20 bp, synthetic construct
  source 1..20: mol_type = other DNA
gagcagggctggggagaagg

SEQ ID NO: 46304 - DNA, 20 bp, synthetic construct
  source 1..20: mol_type = other DNA
ccacatgttcctcctgatcg

SEQ ID NO: 46305 - DNA, 20 bp, synthetic construct
  source 1..20: mol_type = other DNA
gctccacggtcaggaagtcg

SEQ ID NO: 46306 - DNA, 20 bp, synthetic construct
  source 1..20: mol_type = other DNA
gcaccaagtttgacacgctc

SEQ ID NO: 46307 - DNA, 20 bp, synthetic construct
  source 1..20: mol_type = other DNA
agttggaggaatccagtcgc

SEQ ID NO: 46308 - DNA, 20 bp, synthetic construct
  source 1..20: mol_type = other DNA
cttccacatgagcgtggtca

SEQ ID NO: 46309 - DNA, 20 bp, synthetic construct
  source 1..20: mol_type = other DNA
ctcttacctcttcctccgcg

SEQ ID NO: 46310 - DNA, 20 bp, synthetic construct
  source 1..20: mol_type = other DNA
tcctctataggtatcttgaa

SEQ ID NO: 46311 - DNA, 20 bp, synthetic construct
  source 1..20: mol_type = other DNA
ggtgttgcagctgcttcatg

SEQ ID NO: 46312 - DNA, 20 bp, synthetic construct
  source 1..20: mol_type = other DNA
tctgcacacaaggagtgtct

SEQ ID NO: 46313 - DNA, 20 bp, synthetic construct
  source 1..20: mol_type = other DNA
accgcccagacgactggcca

SEQ ID NO: 46314 - DNA, 20 bp, synthetic construct
  source 1..20: mol_type = other DNA
agcagagtttgggatccagc

SEQ ID NO: 46315 - DNA, 20 bp, synthetic construct
  source 1..20: mol_type = other DNA
ctcactcgatctggtcggac

SEQ ID NO: 46316 - DNA, 20 bp, synthetic construct
  source 1..20: mol_type = other DNA
gagaagtacactgacacgct

SEQ ID NO: 46317 - DNA, 20 bp, synthetic construct
  source 1..20: mol_type = other DNA
ggtaccagggcatccgctcg

SEQ ID NO: 46318 - DNA, 20 bp, synthetic construct
  source 1..20: mol_type = other DNA
acagagagggagaagtcccc

SEQ ID NO: 46319 - DNA, 20 bp, synthetic construct
  source 1..20: mol_type = other DNA
gagctatggggtcaccatgt

SEQ ID NO: 46320 - DNA, 20 bp, synthetic construct
  source 1..20: mol_type = other DNA
gcattgacattggttgtccc

SEQ ID NO: 46321 - DNA, 20 bp, synthetic construct
  source 1..20: mol_type = other DNA
tgggcaaggtacgagtggga

SEQ ID NO: 46322 - DNA, 20 bp, synthetic construct
  source 1..20: mol_type = other DNA
tcctccaggtctgcccaaga

SEQ ID NO: 46323 - DNA, 20 bp, synthetic construct
  source 1..20: mol_type = other DNA
acagagatggagaagtcccc

SEQ ID NO: 46324 - DNA, 20 bp, synthetic construct
  source 1..20: mol_type = other DNA
acctggaaggtcttccgctc

SEQ ID NO: 46325 - DNA, 20 bp, synthetic construct
  source 1..20: mol_type = other DNA
agagatggagaagtcccctg

SEQ ID NO: 46326 - DNA, 20 bp, synthetic construct
  source 1..20: mol_type = other DNA
cttacggcacccggagcttg

SEQ ID NO: 46327 - DNA, 20 bp, synthetic construct
  source 1..20: mol_type = other DNA
actcacctgataagaggcag

SEQ ID NO: 46328 - DNA, 20 bp, synthetic construct
  source 1..20: mol_type = other DNA
ccatggctaccgcctgccca

SEQ ID NO: 46329 - DNA, 20 bp, synthetic construct
  source 1..20: mol_type = other DNA
gccggtccaccaggatgggt

SEQ ID NO: 46330 - DNA, 20 bp, synthetic construct
  source 1..20: mol_type = other DNA
agttgagctgcaaagagaag

SEQ ID NO: 46331 - DNA, 20 bp, synthetic construct
  source 1..20: mol_type = other DNA
gcccatggtccctgagggaa

SEQ ID NO: 46332 - DNA, 20 bp, synthetic construct
  source 1..20: mol_type = other DNA
cacagttgccgattacaggt

SEQ ID NO: 46333 - DNA, 20 bp, synthetic construct
  source 1..20: mol_type = other DNA
gcagggctggggagaaggtg

SEQ ID NO: 46334 - DNA, 20 bp, synthetic construct
  source 1..20: mol_type = other DNA
tcacgcactgagccaggtcc

SEQ ID NO: 46335 - DNA, 20 bp, synthetic construct
  source 1..20: mol_type = other DNA
agtgccatggctgctctccc

SEQ ID NO: 46336 - DNA, 20 bp, synthetic construct
  source 1..20: mol_type = other DNA
agaagtcgcagcgacccgag

SEQ ID NO: 46337 - DNA, 20 bp, synthetic construct
  source 1..20: mol_type = other DNA
tgctgcaccaggtgtccatg

SEQ ID NO: 46338 - DNA, 20 bp, synthetic construct
  source 1..20: mol_type = other DNA
tcagcagggaggccaactcc

SEQ ID NO: 46339 - DNA, 20 bp, synthetic construct
  source 1..20: mol_type = other DNA
cctccagagtgtggttgtgg

SEQ ID NO: 46340 - DNA, 20 bp, synthetic construct
  source 1..20: mol_type = other DNA
gcgaggaggagatccagtag

SEQ ID NO: 46341 - DNA, 20 bp, synthetic construct
  source 1..20: mol_type = other DNA
gacctggaaggtcttccgct

SEQ ID NO: 46342 - DNA, 20 bp, synthetic construct
  source 1..20: mol_type = other DNA
tgggtaagggatgcggccgt

SEQ ID NO: 46343 - DNA, 20 bp, synthetic construct
  source 1..20: mol_type = other DNA
caggacctggagcagcgcag

SEQ ID NO: 46344 - DNA, 20 bp, synthetic construct
  source 1..20: mol_type = other DNA
cacacaaggagtgtctgggg

SEQ ID NO: 46345 - DNA, 20 bp, synthetic construct
  source 1..20: mol_type = other DNA
ctgtctcttcaggaaaccgc

SEQ ID NO: 46346 - DNA, 20 bp, synthetic construct
  source 1..20: mol_type = other DNA
caatgtcaatgcacaagctc

SEQ ID NO: 46347 - DNA, 20 bp, synthetic construct
  source 1..20: mol_type = other DNA
aacctttctgagaatgctcc

SEQ ID NO: 46348 - DNA, 20 bp, synthetic construct
  source 1..20: mol_type = other DNA
ccgaccaggaacttgtgcag

SEQ ID NO: 46349 - DNA, 20 bp, synthetic construct
  source 1..20: mol_type = other DNA
tccagcacagcctcatgagt

SEQ ID NO: 46350 - DNA, 20 bp, synthetic construct
  source 1..20: mol_type = other DNA
gtcacgcaccggcatggaca

SEQ ID NO: 46351 - DNA, 20 bp, synthetic construct
  source 1..20: mol_type = other DNA
cccttcggtcaccacgagca

SEQ ID NO: 46352 - DNA, 20 bp, synthetic construct
  source 1..20: mol_type = other DNA
cctgggacatctgggggcgc

SEQ ID NO: 46353 - DNA, 20 bp, synthetic construct
  source 1..20: mol_type = other DNA
cgaagagctcgctccgcttg

SEQ ID NO: 46354 - DNA, 20 bp, synthetic construct
  source 1..20: mol_type = other DNA
tgccaggctgaggccgcgga

SEQ ID NO: 46355 - DNA, 20 bp, synthetic construct
  source 1..20: mol_type = other DNA
ttacacctatatattcctcg

SEQ ID NO: 46356 - DNA, 20 bp, synthetic construct
  source 1..20: mol_type = other DNA
aatccagtcgctggcccttg

SEQ ID NO: 46357 - DNA, 20 bp, synthetic construct
  source 1..20: mol_type = other DNA
cggcccacgagcggatgccc

SEQ ID NO: 46358 - DNA, 20 bp, synthetic construct
  source 1..20: mol_type = other DNA
agcaggaaggcatacctgga

SEQ ID NO: 46359 - DNA, 20 bp, synthetic construct
  source 1..20: mol_type = other DNA
ctcaccagagatgaacagac

SEQ ID NO: 46360 - DNA, 20 bp, synthetic construct
  source 1..20: mol_type = other DNA
ctggattacctcttgccctc

SEQ ID NO: 46361 - DNA, 20 bp, synthetic construct
  source 1..20: mol_type = other DNA
cctgcagattgcagaaggca

SEQ ID NO: 46362 - DNA, 20 bp, synthetic construct
  source 1..20: mol_type = other DNA
ctgcgcaggtagtcaaaggt

SEQ ID NO: 46363 - DNA, 20 bp, synthetic construct
  source 1..20: mol_type = other DNA
agatgcagtcgggcactcac

SEQ ID NO: 46364 - DNA, 20 bp, synthetic construct
  source 1..20: mol_type = other DNA
gggcggtgctacaactgggc

SEQ ID NO: 46365 - DNA, 20 bp, synthetic construct
  source 1..20: mol_type = other DNA
gctgcagtcgattgtactga

SEQ ID NO: 46366 - DNA, 20 bp, synthetic construct
  source 1..20: mol_type = other DNA
gaagaagggcaggtgcgccg

SEQ ID NO: 46367 - DNA, 20 bp, synthetic construct
  source 1..20: mol_type = other DNA
tgcagcgacagcccatccgc

SEQ ID NO: 46368 - DNA, 20 bp, synthetic construct
  source 1..20: mol_type = other DNA
tgcagtggtcctcaatggac

SEQ ID NO: 46369 - DNA, 20 bp, synthetic construct
  source 1..20: mol_type = other DNA
gccgtcacctgaggcgttgc

SEQ ID NO: 46370 - DNA, 20 bp, synthetic construct
  source 1..20: mol_type = other DNA
acctgttgttgtgacgaggc

SEQ ID NO: 46371 - DNA, 20 bp, synthetic construct
  source 1..20: mol_type = other DNA
acaggatgactgggtacctg

SEQ ID NO: 46372 - DNA, 20 bp, synthetic construct
  source 1..20: mol_type = other DNA
ccgcactgattgcactggaa

SEQ ID NO: 46373 - DNA, 20 bp, synthetic construct
  source 1..20: mol_type = other DNA
cctcagacacggttgccccc

SEQ ID NO: 46374 - DNA, 20 bp, synthetic construct
  source 1..20: mol_type = other DNA
tcccaggtcacgcggtggct

SEQ ID NO: 46375 - DNA, 20 bp, synthetic construct
  source 1..20: mol_type = other DNA
ctactcacgggatggggagc

SEQ ID NO: 46376 - DNA, 20 bp, synthetic construct
  source 1..20: mol_type = other DNA
acgactggccagggcgcctg

SEQ ID NO: 46377 - DNA, 20 bp, synthetic construct
  source 1..20: mol_type = other DNA
ctcagaggtaccttctatca

SEQ ID NO: 46378 - DNA, 20 bp, synthetic construct
  source 1..20: mol_type = other DNA
acgcactgagccaggtcctg

SEQ ID NO: 46379 - DNA, 20 bp, synthetic construct
  source 1..20: mol_type = other DNA
gtcctcttcgtggctttctg

SEQ ID NO: 46380 - DNA, 20 bp, synthetic construct
  source 1..20: mol_type = other DNA
tcgccccgacttcctgaccg

SEQ ID NO: 46381 - DNA, 20 bp, synthetic construct
  source 1..20: mol_type = other DNA
gatgacctgtgacggggcag

SEQ ID NO: 46382 - DNA, 20 bp, synthetic construct
  source 1..20: mol_type = other DNA
gtaccagggcatccgctcgt

SEQ ID NO: 46383 - DNA, 20 bp, synthetic construct
  source 1..20: mol_type = other DNA
gcacgaggaaggagccgtca

SEQ ID NO: 46384 - DNA, 20 bp, synthetic construct
  source 1..20: mol_type = other DNA
aggttgtctgtaaagacaag

SEQ ID NO: 46385 - DNA, 20 bp, synthetic construct
  source 1..20: mol_type = other DNA
tgaagaggattccatccagc

SEQ ID NO: 46386 - DNA, 20 bp, synthetic construct
  source 1..20: mol_type = other DNA
acagctctggcacactgtgg

SEQ ID NO: 46387 - DNA, 20 bp, synthetic construct
  source 1..20: mol_type = other DNA
ccccttcggtcaccacgagc

SEQ ID NO: 46388 - DNA, 20 bp, synthetic construct
  source 1..20: mol_type = other DNA
gggcaggaagcagatcgacg

SEQ ID NO: 46389 - DNA, 20 bp, synthetic construct
  source 1..20: mol_type = other DNA
cagtaagtgtggcatcacca

SEQ ID NO: 46390 - DNA, 20 bp, synthetic construct
  source 1..20: mol_type = other DNA
cttaccttgtcagaaaatgg

SEQ ID NO: 46391 - DNA, 20 bp, synthetic construct
  source 1..20: mol_type = other DNA
gccgaacttctcacagcagg

SEQ ID NO: 46392 - DNA, 20 bp, synthetic construct
  source 1..20: mol_type = other DNA
tgcagtagcggccatagacg

SEQ ID NO: 46393 - DNA, 20 bp, synthetic construct
  source 1..20: mol_type = other DNA
ctgacaggccttgcaggatg

SEQ ID NO: 46394 - DNA, 20 bp, synthetic construct
  source 1..20: mol_type = other DNA
aggtttcaggaaccgttgca

SEQ ID NO: 46395 - DNA, 20 bp, synthetic construct
  source 1..20: mol_type = other DNA
gactcactctgaggccacaa

SEQ ID NO: 46396 - DNA, 20 bp, synthetic construct
  source 1..20: mol_type = other DNA
cgtcctcaggtggccagtga

SEQ ID NO: 46397 - DNA, 20 bp, synthetic construct
  source 1..20: mol_type = other DNA
catgtggaagtcacgcccgt

SEQ ID NO: 46398 - DNA, 20 bp, synthetic construct
  source 1..20: mol_type = other DNA
cgggctcactggtgtaatgg

SEQ ID NO: 46399 - DNA, 20 bp, synthetic construct
  source 1..20: mol_type = other DNA
ttaccgtcagccgctctcgg

SEQ ID NO: 46400 - DNA, 20 bp, synthetic construct
  source 1..20: mol_type = other DNA
tcgggtgcgtaccacttgag

SEQ ID NO: 46401 - DNA, 20 bp, synthetic construct
  source 1..20: mol_type = other DNA
ctgcacacaaggagtgtctg

SEQ ID NO: 46402 - DNA, 20 bp, synthetic construct
  source 1..20: mol_type = other DNA
gttccccgtcgatcttgggc

SEQ ID NO: 46403 - DNA, 20 bp, synthetic construct
  source 1..20: mol_type = other DNA
gcagatcaaagagagcctgc

SEQ ID NO: 46404 - DNA, 20 bp, synthetic construct
  source 1..20: mol_type = other DNA
ggaggaggacgctgatcagc

SEQ ID NO: 46405 - DNA, 20 bp, synthetic construct
  source 1..20: mol_type = other DNA
gtcctgaaagagtcaagata

SEQ ID NO: 46406 - DNA, 20 bp, synthetic construct
  source 1..20: mol_type = other DNA
tttccaggagcctgactacg

SEQ ID NO: 46407 - DNA, 20 bp, synthetic construct
  source 1..20: mol_type = other DNA
aagaagggcaggtgcgccgc

SEQ ID NO: 46408 - DNA, 20 bp, synthetic construct
  source 1..20: mol_type = other DNA
ggctcacctgggacatctgg

SEQ ID NO: 46409 - DNA, 20 bp, synthetic construct
  source 1..20: mol_type = other DNA
cttgcagccctcgattccag

SEQ ID NO: 46410 - DNA, 20 bp, synthetic construct
  source 1..20: mol_type = other DNA
tcacgcaccggcatggacac

SEQ ID NO: 46411 - DNA, 20 bp, synthetic construct
  source 1..20: mol_type = other DNA
cacagtgtgtgagaactgca

SEQ ID NO: 46412 - DNA, 20 bp, synthetic construct
  source 1..20: mol_type = other DNA
gtcgagcaggaaggcatacc

SEQ ID NO: 46413 - DNA, 20 bp, synthetic construct
  source 1..20: mol_type = other DNA
cacacgcaagtgagtgcggc

SEQ ID NO: 46414 - DNA, 20 bp, synthetic construct
  source 1..20: mol_type = other DNA
ctccaggtacttcatcccca

SEQ ID NO: 46415 - DNA, 20 bp, synthetic construct
  source 1..20: mol_type = other DNA
ctccccaggcccgctcagca

SEQ ID NO: 46416 - DNA, 20 bp, synthetic construct
  source 1..20: mol_type = other DNA
cttaccgatgtacatggagt

SEQ ID NO: 46417 - DNA, 20 bp, synthetic construct
  source 1..20: mol_type = other DNA
cctcgcacaacacgtgagtg

SEQ ID NO: 46418 - DNA, 20 bp, synthetic construct
  source 1..20: mol_type = other DNA
ggtttcaggaaccgttgcag

SEQ ID NO: 46419 - DNA, 20 bp, synthetic construct
  source 1..20: mol_type = other DNA
cccggcactggatgagccag

SEQ ID NO: 46420 - DNA, 20 bp, synthetic construct
  source 1..20: mol_type = other DNA
gaaacactacctggtacaca

SEQ ID NO: 46421 - DNA, 20 bp, synthetic construct
  source 1..20: mol_type = other DNA
ttaccttcccgctggaatcg

SEQ ID NO: 46422 - DNA, 20 bp, synthetic construct
  source 1..20: mol_type = other DNA
catagctccagacatcgctg

SEQ ID NO: 46423 - DNA, 20 bp, synthetic construct
  source 1..20: mol_type = other DNA
tggttccagatataacgtcg

SEQ ID NO: 46424 - DNA, 20 bp, synthetic construct
  source 1..20: mol_type = other DNA
agagctcagggtgacaggtg

SEQ ID NO: 46425 - DNA, 20 bp, synthetic construct
  source 1..20: mol_type = other DNA
gacaagttcagagagctcca

SEQ ID NO: 46426 - DNA, 20 bp, synthetic construct
  source 1..20: mol_type = other DNA
cagcacaagaagctggctga

SEQ ID NO: 46427 - DNA, 20 bp, synthetic construct
  source 1..20: mol_type = other DNA
ttgcaggtacgcaggcccca

SEQ ID NO: 46428 - DNA, 20 bp, synthetic construct
  source 1..20: mol_type = other DNA
gtaccttgaaagttggcata

SEQ ID NO: 46429 - DNA, 20 bp, synthetic construct
  source 1..20: mol_type = other DNA
cttgaaggggctcactaaag

SEQ ID NO: 46430 - DNA, 20 bp, synthetic construct
  source 1..20: mol_type = other DNA
ccacctcgaggctgcggcag

SEQ ID NO: 46431 - DNA, 20 bp, synthetic construct
  source 1..20: mol_type = other DNA
agaagcgagccccatcgatg

SEQ ID NO: 46432 - DNA, 20 bp, synthetic construct
  source 1..20: mol_type = other DNA
aggaggactcactggagaac

SEQ ID NO: 46433 - DNA, 20 bp, synthetic construct
  source 1..20: mol_type = other DNA
gtcatccttcccggaaacca

SEQ ID NO: 46434 - DNA, 20 bp, synthetic construct
  source 1..20: mol_type = other DNA
gctgaggccgcggaaggagc

SEQ ID NO: 46435 - DNA, 20 bp, synthetic construct
  source 1..20: mol_type = other DNA
ggcgcaggagcggcgagtgg

SEQ ID NO: 46436 - DNA, 20 bp, synthetic construct
  source 1..20: mol_type = other DNA
gtaggccatggctttgaatg

SEQ ID NO: 46437 - DNA, 20 bp, synthetic construct
  source 1..20: mol_type = other DNA
gatggagactttatatgctg

SEQ ID NO: 46438 - DNA, 20 bp, synthetic construct
  source 1..20: mol_type = other DNA
aacccacagcgacacggtgg

SEQ ID NO: 46439 - DNA, 20 bp, synthetic construct
  source 1..20: mol_type = other DNA
ggccaggatggttcttaggt

SEQ ID NO: 46440 - DNA, 20 bp, synthetic construct
  source 1..20: mol_type = other DNA
acgaagcaggtcctactcgg

SEQ ID NO: 46441 - DNA, 20 bp, synthetic construct
  source 1..20: mol_type = other DNA
cacgaggaaggagccgtcag

SEQ ID NO: 46442 - DNA, 20 bp, synthetic construct
  source 1..20: mol_type = other DNA
ccttcttgaaatagtcagca

SEQ ID NO: 46443 - DNA, 20 bp, synthetic construct
  source 1..20: mol_type = other DNA
ccggcactggatgagccagt

SEQ ID NO: 46444 - DNA, 20 bp, synthetic construct
  source 1..20: mol_type = other DNA
agggcatgtcaatattactg

SEQ ID NO: 46445 - DNA, 20 bp, synthetic construct
  source 1..20: mol_type = other DNA
cttctgtctattgaaggagc

SEQ ID NO: 46446 - DNA, 20 bp, synthetic construct
  source 1..20: mol_type = other DNA
agtcctgaaagagtcaagat

SEQ ID NO: 46447 - DNA, 20 bp, synthetic construct
  source 1..20: mol_type = other DNA
ctctcttacctcttcctccg

SEQ ID NO: 46448 - DNA, 20 bp, synthetic construct
  source 1..20: mol_type = other DNA
aaacactacctggtacacac

SEQ ID NO: 46449 - DNA, 20 bp, synthetic construct
  source 1..20: mol_type = other DNA
cctctataggtatcttgaag

SEQ ID NO: 46450 - DNA, 20 bp, synthetic construct
  source 1..20: mol_type = other DNA
gcattggcgccacagctcca

SEQ ID NO: 46451 - DNA, 20 bp, synthetic construct
  source 1..20: mol_type = other DNA
gtttccaggagcctgactac

SEQ ID NO: 46452 - DNA, 20 bp, synthetic construct
  source 1..20: mol_type = other DNA
cacatacaggaacttgccgt

SEQ ID NO: 46453 - DNA, 20 bp, synthetic construct
  source 1..20: mol_type = other DNA
gcaggatgtggtctcctcaa

SEQ ID NO: 46454 - DNA, 20 bp, synthetic construct
  source 1..20: mol_type = other DNA
gcagatggaggaggccatcc

SEQ ID NO: 46455 - DNA, 20 bp, synthetic construct
  source 1..20: mol_type = other DNA
ggaactcaagatcacctcgg

SEQ ID NO: 46456 - DNA, 20 bp, synthetic construct
  source 1..20: mol_type = other DNA
tgtaccttgaaagttggcat

SEQ ID NO: 46457 - DNA, 20 bp, synthetic construct
  source 1..20: mol_type = other DNA
tccaggtctgcccaagatgg

SEQ ID NO: 46458 - DNA, 20 bp, synthetic construct
  source 1..20: mol_type = other DNA
gcggtgaagagcctgaagca

SEQ ID NO: 46459 - DNA, 20 bp, synthetic construct
  source 1..20: mol_type = other DNA
tattatgtctgctaccccag

SEQ ID NO: 46460 - DNA, 20 bp, synthetic construct
  source 1..20: mol_type = other DNA
agagacaggtaaagctctca

SEQ ID NO: 46461 - DNA, 20 bp, synthetic construct
  source 1..20: mol_type = other DNA
ccacagcgacacggtggagg

SEQ ID NO: 46462 - DNA, 20 bp, synthetic construct
  source 1..20: mol_type = other DNA
agagaagggtagccagtacc

SEQ ID NO: 46463 - DNA, 20 bp, synthetic construct
  source 1..20: mol_type = other DNA
tgacgttacctcgtgcggcc

SEQ ID NO: 46464 - DNA, 20 bp, synthetic construct
  source 1..20: mol_type = other DNA
cgactggccagggcgcctgt

SEQ ID NO: 46465 - DNA, 20 bp, synthetic construct
  source 1..20: mol_type = other DNA
gacacagaaggacaccatcc

SEQ ID NO: 46466 - DNA, 20 bp, synthetic construct
  source 1..20: mol_type = other DNA
cacacagctctggcacactg

SEQ ID NO: 46467 - DNA, 20 bp, synthetic construct
  source 1..20: mol_type = other DNA
ggcctcagcctggcagggga

SEQ ID NO: 46468 - DNA, 20 bp, synthetic construct
  source 1..20: mol_type = other DNA
aaggagaggtgagacccagc

SEQ ID NO: 46469 - DNA, 20 bp, synthetic construct
  source 1..20: mol_type = other DNA
cacagctctggcacactgtg

SEQ ID NO: 46470 - DNA, 20 bp, synthetic construct
  source 1..20: mol_type = other DNA
acagaaggacaccatcccgg

SEQ ID NO: 46471 - DNA, 20 bp, synthetic construct
  source 1..20: mol_type = other DNA
cacagtgtgccagagctgtg

SEQ ID NO: 46472 - DNA, 20 bp, synthetic construct
  source 1..20: mol_type = other DNA
gaagaacagctcatagccct

SEQ ID NO: 46473 - DNA, 20 bp, synthetic construct
  source 1..20: mol_type = other DNA
cagaaggacaccatcccgga

SEQ ID NO: 46474 - DNA, 20 bp, synthetic construct
  source 1..20: mol_type = other DNA
ggatgagccagtgggtgcat

SEQ ID NO: 46475 - DNA, 20 bp, synthetic construct
  source 1..20: mol_type = other DNA
ccaagaaagtcccgtccgag

SEQ ID NO: 46476 - DNA, 20 bp, synthetic construct
  source 1..20: mol_type = other DNA
ccgggaaggatgacatgtcc

SEQ ID NO: 46477 - DNA, 20 bp, synthetic construct
  source 1..20: mol_type = other DNA
agcaggagccccagcacgca

SEQ ID NO: 46478 - DNA, 20 bp, synthetic construct
  source 1..20: mol_type = other DNA
cccactcacctggcagtctg

SEQ ID NO: 46479 - DNA, 20 bp, synthetic construct
  source 1..20: mol_type = other DNA
cgaagcaggtcctactcgga

SEQ ID NO: 46480 - DNA, 20 bp, synthetic construct
  source 1..20: mol_type = other DNA
gccatcaaggtgctgaagca

SEQ ID NO: 46481 - DNA, 20 bp, synthetic construct
  source 1..20: mol_type = other DNA
tctggcacactgtgggggaa

SEQ ID NO: 46482 - DNA, 20 bp, synthetic construct
  source 1..20: mol_type = other DNA
actcaccctcatggcatcca

SEQ ID NO: 46483 - DNA, 20 bp, synthetic construct
  source 1..20: mol_type = other DNA
ctgaggccgcggaaggagca

SEQ ID NO: 46484 - DNA, 20 bp, synthetic construct
  source 1..20: mol_type = other DNA
tgtttccaggagcctgacta

SEQ ID NO: 46485 - DNA, 20 bp, synthetic construct
  source 1..20: mol_type = other DNA
aggtgagcccactcaggagg

SEQ ID NO: 46486 - DNA, 20 bp, synthetic construct
  source 1..20: mol_type = other DNA
cctacctgctggcctgctga

SEQ ID NO: 46487 - DNA, 20 bp, synthetic construct
  source 1..20: mol_type = other DNA
tcttacctcttcctccgcgg

SEQ ID NO: 46488 - DNA, 20 bp, synthetic construct
  source 1..20: mol_type = other DNA
gtccacctgagagtgcacag

SEQ ID NO: 46489 - DNA, 20 bp, synthetic construct
  source 1..20: mol_type = other DNA
tcatgacggtgcccacctcg

SEQ ID NO: 46490 - DNA, 20 bp, synthetic construct
  source 1..20: mol_type = other DNA
gtcaggtacctggataggca

SEQ ID NO: 46491 - DNA, 20 bp, synthetic construct
  source 1..20: mol_type = other DNA
taccttcccgctggaatcga

SEQ ID NO: 46492 - DNA, 20 bp, synthetic construct
  source 1..20: mol_type = other DNA
acacagctctggcacactgt

SEQ ID NO: 46493 - DNA, 20 bp, synthetic construct
  source 1..20: mol_type = other DNA
gcaggagccccagcacgcag

SEQ ID NO: 46494 - DNA, 20 bp, synthetic construct
  source 1..20: mol_type = other DNA
gggctcacctgggacatctg

SEQ ID NO: 46495 - DNA, 20 bp, synthetic construct
  source 1..20: mol_type = other DNA
tgggcggcagcacccggcac

SEQ ID NO: 46496 - DNA, 20 bp, synthetic construct
  source 1..20: mol_type = other DNA
cacacacagtgccatcaaca

SEQ ID NO: 46497 - DNA, 20 bp, synthetic construct
  source 1..20: mol_type = other DNA
agtggacatctgcatcactg

SEQ ID NO: 46498 - DNA, 20 bp, synthetic construct
  source 1..20: mol_type = other DNA
gtggacatctgcatcactgg

SEQ ID NO: 46499 - DNA, 20 bp, synthetic construct
  source 1..20: mol_type = other DNA
ccccaggcccttccccaccg

SEQ ID NO: 46500 - DNA, 20 bp, synthetic construct
  source 1..20: mol_type = other DNA
cgcccagcgagcgcaggcac

SEQ ID NO: 46501 - DNA, 20 bp, synthetic construct
  source 1..20: mol_type = other DNA
acttcgataatgaacttgca

SEQ ID NO: 46502 - DNA, 20 bp, synthetic construct
  source 1..20: mol_type = other DNA
gcctcagcctggcaggggaa

SEQ ID NO: 46503 - DNA, 20 bp, synthetic construct
  source 1..20: mol_type = other DNA
gcctaccgagtgattccggc

SEQ ID NO: 46504 - DNA, 20 bp, synthetic construct
  source 1..20: mol_type = other DNA
tggccaggatgggcagcagc

SEQ ID NO: 46505 - DNA, 20 bp, synthetic construct
  source 1..20: mol_type = other DNA
cagcaggagccccagcacgc

SEQ ID NO: 46506 - DNA, 20 bp, synthetic construct
  source 1..20: mol_type = other DNA
agcagggctggggagaaggt

SEQ ID NO: 46507 - DNA, 20 bp, synthetic construct
  source 1..20: mol_type = other DNA
tgagcagaagatgaaagggc

SEQ ID NO: 46508 - DNA, 20 bp, synthetic construct
  source 1..20: mol_type = other DNA
ctgtgcatatgagctggggc

SEQ ID NO: 46509 - DNA, 20 bp, synthetic construct
  source 1..20: mol_type = other DNA
gaatccatcttcctgaccct

SEQ ID NO: 46510 - DNA, 20 bp, synthetic construct
  source 1..20: mol_type = other DNA
gtacctggataggcaaggag

SEQ ID NO: 46511 - DNA, 20 bp, synthetic construct
  source 1..20: mol_type = other DNA
ggcacactgtgggggaaggg

SEQ ID NO: 46512 - DNA, 20 bp, synthetic construct
  source 1..20: mol_type = other DNA
caccctacctggaaactgac

SEQ ID NO: 46513 - DNA, 20 bp, synthetic construct
  source 1..20: mol_type = other DNA
cacgagcagggctggggaga

SEQ ID NO: 46514 - DNA, 20 bp, synthetic construct
  source 1..20: mol_type = other DNA
agtacaggcagatgtgcagc

SEQ ID NO: 46515 - DNA, 20 bp, synthetic construct
  source 1..20: mol_type = other DNA
gacgttacctcgtgcggccc

SEQ ID NO: 46516 - DNA, 20 bp, synthetic construct
  source 1..20: mol_type = other DNA
tggagaactggtccccggtc

SEQ ID NO: 46517 - DNA, 20 bp, synthetic construct
  source 1..20: mol_type = other DNA
aatccatcttcctgaccctt

SEQ ID NO: 46518 - DNA, 20 bp, synthetic construct
  source 1..20: mol_type = other DNA
tgagcagtccccacatcagc

SEQ ID NO: 46519 - DNA, 20 bp, synthetic construct
  source 1..20: mol_type = other DNA
ccagggagatggccccacag

SEQ ID NO: 46520 - DNA, 20 bp, synthetic construct
  source 1..20: mol_type = other DNA
ggtgacaggtgcggcctcgg

SEQ ID NO: 46521 - DNA, 20 bp, synthetic construct
  source 1..20: mol_type = other DNA
tgtagcaccgcccagacgac

SEQ ID NO: 46522 - DNA, 20 bp, synthetic construct
  source 1..20: mol_type = other DNA
tccaggcatgcagatcccac

SEQ ID NO: 46523 - DNA, 20 bp, synthetic construct
  source 1..20: mol_type = other DNA
tgtgcatatgagctggggct

SEQ ID NO: 46524 - DNA, 20 bp, synthetic construct
  source 1..20: mol_type = other DNA
cttgcattcacagttcaaca

SEQ ID NO: 46525 - DNA, 20 bp, synthetic construct
  source 1..20: mol_type = other DNA
ggatacagggctctacacag

SEQ ID NO: 46526 - DNA, 20 bp, synthetic construct
  source 1..20: mol_type = other DNA
ggtccaccttgtcttcccgt

SEQ ID NO: 46527 - DNA, 20 bp, synthetic construct
  source 1..20: mol_type = other DNA
gatcagcaggaaaacacagc

SEQ ID NO: 46528 - DNA, 20 bp, synthetic construct
  source 1..20: mol_type = other DNA
gggtccaccttgtcttcccg

SEQ ID NO: 46529 - DNA, 20 bp, synthetic construct
  source 1..20: mol_type = other DNA
cacctacctaagaaccatcc

SEQ ID NO: 46530 - DNA, 20 bp, synthetic construct
  source 1..20: mol_type = other DNA
ggagatggccccacagaggt

SEQ ID NO: 46531 - DNA, 20 bp, synthetic construct
  source 1..20: mol_type = other DNA
cccaggtgaagagaagcctc

SEQ ID NO: 46532 - DNA, 20 bp, synthetic construct
  source 1..20: mol_type = other DNA
gccaggtgagcccactcagg

SEQ ID NO: 46533 - DNA, 20 bp, synthetic construct
  source 1..20: mol_type = other DNA
tcaccctgagctctgcccgc

SEQ ID NO: 46534 - DNA, 20 bp, synthetic construct
  source 1..20: mol_type = other DNA
ccgcacctgttgttgtgacg

SEQ ID NO: 46535 - DNA, 20 bp, synthetic construct
  source 1..20: mol_type = other DNA
gcagtgacctggaagatgga

SEQ ID NO: 46536 - DNA, 20 bp, synthetic construct
  source 1..20: mol_type = other DNA
ccctgcagtgacctggaaga

SEQ ID NO: 46537 - DNA, 20 bp, synthetic construct
  source 1..20: mol_type = other DNA
ccaccgcaaatgcttctagg

SEQ ID NO: 46538 - DNA, 20 bp, synthetic construct
  source 1..20: mol_type = other DNA
acacttcatgatggagttga

SEQ ID NO: 46539 - DNA, 20 bp, synthetic construct
  source 1..20: mol_type = other DNA
tccagacgcaggatggcatg

SEQ ID NO: 46540 - DNA, 20 bp, synthetic construct
  source 1..20: mol_type = other DNA
agctgtagccgcgctcggtg

SEQ ID NO: 46541 - DNA, 20 bp, synthetic construct
  source 1..20: mol_type = other DNA
gctgatccacatctgctgga

SEQ ID NO: 46542 - DNA, 20 bp, synthetic construct
  source 1..20: mol_type = other DNA
acaggactccatgcctgaga

SEQ ID NO: 46543 - DNA, 20 bp, synthetic construct
  source 1..20: mol_type = other DNA
ctcttccagccttccttcct

SEQ ID NO: 46544 - DNA, 20 bp, synthetic construct
  source 1..20: mol_type = other DNA
cttcattgtgctgggtgcca

SEQ ID NO: 46545 - DNA, 20 bp, synthetic construct
  source 1..20: mol_type = other DNA
cgaggcccccctgaacccca

SEQ ID NO: 46546 - DNA, 20 bp, synthetic construct
  source 1..20: mol_type = other DNA
tggagttgaaggtagtttcg

SEQ ID NO: 46547 - DNA, 20 bp, synthetic construct
  source 1..20: mol_type = other DNA
ctcgtagctcttctccaggg

SEQ ID NO: 46548 - DNA, 20 bp, synthetic construct
  source 1..20: mol_type = other DNA
gatttcccgctcggccgtgg

SEQ ID NO: 46549 - DNA, 20 bp, synthetic construct
  source 1..20: mol_type = other DNA
ccagacgcaggatggcatgg

SEQ ID NO: 46550 - DNA, 20 bp, synthetic construct
  source 1..20: mol_type = other DNA
actcacccaggaaggaaggc

SEQ ID NO: 46551 - DNA, 20 bp, synthetic construct
  source 1..20: mol_type = other DNA
cccccatgccatcctgcgtc

SEQ ID NO: 46552 - DNA, 20 bp, synthetic construct
  source 1..20: mol_type = other DNA
cccaccatcacgccctggga

SEQ ID NO: 46553 - DNA, 20 bp, synthetic construct
  source 1..20: mol_type = other DNA
gtccagacgcaggatggcat

SEQ ID NO: 46554 - DNA, 20 bp, synthetic construct
  source 1..20: mol_type = other DNA
gcggtggacgatggaggggc

SEQ ID NO: 46555 - DNA, 20 bp, synthetic construct
  source 1..20: mol_type = other DNA
aagcaggagtatgacgagtc

SEQ ID NO: 46556 - DNA, 20 bp, synthetic construct
  source 1..20: mol_type = other DNA
tgttggcgtacaggtctttg

SEQ ID NO: 46557 - DNA, 20 bp, synthetic construct
  source 1..20: mol_type = other DNA
ggtccagacgcaggatggca

SEQ ID NO: 46558 - DNA, 20 bp, synthetic construct
  source 1..20: mol_type = other DNA
ctgaagtaccccatcgagca

SEQ ID NO: 46559 - DNA, 20 bp, synthetic construct
  source 1..20: mol_type = other DNA
ccgcctagaagcatttgcgg

SEQ ID NO: 46560 - DNA, 20 bp, synthetic construct
  source 1..20: mol_type = other DNA
cgcaagtactccgtgtggat

SEQ ID NO: 46561 - DNA, 20 bp, synthetic construct
  source 1..20: mol_type = other DNA
atggtgatgacctggccgtc

SEQ ID NO: 46562 - DNA, 20 bp, synthetic construct
  source 1..20: mol_type = other DNA
cgtgctcgatggggtacttc

SEQ ID NO: 46563 - DNA, 20 bp, synthetic construct
  source 1..20: mol_type = other DNA
atttgcggtggacgatggag

SEQ ID NO: 46564 - DNA, 20 bp, synthetic construct
  source 1..20: mol_type = other DNA
cgatggggtacttcagggtg

SEQ ID NO: 46565 - DNA, 20 bp, synthetic construct
  source 1..20: mol_type = other DNA
gatggaggggaagacggccc

SEQ ID NO: 46566 - DNA, 20 bp, synthetic construct
  source 1..20: mol_type = other DNA
ggtagtttcgtggatgccac

SEQ ID NO: 46567 - DNA, 20 bp, synthetic construct
  source 1..20: mol_type = other DNA
gatctccttctgcatcctgt

SEQ ID NO: 46568 - DNA, 20 bp, synthetic construct
  source 1..20: mol_type = other DNA
gtgctcgatggggtacttca

SEQ ID NO: 46569 - DNA, 20 bp, synthetic construct
  source 1..20: mol_type = other DNA
cgtcaccaactgggacgaca

SEQ ID NO: 46570 - DNA, 20 bp, synthetic construct
  source 1..20: mol_type = other DNA
gatggagccgccgatccaca

SEQ ID NO: 46571 - DNA, 20 bp, synthetic construct
  source 1..20: mol_type = other DNA
ctccatcatgaagtgtgacg

SEQ ID NO: 46572 - DNA, 20 bp, synthetic construct
  source 1..20: mol_type = other DNA
ctccagagaagaggaggatg

SEQ ID NO: 46573 - DNA, 20 bp, synthetic construct
  source 1..20: mol_type = other DNA
gtccagacgcaggatggcgt

SEQ ID NO: 46574 - DNA, 20 bp, synthetic construct
  source 1..20: mol_type = other DNA
cgcaagtactcggtgtggat

SEQ ID NO: 46575 - DNA, 20 bp, synthetic construct
  source 1..20: mol_type = other DNA
atgaagatcaaggtgagtcg

SEQ ID NO: 46576 - DNA, 20 bp, synthetic construct
  source 1..20: mol_type = other DNA
ccacacggtgcccatctacg

SEQ ID NO: 46577 - DNA, 20 bp, synthetic construct
  source 1..20: mol_type = other DNA
gcccagcaccatgaagatca

SEQ ID NO: 46578 - DNA, 20 bp, synthetic construct
  source 1..20: mol_type = other DNA
ggctccggcatgtgcaaagc

SEQ ID NO: 46579 - DNA, 20 bp, synthetic construct
  source 1..20: mol_type = other DNA
ccagacaccaggtgagtgga

SEQ ID NO: 46580 - DNA, 20 bp, synthetic construct
  source 1..20: mol_type = other DNA
cccccacgccatcctgcgtc

SEQ ID NO: 46581 - DNA, 20 bp, synthetic construct
  source 1..20: mol_type = other DNA
ccagacgcaggatggcgtgg

SEQ ID NO: 46582 - DNA, 20 bp, synthetic construct
  source 1..20: mol_type = other DNA
caccttgatcttcatggtgc

SEQ ID NO: 46583 - DNA, 20 bp, synthetic construct
  source 1..20: mol_type = other DNA
tggagttgaaggtggtctcg

SEQ ID NO: 46584 - DNA, 20 bp, synthetic construct
  source 1..20: mol_type = other DNA
ataatctgagaagggacaag

SEQ ID NO: 46585 - DNA, 20 bp, synthetic construct
  source 1..20: mol_type = other DNA
gatggaaggaaacacggctc

SEQ ID NO: 46586 - DNA, 20 bp, synthetic construct
  source 1..20: mol_type = other DNA
ggtccagacgcaggatggcg

SEQ ID NO: 46587 - DNA, 20 bp, synthetic construct
  source 1..20: mol_type = other DNA
acagtgagtgggagcccaga

SEQ ID NO: 46588 - DNA, 20 bp, synthetic construct
  source 1..20: mol_type = other DNA
cgatgacagtggtccactgc

SEQ ID NO: 46589 - DNA, 20 bp, synthetic construct
  source 1..20: mol_type = other DNA
gaactcctcatcaaaatacc

SEQ ID NO: 46590 - DNA, 20 bp, synthetic construct
  source 1..20: mol_type = other DNA
cagtgagtgggagcccagat

SEQ ID NO: 46591 - DNA, 20 bp, synthetic construct
  source 1..20: mol_type = other DNA
cagtggtccactgcaggcag

SEQ ID NO: 46592 - DNA, 20 bp, synthetic construct
  source 1..20: mol_type = other DNA
ggtgatcctggtgaaggaga

SEQ ID NO: 46593 - DNA, 20 bp, synthetic construct
  source 1..20: mol_type = other DNA
cgctggccgagtaggagaac

SEQ ID NO: 46594 - DNA, 20 bp, synthetic construct
  source 1..20: mol_type = other DNA
tcgcctgcccttctacaacc

SEQ ID NO: 46595 - DNA, 20 bp, synthetic construct
  source 1..20: mol_type = other DNA
ttgtcctccagcacctgcac

SEQ ID NO: 46596 - DNA, 20 bp, synthetic construct
  source 1..20: mol_type = other DNA
gccagctgatgaagacggag

SEQ ID NO: 46597 - DNA, 20 bp, synthetic construct
  source 1..20: mol_type = other DNA
agacttcgggctgtgcaagg

SEQ ID NO: 46598 - DNA, 20 bp, synthetic construct
  source 1..20: mol_type = other DNA
tcaagaaggaccccaagcag

SEQ ID NO: 46599 - DNA, 20 bp, synthetic construct
  source 1..20: mol_type = other DNA
gcaggatgtggaccaacgtg

SEQ ID NO: 46600 - DNA, 20 bp, synthetic construct
  source 1..20: mol_type = other DNA
cctgcactcggagaagaacg

SEQ ID NO: 46601 - DNA, 20 bp, synthetic construct
  source 1..20: mol_type = other DNA
ctcccctacagacgtgcggg

SEQ ID NO: 46602 - DNA, 20 bp, synthetic construct
  source 1..20: mol_type = other DNA
gggcgcacacctcgggggcc

SEQ ID NO: 46603 - DNA, 20 bp, synthetic construct
  source 1..20: mol_type = other DNA
ccttcattggctacaaggag

SEQ ID NO: 46604 - DNA, 20 bp, synthetic construct
  source 1..20: mol_type = other DNA
tcacgttggtccacatcctg

SEQ ID NO: 46605 - DNA, 20 bp, synthetic construct
  source 1..20: mol_type = other DNA
ccgctccttgtagccaatga

SEQ ID NO: 46606 - DNA, 20 bp, synthetic construct
  source 1..20: mol_type = other DNA
tcctccagcacctgcacggg

SEQ ID NO: 46607 - DNA, 20 bp, synthetic construct
  source 1..20: mol_type = other DNA
tgtactcccctacagacgtg

SEQ ID NO: 46608 - DNA, 20 bp, synthetic construct
  source 1..20: mol_type = other DNA
tcacgtcggagactgacacc

SEQ ID NO: 46609 - DNA, 20 bp, synthetic construct
  source 1..20: mol_type = other DNA
aacctcatgctggacaagga

SEQ ID NO: 46610 - DNA, 20 bp, synthetic construct
  source 1..20: mol_type = other DNA
attgtcctccagcacctgca

SEQ ID NO: 46611 - DNA, 20 bp, synthetic construct
  source 1..20: mol_type = other DNA
gtactcccctacagacgtgc

SEQ ID NO: 46612 - DNA, 20 bp, synthetic construct
  source 1..20: mol_type = other DNA
tgatgtattcacctgaaatg

SEQ ID NO: 46613 - DNA, 20 bp, synthetic construct
  source 1..20: mol_type = other DNA
cctctccttgtacccaatga

SEQ ID NO: 46614 - DNA, 20 bp, synthetic construct
  source 1..20: mol_type = other DNA
agtccatggggtcctcgcct

SEQ ID NO: 46615 - DNA, 20 bp, synthetic construct
  source 1..20: mol_type = other DNA
gtgctggaggacaatgacta

SEQ ID NO: 46616 - DNA, 20 bp, synthetic construct
  source 1..20: mol_type = other DNA
ctccgtagcaggtgtgtctt

SEQ ID NO: 46617 - DNA, 20 bp, synthetic construct
  source 1..20: mol_type = other DNA
tggaggacaatgactatggc

SEQ ID NO: 46618 - DNA, 20 bp, synthetic construct
  source 1..20: mol_type = other DNA
ttccttccgcaggatcttca

SEQ ID NO: 46619 - DNA, 20 bp, synthetic construct
  source 1..20: mol_type = other DNA
cgatgactgtggtccactgc

SEQ ID NO: 46620 - DNA, 20 bp, synthetic construct
  source 1..20: mol_type = other DNA
caatgactatggccgggccg

SEQ ID NO: 46621 - DNA, 20 bp, synthetic construct
  source 1..20: mol_type = other DNA
ctggtgcgggagaaggccac

SEQ ID NO: 46622 - DNA, 20 bp, synthetic construct
  source 1..20: mol_type = other DNA
tcattgtcctccagcacctg

SEQ ID NO: 46623 - DNA, 20 bp, synthetic construct
  source 1..20: mol_type = other DNA
ggaggacaatgactatggcc

SEQ ID NO: 46624 - DNA, 20 bp, synthetic construct
  source 1..20: mol_type = other DNA
tgtcctccagcacctgagga

SEQ ID NO: 46625 - DNA, 20 bp, synthetic construct
  source 1..20: mol_type = other DNA
gtattcacctgaaatgaggc

SEQ ID NO: 46626 - DNA, 20 bp, synthetic construct
  source 1..20: mol_type = other DNA
acttcacaaattgataatat

SEQ ID NO: 46627 - DNA, 20 bp, synthetic construct
  source 1..20: mol_type = other DNA
gtttcttctctggagtaaac

SEQ ID NO: 46628 - DNA, 20 bp, synthetic construct
  source 1..20: mol_type = other DNA
tgctgggactgctgagactg

SEQ ID NO: 46629 - DNA, 20 bp, synthetic construct
  source 1..20: mol_type = other DNA
gcctgagaggaagatgtggg

SEQ ID NO: 46630 - DNA, 20 bp, synthetic construct
  source 1..20: mol_type = other DNA
cagacacatagaggcgatag

SEQ ID NO: 46631 - DNA, 20 bp, synthetic construct
  source 1..20: mol_type = other DNA
cgaagacgacgaggaggcgg

SEQ ID NO: 46632 - DNA, 20 bp, synthetic construct
  source 1..20: mol_type = other DNA
ccgggagcagcggcggcggg

SEQ ID NO: 46633 - DNA, 20 bp, synthetic construct
  source 1..20: mol_type = other DNA
cggggctcatgggcgcgtgg

SEQ ID NO: 46634 - DNA, 20 bp, synthetic construct
  source 1..20: mol_type = other DNA
gtagggttgcccgaagccgt

SEQ ID NO: 46635 - DNA, 20 bp, synthetic construct
  source 1..20: mol_type = other DNA
aggcaaatgctctcggggta

SEQ ID NO: 46636 - DNA, 20 bp, synthetic construct
  source 1..20: mol_type = other DNA
atggggagctatggtcccca

SEQ ID NO: 46637 - DNA, 20 bp, synthetic construct
  source 1..20: mol_type = other DNA
gcttccgttctgggtgcttg

SEQ ID NO: 46638 - DNA, 20 bp, synthetic construct
  source 1..20: mol_type = other DNA
tggcatgttttgctgggcat

SEQ ID NO: 46639 - DNA, 20 bp, synthetic construct
  source 1..20: mol_type = other DNA
cctttgaatgcaagattgaa

SEQ ID NO: 46640 - DNA, 20 bp, synthetic construct
  source 1..20: mol_type = other DNA
tagaggcgatagaggtccag

SEQ ID NO: 46641 - DNA, 20 bp, synthetic construct
  source 1..20: mol_type = other DNA
tgcactggcggattggtggg

SEQ ID NO: 46642 - DNA, 20 bp, synthetic construct
  source 1..20: mol_type = other DNA
gggatgaaaatgcagaaggc

SEQ ID NO: 46643 - DNA, 20 bp, synthetic construct
  source 1..20: mol_type = other DNA
ttcatattggggtagcctgg

SEQ ID NO: 46644 - DNA, 20 bp, synthetic construct
  source 1..20: mol_type = other DNA
ccggaacatcaagatcctag

SEQ ID NO: 46645 - DNA, 20 bp, synthetic construct
  source 1..20: mol_type = other DNA
ccgaagccgtaggctggggg

SEQ ID NO: 46646 - DNA, 20 bp, synthetic construct
  source 1..20: mol_type = other DNA
ctctgtcttgctctcgaagt

SEQ ID NO: 46647 - DNA, 20 bp, synthetic construct
  source 1..20: mol_type = other DNA
aaggaggaggaacaggacca

SEQ ID NO: 46648 - DNA, 20 bp, synthetic construct
  source 1..20: mol_type = other DNA
ccacgacagcactatcccta

SEQ ID NO: 46649 - DNA, 20 bp, synthetic construct
  source 1..20: mol_type = other DNA
ggaggcggggggcgaggcgg

SEQ ID NO: 46650 - DNA, 20 bp, synthetic construct
  source 1..20: mol_type = other DNA
ctggcaggctggggctgggc

SEQ ID NO: 46651 - DNA, 20 bp, synthetic construct
  source 1..20: mol_type = other DNA
acgcggagataaggctgagc

SEQ ID NO: 46652 - DNA, 20 bp, synthetic construct
  source 1..20: mol_type = other DNA
atggtcatcgggtaccgctg

SEQ ID NO: 46653 - DNA, 20 bp, synthetic construct
  source 1..20: mol_type = other DNA
ggagattggtggattgactc

SEQ ID NO: 46654 - DNA, 20 bp, synthetic construct
  source 1..20: mol_type = other DNA
ctcaggtacacagctgagtg

SEQ ID NO: 46655 - DNA, 20 bp, synthetic construct
  source 1..20: mol_type = other DNA
gggagttcccccgccggccg

SEQ ID NO: 46656 - DNA, 20 bp, synthetic construct
  source 1..20: mol_type = other DNA
tcaacaagaacaaaaaatgg

SEQ ID NO: 46657 - DNA, 20 bp, synthetic construct
  source 1..20: mol_type = other DNA
ggagggaggcggcttggagc

SEQ ID NO: 46658 - DNA, 20 bp, synthetic construct
  source 1..20: mol_type = other DNA
ctcctcccgctgctgctgct

SEQ ID NO: 46659 - DNA, 20 bp, synthetic construct
  source 1..20: mol_type = other DNA
gggtacccatgtccttgctg

SEQ ID NO: 46660 - DNA, 20 bp, synthetic construct
  source 1..20: mol_type = other DNA
tatgaatacctctgacatga

SEQ ID NO: 46661 - DNA, 20 bp, synthetic construct
  source 1..20: mol_type = other DNA
agcagcagcagcagcagcaa

SEQ ID NO: 46662 - DNA, 20 bp, synthetic construct
  source 1..20: mol_type = other DNA
gcgtgactcatcctccctgg

SEQ ID NO: 46663 - DNA, 20 bp, synthetic construct
  source 1..20: mol_type = other DNA
gggccaaccacgaaggctcg

SEQ ID NO: 46664 - DNA, 20 bp, synthetic construct
  source 1..20: mol_type = other DNA
gtctgccgtcgccgccgccg

SEQ ID NO: 46665 - DNA, 20 bp, synthetic construct
  source 1..20: mol_type = other DNA
gggccatatgtgccatccat

SEQ ID NO: 46666 - DNA, 20 bp, synthetic construct
  source 1..20: mol_type = other DNA
aaggcccatcatctctgggc

SEQ ID NO: 46667 - DNA, 20 bp, synthetic construct
  source 1..20: mol_type = other DNA
ttggttgagggtgggggtgg

SEQ ID NO: 46668 - DNA, 20 bp, synthetic construct
  source 1..20: mol_type = other DNA
tggcactccgggctccggcg

SEQ ID NO: 46669 - DNA, 20 bp, synthetic construct
  source 1..20: mol_type = other DNA
tccggttcatgccccctggt

SEQ ID NO: 46670 - DNA, 20 bp, synthetic construct
  source 1..20: mol_type = other DNA
tgctgtgggtaggaaacctc

SEQ ID NO: 46671 - DNA, 20 bp, synthetic construct
  source 1..20: mol_type = other DNA
gctgtgtacctgaggggtcc

SEQ ID NO: 46672 - DNA, 20 bp, synthetic construct
  source 1..20: mol_type = other DNA
caggcaggcaaatgctctcg

SEQ ID NO: 46673 - DNA, 20 bp, synthetic construct
  source 1..20: mol_type = other DNA
agcccagagatgatgggcct

SEQ ID NO: 46674 - DNA, 20 bp, synthetic construct
  source 1..20: mol_type = other DNA
atgttccggtggctctgtgc

SEQ ID NO: 46675 - DNA, 20 bp, synthetic construct
  source 1..20: mol_type = other DNA
ggaggaggcagcggaggagg

SEQ ID NO: 46676 - DNA, 20 bp, synthetic construct
  source 1..20: mol_type = other DNA
cgccgctgccgccgcggagg

SEQ ID NO: 46677 - DNA, 20 bp, synthetic construct
  source 1..20: mol_type = other DNA
ggcggcggcggaggaggagg

SEQ ID NO: 46678 - DNA, 20 bp, synthetic construct
  source 1..20: mol_type = other DNA
tgaggagatgctagcagagc

SEQ ID NO: 46679 - DNA, 20 bp, synthetic construct
  source 1..20: mol_type = other DNA
ggcagaaaaggagacttgct

SEQ ID NO: 46680 - DNA, 20 bp, synthetic construct
  source 1..20: mol_type = other DNA
cagcaggcggccgcgggcat

SEQ ID NO: 46681 - DNA, 20 bp, synthetic construct
  source 1..20: mol_type = other DNA
cggcccggcgcgggcggcgg

SEQ ID NO: 46682 - DNA, 20 bp, synthetic construct
  source 1..20: mol_type = other DNA
cggcgcggcggcggcggcgg

SEQ ID NO: 46683 - DNA, 20 bp, synthetic construct
  source 1..20: mol_type = other DNA
cggcggcggcggcggcggcg

SEQ ID NO: 46684 - DNA, 20 bp, synthetic construct
  source 1..20: mol_type = other DNA
cagtatggaggctcctactc

SEQ ID NO: 46685 - DNA, 20 bp, synthetic construct
  source 1..20: mol_type = other DNA
ggcagcagcggcggcggcgg

SEQ ID NO: 46686 - DNA, 20 bp, synthetic construct
  source 1..20: mol_type = other DNA
cttctcctttgggtctgcag

SEQ ID NO: 46687 - DNA, 20 bp, synthetic construct
  source 1..20: mol_type = other DNA
gaagaagaatcagcttcccc

SEQ ID NO: 46688 - DNA, 20 bp, synthetic construct
  source 1..20: mol_type = other DNA
ctctccctgctgtagggata

SEQ ID NO: 46689 - DNA, 20 bp, synthetic construct
  source 1..20: mol_type = other DNA
tcaggtccacattattgtcc

SEQ ID NO: 46690 - DNA, 20 bp, synthetic construct
  source 1..20: mol_type = other DNA
aattcttatggaatatgaag

SEQ ID NO: 46691 - DNA, 20 bp, synthetic construct
  source 1..20: mol_type = other DNA
gtctgcgtcaaagagatcgg

SEQ ID NO: 46692 - DNA, 20 bp, synthetic construct
  source 1..20: mol_type = other DNA
cggctgctgtgggtacaggc

SEQ ID NO: 46693 - DNA, 20 bp, synthetic construct
  source 1..20: mol_type = other DNA
cagagcagtccgtacccagg

SEQ ID NO: 46694 - DNA, 20 bp, synthetic construct
  source 1..20: mol_type = other DNA
gcaggcgccgccctacagca

SEQ ID NO: 46695 - DNA, 20 bp, synthetic construct
  source 1..20: mol_type = other DNA
ggcgcgcggcgcggcggcgg

SEQ ID NO: 46696 - DNA, 20 bp, synthetic construct
  source 1..20: mol_type = other DNA
aacagcttgggcggcgcggg

SEQ ID NO: 46697 - DNA, 20 bp, synthetic construct
  source 1..20: mol_type = other DNA
gtattaagttcaagtcttca

SEQ ID NO: 46698 - DNA, 20 bp, synthetic construct
  source 1..20: mol_type = other DNA
agggagcgctggaaggacgc

SEQ ID NO: 46699 - DNA, 20 bp, synthetic construct
  source 1..20: mol_type = other DNA
agtaactcaagtgggactta

SEQ ID NO: 46700 - DNA, 20 bp, synthetic construct
  source 1..20: mol_type = other DNA
agggatacgggtactggccc

SEQ ID NO: 46701 - DNA, 20 bp, synthetic construct
  source 1..20: mol_type = other DNA
gcggcggcggcagcagcagg

SEQ ID NO: 46702 - DNA, 20 bp, synthetic construct
  source 1..20: mol_type = other DNA
ttaaactccgggacggccgc

SEQ ID NO: 46703 - DNA, 20 bp, synthetic construct
  source 1..20: mol_type = other DNA
ctacctgcggagcttaaggg

SEQ ID NO: 46704 - DNA, 20 bp, synthetic construct
  source 1..20: mol_type = other DNA
tgccttatccctaccagaac

SEQ ID NO: 46705 - DNA, 20 bp, synthetic construct
  source 1..20: mol_type = other DNA
atgagccagagagaaagctc

SEQ ID NO: 46706 - DNA, 20 bp, synthetic construct
  source 1..20: mol_type = other DNA
cgcgggcaggcagcggcgaa

SEQ ID NO: 46707 - DNA, 20 bp, synthetic construct
  source 1..20: mol_type = other DNA
ttgataagcttcctagagga

SEQ ID NO: 46708 - DNA, 20 bp, synthetic construct
  source 1..20: mol_type = other DNA
gctgtgggtacaggccgggc

SEQ ID NO: 46709 - DNA, 20 bp, synthetic construct
  source 1..20: mol_type = other DNA
ggcggcggcggcggaggagg

SEQ ID NO: 46710 - DNA, 20 bp, synthetic construct
  source 1..20: mol_type = other DNA
acaaccagatgcatggacaa

SEQ ID NO: 46711 - DNA, 20 bp, synthetic construct
  source 1..20: mol_type = other DNA
gtgctgctggtggggcggcg

SEQ ID NO: 46712 - DNA, 20 bp, synthetic construct
  source 1..20: mol_type = other DNA
ggccccggcggcggcggcgg

SEQ ID NO: 46713 - DNA, 20 bp, synthetic construct
  source 1..20: mol_type = other DNA
agtcatctggccgtgagggg

SEQ ID NO: 46714 - DNA, 20 bp, synthetic construct
  source 1..20: mol_type = other DNA
agcaatgtctaacctgggca

SEQ ID NO: 46715 - DNA, 20 bp, synthetic construct
  source 1..20: mol_type = other DNA
ggcagcggaggaggaggagg

SEQ ID NO: 46716 - DNA, 20 bp, synthetic construct
  source 1..20: mol_type = other DNA
tccgcctccgccgccgccgc

SEQ ID NO: 46717 - DNA, 20 bp, synthetic construct
  source 1..20: mol_type = other DNA
gcagcaggaggcggcggcgg

SEQ ID NO: 46718 - DNA, 20 bp, synthetic construct
  source 1..20: mol_type = other DNA
aagaaagagcaagaaggcaa

SEQ ID NO: 46719 - DNA, 20 bp, synthetic construct
  source 1..20: mol_type = other DNA
atagcattagcagcccaggc

SEQ ID NO: 46720 - DNA, 20 bp, synthetic construct
  source 1..20: mol_type = other DNA
ggcggcggcggcggcggcgc

SEQ ID NO: 46721 - DNA, 20 bp, synthetic construct
  source 1..20: mol_type = other DNA
ttgcttccgttcccgtgggg

SEQ ID NO: 46722 - DNA, 20 bp, synthetic construct
  source 1..20: mol_type = other DNA
gcggcggcagcagcaggagg

SEQ ID NO: 46723 - DNA, 20 bp, synthetic construct
  source 1..20: mol_type = other DNA
tctcctggcatgtctcagca

SEQ ID NO: 46724 - DNA, 20 bp, synthetic construct
  source 1..20: mol_type = other DNA
gccgccgccgccgcccgcgc

SEQ ID NO: 46725 - DNA, 20 bp, synthetic construct
  source 1..20: mol_type = other DNA
tgcgcctggggtgggaggtg

SEQ ID NO: 46726 - DNA, 20 bp, synthetic construct
  source 1..20: mol_type = other DNA
ggggtgctattggggcctcc

SEQ ID NO: 46727 - DNA, 20 bp, synthetic construct
  source 1..20: mol_type = other DNA
cggggagcgggaggaggagc

SEQ ID NO: 46728 - DNA, 20 bp, synthetic construct
  source 1..20: mol_type = other DNA
tgccttctgggcccagccct

SEQ ID NO: 46729 - DNA, 20 bp, synthetic construct
  source 1..20: mol_type = other DNA
gcgcgtgcacgtggccgcgc

SEQ ID NO: 46730 - DNA, 20 bp, synthetic construct
  source 1..20: mol_type = other DNA
gcgggaggaggagcaggagc

SEQ ID NO: 46731 - DNA, 20 bp, synthetic construct
  source 1..20: mol_type = other DNA
acgcctggggctctgcccca

SEQ ID NO: 46732 - DNA, 20 bp, synthetic construct
  source 1..20: mol_type = other DNA
gcatggaccaggtaggcctg

SEQ ID NO: 46733 - DNA, 20 bp, synthetic construct
  source 1..20: mol_type = other DNA
cagcccaggcagcaccagcg

SEQ ID NO: 46734 - DNA, 20 bp, synthetic construct
  source 1..20: mol_type = other DNA
gatcttccacaggttaactg

SEQ ID NO: 46735 - DNA, 20 bp, synthetic construct
  source 1..20: mol_type = other DNA
tcaaactgtataggcagagc

SEQ ID NO: 46736 - DNA, 20 bp, synthetic construct
  source 1..20: mol_type = other DNA
tgaataccagcaggctcagc

SEQ ID NO: 46737 - DNA, 20 bp, synthetic construct
  source 1..20: mol_type = other DNA
atctgcattgagaagaatgg

SEQ ID NO: 46738 - DNA, 20 bp, synthetic construct
  source 1..20: mol_type = other DNA
cagaagtctgtgcagaacag

SEQ ID NO: 46739 - DNA, 20 bp, synthetic construct
  source 1..20: mol_type = other DNA
tggacaggtaaggtatttgg

SEQ ID NO: 46740 - DNA, 20 bp, synthetic construct
  source 1..20: mol_type = other DNA
ttggacaggtaaggtatttg

SEQ ID NO: 46741 - DNA, 20 bp, synthetic construct
  source 1..20: mol_type = other DNA
gcaagtgaactggtactcct

SEQ ID NO: 46742 - DNA, 20 bp, synthetic construct
  source 1..20: mol_type = other DNA
taccagcttcttcctgggtc

SEQ ID NO: 46743 - DNA, 20 bp, synthetic construct
  source 1..20: mol_type = other DNA
atgttgcacttgggacactg

SEQ ID NO: 46744 - DNA, 20 bp, synthetic construct
  source 1..20: mol_type = other DNA
caagtgaactggtactcctc

SEQ ID NO: 46745 - DNA, 20 bp, synthetic construct
  source 1..20: mol_type = other DNA
atacacactgcacagtggtg

SEQ ID NO: 46746 - DNA, 20 bp, synthetic construct
  source 1..20: mol_type = other DNA
tgcaccgattgcactgtact

SEQ ID NO: 46747 - DNA, 20 bp, synthetic construct
  source 1..20: mol_type = other DNA
agataccttggccaagagct

SEQ ID NO: 46748 - DNA, 20 bp, synthetic construct
  source 1..20: mol_type = other DNA
gactctgtgaacacaccaag

SEQ ID NO: 46749 - DNA, 20 bp, synthetic construct
  source 1..20: mol_type = other DNA
tatacagtttgaataccagc

SEQ ID NO: 46750 - DNA, 20 bp, synthetic construct
  source 1..20: mol_type = other DNA
ttcaacaggagtctcttgca

SEQ ID NO: 46751 - DNA, 20 bp, synthetic construct
  source 1..20: mol_type = other DNA
acacactgcacagtggtgag

SEQ ID NO: 46752 - DNA, 20 bp, synthetic construct
  source 1..20: mol_type = other DNA
tgccttaccagcttcttcct

SEQ ID NO: 46753 - DNA, 20 bp, synthetic construct
  source 1..20: mol_type = other DNA
acaggtaaggtatttggggg

SEQ ID NO: 46754 - DNA, 20 bp, synthetic construct
  source 1..20: mol_type = other DNA
ctatgagtgcagtcgttaca

SEQ ID NO: 46755 - DNA, 20 bp, synthetic construct
  source 1..20: mol_type = other DNA
cacactgcacagtggtgagg

SEQ ID NO: 46756 - DNA, 20 bp, synthetic construct
  source 1..20: mol_type = other DNA
gggacactgaggagacagaa

SEQ ID NO: 46757 - DNA, 20 bp, synthetic construct
  source 1..20: mol_type = other DNA
tgcacagtggtgagggggat

SEQ ID NO: 46758 - DNA, 20 bp, synthetic construct
  source 1..20: mol_type = other DNA
tcagggactatgtggaggta

SEQ ID NO: 46759 - DNA, 20 bp, synthetic construct
  source 1..20: mol_type = other DNA
ttctctctcaattcttcatt

SEQ ID NO: 46760 - DNA, 20 bp, synthetic construct
  source 1..20: mol_type = other DNA
tgggacactgaggagacaga

SEQ ID NO: 46761 - DNA, 20 bp, synthetic construct
  source 1..20: mol_type = other DNA
tacacactgcacagtggtga

SEQ ID NO: 46762 - DNA, 20 bp, synthetic construct
  source 1..20: mol_type = other DNA
ctgagatcgaaaacctctca

SEQ ID NO: 46763 - DNA, 20 bp, synthetic construct
  source 1..20: mol_type = other DNA
cagcgatgtggagcagcagg

SEQ ID NO: 46764 - DNA, 20 bp, synthetic construct
  source 1..20: mol_type = other DNA
agtagaataagtacttcttg

SEQ ID NO: 46765 - DNA, 20 bp, synthetic construct
  source 1..20: mol_type = other DNA
tcaatgcagatgttgcactt

SEQ ID NO: 46766 - DNA, 20 bp, synthetic construct
  source 1..20: mol_type = other DNA
gctgacaggccagagagagt

SEQ ID NO: 46767 - DNA, 20 bp, synthetic construct
  source 1..20: mol_type = other DNA
gtagaataagtacttcttga

SEQ ID NO: 46768 - DNA, 20 bp, synthetic construct
  source 1..20: mol_type = other DNA
taatagtcctctatgtcccc

SEQ ID NO: 46769 - DNA, 20 bp, synthetic construct
  source 1..20: mol_type = other DNA
tatgctgtcggatgagtcct

SEQ ID NO: 46770 - DNA, 20 bp, synthetic construct
  source 1..20: mol_type = other DNA
tacactccgggactcctccc

SEQ ID NO: 46771 - DNA, 20 bp, synthetic construct
  source 1..20: mol_type = other DNA
tacttccactcaagaatcgt

SEQ ID NO: 46772 - DNA, 20 bp, synthetic construct
  source 1..20: mol_type = other DNA
cgggggatgtcgagatggac

SEQ ID NO: 46773 - DNA, 20 bp, synthetic construct
  source 1..20: mol_type = other DNA
gtggactcatacacatacat

SEQ ID NO: 46774 - DNA, 20 bp, synthetic construct
  source 1..20: mol_type = other DNA
gggttaatactggaggccgt

SEQ ID NO: 46775 - DNA, 20 bp, synthetic construct
  source 1..20: mol_type = other DNA
taacagcggcccaaagcccc

SEQ ID NO: 46776 - DNA, 20 bp, synthetic construct
  source 1..20: mol_type = other DNA
gaaccaggcctgatgggaga

SEQ ID NO: 46777 - DNA, 20 bp, synthetic construct
  source 1..20: mol_type = other DNA
ccgagaattgtacctctggg

SEQ ID NO: 46778 - DNA, 20 bp, synthetic construct
  source 1..20: mol_type = other DNA
ggagggcgaggccacgctcc

SEQ ID NO: 46779 - DNA, 20 bp, synthetic construct
  source 1..20: mol_type = other DNA
caggacaggggccaggaggt

SEQ ID NO: 46780 - DNA, 20 bp, synthetic construct
  source 1..20: mol_type = other DNA
ccagcacagcccggtgggcc

SEQ ID NO: 46781 - DNA, 20 bp, synthetic construct
  source 1..20: mol_type = other DNA
cccgctctgtccttggcgtc

SEQ ID NO: 46782 - DNA, 20 bp, synthetic construct
  source 1..20: mol_type = other DNA
tgtgacctgcaaaacaaaca

SEQ ID NO: 46783 - DNA, 20 bp, synthetic construct
  source 1..20: mol_type = other DNA
gcggccccagctggggccgt

SEQ ID NO: 46784 - DNA, 20 bp, synthetic construct
  source 1..20: mol_type = other DNA
caattctcggaggtgttgct

SEQ ID NO: 46785 - DNA, 20 bp, synthetic construct
  source 1..20: mol_type = other DNA
tcttcctcattctcttcact

SEQ ID NO: 46786 - DNA, 20 bp, synthetic construct
  source 1..20: mol_type = other DNA
caggtcacagccaggggctt

SEQ ID NO: 46787 - DNA, 20 bp, synthetic construct
  source 1..20: mol_type = other DNA
tcctacgcggaggacgggag

SEQ ID NO: 46788 - DNA, 20 bp, synthetic construct
  source 1..20: mol_type = other DNA
tgcatgcggccagcacagcc

SEQ ID NO: 46789 - DNA, 20 bp, synthetic construct
  source 1..20: mol_type = other DNA
tgcggccagcacagcccggt

SEQ ID NO: 46790 - DNA, 20 bp, synthetic construct
  source 1..20: mol_type = other DNA
tctccaaggggggtgagcga

SEQ ID NO: 46791 - DNA, 20 bp, synthetic construct
  source 1..20: mol_type = other DNA
ctacgcggaggacgggagcg

SEQ ID NO: 46792 - DNA, 20 bp, synthetic construct
  source 1..20: mol_type = other DNA
ctcggcaaacttcctgggaa

SEQ ID NO: 46793 - DNA, 20 bp, synthetic construct
  source 1..20: mol_type = other DNA
agaggaggaggatgaagagg

SEQ ID NO: 46794 - DNA, 20 bp, synthetic construct
  source 1..20: mol_type = other DNA
cctggatctgctcggggctc

SEQ ID NO: 46795 - DNA, 20 bp, synthetic construct
  source 1..20: mol_type = other DNA
aggcatggctgaaatcttcc

SEQ ID NO: 46796 - DNA, 20 bp, synthetic construct
  source 1..20: mol_type = other DNA
gaagctggagtcactgctgt

SEQ ID NO: 46797 - DNA, 20 bp, synthetic construct
  source 1..20: mol_type = other DNA
tcactgctgtcggagctgtg

SEQ ID NO: 46798 - DNA, 20 bp, synthetic construct
  source 1..20: mol_type = other DNA
gctgtcggagctgtgaggca

SEQ ID NO: 46799 - DNA, 20 bp, synthetic construct
  source 1..20: mol_type = other DNA
tggtgggccctagaggagaa

SEQ ID NO: 46800 - DNA, 20 bp, synthetic construct
  source 1..20: mol_type = other DNA
agtaggagaggaggccgtcc

SEQ ID NO: 46801 - DNA, 20 bp, synthetic construct
  source 1..20: mol_type = other DNA
cttccagatggtgagtgagg

SEQ ID NO: 46802 - DNA, 20 bp, synthetic construct
  source 1..20: mol_type = other DNA
ggtggcaaaggaggagcccc

SEQ ID NO: 46803 - DNA, 20 bp, synthetic construct
  source 1..20: mol_type = other DNA
tcccagacctggggacccag

SEQ ID NO: 46804 - DNA, 20 bp, synthetic construct
  source 1..20: mol_type = other DNA
gatctacagttagaagaaga

SEQ ID NO: 46805 - DNA, 20 bp, synthetic construct
  source 1..20: mol_type = other DNA
gtatacacgtaaattttcta

SEQ ID NO: 46806 - DNA, 20 bp, synthetic construct
  source 1..20: mol_type = other DNA
tcgccgaatagattcaacaa

SEQ ID NO: 46807 - DNA, 20 bp, synthetic construct
  source 1..20: mol_type = other DNA
ttctggatggtacatgacag

SEQ ID NO: 46808 - DNA, 20 bp, synthetic construct
  source 1..20: mol_type = other DNA
acaggaaaacccaaaaggtc

SEQ ID NO: 46809 - DNA, 20 bp, synthetic construct
  source 1..20: mol_type = other DNA
ccttggagctgggccgcccg

SEQ ID NO: 46810 - DNA, 20 bp, synthetic construct
  source 1..20: mol_type = other DNA
gctggaaggggttcaggagc

SEQ ID NO: 46811 - DNA, 20 bp, synthetic construct
  source 1..20: mol_type = other DNA
ccgcgagaacggcggtggtg

SEQ ID NO: 46812 - DNA, 20 bp, synthetic construct
  source 1..20: mol_type = other DNA
gcagcaacttgacggtgcac

SEQ ID NO: 46813 - DNA, 20 bp, synthetic construct
  source 1..20: mol_type = other DNA
gcaacttgacggtgcaccgg

SEQ ID NO: 46814 - DNA, 20 bp, synthetic construct
  source 1..20: mol_type = other DNA
ggaggaggaggacgaggagg

SEQ ID NO: 46815 - DNA, 20 bp, synthetic construct
  source 1..20: mol_type = other DNA
tgaagcgtgcggcgggcggc

SEQ ID NO: 46816 - DNA, 20 bp, synthetic construct
  source 1..20: mol_type = other DNA
tgctcggacgacgtggcgaa

SEQ ID NO: 46817 - DNA, 20 bp, synthetic construct
  source 1..20: mol_type = other DNA
acctgggcggcccgggcccc

SEQ ID NO: 46818 - DNA, 20 bp, synthetic construct
  source 1..20: mol_type = other DNA
tggaaggctcatctttacct

SEQ ID NO: 46819 - DNA, 20 bp, synthetic construct
  source 1..20: mol_type = other DNA
ggcggtgcgggtccaggtgg

SEQ ID NO: 46820 - DNA, 20 bp, synthetic construct
  source 1..20: mol_type = other DNA
ggccctcgccgaagcccggg

SEQ ID NO: 46821 - DNA, 20 bp, synthetic construct
  source 1..20: mol_type = other DNA
aacggcggtggtggggtgcc

SEQ ID NO: 46822 - DNA, 20 bp, synthetic construct
  source 1..20: mol_type = other DNA
gcccggggcccgggccgccc

SEQ ID NO: 46823 - DNA, 20 bp, synthetic construct
  source 1..20: mol_type = other DNA
atcaaacagaggccgcatgc

SEQ ID NO: 46824 - DNA, 20 bp, synthetic construct
  source 1..20: mol_type = other DNA
tacaggtgagcagagtgggc

SEQ ID NO: 46825 - DNA, 20 bp, synthetic construct
  source 1..20: mol_type = other DNA
agccacctgcgaatccacac

SEQ ID NO: 46826 - DNA, 20 bp, synthetic construct
  source 1..20: mol_type = other DNA
ccgctccttggggaaggggt

SEQ ID NO: 46827 - DNA, 20 bp, synthetic construct
  source 1..20: mol_type = other DNA
aacgatgttattgagccggc

SEQ ID NO: 46828 - DNA, 20 bp, synthetic construct
  source 1..20: mol_type = other DNA
atatcacttcgtgcctcttc

SEQ ID NO: 46829 - DNA, 20 bp, synthetic construct
  source 1..20: mol_type = other DNA
actctgtgggcgagttgggc

SEQ ID NO: 46830 - DNA, 20 bp, synthetic construct
  source 1..20: mol_type = other DNA
caggctttggggagctccgg

SEQ ID NO: 46831 - DNA, 20 bp, synthetic construct
  source 1..20: mol_type = other DNA
caagacatcatggcctatcg

SEQ ID NO: 46832 - DNA, 20 bp, synthetic construct
  source 1..20: mol_type = other DNA
acccacactcgaattcactc

SEQ ID NO: 46833 - DNA, 20 bp, synthetic construct
  source 1..20: mol_type = other DNA
aaagccattgaccagggcct

SEQ ID NO: 46834 - DNA, 20 bp, synthetic construct
  source 1..20: mol_type = other DNA
ccggccacgcgcctcggggc

SEQ ID NO: 46835 - DNA, 20 bp, synthetic construct
  source 1..20: mol_type = other DNA
cctgtcagaacagcaggaga

SEQ ID NO: 46836 - DNA, 20 bp, synthetic construct
  source 1..20: mol_type = other DNA
ttactgtgattaggggctgt

SEQ ID NO: 46837 - DNA, 20 bp, synthetic construct
  source 1..20: mol_type = other DNA
gggctccctgtcagaacagc

SEQ ID NO: 46838 - DNA, 20 bp, synthetic construct
  source 1..20: mol_type = other DNA
tggctgctgacggagagagc

SEQ ID NO: 46839 - DNA, 20 bp, synthetic construct
  source 1..20: mol_type = other DNA
cagggccgagggcaccgggc

SEQ ID NO: 46840 - DNA, 20 bp, synthetic construct
  source 1..20: mol_type = other DNA
ggagtacgcgcggctggtga

SEQ ID NO: 46841 - DNA, 20 bp, synthetic construct
  source 1..20: mol_type = other DNA
ttccttgtccttgtccacgg

SEQ ID NO: 46842 - DNA, 20 bp, synthetic construct
  source 1..20: mol_type = other DNA
ccagctcaagctgcagttcg

SEQ ID NO: 46843 - DNA, 20 bp, synthetic construct
  source 1..20: mol_type = other DNA
aaaccagcccgattcaagga

SEQ ID NO: 46844 - DNA, 20 bp, synthetic construct
  source 1..20: mol_type = other DNA
taggaggggactgggagtcc

SEQ ID NO: 46845 - DNA, 20 bp, synthetic construct
  source 1..20: mol_type = other DNA
agaggccgcggcgccggcgc

SEQ ID NO: 46846 - DNA, 20 bp, synthetic construct
  source 1..20: mol_type = other DNA
gacggactggtgagaatttg

SEQ ID NO: 46847 - DNA, 20 bp, synthetic construct
  source 1..20: mol_type = other DNA
cctgcctggatgggtgtttt

SEQ ID NO: 46848 - DNA, 20 bp, synthetic construct
  source 1..20: mol_type = other DNA
ctctgccattaatctcttca

SEQ ID NO: 46849 - DNA, 20 bp, synthetic construct
  source 1..20: mol_type = other DNA
cagcgcatcagctggttcaa

SEQ ID NO: 46850 - DNA, 20 bp, synthetic construct
  source 1..20: mol_type = other DNA
atggagcccgaggccggcgc

SEQ ID NO: 46851 - DNA, 20 bp, synthetic construct
  source 1..20: mol_type = other DNA
ggaacatatagaggccctat

SEQ ID NO: 46852 - DNA, 20 bp, synthetic construct
  source 1..20: mol_type = other DNA
cagtgaaatctcgatggagt

SEQ ID NO: 46853 - DNA, 20 bp, synthetic construct
  source 1..20: mol_type = other DNA
acagtgaaatctcgatggag

SEQ ID NO: 46854 - DNA, 20 bp, synthetic construct
  source 1..20: mol_type = other DNA
gaacagtctacaagggaaag

SEQ ID NO: 46855 - DNA, 20 bp, synthetic construct
  source 1..20: mol_type = other DNA
gttctgtatgaattgatgac

SEQ ID NO: 46856 - DNA, 20 bp, synthetic construct
  source 1..20: mol_type = other DNA
aatcacctatttttactgtg

SEQ ID NO: 46857 - DNA, 20 bp, synthetic construct
  source 1..20: mol_type = other DNA
agtttctgatagcagtactt

SEQ ID NO: 46858 - DNA, 20 bp, synthetic construct
  source 1..20: mol_type = other DNA
agtttattctaatccatgcc

SEQ ID NO: 46859 - DNA, 20 bp, synthetic construct
  source 1..20: mol_type = other DNA
tctcctctgccccagggggc

SEQ ID NO: 46860 - DNA, 20 bp, synthetic construct
  source 1..20: mol_type = other DNA
tgctagacctgcccagctcc

SEQ ID NO: 46861 - DNA, 20 bp, synthetic construct
  source 1..20: mol_type = other DNA
agtccagccgggagctgggc

SEQ ID NO: 46862 - DNA, 20 bp, synthetic construct
  source 1..20: mol_type = other DNA
ctggccctggtacctgctgc

SEQ ID NO: 46863 - DNA, 20 bp, synthetic construct
  source 1..20: mol_type = other DNA
tccagagcaaggttctctgc

SEQ ID NO: 46864 - DNA, 20 bp, synthetic construct
  source 1..20: mol_type = other DNA
agcagcgctgggcgggttcc

SEQ ID NO: 46865 - DNA, 20 bp, synthetic construct
  source 1..20: mol_type = other DNA
gctgccctgctcctgggtgc

SEQ ID NO: 46866 - DNA, 20 bp, synthetic construct
  source 1..20: mol_type = other DNA
gccccctggggcagaggaga

SEQ ID NO: 46867 - DNA, 20 bp, synthetic construct
  source 1..20: mol_type = other DNA
ggacagatggtctggggctg

SEQ ID NO: 46868 - DNA, 20 bp, synthetic construct
  source 1..20: mol_type = other DNA
tgcggggcctggaggcggag

SEQ ID NO: 46869 - DNA, 20 bp, synthetic construct
  source 1..20: mol_type = other DNA
gaggttggagcacagggaat

SEQ ID NO: 46870 - DNA, 20 bp, synthetic construct
  source 1..20: mol_type = other DNA
atcagaggtgacgcagagcc

SEQ ID NO: 46871 - DNA, 20 bp, synthetic construct
  source 1..20: mol_type = other DNA
acatgaggttgacctgctcc

SEQ ID NO: 46872 - DNA, 20 bp, synthetic construct
  source 1..20: mol_type = other DNA
caccagcttccggtaccctg

SEQ ID NO: 46873 - DNA, 20 bp, synthetic construct
  source 1..20: mol_type = other DNA
tcatcctgcgctggggcgga

SEQ ID NO: 46874 - DNA, 20 bp, synthetic construct
  source 1..20: mol_type = other DNA
tcagggtccagctctggcag

SEQ ID NO: 46875 - DNA, 20 bp, synthetic construct
  source 1..20: mol_type = other DNA
catccaggccctcggattgg

SEQ ID NO: 46876 - DNA, 20 bp, synthetic construct
  source 1..20: mol_type = other DNA
agatcgatcagctaaagcac

SEQ ID NO: 46877 - DNA, 20 bp, synthetic construct
  source 1..20: mol_type = other DNA
ggaggaggagtggatggagg

SEQ ID NO: 46878 - DNA, 20 bp, synthetic construct
  source 1..20: mol_type = other DNA
acagtacctggaggagaagg

SEQ ID NO: 46879 - DNA, 20 bp, synthetic construct
  source 1..20: mol_type = other DNA
caggccctcggattggtggg

SEQ ID NO: 46880 - DNA, 20 bp, synthetic construct
  source 1..20: mol_type = other DNA
ctcggattggtgggaggagg

SEQ ID NO: 46881 - DNA, 20 bp, synthetic construct
  source 1..20: mol_type = other DNA
tgcacctctggatggtccag

SEQ ID NO: 46882 - DNA, 20 bp, synthetic construct
  source 1..20: mol_type = other DNA
gttgacctgctccaggtcgt

SEQ ID NO: 46883 - DNA, 20 bp, synthetic construct
  source 1..20: mol_type = other DNA
atggtggagaatctccgagt

SEQ ID NO: 46884 - DNA, 20 bp, synthetic construct
  source 1..20: mol_type = other DNA
ctcccagctcaccctgctgg

SEQ ID NO: 46885 - DNA, 20 bp, synthetic construct
  source 1..20: mol_type = other DNA
tttcaccaggaggagctgct

SEQ ID NO: 46886 - DNA, 20 bp, synthetic construct
  source 1..20: mol_type = other DNA
ggaggaggaggagtggatgg

SEQ ID NO: 46887 - DNA, 20 bp, synthetic construct
  source 1..20: mol_type = other DNA
ctggtggccctcacggaggc

SEQ ID NO: 46888 - DNA, 20 bp, synthetic construct
  source 1..20: mol_type = other DNA
gcacctctggatggtccagt

SEQ ID NO: 46889 - DNA, 20 bp, synthetic construct
  source 1..20: mol_type = other DNA
agggtaccggaagctggtga

SEQ ID NO: 46890 - DNA, 20 bp, synthetic construct
  source 1..20: mol_type = other DNA
tcctcctcccaccaatccga

SEQ ID NO: 46891 - DNA, 20 bp, synthetic construct
  source 1..20: mol_type = other DNA
agcttccggtaccctgcgga

SEQ ID NO: 46892 - DNA, 20 bp, synthetic construct
  source 1..20: mol_type = other DNA
tcatcttgtagtaccgctcc

SEQ ID NO: 46893 - DNA, 20 bp, synthetic construct
  source 1..20: mol_type = other DNA
tgtaccaggacaggcacgag

SEQ ID NO: 46894 - DNA, 20 bp, synthetic construct
  source 1..20: mol_type = other DNA
ctcgcagctcctctgcctgg

SEQ ID NO: 46895 - DNA, 20 bp, synthetic construct
  source 1..20: mol_type = other DNA
acatttcacagtcctttccc

SEQ ID NO: 46896 - DNA, 20 bp, synthetic construct
  source 1..20: mol_type = other DNA
tcaggcgctgcagtttcacc

SEQ ID NO: 46897 - DNA, 20 bp, synthetic construct
  source 1..20: mol_type = other DNA
ccggttgaataagatggagg

SEQ ID NO: 46898 - DNA, 20 bp, synthetic construct
  source 1..20: mol_type = other DNA
gaggaggagtggatggagga

SEQ ID NO: 46899 - DNA, 20 bp, synthetic construct
  source 1..20: mol_type = other DNA
ttggccagctccttcaggta

SEQ ID NO: 46900 - DNA, 20 bp, synthetic construct
  source 1..20: mol_type = other DNA
cacctcccagctcaccctgc

SEQ ID NO: 46901 - DNA, 20 bp, synthetic construct
  source 1..20: mol_type = other DNA
gtcgaagaagacaatgacag

SEQ ID NO: 46902 - DNA, 20 bp, synthetic construct
  source 1..20: mol_type = other DNA
ggagctgctccgcgttgtca

SEQ ID NO: 46903 - DNA, 20 bp, synthetic construct
  source 1..20: mol_type = other DNA
tgagggccaccagctgctgc

SEQ ID NO: 46904 - DNA, 20 bp, synthetic construct
  source 1..20: mol_type = other DNA
gggcctggatgcctacgacc

SEQ ID NO: 46905 - DNA, 20 bp, synthetic construct
  source 1..20: mol_type = other DNA
tgcgagacaaggtgggagtg

SEQ ID NO: 46906 - DNA, 20 bp, synthetic construct
  source 1..20: mol_type = other DNA
catttcacagtcctttccca

SEQ ID NO: 46907 - DNA, 20 bp, synthetic construct
  source 1..20: mol_type = other DNA
agaggagctgcgagacaagg

SEQ ID NO: 46908 - DNA, 20 bp, synthetic construct
  source 1..20: mol_type = other DNA
gcaggttctggaactggagc

SEQ ID NO: 46909 - DNA, 20 bp, synthetic construct
  source 1..20: mol_type = other DNA
ggtccgagaacaagtataag

SEQ ID NO: 46910 - DNA, 20 bp, synthetic construct
  source 1..20: mol_type = other DNA
ggagtgcccgcagggtgtgg

SEQ ID NO: 46911 - DNA, 20 bp, synthetic construct
  source 1..20: mol_type = other DNA
gctccaggtcgtaggcatcc

SEQ ID NO: 46912 - DNA, 20 bp, synthetic construct
  source 1..20: mol_type = other DNA
agcaggtcaacctcatgttc

SEQ ID NO: 46913 - DNA, 20 bp, synthetic construct
  source 1..20: mol_type = other DNA
cagcctgccagactcagaca

SEQ ID NO: 46914 - DNA, 20 bp, synthetic construct
  source 1..20: mol_type = other DNA
caagtgctcgaccctgggaa

SEQ ID NO: 46915 - DNA, 20 bp, synthetic construct
  source 1..20: mol_type = other DNA
ccttctactgcgagcgccgc

SEQ ID NO: 46916 - DNA, 20 bp, synthetic construct
  source 1..20: mol_type = other DNA
ctcggatgcagccttctagc

SEQ ID NO: 46917 - DNA, 20 bp, synthetic construct
  source 1..20: mol_type = other DNA
atccaggccctcggattggt

SEQ ID NO: 46918 - DNA, 20 bp, synthetic construct
  source 1..20: mol_type = other DNA
ggaggaggaggaggagtgga

SEQ ID NO: 46919 - DNA, 20 bp, synthetic construct
  source 1..20: mol_type = other DNA
ggatgcctacgacctggagc

SEQ ID NO: 46920 - DNA, 20 bp, synthetic construct
  source 1..20: mol_type = other DNA
cctcccagctcaccctgctg

SEQ ID NO: 46921 - DNA, 20 bp, synthetic construct
  source 1..20: mol_type = other DNA
caggtgagggcctgggggcg

SEQ ID NO: 46922 - DNA, 20 bp, synthetic construct
  source 1..20: mol_type = other DNA
gtttcaccaggaggagctgc

SEQ ID NO: 46923 - DNA, 20 bp, synthetic construct
  source 1..20: mol_type = other DNA
agcctgcaggaggaggtagg

SEQ ID NO: 46924 - DNA, 20 bp, synthetic construct
  source 1..20: mol_type = other DNA
tctccgcctggggcagagag

SEQ ID NO: 46925 - DNA, 20 bp, synthetic construct
  source 1..20: mol_type = other DNA
cctccagtctcagctcttgt

SEQ ID NO: 46926 - DNA, 20 bp, synthetic construct
  source 1..20: mol_type = other DNA
aggaggccgtggggcttctc

SEQ ID NO: 46927 - DNA, 20 bp, synthetic construct
  source 1..20: mol_type = other DNA
agaccaggtacctgagaggc

SEQ ID NO: 46928 - DNA, 20 bp, synthetic construct
  source 1..20: mol_type = other DNA
ttgtacagggactgctggct

SEQ ID NO: 46929 - DNA, 20 bp, synthetic construct
  source 1..20: mol_type = other DNA
ctttccagctgcggaaggtc

SEQ ID NO: 46930 - DNA, 20 bp, synthetic construct
  source 1..20: mol_type = other DNA
gctcctggaggctgcgaggc

SEQ ID NO: 46931 - DNA, 20 bp, synthetic construct
  source 1..20: mol_type = other DNA
gatgtcccctctctggctcc

SEQ ID NO: 46932 - DNA, 20 bp, synthetic construct
  source 1..20: mol_type = other DNA
ccctggaaggcttgatgtct

SEQ ID NO: 46933 - DNA, 20 bp, synthetic construct
  source 1..20: mol_type = other DNA
ggtggatgaagatgcccgtg

SEQ ID NO: 46934 - DNA, 20 bp, synthetic construct
  source 1..20: mol_type = other DNA
cgcggcatcttcccgccctg

SEQ ID NO: 46935 - DNA, 20 bp, synthetic construct
  source 1..20: mol_type = other DNA
gagagacagattggttcctg

SEQ ID NO: 46936 - DNA, 20 bp, synthetic construct
  source 1..20: mol_type = other DNA
gcgtgcctggcgttcctcgt

SEQ ID NO: 46937 - DNA, 20 bp, synthetic construct
  source 1..20: mol_type = other DNA
aaaaaactggagagacagat

SEQ ID NO: 46938 - DNA, 20 bp, synthetic construct
  source 1..20: mol_type = other DNA
agcgtgcctggcgttcctcg

SEQ ID NO: 46939 - DNA, 20 bp, synthetic construct
  source 1..20: mol_type = other DNA
tgtgaggtgaggcaggcggg

SEQ ID NO: 46940 - DNA, 20 bp, synthetic construct
  source 1..20: mol_type = other DNA
gccgacttacgatttccgag

SEQ ID NO: 46941 - DNA, 20 bp, synthetic construct
  source 1..20: mol_type = other DNA
ctgattgatggcttcaggga

SEQ ID NO: 46942 - DNA, 20 bp, synthetic construct
  source 1..20: mol_type = other DNA
gtgcacatgaggtgtccaca

SEQ ID NO: 46943 - DNA, 20 bp, synthetic construct
  source 1..20: mol_type = other DNA
gccatggagaatggagaagg

SEQ ID NO: 46944 - DNA, 20 bp, synthetic construct
  source 1..20: mol_type = other DNA
taagacaggatgtgcacatg

SEQ ID NO: 46945 - DNA, 20 bp, synthetic construct
  source 1..20: mol_type = other DNA
gtgtcctacctgaaagagtc

SEQ ID NO: 46946 - DNA, 20 bp, synthetic construct
  source 1..20: mol_type = other DNA
tctctggagggacagtcgcc

SEQ ID NO: 46947 - DNA, 20 bp, synthetic construct
  source 1..20: mol_type = other DNA
cctcatcttcagccacatgc

SEQ ID NO: 46948 - DNA, 20 bp, synthetic construct
  source 1..20: mol_type = other DNA
agaaggcggccgttccacct

SEQ ID NO: 46949 - DNA, 20 bp, synthetic construct
  source 1..20: mol_type = other DNA
tctcgaagtgtgggaggtac

SEQ ID NO: 46950 - DNA, 20 bp, synthetic construct
  source 1..20: mol_type = other DNA
accagtgttggcatgggctg

SEQ ID NO: 46951 - DNA, 20 bp, synthetic construct
  source 1..20: mol_type = other DNA
tgtgcacatgaggtgtccac

SEQ ID NO: 46952 - DNA, 20 bp, synthetic construct
  source 1..20: mol_type = other DNA
ccagcatgtggctgaagatg

SEQ ID NO: 46953 - DNA, 20 bp, synthetic construct
  source 1..20: mol_type = other DNA
gctggtaggtatctggtagc

SEQ ID NO: 46954 - DNA, 20 bp, synthetic construct
  source 1..20: mol_type = other DNA
gatatctgagagagttcggc

SEQ ID NO: 46955 - DNA, 20 bp, synthetic construct
  source 1..20: mol_type = other DNA
cccttggaagagctttcgac

SEQ ID NO: 46956 - DNA, 20 bp, synthetic construct
  source 1..20: mol_type = other DNA
cttaccaaaggtgctgctct

SEQ ID NO: 46957 - DNA, 20 bp, synthetic construct
  source 1..20: mol_type = other DNA
agaaagggttgacgcagcag

SEQ ID NO: 46958 - DNA, 20 bp, synthetic construct
  source 1..20: mol_type = other DNA
caccatccaggtggcccaga

SEQ ID NO: 46959 - DNA, 20 bp, synthetic construct
  source 1..20: mol_type = other DNA
cttgctcactgctgctcctc

SEQ ID NO: 46960 - DNA, 20 bp, synthetic construct
  source 1..20: mol_type = other DNA
ccacactcatggaggagcgc

SEQ ID NO: 46961 - DNA, 20 bp, synthetic construct
  source 1..20: mol_type = other DNA
tggggtggtcctggcccaga

SEQ ID NO: 46962 - DNA, 20 bp, synthetic construct
  source 1..20: mol_type = other DNA
agtcgcctatggggagaagg

SEQ ID NO: 46963 - DNA, 20 bp, synthetic construct
  source 1..20: mol_type = other DNA
caccatctgggccacctgga

SEQ ID NO: 46964 - DNA, 20 bp, synthetic construct
  source 1..20: mol_type = other DNA
cgatctcttcaagctcttca

SEQ ID NO: 46965 - DNA, 20 bp, synthetic construct
  source 1..20: mol_type = other DNA
gagcctcttgaaatagatat

SEQ ID NO: 46966 - DNA, 20 bp, synthetic construct
  source 1..20: mol_type = other DNA
ttggctgaactcgaggtctg

SEQ ID NO: 46967 - DNA, 20 bp, synthetic construct
  source 1..20: mol_type = other DNA
tgggaagttgctggattctg

SEQ ID NO: 46968 - DNA, 20 bp, synthetic construct
  source 1..20: mol_type = other DNA
gtcgagcctgtcagctgtcc

SEQ ID NO: 46969 - DNA, 20 bp, synthetic construct
  source 1..20: mol_type = other DNA
atcattggcatatgtggagg

SEQ ID NO: 46970 - DNA, 20 bp, synthetic construct
  source 1..20: mol_type = other DNA
tcccaaactctgctacctgc

SEQ ID NO: 46971 - DNA, 20 bp, synthetic construct
  source 1..20: mol_type = other DNA
tctgtgccaagagataaagc

SEQ ID NO: 46972 - DNA, 20 bp, synthetic construct
  source 1..20: mol_type = other DNA
tgaagaggattccatccagc

SEQ ID NO: 46973 - DNA, 20 bp, synthetic construct
  source 1..20: mol_type = other DNA
agcagagtttgggatccagc

SEQ ID NO: 46974 - DNA, 20 bp, synthetic construct
  source 1..20: mol_type = other DNA
gagtgaaggtgggtaccact

SEQ ID NO: 46975 - DNA, 20 bp, synthetic construct
  source 1..20: mol_type = other DNA
acagttgccgattacaggta

SEQ ID NO: 46976 - DNA, 20 bp, synthetic construct
  source 1..20: mol_type = other DNA
ggcacagaggcacagagctt

SEQ ID NO: 46977 - DNA, 20 bp, synthetic construct
  source 1..20: mol_type = other DNA
cacagttgccgattacaggt

SEQ ID NO: 46978 - DNA, 20 bp, synthetic construct
  source 1..20: mol_type = other DNA
caccttcactctcaggaaca

SEQ ID NO: 46979 - DNA, 20 bp, synthetic construct
  source 1..20: mol_type = other DNA
tctcccttggatggtcggcg

SEQ ID NO: 46980 - DNA, 20 bp, synthetic construct
  source 1..20: mol_type = other DNA
gtgccgacagctctcacagt

SEQ ID NO: 46981 - DNA, 20 bp, synthetic construct
  source 1..20: mol_type = other DNA
tgaactgacatgtcaggctg

SEQ ID NO: 46982 - DNA, 20 bp, synthetic construct
  source 1..20: mol_type = other DNA
tctcttggaattggtggtgg

SEQ ID NO: 46983 - DNA, 20 bp, synthetic construct
  source 1..20: mol_type = other DNA
tgtgaaattgcaggatgcag

SEQ ID NO: 46984 - DNA, 20 bp, synthetic construct
  source 1..20: mol_type = other DNA
cgataggctgcgaagtcgcg

SEQ ID NO: 46985 - DNA, 20 bp, synthetic construct
  source 1..20: mol_type = other DNA
aggctgcgaagtcgcgtggt

SEQ ID NO: 46986 - DNA, 20 bp, synthetic construct
  source 1..20: mol_type = other DNA
gcagcctatcgctcctgaca

SEQ ID NO: 46987 - DNA, 20 bp, synthetic construct
  source 1..20: mol_type = other DNA
gaaataggggacttggacaa

SEQ ID NO: 46988 - DNA, 20 bp, synthetic construct
  source 1..20: mol_type = other DNA
taggctgcgaagtcgcgtgg

SEQ ID NO: 46989 - DNA, 20 bp, synthetic construct
  source 1..20: mol_type = other DNA
atagggctggtaatgcttgc

SEQ ID NO: 46990 - DNA, 20 bp, synthetic construct
  source 1..20: mol_type = other DNA
ggctgcgaagtcgcgtggtg

SEQ ID NO: 46991 - DNA, 20 bp, synthetic construct
  source 1..20: mol_type = other DNA
ccagcctgacactggaagtg

SEQ ID NO: 46992 - DNA, 20 bp, synthetic construct
  source 1..20: mol_type = other DNA
gtgggcatttgcctgggcgt

SEQ ID NO: 46993 - DNA, 20 bp, synthetic construct
  source 1..20: mol_type = other DNA
ctgatcgctgacggcggcgg

SEQ ID NO: 46994 - DNA, 20 bp, synthetic construct
  source 1..20: mol_type = other DNA
tccatagtgggcatttgcct

SEQ ID NO: 46995 - DNA, 20 bp, synthetic construct
  source 1..20: mol_type = other DNA
ttacacctatatattcctcg

SEQ ID NO: 46996 - DNA, 20 bp, synthetic construct
  source 1..20: mol_type = other DNA
ttcctctataggtatcttga

SEQ ID NO: 46997 - DNA, 20 bp, synthetic construct
  source 1..20: mol_type = other DNA
acacagctctggcacactgt

SEQ ID NO: 46998 - DNA, 20 bp, synthetic construct
  source 1..20: mol_type = other DNA
cacagtgtgccagagctgtg

SEQ ID NO: 46999 - DNA, 20 bp, synthetic construct
  source 1..20: mol_type = other DNA
tacacctatatattcctcgt

SEQ ID NO: 47000 - DNA, 20 bp, synthetic construct
  source 1..20: mol_type = other DNA
tcctctataggtatcttgaa

SEQ ID NO: 47001 - DNA, 20 bp, synthetic construct
  source 1..20: mol_type = other DNA
tctggcacactgtgggggaa

SEQ ID NO: 47002 - DNA, 20 bp, synthetic construct
  source 1..20: mol_type = other DNA
cacagctctggcacactgtg

SEQ ID NO: 47003 - DNA, 20 bp, synthetic construct
  source 1..20: mol_type = other DNA
cctctataggtatcttgaag

SEQ ID NO: 47004 - DNA, 20 bp, synthetic construct
  source 1..20: mol_type = other DNA
acttcgataatgaacttgca

SEQ ID NO: 47005 - DNA, 20 bp, synthetic construct
  source 1..20: mol_type = other DNA
acagctctggcacactgtgg

SEQ ID NO: 47006 - DNA, 20 bp, synthetic construct
  source 1..20: mol_type = other DNA
agagaagggtagccagtacc

SEQ ID NO: 47007 - DNA, 20 bp, synthetic construct
  source 1..20: mol_type = other DNA
cacacagctctggcacactg

SEQ ID NO: 47008 - DNA, 20 bp, synthetic construct
  source 1..20: mol_type = other DNA
cttgaaggggctcactaaag

SEQ ID NO: 47009 - DNA, 20 bp, synthetic construct
  source 1..20: mol_type = other DNA
tcttgaaggggctcactaaa

SEQ ID NO: 47010 - DNA, 20 bp, synthetic construct
  source 1..20: mol_type = other DNA
ctctggcacactgtggggga

SEQ ID NO: 47011 - DNA, 20 bp, synthetic construct
  source 1..20: mol_type = other DNA
ggcacactgtgggggaaggg

SEQ ID NO: 47012 - DNA, 20 bp, synthetic construct
  source 1..20: mol_type = other DNA
actcacctgataagaggcag

SEQ ID NO: 47013 - DNA, 20 bp, synthetic construct
  source 1..20: mol_type = other DNA
caacacaatgataaaaacat

SEQ ID NO: 47014 - DNA, 20 bp, synthetic construct
  source 1..20: mol_type = other DNA
catgcagttctcacacactg

SEQ ID NO: 47015 - DNA, 20 bp, synthetic construct
  source 1..20: mol_type = other DNA
tttcagatccaggatactga

SEQ ID NO: 47016 - DNA, 20 bp, synthetic construct
  source 1..20: mol_type = other DNA
tattatgtctgctaccccag

SEQ ID NO: 47017 - DNA, 20 bp, synthetic construct
  source 1..20: mol_type = other DNA
ctggattacctcttgccctc

SEQ ID NO: 47018 - DNA, 20 bp, synthetic construct
  source 1..20: mol_type = other DNA
gtggacatctgcatcactgg

SEQ ID NO: 47019 - DNA, 20 bp, synthetic construct
  source 1..20: mol_type = other DNA
agtggacatctgcatcactg

SEQ ID NO: 47020 - DNA, 20 bp, synthetic construct
  source 1..20: mol_type = other DNA
atttcagatccaggatactg

SEQ ID NO: 47021 - DNA, 20 bp, synthetic construct
  source 1..20: mol_type = other DNA
agggcatgtcaatattactg

SEQ ID NO: 47022 - DNA, 20 bp, synthetic construct
  source 1..20: mol_type = other DNA
tgccatagtatttcagatcc

SEQ ID NO: 47023 - DNA, 20 bp, synthetic construct
  source 1..20: mol_type = other DNA
agatgcagtcgggcactcac

SEQ ID NO: 47024 - DNA, 20 bp, synthetic construct
  source 1..20: mol_type = other DNA
agatggagactttatatgct

SEQ ID NO: 47025 - DNA, 20 bp, synthetic construct
  source 1..20: mol_type = other DNA
gatggagactttatatgctg

SEQ ID NO: 47026 - DNA, 20 bp, synthetic construct
  source 1..20: mol_type = other DNA
cacagtgtgtgagaactgca

SEQ ID NO: 47027 - DNA, 20 bp, synthetic construct
  source 1..20: mol_type = other DNA
ttacactgatacatccctcg

SEQ ID NO: 47028 - DNA, 20 bp, synthetic construct
  source 1..20: mol_type = other DNA
actgacatggaacaggggaa

SEQ ID NO: 47029 - DNA, 20 bp, synthetic construct
  source 1..20: mol_type = other DNA
tcctgaaatgagaaaagccg

SEQ ID NO: 47030 - DNA, 20 bp, synthetic construct
  source 1..20: mol_type = other DNA
cttctgtaatacacttggag

SEQ ID NO: 47031 - DNA, 20 bp, synthetic construct
  source 1..20: mol_type = other DNA
tacactgatacatccctcga

SEQ ID NO: 47032 - DNA, 20 bp, synthetic construct
  source 1..20: mol_type = other DNA
tcctaccattatgtacccaa

SEQ ID NO: 47033 - DNA, 20 bp, synthetic construct
  source 1..20: mol_type = other DNA
gactgacatggaacagggga

SEQ ID NO: 47034 - DNA, 20 bp, synthetic construct
  source 1..20: mol_type = other DNA
ccaggaccctaagctccaga

SEQ ID NO: 47035 - DNA, 20 bp, synthetic construct
  source 1..20: mol_type = other DNA
caggaccctaagctccagat

SEQ ID NO: 47036 - DNA, 20 bp, synthetic construct
  source 1..20: mol_type = other DNA
aaaggtgatccaagacttgg

SEQ ID NO: 47037 - DNA, 20 bp, synthetic construct
  source 1..20: mol_type = other DNA
tggcgagctgtggtggcagg

SEQ ID NO: 47038 - DNA, 20 bp, synthetic construct
  source 1..20: mol_type = other DNA
accagatgttgttttactgc

SEQ ID NO: 47039 - DNA, 20 bp, synthetic construct
  source 1..20: mol_type = other DNA
agccagtgccatggctcact

SEQ ID NO: 47040 - DNA, 20 bp, synthetic construct
  source 1..20: mol_type = other DNA
cataaaaattttcatgctga

SEQ ID NO: 47041 - DNA, 20 bp, synthetic construct
  source 1..20: mol_type = other DNA
taagattctctcgaatctac

SEQ ID NO: 47042 - DNA, 20 bp, synthetic construct
  source 1..20: mol_type = other DNA
tctcatcagctgtcataaac

SEQ ID NO: 47043 - DNA, 20 bp, synthetic construct
  source 1..20: mol_type = other DNA
gaaaggagcagcacttcagg

SEQ ID NO: 47044 - DNA, 20 bp, synthetic construct
  source 1..20: mol_type = other DNA
atagtatgggtggcaagagg

SEQ ID NO: 47045 - DNA, 20 bp, synthetic construct
  source 1..20: mol_type = other DNA
gtttgcaggaaagcagatgg

SEQ ID NO: 47046 - DNA, 20 bp, synthetic construct
  source 1..20: mol_type = other DNA
tttacttactttcacatatt

SEQ ID NO: 47047 - DNA, 20 bp, synthetic construct
  source 1..20: mol_type = other DNA
agttatgtttgaatgcgata

SEQ ID NO: 47048 - DNA, 20 bp, synthetic construct
  source 1..20: mol_type = other DNA
ataactaaatgagaaaagaa

SEQ ID NO: 47049 - DNA, 20 bp, synthetic construct
  source 1..20: mol_type = other DNA
gataagggtttttacctcga

SEQ ID NO: 47050 - DNA, 20 bp, synthetic construct
  source 1..20: mol_type = other DNA
gtagattataagtgtaaaaa

SEQ ID NO: 47051 - DNA, 20 bp, synthetic construct
  source 1..20: mol_type = other DNA
tttaaaggatcccgtatata

SEQ ID NO: 47052 - DNA, 20 bp, synthetic construct
  source 1..20: mol_type = other DNA
acaataagaatattttcatt

SEQ ID NO: 47053 - DNA, 20 bp, synthetic construct
  source 1..20: mol_type = other DNA
gactgggcaagagacaagaa

SEQ ID NO: 47054 - DNA, 20 bp, synthetic construct
  source 1..20: mol_type = other DNA
ctggcacttcgagttggaac

SEQ ID NO: 47055 - DNA, 20 bp, synthetic construct
  source 1..20: mol_type = other DNA
ggtgcagagccgtctggtgg

SEQ ID NO: 47056 - DNA, 20 bp, synthetic construct
  source 1..20: mol_type = other DNA
cggccagcactgtgccggcg

SEQ ID NO: 47057 - DNA, 20 bp, synthetic construct
  source 1..20: mol_type = other DNA
caaggtgcagagccgtctgg

SEQ ID NO: 47058 - DNA, 20 bp, synthetic construct
  source 1..20: mol_type = other DNA
tgtgggctctggagttgtgg

SEQ ID NO: 47059 - DNA, 20 bp, synthetic construct
  source 1..20: mol_type = other DNA
cacactggaggttgttgcag

SEQ ID NO: 47060 - DNA, 20 bp, synthetic construct
  source 1..20: mol_type = other DNA
ctggaggtctacctcaagga

SEQ ID NO: 47061 - DNA, 20 bp, synthetic construct
  source 1..20: mol_type = other DNA
taccatcagctatgaggccc

SEQ ID NO: 47062 - DNA, 20 bp, synthetic construct
  source 1..20: mol_type = other DNA
ccagctggaggtctacctca

SEQ ID NO: 47063 - DNA, 20 bp, synthetic construct
  source 1..20: mol_type = other DNA
gttctacagcggcagcctgg

SEQ ID NO: 47064 - DNA, 20 bp, synthetic construct
  source 1..20: mol_type = other DNA
gctgcagcctgggaggagct

SEQ ID NO: 47065 - DNA, 20 bp, synthetic construct
  source 1..20: mol_type = other DNA
ctagcttcttgtaggcaagg

SEQ ID NO: 47066 - DNA, 20 bp, synthetic construct
  source 1..20: mol_type = other DNA
accaaaacagtaagtgtccc

SEQ ID NO: 47067 - DNA, 20 bp, synthetic construct
  source 1..20: mol_type = other DNA
tcactgtcggaggagttgtc

SEQ ID NO: 47068 - DNA, 20 bp, synthetic construct
  source 1..20: mol_type = other DNA
tgagccttgcctggaaatct

SEQ ID NO: 47069 - DNA, 20 bp, synthetic construct
  source 1..20: mol_type = other DNA
ctgttttggttcattcccgt

SEQ ID NO: 47070 - DNA, 20 bp, synthetic construct
  source 1..20: mol_type = other DNA
acctgtgggctctggagttg

SEQ ID NO: 47071 - DNA, 20 bp, synthetic construct
  source 1..20: mol_type = other DNA
gcactgggacagcttctgat

SEQ ID NO: 47072 - DNA, 20 bp, synthetic construct
  source 1..20: mol_type = other DNA
gacccccagatttccaggca

SEQ ID NO: 47073 - DNA, 20 bp, synthetic construct
  source 1..20: mol_type = other DNA
tagcagatgattgagctctg

SEQ ID NO: 47074 - DNA, 20 bp, synthetic construct
  source 1..20: mol_type = other DNA
gcggtgggaggaggtgtgcc

SEQ ID NO: 47075 - DNA, 20 bp, synthetic construct
  source 1..20: mol_type = other DNA
gcagacttttgacgcttgac

SEQ ID NO: 47076 - DNA, 20 bp, synthetic construct
  source 1..20: mol_type = other DNA
aacctgagaggggaagcaat

SEQ ID NO: 47077 - DNA, 20 bp, synthetic construct
  source 1..20: mol_type = other DNA
cctgaagcaatgctccaggg

SEQ ID NO: 47078 - DNA, 20 bp, synthetic construct
  source 1..20: mol_type = other DNA
ccttgaggtagacctccagc

SEQ ID NO: 47079 - DNA, 20 bp, synthetic construct
  source 1..20: mol_type = other DNA
ctggccctggcacttcgagt

SEQ ID NO: 47080 - DNA, 20 bp, synthetic construct
  source 1..20: mol_type = other DNA
caggcagagcccaagaccca

SEQ ID NO: 47081 - DNA, 20 bp, synthetic construct
  source 1..20: mol_type = other DNA
atcttccattggattggcaa

SEQ ID NO: 47082 - DNA, 20 bp, synthetic construct
  source 1..20: mol_type = other DNA
agcaggtacaaggtggccag

SEQ ID NO: 47083 - DNA, 20 bp, synthetic construct
  source 1..20: mol_type = other DNA
gacacatgtcatttctgctg

SEQ ID NO: 47084 - DNA, 20 bp, synthetic construct
  source 1..20: mol_type = other DNA
gcaccccacagttcagccgc

SEQ ID NO: 47085 - DNA, 20 bp, synthetic construct
  source 1..20: mol_type = other DNA
acgaatacagccaacctccc

SEQ ID NO: 47086 - DNA, 20 bp, synthetic construct
  source 1..20: mol_type = other DNA
gaggaagttctccaggtcct

SEQ ID NO: 47087 - DNA, 20 bp, synthetic construct
  source 1..20: mol_type = other DNA
cactagcttcttgtaggcaa

SEQ ID NO: 47088 - DNA, 20 bp, synthetic construct
  source 1..20: mol_type = other DNA
ctgcagctggtggcacagtc

SEQ ID NO: 47089 - DNA, 20 bp, synthetic construct
  source 1..20: mol_type = other DNA
agttctacagcggcagcctg

SEQ ID NO: 47090 - DNA, 20 bp, synthetic construct
  source 1..20: mol_type = other DNA
cctctcaggtttccagccca

SEQ ID NO: 47091 - DNA, 20 bp, synthetic construct
  source 1..20: mol_type = other DNA
tctcccaaagttcgtggcac

SEQ ID NO: 47092 - DNA, 20 bp, synthetic construct
  source 1..20: mol_type = other DNA
cagacttttgacgcttgact

SEQ ID NO: 47093 - DNA, 20 bp, synthetic construct
  source 1..20: mol_type = other DNA
tcctatcgagtgctggacgc

SEQ ID NO: 47094 - DNA, 20 bp, synthetic construct
  source 1..20: mol_type = other DNA
aaggtgcagagccgtctggt

SEQ ID NO: 47095 - DNA, 20 bp, synthetic construct
  source 1..20: mol_type = other DNA
ctgccagcggctgaactgtg

SEQ ID NO: 47096 - DNA, 20 bp, synthetic construct
  source 1..20: mol_type = other DNA
cagcaccaccaggagcacca

SEQ ID NO: 47097 - DNA, 20 bp, synthetic construct
  source 1..20: mol_type = other DNA
tctgccagcggctgaactgt

SEQ ID NO: 47098 - DNA, 20 bp, synthetic construct
  source 1..20: mol_type = other DNA
ccatgtgccatccgtccttg

SEQ ID NO: 47099 - DNA, 20 bp, synthetic construct
  source 1..20: mol_type = other DNA
gctgtagaactccaccacgc

SEQ ID NO: 47100 - DNA, 20 bp, synthetic construct
  source 1..20: mol_type = other DNA
ggcaagcatcatcctggccc

SEQ ID NO: 47101 - DNA, 20 bp, synthetic construct
  source 1..20: mol_type = other DNA
tcaagaaggagccacactgg

SEQ ID NO: 47102 - DNA, 20 bp, synthetic construct
  source 1..20: mol_type = other DNA
ggtagacctccagctggccc

SEQ ID NO: 47103 - DNA, 20 bp, synthetic construct
  source 1..20: mol_type = other DNA
cagagctcaatcatctgcta

SEQ ID NO: 47104 - DNA, 20 bp, synthetic construct
  source 1..20: mol_type = other DNA
aagaagcagcgccagtggat

SEQ ID NO: 47105 - DNA, 20 bp, synthetic construct
  source 1..20: mol_type = other DNA
actgcagaaagaagagagga

SEQ ID NO: 47106 - DNA, 20 bp, synthetic construct
  source 1..20: mol_type = other DNA
gctgtggctgcagttggaga

SEQ ID NO: 47107 - DNA, 20 bp, synthetic construct
  source 1..20: mol_type = other DNA
gccagaagaagcagcgccag

SEQ ID NO: 47108 - DNA, 20 bp, synthetic construct
  source 1..20: mol_type = other DNA
gactgcagaaagaagagagg

SEQ ID NO: 47109 - DNA, 20 bp, synthetic construct
  source 1..20: mol_type = other DNA
cctcccactgcttggagctc

SEQ ID NO: 47110 - DNA, 20 bp, synthetic construct
  source 1..20: mol_type = other DNA
cagtcgcttcctgcctcgga

SEQ ID NO: 47111 - DNA, 20 bp, synthetic construct
  source 1..20: mol_type = other DNA
ccaccacgccggcacagtgc

SEQ ID NO: 47112 - DNA, 20 bp, synthetic construct
  source 1..20: mol_type = other DNA
gtgaagaaatgtaggtgtca

SEQ ID NO: 47113 - DNA, 20 bp, synthetic construct
  source 1..20: mol_type = other DNA
gtgagccttgcctggaaatc

SEQ ID NO: 47114 - DNA, 20 bp, synthetic construct
  source 1..20: mol_type = other DNA
tccattggattggcaagggc

SEQ ID NO: 47115 - DNA, 20 bp, synthetic construct
  source 1..20: mol_type = other DNA
cctggcacttcgagttggaa

SEQ ID NO: 47116 - DNA, 20 bp, synthetic construct
  source 1..20: mol_type = other DNA
gttacccacctaagcaggtc

SEQ ID NO: 47117 - DNA, 20 bp, synthetic construct
  source 1..20: mol_type = other DNA
ccagcactgtgccggcgtgg

SEQ ID NO: 47118 - DNA, 20 bp, synthetic construct
  source 1..20: mol_type = other DNA
tctctgggcctgacctgctt

SEQ ID NO: 47119 - DNA, 20 bp, synthetic construct
  source 1..20: mol_type = other DNA
gagttctacagcggcagcct

SEQ ID NO: 47120 - DNA, 20 bp, synthetic construct
  source 1..20: mol_type = other DNA
ctcccaccgcagcgagctcc

SEQ ID NO: 47121 - DNA, 20 bp, synthetic construct
  source 1..20: mol_type = other DNA
catccccagcaggtacaagg

SEQ ID NO: 47122 - DNA, 20 bp, synthetic construct
  source 1..20: mol_type = other DNA
ggttctgcaatgagacactc

SEQ ID NO: 47123 - DNA, 20 bp, synthetic construct
  source 1..20: mol_type = other DNA
aggtgcagagccgtctggtg

SEQ ID NO: 47124 - DNA, 20 bp, synthetic construct
  source 1..20: mol_type = other DNA
catagctgatggtacccccc

SEQ ID NO: 47125 - DNA, 20 bp, synthetic construct
  source 1..20: mol_type = other DNA
ggctgtattcgttatccacg

SEQ ID NO: 47126 - DNA, 20 bp, synthetic construct
  source 1..20: mol_type = other DNA
cagaagagcccccgggatgt

SEQ ID NO: 47127 - DNA, 20 bp, synthetic construct
  source 1..20: mol_type = other DNA
gggaggtacagcttgagttc

SEQ ID NO: 47128 - DNA, 20 bp, synthetic construct
  source 1..20: mol_type = other DNA
gtgcagagccgtctggtggg

SEQ ID NO: 47129 - DNA, 20 bp, synthetic construct
  source 1..20: mol_type = other DNA
gttcttgccctcctttgctc

SEQ ID NO: 47130 - DNA, 20 bp, synthetic construct
  source 1..20: mol_type = other DNA
tcctcccaggctgcagctgg

SEQ ID NO: 47131 - DNA, 20 bp, synthetic construct
  source 1..20: mol_type = other DNA
agcgactgcagaaagaagag

SEQ ID NO: 47132 - DNA, 20 bp, synthetic construct
  source 1..20: mol_type = other DNA
tacctggataagctgacagg

SEQ ID NO: 47133 - DNA, 20 bp, synthetic construct
  source 1..20: mol_type = other DNA
cagctggtggcacagtctgg

SEQ ID NO: 47134 - DNA, 20 bp, synthetic construct
  source 1..20: mol_type = other DNA
tctggcggccagcactgtgc

SEQ ID NO: 47135 - DNA, 20 bp, synthetic construct
  source 1..20: mol_type = other DNA
aagcgtcaaaagtctgccag

SEQ ID NO: 47136 - DNA, 20 bp, synthetic construct
  source 1..20: mol_type = other DNA
tgttttggttcattcccgtt

SEQ ID NO: 47137 - DNA, 20 bp, synthetic construct
  source 1..20: mol_type = other DNA
actcacccagcatccccagc

SEQ ID NO: 47138 - DNA, 20 bp, synthetic construct
  source 1..20: mol_type = other DNA
caccagacggctctgcacct

SEQ ID NO: 47139 - DNA, 20 bp, synthetic construct
  source 1..20: mol_type = other DNA
cactgggacagcttctgatg

SEQ ID NO: 47140 - DNA, 20 bp, synthetic construct
  source 1..20: mol_type = other DNA
cataccagctgagccgtccg

SEQ ID NO: 47141 - DNA, 20 bp, synthetic construct
  source 1..20: mol_type = other DNA
gcttacctggataagctgac

SEQ ID NO: 47142 - DNA, 20 bp, synthetic construct
  source 1..20: mol_type = other DNA
gtctgccagcggctgaactg

SEQ ID NO: 47143 - DNA, 20 bp, synthetic construct
  source 1..20: mol_type = other DNA
agctcctcccaggctgcagc

SEQ ID NO: 47144 - DNA, 20 bp, synthetic construct
  source 1..20: mol_type = other DNA
ggcactgggacagcttctga

SEQ ID NO: 47145 - DNA, 20 bp, synthetic construct
  source 1..20: mol_type = other DNA
agaggaagttctccaggtcc

SEQ ID NO: 47146 - DNA, 20 bp, synthetic construct
  source 1..20: mol_type = other DNA
tgtcccagtgccacgaactt

SEQ ID NO: 47147 - DNA, 20 bp, synthetic construct
  source 1..20: mol_type = other DNA
ccgttccaactcgaagtgcc

SEQ ID NO: 47148 - DNA, 20 bp, synthetic construct
  source 1..20: mol_type = other DNA
gatgcttgccaccgtgcctg

SEQ ID NO: 47149 - DNA, 20 bp, synthetic construct
  source 1..20: mol_type = other DNA
accagcccttgccaatccaa

SEQ ID NO: 47150 - DNA, 20 bp, synthetic construct
  source 1..20: mol_type = other DNA
cagtgactatgatctgcatg

SEQ ID NO: 47151 - DNA, 20 bp, synthetic construct
  source 1..20: mol_type = other DNA
gatcttccattggattggca

SEQ ID NO: 47152 - DNA, 20 bp, synthetic construct
  source 1..20: mol_type = other DNA
ttctacagcggcagcctggg

SEQ ID NO: 47153 - DNA, 20 bp, synthetic construct
  source 1..20: mol_type = other DNA
ggccaggatccaaaccccgc

SEQ ID NO: 47154 - DNA, 20 bp, synthetic construct
  source 1..20: mol_type = other DNA
agcaaaggagggcaagaact

SEQ ID NO: 47155 - DNA, 20 bp, synthetic construct
  source 1..20: mol_type = other DNA
gtgggctctggagttgtggt

SEQ ID NO: 47156 - DNA, 20 bp, synthetic construct
  source 1..20: mol_type = other DNA
ccaggtcctgggtcttgtcc

SEQ ID NO: 47157 - DNA, 20 bp, synthetic construct
  source 1..20: mol_type = other DNA
tgttgcagaggaagttctcc

SEQ ID NO: 47158 - DNA, 20 bp, synthetic construct
  source 1..20: mol_type = other DNA
gccaccagctgcagcctggg

SEQ ID NO: 47159 - DNA, 20 bp, synthetic construct
  source 1..20: mol_type = other DNA
gttctcagcatgggatcgga

SEQ ID NO: 47160 - DNA, 20 bp, synthetic construct
  source 1..20: mol_type = other DNA
ccagctgagccgtccgaggc

SEQ ID NO: 47161 - DNA, 20 bp, synthetic construct
  source 1..20: mol_type = other DNA
ttcccgttgggccaatccac

SEQ ID NO: 47162 - DNA, 20 bp, synthetic construct
  source 1..20: mol_type = other DNA
gctgtattcgttatccacgt

SEQ ID NO: 47163 - DNA, 20 bp, synthetic construct
  source 1..20: mol_type = other DNA
tctgcagtcgcttcctgcct

SEQ ID NO: 47164 - DNA, 20 bp, synthetic construct
  source 1..20: mol_type = other DNA
agagtccagtttgtatctgt

SEQ ID NO: 47165 - DNA, 20 bp, synthetic construct
  source 1..20: mol_type = other DNA
tctgttcatatacaaagagc

SEQ ID NO: 47166 - DNA, 20 bp, synthetic construct
  source 1..20: mol_type = other DNA
atcatggtagttgccttcct

SEQ ID NO: 47167 - DNA, 20 bp, synthetic construct
  source 1..20: mol_type = other DNA
tcgtagtaaatgatgtcttg

SEQ ID NO: 47168 - DNA, 20 bp, synthetic construct
  source 1..20: mol_type = other DNA
tgtctgcgggtcagggaggg

SEQ ID NO: 47169 - DNA, 20 bp, synthetic construct
  source 1..20: mol_type = other DNA
gcctcaggtagatcccacgc

SEQ ID NO: 47170 - DNA, 20 bp, synthetic construct
  source 1..20: mol_type = other DNA
cgtcttcggttccctggata

SEQ ID NO: 47171 - DNA, 20 bp, synthetic construct
  source 1..20: mol_type = other DNA
agtacatgatggagttgctc

SEQ ID NO: 47172 - DNA, 20 bp, synthetic construct
  source 1..20: mol_type = other DNA
ggcgccggtgttggtggtcg

SEQ ID NO: 47173 - DNA, 20 bp, synthetic construct
  source 1..20: mol_type = other DNA
cgagggctactatttctgct

SEQ ID NO: 47174 - DNA, 20 bp, synthetic construct
  source 1..20: mol_type = other DNA
gcgatggtgggcgccggtgt

SEQ ID NO: 47175 - DNA, 20 bp, synthetic construct
  source 1..20: mol_type = other DNA
ggactggcggcggcgccgcg

SEQ ID NO: 47176 - DNA, 20 bp, synthetic construct
  source 1..20: mol_type = other DNA
gcccttggccgggacttgtg

SEQ ID NO: 47177 - DNA, 20 bp, synthetic construct
  source 1..20: mol_type = other DNA
tctctcggcggaagtcgctc

SEQ ID NO: 47178 - DNA, 20 bp, synthetic construct
  source 1..20: mol_type = other DNA
ctactggctgagacagcgcc

SEQ ID NO: 47179 - DNA, 20 bp, synthetic construct
  source 1..20: mol_type = other DNA
ccacagccgcggccgcatcg

SEQ ID NO: 47180 - DNA, 20 bp, synthetic construct
  source 1..20: mol_type = other DNA
ccacgagttcctggccctct

SEQ ID NO: 47181 - DNA, 20 bp, synthetic construct
  source 1..20: mol_type = other DNA
atgcttgttctgtatccaga

SEQ ID NO: 47182 - DNA, 20 bp, synthetic construct
  source 1..20: mol_type = other DNA
gtctatcttattggtgacct

SEQ ID NO: 47183 - DNA, 20 bp, synthetic construct
  source 1..20: mol_type = other DNA
ggtggaggtctttccattct

SEQ ID NO: 47184 - DNA, 20 bp, synthetic construct
  source 1..20: mol_type = other DNA
gaaaagatcacttttctctt

SEQ ID NO: 47185 - DNA, 20 bp, synthetic construct
  source 1..20: mol_type = other DNA
tgtaccgactgtaagtataa

SEQ ID NO: 47186 - DNA, 20 bp, synthetic construct
  source 1..20: mol_type = other DNA
cgtgcgggtgcagaccggcg

SEQ ID NO: 47187 - DNA, 20 bp, synthetic construct
  source 1..20: mol_type = other DNA
acctagaagaaaaaacaaag

SEQ ID NO: 47188 - DNA, 20 bp, synthetic construct
  source 1..20: mol_type = other DNA
aatgaagaaagtccagacct

SEQ ID NO: 47189 - DNA, 20 bp, synthetic construct
  source 1..20: mol_type = other DNA
gatacctttatggtttcagt

SEQ ID NO: 47190 - DNA, 20 bp, synthetic construct
  source 1..20: mol_type = other DNA
gaccacgttggggtgctcga

SEQ ID NO: 47191 - DNA, 20 bp, synthetic construct
  source 1..20: mol_type = other DNA
acgaatgcgtggcggagatc

SEQ ID NO: 47192 - DNA, 20 bp, synthetic construct
  source 1..20: mol_type = other DNA
actaggcaaagacctacttc

SEQ ID NO: 47193 - DNA, 20 bp, synthetic construct
  source 1..20: mol_type = other DNA
ctaggccagtcttcttctcc

SEQ ID NO: 47194 - DNA, 20 bp, synthetic construct
  source 1..20: mol_type = other DNA
tcgagcaccccaacgtggtc

SEQ ID NO: 47195 - DNA, 20 bp, synthetic construct
  source 1..20: mol_type = other DNA
actccagagatccacggggg

SEQ ID NO: 47196 - DNA, 20 bp, synthetic construct
  source 1..20: mol_type = other DNA
gcgggtgcagaccggcgagg

SEQ ID NO: 47197 - DNA, 20 bp, synthetic construct
  source 1..20: mol_type = other DNA
aacactccagagatccacgg

SEQ ID NO: 47198 - DNA, 20 bp, synthetic construct
  source 1..20: mol_type = other DNA
ccagcagtacgaatgcgtgg

SEQ ID NO: 47199 - DNA, 20 bp, synthetic construct
  source 1..20: mol_type = other DNA
tgacgacctgcaatggcaag

SEQ ID NO: 47200 - DNA, 20 bp, synthetic construct
  source 1..20: mol_type = other DNA
ctggctcacctgaccacgtt

SEQ ID NO: 47201 - DNA, 20 bp, synthetic construct
  source 1..20: mol_type = other DNA
tccgcgaggtggcggtgctg

SEQ ID NO: 47202 - DNA, 20 bp, synthetic construct
  source 1..20: mol_type = other DNA
cgggtgcagaccggcgagga

SEQ ID NO: 47203 - DNA, 20 bp, synthetic construct
  source 1..20: mol_type = other DNA
ggtggcggtgctgaggcacc

SEQ ID NO: 47204 - DNA, 20 bp, synthetic construct
  source 1..20: mol_type = other DNA
tgaccagcagtacgaatgcg

SEQ ID NO: 47205 - DNA, 20 bp, synthetic construct
  source 1..20: mol_type = other DNA
cattgcaggtcgtcacgctg

SEQ ID NO: 47206 - DNA, 20 bp, synthetic construct
  source 1..20: mol_type = other DNA
tgtagcgtgattggactccc

SEQ ID NO: 47207 - DNA, 20 bp, synthetic construct
  source 1..20: mol_type = other DNA
cctggctcacctgaccacgt

SEQ ID NO: 47208 - DNA, 20 bp, synthetic construct
  source 1..20: mol_type = other DNA
ctggaagtatgggtgagaca

SEQ ID NO: 47209 - DNA, 20 bp, synthetic construct
  source 1..20: mol_type = other DNA
cgctacaaaagaaccacaca

SEQ ID NO: 47210 - DNA, 20 bp, synthetic construct
  source 1..20: mol_type = other DNA
taggccagtcttcttctcct

SEQ ID NO: 47211 - DNA, 20 bp, synthetic construct
  source 1..20: mol_type = other DNA
gtccagctacgccacccccg

SEQ ID NO: 47212 - DNA, 20 bp, synthetic construct
  source 1..20: mol_type = other DNA
ctggactggagcaagacttc

SEQ ID NO: 47213 - DNA, 20 bp, synthetic construct
  source 1..20: mol_type = other DNA
caacactccagagatccacg

SEQ ID NO: 47214 - DNA, 20 bp, synthetic construct
  source 1..20: mol_type = other DNA
gcctcagcaccgccacctcg

SEQ ID NO: 47215 - DNA, 20 bp, synthetic construct
  source 1..20: mol_type = other DNA
ctgggaagggcaacatctct

SEQ ID NO: 47216 - DNA, 20 bp, synthetic construct
  source 1..20: mol_type = other DNA
cacagcgtgacgacctgcaa

SEQ ID NO: 47217 - DNA, 20 bp, synthetic construct
  source 1..20: mol_type = other DNA
ccagatggctctaacctcag

SEQ ID NO: 47218 - DNA, 20 bp, synthetic construct
  source 1..20: mol_type = other DNA
cccgtggatctctggagtgt

SEQ ID NO: 47219 - DNA, 20 bp, synthetic construct
  source 1..20: mol_type = other DNA
cgcgcttcaacgccacgaaa

SEQ ID NO: 47220 - DNA, 20 bp, synthetic construct
  source 1..20: mol_type = other DNA
tggctcacctgaccacgttg

SEQ ID NO: 47221 - DNA, 20 bp, synthetic construct
  source 1..20: mol_type = other DNA
gctggactggagcaagactt

SEQ ID NO: 47222 - DNA, 20 bp, synthetic construct
  source 1..20: mol_type = other DNA
tgagcgcgtcttctgagggc

SEQ ID NO: 47223 - DNA, 20 bp, synthetic construct
  source 1..20: mol_type = other DNA
ctcgaacatggacgtcaggt

SEQ ID NO: 47224 - DNA, 20 bp, synthetic construct
  source 1..20: mol_type = other DNA
actcgaacatggacgtcagg

SEQ ID NO: 47225 - DNA, 20 bp, synthetic construct
  source 1..20: mol_type = other DNA
ccaaccgtgtggtgacactc

SEQ ID NO: 47226 - DNA, 20 bp, synthetic construct
  source 1..20: mol_type = other DNA
ctcaaactccgtctggttgg

SEQ ID NO: 47227 - DNA, 20 bp, synthetic construct
  source 1..20: mol_type = other DNA
aaactccgtctggttggtgg

SEQ ID NO: 47228 - DNA, 20 bp, synthetic construct
  source 1..20: mol_type = other DNA
tcaccacacggttggtgtag

SEQ ID NO: 47229 - DNA, 20 bp, synthetic construct
  source 1..20: mol_type = other DNA
tgatggaaaacgagaaggag

SEQ ID NO: 47230 - DNA, 20 bp, synthetic construct
  source 1..20: mol_type = other DNA
tccgtctggttggtggtggc

SEQ ID NO: 47231 - DNA, 20 bp, synthetic construct
  source 1..20: mol_type = other DNA
ggagagcatgcccttgaggt

SEQ ID NO: 47232 - DNA, 20 bp, synthetic construct
  source 1..20: mol_type = other DNA
tgatgcacccagcaccccac

SEQ ID NO: 47233 - DNA, 20 bp, synthetic construct
  source 1..20: mol_type = other DNA
cacctccctgcaggcggaaa

SEQ ID NO: 47234 - DNA, 20 bp, synthetic construct
  source 1..20: mol_type = other DNA
agacgcgctcaaactccgtc

SEQ ID NO: 47235 - DNA, 20 bp, synthetic construct
  source 1..20: mol_type = other DNA
gccccgtacctcaggggtga

SEQ ID NO: 47236 - DNA, 20 bp, synthetic construct
  source 1..20: mol_type = other DNA
gcgctcaaactccgtctggt

SEQ ID NO: 47237 - DNA, 20 bp, synthetic construct
  source 1..20: mol_type = other DNA
aatgtgcttatcactcgtga

SEQ ID NO: 47238 - DNA, 20 bp, synthetic construct
  source 1..20: mol_type = other DNA
gaacatggacgtcaggtggg

SEQ ID NO: 47239 - DNA, 20 bp, synthetic construct
  source 1..20: mol_type = other DNA
aggcaccttcgggtaaggct

SEQ ID NO: 47240 - DNA, 20 bp, synthetic construct
  source 1..20: mol_type = other DNA
cggctgggcaccggcggctt

SEQ ID NO: 47241 - DNA, 20 bp, synthetic construct
  source 1..20: mol_type = other DNA
atcatctgcagccatttacc

SEQ ID NO: 47242 - DNA, 20 bp, synthetic construct
  source 1..20: mol_type = other DNA
ccgttactcagggatatact

SEQ ID NO: 47243 - DNA, 20 bp, synthetic construct
  source 1..20: mol_type = other DNA
cgtgaaactggaataaatac

SEQ ID NO: 47244 - DNA, 20 bp, synthetic construct
  source 1..20: mol_type = other DNA
caattcttcaggaacatcac

SEQ ID NO: 47245 - DNA, 20 bp, synthetic construct
  source 1..20: mol_type = other DNA
aactagaaaacatacaaaat

SEQ ID NO: 47246 - DNA, 20 bp, synthetic construct
  source 1..20: mol_type = other DNA
tcatgaggcaaatgaggaac

SEQ ID NO: 47247 - DNA, 20 bp, synthetic construct
  source 1..20: mol_type = other DNA
aggagctgtttggtcatttg

SEQ ID NO: 47248 - DNA, 20 bp, synthetic construct
  source 1..20: mol_type = other DNA
acacagccactgttgattat

SEQ ID NO: 47249 - DNA, 20 bp, synthetic construct
  source 1..20: mol_type = other DNA
ttatacagctgcgtaaagtg

SEQ ID NO: 47250 - DNA, 20 bp, synthetic construct
  source 1..20: mol_type = other DNA
tcgacgaacactacgagtac

SEQ ID NO: 47251 - DNA, 20 bp, synthetic construct
  source 1..20: mol_type = other DNA
acggctgctggcagccgttc

SEQ ID NO: 47252 - DNA, 20 bp, synthetic construct
  source 1..20: mol_type = other DNA
actgcagatcatctcaaccc

SEQ ID NO: 47253 - DNA, 20 bp, synthetic construct
  source 1..20: mol_type = other DNA
gttgggcaggacccgggggt

SEQ ID NO: 47254 - DNA, 20 bp, synthetic construct
  source 1..20: mol_type = other DNA
tatatttgtaaatctttttc

SEQ ID NO: 47255 - DNA, 20 bp, synthetic construct
  source 1..20: mol_type = other DNA
ggccctgacatcccccctgc

SEQ ID NO: 47256 - DNA, 20 bp, synthetic construct
  source 1..20: mol_type = other DNA
gcagtgctggggacagagtg

SEQ ID NO: 47257 - DNA, 20 bp, synthetic construct
  source 1..20: mol_type = other DNA
aagacgttcagctgctgtcc

SEQ ID NO: 47258 - DNA, 20 bp, synthetic construct
  source 1..20: mol_type = other DNA
gcgccttctgcaccccagcc

SEQ ID NO: 47259 - DNA, 20 bp, synthetic construct
  source 1..20: mol_type = other DNA
gagaccccggtcacagacgc

SEQ ID NO: 47260 - DNA, 20 bp, synthetic construct
  source 1..20: mol_type = other DNA
tctgcaccccagcccggacc

SEQ ID NO: 47261 - DNA, 20 bp, synthetic construct
  source 1..20: mol_type = other DNA
tctctgtgaattcttttgca

SEQ ID NO: 47262 - DNA, 20 bp, synthetic construct
  source 1..20: mol_type = other DNA
caggcacacggccaccaggt

SEQ ID NO: 47263 - DNA, 20 bp, synthetic construct
  source 1..20: mol_type = other DNA
tggtgcgttccacctccacg

SEQ ID NO: 47264 - DNA, 20 bp, synthetic construct
  source 1..20: mol_type = other DNA
agacgttcagctgctgtcct

SEQ ID NO: 47265 - DNA, 20 bp, synthetic construct
  source 1..20: mol_type = other DNA
gcatgctggaaaaaagcaga

SEQ ID NO: 47266 - DNA, 20 bp, synthetic construct
  source 1..20: mol_type = other DNA
ccaagagttttttcaagcca

SEQ ID NO: 47267 - DNA, 20 bp, synthetic construct
  source 1..20: mol_type = other DNA
tctcttcgccgctcggcctc

SEQ ID NO: 47268 - DNA, 20 bp, synthetic construct
  source 1..20: mol_type = other DNA
cacaggaacagagcggctgc

SEQ ID NO: 47269 - DNA, 20 bp, synthetic construct
  source 1..20: mol_type = other DNA
gagccccgtgacgcccgcaa

SEQ ID NO: 47270 - DNA, 20 bp, synthetic construct
  source 1..20: mol_type = other DNA
gccgcaaggtggaggagctg

SEQ ID NO: 47271 - DNA, 20 bp, synthetic construct
  source 1..20: mol_type = other DNA
gcggcttctttcctctccac

SEQ ID NO: 47272 - DNA, 20 bp, synthetic construct
  source 1..20: mol_type = other DNA
gcaagccccttccacccgga

SEQ ID NO: 47273 - DNA, 20 bp, synthetic construct
  source 1..20: mol_type = other DNA
cgccttttgccgcttgcact

SEQ ID NO: 47274 - DNA, 20 bp, synthetic construct
  source 1..20: mol_type = other DNA
ctgcccgccctcgcgtcgcc

SEQ ID NO: 47275 - DNA, 20 bp, synthetic construct
  source 1..20: mol_type = other DNA
gcagcgagagggaccagttg

SEQ ID NO: 47276 - DNA, 20 bp, synthetic construct
  source 1..20: mol_type = other DNA
gcgtcgccggggcctcgggg

SEQ ID NO: 47277 - DNA, 20 bp, synthetic construct
  source 1..20: mol_type = other DNA
ggagggccaggcgcacctgg

SEQ ID NO: 47278 - DNA, 20 bp, synthetic construct
  source 1..20: mol_type = other DNA
cgaggcgttggaggagactg

SEQ ID NO: 47279 - DNA, 20 bp, synthetic construct
  source 1..20: mol_type = other DNA
cctgcagcggggagcgctcg

SEQ ID NO: 47280 - DNA, 20 bp, synthetic construct
  source 1..20: mol_type = other DNA
cagcggagcctggaagcgcc

SEQ ID NO: 47281 - DNA, 20 bp, synthetic construct
  source 1..20: mol_type = other DNA
accagcaggaggaggctggg

SEQ ID NO: 47282 - DNA, 20 bp, synthetic construct
  source 1..20: mol_type = other DNA
acgccaggctggaggagcgg

SEQ ID NO: 47283 - DNA, 20 bp, synthetic construct
  source 1..20: mol_type = other DNA
agttctctattatgcctgcc

SEQ ID NO: 47284 - DNA, 20 bp, synthetic construct
  source 1..20: mol_type = other DNA
ggcgctggagaggaggcttt

SEQ ID NO: 47285 - DNA, 20 bp, synthetic construct
  source 1..20: mol_type = other DNA
gtctcctccaacgcctcggg

SEQ ID NO: 47286 - DNA, 20 bp, synthetic construct
  source 1..20: mol_type = other DNA
ttaccctccgcagaaagtgg

SEQ ID NO: 47287 - DNA, 20 bp, synthetic construct
  source 1..20: mol_type = other DNA
gctggaacagcaggaggcgg

SEQ ID NO: 47288 - DNA, 20 bp, synthetic construct
  source 1..20: mol_type = other DNA
ctgctggtgttcgcgagctc

SEQ ID NO: 47289 - DNA, 20 bp, synthetic construct
  source 1..20: mol_type = other DNA
agaggcggaaagggcgccgc

SEQ ID NO: 47290 - DNA, 20 bp, synthetic construct
  source 1..20: mol_type = other DNA
agactactggcgagaactgg

SEQ ID NO: 47291 - DNA, 20 bp, synthetic construct
  source 1..20: mol_type = other DNA
atctggctcaggttgactgc

SEQ ID NO: 47292 - DNA, 20 bp, synthetic construct
  source 1..20: mol_type = other DNA
tagagaacttggcgtatcac

SEQ ID NO: 47293 - DNA, 20 bp, synthetic construct
  source 1..20: mol_type = other DNA
cttctcttctggcagagcag

SEQ ID NO: 47294 - DNA, 20 bp, synthetic construct
  source 1..20: mol_type = other DNA
aaagagagaagaaggggaca

SEQ ID NO: 47295 - DNA, 20 bp, synthetic construct
  source 1..20: mol_type = other DNA
cttctcctccaagcccagga

SEQ ID NO: 47296 - DNA, 20 bp, synthetic construct
  source 1..20: mol_type = other DNA
gcttcttctcctccaagccc

SEQ ID NO: 47297 - DNA, 20 bp, synthetic construct
  source 1..20: mol_type = other DNA
tggctgggatgatgccctca

SEQ ID NO: 47298 - DNA, 20 bp, synthetic construct
  source 1..20: mol_type = other DNA
ggttccacggcaagatcaca

SEQ ID NO: 47299 - DNA, 20 bp, synthetic construct
  source 1..20: mol_type = other DNA
cagccccaccttctctctca

SEQ ID NO: 47300 - DNA, 20 bp, synthetic construct
  source 1..20: mol_type = other DNA
tgcctggggcaggacgagag

SEQ ID NO: 47301 - DNA, 20 bp, synthetic construct
  source 1..20: mol_type = other DNA
ctgtgagtgaagcagcctct

SEQ ID NO: 47302 - DNA, 20 bp, synthetic construct
  source 1..20: mol_type = other DNA
agtggagaatttctgccatg

SEQ ID NO: 47303 - DNA, 20 bp, synthetic construct
  source 1..20: mol_type = other DNA
cgatgctgagcttgctggca

SEQ ID NO: 47304 - DNA, 20 bp, synthetic construct
  source 1..20: mol_type = other DNA
tacaagatggatgcccccga

SEQ ID NO: 47305 - DNA, 20 bp, synthetic construct
  source 1..20: mol_type = other DNA
cactgagtacatggccaagg

SEQ ID NO: 47306 - DNA, 20 bp, synthetic construct
  source 1..20: mol_type = other DNA
ccttcaggggctgtggccag

SEQ ID NO: 47307 - DNA, 20 bp, synthetic construct
  source 1..20: mol_type = other DNA
aggagtagatttcccagaga

SEQ ID NO: 47308 - DNA, 20 bp, synthetic construct
  source 1..20: mol_type = other DNA
ctggcagcttgcccgtgtcc

SEQ ID NO: 47309 - DNA, 20 bp, synthetic construct
  source 1..20: mol_type = other DNA
ggaacaggcctgtctccggc

SEQ ID NO: 47310 - DNA, 20 bp, synthetic construct
  source 1..20: mol_type = other DNA
gggcccagccgcctgtgggg

SEQ ID NO: 47311 - DNA, 20 bp, synthetic construct
  source 1..20: mol_type = other DNA
gctgctgcagaccatcggga

SEQ ID NO: 47312 - DNA, 20 bp, synthetic construct
  source 1..20: mol_type = other DNA
atgccgcagttgcctggggc

SEQ ID NO: 47313 - DNA, 20 bp, synthetic construct
  source 1..20: mol_type = other DNA
gcaatacattctgtaccgga

SEQ ID NO: 47314 - DNA, 20 bp, synthetic construct
  source 1..20: mol_type = other DNA
cactgcggtagaactcatcc

SEQ ID NO: 47315 - DNA, 20 bp, synthetic construct
  source 1..20: mol_type = other DNA
gtgtagtgctgcagggtgtg

SEQ ID NO: 47316 - DNA, 20 bp, synthetic construct
  source 1..20: mol_type = other DNA
tagaccgcaggtagtccaca

SEQ ID NO: 47317 - DNA, 20 bp, synthetic construct
  source 1..20: mol_type = other DNA
cagcaatacaggtaccacag

SEQ ID NO: 47318 - DNA, 20 bp, synthetic construct
  source 1..20: mol_type = other DNA
cactacacctcagacgcaga

SEQ ID NO: 47319 - DNA, 20 bp, synthetic construct
  source 1..20: mol_type = other DNA
ctggtacaaagccaaaaaca

SEQ ID NO: 47320 - DNA, 20 bp, synthetic construct
  source 1..20: mol_type = other DNA
gtacaaagccaaaaacaagg

SEQ ID NO: 47321 - DNA, 20 bp, synthetic construct
  source 1..20: mol_type = other DNA
tcactcacagcgagaacttg

SEQ ID NO: 47322 - DNA, 20 bp, synthetic construct
  source 1..20: mol_type = other DNA
ttgtaccagttggggtcctg

SEQ ID NO: 47323 - DNA, 20 bp, synthetic construct
  source 1..20: mol_type = other DNA
tcacggcatgaggctgagtt

SEQ ID NO: 47324 - DNA, 20 bp, synthetic construct
  source 1..20: mol_type = other DNA
acgcacagcgtgtagtctcc

SEQ ID NO: 47325 - DNA, 20 bp, synthetic construct
  source 1..20: mol_type = other DNA
actgagtacatggccaaggt

SEQ ID NO: 47326 - DNA, 20 bp, synthetic construct
  source 1..20: mol_type = other DNA
cgtcactgagtacatggcca

SEQ ID NO: 47327 - DNA, 20 bp, synthetic construct
  source 1..20: mol_type = other DNA
ggtgtagtgctgcagggtgt

SEQ ID NO: 47328 - DNA, 20 bp, synthetic construct
  source 1..20: mol_type = other DNA
tcacctccaccagctgcatg

SEQ ID NO: 47329 - DNA, 20 bp, synthetic construct
  source 1..20: mol_type = other DNA
ctgctgcagaccatcgggaa

SEQ ID NO: 47330 - DNA, 20 bp, synthetic construct
  source 1..20: mol_type = other DNA
tgccgtgagtaccacgagga

SEQ ID NO: 47331 - DNA, 20 bp, synthetic construct
  source 1..20: mol_type = other DNA
caggacctgcccttctgcaa

SEQ ID NO: 47332 - DNA, 20 bp, synthetic construct
  source 1..20: mol_type = other DNA
ctgcaaggcaggtgacacgt

SEQ ID NO: 47333 - DNA, 20 bp, synthetic construct
  source 1..20: mol_type = other DNA
tccgaactcccccttcccga

SEQ ID NO: 47334 - DNA, 20 bp, synthetic construct
  source 1..20: mol_type = other DNA
ccccactcacgtcatgactg

SEQ ID NO: 47335 - DNA, 20 bp, synthetic construct
  source 1..20: mol_type = other DNA
tgtagtgctgcagggtgtgg

SEQ ID NO: 47336 - DNA, 20 bp, synthetic construct
  source 1..20: mol_type = other DNA
tctaggggtcggtcagtgct

SEQ ID NO: 47337 - DNA, 20 bp, synthetic construct
  source 1..20: mol_type = other DNA
tacccccagagatgtctgcg

SEQ ID NO: 47338 - DNA, 20 bp, synthetic construct
  source 1..20: mol_type = other DNA
accaggaacaggcctgtctc

SEQ ID NO: 47339 - DNA, 20 bp, synthetic construct
  source 1..20: mol_type = other DNA
cgcacagcgtgtagtctccg

SEQ ID NO: 47340 - DNA, 20 bp, synthetic construct
  source 1..20: mol_type = other DNA
aggaacaggcctgtctccgg

SEQ ID NO: 47341 - DNA, 20 bp, synthetic construct
  source 1..20: mol_type = other DNA
ggaaccaactggggagcagc

SEQ ID NO: 47342 - DNA, 20 bp, synthetic construct
  source 1..20: mol_type = other DNA
tcgcagacatctctgggggt

SEQ ID NO: 47343 - DNA, 20 bp, synthetic construct
  source 1..20: mol_type = other DNA
cacaaggctcccctgggggc

SEQ ID NO: 47344 - DNA, 20 bp, synthetic construct
  source 1..20: mol_type = other DNA
ttgtagcccttctccacccg

SEQ ID NO: 47345 - DNA, 20 bp, synthetic construct
  source 1..20: mol_type = other DNA
gccgtgagtaccacgaggag

SEQ ID NO: 47346 - DNA, 20 bp, synthetic construct
  source 1..20: mol_type = other DNA
caagctcagcatcgacgagg

SEQ ID NO: 47347 - DNA, 20 bp, synthetic construct
  source 1..20: mol_type = other DNA
ctcagacaccagcacattgc

SEQ ID NO: 47348 - DNA, 20 bp, synthetic construct
  source 1..20: mol_type = other DNA
gaaccaactggggagcagca

SEQ ID NO: 47349 - DNA, 20 bp, synthetic construct
  source 1..20: mol_type = other DNA
gttccacggcaagatcacac

SEQ ID NO: 47350 - DNA, 20 bp, synthetic construct
  source 1..20: mol_type = other DNA
tcacgcccaggagctgcacc

SEQ ID NO: 47351 - DNA, 20 bp, synthetic construct
  source 1..20: mol_type = other DNA
tcatgactgaggcttcagcc

SEQ ID NO: 47352 - DNA, 20 bp, synthetic construct
  source 1..20: mol_type = other DNA
cagccaactacgtccagaag

SEQ ID NO: 47353 - DNA, 20 bp, synthetic construct
  source 1..20: mol_type = other DNA
gtcgtccctcgggtggagaa

SEQ ID NO: 47354 - DNA, 20 bp, synthetic construct
  source 1..20: mol_type = other DNA
acagagtccatctgcgtctg

SEQ ID NO: 47355 - DNA, 20 bp, synthetic construct
  source 1..20: mol_type = other DNA
cgggagagcaccaactaccc

SEQ ID NO: 47356 - DNA, 20 bp, synthetic construct
  source 1..20: mol_type = other DNA
cacgcacagcgtgtagtctc

SEQ ID NO: 47357 - DNA, 20 bp, synthetic construct
  source 1..20: mol_type = other DNA
gcagaagggcaggtcctgct

SEQ ID NO: 47358 - DNA, 20 bp, synthetic construct
  source 1..20: mol_type = other DNA
tacaggtaccacaggggtga

SEQ ID NO: 47359 - DNA, 20 bp, synthetic construct
  source 1..20: mol_type = other DNA
ccagaagcgggagggcgtga

SEQ ID NO: 47360 - DNA, 20 bp, synthetic construct
  source 1..20: mol_type = other DNA
cgactttggtctcaccaagg

SEQ ID NO: 47361 - DNA, 20 bp, synthetic construct
  source 1..20: mol_type = other DNA
atactcacaattcttggata

SEQ ID NO: 47362 - DNA, 20 bp, synthetic construct
  source 1..20: mol_type = other DNA
taccttggtgacggccacaa

SEQ ID NO: 47363 - DNA, 20 bp, synthetic construct
  source 1..20: mol_type = other DNA
cagcgactttggtctcacca

SEQ ID NO: 47364 - DNA, 20 bp, synthetic construct
  source 1..20: mol_type = other DNA
ctcagtcatgacgtgagtgg

SEQ ID NO: 47365 - DNA, 20 bp, synthetic construct
  source 1..20: mol_type = other DNA
tgacatcttctcaggagctc

SEQ ID NO: 47366 - DNA, 20 bp, synthetic construct
  source 1..20: mol_type = other DNA
aggtgtagtgctgcagggtg

SEQ ID NO: 47367 - DNA, 20 bp, synthetic construct
  source 1..20: mol_type = other DNA
taagaacgacgccactgccc

SEQ ID NO: 47368 - DNA, 20 bp, synthetic construct
  source 1..20: mol_type = other DNA
gtctaggggtcggtcagtgc

SEQ ID NO: 47369 - DNA, 20 bp, synthetic construct
  source 1..20: mol_type = other DNA
tgtagcccttctccacccga

SEQ ID NO: 47370 - DNA, 20 bp, synthetic construct
  source 1..20: mol_type = other DNA
gccgtcacaggtgcagctcg

SEQ ID NO: 47371 - DNA, 20 bp, synthetic construct
  source 1..20: mol_type = other DNA
cttctagttctgcctcctct

SEQ ID NO: 47372 - DNA, 20 bp, synthetic construct
  source 1..20: mol_type = other DNA
tacattttggggtccttaaa

SEQ ID NO: 47373 - DNA, 20 bp, synthetic construct
  source 1..20: mol_type = other DNA
accttaataaaattatatct

SEQ ID NO: 47374 - DNA, 20 bp, synthetic construct
  source 1..20: mol_type = other DNA
aaatgtacaagactgctgga

SEQ ID NO: 47375 - DNA, 20 bp, synthetic construct
  source 1..20: mol_type = other DNA
taaaatggtattctcatctc

SEQ ID NO: 47376 - DNA, 20 bp, synthetic construct
  source 1..20: mol_type = other DNA
taatcttgtatctagaatcc

SEQ ID NO: 47377 - DNA, 20 bp, synthetic construct
  source 1..20: mol_type = other DNA
gggttaagccaagtaactgt

SEQ ID NO: 47378 - DNA, 20 bp, synthetic construct
  source 1..20: mol_type = other DNA
aggaatatatgaaatctatt

SEQ ID NO: 47379 - DNA, 20 bp, synthetic construct
  source 1..20: mol_type = other DNA
tttttcatatattcagtaac

SEQ ID NO: 47380 - DNA, 20 bp, synthetic construct
  source 1..20: mol_type = other DNA
gaatcctgttgactatatcc

SEQ ID NO: 47381 - DNA, 20 bp, synthetic construct
  source 1..20: mol_type = other DNA
gaatgatcatcaaacagcta

SEQ ID NO: 47382 - DNA, 20 bp, synthetic construct
  source 1..20: mol_type = other DNA
cttacctggatatagtcaac

SEQ ID NO: 47383 - DNA, 20 bp, synthetic construct
  source 1..20: mol_type = other DNA
ttctacttagccaaacacag

SEQ ID NO: 47384 - DNA, 20 bp, synthetic construct
  source 1..20: mol_type = other DNA
gcagcacaatgttctagtag

SEQ ID NO: 47385 - DNA, 20 bp, synthetic construct
  source 1..20: mol_type = other DNA
gccctacagtccctcgcctg

SEQ ID NO: 47386 - DNA, 20 bp, synthetic construct
  source 1..20: mol_type = other DNA
tatatacttacacatcttga

SEQ ID NO: 47387 - DNA, 20 bp, synthetic construct
  source 1..20: mol_type = other DNA
tgagaggtattcaggagacc

SEQ ID NO: 47388 - DNA, 20 bp, synthetic construct
  source 1..20: mol_type = other DNA
tttacataggtatctttagg

SEQ ID NO: 47389 - DNA, 20 bp, synthetic construct
  source 1..20: mol_type = other DNA
atccagcgtaagaataacag

SEQ ID NO: 47390 - DNA, 20 bp, synthetic construct
  source 1..20: mol_type = other DNA
ttcaaacgctaaatcaagct

SEQ ID NO: 47391 - DNA, 20 bp, synthetic construct
  source 1..20: mol_type = other DNA
tgacatccacattcagtctg

SEQ ID NO: 47392 - DNA, 20 bp, synthetic construct
  source 1..20: mol_type = other DNA
tttttatagttgaacgcatg

SEQ ID NO: 47393 - DNA, 20 bp, synthetic construct
  source 1..20: mol_type = other DNA
aagaaagaaaaggaaatgaa

SEQ ID NO: 47394 - DNA, 20 bp, synthetic construct
  source 1..20: mol_type = other DNA
cttttctttcttcatcttct

SEQ ID NO: 47395 - DNA, 20 bp, synthetic construct
  source 1..20: mol_type = other DNA
gaactgcaagacaggaagag

SEQ ID NO: 47396 - DNA, 20 bp, synthetic construct
  source 1..20: mol_type = other DNA
ttgcagaaaaaagcaatgtt

SEQ ID NO: 47397 - DNA, 20 bp, synthetic construct
  source 1..20: mol_type = other DNA
agaatatcagttagtacaag

SEQ ID NO: 47398 - DNA, 20 bp, synthetic construct
  source 1..20: mol_type = other DNA
ggaaaactccgtagtgacgc

SEQ ID NO: 47399 - DNA, 20 bp, synthetic construct
  source 1..20: mol_type = other DNA
tgctcattgctgttgggcga

SEQ ID NO: 47400 - DNA, 20 bp, synthetic construct
  source 1..20: mol_type = other DNA
agctgcaggaggagaaggag

SEQ ID NO: 47401 - DNA, 20 bp, synthetic construct
  source 1..20: mol_type = other DNA
aattgagcctggaggtgaga

SEQ ID NO: 47402 - DNA, 20 bp, synthetic construct
  source 1..20: mol_type = other DNA
gatggagctgaaggaggagg

SEQ ID NO: 47403 - DNA, 20 bp, synthetic construct
  source 1..20: mol_type = other DNA
tggcctggcgcagttttctc

SEQ ID NO: 47404 - DNA, 20 bp, synthetic construct
  source 1..20: mol_type = other DNA
agcaggagcgctacatcgaa

SEQ ID NO: 47405 - DNA, 20 bp, synthetic construct
  source 1..20: mol_type = other DNA
gagggcacctgagaaggaac

SEQ ID NO: 47406 - DNA, 20 bp, synthetic construct
  source 1..20: mol_type = other DNA
gcaggagctggagctgctgc

SEQ ID NO: 47407 - DNA, 20 bp, synthetic construct
  source 1..20: mol_type = other DNA
ctaaagcgcctgacccgctg

SEQ ID NO: 47408 - DNA, 20 bp, synthetic construct
  source 1..20: mol_type = other DNA
ctacatcgaacgggcgcagc

SEQ ID NO: 47409 - DNA, 20 bp, synthetic construct
  source 1..20: mol_type = other DNA
tgtcccggcccacgccccgc

SEQ ID NO: 47410 - DNA, 20 bp, synthetic construct
  source 1..20: mol_type = other DNA
ggccgagcggctgctgcagg

SEQ ID NO: 47411 - DNA, 20 bp, synthetic construct
  source 1..20: mol_type = other DNA
acatgcagcgctttccgtcg

SEQ ID NO: 47412 - DNA, 20 bp, synthetic construct
  source 1..20: mol_type = other DNA
ggcgctttagggaggagtca

SEQ ID NO: 47413 - DNA, 20 bp, synthetic construct
  source 1..20: mol_type = other DNA
cctaaaaccatggaggaggg

SEQ ID NO: 47414 - DNA, 20 bp, synthetic construct
  source 1..20: mol_type = other DNA
tctctagattgttggtgacg

SEQ ID NO: 47415 - DNA, 20 bp, synthetic construct
  source 1..20: mol_type = other DNA
ttgttggtgacgcggttggc

SEQ ID NO: 47416 - DNA, 20 bp, synthetic construct
  source 1..20: mol_type = other DNA
tctcaggctccgattattca

SEQ ID NO: 47417 - DNA, 20 bp, synthetic construct
  source 1..20: mol_type = other DNA
caggtgagaggagcagcctt

SEQ ID NO: 47418 - DNA, 20 bp, synthetic construct
  source 1..20: mol_type = other DNA
ccacgatgactgcctgcaag

SEQ ID NO: 47419 - DNA, 20 bp, synthetic construct
  source 1..20: mol_type = other DNA
aagctgagtgggtccgggct

SEQ ID NO: 47420 - DNA, 20 bp, synthetic construct
  source 1..20: mol_type = other DNA
ctgtacccgcagagcctcag

SEQ ID NO: 47421 - DNA, 20 bp, synthetic construct
  source 1..20: mol_type = other DNA
gcagggctttcatggcacac

SEQ ID NO: 47422 - DNA, 20 bp, synthetic construct
  source 1..20: mol_type = other DNA
gtacagcttgaaggtgactg

SEQ ID NO: 47423 - DNA, 20 bp, synthetic construct
  source 1..20: mol_type = other DNA
ctccagaagggaaaagtagc

SEQ ID NO: 47424 - DNA, 20 bp, synthetic construct
  source 1..20: mol_type = other DNA
agctgagtgggtccgggctg

SEQ ID NO: 47425 - DNA, 20 bp, synthetic construct
  source 1..20: mol_type = other DNA
agtggctgaatacctggatt

SEQ ID NO: 47426 - DNA, 20 bp, synthetic construct
  source 1..20: mol_type = other DNA
accgctgtcagaaaaagatc

SEQ ID NO: 47427 - DNA, 20 bp, synthetic construct
  source 1..20: mol_type = other DNA
taaaggatggtcctgagata

SEQ ID NO: 47428 - DNA, 20 bp, synthetic construct
  source 1..20: mol_type = other DNA
gctggagggtgcaattgaga

SEQ ID NO: 47429 - DNA, 20 bp, synthetic construct
  source 1..20: mol_type = other DNA
agccggattttggtgtgtgg

SEQ ID NO: 47430 - DNA, 20 bp, synthetic construct
  source 1..20: mol_type = other DNA
ctcaacatgcaaaaagctgg

SEQ ID NO: 47431 - DNA, 20 bp, synthetic construct
  source 1..20: mol_type = other DNA
agatcatttccagtacccag

SEQ ID NO: 47432 - DNA, 20 bp, synthetic construct
  source 1..20: mol_type = other DNA
caaggtccaatcacatgtgt

SEQ ID NO: 47433 - DNA, 20 bp, synthetic construct
  source 1..20: mol_type = other DNA
gcatgggcatctggttcttg

SEQ ID NO: 47434 - DNA, 20 bp, synthetic construct
  source 1..20: mol_type = other DNA
gccaagtctcggaaggacat

SEQ ID NO: 47435 - DNA, 20 bp, synthetic construct
  source 1..20: mol_type = other DNA
cagcactagcagtggcacgg

SEQ ID NO: 47436 - DNA, 20 bp, synthetic construct
  source 1..20: mol_type = other DNA
tatcctacagatgatgcgag

SEQ ID NO: 47437 - DNA, 20 bp, synthetic construct
  source 1..20: mol_type = other DNA
tccgtcgtccttcagagtct

SEQ ID NO: 47438 - DNA, 20 bp, synthetic construct
  source 1..20: mol_type = other DNA
cacggacagaaatgggatcc

SEQ ID NO: 47439 - DNA, 20 bp, synthetic construct
  source 1..20: mol_type = other DNA
agcacatgtggaggcccaag

SEQ ID NO: 47440 - DNA, 20 bp, synthetic construct
  source 1..20: mol_type = other DNA
gctcttcgaggatggcgaga

SEQ ID NO: 47441 - DNA, 20 bp, synthetic construct
  source 1..20: mol_type = other DNA
ctccgtcaatttgcatggga

SEQ ID NO: 47442 - DNA, 20 bp, synthetic construct
  source 1..20: mol_type = other DNA
gtgcgaggaggctgtgagtc

SEQ ID NO: 47443 - DNA, 20 bp, synthetic construct
  source 1..20: mol_type = other DNA
tccgtcaatttgcatgggaa

SEQ ID NO: 47444 - DNA, 20 bp, synthetic construct
  source 1..20: mol_type = other DNA
ctggccgaccaccctccaga

SEQ ID NO: 47445 - DNA, 20 bp, synthetic construct
  source 1..20: mol_type = other DNA
tagaggcatcctggagagtt

SEQ ID NO: 47446 - DNA, 20 bp, synthetic construct
  source 1..20: mol_type = other DNA
tgcgaggaggctgtgagtcc

SEQ ID NO: 47447 - DNA, 20 bp, synthetic construct
  source 1..20: mol_type = other DNA
gtgttcaacctcctaaagga

SEQ ID NO: 47448 - DNA, 20 bp, synthetic construct
  source 1..20: mol_type = other DNA
tcgcacagattgcagtagac

SEQ ID NO: 47449 - DNA, 20 bp, synthetic construct
  source 1..20: mol_type = other DNA
caccttcaagctgtacgaca

SEQ ID NO: 47450 - DNA, 20 bp, synthetic construct
  source 1..20: mol_type = other DNA
ctgacagcggtcgcagcgcc

SEQ ID NO: 47451 - DNA, 20 bp, synthetic construct
  source 1..20: mol_type = other DNA
cttaggtctggggacgaagt

SEQ ID NO: 47452 - DNA, 20 bp, synthetic construct
  source 1..20: mol_type = other DNA
ttggagccaccatgcatgct

SEQ ID NO: 47453 - DNA, 20 bp, synthetic construct
  source 1..20: mol_type = other DNA
gatcttgatctggaagggaa

SEQ ID NO: 47454 - DNA, 20 bp, synthetic construct
  source 1..20: mol_type = other DNA
ctgctacttttcccttctgg

SEQ ID NO: 47455 - DNA, 20 bp, synthetic construct
  source 1..20: mol_type = other DNA
agtctcttgtcacttaggtc

SEQ ID NO: 47456 - DNA, 20 bp, synthetic construct
  source 1..20: mol_type = other DNA
ttcacaaggcagggctttca

SEQ ID NO: 47457 - DNA, 20 bp, synthetic construct
  source 1..20: mol_type = other DNA
ctcccaaactgacctctagg

SEQ ID NO: 47458 - DNA, 20 bp, synthetic construct
  source 1..20: mol_type = other DNA
gagtggctgaatacctggat

SEQ ID NO: 47459 - DNA, 20 bp, synthetic construct
  source 1..20: mol_type = other DNA
acgacggacagcacatgtgg

SEQ ID NO: 47460 - DNA, 20 bp, synthetic construct
  source 1..20: mol_type = other DNA
gaaggtgatctcagagcact

SEQ ID NO: 47461 - DNA, 20 bp, synthetic construct
  source 1..20: mol_type = other DNA
gcataggtgctgacttcaca

SEQ ID NO: 47462 - DNA, 20 bp, synthetic construct
  source 1..20: mol_type = other DNA
tgaagaatctgagcacagag

SEQ ID NO: 47463 - DNA, 20 bp, synthetic construct
  source 1..20: mol_type = other DNA
tgatgatttgaaaggggact

SEQ ID NO: 47464 - DNA, 20 bp, synthetic construct
  source 1..20: mol_type = other DNA
agagaccattggtcagtgca

SEQ ID NO: 47465 - DNA, 20 bp, synthetic construct
  source 1..20: mol_type = other DNA
ccaacctctggggtgatacc

SEQ ID NO: 47466 - DNA, 20 bp, synthetic construct
  source 1..20: mol_type = other DNA
taatcggagcctgagacaaa

SEQ ID NO: 47467 - DNA, 20 bp, synthetic construct
  source 1..20: mol_type = other DNA
gacaaagacgagaagtgggt

SEQ ID NO: 47468 - DNA, 20 bp, synthetic construct
  source 1..20: mol_type = other DNA
gaaccagatgcccatgctca

SEQ ID NO: 47469 - DNA, 20 bp, synthetic construct
  source 1..20: mol_type = other DNA
tgtccttcataacctaggag

SEQ ID NO: 47470 - DNA, 20 bp, synthetic construct
  source 1..20: mol_type = other DNA
ctcgcacccacacatgtgat

SEQ ID NO: 47471 - DNA, 20 bp, synthetic construct
  source 1..20: mol_type = other DNA
gtccttccgagacttggcat

SEQ ID NO: 47472 - DNA, 20 bp, synthetic construct
  source 1..20: mol_type = other DNA
ccacacatgtgattggacct

SEQ ID NO: 47473 - DNA, 20 bp, synthetic construct
  source 1..20: mol_type = other DNA
ctgcgatgccttctagggac

SEQ ID NO: 47474 - DNA, 20 bp, synthetic construct
  source 1..20: mol_type = other DNA
tgatcttgatctggaaggga

SEQ ID NO: 47475 - DNA, 20 bp, synthetic construct
  source 1..20: mol_type = other DNA
gatgcgagtggctgaatacc

SEQ ID NO: 47476 - DNA, 20 bp, synthetic construct
  source 1..20: mol_type = other DNA
ttaggtctggggacgaagta

SEQ ID NO: 47477 - DNA, 20 bp, synthetic construct
  source 1..20: mol_type = other DNA
ttccagagcaccctgtgtgt

SEQ ID NO: 47478 - DNA, 20 bp, synthetic construct
  source 1..20: mol_type = other DNA
cattaaagactgtgcagaac

SEQ ID NO: 47479 - DNA, 20 bp, synthetic construct
  source 1..20: mol_type = other DNA
ctcgctgaagtcttcggtga

SEQ ID NO: 47480 - DNA, 20 bp, synthetic construct
  source 1..20: mol_type = other DNA
cctcgtgaccaagtttaaaa

SEQ ID NO: 47481 - DNA, 20 bp, synthetic construct
  source 1..20: mol_type = other DNA
gcaggacctgggcgtgacca

SEQ ID NO: 47482 - DNA, 20 bp, synthetic construct
  source 1..20: mol_type = other DNA
attcgatgacaagattctgg

SEQ ID NO: 47483 - DNA, 20 bp, synthetic construct
  source 1..20: mol_type = other DNA
tcacctctgggggacagagg

SEQ ID NO: 47484 - DNA, 20 bp, synthetic construct
  source 1..20: mol_type = other DNA
gcacccagagaagtgcaggt

SEQ ID NO: 47485 - DNA, 20 bp, synthetic construct
  source 1..20: mol_type = other DNA
tctccgacagttcacctctg

SEQ ID NO: 47486 - DNA, 20 bp, synthetic construct
  source 1..20: mol_type = other DNA
gccgccactcacttgggtac

SEQ ID NO: 47487 - DNA, 20 bp, synthetic construct
  source 1..20: mol_type = other DNA
gatcttgtggacgctgtgct

SEQ ID NO: 47488 - DNA, 20 bp, synthetic construct
  source 1..20: mol_type = other DNA
caccaaatgcacctgaggga

SEQ ID NO: 47489 - DNA, 20 bp, synthetic construct
  source 1..20: mol_type = other DNA
atggggagccttgggcccaa

SEQ ID NO: 47490 - DNA, 20 bp, synthetic construct
  source 1..20: mol_type = other DNA
tgcagactatgggaagggat

SEQ ID NO: 47491 - DNA, 20 bp, synthetic construct
  source 1..20: mol_type = other DNA
tgctgagaacagaaaggaga

SEQ ID NO: 47492 - DNA, 20 bp, synthetic construct
  source 1..20: mol_type = other DNA
agccaacccaaggtgcccgg

SEQ ID NO: 47493 - DNA, 20 bp, synthetic construct
  source 1..20: mol_type = other DNA
ttttacctcgtagggttctc

SEQ ID NO: 47494 - DNA, 20 bp, synthetic construct
  source 1..20: mol_type = other DNA
ggaggccagcaccaccctcc

SEQ ID NO: 47495 - DNA, 20 bp, synthetic construct
  source 1..20: mol_type = other DNA
tacaggattggaaatgcctt

SEQ ID NO: 47496 - DNA, 20 bp, synthetic construct
  source 1..20: mol_type = other DNA
ttcacccagggactcttcac

SEQ ID NO: 47497 - DNA, 20 bp, synthetic construct
  source 1..20: mol_type = other DNA
tttccacctttggaaagaac

SEQ ID NO: 47498 - DNA, 20 bp, synthetic construct
  source 1..20: mol_type = other DNA
ggagtgttgcctttgggtac

SEQ ID NO: 47499 - DNA, 20 bp, synthetic construct
  source 1..20: mol_type = other DNA
atatccatctctatgatcac

SEQ ID NO: 47500 - DNA, 20 bp, synthetic construct
  source 1..20: mol_type = other DNA
tctctaggatctgaggaagt

SEQ ID NO: 47501 - DNA, 20 bp, synthetic construct
  source 1..20: mol_type = other DNA
ctcaggaggccgcgcgcgcc

SEQ ID NO: 47502 - DNA, 20 bp, synthetic construct
  source 1..20: mol_type = other DNA
cgtgctgacagacagggggc

SEQ ID NO: 47503 - DNA, 20 bp, synthetic construct
  source 1..20: mol_type = other DNA
ggacaccacggtggctgcaa

SEQ ID NO: 47504 - DNA, 20 bp, synthetic construct
  source 1..20: mol_type = other DNA
gttctgtgctgtctgccgca

SEQ ID NO: 47505 - DNA, 20 bp, synthetic construct
  source 1..20: mol_type = other DNA
tgcaggtggacggggagccc

SEQ ID NO: 47506 - DNA, 20 bp, synthetic construct
  source 1..20: mol_type = other DNA
gcagagccccccaaggtaca

SEQ ID NO: 47507 - DNA, 20 bp, synthetic construct
  source 1..20: mol_type = other DNA
cccgtccacctgcaccgggg

SEQ ID NO: 47508 - DNA, 20 bp, synthetic construct
  source 1..20: mol_type = other DNA
acaaggaggggacagctgtc

SEQ ID NO: 47509 - DNA, 20 bp, synthetic construct
  source 1..20: mol_type = other DNA
gcaagttcacaagcaggtac

SEQ ID NO: 47510 - DNA, 20 bp, synthetic construct
  source 1..20: mol_type = other DNA
agggcacctgggagaacagg

SEQ ID NO: 47511 - DNA, 20 bp, synthetic construct
  source 1..20: mol_type = other DNA
cacccatcaccaccactggc

SEQ ID NO: 47512 - DNA, 20 bp, synthetic construct
  source 1..20: mol_type = other DNA
tctgtggccatcctgcccct

SEQ ID NO: 47513 - DNA, 20 bp, synthetic construct
  source 1..20: mol_type = other DNA
ccagcacggggctgcaggcc

SEQ ID NO: 47514 - DNA, 20 bp, synthetic construct
  source 1..20: mol_type = other DNA
ctacaggatcgaccgagccc

SEQ ID NO: 47515 - DNA, 20 bp, synthetic construct
  source 1..20: mol_type = other DNA
agtagttgttgaagacatcc

SEQ ID NO: 47516 - DNA, 20 bp, synthetic construct
  source 1..20: mol_type = other DNA
cttggcccgaaccctcaact

SEQ ID NO: 47517 - DNA, 20 bp, synthetic construct
  source 1..20: mol_type = other DNA
agaggatccagcccacctgg

SEQ ID NO: 47518 - DNA, 20 bp, synthetic construct
  source 1..20: mol_type = other DNA
catcacactggaggcgggcg

SEQ ID NO: 47519 - DNA, 20 bp, synthetic construct
  source 1..20: mol_type = other DNA
ccccgcacgccaggatccgc

SEQ ID NO: 47520 - DNA, 20 bp, synthetic construct
  source 1..20: mol_type = other DNA
gtacacagacgacgccagga

SEQ ID NO: 47521 - DNA, 20 bp, synthetic construct
  source 1..20: mol_type = other DNA
tgcaggtgaagagctgattg

SEQ ID NO: 47522 - DNA, 20 bp, synthetic construct
  source 1..20: mol_type = other DNA
tgttcaggaaaacaacacac

SEQ ID NO: 47523 - DNA, 20 bp, synthetic construct
  source 1..20: mol_type = other DNA
gtgggacgtactcgctgtgc

SEQ ID NO: 47524 - DNA, 20 bp, synthetic construct
  source 1..20: mol_type = other DNA
ctgaacatccccaggtgagg

SEQ ID NO: 47525 - DNA, 20 bp, synthetic construct
  source 1..20: mol_type = other DNA
ggtggggagaggggaagtgg

SEQ ID NO: 47526 - DNA, 20 bp, synthetic construct
  source 1..20: mol_type = other DNA
tcaagtccattccatcacac

SEQ ID NO: 47527 - DNA, 20 bp, synthetic construct
  source 1..20: mol_type = other DNA
cacactggaggcgggcgggg

SEQ ID NO: 47528 - DNA, 20 bp, synthetic construct
  source 1..20: mol_type = other DNA
gcatgacgacggctacctcg

SEQ ID NO: 47529 - DNA, 20 bp, synthetic construct
  source 1..20: mol_type = other DNA
agaagagggcatccttcaag

SEQ ID NO: 47530 - DNA, 20 bp, synthetic construct
  source 1..20: mol_type = other DNA
ccagcaggggcttcatgagc

SEQ ID NO: 47531 - DNA, 20 bp, synthetic construct
  source 1..20: mol_type = other DNA
ccacgtggaggaggggaacg

SEQ ID NO: 47532 - DNA, 20 bp, synthetic construct
  source 1..20: mol_type = other DNA
tggcttcaccatgacgtcgt

SEQ ID NO: 47533 - DNA, 20 bp, synthetic construct
  source 1..20: mol_type = other DNA
ctgactcctagccacgggat

SEQ ID NO: 47534 - DNA, 20 bp, synthetic construct
  source 1..20: mol_type = other DNA
ccacctggatcctccgcgcc

SEQ ID NO: 47535 - DNA, 20 bp, synthetic construct
  source 1..20: mol_type = other DNA
agctgtctgtgggagacaga

SEQ ID NO: 47536 - DNA, 20 bp, synthetic construct
  source 1..20: mol_type = other DNA
ccaggggcaggatggcaaca

SEQ ID NO: 47537 - DNA, 20 bp, synthetic construct
  source 1..20: mol_type = other DNA
gggacgtactcgctgtgcag

SEQ ID NO: 47538 - DNA, 20 bp, synthetic construct
  source 1..20: mol_type = other DNA
ggcaactggaaaaaggtcaa

SEQ ID NO: 47539 - DNA, 20 bp, synthetic construct
  source 1..20: mol_type = other DNA
ccacaggccgcgctgcaggt

SEQ ID NO: 47540 - DNA, 20 bp, synthetic construct
  source 1..20: mol_type = other DNA
ggcacggtgagctccccgca

SEQ ID NO: 47541 - DNA, 20 bp, synthetic construct
  source 1..20: mol_type = other DNA
gctcaggtcgaagacttgtc

SEQ ID NO: 47542 - DNA, 20 bp, synthetic construct
  source 1..20: mol_type = other DNA
ccaggtgggcgggatgacca

SEQ ID NO: 47543 - DNA, 20 bp, synthetic construct
  source 1..20: mol_type = other DNA
ctgggtggagacaagcagtg

SEQ ID NO: 47544 - DNA, 20 bp, synthetic construct
  source 1..20: mol_type = other DNA
ccaagtcgttgccagtaccc

SEQ ID NO: 47545 - DNA, 20 bp, synthetic construct
  source 1..20: mol_type = other DNA
tcaaagtcgtggtgctcccc

SEQ ID NO: 47546 - DNA, 20 bp, synthetic construct
  source 1..20: mol_type = other DNA
tgaagcaggacaccttgctg

SEQ ID NO: 47547 - DNA, 20 bp, synthetic construct
  source 1..20: mol_type = other DNA
tgtggaaggtgaacttctgc

SEQ ID NO: 47548 - DNA, 20 bp, synthetic construct
  source 1..20: mol_type = other DNA
gttctacgccggggtgagtg

SEQ ID NO: 47549 - DNA, 20 bp, synthetic construct
  source 1..20: mol_type = other DNA
gacgccaggacggcaagtgt

SEQ ID NO: 47550 - DNA, 20 bp, synthetic construct
  source 1..20: mol_type = other DNA
cctgggtactggcaacgact

SEQ ID NO: 47551 - DNA, 20 bp, synthetic construct
  source 1..20: mol_type = other DNA
tgacgtgggcgtcaaagccc

SEQ ID NO: 47552 - DNA, 20 bp, synthetic construct
  source 1..20: mol_type = other DNA
tttgcaccctggatgggatg

SEQ ID NO: 47553 - DNA, 20 bp, synthetic construct
  source 1..20: mol_type = other DNA
tgaacatccccaggtgagga

SEQ ID NO: 47554 - DNA, 20 bp, synthetic construct
  source 1..20: mol_type = other DNA
ctaggagtcagcgacatatg

SEQ ID NO: 47555 - DNA, 20 bp, synthetic construct
  source 1..20: mol_type = other DNA
tcgagactcgtggaactcca

SEQ ID NO: 47556 - DNA, 20 bp, synthetic construct
  source 1..20: mol_type = other DNA
agttccacgagtctcgaggt

SEQ ID NO: 47557 - DNA, 20 bp, synthetic construct
  source 1..20: mol_type = other DNA
gcatgctgacgcgactcacc

SEQ ID NO: 47558 - DNA, 20 bp, synthetic construct
  source 1..20: mol_type = other DNA
agctctaggtcactgtctcc

SEQ ID NO: 47559 - DNA, 20 bp, synthetic construct
  source 1..20: mol_type = other DNA
catggtggcctggttgcgca

SEQ ID NO: 47560 - DNA, 20 bp, synthetic construct
  source 1..20: mol_type = other DNA
tttctggcatgtcggggact

SEQ ID NO: 47561 - DNA, 20 bp, synthetic construct
  source 1..20: mol_type = other DNA
accagcaggggcttcatgag

SEQ ID NO: 47562 - DNA, 20 bp, synthetic construct
  source 1..20: mol_type = other DNA
caggggcttcatgagcgggg

SEQ ID NO: 47563 - DNA, 20 bp, synthetic construct
  source 1..20: mol_type = other DNA
acggcaagtgtcggcactgt

SEQ ID NO: 47564 - DNA, 20 bp, synthetic construct
  source 1..20: mol_type = other DNA
cgtggaactccagggtgacg

SEQ ID NO: 47565 - DNA, 20 bp, synthetic construct
  source 1..20: mol_type = other DNA
ggagaggatccagcccacct

SEQ ID NO: 47566 - DNA, 20 bp, synthetic construct
  source 1..20: mol_type = other DNA
gccagtacccaggggcagga

SEQ ID NO: 47567 - DNA, 20 bp, synthetic construct
  source 1..20: mol_type = other DNA
tcttcgacctgagccaggga

SEQ ID NO: 47568 - DNA, 20 bp, synthetic construct
  source 1..20: mol_type = other DNA
ccactgccagccgcttctac

SEQ ID NO: 47569 - DNA, 20 bp, synthetic construct
  source 1..20: mol_type = other DNA
cccactcaccaacgacgtca

SEQ ID NO: 47570 - DNA, 20 bp, synthetic construct
  source 1..20: mol_type = other DNA
tggtgcaagcaggcagtgag

SEQ ID NO: 47571 - DNA, 20 bp, synthetic construct
  source 1..20: mol_type = other DNA
gctcgccatccacctgcacc

SEQ ID NO: 47572 - DNA, 20 bp, synthetic construct
  source 1..20: mol_type = other DNA
tcccccagccaacctttgta

SEQ ID NO: 47573 - DNA, 20 bp, synthetic construct
  source 1..20: mol_type = other DNA
gagcccaggtgagcgattgc

SEQ ID NO: 47574 - DNA, 20 bp, synthetic construct
  source 1..20: mol_type = other DNA
ccgcacagtacctgcaaagg

SEQ ID NO: 47575 - DNA, 20 bp, synthetic construct
  source 1..20: mol_type = other DNA
cgttgccagtacccaggggc

SEQ ID NO: 47576 - DNA, 20 bp, synthetic construct
  source 1..20: mol_type = other DNA
tacccagtggtgccgtacaa

SEQ ID NO: 47577 - DNA, 20 bp, synthetic construct
  source 1..20: mol_type = other DNA
cggggacttctgctacgttg

SEQ ID NO: 47578 - DNA, 20 bp, synthetic construct
  source 1..20: mol_type = other DNA
acctggatgcgcaactgctc

SEQ ID NO: 47579 - DNA, 20 bp, synthetic construct
  source 1..20: mol_type = other DNA
gggaccaccacagtgcccag

SEQ ID NO: 47580 - DNA, 20 bp, synthetic construct
  source 1..20: mol_type = other DNA
ctcctgggagacaaggtgag

SEQ ID NO: 47581 - DNA, 20 bp, synthetic construct
  source 1..20: mol_type = other DNA
gctctaggtcactgtctcct

SEQ ID NO: 47582 - DNA, 20 bp, synthetic construct
  source 1..20: mol_type = other DNA
gtagttgttgaagacatcca

SEQ ID NO: 47583 - DNA, 20 bp, synthetic construct
  source 1..20: mol_type = other DNA
agtcagagaaagctgtctgt

SEQ ID NO: 47584 - DNA, 20 bp, synthetic construct
  source 1..20: mol_type = other DNA
accacgactttgagccccag

SEQ ID NO: 47585 - DNA, 20 bp, synthetic construct
  source 1..20: mol_type = other DNA
accgtccaggaagcaccact

SEQ ID NO: 47586 - DNA, 20 bp, synthetic construct
  source 1..20: mol_type = other DNA
gtagaagcggctggcagtgg

SEQ ID NO: 47587 - DNA, 20 bp, synthetic construct
  source 1..20: mol_type = other DNA
cacggaaggacggcttacag

SEQ ID NO: 47588 - DNA, 20 bp, synthetic construct
  source 1..20: mol_type = other DNA
ggagtctctcaatgtgggca

SEQ ID NO: 47589 - DNA, 20 bp, synthetic construct
  source 1..20: mol_type = other DNA
ccatcacactggaggcgggc

SEQ ID NO: 47590 - DNA, 20 bp, synthetic construct
  source 1..20: mol_type = other DNA
gcggcagatccggagtacag

SEQ ID NO: 47591 - DNA, 20 bp, synthetic construct
  source 1..20: mol_type = other DNA
gcgctgcaggtgggcggaca

SEQ ID NO: 47592 - DNA, 20 bp, synthetic construct
  source 1..20: mol_type = other DNA
caaacaggtctccccgctgg

SEQ ID NO: 47593 - DNA, 20 bp, synthetic construct
  source 1..20: mol_type = other DNA
gccatccacctgcaccggga

SEQ ID NO: 47594 - DNA, 20 bp, synthetic construct
  source 1..20: mol_type = other DNA
gcgcggaggatccaggtggg

SEQ ID NO: 47595 - DNA, 20 bp, synthetic construct
  source 1..20: mol_type = other DNA
tgagataccagaggaaagac

SEQ ID NO: 47596 - DNA, 20 bp, synthetic construct
  source 1..20: mol_type = other DNA
agtccattccatcacactgg

SEQ ID NO: 47597 - DNA, 20 bp, synthetic construct
  source 1..20: mol_type = other DNA
gagccccagcggcatgacga

SEQ ID NO: 47598 - DNA, 20 bp, synthetic construct
  source 1..20: mol_type = other DNA
gcccgaaccctcaactgggg

SEQ ID NO: 47599 - DNA, 20 bp, synthetic construct
  source 1..20: mol_type = other DNA
ctcggtcgatcctgtagaag

SEQ ID NO: 47600 - DNA, 20 bp, synthetic construct
  source 1..20: mol_type = other DNA
ggcaggatggcaacaggggg

SEQ ID NO: 47601 - DNA, 20 bp, synthetic construct
  source 1..20: mol_type = other DNA
cagcaggggcttcatgagcg

SEQ ID NO: 47602 - DNA, 20 bp, synthetic construct
  source 1..20: mol_type = other DNA
atagttgaggtgctcctgtg

SEQ ID NO: 47603 - DNA, 20 bp, synthetic construct
  source 1..20: mol_type = other DNA
cgtccaggaagcaccacttg

SEQ ID NO: 47604 - DNA, 20 bp, synthetic construct
  source 1..20: mol_type = other DNA
ggctaggagtcagcgacata

SEQ ID NO: 47605 - DNA, 20 bp, synthetic construct
  source 1..20: mol_type = other DNA
gtggaactccagggtgacgt

SEQ ID NO: 47606 - DNA, 20 bp, synthetic construct
  source 1..20: mol_type = other DNA
ttcaggaaaacaacacactg

SEQ ID NO: 47607 - DNA, 20 bp, synthetic construct
  source 1..20: mol_type = other DNA
tgggagaggatcttggacac

SEQ ID NO: 47608 - DNA, 20 bp, synthetic construct
  source 1..20: mol_type = other DNA
ttcctgaacatccccaggtg

SEQ ID NO: 47609 - DNA, 20 bp, synthetic construct
  source 1..20: mol_type = other DNA
aagcaagcaagaagaagaag

SEQ ID NO: 47610 - DNA, 20 bp, synthetic construct
  source 1..20: mol_type = other DNA
tctgggtggagacaagcagt

SEQ ID NO: 47611 - DNA, 20 bp, synthetic construct
  source 1..20: mol_type = other DNA
ggaataagatgttctacgcc

SEQ ID NO: 47612 - DNA, 20 bp, synthetic construct
  source 1..20: mol_type = other DNA
gctgactcctagccacggga

SEQ ID NO: 47613 - DNA, 20 bp, synthetic construct
  source 1..20: mol_type = other DNA
tgggacgtactcgctgtgca

SEQ ID NO: 47614 - DNA, 20 bp, synthetic construct
  source 1..20: mol_type = other DNA
gcgtgaggctgcaagcttgc

SEQ ID NO: 47615 - DNA, 20 bp, synthetic construct
  source 1..20: mol_type = other DNA
cgctccagtccactgtactc

SEQ ID NO: 47616 - DNA, 20 bp, synthetic construct
  source 1..20: mol_type = other DNA
cagggcgatgcggatgcgtg

SEQ ID NO: 47617 - DNA, 20 bp, synthetic construct
  source 1..20: mol_type = other DNA
ccatggtggcctggttgcgc

SEQ ID NO: 47618 - DNA, 20 bp, synthetic construct
  source 1..20: mol_type = other DNA
gttcaggaaaacaacacact

SEQ ID NO: 47619 - DNA, 20 bp, synthetic construct
  source 1..20: mol_type = other DNA
ggctcgccatccacctgcac

SEQ ID NO: 47620 - DNA, 20 bp, synthetic construct
  source 1..20: mol_type = other DNA
cccacaggccgcgctgcagg

SEQ ID NO: 47621 - DNA, 20 bp, synthetic construct
  source 1..20: mol_type = other DNA
cttcatgagcggggaggggg

SEQ ID NO: 47622 - DNA, 20 bp, synthetic construct
  source 1..20: mol_type = other DNA
ggatccagcccacctggggg

SEQ ID NO: 47623 - DNA, 20 bp, synthetic construct
  source 1..20: mol_type = other DNA
agaacatcttattccgaaag

SEQ ID NO: 47624 - DNA, 20 bp, synthetic construct
  source 1..20: mol_type = other DNA
aagaggaagtccagcaagaa

SEQ ID NO: 47625 - DNA, 20 bp, synthetic construct
  source 1..20: mol_type = other DNA
gaataagatgttctacgccg

SEQ ID NO: 47626 - DNA, 20 bp, synthetic construct
  source 1..20: mol_type = other DNA
ctttgacgcccacgtcaccc

SEQ ID NO: 47627 - DNA, 20 bp, synthetic construct
  source 1..20: mol_type = other DNA
tggacggtgagtctactccc

SEQ ID NO: 47628 - DNA, 20 bp, synthetic construct
  source 1..20: mol_type = other DNA
tagttgaggtgctcctgtgg

SEQ ID NO: 47629 - DNA, 20 bp, synthetic construct
  source 1..20: mol_type = other DNA
tctctgggttggcctctggg

SEQ ID NO: 47630 - DNA, 20 bp, synthetic construct
  source 1..20: mol_type = other DNA
cagtggtgccgtacaaaggt

SEQ ID NO: 47631 - DNA, 20 bp, synthetic construct
  source 1..20: mol_type = other DNA
aggctccaggaatgtccgcg

SEQ ID NO: 47632 - DNA, 20 bp, synthetic construct
  source 1..20: mol_type = other DNA
cctggggcctccgggcgcgg

SEQ ID NO: 47633 - DNA, 20 bp, synthetic construct
  source 1..20: mol_type = other DNA
caggggcaggatggcaacag

SEQ ID NO: 47634 - DNA, 20 bp, synthetic construct
  source 1..20: mol_type = other DNA
cgcggaggatccaggtgggc

SEQ ID NO: 47635 - DNA, 20 bp, synthetic construct
  source 1..20: mol_type = other DNA
gcggctggcagtggtggctg

SEQ ID NO: 47636 - DNA, 20 bp, synthetic construct
  source 1..20: mol_type = other DNA
cccgaaccctcaactggggt

SEQ ID NO: 47637 - DNA, 20 bp, synthetic construct
  source 1..20: mol_type = other DNA
gagaggatccagcccacctg

SEQ ID NO: 47638 - DNA, 20 bp, synthetic construct
  source 1..20: mol_type = other DNA
cccaggggcaggatggcaac

SEQ ID NO: 47639 - DNA, 20 bp, synthetic construct
  source 1..20: mol_type = other DNA
cctgtagaagcggctggcag

SEQ ID NO: 47640 - DNA, 20 bp, synthetic construct
  source 1..20: mol_type = other DNA
cacactggggtttcaggtcc

SEQ ID NO: 47641 - DNA, 20 bp, synthetic construct
  source 1..20: mol_type = other DNA
caggcgtagctggtccaggg

SEQ ID NO: 47642 - DNA, 20 bp, synthetic construct
  source 1..20: mol_type = other DNA
ctcgagactcgtggaactcc

SEQ ID NO: 47643 - DNA, 20 bp, synthetic construct
  source 1..20: mol_type = other DNA
gtcgatcctgtagaagcggc

SEQ ID NO: 47644 - DNA, 20 bp, synthetic construct
  source 1..20: mol_type = other DNA
ccggggacttctgctacgtt

SEQ ID NO: 47645 - DNA, 20 bp, synthetic construct
  source 1..20: mol_type = other DNA
gctaggagtcagcgacatat

SEQ ID NO: 47646 - DNA, 20 bp, synthetic construct
  source 1..20: mol_type = other DNA
caaagtcgtggtgctcccca

SEQ ID NO: 47647 - DNA, 20 bp, synthetic construct
  source 1..20: mol_type = other DNA
agtactcacctggggcctcc

SEQ ID NO: 47648 - DNA, 20 bp, synthetic construct
  source 1..20: mol_type = other DNA
caggagctgcaccgagctgg

SEQ ID NO: 47649 - DNA, 20 bp, synthetic construct
  source 1..20: mol_type = other DNA
ggccaagcacatccgagtgg

SEQ ID NO: 47650 - DNA, 20 bp, synthetic construct
  source 1..20: mol_type = other DNA
gctgttgaatttctctgggt

SEQ ID NO: 47651 - DNA, 20 bp, synthetic construct
  source 1..20: mol_type = other DNA
ctgctggagtctctcaatgt

SEQ ID NO: 47652 - DNA, 20 bp, synthetic construct
  source 1..20: mol_type = other DNA
tagccgtcgtcatgccgctg

SEQ ID NO: 47653 - DNA, 20 bp, synthetic construct
  source 1..20: mol_type = other DNA
ttctccagctgctcgatgca

SEQ ID NO: 47654 - DNA, 20 bp, synthetic construct
  source 1..20: mol_type = other DNA
ccggctcaccgtggtccagc

SEQ ID NO: 47655 - DNA, 20 bp, synthetic construct
  source 1..20: mol_type = other DNA
gcacggtgagctccccgcat

SEQ ID NO: 47656 - DNA, 20 bp, synthetic construct
  source 1..20: mol_type = other DNA
agcggctgttgaatttctct

SEQ ID NO: 47657 - DNA, 20 bp, synthetic construct
  source 1..20: mol_type = other DNA
ccgtccaggaagcaccactt

SEQ ID NO: 47658 - DNA, 20 bp, synthetic construct
  source 1..20: mol_type = other DNA
tgcccgcacagtacctgcaa

SEQ ID NO: 47659 - DNA, 20 bp, synthetic construct
  source 1..20: mol_type = other DNA
ctctcctcagtaccacagca

SEQ ID NO: 47660 - DNA, 20 bp, synthetic construct
  source 1..20: mol_type = other DNA
cggaataagatgttctacgc

SEQ ID NO: 47661 - DNA, 20 bp, synthetic construct
  source 1..20: mol_type = other DNA
gtcggggattgagataccag

SEQ ID NO: 47662 - DNA, 20 bp, synthetic construct
  source 1..20: mol_type = other DNA
cgtgaggctgcaagcttgca

SEQ ID NO: 47663 - DNA, 20 bp, synthetic construct
  source 1..20: mol_type = other DNA
aggggcaggatggcaacagg

SEQ ID NO: 47664 - DNA, 20 bp, synthetic construct
  source 1..20: mol_type = other DNA
cctggttgcccccactcttg

SEQ ID NO: 47665 - DNA, 20 bp, synthetic construct
  source 1..20: mol_type = other DNA
gcagaagtccccggacacgt

SEQ ID NO: 47666 - DNA, 20 bp, synthetic construct
  source 1..20: mol_type = other DNA
ccaggagctgcaccgagctg

SEQ ID NO: 47667 - DNA, 20 bp, synthetic construct
  source 1..20: mol_type = other DNA
tccgcaggttgtgcactttg

SEQ ID NO: 47668 - DNA, 20 bp, synthetic construct
  source 1..20: mol_type = other DNA
caagtcgttgccagtaccca

SEQ ID NO: 47669 - DNA, 20 bp, synthetic construct
  source 1..20: mol_type = other DNA
ctcaggtcgaagacttgtcg

SEQ ID NO: 47670 - DNA, 20 bp, synthetic construct
  source 1..20: mol_type = other DNA
gcgggatgaccacggctgcg

SEQ ID NO: 47671 - DNA, 20 bp, synthetic construct
  source 1..20: mol_type = other DNA
gggcaactggaaaaaggtca

SEQ ID NO: 47672 - DNA, 20 bp, synthetic construct
  source 1..20: mol_type = other DNA
agttgaggtgctcctgtggg

SEQ ID NO: 47673 - DNA, 20 bp, synthetic construct
  source 1..20: mol_type = other DNA
ggctcaggtcgaagacttgt

SEQ ID NO: 47674 - DNA, 20 bp, synthetic construct
  source 1..20: mol_type = other DNA
gtccaggaagcaccacttgg

SEQ ID NO: 47675 - DNA, 20 bp, synthetic construct
  source 1..20: mol_type = other DNA
aacatccccaggtgaggagg

SEQ ID NO: 47676 - DNA, 20 bp, synthetic construct
  source 1..20: mol_type = other DNA
tccaggagctgcaccgagct

SEQ ID NO: 47677 - DNA, 20 bp, synthetic construct
  source 1..20: mol_type = other DNA
gacggcaagtgtcggcactg

SEQ ID NO: 47678 - DNA, 20 bp, synthetic construct
  source 1..20: mol_type = other DNA
cgacaaggagcagctcaagg

SEQ ID NO: 47679 - DNA, 20 bp, synthetic construct
  source 1..20: mol_type = other DNA
ggacgtactcgctgtgcagg

SEQ ID NO: 47680 - DNA, 20 bp, synthetic construct
  source 1..20: mol_type = other DNA
tgcttaccccaccccagttg

SEQ ID NO: 47681 - DNA, 20 bp, synthetic construct
  source 1..20: mol_type = other DNA
aagtcagagaaagctgtctg

SEQ ID NO: 47682 - DNA, 20 bp, synthetic construct
  source 1..20: mol_type = other DNA
tggtgaagccaatgacctcg

SEQ ID NO: 47683 - DNA, 20 bp, synthetic construct
  source 1..20: mol_type = other DNA
tggtgcagaaggccaagcgg

SEQ ID NO: 47684 - DNA, 20 bp, synthetic construct
  source 1..20: mol_type = other DNA
ctacgacaaggagcagctca

SEQ ID NO: 47685 - DNA, 20 bp, synthetic construct
  source 1..20: mol_type = other DNA
cgcacagtacctgcaaaggc

SEQ ID NO: 47686 - DNA, 20 bp, synthetic construct
  source 1..20: mol_type = other DNA
tggagaggatccagcccacc

SEQ ID NO: 47687 - DNA, 20 bp, synthetic construct
  source 1..20: mol_type = other DNA
gcggctgacgcagtgtcgcg

SEQ ID NO: 47688 - DNA, 20 bp, synthetic construct
  source 1..20: mol_type = other DNA
gcttaccccaccccagttga

SEQ ID NO: 47689 - DNA, 20 bp, synthetic construct
  source 1..20: mol_type = other DNA
ccatgacgtcgttggtgagt

SEQ ID NO: 47690 - DNA, 20 bp, synthetic construct
  source 1..20: mol_type = other DNA
gtgtccgcccacctgcagcg

SEQ ID NO: 47691 - DNA, 20 bp, synthetic construct
  source 1..20: mol_type = other DNA
aagtcgttgccagtacccag

SEQ ID NO: 47692 - DNA, 20 bp, synthetic construct
  source 1..20: mol_type = other DNA
cctgtgggcacaggaagctt

SEQ ID NO: 47693 - DNA, 20 bp, synthetic construct
  source 1..20: mol_type = other DNA
cccacctgcagcgcggcctg

SEQ ID NO: 47694 - DNA, 20 bp, synthetic construct
  source 1..20: mol_type = other DNA
cagctgctcgtggtgcaagc

SEQ ID NO: 47695 - DNA, 20 bp, synthetic construct
  source 1..20: mol_type = other DNA
ttggcccgaaccctcaactg

SEQ ID NO: 47696 - DNA, 20 bp, synthetic construct
  source 1..20: mol_type = other DNA
aggaggcctgtgagtgcggt

SEQ ID NO: 47697 - DNA, 20 bp, synthetic construct
  source 1..20: mol_type = other DNA
gtagccgtcgtcatgccgct

SEQ ID NO: 47698 - DNA, 20 bp, synthetic construct
  source 1..20: mol_type = other DNA
gacgtactcgctgtgcaggg

SEQ ID NO: 47699 - DNA, 20 bp, synthetic construct
  source 1..20: mol_type = other DNA
cttgcaccacgagcagctga

SEQ ID NO: 47700 - DNA, 20 bp, synthetic construct
  source 1..20: mol_type = other DNA
ttctaaaacgagagataaag

SEQ ID NO: 47701 - DNA, 20 bp, synthetic construct
  source 1..20: mol_type = other DNA
aggatgacagtattctcagc

SEQ ID NO: 47702 - DNA, 20 bp, synthetic construct
  source 1..20: mol_type = other DNA
accatggtggcggatggcgg

SEQ ID NO: 47703 - DNA, 20 bp, synthetic construct
  source 1..20: mol_type = other DNA
tgatggtgcccgtcttcacc

SEQ ID NO: 47704 - DNA, 20 bp, synthetic construct
  source 1..20: mol_type = other DNA
cgggcatgtcgacttctcct

SEQ ID NO: 47705 - DNA, 20 bp, synthetic construct
  source 1..20: mol_type = other DNA
cacgccgacgccatccaccg

SEQ ID NO: 47706 - DNA, 20 bp, synthetic construct
  source 1..20: mol_type = other DNA
agaaggcaaacccctgctga

SEQ ID NO: 47707 - DNA, 20 bp, synthetic construct
  source 1..20: mol_type = other DNA
ttcgaggagtcccaggtggc

SEQ ID NO: 47708 - DNA, 20 bp, synthetic construct
  source 1..20: mol_type = other DNA
gctgcagctccagcagggcg

SEQ ID NO: 47709 - DNA, 20 bp, synthetic construct
  source 1..20: mol_type = other DNA
gggagtcaatgaggttgatg

SEQ ID NO: 47710 - DNA, 20 bp, synthetic construct
  source 1..20: mol_type = other DNA
tctccgagagctcgtagaag

SEQ ID NO: 47711 - DNA, 20 bp, synthetic construct
  source 1..20: mol_type = other DNA
gccgacgccatccaccgcgg

SEQ ID NO: 47712 - DNA, 20 bp, synthetic construct
  source 1..20: mol_type = other DNA
agtcccccaacaagcacaac

SEQ ID NO: 47713 - DNA, 20 bp, synthetic construct
  source 1..20: mol_type = other DNA
acatgggggtgccggccacc

SEQ ID NO: 47714 - DNA, 20 bp, synthetic construct
  source 1..20: mol_type = other DNA
tctcctcacacagtgcgccc

SEQ ID NO: 47715 - DNA, 20 bp, synthetic construct
  source 1..20: mol_type = other DNA
tctggattggcttcaggtag

SEQ ID NO: 47716 - DNA, 20 bp, synthetic construct
  source 1..20: mol_type = other DNA
tccgaccccatggtgcaggt

SEQ ID NO: 47717 - DNA, 20 bp, synthetic construct
  source 1..20: mol_type = other DNA
gagcatatcatcgcgggcgc

SEQ ID NO: 47718 - DNA, 20 bp, synthetic construct
  source 1..20: mol_type = other DNA
ggagctgcagctggagcccg

SEQ ID NO: 47719 - DNA, 20 bp, synthetic construct
  source 1..20: mol_type = other DNA
gcatgtcgacttctcctcgg

SEQ ID NO: 47720 - DNA, 20 bp, synthetic construct
  source 1..20: mol_type = other DNA
ggatgatctggccccctccg

SEQ ID NO: 47721 - DNA, 20 bp, synthetic construct
  source 1..20: mol_type = other DNA
ctcaccatggtggcggatgg

SEQ ID NO: 47722 - DNA, 20 bp, synthetic construct
  source 1..20: mol_type = other DNA
gagggagatggcactgatgg

SEQ ID NO: 47723 - DNA, 20 bp, synthetic construct
  source 1..20: mol_type = other DNA
cacagtgcgccctgggggag

SEQ ID NO: 47724 - DNA, 20 bp, synthetic construct
  source 1..20: mol_type = other DNA
ggggaagccactgtgcacag

SEQ ID NO: 47725 - DNA, 20 bp, synthetic construct
  source 1..20: mol_type = other DNA
agcagcagcagcagcggggg

SEQ ID NO: 47726 - DNA, 20 bp, synthetic construct
  source 1..20: mol_type = other DNA
acgcccttacgcttgcccag

SEQ ID NO: 47727 - DNA, 20 bp, synthetic construct
  source 1..20: mol_type = other DNA
gagatgtcaggaaaagactc

SEQ ID NO: 47728 - DNA, 20 bp, synthetic construct
  source 1..20: mol_type = other DNA
cgccacatccgcatccacac

SEQ ID NO: 47729 - DNA, 20 bp, synthetic construct
  source 1..20: mol_type = other DNA
atgcagatgcggcactggaa

SEQ ID NO: 47730 - DNA, 20 bp, synthetic construct
  source 1..20: mol_type = other DNA
agcagcagcagcagcagcgg

SEQ ID NO: 47731 - DNA, 20 bp, synthetic construct
  source 1..20: mol_type = other DNA
ggcaagcgtaagggcgttcg

SEQ ID NO: 47732 - DNA, 20 bp, synthetic construct
  source 1..20: mol_type = other DNA
catgcagatgcggcactgga

SEQ ID NO: 47733 - DNA, 20 bp, synthetic construct
  source 1..20: mol_type = other DNA
tccacagatgtcgcaggcga

SEQ ID NO: 47734 - DNA, 20 bp, synthetic construct
  source 1..20: mol_type = other DNA
gggtgcggctctccaggccc

SEQ ID NO: 47735 - DNA, 20 bp, synthetic construct
  source 1..20: mol_type = other DNA
acccacatccgcacccacac

SEQ ID NO: 47736 - DNA, 20 bp, synthetic construct
  source 1..20: mol_type = other DNA
ccacagatgtcgcaggcgaa

SEQ ID NO: 47737 - DNA, 20 bp, synthetic construct
  source 1..20: mol_type = other DNA
gtgttcggcgtggggaaggt

SEQ ID NO: 47738 - DNA, 20 bp, synthetic construct
  source 1..20: mol_type = other DNA
cagcagcagcagcagcagcg

SEQ ID NO: 47739 - DNA, 20 bp, synthetic construct
  source 1..20: mol_type = other DNA
gggggcggtggaggcggcgg

SEQ ID NO: 47740 - DNA, 20 bp, synthetic construct
  source 1..20: mol_type = other DNA
ggtagcaaccggggacgggt

SEQ ID NO: 47741 - DNA, 20 bp, synthetic construct
  source 1..20: mol_type = other DNA
gggacccgccagagcgcagg

SEQ ID NO: 47742 - DNA, 20 bp, synthetic construct
  source 1..20: mol_type = other DNA
gaagggcttctcaccggtgt

SEQ ID NO: 47743 - DNA, 20 bp, synthetic construct
  source 1..20: mol_type = other DNA
tctcctgcacagccagaata

SEQ ID NO: 47744 - DNA, 20 bp, synthetic construct
  source 1..20: mol_type = other DNA
ccctctacagcctcctgctc

SEQ ID NO: 47745 - DNA, 20 bp, synthetic construct
  source 1..20: mol_type = other DNA
caccggtgtgggtgcggata

SEQ ID NO: 47746 - DNA, 20 bp, synthetic construct
  source 1..20: mol_type = other DNA
atggtctccagaggggtaat

SEQ ID NO: 47747 - DNA, 20 bp, synthetic construct
  source 1..20: mol_type = other DNA
atcattagcctcatgagcgc

SEQ ID NO: 47748 - DNA, 20 bp, synthetic construct
  source 1..20: mol_type = other DNA
tggggggaataggcgagccc

SEQ ID NO: 47749 - DNA, 20 bp, synthetic construct
  source 1..20: mol_type = other DNA
catgcagatccggcactgga

SEQ ID NO: 47750 - DNA, 20 bp, synthetic construct
  source 1..20: mol_type = other DNA
cagcgacacggggggcgccg

SEQ ID NO: 47751 - DNA, 20 bp, synthetic construct
  source 1..20: mol_type = other DNA
tttgtcctcggagcgtagaa

SEQ ID NO: 47752 - DNA, 20 bp, synthetic construct
  source 1..20: mol_type = other DNA
atgcagatccggcactggaa

SEQ ID NO: 47753 - DNA, 20 bp, synthetic construct
  source 1..20: mol_type = other DNA
atgcccgaggaggctggggc

SEQ ID NO: 47754 - DNA, 20 bp, synthetic construct
  source 1..20: mol_type = other DNA
ctgggggtcgtggaaagaca

SEQ ID NO: 47755 - DNA, 20 bp, synthetic construct
  source 1..20: mol_type = other DNA
ggtaattcttgtaaagcctg

SEQ ID NO: 47756 - DNA, 20 bp, synthetic construct
  source 1..20: mol_type = other DNA
cacatacaatggtgagtgca

SEQ ID NO: 47757 - DNA, 20 bp, synthetic construct
  source 1..20: mol_type = other DNA
atttataaaatggttgaagg

SEQ ID NO: 47758 - DNA, 20 bp, synthetic construct
  source 1..20: mol_type = other DNA
atacctgagtgctcttccca

SEQ ID NO: 47759 - DNA, 20 bp, synthetic construct
  source 1..20: mol_type = other DNA
aataggtactattaccaaag

SEQ ID NO: 47760 - DNA, 20 bp, synthetic construct
  source 1..20: mol_type = other DNA
gtaattgtggaacatgttcc

SEQ ID NO: 47761 - DNA, 20 bp, synthetic construct
  source 1..20: mol_type = other DNA
taagaggaaaaaaggtaggt

SEQ ID NO: 47762 - DNA, 20 bp, synthetic construct
  source 1..20: mol_type = other DNA
gatatgaattatgagaccat

SEQ ID NO: 47763 - DNA, 20 bp, synthetic construct
  source 1..20: mol_type = other DNA
tggattctaaagcagtgtcc

SEQ ID NO: 47764 - DNA, 20 bp, synthetic construct
  source 1..20: mol_type = other DNA
gaataggtactattaccaaa

SEQ ID NO: 47765 - DNA, 20 bp, synthetic construct
  source 1..20: mol_type = other DNA
agaaacaaaaactcttacac

SEQ ID NO: 47766 - DNA, 20 bp, synthetic construct
  source 1..20: mol_type = other DNA
tttatatatataagatcttt

SEQ ID NO: 47767 - DNA, 20 bp, synthetic construct
  source 1..20: mol_type = other DNA
cccctggaaaccacctgggt

SEQ ID NO: 47768 - DNA, 20 bp, synthetic construct
  source 1..20: mol_type = other DNA
tgaactatgagacaatgggg

SEQ ID NO: 47769 - DNA, 20 bp, synthetic construct
  source 1..20: mol_type = other DNA
caaagtggaagggcagaggc

SEQ ID NO: 47770 - DNA, 20 bp, synthetic construct
  source 1..20: mol_type = other DNA
ggcccccgtggggtcgggct

SEQ ID NO: 47771 - DNA, 20 bp, synthetic construct
  source 1..20: mol_type = other DNA
ccaacagtggggcggctggg

SEQ ID NO: 47772 - DNA, 20 bp, synthetic construct
  source 1..20: mol_type = other DNA
ccctacttccctcattaaga

SEQ ID NO: 47773 - DNA, 20 bp, synthetic construct
  source 1..20: mol_type = other DNA
ctggatggaccttccacccc

SEQ ID NO: 47774 - DNA, 20 bp, synthetic construct
  source 1..20: mol_type = other DNA
aacatggatccaatgacagt

SEQ ID NO: 47775 - DNA, 20 bp, synthetic construct
  source 1..20: mol_type = other DNA
ttacgttagaggcagaggtt

SEQ ID NO: 47776 - DNA, 20 bp, synthetic construct
  source 1..20: mol_type = other DNA
acttccagagaatttgtcac

SEQ ID NO: 47777 - DNA, 20 bp, synthetic construct
  source 1..20: mol_type = other DNA
gaagtggatactggagagca

SEQ ID NO: 47778 - DNA, 20 bp, synthetic construct
  source 1..20: mol_type = other DNA
ttggatgatggcaagacact

SEQ ID NO: 47779 - DNA, 20 bp, synthetic construct
  source 1..20: mol_type = other DNA
cttcagttcgaacaccgtgc

SEQ ID NO: 47780 - DNA, 20 bp, synthetic construct
  source 1..20: mol_type = other DNA
gctgtacaaggtgggtcccg

SEQ ID NO: 47781 - DNA, 20 bp, synthetic construct
  source 1..20: mol_type = other DNA
atcatgaggaacacgtcctg

SEQ ID NO: 47782 - DNA, 20 bp, synthetic construct
  source 1..20: mol_type = other DNA
ccgtgaagatggtggtcttg

SEQ ID NO: 47783 - DNA, 20 bp, synthetic construct
  source 1..20: mol_type = other DNA
gatcatgaggaacacgtcct

SEQ ID NO: 47784 - DNA, 20 bp, synthetic construct
  source 1..20: mol_type = other DNA
atcacatcgggcagctctgg

SEQ ID NO: 47785 - DNA, 20 bp, synthetic construct
  source 1..20: mol_type = other DNA
tccaagagttggtcatcctg

SEQ ID NO: 47786 - DNA, 20 bp, synthetic construct
  source 1..20: mol_type = other DNA
gagcagcggctgtacaaggt

SEQ ID NO: 47787 - DNA, 20 bp, synthetic construct
  source 1..20: mol_type = other DNA
gatgaccaactcttggatga

SEQ ID NO: 47788 - DNA, 20 bp, synthetic construct
  source 1..20: mol_type = other DNA
cgcgatggtgagcgggcgtg

SEQ ID NO: 47789 - DNA, 20 bp, synthetic construct
  source 1..20: mol_type = other DNA
aaggccagccccactgtggc

SEQ ID NO: 47790 - DNA, 20 bp, synthetic construct
  source 1..20: mol_type = other DNA
cgaactgaagcgcatcgtcg

SEQ ID NO: 47791 - DNA, 20 bp, synthetic construct
  source 1..20: mol_type = other DNA
ttgtacagccgctgctcgtc

SEQ ID NO: 47792 - DNA, 20 bp, synthetic construct
  source 1..20: mol_type = other DNA
tacagccgctgctcgtcagg

SEQ ID NO: 47793 - DNA, 20 bp, synthetic construct
  source 1..20: mol_type = other DNA
ggccagccccactgtggctg

SEQ ID NO: 47794 - DNA, 20 bp, synthetic construct
  source 1..20: mol_type = other DNA
gaacaccgtgctggactcct

SEQ ID NO: 47795 - DNA, 20 bp, synthetic construct
  source 1..20: mol_type = other DNA
gcgatggtgagcgggcgtgg

SEQ ID NO: 47796 - DNA, 20 bp, synthetic construct
  source 1..20: mol_type = other DNA
gccacaggccccagccacag

SEQ ID NO: 47797 - DNA, 20 bp, synthetic construct
  source 1..20: mol_type = other DNA
gccgcgatggtgagcgggcg

SEQ ID NO: 47798 - DNA, 20 bp, synthetic construct
  source 1..20: mol_type = other DNA
aggccagccccactgtggct

SEQ ID NO: 47799 - DNA, 20 bp, synthetic construct
  source 1..20: mol_type = other DNA
tgacgagcagcggctgtaca

SEQ ID NO: 47800 - DNA, 20 bp, synthetic construct
  source 1..20: mol_type = other DNA
tgaggaacacgtcctggggg

SEQ ID NO: 47801 - DNA, 20 bp, synthetic construct
  source 1..20: mol_type = other DNA
gcttcaccagtcaaacagca

SEQ ID NO: 47802 - DNA, 20 bp, synthetic construct
  source 1..20: mol_type = other DNA
caccatcttcacggacgcca

SEQ ID NO: 47803 - DNA, 20 bp, synthetic construct
  source 1..20: mol_type = other DNA
gctcgtcaggaggccgcttg

SEQ ID NO: 47804 - DNA, 20 bp, synthetic construct
  source 1..20: mol_type = other DNA
gaactgaagcgcatcgtcga

SEQ ID NO: 47805 - DNA, 20 bp, synthetic construct
  source 1..20: mol_type = other DNA
tacaaggtgggtcccgcggg

SEQ ID NO: 47806 - DNA, 20 bp, synthetic construct
  source 1..20: mol_type = other DNA
ccgcgatggtgagcgggcgt

SEQ ID NO: 47807 - DNA, 20 bp, synthetic construct
  source 1..20: mol_type = other DNA
gaacacgtcctgggggcggc

SEQ ID NO: 47808 - DNA, 20 bp, synthetic construct
  source 1..20: mol_type = other DNA
cagtcaaacagcacggccac

SEQ ID NO: 47809 - DNA, 20 bp, synthetic construct
  source 1..20: mol_type = other DNA
tcctcaggatgaccaactct

SEQ ID NO: 47810 - DNA, 20 bp, synthetic construct
  source 1..20: mol_type = other DNA
ggaacacgtcctgggggcgg

SEQ ID NO: 47811 - DNA, 20 bp, synthetic construct
  source 1..20: mol_type = other DNA
ggatcatgaggaacacgtcc

SEQ ID NO: 47812 - DNA, 20 bp, synthetic construct
  source 1..20: mol_type = other DNA
agcggcctcctgacgagcag

SEQ ID NO: 47813 - DNA, 20 bp, synthetic construct
  source 1..20: mol_type = other DNA
ccacaggccccagccacagt

SEQ ID NO: 47814 - DNA, 20 bp, synthetic construct
  source 1..20: mol_type = other DNA
cgagcagcggctgtacaagg

SEQ ID NO: 47815 - DNA, 20 bp, synthetic construct
  source 1..20: mol_type = other DNA
cttggatgatggcaagacac

SEQ ID NO: 47816 - DNA, 20 bp, synthetic construct
  source 1..20: mol_type = other DNA
tcatgaggaacacgtcctgg

SEQ ID NO: 47817 - DNA, 20 bp, synthetic construct
  source 1..20: mol_type = other DNA
ctgtacaaggtgggtcccgc

SEQ ID NO: 47818 - DNA, 20 bp, synthetic construct
  source 1..20: mol_type = other DNA
ctccacagatgacacctttg

SEQ ID NO: 47819 - DNA, 20 bp, synthetic construct
  source 1..20: mol_type = other DNA
ggcaagacactgggcgagtg

SEQ ID NO: 47820 - DNA, 20 bp, synthetic construct
  source 1..20: mol_type = other DNA
cacaggccccagccacagtg

SEQ ID NO: 47821 - DNA, 20 bp, synthetic construct
  source 1..20: mol_type = other DNA
acaaggtgggtcccgcgggc

SEQ ID NO: 47822 - DNA, 20 bp, synthetic construct
  source 1..20: mol_type = other DNA
ccggaaggccagccccactg

SEQ ID NO: 47823 - DNA, 20 bp, synthetic construct
  source 1..20: mol_type = other DNA
agagtccaccaggactggga

SEQ ID NO: 47824 - DNA, 20 bp, synthetic construct
  source 1..20: mol_type = other DNA
tgcagtaatgtcagcgagaa

SEQ ID NO: 47825 - DNA, 20 bp, synthetic construct
  source 1..20: mol_type = other DNA
gtataagaatgaggatgtga

SEQ ID NO: 47826 - DNA, 20 bp, synthetic construct
  source 1..20: mol_type = other DNA
caccactccagggggatttt

SEQ ID NO: 47827 - DNA, 20 bp, synthetic construct
  source 1..20: mol_type = other DNA
tcaggcactctggcagaaac

SEQ ID NO: 47828 - DNA, 20 bp, synthetic construct
  source 1..20: mol_type = other DNA
cctcatggttctattctccc

SEQ ID NO: 47829 - DNA, 20 bp, synthetic construct
  source 1..20: mol_type = other DNA
ctcaaatctcttggtgcagg

SEQ ID NO: 47830 - DNA, 20 bp, synthetic construct
  source 1..20: mol_type = other DNA
agccagatgccgacgagtga

SEQ ID NO: 47831 - DNA, 20 bp, synthetic construct
  source 1..20: mol_type = other DNA
gacgagtgatggcactgaag

SEQ ID NO: 47832 - DNA, 20 bp, synthetic construct
  source 1..20: mol_type = other DNA
atagtccttgaaggtgccct

SEQ ID NO: 47833 - DNA, 20 bp, synthetic construct
  source 1..20: mol_type = other DNA
cccagatgaggtaaggaagg

SEQ ID NO: 47834 - DNA, 20 bp, synthetic construct
  source 1..20: mol_type = other DNA
gtgatcgcctcacccagtcc

SEQ ID NO: 47835 - DNA, 20 bp, synthetic construct
  source 1..20: mol_type = other DNA
ccttgggcttgtggttgggc

SEQ ID NO: 47836 - DNA, 20 bp, synthetic construct
  source 1..20: mol_type = other DNA
aggggtagcaaggtctttgc

SEQ ID NO: 47837 - DNA, 20 bp, synthetic construct
  source 1..20: mol_type = other DNA
ggatcttcataagtgttgct

SEQ ID NO: 47838 - DNA, 20 bp, synthetic construct
  source 1..20: mol_type = other DNA
cagtcttttatcagctggac

SEQ ID NO: 47839 - DNA, 20 bp, synthetic construct
  source 1..20: mol_type = other DNA
ccagaagaaactgccatagc

SEQ ID NO: 47840 - DNA, 20 bp, synthetic construct
  source 1..20: mol_type = other DNA
tggggaggaccagtcgtggt

SEQ ID NO: 47841 - DNA, 20 bp, synthetic construct
  source 1..20: mol_type = other DNA
cctacctgtgtagccagcta

SEQ ID NO: 47842 - DNA, 20 bp, synthetic construct
  source 1..20: mol_type = other DNA
ttttgtcgtaatagtagcgt

SEQ ID NO: 47843 - DNA, 20 bp, synthetic construct
  source 1..20: mol_type = other DNA
ctatgacagcttcgactcag

SEQ ID NO: 47844 - DNA, 20 bp, synthetic construct
  source 1..20: mol_type = other DNA
tgtaccccagcaggctctgc

SEQ ID NO: 47845 - DNA, 20 bp, synthetic construct
  source 1..20: mol_type = other DNA
ctctgagtcgaagctgtcat

SEQ ID NO: 47846 - DNA, 20 bp, synthetic construct
  source 1..20: mol_type = other DNA
ctatgctttcaaaagagtcc

SEQ ID NO: 47847 - DNA, 20 bp, synthetic construct
  source 1..20: mol_type = other DNA
cataggagggaacacgctgc

SEQ ID NO: 47848 - DNA, 20 bp, synthetic construct
  source 1..20: mol_type = other DNA
actccgatggtggaacacac

SEQ ID NO: 47849 - DNA, 20 bp, synthetic construct
  source 1..20: mol_type = other DNA
gctactttgtggattctgct

SEQ ID NO: 47850 - DNA, 20 bp, synthetic construct
  source 1..20: mol_type = other DNA
ctggaggtaaaggaggaggt

SEQ ID NO: 47851 - DNA, 20 bp, synthetic construct
  source 1..20: mol_type = other DNA
gcctacctgtgtagccagct

SEQ ID NO: 47852 - DNA, 20 bp, synthetic construct
  source 1..20: mol_type = other DNA
ccggcgccctcgccctcgcc

SEQ ID NO: 47853 - DNA, 20 bp, synthetic construct
  source 1..20: mol_type = other DNA
taagctcgccgaccccgatg

SEQ ID NO: 47854 - DNA, 20 bp, synthetic construct
  source 1..20: mol_type = other DNA
atgaggtatggccagagccc

SEQ ID NO: 47855 - DNA, 20 bp, synthetic construct
  source 1..20: mol_type = other DNA
gtcggccagggcgagcgcgg

SEQ ID NO: 47856 - DNA, 20 bp, synthetic construct
  source 1..20: mol_type = other DNA
actaacagtctactgaaagg

SEQ ID NO: 47857 - DNA, 20 bp, synthetic construct
  source 1..20: mol_type = other DNA
ctaatagacacaaaaagaag

SEQ ID NO: 47858 - DNA, 20 bp, synthetic construct
  source 1..20: mol_type = other DNA
gcacttaccaccagtcttgt

SEQ ID NO: 47859 - DNA, 20 bp, synthetic construct
  source 1..20: mol_type = other DNA
gccaattccactaattgttt

SEQ ID NO: 47860 - DNA, 20 bp, synthetic construct
  source 1..20: mol_type = other DNA
tgacatcaactccaagggat

SEQ ID NO: 47861 - DNA, 20 bp, synthetic construct
  source 1..20: mol_type = other DNA
tctccaactttaaatcctgt

SEQ ID NO: 47862 - DNA, 20 bp, synthetic construct
  source 1..20: mol_type = other DNA
ggcggcggaggtggtagtgg

SEQ ID NO: 47863 - DNA, 20 bp, synthetic construct
  source 1..20: mol_type = other DNA
actgtgcctggaggggccca

SEQ ID NO: 47864 - DNA, 20 bp, synthetic construct
  source 1..20: mol_type = other DNA
atatccccagatctactggg

SEQ ID NO: 47865 - DNA, 20 bp, synthetic construct
  source 1..20: mol_type = other DNA
agtggtggcggcggcggcgg

SEQ ID NO: 47866 - DNA, 20 bp, synthetic construct
  source 1..20: mol_type = other DNA
ggtggcggtggcggtggtgg

SEQ ID NO: 47867 - DNA, 20 bp, synthetic construct
  source 1..20: mol_type = other DNA
tctccttgtgatgtttttca

SEQ ID NO: 47868 - DNA, 20 bp, synthetic construct
  source 1..20: mol_type = other DNA
agacggtgagtagtggcgcg

SEQ ID NO: 47869 - DNA, 20 bp, synthetic construct
  source 1..20: mol_type = other DNA
caaaaagcaggaggtgagcc

SEQ ID NO: 47870 - DNA, 20 bp, synthetic construct
  source 1..20: mol_type = other DNA
ggagttgaggaggctggagt

SEQ ID NO: 47871 - DNA, 20 bp, synthetic construct
  source 1..20: mol_type = other DNA
cagcgggaaggtgcggcgtt

SEQ ID NO: 47872 - DNA, 20 bp, synthetic construct
  source 1..20: mol_type = other DNA
atggagggtttcgtgctgga

SEQ ID NO: 47873 - DNA, 20 bp, synthetic construct
  source 1..20: mol_type = other DNA
ccaggagagcgcagatgccc

SEQ ID NO: 47874 - DNA, 20 bp, synthetic construct
  source 1..20: mol_type = other DNA
gatgcgactgcggaggcgca

SEQ ID NO: 47875 - DNA, 20 bp, synthetic construct
  source 1..20: mol_type = other DNA
gcagctgcagctggtgagtg

SEQ ID NO: 47876 - DNA, 20 bp, synthetic construct
  source 1..20: mol_type = other DNA
gcagctgcagccacggtagc

SEQ ID NO: 47877 - DNA, 20 bp, synthetic construct
  source 1..20: mol_type = other DNA
gggtgcgctgggtgctccgc

SEQ ID NO: 47878 - DNA, 20 bp, synthetic construct
  source 1..20: mol_type = other DNA
gaagtagccgccctggggga

SEQ ID NO: 47879 - DNA, 20 bp, synthetic construct
  source 1..20: mol_type = other DNA
ggttgaggcggcgcaggctg

SEQ ID NO: 47880 - DNA, 20 bp, synthetic construct
  source 1..20: mol_type = other DNA
aggggacctctctggaccca

SEQ ID NO: 47881 - DNA, 20 bp, synthetic construct
  source 1..20: mol_type = other DNA
ggcagctgcacagctgggga

SEQ ID NO: 47882 - DNA, 20 bp, synthetic construct
  source 1..20: mol_type = other DNA
agccctggagtaagccccag

SEQ ID NO: 47883 - DNA, 20 bp, synthetic construct
  source 1..20: mol_type = other DNA
cctccgctggggcttactcc

SEQ ID NO: 47884 - DNA, 20 bp, synthetic construct
  source 1..20: mol_type = other DNA
gttcacagagcgaggaggga

SEQ ID NO: 47885 - DNA, 20 bp, synthetic construct
  source 1..20: mol_type = other DNA
aggggtcgacgaccgggggc

SEQ ID NO: 47886 - DNA, 20 bp, synthetic construct
  source 1..20: mol_type = other DNA
gagctgagtcagggagatag

SEQ ID NO: 47887 - DNA, 20 bp, synthetic construct
  source 1..20: mol_type = other DNA
cgagtctcaatatctgtctt

SEQ ID NO: 47888 - DNA, 20 bp, synthetic construct
  source 1..20: mol_type = other DNA
ctcctgaggccagggaggcc

SEQ ID NO: 47889 - DNA, 20 bp, synthetic construct
  source 1..20: mol_type = other DNA
cgcggtgaccgtgggcacga

SEQ ID NO: 47890 - DNA, 20 bp, synthetic construct
  source 1..20: mol_type = other DNA
cagggcggcagggggctggt

SEQ ID NO: 47891 - DNA, 20 bp, synthetic construct
  source 1..20: mol_type = other DNA
gcagggggctggtgggctgc

SEQ ID NO: 47892 - DNA, 20 bp, synthetic construct
  source 1..20: mol_type = other DNA
tctctgtcagctcccggcgt

SEQ ID NO: 47893 - DNA, 20 bp, synthetic construct
  source 1..20: mol_type = other DNA
ccaagtgccggaaccgacgc

SEQ ID NO: 47894 - DNA, 20 bp, synthetic construct
  source 1..20: mol_type = other DNA
agtggtgaaacaggagcccc

SEQ ID NO: 47895 - DNA, 20 bp, synthetic construct
  source 1..20: mol_type = other DNA
caagtgccggaaccgacgcc

SEQ ID NO: 47896 - DNA, 20 bp, synthetic construct
  source 1..20: mol_type = other DNA
tctcctgccacggaaagaga

SEQ ID NO: 47897 - DNA, 20 bp, synthetic construct
  source 1..20: mol_type = other DNA
caaagttcccgggataatcc

SEQ ID NO: 47898 - DNA, 20 bp, synthetic construct
  source 1..20: mol_type = other DNA
ccggcgggagaggaacaagc

SEQ ID NO: 47899 - DNA, 20 bp, synthetic construct
  source 1..20: mol_type = other DNA
ggctgcagcccatgcgcagt

SEQ ID NO: 47900 - DNA, 20 bp, synthetic construct
  source 1..20: mol_type = other DNA
acatgatccgcggtgggggc

SEQ ID NO: 47901 - DNA, 20 bp, synthetic construct
  source 1..20: mol_type = other DNA
gtcgtgatggcgttgatggt

SEQ ID NO: 47902 - DNA, 20 bp, synthetic construct
  source 1..20: mol_type = other DNA
atgaatgcactgcctgagcc

SEQ ID NO: 47903 - DNA, 20 bp, synthetic construct
  source 1..20: mol_type = other DNA
tgggctgcaccatccactgc

SEQ ID NO: 47904 - DNA, 20 bp, synthetic construct
  source 1..20: mol_type = other DNA
ggacagaggccaggcccggc

SEQ ID NO: 47905 - DNA, 20 bp, synthetic construct
  source 1..20: mol_type = other DNA
ggcggccagcaggtaggtgc

SEQ ID NO: 47906 - DNA, 20 bp, synthetic construct
  source 1..20: mol_type = other DNA
atacctcatccacagaagac

SEQ ID NO: 47907 - DNA, 20 bp, synthetic construct
  source 1..20: mol_type = other DNA
ccgggcggcgggggctgcgg

SEQ ID NO: 47908 - DNA, 20 bp, synthetic construct
  source 1..20: mol_type = other DNA
ggctggaaggtgagtggact

SEQ ID NO: 47909 - DNA, 20 bp, synthetic construct
  source 1..20: mol_type = other DNA
cacctggccgctgcccaggc

SEQ ID NO: 47910 - DNA, 20 bp, synthetic construct
  source 1..20: mol_type = other DNA
gtcgcagatctacgagtgga

SEQ ID NO: 47911 - DNA, 20 bp, synthetic construct
  source 1..20: mol_type = other DNA
catgcagatgagtgccctgg

SEQ ID NO: 47912 - DNA, 20 bp, synthetic construct
  source 1..20: mol_type = other DNA
agcggccaggtgcacgagcg

SEQ ID NO: 47913 - DNA, 20 bp, synthetic construct
  source 1..20: mol_type = other DNA
gcaggcgcccggctccgtgg

SEQ ID NO: 47914 - DNA, 20 bp, synthetic construct
  source 1..20: mol_type = other DNA
cttggtgatgaggtcggcgt

SEQ ID NO: 47915 - DNA, 20 bp, synthetic construct
  source 1..20: mol_type = other DNA
caaggccatcgagagctcgg

SEQ ID NO: 47916 - DNA, 20 bp, synthetic construct
  source 1..20: mol_type = other DNA
cgtgtgcagaatgaaggaac

SEQ ID NO: 47917 - DNA, 20 bp, synthetic construct
  source 1..20: mol_type = other DNA
ggttgccccacgcgttgcgg

SEQ ID NO: 47918 - DNA, 20 bp, synthetic construct
  source 1..20: mol_type = other DNA
tcgagagctcggcggagaag

SEQ ID NO: 47919 - DNA, 20 bp, synthetic construct
  source 1..20: mol_type = other DNA
cgtgcacctggccgctgccc

SEQ ID NO: 47920 - DNA, 20 bp, synthetic construct
  source 1..20: mol_type = other DNA
ccatgcagatgagtgccctg

SEQ ID NO: 47921 - DNA, 20 bp, synthetic construct
  source 1..20: mol_type = other DNA
cccatgcagatgagtgccct

SEQ ID NO: 47922 - DNA, 20 bp, synthetic construct
  source 1..20: mol_type = other DNA
ctacgccgacctcatcacca

SEQ ID NO: 47923 - DNA, 20 bp, synthetic construct
  source 1..20: mol_type = other DNA
gcccgccgcggcgtcggggt

SEQ ID NO: 47924 - DNA, 20 bp, synthetic construct
  source 1..20: mol_type = other DNA
caggacaataagtcgagtta

SEQ ID NO: 47925 - DNA, 20 bp, synthetic construct
  source 1..20: mol_type = other DNA
gatggccttggtgatgaggt

SEQ ID NO: 47926 - DNA, 20 bp, synthetic construct
  source 1..20: mol_type = other DNA
gccgctgtcgcagcacccgc

SEQ ID NO: 47927 - DNA, 20 bp, synthetic construct
  source 1..20: mol_type = other DNA
taggagaagagctgcatcca

SEQ ID NO: 47928 - DNA, 20 bp, synthetic construct
  source 1..20: mol_type = other DNA
cgctgtcgcagatctacgag

SEQ ID NO: 47929 - DNA, 20 bp, synthetic construct
  source 1..20: mol_type = other DNA
gccaggtgcacgagcgcggc

SEQ ID NO: 47930 - DNA, 20 bp, synthetic construct
  source 1..20: mol_type = other DNA
tgatgaggtcggcgtaggac

SEQ ID NO: 47931 - DNA, 20 bp, synthetic construct
  source 1..20: mol_type = other DNA
cccgcaggcgcccggctccg

SEQ ID NO: 47932 - DNA, 20 bp, synthetic construct
  source 1..20: mol_type = other DNA
agctggcttgttctcttgga

SEQ ID NO: 47933 - DNA, 20 bp, synthetic construct
  source 1..20: mol_type = other DNA
cgtgcacggtggaactgcca

SEQ ID NO: 47934 - DNA, 20 bp, synthetic construct
  source 1..20: mol_type = other DNA
caccatccactcgtagatct

SEQ ID NO: 47935 - DNA, 20 bp, synthetic construct
  source 1..20: mol_type = other DNA
tatgcagtgacaggttgtgc

SEQ ID NO: 47936 - DNA, 20 bp, synthetic construct
  source 1..20: mol_type = other DNA
ccgcgccatcgagagctccc

SEQ ID NO: 47937 - DNA, 20 bp, synthetic construct
  source 1..20: mol_type = other DNA
tttgtccggggagctctcga

SEQ ID NO: 47938 - DNA, 20 bp, synthetic construct
  source 1..20: mol_type = other DNA
gacatggaagagaaggtagc

SEQ ID NO: 47939 - DNA, 20 bp, synthetic construct
  source 1..20: mol_type = other DNA
gtcttcatcgtcctcctcct

SEQ ID NO: 47940 - DNA, 20 bp, synthetic construct
  source 1..20: mol_type = other DNA
ctctccgctcgaagtggagc

SEQ ID NO: 47941 - DNA, 20 bp, synthetic construct
  source 1..20: mol_type = other DNA
gtcccagatctacgagtgga

SEQ ID NO: 47942 - DNA, 20 bp, synthetic construct
  source 1..20: mol_type = other DNA
ccgcggcgggcgggctgagc

SEQ ID NO: 47943 - DNA, 20 bp, synthetic construct
  source 1..20: mol_type = other DNA
gaggacggcgggggacgggc

SEQ ID NO: 47944 - DNA, 20 bp, synthetic construct
  source 1..20: mol_type = other DNA
ggccggctctgggagccgag

SEQ ID NO: 47945 - DNA, 20 bp, synthetic construct
  source 1..20: mol_type = other DNA
agagaccactccgagatagc

SEQ ID NO: 47946 - DNA, 20 bp, synthetic construct
  source 1..20: mol_type = other DNA
tgttatccatgtcacactcc

SEQ ID NO: 47947 - DNA, 20 bp, synthetic construct
  source 1..20: mol_type = other DNA
gcagaggggcccctgtcagc

SEQ ID NO: 47948 - DNA, 20 bp, synthetic construct
  source 1..20: mol_type = other DNA
tctctgtcatggtcaaaatc

SEQ ID NO: 47949 - DNA, 20 bp, synthetic construct
  source 1..20: mol_type = other DNA
atcagagtagaggatgagtt

SEQ ID NO: 47950 - DNA, 20 bp, synthetic construct
  source 1..20: mol_type = other DNA
cactcccaaaagggaaaggt

SEQ ID NO: 47951 - DNA, 20 bp, synthetic construct
  source 1..20: mol_type = other DNA
tggttgtttgtcattcctct

SEQ ID NO: 47952 - DNA, 20 bp, synthetic construct
  source 1..20: mol_type = other DNA
tcagccatccagaatgggtc

SEQ ID NO: 47953 - DNA, 20 bp, synthetic construct
  source 1..20: mol_type = other DNA
cttcgggaggggcggtccaa

SEQ ID NO: 47954 - DNA, 20 bp, synthetic construct
  source 1..20: mol_type = other DNA
tcccaccgtgtgcatgctgg

SEQ ID NO: 47955 - DNA, 20 bp, synthetic construct
  source 1..20: mol_type = other DNA
cttgagggagaagaccccag

SEQ ID NO: 47956 - DNA, 20 bp, synthetic construct
  source 1..20: mol_type = other DNA
tgggccaagggccaaggaag

SEQ ID NO: 47957 - DNA, 20 bp, synthetic construct
  source 1..20: mol_type = other DNA
ggtacagtctctggagcagc

SEQ ID NO: 47958 - DNA, 20 bp, synthetic construct
  source 1..20: mol_type = other DNA
ttggtactggggctctgtcg

SEQ ID NO: 47959 - DNA, 20 bp, synthetic construct
  source 1..20: mol_type = other DNA
acagagccccagtaccaacc

SEQ ID NO: 47960 - DNA, 20 bp, synthetic construct
  source 1..20: mol_type = other DNA
cagtttggggaagtatggat

SEQ ID NO: 47961 - DNA, 20 bp, synthetic construct
  source 1..20: mol_type = other DNA
gccatacccaggtaagagca

SEQ ID NO: 47962 - DNA, 20 bp, synthetic construct
  source 1..20: mol_type = other DNA
attcactttctatccgtgat

SEQ ID NO: 47963 - DNA, 20 bp, synthetic construct
  source 1..20: mol_type = other DNA
tactcggtgacgatgtagat

SEQ ID NO: 47964 - DNA, 20 bp, synthetic construct
  source 1..20: mol_type = other DNA
acagacagatcggtaagcct

SEQ ID NO: 47965 - DNA, 20 bp, synthetic construct
  source 1..20: mol_type = other DNA
ccgggaggtgctggagcagg

SEQ ID NO: 47966 - DNA, 20 bp, synthetic construct
  source 1..20: mol_type = other DNA
ttgctgatcgcagatctcta

SEQ ID NO: 47967 - DNA, 20 bp, synthetic construct
  source 1..20: mol_type = other DNA
caaggactcaccgtctttgg

SEQ ID NO: 47968 - DNA, 20 bp, synthetic construct
  source 1..20: mol_type = other DNA
gatgacctgagttttcacaa

SEQ ID NO: 47969 - DNA, 20 bp, synthetic construct
  source 1..20: mol_type = other DNA
acaacaacttccacgcagcc

SEQ ID NO: 47970 - DNA, 20 bp, synthetic construct
  source 1..20: mol_type = other DNA
caaccgggaggtgctggagc

SEQ ID NO: 47971 - DNA, 20 bp, synthetic construct
  source 1..20: mol_type = other DNA
gtggacatggcagcacaggt

SEQ ID NO: 47972 - DNA, 20 bp, synthetic construct
  source 1..20: mol_type = other DNA
catcaagtggacggcccccg

SEQ ID NO: 47973 - DNA, 20 bp, synthetic construct
  source 1..20: mol_type = other DNA
gacggtgagtccttggcccc

SEQ ID NO: 47974 - DNA, 20 bp, synthetic construct
  source 1..20: mol_type = other DNA
ttcctcaaggaatgattcgg

SEQ ID NO: 47975 - DNA, 20 bp, synthetic construct
  source 1..20: mol_type = other DNA
cgaagctggggtagtgctga

SEQ ID NO: 47976 - DNA, 20 bp, synthetic construct
  source 1..20: mol_type = other DNA
cggaaactcggtcagggcca

SEQ ID NO: 47977 - DNA, 20 bp, synthetic construct
  source 1..20: mol_type = other DNA
ccccgacaaggaggaggacg

SEQ ID NO: 47978 - DNA, 20 bp, synthetic construct
  source 1..20: mol_type = other DNA
tggtcagcatgtggctggag

SEQ ID NO: 47979 - DNA, 20 bp, synthetic construct
  source 1..20: mol_type = other DNA
cctccagagtgtggttgtgg

SEQ ID NO: 47980 - DNA, 20 bp, synthetic construct
  source 1..20: mol_type = other DNA
ctggaggaggaatgccaatg

SEQ ID NO: 47981 - DNA, 20 bp, synthetic construct
  source 1..20: mol_type = other DNA
agaggggccccggggagccg

SEQ ID NO: 47982 - DNA, 20 bp, synthetic construct
  source 1..20: mol_type = other DNA
gaacttaccagccttcgctt

SEQ ID NO: 47983 - DNA, 20 bp, synthetic construct
  source 1..20: mol_type = other DNA
cggatgcaagtccaggccca

SEQ ID NO: 47984 - DNA, 20 bp, synthetic construct
  source 1..20: mol_type = other DNA
tgtgtctggagagggcggcc

SEQ ID NO: 47985 - DNA, 20 bp, synthetic construct
  source 1..20: mol_type = other DNA
gcccacaggcattgcagaca

SEQ ID NO: 47986 - DNA, 20 bp, synthetic construct
  source 1..20: mol_type = other DNA
cgtccatgtaggagtggctg

SEQ ID NO: 47987 - DNA, 20 bp, synthetic construct
  source 1..20: mol_type = other DNA
cctccaccacctccccgctg

SEQ ID NO: 47988 - DNA, 20 bp, synthetic construct
  source 1..20: mol_type = other DNA
ccaggcagagaacttactca

SEQ ID NO: 47989 - DNA, 20 bp, synthetic construct
  source 1..20: mol_type = other DNA
cagatacctggtggaaatgg

SEQ ID NO: 47990 - DNA, 20 bp, synthetic construct
  source 1..20: mol_type = other DNA
ccccacagatggtttcacga

SEQ ID NO: 47991 - DNA, 20 bp, synthetic construct
  source 1..20: mol_type = other DNA
cttctcgggttctgtctcta

SEQ ID NO: 47992 - DNA, 20 bp, synthetic construct
  source 1..20: mol_type = other DNA
accggggcaacagcctggac

SEQ ID NO: 47993 - DNA, 20 bp, synthetic construct
  source 1..20: mol_type = other DNA
acagagatggagaagtcccc

SEQ ID NO: 47994 - DNA, 20 bp, synthetic construct
  source 1..20: mol_type = other DNA
gccggtccaccaggatgggt

SEQ ID NO: 47995 - DNA, 20 bp, synthetic construct
  source 1..20: mol_type = other DNA
agagatggagaagtcccctg

SEQ ID NO: 47996 - DNA, 20 bp, synthetic construct
  source 1..20: mol_type = other DNA
cagagatggagaagtcccct

SEQ ID NO: 47997 - DNA, 20 bp, synthetic construct
  source 1..20: mol_type = other DNA
ccccagctcgtcatcctcca

SEQ ID NO: 47998 - DNA, 20 bp, synthetic construct
  source 1..20: mol_type = other DNA
ttatgtcaaggctgcctcct

SEQ ID NO: 47999 - DNA, 20 bp, synthetic construct
  source 1..20: mol_type = other DNA
cccaccgcactcgctgttgg

SEQ ID NO: 48000 - DNA, 20 bp, synthetic construct
  source 1..20: mol_type = other DNA
cctcttccctgccaactacg

SEQ ID NO: 48001 - DNA, 20 bp, synthetic construct
  source 1..20: mol_type = other DNA
cacagacccagtgcagctcc

SEQ ID NO: 48002 - DNA, 20 bp, synthetic construct
  source 1..20: mol_type = other DNA
cgagctggggttccacagcg

SEQ ID NO: 48003 - DNA, 20 bp, synthetic construct
  source 1..20: mol_type = other DNA
ctgtgtgtctccgatgcatg

SEQ ID NO: 48004 - DNA, 20 bp, synthetic construct
  source 1..20: mol_type = other DNA
tgggcattgtggcaccggct

SEQ ID NO: 48005 - DNA, 20 bp, synthetic construct
  source 1..20: mol_type = other DNA
tgtgtgtctccgatgcatga

SEQ ID NO: 48006 - DNA, 20 bp, synthetic construct
  source 1..20: mol_type = other DNA
caggcagagaacttactcat

SEQ ID NO: 48007 - DNA, 20 bp, synthetic construct
  source 1..20: mol_type = other DNA
gggacttctccatctctgtc

SEQ ID NO: 48008 - DNA, 20 bp, synthetic construct
  source 1..20: mol_type = other DNA
ggcagccttgacataaatga

SEQ ID NO: 48009 - DNA, 20 bp, synthetic construct
  source 1..20: mol_type = other DNA
aggcggccggtccaccagga

SEQ ID NO: 48010 - DNA, 20 bp, synthetic construct
  source 1..20: mol_type = other DNA
agaagtcccctggggagctc

SEQ ID NO: 48011 - DNA, 20 bp, synthetic construct
  source 1..20: mol_type = other DNA
ccatgagtaagttctctgcc

SEQ ID NO: 48012 - DNA, 20 bp, synthetic construct
  source 1..20: mol_type = other DNA
ggatgacgttcaacacttca

SEQ ID NO: 48013 - DNA, 20 bp, synthetic construct
  source 1..20: mol_type = other DNA
gttcaattctttgaatgagc

SEQ ID NO: 48014 - DNA, 20 bp, synthetic construct
  source 1..20: mol_type = other DNA
acagagagggagaagtcccc

SEQ ID NO: 48015 - DNA, 20 bp, synthetic construct
  source 1..20: mol_type = other DNA
cacccagaggaagtacttcc

SEQ ID NO: 48016 - DNA, 20 bp, synthetic construct
  source 1..20: mol_type = other DNA
gcccagctctccatcctcct

SEQ ID NO: 48017 - DNA, 20 bp, synthetic construct
  source 1..20: mol_type = other DNA
ctcttagacgttccggttca

SEQ ID NO: 48018 - DNA, 20 bp, synthetic construct
  source 1..20: mol_type = other DNA
tgtcccgcaggaatatctgc

SEQ ID NO: 48019 - DNA, 20 bp, synthetic construct
  source 1..20: mol_type = other DNA
attatgtcacccccgtgaac

SEQ ID NO: 48020 - DNA, 20 bp, synthetic construct
  source 1..20: mol_type = other DNA
agcccagctctccatcctcc

SEQ ID NO: 48021 - DNA, 20 bp, synthetic construct
  source 1..20: mol_type = other DNA
gtggaatacagagcggaggt

SEQ ID NO: 48022 - DNA, 20 bp, synthetic construct
  source 1..20: mol_type = other DNA
cagggctccttactgcagaa

SEQ ID NO: 48023 - DNA, 20 bp, synthetic construct
  source 1..20: mol_type = other DNA
catgagcggctgctggtagg

SEQ ID NO: 48024 - DNA, 20 bp, synthetic construct
  source 1..20: mol_type = other DNA
gagccatggtggccatgaag

SEQ ID NO: 48025 - DNA, 20 bp, synthetic construct
  source 1..20: mol_type = other DNA
cggcacactctgtgcctgcg

SEQ ID NO: 48026 - DNA, 20 bp, synthetic construct
  source 1..20: mol_type = other DNA
cagctgctgagacctacgag

SEQ ID NO: 48027 - DNA, 20 bp, synthetic construct
  source 1..20: mol_type = other DNA
ggtggccatgaaggggctct

SEQ ID NO: 48028 - DNA, 20 bp, synthetic construct
  source 1..20: mol_type = other DNA
cctgagcccgggggatgtgg

SEQ ID NO: 48029 - DNA, 20 bp, synthetic construct
  source 1..20: mol_type = other DNA
gttggtgaacgtaggaccca

SEQ ID NO: 48030 - DNA, 20 bp, synthetic construct
  source 1..20: mol_type = other DNA
ctcccagtaaccacggcacc

SEQ ID NO: 48031 - DNA, 20 bp, synthetic construct
  source 1..20: mol_type = other DNA
ggtgcctccaccctggtcat

SEQ ID NO: 48032 - DNA, 20 bp, synthetic construct
  source 1..20: mol_type = other DNA
gcacaacatcccacagcggg

SEQ ID NO: 48033 - DNA, 20 bp, synthetic construct
  source 1..20: mol_type = other DNA
cctgcatgggtgaactctgc

SEQ ID NO: 48034 - DNA, 20 bp, synthetic construct
  source 1..20: mol_type = other DNA
gtgggatgttgtgctgctgc

SEQ ID NO: 48035 - DNA, 20 bp, synthetic construct
  source 1..20: mol_type = other DNA
ctcatcatggcctcacttcc

SEQ ID NO: 48036 - DNA, 20 bp, synthetic construct
  source 1..20: mol_type = other DNA
tgagctgcccaatgggctgg

SEQ ID NO: 48037 - DNA, 20 bp, synthetic construct
  source 1..20: mol_type = other DNA
tcacccatgcagggcaggga

SEQ ID NO: 48038 - DNA, 20 bp, synthetic construct
  source 1..20: mol_type = other DNA
tctccaccacggctttctgg

SEQ ID NO: 48039 - DNA, 20 bp, synthetic construct
  source 1..20: mol_type = other DNA
cggaggaaccgtttcaagtg

SEQ ID NO: 48040 - DNA, 20 bp, synthetic construct
  source 1..20: mol_type = other DNA
agaaggcatcctccactccc

SEQ ID NO: 48041 - DNA, 20 bp, synthetic construct
  source 1..20: mol_type = other DNA
actccctgggaaaggaggga

SEQ ID NO: 48042 - DNA, 20 bp, synthetic construct
  source 1..20: mol_type = other DNA
tgacctggctgcacgcactg

SEQ ID NO: 48043 - DNA, 20 bp, synthetic construct
  source 1..20: mol_type = other DNA
atattccgtcatcgctcctc

SEQ ID NO: 48044 - DNA, 20 bp, synthetic construct
  source 1..20: mol_type = other DNA
attccacagtgcgtgcagcc

SEQ ID NO: 48045 - DNA, 20 bp, synthetic construct
  source 1..20: mol_type = other DNA
aaaagacttggtgttgttga

SEQ ID NO: 48046 - DNA, 20 bp, synthetic construct
  source 1..20: mol_type = other DNA
ccagtacatgcgcaccgggg

SEQ ID NO: 48047 - DNA, 20 bp, synthetic construct
  source 1..20: mol_type = other DNA
tgttgatggcaaacacacac

SEQ ID NO: 48048 - DNA, 20 bp, synthetic construct
  source 1..20: mol_type = other DNA
cggccaagacccggcaggtg

SEQ ID NO: 48049 - DNA, 20 bp, synthetic construct
  source 1..20: mol_type = other DNA
ggcttaatcaacctcttcaa

SEQ ID NO: 48050 - DNA, 20 bp, synthetic construct
  source 1..20: mol_type = other DNA
cataagcaacagcttcatca

SEQ ID NO: 48051 - DNA, 20 bp, synthetic construct
  source 1..20: mol_type = other DNA
tcaaaagtgacttcaatctg

SEQ ID NO: 48052 - DNA, 20 bp, synthetic construct
  source 1..20: mol_type = other DNA
gccaatgtttcatatcagac

SEQ ID NO: 48053 - DNA, 20 bp, synthetic construct
  source 1..20: mol_type = other DNA
gctggagacacccacttggg

SEQ ID NO: 48054 - DNA, 20 bp, synthetic construct
  source 1..20: mol_type = other DNA
taagcaatagcagcagcagt

SEQ ID NO: 48055 - DNA, 20 bp, synthetic construct
  source 1..20: mol_type = other DNA
ctcttcaatggtgggccctg

SEQ ID NO: 48056 - DNA, 20 bp, synthetic construct
  source 1..20: mol_type = other DNA
tttgaggtcaagtctacagc

SEQ ID NO: 48057 - DNA, 20 bp, synthetic construct
  source 1..20: mol_type = other DNA
catcaaaagtgccacctccc

SEQ ID NO: 48058 - DNA, 20 bp, synthetic construct
  source 1..20: mol_type = other DNA
gattactatcactaatgaca

SEQ ID NO: 48059 - DNA, 20 bp, synthetic construct
  source 1..20: mol_type = other DNA
cgagataattgccaatgatc

SEQ ID NO: 48060 - DNA, 20 bp, synthetic construct
  source 1..20: mol_type = other DNA
attactatcactaatgacaa

SEQ ID NO: 48061 - DNA, 20 bp, synthetic construct
  source 1..20: mol_type = other DNA
gaaacattggccctttatgg

SEQ ID NO: 48062 - DNA, 20 bp, synthetic construct
  source 1..20: mol_type = other DNA
gtccaggcagccatcttgtc

SEQ ID NO: 48063 - DNA, 20 bp, synthetic construct
  source 1..20: mol_type = other DNA
ataggactcaagtgaattct

SEQ ID NO: 48064 - DNA, 20 bp, synthetic construct
  source 1..20: mol_type = other DNA
agacattgaacgtatggtcc

SEQ ID NO: 48065 - DNA, 20 bp, synthetic construct
  source 1..20: mol_type = other DNA
cacggcgcgcgcggatcagg

SEQ ID NO: 48066 - DNA, 20 bp, synthetic construct
  source 1..20: mol_type = other DNA
cacgttgcagacgatctccc

SEQ ID NO: 48067 - DNA, 20 bp, synthetic construct
  source 1..20: mol_type = other DNA
gggcgtggtgactatcgtac

SEQ ID NO: 48068 - DNA, 20 bp, synthetic construct
  source 1..20: mol_type = other DNA
catgcaactcacggtcactg

SEQ ID NO: 48069 - DNA, 20 bp, synthetic construct
  source 1..20: mol_type = other DNA
tcggagctggcggggggctg

SEQ ID NO: 48070 - DNA, 20 bp, synthetic construct
  source 1..20: mol_type = other DNA
gacgtccctatcaaaggagc

SEQ ID NO: 48071 - DNA, 20 bp, synthetic construct
  source 1..20: mol_type = other DNA
ggcatgagaaaggggctccg

SEQ ID NO: 48072 - DNA, 20 bp, synthetic construct
  source 1..20: mol_type = other DNA
acgtcttcagggagcaccaa

SEQ ID NO: 48073 - DNA, 20 bp, synthetic construct
  source 1..20: mol_type = other DNA
ccccagcgccaggtagacct

SEQ ID NO: 48074 - DNA, 20 bp, synthetic construct
  source 1..20: mol_type = other DNA
ccgtctagggtgcagtccac

SEQ ID NO: 48075 - DNA, 20 bp, synthetic construct
  source 1..20: mol_type = other DNA
catgcccccagcacttgaaa

SEQ ID NO: 48076 - DNA, 20 bp, synthetic construct
  source 1..20: mol_type = other DNA
tgaccctagggggcgagaga

SEQ ID NO: 48077 - DNA, 20 bp, synthetic construct
  source 1..20: mol_type = other DNA
cttctgcagtgccactctcg

SEQ ID NO: 48078 - DNA, 20 bp, synthetic construct
  source 1..20: mol_type = other DNA
ttcaatctcagcaacgtgac

SEQ ID NO: 48079 - DNA, 20 bp, synthetic construct
  source 1..20: mol_type = other DNA
cacggtggtgctgcttcgct

SEQ ID NO: 48080 - DNA, 20 bp, synthetic construct
  source 1..20: mol_type = other DNA
ggatccccaccggcacctcc

SEQ ID NO: 48081 - DNA, 20 bp, synthetic construct
  source 1..20: mol_type = other DNA
gcaacccgtaccccgagctg

SEQ ID NO: 48082 - DNA, 20 bp, synthetic construct
  source 1..20: mol_type = other DNA
gagccctgagagaggagggg

SEQ ID NO: 48083 - DNA, 20 bp, synthetic construct
  source 1..20: mol_type = other DNA
tcttggaggtggaaacgtcg

SEQ ID NO: 48084 - DNA, 20 bp, synthetic construct
  source 1..20: mol_type = other DNA
aaagaccgtcaagttctccc

SEQ ID NO: 48085 - DNA, 20 bp, synthetic construct
  source 1..20: mol_type = other DNA
gtctgcaacgtgaccctagg

SEQ ID NO: 48086 - DNA, 20 bp, synthetic construct
  source 1..20: mol_type = other DNA
taaagaccgtcaagttctcc

SEQ ID NO: 48087 - DNA, 20 bp, synthetic construct
  source 1..20: mol_type = other DNA
ctcactaagacaaaaggaag

SEQ ID NO: 48088 - DNA, 20 bp, synthetic construct
  source 1..20: mol_type = other DNA
ccggacaccccacaggggct

SEQ ID NO: 48089 - DNA, 20 bp, synthetic construct
  source 1..20: mol_type = other DNA
ggttctggggggcccagggg

SEQ ID NO: 48090 - DNA, 20 bp, synthetic construct
  source 1..20: mol_type = other DNA
caggtgagccggggaaggag

SEQ ID NO: 48091 - DNA, 20 bp, synthetic construct
  source 1..20: mol_type = other DNA
agcctccccttggcatggga

SEQ ID NO: 48092 - DNA, 20 bp, synthetic construct
  source 1..20: mol_type = other DNA
gtgacatcagggctcggttc

SEQ ID NO: 48093 - DNA, 20 bp, synthetic construct
  source 1..20: mol_type = other DNA
tcctgaatcttggctagttt

SEQ ID NO: 48094 - DNA, 20 bp, synthetic construct
  source 1..20: mol_type = other DNA
tggaaacacgcctgtgatcc

SEQ ID NO: 48095 - DNA, 20 bp, synthetic construct
  source 1..20: mol_type = other DNA
aactataagccaaattttag

SEQ ID NO: 48096 - DNA, 20 bp, synthetic construct
  source 1..20: mol_type = other DNA
gtacattgtataaagaccac

SEQ ID NO: 48097 - DNA, 20 bp, synthetic construct
  source 1..20: mol_type = other DNA
aaaataatttcataaatcag

SEQ ID NO: 48098 - DNA, 20 bp, synthetic construct
  source 1..20: mol_type = other DNA
taggtggtccaatttttcct

SEQ ID NO: 48099 - DNA, 20 bp, synthetic construct
  source 1..20: mol_type = other DNA
aaatattcctgacgtggtcc

SEQ ID NO: 48100 - DNA, 20 bp, synthetic construct
  source 1..20: mol_type = other DNA
cgatgctgccaggttcagac

SEQ ID NO: 48101 - DNA, 20 bp, synthetic construct
  source 1..20: mol_type = other DNA
ccttttctaaggaaaatggc

SEQ ID NO: 48102 - DNA, 20 bp, synthetic construct
  source 1..20: mol_type = other DNA
tctccatttacaaaaactga

SEQ ID NO: 48103 - DNA, 20 bp, synthetic construct
  source 1..20: mol_type = other DNA
tgtgctagtggatctacttg

SEQ ID NO: 48104 - DNA, 20 bp, synthetic construct
  source 1..20: mol_type = other DNA
atcataaccaaaggaggtgg

SEQ ID NO: 48105 - DNA, 20 bp, synthetic construct
  source 1..20: mol_type = other DNA
tgttggtctataaccaatca

SEQ ID NO: 48106 - DNA, 20 bp, synthetic construct
  source 1..20: mol_type = other DNA
gcggccccgccaggtgagcc

SEQ ID NO: 48107 - DNA, 20 bp, synthetic construct
  source 1..20: mol_type = other DNA
cattatctcgtttccggaaa

SEQ ID NO: 48108 - DNA, 20 bp, synthetic construct
  source 1..20: mol_type = other DNA
gggaacattttcgttgctgt

SEQ ID NO: 48109 - DNA, 20 bp, synthetic construct
  source 1..20: mol_type = other DNA
tgatgagggagccttctcct

SEQ ID NO: 48110 - DNA, 20 bp, synthetic construct
  source 1..20: mol_type = other DNA
atatgccaaggagctggatc

SEQ ID NO: 48111 - DNA, 20 bp, synthetic construct
  source 1..20: mol_type = other DNA
acactgagtggcaggcttat

SEQ ID NO: 48112 - DNA, 20 bp, synthetic construct
  source 1..20: mol_type = other DNA
atctcgggcagccaccacat

SEQ ID NO: 48113 - DNA, 20 bp, synthetic construct
  source 1..20: mol_type = other DNA
caatgtcactcagcaaggtg

SEQ ID NO: 48114 - DNA, 20 bp, synthetic construct
  source 1..20: mol_type = other DNA
cagttcgctggtctggagag

SEQ ID NO: 48115 - DNA, 20 bp, synthetic construct
  source 1..20: mol_type = other DNA
tcgctggtctggagagaggg

SEQ ID NO: 48116 - DNA, 20 bp, synthetic construct
  source 1..20: mol_type = other DNA
tgtgtattaactaaaacaaa

SEQ ID NO: 48117 - DNA, 20 bp, synthetic construct
  source 1..20: mol_type = other DNA
tatgccaaggagctggatca

SEQ ID NO: 48118 - DNA, 20 bp, synthetic construct
  source 1..20: mol_type = other DNA
gcatgagaatcacttgaacc

SEQ ID NO: 48119 - DNA, 20 bp, synthetic construct
  source 1..20: mol_type = other DNA
gcagaggctgaggaagaggg

SEQ ID NO: 48120 - DNA, 20 bp, synthetic construct
  source 1..20: mol_type = other DNA
tgccatacaggacactgtga

SEQ ID NO: 48121 - DNA, 20 bp, synthetic construct
  source 1..20: mol_type = other DNA
agtctttgcacatcattcgt

SEQ ID NO: 48122 - DNA, 20 bp, synthetic construct
  source 1..20: mol_type = other DNA
aaccagcatccagattgacc

SEQ ID NO: 48123 - DNA, 20 bp, synthetic construct
  source 1..20: mol_type = other DNA
caccttcctcagctggaaga

SEQ ID NO: 48124 - DNA, 20 bp, synthetic construct
  source 1..20: mol_type = other DNA
aagctgttggaggccgtgga

SEQ ID NO: 48125 - DNA, 20 bp, synthetic construct
  source 1..20: mol_type = other DNA
ttctcatgatctggatctcc

SEQ ID NO: 48126 - DNA, 20 bp, synthetic construct
  source 1..20: mol_type = other DNA
tctgaaatacactgagtggc

SEQ ID NO: 48127 - DNA, 20 bp, synthetic construct
  source 1..20: mol_type = other DNA
cgtccccaaagtggacctgc

SEQ ID NO: 48128 - DNA, 20 bp, synthetic construct
  source 1..20: mol_type = other DNA
ttagctcctgcccatccagc

SEQ ID NO: 48129 - DNA, 20 bp, synthetic construct
  source 1..20: mol_type = other DNA
cagccgcagggcctggtagc

SEQ ID NO: 48130 - DNA, 20 bp, synthetic construct
  source 1..20: mol_type = other DNA
atctgctggatgctgtgggc

SEQ ID NO: 48131 - DNA, 20 bp, synthetic construct
  source 1..20: mol_type = other DNA
aactaaggcccagagaagtg

SEQ ID NO: 48132 - DNA, 20 bp, synthetic construct
  source 1..20: mol_type = other DNA
tcttccagctgcattcccta

SEQ ID NO: 48133 - DNA, 20 bp, synthetic construct
  source 1..20: mol_type = other DNA
tgcccccttccagaaagctc

SEQ ID NO: 48134 - DNA, 20 bp, synthetic construct
  source 1..20: mol_type = other DNA
ggggagaggagaggtaggct

SEQ ID NO: 48135 - DNA, 20 bp, synthetic construct
  source 1..20: mol_type = other DNA
ccttgccctgttggatgaat

SEQ ID NO: 48136 - DNA, 20 bp, synthetic construct
  source 1..20: mol_type = other DNA
gcacctgaagagatgccagc

SEQ ID NO: 48137 - DNA, 20 bp, synthetic construct
  source 1..20: mol_type = other DNA
tgtcgtattcttggaagagc

SEQ ID NO: 48138 - DNA, 20 bp, synthetic construct
  source 1..20: mol_type = other DNA
ttcttggaagagctggtgat

SEQ ID NO: 48139 - DNA, 20 bp, synthetic construct
  source 1..20: mol_type = other DNA
ggccctggtggccaaacagg

SEQ ID NO: 48140 - DNA, 20 bp, synthetic construct
  source 1..20: mol_type = other DNA
ctctggctgggcagggccag

SEQ ID NO: 48141 - DNA, 20 bp, synthetic construct
  source 1..20: mol_type = other DNA
taaggtctcacctgaaactt

SEQ ID NO: 48142 - DNA, 20 bp, synthetic construct
  source 1..20: mol_type = other DNA
tgtacaagtgcgaacactgc

SEQ ID NO: 48143 - DNA, 20 bp, synthetic construct
  source 1..20: mol_type = other DNA
actcgtaccggtcctggctg

SEQ ID NO: 48144 - DNA, 20 bp, synthetic construct
  source 1..20: mol_type = other DNA
gcatttgaagggcttctccc

SEQ ID NO: 48145 - DNA, 20 bp, synthetic construct
  source 1..20: mol_type = other DNA
gcccccgggcggttccgagg

SEQ ID NO: 48146 - DNA, 20 bp, synthetic construct
  source 1..20: mol_type = other DNA
cctcacaaatgtggatattg

SEQ ID NO: 48147 - DNA, 20 bp, synthetic construct
  source 1..20: mol_type = other DNA
catcagcatccatggtcctc

SEQ ID NO: 48148 - DNA, 20 bp, synthetic construct
  source 1..20: mol_type = other DNA
tcggctttgtcgggagttgg

SEQ ID NO: 48149 - DNA, 20 bp, synthetic construct
  source 1..20: mol_type = other DNA
ctcagataacctgaggacca

SEQ ID NO: 48150 - DNA, 20 bp, synthetic construct
  source 1..20: mol_type = other DNA
gctgaaagaaacaatacagg

SEQ ID NO: 48151 - DNA, 20 bp, synthetic construct
  source 1..20: mol_type = other DNA
gacctctccaccacctcggg

SEQ ID NO: 48152 - DNA, 20 bp, synthetic construct
  source 1..20: mol_type = other DNA
ggacaccgagagcaacaacg

SEQ ID NO: 48153 - DNA, 20 bp, synthetic construct
  source 1..20: mol_type = other DNA
ctggctgaaagaaacaatac

SEQ ID NO: 48154 - DNA, 20 bp, synthetic construct
  source 1..20: mol_type = other DNA
ctcgcaggacgcgctccgcg

SEQ ID NO: 48155 - DNA, 20 bp, synthetic construct
  source 1..20: mol_type = other DNA
taaacagcgaagctctttag

SEQ ID NO: 48156 - DNA, 20 bp, synthetic construct
  source 1..20: mol_type = other DNA
acctgaggacgcactccggt

SEQ ID NO: 48157 - DNA, 20 bp, synthetic construct
  source 1..20: mol_type = other DNA
cgtcctcaggtggccagtga

SEQ ID NO: 48158 - DNA, 20 bp, synthetic construct
  source 1..20: mol_type = other DNA
ggaagccgtggcagcccatg

SEQ ID NO: 48159 - DNA, 20 bp, synthetic construct
  source 1..20: mol_type = other DNA
tcacactttagttttccgtt

SEQ ID NO: 48160 - DNA, 20 bp, synthetic construct
  source 1..20: mol_type = other DNA
cccgcactgattgcactgga

SEQ ID NO: 48161 - DNA, 20 bp, synthetic construct
  source 1..20: mol_type = other DNA
ggcggcaggcgtagttgcag

SEQ ID NO: 48162 - DNA, 20 bp, synthetic construct
  source 1..20: mol_type = other DNA
caaggccaagttggtgccct

SEQ ID NO: 48163 - DNA, 20 bp, synthetic construct
  source 1..20: mol_type = other DNA
ggccacctgaggacgcactc

SEQ ID NO: 48164 - DNA, 20 bp, synthetic construct
  source 1..20: mol_type = other DNA
tctcggaggcggcgcgcagc

SEQ ID NO: 48165 - DNA, 20 bp, synthetic construct
  source 1..20: mol_type = other DNA
agcttcgctgtttatagctt

SEQ ID NO: 48166 - DNA, 20 bp, synthetic construct
  source 1..20: mol_type = other DNA
ccgcactgattgcactggaa

SEQ ID NO: 48167 - DNA, 20 bp, synthetic construct
  source 1..20: mol_type = other DNA
ccttttgagtgcaacatgtg

SEQ ID NO: 48168 - DNA, 20 bp, synthetic construct
  source 1..20: mol_type = other DNA
tcaggttatctgagaaagag

SEQ ID NO: 48169 - DNA, 20 bp, synthetic construct
  source 1..20: mol_type = other DNA
cggggacgcctcgcgctccg

SEQ ID NO: 48170 - DNA, 20 bp, synthetic construct
  source 1..20: mol_type = other DNA
cagtgagggcgtccctccgg

SEQ ID NO: 48171 - DNA, 20 bp, synthetic construct
  source 1..20: mol_type = other DNA
ggcaggcgtagttgcagagg

SEQ ID NO: 48172 - DNA, 20 bp, synthetic construct
  source 1..20: mol_type = other DNA
tggtacatcgggctgatgac

SEQ ID NO: 48173 - DNA, 20 bp, synthetic construct
  source 1..20: mol_type = other DNA
gcagaagacctgtgcaagat

SEQ ID NO: 48174 - DNA, 20 bp, synthetic construct
  source 1..20: mol_type = other DNA
gtggagaggtcctcggggat

SEQ ID NO: 48175 - DNA, 20 bp, synthetic construct
  source 1..20: mol_type = other DNA
taccggagtgcgtcctcagg

SEQ ID NO: 48176 - DNA, 20 bp, synthetic construct
  source 1..20: mol_type = other DNA
ttggtctgatgagagagatg

SEQ ID NO: 48177 - DNA, 20 bp, synthetic construct
  source 1..20: mol_type = other DNA
ggaggaatccggcttccgaa

SEQ ID NO: 48178 - DNA, 20 bp, synthetic construct
  source 1..20: mol_type = other DNA
taaggaacaagagcctatta

SEQ ID NO: 48179 - DNA, 20 bp, synthetic construct
  source 1..20: mol_type = other DNA
ggagcttcttttactcagaa

SEQ ID NO: 48180 - DNA, 20 bp, synthetic construct
  source 1..20: mol_type = other DNA
gaataagctgagcttataac

SEQ ID NO: 48181 - DNA, 20 bp, synthetic construct
  source 1..20: mol_type = other DNA
ccattccagtgtaatcagtg

SEQ ID NO: 48182 - DNA, 20 bp, synthetic construct
  source 1..20: mol_type = other DNA
attccagtgtaatcagtgtg

SEQ ID NO: 48183 - DNA, 20 bp, synthetic construct
  source 1..20: mol_type = other DNA
gagtctcttgggcagatggg

SEQ ID NO: 48184 - DNA, 20 bp, synthetic construct
  source 1..20: mol_type = other DNA
gacggagtctcttgggcaga

SEQ ID NO: 48185 - DNA, 20 bp, synthetic construct
  source 1..20: mol_type = other DNA
ttgtatatctgaaaagaaag

SEQ ID NO: 48186 - DNA, 20 bp, synthetic construct
  source 1..20: mol_type = other DNA
gaaatggaaaatgtggacag

SEQ ID NO: 48187 - DNA, 20 bp, synthetic construct
  source 1..20: mol_type = other DNA
atcgcagttcatctttccac

SEQ ID NO: 48188 - DNA, 20 bp, synthetic construct
  source 1..20: mol_type = other DNA
ccctacaaatgtgagttttg

SEQ ID NO: 48189 - DNA, 20 bp, synthetic construct
  source 1..20: mol_type = other DNA
tgttacactcgaaagggtca

SEQ ID NO: 48190 - DNA, 20 bp, synthetic construct
  source 1..20: mol_type = other DNA
cactcccatcacagtagccc

SEQ ID NO: 48191 - DNA, 20 bp, synthetic construct
  source 1..20: mol_type = other DNA
cgagagtggtgagcctgtga

SEQ ID NO: 48192 - DNA, 20 bp, synthetic construct
  source 1..20: mol_type = other DNA
ctcttcccacattgtccggg

SEQ ID NO: 48193 - DNA, 20 bp, synthetic construct
  source 1..20: mol_type = other DNA
atgagtccccgctaccttgg

SEQ ID NO: 48194 - DNA, 20 bp, synthetic construct
  source 1..20: mol_type = other DNA
gccagggaacttccaaagcc

SEQ ID NO: 48195 - DNA, 20 bp, synthetic construct
  source 1..20: mol_type = other DNA
actatccacatgggctgcca

SEQ ID NO: 48196 - DNA, 20 bp, synthetic construct
  source 1..20: mol_type = other DNA
ctttggctggccaaccaggt

SEQ ID NO: 48197 - DNA, 20 bp, synthetic construct
  source 1..20: mol_type = other DNA
gagatgagtccccgctacct

SEQ ID NO: 48198 - DNA, 20 bp, synthetic construct
  source 1..20: mol_type = other DNA
ctcccaccattgtggtgggc

SEQ ID NO: 48199 - DNA, 20 bp, synthetic construct
  source 1..20: mol_type = other DNA
gttgcagaagggacatttaa

SEQ ID NO: 48200 - DNA, 20 bp, synthetic construct
  source 1..20: mol_type = other DNA
cggcccaccacaatggtggg

SEQ ID NO: 48201 - DNA, 20 bp, synthetic construct
  source 1..20: mol_type = other DNA
agggtcagtcagggggcctc

SEQ ID NO: 48202 - DNA, 20 bp, synthetic construct
  source 1..20: mol_type = other DNA
tctcctagccgctcactcag

SEQ ID NO: 48203 - DNA, 20 bp, synthetic construct
  source 1..20: mol_type = other DNA
tctcttcccacattgtccgg

SEQ ID NO: 48204 - DNA, 20 bp, synthetic construct
  source 1..20: mol_type = other DNA
gggtgtggaacgcttgcgtt

SEQ ID NO: 48205 - DNA, 20 bp, synthetic construct
  source 1..20: mol_type = other DNA
caaagtacatatcacagtgc

SEQ ID NO: 48206 - DNA, 20 bp, synthetic construct
  source 1..20: mol_type = other DNA
tctggatatttgggatttcg

SEQ ID NO: 48207 - DNA, 20 bp, synthetic construct
  source 1..20: mol_type = other DNA
gtaaaatcgttaaggtagtc

SEQ ID NO: 48208 - DNA, 20 bp, synthetic construct
  source 1..20: mol_type = other DNA
acctgttgttgtgacgaggc

SEQ ID NO: 48209 - DNA, 20 bp, synthetic construct
  source 1..20: mol_type = other DNA
cccttacctgcctggcagcc

SEQ ID NO: 48210 - DNA, 20 bp, synthetic construct
  source 1..20: mol_type = other DNA
tgagcagtccccacatcagc

SEQ ID NO: 48211 - DNA, 20 bp, synthetic construct
  source 1..20: mol_type = other DNA
gatcagcaggaaaacacagc

SEQ ID NO: 48212 - DNA, 20 bp, synthetic construct
  source 1..20: mol_type = other DNA
cagagcttgtgcattgacat

SEQ ID NO: 48213 - DNA, 20 bp, synthetic construct
  source 1..20: mol_type = other DNA
acaacagagtaccaggtagc

SEQ ID NO: 48214 - DNA, 20 bp, synthetic construct
  source 1..20: mol_type = other DNA
cccaggtgaagagaagcctc

SEQ ID NO: 48215 - DNA, 20 bp, synthetic construct
  source 1..20: mol_type = other DNA
tcagcgtcctcctcctgagt

SEQ ID NO: 48216 - DNA, 20 bp, synthetic construct
  source 1..20: mol_type = other DNA
gtaggccatggctttgaatg

SEQ ID NO: 48217 - DNA, 20 bp, synthetic construct
  source 1..20: mol_type = other DNA
cttgcattcacagttcaaca

SEQ ID NO: 48218 - DNA, 20 bp, synthetic construct
  source 1..20: mol_type = other DNA
gacagaaatggctgcaacca

SEQ ID NO: 48219 - DNA, 20 bp, synthetic construct
  source 1..20: mol_type = other DNA
attttgcagacgctctcagc

SEQ ID NO: 48220 - DNA, 20 bp, synthetic construct
  source 1..20: mol_type = other DNA
caatgtcaatgcacaagctc

SEQ ID NO: 48221 - DNA, 20 bp, synthetic construct
  source 1..20: mol_type = other DNA
cagtaagtgtggcatcacca

SEQ ID NO: 48222 - DNA, 20 bp, synthetic construct
  source 1..20: mol_type = other DNA
ggccactgtcaatagagaga

SEQ ID NO: 48223 - DNA, 20 bp, synthetic construct
  source 1..20: mol_type = other DNA
ggttccttccttgtaggcca

SEQ ID NO: 48224 - DNA, 20 bp, synthetic construct
  source 1..20: mol_type = other DNA
tggattcatacctgctgatg

SEQ ID NO: 48225 - DNA, 20 bp, synthetic construct
  source 1..20: mol_type = other DNA
atcagcgtcctcctcctgag

SEQ ID NO: 48226 - DNA, 20 bp, synthetic construct
  source 1..20: mol_type = other DNA
aggtgagcccactcaggagg

SEQ ID NO: 48227 - DNA, 20 bp, synthetic construct
  source 1..20: mol_type = other DNA
ggaggaggacgctgatcagc

SEQ ID NO: 48228 - DNA, 20 bp, synthetic construct
  source 1..20: mol_type = other DNA
gcgtctgcaaaatgacccac

SEQ ID NO: 48229 - DNA, 20 bp, synthetic construct
  source 1..20: mol_type = other DNA
ccgcacctgttgttgtgacg

SEQ ID NO: 48230 - DNA, 20 bp, synthetic construct
  source 1..20: mol_type = other DNA
tcactctatatgctctgtac

SEQ ID NO: 48231 - DNA, 20 bp, synthetic construct
  source 1..20: mol_type = other DNA
tgtgcatatgagctggggct

SEQ ID NO: 48232 - DNA, 20 bp, synthetic construct
  source 1..20: mol_type = other DNA
gaatccatcttcctgaccct

SEQ ID NO: 48233 - DNA, 20 bp, synthetic construct
  source 1..20: mol_type = other DNA
gcagtgacctggaagatgga

SEQ ID NO: 48234 - DNA, 20 bp, synthetic construct
  source 1..20: mol_type = other DNA
acacgccacattcaaagcca

SEQ ID NO: 48235 - DNA, 20 bp, synthetic construct
  source 1..20: mol_type = other DNA
cctcgtcacaacaacaggtg

SEQ ID NO: 48236 - DNA, 20 bp, synthetic construct
  source 1..20: mol_type = other DNA
ggatacagggctctacacag

SEQ ID NO: 48237 - DNA, 20 bp, synthetic construct
  source 1..20: mol_type = other DNA
gggtccaccttgtcttcccg

SEQ ID NO: 48238 - DNA, 20 bp, synthetic construct
  source 1..20: mol_type = other DNA
ggtccaccttgtcttcccgt

SEQ ID NO: 48239 - DNA, 20 bp, synthetic construct
  source 1..20: mol_type = other DNA
aatccatcttcctgaccctt

SEQ ID NO: 48240 - DNA, 20 bp, synthetic construct
  source 1..20: mol_type = other DNA
attggttgtcccaggacgag

SEQ ID NO: 48241 - DNA, 20 bp, synthetic construct
  source 1..20: mol_type = other DNA
ggcagcggagacagtaagtg

SEQ ID NO: 48242 - DNA, 20 bp, synthetic construct
  source 1..20: mol_type = other DNA
gccaggtgagcccactcagg

SEQ ID NO: 48243 - DNA, 20 bp, synthetic construct
  source 1..20: mol_type = other DNA
ctcgtcacaacaacaggtgc

SEQ ID NO: 48244 - DNA, 20 bp, synthetic construct
  source 1..20: mol_type = other DNA
tgagtgggctcacctggcag

SEQ ID NO: 48245 - DNA, 20 bp, synthetic construct
  source 1..20: mol_type = other DNA
cagccccagctcatatgcac

SEQ ID NO: 48246 - DNA, 20 bp, synthetic construct
  source 1..20: mol_type = other DNA
ctgtgcatatgagctggggc

SEQ ID NO: 48247 - DNA, 20 bp, synthetic construct
  source 1..20: mol_type = other DNA
gcattgacattggttgtccc

SEQ ID NO: 48248 - DNA, 20 bp, synthetic construct
  source 1..20: mol_type = other DNA
agcgtctgcaaaatgaccca

SEQ ID NO: 48249 - DNA, 20 bp, synthetic construct
  source 1..20: mol_type = other DNA
ccaggcaggtaagggcctgt

SEQ ID NO: 48250 - DNA, 20 bp, synthetic construct
  source 1..20: mol_type = other DNA
gaatttatcatttcgtggtg

SEQ ID NO: 48251 - DNA, 20 bp, synthetic construct
  source 1..20: mol_type = other DNA
ccctgcagtgacctggaaga

SEQ ID NO: 48252 - DNA, 20 bp, synthetic construct
  source 1..20: mol_type = other DNA
caccctacctggaaactgac

SEQ ID NO: 48253 - DNA, 20 bp, synthetic construct
  source 1..20: mol_type = other DNA
cgctgtccccaggccacacc

SEQ ID NO: 48254 - DNA, 20 bp, synthetic construct
  source 1..20: mol_type = other DNA
gtaagtaaagtacacctggc

SEQ ID NO: 48255 - DNA, 20 bp, synthetic construct
  source 1..20: mol_type = other DNA
ctggcaggcctctatctcca

SEQ ID NO: 48256 - DNA, 20 bp, synthetic construct
  source 1..20: mol_type = other DNA
ctatctccaaggcatccggg

SEQ ID NO: 48257 - DNA, 20 bp, synthetic construct
  source 1..20: mol_type = other DNA
ggtcgtaagtaaagtacacc

SEQ ID NO: 48258 - DNA, 20 bp, synthetic construct
  source 1..20: mol_type = other DNA
cttggagatagaggcctgcc

SEQ ID NO: 48259 - DNA, 20 bp, synthetic construct
  source 1..20: mol_type = other DNA
gaagaagaagtaaccctggt

SEQ ID NO: 48260 - DNA, 20 bp, synthetic construct
  source 1..20: mol_type = other DNA
agctgggaaaagaacttcga

SEQ ID NO: 48261 - DNA, 20 bp, synthetic construct
  source 1..20: mol_type = other DNA
tcagaggaagaccctgatga

SEQ ID NO: 48262 - DNA, 20 bp, synthetic construct
  source 1..20: mol_type = other DNA
gcctctatctccaaggcatc

SEQ ID NO: 48263 - DNA, 20 bp, synthetic construct
  source 1..20: mol_type = other DNA
tgaagcagctggtcagcgag

SEQ ID NO: 48264 - DNA, 20 bp, synthetic construct
  source 1..20: mol_type = other DNA
gggaaactgactccctccct

SEQ ID NO: 48265 - DNA, 20 bp, synthetic construct
  source 1..20: mol_type = other DNA
tcacctcccaggtgtggcct

SEQ ID NO: 48266 - DNA, 20 bp, synthetic construct
  source 1..20: mol_type = other DNA
ggtggaagaagaagtaaccc

SEQ ID NO: 48267 - DNA, 20 bp, synthetic construct
  source 1..20: mol_type = other DNA
gtgtggccggggcacccaca

SEQ ID NO: 48268 - DNA, 20 bp, synthetic construct
  source 1..20: mol_type = other DNA
ttggtgtagacagatggcca

SEQ ID NO: 48269 - DNA, 20 bp, synthetic construct
  source 1..20: mol_type = other DNA
accctggttggtgaagcagc

SEQ ID NO: 48270 - DNA, 20 bp, synthetic construct
  source 1..20: mol_type = other DNA
ggccccaggcccctccccaa

SEQ ID NO: 48271 - DNA, 20 bp, synthetic construct
  source 1..20: mol_type = other DNA
gctatgctggttgcatgggg

SEQ ID NO: 48272 - DNA, 20 bp, synthetic construct
  source 1..20: mol_type = other DNA
aaaaggaggggcccttgggg

SEQ ID NO: 48273 - DNA, 20 bp, synthetic construct
  source 1..20: mol_type = other DNA
aagatcctctaggttcttca

SEQ ID NO: 48274 - DNA, 20 bp, synthetic construct
  source 1..20: mol_type = other DNA
ctgcagttttagcatctgtg

SEQ ID NO: 48275 - DNA, 20 bp, synthetic construct
  source 1..20: mol_type = other DNA
acaattctaggtacaacttt

SEQ ID NO: 48276 - DNA, 20 bp, synthetic construct
  source 1..20: mol_type = other DNA
ttcttcttgatttgatccca

SEQ ID NO: 48277 - DNA, 20 bp, synthetic construct
  source 1..20: mol_type = other DNA
ttgacctgagtgtcgtctat

SEQ ID NO: 48278 - DNA, 20 bp, synthetic construct
  source 1..20: mol_type = other DNA
tgaaatatggtgagggatgg

SEQ ID NO: 48279 - DNA, 20 bp, synthetic construct
  source 1..20: mol_type = other DNA
aggacctcctgcttagcctt

SEQ ID NO: 48280 - DNA, 20 bp, synthetic construct
  source 1..20: mol_type = other DNA
tgccccaggtgaatggagtg

SEQ ID NO: 48281 - DNA, 20 bp, synthetic construct
  source 1..20: mol_type = other DNA
actttctccttccaaatcaa

SEQ ID NO: 48282 - DNA, 20 bp, synthetic construct
  source 1..20: mol_type = other DNA
gatgaagccgcagatgaggg

SEQ ID NO: 48283 - DNA, 20 bp, synthetic construct
  source 1..20: mol_type = other DNA
acctctgtactgatggaggt

SEQ ID NO: 48284 - DNA, 20 bp, synthetic construct
  source 1..20: mol_type = other DNA
aggggaggagctggcaatgc

SEQ ID NO: 48285 - DNA, 20 bp, synthetic construct
  source 1..20: mol_type = other DNA
aaatggttaccatcagtggt

SEQ ID NO: 48286 - DNA, 20 bp, synthetic construct
  source 1..20: mol_type = other DNA
gacgtggcggccgacatgct

SEQ ID NO: 48287 - DNA, 20 bp, synthetic construct
  source 1..20: mol_type = other DNA
ctcccctggacatgagagag

SEQ ID NO: 48288 - DNA, 20 bp, synthetic construct
  source 1..20: mol_type = other DNA
gcacctacggtgaggcgccc

SEQ ID NO: 48289 - DNA, 20 bp, synthetic construct
  source 1..20: mol_type = other DNA
cgtggccatgatgagtgaca

SEQ ID NO: 48290 - DNA, 20 bp, synthetic construct
  source 1..20: mol_type = other DNA
gcaaacacactgggtgagca

SEQ ID NO: 48291 - DNA, 20 bp, synthetic construct
  source 1..20: mol_type = other DNA
gtcccagaccaaattctacc

SEQ ID NO: 48292 - DNA, 20 bp, synthetic construct
  source 1..20: mol_type = other DNA
ttcacaaagtctggaaggaa

SEQ ID NO: 48293 - DNA, 20 bp, synthetic construct
  source 1..20: mol_type = other DNA
cagtacagatgtggctgatc

SEQ ID NO: 48294 - DNA, 20 bp, synthetic construct
  source 1..20: mol_type = other DNA
aagacgagggagaagctcta

SEQ ID NO: 48295 - DNA, 20 bp, synthetic construct
  source 1..20: mol_type = other DNA
tgcccgggagatggactcgc

SEQ ID NO: 48296 - DNA, 20 bp, synthetic construct
  source 1..20: mol_type = other DNA
ccggttctcgtgctcaggct

SEQ ID NO: 48297 - DNA, 20 bp, synthetic construct
  source 1..20: mol_type = other DNA
acaggcattgcaaacacact

SEQ ID NO: 48298 - DNA, 20 bp, synthetic construct
  source 1..20: mol_type = other DNA
tgaggaggacacaggtaggg

SEQ ID NO: 48299 - DNA, 20 bp, synthetic construct
  source 1..20: mol_type = other DNA
gctctggaacatccgcatcg

SEQ ID NO: 48300 - DNA, 20 bp, synthetic construct
  source 1..20: mol_type = other DNA
agcgacgaatcctatggtaa

SEQ ID NO: 48301 - DNA, 20 bp, synthetic construct
  source 1..20: mol_type = other DNA
aggacgtgatcttcttggga

SEQ ID NO: 48302 - DNA, 20 bp, synthetic construct
  source 1..20: mol_type = other DNA
tctccaagaacggtaagcaa

SEQ ID NO: 48303 - DNA, 20 bp, synthetic construct
  source 1..20: mol_type = other DNA
gacatgatcaccatcttcat

SEQ ID NO: 48304 - DNA, 20 bp, synthetic construct
  source 1..20: mol_type = other DNA
tcggggtgggcggggtctgc

SEQ ID NO: 48305 - DNA, 20 bp, synthetic construct
  source 1..20: mol_type = other DNA
gagcgcgtatgcccgggaga

SEQ ID NO: 48306 - DNA, 20 bp, synthetic construct
  source 1..20: mol_type = other DNA
agtgactcctgcctcaaatg

SEQ ID NO: 48307 - DNA, 20 bp, synthetic construct
  source 1..20: mol_type = other DNA
ccaggaggctgatcgcggcg

SEQ ID NO: 48308 - DNA, 20 bp, synthetic construct
  source 1..20: mol_type = other DNA
caggaaggagaaaatgaaga

SEQ ID NO: 48309 - DNA, 20 bp, synthetic construct
  source 1..20: mol_type = other DNA
cagcgacgaatcctatggta

SEQ ID NO: 48310 - DNA, 20 bp, synthetic construct
  source 1..20: mol_type = other DNA
aggcggaggagctgctttcc

SEQ ID NO: 48311 - DNA, 20 bp, synthetic construct
  source 1..20: mol_type = other DNA
tgctggtctagcaggtactc

SEQ ID NO: 48312 - DNA, 20 bp, synthetic construct
  source 1..20: mol_type = other DNA
agtcccgggacctggaacag

SEQ ID NO: 48313 - DNA, 20 bp, synthetic construct
  source 1..20: mol_type = other DNA
ccgtcttcacaaagtctgga

SEQ ID NO: 48314 - DNA, 20 bp, synthetic construct
  source 1..20: mol_type = other DNA
cgctccgtcttcacaaagtc

SEQ ID NO: 48315 - DNA, 20 bp, synthetic construct
  source 1..20: mol_type = other DNA
gcctcaaatgtggcaaagac

SEQ ID NO: 48316 - DNA, 20 bp, synthetic construct
  source 1..20: mol_type = other DNA
gctggtctagcaggtactca

SEQ ID NO: 48317 - DNA, 20 bp, synthetic construct
  source 1..20: mol_type = other DNA
ctgggacttggtcttcaatg

SEQ ID NO: 48318 - DNA, 20 bp, synthetic construct
  source 1..20: mol_type = other DNA
tcacaaagtctggaaggaaa

SEQ ID NO: 48319 - DNA, 20 bp, synthetic construct
  source 1..20: mol_type = other DNA
acccaccatggggagttgac

SEQ ID NO: 48320 - DNA, 20 bp, synthetic construct
  source 1..20: mol_type = other DNA
ctgacacaccacgtgcacca

SEQ ID NO: 48321 - DNA, 20 bp, synthetic construct
  source 1..20: mol_type = other DNA
cccgagtcagtctctcaaaa

SEQ ID NO: 48322 - DNA, 20 bp, synthetic construct
  source 1..20: mol_type = other DNA
ggggagctggtggtgaagtt

SEQ ID NO: 48323 - DNA, 20 bp, synthetic construct
  source 1..20: mol_type = other DNA
acggagcgtgatgaatccag

SEQ ID NO: 48324 - DNA, 20 bp, synthetic construct
  source 1..20: mol_type = other DNA
taagatccccaaaccagaag

SEQ ID NO: 48325 - DNA, 20 bp, synthetic construct
  source 1..20: mol_type = other DNA
gggataagggagggccggtg

SEQ ID NO: 48326 - DNA, 20 bp, synthetic construct
  source 1..20: mol_type = other DNA
acacactgggtgagcagggc

SEQ ID NO: 48327 - DNA, 20 bp, synthetic construct
  source 1..20: mol_type = other DNA
ttgactggcagcggcggccg

SEQ ID NO: 48328 - DNA, 20 bp, synthetic construct
  source 1..20: mol_type = other DNA
cagaggacttgatgctgatg

SEQ ID NO: 48329 - DNA, 20 bp, synthetic construct
  source 1..20: mol_type = other DNA
tctgacagcgacgaatccta

SEQ ID NO: 48330 - DNA, 20 bp, synthetic construct
  source 1..20: mol_type = other DNA
caggaagtgaaaagaaactc

SEQ ID NO: 48331 - DNA, 20 bp, synthetic construct
  source 1..20: mol_type = other DNA
ccgcgtctttccctgcccct

SEQ ID NO: 48332 - DNA, 20 bp, synthetic construct
  source 1..20: mol_type = other DNA
cggagcgtgatgaatccagt

SEQ ID NO: 48333 - DNA, 20 bp, synthetic construct
  source 1..20: mol_type = other DNA
cctcaaatgtggcaaagaca

SEQ ID NO: 48334 - DNA, 20 bp, synthetic construct
  source 1..20: mol_type = other DNA
agtggcctgtcaactcccca

SEQ ID NO: 48335 - DNA, 20 bp, synthetic construct
  source 1..20: mol_type = other DNA
caagaacggtaagcaaagga

SEQ ID NO: 48336 - DNA, 20 bp, synthetic construct
  source 1..20: mol_type = other DNA
ccaaggggcagggaaagacg

SEQ ID NO: 48337 - DNA, 20 bp, synthetic construct
  source 1..20: mol_type = other DNA
gaacaagcactcagagcagc

SEQ ID NO: 48338 - DNA, 20 bp, synthetic construct
  source 1..20: mol_type = other DNA
aaagacgcgggacgactctg

SEQ ID NO: 48339 - DNA, 20 bp, synthetic construct
  source 1..20: mol_type = other DNA
acaccaagcagaaagcgaca

SEQ ID NO: 48340 - DNA, 20 bp, synthetic construct
  source 1..20: mol_type = other DNA
tgcggatgttccagagcgtg

SEQ ID NO: 48341 - DNA, 20 bp, synthetic construct
  source 1..20: mol_type = other DNA
gacaggcattgcaaacacac

SEQ ID NO: 48342 - DNA, 20 bp, synthetic construct
  source 1..20: mol_type = other DNA
ccaggggataagacttccag

SEQ ID NO: 48343 - DNA, 20 bp, synthetic construct
  source 1..20: mol_type = other DNA
tttcacttcctgaagtcaag

SEQ ID NO: 48344 - DNA, 20 bp, synthetic construct
  source 1..20: mol_type = other DNA
cacgtcctggtttctctcca

SEQ ID NO: 48345 - DNA, 20 bp, synthetic construct
  source 1..20: mol_type = other DNA
ccttggctgtcaacagtccc

SEQ ID NO: 48346 - DNA, 20 bp, synthetic construct
  source 1..20: mol_type = other DNA
tccttggctgtcaacagtcc

SEQ ID NO: 48347 - DNA, 20 bp, synthetic construct
  source 1..20: mol_type = other DNA
cctttgaggtaagtggccat

SEQ ID NO: 48348 - DNA, 20 bp, synthetic construct
  source 1..20: mol_type = other DNA
tctgcagcttgatctccccc

SEQ ID NO: 48349 - DNA, 20 bp, synthetic construct
  source 1..20: mol_type = other DNA
cgcctaatgcaaggaaaaag

SEQ ID NO: 48350 - DNA, 20 bp, synthetic construct
  source 1..20: mol_type = other DNA
tagggaacaagggagccgtg

SEQ ID NO: 48351 - DNA, 20 bp, synthetic construct
  source 1..20: mol_type = other DNA
ccctgtgccgctggaggaag

SEQ ID NO: 48352 - DNA, 20 bp, synthetic construct
  source 1..20: mol_type = other DNA
ccccatgacatttacgtgat

SEQ ID NO: 48353 - DNA, 20 bp, synthetic construct
  source 1..20: mol_type = other DNA
cccactgcttcatggggtcg

SEQ ID NO: 48354 - DNA, 20 bp, synthetic construct
  source 1..20: mol_type = other DNA
tccagccccttcttctacca

SEQ ID NO: 48355 - DNA, 20 bp, synthetic construct
  source 1..20: mol_type = other DNA
tctctgctgccctgcgctcc

SEQ ID NO: 48356 - DNA, 20 bp, synthetic construct
  source 1..20: mol_type = other DNA
atggccggggggccgggccc

SEQ ID NO: 48357 - DNA, 20 bp, synthetic construct
  source 1..20: mol_type = other DNA
ggcctggaacaggacaggca

SEQ ID NO: 48358 - DNA, 20 bp, synthetic construct
  source 1..20: mol_type = other DNA
tctctcctggcctcagcgac

SEQ ID NO: 48359 - DNA, 20 bp, synthetic construct
  source 1..20: mol_type = other DNA
gtacatcaagacgggaaggc

SEQ ID NO: 48360 - DNA, 20 bp, synthetic construct
  source 1..20: mol_type = other DNA
aggctctcgtcactctccac

SEQ ID NO: 48361 - DNA, 20 bp, synthetic construct
  source 1..20: mol_type = other DNA
acagcttcttaaaactttat

SEQ ID NO: 48362 - DNA, 20 bp, synthetic construct
  source 1..20: mol_type = other DNA
ttctgctagtcatgactgtc

SEQ ID NO: 48363 - DNA, 20 bp, synthetic construct
  source 1..20: mol_type = other DNA
tggcaaagtaagtcttaatc

SEQ ID NO: 48364 - DNA, 20 bp, synthetic construct
  source 1..20: mol_type = other DNA
ggtaataaaatgggagaggg

SEQ ID NO: 48365 - DNA, 20 bp, synthetic construct
  source 1..20: mol_type = other DNA
actccgactgctccaagagc

SEQ ID NO: 48366 - DNA, 20 bp, synthetic construct
  source 1..20: mol_type = other DNA
agagtgctgctgacagcaca

SEQ ID NO: 48367 - DNA, 20 bp, synthetic construct
  source 1..20: mol_type = other DNA
ctccgactgctccaagagct

SEQ ID NO: 48368 - DNA, 20 bp, synthetic construct
  source 1..20: mol_type = other DNA
taaagtgagtgtaactcttt

SEQ ID NO: 48369 - DNA, 20 bp, synthetic construct
  source 1..20: mol_type = other DNA
ctggtgcatatgttcccggg

SEQ ID NO: 48370 - DNA, 20 bp, synthetic construct
  source 1..20: mol_type = other DNA
cccggagggcctgcggctgg

SEQ ID NO: 48371 - DNA, 20 bp, synthetic construct
  source 1..20: mol_type = other DNA
gtggcagtgccccagccgct

SEQ ID NO: 48372 - DNA, 20 bp, synthetic construct
  source 1..20: mol_type = other DNA
agaaaagtggtgaggggagt

SEQ ID NO: 48373 - DNA, 20 bp, synthetic construct
  source 1..20: mol_type = other DNA
tagattttatgtgggtcgtg

SEQ ID NO: 48374 - DNA, 20 bp, synthetic construct
  source 1..20: mol_type = other DNA
ccggagggcctgcggctggt

SEQ ID NO: 48375 - DNA, 20 bp, synthetic construct
  source 1..20: mol_type = other DNA
tgggagatccggcagccctc

SEQ ID NO: 48376 - DNA, 20 bp, synthetic construct
  source 1..20: mol_type = other DNA
taaacagtgcccaagcctgg

SEQ ID NO: 48377 - DNA, 20 bp, synthetic construct
  source 1..20: mol_type = other DNA
ggcgtcatacgtatgtccat

SEQ ID NO: 48378 - DNA, 20 bp, synthetic construct
  source 1..20: mol_type = other DNA
gggagatccggcagccctcg

SEQ ID NO: 48379 - DNA, 20 bp, synthetic construct
  source 1..20: mol_type = other DNA
ccgcaggcgcgtcttccagg

SEQ ID NO: 48380 - DNA, 20 bp, synthetic construct
  source 1..20: mol_type = other DNA
ggcatgagcgcggtgagctg

SEQ ID NO: 48381 - DNA, 20 bp, synthetic construct
  source 1..20: mol_type = other DNA
agcaaaataatatagttgtc

SEQ ID NO: 48382 - DNA, 20 bp, synthetic construct
  source 1..20: mol_type = other DNA
cagagcaggatctactggga

SEQ ID NO: 48383 - DNA, 20 bp, synthetic construct
  source 1..20: mol_type = other DNA
tggcgtcatacgtatgtcca

SEQ ID NO: 48384 - DNA, 20 bp, synthetic construct
  source 1..20: mol_type = other DNA
atgggagatccggcagccct

SEQ ID NO: 48385 - DNA, 20 bp, synthetic construct
  source 1..20: mol_type = other DNA
ctggtaaatcgtagcccctc

SEQ ID NO: 48386 - DNA, 20 bp, synthetic construct
  source 1..20: mol_type = other DNA
gtcctccagggtgagctgct

SEQ ID NO: 48387 - DNA, 20 bp, synthetic construct
  source 1..20: mol_type = other DNA
acccctcgaccgaagctgga

SEQ ID NO: 48388 - DNA, 20 bp, synthetic construct
  source 1..20: mol_type = other DNA
agagcaggatctactgggac

SEQ ID NO: 48389 - DNA, 20 bp, synthetic construct
  source 1..20: mol_type = other DNA
agtacaggcagatgtgcagc

SEQ ID NO: 48390 - DNA, 20 bp, synthetic construct
  source 1..20: mol_type = other DNA
tccccacagagccaagcata

SEQ ID NO: 48391 - DNA, 20 bp, synthetic construct
  source 1..20: mol_type = other DNA
cgtcccagtagatcctgctc

SEQ ID NO: 48392 - DNA, 20 bp, synthetic construct
  source 1..20: mol_type = other DNA
cccatgacgtttggaccccg

SEQ ID NO: 48393 - DNA, 20 bp, synthetic construct
  source 1..20: mol_type = other DNA
cgggagcctgggactcaggt

SEQ ID NO: 48394 - DNA, 20 bp, synthetic construct
  source 1..20: mol_type = other DNA
ccccgcggccaccactggca

SEQ ID NO: 48395 - DNA, 20 bp, synthetic construct
  source 1..20: mol_type = other DNA
cggagagttcggcatgagcg

SEQ ID NO: 48396 - DNA, 20 bp, synthetic construct
  source 1..20: mol_type = other DNA
ctaccgggaaatcctcgtga

SEQ ID NO: 48397 - DNA, 20 bp, synthetic construct
  source 1..20: mol_type = other DNA
gctccttcacgaggatttcc

SEQ ID NO: 48398 - DNA, 20 bp, synthetic construct
  source 1..20: mol_type = other DNA
ggacatctgcgggtcctcca

SEQ ID NO: 48399 - DNA, 20 bp, synthetic construct
  source 1..20: mol_type = other DNA
ctgcaagcgtttgctcacca

SEQ ID NO: 48400 - DNA, 20 bp, synthetic construct
  source 1..20: mol_type = other DNA
aggagtttccagaccctcag

SEQ ID NO: 48401 - DNA, 20 bp, synthetic construct
  source 1..20: mol_type = other DNA
acgggtctgagatgtccagc

SEQ ID NO: 48402 - DNA, 20 bp, synthetic construct
  source 1..20: mol_type = other DNA
gaaaaatgatctctggtgtg

SEQ ID NO: 48403 - DNA, 20 bp, synthetic construct
  source 1..20: mol_type = other DNA
tacctgcacgagaatgagtt

SEQ ID NO: 48404 - DNA, 20 bp, synthetic construct
  source 1..20: mol_type = other DNA
tggaaggagctgactccgac

SEQ ID NO: 48405 - DNA, 20 bp, synthetic construct
  source 1..20: mol_type = other DNA
tgatgacggcttccatttcg

SEQ ID NO: 48406 - DNA, 20 bp, synthetic construct
  source 1..20: mol_type = other DNA
gggcaggacctgcaaggaga

SEQ ID NO: 48407 - DNA, 20 bp, synthetic construct
  source 1..20: mol_type = other DNA
cactacactcaacacgccgc

SEQ ID NO: 48408 - DNA, 20 bp, synthetic construct
  source 1..20: mol_type = other DNA
agggcaggacctgcaaggag

SEQ ID NO: 48409 - DNA, 20 bp, synthetic construct
  source 1..20: mol_type = other DNA
ctttctccttgttggggcat

SEQ ID NO: 48410 - DNA, 20 bp, synthetic construct
  source 1..20: mol_type = other DNA
gggccggagcagccaggagc

SEQ ID NO: 48411 - DNA, 20 bp, synthetic construct
  source 1..20: mol_type = other DNA
acagaactcaccgcacccga

SEQ ID NO: 48412 - DNA, 20 bp, synthetic construct
  source 1..20: mol_type = other DNA
tggcgtgcagatcaatgtcc

SEQ ID NO: 48413 - DNA, 20 bp, synthetic construct
  source 1..20: mol_type = other DNA
ggagtcgtaggtgactttca

SEQ ID NO: 48414 - DNA, 20 bp, synthetic construct
  source 1..20: mol_type = other DNA
ccttgccatggcagaggctg

SEQ ID NO: 48415 - DNA, 20 bp, synthetic construct
  source 1..20: mol_type = other DNA
ctaccagctgcctctgtgcc

SEQ ID NO: 48416 - DNA, 20 bp, synthetic construct
  source 1..20: mol_type = other DNA
catactttgaagatcgtcat

SEQ ID NO: 48417 - DNA, 20 bp, synthetic construct
  source 1..20: mol_type = other DNA
tccagcagtgattcataatc

SEQ ID NO: 48418 - DNA, 20 bp, synthetic construct
  source 1..20: mol_type = other DNA
gaggaggtaagctctagagc

SEQ ID NO: 48419 - DNA, 20 bp, synthetic construct
  source 1..20: mol_type = other DNA
gattcactggtggagagtcc

SEQ ID NO: 48420 - DNA, 20 bp, synthetic construct
  source 1..20: mol_type = other DNA
cgcagcagtctggagaaggc

SEQ ID NO: 48421 - DNA, 20 bp, synthetic construct
  source 1..20: mol_type = other DNA
gggcatggcctacctggaag

SEQ ID NO: 48422 - DNA, 20 bp, synthetic construct
  source 1..20: mol_type = other DNA
atatgtaccaagcagttatc

SEQ ID NO: 48423 - DNA, 20 bp, synthetic construct
  source 1..20: mol_type = other DNA
gtttcttcaggttcccaaag

SEQ ID NO: 48424 - DNA, 20 bp, synthetic construct
  source 1..20: mol_type = other DNA
tcttgtaggtgtgctgatgt

SEQ ID NO: 48425 - DNA, 20 bp, synthetic construct
  source 1..20: mol_type = other DNA
gagacttggtatgagcatgc

SEQ ID NO: 48426 - DNA, 20 bp, synthetic construct
  source 1..20: mol_type = other DNA
gacacatgcctcttccaggt

SEQ ID NO: 48427 - DNA, 20 bp, synthetic construct
  source 1..20: mol_type = other DNA
gcttacctcctccattatgt

SEQ ID NO: 48428 - DNA, 20 bp, synthetic construct
  source 1..20: mol_type = other DNA
aaagtatgccaggctggctt

SEQ ID NO: 48429 - DNA, 20 bp, synthetic construct
  source 1..20: mol_type = other DNA
ggctgccagaaattgtttgg

SEQ ID NO: 48430 - DNA, 20 bp, synthetic construct
  source 1..20: mol_type = other DNA
gcatactttgaagatcgtca

SEQ ID NO: 48431 - DNA, 20 bp, synthetic construct
  source 1..20: mol_type = other DNA
ggagcaggcccccatctgcc

SEQ ID NO: 48432 - DNA, 20 bp, synthetic construct
  source 1..20: mol_type = other DNA
tgatgagctgttcttccagg

SEQ ID NO: 48433 - DNA, 20 bp, synthetic construct
  source 1..20: mol_type = other DNA
gggccagcacccagcgctgc

SEQ ID NO: 48434 - DNA, 20 bp, synthetic construct
  source 1..20: mol_type = other DNA
ctatcaaaaccattcgggaa

SEQ ID NO: 48435 - DNA, 20 bp, synthetic construct
  source 1..20: mol_type = other DNA
ggaggtaagctctagagcag

SEQ ID NO: 48436 - DNA, 20 bp, synthetic construct
  source 1..20: mol_type = other DNA
tatcaccaacataatggagg

SEQ ID NO: 48437 - DNA, 20 bp, synthetic construct
  source 1..20: mol_type = other DNA
tcactcaccctgttgtcttc

SEQ ID NO: 48438 - DNA, 20 bp, synthetic construct
  source 1..20: mol_type = other DNA
atcctaatttctggatggat

SEQ ID NO: 48439 - DNA, 20 bp, synthetic construct
  source 1..20: mol_type = other DNA
atttctggatggatgggaag

SEQ ID NO: 48440 - DNA, 20 bp, synthetic construct
  source 1..20: mol_type = other DNA
aggaggtaagctctagagca

SEQ ID NO: 48441 - DNA, 20 bp, synthetic construct
  source 1..20: mol_type = other DNA
agacttggtatgagcatgca

SEQ ID NO: 48442 - DNA, 20 bp, synthetic construct
  source 1..20: mol_type = other DNA
ctctccagagaccagaagat

SEQ ID NO: 48443 - DNA, 20 bp, synthetic construct
  source 1..20: mol_type = other DNA
ccacagtagtacacgtcatc

SEQ ID NO: 48444 - DNA, 20 bp, synthetic construct
  source 1..20: mol_type = other DNA
ccaccgcgacggcgtcgggg

SEQ ID NO: 48445 - DNA, 20 bp, synthetic construct
  source 1..20: mol_type = other DNA
tcacgtttctgaatacctgt

SEQ ID NO: 48446 - DNA, 20 bp, synthetic construct
  source 1..20: mol_type = other DNA
ggcagccagcatgatgagac

SEQ ID NO: 48447 - DNA, 20 bp, synthetic construct
  source 1..20: mol_type = other DNA
tgagaacgagtgtctaggga

SEQ ID NO: 48448 - DNA, 20 bp, synthetic construct
  source 1..20: mol_type = other DNA
tcagccagctccttacatga

SEQ ID NO: 48449 - DNA, 20 bp, synthetic construct
  source 1..20: mol_type = other DNA
tctccttgatgccagctcac

SEQ ID NO: 48450 - DNA, 20 bp, synthetic construct
  source 1..20: mol_type = other DNA
ttgatgacaagatgtccctc

SEQ ID NO: 48451 - DNA, 20 bp, synthetic construct
  source 1..20: mol_type = other DNA
gcggataaataatgttttca

SEQ ID NO: 48452 - DNA, 20 bp, synthetic construct
  source 1..20: mol_type = other DNA
agcaccgtaatggggatgcc

SEQ ID NO: 48453 - DNA, 20 bp, synthetic construct
  source 1..20: mol_type = other DNA
tctccaaagaagcagaaaaa

SEQ ID NO: 48454 - DNA, 20 bp, synthetic construct
  source 1..20: mol_type = other DNA
gtgttctcgtgcctctccca

SEQ ID NO: 48455 - DNA, 20 bp, synthetic construct
  source 1..20: mol_type = other DNA
ttctgatgaaatcagtaaca

SEQ ID NO: 48456 - DNA, 20 bp, synthetic construct
  source 1..20: mol_type = other DNA
tttgctcaggtaggaagttt

SEQ ID NO: 48457 - DNA, 20 bp, synthetic construct
  source 1..20: mol_type = other DNA
aaattgaacttagctcatta

SEQ ID NO: 48458 - DNA, 20 bp, synthetic construct
  source 1..20: mol_type = other DNA
agctacaattttatgaagat

SEQ ID NO: 48459 - DNA, 20 bp, synthetic construct
  source 1..20: mol_type = other DNA
gaacctggaagtggtccttc

SEQ ID NO: 48460 - DNA, 20 bp, synthetic construct
  source 1..20: mol_type = other DNA
gagctagatccctaaaggag

SEQ ID NO: 48461 - DNA, 20 bp, synthetic construct
  source 1..20: mol_type = other DNA
accattataataactggaaa

SEQ ID NO: 48462 - DNA, 20 bp, synthetic construct
  source 1..20: mol_type = other DNA
aaatatgaggataggtgccc

SEQ ID NO: 48463 - DNA, 20 bp, synthetic construct
  source 1..20: mol_type = other DNA
atagagttatagatggccag

SEQ ID NO: 48464 - DNA, 20 bp, synthetic construct
  source 1..20: mol_type = other DNA
aattgaacttagctcattaa

SEQ ID NO: 48465 - DNA, 20 bp, synthetic construct
  source 1..20: mol_type = other DNA
aagggagtgtgctacagtgc

SEQ ID NO: 48466 - DNA, 20 bp, synthetic construct
  source 1..20: mol_type = other DNA
agataaacctctaagtgctc

SEQ ID NO: 48467 - DNA, 20 bp, synthetic construct
  source 1..20: mol_type = other DNA
tctacaggacaacactgggg

SEQ ID NO: 48468 - DNA, 20 bp, synthetic construct
  source 1..20: mol_type = other DNA
tccaaagctccaaacatctg

SEQ ID NO: 48469 - DNA, 20 bp, synthetic construct
  source 1..20: mol_type = other DNA
aaatcaacgcccctccttta

SEQ ID NO: 48470 - DNA, 20 bp, synthetic construct
  source 1..20: mol_type = other DNA
acgagagtaagtaaaactac

SEQ ID NO: 48471 - DNA, 20 bp, synthetic construct
  source 1..20: mol_type = other DNA
taaagatacacctgaagaac

SEQ ID NO: 48472 - DNA, 20 bp, synthetic construct
  source 1..20: mol_type = other DNA
gtagattttactttcctcgt

SEQ ID NO: 48473 - DNA, 20 bp, synthetic construct
  source 1..20: mol_type = other DNA
ttttctatggggagaggatg

SEQ ID NO: 48474 - DNA, 20 bp, synthetic construct
  source 1..20: mol_type = other DNA
caagtggggcttcggcgcca

SEQ ID NO: 48475 - DNA, 20 bp, synthetic construct
  source 1..20: mol_type = other DNA
agaggtgctgctgaaggtca

SEQ ID NO: 48476 - DNA, 20 bp, synthetic construct
  source 1..20: mol_type = other DNA
cagcgccctgggcccccagc

SEQ ID NO: 48477 - DNA, 20 bp, synthetic construct
  source 1..20: mol_type = other DNA
catgctgtggagcggaagcc

SEQ ID NO: 48478 - DNA, 20 bp, synthetic construct
  source 1..20: mol_type = other DNA
ctcttggaactgctggagga

SEQ ID NO: 48479 - DNA, 20 bp, synthetic construct
  source 1..20: mol_type = other DNA
caccattcagcatgagaacc

SEQ ID NO: 48480 - DNA, 20 bp, synthetic construct
  source 1..20: mol_type = other DNA
agggtcactcagcttgatga

SEQ ID NO: 48481 - DNA, 20 bp, synthetic construct
  source 1..20: mol_type = other DNA
caggagttcctgcggatgat

SEQ ID NO: 48482 - DNA, 20 bp, synthetic construct
  source 1..20: mol_type = other DNA
gcgcagagccctgcgccgcg

SEQ ID NO: 48483 - DNA, 20 bp, synthetic construct
  source 1..20: mol_type = other DNA
tggggaggcccgaaagacag

SEQ ID NO: 48484 - DNA, 20 bp, synthetic construct
  source 1..20: mol_type = other DNA
ggaggcgcagacacttagct

SEQ ID NO: 48485 - DNA, 20 bp, synthetic construct
  source 1..20: mol_type = other DNA
ggagcggctggatccagccg

SEQ ID NO: 48486 - DNA, 20 bp, synthetic construct
  source 1..20: mol_type = other DNA
tctctcgccagtcagacgtc

SEQ ID NO: 48487 - DNA, 20 bp, synthetic construct
  source 1..20: mol_type = other DNA
tgggtgggctgtgacctctc

SEQ ID NO: 48488 - DNA, 20 bp, synthetic construct
  source 1..20: mol_type = other DNA
tctccggccgggccaacgcg

SEQ ID NO: 48489 - DNA, 20 bp, synthetic construct
  source 1..20: mol_type = other DNA
ttgctgaggtttgcgtagac

SEQ ID NO: 48490 - DNA, 20 bp, synthetic construct
  source 1..20: mol_type = other DNA
ttggggttactgtagccata

SEQ ID NO: 48491 - DNA, 20 bp, synthetic construct
  source 1..20: mol_type = other DNA
ggtcaacggggcaggcatgg

SEQ ID NO: 48492 - DNA, 20 bp, synthetic construct
  source 1..20: mol_type = other DNA
gagcaggagggcttcgccga

SEQ ID NO: 48493 - DNA, 20 bp, synthetic construct
  source 1..20: mol_type = other DNA
gaactcggagctggcgtcca

SEQ ID NO: 48494 - DNA, 20 bp, synthetic construct
  source 1..20: mol_type = other DNA
cttggggcacaggaactggg

SEQ ID NO: 48495 - DNA, 20 bp, synthetic construct
  source 1..20: mol_type = other DNA
cagggctttgacaaagccgt

SEQ ID NO: 48496 - DNA, 20 bp, synthetic construct
  source 1..20: mol_type = other DNA
gacgctcaaggccgagaacg

SEQ ID NO: 48497 - DNA, 20 bp, synthetic construct
  source 1..20: mol_type = other DNA
gtgtaaacgggaggtggctc

SEQ ID NO: 48498 - DNA, 20 bp, synthetic construct
  source 1..20: mol_type = other DNA
gggccccccggtagcgccca

SEQ ID NO: 48499 - DNA, 20 bp, synthetic construct
  source 1..20: mol_type = other DNA
ggggtaaaagtactgtcccg

SEQ ID NO: 48500 - DNA, 20 bp, synthetic construct
  source 1..20: mol_type = other DNA
cgggggcgtctacgccggcc

SEQ ID NO: 48501 - DNA, 20 bp, synthetic construct
  source 1..20: mol_type = other DNA
agcgcaagcggctgcggaac

SEQ ID NO: 48502 - DNA, 20 bp, synthetic construct
  source 1..20: mol_type = other DNA
tgcgctccagcttccgcttc

SEQ ID NO: 48503 - DNA, 20 bp, synthetic construct
  source 1..20: mol_type = other DNA
cacctgctcccggaggaggc

SEQ ID NO: 48504 - DNA, 20 bp, synthetic construct
  source 1..20: mol_type = other DNA
atgttgatgggggacaccgg

SEQ ID NO: 48505 - DNA, 20 bp, synthetic construct
  source 1..20: mol_type = other DNA
gctgacagccgttgctgacg

SEQ ID NO: 48506 - DNA, 20 bp, synthetic construct
  source 1..20: mol_type = other DNA
agaccaagagcgcatcaaag

SEQ ID NO: 48507 - DNA, 20 bp, synthetic construct
  source 1..20: mol_type = other DNA
ggcgcctcccgaggacgcag

SEQ ID NO: 48508 - DNA, 20 bp, synthetic construct
  source 1..20: mol_type = other DNA
actcgacagccccgcgttct

SEQ ID NO: 48509 - DNA, 20 bp, synthetic construct
  source 1..20: mol_type = other DNA
ctgcggttcctccttgaagg

SEQ ID NO: 48510 - DNA, 20 bp, synthetic construct
  source 1..20: mol_type = other DNA
cccggcccagagggcggcgg

SEQ ID NO: 48511 - DNA, 20 bp, synthetic construct
  source 1..20: mol_type = other DNA
gctgggccacctgctcccgg

SEQ ID NO: 48512 - DNA, 20 bp, synthetic construct
  source 1..20: mol_type = other DNA
ggggccccccggtagcgccc

SEQ ID NO: 48513 - DNA, 20 bp, synthetic construct
  source 1..20: mol_type = other DNA
gggccacctgctcccggagg

SEQ ID NO: 48514 - DNA, 20 bp, synthetic construct
  source 1..20: mol_type = other DNA
ggacaaggtgaagacgctca

SEQ ID NO: 48515 - DNA, 20 bp, synthetic construct
  source 1..20: mol_type = other DNA
catcgcgcgcctggaggaca

SEQ ID NO: 48516 - DNA, 20 bp, synthetic construct
  source 1..20: mol_type = other DNA
ggagcgcatcgcgcgcctgg

SEQ ID NO: 48517 - DNA, 20 bp, synthetic construct
  source 1..20: mol_type = other DNA
ggcacttggtggccgccagc

SEQ ID NO: 48518 - DNA, 20 bp, synthetic construct
  source 1..20: mol_type = other DNA
tctggtcagggctcggacac

SEQ ID NO: 48519 - DNA, 20 bp, synthetic construct
  source 1..20: mol_type = other DNA
gcggctgcggaaccggctgg

SEQ ID NO: 48520 - DNA, 20 bp, synthetic construct
  source 1..20: mol_type = other DNA
gggcccagccgggggccccc

SEQ ID NO: 48521 - DNA, 20 bp, synthetic construct
  source 1..20: mol_type = other DNA
aagtggagcgcaagcggctg

SEQ ID NO: 48522 - DNA, 20 bp, synthetic construct
  source 1..20: mol_type = other DNA
agacgcccccgggcccagcc

SEQ ID NO: 48523 - DNA, 20 bp, synthetic construct
  source 1..20: mol_type = other DNA
caagcggctgcggaaccggc

SEQ ID NO: 48524 - DNA, 20 bp, synthetic construct
  source 1..20: mol_type = other DNA
cgctcaaggccgagaacgcg

SEQ ID NO: 48525 - DNA, 20 bp, synthetic construct
  source 1..20: mol_type = other DNA
ggccggcagcatgatgaaga

SEQ ID NO: 48526 - DNA, 20 bp, synthetic construct
  source 1..20: mol_type = other DNA
gcgcctgggggtggcggcgg

SEQ ID NO: 48527 - DNA, 20 bp, synthetic construct
  source 1..20: mol_type = other DNA
cccaacgcgcctgggggtgg

SEQ ID NO: 48528 - DNA, 20 bp, synthetic construct
  source 1..20: mol_type = other DNA
gctgagcctgagtgagcagg

SEQ ID NO: 48529 - DNA, 20 bp, synthetic construct
  source 1..20: mol_type = other DNA
ctccgtgttctgactcttga

SEQ ID NO: 48530 - DNA, 20 bp, synthetic construct
  source 1..20: mol_type = other DNA
cgcgtactgagtccgcgcgc

SEQ ID NO: 48531 - DNA, 20 bp, synthetic construct
  source 1..20: mol_type = other DNA
cttgcgcttgcggcacttgg

SEQ ID NO: 48532 - DNA, 20 bp, synthetic construct
  source 1..20: mol_type = other DNA
aggccagcttcagcagcccc

SEQ ID NO: 48533 - DNA, 20 bp, synthetic construct
  source 1..20: mol_type = other DNA
tctcttcctagtctctcaca

SEQ ID NO: 48534 - DNA, 20 bp, synthetic construct
  source 1..20: mol_type = other DNA
cagcagcgaggccaacggga

SEQ ID NO: 48535 - DNA, 20 bp, synthetic construct
  source 1..20: mol_type = other DNA
ccctcctccttctgaggaag

SEQ ID NO: 48536 - DNA, 20 bp, synthetic construct
  source 1..20: mol_type = other DNA
agctgggggctgcaggcagt

SEQ ID NO: 48537 - DNA, 20 bp, synthetic construct
  source 1..20: mol_type = other DNA
tggagtacttccaggccacc

SEQ ID NO: 48538 - DNA, 20 bp, synthetic construct
  source 1..20: mol_type = other DNA
gtggaggtcctcttcatcct

SEQ ID NO: 48539 - DNA, 20 bp, synthetic construct
  source 1..20: mol_type = other DNA
agctctgtcacctttggggg

SEQ ID NO: 48540 - DNA, 20 bp, synthetic construct
  source 1..20: mol_type = other DNA
cccttcatcctgttgcactg

SEQ ID NO: 48541 - DNA, 20 bp, synthetic construct
  source 1..20: mol_type = other DNA
cagctacaacctgggtgctg

SEQ ID NO: 48542 - DNA, 20 bp, synthetic construct
  source 1..20: mol_type = other DNA
gccaggggacagcagggggc

SEQ ID NO: 48543 - DNA, 20 bp, synthetic construct
  source 1..20: mol_type = other DNA
aggagggtctggggtccaag

SEQ ID NO: 48544 - DNA, 20 bp, synthetic construct
  source 1..20: mol_type = other DNA
tgatatccttgaaggaaaag

SEQ ID NO: 48545 - DNA, 20 bp, synthetic construct
  source 1..20: mol_type = other DNA
tattggccttcatgcctccc

SEQ ID NO: 48546 - DNA, 20 bp, synthetic construct
  source 1..20: mol_type = other DNA
tgcctcaagaggcttggggt

SEQ ID NO: 48547 - DNA, 20 bp, synthetic construct
  source 1..20: mol_type = other DNA
ttcaaggatatcactcagag

SEQ ID NO: 48548 - DNA, 20 bp, synthetic construct
  source 1..20: mol_type = other DNA
cttcatgaccggcatggccc

SEQ ID NO: 48549 - DNA, 20 bp, synthetic construct
  source 1..20: mol_type = other DNA
cttcacctcctcagcctcac

SEQ ID NO: 48550 - DNA, 20 bp, synthetic construct
  source 1..20: mol_type = other DNA
ataaggaaggagaggagaca

SEQ ID NO: 48551 - DNA, 20 bp, synthetic construct
  source 1..20: mol_type = other DNA
gacctccggacctcagtccc

SEQ ID NO: 48552 - DNA, 20 bp, synthetic construct
  source 1..20: mol_type = other DNA
tctctgggccgtagaggaaa

SEQ ID NO: 48553 - DNA, 20 bp, synthetic construct
  source 1..20: mol_type = other DNA
cctgggagaggcgaggggat

SEQ ID NO: 48554 - DNA, 20 bp, synthetic construct
  source 1..20: mol_type = other DNA
cacgttgccaaagcccacac

SEQ ID NO: 48555 - DNA, 20 bp, synthetic construct
  source 1..20: mol_type = other DNA
tccctgtcccctgccctggc

SEQ ID NO: 48556 - DNA, 20 bp, synthetic construct
  source 1..20: mol_type = other DNA
gtggaaatgctcttcatcct

SEQ ID NO: 48557 - DNA, 20 bp, synthetic construct
  source 1..20: mol_type = other DNA
ggggagccacctggaaattt

SEQ ID NO: 48558 - DNA, 20 bp, synthetic construct
  source 1..20: mol_type = other DNA
agctgtggacaaggagggtc

SEQ ID NO: 48559 - DNA, 20 bp, synthetic construct
  source 1..20: mol_type = other DNA
tgatgttgaagatgtaaagc

SEQ ID NO: 48560 - DNA, 20 bp, synthetic construct
  source 1..20: mol_type = other DNA
atgtcagctctcagctcgtc

SEQ ID NO: 48561 - DNA, 20 bp, synthetic construct
  source 1..20: mol_type = other DNA
ggctgctgcagaagctggag

SEQ ID NO: 48562 - DNA, 20 bp, synthetic construct
  source 1..20: mol_type = other DNA
gcctccactacctggccacc

SEQ ID NO: 48563 - DNA, 20 bp, synthetic construct
  source 1..20: mol_type = other DNA
ctgtagggggcgcctgggag

SEQ ID NO: 48564 - DNA, 20 bp, synthetic construct
  source 1..20: mol_type = other DNA
gggggaatgagaagctgagg

SEQ ID NO: 48565 - DNA, 20 bp, synthetic construct
  source 1..20: mol_type = other DNA
tgtccccgcggcctccttgg

SEQ ID NO: 48566 - DNA, 20 bp, synthetic construct
  source 1..20: mol_type = other DNA
gcttcaaatagaaaagtcac

SEQ ID NO: 48567 - DNA, 20 bp, synthetic construct
  source 1..20: mol_type = other DNA
cttcttggacaacctggtag

SEQ ID NO: 48568 - DNA, 20 bp, synthetic construct
  source 1..20: mol_type = other DNA
gcttacagaccagaacgagc

SEQ ID NO: 48569 - DNA, 20 bp, synthetic construct
  source 1..20: mol_type = other DNA
tgcaaagagcaaaaccgtga

SEQ ID NO: 48570 - DNA, 20 bp, synthetic construct
  source 1..20: mol_type = other DNA
atataggcacttcggatcga

SEQ ID NO: 48571 - DNA, 20 bp, synthetic construct
  source 1..20: mol_type = other DNA
tggggaaacccttagccacc

SEQ ID NO: 48572 - DNA, 20 bp, synthetic construct
  source 1..20: mol_type = other DNA
gtatgaaaatcaggtgttcc

SEQ ID NO: 48573 - DNA, 20 bp, synthetic construct
  source 1..20: mol_type = other DNA
agaggaagagaatctgcttc

SEQ ID NO: 48574 - DNA, 20 bp, synthetic construct
  source 1..20: mol_type = other DNA
catctgcgcacgcacacagg

SEQ ID NO: 48575 - DNA, 20 bp, synthetic construct
  source 1..20: mol_type = other DNA
atgaaacggcacatgtagcc

SEQ ID NO: 48576 - DNA, 20 bp, synthetic construct
  source 1..20: mol_type = other DNA
caccaagagttcgcatctga

SEQ ID NO: 48577 - DNA, 20 bp, synthetic construct
  source 1..20: mol_type = other DNA
caagagcggcggccgcgctt

SEQ ID NO: 48578 - DNA, 20 bp, synthetic construct
  source 1..20: mol_type = other DNA
tcgcacagatggcactggaa

SEQ ID NO: 48579 - DNA, 20 bp, synthetic construct
  source 1..20: mol_type = other DNA
ccctaccactgcaactggga

SEQ ID NO: 48580 - DNA, 20 bp, synthetic construct
  source 1..20: mol_type = other DNA
acagatggcactggaatggc

SEQ ID NO: 48581 - DNA, 20 bp, synthetic construct
  source 1..20: mol_type = other DNA
agaaggcacgatcgcacaga

SEQ ID NO: 48582 - DNA, 20 bp, synthetic construct
  source 1..20: mol_type = other DNA
cacgatcgcacagatggcac

SEQ ID NO: 48583 - DNA, 20 bp, synthetic construct
  source 1..20: mol_type = other DNA
gaagccctaccactgcaact

SEQ ID NO: 48584 - DNA, 20 bp, synthetic construct
  source 1..20: mol_type = other DNA
gatggcactggaatggccgg

SEQ ID NO: 48585 - DNA, 20 bp, synthetic construct
  source 1..20: mol_type = other DNA
catgtgcagcgccaggtgat

SEQ ID NO: 48586 - DNA, 20 bp, synthetic construct
  source 1..20: mol_type = other DNA
ccgtcccagttgcagtggta

SEQ ID NO: 48587 - DNA, 20 bp, synthetic construct
  source 1..20: mol_type = other DNA
cgcagccgtcccagttgcag

SEQ ID NO: 48588 - DNA, 20 bp, synthetic construct
  source 1..20: mol_type = other DNA
agaagccctaccactgcaac

SEQ ID NO: 48589 - DNA, 20 bp, synthetic construct
  source 1..20: mol_type = other DNA
tgaagtccagcacgctgttg

SEQ ID NO: 48590 - DNA, 20 bp, synthetic construct
  source 1..20: mol_type = other DNA
gcgccactaccgaaagcaca

SEQ ID NO: 48591 - DNA, 20 bp, synthetic construct
  source 1..20: mol_type = other DNA
cctcctgcaggccgcgctcg

SEQ ID NO: 48592 - DNA, 20 bp, synthetic construct
  source 1..20: mol_type = other DNA
accgaaagcacacgggccac

SEQ ID NO: 48593 - DNA, 20 bp, synthetic construct
  source 1..20: mol_type = other DNA
ccgccgccctcacctcctgc

SEQ ID NO: 48594 - DNA, 20 bp, synthetic construct
  source 1..20: mol_type = other DNA
cgggctggcgaaagtggaga

SEQ ID NO: 48595 - DNA, 20 bp, synthetic construct
  source 1..20: mol_type = other DNA
agcgccatggccgggacccg

SEQ ID NO: 48596 - DNA, 20 bp, synthetic construct
  source 1..20: mol_type = other DNA
agggcttctcacctgcaggg

SEQ ID NO: 48597 - DNA, 20 bp, synthetic construct
  source 1..20: mol_type = other DNA
gccgtcccagttgcagtggt

SEQ ID NO: 48598 - DNA, 20 bp, synthetic construct
  source 1..20: mol_type = other DNA
gtagctgcaggtgtgagtgg

SEQ ID NO: 48599 - DNA, 20 bp, synthetic construct
  source 1..20: mol_type = other DNA
gccgcagcccgcgtagctgc

SEQ ID NO: 48600 - DNA, 20 bp, synthetic construct
  source 1..20: mol_type = other DNA
gctgcgggcgacagggcaat

SEQ ID NO: 48601 - DNA, 20 bp, synthetic construct
  source 1..20: mol_type = other DNA
tggacttcatcctgtccatg

SEQ ID NO: 48602 - DNA, 20 bp, synthetic construct
  source 1..20: mol_type = other DNA
cgccactaccgaaagcacac

SEQ ID NO: 48603 - DNA, 20 bp, synthetic construct
  source 1..20: mol_type = other DNA
cgccttcagatgcgaactct

SEQ ID NO: 48604 - DNA, 20 bp, synthetic construct
  source 1..20: mol_type = other DNA
gcgcatctgcgcacgcacac

SEQ ID NO: 48605 - DNA, 20 bp, synthetic construct
  source 1..20: mol_type = other DNA
tgagctgctgcgacccgagc

SEQ ID NO: 48606 - DNA, 20 bp, synthetic construct
  source 1..20: mol_type = other DNA
tcagcgccatggccgggacc

SEQ ID NO: 48607 - DNA, 20 bp, synthetic construct
  source 1..20: mol_type = other DNA
tcgtgcatgcgaggtcccgg

SEQ ID NO: 48608 - DNA, 20 bp, synthetic construct
  source 1..20: mol_type = other DNA
cagatgcgaactcttggtgt

SEQ ID NO: 48609 - DNA, 20 bp, synthetic construct
  source 1..20: mol_type = other DNA
ctggcgaaagtggagaagga

SEQ ID NO: 48610 - DNA, 20 bp, synthetic construct
  source 1..20: mol_type = other DNA
acctggcgctgcacatgaaa

SEQ ID NO: 48611 - DNA, 20 bp, synthetic construct
  source 1..20: mol_type = other DNA
caggtgatcggagcgcgaga

SEQ ID NO: 48612 - DNA, 20 bp, synthetic construct
  source 1..20: mol_type = other DNA
ggccagcgctgcgggcgaca

SEQ ID NO: 48613 - DNA, 20 bp, synthetic construct
  source 1..20: mol_type = other DNA
cagcgccatggccgggaccc

SEQ ID NO: 48614 - DNA, 20 bp, synthetic construct
  source 1..20: mol_type = other DNA
tgccgagctcttctcacaga

SEQ ID NO: 48615 - DNA, 20 bp, synthetic construct
  source 1..20: mol_type = other DNA
ccagatggcggctgagctca

SEQ ID NO: 48616 - DNA, 20 bp, synthetic construct
  source 1..20: mol_type = other DNA
agatatgtctcttcatgtgg

SEQ ID NO: 48617 - DNA, 20 bp, synthetic construct
  source 1..20: mol_type = other DNA
taaatcattcacctgctgcc

SEQ ID NO: 48618 - DNA, 20 bp, synthetic construct
  source 1..20: mol_type = other DNA
ctcagctccgtaaaggtggg

SEQ ID NO: 48619 - DNA, 20 bp, synthetic construct
  source 1..20: mol_type = other DNA
tttacactgggtgtgtaaga

SEQ ID NO: 48620 - DNA, 20 bp, synthetic construct
  source 1..20: mol_type = other DNA
aactcttttaatttgttctc

SEQ ID NO: 48621 - DNA, 20 bp, synthetic construct
  source 1..20: mol_type = other DNA
agaacaaattaaaagagtta

SEQ ID NO: 48622 - DNA, 20 bp, synthetic construct
  source 1..20: mol_type = other DNA
tgatggagaaacctgtctct

SEQ ID NO: 48623 - DNA, 20 bp, synthetic construct
  source 1..20: mol_type = other DNA
tttgctgatgtttcaataaa

SEQ ID NO: 48624 - DNA, 20 bp, synthetic construct
  source 1..20: mol_type = other DNA
tctcgacacagcaggtcaag

SEQ ID NO: 48625 - DNA, 20 bp, synthetic construct
  source 1..20: mol_type = other DNA
gaggagtccacttggcagtg

SEQ ID NO: 48626 - DNA, 20 bp, synthetic construct
  source 1..20: mol_type = other DNA
tctctgctccttttggtgac

SEQ ID NO: 48627 - DNA, 20 bp, synthetic construct
  source 1..20: mol_type = other DNA
cgactttacccttcgactag

SEQ ID NO: 48628 - DNA, 20 bp, synthetic construct
  source 1..20: mol_type = other DNA
gcggcagggcagccccaccc

SEQ ID NO: 48629 - DNA, 20 bp, synthetic construct
  source 1..20: mol_type = other DNA
tgctgtttctgcagccgctt

SEQ ID NO: 48630 - DNA, 20 bp, synthetic construct
  source 1..20: mol_type = other DNA
tgggggaggccctgacctcc

SEQ ID NO: 48631 - DNA, 20 bp, synthetic construct
  source 1..20: mol_type = other DNA
tgtggggctgcaggggagct

SEQ ID NO: 48632 - DNA, 20 bp, synthetic construct
  source 1..20: mol_type = other DNA
tggcaatgccagctgtacca

SEQ ID NO: 48633 - DNA, 20 bp, synthetic construct
  source 1..20: mol_type = other DNA
cctccgtctgcgcctgggcc

SEQ ID NO: 48634 - DNA, 20 bp, synthetic construct
  source 1..20: mol_type = other DNA
cttttggtgactggagcctt

SEQ ID NO: 48635 - DNA, 20 bp, synthetic construct
  source 1..20: mol_type = other DNA
cagctggacgcggggctgca

SEQ ID NO: 48636 - DNA, 20 bp, synthetic construct
  source 1..20: mol_type = other DNA
gaggagggcgccgccgggtg

SEQ ID NO: 48637 - DNA, 20 bp, synthetic construct
  source 1..20: mol_type = other DNA
cacgggtgagggcgaggggc

SEQ ID NO: 48638 - DNA, 20 bp, synthetic construct
  source 1..20: mol_type = other DNA
gggtggcgcagggggcgctg

SEQ ID NO: 48639 - DNA, 20 bp, synthetic construct
  source 1..20: mol_type = other DNA
tcctaccttagggccactct

SEQ ID NO: 48640 - DNA, 20 bp, synthetic construct
  source 1..20: mol_type = other DNA
ggcagtggaggagtgtctgc

SEQ ID NO: 48641 - DNA, 20 bp, synthetic construct
  source 1..20: mol_type = other DNA
gcagctccagagtcaccagg

SEQ ID NO: 48642 - DNA, 20 bp, synthetic construct
  source 1..20: mol_type = other DNA
gccgcagctcccgctggccg

SEQ ID NO: 48643 - DNA, 20 bp, synthetic construct
  source 1..20: mol_type = other DNA
gtgaactacgacaccaagag

SEQ ID NO: 48644 - DNA, 20 bp, synthetic construct
  source 1..20: mol_type = other DNA
cagctccagagtcaccaggt

SEQ ID NO: 48645 - DNA, 20 bp, synthetic construct
  source 1..20: mol_type = other DNA
ccatcccgaactggaagagc

SEQ ID NO: 48646 - DNA, 20 bp, synthetic construct
  source 1..20: mol_type = other DNA
cgtgcccaagagcccctctg

SEQ ID NO: 48647 - DNA, 20 bp, synthetic construct
  source 1..20: mol_type = other DNA
cagcacgcaggggaccagga

SEQ ID NO: 48648 - DNA, 20 bp, synthetic construct
  source 1..20: mol_type = other DNA
ctactcacgggatggggagc

SEQ ID NO: 48649 - DNA, 20 bp, synthetic construct
  source 1..20: mol_type = other DNA
cacacacagtgccatcaaca

SEQ ID NO: 48650 - DNA, 20 bp, synthetic construct
  source 1..20: mol_type = other DNA
gtgtcccaggaactgcatcc

SEQ ID NO: 48651 - DNA, 20 bp, synthetic construct
  source 1..20: mol_type = other DNA
tgaggatgcggatgaggatg

SEQ ID NO: 48652 - DNA, 20 bp, synthetic construct
  source 1..20: mol_type = other DNA
ccagggggcaaccgtgtctg

SEQ ID NO: 48653 - DNA, 20 bp, synthetic construct
  source 1..20: mol_type = other DNA
ggagtatgtgaatgtgtccc

SEQ ID NO: 48654 - DNA, 20 bp, synthetic construct
  source 1..20: mol_type = other DNA
actcacgaggccgtttgaac

SEQ ID NO: 48655 - DNA, 20 bp, synthetic construct
  source 1..20: mol_type = other DNA
gaggacgactatcacaaccc

SEQ ID NO: 48656 - DNA, 20 bp, synthetic construct
  source 1..20: mol_type = other DNA
ccgagctcccctgcagatgg

SEQ ID NO: 48657 - DNA, 20 bp, synthetic construct
  source 1..20: mol_type = other DNA
gcaggagccccagcacgcag

SEQ ID NO: 48658 - DNA, 20 bp, synthetic construct
  source 1..20: mol_type = other DNA
tggccaggatgggcagcagc

SEQ ID NO: 48659 - DNA, 20 bp, synthetic construct
  source 1..20: mol_type = other DNA
accctgaaaggaagtgaaaa

SEQ ID NO: 48660 - DNA, 20 bp, synthetic construct
  source 1..20: mol_type = other DNA
acccccagaaccagcctgtg

SEQ ID NO: 48661 - DNA, 20 bp, synthetic construct
  source 1..20: mol_type = other DNA
cctcagacacggttgccccc

SEQ ID NO: 48662 - DNA, 20 bp, synthetic construct
  source 1..20: mol_type = other DNA
cagcaggagccccagcacgc

SEQ ID NO: 48663 - DNA, 20 bp, synthetic construct
  source 1..20: mol_type = other DNA
agcaggagccccagcacgca

SEQ ID NO: 48664 - DNA, 20 bp, synthetic construct
  source 1..20: mol_type = other DNA
cctccatctgcaggggagct

SEQ ID NO: 48665 - DNA, 20 bp, synthetic construct
  source 1..20: mol_type = other DNA
gcttcaaagagagggtgaga

SEQ ID NO: 48666 - DNA, 20 bp, synthetic construct
  source 1..20: mol_type = other DNA
atggcctcctccatctgcag

SEQ ID NO: 48667 - DNA, 20 bp, synthetic construct
  source 1..20: mol_type = other DNA
cccactcacctggcagtctg

SEQ ID NO: 48668 - DNA, 20 bp, synthetic construct
  source 1..20: mol_type = other DNA
gcagatggaggaggccatcc

SEQ ID NO: 48669 - DNA, 20 bp, synthetic construct
  source 1..20: mol_type = other DNA
gctacctgtgagtggccagg

SEQ ID NO: 48670 - DNA, 20 bp, synthetic construct
  source 1..20: mol_type = other DNA
agtccaggaaggtcatgggt

SEQ ID NO: 48671 - DNA, 20 bp, synthetic construct
  source 1..20: mol_type = other DNA
ttgtgggtgccatgtccgcc

SEQ ID NO: 48672 - DNA, 20 bp, synthetic construct
  source 1..20: mol_type = other DNA
agacgaggaggacggggaac

SEQ ID NO: 48673 - DNA, 20 bp, synthetic construct
  source 1..20: mol_type = other DNA
ttgtccttcctgcagggagg

SEQ ID NO: 48674 - DNA, 20 bp, synthetic construct
  source 1..20: mol_type = other DNA
gcaaatgagcacattctcgt

SEQ ID NO: 48675 - DNA, 20 bp, synthetic construct
  source 1..20: mol_type = other DNA
cgggagagcgagagcaccgc

SEQ ID NO: 48676 - DNA, 20 bp, synthetic construct
  source 1..20: mol_type = other DNA
cccaagtaaggagactgggg

SEQ ID NO: 48677 - DNA, 20 bp, synthetic construct
  source 1..20: mol_type = other DNA
cctgcagattgcagaaggca

SEQ ID NO: 48678 - DNA, 20 bp, synthetic construct
  source 1..20: mol_type = other DNA
cgtagggatgaccaacccgg

SEQ ID NO: 48679 - DNA, 20 bp, synthetic construct
  source 1..20: mol_type = other DNA
ggtcatccctacgggttgat

SEQ ID NO: 48680 - DNA, 20 bp, synthetic construct
  source 1..20: mol_type = other DNA
aggctggtactggccctctg

SEQ ID NO: 48681 - DNA, 20 bp, synthetic construct
  source 1..20: mol_type = other DNA
ggcgcaggagcggcgagtgg

SEQ ID NO: 48682 - DNA, 20 bp, synthetic construct
  source 1..20: mol_type = other DNA
tcctcgcagatgcttcagat

SEQ ID NO: 48683 - DNA, 20 bp, synthetic construct
  source 1..20: mol_type = other DNA
ccgggagagcgagagcaccg

SEQ ID NO: 48684 - DNA, 20 bp, synthetic construct
  source 1..20: mol_type = other DNA
tccaggttctgaatcacctc

SEQ ID NO: 48685 - DNA, 20 bp, synthetic construct
  source 1..20: mol_type = other DNA
gcgccctgacaactgtccag

SEQ ID NO: 48686 - DNA, 20 bp, synthetic construct
  source 1..20: mol_type = other DNA
ggacttcttcacggccacag

SEQ ID NO: 48687 - DNA, 20 bp, synthetic construct
  source 1..20: mol_type = other DNA
gaaagtaggtgggggagagg

SEQ ID NO: 48688 - DNA, 20 bp, synthetic construct
  source 1..20: mol_type = other DNA
tcaccttgcagtggggaagc

SEQ ID NO: 48689 - DNA, 20 bp, synthetic construct
  source 1..20: mol_type = other DNA
gcccatggtccctgagggaa

SEQ ID NO: 48690 - DNA, 20 bp, synthetic construct
  source 1..20: mol_type = other DNA
ttacttgggctgccatgtcc

SEQ ID NO: 48691 - DNA, 20 bp, synthetic construct
  source 1..20: mol_type = other DNA
tgtactcgttgtcctcaatg

SEQ ID NO: 48692 - DNA, 20 bp, synthetic construct
  source 1..20: mol_type = other DNA
gcctcggccaggaaggcgtc

SEQ ID NO: 48693 - DNA, 20 bp, synthetic construct
  source 1..20: mol_type = other DNA
gcggtgaagagcctgaagca

SEQ ID NO: 48694 - DNA, 20 bp, synthetic construct
  source 1..20: mol_type = other DNA
cgtagagccgaaccagccgc

SEQ ID NO: 48695 - DNA, 20 bp, synthetic construct
  source 1..20: mol_type = other DNA
ggcggtgaagagcctgaagc

SEQ ID NO: 48696 - DNA, 20 bp, synthetic construct
  source 1..20: mol_type = other DNA
catgtccaggagtttgttga

SEQ ID NO: 48697 - DNA, 20 bp, synthetic construct
  source 1..20: mol_type = other DNA
cctggggtcaccttgcagtg

SEQ ID NO: 48698 - DNA, 20 bp, synthetic construct
  source 1..20: mol_type = other DNA
tccagcacagcctcatgagt

SEQ ID NO: 48699 - DNA, 20 bp, synthetic construct
  source 1..20: mol_type = other DNA
ttgcagctgcttcatgaggt

SEQ ID NO: 48700 - DNA, 20 bp, synthetic construct
  source 1..20: mol_type = other DNA
ctacctgcgcagtgtgctgg

SEQ ID NO: 48701 - DNA, 20 bp, synthetic construct
  source 1..20: mol_type = other DNA
ctcggccaggaaggcgtccg

SEQ ID NO: 48702 - DNA, 20 bp, synthetic construct
  source 1..20: mol_type = other DNA
tgaagcagctgcaacaccag

SEQ ID NO: 48703 - DNA, 20 bp, synthetic construct
  source 1..20: mol_type = other DNA
tgagctgcagccacagccca

SEQ ID NO: 48704 - DNA, 20 bp, synthetic construct
  source 1..20: mol_type = other DNA
gtactacaacgggcacacga

SEQ ID NO: 48705 - DNA, 20 bp, synthetic construct
  source 1..20: mol_type = other DNA
tcatgaggttggcctcggcc

SEQ ID NO: 48706 - DNA, 20 bp, synthetic construct
  source 1..20: mol_type = other DNA
gccacagcccatggtccctg

SEQ ID NO: 48707 - DNA, 20 bp, synthetic construct
  source 1..20: mol_type = other DNA
cactcgccgctcctgcgcca

SEQ ID NO: 48708 - DNA, 20 bp, synthetic construct
  source 1..20: mol_type = other DNA
ccgaaatggctctgaggtgc

SEQ ID NO: 48709 - DNA, 20 bp, synthetic construct
  source 1..20: mol_type = other DNA
gacttcttcacggccacaga

SEQ ID NO: 48710 - DNA, 20 bp, synthetic construct
  source 1..20: mol_type = other DNA
tgaagcatctgcgaggacga

SEQ ID NO: 48711 - DNA, 20 bp, synthetic construct
  source 1..20: mol_type = other DNA
aggttgtctgtaaagacaag

SEQ ID NO: 48712 - DNA, 20 bp, synthetic construct
  source 1..20: mol_type = other DNA
tgactacctgcgcagtgtgc

SEQ ID NO: 48713 - DNA, 20 bp, synthetic construct
  source 1..20: mol_type = other DNA
gcatggcattcattgaagag

SEQ ID NO: 48714 - DNA, 20 bp, synthetic construct
  source 1..20: mol_type = other DNA
gttctgaatcacctccgggt

SEQ ID NO: 48715 - DNA, 20 bp, synthetic construct
  source 1..20: mol_type = other DNA
tgtgctggaggacttcttca

SEQ ID NO: 48716 - DNA, 20 bp, synthetic construct
  source 1..20: mol_type = other DNA
gaagccccagaagccgtggt

SEQ ID NO: 48717 - DNA, 20 bp, synthetic construct
  source 1..20: mol_type = other DNA
tgggtaagggatgcggccgt

SEQ ID NO: 48718 - DNA, 20 bp, synthetic construct
  source 1..20: mol_type = other DNA
cttacccaggttagagccaa

SEQ ID NO: 48719 - DNA, 20 bp, synthetic construct
  source 1..20: mol_type = other DNA
agctgtggagtgggggatga

SEQ ID NO: 48720 - DNA, 20 bp, synthetic construct
  source 1..20: mol_type = other DNA
tgaaggggatgaagccttcc

SEQ ID NO: 48721 - DNA, 20 bp, synthetic construct
  source 1..20: mol_type = other DNA
cccagaagccccagaagccg

SEQ ID NO: 48722 - DNA, 20 bp, synthetic construct
  source 1..20: mol_type = other DNA
cctacgggttgatgggtgaa

SEQ ID NO: 48723 - DNA, 20 bp, synthetic construct
  source 1..20: mol_type = other DNA
ccacagcccatggtccctga

SEQ ID NO: 48724 - DNA, 20 bp, synthetic construct
  source 1..20: mol_type = other DNA
gtaccagcctcagccttgag

SEQ ID NO: 48725 - DNA, 20 bp, synthetic construct
  source 1..20: mol_type = other DNA
tctaacctgggtaagggatg

SEQ ID NO: 48726 - DNA, 20 bp, synthetic construct
  source 1..20: mol_type = other DNA
aaggagccgtgagtgttccc

SEQ ID NO: 48727 - DNA, 20 bp, synthetic construct
  source 1..20: mol_type = other DNA
ggtgttgcagctgcttcatg

SEQ ID NO: 48728 - DNA, 20 bp, synthetic construct
  source 1..20: mol_type = other DNA
cctcggccaggaaggcgtcc

SEQ ID NO: 48729 - DNA, 20 bp, synthetic construct
  source 1..20: mol_type = other DNA
ctgcgcaggtagtcaaaggt

SEQ ID NO: 48730 - DNA, 20 bp, synthetic construct
  source 1..20: mol_type = other DNA
agtcctccagcacactgcgc

SEQ ID NO: 48731 - DNA, 20 bp, synthetic construct
  source 1..20: mol_type = other DNA
ccgacccagggtactacaac

SEQ ID NO: 48732 - DNA, 20 bp, synthetic construct
  source 1..20: mol_type = other DNA
cacactgcgcaggtagtcaa

SEQ ID NO: 48733 - DNA, 20 bp, synthetic construct
  source 1..20: mol_type = other DNA
ccagaatgttggcagcccga

SEQ ID NO: 48734 - DNA, 20 bp, synthetic construct
  source 1..20: mol_type = other DNA
ggactcactgctccaggatg

SEQ ID NO: 48735 - DNA, 20 bp, synthetic construct
  source 1..20: mol_type = other DNA
cgggctcactggtgtaatgg

SEQ ID NO: 48736 - DNA, 20 bp, synthetic construct
  source 1..20: mol_type = other DNA
gtcccgtagttaatggcttc

SEQ ID NO: 48737 - DNA, 20 bp, synthetic construct
  source 1..20: mol_type = other DNA
gtgctggaaggagcgcccag

SEQ ID NO: 48738 - DNA, 20 bp, synthetic construct
  source 1..20: mol_type = other DNA
caaggtgaccccaggcagca

SEQ ID NO: 48739 - DNA, 20 bp, synthetic construct
  source 1..20: mol_type = other DNA
caaaggtgggccggtcctct

SEQ ID NO: 48740 - DNA, 20 bp, synthetic construct
  source 1..20: mol_type = other DNA
tcaaaggtgggccggtcctc

SEQ ID NO: 48741 - DNA, 20 bp, synthetic construct
  source 1..20: mol_type = other DNA
gttaatggaacctggttgga

SEQ ID NO: 48742 - DNA, 20 bp, synthetic construct
  source 1..20: mol_type = other DNA
agatcaaagttcctgttgac

SEQ ID NO: 48743 - DNA, 20 bp, synthetic construct
  source 1..20: mol_type = other DNA
catagagctggaagatgacc

SEQ ID NO: 48744 - DNA, 20 bp, synthetic construct
  source 1..20: mol_type = other DNA
taaaagccaagttcaacttg

SEQ ID NO: 48745 - DNA, 20 bp, synthetic construct
  source 1..20: mol_type = other DNA
ataaaagccaagttcaactt

SEQ ID NO: 48746 - DNA, 20 bp, synthetic construct
  source 1..20: mol_type = other DNA
cagtgacttatcagatgccc

SEQ ID NO: 48747 - DNA, 20 bp, synthetic construct
  source 1..20: mol_type = other DNA
cacatggcacccgatggctg

SEQ ID NO: 48748 - DNA, 20 bp, synthetic construct
  source 1..20: mol_type = other DNA
cagcccctatgttgaccaca

SEQ ID NO: 48749 - DNA, 20 bp, synthetic construct
  source 1..20: mol_type = other DNA
gtgatctggaccaagatgga

SEQ ID NO: 48750 - DNA, 20 bp, synthetic construct
  source 1..20: mol_type = other DNA
ttaccacctgcttgagcagg

SEQ ID NO: 48751 - DNA, 20 bp, synthetic construct
  source 1..20: mol_type = other DNA
caattgtgtctggcactgac

SEQ ID NO: 48752 - DNA, 20 bp, synthetic construct
  source 1..20: mol_type = other DNA
cttaccttgtcagaaaatgg

SEQ ID NO: 48753 - DNA, 20 bp, synthetic construct
  source 1..20: mol_type = other DNA
aaaccttgagagaagtatgg

SEQ ID NO: 48754 - DNA, 20 bp, synthetic construct
  source 1..20: mol_type = other DNA
cttacggcacccggagcttg

SEQ ID NO: 48755 - DNA, 20 bp, synthetic construct
  source 1..20: mol_type = other DNA
ttaccttcccgctggaatcg

SEQ ID NO: 48756 - DNA, 20 bp, synthetic construct
  source 1..20: mol_type = other DNA
gcagggactggaaggggaaa

SEQ ID NO: 48757 - DNA, 20 bp, synthetic construct
  source 1..20: mol_type = other DNA
cgttaatgtgcactggtatc

SEQ ID NO: 48758 - DNA, 20 bp, synthetic construct
  source 1..20: mol_type = other DNA
cgggcccttaccgatgtaca

SEQ ID NO: 48759 - DNA, 20 bp, synthetic construct
  source 1..20: mol_type = other DNA
tcttcgtggctttctgtgga

SEQ ID NO: 48760 - DNA, 20 bp, synthetic construct
  source 1..20: mol_type = other DNA
tacttacggcacccggagct

SEQ ID NO: 48761 - DNA, 20 bp, synthetic construct
  source 1..20: mol_type = other DNA
taccttcccgctggaatcga

SEQ ID NO: 48762 - DNA, 20 bp, synthetic construct
  source 1..20: mol_type = other DNA
ccttcccaggatgaagatga

SEQ ID NO: 48763 - DNA, 20 bp, synthetic construct
  source 1..20: mol_type = other DNA
acttacggcacccggagctt

SEQ ID NO: 48764 - DNA, 20 bp, synthetic construct
  source 1..20: mol_type = other DNA
aacctttctgagaatgctcc

SEQ ID NO: 48765 - DNA, 20 bp, synthetic construct
  source 1..20: mol_type = other DNA
tagttgagctgcaaagagaa

SEQ ID NO: 48766 - DNA, 20 bp, synthetic construct
  source 1..20: mol_type = other DNA
ttgagagaagtatggtggca

SEQ ID NO: 48767 - DNA, 20 bp, synthetic construct
  source 1..20: mol_type = other DNA
ttctgtctattgaaggagca

SEQ ID NO: 48768 - DNA, 20 bp, synthetic construct
  source 1..20: mol_type = other DNA
atcatacccacctagtgtga

SEQ ID NO: 48769 - DNA, 20 bp, synthetic construct
  source 1..20: mol_type = other DNA
agagacaggtaaagctctca

SEQ ID NO: 48770 - DNA, 20 bp, synthetic construct
  source 1..20: mol_type = other DNA
tcatacccacctagtgtgaa

SEQ ID NO: 48771 - DNA, 20 bp, synthetic construct
  source 1..20: mol_type = other DNA
atgtacatggagttggagtt

SEQ ID NO: 48772 - DNA, 20 bp, synthetic construct
  source 1..20: mol_type = other DNA
agaagcgagccccatcgatg

SEQ ID NO: 48773 - DNA, 20 bp, synthetic construct
  source 1..20: mol_type = other DNA
ctgctggggggttttcccag

SEQ ID NO: 48774 - DNA, 20 bp, synthetic construct
  source 1..20: mol_type = other DNA
catcatcttcatcctgggaa

SEQ ID NO: 48775 - DNA, 20 bp, synthetic construct
  source 1..20: mol_type = other DNA
cttaccgatgtacatggagt

SEQ ID NO: 48776 - DNA, 20 bp, synthetic construct
  source 1..20: mol_type = other DNA
tgctcttagaaagataaacc

SEQ ID NO: 48777 - DNA, 20 bp, synthetic construct
  source 1..20: mol_type = other DNA
agttgagctgcaaagagaag

SEQ ID NO: 48778 - DNA, 20 bp, synthetic construct
  source 1..20: mol_type = other DNA
ctgtctcttcaggaaaccgc

SEQ ID NO: 48779 - DNA, 20 bp, synthetic construct
  source 1..20: mol_type = other DNA
ccagaagttccccaagctcc

SEQ ID NO: 48780 - DNA, 20 bp, synthetic construct
  source 1..20: mol_type = other DNA
ctccaggcatgtgagaggat

SEQ ID NO: 48781 - DNA, 20 bp, synthetic construct
  source 1..20: mol_type = other DNA
gcccaggacctctgagcgaa

SEQ ID NO: 48782 - DNA, 20 bp, synthetic construct
  source 1..20: mol_type = other DNA
tgtacatggagttggagttg

SEQ ID NO: 48783 - DNA, 20 bp, synthetic construct
  source 1..20: mol_type = other DNA
atagttgagctgcaaagaga

SEQ ID NO: 48784 - DNA, 20 bp, synthetic construct
  source 1..20: mol_type = other DNA
cttgcagccctcgattccag

SEQ ID NO: 48785 - DNA, 20 bp, synthetic construct
  source 1..20: mol_type = other DNA
gcctaccgagtgattccggc

SEQ ID NO: 48786 - DNA, 20 bp, synthetic construct
  source 1..20: mol_type = other DNA
tccagaagttccccaagctc

SEQ ID NO: 48787 - DNA, 20 bp, synthetic construct
  source 1..20: mol_type = other DNA
cctgtctcttcaggaaaccg

SEQ ID NO: 48788 - DNA, 20 bp, synthetic construct
  source 1..20: mol_type = other DNA
tacaacaccatgaggacata

SEQ ID NO: 48789 - DNA, 20 bp, synthetic construct
  source 1..20: mol_type = other DNA
ctctcttacctcttcctccg

SEQ ID NO: 48790 - DNA, 20 bp, synthetic construct
  source 1..20: mol_type = other DNA
gatgtacatggagttggagt

SEQ ID NO: 48791 - DNA, 20 bp, synthetic construct
  source 1..20: mol_type = other DNA
ccttcttgaaatagtcagca

SEQ ID NO: 48792 - DNA, 20 bp, synthetic construct
  source 1..20: mol_type = other DNA
cttcctgcccacacagtgat

SEQ ID NO: 48793 - DNA, 20 bp, synthetic construct
  source 1..20: mol_type = other DNA
ccttgctgactatttcaaga

SEQ ID NO: 48794 - DNA, 20 bp, synthetic construct
  source 1..20: mol_type = other DNA
tcttacctcttcctccgcgg

SEQ ID NO: 48795 - DNA, 20 bp, synthetic construct
  source 1..20: mol_type = other DNA
ggccggtctgtggaaacaca

SEQ ID NO: 48796 - DNA, 20 bp, synthetic construct
  source 1..20: mol_type = other DNA
agtgccatggctgctctccc

SEQ ID NO: 48797 - DNA, 20 bp, synthetic construct
  source 1..20: mol_type = other DNA
ctcttacctcttcctccgcg

SEQ ID NO: 48798 - DNA, 20 bp, synthetic construct
  source 1..20: mol_type = other DNA
gtcctgaaagagtcaagata

SEQ ID NO: 48799 - DNA, 20 bp, synthetic construct
  source 1..20: mol_type = other DNA
cttctgtctattgaaggagc

SEQ ID NO: 48800 - DNA, 20 bp, synthetic construct
  source 1..20: mol_type = other DNA
ttcgtgcttctgtctattga

SEQ ID NO: 48801 - DNA, 20 bp, synthetic construct
  source 1..20: mol_type = other DNA
gtcctcttcgtggctttctg

SEQ ID NO: 48802 - DNA, 20 bp, synthetic construct
  source 1..20: mol_type = other DNA
tacaaaccttgagagaagta

SEQ ID NO: 48803 - DNA, 20 bp, synthetic construct
  source 1..20: mol_type = other DNA
ttgcagccctcgattccagc

SEQ ID NO: 48804 - DNA, 20 bp, synthetic construct
  source 1..20: mol_type = other DNA
tctattgaaggagcagggac

SEQ ID NO: 48805 - DNA, 20 bp, synthetic construct
  source 1..20: mol_type = other DNA
caccatgaggacatatggat

SEQ ID NO: 48806 - DNA, 20 bp, synthetic construct
  source 1..20: mol_type = other DNA
ttcctgcccacacagtgata

SEQ ID NO: 48807 - DNA, 20 bp, synthetic construct
  source 1..20: mol_type = other DNA
agtagtgctggctggggcaa

SEQ ID NO: 48808 - DNA, 20 bp, synthetic construct
  source 1..20: mol_type = other DNA
cttgagagaagtatggtggc

SEQ ID NO: 48809 - DNA, 20 bp, synthetic construct
  source 1..20: mol_type = other DNA
cacacgcaagtgagtgcggc

SEQ ID NO: 48810 - DNA, 20 bp, synthetic construct
  source 1..20: mol_type = other DNA
agtcctgaaagagtcaagat

SEQ ID NO: 48811 - DNA, 20 bp, synthetic construct
  source 1..20: mol_type = other DNA
ctgagaggtttgtgcttgtc

SEQ ID NO: 48812 - DNA, 20 bp, synthetic construct
  source 1..20: mol_type = other DNA
attaggtcactgtcagtgtg

SEQ ID NO: 48813 - DNA, 20 bp, synthetic construct
  source 1..20: mol_type = other DNA
tgtggagcctttttaatagt

SEQ ID NO: 48814 - DNA, 20 bp, synthetic construct
  source 1..20: mol_type = other DNA
atcgaagaagatcaaaaagc

SEQ ID NO: 48815 - DNA, 20 bp, synthetic construct
  source 1..20: mol_type = other DNA
gagaaagggaagaaagagaa

SEQ ID NO: 48816 - DNA, 20 bp, synthetic construct
  source 1..20: mol_type = other DNA
gcactacaaaattagaagtc

SEQ ID NO: 48817 - DNA, 20 bp, synthetic construct
  source 1..20: mol_type = other DNA
tccccatacgcaggtcctgc

SEQ ID NO: 48818 - DNA, 20 bp, synthetic construct
  source 1..20: mol_type = other DNA
cggggcggccgcgccacccc

SEQ ID NO: 48819 - DNA, 20 bp, synthetic construct
  source 1..20: mol_type = other DNA
aaccttgggcagggaccaaa

SEQ ID NO: 48820 - DNA, 20 bp, synthetic construct
  source 1..20: mol_type = other DNA
ccccgcttgccgcgggctgg

SEQ ID NO: 48821 - DNA, 20 bp, synthetic construct
  source 1..20: mol_type = other DNA
ataatgtcatagagctcatc

SEQ ID NO: 48822 - DNA, 20 bp, synthetic construct
  source 1..20: mol_type = other DNA
tttcaaggatataaccagga

SEQ ID NO: 48823 - DNA, 20 bp, synthetic construct
  source 1..20: mol_type = other DNA
tactgttgttatagtaacct

SEQ ID NO: 48824 - DNA, 20 bp, synthetic construct
  source 1..20: mol_type = other DNA
tatcttcaattactctagca

SEQ ID NO: 48825 - DNA, 20 bp, synthetic construct
  source 1..20: mol_type = other DNA
agccatgggataaagatgcc

SEQ ID NO: 48826 - DNA, 20 bp, synthetic construct
  source 1..20: mol_type = other DNA
tgactacttacagagcgtcc

SEQ ID NO: 48827 - DNA, 20 bp, synthetic construct
  source 1..20: mol_type = other DNA
ttactataacaacagtacca

SEQ ID NO: 48828 - DNA, 20 bp, synthetic construct
  source 1..20: mol_type = other DNA
cccgctcgcggtgaaagttt

SEQ ID NO: 48829 - DNA, 20 bp, synthetic construct
  source 1..20: mol_type = other DNA
agtttggccacatagttgct

SEQ ID NO: 48830 - DNA, 20 bp, synthetic construct
  source 1..20: mol_type = other DNA
ggctctacgctgtggtcacc

SEQ ID NO: 48831 - DNA, 20 bp, synthetic construct
  source 1..20: mol_type = other DNA
gcctggagatctcctgcttg

SEQ ID NO: 48832 - DNA, 20 bp, synthetic construct
  source 1..20: mol_type = other DNA
agcagctggccgcggcggcc

SEQ ID NO: 48833 - DNA, 20 bp, synthetic construct
  source 1..20: mol_type = other DNA
ggcccggccagcgctggggg

SEQ ID NO: 48834 - DNA, 20 bp, synthetic construct
  source 1..20: mol_type = other DNA
catgagcacgccgtgcagct

SEQ ID NO: 48835 - DNA, 20 bp, synthetic construct
  source 1..20: mol_type = other DNA
ggcggcggcggaggcggcgg

SEQ ID NO: 48836 - DNA, 20 bp, synthetic construct
  source 1..20: mol_type = other DNA
tctgctcgctgcccgagccc

SEQ ID NO: 48837 - DNA, 20 bp, synthetic construct
  source 1..20: mol_type = other DNA
gctgaaccggcagctgcgcg

SEQ ID NO: 48838 - DNA, 20 bp, synthetic construct
  source 1..20: mol_type = other DNA
agcgctgggggcggcggcgg

SEQ ID NO: 48839 - DNA, 20 bp, synthetic construct
  source 1..20: mol_type = other DNA
gccgccgccgcccccagcgc

SEQ ID NO: 48840 - DNA, 20 bp, synthetic construct
  source 1..20: mol_type = other DNA
cacccgacggccggcgcgcc

SEQ ID NO: 48841 - DNA, 20 bp, synthetic construct
  source 1..20: mol_type = other DNA
ggcaggactgggcatagccg

SEQ ID NO: 48842 - DNA, 20 bp, synthetic construct
  source 1..20: mol_type = other DNA
tccggctgaagcagaagagg

SEQ ID NO: 48843 - DNA, 20 bp, synthetic construct
  source 1..20: mol_type = other DNA
gctgggggcggcggcggcgg

SEQ ID NO: 48844 - DNA, 20 bp, synthetic construct
  source 1..20: mol_type = other DNA
gcgagcccccggcgatgaga

SEQ ID NO: 48845 - DNA, 20 bp, synthetic construct
  source 1..20: mol_type = other DNA
tctccaggctggtgcgcgag

SEQ ID NO: 48846 - DNA, 20 bp, synthetic construct
  source 1..20: mol_type = other DNA
tctccgccgaggaggtgaca

SEQ ID NO: 48847 - DNA, 20 bp, synthetic construct
  source 1..20: mol_type = other DNA
gcccggggtggacttgacga

SEQ ID NO: 48848 - DNA, 20 bp, synthetic construct
  source 1..20: mol_type = other DNA
ttattatattatgcaggaca

SEQ ID NO: 48849 - DNA, 20 bp, synthetic construct
  source 1..20: mol_type = other DNA
gtaacattacttggattacc

SEQ ID NO: 48850 - DNA, 20 bp, synthetic construct
  source 1..20: mol_type = other DNA
taagaaaatcactgtgttac

SEQ ID NO: 48851 - DNA, 20 bp, synthetic construct
  source 1..20: mol_type = other DNA
tatgtggatttggaacacca

SEQ ID NO: 48852 - DNA, 20 bp, synthetic construct
  source 1..20: mol_type = other DNA
gtaattcatttttgaaccac

SEQ ID NO: 48853 - DNA, 20 bp, synthetic construct
  source 1..20: mol_type = other DNA
ccggccggaggggcgagcag

SEQ ID NO: 48854 - DNA, 20 bp, synthetic construct
  source 1..20: mol_type = other DNA
ttagatgaattaaataatct

SEQ ID NO: 48855 - DNA, 20 bp, synthetic construct
  source 1..20: mol_type = other DNA
tgcgggagccgctgctgcgg

SEQ ID NO: 48856 - DNA, 20 bp, synthetic construct
  source 1..20: mol_type = other DNA
aagtagctgccagtttcttc

SEQ ID NO: 48857 - DNA, 20 bp, synthetic construct
  source 1..20: mol_type = other DNA
ccgccagtctcctccagccc

SEQ ID NO: 48858 - DNA, 20 bp, synthetic construct
  source 1..20: mol_type = other DNA
ttggagggcttgacatctgc

SEQ ID NO: 48859 - DNA, 20 bp, synthetic construct
  source 1..20: mol_type = other DNA
acagagcttgatctccccac

SEQ ID NO: 48860 - DNA, 20 bp, synthetic construct
  source 1..20: mol_type = other DNA
atgatctggttccggattgc

SEQ ID NO: 48861 - DNA, 20 bp, synthetic construct
  source 1..20: mol_type = other DNA
tctccccacgggagttgact

SEQ ID NO: 48862 - DNA, 20 bp, synthetic construct
  source 1..20: mol_type = other DNA
gtgcaactctccgtacatcg

SEQ ID NO: 48863 - DNA, 20 bp, synthetic construct
  source 1..20: mol_type = other DNA
tgcaactctccgtacatcgt

SEQ ID NO: 48864 - DNA, 20 bp, synthetic construct
  source 1..20: mol_type = other DNA
ggaggccttgcagaagaagc

SEQ ID NO: 48865 - DNA, 20 bp, synthetic construct
  source 1..20: mol_type = other DNA
ccgtacatcgtgggcttcta

SEQ ID NO: 48866 - DNA, 20 bp, synthetic construct
  source 1..20: mol_type = other DNA
ccaggccaaggacccccggg

SEQ ID NO: 48867 - DNA, 20 bp, synthetic construct
  source 1..20: mol_type = other DNA
tggagggcttgacatctgca

SEQ ID NO: 48868 - DNA, 20 bp, synthetic construct
  source 1..20: mol_type = other DNA
taaaaggcctgacatatctg

SEQ ID NO: 48869 - DNA, 20 bp, synthetic construct
  source 1..20: mol_type = other DNA
gcagaaggtgggagaactga

SEQ ID NO: 48870 - DNA, 20 bp, synthetic construct
  source 1..20: mol_type = other DNA
ttctgttcataccgacatgt

SEQ ID NO: 48871 - DNA, 20 bp, synthetic construct
  source 1..20: mol_type = other DNA
tatggtgcgttctacagcga

SEQ ID NO: 48872 - DNA, 20 bp, synthetic construct
  source 1..20: mol_type = other DNA
cagctgaacccggcccccga

SEQ ID NO: 48873 - DNA, 20 bp, synthetic construct
  source 1..20: mol_type = other DNA
actccactgggcagttttgg

SEQ ID NO: 48874 - DNA, 20 bp, synthetic construct
  source 1..20: mol_type = other DNA
atgcggctgagaccccaccc

SEQ ID NO: 48875 - DNA, 20 bp, synthetic construct
  source 1..20: mol_type = other DNA
gcagcagcgaaagcgccttg

SEQ ID NO: 48876 - DNA, 20 bp, synthetic construct
  source 1..20: mol_type = other DNA
tatgatctggttccggattg

SEQ ID NO: 48877 - DNA, 20 bp, synthetic construct
  source 1..20: mol_type = other DNA
ccatagaagcccacgatgta

SEQ ID NO: 48878 - DNA, 20 bp, synthetic construct
  source 1..20: mol_type = other DNA
gggcagtcagctggtggccc

SEQ ID NO: 48879 - DNA, 20 bp, synthetic construct
  source 1..20: mol_type = other DNA
agcttaggaggtggctgtgg

SEQ ID NO: 48880 - DNA, 20 bp, synthetic construct
  source 1..20: mol_type = other DNA
tgcaactcgccgtacatcgt

SEQ ID NO: 48881 - DNA, 20 bp, synthetic construct
  source 1..20: mol_type = other DNA
ctgtgtgacttcggggtgag

SEQ ID NO: 48882 - DNA, 20 bp, synthetic construct
  source 1..20: mol_type = other DNA
ggcagcttaggaggtggctg

SEQ ID NO: 48883 - DNA, 20 bp, synthetic construct
  source 1..20: mol_type = other DNA
atgttggagggcttcacatc

SEQ ID NO: 48884 - DNA, 20 bp, synthetic construct
  source 1..20: mol_type = other DNA
ctcggcgatggtagggttga

SEQ ID NO: 48885 - DNA, 20 bp, synthetic construct
  source 1..20: mol_type = other DNA
gggcctgtccctggtggagc

SEQ ID NO: 48886 - DNA, 20 bp, synthetic construct
  source 1..20: mol_type = other DNA
tgatctggtgcttctctcgg

SEQ ID NO: 48887 - DNA, 20 bp, synthetic construct
  source 1..20: mol_type = other DNA
ccgtagaagcccacgatgta

SEQ ID NO: 48888 - DNA, 20 bp, synthetic construct
  source 1..20: mol_type = other DNA
caagcacccagcagcacctg

SEQ ID NO: 48889 - DNA, 20 bp, synthetic construct
  source 1..20: mol_type = other DNA
caagccccggagaacctgca

SEQ ID NO: 48890 - DNA, 20 bp, synthetic construct
  source 1..20: mol_type = other DNA
atctggaggcggcaggctgc

SEQ ID NO: 48891 - DNA, 20 bp, synthetic construct
  source 1..20: mol_type = other DNA
ccgtgcgcatgttgatgtcc

SEQ ID NO: 48892 - DNA, 20 bp, synthetic construct
  source 1..20: mol_type = other DNA
tggagggcttcacatctgcc

SEQ ID NO: 48893 - DNA, 20 bp, synthetic construct
  source 1..20: mol_type = other DNA
ctccaatggtgatgaaggtc

SEQ ID NO: 48894 - DNA, 20 bp, synthetic construct
  source 1..20: mol_type = other DNA
atggccatctcaatctgcag

SEQ ID NO: 48895 - DNA, 20 bp, synthetic construct
  source 1..20: mol_type = other DNA
cttcaagaactttgaggtgg

SEQ ID NO: 48896 - DNA, 20 bp, synthetic construct
  source 1..20: mol_type = other DNA
gctgtgtctgtgagtggcct

SEQ ID NO: 48897 - DNA, 20 bp, synthetic construct
  source 1..20: mol_type = other DNA
gctctgcggggttcttcctc

SEQ ID NO: 48898 - DNA, 20 bp, synthetic construct
  source 1..20: mol_type = other DNA
tccaatggtgatgaaggtcc

SEQ ID NO: 48899 - DNA, 20 bp, synthetic construct
  source 1..20: mol_type = other DNA
ccatggtactgtggggggcc

SEQ ID NO: 48900 - DNA, 20 bp, synthetic construct
  source 1..20: mol_type = other DNA
acacccggtatttattgtct

SEQ ID NO: 48901 - DNA, 20 bp, synthetic construct
  source 1..20: mol_type = other DNA
ctcagaaatgtcctctgaac

SEQ ID NO: 48902 - DNA, 20 bp, synthetic construct
  source 1..20: mol_type = other DNA
agaactcaagtagatccttc

SEQ ID NO: 48903 - DNA, 20 bp, synthetic construct
  source 1..20: mol_type = other DNA
ggcggcagctgcgcaaagtg

SEQ ID NO: 48904 - DNA, 20 bp, synthetic construct
  source 1..20: mol_type = other DNA
cattcagtgtcttctctata

SEQ ID NO: 48905 - DNA, 20 bp, synthetic construct
  source 1..20: mol_type = other DNA
catctcctgagatactggtc

SEQ ID NO: 48906 - DNA, 20 bp, synthetic construct
  source 1..20: mol_type = other DNA
tgtgggaactggaactttaa

SEQ ID NO: 48907 - DNA, 20 bp, synthetic construct
  source 1..20: mol_type = other DNA
tacaaattgacatgcagtgg

SEQ ID NO: 48908 - DNA, 20 bp, synthetic construct
  source 1..20: mol_type = other DNA
cattgataattcccactcaa

SEQ ID NO: 48909 - DNA, 20 bp, synthetic construct
  source 1..20: mol_type = other DNA
agagaaaatggcggcggcgg

SEQ ID NO: 48910 - DNA, 20 bp, synthetic construct
  source 1..20: mol_type = other DNA
acatacaaattgacatgcag

SEQ ID NO: 48911 - DNA, 20 bp, synthetic construct
  source 1..20: mol_type = other DNA
tcaaaagtgcaaagagaaga

SEQ ID NO: 48912 - DNA, 20 bp, synthetic construct
  source 1..20: mol_type = other DNA
cccgctgcgtccgcgggctc

SEQ ID NO: 48913 - DNA, 20 bp, synthetic construct
  source 1..20: mol_type = other DNA
tgagtctccaggagaggtcc

SEQ ID NO: 48914 - DNA, 20 bp, synthetic construct
  source 1..20: mol_type = other DNA
tttgtttgaaccattggctt

SEQ ID NO: 48915 - DNA, 20 bp, synthetic construct
  source 1..20: mol_type = other DNA
aataaataccgggtgtttat

SEQ ID NO: 48916 - DNA, 20 bp, synthetic construct
  source 1..20: mol_type = other DNA
ctcggccgctgcgggactcg

SEQ ID NO: 48917 - DNA, 20 bp, synthetic construct
  source 1..20: mol_type = other DNA
tgggattacctttaatgtca

SEQ ID NO: 48918 - DNA, 20 bp, synthetic construct
  source 1..20: mol_type = other DNA
ggatttcattaataatatct

SEQ ID NO: 48919 - DNA, 20 bp, synthetic construct
  source 1..20: mol_type = other DNA
cagaagatgacttcttggta

SEQ ID NO: 48920 - DNA, 20 bp, synthetic construct
  source 1..20: mol_type = other DNA
tgcaaaagacttccaggaca

SEQ ID NO: 48921 - DNA, 20 bp, synthetic construct
  source 1..20: mol_type = other DNA
caaattctgatgtgaacatg

SEQ ID NO: 48922 - DNA, 20 bp, synthetic construct
  source 1..20: mol_type = other DNA
aaaaactttaaacgatctgc

SEQ ID NO: 48923 - DNA, 20 bp, synthetic construct
  source 1..20: mol_type = other DNA
cctgctcaaatgagaccctc

SEQ ID NO: 48924 - DNA, 20 bp, synthetic construct
  source 1..20: mol_type = other DNA
tgacaccctgagaagcatgc

SEQ ID NO: 48925 - DNA, 20 bp, synthetic construct
  source 1..20: mol_type = other DNA
cctgcatcagcgtcgacacc

SEQ ID NO: 48926 - DNA, 20 bp, synthetic construct
  source 1..20: mol_type = other DNA
aggatttcattaataatatc

SEQ ID NO: 48927 - DNA, 20 bp, synthetic construct
  source 1..20: mol_type = other DNA
ggtggtggcggcggcggcgg

SEQ ID NO: 48928 - DNA, 20 bp, synthetic construct
  source 1..20: mol_type = other DNA
tatgtaatgagttatttctt

SEQ ID NO: 48929 - DNA, 20 bp, synthetic construct
  source 1..20: mol_type = other DNA
ctctagaaaccaaaagaaaa

SEQ ID NO: 48930 - DNA, 20 bp, synthetic construct
  source 1..20: mol_type = other DNA
tgcttatggtcagaagcagt

SEQ ID NO: 48931 - DNA, 20 bp, synthetic construct
  source 1..20: mol_type = other DNA
aaacatcagaggaataatgt

SEQ ID NO: 48932 - DNA, 20 bp, synthetic construct
  source 1..20: mol_type = other DNA
agacttccaggacagggtgc

SEQ ID NO: 48933 - DNA, 20 bp, synthetic construct
  source 1..20: mol_type = other DNA
gaggatgattctcttggctg

SEQ ID NO: 48934 - DNA, 20 bp, synthetic construct
  source 1..20: mol_type = other DNA
cgaggtaccttcataggacg

SEQ ID NO: 48935 - DNA, 20 bp, synthetic construct
  source 1..20: mol_type = other DNA
taaaagattatccacctggg

SEQ ID NO: 48936 - DNA, 20 bp, synthetic construct
  source 1..20: mol_type = other DNA
ttagaagaggtgtcaaggct

SEQ ID NO: 48937 - DNA, 20 bp, synthetic construct
  source 1..20: mol_type = other DNA
agaaatgcagtgctgtgtcg

SEQ ID NO: 48938 - DNA, 20 bp, synthetic construct
  source 1..20: mol_type = other DNA
cccggtgtcgacgctgatgc

SEQ ID NO: 48939 - DNA, 20 bp, synthetic construct
  source 1..20: mol_type = other DNA
tttaaactatgcgatgcttg

SEQ ID NO: 48940 - DNA, 20 bp, synthetic construct
  source 1..20: mol_type = other DNA
cccgtgattcagaggacagc

SEQ ID NO: 48941 - DNA, 20 bp, synthetic construct
  source 1..20: mol_type = other DNA
ttgatagtcttatggtcatt

SEQ ID NO: 48942 - DNA, 20 bp, synthetic construct
  source 1..20: mol_type = other DNA
ggcttattgagatccacatc

SEQ ID NO: 48943 - DNA, 20 bp, synthetic construct
  source 1..20: mol_type = other DNA
tgctttggaagccctttctc

SEQ ID NO: 48944 - DNA, 20 bp, synthetic construct
  source 1..20: mol_type = other DNA
ggagtggggataatgaggtg

SEQ ID NO: 48945 - DNA, 20 bp, synthetic construct
  source 1..20: mol_type = other DNA
tgagggttctgagaggggtt

SEQ ID NO: 48946 - DNA, 20 bp, synthetic construct
  source 1..20: mol_type = other DNA
atccctgggcaggtcgccgc

SEQ ID NO: 48947 - DNA, 20 bp, synthetic construct
  source 1..20: mol_type = other DNA
gagccttgcaaaggggaagt

SEQ ID NO: 48948 - DNA, 20 bp, synthetic construct
  source 1..20: mol_type = other DNA
gatccgccgagggatagcag

SEQ ID NO: 48949 - DNA, 20 bp, synthetic construct
  source 1..20: mol_type = other DNA
tcaccatcttcagtgccacc

SEQ ID NO: 48950 - DNA, 20 bp, synthetic construct
  source 1..20: mol_type = other DNA
cctgcagggtgtgtgtatgt

SEQ ID NO: 48951 - DNA, 20 bp, synthetic construct
  source 1..20: mol_type = other DNA
ccggctaggaaagagctgca

SEQ ID NO: 48952 - DNA, 20 bp, synthetic construct
  source 1..20: mol_type = other DNA
cctgggaatgagaggggata

SEQ ID NO: 48953 - DNA, 20 bp, synthetic construct
  source 1..20: mol_type = other DNA
tccgtctgcttggctccccc

SEQ ID NO: 48954 - DNA, 20 bp, synthetic construct
  source 1..20: mol_type = other DNA
ccaatgcaccgcacaggaac

SEQ ID NO: 48955 - DNA, 20 bp, synthetic construct
  source 1..20: mol_type = other DNA
aggagcaggtgctggtctgg

SEQ ID NO: 48956 - DNA, 20 bp, synthetic construct
  source 1..20: mol_type = other DNA
ttgccggcacgccaacatcg

SEQ ID NO: 48957 - DNA, 20 bp, synthetic construct
  source 1..20: mol_type = other DNA
ccagagtgagggttctgaga

SEQ ID NO: 48958 - DNA, 20 bp, synthetic construct
  source 1..20: mol_type = other DNA
ccagagataactcccatggt

SEQ ID NO: 48959 - DNA, 20 bp, synthetic construct
  source 1..20: mol_type = other DNA
cccaggagcaggtgctggtc

SEQ ID NO: 48960 - DNA, 20 bp, synthetic construct
  source 1..20: mol_type = other DNA
tctttcctagccggactacg

SEQ ID NO: 48961 - DNA, 20 bp, synthetic construct
  source 1..20: mol_type = other DNA
gaacggaaagagaccagagc

SEQ ID NO: 48962 - DNA, 20 bp, synthetic construct
  source 1..20: mol_type = other DNA
agctaccccctgctatccct

SEQ ID NO: 48963 - DNA, 20 bp, synthetic construct
  source 1..20: mol_type = other DNA
agggtgtcccaatgaaagag

SEQ ID NO: 48964 - DNA, 20 bp, synthetic construct
  source 1..20: mol_type = other DNA
tccttacctggagcacttcc

SEQ ID NO: 48965 - DNA, 20 bp, synthetic construct
  source 1..20: mol_type = other DNA
gtggggctgaaacacaaaga

SEQ ID NO: 48966 - DNA, 20 bp, synthetic construct
  source 1..20: mol_type = other DNA
gctggtaccttgccagtagg

SEQ ID NO: 48967 - DNA, 20 bp, synthetic construct
  source 1..20: mol_type = other DNA
gttcgatggccgtgatgccc

SEQ ID NO: 48968 - DNA, 20 bp, synthetic construct
  source 1..20: mol_type = other DNA
ctcacgccgatgcacacagc

SEQ ID NO: 48969 - DNA, 20 bp, synthetic construct
  source 1..20: mol_type = other DNA
tcatcatctgtgaggagggc

SEQ ID NO: 48970 - DNA, 20 bp, synthetic construct
  source 1..20: mol_type = other DNA
ctggtctggaggcacagaca

SEQ ID NO: 48971 - DNA, 20 bp, synthetic construct
  source 1..20: mol_type = other DNA
agcatctcacggtgttggct

SEQ ID NO: 48972 - DNA, 20 bp, synthetic construct
  source 1..20: mol_type = other DNA
ccaccaaacagcccccgtcc

SEQ ID NO: 48973 - DNA, 20 bp, synthetic construct
  source 1..20: mol_type = other DNA
ctcacagaagaagatacaca

SEQ ID NO: 48974 - DNA, 20 bp, synthetic construct
  source 1..20: mol_type = other DNA
ctgctacagcggctgggtgg

SEQ ID NO: 48975 - DNA, 20 bp, synthetic construct
  source 1..20: mol_type = other DNA
gcatccttggcctgctggaa

SEQ ID NO: 48976 - DNA, 20 bp, synthetic construct
  source 1..20: mol_type = other DNA
ctcttccacacggtgcgctt

SEQ ID NO: 48977 - DNA, 20 bp, synthetic construct
  source 1..20: mol_type = other DNA
tcatagcatccttggcctgc

SEQ ID NO: 48978 - DNA, 20 bp, synthetic construct
  source 1..20: mol_type = other DNA
atccgccgagggatagcagg

SEQ ID NO: 48979 - DNA, 20 bp, synthetic construct
  source 1..20: mol_type = other DNA
caaagtcagctggaagcaga

SEQ ID NO: 48980 - DNA, 20 bp, synthetic construct
  source 1..20: mol_type = other DNA
cggctgggtggcggcacgta

SEQ ID NO: 48981 - DNA, 20 bp, synthetic construct
  source 1..20: mol_type = other DNA
gatccccatgaccgaagcgg

SEQ ID NO: 48982 - DNA, 20 bp, synthetic construct
  source 1..20: mol_type = other DNA
cctccccgactgaaggaaaa

SEQ ID NO: 48983 - DNA, 20 bp, synthetic construct
  source 1..20: mol_type = other DNA
ggtcccctgtgctctgtttg

SEQ ID NO: 48984 - DNA, 20 bp, synthetic construct
  source 1..20: mol_type = other DNA
tatgaggatttccttctgaa

SEQ ID NO: 48985 - DNA, 20 bp, synthetic construct
  source 1..20: mol_type = other DNA
ccccctccggatccacagca

SEQ ID NO: 48986 - DNA, 20 bp, synthetic construct
  source 1..20: mol_type = other DNA
tacacccacgtagtccggct

SEQ ID NO: 48987 - DNA, 20 bp, synthetic construct
  source 1..20: mol_type = other DNA
actcacagaagaagatacac

SEQ ID NO: 48988 - DNA, 20 bp, synthetic construct
  source 1..20: mol_type = other DNA
tccagaccagcacctgctcc

SEQ ID NO: 48989 - DNA, 20 bp, synthetic construct
  source 1..20: mol_type = other DNA
atcaggcctcgattcagccc

SEQ ID NO: 48990 - DNA, 20 bp, synthetic construct
  source 1..20: mol_type = other DNA
tctacctgggtcacctgcac

SEQ ID NO: 48991 - DNA, 20 bp, synthetic construct
  source 1..20: mol_type = other DNA
ccccaggtatgttgtggggt

SEQ ID NO: 48992 - DNA, 20 bp, synthetic construct
  source 1..20: mol_type = other DNA
ctggggagaagggtggacaa

SEQ ID NO: 48993 - DNA, 20 bp, synthetic construct
  source 1..20: mol_type = other DNA
tgcaaataggccagtccctg

SEQ ID NO: 48994 - DNA, 20 bp, synthetic construct
  source 1..20: mol_type = other DNA
agacatcatcatctgtgagg

SEQ ID NO: 48995 - DNA, 20 bp, synthetic construct
  source 1..20: mol_type = other DNA
ggagctggtaccttgccagt

SEQ ID NO: 48996 - DNA, 20 bp, synthetic construct
  source 1..20: mol_type = other DNA
gaggatttccttctgaaggg

SEQ ID NO: 48997 - DNA, 20 bp, synthetic construct
  source 1..20: mol_type = other DNA
catcctcatcaatgatgctg

SEQ ID NO: 48998 - DNA, 20 bp, synthetic construct
  source 1..20: mol_type = other DNA
ggctcccccaggtatgttgt

SEQ ID NO: 48999 - DNA, 20 bp, synthetic construct
  source 1..20: mol_type = other DNA
ggctcgagacaaggtgtcag

SEQ ID NO: 49000 - DNA, 20 bp, synthetic construct
  source 1..20: mol_type = other DNA
gctcacgccgatgcacacag

SEQ ID NO: 49001 - DNA, 20 bp, synthetic construct
  source 1..20: mol_type = other DNA
gggaggaggaggttgcagtg

SEQ ID NO: 49002 - DNA, 20 bp, synthetic construct
  source 1..20: mol_type = other DNA
tggcatctcggcccagattg

SEQ ID NO: 49003 - DNA, 20 bp, synthetic construct
  source 1..20: mol_type = other DNA
gggggctaatgtgagcgatg

SEQ ID NO: 49004 - DNA, 20 bp, synthetic construct
  source 1..20: mol_type = other DNA
ggtagccactcttggtcatg

SEQ ID NO: 49005 - DNA, 20 bp, synthetic construct
  source 1..20: mol_type = other DNA
gccgtgggtctgtgcaggga

SEQ ID NO: 49006 - DNA, 20 bp, synthetic construct
  source 1..20: mol_type = other DNA
acctgggggagccaagcaga

SEQ ID NO: 49007 - DNA, 20 bp, synthetic construct
  source 1..20: mol_type = other DNA
gggtgcacatcaaagagcgg

SEQ ID NO: 49008 - DNA, 20 bp, synthetic construct
  source 1..20: mol_type = other DNA
gggtccacgacgtccatccc

SEQ ID NO: 49009 - DNA, 20 bp, synthetic construct
  source 1..20: mol_type = other DNA
caccatatcttcctctacct

SEQ ID NO: 49010 - DNA, 20 bp, synthetic construct
  source 1..20: mol_type = other DNA
ctttcctagccggactacgt

SEQ ID NO: 49011 - DNA, 20 bp, synthetic construct
  source 1..20: mol_type = other DNA
taggaaagagctgcagggaa

SEQ ID NO: 49012 - DNA, 20 bp, synthetic construct
  source 1..20: mol_type = other DNA
ccccagagagctggagcggt

SEQ ID NO: 49013 - DNA, 20 bp, synthetic construct
  source 1..20: mol_type = other DNA
cgtccgttgtcctgcttcag

SEQ ID NO: 49014 - DNA, 20 bp, synthetic construct
  source 1..20: mol_type = other DNA
gaagtgctccaggtaaggag

SEQ ID NO: 49015 - DNA, 20 bp, synthetic construct
  source 1..20: mol_type = other DNA
gtgctctgtttggggggagt

SEQ ID NO: 49016 - DNA, 20 bp, synthetic construct
  source 1..20: mol_type = other DNA
tggggctgaaacacaaagat

SEQ ID NO: 49017 - DNA, 20 bp, synthetic construct
  source 1..20: mol_type = other DNA
gcaggtgtgggctctaggct

SEQ ID NO: 49018 - DNA, 20 bp, synthetic construct
  source 1..20: mol_type = other DNA
ggatccccagagagctggag

SEQ ID NO: 49019 - DNA, 20 bp, synthetic construct
  source 1..20: mol_type = other DNA
ccagcttcacagagcctgga

SEQ ID NO: 49020 - DNA, 20 bp, synthetic construct
  source 1..20: mol_type = other DNA
ccgtgttcgcgctgctgacc

SEQ ID NO: 49021 - DNA, 20 bp, synthetic construct
  source 1..20: mol_type = other DNA
tgctgcgggccgcacaggga

SEQ ID NO: 49022 - DNA, 20 bp, synthetic construct
  source 1..20: mol_type = other DNA
actgagcatcttggtggcgc

SEQ ID NO: 49023 - DNA, 20 bp, synthetic construct
  source 1..20: mol_type = other DNA
tgtcactgcaaaggtcaccc

SEQ ID NO: 49024 - DNA, 20 bp, synthetic construct
  source 1..20: mol_type = other DNA
tccaatgcaccgcacaggaa

SEQ ID NO: 49025 - DNA, 20 bp, synthetic construct
  source 1..20: mol_type = other DNA
tacctgaatgggcggtgagg

SEQ ID NO: 49026 - DNA, 20 bp, synthetic construct
  source 1..20: mol_type = other DNA
ccaaagtcagctggaagcag

SEQ ID NO: 49027 - DNA, 20 bp, synthetic construct
  source 1..20: mol_type = other DNA
tactggtgagtggcgcccag

SEQ ID NO: 49028 - DNA, 20 bp, synthetic construct
  source 1..20: mol_type = other DNA
aacatcctcatcaatgatgc

SEQ ID NO: 49029 - DNA, 20 bp, synthetic construct
  source 1..20: mol_type = other DNA
gcacctgctgcgggccgcac

SEQ ID NO: 49030 - DNA, 20 bp, synthetic construct
  source 1..20: mol_type = other DNA
cacttccggagccatcctgg

SEQ ID NO: 49031 - DNA, 20 bp, synthetic construct
  source 1..20: mol_type = other DNA
gttccgttctccatcagacg

SEQ ID NO: 49032 - DNA, 20 bp, synthetic construct
  source 1..20: mol_type = other DNA
gtaccactgaagcaggacaa

SEQ ID NO: 49033 - DNA, 20 bp, synthetic construct
  source 1..20: mol_type = other DNA
ccagaccagcacctgctcct

SEQ ID NO: 49034 - DNA, 20 bp, synthetic construct
  source 1..20: mol_type = other DNA
gaactccatgtgccgcccta

SEQ ID NO: 49035 - DNA, 20 bp, synthetic construct
  source 1..20: mol_type = other DNA
ctaccagcctccccgactga

SEQ ID NO: 49036 - DNA, 20 bp, synthetic construct
  source 1..20: mol_type = other DNA
gctgcagggaatgggagaga

SEQ ID NO: 49037 - DNA, 20 bp, synthetic construct
  source 1..20: mol_type = other DNA
aacgttctcatgtctctctc

SEQ ID NO: 49038 - DNA, 20 bp, synthetic construct
  source 1..20: mol_type = other DNA
tgatgggcagctgagcccgg

SEQ ID NO: 49039 - DNA, 20 bp, synthetic construct
  source 1..20: mol_type = other DNA
ggaggccgtgggtctgtgca

SEQ ID NO: 49040 - DNA, 20 bp, synthetic construct
  source 1..20: mol_type = other DNA
gttcaggaagctccgaggaa

SEQ ID NO: 49041 - DNA, 20 bp, synthetic construct
  source 1..20: mol_type = other DNA
cagagtgagggttctgagag

SEQ ID NO: 49042 - DNA, 20 bp, synthetic construct
  source 1..20: mol_type = other DNA
tggctcccccaggtatgttg

SEQ ID NO: 49043 - DNA, 20 bp, synthetic construct
  source 1..20: mol_type = other DNA
tccatgtgccgccctagggt

SEQ ID NO: 49044 - DNA, 20 bp, synthetic construct
  source 1..20: mol_type = other DNA
cctccaccgcttcggtcatg

SEQ ID NO: 49045 - DNA, 20 bp, synthetic construct
  source 1..20: mol_type = other DNA
ggtagaggaagatatggtga

SEQ ID NO: 49046 - DNA, 20 bp, synthetic construct
  source 1..20: mol_type = other DNA
gcccccaccgcctactggca

SEQ ID NO: 49047 - DNA, 20 bp, synthetic construct
  source 1..20: mol_type = other DNA
tctaaccttggtagatgtcc

SEQ ID NO: 49048 - DNA, 20 bp, synthetic construct
  source 1..20: mol_type = other DNA
ttagctccctgggaatgaga

SEQ ID NO: 49049 - DNA, 20 bp, synthetic construct
  source 1..20: mol_type = other DNA
catctaccaaggttagagaa

SEQ ID NO: 49050 - DNA, 20 bp, synthetic construct
  source 1..20: mol_type = other DNA
ctctacctgggtcacctgca

SEQ ID NO: 49051 - DNA, 20 bp, synthetic construct
  source 1..20: mol_type = other DNA
aactctagaatagtagggaa

SEQ ID NO: 49052 - DNA, 20 bp, synthetic construct
  source 1..20: mol_type = other DNA
gcctccaccgcttcggtcat

SEQ ID NO: 49053 - DNA, 20 bp, synthetic construct
  source 1..20: mol_type = other DNA
taccccctgctatccctcgg

SEQ ID NO: 49054 - DNA, 20 bp, synthetic construct
  source 1..20: mol_type = other DNA
gtccacgacgtccatccctg

SEQ ID NO: 49055 - DNA, 20 bp, synthetic construct
  source 1..20: mol_type = other DNA
cctggggagaagggtggaca

SEQ ID NO: 49056 - DNA, 20 bp, synthetic construct
  source 1..20: mol_type = other DNA
cttcaggccttctggaagca

SEQ ID NO: 49057 - DNA, 20 bp, synthetic construct
  source 1..20: mol_type = other DNA
gtctctctcaggtctggctg

SEQ ID NO: 49058 - DNA, 20 bp, synthetic construct
  source 1..20: mol_type = other DNA
cccaccgctccagctctctg

SEQ ID NO: 49059 - DNA, 20 bp, synthetic construct
  source 1..20: mol_type = other DNA
cactgcaacctcctcctccc

SEQ ID NO: 49060 - DNA, 20 bp, synthetic construct
  source 1..20: mol_type = other DNA
aggcggccgtgctgtggatc

SEQ ID NO: 49061 - DNA, 20 bp, synthetic construct
  source 1..20: mol_type = other DNA
cccaatgaaagagaggcgtc

SEQ ID NO: 49062 - DNA, 20 bp, synthetic construct
  source 1..20: mol_type = other DNA
gaatgaccaggaggccacgc

SEQ ID NO: 49063 - DNA, 20 bp, synthetic construct
  source 1..20: mol_type = other DNA
acccacggcctccaccgctt

SEQ ID NO: 49064 - DNA, 20 bp, synthetic construct
  source 1..20: mol_type = other DNA
gacgagggtcctgggagcat

SEQ ID NO: 49065 - DNA, 20 bp, synthetic construct
  source 1..20: mol_type = other DNA
agagcctggaaggagataga

SEQ ID NO: 49066 - DNA, 20 bp, synthetic construct
  source 1..20: mol_type = other DNA
gtgcaccctctcaggtaggc

SEQ ID NO: 49067 - DNA, 20 bp, synthetic construct
  source 1..20: mol_type = other DNA
cccccaggtatgttgtgggg

SEQ ID NO: 49068 - DNA, 20 bp, synthetic construct
  source 1..20: mol_type = other DNA
gctcattgtatcctcccttc

SEQ ID NO: 49069 - DNA, 20 bp, synthetic construct
  source 1..20: mol_type = other DNA
ctcagctcctgtagcagcta

SEQ ID NO: 49070 - DNA, 20 bp, synthetic construct
  source 1..20: mol_type = other DNA
ctgcaaaggtcaccccggcc

SEQ ID NO: 49071 - DNA, 20 bp, synthetic construct
  source 1..20: mol_type = other DNA
agctaatctggagctctgac

SEQ ID NO: 49072 - DNA, 20 bp, synthetic construct
  source 1..20: mol_type = other DNA
ggacctggtggcactgaaga

SEQ ID NO: 49073 - DNA, 20 bp, synthetic construct
  source 1..20: mol_type = other DNA
gggacatcaaggtggtctgg

SEQ ID NO: 49074 - DNA, 20 bp, synthetic construct
  source 1..20: mol_type = other DNA
acagggacatcaaggtggtc

SEQ ID NO: 49075 - DNA, 20 bp, synthetic construct
  source 1..20: mol_type = other DNA
aggctgccgggcgtgctgtg

SEQ ID NO: 49076 - DNA, 20 bp, synthetic construct
  source 1..20: mol_type = other DNA
ctcattgtatcctcccttca

SEQ ID NO: 49077 - DNA, 20 bp, synthetic construct
  source 1..20: mol_type = other DNA
ccccaggatggctccggaag

SEQ ID NO: 49078 - DNA, 20 bp, synthetic construct
  source 1..20: mol_type = other DNA
taccttgccagtaggcggtg

SEQ ID NO: 49079 - DNA, 20 bp, synthetic construct
  source 1..20: mol_type = other DNA
tccaggacaccaaaggctgc

SEQ ID NO: 49080 - DNA, 20 bp, synthetic construct
  source 1..20: mol_type = other DNA
ccccatactccccagcccac

SEQ ID NO: 49081 - DNA, 20 bp, synthetic construct
  source 1..20: mol_type = other DNA
aggctcgagacaaggtgtca

SEQ ID NO: 49082 - DNA, 20 bp, synthetic construct
  source 1..20: mol_type = other DNA
ctatgacctgctacagcggc

SEQ ID NO: 49083 - DNA, 20 bp, synthetic construct
  source 1..20: mol_type = other DNA
atcatcatctgtgaggaggg

SEQ ID NO: 49084 - DNA, 20 bp, synthetic construct
  source 1..20: mol_type = other DNA
ctgcactccatgcttccaga

SEQ ID NO: 49085 - DNA, 20 bp, synthetic construct
  source 1..20: mol_type = other DNA
tagctccctgggaatgagag

SEQ ID NO: 49086 - DNA, 20 bp, synthetic construct
  source 1..20: mol_type = other DNA
tctcaggtgtgcgaagtccc

SEQ ID NO: 49087 - DNA, 20 bp, synthetic construct
  source 1..20: mol_type = other DNA
gacctgctacagcggctggg

SEQ ID NO: 49088 - DNA, 20 bp, synthetic construct
  source 1..20: mol_type = other DNA
ctccacttccccccaaggta

SEQ ID NO: 49089 - DNA, 20 bp, synthetic construct
  source 1..20: mol_type = other DNA
gttcttcctggagaataggt

SEQ ID NO: 49090 - DNA, 20 bp, synthetic construct
  source 1..20: mol_type = other DNA
ccctctcaggtaggcaggcg

SEQ ID NO: 49091 - DNA, 20 bp, synthetic construct
  source 1..20: mol_type = other DNA
cctccgctgtggcatgggca

SEQ ID NO: 49092 - DNA, 20 bp, synthetic construct
  source 1..20: mol_type = other DNA
agccaagcagacggaaagtg

SEQ ID NO: 49093 - DNA, 20 bp, synthetic construct
  source 1..20: mol_type = other DNA
cctccccagcatcattgatg

SEQ ID NO: 49094 - DNA, 20 bp, synthetic construct
  source 1..20: mol_type = other DNA
tcaccatatcttcctctacc

SEQ ID NO: 49095 - DNA, 20 bp, synthetic construct
  source 1..20: mol_type = other DNA
aggccacgctggaaatggtg

SEQ ID NO: 49096 - DNA, 20 bp, synthetic construct
  source 1..20: mol_type = other DNA
cccagctactcgggaggctg

SEQ ID NO: 49097 - DNA, 20 bp, synthetic construct
  source 1..20: mol_type = other DNA
gctgcgggccgcacagggag

SEQ ID NO: 49098 - DNA, 20 bp, synthetic construct
  source 1..20: mol_type = other DNA
tgatgtgcaccctctcaggt

SEQ ID NO: 49099 - DNA, 20 bp, synthetic construct
  source 1..20: mol_type = other DNA
ggctgccgggcgtgctgtgt

SEQ ID NO: 49100 - DNA, 20 bp, synthetic construct
  source 1..20: mol_type = other DNA
tccagagtgagggttctgag

SEQ ID NO: 49101 - DNA, 20 bp, synthetic construct
  source 1..20: mol_type = other DNA
acgagggtcctgggagcatg

SEQ ID NO: 49102 - DNA, 20 bp, synthetic construct
  source 1..20: mol_type = other DNA
cctctcaggtaggcaggcgt

SEQ ID NO: 49103 - DNA, 20 bp, synthetic construct
  source 1..20: mol_type = other DNA
gtgtccaggcggccgtgctg

SEQ ID NO: 49104 - DNA, 20 bp, synthetic construct
  source 1..20: mol_type = other DNA
ttgtctcgagccttgcaaag

SEQ ID NO: 49105 - DNA, 20 bp, synthetic construct
  source 1..20: mol_type = other DNA
agaccagcacctgctcctgg

SEQ ID NO: 49106 - DNA, 20 bp, synthetic construct
  source 1..20: mol_type = other DNA
ccccatgaccgaagcggtgg

SEQ ID NO: 49107 - DNA, 20 bp, synthetic construct
  source 1..20: mol_type = other DNA
atcaccagagataactccca

SEQ ID NO: 49108 - DNA, 20 bp, synthetic construct
  source 1..20: mol_type = other DNA
acctcaggagcagcagcccc

SEQ ID NO: 49109 - DNA, 20 bp, synthetic construct
  source 1..20: mol_type = other DNA
cacgacagcagtctgcatct

SEQ ID NO: 49110 - DNA, 20 bp, synthetic construct
  source 1..20: mol_type = other DNA
ttcatcttttccttcttggg

SEQ ID NO: 49111 - DNA, 20 bp, synthetic construct
  source 1..20: mol_type = other DNA
gccgctgtagcaggtcatag

SEQ ID NO: 49112 - DNA, 20 bp, synthetic construct
  source 1..20: mol_type = other DNA
gagctgcccgctgtgtgcat

SEQ ID NO: 49113 - DNA, 20 bp, synthetic construct
  source 1..20: mol_type = other DNA
catccctgggggcctgagct

SEQ ID NO: 49114 - DNA, 20 bp, synthetic construct
  source 1..20: mol_type = other DNA
ctctcaggtaggcaggcgtg

SEQ ID NO: 49115 - DNA, 20 bp, synthetic construct
  source 1..20: mol_type = other DNA
accttgccagtaggcggtgg

SEQ ID NO: 49116 - DNA, 20 bp, synthetic construct
  source 1..20: mol_type = other DNA
ggcactgaagatggtgaaga

SEQ ID NO: 49117 - DNA, 20 bp, synthetic construct
  source 1..20: mol_type = other DNA
tcccgagtagctgggattac

SEQ ID NO: 49118 - DNA, 20 bp, synthetic construct
  source 1..20: mol_type = other DNA
tcagtttgtcaagaagatcc

SEQ ID NO: 49119 - DNA, 20 bp, synthetic construct
  source 1..20: mol_type = other DNA
ctgagcatcttggtggcgct

SEQ ID NO: 49120 - DNA, 20 bp, synthetic construct
  source 1..20: mol_type = other DNA
tccagattagctatgtctgc

SEQ ID NO: 49121 - DNA, 20 bp, synthetic construct
  source 1..20: mol_type = other DNA
ggcctccaccgcttcggtca

SEQ ID NO: 49122 - DNA, 20 bp, synthetic construct
  source 1..20: mol_type = other DNA
tccccccaaggtaaggccct

SEQ ID NO: 49123 - DNA, 20 bp, synthetic construct
  source 1..20: mol_type = other DNA
gtcccctgtgctctgtttgg

SEQ ID NO: 49124 - DNA, 20 bp, synthetic construct
  source 1..20: mol_type = other DNA
tctttgatgtgcaccctctc

SEQ ID NO: 49125 - DNA, 20 bp, synthetic construct
  source 1..20: mol_type = other DNA
gttagctccctgggaatgag

SEQ ID NO: 49126 - DNA, 20 bp, synthetic construct
  source 1..20: mol_type = other DNA
tcctcaatgtccccaatgga

SEQ ID NO: 49127 - DNA, 20 bp, synthetic construct
  source 1..20: mol_type = other DNA
gccaacatcgtggcctacca

SEQ ID NO: 49128 - DNA, 20 bp, synthetic construct
  source 1..20: mol_type = other DNA
catccctgggcaggtcgccg

SEQ ID NO: 49129 - DNA, 20 bp, synthetic construct
  source 1..20: mol_type = other DNA
acatcctcatcaatgatgct

SEQ ID NO: 49130 - DNA, 20 bp, synthetic construct
  source 1..20: mol_type = other DNA
cccggtcagcagcgcgaaca

SEQ ID NO: 49131 - DNA, 20 bp, synthetic construct
  source 1..20: mol_type = other DNA
cctgaaccggaatgaccagg

SEQ ID NO: 49132 - DNA, 20 bp, synthetic construct
  source 1..20: mol_type = other DNA
tcgcaccctccgctgtggca

SEQ ID NO: 49133 - DNA, 20 bp, synthetic construct
  source 1..20: mol_type = other DNA
tgaactccatgtgccgccct

SEQ ID NO: 49134 - DNA, 20 bp, synthetic construct
  source 1..20: mol_type = other DNA
ctccatgtgccgccctaggg

SEQ ID NO: 49135 - DNA, 20 bp, synthetic construct
  source 1..20: mol_type = other DNA
ggtccacgacgtccatccct

SEQ ID NO: 49136 - DNA, 20 bp, synthetic construct
  source 1..20: mol_type = other DNA
gacccaggtagaggaagata

SEQ ID NO: 49137 - DNA, 20 bp, synthetic construct
  source 1..20: mol_type = other DNA
ctgaatgggcggtgaggtgg

SEQ ID NO: 49138 - DNA, 20 bp, synthetic construct
  source 1..20: mol_type = other DNA
caaggttagagaaaggacaa

SEQ ID NO: 49139 - DNA, 20 bp, synthetic construct
  source 1..20: mol_type = other DNA
cacatccctccaccaagggt

SEQ ID NO: 49140 - DNA, 20 bp, synthetic construct
  source 1..20: mol_type = other DNA
ggtaccttgccagtaggcgg

SEQ ID NO: 49141 - DNA, 20 bp, synthetic construct
  source 1..20: mol_type = other DNA
gctaatctggagctctgaca

SEQ ID NO: 49142 - DNA, 20 bp, synthetic construct
  source 1..20: mol_type = other DNA
aaggctcgagacaaggtgtc

SEQ ID NO: 49143 - DNA, 20 bp, synthetic construct
  source 1..20: mol_type = other DNA
tacagcctcctcgagacctc

SEQ ID NO: 49144 - DNA, 20 bp, synthetic construct
  source 1..20: mol_type = other DNA
tgatgtctccacccttcaga

SEQ ID NO: 49145 - DNA, 20 bp, synthetic construct
  source 1..20: mol_type = other DNA
tgggacaccctactggtgag

SEQ ID NO: 49146 - DNA, 20 bp, synthetic construct
  source 1..20: mol_type = other DNA
catggtttccaccaagatcc

SEQ ID NO: 49147 - DNA, 20 bp, synthetic construct
  source 1..20: mol_type = other DNA
gacatcatcatctgtgagga

SEQ ID NO: 49148 - DNA, 20 bp, synthetic construct
  source 1..20: mol_type = other DNA
tcccagcctgggctgaatcg

SEQ ID NO: 49149 - DNA, 20 bp, synthetic construct
  source 1..20: mol_type = other DNA
ctcttcctcatgaccaagag

SEQ ID NO: 49150 - DNA, 20 bp, synthetic construct
  source 1..20: mol_type = other DNA
tcccccaggctggagtgcag

SEQ ID NO: 49151 - DNA, 20 bp, synthetic construct
  source 1..20: mol_type = other DNA
gccggcaagttttcaatatg

SEQ ID NO: 49152 - DNA, 20 bp, synthetic construct
  source 1..20: mol_type = other DNA
gtctgatggagaacggaact

SEQ ID NO: 49153 - DNA, 20 bp, synthetic construct
  source 1..20: mol_type = other DNA
ccaggacaccaaaggctgcc

SEQ ID NO: 49154 - DNA, 20 bp, synthetic construct
  source 1..20: mol_type = other DNA
tatgacctgctacagcggct

SEQ ID NO: 49155 - DNA, 20 bp, synthetic construct
  source 1..20: mol_type = other DNA
tcaggtaatgggacaggcta

SEQ ID NO: 49156 - DNA, 20 bp, synthetic construct
  source 1..20: mol_type = other DNA
tctctctcaggtctggctgt

SEQ ID NO: 49157 - DNA, 20 bp, synthetic construct
  source 1..20: mol_type = other DNA
aaatggtacgagagagtaac

SEQ ID NO: 49158 - DNA, 20 bp, synthetic construct
  source 1..20: mol_type = other DNA
gaccttgggaagaagaagcc

SEQ ID NO: 49159 - DNA, 20 bp, synthetic construct
  source 1..20: mol_type = other DNA
tccccagagagctggagcgg

SEQ ID NO: 49160 - DNA, 20 bp, synthetic construct
  source 1..20: mol_type = other DNA
tctcacccacacagcacgcc

SEQ ID NO: 49161 - DNA, 20 bp, synthetic construct
  source 1..20: mol_type = other DNA
tgagatccccatgaccgaag

SEQ ID NO: 49162 - DNA, 20 bp, synthetic construct
  source 1..20: mol_type = other DNA
gtgggctctaggctcggatc

SEQ ID NO: 49163 - DNA, 20 bp, synthetic construct
  source 1..20: mol_type = other DNA
caccactacaggcctgtgga

SEQ ID NO: 49164 - DNA, 20 bp, synthetic construct
  source 1..20: mol_type = other DNA
atatgaggatttccttctga

SEQ ID NO: 49165 - DNA, 20 bp, synthetic construct
  source 1..20: mol_type = other DNA
tgtctgccgggaagtgctcc

SEQ ID NO: 49166 - DNA, 20 bp, synthetic construct
  source 1..20: mol_type = other DNA
ccccacctcaccgcccattc

SEQ ID NO: 49167 - DNA, 20 bp, synthetic construct
  source 1..20: mol_type = other DNA
tctcagctcctgtagcagct

SEQ ID NO: 49168 - DNA, 20 bp, synthetic construct
  source 1..20: mol_type = other DNA
tttccttcagtcggggaggc

SEQ ID NO: 49169 - DNA, 20 bp, synthetic construct
  source 1..20: mol_type = other DNA
gccgggaagtgctccaggta

SEQ ID NO: 49170 - DNA, 20 bp, synthetic construct
  source 1..20: mol_type = other DNA
acccaccgctccagctctct

SEQ ID NO: 49171 - DNA, 20 bp, synthetic construct
  source 1..20: mol_type = other DNA
tccctgggcaggtcgccgcg

SEQ ID NO: 49172 - DNA, 20 bp, synthetic construct
  source 1..20: mol_type = other DNA
tggtctctttccgttccagc

SEQ ID NO: 49173 - DNA, 20 bp, synthetic construct
  source 1..20: mol_type = other DNA
tgatccgccgagggatagca

SEQ ID NO: 49174 - DNA, 20 bp, synthetic construct
  source 1..20: mol_type = other DNA
ggctgggtggcggcacgtat

SEQ ID NO: 49175 - DNA, 20 bp, synthetic construct
  source 1..20: mol_type = other DNA
cccaatgtggtggcctacat

SEQ ID NO: 49176 - DNA, 20 bp, synthetic construct
  source 1..20: mol_type = other DNA
caccatggtaaatctcctgc

SEQ ID NO: 49177 - DNA, 20 bp, synthetic construct
  source 1..20: mol_type = other DNA
gctgaaggtgaggggcggtg

SEQ ID NO: 49178 - DNA, 20 bp, synthetic construct
  source 1..20: mol_type = other DNA
attgaagaccttggagaagc

SEQ ID NO: 49179 - DNA, 20 bp, synthetic construct
  source 1..20: mol_type = other DNA
tgaccgtgtcgcgggcctgc

SEQ ID NO: 49180 - DNA, 20 bp, synthetic construct
  source 1..20: mol_type = other DNA
cagcagcgtggatccgcagg

SEQ ID NO: 49181 - DNA, 20 bp, synthetic construct
  source 1..20: mol_type = other DNA
tggggagtccagctcctggt

SEQ ID NO: 49182 - DNA, 20 bp, synthetic construct
  source 1..20: mol_type = other DNA
tctggaggagagaggagtag

SEQ ID NO: 49183 - DNA, 20 bp, synthetic construct
  source 1..20: mol_type = other DNA
tcagtagaatgcatttcctg

SEQ ID NO: 49184 - DNA, 20 bp, synthetic construct
  source 1..20: mol_type = other DNA
agcaatttgtacatcctggc

SEQ ID NO: 49185 - DNA, 20 bp, synthetic construct
  source 1..20: mol_type = other DNA
tgttactcatgtaacccaac

SEQ ID NO: 49186 - DNA, 20 bp, synthetic construct
  source 1..20: mol_type = other DNA
catgagagcaatggctttgc

SEQ ID NO: 49187 - DNA, 20 bp, synthetic construct
  source 1..20: mol_type = other DNA
gccagccatcatgagagcaa

SEQ ID NO: 49188 - DNA, 20 bp, synthetic construct
  source 1..20: mol_type = other DNA
cggcgaagagtagactcacc

SEQ ID NO: 49189 - DNA, 20 bp, synthetic construct
  source 1..20: mol_type = other DNA
tatggtcatgctgtagagac

SEQ ID NO: 49190 - DNA, 20 bp, synthetic construct
  source 1..20: mol_type = other DNA
ctccaaggagtgccgatggc

SEQ ID NO: 49191 - DNA, 20 bp, synthetic construct
  source 1..20: mol_type = other DNA
gggcactctaatcgtccgcc

SEQ ID NO: 49192 - DNA, 20 bp, synthetic construct
  source 1..20: mol_type = other DNA
ggaggatggggaggaggagg

SEQ ID NO: 49193 - DNA, 20 bp, synthetic construct
  source 1..20: mol_type = other DNA
ggcgcaaagaagaagaggag

SEQ ID NO: 49194 - DNA, 20 bp, synthetic construct
  source 1..20: mol_type = other DNA
cactcacccgcagggaggag

SEQ ID NO: 49195 - DNA, 20 bp, synthetic construct
  source 1..20: mol_type = other DNA
ctgagacccagggtgagacc

SEQ ID NO: 49196 - DNA, 20 bp, synthetic construct
  source 1..20: mol_type = other DNA
ggagagatgcctacatcagt

SEQ ID NO: 49197 - DNA, 20 bp, synthetic construct
  source 1..20: mol_type = other DNA
acttgagggcttgaatgtct

SEQ ID NO: 49198 - DNA, 20 bp, synthetic construct
  source 1..20: mol_type = other DNA
aaggccataaatttgtgata

SEQ ID NO: 49199 - DNA, 20 bp, synthetic construct
  source 1..20: mol_type = other DNA
ctggtggaagtggttggaaa

SEQ ID NO: 49200 - DNA, 20 bp, synthetic construct
  source 1..20: mol_type = other DNA
tccctactggatggctcctg

SEQ ID NO: 49201 - DNA, 20 bp, synthetic construct
  source 1..20: mol_type = other DNA
ggcagccaacatggcggcgg

SEQ ID NO: 49202 - DNA, 20 bp, synthetic construct
  source 1..20: mol_type = other DNA
ataatgcttccctggaaaga

SEQ ID NO: 49203 - DNA, 20 bp, synthetic construct
  source 1..20: mol_type = other DNA
ttcagacatgagaacatcat

SEQ ID NO: 49204 - DNA, 20 bp, synthetic construct
  source 1..20: mol_type = other DNA
tttctctaccagatcctcag

SEQ ID NO: 49205 - DNA, 20 bp, synthetic construct
  source 1..20: mol_type = other DNA
ggcgggcgcgggcccggaga

SEQ ID NO: 49206 - DNA, 20 bp, synthetic construct
  source 1..20: mol_type = other DNA
tgtggccacacgttggtaca

SEQ ID NO: 49207 - DNA, 20 bp, synthetic construct
  source 1..20: mol_type = other DNA
tcgtaatactgctccagata

SEQ ID NO: 49208 - DNA, 20 bp, synthetic construct
  source 1..20: mol_type = other DNA
ttctctaccagatcctcaga

SEQ ID NO: 49209 - DNA, 20 bp, synthetic construct
  source 1..20: mol_type = other DNA
atgtggccacacgttggtac

SEQ ID NO: 49210 - DNA, 20 bp, synthetic construct
  source 1..20: mol_type = other DNA
gtattacgacccgagtgacg

SEQ ID NO: 49211 - DNA, 20 bp, synthetic construct
  source 1..20: mol_type = other DNA
attttaaccctctgaggatc

SEQ ID NO: 49212 - DNA, 20 bp, synthetic construct
  source 1..20: mol_type = other DNA
aatactgctccagatatggg

SEQ ID NO: 49213 - DNA, 20 bp, synthetic construct
  source 1..20: mol_type = other DNA
cgtaatactgctccagatat

SEQ ID NO: 49214 - DNA, 20 bp, synthetic construct
  source 1..20: mol_type = other DNA
atactgctccagatatgggt

SEQ ID NO: 49215 - DNA, 20 bp, synthetic construct
  source 1..20: mol_type = other DNA
tttgggaacagcctgttcca

SEQ ID NO: 49216 - DNA, 20 bp, synthetic construct
  source 1..20: mol_type = other DNA
ccgtaggcgccggagcccac

SEQ ID NO: 49217 - DNA, 20 bp, synthetic construct
  source 1..20: mol_type = other DNA
ggacctgaagcccagcaacg

SEQ ID NO: 49218 - DNA, 20 bp, synthetic construct
  source 1..20: mol_type = other DNA
cagcaacgtggctgtgaacg

SEQ ID NO: 49219 - DNA, 20 bp, synthetic construct
  source 1..20: mol_type = other DNA
cctaggtggcggggggcgtc

SEQ ID NO: 49220 - DNA, 20 bp, synthetic construct
  source 1..20: mol_type = other DNA
tgtggccacgcgctggtacc

SEQ ID NO: 49221 - DNA, 20 bp, synthetic construct
  source 1..20: mol_type = other DNA
accaaacaggtgcaggggga

SEQ ID NO: 49222 - DNA, 20 bp, synthetic construct
  source 1..20: mol_type = other DNA
cgtgctcgtcgctcagcgcc

SEQ ID NO: 49223 - DNA, 20 bp, synthetic construct
  source 1..20: mol_type = other DNA
ccagacggagccgtaggcgc

SEQ ID NO: 49224 - DNA, 20 bp, synthetic construct
  source 1..20: mol_type = other DNA
tgttcaggtcggcgcccatc

SEQ ID NO: 49225 - DNA, 20 bp, synthetic construct
  source 1..20: mol_type = other DNA
atccagttgagcatgatctc

SEQ ID NO: 49226 - DNA, 20 bp, synthetic construct
  source 1..20: mol_type = other DNA
cctacccacagcacccagct

SEQ ID NO: 49227 - DNA, 20 bp, synthetic construct
  source 1..20: mol_type = other DNA
tctcataggatcccccggct

SEQ ID NO: 49228 - DNA, 20 bp, synthetic construct
  source 1..20: mol_type = other DNA
gtctcataggatcccccggc

SEQ ID NO: 49229 - DNA, 20 bp, synthetic construct
  source 1..20: mol_type = other DNA
cgctaggcaatgtcactgcc

SEQ ID NO: 49230 - DNA, 20 bp, synthetic construct
  source 1..20: mol_type = other DNA
ttcctccaggggccatgctg

SEQ ID NO: 49231 - DNA, 20 bp, synthetic construct
  source 1..20: mol_type = other DNA
gtcagtgctcgggcttcccc

SEQ ID NO: 49232 - DNA, 20 bp, synthetic construct
  source 1..20: mol_type = other DNA
tcaccagggaaggggtgacc

SEQ ID NO: 49233 - DNA, 20 bp, synthetic construct
  source 1..20: mol_type = other DNA
acactgttcctctgtagtgc

SEQ ID NO: 49234 - DNA, 20 bp, synthetic construct
  source 1..20: mol_type = other DNA
ctttcccacagtcccccaac

SEQ ID NO: 49235 - DNA, 20 bp, synthetic construct
  source 1..20: mol_type = other DNA
ggagaaaggagagttcaggt

SEQ ID NO: 49236 - DNA, 20 bp, synthetic construct
  source 1..20: mol_type = other DNA
ctctgaacttggagaggctg

SEQ ID NO: 49237 - DNA, 20 bp, synthetic construct
  source 1..20: mol_type = other DNA
atcctcagggtcctgcccat

SEQ ID NO: 49238 - DNA, 20 bp, synthetic construct
  source 1..20: mol_type = other DNA
tccagaaccgaaggatgaag

SEQ ID NO: 49239 - DNA, 20 bp, synthetic construct
  source 1..20: mol_type = other DNA
cgccctgagggccgcggctc

SEQ ID NO: 49240 - DNA, 20 bp, synthetic construct
  source 1..20: mol_type = other DNA
cctgcctgtaggtactgggc

SEQ ID NO: 49241 - DNA, 20 bp, synthetic construct
  source 1..20: mol_type = other DNA
aagttcagctattgggtaag

SEQ ID NO: 49242 - DNA, 20 bp, synthetic construct
  source 1..20: mol_type = other DNA
cactaagggaatgaaggagg

SEQ ID NO: 49243 - DNA, 20 bp, synthetic construct
  source 1..20: mol_type = other DNA
tcagcctccagttcagcaag

SEQ ID NO: 49244 - DNA, 20 bp, synthetic construct
  source 1..20: mol_type = other DNA
acgcatgccaggcctggttg

SEQ ID NO: 49245 - DNA, 20 bp, synthetic construct
  source 1..20: mol_type = other DNA
ggtatgagaaactgcacgag

SEQ ID NO: 49246 - DNA, 20 bp, synthetic construct
  source 1..20: mol_type = other DNA
ggtgatggcctggacaacca

SEQ ID NO: 49247 - DNA, 20 bp, synthetic construct
  source 1..20: mol_type = other DNA
ttgacatgaccgctaaagaa

SEQ ID NO: 49248 - DNA, 20 bp, synthetic construct
  source 1..20: mol_type = other DNA
tagcggtcatgtcaatggtt

SEQ ID NO: 49249 - DNA, 20 bp, synthetic construct
  source 1..20: mol_type = other DNA
tcgccacccaggcatgccca

SEQ ID NO: 49250 - DNA, 20 bp, synthetic construct
  source 1..20: mol_type = other DNA
gcgctgcctcgaggccttgg

SEQ ID NO: 49251 - DNA, 20 bp, synthetic construct
  source 1..20: mol_type = other DNA
gctgcatcacacgctcatcc

SEQ ID NO: 49252 - DNA, 20 bp, synthetic construct
  source 1..20: mol_type = other DNA
taatacagctggggacgacc

SEQ ID NO: 49253 - DNA, 20 bp, synthetic construct
  source 1..20: mol_type = other DNA
tgattctgtagttgccatcc

SEQ ID NO: 49254 - DNA, 20 bp, synthetic construct
  source 1..20: mol_type = other DNA
ggcccttgggcatgcctggg

SEQ ID NO: 49255 - DNA, 20 bp, synthetic construct
  source 1..20: mol_type = other DNA
caagaaaatggacaccaaca

SEQ ID NO: 49256 - DNA, 20 bp, synthetic construct
  source 1..20: mol_type = other DNA
acctgagagaggaaggataa

SEQ ID NO: 49257 - DNA, 20 bp, synthetic construct
  source 1..20: mol_type = other DNA
atagacaaaggcttccagca

SEQ ID NO: 49258 - DNA, 20 bp, synthetic construct
  source 1..20: mol_type = other DNA
caactgggtcattggagggg

SEQ ID NO: 49259 - DNA, 20 bp, synthetic construct
  source 1..20: mol_type = other DNA
agcagagtgcccgcatgctg

SEQ ID NO: 49260 - DNA, 20 bp, synthetic construct
  source 1..20: mol_type = other DNA
ccacatgctgtccgagctgg

SEQ ID NO: 49261 - DNA, 20 bp, synthetic construct
  source 1..20: mol_type = other DNA
acgacctggccaagctgctg

SEQ ID NO: 49262 - DNA, 20 bp, synthetic construct
  source 1..20: mol_type = other DNA
agacgtcccaccaagggtct

SEQ ID NO: 49263 - DNA, 20 bp, synthetic construct
  source 1..20: mol_type = other DNA
agtgggtagatgagggcctg

SEQ ID NO: 49264 - DNA, 20 bp, synthetic construct
  source 1..20: mol_type = other DNA
ttagcggtcatgtcaatggt

SEQ ID NO: 49265 - DNA, 20 bp, synthetic construct
  source 1..20: mol_type = other DNA
tagagcactgcagtgagggc

SEQ ID NO: 49266 - DNA, 20 bp, synthetic construct
  source 1..20: mol_type = other DNA
catcagcctccagttcagca

SEQ ID NO: 49267 - DNA, 20 bp, synthetic construct
  source 1..20: mol_type = other DNA
accattcccccaaggcctcg

SEQ ID NO: 49268 - DNA, 20 bp, synthetic construct
  source 1..20: mol_type = other DNA
acatcctttaatcaggtatg

SEQ ID NO: 49269 - DNA, 20 bp, synthetic construct
  source 1..20: mol_type = other DNA
gtgggtagatgagggcctga

SEQ ID NO: 49270 - DNA, 20 bp, synthetic construct
  source 1..20: mol_type = other DNA
gttccagcagctgggaatgt

SEQ ID NO: 49271 - DNA, 20 bp, synthetic construct
  source 1..20: mol_type = other DNA
ccaccaaggcatttgactgc

SEQ ID NO: 49272 - DNA, 20 bp, synthetic construct
  source 1..20: mol_type = other DNA
gtccagcaggccatgatggt

SEQ ID NO: 49273 - DNA, 20 bp, synthetic construct
  source 1..20: mol_type = other DNA
ttcatgagggctgaccacaa

SEQ ID NO: 49274 - DNA, 20 bp, synthetic construct
  source 1..20: mol_type = other DNA
aacatcctttaatcaggtat

SEQ ID NO: 49275 - DNA, 20 bp, synthetic construct
  source 1..20: mol_type = other DNA
actgaatgcgaatgattggc

SEQ ID NO: 49276 - DNA, 20 bp, synthetic construct
  source 1..20: mol_type = other DNA
cagcaaggggtcatagacaa

SEQ ID NO: 49277 - DNA, 20 bp, synthetic construct
  source 1..20: mol_type = other DNA
agcgatgtcttgtgaggtga

SEQ ID NO: 49278 - DNA, 20 bp, synthetic construct
  source 1..20: mol_type = other DNA
taacctgcaaaatgaaaaag

SEQ ID NO: 49279 - DNA, 20 bp, synthetic construct
  source 1..20: mol_type = other DNA
tcccaaatcccatgaggcct

SEQ ID NO: 49280 - DNA, 20 bp, synthetic construct
  source 1..20: mol_type = other DNA
atcagcctccagttcagcaa

SEQ ID NO: 49281 - DNA, 20 bp, synthetic construct
  source 1..20: mol_type = other DNA
gtatgagaaactgcacgagt

SEQ ID NO: 49282 - DNA, 20 bp, synthetic construct
  source 1..20: mol_type = other DNA
ggtctatttgcctcgcgtgc

SEQ ID NO: 49283 - DNA, 20 bp, synthetic construct
  source 1..20: mol_type = other DNA
gtttctcataccaggtagcc

SEQ ID NO: 49284 - DNA, 20 bp, synthetic construct
  source 1..20: mol_type = other DNA
gttccatggtgacatagtgc

SEQ ID NO: 49285 - DNA, 20 bp, synthetic construct
  source 1..20: mol_type = other DNA
gctacagcagccggaggcag

SEQ ID NO: 49286 - DNA, 20 bp, synthetic construct
  source 1..20: mol_type = other DNA
atgcggcccagcatcagctc

SEQ ID NO: 49287 - DNA, 20 bp, synthetic construct
  source 1..20: mol_type = other DNA
tctccttcttgacacagctt

SEQ ID NO: 49288 - DNA, 20 bp, synthetic construct
  source 1..20: mol_type = other DNA
cacagactcgaatgacgtta

SEQ ID NO: 49289 - DNA, 20 bp, synthetic construct
  source 1..20: mol_type = other DNA
gcagtctctcccaccagatc

SEQ ID NO: 49290 - DNA, 20 bp, synthetic construct
  source 1..20: mol_type = other DNA
tgagaaactgcacgagtggg

SEQ ID NO: 49291 - DNA, 20 bp, synthetic construct
  source 1..20: mol_type = other DNA
agcagtcaaatgccttggtg

SEQ ID NO: 49292 - DNA, 20 bp, synthetic construct
  source 1..20: mol_type = other DNA
ctcgtgcagtttctcatacc

SEQ ID NO: 49293 - DNA, 20 bp, synthetic construct
  source 1..20: mol_type = other DNA
cgcacagtggcgaacaaatt

SEQ ID NO: 49294 - DNA, 20 bp, synthetic construct
  source 1..20: mol_type = other DNA
tggccagaagggtgttaacc

SEQ ID NO: 49295 - DNA, 20 bp, synthetic construct
  source 1..20: mol_type = other DNA
gaccttgaattggctgtgcc

SEQ ID NO: 49296 - DNA, 20 bp, synthetic construct
  source 1..20: mol_type = other DNA
aaaccaattcaaaaatgtga

SEQ ID NO: 49297 - DNA, 20 bp, synthetic construct
  source 1..20: mol_type = other DNA
gagaagtcccgacctagcac

SEQ ID NO: 49298 - DNA, 20 bp, synthetic construct
  source 1..20: mol_type = other DNA
agcatgctggctcgagcaat

SEQ ID NO: 49299 - DNA, 20 bp, synthetic construct
  source 1..20: mol_type = other DNA
tagccaggtatcaatctgga

SEQ ID NO: 49300 - DNA, 20 bp, synthetic construct
  source 1..20: mol_type = other DNA
ccatcctctggcatgagatg

SEQ ID NO: 49301 - DNA, 20 bp, synthetic construct
  source 1..20: mol_type = other DNA
atttcactgactatgcctcc

SEQ ID NO: 49302 - DNA, 20 bp, synthetic construct
  source 1..20: mol_type = other DNA
aacactccggccgctgcctc

SEQ ID NO: 49303 - DNA, 20 bp, synthetic construct
  source 1..20: mol_type = other DNA
gcagcacctccatcactgtg

SEQ ID NO: 49304 - DNA, 20 bp, synthetic construct
  source 1..20: mol_type = other DNA
ggtttttccgaagagatgtt

SEQ ID NO: 49305 - DNA, 20 bp, synthetic construct
  source 1..20: mol_type = other DNA
gaaaggcatgtttgaggtgc

SEQ ID NO: 49306 - DNA, 20 bp, synthetic construct
  source 1..20: mol_type = other DNA
ctcaagtatgcaagcctgtg

SEQ ID NO: 49307 - DNA, 20 bp, synthetic construct
  source 1..20: mol_type = other DNA
aggcctcgaggcagcgcatg

SEQ ID NO: 49308 - DNA, 20 bp, synthetic construct
  source 1..20: mol_type = other DNA
gactgactggccagcagagt

SEQ ID NO: 49309 - DNA, 20 bp, synthetic construct
  source 1..20: mol_type = other DNA
ggtccagcaggccatgatgg

SEQ ID NO: 49310 - DNA, 20 bp, synthetic construct
  source 1..20: mol_type = other DNA
ccgaagagatgttgggtcat

SEQ ID NO: 49311 - DNA, 20 bp, synthetic construct
  source 1..20: mol_type = other DNA
tgcggcccagcatcagctct

SEQ ID NO: 49312 - DNA, 20 bp, synthetic construct
  source 1..20: mol_type = other DNA
tgacatgaccgctaaagaac

SEQ ID NO: 49313 - DNA, 20 bp, synthetic construct
  source 1..20: mol_type = other DNA
catctcttcggaaaaacctc

SEQ ID NO: 49314 - DNA, 20 bp, synthetic construct
  source 1..20: mol_type = other DNA
agacacagtagcgaatgtca

SEQ ID NO: 49315 - DNA, 20 bp, synthetic construct
  source 1..20: mol_type = other DNA
agcaggccatgatggtgggt

SEQ ID NO: 49316 - DNA, 20 bp, synthetic construct
  source 1..20: mol_type = other DNA
tggggcgcggccacggcggg

SEQ ID NO: 49317 - DNA, 20 bp, synthetic construct
  source 1..20: mol_type = other DNA
gcacagccgggggcgcggcg

SEQ ID NO: 49318 - DNA, 20 bp, synthetic construct
  source 1..20: mol_type = other DNA
gttctgattcagagcgaggt

SEQ ID NO: 49319 - DNA, 20 bp, synthetic construct
  source 1..20: mol_type = other DNA
tttggcagaggagattgaag

SEQ ID NO: 49320 - DNA, 20 bp, synthetic construct
  source 1..20: mol_type = other DNA
caggtaacggggagccgggc

SEQ ID NO: 49321 - DNA, 20 bp, synthetic construct
  source 1..20: mol_type = other DNA
tatgctgcagaaataagaat

SEQ ID NO: 49322 - DNA, 20 bp, synthetic construct
  source 1..20: mol_type = other DNA
gtctcacatgaccagcgtcc

SEQ ID NO: 49323 - DNA, 20 bp, synthetic construct
  source 1..20: mol_type = other DNA
ggaagacagaattatttacc

SEQ ID NO: 49324 - DNA, 20 bp, synthetic construct
  source 1..20: mol_type = other DNA
aaggtgcatgatcgtccacc

SEQ ID NO: 49325 - DNA, 20 bp, synthetic construct
  source 1..20: mol_type = other DNA
cgaacaggaaggttatctgc

SEQ ID NO: 49326 - DNA, 20 bp, synthetic construct
  source 1..20: mol_type = other DNA
caaggacccttgatgagctc

SEQ ID NO: 49327 - DNA, 20 bp, synthetic construct
  source 1..20: mol_type = other DNA
ggagaattggaaaacaatgt

SEQ ID NO: 49328 - DNA, 20 bp, synthetic construct
  source 1..20: mol_type = other DNA
gtctctgaaattacaaagta

SEQ ID NO: 49329 - DNA, 20 bp, synthetic construct
  source 1..20: mol_type = other DNA
tggacgatcatgcaccttgc

SEQ ID NO: 49330 - DNA, 20 bp, synthetic construct
  source 1..20: mol_type = other DNA
gctccccgttacctgtgccg

SEQ ID NO: 49331 - DNA, 20 bp, synthetic construct
  source 1..20: mol_type = other DNA
aggtgcatgatcgtccacca

SEQ ID NO: 49332 - DNA, 20 bp, synthetic construct
  source 1..20: mol_type = other DNA
gaacttactagcatcttcag

SEQ ID NO: 49333 - DNA, 20 bp, synthetic construct
  source 1..20: mol_type = other DNA
gcgccatggcccgaagaccc

SEQ ID NO: 49334 - DNA, 20 bp, synthetic construct
  source 1..20: mol_type = other DNA
accaggcacacaagagactg

SEQ ID NO: 49335 - DNA, 20 bp, synthetic construct
  source 1..20: mol_type = other DNA
taccaggcacacaagagact

SEQ ID NO: 49336 - DNA, 20 bp, synthetic construct
  source 1..20: mol_type = other DNA
cttaccggtgcatctgccac

SEQ ID NO: 49337 - DNA, 20 bp, synthetic construct
  source 1..20: mol_type = other DNA
actggaattctacaatgcgt

SEQ ID NO: 49338 - DNA, 20 bp, synthetic construct
  source 1..20: mol_type = other DNA
tgtctcacatgaccagcgtc

SEQ ID NO: 49339 - DNA, 20 bp, synthetic construct
  source 1..20: mol_type = other DNA
tacttacagaatctataaat

SEQ ID NO: 49340 - DNA, 20 bp, synthetic construct
  source 1..20: mol_type = other DNA
gtcttcctcttctgtccagg

SEQ ID NO: 49341 - DNA, 20 bp, synthetic construct
  source 1..20: mol_type = other DNA
agaacttactagcatcttca

SEQ ID NO: 49342 - DNA, 20 bp, synthetic construct
  source 1..20: mol_type = other DNA
acagctcaactccctgccac

SEQ ID NO: 49343 - DNA, 20 bp, synthetic construct
  source 1..20: mol_type = other DNA
atggtggtgctgtgccaccc

SEQ ID NO: 49344 - DNA, 20 bp, synthetic construct
  source 1..20: mol_type = other DNA
atgtgcagtgccagcaccga

SEQ ID NO: 49345 - DNA, 20 bp, synthetic construct
  source 1..20: mol_type = other DNA
cattttgtgcttcagaaatg

SEQ ID NO: 49346 - DNA, 20 bp, synthetic construct
  source 1..20: mol_type = other DNA
gccatggcgcggcgggcgcg

SEQ ID NO: 49347 - DNA, 20 bp, synthetic construct
  source 1..20: mol_type = other DNA
acctgaatggctgcggcagc

SEQ ID NO: 49348 - DNA, 20 bp, synthetic construct
  source 1..20: mol_type = other DNA
gtggcagggagttgagctgt

SEQ ID NO: 49349 - DNA, 20 bp, synthetic construct
  source 1..20: mol_type = other DNA
ctgaggctaaacggaagagt

SEQ ID NO: 49350 - DNA, 20 bp, synthetic construct
  source 1..20: mol_type = other DNA
cagaagttaagaaaacctcc

SEQ ID NO: 49351 - DNA, 20 bp, synthetic construct
  source 1..20: mol_type = other DNA
caagagactggggaacagat

SEQ ID NO: 49352 - DNA, 20 bp, synthetic construct
  source 1..20: mol_type = other DNA
aaggacccttgatgagctca

SEQ ID NO: 49353 - DNA, 20 bp, synthetic construct
  source 1..20: mol_type = other DNA
tctctgaaattacaaagtaa

SEQ ID NO: 49354 - DNA, 20 bp, synthetic construct
  source 1..20: mol_type = other DNA
tccccagtctcttgtgtgcc

SEQ ID NO: 49355 - DNA, 20 bp, synthetic construct
  source 1..20: mol_type = other DNA
tgagaaggaaaagcgaataa

SEQ ID NO: 49356 - DNA, 20 bp, synthetic construct
  source 1..20: mol_type = other DNA
gacggacaggatgtatgctg

SEQ ID NO: 49357 - DNA, 20 bp, synthetic construct
  source 1..20: mol_type = other DNA
gcatcgtcgcgggaggctgc

SEQ ID NO: 49358 - DNA, 20 bp, synthetic construct
  source 1..20: mol_type = other DNA
cgaggggtcgatgcactctg

SEQ ID NO: 49359 - DNA, 20 bp, synthetic construct
  source 1..20: mol_type = other DNA
atccaggactgtatgtggag

SEQ ID NO: 49360 - DNA, 20 bp, synthetic construct
  source 1..20: mol_type = other DNA
ttttaaggataactaccttg

SEQ ID NO: 49361 - DNA, 20 bp, synthetic construct
  source 1..20: mol_type = other DNA
tgcgtagttgtgctgatgtg

SEQ ID NO: 49362 - DNA, 20 bp, synthetic construct
  source 1..20: mol_type = other DNA
ttgaggggcatcgtcgcggg

SEQ ID NO: 49363 - DNA, 20 bp, synthetic construct
  source 1..20: mol_type = other DNA
gttttagctcgttcctcctc

SEQ ID NO: 49364 - DNA, 20 bp, synthetic construct
  source 1..20: mol_type = other DNA
acgttgaggggcatcgtcgc

SEQ ID NO: 49365 - DNA, 20 bp, synthetic construct
  source 1..20: mol_type = other DNA
ctgtatgtggagcggcttct

SEQ ID NO: 49366 - DNA, 20 bp, synthetic construct
  source 1..20: mol_type = other DNA
agccgctccacatacagtcc

SEQ ID NO: 49367 - DNA, 20 bp, synthetic construct
  source 1..20: mol_type = other DNA
cacggccgaccagctggaga

SEQ ID NO: 49368 - DNA, 20 bp, synthetic construct
  source 1..20: mol_type = other DNA
gctgcaccgagtcgtagtcg

SEQ ID NO: 49369 - DNA, 20 bp, synthetic construct
  source 1..20: mol_type = other DNA
ggcacctcttgaggaccagt

SEQ ID NO: 49370 - DNA, 20 bp, synthetic construct
  source 1..20: mol_type = other DNA
aacgttgaggggcatcgtcg

SEQ ID NO: 49371 - DNA, 20 bp, synthetic construct
  source 1..20: mol_type = other DNA
tttaaggataactaccttgg

SEQ ID NO: 49372 - DNA, 20 bp, synthetic construct
  source 1..20: mol_type = other DNA
gagagcagccaggggaaggg

SEQ ID NO: 49373 - DNA, 20 bp, synthetic construct
  source 1..20: mol_type = other DNA
cttcattgccttgtacttga

SEQ ID NO: 49374 - DNA, 20 bp, synthetic construct
  source 1..20: mol_type = other DNA
caccatccggcggcacctag

SEQ ID NO: 49375 - DNA, 20 bp, synthetic construct
  source 1..20: mol_type = other DNA
ttatgtgaaatttaactaca

SEQ ID NO: 49376 - DNA, 20 bp, synthetic construct
  source 1..20: mol_type = other DNA
agtcctttgggtgaccatgt

SEQ ID NO: 49377 - DNA, 20 bp, synthetic construct
  source 1..20: mol_type = other DNA
taatccattaacttcaggtt

SEQ ID NO: 49378 - DNA, 20 bp, synthetic construct
  source 1..20: mol_type = other DNA
ttttggggacgaggcccacc

SEQ ID NO: 49379 - DNA, 20 bp, synthetic construct
  source 1..20: mol_type = other DNA
tggacatcaagaagaacgag

SEQ ID NO: 49380 - DNA, 20 bp, synthetic construct
  source 1..20: mol_type = other DNA
ctcggcgtccgtgctgggcg

SEQ ID NO: 49381 - DNA, 20 bp, synthetic construct
  source 1..20: mol_type = other DNA
cgactccaagacgtggtggc

SEQ ID NO: 49382 - DNA, 20 bp, synthetic construct
  source 1..20: mol_type = other DNA
agtgatctgaaggaagaggt

SEQ ID NO: 49383 - DNA, 20 bp, synthetic construct
  source 1..20: mol_type = other DNA
tgcactttttttaaagctac

SEQ ID NO: 49384 - DNA, 20 bp, synthetic construct
  source 1..20: mol_type = other DNA
tgctgtcattctccaggatg

SEQ ID NO: 49385 - DNA, 20 bp, synthetic construct
  source 1..20: mol_type = other DNA
agatgattgcacataccacg

SEQ ID NO: 49386 - DNA, 20 bp, synthetic construct
  source 1..20: mol_type = other DNA
caacttacaagttcaaccgg

SEQ ID NO: 49387 - DNA, 20 bp, synthetic construct
  source 1..20: mol_type = other DNA
cttacaagttcaaccggagg

SEQ ID NO: 49388 - DNA, 20 bp, synthetic construct
  source 1..20: mol_type = other DNA
tcatctgttccagccacgct

SEQ ID NO: 49389 - DNA, 20 bp, synthetic construct
  source 1..20: mol_type = other DNA
actacgggagcgcggccgag

SEQ ID NO: 49390 - DNA, 20 bp, synthetic construct
  source 1..20: mol_type = other DNA
tttcggatgtaactgacaac

SEQ ID NO: 49391 - DNA, 20 bp, synthetic construct
  source 1..20: mol_type = other DNA
gggttccatgatataatccc

SEQ ID NO: 49392 - DNA, 20 bp, synthetic construct
  source 1..20: mol_type = other DNA
ggcccagactgtgaacctgc

SEQ ID NO: 49393 - DNA, 20 bp, synthetic construct
  source 1..20: mol_type = other DNA
cctcatccagcaacgccagg

SEQ ID NO: 49394 - DNA, 20 bp, synthetic construct
  source 1..20: mol_type = other DNA
cctcttcagagtgttgaaga

SEQ ID NO: 49395 - DNA, 20 bp, synthetic construct
  source 1..20: mol_type = other DNA
acaggtacgtgtgctccccg

SEQ ID NO: 49396 - DNA, 20 bp, synthetic construct
  source 1..20: mol_type = other DNA
cgtggttgagacctggaaga

SEQ ID NO: 49397 - DNA, 20 bp, synthetic construct
  source 1..20: mol_type = other DNA
gacgtccagcacctgcgtgg

SEQ ID NO: 49398 - DNA, 20 bp, synthetic construct
  source 1..20: mol_type = other DNA
cttcagagtgttgaagatgg

SEQ ID NO: 49399 - DNA, 20 bp, synthetic construct
  source 1..20: mol_type = other DNA
ttcaggtgttgagccagtgc

SEQ ID NO: 49400 - DNA, 20 bp, synthetic construct
  source 1..20: mol_type = other DNA
acctgtctgaatgagccact

SEQ ID NO: 49401 - DNA, 20 bp, synthetic construct
  source 1..20: mol_type = other DNA
agggttccatgatataatcc

SEQ ID NO: 49402 - DNA, 20 bp, synthetic construct
  source 1..20: mol_type = other DNA
accaggggctcggatcaacc

SEQ ID NO: 49403 - DNA, 20 bp, synthetic construct
  source 1..20: mol_type = other DNA
aatgacgtccagcacctgcg

SEQ ID NO: 49404 - DNA, 20 bp, synthetic construct
  source 1..20: mol_type = other DNA
tactggatgtaatttagata

SEQ ID NO: 49405 - DNA, 20 bp, synthetic construct
  source 1..20: mol_type = other DNA
gatgaaaaaaggttaacttg

SEQ ID NO: 49406 - DNA, 20 bp, synthetic construct
  source 1..20: mol_type = other DNA
tcctgccaggatgaggggtg

SEQ ID NO: 49407 - DNA, 20 bp, synthetic construct
  source 1..20: mol_type = other DNA
tgagaaagaagtgttgtcac

SEQ ID NO: 49408 - DNA, 20 bp, synthetic construct
  source 1..20: mol_type = other DNA
ataaattatctggtctggta

SEQ ID NO: 49409 - DNA, 20 bp, synthetic construct
  source 1..20: mol_type = other DNA
gtacatctcaccaccacctg

SEQ ID NO: 49410 - DNA, 20 bp, synthetic construct
  source 1..20: mol_type = other DNA
tatcaggcctgcagagtaac

SEQ ID NO: 49411 - DNA, 20 bp, synthetic construct
  source 1..20: mol_type = other DNA
cgaaatccaaagcagaggcc

SEQ ID NO: 49412 - DNA, 20 bp, synthetic construct
  source 1..20: mol_type = other DNA
catagacagattctgtgggg

SEQ ID NO: 49413 - DNA, 20 bp, synthetic construct
  source 1..20: mol_type = other DNA
agtaccattgctgtgttaca

SEQ ID NO: 49414 - DNA, 20 bp, synthetic construct
  source 1..20: mol_type = other DNA
gaaatatgttggttgactgc

SEQ ID NO: 49415 - DNA, 20 bp, synthetic construct
  source 1..20: mol_type = other DNA
tcgcccacgccgtccccgca

SEQ ID NO: 49416 - DNA, 20 bp, synthetic construct
  source 1..20: mol_type = other DNA
gggctgcatcagaaggagag

SEQ ID NO: 49417 - DNA, 20 bp, synthetic construct
  source 1..20: mol_type = other DNA
caccgtcatccaggtacaac

SEQ ID NO: 49418 - DNA, 20 bp, synthetic construct
  source 1..20: mol_type = other DNA
atgaggtgagccggcagcgc

SEQ ID NO: 49419 - DNA, 20 bp, synthetic construct
  source 1..20: mol_type = other DNA
attttcgtggagaaagcccc

SEQ ID NO: 49420 - DNA, 20 bp, synthetic construct
  source 1..20: mol_type = other DNA
gggactggaaagctggtgct

SEQ ID NO: 49421 - DNA, 20 bp, synthetic construct
  source 1..20: mol_type = other DNA
ggacttaacccctggctcac

SEQ ID NO: 49422 - DNA, 20 bp, synthetic construct
  source 1..20: mol_type = other DNA
cagtcggagactcgtccctg

SEQ ID NO: 49423 - DNA, 20 bp, synthetic construct
  source 1..20: mol_type = other DNA
gtgcgccgtggggagcggca

SEQ ID NO: 49424 - DNA, 20 bp, synthetic construct
  source 1..20: mol_type = other DNA
actcagcgtggccgtggagg

SEQ ID NO: 49425 - DNA, 20 bp, synthetic construct
  source 1..20: mol_type = other DNA
cgggatgatgcccggtgtgg

SEQ ID NO: 49426 - DNA, 20 bp, synthetic construct
  source 1..20: mol_type = other DNA
gcctgatggggcccctgccc

SEQ ID NO: 49427 - DNA, 20 bp, synthetic construct
  source 1..20: mol_type = other DNA
cagagcgagtgttcgagacc

SEQ ID NO: 49428 - DNA, 20 bp, synthetic construct
  source 1..20: mol_type = other DNA
accttcctccgctgacttca

SEQ ID NO: 49429 - DNA, 20 bp, synthetic construct
  source 1..20: mol_type = other DNA
ctcgtggctggtggtggaca

SEQ ID NO: 49430 - DNA, 20 bp, synthetic construct
  source 1..20: mol_type = other DNA
tggccaccatgtctgggaga

SEQ ID NO: 49431 - DNA, 20 bp, synthetic construct
  source 1..20: mol_type = other DNA
agcaggctcataatcatcag

SEQ ID NO: 49432 - DNA, 20 bp, synthetic construct
  source 1..20: mol_type = other DNA
aacaaaaagcatgttctata

SEQ ID NO: 49433 - DNA, 20 bp, synthetic construct
  source 1..20: mol_type = other DNA
agcccagcaggctggggctc

SEQ ID NO: 49434 - DNA, 20 bp, synthetic construct
  source 1..20: mol_type = other DNA
gcagctcgtgagcagatcgc

SEQ ID NO: 49435 - DNA, 20 bp, synthetic construct
  source 1..20: mol_type = other DNA
gtccgcaagggacagcgggg

SEQ ID NO: 49436 - DNA, 20 bp, synthetic construct
  source 1..20: mol_type = other DNA
ctagcggggctcaagcaaag

SEQ ID NO: 49437 - DNA, 20 bp, synthetic construct
  source 1..20: mol_type = other DNA
ggccctgcgagcagggcgag

SEQ ID NO: 49438 - DNA, 20 bp, synthetic construct
  source 1..20: mol_type = other DNA
atgagggcaacgtaagggct

SEQ ID NO: 49439 - DNA, 20 bp, synthetic construct
  source 1..20: mol_type = other DNA
ctacatggaaaacaagcctc

SEQ ID NO: 49440 - DNA, 20 bp, synthetic construct
  source 1..20: mol_type = other DNA
accagcggcttgggccaagt

SEQ ID NO: 49441 - DNA, 20 bp, synthetic construct
  source 1..20: mol_type = other DNA
atccgtgggctccgtcttga

SEQ ID NO: 49442 - DNA, 20 bp, synthetic construct
  source 1..20: mol_type = other DNA
atcttgggggggatcccaca

SEQ ID NO: 49443 - DNA, 20 bp, synthetic construct
  source 1..20: mol_type = other DNA
caaggtcagaggctgagccc

SEQ ID NO: 49444 - DNA, 20 bp, synthetic construct
  source 1..20: mol_type = other DNA
gatcccacaaggcgagtccg

SEQ ID NO: 49445 - DNA, 20 bp, synthetic construct
  source 1..20: mol_type = other DNA
tccccgtgattcggtgcacc

SEQ ID NO: 49446 - DNA, 20 bp, synthetic construct
  source 1..20: mol_type = other DNA
gctggttggtcggagagggg

SEQ ID NO: 49447 - DNA, 20 bp, synthetic construct
  source 1..20: mol_type = other DNA
gggctgcggcgaggggctcc

SEQ ID NO: 49448 - DNA, 20 bp, synthetic construct
  source 1..20: mol_type = other DNA
ggagtgcctccgtttcccac

SEQ ID NO: 49449 - DNA, 20 bp, synthetic construct
  source 1..20: mol_type = other DNA
aatccagggactcaggactc

SEQ ID NO: 49450 - DNA, 20 bp, synthetic construct
  source 1..20: mol_type = other DNA
gcagcatctcttctaggagt

SEQ ID NO: 49451 - DNA, 20 bp, synthetic construct
  source 1..20: mol_type = other DNA
gcactgcagctgtaactgct

SEQ ID NO: 49452 - DNA, 20 bp, synthetic construct
  source 1..20: mol_type = other DNA
tatgcacagaatgaggtgta

SEQ ID NO: 49453 - DNA, 20 bp, synthetic construct
  source 1..20: mol_type = other DNA
tctattgaagtctcccgggc

SEQ ID NO: 49454 - DNA, 20 bp, synthetic construct
  source 1..20: mol_type = other DNA
ctagaagagatgctgctggc

SEQ ID NO: 49455 - DNA, 20 bp, synthetic construct
  source 1..20: mol_type = other DNA
agatagagatgatctctaga

SEQ ID NO: 49456 - DNA, 20 bp, synthetic construct
  source 1..20: mol_type = other DNA
gtctctacacagtactgaaa

SEQ ID NO: 49457 - DNA, 20 bp, synthetic construct
  source 1..20: mol_type = other DNA
ctctttagtattgattgtgc

SEQ ID NO: 49458 - DNA, 20 bp, synthetic construct
  source 1..20: mol_type = other DNA
taaatctacaaatgtttatt

SEQ ID NO: 49459 - DNA, 20 bp, synthetic construct
  source 1..20: mol_type = other DNA
caggtagtccaccatgggat

SEQ ID NO: 49460 - DNA, 20 bp, synthetic construct
  source 1..20: mol_type = other DNA
ctagaaagaggttatctgta

SEQ ID NO: 49461 - DNA, 20 bp, synthetic construct
  source 1..20: mol_type = other DNA
tcactgggctggaggctgcc

SEQ ID NO: 49462 - DNA, 20 bp, synthetic construct
  source 1..20: mol_type = other DNA
ttttcggatagtttcggcgg

SEQ ID NO: 49463 - DNA, 20 bp, synthetic construct
  source 1..20: mol_type = other DNA
gtgggaaaacactgtgagga

SEQ ID NO: 49464 - DNA, 20 bp, synthetic construct
  source 1..20: mol_type = other DNA
ccaggtagtccaccatggga

SEQ ID NO: 49465 - DNA, 20 bp, synthetic construct
  source 1..20: mol_type = other DNA
cctcacagtgttttcccacc

SEQ ID NO: 49466 - DNA, 20 bp, synthetic construct
  source 1..20: mol_type = other DNA
ccaccaggctgtgggcatgc

SEQ ID NO: 49467 - DNA, 20 bp, synthetic construct
  source 1..20: mol_type = other DNA
tgtataaggggctataatcc

SEQ ID NO: 49468 - DNA, 20 bp, synthetic construct
  source 1..20: mol_type = other DNA
tgaaaattgtaagaatggac

SEQ ID NO: 49469 - DNA, 20 bp, synthetic construct
  source 1..20: mol_type = other DNA
ccaggctgtgggcatgcagg

SEQ ID NO: 49470 - DNA, 20 bp, synthetic construct
  source 1..20: mol_type = other DNA
cacaaggcgcctggaacccg

SEQ ID NO: 49471 - DNA, 20 bp, synthetic construct
  source 1..20: mol_type = other DNA
gatgtaaactctggctcata

SEQ ID NO: 49472 - DNA, 20 bp, synthetic construct
  source 1..20: mol_type = other DNA
gctctaatatttgaaggtat

SEQ ID NO: 49473 - DNA, 20 bp, synthetic construct
  source 1..20: mol_type = other DNA
aaaaacactgtaaacctctt

SEQ ID NO: 49474 - DNA, 20 bp, synthetic construct
  source 1..20: mol_type = other DNA
cgccgaggtcctgggcgtgg

SEQ ID NO: 49475 - DNA, 20 bp, synthetic construct
  source 1..20: mol_type = other DNA
actggtaggggctgtaggcc

SEQ ID NO: 49476 - DNA, 20 bp, synthetic construct
  source 1..20: mol_type = other DNA
ctatgatacaaaaacttcag

SEQ ID NO: 49477 - DNA, 20 bp, synthetic construct
  source 1..20: mol_type = other DNA
gcccccgcacctggtgcagg

SEQ ID NO: 49478 - DNA, 20 bp, synthetic construct
  source 1..20: mol_type = other DNA
tacaaaaacttcagaggcag

SEQ ID NO: 49479 - DNA, 20 bp, synthetic construct
  source 1..20: mol_type = other DNA
ccagtccggcgcgggcccca

SEQ ID NO: 49480 - DNA, 20 bp, synthetic construct
  source 1..20: mol_type = other DNA
ggagatgctgcagcgaggta

SEQ ID NO: 49481 - DNA, 20 bp, synthetic construct
  source 1..20: mol_type = other DNA
gccacctgtggatacaggca

SEQ ID NO: 49482 - DNA, 20 bp, synthetic construct
  source 1..20: mol_type = other DNA
tcaatcttcatcttgtgata

SEQ ID NO: 49483 - DNA, 20 bp, synthetic construct
  source 1..20: mol_type = other DNA
tgtgggagagaagtccccaa

SEQ ID NO: 49484 - DNA, 20 bp, synthetic construct
  source 1..20: mol_type = other DNA
accttccaccagagggtaat

SEQ ID NO: 49485 - DNA, 20 bp, synthetic construct
  source 1..20: mol_type = other DNA
tcgtcccccctgccgctctg

SEQ ID NO: 49486 - DNA, 20 bp, synthetic construct
  source 1..20: mol_type = other DNA
cttgcatctagccacagaga

SEQ ID NO: 49487 - DNA, 20 bp, synthetic construct
  source 1..20: mol_type = other DNA
gaccccccagtgcgagccgc

SEQ ID NO: 49488 - DNA, 20 bp, synthetic construct
  source 1..20: mol_type = other DNA
tgtgaaggcccctcccatgg

SEQ ID NO: 49489 - DNA, 20 bp, synthetic construct
  source 1..20: mol_type = other DNA
tcaccttggtgctgcaagtg

SEQ ID NO: 49490 - DNA, 20 bp, synthetic construct
  source 1..20: mol_type = other DNA
gggggctacggaggagctgg

SEQ ID NO: 49491 - DNA, 20 bp, synthetic construct
  source 1..20: mol_type = other DNA
gggctgtaggccagggagga

SEQ ID NO: 49492 - DNA, 20 bp, synthetic construct
  source 1..20: mol_type = other DNA
cctcaccaaccacctgcacc

SEQ ID NO: 49493 - DNA, 20 bp, synthetic construct
  source 1..20: mol_type = other DNA
ccacgggcacccccagcctc

SEQ ID NO: 49494 - DNA, 20 bp, synthetic construct
  source 1..20: mol_type = other DNA
taaacaggtacccagggcta

SEQ ID NO: 49495 - DNA, 20 bp, synthetic construct
  source 1..20: mol_type = other DNA
ctcctccattgtggaaccca

SEQ ID NO: 49496 - DNA, 20 bp, synthetic construct
  source 1..20: mol_type = other DNA
caatcttcatcttgtgatag

SEQ ID NO: 49497 - DNA, 20 bp, synthetic construct
  source 1..20: mol_type = other DNA
ttcctccccggagtccctgc

SEQ ID NO: 49498 - DNA, 20 bp, synthetic construct
  source 1..20: mol_type = other DNA
gcccagcagggactccgggg

SEQ ID NO: 49499 - DNA, 20 bp, synthetic construct
  source 1..20: mol_type = other DNA
cagcccctaccagtccggcg

SEQ ID NO: 49500 - DNA, 20 bp, synthetic construct
  source 1..20: mol_type = other DNA
gaccagccttcagaaggagg

SEQ ID NO: 49501 - DNA, 20 bp, synthetic construct
  source 1..20: mol_type = other DNA
gccttccttagagccagtga

SEQ ID NO: 49502 - DNA, 20 bp, synthetic construct
  source 1..20: mol_type = other DNA
cgtagttacagatctaggag

SEQ ID NO: 49503 - DNA, 20 bp, synthetic construct
  source 1..20: mol_type = other DNA
aggcaccgggcagtcctcca

SEQ ID NO: 49504 - DNA, 20 bp, synthetic construct
  source 1..20: mol_type = other DNA
gctacgggccacagagggcg

SEQ ID NO: 49505 - DNA, 20 bp, synthetic construct
  source 1..20: mol_type = other DNA
tgccacctgtggatacaggc

SEQ ID NO: 49506 - DNA, 20 bp, synthetic construct
  source 1..20: mol_type = other DNA
tggctaggtgcagtggtctg

SEQ ID NO: 49507 - DNA, 20 bp, synthetic construct
  source 1..20: mol_type = other DNA
ctcacctgctgggctgggcg

SEQ ID NO: 49508 - DNA, 20 bp, synthetic construct
  source 1..20: mol_type = other DNA
gcagcgggagctggagcaag

SEQ ID NO: 49509 - DNA, 20 bp, synthetic construct
  source 1..20: mol_type = other DNA
gggcgtctggggatgaaagc

SEQ ID NO: 49510 - DNA, 20 bp, synthetic construct
  source 1..20: mol_type = other DNA
tgcacctagccatcatccac

SEQ ID NO: 49511 - DNA, 20 bp, synthetic construct
  source 1..20: mol_type = other DNA
cggaacacaatggcatactg

SEQ ID NO: 49512 - DNA, 20 bp, synthetic construct
  source 1..20: mol_type = other DNA
tgctgacctgtttctggggc

SEQ ID NO: 49513 - DNA, 20 bp, synthetic construct
  source 1..20: mol_type = other DNA
tgttccacgatcaccaggta

SEQ ID NO: 49514 - DNA, 20 bp, synthetic construct
  source 1..20: mol_type = other DNA
cggtgcccagcagggactcc

SEQ ID NO: 49515 - DNA, 20 bp, synthetic construct
  source 1..20: mol_type = other DNA
ccagccagctgagaagacag

SEQ ID NO: 49516 - DNA, 20 bp, synthetic construct
  source 1..20: mol_type = other DNA
agattctatggagtgggata

SEQ ID NO: 49517 - DNA, 20 bp, synthetic construct
  source 1..20: mol_type = other DNA
gctggtcagtctcaccctca

SEQ ID NO: 49518 - DNA, 20 bp, synthetic construct
  source 1..20: mol_type = other DNA
gggaccagccaagatcgagg

SEQ ID NO: 49519 - DNA, 20 bp, synthetic construct
  source 1..20: mol_type = other DNA
gccaggtgcaggggcgtctg

SEQ ID NO: 49520 - DNA, 20 bp, synthetic construct
  source 1..20: mol_type = other DNA
cctgaggctgggggtgcccg

SEQ ID NO: 49521 - DNA, 20 bp, synthetic construct
  source 1..20: mol_type = other DNA
gatcgtggaacagcctaagc

SEQ ID NO: 49522 - DNA, 20 bp, synthetic construct
  source 1..20: mol_type = other DNA
aggaggtgagggggtactga

SEQ ID NO: 49523 - DNA, 20 bp, synthetic construct
  source 1..20: mol_type = other DNA
tccccagacgcccctgcacc

SEQ ID NO: 49524 - DNA, 20 bp, synthetic construct
  source 1..20: mol_type = other DNA
cgggagccagtcagtggagc

SEQ ID NO: 49525 - DNA, 20 bp, synthetic construct
  source 1..20: mol_type = other DNA
actctccatgtctctgggct

SEQ ID NO: 49526 - DNA, 20 bp, synthetic construct
  source 1..20: mol_type = other DNA
ggctaggtgcagtggtctgg

SEQ ID NO: 49527 - DNA, 20 bp, synthetic construct
  source 1..20: mol_type = other DNA
caggtaggggccatcagctg

SEQ ID NO: 49528 - DNA, 20 bp, synthetic construct
  source 1..20: mol_type = other DNA
gggaggaggggaagaaaccg

SEQ ID NO: 49529 - DNA, 20 bp, synthetic construct
  source 1..20: mol_type = other DNA
agcagtgcacgcagcagctc

SEQ ID NO: 49530 - DNA, 20 bp, synthetic construct
  source 1..20: mol_type = other DNA
cctggtgcaggtggttggtg

SEQ ID NO: 49531 - DNA, 20 bp, synthetic construct
  source 1..20: mol_type = other DNA
gagccagtcagtggagcagg

SEQ ID NO: 49532 - DNA, 20 bp, synthetic construct
  source 1..20: mol_type = other DNA
acctgtttatgcacatctgt

SEQ ID NO: 49533 - DNA, 20 bp, synthetic construct
  source 1..20: mol_type = other DNA
gcagcgaggtatggactccg

SEQ ID NO: 49534 - DNA, 20 bp, synthetic construct
  source 1..20: mol_type = other DNA
ccagcagatccaggcactca

SEQ ID NO: 49535 - DNA, 20 bp, synthetic construct
  source 1..20: mol_type = other DNA
gcatctagccacagagatgg

SEQ ID NO: 49536 - DNA, 20 bp, synthetic construct
  source 1..20: mol_type = other DNA
ggctggtcagtctcaccctc

SEQ ID NO: 49537 - DNA, 20 bp, synthetic construct
  source 1..20: mol_type = other DNA
acagcaggctctgtgcgggg

SEQ ID NO: 49538 - DNA, 20 bp, synthetic construct
  source 1..20: mol_type = other DNA
tcagcatggatgtcagcacc

SEQ ID NO: 49539 - DNA, 20 bp, synthetic construct
  source 1..20: mol_type = other DNA
ggaggccacagagcggcagg

SEQ ID NO: 49540 - DNA, 20 bp, synthetic construct
  source 1..20: mol_type = other DNA
ccagtccagctgccaggtgc

SEQ ID NO: 49541 - DNA, 20 bp, synthetic construct
  source 1..20: mol_type = other DNA
taagcaggtgagtgagcaaa

SEQ ID NO: 49542 - DNA, 20 bp, synthetic construct
  source 1..20: mol_type = other DNA
atctgagaagagagaatcgg

SEQ ID NO: 49543 - DNA, 20 bp, synthetic construct
  source 1..20: mol_type = other DNA
ccaaccacctgcaccaggtg

SEQ ID NO: 49544 - DNA, 20 bp, synthetic construct
  source 1..20: mol_type = other DNA
acagttcacctattaccctc

SEQ ID NO: 49545 - DNA, 20 bp, synthetic construct
  source 1..20: mol_type = other DNA
cagtccggcgcgggccccat

SEQ ID NO: 49546 - DNA, 20 bp, synthetic construct
  source 1..20: mol_type = other DNA
cagtccagctgccaggtgca

SEQ ID NO: 49547 - DNA, 20 bp, synthetic construct
  source 1..20: mol_type = other DNA
ccagtgcgagccgcaggccc

SEQ ID NO: 49548 - DNA, 20 bp, synthetic construct
  source 1..20: mol_type = other DNA
ctgcaactgaaacgcaagcg

SEQ ID NO: 49549 - DNA, 20 bp, synthetic construct
  source 1..20: mol_type = other DNA
ggggggtgtccggaacacaa

SEQ ID NO: 49550 - DNA, 20 bp, synthetic construct
  source 1..20: mol_type = other DNA
aatgtcatctacaaggaaaa

SEQ ID NO: 49551 - DNA, 20 bp, synthetic construct
  source 1..20: mol_type = other DNA
taaatctgagaagagagaat

SEQ ID NO: 49552 - DNA, 20 bp, synthetic construct
  source 1..20: mol_type = other DNA
cgacagacaacctcacccag

SEQ ID NO: 49553 - DNA, 20 bp, synthetic construct
  source 1..20: mol_type = other DNA
agtccagctgccaggtgcag

SEQ ID NO: 49554 - DNA, 20 bp, synthetic construct
  source 1..20: mol_type = other DNA
ggccgccacggtgcccagca

SEQ ID NO: 49555 - DNA, 20 bp, synthetic construct
  source 1..20: mol_type = other DNA
ctgcacctagccatcatcca

SEQ ID NO: 49556 - DNA, 20 bp, synthetic construct
  source 1..20: mol_type = other DNA
ccatgtctctgggctaggcc

SEQ ID NO: 49557 - DNA, 20 bp, synthetic construct
  source 1..20: mol_type = other DNA
gggacagcgccacctgctga

SEQ ID NO: 49558 - DNA, 20 bp, synthetic construct
  source 1..20: mol_type = other DNA
gctgagaagacagaggaatg

SEQ ID NO: 49559 - DNA, 20 bp, synthetic construct
  source 1..20: mol_type = other DNA
ctgcagcgaggtatggactc

SEQ ID NO: 49560 - DNA, 20 bp, synthetic construct
  source 1..20: mol_type = other DNA
ccagctctgctggatcggca

SEQ ID NO: 49561 - DNA, 20 bp, synthetic construct
  source 1..20: mol_type = other DNA
caactgaaacgcaagcgagg

SEQ ID NO: 49562 - DNA, 20 bp, synthetic construct
  source 1..20: mol_type = other DNA
caggatactcactgctgtca

SEQ ID NO: 49563 - DNA, 20 bp, synthetic construct
  source 1..20: mol_type = other DNA
tacctgtttatgcacatctg

SEQ ID NO: 49564 - DNA, 20 bp, synthetic construct
  source 1..20: mol_type = other DNA
gcccttctcactggaggcac

SEQ ID NO: 49565 - DNA, 20 bp, synthetic construct
  source 1..20: mol_type = other DNA
gagactgaccagccttcaga

SEQ ID NO: 49566 - DNA, 20 bp, synthetic construct
  source 1..20: mol_type = other DNA
agtccaggccgctgtcgtgg

SEQ ID NO: 49567 - DNA, 20 bp, synthetic construct
  source 1..20: mol_type = other DNA
ctcgtactcctcgtctttca

SEQ ID NO: 49568 - DNA, 20 bp, synthetic construct
  source 1..20: mol_type = other DNA
gctgaagaaggagcggctac

SEQ ID NO: 49569 - DNA, 20 bp, synthetic construct
  source 1..20: mol_type = other DNA
ctggacgaccgccacgacag

SEQ ID NO: 49570 - DNA, 20 bp, synthetic construct
  source 1..20: mol_type = other DNA
tggagtccaggccgctgtcg

SEQ ID NO: 49571 - DNA, 20 bp, synthetic construct
  source 1..20: mol_type = other DNA
actcgtaagtggcggaggcc

SEQ ID NO: 49572 - DNA, 20 bp, synthetic construct
  source 1..20: mol_type = other DNA
cctcgtctttcatggagtcc

SEQ ID NO: 49573 - DNA, 20 bp, synthetic construct
  source 1..20: mol_type = other DNA
cctccatggcccactcctgg

SEQ ID NO: 49574 - DNA, 20 bp, synthetic construct
  source 1..20: mol_type = other DNA
cccccaggagtgggccatgg

SEQ ID NO: 49575 - DNA, 20 bp, synthetic construct
  source 1..20: mol_type = other DNA
agagttcacggagttcacag

SEQ ID NO: 49576 - DNA, 20 bp, synthetic construct
  source 1..20: mol_type = other DNA
gcagatggtcaaggagctgc

SEQ ID NO: 49577 - DNA, 20 bp, synthetic construct
  source 1..20: mol_type = other DNA
ggagtacgagcagatggtca

SEQ ID NO: 49578 - DNA, 20 bp, synthetic construct
  source 1..20: mol_type = other DNA
acgctggcggggtgcaggtg

SEQ ID NO: 49579 - DNA, 20 bp, synthetic construct
  source 1..20: mol_type = other DNA
caacaagacagttctgcact

SEQ ID NO: 49580 - DNA, 20 bp, synthetic construct
  source 1..20: mol_type = other DNA
cccagagttaagcacagcct

SEQ ID NO: 49581 - DNA, 20 bp, synthetic construct
  source 1..20: mol_type = other DNA
tcccaggagttctcttggta

SEQ ID NO: 49582 - DNA, 20 bp, synthetic construct
  source 1..20: mol_type = other DNA
ggcggcatatgctgcggctg

SEQ ID NO: 49583 - DNA, 20 bp, synthetic construct
  source 1..20: mol_type = other DNA
cagccaggtgagcggggatg

SEQ ID NO: 49584 - DNA, 20 bp, synthetic construct
  source 1..20: mol_type = other DNA
ctcaacctgagctacttcta

SEQ ID NO: 49585 - DNA, 20 bp, synthetic construct
  source 1..20: mol_type = other DNA
agttagctggctgaaccccg

SEQ ID NO: 49586 - DNA, 20 bp, synthetic construct
  source 1..20: mol_type = other DNA
agcctggtctatcatttgtt

SEQ ID NO: 49587 - DNA, 20 bp, synthetic construct
  source 1..20: mol_type = other DNA
tttacccgaacaccttgaaa

SEQ ID NO: 49588 - DNA, 20 bp, synthetic construct
  source 1..20: mol_type = other DNA
aatactggtacagggaagcc

SEQ ID NO: 49589 - DNA, 20 bp, synthetic construct
  source 1..20: mol_type = other DNA
ctgtggagaatactggtaca

SEQ ID NO: 49590 - DNA, 20 bp, synthetic construct
  source 1..20: mol_type = other DNA
cagggaccggcagagctcca

SEQ ID NO: 49591 - DNA, 20 bp, synthetic construct
  source 1..20: mol_type = other DNA
tgagacccagcccaggtaga

SEQ ID NO: 49592 - DNA, 20 bp, synthetic construct
  source 1..20: mol_type = other DNA
cttctcctggtccttctacc

SEQ ID NO: 49593 - DNA, 20 bp, synthetic construct
  source 1..20: mol_type = other DNA
aaggtttcatagccaggacg

SEQ ID NO: 49594 - DNA, 20 bp, synthetic construct
  source 1..20: mol_type = other DNA
acccaggctcagggcacctg

SEQ ID NO: 49595 - DNA, 20 bp, synthetic construct
  source 1..20: mol_type = other DNA
gaggaggagggaggtgtgga

SEQ ID NO: 49596 - DNA, 20 bp, synthetic construct
  source 1..20: mol_type = other DNA
caatagcattgctgtaatga

SEQ ID NO: 49597 - DNA, 20 bp, synthetic construct
  source 1..20: mol_type = other DNA
cagcggccttcacttccacc

SEQ ID NO: 49598 - DNA, 20 bp, synthetic construct
  source 1..20: mol_type = other DNA
gggaggactgaaggaaaaga

SEQ ID NO: 49599 - DNA, 20 bp, synthetic construct
  source 1..20: mol_type = other DNA
ggaggcagaggcaggggagg

SEQ ID NO: 49600 - DNA, 20 bp, synthetic construct
  source 1..20: mol_type = other DNA
gtccatgaaggtgctgaagc

SEQ ID NO: 49601 - DNA, 20 bp, synthetic construct
  source 1..20: mol_type = other DNA
agctgggcgtggagggcgac

SEQ ID NO: 49602 - DNA, 20 bp, synthetic construct
  source 1..20: mol_type = other DNA
agccgccccagctctctccc

SEQ ID NO: 49603 - DNA, 20 bp, synthetic construct
  source 1..20: mol_type = other DNA
tctccacaccttgagggctc

SEQ ID NO: 49604 - DNA, 20 bp, synthetic construct
  source 1..20: mol_type = other DNA
gctggtgggtggcctgtgag

SEQ ID NO: 49605 - DNA, 20 bp, synthetic construct
  source 1..20: mol_type = other DNA
aagagggagaggcgggagac

SEQ ID NO: 49606 - DNA, 20 bp, synthetic construct
  source 1..20: mol_type = other DNA
caactagacaccggggtgcc

SEQ ID NO: 49607 - DNA, 20 bp, synthetic construct
  source 1..20: mol_type = other DNA
tctcctcagactgggggggc

SEQ ID NO: 49608 - DNA, 20 bp, synthetic construct
  source 1..20: mol_type = other DNA
cccatgaacccggagcccgc

SEQ ID NO: 49609 - DNA, 20 bp, synthetic construct
  source 1..20: mol_type = other DNA
agggcattcatcatgcagat

SEQ ID NO: 49610 - DNA, 20 bp, synthetic construct
  source 1..20: mol_type = other DNA
tgatcaaagtggaggagggg

SEQ ID NO: 49611 - DNA, 20 bp, synthetic construct
  source 1..20: mol_type = other DNA
cctcatgtattggtctctca

SEQ ID NO: 49612 - DNA, 20 bp, synthetic construct
  source 1..20: mol_type = other DNA
tgaatatgatcccaccatag

SEQ ID NO: 49613 - DNA, 20 bp, synthetic construct
  source 1..20: mol_type = other DNA
gatgtacctatggtgctagt

SEQ ID NO: 49614 - DNA, 20 bp, synthetic construct
  source 1..20: mol_type = other DNA
acggcggacggcggcggtgg

SEQ ID NO: 49615 - DNA, 20 bp, synthetic construct
  source 1..20: mol_type = other DNA
cacctggatggacacgctga

SEQ ID NO: 49616 - DNA, 20 bp, synthetic construct
  source 1..20: mol_type = other DNA
ctatcaacagaagatcaagg

SEQ ID NO: 49617 - DNA, 20 bp, synthetic construct
  source 1..20: mol_type = other DNA
ggccagcaggtcggcgacag

SEQ ID NO: 49618 - DNA, 20 bp, synthetic construct
  source 1..20: mol_type = other DNA
ccttgaacctgggggtggga

SEQ ID NO: 49619 - DNA, 20 bp, synthetic construct
  source 1..20: mol_type = other DNA
gcagccgcaggtagaccaca

SEQ ID NO: 49620 - DNA, 20 bp, synthetic construct
  source 1..20: mol_type = other DNA
tatcaacagaagatcaaggt

SEQ ID NO: 49621 - DNA, 20 bp, synthetic construct
  source 1..20: mol_type = other DNA
tagaggatatcgtagtgtcc

SEQ ID NO: 49622 - DNA, 20 bp, synthetic construct
  source 1..20: mol_type = other DNA
ccagcgcaatgatgtggatg

SEQ ID NO: 49623 - DNA, 20 bp, synthetic construct
  source 1..20: mol_type = other DNA
agcccgaggtgagcagccgc

SEQ ID NO: 49624 - DNA, 20 bp, synthetic construct
  source 1..20: mol_type = other DNA
atccagcagtgcctccaagt

SEQ ID NO: 49625 - DNA, 20 bp, synthetic construct
  source 1..20: mol_type = other DNA
catctatcaacagaagatca

SEQ ID NO: 49626 - DNA, 20 bp, synthetic construct
  source 1..20: mol_type = other DNA
gagaaggtagaccttgggct

SEQ ID NO: 49627 - DNA, 20 bp, synthetic construct
  source 1..20: mol_type = other DNA
ccatgaactgcagccacgga

SEQ ID NO: 49628 - DNA, 20 bp, synthetic construct
  source 1..20: mol_type = other DNA
accgaattcagcaagaggtg

SEQ ID NO: 49629 - DNA, 20 bp, synthetic construct
  source 1..20: mol_type = other DNA
ccacctggatggacacgctg

SEQ ID NO: 49630 - DNA, 20 bp, synthetic construct
  source 1..20: mol_type = other DNA
caggtggagtacatggaccg

SEQ ID NO: 49631 - DNA, 20 bp, synthetic construct
  source 1..20: mol_type = other DNA
ccgaattcagcaagaggtga

SEQ ID NO: 49632 - DNA, 20 bp, synthetic construct
  source 1..20: mol_type = other DNA
caggtagaccacaaggtagt

SEQ ID NO: 49633 - DNA, 20 bp, synthetic construct
  source 1..20: mol_type = other DNA
tccagccgctctgacaccag

SEQ ID NO: 49634 - DNA, 20 bp, synthetic construct
  source 1..20: mol_type = other DNA
cctgggccagcgcaatgatg

SEQ ID NO: 49635 - DNA, 20 bp, synthetic construct
  source 1..20: mol_type = other DNA
ggctccacctcctgtggcac

SEQ ID NO: 49636 - DNA, 20 bp, synthetic construct
  source 1..20: mol_type = other DNA
agcaatcagtggagtgaggc

SEQ ID NO: 49637 - DNA, 20 bp, synthetic construct
  source 1..20: mol_type = other DNA
tctctgggttctgaagttct

SEQ ID NO: 49638 - DNA, 20 bp, synthetic construct
  source 1..20: mol_type = other DNA
tctgggcgtggagcaatcac

SEQ ID NO: 49639 - DNA, 20 bp, synthetic construct
  source 1..20: mol_type = other DNA
caagagtgacaatattctgt

SEQ ID NO: 49640 - DNA, 20 bp, synthetic construct
  source 1..20: mol_type = other DNA
ccacatccatctcgagacag

SEQ ID NO: 49641 - DNA, 20 bp, synthetic construct
  source 1..20: mol_type = other DNA
tgatgtctctgtgaatgacc

SEQ ID NO: 49642 - DNA, 20 bp, synthetic construct
  source 1..20: mol_type = other DNA
ttcgatggccatgatgccca

SEQ ID NO: 49643 - DNA, 20 bp, synthetic construct
  source 1..20: mol_type = other DNA
tctgcacaggaagaaaaaca

SEQ ID NO: 49644 - DNA, 20 bp, synthetic construct
  source 1..20: mol_type = other DNA
acattgtgaattacttggac

SEQ ID NO: 49645 - DNA, 20 bp, synthetic construct
  source 1..20: mol_type = other DNA
tgtcactccaactcgggacg

SEQ ID NO: 49646 - DNA, 20 bp, synthetic construct
  source 1..20: mol_type = other DNA
gaagaatcctcaggctgtgc

SEQ ID NO: 49647 - DNA, 20 bp, synthetic construct
  source 1..20: mol_type = other DNA
ccctcaagggattttcattg

SEQ ID NO: 49648 - DNA, 20 bp, synthetic construct
  source 1..20: mol_type = other DNA
atatttctgcttcactgtgt

SEQ ID NO: 49649 - DNA, 20 bp, synthetic construct
  source 1..20: mol_type = other DNA
ctctagtttggtgatattgg

SEQ ID NO: 49650 - DNA, 20 bp, synthetic construct
  source 1..20: mol_type = other DNA
tggcaccagaggtggttaca

SEQ ID NO: 49651 - DNA, 20 bp, synthetic construct
  source 1..20: mol_type = other DNA
ttctgaatcatgtctgataa

SEQ ID NO: 49652 - DNA, 20 bp, synthetic construct
  source 1..20: mol_type = other DNA
gtgtgctcaaaatcagatgg

SEQ ID NO: 49653 - DNA, 20 bp, synthetic construct
  source 1..20: mol_type = other DNA
tgcctagctgtggcttctcc

SEQ ID NO: 49654 - DNA, 20 bp, synthetic construct
  source 1..20: mol_type = other DNA
ctgacccgagcattcctcgc

SEQ ID NO: 49655 - DNA, 20 bp, synthetic construct
  source 1..20: mol_type = other DNA
ctagaaggaagagaaacaga

SEQ ID NO: 49656 - DNA, 20 bp, synthetic construct
  source 1..20: mol_type = other DNA
ttctcctgcttctggaaggt

SEQ ID NO: 49657 - DNA, 20 bp, synthetic construct
  source 1..20: mol_type = other DNA
tctctttctgaaggagacac

SEQ ID NO: 49658 - DNA, 20 bp, synthetic construct
  source 1..20: mol_type = other DNA
cattgtctatgatattgctc

SEQ ID NO: 49659 - DNA, 20 bp, synthetic construct
  source 1..20: mol_type = other DNA
aaccccaaaggtaaggggta

SEQ ID NO: 49660 - DNA, 20 bp, synthetic construct
  source 1..20: mol_type = other DNA
tcttgacaaagcagcctgga

SEQ ID NO: 49661 - DNA, 20 bp, synthetic construct
  source 1..20: mol_type = other DNA
acggaggcgctggtttctgg

SEQ ID NO: 49662 - DNA, 20 bp, synthetic construct
  source 1..20: mol_type = other DNA
atgttggataatggcttatc

SEQ ID NO: 49663 - DNA, 20 bp, synthetic construct
  source 1..20: mol_type = other DNA
caggctacatgtttggtaaa

SEQ ID NO: 49664 - DNA, 20 bp, synthetic construct
  source 1..20: mol_type = other DNA
cggagctcctgggcaaggtg

SEQ ID NO: 49665 - DNA, 20 bp, synthetic construct
  source 1..20: mol_type = other DNA
ttcagaatctcaagattcag

SEQ ID NO: 49666 - DNA, 20 bp, synthetic construct
  source 1..20: mol_type = other DNA
gggccaggacccagctgagg

SEQ ID NO: 49667 - DNA, 20 bp, synthetic construct
  source 1..20: mol_type = other DNA
aaagagttccttgaggttcc

SEQ ID NO: 49668 - DNA, 20 bp, synthetic construct
  source 1..20: mol_type = other DNA
ggccaggacccagctgaggg

SEQ ID NO: 49669 - DNA, 20 bp, synthetic construct
  source 1..20: mol_type = other DNA
cctatgctgcgtggtggtcc

SEQ ID NO: 49670 - DNA, 20 bp, synthetic construct
  source 1..20: mol_type = other DNA
agcacctgcaatgcagaaga

SEQ ID NO: 49671 - DNA, 20 bp, synthetic construct
  source 1..20: mol_type = other DNA
tgactcccatccgctctagc

SEQ ID NO: 49672 - DNA, 20 bp, synthetic construct
  source 1..20: mol_type = other DNA
cggtgaacaggcgctgccca

SEQ ID NO: 49673 - DNA, 20 bp, synthetic construct
  source 1..20: mol_type = other DNA
gcatctctggtcctcttcaa

SEQ ID NO: 49674 - DNA, 20 bp, synthetic construct
  source 1..20: mol_type = other DNA
ccttgttagggttgcacaca

SEQ ID NO: 49675 - DNA, 20 bp, synthetic construct
  source 1..20: mol_type = other DNA
gcggggctgctggcctgcag

SEQ ID NO: 49676 - DNA, 20 bp, synthetic construct
  source 1..20: mol_type = other DNA
gtgtttagctggtcagcaga

SEQ ID NO: 49677 - DNA, 20 bp, synthetic construct
  source 1..20: mol_type = other DNA
accgcccagacgactggcca

SEQ ID NO: 49678 - DNA, 20 bp, synthetic construct
  source 1..20: mol_type = other DNA
cacgaagctctccgatgtgt

SEQ ID NO: 49679 - DNA, 20 bp, synthetic construct
  source 1..20: mol_type = other DNA
gcagatcaaagagagcctgc

SEQ ID NO: 49680 - DNA, 20 bp, synthetic construct
  source 1..20: mol_type = other DNA
agagctcagggtgacaggtg

SEQ ID NO: 49681 - DNA, 20 bp, synthetic construct
  source 1..20: mol_type = other DNA
gagcagggctggggagaagg

SEQ ID NO: 49682 - DNA, 20 bp, synthetic construct
  source 1..20: mol_type = other DNA
gcagggctggggagaaggtg

SEQ ID NO: 49683 - DNA, 20 bp, synthetic construct
  source 1..20: mol_type = other DNA
catgtggaagtcacgcccgt

SEQ ID NO: 49684 - DNA, 20 bp, synthetic construct
  source 1..20: mol_type = other DNA
tgtagcaccgcccagacgac

SEQ ID NO: 49685 - DNA, 20 bp, synthetic construct
  source 1..20: mol_type = other DNA
gccctgctcgtggtgaccga

SEQ ID NO: 49686 - DNA, 20 bp, synthetic construct
  source 1..20: mol_type = other DNA
tctctttgatctgcgccttg

SEQ ID NO: 49687 - DNA, 20 bp, synthetic construct
  source 1..20: mol_type = other DNA
tgcagatcccacaggcgccc

SEQ ID NO: 49688 - DNA, 20 bp, synthetic construct
  source 1..20: mol_type = other DNA
agcagggctggggagaaggt

SEQ ID NO: 49689 - DNA, 20 bp, synthetic construct
  source 1..20: mol_type = other DNA
gggcggtgctacaactgggc

SEQ ID NO: 49690 - DNA, 20 bp, synthetic construct
  source 1..20: mol_type = other DNA
ggagatggccccacagaggt

SEQ ID NO: 49691 - DNA, 20 bp, synthetic construct
  source 1..20: mol_type = other DNA
ggccaggatggttcttaggt

SEQ ID NO: 49692 - DNA, 20 bp, synthetic construct
  source 1..20: mol_type = other DNA
agccggccagttccaaaccc

SEQ ID NO: 49693 - DNA, 20 bp, synthetic construct
  source 1..20: mol_type = other DNA
gacgttacctcgtgcggccc

SEQ ID NO: 49694 - DNA, 20 bp, synthetic construct
  source 1..20: mol_type = other DNA
acgactggccagggcgcctg

SEQ ID NO: 49695 - DNA, 20 bp, synthetic construct
  source 1..20: mol_type = other DNA
tccaggcatgcagatcccac

SEQ ID NO: 49696 - DNA, 20 bp, synthetic construct
  source 1..20: mol_type = other DNA
cttccacatgagcgtggtca

SEQ ID NO: 49697 - DNA, 20 bp, synthetic construct
  source 1..20: mol_type = other DNA
ggtgacaggtgcggcctcgg

SEQ ID NO: 49698 - DNA, 20 bp, synthetic construct
  source 1..20: mol_type = other DNA
cccttcggtcaccacgagca

SEQ ID NO: 49699 - DNA, 20 bp, synthetic construct
  source 1..20: mol_type = other DNA
tgacgttacctcgtgcggcc

SEQ ID NO: 49700 - DNA, 20 bp, synthetic construct
  source 1..20: mol_type = other DNA
tcaccctgagctctgcccgc

SEQ ID NO: 49701 - DNA, 20 bp, synthetic construct
  source 1..20: mol_type = other DNA
ccccttcggtcaccacgagc

SEQ ID NO: 49702 - DNA, 20 bp, synthetic construct
  source 1..20: mol_type = other DNA
ctctgtggactatggggagc

SEQ ID NO: 49703 - DNA, 20 bp, synthetic construct
  source 1..20: mol_type = other DNA
cggccagttccaaaccctgg

SEQ ID NO: 49704 - DNA, 20 bp, synthetic construct
  source 1..20: mol_type = other DNA
tctggaagggcacaaaggtc

SEQ ID NO: 49705 - DNA, 20 bp, synthetic construct
  source 1..20: mol_type = other DNA
tggcggccaggatggttctt

SEQ ID NO: 49706 - DNA, 20 bp, synthetic construct
  source 1..20: mol_type = other DNA
cgcagatcaaagagagcctg

SEQ ID NO: 49707 - DNA, 20 bp, synthetic construct
  source 1..20: mol_type = other DNA
cacctacctaagaaccatcc

SEQ ID NO: 49708 - DNA, 20 bp, synthetic construct
  source 1..20: mol_type = other DNA
cctgcagagaaacacacttg

SEQ ID NO: 49709 - DNA, 20 bp, synthetic construct
  source 1..20: mol_type = other DNA
ccagggagatggccccacag

SEQ ID NO: 49710 - DNA, 20 bp, synthetic construct
  source 1..20: mol_type = other DNA
cgactggccagggcgcctgt

SEQ ID NO: 49711 - DNA, 20 bp, synthetic construct
  source 1..20: mol_type = other DNA
ggatggttcttaggtaggtg

SEQ ID NO: 49712 - DNA, 20 bp, synthetic construct
  source 1..20: mol_type = other DNA
cacgagcagggctggggaga

SEQ ID NO: 49713 - DNA, 20 bp, synthetic construct
  source 1..20: mol_type = other DNA
atgtggaagtcacgcccgtt

SEQ ID NO: 49714 - DNA, 20 bp, synthetic construct
  source 1..20: mol_type = other DNA
aactgggctggcggccagga

SEQ ID NO: 49715 - DNA, 20 bp, synthetic construct
  source 1..20: mol_type = other DNA
ggccagctcttccgctgggc

SEQ ID NO: 49716 - DNA, 20 bp, synthetic construct
  source 1..20: mol_type = other DNA
gcaaggactcctgagggaga

SEQ ID NO: 49717 - DNA, 20 bp, synthetic construct
  source 1..20: mol_type = other DNA
acaggaggctgactagcagc

SEQ ID NO: 49718 - DNA, 20 bp, synthetic construct
  source 1..20: mol_type = other DNA
gggggattatgtatccacgg

SEQ ID NO: 49719 - DNA, 20 bp, synthetic construct
  source 1..20: mol_type = other DNA
tcttaggtaagatattaact

SEQ ID NO: 49720 - DNA, 20 bp, synthetic construct
  source 1..20: mol_type = other DNA
aaacgctggaggaattagac

SEQ ID NO: 49721 - DNA, 20 bp, synthetic construct
  source 1..20: mol_type = other DNA
gtggactccgacctggggaa

SEQ ID NO: 49722 - DNA, 20 bp, synthetic construct
  source 1..20: mol_type = other DNA
aaaattagcaatggaaacgc

SEQ ID NO: 49723 - DNA, 20 bp, synthetic construct
  source 1..20: mol_type = other DNA
atatcagttgctaacacctt

SEQ ID NO: 49724 - DNA, 20 bp, synthetic construct
  source 1..20: mol_type = other DNA
ctctgtctttgagacagtgg

SEQ ID NO: 49725 - DNA, 20 bp, synthetic construct
  source 1..20: mol_type = other DNA
ccgggcggcggcgggggcgg

SEQ ID NO: 49726 - DNA, 20 bp, synthetic construct
  source 1..20: mol_type = other DNA
tgaggaatcattgtacatca

SEQ ID NO: 49727 - DNA, 20 bp, synthetic construct
  source 1..20: mol_type = other DNA
cgggcagccccgggcggcgg

SEQ ID NO: 49728 - DNA, 20 bp, synthetic construct
  source 1..20: mol_type = other DNA
acagctggagaggctttgtt

SEQ ID NO: 49729 - DNA, 20 bp, synthetic construct
  source 1..20: mol_type = other DNA
cggcgggggcggcggcaggg

SEQ ID NO: 49730 - DNA, 20 bp, synthetic construct
  source 1..20: mol_type = other DNA
gagtctgtaaaaaagacaaa

SEQ ID NO: 49731 - DNA, 20 bp, synthetic construct
  source 1..20: mol_type = other DNA
tagcagagttgtctggtaac

SEQ ID NO: 49732 - DNA, 20 bp, synthetic construct
  source 1..20: mol_type = other DNA
actggccagcgagaccctgg

SEQ ID NO: 49733 - DNA, 20 bp, synthetic construct
  source 1..20: mol_type = other DNA
ccagggtgtgattgaataca

SEQ ID NO: 49734 - DNA, 20 bp, synthetic construct
  source 1..20: mol_type = other DNA
taggtatatccagagtcttc

SEQ ID NO: 49735 - DNA, 20 bp, synthetic construct
  source 1..20: mol_type = other DNA
gctttacagatactgtgata

SEQ ID NO: 49736 - DNA, 20 bp, synthetic construct
  source 1..20: mol_type = other DNA
tgaacattctggctggtgac

SEQ ID NO: 49737 - DNA, 20 bp, synthetic construct
  source 1..20: mol_type = other DNA
tgaatacaaggagagctttg

SEQ ID NO: 49738 - DNA, 20 bp, synthetic construct
  source 1..20: mol_type = other DNA
ctagcatgtaccagcgccta

SEQ ID NO: 49739 - DNA, 20 bp, synthetic construct
  source 1..20: mol_type = other DNA
ggcccagcgggcccaattct

SEQ ID NO: 49740 - DNA, 20 bp, synthetic construct
  source 1..20: mol_type = other DNA
gctgtagaagccaaacaagt

SEQ ID NO: 49741 - DNA, 20 bp, synthetic construct
  source 1..20: mol_type = other DNA
aagataaaccacttgcagag

SEQ ID NO: 49742 - DNA, 20 bp, synthetic construct
  source 1..20: mol_type = other DNA
ttataatgcaagccctttgc

SEQ ID NO: 49743 - DNA, 20 bp, synthetic construct
  source 1..20: mol_type = other DNA
ttacttttacgtgtgatggt

SEQ ID NO: 49744 - DNA, 20 bp, synthetic construct
  source 1..20: mol_type = other DNA
gggaccagtagtttgccaac

SEQ ID NO: 49745 - DNA, 20 bp, synthetic construct
  source 1..20: mol_type = other DNA
cctgaaattcgtcaaatgtt

SEQ ID NO: 49746 - DNA, 20 bp, synthetic construct
  source 1..20: mol_type = other DNA
ttatcacaaccaagtagaac

SEQ ID NO: 49747 - DNA, 20 bp, synthetic construct
  source 1..20: mol_type = other DNA
tgaacttgagaaactattgc

SEQ ID NO: 49748 - DNA, 20 bp, synthetic construct
  source 1..20: mol_type = other DNA
ttctctgcttattagaatca

SEQ ID NO: 49749 - DNA, 20 bp, synthetic construct
  source 1..20: mol_type = other DNA
atagtttctcaagttcagct

SEQ ID NO: 49750 - DNA, 20 bp, synthetic construct
  source 1..20: mol_type = other DNA
acatcagaatttttaaaaaa

SEQ ID NO: 49751 - DNA, 20 bp, synthetic construct
  source 1..20: mol_type = other DNA
agccagtgttgagtttttgc

SEQ ID NO: 49752 - DNA, 20 bp, synthetic construct
  source 1..20: mol_type = other DNA
acagattcacaagtttgccc

SEQ ID NO: 49753 - DNA, 20 bp, synthetic construct
  source 1..20: mol_type = other DNA
tagataggtatggatatcca

SEQ ID NO: 49754 - DNA, 20 bp, synthetic construct
  source 1..20: mol_type = other DNA
gggttaccttcaacaatgct

SEQ ID NO: 49755 - DNA, 20 bp, synthetic construct
  source 1..20: mol_type = other DNA
aaagaaatggtagaaggaat

SEQ ID NO: 49756 - DNA, 20 bp, synthetic construct
  source 1..20: mol_type = other DNA
gaaggtaacccttaaatgtg

SEQ ID NO: 49757 - DNA, 20 bp, synthetic construct
  source 1..20: mol_type = other DNA
ttccctagcatgtttcgcca

SEQ ID NO: 49758 - DNA, 20 bp, synthetic construct
  source 1..20: mol_type = other DNA
tcttttgtttttgatgcagg

SEQ ID NO: 49759 - DNA, 20 bp, synthetic construct
  source 1..20: mol_type = other DNA
ctttcagaggaagcttggaa

SEQ ID NO: 49760 - DNA, 20 bp, synthetic construct
  source 1..20: mol_type = other DNA
gacacttacgttaaaagctg

SEQ ID NO: 49761 - DNA, 20 bp, synthetic construct
  source 1..20: mol_type = other DNA
aactggatataaatcccagt

SEQ ID NO: 49762 - DNA, 20 bp, synthetic construct
  source 1..20: mol_type = other DNA
aatgcaagagagtcctaaaa

SEQ ID NO: 49763 - DNA, 20 bp, synthetic construct
  source 1..20: mol_type = other DNA
attcctcaatggctcggtcc

SEQ ID NO: 49764 - DNA, 20 bp, synthetic construct
  source 1..20: mol_type = other DNA
cttagaagataaactttatg

SEQ ID NO: 49765 - DNA, 20 bp, synthetic construct
  source 1..20: mol_type = other DNA
caaaatgaagcctttgtggc

SEQ ID NO: 49766 - DNA, 20 bp, synthetic construct
  source 1..20: mol_type = other DNA
aggctgggggccggggaagc

SEQ ID NO: 49767 - DNA, 20 bp, synthetic construct
  source 1..20: mol_type = other DNA
agctgaagtctagcagctcc

SEQ ID NO: 49768 - DNA, 20 bp, synthetic construct
  source 1..20: mol_type = other DNA
ggcagtcctgcagaaggaca

SEQ ID NO: 49769 - DNA, 20 bp, synthetic construct
  source 1..20: mol_type = other DNA
cctcacgggccaccaggcgc

SEQ ID NO: 49770 - DNA, 20 bp, synthetic construct
  source 1..20: mol_type = other DNA
ggccacacaatagccagcac

SEQ ID NO: 49771 - DNA, 20 bp, synthetic construct
  source 1..20: mol_type = other DNA
aggacctggtgtggaagctg

SEQ ID NO: 49772 - DNA, 20 bp, synthetic construct
  source 1..20: mol_type = other DNA
ccactactgcctgttgtctt

SEQ ID NO: 49773 - DNA, 20 bp, synthetic construct
  source 1..20: mol_type = other DNA
agcacgagaaggacctggtg

SEQ ID NO: 49774 - DNA, 20 bp, synthetic construct
  source 1..20: mol_type = other DNA
acaaggagtcaaactcgtgg

SEQ ID NO: 49775 - DNA, 20 bp, synthetic construct
  source 1..20: mol_type = other DNA
gtgccaattctgcgaggagg

SEQ ID NO: 49776 - DNA, 20 bp, synthetic construct
  source 1..20: mol_type = other DNA
gaacgccgacgagcggatga

SEQ ID NO: 49777 - DNA, 20 bp, synthetic construct
  source 1..20: mol_type = other DNA
cggcgttcactttgctgccc

SEQ ID NO: 49778 - DNA, 20 bp, synthetic construct
  source 1..20: mol_type = other DNA
agtccaggagcacttcccgg

SEQ ID NO: 49779 - DNA, 20 bp, synthetic construct
  source 1..20: mol_type = other DNA
tctttggagcagctgagctc

SEQ ID NO: 49780 - DNA, 20 bp, synthetic construct
  source 1..20: mol_type = other DNA
gcgctcaggacgggcagctc

SEQ ID NO: 49781 - DNA, 20 bp, synthetic construct
  source 1..20: mol_type = other DNA
ctcgttgccgtggaaaagcc

SEQ ID NO: 49782 - DNA, 20 bp, synthetic construct
  source 1..20: mol_type = other DNA
cgccctggagaaggtcagtg

SEQ ID NO: 49783 - DNA, 20 bp, synthetic construct
  source 1..20: mol_type = other DNA
tggagcagctgagctcaggc

SEQ ID NO: 49784 - DNA, 20 bp, synthetic construct
  source 1..20: mol_type = other DNA
cttggtgaccagcagcagcc

SEQ ID NO: 49785 - DNA, 20 bp, synthetic construct
  source 1..20: mol_type = other DNA
ccggcagcagctgggctggg

SEQ ID NO: 49786 - DNA, 20 bp, synthetic construct
  source 1..20: mol_type = other DNA
gggcttcgttaaacttcact

SEQ ID NO: 49787 - DNA, 20 bp, synthetic construct
  source 1..20: mol_type = other DNA
caatggggcagtcctgcaga

SEQ ID NO: 49788 - DNA, 20 bp, synthetic construct
  source 1..20: mol_type = other DNA
agccacagccgccttcaaca

SEQ ID NO: 49789 - DNA, 20 bp, synthetic construct
  source 1..20: mol_type = other DNA
tttgtccatgtgattcagca

SEQ ID NO: 49790 - DNA, 20 bp, synthetic construct
  source 1..20: mol_type = other DNA
atcctcatgcttgttccact

SEQ ID NO: 49791 - DNA, 20 bp, synthetic construct
  source 1..20: mol_type = other DNA
gaacggggatggtgagggcc

SEQ ID NO: 49792 - DNA, 20 bp, synthetic construct
  source 1..20: mol_type = other DNA
gtcctgcagaaggacagggc

SEQ ID NO: 49793 - DNA, 20 bp, synthetic construct
  source 1..20: mol_type = other DNA
ggagctgtatgagcacgaga

SEQ ID NO: 49794 - DNA, 20 bp, synthetic construct
  source 1..20: mol_type = other DNA
ttgtccatgtgattcagcag

SEQ ID NO: 49795 - DNA, 20 bp, synthetic construct
  source 1..20: mol_type = other DNA
caccaagaagaagtccaaga

SEQ ID NO: 49796 - DNA, 20 bp, synthetic construct
  source 1..20: mol_type = other DNA
cagtatctcaaggtatgtgc

SEQ ID NO: 49797 - DNA, 20 bp, synthetic construct
  source 1..20: mol_type = other DNA
aggtgaacacataggcctcg

SEQ ID NO: 49798 - DNA, 20 bp, synthetic construct
  source 1..20: mol_type = other DNA
acgggccaccaggcgcagga

SEQ ID NO: 49799 - DNA, 20 bp, synthetic construct
  source 1..20: mol_type = other DNA
ccgaagcgcagggccaccga

SEQ ID NO: 49800 - DNA, 20 bp, synthetic construct
  source 1..20: mol_type = other DNA
caacgagatgctgtgcaaga

SEQ ID NO: 49801 - DNA, 20 bp, synthetic construct
  source 1..20: mol_type = other DNA
gatgcacttgtgcatgcggc

SEQ ID NO: 49802 - DNA, 20 bp, synthetic construct
  source 1..20: mol_type = other DNA
gggcagtcctgcagaaggac

SEQ ID NO: 49803 - DNA, 20 bp, synthetic construct
  source 1..20: mol_type = other DNA
ccacctctttgccctgatgc

SEQ ID NO: 49804 - DNA, 20 bp, synthetic construct
  source 1..20: mol_type = other DNA
agagaagcccgtggcgccgc

SEQ ID NO: 49805 - DNA, 20 bp, synthetic construct
  source 1..20: mol_type = other DNA
ggacggagggccacatgtag

SEQ ID NO: 49806 - DNA, 20 bp, synthetic construct
  source 1..20: mol_type = other DNA
gtatgagcacgagaaggacc

SEQ ID NO: 49807 - DNA, 20 bp, synthetic construct
  source 1..20: mol_type = other DNA
gttcacttctgggtcgcaca

SEQ ID NO: 49808 - DNA, 20 bp, synthetic construct
  source 1..20: mol_type = other DNA
tgcgggaaatcctggagcgg

SEQ ID NO: 49809 - DNA, 20 bp, synthetic construct
  source 1..20: mol_type = other DNA
gtggcgccgcaggatggtgt

SEQ ID NO: 49810 - DNA, 20 bp, synthetic construct
  source 1..20: mol_type = other DNA
gcaggtgaacacataggcct

SEQ ID NO: 49811 - DNA, 20 bp, synthetic construct
  source 1..20: mol_type = other DNA
catggacaaagtcgtaggtg

SEQ ID NO: 49812 - DNA, 20 bp, synthetic construct
  source 1..20: mol_type = other DNA
gcacaggccatcagcgccag

SEQ ID NO: 49813 - DNA, 20 bp, synthetic construct
  source 1..20: mol_type = other DNA
ggtcgccctcacgggccacc

SEQ ID NO: 49814 - DNA, 20 bp, synthetic construct
  source 1..20: mol_type = other DNA
caggtgaacacataggcctc

SEQ ID NO: 49815 - DNA, 20 bp, synthetic construct
  source 1..20: mol_type = other DNA
gggaaatcctggagcggcgg

SEQ ID NO: 49816 - DNA, 20 bp, synthetic construct
  source 1..20: mol_type = other DNA
ctacctgctgtgctcctggc

SEQ ID NO: 49817 - DNA, 20 bp, synthetic construct
  source 1..20: mol_type = other DNA
aagaacccggggtgggtttc

SEQ ID NO: 49818 - DNA, 20 bp, synthetic construct
  source 1..20: mol_type = other DNA
gctcttgctgctccgctgtc

SEQ ID NO: 49819 - DNA, 20 bp, synthetic construct
  source 1..20: mol_type = other DNA
caggacgggcagctccggcc

SEQ ID NO: 49820 - DNA, 20 bp, synthetic construct
  source 1..20: mol_type = other DNA
caaactcgtggaggcctgcg

SEQ ID NO: 49821 - DNA, 20 bp, synthetic construct
  source 1..20: mol_type = other DNA
aagcccgtggcgccgcagga

SEQ ID NO: 49822 - DNA, 20 bp, synthetic construct
  source 1..20: mol_type = other DNA
gtagtggctcctcccagccc

SEQ ID NO: 49823 - DNA, 20 bp, synthetic construct
  source 1..20: mol_type = other DNA
ccaaagacaacaggcagtag

SEQ ID NO: 49824 - DNA, 20 bp, synthetic construct
  source 1..20: mol_type = other DNA
agcgttccccggtcttaagc

SEQ ID NO: 49825 - DNA, 20 bp, synthetic construct
  source 1..20: mol_type = other DNA
gcgcctccgggaagtgctcc

SEQ ID NO: 49826 - DNA, 20 bp, synthetic construct
  source 1..20: mol_type = other DNA
caaagacatccagtatctca

SEQ ID NO: 49827 - DNA, 20 bp, synthetic construct
  source 1..20: mol_type = other DNA
atccttgttgaaggcggctg

SEQ ID NO: 49828 - DNA, 20 bp, synthetic construct
  source 1..20: mol_type = other DNA
gaacctctgctgatagtgtc

SEQ ID NO: 49829 - DNA, 20 bp, synthetic construct
  source 1..20: mol_type = other DNA
ggactgcctgcgctactgga

SEQ ID NO: 49830 - DNA, 20 bp, synthetic construct
  source 1..20: mol_type = other DNA
ctttaccgcagtagatctgg

SEQ ID NO: 49831 - DNA, 20 bp, synthetic construct
  source 1..20: mol_type = other DNA
tgggcatttctgctcgaacc

SEQ ID NO: 49832 - DNA, 20 bp, synthetic construct
  source 1..20: mol_type = other DNA
ctgaacctccagatctactg

SEQ ID NO: 49833 - DNA, 20 bp, synthetic construct
  source 1..20: mol_type = other DNA
tgtggaggacgtattctcca

SEQ ID NO: 49834 - DNA, 20 bp, synthetic construct
  source 1..20: mol_type = other DNA
gttcaaatttcacagcctaa

SEQ ID NO: 49835 - DNA, 20 bp, synthetic construct
  source 1..20: mol_type = other DNA
aataggtatgtagttacctc

SEQ ID NO: 49836 - DNA, 20 bp, synthetic construct
  source 1..20: mol_type = other DNA
tggagaacaggatgatcagt

SEQ ID NO: 49837 - DNA, 20 bp, synthetic construct
  source 1..20: mol_type = other DNA
tgtcagcattgaagcttcct

SEQ ID NO: 49838 - DNA, 20 bp, synthetic construct
  source 1..20: mol_type = other DNA
cagagagcgatttaatatca

SEQ ID NO: 49839 - DNA, 20 bp, synthetic construct
  source 1..20: mol_type = other DNA
tgatgggcgtttcgcccacc

SEQ ID NO: 49840 - DNA, 20 bp, synthetic construct
  source 1..20: mol_type = other DNA
tccccactgtgagggcatcc

SEQ ID NO: 49841 - DNA, 20 bp, synthetic construct
  source 1..20: mol_type = other DNA
tacgaatcatggagtctatt

SEQ ID NO: 49842 - DNA, 20 bp, synthetic construct
  source 1..20: mol_type = other DNA
acggcgctgctgcacgtggc

SEQ ID NO: 49843 - DNA, 20 bp, synthetic construct
  source 1..20: mol_type = other DNA
ggcctggcccataagggggg

SEQ ID NO: 49844 - DNA, 20 bp, synthetic construct
  source 1..20: mol_type = other DNA
ctcgccactgacgtagcacc

SEQ ID NO: 49845 - DNA, 20 bp, synthetic construct
  source 1..20: mol_type = other DNA
acaggttttcagctttgttt

SEQ ID NO: 49846 - DNA, 20 bp, synthetic construct
  source 1..20: mol_type = other DNA
aacaaaacagcaactggcta

SEQ ID NO: 49847 - DNA, 20 bp, synthetic construct
  source 1..20: mol_type = other DNA
gatgcgtctactaaaatgca

SEQ ID NO: 49848 - DNA, 20 bp, synthetic construct
  source 1..20: mol_type = other DNA
gtgattatactcttacacta

SEQ ID NO: 49849 - DNA, 20 bp, synthetic construct
  source 1..20: mol_type = other DNA
tcgtctttctcagctggata

SEQ ID NO: 49850 - DNA, 20 bp, synthetic construct
  source 1..20: mol_type = other DNA
ctagagattcattccggtag

SEQ ID NO: 49851 - DNA, 20 bp, synthetic construct
  source 1..20: mol_type = other DNA
agcgtaagccaatactgatg

SEQ ID NO: 49852 - DNA, 20 bp, synthetic construct
  source 1..20: mol_type = other DNA
gggagtcgttgtgctgcaca

SEQ ID NO: 49853 - DNA, 20 bp, synthetic construct
  source 1..20: mol_type = other DNA
ggtctctcgtctttctcagc

SEQ ID NO: 49854 - DNA, 20 bp, synthetic construct
  source 1..20: mol_type = other DNA
tcttacactaaggtaagcca

SEQ ID NO: 49855 - DNA, 20 bp, synthetic construct
  source 1..20: mol_type = other DNA
ccatgtcttctcatcatgat

SEQ ID NO: 49856 - DNA, 20 bp, synthetic construct
  source 1..20: mol_type = other DNA
gtaccattcagcatcttgta

SEQ ID NO: 49857 - DNA, 20 bp, synthetic construct
  source 1..20: mol_type = other DNA
gctgtacaagttatagggct

SEQ ID NO: 49858 - DNA, 20 bp, synthetic construct
  source 1..20: mol_type = other DNA
ctcttacactaaggtaagcc

SEQ ID NO: 49859 - DNA, 20 bp, synthetic construct
  source 1..20: mol_type = other DNA
aaaactcacctgggatgtgc

SEQ ID NO: 49860 - DNA, 20 bp, synthetic construct
  source 1..20: mol_type = other DNA
gtcgttgtgctgcacaaggg

SEQ ID NO: 49861 - DNA, 20 bp, synthetic construct
  source 1..20: mol_type = other DNA
aaagaagttgaacgagtggt

SEQ ID NO: 49862 - DNA, 20 bp, synthetic construct
  source 1..20: mol_type = other DNA
ggtactggggagatatctcg

SEQ ID NO: 49863 - DNA, 20 bp, synthetic construct
  source 1..20: mol_type = other DNA
gtccgggagagcagtaaaca

SEQ ID NO: 49864 - DNA, 20 bp, synthetic construct
  source 1..20: mol_type = other DNA
cttcgccgtccaccctagag

SEQ ID NO: 49865 - DNA, 20 bp, synthetic construct
  source 1..20: mol_type = other DNA
tacaagatgctgaatggtac

SEQ ID NO: 49866 - DNA, 20 bp, synthetic construct
  source 1..20: mol_type = other DNA
gcaacaggaagaggccgagg

SEQ ID NO: 49867 - DNA, 20 bp, synthetic construct
  source 1..20: mol_type = other DNA
tttctcagctggataaggtc

SEQ ID NO: 49868 - DNA, 20 bp, synthetic construct
  source 1..20: mol_type = other DNA
tccatgtcttctcatcatga

SEQ ID NO: 49869 - DNA, 20 bp, synthetic construct
  source 1..20: mol_type = other DNA
caagatgctgaatggtactg

SEQ ID NO: 49870 - DNA, 20 bp, synthetic construct
  source 1..20: mol_type = other DNA
gaaaactcacctgggatgtg

SEQ ID NO: 49871 - DNA, 20 bp, synthetic construct
  source 1..20: mol_type = other DNA
ggagtcgttgtgctgcacaa

SEQ ID NO: 49872 - DNA, 20 bp, synthetic construct
  source 1..20: mol_type = other DNA
aggggccccatcacggggcc

SEQ ID NO: 49873 - DNA, 20 bp, synthetic construct
  source 1..20: mol_type = other DNA
cctggcggcggcgaggacgg

SEQ ID NO: 49874 - DNA, 20 bp, synthetic construct
  source 1..20: mol_type = other DNA
ggcggcgaggacggcggcgg

SEQ ID NO: 49875 - DNA, 20 bp, synthetic construct
  source 1..20: mol_type = other DNA
cagccagtacgcactcatgg

SEQ ID NO: 49876 - DNA, 20 bp, synthetic construct
  source 1..20: mol_type = other DNA
catctgcagctcctggagga

SEQ ID NO: 49877 - DNA, 20 bp, synthetic construct
  source 1..20: mol_type = other DNA
tcaaggtcttccaccgagat

SEQ ID NO: 49878 - DNA, 20 bp, synthetic construct
  source 1..20: mol_type = other DNA
tctcgttcacctcctccctg

SEQ ID NO: 49879 - DNA, 20 bp, synthetic construct
  source 1..20: mol_type = other DNA
actctgtgggggcagacgag

SEQ ID NO: 49880 - DNA, 20 bp, synthetic construct
  source 1..20: mol_type = other DNA
ggcctggtgggggaaacagg

SEQ ID NO: 49881 - DNA, 20 bp, synthetic construct
  source 1..20: mol_type = other DNA
cggactaggaaggtgccatc

SEQ ID NO: 49882 - DNA, 20 bp, synthetic construct
  source 1..20: mol_type = other DNA
gctggtgatagaccttaagc

SEQ ID NO: 49883 - DNA, 20 bp, synthetic construct
  source 1..20: mol_type = other DNA
tgagccacctgagaaggaac

SEQ ID NO: 49884 - DNA, 20 bp, synthetic construct
  source 1..20: mol_type = other DNA
gctgcccacagagcgtgggc

SEQ ID NO: 49885 - DNA, 20 bp, synthetic construct
  source 1..20: mol_type = other DNA
cgccagggggcgctcccgac

SEQ ID NO: 49886 - DNA, 20 bp, synthetic construct
  source 1..20: mol_type = other DNA
ggcggcgcgcgcagcagcag

SEQ ID NO: 49887 - DNA, 20 bp, synthetic construct
  source 1..20: mol_type = other DNA
aggatcctgtgggaggggtg

SEQ ID NO: 49888 - DNA, 20 bp, synthetic construct
  source 1..20: mol_type = other DNA
ccatgagtgcgtactggctg

SEQ ID NO: 49889 - DNA, 20 bp, synthetic construct
  source 1..20: mol_type = other DNA
aagtcggggagtgtgaggcc

SEQ ID NO: 49890 - DNA, 20 bp, synthetic construct
  source 1..20: mol_type = other DNA
ctcatggatctcggcaatgc

SEQ ID NO: 49891 - DNA, 20 bp, synthetic construct
  source 1..20: mol_type = other DNA
agtacacgctgaccctcagg

SEQ ID NO: 49892 - DNA, 20 bp, synthetic construct
  source 1..20: mol_type = other DNA
gctgctctcgcggatgagga

SEQ ID NO: 49893 - DNA, 20 bp, synthetic construct
  source 1..20: mol_type = other DNA
tctctctgttgtccgaggcc

SEQ ID NO: 49894 - DNA, 20 bp, synthetic construct
  source 1..20: mol_type = other DNA
ataaagatctatcaccggga

SEQ ID NO: 49895 - DNA, 20 bp, synthetic construct
  source 1..20: mol_type = other DNA
tatgccagatgggaccttct

SEQ ID NO: 49896 - DNA, 20 bp, synthetic construct
  source 1..20: mol_type = other DNA
actgatattttatattgaaa

SEQ ID NO: 49897 - DNA, 20 bp, synthetic construct
  source 1..20: mol_type = other DNA
tctgacatttaattccgtgg

SEQ ID NO: 49898 - DNA, 20 bp, synthetic construct
  source 1..20: mol_type = other DNA
aaatatcagttctgtcgaat

SEQ ID NO: 49899 - DNA, 20 bp, synthetic construct
  source 1..20: mol_type = other DNA
attcttacatacagccgaat

SEQ ID NO: 49900 - DNA, 20 bp, synthetic construct
  source 1..20: mol_type = other DNA
tctgaagaagttgctctcac

SEQ ID NO: 49901 - DNA, 20 bp, synthetic construct
  source 1..20: mol_type = other DNA
tgtatacctgtattattggt

SEQ ID NO: 49902 - DNA, 20 bp, synthetic construct
  source 1..20: mol_type = other DNA
tgcagaaagaaacgtttcct

SEQ ID NO: 49903 - DNA, 20 bp, synthetic construct
  source 1..20: mol_type = other DNA
ataagatacctgctttgtag

SEQ ID NO: 49904 - DNA, 20 bp, synthetic construct
  source 1..20: mol_type = other DNA
aggcttaaaagaaatagatg

SEQ ID NO: 49905 - DNA, 20 bp, synthetic construct
  source 1..20: mol_type = other DNA
aaccagagagccattcacag

SEQ ID NO: 49906 - DNA, 20 bp, synthetic construct
  source 1..20: mol_type = other DNA
taactggcacatacaagtaa

SEQ ID NO: 49907 - DNA, 20 bp, synthetic construct
  source 1..20: mol_type = other DNA
ttgcagcagcaccggtctgg

SEQ ID NO: 49908 - DNA, 20 bp, synthetic construct
  source 1..20: mol_type = other DNA
gtagcacctggcgacaggga

SEQ ID NO: 49909 - DNA, 20 bp, synthetic construct
  source 1..20: mol_type = other DNA
atcagagaggcctgagacaa

SEQ ID NO: 49910 - DNA, 20 bp, synthetic construct
  source 1..20: mol_type = other DNA
ctctccacaggtccaggaga

SEQ ID NO: 49911 - DNA, 20 bp, synthetic construct
  source 1..20: mol_type = other DNA
cctggaaggcgtgcaggagc

SEQ ID NO: 49912 - DNA, 20 bp, synthetic construct
  source 1..20: mol_type = other DNA
ggtgatactggttcgtccag

SEQ ID NO: 49913 - DNA, 20 bp, synthetic construct
  source 1..20: mol_type = other DNA
ggaggataaggaagtggccc

SEQ ID NO: 49914 - DNA, 20 bp, synthetic construct
  source 1..20: mol_type = other DNA
gtcagccaggatgggcagct

SEQ ID NO: 49915 - DNA, 20 bp, synthetic construct
  source 1..20: mol_type = other DNA
ccaggtcaggaaccggtggt

SEQ ID NO: 49916 - DNA, 20 bp, synthetic construct
  source 1..20: mol_type = other DNA
tagcgtcagggcctccatgc

SEQ ID NO: 49917 - DNA, 20 bp, synthetic construct
  source 1..20: mol_type = other DNA
actccagggctggcgtgcct

SEQ ID NO: 49918 - DNA, 20 bp, synthetic construct
  source 1..20: mol_type = other DNA
gacagctttggtaaggagcc

SEQ ID NO: 49919 - DNA, 20 bp, synthetic construct
  source 1..20: mol_type = other DNA
ggaggaggtggaggaggact

SEQ ID NO: 49920 - DNA, 20 bp, synthetic construct
  source 1..20: mol_type = other DNA
tgaagaggaggaagaggagg

SEQ ID NO: 49921 - DNA, 20 bp, synthetic construct
  source 1..20: mol_type = other DNA
gggatgctgcagaggcccgg

SEQ ID NO: 49922 - DNA, 20 bp, synthetic construct
  source 1..20: mol_type = other DNA
agtagcatgtcagccaggat

SEQ ID NO: 49923 - DNA, 20 bp, synthetic construct
  source 1..20: mol_type = other DNA
tgaacctcaacaaggcctgc

SEQ ID NO: 49924 - DNA, 20 bp, synthetic construct
  source 1..20: mol_type = other DNA
catggacagcggctacgtgg

SEQ ID NO: 49925 - DNA, 20 bp, synthetic construct
  source 1..20: mol_type = other DNA
acagctttggtaaggagccg

SEQ ID NO: 49926 - DNA, 20 bp, synthetic construct
  source 1..20: mol_type = other DNA
catgatgggcaggcagagaa

SEQ ID NO: 49927 - DNA, 20 bp, synthetic construct
  source 1..20: mol_type = other DNA
ccagctggaaaaggagagag

SEQ ID NO: 49928 - DNA, 20 bp, synthetic construct
  source 1..20: mol_type = other DNA
acacgtgccatcaaggcgtc

SEQ ID NO: 49929 - DNA, 20 bp, synthetic construct
  source 1..20: mol_type = other DNA
cagtgtctgtaagaacaggg

SEQ ID NO: 49930 - DNA, 20 bp, synthetic construct
  source 1..20: mol_type = other DNA
caggaaggggcggcggcgct

SEQ ID NO: 49931 - DNA, 20 bp, synthetic construct
  source 1..20: mol_type = other DNA
cacccccgacagactcccct

SEQ ID NO: 49932 - DNA, 20 bp, synthetic construct
  source 1..20: mol_type = other DNA
tcaggaaggggcggcggcgc

SEQ ID NO: 49933 - DNA, 20 bp, synthetic construct
  source 1..20: mol_type = other DNA
ggccccaaaggtggcctgga

SEQ ID NO: 49934 - DNA, 20 bp, synthetic construct
  source 1..20: mol_type = other DNA
agaggaggaagaggaggagg

SEQ ID NO: 49935 - DNA, 20 bp, synthetic construct
  source 1..20: mol_type = other DNA
tcatcatctcccaggatccc

SEQ ID NO: 49936 - DNA, 20 bp, synthetic construct
  source 1..20: mol_type = other DNA
catctcagccagcttgtgga

SEQ ID NO: 49937 - DNA, 20 bp, synthetic construct
  source 1..20: mol_type = other DNA
cccgcggcggggcgctgcgg

SEQ ID NO: 49938 - DNA, 20 bp, synthetic construct
  source 1..20: mol_type = other DNA
gaatctatgccttttgcaca

SEQ ID NO: 49939 - DNA, 20 bp, synthetic construct
  source 1..20: mol_type = other DNA
tgggtgaaaagccatctgtg

SEQ ID NO: 49940 - DNA, 20 bp, synthetic construct
  source 1..20: mol_type = other DNA
aataccagagaatgtgttga

SEQ ID NO: 49941 - DNA, 20 bp, synthetic construct
  source 1..20: mol_type = other DNA
ggtcccgcggcggggcgctg

SEQ ID NO: 49942 - DNA, 20 bp, synthetic construct
  source 1..20: mol_type = other DNA
acgtgctcaccaaggtgagc

SEQ ID NO: 49943 - DNA, 20 bp, synthetic construct
  source 1..20: mol_type = other DNA
agacagtgaccaacaccttc

SEQ ID NO: 49944 - DNA, 20 bp, synthetic construct
  source 1..20: mol_type = other DNA
caccagttccttccctgggg

SEQ ID NO: 49945 - DNA, 20 bp, synthetic construct
  source 1..20: mol_type = other DNA
gctccgggagctcagcaccc

SEQ ID NO: 49946 - DNA, 20 bp, synthetic construct
  source 1..20: mol_type = other DNA
agtgctccagggtgcggcga

SEQ ID NO: 49947 - DNA, 20 bp, synthetic construct
  source 1..20: mol_type = other DNA
attccagccagcgacacaga

SEQ ID NO: 49948 - DNA, 20 bp, synthetic construct
  source 1..20: mol_type = other DNA
caagattctaaattccccaa

SEQ ID NO: 49949 - DNA, 20 bp, synthetic construct
  source 1..20: mol_type = other DNA
cttcttctggcaggtgctgg

SEQ ID NO: 49950 - DNA, 20 bp, synthetic construct
  source 1..20: mol_type = other DNA
aaggtgagctcgggtttctc

SEQ ID NO: 49951 - DNA, 20 bp, synthetic construct
  source 1..20: mol_type = other DNA
ctgagtctgactgggggcac

SEQ ID NO: 49952 - DNA, 20 bp, synthetic construct
  source 1..20: mol_type = other DNA
cttgtccctgcacacaagcc

SEQ ID NO: 49953 - DNA, 20 bp, synthetic construct
  source 1..20: mol_type = other DNA
atagtcaaagagatcctggg

SEQ ID NO: 49954 - DNA, 20 bp, synthetic construct
  source 1..20: mol_type = other DNA
gatatagtcaaagagatcct

SEQ ID NO: 49955 - DNA, 20 bp, synthetic construct
  source 1..20: mol_type = other DNA
ccgcctcacagatcgactcc

SEQ ID NO: 49956 - DNA, 20 bp, synthetic construct
  source 1..20: mol_type = other DNA
ctccacgggaatggcagtgc

SEQ ID NO: 49957 - DNA, 20 bp, synthetic construct
  source 1..20: mol_type = other DNA
aggggcctcccgcgcccccc

SEQ ID NO: 49958 - DNA, 20 bp, synthetic construct
  source 1..20: mol_type = other DNA
actgctgtgccctaatccgc

SEQ ID NO: 49959 - DNA, 20 bp, synthetic construct
  source 1..20: mol_type = other DNA
tgccaaagccccccttaccc

SEQ ID NO: 49960 - DNA, 20 bp, synthetic construct
  source 1..20: mol_type = other DNA
actccggggggctgtacact

SEQ ID NO: 49961 - DNA, 20 bp, synthetic construct
  source 1..20: mol_type = other DNA
cagcaccacctccaggggca

SEQ ID NO: 49962 - DNA, 20 bp, synthetic construct
  source 1..20: mol_type = other DNA
ctcccggtgagtcggaccgc

SEQ ID NO: 49963 - DNA, 20 bp, synthetic construct
  source 1..20: mol_type = other DNA
tggtgctggccacgtcatca

SEQ ID NO: 49964 - DNA, 20 bp, synthetic construct
  source 1..20: mol_type = other DNA
aagtatgacctcaaggtaaa

SEQ ID NO: 49965 - DNA, 20 bp, synthetic construct
  source 1..20: mol_type = other DNA
ggcagagcaggaggagatgg

SEQ ID NO: 49966 - DNA, 20 bp, synthetic construct
  source 1..20: mol_type = other DNA
atggactacagcctgctggt

SEQ ID NO: 49967 - DNA, 20 bp, synthetic construct
  source 1..20: mol_type = other DNA
cggtacatgcccaggaactg

SEQ ID NO: 49968 - DNA, 20 bp, synthetic construct
  source 1..20: mol_type = other DNA
gctctgcccggtccacgtcg

SEQ ID NO: 49969 - DNA, 20 bp, synthetic construct
  source 1..20: mol_type = other DNA
cgtcgtggatgcccaccagc

SEQ ID NO: 49970 - DNA, 20 bp, synthetic construct
  source 1..20: mol_type = other DNA
atgaaatacacctccttctt

SEQ ID NO: 49971 - DNA, 20 bp, synthetic construct
  source 1..20: mol_type = other DNA
cggctgggcaggttctccct

SEQ ID NO: 49972 - DNA, 20 bp, synthetic construct
  source 1..20: mol_type = other DNA
cagcaccacggcggtggcgg

SEQ ID NO: 49973 - DNA, 20 bp, synthetic construct
  source 1..20: mol_type = other DNA
cctcagcgtcctgatgtggg

SEQ ID NO: 49974 - DNA, 20 bp, synthetic construct
  source 1..20: mol_type = other DNA
ccgtatagctgttggggagg

SEQ ID NO: 49975 - DNA, 20 bp, synthetic construct
  source 1..20: mol_type = other DNA
gtgtaccgcagcccaaacca

SEQ ID NO: 49976 - DNA, 20 bp, synthetic construct
  source 1..20: mol_type = other DNA
actcacccgagaactggaag

SEQ ID NO: 49977 - DNA, 20 bp, synthetic construct
  source 1..20: mol_type = other DNA
tctcgctccaatgtcgacac

SEQ ID NO: 49978 - DNA, 20 bp, synthetic construct
  source 1..20: mol_type = other DNA
ctattgtaatactgcatagg

SEQ ID NO: 49979 - DNA, 20 bp, synthetic construct
  source 1..20: mol_type = other DNA
gctggagctggaggtgcccc

SEQ ID NO: 49980 - DNA, 20 bp, synthetic construct
  source 1..20: mol_type = other DNA
aggggttggtccgttgggat

SEQ ID NO: 49981 - DNA, 20 bp, synthetic construct
  source 1..20: mol_type = other DNA
tcttgacatgacgcgtcagg

SEQ ID NO: 49982 - DNA, 20 bp, synthetic construct
  source 1..20: mol_type = other DNA
tagttcccaggcctcggggc

SEQ ID NO: 49983 - DNA, 20 bp, synthetic construct
  source 1..20: mol_type = other DNA
aaaactatccacctccactt

SEQ ID NO: 49984 - DNA, 20 bp, synthetic construct
  source 1..20: mol_type = other DNA
tgccgccggctgaggtgagg

SEQ ID NO: 49985 - DNA, 20 bp, synthetic construct
  source 1..20: mol_type = other DNA
caacatgccagggaaggcct

SEQ ID NO: 49986 - DNA, 20 bp, synthetic construct
  source 1..20: mol_type = other DNA
agtggaggtggatagttttc

SEQ ID NO: 49987 - DNA, 20 bp, synthetic construct
  source 1..20: mol_type = other DNA
gccggtcgcagtggtcacag

SEQ ID NO: 49988 - DNA, 20 bp, synthetic construct
  source 1..20: mol_type = other DNA
cggcacctagtggtgcacac

SEQ ID NO: 49989 - DNA, 20 bp, synthetic construct
  source 1..20: mol_type = other DNA
gttcagcggatgagagagac

SEQ ID NO: 49990 - DNA, 20 bp, synthetic construct
  source 1..20: mol_type = other DNA
ttacacgggggcaggttgag

SEQ ID NO: 49991 - DNA, 20 bp, synthetic construct
  source 1..20: mol_type = other DNA
ctgtggagctgcagctgagt

SEQ ID NO: 49992 - DNA, 20 bp, synthetic construct
  source 1..20: mol_type = other DNA
gatcctcagggctgggcagg

SEQ ID NO: 49993 - DNA, 20 bp, synthetic construct
  source 1..20: mol_type = other DNA
tgagctggaggaggaggagg

SEQ ID NO: 49994 - DNA, 20 bp, synthetic construct
  source 1..20: mol_type = other DNA
tacatacctggtgcttgggc

SEQ ID NO: 49995 - DNA, 20 bp, synthetic construct
  source 1..20: mol_type = other DNA
atgggcactgaagaacttaa

SEQ ID NO: 49996 - DNA, 20 bp, synthetic construct
  source 1..20: mol_type = other DNA
tgccctaaggagaagagggg

SEQ ID NO: 49997 - DNA, 20 bp, synthetic construct
  source 1..20: mol_type = other DNA
caggatgatgggataggggg

SEQ ID NO: 49998 - DNA, 20 bp, synthetic construct
  source 1..20: mol_type = other DNA
catagcaaaggcagatgccc

SEQ ID NO: 49999 - DNA, 20 bp, synthetic construct
  source 1..20: mol_type = other DNA
caagttctccgtcatctggg

SEQ ID NO: 50000 - DNA, 20 bp, synthetic construct
  source 1..20: mol_type = other DNA
cgggaggcgttggccgtcag

SEQ ID NO: 50001 - DNA, 20 bp, synthetic construct
  source 1..20: mol_type = other DNA
acttcggttcttttctatat

SEQ ID NO: 50002 - DNA, 20 bp, synthetic construct
  source 1..20: mol_type = other DNA
ggaggtggaagaggaagagg

SEQ ID NO: 50003 - DNA, 20 bp, synthetic construct
  source 1..20: mol_type = other DNA
gtgaagatctcatctatttc

SEQ ID NO: 50004 - DNA, 20 bp, synthetic construct
  source 1..20: mol_type = other DNA
cagccaggtcaatggggcgt

SEQ ID NO: 50005 - DNA, 20 bp, synthetic construct
  source 1..20: mol_type = other DNA
ctccatcaatcctgtctgga

SEQ ID NO: 50006 - DNA, 20 bp, synthetic construct
  source 1..20: mol_type = other DNA
accagaaacagcgggactcc

SEQ ID NO: 50007 - DNA, 20 bp, synthetic construct
  source 1..20: mol_type = other DNA
actcagccatcttagcctgc

SEQ ID NO: 50008 - DNA, 20 bp, synthetic construct
  source 1..20: mol_type = other DNA
gaggctatgaaagaagctgc

SEQ ID NO: 50009 - DNA, 20 bp, synthetic construct
  source 1..20: mol_type = other DNA
aatctccaaaatgatggagc

SEQ ID NO: 50010 - DNA, 20 bp, synthetic construct
  source 1..20: mol_type = other DNA
gcagcaaatctccaaaatga

SEQ ID NO: 50011 - DNA, 20 bp, synthetic construct
  source 1..20: mol_type = other DNA
catagcctcttccctggccc

SEQ ID NO: 50012 - DNA, 20 bp, synthetic construct
  source 1..20: mol_type = other DNA
cctctgtgcattgatgccac

SEQ ID NO: 50013 - DNA, 20 bp, synthetic construct
  source 1..20: mol_type = other DNA
ttgatgaagtaatgattgag

SEQ ID NO: 50014 - DNA, 20 bp, synthetic construct
  source 1..20: mol_type = other DNA
ggcggtccgcggctctgcgg

SEQ ID NO: 50015 - DNA, 20 bp, synthetic construct
  source 1..20: mol_type = other DNA
ttctccagggataggatgac

SEQ ID NO: 50016 - DNA, 20 bp, synthetic construct
  source 1..20: mol_type = other DNA
atctccctccaggactaggc

SEQ ID NO: 50017 - DNA, 20 bp, synthetic construct
  source 1..20: mol_type = other DNA
ctagcctgagcttgtcctcc

SEQ ID NO: 50018 - DNA, 20 bp, synthetic construct
  source 1..20: mol_type = other DNA
ccatgcagtgcctggggatc

SEQ ID NO: 50019 - DNA, 20 bp, synthetic construct
  source 1..20: mol_type = other DNA
gcggtcgatctccacccgct

SEQ ID NO: 50020 - DNA, 20 bp, synthetic construct
  source 1..20: mol_type = other DNA
ggagatcttcacaaagaggg

SEQ ID NO: 50021 - DNA, 20 bp, synthetic construct
  source 1..20: mol_type = other DNA
gtatagccgtggtagatgat

SEQ ID NO: 50022 - DNA, 20 bp, synthetic construct
  source 1..20: mol_type = other DNA
ccttcagttgctaggtgggg

SEQ ID NO: 50023 - DNA, 20 bp, synthetic construct
  source 1..20: mol_type = other DNA
acaggatgatgaggatctac

SEQ ID NO: 50024 - DNA, 20 bp, synthetic construct
  source 1..20: mol_type = other DNA
gtagatcctcatcatcctgt

SEQ ID NO: 50025 - DNA, 20 bp, synthetic construct
  source 1..20: mol_type = other DNA
tgccctcatccgcttcttgg

SEQ ID NO: 50026 - DNA, 20 bp, synthetic construct
  source 1..20: mol_type = other DNA
tgaaggggaagaagctcggg

SEQ ID NO: 50027 - DNA, 20 bp, synthetic construct
  source 1..20: mol_type = other DNA
tgaaggtgaagtccagctca

SEQ ID NO: 50028 - DNA, 20 bp, synthetic construct
  source 1..20: mol_type = other DNA
cttcaaggtgggagtgcccc

SEQ ID NO: 50029 - DNA, 20 bp, synthetic construct
  source 1..20: mol_type = other DNA
ctgagcagaatctacccggc

SEQ ID NO: 50030 - DNA, 20 bp, synthetic construct
  source 1..20: mol_type = other DNA
cagtatccttttggtggcag

SEQ ID NO: 50031 - DNA, 20 bp, synthetic construct
  source 1..20: mol_type = other DNA
ccttgccctcatccgcttct

SEQ ID NO: 50032 - DNA, 20 bp, synthetic construct
  source 1..20: mol_type = other DNA
atggagaagcagcggtcctc

SEQ ID NO: 50033 - DNA, 20 bp, synthetic construct
  source 1..20: mol_type = other DNA
gatcttccccttcagttgct

SEQ ID NO: 50034 - DNA, 20 bp, synthetic construct
  source 1..20: mol_type = other DNA
gccagcttcttgtgctgtag

SEQ ID NO: 50035 - DNA, 20 bp, synthetic construct
  source 1..20: mol_type = other DNA
ccctcactctttgctctcgt

SEQ ID NO: 50036 - DNA, 20 bp, synthetic construct
  source 1..20: mol_type = other DNA
gtttccaggagcctgactac

SEQ ID NO: 50037 - DNA, 20 bp, synthetic construct
  source 1..20: mol_type = other DNA
agcagttttactcagtggat

SEQ ID NO: 50038 - DNA, 20 bp, synthetic construct
  source 1..20: mol_type = other DNA
cctcccagccatccgtcctg

SEQ ID NO: 50039 - DNA, 20 bp, synthetic construct
  source 1..20: mol_type = other DNA
cgagagagtgagaccttcgt

SEQ ID NO: 50040 - DNA, 20 bp, synthetic construct
  source 1..20: mol_type = other DNA
cgccagatcacgtggagccg

SEQ ID NO: 50041 - DNA, 20 bp, synthetic construct
  source 1..20: mol_type = other DNA
ttcttgactaccagggggta

SEQ ID NO: 50042 - DNA, 20 bp, synthetic construct
  source 1..20: mol_type = other DNA
caggacctggagcagcgcag

SEQ ID NO: 50043 - DNA, 20 bp, synthetic construct
  source 1..20: mol_type = other DNA
agcactgccgtatccactcc

SEQ ID NO: 50044 - DNA, 20 bp, synthetic construct
  source 1..20: mol_type = other DNA
tccctttgatgaagagagta

SEQ ID NO: 50045 - DNA, 20 bp, synthetic construct
  source 1..20: mol_type = other DNA
gatagcgcagcttcatcttg

SEQ ID NO: 50046 - DNA, 20 bp, synthetic construct
  source 1..20: mol_type = other DNA
cggtgcccacctcgaggctg

SEQ ID NO: 50047 - DNA, 20 bp, synthetic construct
  source 1..20: mol_type = other DNA
ctctcccgcatctaccccaa

SEQ ID NO: 50048 - DNA, 20 bp, synthetic construct
  source 1..20: mol_type = other DNA
tctctcgtaaggggtctcgg

SEQ ID NO: 50049 - DNA, 20 bp, synthetic construct
  source 1..20: mol_type = other DNA
cctttgcccatgtggatctg

SEQ ID NO: 50050 - DNA, 20 bp, synthetic construct
  source 1..20: mol_type = other DNA
ggcccagacagcagacgcca

SEQ ID NO: 50051 - DNA, 20 bp, synthetic construct
  source 1..20: mol_type = other DNA
ctctgccgcagcctcgaggt

SEQ ID NO: 50052 - DNA, 20 bp, synthetic construct
  source 1..20: mol_type = other DNA
agaggacccagctttccggc

SEQ ID NO: 50053 - DNA, 20 bp, synthetic construct
  source 1..20: mol_type = other DNA
agcaggatgaggaggatgac

SEQ ID NO: 50054 - DNA, 20 bp, synthetic construct
  source 1..20: mol_type = other DNA
gcagcgagcataggcttcca

SEQ ID NO: 50055 - DNA, 20 bp, synthetic construct
  source 1..20: mol_type = other DNA
agtggttccatgggaagcta

SEQ ID NO: 50056 - DNA, 20 bp, synthetic construct
  source 1..20: mol_type = other DNA
gtgagctggtgacacacaca

SEQ ID NO: 50057 - DNA, 20 bp, synthetic construct
  source 1..20: mol_type = other DNA
tgactgccacagatccacat

SEQ ID NO: 50058 - DNA, 20 bp, synthetic construct
  source 1..20: mol_type = other DNA
agaagtcgcagcgacccgag

SEQ ID NO: 50059 - DNA, 20 bp, synthetic construct
  source 1..20: mol_type = other DNA
gaggagaccagcagtgacca

SEQ ID NO: 50060 - DNA, 20 bp, synthetic construct
  source 1..20: mol_type = other DNA
tgctgcagccaagcaccatg

SEQ ID NO: 50061 - DNA, 20 bp, synthetic construct
  source 1..20: mol_type = other DNA
tggaagtggaagggcttggc

SEQ ID NO: 50062 - DNA, 20 bp, synthetic construct
  source 1..20: mol_type = other DNA
cagcacaagaagctggctga

SEQ ID NO: 50063 - DNA, 20 bp, synthetic construct
  source 1..20: mol_type = other DNA
tccttttgtggagattgagg

SEQ ID NO: 50064 - DNA, 20 bp, synthetic construct
  source 1..20: mol_type = other DNA
caagcagaagacagagtttg

SEQ ID NO: 50065 - DNA, 20 bp, synthetic construct
  source 1..20: mol_type = other DNA
tgtaccttgaaagttggcat

SEQ ID NO: 50066 - DNA, 20 bp, synthetic construct
  source 1..20: mol_type = other DNA
gtaccttgaaagttggcata

SEQ ID NO: 50067 - DNA, 20 bp, synthetic construct
  source 1..20: mol_type = other DNA
agagtagtagatcttgctgc

SEQ ID NO: 50068 - DNA, 20 bp, synthetic construct
  source 1..20: mol_type = other DNA
cttcatcaaagggaacaggc

SEQ ID NO: 50069 - DNA, 20 bp, synthetic construct
  source 1..20: mol_type = other DNA
gtcaggtacctggataggca

SEQ ID NO: 50070 - DNA, 20 bp, synthetic construct
  source 1..20: mol_type = other DNA
ccaggaaggccccatcacga

SEQ ID NO: 50071 - DNA, 20 bp, synthetic construct
  source 1..20: mol_type = other DNA
ccccggtcaggtacctggat

SEQ ID NO: 50072 - DNA, 20 bp, synthetic construct
  source 1..20: mol_type = other DNA
tctcctgcttcaacgaagcc

SEQ ID NO: 50073 - DNA, 20 bp, synthetic construct
  source 1..20: mol_type = other DNA
aaagagatggcatatgagtt

SEQ ID NO: 50074 - DNA, 20 bp, synthetic construct
  source 1..20: mol_type = other DNA
caggatgactgggtacctgc

SEQ ID NO: 50075 - DNA, 20 bp, synthetic construct
  source 1..20: mol_type = other DNA
tgcagcgacagcccatccgc

SEQ ID NO: 50076 - DNA, 20 bp, synthetic construct
  source 1..20: mol_type = other DNA
tttccaggagcctgactacg

SEQ ID NO: 50077 - DNA, 20 bp, synthetic construct
  source 1..20: mol_type = other DNA
agccagcttcttgtgctgta

SEQ ID NO: 50078 - DNA, 20 bp, synthetic construct
  source 1..20: mol_type = other DNA
gactcactctgaggccacaa

SEQ ID NO: 50079 - DNA, 20 bp, synthetic construct
  source 1..20: mol_type = other DNA
ccggtgaggggtgtggcact

SEQ ID NO: 50080 - DNA, 20 bp, synthetic construct
  source 1..20: mol_type = other DNA
agctcaccaatctgacaagc

SEQ ID NO: 50081 - DNA, 20 bp, synthetic construct
  source 1..20: mol_type = other DNA
cacccctcaccggaaagaga

SEQ ID NO: 50082 - DNA, 20 bp, synthetic construct
  source 1..20: mol_type = other DNA
gtacctggataggcaaggag

SEQ ID NO: 50083 - DNA, 20 bp, synthetic construct
  source 1..20: mol_type = other DNA
ctctgaggtttggtttggag

SEQ ID NO: 50084 - DNA, 20 bp, synthetic construct
  source 1..20: mol_type = other DNA
cgctgcattgagtgtgcgtg

SEQ ID NO: 50085 - DNA, 20 bp, synthetic construct
  source 1..20: mol_type = other DNA
agttggaggaatccagtcgc

SEQ ID NO: 50086 - DNA, 20 bp, synthetic construct
  source 1..20: mol_type = other DNA
ctcagatgtggctgtgagca

SEQ ID NO: 50087 - DNA, 20 bp, synthetic construct
  source 1..20: mol_type = other DNA
gccctcaacttccagacccc

SEQ ID NO: 50088 - DNA, 20 bp, synthetic construct
  source 1..20: mol_type = other DNA
gtcgggcccccagcacctgt

SEQ ID NO: 50089 - DNA, 20 bp, synthetic construct
  source 1..20: mol_type = other DNA
aggaggactcactggagaac

SEQ ID NO: 50090 - DNA, 20 bp, synthetic construct
  source 1..20: mol_type = other DNA
gacctggaaggtcttccgct

SEQ ID NO: 50091 - DNA, 20 bp, synthetic construct
  source 1..20: mol_type = other DNA
cccacgagagcaaagagtga

SEQ ID NO: 50092 - DNA, 20 bp, synthetic construct
  source 1..20: mol_type = other DNA
cctcgcacaacacgtgagtg

SEQ ID NO: 50093 - DNA, 20 bp, synthetic construct
  source 1..20: mol_type = other DNA
ggtcctgcatggtatagagc

SEQ ID NO: 50094 - DNA, 20 bp, synthetic construct
  source 1..20: mol_type = other DNA
ggctgagggcagtgcctacg

SEQ ID NO: 50095 - DNA, 20 bp, synthetic construct
  source 1..20: mol_type = other DNA
agatgtcctgcacaccatca

SEQ ID NO: 50096 - DNA, 20 bp, synthetic construct
  source 1..20: mol_type = other DNA
gagaggatgggatgactggt

SEQ ID NO: 50097 - DNA, 20 bp, synthetic construct
  source 1..20: mol_type = other DNA
gtcgttctcagagtacatca

SEQ ID NO: 50098 - DNA, 20 bp, synthetic construct
  source 1..20: mol_type = other DNA
cccgtggagatctctgccga

SEQ ID NO: 50099 - DNA, 20 bp, synthetic construct
  source 1..20: mol_type = other DNA
cctcctcatcctcgttgccc

SEQ ID NO: 50100 - DNA, 20 bp, synthetic construct
  source 1..20: mol_type = other DNA
caaccctggcttctatgtag

SEQ ID NO: 50101 - DNA, 20 bp, synthetic construct
  source 1..20: mol_type = other DNA
ccccgcagcaagtcccctag

SEQ ID NO: 50102 - DNA, 20 bp, synthetic construct
  source 1..20: mol_type = other DNA
cagccagcttcttgtgctgt

SEQ ID NO: 50103 - DNA, 20 bp, synthetic construct
  source 1..20: mol_type = other DNA
agaccccttacgagagatcg

SEQ ID NO: 50104 - DNA, 20 bp, synthetic construct
  source 1..20: mol_type = other DNA
gaatccagtcgctggccctt

SEQ ID NO: 50105 - DNA, 20 bp, synthetic construct
  source 1..20: mol_type = other DNA
ggtgacctcagtcccttcag

SEQ ID NO: 50106 - DNA, 20 bp, synthetic construct
  source 1..20: mol_type = other DNA
gcgactacacgctctctttc

SEQ ID NO: 50107 - DNA, 20 bp, synthetic construct
  source 1..20: mol_type = other DNA
acagcacaagaagctggctg

SEQ ID NO: 50108 - DNA, 20 bp, synthetic construct
  source 1..20: mol_type = other DNA
cgaggaggagatccagtagt

SEQ ID NO: 50109 - DNA, 20 bp, synthetic construct
  source 1..20: mol_type = other DNA
agatccagtagtgggaaaga

SEQ ID NO: 50110 - DNA, 20 bp, synthetic construct
  source 1..20: mol_type = other DNA
cgcacgaggaaggagccgtc

SEQ ID NO: 50111 - DNA, 20 bp, synthetic construct
  source 1..20: mol_type = other DNA
cctatccaggtacctgaccg

SEQ ID NO: 50112 - DNA, 20 bp, synthetic construct
  source 1..20: mol_type = other DNA
tgaccagaatttcctggctc

SEQ ID NO: 50113 - DNA, 20 bp, synthetic construct
  source 1..20: mol_type = other DNA
ctcagccttggtttccggga

SEQ ID NO: 50114 - DNA, 20 bp, synthetic construct
  source 1..20: mol_type = other DNA
ccacctcgaggctgcggcag

SEQ ID NO: 50115 - DNA, 20 bp, synthetic construct
  source 1..20: mol_type = other DNA
gcgtggtaccacctgagaac

SEQ ID NO: 50116 - DNA, 20 bp, synthetic construct
  source 1..20: mol_type = other DNA
tcacagggtcctccaggtag

SEQ ID NO: 50117 - DNA, 20 bp, synthetic construct
  source 1..20: mol_type = other DNA
tgagggcagtgcctacgagg

SEQ ID NO: 50118 - DNA, 20 bp, synthetic construct
  source 1..20: mol_type = other DNA
tcccatcaacgaggaggcac

SEQ ID NO: 50119 - DNA, 20 bp, synthetic construct
  source 1..20: mol_type = other DNA
ctgaacttgtcgtctactgc

SEQ ID NO: 50120 - DNA, 20 bp, synthetic construct
  source 1..20: mol_type = other DNA
tcatgacggtgcccacctcg

SEQ ID NO: 50121 - DNA, 20 bp, synthetic construct
  source 1..20: mol_type = other DNA
acaggatgactgggtacctg

SEQ ID NO: 50122 - DNA, 20 bp, synthetic construct
  source 1..20: mol_type = other DNA
cccgcagcaagtcccctagg

SEQ ID NO: 50123 - DNA, 20 bp, synthetic construct
  source 1..20: mol_type = other DNA
atacaccacgaagcgcagaa

SEQ ID NO: 50124 - DNA, 20 bp, synthetic construct
  source 1..20: mol_type = other DNA
gtgctctggtcaggctcgcg

SEQ ID NO: 50125 - DNA, 20 bp, synthetic construct
  source 1..20: mol_type = other DNA
tttgtggagattgaggtggc

SEQ ID NO: 50126 - DNA, 20 bp, synthetic construct
  source 1..20: mol_type = other DNA
gcttcgttgaagcaggagaa

SEQ ID NO: 50127 - DNA, 20 bp, synthetic construct
  source 1..20: mol_type = other DNA
gcacgaggaaggagccgtca

SEQ ID NO: 50128 - DNA, 20 bp, synthetic construct
  source 1..20: mol_type = other DNA
ccacacccctgcagattgag

SEQ ID NO: 50129 - DNA, 20 bp, synthetic construct
  source 1..20: mol_type = other DNA
ttaccgtcagccgctctcgg

SEQ ID NO: 50130 - DNA, 20 bp, synthetic construct
  source 1..20: mol_type = other DNA
ctggtccccggtcaggtacc

SEQ ID NO: 50131 - DNA, 20 bp, synthetic construct
  source 1..20: mol_type = other DNA
ccgggaaggatgacatgtcc

SEQ ID NO: 50132 - DNA, 20 bp, synthetic construct
  source 1..20: mol_type = other DNA
gcccttactctcttcatcaa

SEQ ID NO: 50133 - DNA, 20 bp, synthetic construct
  source 1..20: mol_type = other DNA
gttctccagtgagtcctcct

SEQ ID NO: 50134 - DNA, 20 bp, synthetic construct
  source 1..20: mol_type = other DNA
agcgcagaaaggcaaattca

SEQ ID NO: 50135 - DNA, 20 bp, synthetic construct
  source 1..20: mol_type = other DNA
tcagcagggaggccaactcc

SEQ ID NO: 50136 - DNA, 20 bp, synthetic construct
  source 1..20: mol_type = other DNA
agttccctagcatcactgtc

SEQ ID NO: 50137 - DNA, 20 bp, synthetic construct
  source 1..20: mol_type = other DNA
tcttacctctcaatctgcag

SEQ ID NO: 50138 - DNA, 20 bp, synthetic construct
  source 1..20: mol_type = other DNA
gcttcaggtcaccgtgggag

SEQ ID NO: 50139 - DNA, 20 bp, synthetic construct
  source 1..20: mol_type = other DNA
acctggaaggtcttccgctc

SEQ ID NO: 50140 - DNA, 20 bp, synthetic construct
  source 1..20: mol_type = other DNA
atcaagaggacccagctttc

SEQ ID NO: 50141 - DNA, 20 bp, synthetic construct
  source 1..20: mol_type = other DNA
cccccgcagcaagtccccta

SEQ ID NO: 50142 - DNA, 20 bp, synthetic construct
  source 1..20: mol_type = other DNA
gcacctctgccgcagcctcg

SEQ ID NO: 50143 - DNA, 20 bp, synthetic construct
  source 1..20: mol_type = other DNA
aagggaagataatggaacgg

SEQ ID NO: 50144 - DNA, 20 bp, synthetic construct
  source 1..20: mol_type = other DNA
gcccacgagagcaaagagtg

SEQ ID NO: 50145 - DNA, 20 bp, synthetic construct
  source 1..20: mol_type = other DNA
cgcgccagatcacgtggagc

SEQ ID NO: 50146 - DNA, 20 bp, synthetic construct
  source 1..20: mol_type = other DNA
gtcatccttcccggaaacca

SEQ ID NO: 50147 - DNA, 20 bp, synthetic construct
  source 1..20: mol_type = other DNA
acccgagcggaagaccttcc

SEQ ID NO: 50148 - DNA, 20 bp, synthetic construct
  source 1..20: mol_type = other DNA
gctgcagccaagcaccatgc

SEQ ID NO: 50149 - DNA, 20 bp, synthetic construct
  source 1..20: mol_type = other DNA
ctgatggggtagggagggca

SEQ ID NO: 50150 - DNA, 20 bp, synthetic construct
  source 1..20: mol_type = other DNA
gcgaggaggagatccagtag

SEQ ID NO: 50151 - DNA, 20 bp, synthetic construct
  source 1..20: mol_type = other DNA
gaatggcatcctctacctgg

SEQ ID NO: 50152 - DNA, 20 bp, synthetic construct
  source 1..20: mol_type = other DNA
tggcccagacagcagacgcc

SEQ ID NO: 50153 - DNA, 20 bp, synthetic construct
  source 1..20: mol_type = other DNA
tgaggagaccagcagtgacc

SEQ ID NO: 50154 - DNA, 20 bp, synthetic construct
  source 1..20: mol_type = other DNA
cacaggaggagctgcaggac

SEQ ID NO: 50155 - DNA, 20 bp, synthetic construct
  source 1..20: mol_type = other DNA
agtagtggggataccattcc

SEQ ID NO: 50156 - DNA, 20 bp, synthetic construct
  source 1..20: mol_type = other DNA
gaagaccttccaggtcaagc

SEQ ID NO: 50157 - DNA, 20 bp, synthetic construct
  source 1..20: mol_type = other DNA
gacaagttcagagagctcca

SEQ ID NO: 50158 - DNA, 20 bp, synthetic construct
  source 1..20: mol_type = other DNA
tccggtgaggggtgtggcac

SEQ ID NO: 50159 - DNA, 20 bp, synthetic construct
  source 1..20: mol_type = other DNA
gctgcagtcgattgtactga

SEQ ID NO: 50160 - DNA, 20 bp, synthetic construct
  source 1..20: mol_type = other DNA
cagggttgcgtccctcatac

SEQ ID NO: 50161 - DNA, 20 bp, synthetic construct
  source 1..20: mol_type = other DNA
cgtggttcacagggtcctcc

SEQ ID NO: 50162 - DNA, 20 bp, synthetic construct
  source 1..20: mol_type = other DNA
gctgcgctatcccatcaacg

SEQ ID NO: 50163 - DNA, 20 bp, synthetic construct
  source 1..20: mol_type = other DNA
ggatgaggaggagcccaagg

SEQ ID NO: 50164 - DNA, 20 bp, synthetic construct
  source 1..20: mol_type = other DNA
aatccagtcgctggcccttg

SEQ ID NO: 50165 - DNA, 20 bp, synthetic construct
  source 1..20: mol_type = other DNA
atttctcagccttggtttcc

SEQ ID NO: 50166 - DNA, 20 bp, synthetic construct
  source 1..20: mol_type = other DNA
tgcagtggtcctcaatggac

SEQ ID NO: 50167 - DNA, 20 bp, synthetic construct
  source 1..20: mol_type = other DNA
tccctcactctttgctctcg

SEQ ID NO: 50168 - DNA, 20 bp, synthetic construct
  source 1..20: mol_type = other DNA
tgtttccaggagcctgacta

SEQ ID NO: 50169 - DNA, 20 bp, synthetic construct
  source 1..20: mol_type = other DNA
gtctgtcaagaagaacttgg

SEQ ID NO: 50170 - DNA, 20 bp, synthetic construct
  source 1..20: mol_type = other DNA
tgaggacttccgcatctccc

SEQ ID NO: 50171 - DNA, 20 bp, synthetic construct
  source 1..20: mol_type = other DNA
cttctccatcagcatggcgt

SEQ ID NO: 50172 - DNA, 20 bp, synthetic construct
  source 1..20: mol_type = other DNA
aggaccctgtgaaccacgtg

SEQ ID NO: 50173 - DNA, 20 bp, synthetic construct
  source 1..20: mol_type = other DNA
aggaggagcccaaggaggtg

SEQ ID NO: 50174 - DNA, 20 bp, synthetic construct
  source 1..20: mol_type = other DNA
ctgcagctcctcctgtgagt

SEQ ID NO: 50175 - DNA, 20 bp, synthetic construct
  source 1..20: mol_type = other DNA
cacgaggaaggagccgtcag

SEQ ID NO: 50176 - DNA, 20 bp, synthetic construct
  source 1..20: mol_type = other DNA
ggaatccagtcgctggccct

SEQ ID NO: 50177 - DNA, 20 bp, synthetic construct
  source 1..20: mol_type = other DNA
gcgctatcccatcaacgagg

SEQ ID NO: 50178 - DNA, 20 bp, synthetic construct
  source 1..20: mol_type = other DNA
accaggaaggccccatcacg

SEQ ID NO: 50179 - DNA, 20 bp, synthetic construct
  source 1..20: mol_type = other DNA
acggaggaagaagattgccc

SEQ ID NO: 50180 - DNA, 20 bp, synthetic construct
  source 1..20: mol_type = other DNA
ccccccgcagcaagtcccct

SEQ ID NO: 50181 - DNA, 20 bp, synthetic construct
  source 1..20: mol_type = other DNA
catccgcaggcagcgagcat

SEQ ID NO: 50182 - DNA, 20 bp, synthetic construct
  source 1..20: mol_type = other DNA
cgaggatgaggaggagccca

SEQ ID NO: 50183 - DNA, 20 bp, synthetic construct
  source 1..20: mol_type = other DNA
tggagaactggtccccggtc

SEQ ID NO: 50184 - DNA, 20 bp, synthetic construct
  source 1..20: mol_type = other DNA
agcttcatcttgcggtatag

SEQ ID NO: 50185 - DNA, 20 bp, synthetic construct
  source 1..20: mol_type = other DNA
tatttctcagccttggtttc

SEQ ID NO: 50186 - DNA, 20 bp, synthetic construct
  source 1..20: mol_type = other DNA
gaaagagatggcatatgagt

SEQ ID NO: 50187 - DNA, 20 bp, synthetic construct
  source 1..20: mol_type = other DNA
gcggcagaggtgcagcacct

SEQ ID NO: 50188 - DNA, 20 bp, synthetic construct
  source 1..20: mol_type = other DNA
cttcgtcttctccatcagca

SEQ ID NO: 50189 - DNA, 20 bp, synthetic construct
  source 1..20: mol_type = other DNA
caagaatggcatcctctacc

SEQ ID NO: 50190 - DNA, 20 bp, synthetic construct
  source 1..20: mol_type = other DNA
ctcctggaaacaggacacaa

SEQ ID NO: 50191 - DNA, 20 bp, synthetic construct
  source 1..20: mol_type = other DNA
cgatgcagtactcagtaagc

SEQ ID NO: 50192 - DNA, 20 bp, synthetic construct
  source 1..20: mol_type = other DNA
cctcagagtgagtcggaggc

SEQ ID NO: 50193 - DNA, 20 bp, synthetic construct
  source 1..20: mol_type = other DNA
ctccgcctattttgagagtc

SEQ ID NO: 50194 - DNA, 20 bp, synthetic construct
  source 1..20: mol_type = other DNA
tgttgacatccacatcgcct

SEQ ID NO: 50195 - DNA, 20 bp, synthetic construct
  source 1..20: mol_type = other DNA
tctggtaatgcccccgaccc

SEQ ID NO: 50196 - DNA, 20 bp, synthetic construct
  source 1..20: mol_type = other DNA
tcaagagagccctggagctg

SEQ ID NO: 50197 - DNA, 20 bp, synthetic construct
  source 1..20: mol_type = other DNA
tccacaagaaggtggagaag

SEQ ID NO: 50198 - DNA, 20 bp, synthetic construct
  source 1..20: mol_type = other DNA
ttcatctgcatgtacttatc

SEQ ID NO: 50199 - DNA, 20 bp, synthetic construct
  source 1..20: mol_type = other DNA
tccaggagctcgggggtcac

SEQ ID NO: 50200 - DNA, 20 bp, synthetic construct
  source 1..20: mol_type = other DNA
ctcgctctcccgaaccagga

SEQ ID NO: 50201 - DNA, 20 bp, synthetic construct
  source 1..20: mol_type = other DNA
cttcaggtgggtgcgagggt

SEQ ID NO: 50202 - DNA, 20 bp, synthetic construct
  source 1..20: mol_type = other DNA
cgatgccacccgagtcccag

SEQ ID NO: 50203 - DNA, 20 bp, synthetic construct
  source 1..20: mol_type = other DNA
aaacttatctttaaggaact

SEQ ID NO: 50204 - DNA, 20 bp, synthetic construct
  source 1..20: mol_type = other DNA
acatgctgatgaggattccc

SEQ ID NO: 50205 - DNA, 20 bp, synthetic construct
  source 1..20: mol_type = other DNA
gtgtgtcatacagaaagagc

SEQ ID NO: 50206 - DNA, 20 bp, synthetic construct
  source 1..20: mol_type = other DNA
gggctggtaaggctgagtgg

SEQ ID NO: 50207 - DNA, 20 bp, synthetic construct
  source 1..20: mol_type = other DNA
accacgcctttgttacctcg

SEQ ID NO: 50208 - DNA, 20 bp, synthetic construct
  source 1..20: mol_type = other DNA
agccctaccaggggaccccg

SEQ ID NO: 50209 - DNA, 20 bp, synthetic construct
  source 1..20: mol_type = other DNA
tacacagagttatatgtcca

SEQ ID NO: 50210 - DNA, 20 bp, synthetic construct
  source 1..20: mol_type = other DNA
attttcaatcaacgccttga

SEQ ID NO: 50211 - DNA, 20 bp, synthetic construct
  source 1..20: mol_type = other DNA
ccggcttgctctcccggggg

SEQ ID NO: 50212 - DNA, 20 bp, synthetic construct
  source 1..20: mol_type = other DNA
cctatgataaattctagagt

SEQ ID NO: 50213 - DNA, 20 bp, synthetic construct
  source 1..20: mol_type = other DNA
ctaccttgatgatgctgctc

SEQ ID NO: 50214 - DNA, 20 bp, synthetic construct
  source 1..20: mol_type = other DNA
tcagggcgcccttggcgccg

SEQ ID NO: 50215 - DNA, 20 bp, synthetic construct
  source 1..20: mol_type = other DNA
gctagcccgggcttcgtccc

SEQ ID NO: 50216 - DNA, 20 bp, synthetic construct
  source 1..20: mol_type = other DNA
attggctggtttaggcagaa

SEQ ID NO: 50217 - DNA, 20 bp, synthetic construct
  source 1..20: mol_type = other DNA
tcgaatatatcctgtgatgt

SEQ ID NO: 50218 - DNA, 20 bp, synthetic construct
  source 1..20: mol_type = other DNA
tcagacaccaggactgatga

SEQ ID NO: 50219 - DNA, 20 bp, synthetic construct
  source 1..20: mol_type = other DNA
ccacaagtgaagcagcgtac

SEQ ID NO: 50220 - DNA, 20 bp, synthetic construct
  source 1..20: mol_type = other DNA
ttctgcaagaggcaaagcag

SEQ ID NO: 50221 - DNA, 20 bp, synthetic construct
  source 1..20: mol_type = other DNA
ggagggggtgggggcggggg

SEQ ID NO: 50222 - DNA, 20 bp, synthetic construct
  source 1..20: mol_type = other DNA
cggcggccaggagctgggcc

SEQ ID NO: 50223 - DNA, 20 bp, synthetic construct
  source 1..20: mol_type = other DNA
ggggctccaggtaagggggc

SEQ ID NO: 50224 - DNA, 20 bp, synthetic construct
  source 1..20: mol_type = other DNA
acctgaggagagaagaaagg

SEQ ID NO: 50225 - DNA, 20 bp, synthetic construct
  source 1..20: mol_type = other DNA
gctgcaagtggaggaggagg

SEQ ID NO: 50226 - DNA, 20 bp, synthetic construct
  source 1..20: mol_type = other DNA
atcagagcacacaggtgggt

SEQ ID NO: 50227 - DNA, 20 bp, synthetic construct
  source 1..20: mol_type = other DNA
gagaagtggctcaacgatgc

SEQ ID NO: 50228 - DNA, 20 bp, synthetic construct
  source 1..20: mol_type = other DNA
gctgccatcaaggctggtaa

SEQ ID NO: 50229 - DNA, 20 bp, synthetic construct
  source 1..20: mol_type = other DNA
ctaccttatcctcagctgtg

SEQ ID NO: 50230 - DNA, 20 bp, synthetic construct
  source 1..20: mol_type = other DNA
ggaggaggaggaagtagagg

SEQ ID NO: 50231 - DNA, 20 bp, synthetic construct
  source 1..20: mol_type = other DNA
ctttgtactggggccagttg

SEQ ID NO: 50232 - DNA, 20 bp, synthetic construct
  source 1..20: mol_type = other DNA
accccccccagaggaggctg

SEQ ID NO: 50233 - DNA, 20 bp, synthetic construct
  source 1..20: mol_type = other DNA
caagcaccagctgctggagc

SEQ ID NO: 50234 - DNA, 20 bp, synthetic construct
  source 1..20: mol_type = other DNA
ttaccagccttgatggcagc

SEQ ID NO: 50235 - DNA, 20 bp, synthetic construct
  source 1..20: mol_type = other DNA
tcctcaggtcacaccccaag

SEQ ID NO: 50236 - DNA, 20 bp, synthetic construct
  source 1..20: mol_type = other DNA
agggcgggtcacggcctggt

SEQ ID NO: 50237 - DNA, 20 bp, synthetic construct
  source 1..20: mol_type = other DNA
agaggaggaggcggaggcgg

SEQ ID NO: 50238 - DNA, 20 bp, synthetic construct
  source 1..20: mol_type = other DNA
agacccctggaggtccaggg

SEQ ID NO: 50239 - DNA, 20 bp, synthetic construct
  source 1..20: mol_type = other DNA
ctccagaatggagtcgcagg

SEQ ID NO: 50240 - DNA, 20 bp, synthetic construct
  source 1..20: mol_type = other DNA
gtggcactgggagcacttgt

SEQ ID NO: 50241 - DNA, 20 bp, synthetic construct
  source 1..20: mol_type = other DNA
gaagctttcaaaaagtcttc

SEQ ID NO: 50242 - DNA, 20 bp, synthetic construct
  source 1..20: mol_type = other DNA
tgaatccagcacactctccc

SEQ ID NO: 50243 - DNA, 20 bp, synthetic construct
  source 1..20: mol_type = other DNA
aaacactacctggtacacac

SEQ ID NO: 50244 - DNA, 20 bp, synthetic construct
  source 1..20: mol_type = other DNA
tgtggcagacctacagtgta

SEQ ID NO: 50245 - DNA, 20 bp, synthetic construct
  source 1..20: mol_type = other DNA
ttgcaagtctgacatttgaa

SEQ ID NO: 50246 - DNA, 20 bp, synthetic construct
  source 1..20: mol_type = other DNA
ggaatggactcctctcctca

SEQ ID NO: 50247 - DNA, 20 bp, synthetic construct
  source 1..20: mol_type = other DNA
gaaacactacctggtacaca

SEQ ID NO: 50248 - DNA, 20 bp, synthetic construct
  source 1..20: mol_type = other DNA
agcacttgtggggccgctcc

SEQ ID NO: 50249 - DNA, 20 bp, synthetic construct
  source 1..20: mol_type = other DNA
caaactgggtgaacttggca

SEQ ID NO: 50250 - DNA, 20 bp, synthetic construct
  source 1..20: mol_type = other DNA
caggtgggtcttgagattgc

SEQ ID NO: 50251 - DNA, 20 bp, synthetic construct
  source 1..20: mol_type = other DNA
gaaccttgaggctacagaga

SEQ ID NO: 50252 - DNA, 20 bp, synthetic construct
  source 1..20: mol_type = other DNA
gattcgggtcagatcttcca

SEQ ID NO: 50253 - DNA, 20 bp, synthetic construct
  source 1..20: mol_type = other DNA
ctgcgcacctggcattcatg

SEQ ID NO: 50254 - DNA, 20 bp, synthetic construct
  source 1..20: mol_type = other DNA
gatgtagttcttgtggcact

SEQ ID NO: 50255 - DNA, 20 bp, synthetic construct
  source 1..20: mol_type = other DNA
attcgggtcagatcttccaa

SEQ ID NO: 50256 - DNA, 20 bp, synthetic construct
  source 1..20: mol_type = other DNA
caagaagttcctggttggca

SEQ ID NO: 50257 - DNA, 20 bp, synthetic construct
  source 1..20: mol_type = other DNA
gggcacaccttgcattggta

SEQ ID NO: 50258 - DNA, 20 bp, synthetic construct
  source 1..20: mol_type = other DNA
tgtgatctctgtagtggaga

SEQ ID NO: 50259 - DNA, 20 bp, synthetic construct
  source 1..20: mol_type = other DNA
tgggaatacggtgtcccctg

SEQ ID NO: 50260 - DNA, 20 bp, synthetic construct
  source 1..20: mol_type = other DNA
ttaatgaagagaaaagcaac

SEQ ID NO: 50261 - DNA, 20 bp, synthetic construct
  source 1..20: mol_type = other DNA
cctccaaaaatatttcctgt

SEQ ID NO: 50262 - DNA, 20 bp, synthetic construct
  source 1..20: mol_type = other DNA
ctaccttcagattggagagc

SEQ ID NO: 50263 - DNA, 20 bp, synthetic construct
  source 1..20: mol_type = other DNA
gtccacctgagagtgcacag

SEQ ID NO: 50264 - DNA, 20 bp, synthetic construct
  source 1..20: mol_type = other DNA
ggatgtagttcttgtggcac

SEQ ID NO: 50265 - DNA, 20 bp, synthetic construct
  source 1..20: mol_type = other DNA
agagaaaccataccaatgca

SEQ ID NO: 50266 - DNA, 20 bp, synthetic construct
  source 1..20: mol_type = other DNA
caacctccgggctccatctg

SEQ ID NO: 50267 - DNA, 20 bp, synthetic construct
  source 1..20: mol_type = other DNA
tccagaatggagtcgcaggt

SEQ ID NO: 50268 - DNA, 20 bp, synthetic construct
  source 1..20: mol_type = other DNA
acccacctgcgactccattc

SEQ ID NO: 50269 - DNA, 20 bp, synthetic construct
  source 1..20: mol_type = other DNA
agaaaagagaaagaagaaac

SEQ ID NO: 50270 - DNA, 20 bp, synthetic construct
  source 1..20: mol_type = other DNA
gcacaagcgtctgcacaccc

SEQ ID NO: 50271 - DNA, 20 bp, synthetic construct
  source 1..20: mol_type = other DNA
tgtgcactctcaggtggacc

SEQ ID NO: 50272 - DNA, 20 bp, synthetic construct
  source 1..20: mol_type = other DNA
ttctggcagaggggcccgga

SEQ ID NO: 50273 - DNA, 20 bp, synthetic construct
  source 1..20: mol_type = other DNA
gtggcagacctacagtgtag

SEQ ID NO: 50274 - DNA, 20 bp, synthetic construct
  source 1..20: mol_type = other DNA
acgaggggatgaaagctggc

SEQ ID NO: 50275 - DNA, 20 bp, synthetic construct
  source 1..20: mol_type = other DNA
tgcacaagcgtctgcacacc

SEQ ID NO: 50276 - DNA, 20 bp, synthetic construct
  source 1..20: mol_type = other DNA
gtgcactctcaggtggacct

SEQ ID NO: 50277 - DNA, 20 bp, synthetic construct
  source 1..20: mol_type = other DNA
tggcagggcacaccttgcat

SEQ ID NO: 50278 - DNA, 20 bp, synthetic construct
  source 1..20: mol_type = other DNA
ttgtggcagacctacagtgt

SEQ ID NO: 50279 - DNA, 20 bp, synthetic construct
  source 1..20: mol_type = other DNA
ttgacctttacaggtaccag

SEQ ID NO: 50280 - DNA, 20 bp, synthetic construct
  source 1..20: mol_type = other DNA
agcgagctcgggagagaagt

SEQ ID NO: 50281 - DNA, 20 bp, synthetic construct
  source 1..20: mol_type = other DNA
gcttttctcccgtgtgtacc

SEQ ID NO: 50282 - DNA, 20 bp, synthetic construct
  source 1..20: mol_type = other DNA
acctaaacaggaaaaaacac

SEQ ID NO: 50283 - DNA, 20 bp, synthetic construct
  source 1..20: mol_type = other DNA
agatcttccaagggcagccc

SEQ ID NO: 50284 - DNA, 20 bp, synthetic construct
  source 1..20: mol_type = other DNA
agaaaagccacatgaatgcc

SEQ ID NO: 50285 - DNA, 20 bp, synthetic construct
  source 1..20: mol_type = other DNA
ccatctgcagggttttctac

SEQ ID NO: 50286 - DNA, 20 bp, synthetic construct
  source 1..20: mol_type = other DNA
aggaggtggagaaggagaag

SEQ ID NO: 50287 - DNA, 20 bp, synthetic construct
  source 1..20: mol_type = other DNA
tagcaacccctgcccctgcc

SEQ ID NO: 50288 - DNA, 20 bp, synthetic construct
  source 1..20: mol_type = other DNA
ttctgtcgtagaagagaatg

SEQ ID NO: 50289 - DNA, 20 bp, synthetic construct
  source 1..20: mol_type = other DNA
tacctcagccagggtctcgg

SEQ ID NO: 50290 - DNA, 20 bp, synthetic construct
  source 1..20: mol_type = other DNA
gtacggtaggaaggagggga

SEQ ID NO: 50291 - DNA, 20 bp, synthetic construct
  source 1..20: mol_type = other DNA
taactgtgatgtgattgaga

SEQ ID NO: 50292 - DNA, 20 bp, synthetic construct
  source 1..20: mol_type = other DNA
acaccgctggataaatccag

SEQ ID NO: 50293 - DNA, 20 bp, synthetic construct
  source 1..20: mol_type = other DNA
agaagaatttattgtgtctt

SEQ ID NO: 50294 - DNA, 20 bp, synthetic construct
  source 1..20: mol_type = other DNA
aagtactgtgggaaagcctt

SEQ ID NO: 50295 - DNA, 20 bp, synthetic construct
  source 1..20: mol_type = other DNA
tcaccagcatggagtttgtc

SEQ ID NO: 50296 - DNA, 20 bp, synthetic construct
  source 1..20: mol_type = other DNA
agatggtaggcaactgccaa

SEQ ID NO: 50297 - DNA, 20 bp, synthetic construct
  source 1..20: mol_type = other DNA
gattcagatgctgaggctca

SEQ ID NO: 50298 - DNA, 20 bp, synthetic construct
  source 1..20: mol_type = other DNA
cagaaggatttaaatattga

SEQ ID NO: 50299 - DNA, 20 bp, synthetic construct
  source 1..20: mol_type = other DNA
gaagcagaaacacgacgggc

SEQ ID NO: 50300 - DNA, 20 bp, synthetic construct
  source 1..20: mol_type = other DNA
tttgattatatctgtaagaa

SEQ ID NO: 50301 - DNA, 20 bp, synthetic construct
  source 1..20: mol_type = other DNA
tacttctggtgcagcatagt

SEQ ID NO: 50302 - DNA, 20 bp, synthetic construct
  source 1..20: mol_type = other DNA
atcatcttatcattgacaat

SEQ ID NO: 50303 - DNA, 20 bp, synthetic construct
  source 1..20: mol_type = other DNA
tcactttctggctctctcac

SEQ ID NO: 50304 - DNA, 20 bp, synthetic construct
  source 1..20: mol_type = other DNA
acacatttcaaaaaaatcca

SEQ ID NO: 50305 - DNA, 20 bp, synthetic construct
  source 1..20: mol_type = other DNA
caataactttgtagccatcc

SEQ ID NO: 50306 - DNA, 20 bp, synthetic construct
  source 1..20: mol_type = other DNA
ctgcttctaggcaccagaga

SEQ ID NO: 50307 - DNA, 20 bp, synthetic construct
  source 1..20: mol_type = other DNA
tctccccccacatctcctcc

SEQ ID NO: 50308 - DNA, 20 bp, synthetic construct
  source 1..20: mol_type = other DNA
tgtgttcataccagacacat

SEQ ID NO: 50309 - DNA, 20 bp, synthetic construct
  source 1..20: mol_type = other DNA
gtatgaagggagcttccacc

SEQ ID NO: 50310 - DNA, 20 bp, synthetic construct
  source 1..20: mol_type = other DNA
ttcatagataagaaccccca

SEQ ID NO: 50311 - DNA, 20 bp, synthetic construct
  source 1..20: mol_type = other DNA
aaggctataaatacctcggc

SEQ ID NO: 50312 - DNA, 20 bp, synthetic construct
  source 1..20: mol_type = other DNA
tcagtttcaccacctgggaa

SEQ ID NO: 50313 - DNA, 20 bp, synthetic construct
  source 1..20: mol_type = other DNA
ggccgcgtagaaacgggcat

SEQ ID NO: 50314 - DNA, 20 bp, synthetic construct
  source 1..20: mol_type = other DNA
cttgaggttcccaaagcgct

SEQ ID NO: 50315 - DNA, 20 bp, synthetic construct
  source 1..20: mol_type = other DNA
gcttggtgagatctacctgc

SEQ ID NO: 50316 - DNA, 20 bp, synthetic construct
  source 1..20: mol_type = other DNA
gggagatgttctcacaccta

SEQ ID NO: 50317 - DNA, 20 bp, synthetic construct
  source 1..20: mol_type = other DNA
tgccgcacaaggtccaagtg

SEQ ID NO: 50318 - DNA, 20 bp, synthetic construct
  source 1..20: mol_type = other DNA
acgatatcaagaaccacaag

SEQ ID NO: 50319 - DNA, 20 bp, synthetic construct
  source 1..20: mol_type = other DNA
tcctcgacaaacagaaggtg

SEQ ID NO: 50320 - DNA, 20 bp, synthetic construct
  source 1..20: mol_type = other DNA
caaagttactcgtatcccca

SEQ ID NO: 50321 - DNA, 20 bp, synthetic construct
  source 1..20: mol_type = other DNA
cctgggaagggaaggagggg

SEQ ID NO: 50322 - DNA, 20 bp, synthetic construct
  source 1..20: mol_type = other DNA
ctgtttcagtttcaccacct

SEQ ID NO: 50323 - DNA, 20 bp, synthetic construct
  source 1..20: mol_type = other DNA
ttcagtttcaccacctggga

SEQ ID NO: 50324 - DNA, 20 bp, synthetic construct
  source 1..20: mol_type = other DNA
gccgtggactggtgggccct

SEQ ID NO: 50325 - DNA, 20 bp, synthetic construct
  source 1..20: mol_type = other DNA
actatgaggaagaagaaatc

SEQ ID NO: 50326 - DNA, 20 bp, synthetic construct
  source 1..20: mol_type = other DNA
accctcggcacgggctcctt

SEQ ID NO: 50327 - DNA, 20 bp, synthetic construct
  source 1..20: mol_type = other DNA
tcaaagttactcgtatcccc

SEQ ID NO: 50328 - DNA, 20 bp, synthetic construct
  source 1..20: mol_type = other DNA
tggtgagatctacctgcagg

SEQ ID NO: 50329 - DNA, 20 bp, synthetic construct
  source 1..20: mol_type = other DNA
tggtcaaatccacctgcagc

SEQ ID NO: 50330 - DNA, 20 bp, synthetic construct
  source 1..20: mol_type = other DNA
tgggcaaccagtgttgggga

SEQ ID NO: 50331 - DNA, 20 bp, synthetic construct
  source 1..20: mol_type = other DNA
ggagaacttgctttgattta

SEQ ID NO: 50332 - DNA, 20 bp, synthetic construct
  source 1..20: mol_type = other DNA
ccccttcatcacctaaaaga

SEQ ID NO: 50333 - DNA, 20 bp, synthetic construct
  source 1..20: mol_type = other DNA
gcaaccagtgttggggaagg

SEQ ID NO: 50334 - DNA, 20 bp, synthetic construct
  source 1..20: mol_type = other DNA
ggagaaggtaaaaataaatg

SEQ ID NO: 50335 - DNA, 20 bp, synthetic construct
  source 1..20: mol_type = other DNA
ggggccacgagcaacaactg

SEQ ID NO: 50336 - DNA, 20 bp, synthetic construct
  source 1..20: mol_type = other DNA
ttgtggtgcagggagaacca

SEQ ID NO: 50337 - DNA, 20 bp, synthetic construct
  source 1..20: mol_type = other DNA
caaccagtgttggggaagga

SEQ ID NO: 50338 - DNA, 20 bp, synthetic construct
  source 1..20: mol_type = other DNA
ggacttggaaggtaggctgt

SEQ ID NO: 50339 - DNA, 20 bp, synthetic construct
  source 1..20: mol_type = other DNA
ataatcactcaggtgagtga

SEQ ID NO: 50340 - DNA, 20 bp, synthetic construct
  source 1..20: mol_type = other DNA
ctggatgtggctcatgccgg

SEQ ID NO: 50341 - DNA, 20 bp, synthetic construct
  source 1..20: mol_type = other DNA
ttgagaaagctgttcctgca

SEQ ID NO: 50342 - DNA, 20 bp, synthetic construct
  source 1..20: mol_type = other DNA
ttgaacttgtgcttgctcct

SEQ ID NO: 50343 - DNA, 20 bp, synthetic construct
  source 1..20: mol_type = other DNA
gggagttttggaaaggtaag

SEQ ID NO: 50344 - DNA, 20 bp, synthetic construct
  source 1..20: mol_type = other DNA
acaacaaggaatgacttcat

SEQ ID NO: 50345 - DNA, 20 bp, synthetic construct
  source 1..20: mol_type = other DNA
cggatttagtgtggagcgga

SEQ ID NO: 50346 - DNA, 20 bp, synthetic construct
  source 1..20: mol_type = other DNA
ccagggtccttaccactgtc

SEQ ID NO: 50347 - DNA, 20 bp, synthetic construct
  source 1..20: mol_type = other DNA
gctccacactaaatccgcag

SEQ ID NO: 50348 - DNA, 20 bp, synthetic construct
  source 1..20: mol_type = other DNA
tctaacttcagatccctgca

SEQ ID NO: 50349 - DNA, 20 bp, synthetic construct
  source 1..20: mol_type = other DNA
ccacagtgatcgcagaaggt

SEQ ID NO: 50350 - DNA, 20 bp, synthetic construct
  source 1..20: mol_type = other DNA
tagaatctgcaaaagaaaac

SEQ ID NO: 50351 - DNA, 20 bp, synthetic construct
  source 1..20: mol_type = other DNA
catctggtaggtgccgggcc

SEQ ID NO: 50352 - DNA, 20 bp, synthetic construct
  source 1..20: mol_type = other DNA
agggattccagtgccaaggt

SEQ ID NO: 50353 - DNA, 20 bp, synthetic construct
  source 1..20: mol_type = other DNA
cttaaacctgaagggagaca

SEQ ID NO: 50354 - DNA, 20 bp, synthetic construct
  source 1..20: mol_type = other DNA
tcattggcctcacttccttc

SEQ ID NO: 50355 - DNA, 20 bp, synthetic construct
  source 1..20: mol_type = other DNA
aaggcagctttggcaaggta

SEQ ID NO: 50356 - DNA, 20 bp, synthetic construct
  source 1..20: mol_type = other DNA
tctgttcttcttacagagta

SEQ ID NO: 50357 - DNA, 20 bp, synthetic construct
  source 1..20: mol_type = other DNA
acaggcaccctttgaagggg

SEQ ID NO: 50358 - DNA, 20 bp, synthetic construct
  source 1..20: mol_type = other DNA
taaaatcggtcagtttcatc

SEQ ID NO: 50359 - DNA, 20 bp, synthetic construct
  source 1..20: mol_type = other DNA
tgcactccacgtcatcatct

SEQ ID NO: 50360 - DNA, 20 bp, synthetic construct
  source 1..20: mol_type = other DNA
tgctaaaaaccttgtaccta

SEQ ID NO: 50361 - DNA, 20 bp, synthetic construct
  source 1..20: mol_type = other DNA
gtgatggagttcctcaacgg

SEQ ID NO: 50362 - DNA, 20 bp, synthetic construct
  source 1..20: mol_type = other DNA
ttgtgatggagttcctcaac

SEQ ID NO: 50363 - DNA, 20 bp, synthetic construct
  source 1..20: mol_type = other DNA
atctcagcggcataaaacct

SEQ ID NO: 50364 - DNA, 20 bp, synthetic construct
  source 1..20: mol_type = other DNA
gccgcagtggtcacagaagg

SEQ ID NO: 50365 - DNA, 20 bp, synthetic construct
  source 1..20: mol_type = other DNA
cgcatagactgtttgcaatc

SEQ ID NO: 50366 - DNA, 20 bp, synthetic construct
  source 1..20: mol_type = other DNA
aggcctcagccaaaagcttc

SEQ ID NO: 50367 - DNA, 20 bp, synthetic construct
  source 1..20: mol_type = other DNA
actggtccatggagtcgatg

SEQ ID NO: 50368 - DNA, 20 bp, synthetic construct
  source 1..20: mol_type = other DNA
tctggaaggtgcagatgagg

SEQ ID NO: 50369 - DNA, 20 bp, synthetic construct
  source 1..20: mol_type = other DNA
tggcctgtttgatggctccg

SEQ ID NO: 50370 - DNA, 20 bp, synthetic construct
  source 1..20: mol_type = other DNA
ggccttgaaccaagtcaccc

SEQ ID NO: 50371 - DNA, 20 bp, synthetic construct
  source 1..20: mol_type = other DNA
tatctcagcggcataaaacc

SEQ ID NO: 50372 - DNA, 20 bp, synthetic construct
  source 1..20: mol_type = other DNA
atgataaaggaatcatctat

SEQ ID NO: 50373 - DNA, 20 bp, synthetic construct
  source 1..20: mol_type = other DNA
cctatggcaaagcaaaagga

SEQ ID NO: 50374 - DNA, 20 bp, synthetic construct
  source 1..20: mol_type = other DNA
agatgattcctttatcatgg

SEQ ID NO: 50375 - DNA, 20 bp, synthetic construct
  source 1..20: mol_type = other DNA
aatgcaccatgaccgagaaa

SEQ ID NO: 50376 - DNA, 20 bp, synthetic construct
  source 1..20: mol_type = other DNA
catagccctttggcgcttcc

SEQ ID NO: 50377 - DNA, 20 bp, synthetic construct
  source 1..20: mol_type = other DNA
gatttgcaatggtgtcacca

SEQ ID NO: 50378 - DNA, 20 bp, synthetic construct
  source 1..20: mol_type = other DNA
cactgtggctcactgctctg

SEQ ID NO: 50379 - DNA, 20 bp, synthetic construct
  source 1..20: mol_type = other DNA
gcagcgtttatggacgacac

SEQ ID NO: 50380 - DNA, 20 bp, synthetic construct
  source 1..20: mol_type = other DNA
gtagctatatattaaaagga

SEQ ID NO: 50381 - DNA, 20 bp, synthetic construct
  source 1..20: mol_type = other DNA
aatattgttttggcaagtac

SEQ ID NO: 50382 - DNA, 20 bp, synthetic construct
  source 1..20: mol_type = other DNA
cgaggttggagaaatatttc

SEQ ID NO: 50383 - DNA, 20 bp, synthetic construct
  source 1..20: mol_type = other DNA
tgaacttgtgtccattgatc

SEQ ID NO: 50384 - DNA, 20 bp, synthetic construct
  source 1..20: mol_type = other DNA
ccatattcggtctgtgcaga

SEQ ID NO: 50385 - DNA, 20 bp, synthetic construct
  source 1..20: mol_type = other DNA
ccaaattccccagaaatatt

SEQ ID NO: 50386 - DNA, 20 bp, synthetic construct
  source 1..20: mol_type = other DNA
tcgtcacaattgaatgtggg

SEQ ID NO: 50387 - DNA, 20 bp, synthetic construct
  source 1..20: mol_type = other DNA
tctcctggacaaggcatccc

SEQ ID NO: 50388 - DNA, 20 bp, synthetic construct
  source 1..20: mol_type = other DNA
tctgtcggcaaatgacagcc

SEQ ID NO: 50389 - DNA, 20 bp, synthetic construct
  source 1..20: mol_type = other DNA
gggtgccatcaagcaggcaa

SEQ ID NO: 50390 - DNA, 20 bp, synthetic construct
  source 1..20: mol_type = other DNA
ttacctgtagactattcctt

SEQ ID NO: 50391 - DNA, 20 bp, synthetic construct
  source 1..20: mol_type = other DNA
acaatcccttttacccacgg

SEQ ID NO: 50392 - DNA, 20 bp, synthetic construct
  source 1..20: mol_type = other DNA
gctgttgatcagtgctctgt

SEQ ID NO: 50393 - DNA, 20 bp, synthetic construct
  source 1..20: mol_type = other DNA
tctttgctttgcatcagcgc

SEQ ID NO: 50394 - DNA, 20 bp, synthetic construct
  source 1..20: mol_type = other DNA
ttttgatgcccatatcaaca

SEQ ID NO: 50395 - DNA, 20 bp, synthetic construct
  source 1..20: mol_type = other DNA
cgaccttctgtgaacactgt

SEQ ID NO: 50396 - DNA, 20 bp, synthetic construct
  source 1..20: mol_type = other DNA
aaaagttcctgaacatattc

SEQ ID NO: 50397 - DNA, 20 bp, synthetic construct
  source 1..20: mol_type = other DNA
gtagtcaggtgtcccacaga

SEQ ID NO: 50398 - DNA, 20 bp, synthetic construct
  source 1..20: mol_type = other DNA
ggaaaacctcttttttgtga

SEQ ID NO: 50399 - DNA, 20 bp, synthetic construct
  source 1..20: mol_type = other DNA
cactgacttgctgaggggag

SEQ ID NO: 50400 - DNA, 20 bp, synthetic construct
  source 1..20: mol_type = other DNA
tggggctgcagactccagcc

SEQ ID NO: 50401 - DNA, 20 bp, synthetic construct
  source 1..20: mol_type = other DNA
agacaggagagagcaggggc

SEQ ID NO: 50402 - DNA, 20 bp, synthetic construct
  source 1..20: mol_type = other DNA
aggctacctcggggagatcc

SEQ ID NO: 50403 - DNA, 20 bp, synthetic construct
  source 1..20: mol_type = other DNA
ggtgagtgggggcttgggac

SEQ ID NO: 50404 - DNA, 20 bp, synthetic construct
  source 1..20: mol_type = other DNA
tgcagcagggggacgtggac

SEQ ID NO: 50405 - DNA, 20 bp, synthetic construct
  source 1..20: mol_type = other DNA
aggccacatggggcagaagc

SEQ ID NO: 50406 - DNA, 20 bp, synthetic construct
  source 1..20: mol_type = other DNA
ccagttggcaggtcctgggg

SEQ ID NO: 50407 - DNA, 20 bp, synthetic construct
  source 1..20: mol_type = other DNA
gcgaaggccacgatgttgac

SEQ ID NO: 50408 - DNA, 20 bp, synthetic construct
  source 1..20: mol_type = other DNA
actggggttagggcgagggg

SEQ ID NO: 50409 - DNA, 20 bp, synthetic construct
  source 1..20: mol_type = other DNA
acaatattgatgatgtagta

SEQ ID NO: 50410 - DNA, 20 bp, synthetic construct
  source 1..20: mol_type = other DNA
gtaaatacattcttcatacc

SEQ ID NO: 50411 - DNA, 20 bp, synthetic construct
  source 1..20: mol_type = other DNA
aatcccatagcaataatgtt

SEQ ID NO: 50412 - DNA, 20 bp, synthetic construct
  source 1..20: mol_type = other DNA
aaaaggatattgtgcaactg

SEQ ID NO: 50413 - DNA, 20 bp, synthetic construct
  source 1..20: mol_type = other DNA
caagttccgccactgaacat

SEQ ID NO: 50414 - DNA, 20 bp, synthetic construct
  source 1..20: mol_type = other DNA
tcatctggattatagaccag

SEQ ID NO: 50415 - DNA, 20 bp, synthetic construct
  source 1..20: mol_type = other DNA
ccacaaactgaggatctgca

SEQ ID NO: 50416 - DNA, 20 bp, synthetic construct
  source 1..20: mol_type = other DNA
ttgatgatggctgtcatgtc

SEQ ID NO: 50417 - DNA, 20 bp, synthetic construct
  source 1..20: mol_type = other DNA
ccaaatttaattgcagaggt

SEQ ID NO: 50418 - DNA, 20 bp, synthetic construct
  source 1..20: mol_type = other DNA
tgggaatagttactccctgg

SEQ ID NO: 50419 - DNA, 20 bp, synthetic construct
  source 1..20: mol_type = other DNA
ttgataagttctagctgtgg

SEQ ID NO: 50420 - DNA, 20 bp, synthetic construct
  source 1..20: mol_type = other DNA
ccaattcaggacccacacga

SEQ ID NO: 50421 - DNA, 20 bp, synthetic construct
  source 1..20: mol_type = other DNA
gagtaactattcccagtcag

SEQ ID NO: 50422 - DNA, 20 bp, synthetic construct
  source 1..20: mol_type = other DNA
gaaactattccaatgttcag

SEQ ID NO: 50423 - DNA, 20 bp, synthetic construct
  source 1..20: mol_type = other DNA
ccatgcagatcctcagtttg

SEQ ID NO: 50424 - DNA, 20 bp, synthetic construct
  source 1..20: mol_type = other DNA
tgatgatggctgtcatgtct

SEQ ID NO: 50425 - DNA, 20 bp, synthetic construct
  source 1..20: mol_type = other DNA
ttagcatcttgttctgtttg

SEQ ID NO: 50426 - DNA, 20 bp, synthetic construct
  source 1..20: mol_type = other DNA
aaagctggaaagggacgaac

SEQ ID NO: 50427 - DNA, 20 bp, synthetic construct
  source 1..20: mol_type = other DNA
tgtgcatatttattacatcg

SEQ ID NO: 50428 - DNA, 20 bp, synthetic construct
  source 1..20: mol_type = other DNA
tggtcaagatcttcacaaaa

SEQ ID NO: 50429 - DNA, 20 bp, synthetic construct
  source 1..20: mol_type = other DNA
tacttccccatagaaatcta

SEQ ID NO: 50430 - DNA, 20 bp, synthetic construct
  source 1..20: mol_type = other DNA
cacacacaggtaacggctga

SEQ ID NO: 50431 - DNA, 20 bp, synthetic construct
  source 1..20: mol_type = other DNA
agaggagccgtcaaatccag

SEQ ID NO: 50432 - DNA, 20 bp, synthetic construct
  source 1..20: mol_type = other DNA
gtacttcacaaaaacagtag

SEQ ID NO: 50433 - DNA, 20 bp, synthetic construct
  source 1..20: mol_type = other DNA
gttctagctgtggtgggtta

SEQ ID NO: 50434 - DNA, 20 bp, synthetic construct
  source 1..20: mol_type = other DNA
accgccaaatttaattgcag

SEQ ID NO: 50435 - DNA, 20 bp, synthetic construct
  source 1..20: mol_type = other DNA
actttgatatcaccacacac

SEQ ID NO: 50436 - DNA, 20 bp, synthetic construct
  source 1..20: mol_type = other DNA
tacacatagcgcctctgact

SEQ ID NO: 50437 - DNA, 20 bp, synthetic construct
  source 1..20: mol_type = other DNA
tgataagttctagctgtggt

SEQ ID NO: 50438 - DNA, 20 bp, synthetic construct
  source 1..20: mol_type = other DNA
aatatatcttcacctttagc

SEQ ID NO: 50439 - DNA, 20 bp, synthetic construct
  source 1..20: mol_type = other DNA
ccacacacaggtaacggctg

SEQ ID NO: 50440 - DNA, 20 bp, synthetic construct
  source 1..20: mol_type = other DNA
ctgtcatgtctgggagcctg

SEQ ID NO: 50441 - DNA, 20 bp, synthetic construct
  source 1..20: mol_type = other DNA
atacacatagcgcctctgac

SEQ ID NO: 50442 - DNA, 20 bp, synthetic construct
  source 1..20: mol_type = other DNA
caattcaggacccacacgac

SEQ ID NO: 50443 - DNA, 20 bp, synthetic construct
  source 1..20: mol_type = other DNA
aaaaggagatatcaagagga

SEQ ID NO: 50444 - DNA, 20 bp, synthetic construct
  source 1..20: mol_type = other DNA
atttccagggctgggaacgc

SEQ ID NO: 50445 - DNA, 20 bp, synthetic construct
  source 1..20: mol_type = other DNA
aaacaaaaggagatatcaag

SEQ ID NO: 50446 - DNA, 20 bp, synthetic construct
  source 1..20: mol_type = other DNA
gctaacgatctctttgatga

SEQ ID NO: 50447 - DNA, 20 bp, synthetic construct
  source 1..20: mol_type = other DNA
atatcaccacacacaggtaa

SEQ ID NO: 50448 - DNA, 20 bp, synthetic construct
  source 1..20: mol_type = other DNA
acgccttcaagtctttctgc

SEQ ID NO: 50449 - DNA, 20 bp, synthetic construct
  source 1..20: mol_type = other DNA
aattcactgtaaagctggaa

SEQ ID NO: 50450 - DNA, 20 bp, synthetic construct
  source 1..20: mol_type = other DNA
attcactgtaaagctggaaa

SEQ ID NO: 50451 - DNA, 20 bp, synthetic construct
  source 1..20: mol_type = other DNA
ggtttgataagttctagctg

SEQ ID NO: 50452 - DNA, 20 bp, synthetic construct
  source 1..20: mol_type = other DNA
gactgggaatagttactccc

SEQ ID NO: 50453 - DNA, 20 bp, synthetic construct
  source 1..20: mol_type = other DNA
acagattgtatatcttgtaa

SEQ ID NO: 50454 - DNA, 20 bp, synthetic construct
  source 1..20: mol_type = other DNA
acctctgcaattaaatttgg

SEQ ID NO: 50455 - DNA, 20 bp, synthetic construct
  source 1..20: mol_type = other DNA
ttgacctgtatccatttctg

SEQ ID NO: 50456 - DNA, 20 bp, synthetic construct
  source 1..20: mol_type = other DNA
cctcagccgttacctgtgtg

SEQ ID NO: 50457 - DNA, 20 bp, synthetic construct
  source 1..20: mol_type = other DNA
actattccaatgttcagtgg

SEQ ID NO: 50458 - DNA, 20 bp, synthetic construct
  source 1..20: mol_type = other DNA
gtttgtggtctgccagctaa

SEQ ID NO: 50459 - DNA, 20 bp, synthetic construct
  source 1..20: mol_type = other DNA
ttggtcaagatcttcacaaa

SEQ ID NO: 50460 - DNA, 20 bp, synthetic construct
  source 1..20: mol_type = other DNA
ggtgctgcgttatgtagctc

SEQ ID NO: 50461 - DNA, 20 bp, synthetic construct
  source 1..20: mol_type = other DNA
ggctccagtccttgtggcgc

SEQ ID NO: 50462 - DNA, 20 bp, synthetic construct
  source 1..20: mol_type = other DNA
gtgatgccatccttctccag

SEQ ID NO: 50463 - DNA, 20 bp, synthetic construct
  source 1..20: mol_type = other DNA
agactggctgagcctggtga

SEQ ID NO: 50464 - DNA, 20 bp, synthetic construct
  source 1..20: mol_type = other DNA
gcactgcagtgcaccacaac

SEQ ID NO: 50465 - DNA, 20 bp, synthetic construct
  source 1..20: mol_type = other DNA
caggtctggaaccttctgtc

SEQ ID NO: 50466 - DNA, 20 bp, synthetic construct
  source 1..20: mol_type = other DNA
cgtcatgctcaacagagtga

SEQ ID NO: 50467 - DNA, 20 bp, synthetic construct
  source 1..20: mol_type = other DNA
tccttcacccactggtgatt

SEQ ID NO: 50468 - DNA, 20 bp, synthetic construct
  source 1..20: mol_type = other DNA
agtccctgtaagtatccacg

SEQ ID NO: 50469 - DNA, 20 bp, synthetic construct
  source 1..20: mol_type = other DNA
gtaaatggccgcccagctcc

SEQ ID NO: 50470 - DNA, 20 bp, synthetic construct
  source 1..20: mol_type = other DNA
tacatttccactataccaca

SEQ ID NO: 50471 - DNA, 20 bp, synthetic construct
  source 1..20: mol_type = other DNA
gactccaaagtcaggccatg

SEQ ID NO: 50472 - DNA, 20 bp, synthetic construct
  source 1..20: mol_type = other DNA
gctggtaaggaggccctcgc

SEQ ID NO: 50473 - DNA, 20 bp, synthetic construct
  source 1..20: mol_type = other DNA
ccaggattcgtttgggtggc

SEQ ID NO: 50474 - DNA, 20 bp, synthetic construct
  source 1..20: mol_type = other DNA
ccgcaccctacggcatcgaa

SEQ ID NO: 50475 - DNA, 20 bp, synthetic construct
  source 1..20: mol_type = other DNA
aggtgccaaattcatcatgg

SEQ ID NO: 50476 - DNA, 20 bp, synthetic construct
  source 1..20: mol_type = other DNA
gtgtgggagcagaaaagcag

SEQ ID NO: 50477 - DNA, 20 bp, synthetic construct
  source 1..20: mol_type = other DNA
tgctggtaaggaggccctcg

SEQ ID NO: 50478 - DNA, 20 bp, synthetic construct
  source 1..20: mol_type = other DNA
actgcagtgcaggcatcggc

SEQ ID NO: 50479 - DNA, 20 bp, synthetic construct
  source 1..20: mol_type = other DNA
gctatgtgttgctgttgaac

SEQ ID NO: 50480 - DNA, 20 bp, synthetic construct
  source 1..20: mol_type = other DNA
agaatgaggctggtgattca

SEQ ID NO: 50481 - DNA, 20 bp, synthetic construct
  source 1..20: mol_type = other DNA
tgtccatctgaaagccagag

SEQ ID NO: 50482 - DNA, 20 bp, synthetic construct
  source 1..20: mol_type = other DNA
agatcgacaagtccgggagc

SEQ ID NO: 50483 - DNA, 20 bp, synthetic construct
  source 1..20: mol_type = other DNA
cactctacatgggaagtcac

SEQ ID NO: 50484 - DNA, 20 bp, synthetic construct
  source 1..20: mol_type = other DNA
agaaatgaggaagtttcgga

SEQ ID NO: 50485 - DNA, 20 bp, synthetic construct
  source 1..20: mol_type = other DNA
gaaatgaggaagtttcggat

SEQ ID NO: 50486 - DNA, 20 bp, synthetic construct
  source 1..20: mol_type = other DNA
ccaggtaggagaagcgcagc

SEQ ID NO: 50487 - DNA, 20 bp, synthetic construct
  source 1..20: mol_type = other DNA
ggagccgtcactgcccgaga

SEQ ID NO: 50488 - DNA, 20 bp, synthetic construct
  source 1..20: mol_type = other DNA
tgaccgcatgtgttaggcaa

SEQ ID NO: 50489 - DNA, 20 bp, synthetic construct
  source 1..20: mol_type = other DNA
acttctctacagccgaaaag

SEQ ID NO: 50490 - DNA, 20 bp, synthetic construct
  source 1..20: mol_type = other DNA
ctggaccaactcagccaaag

SEQ ID NO: 50491 - DNA, 20 bp, synthetic construct
  source 1..20: mol_type = other DNA
cagcactacttactctgcac

SEQ ID NO: 50492 - DNA, 20 bp, synthetic construct
  source 1..20: mol_type = other DNA
agagtaaatgtgtcaaatac

SEQ ID NO: 50493 - DNA, 20 bp, synthetic construct
  source 1..20: mol_type = other DNA
ttataagaagaatcctatgg

SEQ ID NO: 50494 - DNA, 20 bp, synthetic construct
  source 1..20: mol_type = other DNA
gccttgtttgactttatctg

SEQ ID NO: 50495 - DNA, 20 bp, synthetic construct
  source 1..20: mol_type = other DNA
agtatttgacacatttactc

SEQ ID NO: 50496 - DNA, 20 bp, synthetic construct
  source 1..20: mol_type = other DNA
cgttcccaaaaccatccaga

SEQ ID NO: 50497 - DNA, 20 bp, synthetic construct
  source 1..20: mol_type = other DNA
ttcttctagttgatcatacc

SEQ ID NO: 50498 - DNA, 20 bp, synthetic construct
  source 1..20: mol_type = other DNA
gtgcagatcctacctctgaa

SEQ ID NO: 50499 - DNA, 20 bp, synthetic construct
  source 1..20: mol_type = other DNA
agtgctggaattggccggac

SEQ ID NO: 50500 - DNA, 20 bp, synthetic construct
  source 1..20: mol_type = other DNA
tttcttctaaaatagtccat

SEQ ID NO: 50501 - DNA, 20 bp, synthetic construct
  source 1..20: mol_type = other DNA
gagacttcacactttccgtt

SEQ ID NO: 50502 - DNA, 20 bp, synthetic construct
  source 1..20: mol_type = other DNA
ttaactgaaaaaggaaaaca

SEQ ID NO: 50503 - DNA, 20 bp, synthetic construct
  source 1..20: mol_type = other DNA
aggtgcagcagatgaaacag

SEQ ID NO: 50504 - DNA, 20 bp, synthetic construct
  source 1..20: mol_type = other DNA
tgtcatgctgaaccgcattg

SEQ ID NO: 50505 - DNA, 20 bp, synthetic construct
  source 1..20: mol_type = other DNA
atgaaagtgagatattgttc

SEQ ID NO: 50506 - DNA, 20 bp, synthetic construct
  source 1..20: mol_type = other DNA
tgagaatctcagttgatctg

SEQ ID NO: 50507 - DNA, 20 bp, synthetic construct
  source 1..20: mol_type = other DNA
gaacatgagaaaataccgaa

SEQ ID NO: 50508 - DNA, 20 bp, synthetic construct
  source 1..20: mol_type = other DNA
aggttaaatgtgcacagtac

SEQ ID NO: 50509 - DNA, 20 bp, synthetic construct
  source 1..20: mol_type = other DNA
aaggagttacatcttaacac

SEQ ID NO: 50510 - DNA, 20 bp, synthetic construct
  source 1..20: mol_type = other DNA
ccgattctttctccacaatg

SEQ ID NO: 50511 - DNA, 20 bp, synthetic construct
  source 1..20: mol_type = other DNA
tcaactgagattctcataca

SEQ ID NO: 50512 - DNA, 20 bp, synthetic construct
  source 1..20: mol_type = other DNA
gcccaatgcctgcactacag

SEQ ID NO: 50513 - DNA, 20 bp, synthetic construct
  source 1..20: mol_type = other DNA
gccaaaccataagccagaaa

SEQ ID NO: 50514 - DNA, 20 bp, synthetic construct
  source 1..20: mol_type = other DNA
agttggatactcagcgtcgc

SEQ ID NO: 50515 - DNA, 20 bp, synthetic construct
  source 1..20: mol_type = other DNA
agtggatcaccgcaggccca

SEQ ID NO: 50516 - DNA, 20 bp, synthetic construct
  source 1..20: mol_type = other DNA
ggaaacttggccactctatg

SEQ ID NO: 50517 - DNA, 20 bp, synthetic construct
  source 1..20: mol_type = other DNA
gcactacagtggatcaccgc

SEQ ID NO: 50518 - DNA, 20 bp, synthetic construct
  source 1..20: mol_type = other DNA
ccgcgactcaccaagtacag

SEQ ID NO: 50519 - DNA, 20 bp, synthetic construct
  source 1..20: mol_type = other DNA
gccatttctggcttatggtt

SEQ ID NO: 50520 - DNA, 20 bp, synthetic construct
  source 1..20: mol_type = other DNA
ccatgcccaccaccatcgag

SEQ ID NO: 50521 - DNA, 20 bp, synthetic construct
  source 1..20: mol_type = other DNA
tatgagaatctcagttgatc

SEQ ID NO: 50522 - DNA, 20 bp, synthetic construct
  source 1..20: mol_type = other DNA
atccactgtagtgcaggcat

SEQ ID NO: 50523 - DNA, 20 bp, synthetic construct
  source 1..20: mol_type = other DNA
agggactccaaaatctggcc

SEQ ID NO: 50524 - DNA, 20 bp, synthetic construct
  source 1..20: mol_type = other DNA
gcatggctgcgggagcgagc

SEQ ID NO: 50525 - DNA, 20 bp, synthetic construct
  source 1..20: mol_type = other DNA
aacatgagaaaataccgaat

SEQ ID NO: 50526 - DNA, 20 bp, synthetic construct
  source 1..20: mol_type = other DNA
gttcagcatgacaactgctt

SEQ ID NO: 50527 - DNA, 20 bp, synthetic construct
  source 1..20: mol_type = other DNA
acaagtgtctaccagagaga

SEQ ID NO: 50528 - DNA, 20 bp, synthetic construct
  source 1..20: mol_type = other DNA
tggcagcatgtgttaggaag

SEQ ID NO: 50529 - DNA, 20 bp, synthetic construct
  source 1..20: mol_type = other DNA
acagcagagagaaaccaagg

SEQ ID NO: 50530 - DNA, 20 bp, synthetic construct
  source 1..20: mol_type = other DNA
agaatagggtctatagatga

SEQ ID NO: 50531 - DNA, 20 bp, synthetic construct
  source 1..20: mol_type = other DNA
tgaagatggagacacagaac

SEQ ID NO: 50532 - DNA, 20 bp, synthetic construct
  source 1..20: mol_type = other DNA
caaaactgtgcacaggtatg

SEQ ID NO: 50533 - DNA, 20 bp, synthetic construct
  source 1..20: mol_type = other DNA
gccgaggacttcgcctgggt

SEQ ID NO: 50534 - DNA, 20 bp, synthetic construct
  source 1..20: mol_type = other DNA
ctccttcatcatggggaagg

SEQ ID NO: 50535 - DNA, 20 bp, synthetic construct
  source 1..20: mol_type = other DNA
atttccctgcaataataccc

SEQ ID NO: 50536 - DNA, 20 bp, synthetic construct
  source 1..20: mol_type = other DNA
atgagcagcacaggtgaggg

SEQ ID NO: 50537 - DNA, 20 bp, synthetic construct
  source 1..20: mol_type = other DNA
atttccatctggtaagaaat

SEQ ID NO: 50538 - DNA, 20 bp, synthetic construct
  source 1..20: mol_type = other DNA
tacctctcctcctgatcacc

SEQ ID NO: 50539 - DNA, 20 bp, synthetic construct
  source 1..20: mol_type = other DNA
ctaaagaagggcctcgaaag

SEQ ID NO: 50540 - DNA, 20 bp, synthetic construct
  source 1..20: mol_type = other DNA
aacctgccaaaactgtgcac

SEQ ID NO: 50541 - DNA, 20 bp, synthetic construct
  source 1..20: mol_type = other DNA
aatgacctacatcacggaaa

SEQ ID NO: 50542 - DNA, 20 bp, synthetic construct
  source 1..20: mol_type = other DNA
cgagtttcttactcttggtg

SEQ ID NO: 50543 - DNA, 20 bp, synthetic construct
  source 1..20: mol_type = other DNA
gttttccggaggatgcccac

SEQ ID NO: 50544 - DNA, 20 bp, synthetic construct
  source 1..20: mol_type = other DNA
ctgtctcagtactggactat

SEQ ID NO: 50545 - DNA, 20 bp, synthetic construct
  source 1..20: mol_type = other DNA
cggttacgaccatcttcagt

SEQ ID NO: 50546 - DNA, 20 bp, synthetic construct
  source 1..20: mol_type = other DNA
tattcaacttagaaaagaat

SEQ ID NO: 50547 - DNA, 20 bp, synthetic construct
  source 1..20: mol_type = other DNA
ccaaacctcccattttcatc

SEQ ID NO: 50548 - DNA, 20 bp, synthetic construct
  source 1..20: mol_type = other DNA
gatttctatgacctgtatgg

SEQ ID NO: 50549 - DNA, 20 bp, synthetic construct
  source 1..20: mol_type = other DNA
ggggatttctatgacctgta

SEQ ID NO: 50550 - DNA, 20 bp, synthetic construct
  source 1..20: mol_type = other DNA
tctcacaggtgacgcagcca

SEQ ID NO: 50551 - DNA, 20 bp, synthetic construct
  source 1..20: mol_type = other DNA
gtgacttctcgctctccgtc

SEQ ID NO: 50552 - DNA, 20 bp, synthetic construct
  source 1..20: mol_type = other DNA
catagaaatcccctgagttc

SEQ ID NO: 50553 - DNA, 20 bp, synthetic construct
  source 1..20: mol_type = other DNA
caccagggtaagatgggtcg

SEQ ID NO: 50554 - DNA, 20 bp, synthetic construct
  source 1..20: mol_type = other DNA
tgctttcacacgctccagga

SEQ ID NO: 50555 - DNA, 20 bp, synthetic construct
  source 1..20: mol_type = other DNA
cagaagcagcagcagcagtc

SEQ ID NO: 50556 - DNA, 20 bp, synthetic construct
  source 1..20: mol_type = other DNA
cgatcactagcagagaggac

SEQ ID NO: 50557 - DNA, 20 bp, synthetic construct
  source 1..20: mol_type = other DNA
agaagcagcagcagcagtca

SEQ ID NO: 50558 - DNA, 20 bp, synthetic construct
  source 1..20: mol_type = other DNA
ctaacagaactggaggagag

SEQ ID NO: 50559 - DNA, 20 bp, synthetic construct
  source 1..20: mol_type = other DNA
gatgcatacagaacggaagg

SEQ ID NO: 50560 - DNA, 20 bp, synthetic construct
  source 1..20: mol_type = other DNA
ttacctcctttctctccttc

SEQ ID NO: 50561 - DNA, 20 bp, synthetic construct
  source 1..20: mol_type = other DNA
agaacaagtgtgcagaatac

SEQ ID NO: 50562 - DNA, 20 bp, synthetic construct
  source 1..20: mol_type = other DNA
taaataaacttaccacatgt

SEQ ID NO: 50563 - DNA, 20 bp, synthetic construct
  source 1..20: mol_type = other DNA
tttccaacaaaatatctgca

SEQ ID NO: 50564 - DNA, 20 bp, synthetic construct
  source 1..20: mol_type = other DNA
tagggatggatctcagcaaa

SEQ ID NO: 50565 - DNA, 20 bp, synthetic construct
  source 1..20: mol_type = other DNA
agtacatgaattatgagata

SEQ ID NO: 50566 - DNA, 20 bp, synthetic construct
  source 1..20: mol_type = other DNA
attacctacagatttcagtg

SEQ ID NO: 50567 - DNA, 20 bp, synthetic construct
  source 1..20: mol_type = other DNA
ttccaaatggtaacgttcat

SEQ ID NO: 50568 - DNA, 20 bp, synthetic construct
  source 1..20: mol_type = other DNA
cagcaggagcttgttgaaag

SEQ ID NO: 50569 - DNA, 20 bp, synthetic construct
  source 1..20: mol_type = other DNA
ctcattcactgcaggtgcgt

SEQ ID NO: 50570 - DNA, 20 bp, synthetic construct
  source 1..20: mol_type = other DNA
acgcaaagctaggccaggca

SEQ ID NO: 50571 - DNA, 20 bp, synthetic construct
  source 1..20: mol_type = other DNA
gaggatcctcaggcaccccg

SEQ ID NO: 50572 - DNA, 20 bp, synthetic construct
  source 1..20: mol_type = other DNA
acctggaattcagcctctag

SEQ ID NO: 50573 - DNA, 20 bp, synthetic construct
  source 1..20: mol_type = other DNA
aggaaatacattgctgcaca

SEQ ID NO: 50574 - DNA, 20 bp, synthetic construct
  source 1..20: mol_type = other DNA
aggcctcccagggaccgtaa

SEQ ID NO: 50575 - DNA, 20 bp, synthetic construct
  source 1..20: mol_type = other DNA
tttctttcagagcatcccgc

SEQ ID NO: 50576 - DNA, 20 bp, synthetic construct
  source 1..20: mol_type = other DNA
gggcgcacaggaacctatat

SEQ ID NO: 50577 - DNA, 20 bp, synthetic construct
  source 1..20: mol_type = other DNA
tttcacaatggagactatcc

SEQ ID NO: 50578 - DNA, 20 bp, synthetic construct
  source 1..20: mol_type = other DNA
cactgcaggtgcgtgggatt

SEQ ID NO: 50579 - DNA, 20 bp, synthetic construct
  source 1..20: mol_type = other DNA
tcaggtttttatccagattg

SEQ ID NO: 50580 - DNA, 20 bp, synthetic construct
  source 1..20: mol_type = other DNA
catactattatctgatgtca

SEQ ID NO: 50581 - DNA, 20 bp, synthetic construct
  source 1..20: mol_type = other DNA
ttaccacatgttggcttaga

SEQ ID NO: 50582 - DNA, 20 bp, synthetic construct
  source 1..20: mol_type = other DNA
aaggaagaatgtcaacataa

SEQ ID NO: 50583 - DNA, 20 bp, synthetic construct
  source 1..20: mol_type = other DNA
gtcatgttccagacctggct

SEQ ID NO: 50584 - DNA, 20 bp, synthetic construct
  source 1..20: mol_type = other DNA
aaaatatgcaaacatcactg

SEQ ID NO: 50585 - DNA, 20 bp, synthetic construct
  source 1..20: mol_type = other DNA
tgagatagcattgctgcctg

SEQ ID NO: 50586 - DNA, 20 bp, synthetic construct
  source 1..20: mol_type = other DNA
acatcttgtaagttatcact

SEQ ID NO: 50587 - DNA, 20 bp, synthetic construct
  source 1..20: mol_type = other DNA
ggagaaggaaagcaaacata

SEQ ID NO: 50588 - DNA, 20 bp, synthetic construct
  source 1..20: mol_type = other DNA
aagaggaagattgctgatga

SEQ ID NO: 50589 - DNA, 20 bp, synthetic construct
  source 1..20: mol_type = other DNA
gccagaccacggggtgcctg

SEQ ID NO: 50590 - DNA, 20 bp, synthetic construct
  source 1..20: mol_type = other DNA
ggctgagggtggttgtcaat

SEQ ID NO: 50591 - DNA, 20 bp, synthetic construct
  source 1..20: mol_type = other DNA
agtgccacttaaacatgagc

SEQ ID NO: 50592 - DNA, 20 bp, synthetic construct
  source 1..20: mol_type = other DNA
atttccagctcatgtttaag

SEQ ID NO: 50593 - DNA, 20 bp, synthetic construct
  source 1..20: mol_type = other DNA
tcaccaatggtctccttcag

SEQ ID NO: 50594 - DNA, 20 bp, synthetic construct
  source 1..20: mol_type = other DNA
gtctcagttcaaagacacga

SEQ ID NO: 50595 - DNA, 20 bp, synthetic construct
  source 1..20: mol_type = other DNA
agacagtcatgttccagacc

SEQ ID NO: 50596 - DNA, 20 bp, synthetic construct
  source 1..20: mol_type = other DNA
tcaccagctggccagaccac

SEQ ID NO: 50597 - DNA, 20 bp, synthetic construct
  source 1..20: mol_type = other DNA
gataaaacatatttcgtata

SEQ ID NO: 50598 - DNA, 20 bp, synthetic construct
  source 1..20: mol_type = other DNA
agtgaccatgacaataactg

SEQ ID NO: 50599 - DNA, 20 bp, synthetic construct
  source 1..20: mol_type = other DNA
aaactgttgatgatttctgg

SEQ ID NO: 50600 - DNA, 20 bp, synthetic construct
  source 1..20: mol_type = other DNA
ccaaatggtaacgttcatgg

SEQ ID NO: 50601 - DNA, 20 bp, synthetic construct
  source 1..20: mol_type = other DNA
catctgccaaaagtcaccaa

SEQ ID NO: 50602 - DNA, 20 bp, synthetic construct
  source 1..20: mol_type = other DNA
catggcatcaattccgatat

SEQ ID NO: 50603 - DNA, 20 bp, synthetic construct
  source 1..20: mol_type = other DNA
acttgctcctcaaactgaga

SEQ ID NO: 50604 - DNA, 20 bp, synthetic construct
  source 1..20: mol_type = other DNA
aggagcaagtgaggatcctc

SEQ ID NO: 50605 - DNA, 20 bp, synthetic construct
  source 1..20: mol_type = other DNA
cgtcaatggaagagggcact

SEQ ID NO: 50606 - DNA, 20 bp, synthetic construct
  source 1..20: mol_type = other DNA
tctgcgtgcgtgggaaggtg

SEQ ID NO: 50607 - DNA, 20 bp, synthetic construct
  source 1..20: mol_type = other DNA
gtcctccagctcctatatga

SEQ ID NO: 50608 - DNA, 20 bp, synthetic construct
  source 1..20: mol_type = other DNA
ttgcacttttgcaatgatgt

SEQ ID NO: 50609 - DNA, 20 bp, synthetic construct
  source 1..20: mol_type = other DNA
attgcaaaagtgcaacgtaa

SEQ ID NO: 50610 - DNA, 20 bp, synthetic construct
  source 1..20: mol_type = other DNA
accagtaccaatatacaaac

SEQ ID NO: 50611 - DNA, 20 bp, synthetic construct
  source 1..20: mol_type = other DNA
cagcaatttagatgaacagc

SEQ ID NO: 50612 - DNA, 20 bp, synthetic construct
  source 1..20: mol_type = other DNA
tccaaatggtaacgttcatg

SEQ ID NO: 50613 - DNA, 20 bp, synthetic construct
  source 1..20: mol_type = other DNA
atacctctacttgaaccatc

SEQ ID NO: 50614 - DNA, 20 bp, synthetic construct
  source 1..20: mol_type = other DNA
ggcttccaggccttctagca

SEQ ID NO: 50615 - DNA, 20 bp, synthetic construct
  source 1..20: mol_type = other DNA
tactggccgtcaatggaaga

SEQ ID NO: 50616 - DNA, 20 bp, synthetic construct
  source 1..20: mol_type = other DNA
gtcccattgtggtgcactgc

SEQ ID NO: 50617 - DNA, 20 bp, synthetic construct
  source 1..20: mol_type = other DNA
tacctgcagtgcaccacaat

SEQ ID NO: 50618 - DNA, 20 bp, synthetic construct
  source 1..20: mol_type = other DNA
cacctgcagtgaatgagtag

SEQ ID NO: 50619 - DNA, 20 bp, synthetic construct
  source 1..20: mol_type = other DNA
atactggccgtcaatggaag

SEQ ID NO: 50620 - DNA, 20 bp, synthetic construct
  source 1..20: mol_type = other DNA
gactcgcagacgccctctgc

SEQ ID NO: 50621 - DNA, 20 bp, synthetic construct
  source 1..20: mol_type = other DNA
ctcacattcagttcaccagc

SEQ ID NO: 50622 - DNA, 20 bp, synthetic construct
  source 1..20: mol_type = other DNA
actcattcactgcaggtgcg

SEQ ID NO: 50623 - DNA, 20 bp, synthetic construct
  source 1..20: mol_type = other DNA
atgcctgatggttcaagtag

SEQ ID NO: 50624 - DNA, 20 bp, synthetic construct
  source 1..20: mol_type = other DNA
cttccaaatggtaacgttca

SEQ ID NO: 50625 - DNA, 20 bp, synthetic construct
  source 1..20: mol_type = other DNA
gtcacacttatactcatgtt

SEQ ID NO: 50626 - DNA, 20 bp, synthetic construct
  source 1..20: mol_type = other DNA
ctcagtttgaggagcaagtg

SEQ ID NO: 50627 - DNA, 20 bp, synthetic construct
  source 1..20: mol_type = other DNA
tgcagaatactggccgtcaa

SEQ ID NO: 50628 - DNA, 20 bp, synthetic construct
  source 1..20: mol_type = other DNA
aattcagcctctagtggaga

SEQ ID NO: 50629 - DNA, 20 bp, synthetic construct
  source 1..20: mol_type = other DNA
tctcagttcaaagacacgaa

SEQ ID NO: 50630 - DNA, 20 bp, synthetic construct
  source 1..20: mol_type = other DNA
tggttgtgtaactgatcagt

SEQ ID NO: 50631 - DNA, 20 bp, synthetic construct
  source 1..20: mol_type = other DNA
ttttctcttcctcttcttca

SEQ ID NO: 50632 - DNA, 20 bp, synthetic construct
  source 1..20: mol_type = other DNA
agatggaaaaccggtgaatc

SEQ ID NO: 50633 - DNA, 20 bp, synthetic construct
  source 1..20: mol_type = other DNA
tagaccctgcggataggtga

SEQ ID NO: 50634 - DNA, 20 bp, synthetic construct
  source 1..20: mol_type = other DNA
actcccatcacctatccgca

SEQ ID NO: 50635 - DNA, 20 bp, synthetic construct
  source 1..20: mol_type = other DNA
gaaaatgtccgtgcaaaggt

SEQ ID NO: 50636 - DNA, 20 bp, synthetic construct
  source 1..20: mol_type = other DNA
tatcctatccgcaaacagta

SEQ ID NO: 50637 - DNA, 20 bp, synthetic construct
  source 1..20: mol_type = other DNA
catggctaaggagattggta

SEQ ID NO: 50638 - DNA, 20 bp, synthetic construct
  source 1..20: mol_type = other DNA
ctgaatagttgtcaaacctg

SEQ ID NO: 50639 - DNA, 20 bp, synthetic construct
  source 1..20: mol_type = other DNA
gaatagttgtcaaacctgtg

SEQ ID NO: 50640 - DNA, 20 bp, synthetic construct
  source 1..20: mol_type = other DNA
cgtgggctgagggcacagca

SEQ ID NO: 50641 - DNA, 20 bp, synthetic construct
  source 1..20: mol_type = other DNA
gccatcaagtgtgtggtggt

SEQ ID NO: 50642 - DNA, 20 bp, synthetic construct
  source 1..20: mol_type = other DNA
ggccatcaagtgtgtggtgg

SEQ ID NO: 50643 - DNA, 20 bp, synthetic construct
  source 1..20: mol_type = other DNA
acggtggggatgtactctcc

SEQ ID NO: 50644 - DNA, 20 bp, synthetic construct
  source 1..20: mol_type = other DNA
tcctggggacagagcaagcg

SEQ ID NO: 50645 - DNA, 20 bp, synthetic construct
  source 1..20: mol_type = other DNA
gacagcaagccagtgaacct

SEQ ID NO: 50646 - DNA, 20 bp, synthetic construct
  source 1..20: mol_type = other DNA
gaggccggcagtgaggaggg

SEQ ID NO: 50647 - DNA, 20 bp, synthetic construct
  source 1..20: mol_type = other DNA
gctttggggtcagagttcct

SEQ ID NO: 50648 - DNA, 20 bp, synthetic construct
  source 1..20: mol_type = other DNA
aaacaaaaccactgaatggg

SEQ ID NO: 50649 - DNA, 20 bp, synthetic construct
  source 1..20: mol_type = other DNA
catcatctcatccagacatc

SEQ ID NO: 50650 - DNA, 20 bp, synthetic construct
  source 1..20: mol_type = other DNA
atttacctgaacctctgaat

SEQ ID NO: 50651 - DNA, 20 bp, synthetic construct
  source 1..20: mol_type = other DNA
ctagagaaactgttgcataa

SEQ ID NO: 50652 - DNA, 20 bp, synthetic construct
  source 1..20: mol_type = other DNA
tgcagcagcagtcgtacaag

SEQ ID NO: 50653 - DNA, 20 bp, synthetic construct
  source 1..20: mol_type = other DNA
actaagaaaaaacaaacaca

SEQ ID NO: 50654 - DNA, 20 bp, synthetic construct
  source 1..20: mol_type = other DNA
catggcatgccttgatgcta

SEQ ID NO: 50655 - DNA, 20 bp, synthetic construct
  source 1..20: mol_type = other DNA
cctctcatcaagcctggtaa

SEQ ID NO: 50656 - DNA, 20 bp, synthetic construct
  source 1..20: mol_type = other DNA
ttctgtacctcatcaagaat

SEQ ID NO: 50657 - DNA, 20 bp, synthetic construct
  source 1..20: mol_type = other DNA
actacctggctgtttgtggt

SEQ ID NO: 50658 - DNA, 20 bp, synthetic construct
  source 1..20: mol_type = other DNA
ccaagaactaaatggggaaa

SEQ ID NO: 50659 - DNA, 20 bp, synthetic construct
  source 1..20: mol_type = other DNA
acaaagttagaataatcatc

SEQ ID NO: 50660 - DNA, 20 bp, synthetic construct
  source 1..20: mol_type = other DNA
gcctgttgactccaattcag

SEQ ID NO: 50661 - DNA, 20 bp, synthetic construct
  source 1..20: mol_type = other DNA
tatctatttggatgtctgca

SEQ ID NO: 50662 - DNA, 20 bp, synthetic construct
  source 1..20: mol_type = other DNA
tcatcatctcatccagacat

SEQ ID NO: 50663 - DNA, 20 bp, synthetic construct
  source 1..20: mol_type = other DNA
ttacaaagagatctccgtat

SEQ ID NO: 50664 - DNA, 20 bp, synthetic construct
  source 1..20: mol_type = other DNA
cttctacacagttatttgcc

SEQ ID NO: 50665 - DNA, 20 bp, synthetic construct
  source 1..20: mol_type = other DNA
tcctctcatcaagcctggta

SEQ ID NO: 50666 - DNA, 20 bp, synthetic construct
  source 1..20: mol_type = other DNA
attacttggaacatcttcat

SEQ ID NO: 50667 - DNA, 20 bp, synthetic construct
  source 1..20: mol_type = other DNA
tacaaactttgggaagctgg

SEQ ID NO: 50668 - DNA, 20 bp, synthetic construct
  source 1..20: mol_type = other DNA
ttgctacagccaagagacaa

SEQ ID NO: 50669 - DNA, 20 bp, synthetic construct
  source 1..20: mol_type = other DNA
ttttaaacgaaagtccaact

SEQ ID NO: 50670 - DNA, 20 bp, synthetic construct
  source 1..20: mol_type = other DNA
cagctttggccatttatgag

SEQ ID NO: 50671 - DNA, 20 bp, synthetic construct
  source 1..20: mol_type = other DNA
ggtgcagcagcagtcgtaca

SEQ ID NO: 50672 - DNA, 20 bp, synthetic construct
  source 1..20: mol_type = other DNA
ctgtaccataaatttggacc

SEQ ID NO: 50673 - DNA, 20 bp, synthetic construct
  source 1..20: mol_type = other DNA
ctaggaaaacatcttggact

SEQ ID NO: 50674 - DNA, 20 bp, synthetic construct
  source 1..20: mol_type = other DNA
gctcaaggaagaactcggat

SEQ ID NO: 50675 - DNA, 20 bp, synthetic construct
  source 1..20: mol_type = other DNA
tctcacctaggaaaacatct

SEQ ID NO: 50676 - DNA, 20 bp, synthetic construct
  source 1..20: mol_type = other DNA
ccagttccaggtagaagagg

SEQ ID NO: 50677 - DNA, 20 bp, synthetic construct
  source 1..20: mol_type = other DNA
ttccctggctacccgatgtc

SEQ ID NO: 50678 - DNA, 20 bp, synthetic construct
  source 1..20: mol_type = other DNA
cccttaccaggcttgatgag

SEQ ID NO: 50679 - DNA, 20 bp, synthetic construct
  source 1..20: mol_type = other DNA
tgactccaattcagaggttc

SEQ ID NO: 50680 - DNA, 20 bp, synthetic construct
  source 1..20: mol_type = other DNA
cacaactacctggctgtttg

SEQ ID NO: 50681 - DNA, 20 bp, synthetic construct
  source 1..20: mol_type = other DNA
cttactgtacaacaagctgc

SEQ ID NO: 50682 - DNA, 20 bp, synthetic construct
  source 1..20: mol_type = other DNA
caagaactaaatggggaaat

SEQ ID NO: 50683 - DNA, 20 bp, synthetic construct
  source 1..20: mol_type = other DNA
gtgcagcagcagtcgtacaa

SEQ ID NO: 50684 - DNA, 20 bp, synthetic construct
  source 1..20: mol_type = other DNA
tgaacacttactggatgatg

SEQ ID NO: 50685 - DNA, 20 bp, synthetic construct
  source 1..20: mol_type = other DNA
gatattggctaaatacagaa

SEQ ID NO: 50686 - DNA, 20 bp, synthetic construct
  source 1..20: mol_type = other DNA
atacaaactttgggaagctg

SEQ ID NO: 50687 - DNA, 20 bp, synthetic construct
  source 1..20: mol_type = other DNA
ctagtccaagatgttttcct

SEQ ID NO: 50688 - DNA, 20 bp, synthetic construct
  source 1..20: mol_type = other DNA
gactaagaaaaaacaaacac

SEQ ID NO: 50689 - DNA, 20 bp, synthetic construct
  source 1..20: mol_type = other DNA
gtcccagttccaggtagaag

SEQ ID NO: 50690 - DNA, 20 bp, synthetic construct
  source 1..20: mol_type = other DNA
tatacaaactttgggaagct

SEQ ID NO: 50691 - DNA, 20 bp, synthetic construct
  source 1..20: mol_type = other DNA
tatttaatcgaagagacccc

SEQ ID NO: 50692 - DNA, 20 bp, synthetic construct
  source 1..20: mol_type = other DNA
ggtcgcaaatgaaaagtatg

SEQ ID NO: 50693 - DNA, 20 bp, synthetic construct
  source 1..20: mol_type = other DNA
tggtcattcctgttccaatg

SEQ ID NO: 50694 - DNA, 20 bp, synthetic construct
  source 1..20: mol_type = other DNA
tttcatccaagaactaaatg

SEQ ID NO: 50695 - DNA, 20 bp, synthetic construct
  source 1..20: mol_type = other DNA
atccagacatcgggtagcca

SEQ ID NO: 50696 - DNA, 20 bp, synthetic construct
  source 1..20: mol_type = other DNA
cgatcctgaaaattgaaaac

SEQ ID NO: 50697 - DNA, 20 bp, synthetic construct
  source 1..20: mol_type = other DNA
catcttagagtttaacagat

SEQ ID NO: 50698 - DNA, 20 bp, synthetic construct
  source 1..20: mol_type = other DNA
tacccttctttcaggtgcac

SEQ ID NO: 50699 - DNA, 20 bp, synthetic construct
  source 1..20: mol_type = other DNA
acctctgaattggagtcaac

SEQ ID NO: 50700 - DNA, 20 bp, synthetic construct
  source 1..20: mol_type = other DNA
tggatgacctggaacatctg

SEQ ID NO: 50701 - DNA, 20 bp, synthetic construct
  source 1..20: mol_type = other DNA
ccagtggccgctcaggtagg

SEQ ID NO: 50702 - DNA, 20 bp, synthetic construct
  source 1..20: mol_type = other DNA
tgggaatgctgtagagaggc

SEQ ID NO: 50703 - DNA, 20 bp, synthetic construct
  source 1..20: mol_type = other DNA
cagccagtggccgctcaggt

SEQ ID NO: 50704 - DNA, 20 bp, synthetic construct
  source 1..20: mol_type = other DNA
cgctcaggtaggcggacggg

SEQ ID NO: 50705 - DNA, 20 bp, synthetic construct
  source 1..20: mol_type = other DNA
cggacgggtggtagacggtg

SEQ ID NO: 50706 - DNA, 20 bp, synthetic construct
  source 1..20: mol_type = other DNA
tgtgtatgacggcccggagc

SEQ ID NO: 50707 - DNA, 20 bp, synthetic construct
  source 1..20: mol_type = other DNA
agcacagccagtggccgctc

SEQ ID NO: 50708 - DNA, 20 bp, synthetic construct
  source 1..20: mol_type = other DNA
cgagcagcccggagccgagt

SEQ ID NO: 50709 - DNA, 20 bp, synthetic construct
  source 1..20: mol_type = other DNA
cattcccatcgagaacatcc

SEQ ID NO: 50710 - DNA, 20 bp, synthetic construct
  source 1..20: mol_type = other DNA
gcccaaggacggaagcgctt

SEQ ID NO: 50711 - DNA, 20 bp, synthetic construct
  source 1..20: mol_type = other DNA
cactgccaggatgttctcga

SEQ ID NO: 50712 - DNA, 20 bp, synthetic construct
  source 1..20: mol_type = other DNA
gtaggcggacgggtggtaga

SEQ ID NO: 50713 - DNA, 20 bp, synthetic construct
  source 1..20: mol_type = other DNA
gtggtaggtaaattcatggt

SEQ ID NO: 50714 - DNA, 20 bp, synthetic construct
  source 1..20: mol_type = other DNA
ggtagacggtgaggcgcttc

SEQ ID NO: 50715 - DNA, 20 bp, synthetic construct
  source 1..20: mol_type = other DNA
ggcagtggagaagctggagg

SEQ ID NO: 50716 - DNA, 20 bp, synthetic construct
  source 1..20: mol_type = other DNA
tggccgctcaggtaggcgga

SEQ ID NO: 50717 - DNA, 20 bp, synthetic construct
  source 1..20: mol_type = other DNA
cagcccggagccgagtcgga

SEQ ID NO: 50718 - DNA, 20 bp, synthetic construct
  source 1..20: mol_type = other DNA
aaccttgaaaacaacatggt

SEQ ID NO: 50719 - DNA, 20 bp, synthetic construct
  source 1..20: mol_type = other DNA
tggatgtacagcgcacgctc

SEQ ID NO: 50720 - DNA, 20 bp, synthetic construct
  source 1..20: mol_type = other DNA
catcgagaacatcctggcag

SEQ ID NO: 50721 - DNA, 20 bp, synthetic construct
  source 1..20: mol_type = other DNA
gtaggaagagccgcaccagc

SEQ ID NO: 50722 - DNA, 20 bp, synthetic construct
  source 1..20: mol_type = other DNA
catcgacgagaccatgaagc

SEQ ID NO: 50723 - DNA, 20 bp, synthetic construct
  source 1..20: mol_type = other DNA
catcctggcagtggagaagc

SEQ ID NO: 50724 - DNA, 20 bp, synthetic construct
  source 1..20: mol_type = other DNA
tgaggcgcttctggttgcac

SEQ ID NO: 50725 - DNA, 20 bp, synthetic construct
  source 1..20: mol_type = other DNA
cctccagcttctccactgcc

SEQ ID NO: 50726 - DNA, 20 bp, synthetic construct
  source 1..20: mol_type = other DNA
cattgatggggaccgtgaga

SEQ ID NO: 50727 - DNA, 20 bp, synthetic construct
  source 1..20: mol_type = other DNA
gctccttacctttgcttttg

SEQ ID NO: 50728 - DNA, 20 bp, synthetic construct
  source 1..20: mol_type = other DNA
cacccgtccgcctacctgag

SEQ ID NO: 50729 - DNA, 20 bp, synthetic construct
  source 1..20: mol_type = other DNA
ccccagactcagtgatggcg

SEQ ID NO: 50730 - DNA, 20 bp, synthetic construct
  source 1..20: mol_type = other DNA
tctcccggcaaacctcgccc

SEQ ID NO: 50731 - DNA, 20 bp, synthetic construct
  source 1..20: mol_type = other DNA
ttctactgaggactgtgaag

SEQ ID NO: 50732 - DNA, 20 bp, synthetic construct
  source 1..20: mol_type = other DNA
tgtgcgcctccctcttcctg

SEQ ID NO: 50733 - DNA, 20 bp, synthetic construct
  source 1..20: mol_type = other DNA
gccagacccggagccggagc

SEQ ID NO: 50734 - DNA, 20 bp, synthetic construct
  source 1..20: mol_type = other DNA
cgagcgctacaaggagctgg

SEQ ID NO: 50735 - DNA, 20 bp, synthetic construct
  source 1..20: mol_type = other DNA
cccgacggaatatcgagcga

SEQ ID NO: 50736 - DNA, 20 bp, synthetic construct
  source 1..20: mol_type = other DNA
aaccgtgccccgtaggtgct

SEQ ID NO: 50737 - DNA, 20 bp, synthetic construct
  source 1..20: mol_type = other DNA
ccctgccccagccagcaaag

SEQ ID NO: 50738 - DNA, 20 bp, synthetic construct
  source 1..20: mol_type = other DNA
ctccgagggcagcatccacg

SEQ ID NO: 50739 - DNA, 20 bp, synthetic construct
  source 1..20: mol_type = other DNA
gtgtctcgggttgtctggtg

SEQ ID NO: 50740 - DNA, 20 bp, synthetic construct
  source 1..20: mol_type = other DNA
tggcgctgccagggtaccga

SEQ ID NO: 50741 - DNA, 20 bp, synthetic construct
  source 1..20: mol_type = other DNA
aagacttctgctcggagctg

SEQ ID NO: 50742 - DNA, 20 bp, synthetic construct
  source 1..20: mol_type = other DNA
tctgttatccaatacctaca

SEQ ID NO: 50743 - DNA, 20 bp, synthetic construct
  source 1..20: mol_type = other DNA
cattctgggtgtgcatctca

SEQ ID NO: 50744 - DNA, 20 bp, synthetic construct
  source 1..20: mol_type = other DNA
gtttcctggggaaagagaga

SEQ ID NO: 50745 - DNA, 20 bp, synthetic construct
  source 1..20: mol_type = other DNA
caagaactatgatcacgacc

SEQ ID NO: 50746 - DNA, 20 bp, synthetic construct
  source 1..20: mol_type = other DNA
tcggtatgtatgcaaggggc

SEQ ID NO: 50747 - DNA, 20 bp, synthetic construct
  source 1..20: mol_type = other DNA
ggacatggagaggtgggact

SEQ ID NO: 50748 - DNA, 20 bp, synthetic construct
  source 1..20: mol_type = other DNA
actactactggtggctttga

SEQ ID NO: 50749 - DNA, 20 bp, synthetic construct
  source 1..20: mol_type = other DNA
tgcctgactatctggaggac

SEQ ID NO: 50750 - DNA, 20 bp, synthetic construct
  source 1..20: mol_type = other DNA
gaaccatcagttgtacccac

SEQ ID NO: 50751 - DNA, 20 bp, synthetic construct
  source 1..20: mol_type = other DNA
aaccatcagttgtacccact

SEQ ID NO: 50752 - DNA, 20 bp, synthetic construct
  source 1..20: mol_type = other DNA
agtctgtggacaagacatcc

SEQ ID NO: 50753 - DNA, 20 bp, synthetic construct
  source 1..20: mol_type = other DNA
cctctggacgtgtttgctaa

SEQ ID NO: 50754 - DNA, 20 bp, synthetic construct
  source 1..20: mol_type = other DNA
ccttgttagcctccaagggt

SEQ ID NO: 50755 - DNA, 20 bp, synthetic construct
  source 1..20: mol_type = other DNA
gcccagtccactactactgg

SEQ ID NO: 50756 - DNA, 20 bp, synthetic construct
  source 1..20: mol_type = other DNA
cattcaatcttttggtaagt

SEQ ID NO: 50757 - DNA, 20 bp, synthetic construct
  source 1..20: mol_type = other DNA
tggtacacttgctgacggtg

SEQ ID NO: 50758 - DNA, 20 bp, synthetic construct
  source 1..20: mol_type = other DNA
cccagactgaatcacagcct

SEQ ID NO: 50759 - DNA, 20 bp, synthetic construct
  source 1..20: mol_type = other DNA
cttgttagcctccaagggtg

SEQ ID NO: 50760 - DNA, 20 bp, synthetic construct
  source 1..20: mol_type = other DNA
gaagcccagtccactactac

SEQ ID NO: 50761 - DNA, 20 bp, synthetic construct
  source 1..20: mol_type = other DNA
tccttgttagcctccaaggg

SEQ ID NO: 50762 - DNA, 20 bp, synthetic construct
  source 1..20: mol_type = other DNA
caagtccttgttagcctcca

SEQ ID NO: 50763 - DNA, 20 bp, synthetic construct
  source 1..20: mol_type = other DNA
tgaagatctgttattttgta

SEQ ID NO: 50764 - DNA, 20 bp, synthetic construct
  source 1..20: mol_type = other DNA
aagtccttgttagcctccaa

SEQ ID NO: 50765 - DNA, 20 bp, synthetic construct
  source 1..20: mol_type = other DNA
attgtcgtagtttctggagg

SEQ ID NO: 50766 - DNA, 20 bp, synthetic construct
  source 1..20: mol_type = other DNA
caagctgagccgggacccct

SEQ ID NO: 50767 - DNA, 20 bp, synthetic construct
  source 1..20: mol_type = other DNA
ggccctgcttgtagatgccc

SEQ ID NO: 50768 - DNA, 20 bp, synthetic construct
  source 1..20: mol_type = other DNA
ctgtgcatgggtgagggtga

SEQ ID NO: 50769 - DNA, 20 bp, synthetic construct
  source 1..20: mol_type = other DNA
tctctctgccccgccctggc

SEQ ID NO: 50770 - DNA, 20 bp, synthetic construct
  source 1..20: mol_type = other DNA
tgtggagggagggaagcggg

SEQ ID NO: 50771 - DNA, 20 bp, synthetic construct
  source 1..20: mol_type = other DNA
tgcgccgacactcaactgac

SEQ ID NO: 50772 - DNA, 20 bp, synthetic construct
  source 1..20: mol_type = other DNA
tctcgatgtgctccaccacg

SEQ ID NO: 50773 - DNA, 20 bp, synthetic construct
  source 1..20: mol_type = other DNA
cagggggcctgccctagggg

SEQ ID NO: 50774 - DNA, 20 bp, synthetic construct
  source 1..20: mol_type = other DNA
ggcgcaaggagttgctctcc

SEQ ID NO: 50775 - DNA, 20 bp, synthetic construct
  source 1..20: mol_type = other DNA
catgacaccattagcaactc

SEQ ID NO: 50776 - DNA, 20 bp, synthetic construct
  source 1..20: mol_type = other DNA
ttgatctgctcagccaactc

SEQ ID NO: 50777 - DNA, 20 bp, synthetic construct
  source 1..20: mol_type = other DNA
atagacagcgtgtgcgtggg

SEQ ID NO: 50778 - DNA, 20 bp, synthetic construct
  source 1..20: mol_type = other DNA
catggccgccggcgcggggt

SEQ ID NO: 50779 - DNA, 20 bp, synthetic construct
  source 1..20: mol_type = other DNA
gcagcccttgtccaggtcca

SEQ ID NO: 50780 - DNA, 20 bp, synthetic construct
  source 1..20: mol_type = other DNA
ctggtgcggcccgagggctg

SEQ ID NO: 50781 - DNA, 20 bp, synthetic construct
  source 1..20: mol_type = other DNA
catatggaacccacggtggc

SEQ ID NO: 50782 - DNA, 20 bp, synthetic construct
  source 1..20: mol_type = other DNA
acatacgatggtactgctgc

SEQ ID NO: 50783 - DNA, 20 bp, synthetic construct
  source 1..20: mol_type = other DNA
tatcagaatgtggagagtaa

SEQ ID NO: 50784 - DNA, 20 bp, synthetic construct
  source 1..20: mol_type = other DNA
tgcactaggctgttagtaac

SEQ ID NO: 50785 - DNA, 20 bp, synthetic construct
  source 1..20: mol_type = other DNA
tacgaaggtctgatctgagt

SEQ ID NO: 50786 - DNA, 20 bp, synthetic construct
  source 1..20: mol_type = other DNA
ttgacattcaggtaaagaaa

SEQ ID NO: 50787 - DNA, 20 bp, synthetic construct
  source 1..20: mol_type = other DNA
atctagactaggatgaggct

SEQ ID NO: 50788 - DNA, 20 bp, synthetic construct
  source 1..20: mol_type = other DNA
cacatgaccagggagagtat

SEQ ID NO: 50789 - DNA, 20 bp, synthetic construct
  source 1..20: mol_type = other DNA
gcagcaatgctgagttcaca

SEQ ID NO: 50790 - DNA, 20 bp, synthetic construct
  source 1..20: mol_type = other DNA
aaaactatatatcagggtgc

SEQ ID NO: 50791 - DNA, 20 bp, synthetic construct
  source 1..20: mol_type = other DNA
caaatgggcaagccttgcgg

SEQ ID NO: 50792 - DNA, 20 bp, synthetic construct
  source 1..20: mol_type = other DNA
acatagatattctctccctt

SEQ ID NO: 50793 - DNA, 20 bp, synthetic construct
  source 1..20: mol_type = other DNA
ctaggctgttagtaacaggc

SEQ ID NO: 50794 - DNA, 20 bp, synthetic construct
  source 1..20: mol_type = other DNA
cgatgtagttcatctagact

SEQ ID NO: 50795 - DNA, 20 bp, synthetic construct
  source 1..20: mol_type = other DNA
tcactaacttcctggtcaga

SEQ ID NO: 50796 - DNA, 20 bp, synthetic construct
  source 1..20: mol_type = other DNA
cctggatagaagggtatgtt

SEQ ID NO: 50797 - DNA, 20 bp, synthetic construct
  source 1..20: mol_type = other DNA
ggcctccggtgagtgttcat

SEQ ID NO: 50798 - DNA, 20 bp, synthetic construct
  source 1..20: mol_type = other DNA
tatctgattagaaagaaacc

SEQ ID NO: 50799 - DNA, 20 bp, synthetic construct
  source 1..20: mol_type = other DNA
aattgaacaacccaggcaga

SEQ ID NO: 50800 - DNA, 20 bp, synthetic construct
  source 1..20: mol_type = other DNA
agatatctgccagatgaaaa

SEQ ID NO: 50801 - DNA, 20 bp, synthetic construct
  source 1..20: mol_type = other DNA
aacacagtctcaccacattg

SEQ ID NO: 50802 - DNA, 20 bp, synthetic construct
  source 1..20: mol_type = other DNA
acaggtattctcaggaatgg

SEQ ID NO: 50803 - DNA, 20 bp, synthetic construct
  source 1..20: mol_type = other DNA
tatacttgaaaaaattcata

SEQ ID NO: 50804 - DNA, 20 bp, synthetic construct
  source 1..20: mol_type = other DNA
ccaactaaatcatgaggatg

SEQ ID NO: 50805 - DNA, 20 bp, synthetic construct
  source 1..20: mol_type = other DNA
caggtgggagccaccacgcc

SEQ ID NO: 50806 - DNA, 20 bp, synthetic construct
  source 1..20: mol_type = other DNA
attgaacaacccaggcagag

SEQ ID NO: 50807 - DNA, 20 bp, synthetic construct
  source 1..20: mol_type = other DNA
aatccagtgtgtgaagaagc

SEQ ID NO: 50808 - DNA, 20 bp, synthetic construct
  source 1..20: mol_type = other DNA
caggtaagtggcccccgcgg

SEQ ID NO: 50809 - DNA, 20 bp, synthetic construct
  source 1..20: mol_type = other DNA
cgttccttccccagcctggg

SEQ ID NO: 50810 - DNA, 20 bp, synthetic construct
  source 1..20: mol_type = other DNA
ggagcaggagctgggtcggg

SEQ ID NO: 50811 - DNA, 20 bp, synthetic construct
  source 1..20: mol_type = other DNA
agacgatcgtcaccggattg

SEQ ID NO: 50812 - DNA, 20 bp, synthetic construct
  source 1..20: mol_type = other DNA
cagtgcgggacccatcaggc

SEQ ID NO: 50813 - DNA, 20 bp, synthetic construct
  source 1..20: mol_type = other DNA
tgtcaaagatgggatgagaa

SEQ ID NO: 50814 - DNA, 20 bp, synthetic construct
  source 1..20: mol_type = other DNA
aagatgggatgagaaaggac

SEQ ID NO: 50815 - DNA, 20 bp, synthetic construct
  source 1..20: mol_type = other DNA
ggagcctggggcaggacttg

SEQ ID NO: 50816 - DNA, 20 bp, synthetic construct
  source 1..20: mol_type = other DNA
atgggatgagaaaggacagg

SEQ ID NO: 50817 - DNA, 20 bp, synthetic construct
  source 1..20: mol_type = other DNA
ttgacaatcgtgagtagcga

SEQ ID NO: 50818 - DNA, 20 bp, synthetic construct
  source 1..20: mol_type = other DNA
cacactggattcccaggttc

SEQ ID NO: 50819 - DNA, 20 bp, synthetic construct
  source 1..20: mol_type = other DNA
aagcgcatgccccgctgctt

SEQ ID NO: 50820 - DNA, 20 bp, synthetic construct
  source 1..20: mol_type = other DNA
tgacgtaaagggatagggct

SEQ ID NO: 50821 - DNA, 20 bp, synthetic construct
  source 1..20: mol_type = other DNA
ctacgagtgcgagggccgct

SEQ ID NO: 50822 - DNA, 20 bp, synthetic construct
  source 1..20: mol_type = other DNA
ggcagcccctcgcccgggcc

SEQ ID NO: 50823 - DNA, 20 bp, synthetic construct
  source 1..20: mol_type = other DNA
acggagcagcccaagcagcg

SEQ ID NO: 50824 - DNA, 20 bp, synthetic construct
  source 1..20: mol_type = other DNA
actgacactggactcgtacc

SEQ ID NO: 50825 - DNA, 20 bp, synthetic construct
  source 1..20: mol_type = other DNA
gccttaggtaagcggggctg

SEQ ID NO: 50826 - DNA, 20 bp, synthetic construct
  source 1..20: mol_type = other DNA
cctgcctggtgtggaaggac

SEQ ID NO: 50827 - DNA, 20 bp, synthetic construct
  source 1..20: mol_type = other DNA
aggcaaagccatcgtccagg

SEQ ID NO: 50828 - DNA, 20 bp, synthetic construct
  source 1..20: mol_type = other DNA
cggcgagcgagagtgaggag

SEQ ID NO: 50829 - DNA, 20 bp, synthetic construct
  source 1..20: mol_type = other DNA
agggggctccaggccgggca

SEQ ID NO: 50830 - DNA, 20 bp, synthetic construct
  source 1..20: mol_type = other DNA
ggccttaggtaagcggggct

SEQ ID NO: 50831 - DNA, 20 bp, synthetic construct
  source 1..20: mol_type = other DNA
tggtgttcagcagggcctcc

SEQ ID NO: 50832 - DNA, 20 bp, synthetic construct
  source 1..20: mol_type = other DNA
gtggcggtgccgggggcagc

SEQ ID NO: 50833 - DNA, 20 bp, synthetic construct
  source 1..20: mol_type = other DNA
tttgtgggacacagctgggc

SEQ ID NO: 50834 - DNA, 20 bp, synthetic construct
  source 1..20: mol_type = other DNA
aaaacacatcagtataacat

SEQ ID NO: 50835 - DNA, 20 bp, synthetic construct
  source 1..20: mol_type = other DNA
aaagccaactctacctgtaa

SEQ ID NO: 50836 - DNA, 20 bp, synthetic construct
  source 1..20: mol_type = other DNA
ggacagaaatgcttgacttc

SEQ ID NO: 50837 - DNA, 20 bp, synthetic construct
  source 1..20: mol_type = other DNA
acagaaatgcttgacttctg

SEQ ID NO: 50838 - DNA, 20 bp, synthetic construct
  source 1..20: mol_type = other DNA
gccctgatagtttaggtgag

SEQ ID NO: 50839 - DNA, 20 bp, synthetic construct
  source 1..20: mol_type = other DNA
gaccaaagatggagtgagag

SEQ ID NO: 50840 - DNA, 20 bp, synthetic construct
  source 1..20: mol_type = other DNA
tcggtatctgggtaggagag

SEQ ID NO: 50841 - DNA, 20 bp, synthetic construct
  source 1..20: mol_type = other DNA
cggaagaaactggtgattgt

SEQ ID NO: 50842 - DNA, 20 bp, synthetic construct
  source 1..20: mol_type = other DNA
tggctttgtgggacacagct

SEQ ID NO: 50843 - DNA, 20 bp, synthetic construct
  source 1..20: mol_type = other DNA
gacagaaatgcttgacttct

SEQ ID NO: 50844 - DNA, 20 bp, synthetic construct
  source 1..20: mol_type = other DNA
gatccttcttattcccaacc

SEQ ID NO: 50845 - DNA, 20 bp, synthetic construct
  source 1..20: mol_type = other DNA
tataacatcggtatctgggt

SEQ ID NO: 50846 - DNA, 20 bp, synthetic construct
  source 1..20: mol_type = other DNA
catcggtatctgggtaggag

SEQ ID NO: 50847 - DNA, 20 bp, synthetic construct
  source 1..20: mol_type = other DNA
atcggtatctgggtaggaga

SEQ ID NO: 50848 - DNA, 20 bp, synthetic construct
  source 1..20: mol_type = other DNA
aacgtgcccatcatcctggt

SEQ ID NO: 50849 - DNA, 20 bp, synthetic construct
  source 1..20: mol_type = other DNA
cggtgggcacgtacacctcg

SEQ ID NO: 50850 - DNA, 20 bp, synthetic construct
  source 1..20: mol_type = other DNA
ccgcaagaagctggtggtgg

SEQ ID NO: 50851 - DNA, 20 bp, synthetic construct
  source 1..20: mol_type = other DNA
ccccgagaagtgggtccccg

SEQ ID NO: 50852 - DNA, 20 bp, synthetic construct
  source 1..20: mol_type = other DNA
atgagaacgtgcggcacaag

SEQ ID NO: 50853 - DNA, 20 bp, synthetic construct
  source 1..20: mol_type = other DNA
accgcagcagggccaggcac

SEQ ID NO: 50854 - DNA, 20 bp, synthetic construct
  source 1..20: mol_type = other DNA
ccctgtgttctcgtacactg

SEQ ID NO: 50855 - DNA, 20 bp, synthetic construct
  source 1..20: mol_type = other DNA
cctgtgttctcgtacactgt

SEQ ID NO: 50856 - DNA, 20 bp, synthetic construct
  source 1..20: mol_type = other DNA
cgcgctgatgctcaagtgcg

SEQ ID NO: 50857 - DNA, 20 bp, synthetic construct
  source 1..20: mol_type = other DNA
tgagccatgctgctgccggc

SEQ ID NO: 50858 - DNA, 20 bp, synthetic construct
  source 1..20: mol_type = other DNA
ctgggccagcttccccaccg

SEQ ID NO: 50859 - DNA, 20 bp, synthetic construct
  source 1..20: mol_type = other DNA
ccatttacctgttggtggca

SEQ ID NO: 50860 - DNA, 20 bp, synthetic construct
  source 1..20: mol_type = other DNA
gcaaaccaggactcctccac

SEQ ID NO: 50861 - DNA, 20 bp, synthetic construct
  source 1..20: mol_type = other DNA
atagcttggtacttagcagc

SEQ ID NO: 50862 - DNA, 20 bp, synthetic construct
  source 1..20: mol_type = other DNA
aagacccatttacctgttgg

SEQ ID NO: 50863 - DNA, 20 bp, synthetic construct
  source 1..20: mol_type = other DNA
ggaacactggtggagcgcct

SEQ ID NO: 50864 - DNA, 20 bp, synthetic construct
  source 1..20: mol_type = other DNA
gcctacaattatatggagat

SEQ ID NO: 50865 - DNA, 20 bp, synthetic construct
  source 1..20: mol_type = other DNA
gcaccgggttctggtcgtgc

SEQ ID NO: 50866 - DNA, 20 bp, synthetic construct
  source 1..20: mol_type = other DNA
gtgactaaattcatggagaa

SEQ ID NO: 50867 - DNA, 20 bp, synthetic construct
  source 1..20: mol_type = other DNA
cctgtagacgtcactggctg

SEQ ID NO: 50868 - DNA, 20 bp, synthetic construct
  source 1..20: mol_type = other DNA
acgcacgacatcaggctgga

SEQ ID NO: 50869 - DNA, 20 bp, synthetic construct
  source 1..20: mol_type = other DNA
aaaggagcggccagggccga

SEQ ID NO: 50870 - DNA, 20 bp, synthetic construct
  source 1..20: mol_type = other DNA
tgctgctcctgagctgagac

SEQ ID NO: 50871 - DNA, 20 bp, synthetic construct
  source 1..20: mol_type = other DNA
tgagtccacctgcttggcca

SEQ ID NO: 50872 - DNA, 20 bp, synthetic construct
  source 1..20: mol_type = other DNA
tcccagacacgcctgcgtag

SEQ ID NO: 50873 - DNA, 20 bp, synthetic construct
  source 1..20: mol_type = other DNA
cccagataatctgatagtgg

SEQ ID NO: 50874 - DNA, 20 bp, synthetic construct
  source 1..20: mol_type = other DNA
ttccccagataatctgatag

SEQ ID NO: 50875 - DNA, 20 bp, synthetic construct
  source 1..20: mol_type = other DNA
agatctaaggcaaagactca

SEQ ID NO: 50876 - DNA, 20 bp, synthetic construct
  source 1..20: mol_type = other DNA
accagactctgatagcaatc

SEQ ID NO: 50877 - DNA, 20 bp, synthetic construct
  source 1..20: mol_type = other DNA
gagtcttcagagtcaacacc

SEQ ID NO: 50878 - DNA, 20 bp, synthetic construct
  source 1..20: mol_type = other DNA
agccttgcagggcagcctcg

SEQ ID NO: 50879 - DNA, 20 bp, synthetic construct
  source 1..20: mol_type = other DNA
agaagccgcccagctggccg

SEQ ID NO: 50880 - DNA, 20 bp, synthetic construct
  source 1..20: mol_type = other DNA
cgcactcgaagcagaaaacg

SEQ ID NO: 50881 - DNA, 20 bp, synthetic construct
  source 1..20: mol_type = other DNA
ggaggagatcaaggagtaca

SEQ ID NO: 50882 - DNA, 20 bp, synthetic construct
  source 1..20: mol_type = other DNA
actgggtgccagcagcagtg

SEQ ID NO: 50883 - DNA, 20 bp, synthetic construct
  source 1..20: mol_type = other DNA
gcagaaaacgtggaagcact

SEQ ID NO: 50884 - DNA, 20 bp, synthetic construct
  source 1..20: mol_type = other DNA
gctggagatggagacaacag

SEQ ID NO: 50885 - DNA, 20 bp, synthetic construct
  source 1..20: mol_type = other DNA
atgagctgcggagccgcatc

SEQ ID NO: 50886 - DNA, 20 bp, synthetic construct
  source 1..20: mol_type = other DNA
ggcctcaggttctcggcccc

SEQ ID NO: 50887 - DNA, 20 bp, synthetic construct
  source 1..20: mol_type = other DNA
tctctttctcacgagcagcc

SEQ ID NO: 50888 - DNA, 20 bp, synthetic construct
  source 1..20: mol_type = other DNA
agagatggatgtgacaggtc

SEQ ID NO: 50889 - DNA, 20 bp, synthetic construct
  source 1..20: mol_type = other DNA
ctctgacattagcttaaagt

SEQ ID NO: 50890 - DNA, 20 bp, synthetic construct
  source 1..20: mol_type = other DNA
acatgcaggaacagaacggg

SEQ ID NO: 50891 - DNA, 20 bp, synthetic construct
  source 1..20: mol_type = other DNA
gtcagcgcccaaggagcagc

SEQ ID NO: 50892 - DNA, 20 bp, synthetic construct
  source 1..20: mol_type = other DNA
acagtgacagtaggggtggc

SEQ ID NO: 50893 - DNA, 20 bp, synthetic construct
  source 1..20: mol_type = other DNA
tctcaagacaggcaggccca

SEQ ID NO: 50894 - DNA, 20 bp, synthetic construct
  source 1..20: mol_type = other DNA
gccaagcaggtgagaggtga

SEQ ID NO: 50895 - DNA, 20 bp, synthetic construct
  source 1..20: mol_type = other DNA
caaaaaatcttatttctgac

SEQ ID NO: 50896 - DNA, 20 bp, synthetic construct
  source 1..20: mol_type = other DNA
cttccctgtctcggaagtcc

SEQ ID NO: 50897 - DNA, 20 bp, synthetic construct
  source 1..20: mol_type = other DNA
tcgtctgggagctggtcctg

SEQ ID NO: 50898 - DNA, 20 bp, synthetic construct
  source 1..20: mol_type = other DNA
tgattaagcatgatattctc

SEQ ID NO: 50899 - DNA, 20 bp, synthetic construct
  source 1..20: mol_type = other DNA
catagacctggaccagccag

SEQ ID NO: 50900 - DNA, 20 bp, synthetic construct
  source 1..20: mol_type = other DNA
atataaacttacagttcata

SEQ ID NO: 50901 - DNA, 20 bp, synthetic construct
  source 1..20: mol_type = other DNA
caagtagggattggcatctt

SEQ ID NO: 50902 - DNA, 20 bp, synthetic construct
  source 1..20: mol_type = other DNA
tctcagtgaaagtgccaatc

SEQ ID NO: 50903 - DNA, 20 bp, synthetic construct
  source 1..20: mol_type = other DNA
agcccagtcaaattttctcc

SEQ ID NO: 50904 - DNA, 20 bp, synthetic construct
  source 1..20: mol_type = other DNA
aggagtgtttgacatagacc

SEQ ID NO: 50905 - DNA, 20 bp, synthetic construct
  source 1..20: mol_type = other DNA
tcagaaactagtgtgaacag

SEQ ID NO: 50906 - DNA, 20 bp, synthetic construct
  source 1..20: mol_type = other DNA
tacctttttaagcagatctc

SEQ ID NO: 50907 - DNA, 20 bp, synthetic construct
  source 1..20: mol_type = other DNA
ttaatgtatgacatgctgac

SEQ ID NO: 50908 - DNA, 20 bp, synthetic construct
  source 1..20: mol_type = other DNA
cctccccgttgactgtgggc

SEQ ID NO: 50909 - DNA, 20 bp, synthetic construct
  source 1..20: mol_type = other DNA
atcgggtaagtggattctga

SEQ ID NO: 50910 - DNA, 20 bp, synthetic construct
  source 1..20: mol_type = other DNA
gtctcggctgaccggctgct

SEQ ID NO: 50911 - DNA, 20 bp, synthetic construct
  source 1..20: mol_type = other DNA
gtggtgcccggccggccaga

SEQ ID NO: 50912 - DNA, 20 bp, synthetic construct
  source 1..20: mol_type = other DNA
ctctttttcataaaagccaa

SEQ ID NO: 50913 - DNA, 20 bp, synthetic construct
  source 1..20: mol_type = other DNA
cggaggggagcccctgccat

SEQ ID NO: 50914 - DNA, 20 bp, synthetic construct
  source 1..20: mol_type = other DNA
ggtcaaggctctgcttgtac

SEQ ID NO: 50915 - DNA, 20 bp, synthetic construct
  source 1..20: mol_type = other DNA
tgacccctatccagaggtct

SEQ ID NO: 50916 - DNA, 20 bp, synthetic construct
  source 1..20: mol_type = other DNA
agccgggaggtcggggatca

SEQ ID NO: 50917 - DNA, 20 bp, synthetic construct
  source 1..20: mol_type = other DNA
cttcagacaggacttgctgg

SEQ ID NO: 50918 - DNA, 20 bp, synthetic construct
  source 1..20: mol_type = other DNA
gcggcacttaccccgcctgg

SEQ ID NO: 50919 - DNA, 20 bp, synthetic construct
  source 1..20: mol_type = other DNA
catgacgcggctgtagggga

SEQ ID NO: 50920 - DNA, 20 bp, synthetic construct
  source 1..20: mol_type = other DNA
ttcctcttctatgaactgca

SEQ ID NO: 50921 - DNA, 20 bp, synthetic construct
  source 1..20: mol_type = other DNA
ccagctctgagctaaggatt

SEQ ID NO: 50922 - DNA, 20 bp, synthetic construct
  source 1..20: mol_type = other DNA
ggactgctcgcttctgctga

SEQ ID NO: 50923 - DNA, 20 bp, synthetic construct
  source 1..20: mol_type = other DNA
gggtggccatctgcctcggc

SEQ ID NO: 50924 - DNA, 20 bp, synthetic construct
  source 1..20: mol_type = other DNA
gctccaggcagatggcaatg

SEQ ID NO: 50925 - DNA, 20 bp, synthetic construct
  source 1..20: mol_type = other DNA
atgctctcagccggtgcact

SEQ ID NO: 50926 - DNA, 20 bp, synthetic construct
  source 1..20: mol_type = other DNA
ggaggtctgggtcttcaaca

SEQ ID NO: 50927 - DNA, 20 bp, synthetic construct
  source 1..20: mol_type = other DNA
agatccagttcagttcaccc

SEQ ID NO: 50928 - DNA, 20 bp, synthetic construct
  source 1..20: mol_type = other DNA
aggatatgctcctcattctc

SEQ ID NO: 50929 - DNA, 20 bp, synthetic construct
  source 1..20: mol_type = other DNA
gcggacctcgtgaaggacaa

SEQ ID NO: 50930 - DNA, 20 bp, synthetic construct
  source 1..20: mol_type = other DNA
cctcattctcggggctgccc

SEQ ID NO: 50931 - DNA, 20 bp, synthetic construct
  source 1..20: mol_type = other DNA
cagcattccaagcgtgcaca

SEQ ID NO: 50932 - DNA, 20 bp, synthetic construct
  source 1..20: mol_type = other DNA
cgaacatcttccgtgtccgg

SEQ ID NO: 50933 - DNA, 20 bp, synthetic construct
  source 1..20: mol_type = other DNA
tgccgacagacaaggcctgg

SEQ ID NO: 50934 - DNA, 20 bp, synthetic construct
  source 1..20: mol_type = other DNA
tcaccacagaggggacgccg

SEQ ID NO: 50935 - DNA, 20 bp, synthetic construct
  source 1..20: mol_type = other DNA
cgagcagctgaccgcattcc

SEQ ID NO: 50936 - DNA, 20 bp, synthetic construct
  source 1..20: mol_type = other DNA
tacagaagcagtacgagaac

SEQ ID NO: 50937 - DNA, 20 bp, synthetic construct
  source 1..20: mol_type = other DNA
aagctggattatttccacaa

SEQ ID NO: 50938 - DNA, 20 bp, synthetic construct
  source 1..20: mol_type = other DNA
tgacgcggctgtaggggagg

SEQ ID NO: 50939 - DNA, 20 bp, synthetic construct
  source 1..20: mol_type = other DNA
ggcgggggccgactgcgtga

SEQ ID NO: 50940 - DNA, 20 bp, synthetic construct
  source 1..20: mol_type = other DNA
gggcctgggggaggaagatg

SEQ ID NO: 50941 - DNA, 20 bp, synthetic construct
  source 1..20: mol_type = other DNA
gggggaactggtgggagtga

SEQ ID NO: 50942 - DNA, 20 bp, synthetic construct
  source 1..20: mol_type = other DNA
ggccatgatgctggcccagc

SEQ ID NO: 50943 - DNA, 20 bp, synthetic construct
  source 1..20: mol_type = other DNA
gttcgcactacagcgggagc

SEQ ID NO: 50944 - DNA, 20 bp, synthetic construct
  source 1..20: mol_type = other DNA
aacaacatcaagtactacga

SEQ ID NO: 50945 - DNA, 20 bp, synthetic construct
  source 1..20: mol_type = other DNA
tgaaggtgcgcccggggtgt

SEQ ID NO: 50946 - DNA, 20 bp, synthetic construct
  source 1..20: mol_type = other DNA
gattttgatggctctgtggt

SEQ ID NO: 50947 - DNA, 20 bp, synthetic construct
  source 1..20: mol_type = other DNA
gcctggaggaggccgtgtgg

SEQ ID NO: 50948 - DNA, 20 bp, synthetic construct
  source 1..20: mol_type = other DNA
ccgctgggcgccccggacgc

SEQ ID NO: 50949 - DNA, 20 bp, synthetic construct
  source 1..20: mol_type = other DNA
cgcttgcgacgagccggggt

SEQ ID NO: 50950 - DNA, 20 bp, synthetic construct
  source 1..20: mol_type = other DNA
ctgcagggcgggcaagagaa

SEQ ID NO: 50951 - DNA, 20 bp, synthetic construct
  source 1..20: mol_type = other DNA
gagggttaaaggcagtggag

SEQ ID NO: 50952 - DNA, 20 bp, synthetic construct
  source 1..20: mol_type = other DNA
cggagatggagggcagcgcg

SEQ ID NO: 50953 - DNA, 20 bp, synthetic construct
  source 1..20: mol_type = other DNA
ttgttgcagcgccagtgcga

SEQ ID NO: 50954 - DNA, 20 bp, synthetic construct
  source 1..20: mol_type = other DNA
ctcctaccagttctccatgg

SEQ ID NO: 50955 - DNA, 20 bp, synthetic construct
  source 1..20: mol_type = other DNA
ctcgggccgggcgcgccctc

SEQ ID NO: 50956 - DNA, 20 bp, synthetic construct
  source 1..20: mol_type = other DNA
ggtcgttgaacctggccacc

SEQ ID NO: 50957 - DNA, 20 bp, synthetic construct
  source 1..20: mol_type = other DNA
caaggtacggcacggaggga

SEQ ID NO: 50958 - DNA, 20 bp, synthetic construct
  source 1..20: mol_type = other DNA
cccccgggtagggtggcggg

SEQ ID NO: 50959 - DNA, 20 bp, synthetic construct
  source 1..20: mol_type = other DNA
agggcaccggcagaagctgg

SEQ ID NO: 50960 - DNA, 20 bp, synthetic construct
  source 1..20: mol_type = other DNA
gccggtgccctgcagagcac

SEQ ID NO: 50961 - DNA, 20 bp, synthetic construct
  source 1..20: mol_type = other DNA
cttgttgcagcgccagtgcg

SEQ ID NO: 50962 - DNA, 20 bp, synthetic construct
  source 1..20: mol_type = other DNA
cgccgccgcaggggaaggcc

SEQ ID NO: 50963 - DNA, 20 bp, synthetic construct
  source 1..20: mol_type = other DNA
aatccaaggtacggcacgga

SEQ ID NO: 50964 - DNA, 20 bp, synthetic construct
  source 1..20: mol_type = other DNA
ccagaccccaatccaaggta

SEQ ID NO: 50965 - DNA, 20 bp, synthetic construct
  source 1..20: mol_type = other DNA
aggatgtcccgtagtagagg

SEQ ID NO: 50966 - DNA, 20 bp, synthetic construct
  source 1..20: mol_type = other DNA
gcagaggaagttggggctgt

SEQ ID NO: 50967 - DNA, 20 bp, synthetic construct
  source 1..20: mol_type = other DNA
gggggacgtgccggatggta

SEQ ID NO: 50968 - DNA, 20 bp, synthetic construct
  source 1..20: mol_type = other DNA
tcggtggtaggtcgccactt

SEQ ID NO: 50969 - DNA, 20 bp, synthetic construct
  source 1..20: mol_type = other DNA
caatccaaggtacggcacgg

SEQ ID NO: 50970 - DNA, 20 bp, synthetic construct
  source 1..20: mol_type = other DNA
aggcggccgtggggcccgga

SEQ ID NO: 50971 - DNA, 20 bp, synthetic construct
  source 1..20: mol_type = other DNA
cccgtagtagaggtggtagg

SEQ ID NO: 50972 - DNA, 20 bp, synthetic construct
  source 1..20: mol_type = other DNA
ccaaggtacggcacggaggg

SEQ ID NO: 50973 - DNA, 20 bp, synthetic construct
  source 1..20: mol_type = other DNA
tattttggattccaagatga

SEQ ID NO: 50974 - DNA, 20 bp, synthetic construct
  source 1..20: mol_type = other DNA
tctgcggaaggggtgtttga

SEQ ID NO: 50975 - DNA, 20 bp, synthetic construct
  source 1..20: mol_type = other DNA
gttctctgtgttcagattgc

SEQ ID NO: 50976 - DNA, 20 bp, synthetic construct
  source 1..20: mol_type = other DNA
gtaattaatgatcctatcca

SEQ ID NO: 50977 - DNA, 20 bp, synthetic construct
  source 1..20: mol_type = other DNA
gggatggagttccaggcccg

SEQ ID NO: 50978 - DNA, 20 bp, synthetic construct
  source 1..20: mol_type = other DNA
agtctagggtaagaagggaa

SEQ ID NO: 50979 - DNA, 20 bp, synthetic construct
  source 1..20: mol_type = other DNA
atttattccacttgctcgcc

SEQ ID NO: 50980 - DNA, 20 bp, synthetic construct
  source 1..20: mol_type = other DNA
agatgatggcagtccctaga

SEQ ID NO: 50981 - DNA, 20 bp, synthetic construct
  source 1..20: mol_type = other DNA
cgactacaagacatggggtc

SEQ ID NO: 50982 - DNA, 20 bp, synthetic construct
  source 1..20: mol_type = other DNA
ctcggaatcggctcgctgca

SEQ ID NO: 50983 - DNA, 20 bp, synthetic construct
  source 1..20: mol_type = other DNA
agtgggccggggaggagggg

SEQ ID NO: 50984 - DNA, 20 bp, synthetic construct
  source 1..20: mol_type = other DNA
tggctcacacgaaggagtac

SEQ ID NO: 50985 - DNA, 20 bp, synthetic construct
  source 1..20: mol_type = other DNA
tcggggagggggcgccttga

SEQ ID NO: 50986 - DNA, 20 bp, synthetic construct
  source 1..20: mol_type = other DNA
gtcccttgagagctgcaggg

SEQ ID NO: 50987 - DNA, 20 bp, synthetic construct
  source 1..20: mol_type = other DNA
gcagcactttgaagccgagg

SEQ ID NO: 50988 - DNA, 20 bp, synthetic construct
  source 1..20: mol_type = other DNA
tctccagggctgtggttgtc

SEQ ID NO: 50989 - DNA, 20 bp, synthetic construct
  source 1..20: mol_type = other DNA
gctgacaaggacaacatcac

SEQ ID NO: 50990 - DNA, 20 bp, synthetic construct
  source 1..20: mol_type = other DNA
agccctggagatgcctgacc

SEQ ID NO: 50991 - DNA, 20 bp, synthetic construct
  source 1..20: mol_type = other DNA
agcaactccaactcctctgg

SEQ ID NO: 50992 - DNA, 20 bp, synthetic construct
  source 1..20: mol_type = other DNA
ggggcccacggcctgtgtcc

SEQ ID NO: 50993 - DNA, 20 bp, synthetic construct
  source 1..20: mol_type = other DNA
tctcaagccgtgtgcaccac

SEQ ID NO: 50994 - DNA, 20 bp, synthetic construct
  source 1..20: mol_type = other DNA
tgtgctgccccttggggagc

SEQ ID NO: 50995 - DNA, 20 bp, synthetic construct
  source 1..20: mol_type = other DNA
tctcggagtgcacaggccga

SEQ ID NO: 50996 - DNA, 20 bp, synthetic construct
  source 1..20: mol_type = other DNA
tccttcagcgcctcgggtgg

SEQ ID NO: 50997 - DNA, 20 bp, synthetic construct
  source 1..20: mol_type = other DNA
ggcacctgcatggagctctt

SEQ ID NO: 50998 - DNA, 20 bp, synthetic construct
  source 1..20: mol_type = other DNA
acccacagccctctttcaac

SEQ ID NO: 50999 - DNA, 20 bp, synthetic construct
  source 1..20: mol_type = other DNA
cttcgtgcggaggctgctct

SEQ ID NO: 51000 - DNA, 20 bp, synthetic construct
  source 1..20: mol_type = other DNA
gccggggcgctggcggtgct

SEQ ID NO: 51001 - DNA, 20 bp, synthetic construct
  source 1..20: mol_type = other DNA
gccagaggccccatggtggg

SEQ ID NO: 51002 - DNA, 20 bp, synthetic construct
  source 1..20: mol_type = other DNA
gcaacagttcccaggggagc

SEQ ID NO: 51003 - DNA, 20 bp, synthetic construct
  source 1..20: mol_type = other DNA
ctgtcggcaacagttcccag

SEQ ID NO: 51004 - DNA, 20 bp, synthetic construct
  source 1..20: mol_type = other DNA
tgctcccaggatggtgctcc

SEQ ID NO: 51005 - DNA, 20 bp, synthetic construct
  source 1..20: mol_type = other DNA
gccgcctgcccgggacgagg

SEQ ID NO: 51006 - DNA, 20 bp, synthetic construct
  source 1..20: mol_type = other DNA
cctcctcctcctcctcgtcc

SEQ ID NO: 51007 - DNA, 20 bp, synthetic construct
  source 1..20: mol_type = other DNA
ggggctggaggaggaagaag

SEQ ID NO: 51008 - DNA, 20 bp, synthetic construct
  source 1..20: mol_type = other DNA
agcatttctggtctttcagg

SEQ ID NO: 51009 - DNA, 20 bp, synthetic construct
  source 1..20: mol_type = other DNA
ggtgggaaggtgttctcaac

SEQ ID NO: 51010 - DNA, 20 bp, synthetic construct
  source 1..20: mol_type = other DNA
tccgccaggtggctgtatga

SEQ ID NO: 51011 - DNA, 20 bp, synthetic construct
  source 1..20: mol_type = other DNA
gccctcatacagccacctgg

SEQ ID NO: 51012 - DNA, 20 bp, synthetic construct
  source 1..20: mol_type = other DNA
gtaagagcctgaggagaaag

SEQ ID NO: 51013 - DNA, 20 bp, synthetic construct
  source 1..20: mol_type = other DNA
ggctgtatgagggcctgagc

SEQ ID NO: 51014 - DNA, 20 bp, synthetic construct
  source 1..20: mol_type = other DNA
cctggagtgaggggaaggtg

SEQ ID NO: 51015 - DNA, 20 bp, synthetic construct
  source 1..20: mol_type = other DNA
catgggagactttggccacg

SEQ ID NO: 51016 - DNA, 20 bp, synthetic construct
  source 1..20: mol_type = other DNA
cctgagcagggagaaagcag

SEQ ID NO: 51017 - DNA, 20 bp, synthetic construct
  source 1..20: mol_type = other DNA
cacctggcggagcgaaagag

SEQ ID NO: 51018 - DNA, 20 bp, synthetic construct
  source 1..20: mol_type = other DNA
gccagccattgtcaaggcag

SEQ ID NO: 51019 - DNA, 20 bp, synthetic construct
  source 1..20: mol_type = other DNA
agtgaggggaaggtgaggcg

SEQ ID NO: 51020 - DNA, 20 bp, synthetic construct
  source 1..20: mol_type = other DNA
gtccaccagggcctggagtg

SEQ ID NO: 51021 - DNA, 20 bp, synthetic construct
  source 1..20: mol_type = other DNA
cttactcacctctcctggtc

SEQ ID NO: 51022 - DNA, 20 bp, synthetic construct
  source 1..20: mol_type = other DNA
ggatgaggaaggcccctcca

SEQ ID NO: 51023 - DNA, 20 bp, synthetic construct
  source 1..20: mol_type = other DNA
accagagtaatggtccacca

SEQ ID NO: 51024 - DNA, 20 bp, synthetic construct
  source 1..20: mol_type = other DNA
actgcccagggccacggctg

SEQ ID NO: 51025 - DNA, 20 bp, synthetic construct
  source 1..20: mol_type = other DNA
acgtggccaaagtctcccat

SEQ ID NO: 51026 - DNA, 20 bp, synthetic construct
  source 1..20: mol_type = other DNA
tgtacagccagccattgtca

SEQ ID NO: 51027 - DNA, 20 bp, synthetic construct
  source 1..20: mol_type = other DNA
cgggagagccagaccaggag

SEQ ID NO: 51028 - DNA, 20 bp, synthetic construct
  source 1..20: mol_type = other DNA
ctggctctcccggatgagga

SEQ ID NO: 51029 - DNA, 20 bp, synthetic construct
  source 1..20: mol_type = other DNA
ccaccagggcctggagtgag

SEQ ID NO: 51030 - DNA, 20 bp, synthetic construct
  source 1..20: mol_type = other DNA
ctacctgcttccatggtcac

SEQ ID NO: 51031 - DNA, 20 bp, synthetic construct
  source 1..20: mol_type = other DNA
tgacagagagtaagagcctg

SEQ ID NO: 51032 - DNA, 20 bp, synthetic construct
  source 1..20: mol_type = other DNA
cggatgaggaaggcccctcc

SEQ ID NO: 51033 - DNA, 20 bp, synthetic construct
  source 1..20: mol_type = other DNA
taccagagtaatggtccacc

SEQ ID NO: 51034 - DNA, 20 bp, synthetic construct
  source 1..20: mol_type = other DNA
tggtaatggttcgttttacc

SEQ ID NO: 51035 - DNA, 20 bp, synthetic construct
  source 1..20: mol_type = other DNA
tctgtcaggagtgggaggaa

SEQ ID NO: 51036 - DNA, 20 bp, synthetic construct
  source 1..20: mol_type = other DNA
catccacattgtcgtcacaa

SEQ ID NO: 51037 - DNA, 20 bp, synthetic construct
  source 1..20: mol_type = other DNA
gcaggaaggaggatgaggga

SEQ ID NO: 51038 - DNA, 20 bp, synthetic construct
  source 1..20: mol_type = other DNA
taagaatgagttttgtgaaa

SEQ ID NO: 51039 - DNA, 20 bp, synthetic construct
  source 1..20: mol_type = other DNA
atagatcagtgggatacaac

SEQ ID NO: 51040 - DNA, 20 bp, synthetic construct
  source 1..20: mol_type = other DNA
ttgaatcaaagtatggacac

SEQ ID NO: 51041 - DNA, 20 bp, synthetic construct
  source 1..20: mol_type = other DNA
ccatactttgattcaactgt

SEQ ID NO: 51042 - DNA, 20 bp, synthetic construct
  source 1..20: mol_type = other DNA
tacccaagctatgattaaca

SEQ ID NO: 51043 - DNA, 20 bp, synthetic construct
  source 1..20: mol_type = other DNA
ggagaaatggtgcgagaagg

SEQ ID NO: 51044 - DNA, 20 bp, synthetic construct
  source 1..20: mol_type = other DNA
agagacatcaagtatggtag

SEQ ID NO: 51045 - DNA, 20 bp, synthetic construct
  source 1..20: mol_type = other DNA
gctctactacatcggagggg

SEQ ID NO: 51046 - DNA, 20 bp, synthetic construct
  source 1..20: mol_type = other DNA
acacaggaggtagaactgtc

SEQ ID NO: 51047 - DNA, 20 bp, synthetic construct
  source 1..20: mol_type = other DNA
gtgcatcaccatccccaggt

SEQ ID NO: 51048 - DNA, 20 bp, synthetic construct
  source 1..20: mol_type = other DNA
tcatggatggctgcgaggcg

SEQ ID NO: 51049 - DNA, 20 bp, synthetic construct
  source 1..20: mol_type = other DNA
gacaaggtcctcacccagat

SEQ ID NO: 51050 - DNA, 20 bp, synthetic construct
  source 1..20: mol_type = other DNA
tgttaccatacagagaacat

SEQ ID NO: 51051 - DNA, 20 bp, synthetic construct
  source 1..20: mol_type = other DNA
caaaagcgatctcctccaga

SEQ ID NO: 51052 - DNA, 20 bp, synthetic construct
  source 1..20: mol_type = other DNA
cagtaatgtccgggatgggg

SEQ ID NO: 51053 - DNA, 20 bp, synthetic construct
  source 1..20: mol_type = other DNA
ttctaggtggctggtcggaa

SEQ ID NO: 51054 - DNA, 20 bp, synthetic construct
  source 1..20: mol_type = other DNA
cataggcaaaggtgtgcagt

SEQ ID NO: 51055 - DNA, 20 bp, synthetic construct
  source 1..20: mol_type = other DNA
gatgattggaaatgggaggc

SEQ ID NO: 51056 - DNA, 20 bp, synthetic construct
  source 1..20: mol_type = other DNA
caacagccggtagccgcgtg

SEQ ID NO: 51057 - DNA, 20 bp, synthetic construct
  source 1..20: mol_type = other DNA
gctgcggggagaaggggcga

SEQ ID NO: 51058 - DNA, 20 bp, synthetic construct
  source 1..20: mol_type = other DNA
caccagtgtgaccgatcccc

SEQ ID NO: 51059 - DNA, 20 bp, synthetic construct
  source 1..20: mol_type = other DNA
cctggactgcaggctgggcc

SEQ ID NO: 51060 - DNA, 20 bp, synthetic construct
  source 1..20: mol_type = other DNA
gtgcaaagtgttcaggtggc

SEQ ID NO: 51061 - DNA, 20 bp, synthetic construct
  source 1..20: mol_type = other DNA
ctgggaggagaagacgagag

SEQ ID NO: 51062 - DNA, 20 bp, synthetic construct
  source 1..20: mol_type = other DNA
tcggagtgagtcctgcggtg

SEQ ID NO: 51063 - DNA, 20 bp, synthetic construct
  source 1..20: mol_type = other DNA
ctatcaattccagaacaacc

SEQ ID NO: 51064 - DNA, 20 bp, synthetic construct
  source 1..20: mol_type = other DNA
cctgttcatagaggtcaatg

SEQ ID NO: 51065 - DNA, 20 bp, synthetic construct
  source 1..20: mol_type = other DNA
tcaagtactgcataataagg

SEQ ID NO: 51066 - DNA, 20 bp, synthetic construct
  source 1..20: mol_type = other DNA
gtgcacgagaaggatgtgat

SEQ ID NO: 51067 - DNA, 20 bp, synthetic construct
  source 1..20: mol_type = other DNA
catagatttgtttcgaggca

SEQ ID NO: 51068 - DNA, 20 bp, synthetic construct
  source 1..20: mol_type = other DNA
tcataaagttatcttgggcc

SEQ ID NO: 51069 - DNA, 20 bp, synthetic construct
  source 1..20: mol_type = other DNA
agttctggtaaaagagaagg

SEQ ID NO: 51070 - DNA, 20 bp, synthetic construct
  source 1..20: mol_type = other DNA
gggtatgcctgaaaaaggag

SEQ ID NO: 51071 - DNA, 20 bp, synthetic construct
  source 1..20: mol_type = other DNA
tggcggcacagctcctgcag

SEQ ID NO: 51072 - DNA, 20 bp, synthetic construct
  source 1..20: mol_type = other DNA
agaggcagtcgaagctctcg

SEQ ID NO: 51073 - DNA, 20 bp, synthetic construct
  source 1..20: mol_type = other DNA
taggatggtagcacacaacc

SEQ ID NO: 51074 - DNA, 20 bp, synthetic construct
  source 1..20: mol_type = other DNA
agtgctccagcagctcgaag

SEQ ID NO: 51075 - DNA, 20 bp, synthetic construct
  source 1..20: mol_type = other DNA
gctcctgcagcggccgcacg

SEQ ID NO: 51076 - DNA, 20 bp, synthetic construct
  source 1..20: mol_type = other DNA
gggcccccagtagaatccgc

SEQ ID NO: 51077 - DNA, 20 bp, synthetic construct
  source 1..20: mol_type = other DNA
gggcgaaaaagcagttccgc

SEQ ID NO: 51078 - DNA, 20 bp, synthetic construct
  source 1..20: mol_type = other DNA
tgcggaagtgcgtgtcgccg

SEQ ID NO: 51079 - DNA, 20 bp, synthetic construct
  source 1..20: mol_type = other DNA
caggaaggtgcccacgggct

SEQ ID NO: 51080 - DNA, 20 bp, synthetic construct
  source 1..20: mol_type = other DNA
gcaggcgtccaggagcgcgc

SEQ ID NO: 51081 - DNA, 20 bp, synthetic construct
  source 1..20: mol_type = other DNA
gcggtcccggccccggcccc

SEQ ID NO: 51082 - DNA, 20 bp, synthetic construct
  source 1..20: mol_type = other DNA
cgcaccaggaaggtgcccac

SEQ ID NO: 51083 - DNA, 20 bp, synthetic construct
  source 1..20: mol_type = other DNA
agaggggccggctcaacacc

SEQ ID NO: 51084 - DNA, 20 bp, synthetic construct
  source 1..20: mol_type = other DNA
aacctgcgcatccagtgtga

SEQ ID NO: 51085 - DNA, 20 bp, synthetic construct
  source 1..20: mol_type = other DNA
agacggctgctcgggcacct

SEQ ID NO: 51086 - DNA, 20 bp, synthetic construct
  source 1..20: mol_type = other DNA
agctgaaggtcttgaggcgc

SEQ ID NO: 51087 - DNA, 20 bp, synthetic construct
  source 1..20: mol_type = other DNA
tgacgctgagcgtgaagaag

SEQ ID NO: 51088 - DNA, 20 bp, synthetic construct
  source 1..20: mol_type = other DNA
tcttggagctgaaggtcttg

SEQ ID NO: 51089 - DNA, 20 bp, synthetic construct
  source 1..20: mol_type = other DNA
cggatcagaaaggtgccggc

SEQ ID NO: 51090 - DNA, 20 bp, synthetic construct
  source 1..20: mol_type = other DNA
caggttcttggtcccagact

SEQ ID NO: 51091 - DNA, 20 bp, synthetic construct
  source 1..20: mol_type = other DNA
gcttgagcacgcagtcgaag

SEQ ID NO: 51092 - DNA, 20 bp, synthetic construct
  source 1..20: mol_type = other DNA
ctggggggactcccagggag

SEQ ID NO: 51093 - DNA, 20 bp, synthetic construct
  source 1..20: mol_type = other DNA
ttgagcacgcagtcgaagcg

SEQ ID NO: 51094 - DNA, 20 bp, synthetic construct
  source 1..20: mol_type = other DNA
tcagcgtcaagacccagtct

SEQ ID NO: 51095 - DNA, 20 bp, synthetic construct
  source 1..20: mol_type = other DNA
ctgctcagtgccgagcccgc

SEQ ID NO: 51096 - DNA, 20 bp, synthetic construct
  source 1..20: mol_type = other DNA
caagagcgagtaccagctgg

SEQ ID NO: 51097 - DNA, 20 bp, synthetic construct
  source 1..20: mol_type = other DNA
ccgtctgcccagccactccc

SEQ ID NO: 51098 - DNA, 20 bp, synthetic construct
  source 1..20: mol_type = other DNA
acgcagtcgaagcggggcac

SEQ ID NO: 51099 - DNA, 20 bp, synthetic construct
  source 1..20: mol_type = other DNA
cgagctgtcgcggatcagaa

SEQ ID NO: 51100 - DNA, 20 bp, synthetic construct
  source 1..20: mol_type = other DNA
cagggggatcttctcgcccc

SEQ ID NO: 51101 - DNA, 20 bp, synthetic construct
  source 1..20: mol_type = other DNA
gcaggttcttggtcccagac

SEQ ID NO: 51102 - DNA, 20 bp, synthetic construct
  source 1..20: mol_type = other DNA
cagcaggttcgcctcgccgc

SEQ ID NO: 51103 - DNA, 20 bp, synthetic construct
  source 1..20: mol_type = other DNA
cctgcgcatccagtgtgagg

SEQ ID NO: 51104 - DNA, 20 bp, synthetic construct
  source 1..20: mol_type = other DNA
caccactacatgccgccccc

SEQ ID NO: 51105 - DNA, 20 bp, synthetic construct
  source 1..20: mol_type = other DNA
ctgcgcatccagtgtgaggg

SEQ ID NO: 51106 - DNA, 20 bp, synthetic construct
  source 1..20: mol_type = other DNA
acctgcgcatccagtgtgag

SEQ ID NO: 51107 - DNA, 20 bp, synthetic construct
  source 1..20: mol_type = other DNA
agaagctgcccccctcacac

SEQ ID NO: 51108 - DNA, 20 bp, synthetic construct
  source 1..20: mol_type = other DNA
cttgagcacgcagtcgaagc

SEQ ID NO: 51109 - DNA, 20 bp, synthetic construct
  source 1..20: mol_type = other DNA
ctgtgggtgaccatggcgca

SEQ ID NO: 51110 - DNA, 20 bp, synthetic construct
  source 1..20: mol_type = other DNA
ttctactggagcgcagtgac

SEQ ID NO: 51111 - DNA, 20 bp, synthetic construct
  source 1..20: mol_type = other DNA
tgcaggagagcggcttctac

SEQ ID NO: 51112 - DNA, 20 bp, synthetic construct
  source 1..20: mol_type = other DNA
cacgcagtcgaagcggggca

SEQ ID NO: 51113 - DNA, 20 bp, synthetic construct
  source 1..20: mol_type = other DNA
gcggatcagaaaggtgccgg

SEQ ID NO: 51114 - DNA, 20 bp, synthetic construct
  source 1..20: mol_type = other DNA
cttaaagcggggcatcgtac

SEQ ID NO: 51115 - DNA, 20 bp, synthetic construct
  source 1..20: mol_type = other DNA
cagaaaggtgccggcgggct

SEQ ID NO: 51116 - DNA, 20 bp, synthetic construct
  source 1..20: mol_type = other DNA
cgtctgcccagccactccct

SEQ ID NO: 51117 - DNA, 20 bp, synthetic construct
  source 1..20: mol_type = other DNA
caccagctggtactcgctct

SEQ ID NO: 51118 - DNA, 20 bp, synthetic construct
  source 1..20: mol_type = other DNA
tgagcgtgaagaagtggcgc

SEQ ID NO: 51119 - DNA, 20 bp, synthetic construct
  source 1..20: mol_type = other DNA
gtcgcggatcagaaaggtgc

SEQ ID NO: 51120 - DNA, 20 bp, synthetic construct
  source 1..20: mol_type = other DNA
caaagaacatacaggcgctt

SEQ ID NO: 51121 - DNA, 20 bp, synthetic construct
  source 1..20: mol_type = other DNA
gcagtttctgtttaagagat

SEQ ID NO: 51122 - DNA, 20 bp, synthetic construct
  source 1..20: mol_type = other DNA
taggaggtgtttccaactgc

SEQ ID NO: 51123 - DNA, 20 bp, synthetic construct
  source 1..20: mol_type = other DNA
atctgcgtgtggtatttagg

SEQ ID NO: 51124 - DNA, 20 bp, synthetic construct
  source 1..20: mol_type = other DNA
cacataaccgtcttttctgt

SEQ ID NO: 51125 - DNA, 20 bp, synthetic construct
  source 1..20: mol_type = other DNA
aaaagggaaagtccgaatta

SEQ ID NO: 51126 - DNA, 20 bp, synthetic construct
  source 1..20: mol_type = other DNA
tggacttagatcattcctgt

SEQ ID NO: 51127 - DNA, 20 bp, synthetic construct
  source 1..20: mol_type = other DNA
gttcaaagtaatggagacag

SEQ ID NO: 51128 - DNA, 20 bp, synthetic construct
  source 1..20: mol_type = other DNA
agatgccttcttgtgccgtg

SEQ ID NO: 51129 - DNA, 20 bp, synthetic construct
  source 1..20: mol_type = other DNA
cgaacaccaggagattttag

SEQ ID NO: 51130 - DNA, 20 bp, synthetic construct
  source 1..20: mol_type = other DNA
agcagcttcctactagtgga

SEQ ID NO: 51131 - DNA, 20 bp, synthetic construct
  source 1..20: mol_type = other DNA
gcccatttatcaattggatg

SEQ ID NO: 51132 - DNA, 20 bp, synthetic construct
  source 1..20: mol_type = other DNA
ctctttcaaaatcatagaag

SEQ ID NO: 51133 - DNA, 20 bp, synthetic construct
  source 1..20: mol_type = other DNA
aaatatgtgtctctcatgtt

SEQ ID NO: 51134 - DNA, 20 bp, synthetic construct
  source 1..20: mol_type = other DNA
tgcgcctgcatggtgccccc

SEQ ID NO: 51135 - DNA, 20 bp, synthetic construct
  source 1..20: mol_type = other DNA
tctcgtggtggtaataaggg

SEQ ID NO: 51136 - DNA, 20 bp, synthetic construct
  source 1..20: mol_type = other DNA
gcagcttcctactagtggat

SEQ ID NO: 51137 - DNA, 20 bp, synthetic construct
  source 1..20: mol_type = other DNA
caaatcttgggagaggctta

SEQ ID NO: 51138 - DNA, 20 bp, synthetic construct
  source 1..20: mol_type = other DNA
cccatttatcaattggatga

SEQ ID NO: 51139 - DNA, 20 bp, synthetic construct
  source 1..20: mol_type = other DNA
tttgatgtgggttgcctagg

SEQ ID NO: 51140 - DNA, 20 bp, synthetic construct
  source 1..20: mol_type = other DNA
tctcgagcatacgattcata

SEQ ID NO: 51141 - DNA, 20 bp, synthetic construct
  source 1..20: mol_type = other DNA
gcatcctttccagtgtactc

SEQ ID NO: 51142 - DNA, 20 bp, synthetic construct
  source 1..20: mol_type = other DNA
tgaagagaaaaacaattgga

SEQ ID NO: 51143 - DNA, 20 bp, synthetic construct
  source 1..20: mol_type = other DNA
cagcttcctactagtggatg

SEQ ID NO: 51144 - DNA, 20 bp, synthetic construct
  source 1..20: mol_type = other DNA
aggtccacttcttgtgtcaa

SEQ ID NO: 51145 - DNA, 20 bp, synthetic construct
  source 1..20: mol_type = other DNA
aaggaaaaagttgatttcct

SEQ ID NO: 51146 - DNA, 20 bp, synthetic construct
  source 1..20: mol_type = other DNA
gaatggcatatcagcaaacc

SEQ ID NO: 51147 - DNA, 20 bp, synthetic construct
  source 1..20: mol_type = other DNA
tttaattcaccagaagaact

SEQ ID NO: 51148 - DNA, 20 bp, synthetic construct
  source 1..20: mol_type = other DNA
aagtgttctggaggccgaag

SEQ ID NO: 51149 - DNA, 20 bp, synthetic construct
  source 1..20: mol_type = other DNA
tcaaatgcaccagtaggaac

SEQ ID NO: 51150 - DNA, 20 bp, synthetic construct
  source 1..20: mol_type = other DNA
tgattgacttaagttttact

SEQ ID NO: 51151 - DNA, 20 bp, synthetic construct
  source 1..20: mol_type = other DNA
ggttctatccgtaaacagta

SEQ ID NO: 51152 - DNA, 20 bp, synthetic construct
  source 1..20: mol_type = other DNA
ggacagtttataaagtgttc

SEQ ID NO: 51153 - DNA, 20 bp, synthetic construct
  source 1..20: mol_type = other DNA
ggtggaggggtatcaggaag

SEQ ID NO: 51154 - DNA, 20 bp, synthetic construct
  source 1..20: mol_type = other DNA
tgagggcttgaattctgcct

SEQ ID NO: 51155 - DNA, 20 bp, synthetic construct
  source 1..20: mol_type = other DNA
aattacccaggtcgacgtct

SEQ ID NO: 51156 - DNA, 20 bp, synthetic construct
  source 1..20: mol_type = other DNA
tgaagatgccccagtggagg

SEQ ID NO: 51157 - DNA, 20 bp, synthetic construct
  source 1..20: mol_type = other DNA
cttggtggaacagggggagc

SEQ ID NO: 51158 - DNA, 20 bp, synthetic construct
  source 1..20: mol_type = other DNA
ctgagcacatagcatcgacg

SEQ ID NO: 51159 - DNA, 20 bp, synthetic construct
  source 1..20: mol_type = other DNA
tgtccttccacgtcttatgc

SEQ ID NO: 51160 - DNA, 20 bp, synthetic construct
  source 1..20: mol_type = other DNA
tccttcatttcaagtgtaag

SEQ ID NO: 51161 - DNA, 20 bp, synthetic construct
  source 1..20: mol_type = other DNA
tgcacgtcagctgacacttt

SEQ ID NO: 51162 - DNA, 20 bp, synthetic construct
  source 1..20: mol_type = other DNA
gtgttgtaatgaattcatta

SEQ ID NO: 51163 - DNA, 20 bp, synthetic construct
  source 1..20: mol_type = other DNA
gacgttggagatcaccacaa

SEQ ID NO: 51164 - DNA, 20 bp, synthetic construct
  source 1..20: mol_type = other DNA
atgataaaaattttcccttc

SEQ ID NO: 51165 - DNA, 20 bp, synthetic construct
  source 1..20: mol_type = other DNA
tgtaaatgatcatagacatc

SEQ ID NO: 51166 - DNA, 20 bp, synthetic construct
  source 1..20: mol_type = other DNA
ctgtgaagttgaggtaacaa

SEQ ID NO: 51167 - DNA, 20 bp, synthetic construct
  source 1..20: mol_type = other DNA
tatttggatacagatacttc

SEQ ID NO: 51168 - DNA, 20 bp, synthetic construct
  source 1..20: mol_type = other DNA
gtccaccaatggcagtctgg

SEQ ID NO: 51169 - DNA, 20 bp, synthetic construct
  source 1..20: mol_type = other DNA
gatcatttacagctgtctga

SEQ ID NO: 51170 - DNA, 20 bp, synthetic construct
  source 1..20: mol_type = other DNA
caccaaaagaggtctcaatg

SEQ ID NO: 51171 - DNA, 20 bp, synthetic construct
  source 1..20: mol_type = other DNA
tgtgatagggtcatgttcgt

SEQ ID NO: 51172 - DNA, 20 bp, synthetic construct
  source 1..20: mol_type = other DNA
tgactcaaaattcctggagc

SEQ ID NO: 51173 - DNA, 20 bp, synthetic construct
  source 1..20: mol_type = other DNA
agccgccagactgccattgg

SEQ ID NO: 51174 - DNA, 20 bp, synthetic construct
  source 1..20: mol_type = other DNA
acgttggagatcaccacaac

SEQ ID NO: 51175 - DNA, 20 bp, synthetic construct
  source 1..20: mol_type = other DNA
aggcccaaccgctcgggagc

SEQ ID NO: 51176 - DNA, 20 bp, synthetic construct
  source 1..20: mol_type = other DNA
attcatcttgtaaatcttcc

SEQ ID NO: 51177 - DNA, 20 bp, synthetic construct
  source 1..20: mol_type = other DNA
accttacaaaacctcgtcca

SEQ ID NO: 51178 - DNA, 20 bp, synthetic construct
  source 1..20: mol_type = other DNA
gcacacaaaagtgatgaaca

SEQ ID NO: 51179 - DNA, 20 bp, synthetic construct
  source 1..20: mol_type = other DNA
aacgcaccctcagaggccgc

SEQ ID NO: 51180 - DNA, 20 bp, synthetic construct
  source 1..20: mol_type = other DNA
acccctgtcttcaagaccag

SEQ ID NO: 51181 - DNA, 20 bp, synthetic construct
  source 1..20: mol_type = other DNA
gatcatccagctgtgacagg

SEQ ID NO: 51182 - DNA, 20 bp, synthetic construct
  source 1..20: mol_type = other DNA
gcttaaaaagttggaggaat

SEQ ID NO: 51183 - DNA, 20 bp, synthetic construct
  source 1..20: mol_type = other DNA
attgatcatccagctgtgac

SEQ ID NO: 51184 - DNA, 20 bp, synthetic construct
  source 1..20: mol_type = other DNA
tgtgatacaggtccttggtc

SEQ ID NO: 51185 - DNA, 20 bp, synthetic construct
  source 1..20: mol_type = other DNA
tcggcctagcagtgctttgg

SEQ ID NO: 51186 - DNA, 20 bp, synthetic construct
  source 1..20: mol_type = other DNA
tctggcactggctgtgatac

SEQ ID NO: 51187 - DNA, 20 bp, synthetic construct
  source 1..20: mol_type = other DNA
tgggtggagcaccaggatga

SEQ ID NO: 51188 - DNA, 20 bp, synthetic construct
  source 1..20: mol_type = other DNA
gatgatctttaacctccttc

SEQ ID NO: 51189 - DNA, 20 bp, synthetic construct
  source 1..20: mol_type = other DNA
tgtcacacctagtggcccct

SEQ ID NO: 51190 - DNA, 20 bp, synthetic construct
  source 1..20: mol_type = other DNA
atcatctcagccaactgggt

SEQ ID NO: 51191 - DNA, 20 bp, synthetic construct
  source 1..20: mol_type = other DNA
ggaaataatcaccacaggga

SEQ ID NO: 51192 - DNA, 20 bp, synthetic construct
  source 1..20: mol_type = other DNA
gccgcatatgccctaggaaa

SEQ ID NO: 51193 - DNA, 20 bp, synthetic construct
  source 1..20: mol_type = other DNA
tctctatcctgacattccca

SEQ ID NO: 51194 - DNA, 20 bp, synthetic construct
  source 1..20: mol_type = other DNA
gcagacatgcaagatctgaa

SEQ ID NO: 51195 - DNA, 20 bp, synthetic construct
  source 1..20: mol_type = other DNA
gaaagtggtagagaatctcc

SEQ ID NO: 51196 - DNA, 20 bp, synthetic construct
  source 1..20: mol_type = other DNA
tcccacatctctgctccctc

SEQ ID NO: 51197 - DNA, 20 bp, synthetic construct
  source 1..20: mol_type = other DNA
ttcttttcttacagaccctg

SEQ ID NO: 51198 - DNA, 20 bp, synthetic construct
  source 1..20: mol_type = other DNA
tcctgacattcccaaggagg

SEQ ID NO: 51199 - DNA, 20 bp, synthetic construct
  source 1..20: mol_type = other DNA
ttggtgtttcataatctcct

SEQ ID NO: 51200 - DNA, 20 bp, synthetic construct
  source 1..20: mol_type = other DNA
cgatctaggcagatgttggg

SEQ ID NO: 51201 - DNA, 20 bp, synthetic construct
  source 1..20: mol_type = other DNA
cagtcctcgcttggtggtgg

SEQ ID NO: 51202 - DNA, 20 bp, synthetic construct
  source 1..20: mol_type = other DNA
gggagcagagatgtgggaat

SEQ ID NO: 51203 - DNA, 20 bp, synthetic construct
  source 1..20: mol_type = other DNA
gatctaggcagatgttgggc

SEQ ID NO: 51204 - DNA, 20 bp, synthetic construct
  source 1..20: mol_type = other DNA
tgcgctacctcccccatgtg

SEQ ID NO: 51205 - DNA, 20 bp, synthetic construct
  source 1..20: mol_type = other DNA
gggctttatcagtaaggagc

SEQ ID NO: 51206 - DNA, 20 bp, synthetic construct
  source 1..20: mol_type = other DNA
aactctcacggacgaggagc

SEQ ID NO: 51207 - DNA, 20 bp, synthetic construct
  source 1..20: mol_type = other DNA
agagctgatggagctgctcc

SEQ ID NO: 51208 - DNA, 20 bp, synthetic construct
  source 1..20: mol_type = other DNA
ctctgcagaattcaaacact

SEQ ID NO: 51209 - DNA, 20 bp, synthetic construct
  source 1..20: mol_type = other DNA
agagaacattcgactcttgc

SEQ ID NO: 51210 - DNA, 20 bp, synthetic construct
  source 1..20: mol_type = other DNA
tcaggtatggggcagcgcct

SEQ ID NO: 51211 - DNA, 20 bp, synthetic construct
  source 1..20: mol_type = other DNA
aaaaccctcaagagtcaagg

SEQ ID NO: 51212 - DNA, 20 bp, synthetic construct
  source 1..20: mol_type = other DNA
gcctagatcggctagaaaac

SEQ ID NO: 51213 - DNA, 20 bp, synthetic construct
  source 1..20: mol_type = other DNA
gatgctggaggagagaatcg

SEQ ID NO: 51214 - DNA, 20 bp, synthetic construct
  source 1..20: mol_type = other DNA
actttcagaatggtccaccc

SEQ ID NO: 51215 - DNA, 20 bp, synthetic construct
  source 1..20: mol_type = other DNA
caagagtaggtttttctctt

SEQ ID NO: 51216 - DNA, 20 bp, synthetic construct
  source 1..20: mol_type = other DNA
ttcagtgaaagccatctcgg

SEQ ID NO: 51217 - DNA, 20 bp, synthetic construct
  source 1..20: mol_type = other DNA
cttctggcagtggtttgacg

SEQ ID NO: 51218 - DNA, 20 bp, synthetic construct
  source 1..20: mol_type = other DNA
cctgagagggagacaagaga

SEQ ID NO: 51219 - DNA, 20 bp, synthetic construct
  source 1..20: mol_type = other DNA
tccaagtcaatggcatccct

SEQ ID NO: 51220 - DNA, 20 bp, synthetic construct
  source 1..20: mol_type = other DNA
tgtgaacttctcctctgtca

SEQ ID NO: 51221 - DNA, 20 bp, synthetic construct
  source 1..20: mol_type = other DNA
gaggtgaaaagaccggcagg

SEQ ID NO: 51222 - DNA, 20 bp, synthetic construct
  source 1..20: mol_type = other DNA
cgtgcacatgaatccccccc

SEQ ID NO: 51223 - DNA, 20 bp, synthetic construct
  source 1..20: mol_type = other DNA
tcaggaacatggtgaggacg

SEQ ID NO: 51224 - DNA, 20 bp, synthetic construct
  source 1..20: mol_type = other DNA
tcaggatggagaattcgacc

SEQ ID NO: 51225 - DNA, 20 bp, synthetic construct
  source 1..20: mol_type = other DNA
gatggagtaccaccaagcca

SEQ ID NO: 51226 - DNA, 20 bp, synthetic construct
  source 1..20: mol_type = other DNA
gcagtggtttgacggggtga

SEQ ID NO: 51227 - DNA, 20 bp, synthetic construct
  source 1..20: mol_type = other DNA
catgaatcccccccaggtga

SEQ ID NO: 51228 - DNA, 20 bp, synthetic construct
  source 1..20: mol_type = other DNA
cccgcccaccagcaggcgta

SEQ ID NO: 51229 - DNA, 20 bp, synthetic construct
  source 1..20: mol_type = other DNA
accgtacgcctgctggtggg

SEQ ID NO: 51230 - DNA, 20 bp, synthetic construct
  source 1..20: mol_type = other DNA
gaatgcatctgcagatgctg

SEQ ID NO: 51231 - DNA, 20 bp, synthetic construct
  source 1..20: mol_type = other DNA
atcaacagctttagctgtca

SEQ ID NO: 51232 - DNA, 20 bp, synthetic construct
  source 1..20: mol_type = other DNA
aacgcatctgcagatgccgg

SEQ ID NO: 51233 - DNA, 20 bp, synthetic construct
  source 1..20: mol_type = other DNA
ggacgtagcgcggcgtgtgg

SEQ ID NO: 51234 - DNA, 20 bp, synthetic construct
  source 1..20: mol_type = other DNA
ccagatcaaccagacgtttg

SEQ ID NO: 51235 - DNA, 20 bp, synthetic construct
  source 1..20: mol_type = other DNA
cgtgcacatgaacccccccc

SEQ ID NO: 51236 - DNA, 20 bp, synthetic construct
  source 1..20: mol_type = other DNA
tacagtcctggtaatggtgt

SEQ ID NO: 51237 - DNA, 20 bp, synthetic construct
  source 1..20: mol_type = other DNA
catgaaccccccccaggtga

SEQ ID NO: 51238 - DNA, 20 bp, synthetic construct
  source 1..20: mol_type = other DNA
gaacgcatctgcagatgccg

SEQ ID NO: 51239 - DNA, 20 bp, synthetic construct
  source 1..20: mol_type = other DNA
agcatctcctccactgggcc

SEQ ID NO: 51240 - DNA, 20 bp, synthetic construct
  source 1..20: mol_type = other DNA
gcggcgtgtggaggagctcc

SEQ ID NO: 51241 - DNA, 20 bp, synthetic construct
  source 1..20: mol_type = other DNA
caccgatggggacttcgatc

SEQ ID NO: 51242 - DNA, 20 bp, synthetic construct
  source 1..20: mol_type = other DNA
tatgccacacagctccaggt

SEQ ID NO: 51243 - DNA, 20 bp, synthetic construct
  source 1..20: mol_type = other DNA
gcaatggtttgacggtgtga

SEQ ID NO: 51244 - DNA, 20 bp, synthetic construct
  source 1..20: mol_type = other DNA
ctacagtcctggtaatggtg

SEQ ID NO: 51245 - DNA, 20 bp, synthetic construct
  source 1..20: mol_type = other DNA
agaccgtcgtggggcagagt

SEQ ID NO: 51246 - DNA, 20 bp, synthetic construct
  source 1..20: mol_type = other DNA
tcggccagcatctcctccac

SEQ ID NO: 51247 - DNA, 20 bp, synthetic construct
  source 1..20: mol_type = other DNA
acagtcctggtaatggtgtg

SEQ ID NO: 51248 - DNA, 20 bp, synthetic construct
  source 1..20: mol_type = other DNA
gcaccaggccctccaggagc

SEQ ID NO: 51249 - DNA, 20 bp, synthetic construct
  source 1..20: mol_type = other DNA
ggtaattcaagtctcccaag

SEQ ID NO: 51250 - DNA, 20 bp, synthetic construct
  source 1..20: mol_type = other DNA
acatcagcacccttgaggtg

SEQ ID NO: 51251 - DNA, 20 bp, synthetic construct
  source 1..20: mol_type = other DNA
cagcgtttcctcagggcact

SEQ ID NO: 51252 - DNA, 20 bp, synthetic construct
  source 1..20: mol_type = other DNA
tggtgacagagaagcaggcg

SEQ ID NO: 51253 - DNA, 20 bp, synthetic construct
  source 1..20: mol_type = other DNA
gcagtggtttgatggtgtcc

SEQ ID NO: 51254 - DNA, 20 bp, synthetic construct
  source 1..20: mol_type = other DNA
cagaagatgccgcaggtgtt

SEQ ID NO: 51255 - DNA, 20 bp, synthetic construct
  source 1..20: mol_type = other DNA
ggtgacagagaagcaggcgc

SEQ ID NO: 51256 - DNA, 20 bp, synthetic construct
  source 1..20: mol_type = other DNA
cagcaccttcaggcctcggt

SEQ ID NO: 51257 - DNA, 20 bp, synthetic construct
  source 1..20: mol_type = other DNA
gtcctggtcgcagttcaaca

SEQ ID NO: 51258 - DNA, 20 bp, synthetic construct
  source 1..20: mol_type = other DNA
acagatgggtaaggatggca

SEQ ID NO: 51259 - DNA, 20 bp, synthetic construct
  source 1..20: mol_type = other DNA
gactcgccataatcacctca

SEQ ID NO: 51260 - DNA, 20 bp, synthetic construct
  source 1..20: mol_type = other DNA
agcagaggcagatggagagc

SEQ ID NO: 51261 - DNA, 20 bp, synthetic construct
  source 1..20: mol_type = other DNA
catcatcgtccatcagtttg

SEQ ID NO: 51262 - DNA, 20 bp, synthetic construct
  source 1..20: mol_type = other DNA
catgcagactctgctcagct

SEQ ID NO: 51263 - DNA, 20 bp, synthetic construct
  source 1..20: mol_type = other DNA
gtgtctatcgttattggtgt

SEQ ID NO: 51264 - DNA, 20 bp, synthetic construct
  source 1..20: mol_type = other DNA
tcttccctcaggaactgcaa

SEQ ID NO: 51265 - DNA, 20 bp, synthetic construct
  source 1..20: mol_type = other DNA
gtcttccctcaggaactgca

SEQ ID NO: 51266 - DNA, 20 bp, synthetic construct
  source 1..20: mol_type = other DNA
cgatgatgccaatggtgatg

SEQ ID NO: 51267 - DNA, 20 bp, synthetic construct
  source 1..20: mol_type = other DNA
ccagacacaccatctccagt

SEQ ID NO: 51268 - DNA, 20 bp, synthetic construct
  source 1..20: mol_type = other DNA
aaatgtggagagccaccagg

SEQ ID NO: 51269 - DNA, 20 bp, synthetic construct
  source 1..20: mol_type = other DNA
tgatgagcttatcctcacca

SEQ ID NO: 51270 - DNA, 20 bp, synthetic construct
  source 1..20: mol_type = other DNA
agcccctcagccccacctgg

SEQ ID NO: 51271 - DNA, 20 bp, synthetic construct
  source 1..20: mol_type = other DNA
ctgatggacgatgatgccaa

SEQ ID NO: 51272 - DNA, 20 bp, synthetic construct
  source 1..20: mol_type = other DNA
ccatcagtttgtggatgtta

SEQ ID NO: 51273 - DNA, 20 bp, synthetic construct
  source 1..20: mol_type = other DNA
ggatgtggaagaaagtgatg

SEQ ID NO: 51274 - DNA, 20 bp, synthetic construct
  source 1..20: mol_type = other DNA
gtctgcatgaccttcaggaa

SEQ ID NO: 51275 - DNA, 20 bp, synthetic construct
  source 1..20: mol_type = other DNA
tgctgaggaggagttggagc

SEQ ID NO: 51276 - DNA, 20 bp, synthetic construct
  source 1..20: mol_type = other DNA
ggtaattgaggtcttccctc

SEQ ID NO: 51277 - DNA, 20 bp, synthetic construct
  source 1..20: mol_type = other DNA
gggagggtactgagaatgag

SEQ ID NO: 51278 - DNA, 20 bp, synthetic construct
  source 1..20: mol_type = other DNA
cgaggtgacagcagcattgc

SEQ ID NO: 51279 - DNA, 20 bp, synthetic construct
  source 1..20: mol_type = other DNA
tgccaatggtgatgtggatg

SEQ ID NO: 51280 - DNA, 20 bp, synthetic construct
  source 1..20: mol_type = other DNA
catgatgaagtgagcagggt

SEQ ID NO: 51281 - DNA, 20 bp, synthetic construct
  source 1..20: mol_type = other DNA
ctgggccttgtgcagcctgg

SEQ ID NO: 51282 - DNA, 20 bp, synthetic construct
  source 1..20: mol_type = other DNA
acggctcatctgaggaggtt

SEQ ID NO: 51283 - DNA, 20 bp, synthetic construct
  source 1..20: mol_type = other DNA
tcatcagcgtggaggacctg

SEQ ID NO: 51284 - DNA, 20 bp, synthetic construct
  source 1..20: mol_type = other DNA
ttccacatccacatcaccat

SEQ ID NO: 51285 - DNA, 20 bp, synthetic construct
  source 1..20: mol_type = other DNA
ctagcctgcagagcagtgtt

SEQ ID NO: 51286 - DNA, 20 bp, synthetic construct
  source 1..20: mol_type = other DNA
ggtgaaggtggtggtggtgg

SEQ ID NO: 51287 - DNA, 20 bp, synthetic construct
  source 1..20: mol_type = other DNA
ggtaataaacagggtggaca

SEQ ID NO: 51288 - DNA, 20 bp, synthetic construct
  source 1..20: mol_type = other DNA
gagcagcatataccctctcg

SEQ ID NO: 51289 - DNA, 20 bp, synthetic construct
  source 1..20: mol_type = other DNA
agacaaagagaatatcccag

SEQ ID NO: 51290 - DNA, 20 bp, synthetic construct
  source 1..20: mol_type = other DNA
actattttaatgtccccgag

SEQ ID NO: 51291 - DNA, 20 bp, synthetic construct
  source 1..20: mol_type = other DNA
tagtggaggcagacagtttg

SEQ ID NO: 51292 - DNA, 20 bp, synthetic construct
  source 1..20: mol_type = other DNA
ccaaaaggaaagcagaaacc

SEQ ID NO: 51293 - DNA, 20 bp, synthetic construct
  source 1..20: mol_type = other DNA
ttctaatatttaaataaaaa

SEQ ID NO: 51294 - DNA, 20 bp, synthetic construct
  source 1..20: mol_type = other DNA
gaaaatgttctatagttttc

SEQ ID NO: 51295 - DNA, 20 bp, synthetic construct
  source 1..20: mol_type = other DNA
tggacagcaaggtattgggg

SEQ ID NO: 51296 - DNA, 20 bp, synthetic construct
  source 1..20: mol_type = other DNA
tgacacgttgccatcacaac

SEQ ID NO: 51297 - DNA, 20 bp, synthetic construct
  source 1..20: mol_type = other DNA
ggcaacaaaacttctgagca

SEQ ID NO: 51298 - DNA, 20 bp, synthetic construct
  source 1..20: mol_type = other DNA
attggatggatatcagcata

SEQ ID NO: 51299 - DNA, 20 bp, synthetic construct
  source 1..20: mol_type = other DNA
cactgtattccgcttggcca

SEQ ID NO: 51300 - DNA, 20 bp, synthetic construct
  source 1..20: mol_type = other DNA
ctttggcactcctgacaaat

SEQ ID NO: 51301 - DNA, 20 bp, synthetic construct
  source 1..20: mol_type = other DNA
cagtggaggaccttcagaag

SEQ ID NO: 51302 - DNA, 20 bp, synthetic construct
  source 1..20: mol_type = other DNA
cctagcactttgggaggctg

SEQ ID NO: 51303 - DNA, 20 bp, synthetic construct
  source 1..20: mol_type = other DNA
gcgactacatcgacaccacc

SEQ ID NO: 51304 - DNA, 20 bp, synthetic construct
  source 1..20: mol_type = other DNA
gaagggaagagcatgtttgc

SEQ ID NO: 51305 - DNA, 20 bp, synthetic construct
  source 1..20: mol_type = other DNA
ttgatgaggtatgtgcattc

SEQ ID NO: 51306 - DNA, 20 bp, synthetic construct
  source 1..20: mol_type = other DNA
acaggcctcctcccagggcc

SEQ ID NO: 51307 - DNA, 20 bp, synthetic construct
  source 1..20: mol_type = other DNA
gcaccttcccttcgtgcagc

SEQ ID NO: 51308 - DNA, 20 bp, synthetic construct
  source 1..20: mol_type = other DNA
tggacaacccgtacatcgtg

SEQ ID NO: 51309 - DNA, 20 bp, synthetic construct
  source 1..20: mol_type = other DNA
catgggcatgaagtacttgg

SEQ ID NO: 51310 - DNA, 20 bp, synthetic construct
  source 1..20: mol_type = other DNA
atatagaatttgatcttttc

SEQ ID NO: 51311 - DNA, 20 bp, synthetic construct
  source 1..20: mol_type = other DNA
gaaacacggaaactgagtat

SEQ ID NO: 51312 - DNA, 20 bp, synthetic construct
  source 1..20: mol_type = other DNA
ttaagcagtcaatgtcaatc

SEQ ID NO: 51313 - DNA, 20 bp, synthetic construct
  source 1..20: mol_type = other DNA
atagaccttaggttgactac

SEQ ID NO: 51314 - DNA, 20 bp, synthetic construct
  source 1..20: mol_type = other DNA
cctttgggttttggtggcac

SEQ ID NO: 51315 - DNA, 20 bp, synthetic construct
  source 1..20: mol_type = other DNA
cactaacctttgggttttgg

SEQ ID NO: 51316 - DNA, 20 bp, synthetic construct
  source 1..20: mol_type = other DNA
tacttccttctcttccatgg

SEQ ID NO: 51317 - DNA, 20 bp, synthetic construct
  source 1..20: mol_type = other DNA
ttgaaagtgtatttcgtatt

SEQ ID NO: 51318 - DNA, 20 bp, synthetic construct
  source 1..20: mol_type = other DNA
gtcgttccattctggccttc

SEQ ID NO: 51319 - DNA, 20 bp, synthetic construct
  source 1..20: mol_type = other DNA
aacattcagaatatttcaac

SEQ ID NO: 51320 - DNA, 20 bp, synthetic construct
  source 1..20: mol_type = other DNA
aaaagttatgaatagcgctg

SEQ ID NO: 51321 - DNA, 20 bp, synthetic construct
  source 1..20: mol_type = other DNA
taaaagttatgaatagcgct

SEQ ID NO: 51322 - DNA, 20 bp, synthetic construct
  source 1..20: mol_type = other DNA
atacactaacctttgggttt

SEQ ID NO: 51323 - DNA, 20 bp, synthetic construct
  source 1..20: mol_type = other DNA
tatgacaatattggatttgt

SEQ ID NO: 51324 - DNA, 20 bp, synthetic construct
  source 1..20: mol_type = other DNA
tcggtttctacataatgatc

SEQ ID NO: 51325 - DNA, 20 bp, synthetic construct
  source 1..20: mol_type = other DNA
acagaaccggagaacagcac

SEQ ID NO: 51326 - DNA, 20 bp, synthetic construct
  source 1..20: mol_type = other DNA
aaccgaggtcctggcgcagc

SEQ ID NO: 51327 - DNA, 20 bp, synthetic construct
  source 1..20: mol_type = other DNA
accctggacctccctgctgc

SEQ ID NO: 51328 - DNA, 20 bp, synthetic construct
  source 1..20: mol_type = other DNA
cctcttctcctttggcaggt

SEQ ID NO: 51329 - DNA, 20 bp, synthetic construct
  source 1..20: mol_type = other DNA
agatgctgatgctgagctgt

SEQ ID NO: 51330 - DNA, 20 bp, synthetic construct
  source 1..20: mol_type = other DNA
cagaccctggtatacatata

SEQ ID NO: 51331 - DNA, 20 bp, synthetic construct
  source 1..20: mol_type = other DNA
aaccccctgcagagtggtgg

SEQ ID NO: 51332 - DNA, 20 bp, synthetic construct
  source 1..20: mol_type = other DNA
tgctgttctccggttctgtg

SEQ ID NO: 51333 - DNA, 20 bp, synthetic construct
  source 1..20: mol_type = other DNA
gcaggtacaaggcgcgttcc

SEQ ID NO: 51334 - DNA, 20 bp, synthetic construct
  source 1..20: mol_type = other DNA
atggagcatggaatatacac

SEQ ID NO: 51335 - DNA, 20 bp, synthetic construct
  source 1..20: mol_type = other DNA
ctggggactttgcttcctca

SEQ ID NO: 51336 - DNA, 20 bp, synthetic construct
  source 1..20: mol_type = other DNA
tctcaggtcagggagccgca

SEQ ID NO: 51337 - DNA, 20 bp, synthetic construct
  source 1..20: mol_type = other DNA
gcgggtctcgtacaagggcc

SEQ ID NO: 51338 - DNA, 20 bp, synthetic construct
  source 1..20: mol_type = other DNA
aaagatcatcagaagaaata

SEQ ID NO: 51339 - DNA, 20 bp, synthetic construct
  source 1..20: mol_type = other DNA
tcaaggatgtttgcaagaac

SEQ ID NO: 51340 - DNA, 20 bp, synthetic construct
  source 1..20: mol_type = other DNA
tccacgttatgatttagacg

SEQ ID NO: 51341 - DNA, 20 bp, synthetic construct
  source 1..20: mol_type = other DNA
ataagtcagaagaatggata

SEQ ID NO: 51342 - DNA, 20 bp, synthetic construct
  source 1..20: mol_type = other DNA
ttcgcccagtcctgaatcac

SEQ ID NO: 51343 - DNA, 20 bp, synthetic construct
  source 1..20: mol_type = other DNA
agaaggggccccagcagggg

SEQ ID NO: 51344 - DNA, 20 bp, synthetic construct
  source 1..20: mol_type = other DNA
ctacccggagccgggcgcgc

SEQ ID NO: 51345 - DNA, 20 bp, synthetic construct
  source 1..20: mol_type = other DNA
ccacgatgcccatccggggc

SEQ ID NO: 51346 - DNA, 20 bp, synthetic construct
  source 1..20: mol_type = other DNA
gtggctggtgggctccagcc

SEQ ID NO: 51347 - DNA, 20 bp, synthetic construct
  source 1..20: mol_type = other DNA
atgcgtgttggaagcgttgc

SEQ ID NO: 51348 - DNA, 20 bp, synthetic construct
  source 1..20: mol_type = other DNA
cccgggtagagcccggcgcg

SEQ ID NO: 51349 - DNA, 20 bp, synthetic construct
  source 1..20: mol_type = other DNA
ggccaggaggtcctggcacc

SEQ ID NO: 51350 - DNA, 20 bp, synthetic construct
  source 1..20: mol_type = other DNA
ctggtagccctcggcgtccg

SEQ ID NO: 51351 - DNA, 20 bp, synthetic construct
  source 1..20: mol_type = other DNA
aaaggagaaggggccccagc

SEQ ID NO: 51352 - DNA, 20 bp, synthetic construct
  source 1..20: mol_type = other DNA
cggatgggcatcgtggagcc

SEQ ID NO: 51353 - DNA, 20 bp, synthetic construct
  source 1..20: mol_type = other DNA
atccagtatctctgctgtac

SEQ ID NO: 51354 - DNA, 20 bp, synthetic construct
  source 1..20: mol_type = other DNA
ttttccccacctgttaatag

SEQ ID NO: 51355 - DNA, 20 bp, synthetic construct
  source 1..20: mol_type = other DNA
tctcttaaggcaggctgctt

SEQ ID NO: 51356 - DNA, 20 bp, synthetic construct
  source 1..20: mol_type = other DNA
aggccgaggtgagcccccgc

SEQ ID NO: 51357 - DNA, 20 bp, synthetic construct
  source 1..20: mol_type = other DNA
atccgcaggaaggggacagg

SEQ ID NO: 51358 - DNA, 20 bp, synthetic construct
  source 1..20: mol_type = other DNA
cttccagagcccctggagga

SEQ ID NO: 51359 - DNA, 20 bp, synthetic construct
  source 1..20: mol_type = other DNA
ctccctccaggctctcgggc

SEQ ID NO: 51360 - DNA, 20 bp, synthetic construct
  source 1..20: mol_type = other DNA
actactattctcaggaggcc

SEQ ID NO: 51361 - DNA, 20 bp, synthetic construct
  source 1..20: mol_type = other DNA
gaccacaccaatccgtctgc

SEQ ID NO: 51362 - DNA, 20 bp, synthetic construct
  source 1..20: mol_type = other DNA
gctcacctcggcctcgccgc

SEQ ID NO: 51363 - DNA, 20 bp, synthetic construct
  source 1..20: mol_type = other DNA
gccgcccgcgccgcccccgc

SEQ ID NO: 51364 - DNA, 20 bp, synthetic construct
  source 1..20: mol_type = other DNA
gtgctgaaaaatgagaagga

SEQ ID NO: 51365 - DNA, 20 bp, synthetic construct
  source 1..20: mol_type = other DNA
cagggggtagagaggagggc

SEQ ID NO: 51366 - DNA, 20 bp, synthetic construct
  source 1..20: mol_type = other DNA
cggagttggggaaacaatac

SEQ ID NO: 51367 - DNA, 20 bp, synthetic construct
  source 1..20: mol_type = other DNA
atcagcctcctgccaccact

SEQ ID NO: 51368 - DNA, 20 bp, synthetic construct
  source 1..20: mol_type = other DNA
atgggcagtcctattacagc

SEQ ID NO: 51369 - DNA, 20 bp, synthetic construct
  source 1..20: mol_type = other DNA
gtgagctggagcatctggac

SEQ ID NO: 51370 - DNA, 20 bp, synthetic construct
  source 1..20: mol_type = other DNA
agttgctcatgcaggatttc

SEQ ID NO: 51371 - DNA, 20 bp, synthetic construct
  source 1..20: mol_type = other DNA
ctgggaggacctgcgcaagc

SEQ ID NO: 51372 - DNA, 20 bp, synthetic construct
  source 1..20: mol_type = other DNA
agcagcccctttcccacgtg

SEQ ID NO: 51373 - DNA, 20 bp, synthetic construct
  source 1..20: mol_type = other DNA
gcgaccgagggagttcccaa

SEQ ID NO: 51374 - DNA, 20 bp, synthetic construct
  source 1..20: mol_type = other DNA
tctatgacttcagtcactat

SEQ ID NO: 51375 - DNA, 20 bp, synthetic construct
  source 1..20: mol_type = other DNA
tggtggatgaagagaaagaa

SEQ ID NO: 51376 - DNA, 20 bp, synthetic construct
  source 1..20: mol_type = other DNA
atctctaggtcataggccgt

SEQ ID NO: 51377 - DNA, 20 bp, synthetic construct
  source 1..20: mol_type = other DNA
tccttgcttctatcatcaga

SEQ ID NO: 51378 - DNA, 20 bp, synthetic construct
  source 1..20: mol_type = other DNA
cttcgacatctagactgggg

SEQ ID NO: 51379 - DNA, 20 bp, synthetic construct
  source 1..20: mol_type = other DNA
ttctataaataaaaaaagaa

SEQ ID NO: 51380 - DNA, 20 bp, synthetic construct
  source 1..20: mol_type = other DNA
gcagagaattgcttgaaccc

SEQ ID NO: 51381 - DNA, 20 bp, synthetic construct
  source 1..20: mol_type = other DNA
ctgagctttctaggacctcc

SEQ ID NO: 51382 - DNA, 20 bp, synthetic construct
  source 1..20: mol_type = other DNA
gcgactggagggtgaggccc

SEQ ID NO: 51383 - DNA, 20 bp, synthetic construct
  source 1..20: mol_type = other DNA
gagcttgggcttggcccctg

SEQ ID NO: 51384 - DNA, 20 bp, synthetic construct
  source 1..20: mol_type = other DNA
agacccaggcagcagcagca

SEQ ID NO: 51385 - DNA, 20 bp, synthetic construct
  source 1..20: mol_type = other DNA
tcctttagggatgtgatgat

SEQ ID NO: 51386 - DNA, 20 bp, synthetic construct
  source 1..20: mol_type = other DNA
cagtgcctcaccttctttgt

SEQ ID NO: 51387 - DNA, 20 bp, synthetic construct
  source 1..20: mol_type = other DNA
cggccgcgtgctcttcatca

SEQ ID NO: 51388 - DNA, 20 bp, synthetic construct
  source 1..20: mol_type = other DNA
tgtcatagccgagaacaatg

SEQ ID NO: 51389 - DNA, 20 bp, synthetic construct
  source 1..20: mol_type = other DNA
acccccccaagcagcgttgc

SEQ ID NO: 51390 - DNA, 20 bp, synthetic construct
  source 1..20: mol_type = other DNA
ggggcacgcccagaatccca

SEQ ID NO: 51391 - DNA, 20 bp, synthetic construct
  source 1..20: mol_type = other DNA
tctcaagctgcacggactcc

SEQ ID NO: 51392 - DNA, 20 bp, synthetic construct
  source 1..20: mol_type = other DNA
ctcgctgcgctcccgggatt

SEQ ID NO: 51393 - DNA, 20 bp, synthetic construct
  source 1..20: mol_type = other DNA
tctcatagatcagaacatcc

SEQ ID NO: 51394 - DNA, 20 bp, synthetic construct
  source 1..20: mol_type = other DNA
ctgatttacaagctgtacat

SEQ ID NO: 51395 - DNA, 20 bp, synthetic construct
  source 1..20: mol_type = other DNA
cactgtacagtccccagggg

SEQ ID NO: 51396 - DNA, 20 bp, synthetic construct
  source 1..20: mol_type = other DNA
cagagggatggtcaaggtca

SEQ ID NO: 51397 - DNA, 20 bp, synthetic construct
  source 1..20: mol_type = other DNA
agatgtactctagctggtgg

SEQ ID NO: 51398 - DNA, 20 bp, synthetic construct
  source 1..20: mol_type = other DNA
catcgatctcatttttcgtg

SEQ ID NO: 51399 - DNA, 20 bp, synthetic construct
  source 1..20: mol_type = other DNA
cccaggacccaggccggcgc

SEQ ID NO: 51400 - DNA, 20 bp, synthetic construct
  source 1..20: mol_type = other DNA
ggaagagccccacactttgc

SEQ ID NO: 51401 - DNA, 20 bp, synthetic construct
  source 1..20: mol_type = other DNA
acacactgtgtttctggtcg

SEQ ID NO: 51402 - DNA, 20 bp, synthetic construct
  source 1..20: mol_type = other DNA
tgagctctggaaaaagacat

SEQ ID NO: 51403 - DNA, 20 bp, synthetic construct
  source 1..20: mol_type = other DNA
cactgggaaaaccccagcag

SEQ ID NO: 51404 - DNA, 20 bp, synthetic construct
  source 1..20: mol_type = other DNA
gataaggtagtgatagggag

SEQ ID NO: 51405 - DNA, 20 bp, synthetic construct
  source 1..20: mol_type = other DNA
catgtccttcacgagttcct

SEQ ID NO: 51406 - DNA, 20 bp, synthetic construct
  source 1..20: mol_type = other DNA
aaattcatttcttacctcaa

SEQ ID NO: 51407 - DNA, 20 bp, synthetic construct
  source 1..20: mol_type = other DNA
tcgggacctcctccaccacc

SEQ ID NO: 51408 - DNA, 20 bp, synthetic construct
  source 1..20: mol_type = other DNA
gcccccgacggagacaagga

SEQ ID NO: 51409 - DNA, 20 bp, synthetic construct
  source 1..20: mol_type = other DNA
cagccactgcaggctggggc

SEQ ID NO: 51410 - DNA, 20 bp, synthetic construct
  source 1..20: mol_type = other DNA
ctacttgggctgaggatgtg

SEQ ID NO: 51411 - DNA, 20 bp, synthetic construct
  source 1..20: mol_type = other DNA
tgggagagaaggtccccggg

SEQ ID NO: 51412 - DNA, 20 bp, synthetic construct
  source 1..20: mol_type = other DNA
gggccagcaagggaggaagg

SEQ ID NO: 51413 - DNA, 20 bp, synthetic construct
  source 1..20: mol_type = other DNA
ccccggtggggcgctgaccc

SEQ ID NO: 51414 - DNA, 20 bp, synthetic construct
  source 1..20: mol_type = other DNA
ttgctggccctgatggggtg

SEQ ID NO: 51415 - DNA, 20 bp, synthetic construct
  source 1..20: mol_type = other DNA
tccccgccggcagagccgct

SEQ ID NO: 51416 - DNA, 20 bp, synthetic construct
  source 1..20: mol_type = other DNA
ccgcggctgggccctgcagg

SEQ ID NO: 51417 - DNA, 20 bp, synthetic construct
  source 1..20: mol_type = other DNA
cgcacccgggacccccggtg

SEQ ID NO: 51418 - DNA, 20 bp, synthetic construct
  source 1..20: mol_type = other DNA
gcgcgggcgggagggcggcg

SEQ ID NO: 51419 - DNA, 20 bp, synthetic construct
  source 1..20: mol_type = other DNA
accgggggtataggtggagc

SEQ ID NO: 51420 - DNA, 20 bp, synthetic construct
  source 1..20: mol_type = other DNA
gatggggtcagccccctgat

SEQ ID NO: 51421 - DNA, 20 bp, synthetic construct
  source 1..20: mol_type = other DNA
tgtcctccaggcagcccagc

SEQ ID NO: 51422 - DNA, 20 bp, synthetic construct
  source 1..20: mol_type = other DNA
aggaattcgtgcggcgccta

SEQ ID NO: 51423 - DNA, 20 bp, synthetic construct
  source 1..20: mol_type = other DNA
cgggactgaagcccagggtg

SEQ ID NO: 51424 - DNA, 20 bp, synthetic construct
  source 1..20: mol_type = other DNA
ggtgggaatatacccctcag

SEQ ID NO: 51425 - DNA, 20 bp, synthetic construct
  source 1..20: mol_type = other DNA
aagtccaagctctactccat

SEQ ID NO: 51426 - DNA, 20 bp, synthetic construct
  source 1..20: mol_type = other DNA
gggcactgaggactcaggtg

SEQ ID NO: 51427 - DNA, 20 bp, synthetic construct
  source 1..20: mol_type = other DNA
tctcgtggtcgctcagccct

SEQ ID NO: 51428 - DNA, 20 bp, synthetic construct
  source 1..20: mol_type = other DNA
ccgctgtagctctggtgagt

SEQ ID NO: 51429 - DNA, 20 bp, synthetic construct
  source 1..20: mol_type = other DNA
ggccgcgctggccgtcggac

SEQ ID NO: 51430 - DNA, 20 bp, synthetic construct
  source 1..20: mol_type = other DNA
tgaggtagaggctgtggggc

SEQ ID NO: 51431 - DNA, 20 bp, synthetic construct
  source 1..20: mol_type = other DNA
atctctcaggtttgaggtag

SEQ ID NO: 51432 - DNA, 20 bp, synthetic construct
  source 1..20: mol_type = other DNA
gaggtgtgcagagccctggg

SEQ ID NO: 51433 - DNA, 20 bp, synthetic construct
  source 1..20: mol_type = other DNA
ggtctagagcagcgagaggg

SEQ ID NO: 51434 - DNA, 20 bp, synthetic construct
  source 1..20: mol_type = other DNA
cacagagggcccttgggcgt

SEQ ID NO: 51435 - DNA, 20 bp, synthetic construct
  source 1..20: mol_type = other DNA
tctgctgggcaactggtccc

SEQ ID NO: 51436 - DNA, 20 bp, synthetic construct
  source 1..20: mol_type = other DNA
aggctggtttgtggagtgcc

SEQ ID NO: 51437 - DNA, 20 bp, synthetic construct
  source 1..20: mol_type = other DNA
ccaagacaccttcttggcct

SEQ ID NO: 51438 - DNA, 20 bp, synthetic construct
  source 1..20: mol_type = other DNA
gtccaagggtgacagatggg

SEQ ID NO: 51439 - DNA, 20 bp, synthetic construct
  source 1..20: mol_type = other DNA
gttctccagcgccacctggg

SEQ ID NO: 51440 - DNA, 20 bp, synthetic construct
  source 1..20: mol_type = other DNA
ccaggatggcggcaaccgca

SEQ ID NO: 51441 - DNA, 20 bp, synthetic construct
  source 1..20: mol_type = other DNA
gcagccggccagcaatagct

SEQ ID NO: 51442 - DNA, 20 bp, synthetic construct
  source 1..20: mol_type = other DNA
caaccgcacggcctgcagga

SEQ ID NO: 51443 - DNA, 20 bp, synthetic construct
  source 1..20: mol_type = other DNA
gggcctggccggggggccct

SEQ ID NO: 51444 - DNA, 20 bp, synthetic construct
  source 1..20: mol_type = other DNA
ccagggggcttgtgggcatc

SEQ ID NO: 51445 - DNA, 20 bp, synthetic construct
  source 1..20: mol_type = other DNA
aggcggtggaggggtaggga

SEQ ID NO: 51446 - DNA, 20 bp, synthetic construct
  source 1..20: mol_type = other DNA
ggcctggtgctggggctgct

SEQ ID NO: 51447 - DNA, 20 bp, synthetic construct
  source 1..20: mol_type = other DNA
cagggccagcaggatggcca

SEQ ID NO: 51448 - DNA, 20 bp, synthetic construct
  source 1..20: mol_type = other DNA
tctcctggggctgcgtggct

SEQ ID NO: 51449 - DNA, 20 bp, synthetic construct
  source 1..20: mol_type = other DNA
gtgggtgggcctcacccgcc

SEQ ID NO: 51450 - DNA, 20 bp, synthetic construct
  source 1..20: mol_type = other DNA
cggccctctgtgtggtgggg

SEQ ID NO: 51451 - DNA, 20 bp, synthetic construct
  source 1..20: mol_type = other DNA
cgacacagcagtgcccacag

SEQ ID NO: 51452 - DNA, 20 bp, synthetic construct
  source 1..20: mol_type = other DNA
gctggcactggaggttgctg

SEQ ID NO: 51453 - DNA, 20 bp, synthetic construct
  source 1..20: mol_type = other DNA
tgacagccttgtcatagtag

SEQ ID NO: 51454 - DNA, 20 bp, synthetic construct
  source 1..20: mol_type = other DNA
ggaaggcctagttcagatcc

SEQ ID NO: 51455 - DNA, 20 bp, synthetic construct
  source 1..20: mol_type = other DNA
ggtgatcctggtgttggttg

SEQ ID NO: 51456 - DNA, 20 bp, synthetic construct
  source 1..20: mol_type = other DNA
cccgccaggccccggccctc

SEQ ID NO: 51457 - DNA, 20 bp, synthetic construct
  source 1..20: mol_type = other DNA
aagtgaggcctgggctgggc

SEQ ID NO: 51458 - DNA, 20 bp, synthetic construct
  source 1..20: mol_type = other DNA
gcccgagttggaggaggagc

SEQ ID NO: 51459 - DNA, 20 bp, synthetic construct
  source 1..20: mol_type = other DNA
aacttgacaatcatccctgc

SEQ ID NO: 51460 - DNA, 20 bp, synthetic construct
  source 1..20: mol_type = other DNA
tctctgcaaggcaaaaggat

SEQ ID NO: 51461 - DNA, 20 bp, synthetic construct
  source 1..20: mol_type = other DNA
ccggggctcaggaaggtccc

SEQ ID NO: 51462 - DNA, 20 bp, synthetic construct
  source 1..20: mol_type = other DNA
cagacccaggaggagctcaa

SEQ ID NO: 51463 - DNA, 20 bp, synthetic construct
  source 1..20: mol_type = other DNA
tctccagcgcaggtggacaa

SEQ ID NO: 51464 - DNA, 20 bp, synthetic construct
  source 1..20: mol_type = other DNA
ggatgctcccggagagaggt

SEQ ID NO: 51465 - DNA, 20 bp, synthetic construct
  source 1..20: mol_type = other DNA
ttgtaggtgttttcaggacc

SEQ ID NO: 51466 - DNA, 20 bp, synthetic construct
  source 1..20: mol_type = other DNA
agctgatacaaggtgagtca

SEQ ID NO: 51467 - DNA, 20 bp, synthetic construct
  source 1..20: mol_type = other DNA
aaggtgcagctgggcggtgt

SEQ ID NO: 51468 - DNA, 20 bp, synthetic construct
  source 1..20: mol_type = other DNA
ttcgactgcgtgatggtacc

SEQ ID NO: 51469 - DNA, 20 bp, synthetic construct
  source 1..20: mol_type = other DNA
tctcttgctgttgctgatgg

SEQ ID NO: 51470 - DNA, 20 bp, synthetic construct
  source 1..20: mol_type = other DNA
ggctttcatggtgtgaagga

SEQ ID NO: 51471 - DNA, 20 bp, synthetic construct
  source 1..20: mol_type = other DNA
atgggagactcagctgggcc

SEQ ID NO: 51472 - DNA, 20 bp, synthetic construct
  source 1..20: mol_type = other DNA
cgacatcccattcacgaggc

SEQ ID NO: 51473 - DNA, 20 bp, synthetic construct
  source 1..20: mol_type = other DNA
tgcatggctgtgtctccagg

SEQ ID NO: 51474 - DNA, 20 bp, synthetic construct
  source 1..20: mol_type = other DNA
atggagtcagatatcaggat

SEQ ID NO: 51475 - DNA, 20 bp, synthetic construct
  source 1..20: mol_type = other DNA
tccaatatgctgggccagga

SEQ ID NO: 51476 - DNA, 20 bp, synthetic construct
  source 1..20: mol_type = other DNA
gctatgttcctggggagact

SEQ ID NO: 51477 - DNA, 20 bp, synthetic construct
  source 1..20: mol_type = other DNA
tttgtggatgaaatggtagc

SEQ ID NO: 51478 - DNA, 20 bp, synthetic construct
  source 1..20: mol_type = other DNA
ggtgcaccagcgagtggtct

SEQ ID NO: 51479 - DNA, 20 bp, synthetic construct
  source 1..20: mol_type = other DNA
agtctccaatatgctgggcc

SEQ ID NO: 51480 - DNA, 20 bp, synthetic construct
  source 1..20: mol_type = other DNA
tgaaggcgatgatacctcta

SEQ ID NO: 51481 - DNA, 20 bp, synthetic construct
  source 1..20: mol_type = other DNA
tgggcccagccaggcccact

SEQ ID NO: 51482 - DNA, 20 bp, synthetic construct
  source 1..20: mol_type = other DNA
caatagtaggggtccaggca

SEQ ID NO: 51483 - DNA, 20 bp, synthetic construct
  source 1..20: mol_type = other DNA
ctgggctgtggcctggagtc

SEQ ID NO: 51484 - DNA, 20 bp, synthetic construct
  source 1..20: mol_type = other DNA
atgcagccactgcaagagtc

SEQ ID NO: 51485 - DNA, 20 bp, synthetic construct
  source 1..20: mol_type = other DNA
agcagcttcaagaagcccac

SEQ ID NO: 51486 - DNA, 20 bp, synthetic construct
  source 1..20: mol_type = other DNA
tacctgaacggggacgggat

SEQ ID NO: 51487 - DNA, 20 bp, synthetic construct
  source 1..20: mol_type = other DNA
ggacagggtcttccccatga

SEQ ID NO: 51488 - DNA, 20 bp, synthetic construct
  source 1..20: mol_type = other DNA
gggtctacctgaacggggac

SEQ ID NO: 51489 - DNA, 20 bp, synthetic construct
  source 1..20: mol_type = other DNA
agtaaccagtgtagaaaggc

SEQ ID NO: 51490 - DNA, 20 bp, synthetic construct
  source 1..20: mol_type = other DNA
agctggcggtctccaggacc

SEQ ID NO: 51491 - DNA, 20 bp, synthetic construct
  source 1..20: mol_type = other DNA
ctggaagcgcaggtccatgt

SEQ ID NO: 51492 - DNA, 20 bp, synthetic construct
  source 1..20: mol_type = other DNA
gcagaagcggtgcccacact

SEQ ID NO: 51493 - DNA, 20 bp, synthetic construct
  source 1..20: mol_type = other DNA
acggggacgggatggggaag

SEQ ID NO: 51494 - DNA, 20 bp, synthetic construct
  source 1..20: mol_type = other DNA
aaactggcgtcccagcactg

SEQ ID NO: 51495 - DNA, 20 bp, synthetic construct
  source 1..20: mol_type = other DNA
ctacaagcggcggaagcagg

SEQ ID NO: 51496 - DNA, 20 bp, synthetic construct
  source 1..20: mol_type = other DNA
tctccaggacctggaagcgc

SEQ ID NO: 51497 - DNA, 20 bp, synthetic construct
  source 1..20: mol_type = other DNA
cacatggaagttcttcaaaa

SEQ ID NO: 51498 - DNA, 20 bp, synthetic construct
  source 1..20: mol_type = other DNA
ttgcagtcaggacgcacaca

SEQ ID NO: 51499 - DNA, 20 bp, synthetic construct
  source 1..20: mol_type = other DNA
tggctataagatgtgtgcca

SEQ ID NO: 51500 - DNA, 20 bp, synthetic construct
  source 1..20: mol_type = other DNA
tgtgccagggtctacctgaa

SEQ ID NO: 51501 - DNA, 20 bp, synthetic construct
  source 1..20: mol_type = other DNA
gtgccagggtctacctgaac

SEQ ID NO: 51502 - DNA, 20 bp, synthetic construct
  source 1..20: mol_type = other DNA
agtgtgcactcaactgcaac

SEQ ID NO: 51503 - DNA, 20 bp, synthetic construct
  source 1..20: mol_type = other DNA
tattgtcggaatgaaagcag

SEQ ID NO: 51504 - DNA, 20 bp, synthetic construct
  source 1..20: mol_type = other DNA
tccccatcccgtccccgttc

SEQ ID NO: 51505 - DNA, 20 bp, synthetic construct
  source 1..20: mol_type = other DNA
ccagctcggtcacgcggttc

SEQ ID NO: 51506 - DNA, 20 bp, synthetic construct
  source 1..20: mol_type = other DNA
gcccacactcggtctgcttc

SEQ ID NO: 51507 - DNA, 20 bp, synthetic construct
  source 1..20: mol_type = other DNA
agggtctacctgaacgggga

SEQ ID NO: 51508 - DNA, 20 bp, synthetic construct
  source 1..20: mol_type = other DNA
gcttaaacggccaaggaagc

SEQ ID NO: 51509 - DNA, 20 bp, synthetic construct
  source 1..20: mol_type = other DNA
cttaaacggccaaggaagca

SEQ ID NO: 51510 - DNA, 20 bp, synthetic construct
  source 1..20: mol_type = other DNA
ggagagatgaatatcgcctc

SEQ ID NO: 51511 - DNA, 20 bp, synthetic construct
  source 1..20: mol_type = other DNA
tgtagaaaggctggctgtaa

SEQ ID NO: 51512 - DNA, 20 bp, synthetic construct
  source 1..20: mol_type = other DNA
cactcagcatctggtcatgc

SEQ ID NO: 51513 - DNA, 20 bp, synthetic construct
  source 1..20: mol_type = other DNA
gccatagcgcttaaaactac

SEQ ID NO: 51514 - DNA, 20 bp, synthetic construct
  source 1..20: mol_type = other DNA
ccatgcagctctcgcagaag

SEQ ID NO: 51515 - DNA, 20 bp, synthetic construct
  source 1..20: mol_type = other DNA
cacaaagactgggcagccag

SEQ ID NO: 51516 - DNA, 20 bp, synthetic construct
  source 1..20: mol_type = other DNA
acacttgtacttgtcctcca

SEQ ID NO: 51517 - DNA, 20 bp, synthetic construct
  source 1..20: mol_type = other DNA
tgccagggtctacctgaacg

SEQ ID NO: 51518 - DNA, 20 bp, synthetic construct
  source 1..20: mol_type = other DNA
cgactacaagcggcggaagc

SEQ ID NO: 51519 - DNA, 20 bp, synthetic construct
  source 1..20: mol_type = other DNA
ctacctgaacggggacggga

SEQ ID NO: 51520 - DNA, 20 bp, synthetic construct
  source 1..20: mol_type = other DNA
gtagaaaggctggctgtaaa

SEQ ID NO: 51521 - DNA, 20 bp, synthetic construct
  source 1..20: mol_type = other DNA
agcgcaggtccatgtcggct

SEQ ID NO: 51522 - DNA, 20 bp, synthetic construct
  source 1..20: mol_type = other DNA
tgcccacactcggtctgctt

SEQ ID NO: 51523 - DNA, 20 bp, synthetic construct
  source 1..20: mol_type = other DNA
tacagccagcctttctacac

SEQ ID NO: 51524 - DNA, 20 bp, synthetic construct
  source 1..20: mol_type = other DNA
agattcttacctgtaaatga

SEQ ID NO: 51525 - DNA, 20 bp, synthetic construct
  source 1..20: mol_type = other DNA
atctcccaaatgacgtcgag

SEQ ID NO: 51526 - DNA, 20 bp, synthetic construct
  source 1..20: mol_type = other DNA
aacaacttacgcaattcttc

SEQ ID NO: 51527 - DNA, 20 bp, synthetic construct
  source 1..20: mol_type = other DNA
aacacacggaggtgaggggc

SEQ ID NO: 51528 - DNA, 20 bp, synthetic construct
  source 1..20: mol_type = other DNA
ttccttatatttggagcagg

SEQ ID NO: 51529 - DNA, 20 bp, synthetic construct
  source 1..20: mol_type = other DNA
tcctgaattatcccagcccc

SEQ ID NO: 51530 - DNA, 20 bp, synthetic construct
  source 1..20: mol_type = other DNA
cctccagaacttgagtgcgc

SEQ ID NO: 51531 - DNA, 20 bp, synthetic construct
  source 1..20: mol_type = other DNA
cacacggaggtgaggggcag

SEQ ID NO: 51532 - DNA, 20 bp, synthetic construct
  source 1..20: mol_type = other DNA
aaatacaaacaggacgtgga

SEQ ID NO: 51533 - DNA, 20 bp, synthetic construct
  source 1..20: mol_type = other DNA
tcaggttgtctttattggcc

SEQ ID NO: 51534 - DNA, 20 bp, synthetic construct
  source 1..20: mol_type = other DNA
aggaggactggaggaccctt

SEQ ID NO: 51535 - DNA, 20 bp, synthetic construct
  source 1..20: mol_type = other DNA
cagagcagaagtgtgaagag

SEQ ID NO: 51536 - DNA, 20 bp, synthetic construct
  source 1..20: mol_type = other DNA
tctctcaggtactcagacaa

SEQ ID NO: 51537 - DNA, 20 bp, synthetic construct
  source 1..20: mol_type = other DNA
cctactgtccactctgattc

SEQ ID NO: 51538 - DNA, 20 bp, synthetic construct
  source 1..20: mol_type = other DNA
cactttctgcagtgactcct

SEQ ID NO: 51539 - DNA, 20 bp, synthetic construct
  source 1..20: mol_type = other DNA
cagcagccgccgcatcatgc

SEQ ID NO: 51540 - DNA, 20 bp, synthetic construct
  source 1..20: mol_type = other DNA
tgttacagctgtccttcaga

SEQ ID NO: 51541 - DNA, 20 bp, synthetic construct
  source 1..20: mol_type = other DNA
tctcacagtagacactctcc

SEQ ID NO: 51542 - DNA, 20 bp, synthetic construct
  source 1..20: mol_type = other DNA
aggagtcttcaagtgccctg

SEQ ID NO: 51543 - DNA, 20 bp, synthetic construct
  source 1..20: mol_type = other DNA
gcacacatcatggccagatg

SEQ ID NO: 51544 - DNA, 20 bp, synthetic construct
  source 1..20: mol_type = other DNA
tctggaaattcttccagttt

SEQ ID NO: 51545 - DNA, 20 bp, synthetic construct
  source 1..20: mol_type = other DNA
gcatgggcttcccgcacagt

SEQ ID NO: 51546 - DNA, 20 bp, synthetic construct
  source 1..20: mol_type = other DNA
ctcctggctgcggccggcgg

SEQ ID NO: 51547 - DNA, 20 bp, synthetic construct
  source 1..20: mol_type = other DNA
cggggccggggcgcgggcgg

SEQ ID NO: 51548 - DNA, 20 bp, synthetic construct
  source 1..20: mol_type = other DNA
ttgatgacctctttatctac

SEQ ID NO: 51549 - DNA, 20 bp, synthetic construct
  source 1..20: mol_type = other DNA
gagaccgtcatccaggcggt

SEQ ID NO: 51550 - DNA, 20 bp, synthetic construct
  source 1..20: mol_type = other DNA
gtgaagcaccgagtggcaga

SEQ ID NO: 51551 - DNA, 20 bp, synthetic construct
  source 1..20: mol_type = other DNA
actgaatgtgcatggaattg

SEQ ID NO: 51552 - DNA, 20 bp, synthetic construct
  source 1..20: mol_type = other DNA
ttgtaaggcgtattgtaccc

SEQ ID NO: 51553 - DNA, 20 bp, synthetic construct
  source 1..20: mol_type = other DNA
aatatgacagccacctccct

SEQ ID NO: 51554 - DNA, 20 bp, synthetic construct
  source 1..20: mol_type = other DNA
tcatacttgctttccagggg

SEQ ID NO: 51555 - DNA, 20 bp, synthetic construct
  source 1..20: mol_type = other DNA
tgcaggctttgcagaaccta

SEQ ID NO: 51556 - DNA, 20 bp, synthetic construct
  source 1..20: mol_type = other DNA
caaactctacatcatatccc

SEQ ID NO: 51557 - DNA, 20 bp, synthetic construct
  source 1..20: mol_type = other DNA
tcagaatgtgaatattaata

SEQ ID NO: 51558 - DNA, 20 bp, synthetic construct
  source 1..20: mol_type = other DNA
aggcgtattgtaccctggaa

SEQ ID NO: 51559 - DNA, 20 bp, synthetic construct
  source 1..20: mol_type = other DNA
gcgcatgcacagtttgtacc

SEQ ID NO: 51560 - DNA, 20 bp, synthetic construct
  source 1..20: mol_type = other DNA
ggattctacactggcaaacc

SEQ ID NO: 51561 - DNA, 20 bp, synthetic construct
  source 1..20: mol_type = other DNA
cgcatgcacagtttgtaccc

SEQ ID NO: 51562 - DNA, 20 bp, synthetic construct
  source 1..20: mol_type = other DNA
ccagtcacacatgagaatgt

SEQ ID NO: 51563 - DNA, 20 bp, synthetic construct
  source 1..20: mol_type = other DNA
aaggcgtattgtaccctgga

SEQ ID NO: 51564 - DNA, 20 bp, synthetic construct
  source 1..20: mol_type = other DNA
cagtcagctcccggatttga

SEQ ID NO: 51565 - DNA, 20 bp, synthetic construct
  source 1..20: mol_type = other DNA
tggcatccattatctcttcg

SEQ ID NO: 51566 - DNA, 20 bp, synthetic construct
  source 1..20: mol_type = other DNA
gcatttgaaatgtcaagaag

SEQ ID NO: 51567 - DNA, 20 bp, synthetic construct
  source 1..20: mol_type = other DNA
tcacaagaaacctgtctcct

SEQ ID NO: 51568 - DNA, 20 bp, synthetic construct
  source 1..20: mol_type = other DNA
aagacaagaccatcaaatcc

SEQ ID NO: 51569 - DNA, 20 bp, synthetic construct
  source 1..20: mol_type = other DNA
acaatcccacggaacccaaa

SEQ ID NO: 51570 - DNA, 20 bp, synthetic construct
  source 1..20: mol_type = other DNA
ccatgaccagaactgtcctt

SEQ ID NO: 51571 - DNA, 20 bp, synthetic construct
  source 1..20: mol_type = other DNA
atggtgaaatgtccaaatga

SEQ ID NO: 51572 - DNA, 20 bp, synthetic construct
  source 1..20: mol_type = other DNA
ccaaaggacagttctggtca

SEQ ID NO: 51573 - DNA, 20 bp, synthetic construct
  source 1..20: mol_type = other DNA
cctggaagggccaagggagg

SEQ ID NO: 51574 - DNA, 20 bp, synthetic construct
  source 1..20: mol_type = other DNA
catagccctggattctacac

SEQ ID NO: 51575 - DNA, 20 bp, synthetic construct
  source 1..20: mol_type = other DNA
taagacaagaccatcaaatc

SEQ ID NO: 51576 - DNA, 20 bp, synthetic construct
  source 1..20: mol_type = other DNA
gattctacactggcaaaccc

SEQ ID NO: 51577 - DNA, 20 bp, synthetic construct
  source 1..20: mol_type = other DNA
taccctggaagggccaaggg

SEQ ID NO: 51578 - DNA, 20 bp, synthetic construct
  source 1..20: mol_type = other DNA
cagactgatcaagaattgta

SEQ ID NO: 51579 - DNA, 20 bp, synthetic construct
  source 1..20: mol_type = other DNA
ggcattcatacttgctttcc

SEQ ID NO: 51580 - DNA, 20 bp, synthetic construct
  source 1..20: mol_type = other DNA
atcagtctgaagcacctgta

SEQ ID NO: 51581 - DNA, 20 bp, synthetic construct
  source 1..20: mol_type = other DNA
gaaagcaagcagctctggtt

SEQ ID NO: 51582 - DNA, 20 bp, synthetic construct
  source 1..20: mol_type = other DNA
catacttgctttccaggggt

SEQ ID NO: 51583 - DNA, 20 bp, synthetic construct
  source 1..20: mol_type = other DNA
tgcaaacgccatgcggccat

SEQ ID NO: 51584 - DNA, 20 bp, synthetic construct
  source 1..20: mol_type = other DNA
ttacaaggcgaccctctaac

SEQ ID NO: 51585 - DNA, 20 bp, synthetic construct
  source 1..20: mol_type = other DNA
gatcacaaactctgtatcac

SEQ ID NO: 51586 - DNA, 20 bp, synthetic construct
  source 1..20: mol_type = other DNA
ttctatatgaaaatcaagac

SEQ ID NO: 51587 - DNA, 20 bp, synthetic construct
  source 1..20: mol_type = other DNA
aaagaagcatgtcaggtaag

SEQ ID NO: 51588 - DNA, 20 bp, synthetic construct
  source 1..20: mol_type = other DNA
gtatgatacctaaagtggag

SEQ ID NO: 51589 - DNA, 20 bp, synthetic construct
  source 1..20: mol_type = other DNA
ggagcagatccgagagctgg

SEQ ID NO: 51590 - DNA, 20 bp, synthetic construct
  source 1..20: mol_type = other DNA
ttacaccgcagaaccaccag

SEQ ID NO: 51591 - DNA, 20 bp, synthetic construct
  source 1..20: mol_type = other DNA
gcttgccagggtcttcaaca

SEQ ID NO: 51592 - DNA, 20 bp, synthetic construct
  source 1..20: mol_type = other DNA
ggtccctgccaggcacgagg

SEQ ID NO: 51593 - DNA, 20 bp, synthetic construct
  source 1..20: mol_type = other DNA
ccagaaggagatcacccagg

SEQ ID NO: 51594 - DNA, 20 bp, synthetic construct
  source 1..20: mol_type = other DNA
gcaggttttatttccggaac

SEQ ID NO: 51595 - DNA, 20 bp, synthetic construct
  source 1..20: mol_type = other DNA
tagcgcttgtggaaaaccgt

SEQ ID NO: 51596 - DNA, 20 bp, synthetic construct
  source 1..20: mol_type = other DNA
agggtctcctagacatacct

SEQ ID NO: 51597 - DNA, 20 bp, synthetic construct
  source 1..20: mol_type = other DNA
cgcgcacgcggtagtactcg

SEQ ID NO: 51598 - DNA, 20 bp, synthetic construct
  source 1..20: mol_type = other DNA
gattcatgccatgccagttc

SEQ ID NO: 51599 - DNA, 20 bp, synthetic construct
  source 1..20: mol_type = other DNA
tccccagcgttcgggaactt

SEQ ID NO: 51600 - DNA, 20 bp, synthetic construct
  source 1..20: mol_type = other DNA
acatcctgctggcccggctg

SEQ ID NO: 51601 - DNA, 20 bp, synthetic construct
  source 1..20: mol_type = other DNA
tcttcccaaacaggctggct

SEQ ID NO: 51602 - DNA, 20 bp, synthetic construct
  source 1..20: mol_type = other DNA
acccacgaggtgctggtgac

SEQ ID NO: 51603 - DNA, 20 bp, synthetic construct
  source 1..20: mol_type = other DNA
gggcgatgtcatggtgacta

SEQ ID NO: 51604 - DNA, 20 bp, synthetic construct
  source 1..20: mol_type = other DNA
cccgaacgctggggaaggac

SEQ ID NO: 51605 - DNA, 20 bp, synthetic construct
  source 1..20: mol_type = other DNA
cccgcggcctgtctgccggc

SEQ ID NO: 51606 - DNA, 20 bp, synthetic construct
  source 1..20: mol_type = other DNA
tatcatcgtacctcctggtt

SEQ ID NO: 51607 - DNA, 20 bp, synthetic construct
  source 1..20: mol_type = other DNA
catgacatcgccctggtgag

SEQ ID NO: 51608 - DNA, 20 bp, synthetic construct
  source 1..20: mol_type = other DNA
ccgaaggcgcagccgggtca

SEQ ID NO: 51609 - DNA, 20 bp, synthetic construct
  source 1..20: mol_type = other DNA
tctcctgaggtgggcaggag

SEQ ID NO: 51610 - DNA, 20 bp, synthetic construct
  source 1..20: mol_type = other DNA
ccgggtgaggtcacgcagga

SEQ ID NO: 51611 - DNA, 20 bp, synthetic construct
  source 1..20: mol_type = other DNA
cccctgctgtgagtgctggg

SEQ ID NO: 51612 - DNA, 20 bp, synthetic construct
  source 1..20: mol_type = other DNA
aatgggtatgaggttctcga

SEQ ID NO: 51613 - DNA, 20 bp, synthetic construct
  source 1..20: mol_type = other DNA
ccccgctgccctccactcgc

SEQ ID NO: 51614 - DNA, 20 bp, synthetic construct
  source 1..20: mol_type = other DNA
ggtggagaggatcccctggc

SEQ ID NO: 51615 - DNA, 20 bp, synthetic construct
  source 1..20: mol_type = other DNA
caggcgcaacaccaggtgca

SEQ ID NO: 51616 - DNA, 20 bp, synthetic construct
  source 1..20: mol_type = other DNA
aatatcagacgctgctggtc

SEQ ID NO: 51617 - DNA, 20 bp, synthetic construct
  source 1..20: mol_type = other DNA
tggcaaaaccatcacccttg

SEQ ID NO: 51618 - DNA, 20 bp, synthetic construct
  source 1..20: mol_type = other DNA
gcgcaacaccaggtgcaggg

SEQ ID NO: 51619 - DNA, 20 bp, synthetic construct
  source 1..20: mol_type = other DNA
tctcaaggtaagccatgcac

SEQ ID NO: 51620 - DNA, 20 bp, synthetic construct
  source 1..20: mol_type = other DNA
gtggagaatgaggaggcgga

SEQ ID NO: 51621 - DNA, 20 bp, synthetic construct
  source 1..20: mol_type = other DNA
gaccagtctctggctcacta

SEQ ID NO: 51622 - DNA, 20 bp, synthetic construct
  source 1..20: mol_type = other DNA
ttgcaggtacgcaggcccca

SEQ ID NO: 51623 - DNA, 20 bp, synthetic construct
  source 1..20: mol_type = other DNA
tcttcatcaaatacaaggag

SEQ ID NO: 51624 - DNA, 20 bp, synthetic construct
  source 1..20: mol_type = other DNA
tgttctcagagagccaacaa

SEQ ID NO: 51625 - DNA, 20 bp, synthetic construct
  source 1..20: mol_type = other DNA
cagaaggacaccatcccgga

SEQ ID NO: 51626 - DNA, 20 bp, synthetic construct
  source 1..20: mol_type = other DNA
cgcccagccaccgcgtgacc

SEQ ID NO: 51627 - DNA, 20 bp, synthetic construct
  source 1..20: mol_type = other DNA
ggctcacctgggacatctgg

SEQ ID NO: 51628 - DNA, 20 bp, synthetic construct
  source 1..20: mol_type = other DNA
ctatgaggacctcatgcgct

SEQ ID NO: 51629 - DNA, 20 bp, synthetic construct
  source 1..20: mol_type = other DNA
gttctcagagagccaacaac

SEQ ID NO: 51630 - DNA, 20 bp, synthetic construct
  source 1..20: mol_type = other DNA
ccgcctcaccaggttctcaa

SEQ ID NO: 51631 - DNA, 20 bp, synthetic construct
  source 1..20: mol_type = other DNA
cctgggacatctgggggcgc

SEQ ID NO: 51632 - DNA, 20 bp, synthetic construct
  source 1..20: mol_type = other DNA
atcacctacactctcctcct

SEQ ID NO: 51633 - DNA, 20 bp, synthetic construct
  source 1..20: mol_type = other DNA
agggctcacctgggacatct

SEQ ID NO: 51634 - DNA, 20 bp, synthetic construct
  source 1..20: mol_type = other DNA
acgcactgagccaggtcctg

SEQ ID NO: 51635 - DNA, 20 bp, synthetic construct
  source 1..20: mol_type = other DNA
atgtgcctggcacctggaga

SEQ ID NO: 51636 - DNA, 20 bp, synthetic construct
  source 1..20: mol_type = other DNA
gatgacctgtgacggggcag

SEQ ID NO: 51637 - DNA, 20 bp, synthetic construct
  source 1..20: mol_type = other DNA
tgtggcgccaatgcacccac

SEQ ID NO: 51638 - DNA, 20 bp, synthetic construct
  source 1..20: mol_type = other DNA
tctcaatgtcttgaggtttc

SEQ ID NO: 51639 - DNA, 20 bp, synthetic construct
  source 1..20: mol_type = other DNA
tgagtagagctttgtcgagc

SEQ ID NO: 51640 - DNA, 20 bp, synthetic construct
  source 1..20: mol_type = other DNA
caccatcagcaggtcccgca

SEQ ID NO: 51641 - DNA, 20 bp, synthetic construct
  source 1..20: mol_type = other DNA
tcccaggtcacgcggtggct

SEQ ID NO: 51642 - DNA, 20 bp, synthetic construct
  source 1..20: mol_type = other DNA
agatgaacagacaggtcctg

SEQ ID NO: 51643 - DNA, 20 bp, synthetic construct
  source 1..20: mol_type = other DNA
cccggcactggatgagccag

SEQ ID NO: 51644 - DNA, 20 bp, synthetic construct
  source 1..20: mol_type = other DNA
ccggcactggatgagccagt

SEQ ID NO: 51645 - DNA, 20 bp, synthetic construct
  source 1..20: mol_type = other DNA
gagcactcactcgatctggt

SEQ ID NO: 51646 - DNA, 20 bp, synthetic construct
  source 1..20: mol_type = other DNA
cctacctgctggcctgctga

SEQ ID NO: 51647 - DNA, 20 bp, synthetic construct
  source 1..20: mol_type = other DNA
ctctactcatctgtaagcgc

SEQ ID NO: 51648 - DNA, 20 bp, synthetic construct
  source 1..20: mol_type = other DNA
tcgggcgcagaagtcatagc

SEQ ID NO: 51649 - DNA, 20 bp, synthetic construct
  source 1..20: mol_type = other DNA
tcacgcaccggcatggacac

SEQ ID NO: 51650 - DNA, 20 bp, synthetic construct
  source 1..20: mol_type = other DNA
gagggctcacctgggacatc

SEQ ID NO: 51651 - DNA, 20 bp, synthetic construct
  source 1..20: mol_type = other DNA
actgagccaggtcctgggga

SEQ ID NO: 51652 - DNA, 20 bp, synthetic construct
  source 1..20: mol_type = other DNA
gttccctgccaactacgtgg

SEQ ID NO: 51653 - DNA, 20 bp, synthetic construct
  source 1..20: mol_type = other DNA
ctggatgccatgagggtgag

SEQ ID NO: 51654 - DNA, 20 bp, synthetic construct
  source 1..20: mol_type = other DNA
cacacaaggagtgtctgggg

SEQ ID NO: 51655 - DNA, 20 bp, synthetic construct
  source 1..20: mol_type = other DNA
ctggaagtcatgcccgttgg

SEQ ID NO: 51656 - DNA, 20 bp, synthetic construct
  source 1..20: mol_type = other DNA
accgagacaacaagaaggtg

SEQ ID NO: 51657 - DNA, 20 bp, synthetic construct
  source 1..20: mol_type = other DNA
atcgaggaccaaggtgccca

SEQ ID NO: 51658 - DNA, 20 bp, synthetic construct
  source 1..20: mol_type = other DNA
ccctgtaggttcctcgtcta

SEQ ID NO: 51659 - DNA, 20 bp, synthetic construct
  source 1..20: mol_type = other DNA
acctccatcttgggcagacc

SEQ ID NO: 51660 - DNA, 20 bp, synthetic construct
  source 1..20: mol_type = other DNA
aggtgtttcaggaatactac

SEQ ID NO: 51661 - DNA, 20 bp, synthetic construct
  source 1..20: mol_type = other DNA
gcagggctcaggacaaaaag

SEQ ID NO: 51662 - DNA, 20 bp, synthetic construct
  source 1..20: mol_type = other DNA
ttctgaatactgctgagccc

SEQ ID NO: 51663 - DNA, 20 bp, synthetic construct
  source 1..20: mol_type = other DNA
gggagactcctatgacctca

SEQ ID NO: 51664 - DNA, 20 bp, synthetic construct
  source 1..20: mol_type = other DNA
gtcacgcaccggcatggaca

SEQ ID NO: 51665 - DNA, 20 bp, synthetic construct
  source 1..20: mol_type = other DNA
gatgaagacctggtagagat

SEQ ID NO: 51666 - DNA, 20 bp, synthetic construct
  source 1..20: mol_type = other DNA
tctgcacacaaggagtgtct

SEQ ID NO: 51667 - DNA, 20 bp, synthetic construct
  source 1..20: mol_type = other DNA
accagatcgagtgagtgctc

SEQ ID NO: 51668 - DNA, 20 bp, synthetic construct
  source 1..20: mol_type = other DNA
gttccccgtcgatcttgggc

SEQ ID NO: 51669 - DNA, 20 bp, synthetic construct
  source 1..20: mol_type = other DNA
tggttccagatataacgtcg

SEQ ID NO: 51670 - DNA, 20 bp, synthetic construct
  source 1..20: mol_type = other DNA
ctccaccagctcctagaagg

SEQ ID NO: 51671 - DNA, 20 bp, synthetic construct
  source 1..20: mol_type = other DNA
gtagagattggctgcgccag

SEQ ID NO: 51672 - DNA, 20 bp, synthetic construct
  source 1..20: mol_type = other DNA
ctcactcgatctggtcggac

SEQ ID NO: 51673 - DNA, 20 bp, synthetic construct
  source 1..20: mol_type = other DNA
ccccaggcccttccccaccg

SEQ ID NO: 51674 - DNA, 20 bp, synthetic construct
  source 1..20: mol_type = other DNA
tgggcggcagcacccggcac

SEQ ID NO: 51675 - DNA, 20 bp, synthetic construct
  source 1..20: mol_type = other DNA
ccatggctaccgcctgccca

SEQ ID NO: 51676 - DNA, 20 bp, synthetic construct
  source 1..20: mol_type = other DNA
caggtcctactcggagggaa

SEQ ID NO: 51677 - DNA, 20 bp, synthetic construct
  source 1..20: mol_type = other DNA
gtgggaagcacaaagtattt

SEQ ID NO: 51678 - DNA, 20 bp, synthetic construct
  source 1..20: mol_type = other DNA
gcattggcgccacagctcca

SEQ ID NO: 51679 - DNA, 20 bp, synthetic construct
  source 1..20: mol_type = other DNA
cttaacaagaagggacagca

SEQ ID NO: 51680 - DNA, 20 bp, synthetic construct
  source 1..20: mol_type = other DNA
ggatgagccagtgggtgcat

SEQ ID NO: 51681 - DNA, 20 bp, synthetic construct
  source 1..20: mol_type = other DNA
ccactggctcatccagtgcc

SEQ ID NO: 51682 - DNA, 20 bp, synthetic construct
  source 1..20: mol_type = other DNA
ggtccaggacagagcagaca

SEQ ID NO: 51683 - DNA, 20 bp, synthetic construct
  source 1..20: mol_type = other DNA
caagagaattgaagaagaag

SEQ ID NO: 51684 - DNA, 20 bp, synthetic construct
  source 1..20: mol_type = other DNA
actcaccctcatggcatcca

SEQ ID NO: 51685 - DNA, 20 bp, synthetic construct
  source 1..20: mol_type = other DNA
ctgagccaggtcctggggag

SEQ ID NO: 51686 - DNA, 20 bp, synthetic construct
  source 1..20: mol_type = other DNA
tgggcaaggtacgagtggga

SEQ ID NO: 51687 - DNA, 20 bp, synthetic construct
  source 1..20: mol_type = other DNA
aacccacagcgacacggtgg

SEQ ID NO: 51688 - DNA, 20 bp, synthetic construct
  source 1..20: mol_type = other DNA
ccaagaaagtcccgtccgag

SEQ ID NO: 51689 - DNA, 20 bp, synthetic construct
  source 1..20: mol_type = other DNA
ttcctgggaaatctacggga

SEQ ID NO: 51690 - DNA, 20 bp, synthetic construct
  source 1..20: mol_type = other DNA
cgacatgggcaaggtacgag

SEQ ID NO: 51691 - DNA, 20 bp, synthetic construct
  source 1..20: mol_type = other DNA
gatcgaggaccaaggtgccc

SEQ ID NO: 51692 - DNA, 20 bp, synthetic construct
  source 1..20: mol_type = other DNA
cacgcaggaggcgatggaga

SEQ ID NO: 51693 - DNA, 20 bp, synthetic construct
  source 1..20: mol_type = other DNA
cactcgtaccttgcccatgt

SEQ ID NO: 51694 - DNA, 20 bp, synthetic construct
  source 1..20: mol_type = other DNA
aggacctgtctgttcatctc

SEQ ID NO: 51695 - DNA, 20 bp, synthetic construct
  source 1..20: mol_type = other DNA
ggagaagtacactgacacgc

SEQ ID NO: 51696 - DNA, 20 bp, synthetic construct
  source 1..20: mol_type = other DNA
ctcgggcgcagaagtcatag

SEQ ID NO: 51697 - DNA, 20 bp, synthetic construct
  source 1..20: mol_type = other DNA
tccaggtctgcccaagatgg

SEQ ID NO: 51698 - DNA, 20 bp, synthetic construct
  source 1..20: mol_type = other DNA
atcagggctaccgctgccat

SEQ ID NO: 51699 - DNA, 20 bp, synthetic construct
  source 1..20: mol_type = other DNA
cgaagagctcgctccgcttg

SEQ ID NO: 51700 - DNA, 20 bp, synthetic construct
  source 1..20: mol_type = other DNA
caggtcacgcggtggctggg

SEQ ID NO: 51701 - DNA, 20 bp, synthetic construct
  source 1..20: mol_type = other DNA
ccgtctgctggatctcccgc

SEQ ID NO: 51702 - DNA, 20 bp, synthetic construct
  source 1..20: mol_type = other DNA
tgaagaacagctcatagccc

SEQ ID NO: 51703 - DNA, 20 bp, synthetic construct
  source 1..20: mol_type = other DNA
acagaaggacaccatcccgg

SEQ ID NO: 51704 - DNA, 20 bp, synthetic construct
  source 1..20: mol_type = other DNA
gaaggtacctctgagatgca

SEQ ID NO: 51705 - DNA, 20 bp, synthetic construct
  source 1..20: mol_type = other DNA
ctcagagagccaacaacggg

SEQ ID NO: 51706 - DNA, 20 bp, synthetic construct
  source 1..20: mol_type = other DNA
gaccgagacaacaagaaggt

SEQ ID NO: 51707 - DNA, 20 bp, synthetic construct
  source 1..20: mol_type = other DNA
cgaagcaggtcctactcgga

SEQ ID NO: 51708 - DNA, 20 bp, synthetic construct
  source 1..20: mol_type = other DNA
gcaggatgtggtctcctcaa

SEQ ID NO: 51709 - DNA, 20 bp, synthetic construct
  source 1..20: mol_type = other DNA
cctcgatcaggaggaacatg

SEQ ID NO: 51710 - DNA, 20 bp, synthetic construct
  source 1..20: mol_type = other DNA
gaggtttcaggaaccgttgc

SEQ ID NO: 51711 - DNA, 20 bp, synthetic construct
  source 1..20: mol_type = other DNA
tgtacttctcctccgtctgc

SEQ ID NO: 51712 - DNA, 20 bp, synthetic construct
  source 1..20: mol_type = other DNA
ccatgccatcaacctgcgtg

SEQ ID NO: 51713 - DNA, 20 bp, synthetic construct
  source 1..20: mol_type = other DNA
gcccagccaccgcgtgacct

SEQ ID NO: 51714 - DNA, 20 bp, synthetic construct
  source 1..20: mol_type = other DNA
tggccggcccaagatcgacg

SEQ ID NO: 51715 - DNA, 20 bp, synthetic construct
  source 1..20: mol_type = other DNA
gcaggtttacaaagtccttg

SEQ ID NO: 51716 - DNA, 20 bp, synthetic construct
  source 1..20: mol_type = other DNA
agaaggtggggctttgacgc

SEQ ID NO: 51717 - DNA, 20 bp, synthetic construct
  source 1..20: mol_type = other DNA
gacacagaaggacaccatcc

SEQ ID NO: 51718 - DNA, 20 bp, synthetic construct
  source 1..20: mol_type = other DNA
gagaagtacactgacacgct

SEQ ID NO: 51719 - DNA, 20 bp, synthetic construct
  source 1..20: mol_type = other DNA
acctgcacagcttccaggtt

SEQ ID NO: 51720 - DNA, 20 bp, synthetic construct
  source 1..20: mol_type = other DNA
cctcctccaccgtgtcgctg

SEQ ID NO: 51721 - DNA, 20 bp, synthetic construct
  source 1..20: mol_type = other DNA
tcttcctccacgtagttggc

SEQ ID NO: 51722 - DNA, 20 bp, synthetic construct
  source 1..20: mol_type = other DNA
tgcagtagcggccatagacg

SEQ ID NO: 51723 - DNA, 20 bp, synthetic construct
  source 1..20: mol_type = other DNA
ccacagcgacacggtggagg

SEQ ID NO: 51724 - DNA, 20 bp, synthetic construct
  source 1..20: mol_type = other DNA
tgacccttaccgtaagcccc

SEQ ID NO: 51725 - DNA, 20 bp, synthetic construct
  source 1..20: mol_type = other DNA
tccatggctaccgcctgccc

SEQ ID NO: 51726 - DNA, 20 bp, synthetic construct
  source 1..20: mol_type = other DNA
cctggctcagtgcgtgaacg

SEQ ID NO: 51727 - DNA, 20 bp, synthetic construct
  source 1..20: mol_type = other DNA
ctgcacacaaggagtgtctg

SEQ ID NO: 51728 - DNA, 20 bp, synthetic construct
  source 1..20: mol_type = other DNA
gaagaacagctcatagccct

SEQ ID NO: 51729 - DNA, 20 bp, synthetic construct
  source 1..20: mol_type = other DNA
gggctcacctgggacatctg

SEQ ID NO: 51730 - DNA, 20 bp, synthetic construct
  source 1..20: mol_type = other DNA
acgaagcaggtcctactcgg

SEQ ID NO: 51731 - DNA, 20 bp, synthetic construct
  source 1..20: mol_type = other DNA
cactcaccctcatggcatcc

SEQ ID NO: 51732 - DNA, 20 bp, synthetic construct
  source 1..20: mol_type = other DNA
gcaggtcctactcggaggga

SEQ ID NO: 51733 - DNA, 20 bp, synthetic construct
  source 1..20: mol_type = other DNA
aggtttcaggaaccgttgca

SEQ ID NO: 51734 - DNA, 20 bp, synthetic construct
  source 1..20: mol_type = other DNA
caaatatcacctccttctcc

SEQ ID NO: 51735 - DNA, 20 bp, synthetic construct
  source 1..20: mol_type = other DNA
aaggagaggtgagacccagc

SEQ ID NO: 51736 - DNA, 20 bp, synthetic construct
  source 1..20: mol_type = other DNA
gccgaacttctcacagcagg

SEQ ID NO: 51737 - DNA, 20 bp, synthetic construct
  source 1..20: mol_type = other DNA
gcaggtaggaggtctcagac

SEQ ID NO: 51738 - DNA, 20 bp, synthetic construct
  source 1..20: mol_type = other DNA
ggtttcaggaaccgttgcag

SEQ ID NO: 51739 - DNA, 20 bp, synthetic construct
  source 1..20: mol_type = other DNA
tccaggacaaactacatcgc

SEQ ID NO: 51740 - DNA, 20 bp, synthetic construct
  source 1..20: mol_type = other DNA
cttcatctgcacgtcctccc

SEQ ID NO: 51741 - DNA, 20 bp, synthetic construct
  source 1..20: mol_type = other DNA
ctcggagcccgtgtccatgc

SEQ ID NO: 51742 - DNA, 20 bp, synthetic construct
  source 1..20: mol_type = other DNA
gtcgagcaggaaggcatacc

SEQ ID NO: 51743 - DNA, 20 bp, synthetic construct
  source 1..20: mol_type = other DNA
agcaggaaggcatacctgga

SEQ ID NO: 51744 - DNA, 20 bp, synthetic construct
  source 1..20: mol_type = other DNA
ctgaggctgaacagaactgg

SEQ ID NO: 51745 - DNA, 20 bp, synthetic construct
  source 1..20: mol_type = other DNA
tcctccaggtctgcccaaga

SEQ ID NO: 51746 - DNA, 20 bp, synthetic construct
  source 1..20: mol_type = other DNA
gcagaagtcatagcgggctt

SEQ ID NO: 51747 - DNA, 20 bp, synthetic construct
  source 1..20: mol_type = other DNA
ccacatgttcctcctgatcg

SEQ ID NO: 51748 - DNA, 20 bp, synthetic construct
  source 1..20: mol_type = other DNA
ctcagaggtaccttctatca

SEQ ID NO: 51749 - DNA, 20 bp, synthetic construct
  source 1..20: mol_type = other DNA
tcacgcactgagccaggtcc

SEQ ID NO: 51750 - DNA, 20 bp, synthetic construct
  source 1..20: mol_type = other DNA
ctcaccagagatgaacagac

SEQ ID NO: 51751 - DNA, 20 bp, synthetic construct
  source 1..20: mol_type = other DNA
acaagaagggacagcaaggc

SEQ ID NO: 51752 - DNA, 20 bp, synthetic construct
  source 1..20: mol_type = other DNA
tggcatccagggccagccgc

SEQ ID NO: 51753 - DNA, 20 bp, synthetic construct
  source 1..20: mol_type = other DNA
ctgacaggccttgcaggatg

SEQ ID NO: 51754 - DNA, 20 bp, synthetic construct
  source 1..20: mol_type = other DNA
tccatcttgggcagacctgg

SEQ ID NO: 51755 - DNA, 20 bp, synthetic construct
  source 1..20: mol_type = other DNA
ggaactcaagatcacctcgg

SEQ ID NO: 51756 - DNA, 20 bp, synthetic construct
  source 1..20: mol_type = other DNA
acaggagactggacatcgtc

SEQ ID NO: 51757 - DNA, 20 bp, synthetic construct
  source 1..20: mol_type = other DNA
gagggcggagaactgggacg

SEQ ID NO: 51758 - DNA, 20 bp, synthetic construct
  source 1..20: mol_type = other DNA
cctctacgaggaggagatgc

SEQ ID NO: 51759 - DNA, 20 bp, synthetic construct
  source 1..20: mol_type = other DNA
ggttgaaactagagatggac

SEQ ID NO: 51760 - DNA, 20 bp, synthetic construct
  source 1..20: mol_type = other DNA
tccacctggatgcaggggca

SEQ ID NO: 51761 - DNA, 20 bp, synthetic construct
  source 1..20: mol_type = other DNA
gactccgcagatctgggtcg

SEQ ID NO: 51762 - DNA, 20 bp, synthetic construct
  source 1..20: mol_type = other DNA
tcgaggttgttcacctgccc

SEQ ID NO: 51763 - DNA, 20 bp, synthetic construct
  source 1..20: mol_type = other DNA
accccccacaatagggggcc

SEQ ID NO: 51764 - DNA, 20 bp, synthetic construct
  source 1..20: mol_type = other DNA
caaaaattagccaggtatgg

SEQ ID NO: 51765 - DNA, 20 bp, synthetic construct
  source 1..20: mol_type = other DNA
cctcgagatggcggtggggg

SEQ ID NO: 51766 - DNA, 20 bp, synthetic construct
  source 1..20: mol_type = other DNA
accagtccctctgagctctg

SEQ ID NO: 51767 - DNA, 20 bp, synthetic construct
  source 1..20: mol_type = other DNA
ggtggcggtggtggcggtgg

SEQ ID NO: 51768 - DNA, 20 bp, synthetic construct
  source 1..20: mol_type = other DNA
tgtcccaggctggagtacag

SEQ ID NO: 51769 - DNA, 20 bp, synthetic construct
  source 1..20: mol_type = other DNA
cctattgtggggggtaacaa

SEQ ID NO: 51770 - DNA, 20 bp, synthetic construct
  source 1..20: mol_type = other DNA
gaagtcgtagataagtttag

SEQ ID NO: 51771 - DNA, 20 bp, synthetic construct
  source 1..20: mol_type = other DNA
caggcgtgtgccaccatacc

SEQ ID NO: 51772 - DNA, 20 bp, synthetic construct
  source 1..20: mol_type = other DNA
ggggcagatcgcttgagccc

SEQ ID NO: 51773 - DNA, 20 bp, synthetic construct
  source 1..20: mol_type = other DNA
gcctcagcctcccagagtgc

SEQ ID NO: 51774 - DNA, 20 bp, synthetic construct
  source 1..20: mol_type = other DNA
agcactctgggaggctgagg

SEQ ID NO: 51775 - DNA, 20 bp, synthetic construct
  source 1..20: mol_type = other DNA
gtagataagtttagaggtct

SEQ ID NO: 51776 - DNA, 20 bp, synthetic construct
  source 1..20: mol_type = other DNA
ccccccacaatagggggccg

SEQ ID NO: 51777 - DNA, 20 bp, synthetic construct
  source 1..20: mol_type = other DNA
ctcctgctctggtgcctgcc

SEQ ID NO: 51778 - DNA, 20 bp, synthetic construct
  source 1..20: mol_type = other DNA
gggcggcggaagtggctctg

SEQ ID NO: 51779 - DNA, 20 bp, synthetic construct
  source 1..20: mol_type = other DNA
gagaacagactccgcagatc

SEQ ID NO: 51780 - DNA, 20 bp, synthetic construct
  source 1..20: mol_type = other DNA
ggcccaccagctccaggggg

SEQ ID NO: 51781 - DNA, 20 bp, synthetic construct
  source 1..20: mol_type = other DNA
cgttgactcatgtgagttgg

SEQ ID NO: 51782 - DNA, 20 bp, synthetic construct
  source 1..20: mol_type = other DNA
ccgttgagctggcgctcgat

SEQ ID NO: 51783 - DNA, 20 bp, synthetic construct
  source 1..20: mol_type = other DNA
gcaagaggtgagcaccgggt

SEQ ID NO: 51784 - DNA, 20 bp, synthetic construct
  source 1..20: mol_type = other DNA
tacagtgtagtagctgtcgt

SEQ ID NO: 51785 - DNA, 20 bp, synthetic construct
  source 1..20: mol_type = other DNA
aagaagggcaggtgcgccgc

SEQ ID NO: 51786 - DNA, 20 bp, synthetic construct
  source 1..20: mol_type = other DNA
cggcacccagtgctttggag

SEQ ID NO: 51787 - DNA, 20 bp, synthetic construct
  source 1..20: mol_type = other DNA
tgctgccgtagaagaagggc

SEQ ID NO: 51788 - DNA, 20 bp, synthetic construct
  source 1..20: mol_type = other DNA
ccgaccaggaacttgtgcag

SEQ ID NO: 51789 - DNA, 20 bp, synthetic construct
  source 1..20: mol_type = other DNA
cggcccacgagcggatgccc

SEQ ID NO: 51790 - DNA, 20 bp, synthetic construct
  source 1..20: mol_type = other DNA
ggcaagtactgcattcccga

SEQ ID NO: 51791 - DNA, 20 bp, synthetic construct
  source 1..20: mol_type = other DNA
ggtaccagggcatccgctcg

SEQ ID NO: 51792 - DNA, 20 bp, synthetic construct
  source 1..20: mol_type = other DNA
aatgagcttctccacctgcg

SEQ ID NO: 51793 - DNA, 20 bp, synthetic construct
  source 1..20: mol_type = other DNA
cgggctcatctactgcctga

SEQ ID NO: 51794 - DNA, 20 bp, synthetic construct
  source 1..20: mol_type = other DNA
cagggaagtggccgctcaag

SEQ ID NO: 51795 - DNA, 20 bp, synthetic construct
  source 1..20: mol_type = other DNA
gtaggacaaggcctcccaca

SEQ ID NO: 51796 - DNA, 20 bp, synthetic construct
  source 1..20: mol_type = other DNA
caggttgcagggcagcccgt

SEQ ID NO: 51797 - DNA, 20 bp, synthetic construct
  source 1..20: mol_type = other DNA
tcagatactccaccagctgc

SEQ ID NO: 51798 - DNA, 20 bp, synthetic construct
  source 1..20: mol_type = other DNA
cgtagtgccggttaaccagc

SEQ ID NO: 51799 - DNA, 20 bp, synthetic construct
  source 1..20: mol_type = other DNA
cctcatcagccaagacaagg

SEQ ID NO: 51800 - DNA, 20 bp, synthetic construct
  source 1..20: mol_type = other DNA
cggccacttccctgctgagc

SEQ ID NO: 51801 - DNA, 20 bp, synthetic construct
  source 1..20: mol_type = other DNA
ggcctcagcctggcagggga

SEQ ID NO: 51802 - DNA, 20 bp, synthetic construct
  source 1..20: mol_type = other DNA
gggcttctggccgtaggaca

SEQ ID NO: 51803 - DNA, 20 bp, synthetic construct
  source 1..20: mol_type = other DNA
gagctatggggtcaccatgt

SEQ ID NO: 51804 - DNA, 20 bp, synthetic construct
  source 1..20: mol_type = other DNA
ctcatgagtgcgtacagttc

SEQ ID NO: 51805 - DNA, 20 bp, synthetic construct
  source 1..20: mol_type = other DNA
gctcatctactgcctgaagg

SEQ ID NO: 51806 - DNA, 20 bp, synthetic construct
  source 1..20: mol_type = other DNA
actcatgagtgcgtacagtt

SEQ ID NO: 51807 - DNA, 20 bp, synthetic construct
  source 1..20: mol_type = other DNA
ccgctgcacaagttcctggt

SEQ ID NO: 51808 - DNA, 20 bp, synthetic construct
  source 1..20: mol_type = other DNA
ggttcctgactgttggcgag

SEQ ID NO: 51809 - DNA, 20 bp, synthetic construct
  source 1..20: mol_type = other DNA
ggtgtatccatctgagttga

SEQ ID NO: 51810 - DNA, 20 bp, synthetic construct
  source 1..20: mol_type = other DNA
gggcaggaagcagatcgacg

SEQ ID NO: 51811 - DNA, 20 bp, synthetic construct
  source 1..20: mol_type = other DNA
aagccctacaaggcaggcgc

SEQ ID NO: 51812 - DNA, 20 bp, synthetic construct
  source 1..20: mol_type = other DNA
cgctgcggctggagaacttg

SEQ ID NO: 51813 - DNA, 20 bp, synthetic construct
  source 1..20: mol_type = other DNA
gtccctcatctatgggaaga

SEQ ID NO: 51814 - DNA, 20 bp, synthetic construct
  source 1..20: mol_type = other DNA
gcagatcgacgtggccatca

SEQ ID NO: 51815 - DNA, 20 bp, synthetic construct
  source 1..20: mol_type = other DNA
gccatcaaggtgctgaagca

SEQ ID NO: 51816 - DNA, 20 bp, synthetic construct
  source 1..20: mol_type = other DNA
gggcgatcctcccacctgtg

SEQ ID NO: 51817 - DNA, 20 bp, synthetic construct
  source 1..20: mol_type = other DNA
gtaccagggcatccgctcgt

SEQ ID NO: 51818 - DNA, 20 bp, synthetic construct
  source 1..20: mol_type = other DNA
catggggatgaagtacctgg

SEQ ID NO: 51819 - DNA, 20 bp, synthetic construct
  source 1..20: mol_type = other DNA
gaagaagggcaggtgcgccg

SEQ ID NO: 51820 - DNA, 20 bp, synthetic construct
  source 1..20: mol_type = other DNA
tcgggtgcgtaccacttgag

SEQ ID NO: 51821 - DNA, 20 bp, synthetic construct
  source 1..20: mol_type = other DNA
atctacaagtgagtgccagt

SEQ ID NO: 51822 - DNA, 20 bp, synthetic construct
  source 1..20: mol_type = other DNA
tgagcagaagatgaaagggc

SEQ ID NO: 51823 - DNA, 20 bp, synthetic construct
  source 1..20: mol_type = other DNA
agaagggcaggtgcgccgcg

SEQ ID NO: 51824 - DNA, 20 bp, synthetic construct
  source 1..20: mol_type = other DNA
ccaggtgagcgggcagaggt

SEQ ID NO: 51825 - DNA, 20 bp, synthetic construct
  source 1..20: mol_type = other DNA
ccaactcacatgagtcaacg

SEQ ID NO: 51826 - DNA, 20 bp, synthetic construct
  source 1..20: mol_type = other DNA
gccgtcacctgaggcgttgc

SEQ ID NO: 51827 - DNA, 20 bp, synthetic construct
  source 1..20: mol_type = other DNA
tgctgcaccaggtgtccatg

SEQ ID NO: 51828 - DNA, 20 bp, synthetic construct
  source 1..20: mol_type = other DNA
gcaccaagtttgacacgctc

SEQ ID NO: 51829 - DNA, 20 bp, synthetic construct
  source 1..20: mol_type = other DNA
ctccaggtacttcatcccca

SEQ ID NO: 51830 - DNA, 20 bp, synthetic construct
  source 1..20: mol_type = other DNA
ctccccaggcccgctcagca

SEQ ID NO: 51831 - DNA, 20 bp, synthetic construct
  source 1..20: mol_type = other DNA
catagctccagacatcgctg

SEQ ID NO: 51832 - DNA, 20 bp, synthetic construct
  source 1..20: mol_type = other DNA
tgcgcatgcggtacacgccc

SEQ ID NO: 51833 - DNA, 20 bp, synthetic construct
  source 1..20: mol_type = other DNA
cgctgatcttggcgtagtgc

SEQ ID NO: 51834 - DNA, 20 bp, synthetic construct
  source 1..20: mol_type = other DNA
tctctgaggctaaaggccac

SEQ ID NO: 51835 - DNA, 20 bp, synthetic construct
  source 1..20: mol_type = other DNA
ctacctcatcagccaagaca

SEQ ID NO: 51836 - DNA, 20 bp, synthetic construct
  source 1..20: mol_type = other DNA
tgccaggctgaggccgcgga

SEQ ID NO: 51837 - DNA, 20 bp, synthetic construct
  source 1..20: mol_type = other DNA
catagccgcccagcgagcgc

SEQ ID NO: 51838 - DNA, 20 bp, synthetic construct
  source 1..20: mol_type = other DNA
gatctacaagtgagtgccag

SEQ ID NO: 51839 - DNA, 20 bp, synthetic construct
  source 1..20: mol_type = other DNA
ggagctatggggtcaccatg

SEQ ID NO: 51840 - DNA, 20 bp, synthetic construct
  source 1..20: mol_type = other DNA
cacatacaggaacttgccgt

SEQ ID NO: 51841 - DNA, 20 bp, synthetic construct
  source 1..20: mol_type = other DNA
gggtgtatccatctgagttg

SEQ ID NO: 51842 - DNA, 20 bp, synthetic construct
  source 1..20: mol_type = other DNA
cgcccagcgagcgcaggcac

SEQ ID NO: 51843 - DNA, 20 bp, synthetic construct
  source 1..20: mol_type = other DNA
cttgtagggcttctggccgt

SEQ ID NO: 51844 - DNA, 20 bp, synthetic construct
  source 1..20: mol_type = other DNA
ctgaggccgcggaaggagca

SEQ ID NO: 51845 - DNA, 20 bp, synthetic construct
  source 1..20: mol_type = other DNA
ctgcccgctcacctggctca

SEQ ID NO: 51846 - DNA, 20 bp, synthetic construct
  source 1..20: mol_type = other DNA
gttaaccagcaggacgttgc

SEQ ID NO: 51847 - DNA, 20 bp, synthetic construct
  source 1..20: mol_type = other DNA
gctccagacatcgctgcggc

SEQ ID NO: 51848 - DNA, 20 bp, synthetic construct
  source 1..20: mol_type = other DNA
acacccctgagccaggtgag

SEQ ID NO: 51849 - DNA, 20 bp, synthetic construct
  source 1..20: mol_type = other DNA
cagatactccaccagctgca

SEQ ID NO: 51850 - DNA, 20 bp, synthetic construct
  source 1..20: mol_type = other DNA
gcggccacttccctgctgag

SEQ ID NO: 51851 - DNA, 20 bp, synthetic construct
  source 1..20: mol_type = other DNA
gctccacggtcaggaagtcg

SEQ ID NO: 51852 - DNA, 20 bp, synthetic construct
  source 1..20: mol_type = other DNA
cagcgacccagaggagctca

SEQ ID NO: 51853 - DNA, 20 bp, synthetic construct
  source 1..20: mol_type = other DNA
catctccatgaccagcatga

SEQ ID NO: 51854 - DNA, 20 bp, synthetic construct
  source 1..20: mol_type = other DNA
ttcatcttctgctcaagccg

SEQ ID NO: 51855 - DNA, 20 bp, synthetic construct
  source 1..20: mol_type = other DNA
tcgccccgacttcctgaccg

SEQ ID NO: 51856 - DNA, 20 bp, synthetic construct
  source 1..20: mol_type = other DNA
ggccagaagccctacaaggc

SEQ ID NO: 51857 - DNA, 20 bp, synthetic construct
  source 1..20: mol_type = other DNA
gctgaggccgcggaaggagc

SEQ ID NO: 51858 - DNA, 20 bp, synthetic construct
  source 1..20: mol_type = other DNA
gggcaagtactgcattcccg

SEQ ID NO: 51859 - DNA, 20 bp, synthetic construct
  source 1..20: mol_type = other DNA
tacagttcgggtggacactc

SEQ ID NO: 51860 - DNA, 20 bp, synthetic construct
  source 1..20: mol_type = other DNA
gcctcagcctggcaggggaa

SEQ ID NO: 51861 - DNA, 20 bp, synthetic construct
  source 1..20: mol_type = other DNA
tgatgaattcttcatacccc

SEQ ID NO: 51862 - DNA, 20 bp, synthetic construct
  source 1..20: mol_type = other DNA
aataacatattcagcaatgc

SEQ ID NO: 51863 - DNA, 20 bp, synthetic construct
  source 1..20: mol_type = other DNA
ctggcaggagcccgtggggc

SEQ ID NO: 51864 - DNA, 20 bp, synthetic construct
  source 1..20: mol_type = other DNA
gcgggactagagggagctga

SEQ ID NO: 51865 - DNA, 20 bp, synthetic construct
  source 1..20: mol_type = other DNA
tctcgaggtggaaaggcagg

SEQ ID NO: 51866 - DNA, 20 bp, synthetic construct
  source 1..20: mol_type = other DNA
tttggccgggccatgggtgc

SEQ ID NO: 51867 - DNA, 20 bp, synthetic construct
  source 1..20: mol_type = other DNA
tgcagagcccaggggctggc

SEQ ID NO: 51868 - DNA, 20 bp, synthetic construct
  source 1..20: mol_type = other DNA
cggcccagtgggtcatcagg

SEQ ID NO: 51869 - DNA, 20 bp, synthetic construct
  source 1..20: mol_type = other DNA
tggtcaacaaaatccacgtc

SEQ ID NO: 51870 - DNA, 20 bp, synthetic construct
  source 1..20: mol_type = other DNA
ctcatcaccacctgttccct

SEQ ID NO: 51871 - DNA, 20 bp, synthetic construct
  source 1..20: mol_type = other DNA
aaaagattctagagtgattt

SEQ ID NO: 51872 - DNA, 20 bp, synthetic construct
  source 1..20: mol_type = other DNA
cccgtaggggcaaaagccga

SEQ ID NO: 51873 - DNA, 20 bp, synthetic construct
  source 1..20: mol_type = other DNA
caaagctaaagctatgctgg

SEQ ID NO: 51874 - DNA, 20 bp, synthetic construct
  source 1..20: mol_type = other DNA
ccgccaccccaagtacaaga

SEQ ID NO: 51875 - DNA, 20 bp, synthetic construct
  source 1..20: mol_type = other DNA
ggcacagctccgtcttgtag

SEQ ID NO: 51876 - DNA, 20 bp, synthetic construct
  source 1..20: mol_type = other DNA
ctgctggacagaaaggcagt

SEQ ID NO: 51877 - DNA, 20 bp, synthetic construct
  source 1..20: mol_type = other DNA
cgttgtggatgaagtggcag

SEQ ID NO: 51878 - DNA, 20 bp, synthetic construct
  source 1..20: mol_type = other DNA
agctaaagctatgctggagg

SEQ ID NO: 51879 - DNA, 20 bp, synthetic construct
  source 1..20: mol_type = other DNA
agtggcagcggggcccgtag

SEQ ID NO: 51880 - DNA, 20 bp, synthetic construct
  source 1..20: mol_type = other DNA
atgtgaggggactcggacat

SEQ ID NO: 51881 - DNA, 20 bp, synthetic construct
  source 1..20: mol_type = other DNA
agccgatggtgtggaaggtg

SEQ ID NO: 51882 - DNA, 20 bp, synthetic construct
  source 1..20: mol_type = other DNA
gctaaagctatgctggaggc

SEQ ID NO: 51883 - DNA, 20 bp, synthetic construct
  source 1..20: mol_type = other DNA
ctggtgggggcttccctcgg

SEQ ID NO: 51884 - DNA, 20 bp, synthetic construct
  source 1..20: mol_type = other DNA
ggtggcagcggcggtggcag

SEQ ID NO: 51885 - DNA, 20 bp, synthetic construct
  source 1..20: mol_type = other DNA
tgccgcaccttccacaccat

SEQ ID NO: 51886 - DNA, 20 bp, synthetic construct
  source 1..20: mol_type = other DNA
cagcaaagctaaagctatgc

SEQ ID NO: 51887 - DNA, 20 bp, synthetic construct
  source 1..20: mol_type = other DNA
gtacggcaccgggggcgccg

SEQ ID NO: 51888 - DNA, 20 bp, synthetic construct
  source 1..20: mol_type = other DNA
cagccccccggactcgctgt

SEQ ID NO: 51889 - DNA, 20 bp, synthetic construct
  source 1..20: mol_type = other DNA
tgccgcacctttcataccat

SEQ ID NO: 51890 - DNA, 20 bp, synthetic construct
  source 1..20: mol_type = other DNA
gcggcgccggcggctgcgcg

SEQ ID NO: 51891 - DNA, 20 bp, synthetic construct
  source 1..20: mol_type = other DNA
cagctcggtcttgtagcgcg

SEQ ID NO: 51892 - DNA, 20 bp, synthetic construct
  source 1..20: mol_type = other DNA
cgaggaacaggaggaggcgg

SEQ ID NO: 51893 - DNA, 20 bp, synthetic construct
  source 1..20: mol_type = other DNA
gctacaagaccgagctgtgc

SEQ ID NO: 51894 - DNA, 20 bp, synthetic construct
  source 1..20: mol_type = other DNA
cacagctcggtcttgtactt

SEQ ID NO: 51895 - DNA, 20 bp, synthetic construct
  source 1..20: mol_type = other DNA
tctccgacgactgaggcaag

SEQ ID NO: 51896 - DNA, 20 bp, synthetic construct
  source 1..20: mol_type = other DNA
cccataggggcagaagccga

SEQ ID NO: 51897 - DNA, 20 bp, synthetic construct
  source 1..20: mol_type = other DNA
ggaacaggaggaggcggagg

SEQ ID NO: 51898 - DNA, 20 bp, synthetic construct
  source 1..20: mol_type = other DNA
tctcatagatcagaacatcc

SEQ ID NO: 51899 - DNA, 20 bp, synthetic construct
  source 1..20: mol_type = other DNA
tctcggaggcggcgcgcagc

SEQ ID NO: 51900 - DNA, 20 bp, synthetic construct
  source 1..20: mol_type = other DNA
tctctgggcctgacctgctt

SEQ ID NO: 51901 - DNA, 20 bp, synthetic construct
  source 1..20: mol_type = other DNA
gagcagcggctgtacaaggt

SEQ ID NO: 51902 - DNA, 20 bp, synthetic construct
  source 1..20: mol_type = other DNA
agacgttcagctgctgtcct

SEQ ID NO: 51903 - DNA, 20 bp, synthetic construct
  source 1..20: mol_type = other DNA
cgagcagcggctgtacaagg

SEQ ID NO: 51904 - DNA, 20 bp, synthetic construct
  source 1..20: mol_type = other DNA
cgcagccgtcccagttgcag

SEQ ID NO: 51905 - DNA, 20 bp, synthetic construct
  source 1..20: mol_type = other DNA
gctgtacaaggtgggtcccg

SEQ ID NO: 51906 - DNA, 20 bp, synthetic construct
  source 1..20: mol_type = other DNA
gggcagtcctgcagaaggac

SEQ ID NO: 51907 - DNA, 20 bp, synthetic construct
  source 1..20: mol_type = other DNA
gcgccactaccgaaagcaca

SEQ ID NO: 51908 - DNA, 20 bp, synthetic construct
  source 1..20: mol_type = other DNA
tcgcacagatggcactggaa

SEQ ID NO: 51909 - DNA, 20 bp, synthetic construct
  source 1..20: mol_type = other DNA
ctgtacaaggtgggtcccgc

SEQ ID NO: 51910 - DNA, 20 bp, synthetic construct
  source 1..20: mol_type = other DNA
tctcttcgccgctcggcctc

SEQ ID NO: 51911 - DNA, 20 bp, synthetic construct
  source 1..20: mol_type = other DNA
cttcagttcgaacaccgtgc

SEQ ID NO: 51912 - DNA, 20 bp, synthetic construct
  source 1..20: mol_type = other DNA
tacagccgctgctcgtcagg

SEQ ID NO: 51913 - DNA, 20 bp, synthetic construct
  source 1..20: mol_type = other DNA
gatggcactggaatggccgg

SEQ ID NO: 51914 - DNA, 20 bp, synthetic construct
  source 1..20: mol_type = other DNA
ttgtacagccgctgctcgtc

SEQ ID NO: 51915 - DNA, 20 bp, synthetic construct
  source 1..20: mol_type = other DNA
ggcagtcctgcagaaggaca

SEQ ID NO: 51916 - DNA, 20 bp, synthetic construct
  source 1..20: mol_type = other DNA
cgccactaccgaaagcacac

SEQ ID NO: 51917 - DNA, 20 bp, synthetic construct
  source 1..20: mol_type = other DNA
agacgtcccaccaagggtct

SEQ ID NO: 51918 - DNA, 20 bp, synthetic construct
  source 1..20: mol_type = other DNA
tcctcaggatgaccaactct

SEQ ID NO: 51919 - DNA, 20 bp, synthetic construct
  source 1..20: mol_type = other DNA
gaactgaagcgcatcgtcga

SEQ ID NO: 51920 - DNA, 20 bp, synthetic construct
  source 1..20: mol_type = other DNA
tcatgaggaacacgtcctgg

SEQ ID NO: 51921 - DNA, 20 bp, synthetic construct
  source 1..20: mol_type = other DNA
tacacatagcgcctctgact

SEQ ID NO: 51922 - DNA, 20 bp, synthetic construct
  source 1..20: mol_type = other DNA
atcatgaggaacacgtcctg

SEQ ID NO: 51923 - DNA, 20 bp, synthetic construct
  source 1..20: mol_type = other DNA
accaggaaggccccatcacg

SEQ ID NO: 51924 - DNA, 20 bp, synthetic construct
  source 1..20: mol_type = other DNA
ccggaaggccagccccactg

SEQ ID NO: 51925 - DNA, 20 bp, synthetic construct
  source 1..20: mol_type = other DNA
tctcagtgaaagtgccaatc

SEQ ID NO: 51926 - DNA, 20 bp, synthetic construct
  source 1..20: mol_type = other DNA
gcgatggtgagcgggcgtgg

SEQ ID NO: 51927 - DNA, 20 bp, synthetic construct
  source 1..20: mol_type = other DNA
tcttccctcaggaactgcaa

SEQ ID NO: 51928 - DNA, 20 bp, synthetic construct
  source 1..20: mol_type = other DNA
tctcctgcacagccagaata

SEQ ID NO: 51929 - DNA, 20 bp, synthetic construct
  source 1..20: mol_type = other DNA
agacgcgctcaaactccgtc

SEQ ID NO: 51930 - DNA, 20 bp, synthetic construct
  source 1..20: mol_type = other DNA
ccaggaaggccccatcacga

SEQ ID NO: 51931 - DNA, 20 bp, synthetic construct
  source 1..20: mol_type = other DNA
gtatgagcacgagaaggacc

SEQ ID NO: 51932 - DNA, 20 bp, synthetic construct
  source 1..20: mol_type = other DNA
aaacaaaaggagatatcaag

SEQ ID NO: 51933 - DNA, 20 bp, synthetic construct
  source 1..20: mol_type = other DNA
cgcgatggtgagcgggcgtg

SEQ ID NO: 51934 - DNA, 20 bp, synthetic construct
  source 1..20: mol_type = other DNA
ctccacagatgacacctttg

SEQ ID NO: 51935 - DNA, 20 bp, synthetic construct
  source 1..20: mol_type = other DNA
agaaggcacgatcgcacaga

SEQ ID NO: 51936 - DNA, 20 bp, synthetic construct
  source 1..20: mol_type = other DNA
tctctgggttctgaagttct

SEQ ID NO: 51937 - DNA, 20 bp, synthetic construct
  source 1..20: mol_type = other DNA
catgcagactctgctcagct

SEQ ID NO: 51938 - DNA, 20 bp, synthetic construct
  source 1..20: mol_type = other DNA
aaaaggagatatcaagagga

SEQ ID NO: 51939 - DNA, 20 bp, synthetic construct
  source 1..20: mol_type = other DNA
cctcatcttcagccacatgc

SEQ ID NO: 51940 - DNA, 20 bp, synthetic construct
  source 1..20: mol_type = other DNA
ggtttgataagttctagctg

SEQ ID NO: 51941 - DNA, 20 bp, synthetic construct
  source 1..20: mol_type = other DNA
gccgcgatggtgagcgggcg

SEQ ID NO: 51942 - DNA, 20 bp, synthetic construct
  source 1..20: mol_type = other DNA
acctctgcaattaaatttgg

SEQ ID NO: 51943 - DNA, 20 bp, synthetic construct
  source 1..20: mol_type = other DNA
cacacacaggtaacggctga

SEQ ID NO: 51944 - DNA, 20 bp, synthetic construct
  source 1..20: mol_type = other DNA
ccgtgaagatggtggtcttg

SEQ ID NO: 51945 - DNA, 20 bp, synthetic construct
  source 1..20: mol_type = other DNA
gcagaggaagttggggctgt

SEQ ID NO: 51946 - DNA, 20 bp, synthetic construct
  source 1..20: mol_type = other DNA
ccgcgatggtgagcgggcgt

SEQ ID NO: 51947 - DNA, 20 bp, synthetic construct
  source 1..20: mol_type = other DNA
tgaccagaatttcctggctc

SEQ ID NO: 51948 - DNA, 20 bp, synthetic construct
  source 1..20: mol_type = other DNA
tctcaggtgtgcgaagtccc

SEQ ID NO: 51949 - DNA, 20 bp, synthetic construct
  source 1..20: mol_type = other DNA
gtacttcacaaaaacagtag

SEQ ID NO: 51950 - DNA, 20 bp, synthetic construct
  source 1..20: mol_type = other DNA
gatcatgaggaacacgtcct

SEQ ID NO: 51951 - DNA, 20 bp, synthetic construct
  source 1..20: mol_type = other DNA
ccacacacaggtaacggctg

SEQ ID NO: 51952 - DNA, 20 bp, synthetic construct
  source 1..20: mol_type = other DNA
gtagctgcaggtgtgagtgg

SEQ ID NO: 51953 - DNA, 20 bp, synthetic construct
  source 1..20: mol_type = other DNA
acagatggcactggaatggc

SEQ ID NO: 51954 - DNA, 20 bp, synthetic construct
  source 1..20: mol_type = other DNA
gactgggaatagttactccc

SEQ ID NO: 51955 - DNA, 20 bp, synthetic construct
  source 1..20: mol_type = other DNA
agacgatcgtcaccggattg

SEQ ID NO: 51956 - DNA, 20 bp, synthetic construct
  source 1..20: mol_type = other DNA
atacacatagcgcctctgac

SEQ ID NO: 51957 - DNA, 20 bp, synthetic construct
  source 1..20: mol_type = other DNA
agacgaggaggacggggaac

SEQ ID NO: 51958 - DNA, 20 bp, synthetic construct
  source 1..20: mol_type = other DNA
cctcagccgttacctgtgtg

SEQ ID NO: 51959 - DNA, 20 bp, synthetic construct
  source 1..20: mol_type = other DNA
attcactgtaaagctggaaa

SEQ ID NO: 51960 - DNA, 20 bp, synthetic construct
  source 1..20: mol_type = other DNA
tctcaatgtcttgaggtttc

SEQ ID NO: 51961 - DNA, 20 bp, synthetic construct
  source 1..20: mol_type = other DNA
tctcttcctagtctctcaca

SEQ ID NO: 51962 - DNA, 20 bp, synthetic construct
  source 1..20: mol_type = other DNA
ttgacctgtatccatttctg

SEQ ID NO: 51963 - DNA, 20 bp, synthetic construct
  source 1..20: mol_type = other DNA
tctctgaaattacaaagtaa

SEQ ID NO: 51964 - DNA, 20 bp, synthetic construct
  source 1..20: mol_type = other DNA
tctccaactttaaatcctgt

SEQ ID NO: 51965 - DNA, 20 bp, synthetic construct
  source 1..20: mol_type = other DNA
tctcagctcctgtagcagct

SEQ ID NO: 51966 - DNA, 20 bp, synthetic construct
  source 1..20: mol_type = other DNA
tgggaatagttactccctgg

SEQ ID NO: 51967 - DNA, 20 bp, synthetic construct
  source 1..20: mol_type = other DNA
tctcataggatcccccggct

SEQ ID NO: 51968 - DNA, 20 bp, synthetic construct
  source 1..20: mol_type = other DNA
tctcttaaggcaggctgctt

SEQ ID NO: 51969 - DNA, 20 bp, synthetic construct
  source 1..20: mol_type = other DNA
ctggcacttcgagttggaac

SEQ ID NO: 51970 - DNA, 20 bp, synthetic construct
  source 1..20: mol_type = other DNA
tctctgctccttttggtgac

SEQ ID NO: 51971 - DNA, 20 bp, synthetic construct
  source 1..20: mol_type = other DNA
tctcggagtgcacaggccga

SEQ ID NO: 51972 - DNA, 20 bp, synthetic construct
  source 1..20: mol_type = other DNA
tgttgcagaggaagttctcc

SEQ ID NO: 51973 - DNA, 20 bp, synthetic construct
  source 1..20: mol_type = other DNA
gttctagctgtggtgggtta

SEQ ID NO: 51974 - DNA, 20 bp, synthetic construct
  source 1..20: mol_type = other DNA
tccaagagttggtcatcctg

SEQ ID NO: 51975 - DNA, 20 bp, synthetic construct
  source 1..20: mol_type = other DNA
tctctctgttgtccgaggcc

SEQ ID NO: 51976 - DNA, 20 bp, synthetic construct
  source 1..20: mol_type = other DNA
tctcgtggtggtaataaggg

SEQ ID NO: 51977 - DNA, 20 bp, synthetic construct
  source 1..20: mol_type = other DNA
ccgtcccagttgcagtggta

SEQ ID NO: 51978 - DNA, 20 bp, synthetic construct
  source 1..20: mol_type = other DNA
tctcccggcaaacctcgccc

SEQ ID NO: 51979 - DNA, 20 bp, synthetic construct
  source 1..20: mol_type = other DNA
atatcaccacacacaggtaa

SEQ ID NO: 51980 - DNA, 20 bp, synthetic construct
  source 1..20: mol_type = other DNA
tctcgaagtgtgggaggtac

SEQ ID NO: 51981 - DNA, 20 bp, synthetic construct
  source 1..20: mol_type = other DNA
tctcccaaagttcgtggcac

SEQ ID NO: 51982 - DNA, 20 bp, synthetic construct
  source 1..20: mol_type = other DNA
atcttccattggattggcaa

SEQ ID NO: 51983 - DNA, 20 bp, synthetic construct
  source 1..20: mol_type = other DNA
tctcgacacagcaggtcaag

SEQ ID NO: 51984 - DNA, 20 bp, synthetic construct
  source 1..20: mol_type = other DNA
tctcacctaggaaaacatct

SEQ ID NO: 51985 - DNA, 20 bp, synthetic construct
  source 1..20: mol_type = other DNA
aattcactgtaaagctggaa

SEQ ID NO: 51986 - DNA, 20 bp, synthetic construct
  source 1..20: mol_type = other DNA
tctctttctgaaggagacac

SEQ ID NO: 51987 - DNA, 20 bp, synthetic construct
  source 1..20: mol_type = other DNA
tctcacagtagacactctcc

SEQ ID NO: 51988 - DNA, 20 bp, synthetic construct
  source 1..20: mol_type = other DNA
tctctttgatctgcgccttg

SEQ ID NO: 51989 - DNA, 20 bp, synthetic construct
  source 1..20: mol_type = other DNA
tagcagatgattgagctctg

SEQ ID NO: 51990 - DNA, 20 bp, synthetic construct
  source 1..20: mol_type = other DNA
agcggcctcctgacgagcag

SEQ ID NO: 51991 - DNA, 20 bp, synthetic construct
  source 1..20: mol_type = other DNA
tctctcggcggaagtcgctc

SEQ ID NO: 51992 - DNA, 20 bp, synthetic construct
  source 1..20: mol_type = other DNA
ccacaaactgaggatctgca

SEQ ID NO: 51993 - DNA, 20 bp, synthetic construct
  source 1..20: mol_type = other DNA
tctcccttggatggtcggcg

SEQ ID NO: 51994 - DNA, 20 bp, synthetic construct
  source 1..20: mol_type = other DNA
ggagctgtatgagcacgaga

SEQ ID NO: 51995 - DNA, 20 bp, synthetic construct
  source 1..20: mol_type = other DNA
tgggacactgaggagacaga

SEQ ID NO: 51996 - DNA, 20 bp, synthetic construct
  source 1..20: mol_type = other DNA
tctccgccgaggaggtgaca

SEQ ID NO: 51997 - DNA, 20 bp, synthetic construct
  source 1..20: mol_type = other DNA
aatcccatagcaataatgtt

SEQ ID NO: 51998 - DNA, 20 bp, synthetic construct
  source 1..20: mol_type = other DNA
ccagcatgtggctgaagatg

SEQ ID NO: 51999 - DNA, 20 bp, synthetic construct
  source 1..20: mol_type = other DNA
ctggaggtctacctcaagga

SEQ ID NO: 52000 - DNA, 20 bp, synthetic construct
  source 1..20: mol_type = other DNA
tctctcctggcctcagcgac

SEQ ID NO: 52001 - DNA, 20 bp, synthetic construct
  source 1..20: mol_type = other DNA
tccattggattggcaagggc

SEQ ID NO: 52002 - DNA, 20 bp, synthetic construct
  source 1..20: mol_type = other DNA
aggccagccccactgtggct

SEQ ID NO: 52003 - DNA, 20 bp, synthetic construct
  source 1..20: mol_type = other DNA
tctccaggctggtgcgcgag

SEQ ID NO: 52004 - DNA, 20 bp, synthetic construct
  source 1..20: mol_type = other DNA
gcgcatctgcgcacgcacac

SEQ ID NO: 52005 - DNA, 20 bp, synthetic construct
  source 1..20: mol_type = other DNA
catccccagcaggtacaagg

SEQ ID NO: 52006 - DNA, 20 bp, synthetic construct
  source 1..20: mol_type = other DNA
actcacccagcatccccagc

SEQ ID NO: 52007 - DNA, 20 bp, synthetic construct
  source 1..20: mol_type = other DNA
ggcaagacactgggcgagtg

SEQ ID NO: 52008 - DNA, 20 bp, synthetic construct
  source 1..20: mol_type = other DNA
gggacactgaggagacagaa

SEQ ID NO: 52009 - DNA, 20 bp, synthetic construct
  source 1..20: mol_type = other DNA
ccgccgccctcacctcctgc

SEQ ID NO: 52010 - DNA, 20 bp, synthetic construct
  source 1..20: mol_type = other DNA
cacactggaggttgttgcag

SEQ ID NO: 52011 - DNA, 20 bp, synthetic construct
  source 1..20: mol_type = other DNA
tctccttgatgccagctcac

SEQ ID NO: 52012 - DNA, 20 bp, synthetic construct
  source 1..20: mol_type = other DNA
tctcaggctccgattattca

SEQ ID NO: 52013 - DNA, 20 bp, synthetic construct
  source 1..20: mol_type = other DNA
cagaagtctgtgcagaacag

SEQ ID NO: 52014 - DNA, 20 bp, synthetic construct
  source 1..20: mol_type = other DNA
aggggcaggatggcaacagg

SEQ ID NO: 52015 - DNA, 20 bp, synthetic construct
  source 1..20: mol_type = other DNA
tgttcaggaaaacaacacac

SEQ ID NO: 52016 - DNA, 20 bp, synthetic construct
  source 1..20: mol_type = other DNA
cactgggacagcttctgatg

SEQ ID NO: 52017 - DNA, 20 bp, synthetic construct
  source 1..20: mol_type = other DNA
gctgcagcctgggaggagct

SEQ ID NO: 52018 - DNA, 20 bp, synthetic construct
  source 1..20: mol_type = other DNA
tctcctggcatgtctcagca

SEQ ID NO: 52019 - DNA, 20 bp, synthetic construct
  source 1..20: mol_type = other DNA
tctctcaggtactcagacaa

SEQ ID NO: 52020 - DNA, 20 bp, synthetic construct
  source 1..20: mol_type = other DNA
agcgccatggccgggacccg

SEQ ID NO: 52021 - DNA, 20 bp, synthetic construct
  source 1..20: mol_type = other DNA
cgtgaggctgcaagcttgca

SEQ ID NO: 52022 - DNA, 20 bp, synthetic construct
  source 1..20: mol_type = other DNA
tctccaaagaagcagaaaaa

SEQ ID NO: 52023 - DNA, 20 bp, synthetic construct
  source 1..20: mol_type = other DNA
ggcagccagcatgatgagac

SEQ ID NO: 52024 - DNA, 20 bp, synthetic construct
  source 1..20: mol_type = other DNA
tctcctctgccccagggggc

SEQ ID NO: 52025 - DNA, 20 bp, synthetic construct
  source 1..20: mol_type = other DNA
tctcacaggtgacgcagcca

SEQ ID NO: 52026 - DNA, 20 bp, synthetic construct
  source 1..20: mol_type = other DNA
tttctcagctggataaggtc

SEQ ID NO: 52027 - DNA, 20 bp, synthetic construct
  source 1..20: mol_type = other DNA
tgaggaacacgtcctggggg

SEQ ID NO: 52028 - DNA, 20 bp, synthetic construct
  source 1..20: mol_type = other DNA
tgctgctcctgagctgagac

SEQ ID NO: 52029 - DNA, 20 bp, synthetic construct
  source 1..20: mol_type = other DNA
gggaggtacagcttgagttc

SEQ ID NO: 52030 - DNA, 20 bp, synthetic construct
  source 1..20: mol_type = other DNA
ctggctcacctgaccacgtt

SEQ ID NO: 52031 - DNA, 20 bp, synthetic construct
  source 1..20: mol_type = other DNA
ggtgcagcagcagtcgtaca

SEQ ID NO: 52032 - DNA, 20 bp, synthetic construct
  source 1..20: mol_type = other DNA
cccttaccaggcttgatgag

SEQ ID NO: 52033 - DNA, 20 bp, synthetic construct
  source 1..20: mol_type = other DNA
tctccaggacctggaagcgc

SEQ ID NO: 52034 - DNA, 20 bp, synthetic construct
  source 1..20: mol_type = other DNA
agaggaagttctccaggtcc

SEQ ID NO: 52035 - DNA, 20 bp, synthetic construct
  source 1..20: mol_type = other DNA
agacgcccccgggcccagcc

SEQ ID NO: 52036 - DNA, 20 bp, synthetic construct
  source 1..20: mol_type = other DNA
ccttgaggtagacctccagc

SEQ ID NO: 52037 - DNA, 20 bp, synthetic construct
  source 1..20: mol_type = other DNA
gttctacagcggcagcctgg

SEQ ID NO: 52038 - DNA, 20 bp, synthetic construct
  source 1..20: mol_type = other DNA
gtagttgttgaagacatcca

SEQ ID NO: 52039 - DNA, 20 bp, synthetic construct
  source 1..20: mol_type = other DNA
tctcgctccaatgtcgacac

SEQ ID NO: 52040 - DNA, 20 bp, synthetic construct
  source 1..20: mol_type = other DNA
tctctgcaaggcaaaaggat

SEQ ID NO: 52041 - DNA, 20 bp, synthetic construct
  source 1..20: mol_type = other DNA
tgcagcagcagtcgtacaag

SEQ ID NO: 52042 - DNA, 20 bp, synthetic construct
  source 1..20: mol_type = other DNA
gctaacgatctctttgatga

SEQ ID NO: 52043 - DNA, 20 bp, synthetic construct
  source 1..20: mol_type = other DNA
caggtgatcggagcgcgaga

SEQ ID NO: 52044 - DNA, 20 bp, synthetic construct
  source 1..20: mol_type = other DNA
gatcttccattggattggca

SEQ ID NO: 52045 - DNA, 20 bp, synthetic construct
  source 1..20: mol_type = other DNA
ccaaatttaattgcagaggt

SEQ ID NO: 52046 - DNA, 20 bp, synthetic construct
  source 1..20: mol_type = other DNA
tctccgacgactgaggcaag

SEQ ID NO: 52047 - DNA, 20 bp, synthetic construct
  source 1..20: mol_type = other DNA
cctggcacttcgagttggaa

SEQ ID NO: 52048 - DNA, 20 bp, synthetic construct
  source 1..20: mol_type = other DNA
tctccaccacggctttctgg

SEQ ID NO: 52049 - DNA, 20 bp, synthetic construct
  source 1..20: mol_type = other DNA
gcactgggacagcttctgat

SEQ ID NO: 52050 - DNA, 20 bp, synthetic construct
  source 1..20: mol_type = other DNA
cataccagctgagccgtccg

SEQ ID NO: 52051 - DNA, 20 bp, synthetic construct
  source 1..20: mol_type = other DNA
agacggctgctcgggcacct

SEQ ID NO: 52052 - DNA, 20 bp, synthetic construct
  source 1..20: mol_type = other DNA
tctcgtggtcgctcagccct

SEQ ID NO: 52053 - DNA, 20 bp, synthetic construct
  source 1..20: mol_type = other DNA
tctctgggttggcctctggg

SEQ ID NO: 52054 - DNA, 20 bp, synthetic construct
  source 1..20: mol_type = other DNA
tctccaagaacggtaagcaa

SEQ ID NO: 52055 - DNA, 20 bp, synthetic construct
  source 1..20: mol_type = other DNA
agcaaaggagggcaagaact

SEQ ID NO: 52056 - DNA, 20 bp, synthetic construct
  source 1..20: mol_type = other DNA
ccccgcagcaagtcccctag

SEQ ID NO: 52057 - DNA, 20 bp, synthetic construct
  source 1..20: mol_type = other DNA
gtaaatacattcttcatacc

SEQ ID NO: 52058 - DNA, 20 bp, synthetic construct
  source 1..20: mol_type = other DNA
gctgtagaactccaccacgc

SEQ ID NO: 52059 - DNA, 20 bp, synthetic construct
  source 1..20: mol_type = other DNA
agtggcagcggggcccgtag

SEQ ID NO: 52060 - DNA, 20 bp, synthetic construct
  source 1..20: mol_type = other DNA
cgccttcagatgcgaactct

SEQ ID NO: 52061 - DNA, 20 bp, synthetic construct
  source 1..20: mol_type = other DNA
tggctcacctgaccacgttg

SEQ ID NO: 52062 - DNA, 20 bp, synthetic construct
  source 1..20: mol_type = other DNA
gccgtcccagttgcagtggt

SEQ ID NO: 52063 - DNA, 20 bp, synthetic construct
  source 1..20: mol_type = other DNA
tctctggagggacagtcgcc

SEQ ID NO: 52064 - DNA, 20 bp, synthetic construct
  source 1..20: mol_type = other DNA
ttcaggaaaacaacacactg

SEQ ID NO: 52065 - DNA, 20 bp, synthetic construct
  source 1..20: mol_type = other DNA
caccagacggctctgcacct

SEQ ID NO: 52066 - DNA, 20 bp, synthetic construct
  source 1..20: mol_type = other DNA
tctcctgccacggaaagaga

SEQ ID NO: 52067 - DNA, 20 bp, synthetic construct
  source 1..20: mol_type = other DNA
cccgcagcaagtcccctagg

SEQ ID NO: 52068 - DNA, 20 bp, synthetic construct
  source 1..20: mol_type = other DNA
gcctcagcaccgccacctcg

SEQ ID NO: 52069 - DNA, 20 bp, synthetic construct
  source 1..20: mol_type = other DNA
atataaacttacagttcata

SEQ ID NO: 52070 - DNA, 20 bp, synthetic construct
  source 1..20: mol_type = other DNA
tctcaaggtaagccatgcac

SEQ ID NO: 52071 - DNA, 20 bp, synthetic construct
  source 1..20: mol_type = other DNA
tctcctgaggtgggcaggag

SEQ ID NO: 52072 - DNA, 20 bp, synthetic construct
  source 1..20: mol_type = other DNA
cagtcgcttcctgcctcgga

SEQ ID NO: 52073 - DNA, 20 bp, synthetic construct
  source 1..20: mol_type = other DNA
gacccccagatttccaggca

SEQ ID NO: 52074 - DNA, 20 bp, synthetic construct
  source 1..20: mol_type = other DNA
ggcactgggacagcttctga

SEQ ID NO: 52075 - DNA, 20 bp, synthetic construct
  source 1..20: mol_type = other DNA
accgccaaatttaattgcag

SEQ ID NO: 52076 - DNA, 20 bp, synthetic construct
  source 1..20: mol_type = other DNA
gcagagaattgcttgaaccc

SEQ ID NO: 52077 - DNA, 20 bp, synthetic construct
  source 1..20: mol_type = other DNA
ttccacatccacatcaccat

SEQ ID NO: 52078 - DNA, 20 bp, synthetic construct
  source 1..20: mol_type = other DNA
caattcaggacccacacgac

SEQ ID NO: 52079 - DNA, 20 bp, synthetic construct
  source 1..20: mol_type = other DNA
tgtctcacatgaccagcgtc

SEQ ID NO: 52080 - DNA, 20 bp, synthetic construct
  source 1..20: mol_type = other DNA
tctccccccacatctcctcc

SEQ ID NO: 52081 - DNA, 20 bp, synthetic construct
  source 1..20: mol_type = other DNA
tctcaagccgtgtgcaccac

SEQ ID NO: 52082 - DNA, 20 bp, synthetic construct
  source 1..20: mol_type = other DNA
tctctgggccgtagaggaaa

SEQ ID NO: 52083 - DNA, 20 bp, synthetic construct
  source 1..20: mol_type = other DNA
agacggtgagtagtggcgcg

SEQ ID NO: 52084 - DNA, 20 bp, synthetic construct
  source 1..20: mol_type = other DNA
agaagccctaccactgcaac

SEQ ID NO: 52085 - DNA, 20 bp, synthetic construct
  source 1..20: mol_type = other DNA
tctccatttacaaaaactga

SEQ ID NO: 52086 - DNA, 20 bp, synthetic construct
  source 1..20: mol_type = other DNA
tctcctgcttcaacgaagcc

SEQ ID NO: 52087 - DNA, 20 bp, synthetic construct
  source 1..20: mol_type = other DNA
ttgataagttctagctgtgg

SEQ ID NO: 52088 - DNA, 20 bp, synthetic construct
  source 1..20: mol_type = other DNA
tctcgaggtggaaaggcagg

SEQ ID NO: 52089 - DNA, 20 bp, synthetic construct
  source 1..20: mol_type = other DNA
ttgatgatggctgtcatgtc

SEQ ID NO: 52090 - DNA, 20 bp, synthetic construct
  source 1..20: mol_type = other DNA
tctcatcagctgtcataaac

SEQ ID NO: 52091 - DNA, 20 bp, synthetic construct
  source 1..20: mol_type = other DNA
tctcctggacaaggcatccc

SEQ ID NO: 52092 - DNA, 20 bp, synthetic construct
  source 1..20: mol_type = other DNA
tcagcgccatggccgggacc

SEQ ID NO: 52093 - DNA, 20 bp, synthetic construct
  source 1..20: mol_type = other DNA
cctgaagcaatgctccaggg

SEQ ID NO: 52094 - DNA, 20 bp, synthetic construct
  source 1..20: mol_type = other DNA
catgtgcagcgccaggtgat

SEQ ID NO: 52095 - DNA, 20 bp, synthetic construct
  source 1..20: mol_type = other DNA
tgataagttctagctgtggt

SEQ ID NO: 52096 - DNA, 20 bp, synthetic construct
  source 1..20: mol_type = other DNA
actattccaatgttcagtgg

SEQ ID NO: 52097 - DNA, 20 bp, synthetic construct
  source 1..20: mol_type = other DNA
ctcccaccgcagcgagctcc

SEQ ID NO: 52098 - DNA, 20 bp, synthetic construct
  source 1..20: mol_type = other DNA
tctcctggggctgcgtggct

SEQ ID NO: 52099 - DNA, 20 bp, synthetic construct
  source 1..20: mol_type = other DNA
gtgcagcagcagtcgtacaa

SEQ ID NO: 52100 - DNA, 20 bp, synthetic construct
  source 1..20: mol_type = other DNA
cccccgcagcaagtccccta

SEQ ID NO: 52101 - DNA, 20 bp, synthetic construct
  source 1..20: mol_type = other DNA
cgtggaactccagggtgacg

SEQ ID NO: 52102 - DNA, 20 bp, synthetic construct
  source 1..20: mol_type = other DNA
tctctgctgccctgcgctcc

SEQ ID NO: 52103 - DNA, 20 bp, synthetic construct
  source 1..20: mol_type = other DNA
tatgccaaggagctggatca

SEQ ID NO: 52104 - DNA, 20 bp, synthetic construct
  source 1..20: mol_type = other DNA
cattgcaggtcgtcacgctg

SEQ ID NO: 52105 - DNA, 20 bp, synthetic construct
  source 1..20: mol_type = other DNA
tgatgatggctgtcatgtct

SEQ ID NO: 52106 - DNA, 20 bp, synthetic construct
  source 1..20: mol_type = other DNA
ccaggggcaggatggcaaca

SEQ ID NO: 52107 - DNA, 20 bp, synthetic construct
  source 1..20: mol_type = other DNA
tctctcgccagtcagacgtc

SEQ ID NO: 52108 - DNA, 20 bp, synthetic construct
  source 1..20: mol_type = other DNA
tacccttctttcaggtgcac

SEQ ID NO: 52109 - DNA, 20 bp, synthetic construct
  source 1..20: mol_type = other DNA
tctcttcccacattgtccgg

SEQ ID NO: 52110 - DNA, 20 bp, synthetic construct
  source 1..20: mol_type = other DNA
agaggatccagcccacctgg

SEQ ID NO: 52111 - DNA, 20 bp, synthetic construct
  source 1..20: mol_type = other DNA
atttacctgaacctctgaat

SEQ ID NO: 52112 - DNA, 20 bp, synthetic construct
  source 1..20: mol_type = other DNA
tctctagattgttggtgacg

SEQ ID NO: 52113 - DNA, 20 bp, synthetic construct
  source 1..20: mol_type = other DNA
cggccagcactgtgccggcg

SEQ ID NO: 52114 - DNA, 20 bp, synthetic construct
  source 1..20: mol_type = other DNA
agttccacgagtctcgaggt

SEQ ID NO: 52115 - DNA, 20 bp, synthetic construct
  source 1..20: mol_type = other DNA
aaaactcacctgggatgtgc

SEQ ID NO: 52116 - DNA, 20 bp, synthetic construct
  source 1..20: mol_type = other DNA
tctccgagagctcgtagaag

SEQ ID NO: 52117 - DNA, 20 bp, synthetic construct
  source 1..20: mol_type = other DNA
ggccagccccactgtggctg

SEQ ID NO: 52118 - DNA, 20 bp, synthetic construct
  source 1..20: mol_type = other DNA
tctccgacagttcacctctg

SEQ ID NO: 52119 - DNA, 20 bp, synthetic construct
  source 1..20: mol_type = other DNA
gtggaactccagggtgacgt

SEQ ID NO: 52120 - DNA, 20 bp, synthetic construct
  source 1..20: mol_type = other DNA
cctggctcacctgaccacgt

SEQ ID NO: 52121 - DNA, 20 bp, synthetic construct
  source 1..20: mol_type = other DNA
tgaagcaggacaccttgctg

SEQ ID NO: 52122 - DNA, 20 bp, synthetic construct
  source 1..20: mol_type = other DNA
ttctacagcggcagcctggg

SEQ ID NO: 52123 - DNA, 20 bp, synthetic construct
  source 1..20: mol_type = other DNA
cagcaaggggtcatagacaa

SEQ ID NO: 52124 - DNA, 20 bp, synthetic construct
  source 1..20: mol_type = other DNA
cttggtgatgaggtcggcgt

SEQ ID NO: 52125 - DNA, 20 bp, synthetic construct
  source 1..20: mol_type = other DNA
actacctggctgtttgtggt

SEQ ID NO: 52126 - DNA, 20 bp, synthetic construct
  source 1..20: mol_type = other DNA
cttgcaccacgagcagctga

SEQ ID NO: 52127 - DNA, 20 bp, synthetic construct
  source 1..20: mol_type = other DNA
gaacacgtcctgggggcggc

SEQ ID NO: 52128 - DNA, 20 bp, synthetic construct
  source 1..20: mol_type = other DNA
tctccccacgggagttgact

SEQ ID NO: 52129 - DNA, 20 bp, synthetic construct
  source 1..20: mol_type = other DNA
ggaacacgtcctgggggcgg

SEQ ID NO: 52130 - DNA, 20 bp, synthetic construct
  source 1..20: mol_type = other DNA
taagattctctcgaatctac

SEQ ID NO: 52131 - DNA, 20 bp, synthetic construct
  source 1..20: mol_type = other DNA
tctctatcctgacattccca

SEQ ID NO: 52132 - DNA, 20 bp, synthetic construct
  source 1..20: mol_type = other DNA
tacttccccatagaaatcta

SEQ ID NO: 52133 - DNA, 20 bp, synthetic construct
  source 1..20: mol_type = other DNA
tctcctcagactgggggggc

SEQ ID NO: 52134 - DNA, 20 bp, synthetic construct
  source 1..20: mol_type = other DNA
aagtcgttgccagtacccag

SEQ ID NO: 52135 - DNA, 20 bp, synthetic construct
  source 1..20: mol_type = other DNA
tctccggccgggccaacgcg

SEQ ID NO: 52136 - DNA, 20 bp, synthetic construct
  source 1..20: mol_type = other DNA
gaaccaactggggagcagca

SEQ ID NO: 52137 - DNA, 20 bp, synthetic construct
  source 1..20: mol_type = other DNA
ggaacaggcctgtctccggc

SEQ ID NO: 52138 - DNA, 20 bp, synthetic construct
  source 1..20: mol_type = other DNA
actttgatatcaccacacac

SEQ ID NO: 52139 - DNA, 20 bp, synthetic construct
  source 1..20: mol_type = other DNA
gagtaactattcccagtcag

SEQ ID NO: 52140 - DNA, 20 bp, synthetic construct
  source 1..20: mol_type = other DNA
tctctgaggctaaaggccac

SEQ ID NO: 52141 - DNA, 20 bp, synthetic construct
  source 1..20: mol_type = other DNA
tctctaggatctgaggaagt

SEQ ID NO: 52142 - DNA, 20 bp, synthetic construct
  source 1..20: mol_type = other DNA
tctccagggctgtggttgtc

SEQ ID NO: 52143 - DNA, 20 bp, synthetic construct
  source 1..20: mol_type = other DNA
tatggtcatgctgtagagac

SEQ ID NO: 52144 - DNA, 20 bp, synthetic construct
  source 1..20: mol_type = other DNA
atgttgcacttgggacactg

SEQ ID NO: 52145 - DNA, 20 bp, synthetic construct
  source 1..20: mol_type = other DNA
tctcctcacacagtgcgccc

SEQ ID NO: 52146 - DNA, 20 bp, synthetic construct
  source 1..20: mol_type = other DNA
ccctaccactgcaactggga

SEQ ID NO: 52147 - DNA, 20 bp, synthetic construct
  source 1..20: mol_type = other DNA
tgatgaggtcggcgtaggac

SEQ ID NO: 52148 - DNA, 20 bp, synthetic construct
  source 1..20: mol_type = other DNA
gcacggtgagctccccgcat

SEQ ID NO: 52149 - DNA, 20 bp, synthetic construct
  source 1..20: mol_type = other DNA
tgcttaccccaccccagttg

SEQ ID NO: 52150 - DNA, 20 bp, synthetic construct
  source 1..20: mol_type = other DNA
ctaggaaaacatcttggact

SEQ ID NO: 52151 - DNA, 20 bp, synthetic construct
  source 1..20: mol_type = other DNA
cccataggggcagaagccga

SEQ ID NO: 52152 - DNA, 20 bp, synthetic construct
  source 1..20: mol_type = other DNA
cttactgtacaacaagctgc

SEQ ID NO: 52153 - DNA, 20 bp, synthetic construct
  source 1..20: mol_type = other DNA
gagaggatccagcccacctg

SEQ ID NO: 52154 - DNA, 20 bp, synthetic construct
  source 1..20: mol_type = other DNA
gtttgtggtctgccagctaa

SEQ ID NO: 52155 - DNA, 20 bp, synthetic construct
  source 1..20: mol_type = other DNA
tctccaaggggggtgagcga

SEQ ID NO: 52156 - DNA, 20 bp, synthetic construct
  source 1..20: mol_type = other DNA
cggatcagaaaggtgccggc

SEQ ID NO: 52157 - DNA, 20 bp, synthetic construct
  source 1..20: mol_type = other DNA
gactaagaaaaaacaaacac

SEQ ID NO: 52158 - DNA, 20 bp, synthetic construct
  source 1..20: mol_type = other DNA
tctcagttcaaagacacgaa

SEQ ID NO: 52159 - DNA, 20 bp, synthetic construct
  source 1..20: mol_type = other DNA
agtagtggggataccattcc

SEQ ID NO: 52160 - DNA, 20 bp, synthetic construct
  source 1..20: mol_type = other DNA
ggatgtggaagaaagtgatg

SEQ ID NO: 52161 - DNA, 20 bp, synthetic construct
  source 1..20: mol_type = other DNA
aagagggagaggcgggagac

SEQ ID NO: 52162 - DNA, 20 bp, synthetic construct
  source 1..20: mol_type = other DNA
ttctgtacctcatcaagaat

SEQ ID NO: 52163 - DNA, 20 bp, synthetic construct
  source 1..20: mol_type = other DNA
aggagtagatttcccagaga

SEQ ID NO: 52164 - DNA, 20 bp, synthetic construct
  source 1..20: mol_type = other DNA
cgggagagcaccaactaccc

SEQ ID NO: 52165 - DNA, 20 bp, synthetic construct
  source 1..20: mol_type = other DNA
tctctctcaggtctggctgt

SEQ ID NO: 52166 - DNA, 20 bp, synthetic construct
  source 1..20: mol_type = other DNA
caagttccgccactgaacat

SEQ ID NO: 52167 - DNA, 20 bp, synthetic construct
  source 1..20: mol_type = other DNA
gaacttactagcatcttcag

SEQ ID NO: 52168 - DNA, 20 bp, synthetic construct
  source 1..20: mol_type = other DNA
cgctccagtccactgtactc

SEQ ID NO: 52169 - DNA, 20 bp, synthetic construct
  source 1..20: mol_type = other DNA
tgacgagcagcggctgtaca

SEQ ID NO: 52170 - DNA, 20 bp, synthetic construct
  source 1..20: mol_type = other DNA
gaagccctaccactgcaact

SEQ ID NO: 52171 - DNA, 20 bp, synthetic construct
  source 1..20: mol_type = other DNA
tctcgttcacctcctccctg

SEQ ID NO: 52172 - DNA, 20 bp, synthetic construct
  source 1..20: mol_type = other DNA
tctcacccacacagcacgcc

SEQ ID NO: 52173 - DNA, 20 bp, synthetic construct
  source 1..20: mol_type = other DNA
tctcctagccgctcactcag

SEQ ID NO: 52174 - DNA, 20 bp, synthetic construct
  source 1..20: mol_type = other DNA
gttcagcggatgagagagac

SEQ ID NO: 52175 - DNA, 20 bp, synthetic construct
  source 1..20: mol_type = other DNA
tctcttgctgttgctgatgg

SEQ ID NO: 52176 - DNA, 20 bp, synthetic construct
  source 1..20: mol_type = other DNA
tctcaggtcagggagccgca

SEQ ID NO: 52177 - DNA, 20 bp, synthetic construct
  source 1..20: mol_type = other DNA
aaagagatggcatatgagtt

SEQ ID NO: 52178 - DNA, 20 bp, synthetic construct
  source 1..20: mol_type = other DNA
tctccttcttgacacagctt

SEQ ID NO: 52179 - DNA, 20 bp, synthetic construct
  source 1..20: mol_type = other DNA
gacacatgtcatttctgctg

SEQ ID NO: 52180 - DNA, 20 bp, synthetic construct
  source 1..20: mol_type = other DNA
gttcaggaaaacaacacact

SEQ ID NO: 52181 - DNA, 20 bp, synthetic construct
  source 1..20: mol_type = other DNA
tctccttgtgatgtttttca

SEQ ID NO: 52182 - DNA, 20 bp, synthetic construct
  source 1..20: mol_type = other DNA
acgcagtcgaagcggggcac

SEQ ID NO: 52183 - DNA, 20 bp, synthetic construct
  source 1..20: mol_type = other DNA
tctctctgccccgccctggc

SEQ ID NO: 52184 - DNA, 20 bp, synthetic construct
  source 1..20: mol_type = other DNA
agcacgagaaggacctggtg

SEQ ID NO: 52185 - DNA, 20 bp, synthetic construct
  source 1..20: mol_type = other DNA
caagtcgttgccagtaccca

SEQ ID NO: 52186 - DNA, 20 bp, synthetic construct
  source 1..20: mol_type = other DNA
cacgcacagcgtgtagtctc

SEQ ID NO: 52187 - DNA, 20 bp, synthetic construct
  source 1..20: mol_type = other DNA
tacccccagagatgtctgcg

SEQ ID NO: 52188 - DNA, 20 bp, synthetic construct
  source 1..20: mol_type = other DNA
ctcaggtcgaagacttgtcg

SEQ ID NO: 52189 - DNA, 20 bp, synthetic construct
  source 1..20: mol_type = other DNA
acgcacagcgtgtagtctcc

SEQ ID NO: 52190 - DNA, 20 bp, synthetic construct
  source 1..20: mol_type = other DNA
ctggccctggcacttcgagt

SEQ ID NO: 52191 - DNA, 20 bp, synthetic construct
  source 1..20: mol_type = other DNA
tctgcagtcgcttcctgcct

SEQ ID NO: 52192 - DNA, 20 bp, synthetic construct
  source 1..20: mol_type = other DNA
tctctgtcatggtcaaaatc

SEQ ID NO: 52193 - DNA, 20 bp, synthetic construct
  source 1..20: mol_type = other DNA
tctctgtgaattcttttgca

SEQ ID NO: 52194 - DNA, 20 bp, synthetic construct
  source 1..20: mol_type = other DNA
tctccacaccttgagggctc

SEQ ID NO: 52195 - DNA, 20 bp, synthetic construct
  source 1..20: mol_type = other DNA
ccaattcaggacccacacga

SEQ ID NO: 52196 - DNA, 20 bp, synthetic construct
  source 1..20: mol_type = other DNA
tctcttggaattggtggtgg

SEQ ID NO: 52197 - DNA, 20 bp, synthetic construct
  source 1..20: mol_type = other DNA
gaaaactcacctgggatgtg

SEQ ID NO: 52198 - DNA, 20 bp, synthetic construct
  source 1..20: mol_type = other DNA
ccagctgagccgtccgaggc

SEQ ID NO: 52199 - DNA, 20 bp, synthetic construct
  source 1..20: mol_type = other DNA
tctcaagacaggcaggccca

SEQ ID NO: 52200 - DNA, 20 bp, synthetic construct
  source 1..20: mol_type = other DNA
tctctgtcagctcccggcgt

SEQ ID NO: 52201 - DNA, 20 bp, synthetic construct
  source 1..20: mol_type = other DNA
tcgagactcgtggaactcca

SEQ ID NO: 52202 - DNA, 20 bp, synthetic construct
  source 1..20: mol_type = other DNA
acgccttcaagtctttctgc

SEQ ID NO: 52203 - DNA, 20 bp, synthetic construct
  source 1..20: mol_type = other DNA
gctgtacaagttatagggct

SEQ ID NO: 52204 - DNA, 20 bp, synthetic construct
  source 1..20: mol_type = other DNA
accaggaacaggcctgtctc

SEQ ID NO: 52205 - DNA, 20 bp, synthetic construct
  source 1..20: mol_type = other DNA
gcatgacgacggctacctcg

SEQ ID NO: 52206 - DNA, 20 bp, synthetic construct
  source 1..20: mol_type = other DNA
gtgctggaggacaatgacta

SEQ ID NO: 52207 - DNA, 20 bp, synthetic construct
  source 1..20: mol_type = other DNA
cagcgccatggccgggaccc

SEQ ID NO: 52208 - DNA, 20 bp, synthetic construct
  source 1..20: mol_type = other DNA
atgataaaggaatcatctat

SEQ ID NO: 52209 - DNA, 20 bp, synthetic construct
  source 1..20: mol_type = other DNA
tgacatcttctcaggagctc

SEQ ID NO: 52210 - DNA, 20 bp, synthetic construct
  source 1..20: mol_type = other DNA
tctcaagctgcacggactcc

SEQ ID NO: 52211 - DNA, 20 bp, synthetic construct
  source 1..20: mol_type = other DNA
tcgcagacatctctgggggt

SEQ ID NO: 52212 - DNA, 20 bp, synthetic construct
  source 1..20: mol_type = other DNA
ctgtcatgtctgggagcctg

SEQ ID NO: 52213 - DNA, 20 bp, synthetic construct
  source 1..20: mol_type = other DNA
tgtggcagacctacagtgta

SEQ ID NO: 52214 - DNA, 20 bp, synthetic construct
  source 1..20: mol_type = other DNA
gacgtactcgctgtgcaggg

SEQ ID NO: 52215 - DNA, 20 bp, synthetic construct
  source 1..20: mol_type = other DNA
ccggtgaggggtgtggcact

SEQ ID NO: 52216 - DNA, 20 bp, synthetic construct
  source 1..20: mol_type = other DNA
gtcgttctcagagtacatca

SEQ ID NO: 52217 - DNA, 20 bp, synthetic construct
  source 1..20: mol_type = other DNA
cagctggtggcacagtctgg

SEQ ID NO: 52218 - DNA, 20 bp, synthetic construct
  source 1..20: mol_type = other DNA
tctgccagcggctgaactgt

SEQ ID NO: 52219 - DNA, 20 bp, synthetic construct
  source 1..20: mol_type = other DNA
tgagaggtattcaggagacc

SEQ ID NO: 52220 - DNA, 20 bp, synthetic construct
  source 1..20: mol_type = other DNA
gccgcagcccgcgtagctgc

SEQ ID NO: 52221 - DNA, 20 bp, synthetic construct
  source 1..20: mol_type = other DNA
cagggcgatgcggatgcgtg

SEQ ID NO: 52222 - DNA, 20 bp, synthetic construct
  source 1..20: mol_type = other DNA
gagaaggtagaccttgggct

SEQ ID NO: 52223 - DNA, 20 bp, synthetic construct
  source 1..20: mol_type = other DNA
cgatgatgccaatggtgatg

SEQ ID NO: 52224 - DNA, 20 bp, synthetic construct
  source 1..20: mol_type = other DNA
gcgcgggcgggagggcggcg

SEQ ID NO: 52225 - DNA, 20 bp, synthetic construct
  source 1..20: mol_type = other DNA
agaggggccggctcaacacc

SEQ ID NO: 52226 - DNA, 20 bp, synthetic construct
  source 1..20: mol_type = other DNA
gccaccagctgcagcctggg

SEQ ID NO: 52227 - DNA, 20 bp, synthetic construct
  source 1..20: mol_type = other DNA
catcacactggaggcgggcg

SEQ ID NO: 52228 - DNA, 20 bp, synthetic construct
  source 1..20: mol_type = other DNA
gactgggcaagagacaagaa

SEQ ID NO: 52229 - DNA, 20 bp, synthetic construct
  source 1..20: mol_type = other DNA
aaccagagagccattcacag

SEQ ID NO: 52230 - DNA, 20 bp, synthetic construct
  source 1..20: mol_type = other DNA
ggtagacctccagctggccc

SEQ ID NO: 52231 - DNA, 20 bp, synthetic construct
  source 1..20: mol_type = other DNA
tctcgagcatacgattcata

SEQ ID NO: 52232 - DNA, 20 bp, synthetic construct
  source 1..20: mol_type = other DNA
tcactcacagcgagaacttg

SEQ ID NO: 52233 - DNA, 20 bp, synthetic construct
  source 1..20: mol_type = other DNA
agcccgaggtgagcagccgc

SEQ ID NO: 52234 - DNA, 20 bp, synthetic construct
  source 1..20: mol_type = other DNA
gcagaagtccccggacacgt

SEQ ID NO: 52235 - DNA, 20 bp, synthetic construct
  source 1..20: mol_type = other DNA
ggaaccaactggggagcagc

SEQ ID NO: 52236 - DNA, 20 bp, synthetic construct
  source 1..20: mol_type = other DNA
gcaggttcttggtcccagac

SEQ ID NO: 52237 - DNA, 20 bp, synthetic construct
  source 1..20: mol_type = other DNA
agtcagagaaagctgtctgt

SEQ ID NO: 52238 - DNA, 20 bp, synthetic construct
  source 1..20: mol_type = other DNA
cggcgggggcggcggcaggg

SEQ ID NO: 52239 - DNA, 20 bp, synthetic construct
  source 1..20: mol_type = other DNA
tgggacgtactcgctgtgca

SEQ ID NO: 52240 - DNA, 20 bp, synthetic construct
  source 1..20: mol_type = other DNA
ccaagtcgttgccagtaccc

SEQ ID NO: 52241 - DNA, 20 bp, synthetic construct
  source 1..20: mol_type = other DNA
ggctggaaggtgagtggact

SEQ ID NO: 52242 - DNA, 20 bp, synthetic construct
  source 1..20: mol_type = other DNA
gtcgcggatcagaaaggtgc

SEQ ID NO: 52243 - DNA, 20 bp, synthetic construct
  source 1..20: mol_type = other DNA
gatagcgcagcttcatcttg

SEQ ID NO: 52244 - DNA, 20 bp, synthetic construct
  source 1..20: mol_type = other DNA
tttctctaccagatcctcag

SEQ ID NO: 52245 - DNA, 20 bp, synthetic construct
  source 1..20: mol_type = other DNA
ggagaggatccagcccacct

SEQ ID NO: 52246 - DNA, 20 bp, synthetic construct
  source 1..20: mol_type = other DNA
ggaggaggaggacgaggagg

SEQ ID NO: 52247 - DNA, 20 bp, synthetic construct
  source 1..20: mol_type = other DNA
gtctcacatgaccagcgtcc

SEQ ID NO: 52248 - DNA, 20 bp, synthetic construct
  source 1..20: mol_type = other DNA
cccagctactcgggaggctg

SEQ ID NO: 52249 - DNA, 20 bp, synthetic construct
  source 1..20: mol_type = other DNA
accgaaagcacacgggccac

SEQ ID NO: 52250 - DNA, 20 bp, synthetic construct
  source 1..20: mol_type = other DNA
cgtaatactgctccagatat

SEQ ID NO: 52251 - DNA, 20 bp, synthetic construct
  source 1..20: mol_type = other DNA
ggacgtactcgctgtgcagg

SEQ ID NO: 52252 - DNA, 20 bp, synthetic construct
  source 1..20: mol_type = other DNA
ccatggtggcctggttgcgc

SEQ ID NO: 52253 - DNA, 20 bp, synthetic construct
  source 1..20: mol_type = other DNA
gcccgaaccctcaactgggg

SEQ ID NO: 52254 - DNA, 20 bp, synthetic construct
  source 1..20: mol_type = other DNA
ccaccacgccggcacagtgc

SEQ ID NO: 52255 - DNA, 20 bp, synthetic construct
  source 1..20: mol_type = other DNA
tgaagtccagcacgctgttg

SEQ ID NO: 52256 - DNA, 20 bp, synthetic construct
  source 1..20: mol_type = other DNA
cgcacagtacctgcaaaggc

SEQ ID NO: 52257 - DNA, 20 bp, synthetic construct
  source 1..20: mol_type = other DNA
ccacaggccgcgctgcaggt

SEQ ID NO: 52258 - DNA, 20 bp, synthetic construct
  source 1..20: mol_type = other DNA
aggtgcatgatcgtccacca

SEQ ID NO: 52259 - DNA, 20 bp, synthetic construct
  source 1..20: mol_type = other DNA
gcggatcagaaaggtgccgg

SEQ ID NO: 52260 - DNA, 20 bp, synthetic construct
  source 1..20: mol_type = other DNA
tgaacatccccaggtgagga

SEQ ID NO: 52261 - DNA, 20 bp, synthetic construct
  source 1..20: mol_type = other DNA
gctcaggtcgaagacttgtc

SEQ ID NO: 52262 - DNA, 20 bp, synthetic construct
  source 1..20: mol_type = other DNA
tctctttctcacgagcagcc

SEQ ID NO: 52263 - DNA, 20 bp, synthetic construct
  source 1..20: mol_type = other DNA
tctccagcgcaggtggacaa

SEQ ID NO: 52264 - DNA, 20 bp, synthetic construct
  source 1..20: mol_type = other DNA
ctttgacgcccacgtcaccc

SEQ ID NO: 52265 - DNA, 20 bp, synthetic construct
  source 1..20: mol_type = other DNA
cagctcggtcttgtagcgcg

SEQ ID NO: 52266 - DNA, 20 bp, synthetic construct
  source 1..20: mol_type = other DNA
ggccagcgctgcgggcgaca

SEQ ID NO: 52267 - DNA, 20 bp, synthetic construct
  source 1..20: mol_type = other DNA
gtgcagagccgtctggtggg

SEQ ID NO: 52268 - DNA, 20 bp, synthetic construct
  source 1..20: mol_type = other DNA
gcttgagcacgcagtcgaag

SEQ ID NO: 52269 - DNA, 20 bp, synthetic construct
  source 1..20: mol_type = other DNA
gatccttcttattcccaacc

SEQ ID NO: 52270 - DNA, 20 bp, synthetic construct
  source 1..20: mol_type = other DNA
cacgcagtcgaagcggggca

SEQ ID NO: 52271 - DNA, 20 bp, synthetic construct
  source 1..20: mol_type = other DNA
tctccgcctggggcagagag

SEQ ID NO: 52272 - DNA, 20 bp, synthetic construct
  source 1..20: mol_type = other DNA
tctctcgtaaggggtctcgg

SEQ ID NO: 52273 - DNA, 20 bp, synthetic construct
  source 1..20: mol_type = other DNA
caagctcagcatcgacgagg

SEQ ID NO: 52274 - DNA, 20 bp, synthetic construct
  source 1..20: mol_type = other DNA
catggcatgccttgatgcta

SEQ ID NO: 52275 - DNA, 20 bp, synthetic construct
  source 1..20: mol_type = other DNA
cctctcatcaagcctggtaa

SEQ ID NO: 52276 - DNA, 20 bp, synthetic construct
  source 1..20: mol_type = other DNA
tctcgatgtgctccaccacg

SEQ ID NO: 52277 - DNA, 20 bp, synthetic construct
  source 1..20: mol_type = other DNA
caggttcttggtcccagact

SEQ ID NO: 52278 - DNA, 20 bp, synthetic construct
  source 1..20: mol_type = other DNA
ttggagggcttgacatctgc

SEQ ID NO: 52279 - DNA, 20 bp, synthetic construct
  source 1..20: mol_type = other DNA
cagccccaccttctctctca

SEQ ID NO: 52280 - DNA, 20 bp, synthetic construct
  source 1..20: mol_type = other DNA
agcgactgcagaaagaagag

SEQ ID NO: 52281 - DNA, 20 bp, synthetic construct
  source 1..20: mol_type = other DNA
tgggagaggatcttggacac

SEQ ID NO: 52282 - DNA, 20 bp, synthetic construct
  source 1..20: mol_type = other DNA
ggaggaggaggaggagtgga

SEQ ID NO: 52283 - DNA, 20 bp, synthetic construct
  source 1..20: mol_type = other DNA
ttctactggagcgcagtgac

SEQ ID NO: 52284 - DNA, 20 bp, synthetic construct
  source 1..20: mol_type = other DNA
agcaaaataatatagttgtc

SEQ ID NO: 52285 - DNA, 20 bp, synthetic construct
  source 1..20: mol_type = other DNA
cgcactcgaagcagaaaacg

SEQ ID NO: 52286 - DNA, 20 bp, synthetic construct
  source 1..20: mol_type = other DNA
tcgagcaccccaacgtggtc

SEQ ID NO: 52287 - DNA, 20 bp, synthetic construct
  source 1..20: mol_type = other DNA
tagataggtatggatatcca

SEQ ID NO: 52288 - DNA, 20 bp, synthetic construct
  source 1..20: mol_type = other DNA
aggaacaggcctgtctccgg

SEQ ID NO: 52289 - DNA, 20 bp, synthetic construct
  source 1..20: mol_type = other DNA
ttcaacaggagtctcttgca

SEQ ID NO: 52290 - DNA, 20 bp, synthetic construct
  source 1..20: mol_type = other DNA
gccgtgagtaccacgaggag

SEQ ID NO: 52291 - DNA, 20 bp, synthetic construct
  source 1..20: mol_type = other DNA
caggggcaggatggcaacag

SEQ ID NO: 52292 - DNA, 20 bp, synthetic construct
  source 1..20: mol_type = other DNA
atccagcagtgcctccaagt

SEQ ID NO: 52293 - DNA, 20 bp, synthetic construct
  source 1..20: mol_type = other DNA
cactacacctcagacgcaga

SEQ ID NO: 52294 - DNA, 20 bp, synthetic construct
  source 1..20: mol_type = other DNA
cagcaggttcgcctcgccgc

SEQ ID NO: 52295 - DNA, 20 bp, synthetic construct
  source 1..20: mol_type = other DNA
acagagtccatctgcgtctg

SEQ ID NO: 52296 - DNA, 20 bp, synthetic construct
  source 1..20: mol_type = other DNA
tgagcgtgaagaagtggcgc

SEQ ID NO: 52297 - DNA, 20 bp, synthetic construct
  source 1..20: mol_type = other DNA
aggtgcagagccgtctggtg

SEQ ID NO: 52298 - DNA, 20 bp, synthetic construct
  source 1..20: mol_type = other DNA
tgacgctgagcgtgaagaag

SEQ ID NO: 52299 - DNA, 20 bp, synthetic construct
  source 1..20: mol_type = other DNA
ggctaggagtcagcgacata

SEQ ID NO: 52300 - DNA, 20 bp, synthetic construct
  source 1..20: mol_type = other DNA
ggttctgcaatgagacactc

SEQ ID NO: 52301 - DNA, 20 bp, synthetic construct
  source 1..20: mol_type = other DNA
gaaactattccaatgttcag

SEQ ID NO: 52302 - DNA, 20 bp, synthetic construct
  source 1..20: mol_type = other DNA
aatactgctccagatatggg

SEQ ID NO: 52303 - DNA, 20 bp, synthetic construct
  source 1..20: mol_type = other DNA
tcgtaatactgctccagata

SEQ ID NO: 52304 - DNA, 20 bp, synthetic construct
  source 1..20: mol_type = other DNA
ccatgcagatcctcagtttg

SEQ ID NO: 52305 - DNA, 20 bp, synthetic construct
  source 1..20: mol_type = other DNA
gcgcggaggatccaggtggg

SEQ ID NO: 52306 - DNA, 20 bp, synthetic construct
  source 1..20: mol_type = other DNA
ggtcgcaaatgaaaagtatg

SEQ ID NO: 52307 - DNA, 20 bp, synthetic construct
  source 1..20: mol_type = other DNA
gctcttgctgctccgctgtc

SEQ ID NO: 52308 - DNA, 20 bp, synthetic construct
  source 1..20: mol_type = other DNA
tgaacacttactggatgatg

SEQ ID NO: 52309 - DNA, 20 bp, synthetic construct
  source 1..20: mol_type = other DNA
ggctcaggtcgaagacttgt

SEQ ID NO: 52310 - DNA, 20 bp, synthetic construct
  source 1..20: mol_type = other DNA
cagcagcagcagcagcagcg

SEQ ID NO: 52311 - DNA, 20 bp, synthetic construct
  source 1..20: mol_type = other DNA
gggcccccagtagaatccgc

SEQ ID NO: 52312 - DNA, 20 bp, synthetic construct
  source 1..20: mol_type = other DNA
ctaggagtcagcgacatatg

SEQ ID NO: 52313 - DNA, 20 bp, synthetic construct
  source 1..20: mol_type = other DNA
cagcaggggcttcatgagcg

SEQ ID NO: 52314 - DNA, 20 bp, synthetic construct
  source 1..20: mol_type = other DNA
ggaataagatgttctacgcc

SEQ ID NO: 52315 - DNA, 20 bp, synthetic construct
  source 1..20: mol_type = other DNA
gaataagatgttctacgccg

SEQ ID NO: 52316 - DNA, 20 bp, synthetic construct
  source 1..20: mol_type = other DNA
tggacaggtaaggtatttgg

SEQ ID NO: 52317 - DNA, 20 bp, synthetic construct
  source 1..20: mol_type = other DNA
agtgctccagcagctcgaag

SEQ ID NO: 52318 - DNA, 20 bp, synthetic construct
  source 1..20: mol_type = other DNA
gggacgtactcgctgtgcag

SEQ ID NO: 52319 - DNA, 20 bp, synthetic construct
  source 1..20: mol_type = other DNA
agtgaccatgacaataactg

SEQ ID NO: 52320 - DNA, 20 bp, synthetic construct
  source 1..20: mol_type = other DNA
cacccctcaccggaaagaga

SEQ ID NO: 52321 - DNA, 20 bp, synthetic construct
  source 1..20: mol_type = other DNA
tagccgtcgtcatgccgctg

SEQ ID NO: 52322 - DNA, 20 bp, synthetic construct
  source 1..20: mol_type = other DNA
gcttacctggataagctgac

SEQ ID NO: 52323 - DNA, 20 bp, synthetic construct
  source 1..20: mol_type = other DNA
cagtcaaacagcacggccac

SEQ ID NO: 52324 - DNA, 20 bp, synthetic construct
  source 1..20: mol_type = other DNA
agataccttggccaagagct

SEQ ID NO: 52325 - DNA, 20 bp, synthetic construct
  source 1..20: mol_type = other DNA
ggaggatggggaggaggagg

SEQ ID NO: 52326 - DNA, 20 bp, synthetic construct
  source 1..20: mol_type = other DNA
gtctgccagcggctgaactg

SEQ ID NO: 52327 - DNA, 20 bp, synthetic construct
  source 1..20: mol_type = other DNA
tcacctccaccagctgcatg

SEQ ID NO: 52328 - DNA, 20 bp, synthetic construct
  source 1..20: mol_type = other DNA
cccgtaggggcaaaagccga

SEQ ID NO: 52329 - DNA, 20 bp, synthetic construct
  source 1..20: mol_type = other DNA
gtcttcctcttctgtccagg

SEQ ID NO: 52330 - DNA, 20 bp, synthetic construct
  source 1..20: mol_type = other DNA
tcgagagctcggcggagaag

SEQ ID NO: 52331 - DNA, 20 bp, synthetic construct
  source 1..20: mol_type = other DNA
tacaaattgacatgcagtgg

SEQ ID NO: 52332 - DNA, 20 bp, synthetic construct
  source 1..20: mol_type = other DNA
tgaccagcagtacgaatgcg

SEQ ID NO: 52333 - DNA, 20 bp, synthetic construct
  source 1..20: mol_type = other DNA
atcggtatctgggtaggaga

SEQ ID NO: 52334 - DNA, 20 bp, synthetic construct
  source 1..20: mol_type = other DNA
tcccccagccaacctttgta

SEQ ID NO: 52335 - DNA, 20 bp, synthetic construct
  source 1..20: mol_type = other DNA
ctgcgcatccagtgtgaggg

SEQ ID NO: 52336 - DNA, 20 bp, synthetic construct
  source 1..20: mol_type = other DNA
ctatcaacagaagatcaagg

SEQ ID NO: 52337 - DNA, 20 bp, synthetic construct
  source 1..20: mol_type = other DNA
actaagaaaaaacaaacaca

SEQ ID NO: 52338 - DNA, 20 bp, synthetic construct
  source 1..20: mol_type = other DNA
actccagagatccacggggg

SEQ ID NO: 52339 - DNA, 20 bp, synthetic construct
  source 1..20: mol_type = other DNA
tttatatatataagatcttt

SEQ ID NO: 52340 - DNA, 20 bp, synthetic construct
  source 1..20: mol_type = other DNA
accagcaggggcttcatgag

SEQ ID NO: 52341 - DNA, 20 bp, synthetic construct
  source 1..20: mol_type = other DNA
cggaataagatgttctacgc

SEQ ID NO: 52342 - DNA, 20 bp, synthetic construct
  source 1..20: mol_type = other DNA
gatggccttggtgatgaggt

SEQ ID NO: 52343 - DNA, 20 bp, synthetic construct
  source 1..20: mol_type = other DNA
ccacctggatggacacgctg

SEQ ID NO: 52344 - DNA, 20 bp, synthetic construct
  source 1..20: mol_type = other DNA
tacttacagaatctataaat

SEQ ID NO: 52345 - DNA, 20 bp, synthetic construct
  source 1..20: mol_type = other DNA
tacccagtggtgccgtacaa

SEQ ID NO: 52346 - DNA, 20 bp, synthetic construct
  source 1..20: mol_type = other DNA
agccttgcagggcagcctcg

SEQ ID NO: 52347 - DNA, 20 bp, synthetic construct
  source 1..20: mol_type = other DNA
agaagctgcccccctcacac

SEQ ID NO: 52348 - DNA, 20 bp, synthetic construct
  source 1..20: mol_type = other DNA
tacctggataagctgacagg

SEQ ID NO: 52349 - DNA, 20 bp, synthetic construct
  source 1..20: mol_type = other DNA
ggtgtatccatctgagttga

SEQ ID NO: 52350 - DNA, 20 bp, synthetic construct
  source 1..20: mol_type = other DNA
gcttcaccagtcaaacagca

SEQ ID NO: 52351 - DNA, 20 bp, synthetic construct
  source 1..20: mol_type = other DNA
caggtaacggggagccgggc

SEQ ID NO: 52352 - DNA, 20 bp, synthetic construct
  source 1..20: mol_type = other DNA
tcccccaggctggagtgcag

SEQ ID NO: 52353 - DNA, 20 bp, synthetic construct
  source 1..20: mol_type = other DNA
aaagctggaaagggacgaac

SEQ ID NO: 52354 - DNA, 20 bp, synthetic construct
  source 1..20: mol_type = other DNA
atatgccaaggagctggatc

SEQ ID NO: 52355 - DNA, 20 bp, synthetic construct
  source 1..20: mol_type = other DNA
acaatattgatgatgtagta

SEQ ID NO: 52356 - DNA, 20 bp, synthetic construct
  source 1..20: mol_type = other DNA
accagcccttgccaatccaa

SEQ ID NO: 52357 - DNA, 20 bp, synthetic construct
  source 1..20: mol_type = other DNA
gtcccagttccaggtagaag

SEQ ID NO: 52358 - DNA, 20 bp, synthetic construct
  source 1..20: mol_type = other DNA
gctgtggctgcagttggaga

SEQ ID NO: 52359 - DNA, 20 bp, synthetic construct
  source 1..20: mol_type = other DNA
tgtagcgtgattggactccc

SEQ ID NO: 52360 - DNA, 20 bp, synthetic construct
  source 1..20: mol_type = other DNA
gtcgcagatctacgagtgga

SEQ ID NO: 52361 - DNA, 20 bp, synthetic construct
  source 1..20: mol_type = other DNA
caggcgtagctggtccaggg

SEQ ID NO: 52362 - DNA, 20 bp, synthetic construct
  source 1..20: mol_type = other DNA
tacacactgcacagtggtga

SEQ ID NO: 52363 - DNA, 20 bp, synthetic construct
  source 1..20: mol_type = other DNA
caccagctggtactcgctct

SEQ ID NO: 52364 - DNA, 20 bp, synthetic construct
  source 1..20: mol_type = other DNA
ctgccagcggctgaactgtg

SEQ ID NO: 52365 - DNA, 20 bp, synthetic construct
  source 1..20: mol_type = other DNA
ggccaggatccaaaccccgc

SEQ ID NO: 52366 - DNA, 20 bp, synthetic construct
  source 1..20: mol_type = other DNA
ttgtcctccagcacctgcac

SEQ ID NO: 52367 - DNA, 20 bp, synthetic construct
  source 1..20: mol_type = other DNA
gagccccagcggcatgacga

SEQ ID NO: 52368 - DNA, 20 bp, synthetic construct
  source 1..20: mol_type = other DNA
agcaggtacaaggtggccag

SEQ ID NO: 52369 - DNA, 20 bp, synthetic construct
  source 1..20: mol_type = other DNA
cacgatcgcacagatggcac

SEQ ID NO: 52370 - DNA, 20 bp, synthetic construct
  source 1..20: mol_type = other DNA
tgccaatggtgatgtggatg

SEQ ID NO: 52371 - DNA, 20 bp, synthetic construct
  source 1..20: mol_type = other DNA
caggggcttcatgagcgggg

SEQ ID NO: 52372 - DNA, 20 bp, synthetic construct
  source 1..20: mol_type = other DNA
gagtcttcagagtcaacacc

SEQ ID NO: 52373 - DNA, 20 bp, synthetic construct
  source 1..20: mol_type = other DNA
cacggaaggacggcttacag

SEQ ID NO: 52374 - DNA, 20 bp, synthetic construct
  source 1..20: mol_type = other DNA
tcctcccaggctgcagctgg

SEQ ID NO: 52375 - DNA, 20 bp, synthetic construct
  source 1..20: mol_type = other DNA
ttccctggctacccgatgtc

SEQ ID NO: 52376 - DNA, 20 bp, synthetic construct
  source 1..20: mol_type = other DNA
caaggacccttgatgagctc

SEQ ID NO: 52377 - DNA, 20 bp, synthetic construct
  source 1..20: mol_type = other DNA
tctggcggccagcactgtgc

SEQ ID NO: 52378 - DNA, 20 bp, synthetic construct
  source 1..20: mol_type = other DNA
atacctgagtgctcttccca

SEQ ID NO: 52379 - DNA, 20 bp, synthetic construct
  source 1..20: mol_type = other DNA
gcagacttttgacgcttgac

SEQ ID NO: 52380 - DNA, 20 bp, synthetic construct
  source 1..20: mol_type = other DNA
cgggtgcagaccggcgagga

SEQ ID NO: 52381 - DNA, 20 bp, synthetic construct
  source 1..20: mol_type = other DNA
actgcagaaagaagagagga

SEQ ID NO: 52382 - DNA, 20 bp, synthetic construct
  source 1..20: mol_type = other DNA
caatggggcagtcctgcaga

SEQ ID NO: 52383 - DNA, 20 bp, synthetic construct
  source 1..20: mol_type = other DNA
gccagaagaagcagcgccag

SEQ ID NO: 52384 - DNA, 20 bp, synthetic construct
  source 1..20: mol_type = other DNA
aactggatataaatcccagt

SEQ ID NO: 52385 - DNA, 20 bp, synthetic construct
  source 1..20: mol_type = other DNA
gctgacaggccagagagagt

SEQ ID NO: 52386 - DNA, 20 bp, synthetic construct
  source 1..20: mol_type = other DNA
ccagcagtacgaatgcgtgg

SEQ ID NO: 52387 - DNA, 20 bp, synthetic construct
  source 1..20: mol_type = other DNA
ccagcaggggcttcatgagc

SEQ ID NO: 52388 - DNA, 20 bp, synthetic construct
  source 1..20: mol_type = other DNA
taccagcttcttcctgggtc

SEQ ID NO: 52389 - DNA, 20 bp, synthetic construct
  source 1..20: mol_type = other DNA
atacacactgcacagtggtg

SEQ ID NO: 52390 - DNA, 20 bp, synthetic construct
  source 1..20: mol_type = other DNA
cacactggggtttcaggtcc

SEQ ID NO: 52391 - DNA, 20 bp, synthetic construct
  source 1..20: mol_type = other DNA
gctcctgcagcggccgcacg

SEQ ID NO: 52392 - DNA, 20 bp, synthetic construct
  source 1..20: mol_type = other DNA
ccaagaactaaatggggaaa

SEQ ID NO: 52393 - DNA, 20 bp, synthetic construct
  source 1..20: mol_type = other DNA
tccagccgctctgacaccag

SEQ ID NO: 52394 - DNA, 20 bp, synthetic construct
  source 1..20: mol_type = other DNA
gctcaaggaagaactcggat

SEQ ID NO: 52395 - DNA, 20 bp, synthetic construct
  source 1..20: mol_type = other DNA
gggcgaaaaagcagttccgc

SEQ ID NO: 52396 - DNA, 20 bp, synthetic construct
  source 1..20: mol_type = other DNA
gtagccgtcgtcatgccgct

SEQ ID NO: 52397 - DNA, 20 bp, synthetic construct
  source 1..20: mol_type = other DNA
tccgcaggttgtgcactttg

SEQ ID NO: 52398 - DNA, 20 bp, synthetic construct
  source 1..20: mol_type = other DNA
cgcacagcgtgtagtctccg

SEQ ID NO: 52399 - DNA, 20 bp, synthetic construct
  source 1..20: mol_type = other DNA
agaacttactagcatcttca

SEQ ID NO: 52400 - DNA, 20 bp, synthetic construct
  source 1..20: mol_type = other DNA
ttgtggcagacctacagtgt

SEQ ID NO: 52401 - DNA, 20 bp, synthetic construct
  source 1..20: mol_type = other DNA
gtgagccttgcctggaaatc

SEQ ID NO: 52402 - DNA, 20 bp, synthetic construct
  source 1..20: mol_type = other DNA
acctgcgcatccagtgtgag

SEQ ID NO: 52403 - DNA, 20 bp, synthetic construct
  source 1..20: mol_type = other DNA
acctgtgggctctggagttg

SEQ ID NO: 52404 - DNA, 20 bp, synthetic construct
  source 1..20: mol_type = other DNA
gggttaccttcaacaatgct

SEQ ID NO: 52405 - DNA, 20 bp, synthetic construct
  source 1..20: mol_type = other DNA
gcagccgcaggtagaccaca

SEQ ID NO: 52406 - DNA, 20 bp, synthetic construct
  source 1..20: mol_type = other DNA
caagaactaaatggggaaat

SEQ ID NO: 52407 - DNA, 20 bp, synthetic construct
  source 1..20: mol_type = other DNA
ccccactcacgtcatgactg

SEQ ID NO: 52408 - DNA, 20 bp, synthetic construct
  source 1..20: mol_type = other DNA
atacaccacgaagcgcagaa

SEQ ID NO: 52409 - DNA, 20 bp, synthetic construct
  source 1..20: mol_type = other DNA
ggccagcaggtcggcgacag

SEQ ID NO: 52410 - DNA, 20 bp, synthetic construct
  source 1..20: mol_type = other DNA
cttgagcacgcagtcgaagc

SEQ ID NO: 52411 - DNA, 20 bp, synthetic construct
  source 1..20: mol_type = other DNA
tcaagtccattccatcacac

SEQ ID NO: 52412 - DNA, 20 bp, synthetic construct
  source 1..20: mol_type = other DNA
ttacaaagagatctccgtat

SEQ ID NO: 52413 - DNA, 20 bp, synthetic construct
  source 1..20: mol_type = other DNA
ccagctggaggtctacctca

SEQ ID NO: 52414 - DNA, 20 bp, synthetic construct
  source 1..20: mol_type = other DNA
tatttaatcgaagagacccc

SEQ ID NO: 52415 - DNA, 20 bp, synthetic construct
  source 1..20: mol_type = other DNA
tgaagaggaggaagaggagg

SEQ ID NO: 52416 - DNA, 20 bp, synthetic construct
  source 1..20: mol_type = other DNA
actggaattctacaatgcgt

SEQ ID NO: 52417 - DNA, 20 bp, synthetic construct
  source 1..20: mol_type = other DNA
ttggatgatggcaagacact

SEQ ID NO: 52418 - DNA, 20 bp, synthetic construct
  source 1..20: mol_type = other DNA
aaaacacatcagtataacat

SEQ ID NO: 52419 - DNA, 20 bp, synthetic construct
  source 1..20: mol_type = other DNA
ttagcatcttgttctgtttg

SEQ ID NO: 52420 - DNA, 20 bp, synthetic construct
  source 1..20: mol_type = other DNA
ctgttttggttcattcccgt

SEQ ID NO: 52421 - DNA, 20 bp, synthetic construct
  source 1..20: mol_type = other DNA
ctgggtggagacaagcagtg

SEQ ID NO: 52422 - DNA, 20 bp, synthetic construct
  source 1..20: mol_type = other DNA
gctgctgcagaccatcggga

SEQ ID NO: 52423 - DNA, 20 bp, synthetic construct
  source 1..20: mol_type = other DNA
taggccagtcttcttctcct

SEQ ID NO: 52424 - DNA, 20 bp, synthetic construct
  source 1..20: mol_type = other DNA
cccgaaccctcaactggggt

SEQ ID NO: 52425 - DNA, 20 bp, synthetic construct
  source 1..20: mol_type = other DNA
cccgcaggcgcccggctccg

SEQ ID NO: 52426 - DNA, 20 bp, synthetic construct
  source 1..20: mol_type = other DNA
cttcagagtgttgaagatgg

SEQ ID NO: 52427 - DNA, 20 bp, synthetic construct
  source 1..20: mol_type = other DNA
tcagcgtcaagacccagtct

SEQ ID NO: 52428 - DNA, 20 bp, synthetic construct
  source 1..20: mol_type = other DNA
aagaagcagcgccagtggat

SEQ ID NO: 52429 - DNA, 20 bp, synthetic construct
  source 1..20: mol_type = other DNA
ggcggcggcggaggcggcgg

SEQ ID NO: 52430 - DNA, 20 bp, synthetic construct
  source 1..20: mol_type = other DNA
cagtggtccactgcaggcag

SEQ ID NO: 52431 - DNA, 20 bp, synthetic construct
  source 1..20: mol_type = other DNA
tgagaaggaaaagcgaataa

SEQ ID NO: 52432 - DNA, 20 bp, synthetic construct
  source 1..20: mol_type = other DNA
gaacaccgtgctggactcct

SEQ ID NO: 52433 - DNA, 20 bp, synthetic construct
  source 1..20: mol_type = other DNA
gttctcagcatgggatcgga

SEQ ID NO: 52434 - DNA, 20 bp, synthetic construct
  source 1..20: mol_type = other DNA
tggtcaagatcttcacaaaa

SEQ ID NO: 52435 - DNA, 20 bp, synthetic construct
  source 1..20: mol_type = other DNA
tggagaggatccagcccacc

SEQ ID NO: 52436 - DNA, 20 bp, synthetic construct
  source 1..20: mol_type = other DNA
tacaaggtgggtcccgcggg

SEQ ID NO: 52437 - DNA, 20 bp, synthetic construct
  source 1..20: mol_type = other DNA
cgaactgaagcgcatcgtcg

SEQ ID NO: 52438 - DNA, 20 bp, synthetic construct
  source 1..20: mol_type = other DNA
ccacaagtgaagcagcgtac

SEQ ID NO: 52439 - DNA, 20 bp, synthetic construct
  source 1..20: mol_type = other DNA
tacaaactttgggaagctgg

SEQ ID NO: 52440 - DNA, 20 bp, synthetic construct
  source 1..20: mol_type = other DNA
cagaagagcccccgggatgt

SEQ ID NO: 52441 - DNA, 20 bp, synthetic construct
  source 1..20: mol_type = other DNA
ctgtgcatgggtgagggtga

SEQ ID NO: 52442 - DNA, 20 bp, synthetic construct
  source 1..20: mol_type = other DNA
tggctgggatgatgccctca

SEQ ID NO: 52443 - DNA, 20 bp, synthetic construct
  source 1..20: mol_type = other DNA
tgccttaccagcttcttcct

SEQ ID NO: 52444 - DNA, 20 bp, synthetic construct
  source 1..20: mol_type = other DNA
tagaggatatcgtagtgtcc

SEQ ID NO: 52445 - DNA, 20 bp, synthetic construct
  source 1..20: mol_type = other DNA
agaacaagtgtgcagaatac

SEQ ID NO: 52446 - DNA, 20 bp, synthetic construct
  source 1..20: mol_type = other DNA
tctgggtggagacaagcagt

SEQ ID NO: 52447 - DNA, 20 bp, synthetic construct
  source 1..20: mol_type = other DNA
caggtggagtacatggaccg

SEQ ID NO: 52448 - DNA, 20 bp, synthetic construct
  source 1..20: mol_type = other DNA
tggtgaagccaatgacctcg

SEQ ID NO: 52449 - DNA, 20 bp, synthetic construct
  source 1..20: mol_type = other DNA
cctcccactgcttggagctc

SEQ ID NO: 52450 - DNA, 20 bp, synthetic construct
  source 1..20: mol_type = other DNA
tcttggagctgaaggtcttg

SEQ ID NO: 52451 - DNA, 20 bp, synthetic construct
  source 1..20: mol_type = other DNA
caccaagaagaagtccaaga

SEQ ID NO: 52452 - DNA, 20 bp, synthetic construct
  source 1..20: mol_type = other DNA
gacgccaggacggcaagtgt

SEQ ID NO: 52453 - DNA, 20 bp, synthetic construct
  source 1..20: mol_type = other DNA
agtagttgttgaagacatcc

SEQ ID NO: 52454 - DNA, 20 bp, synthetic construct
  source 1..20: mol_type = other DNA
atactcacaattcttggata

SEQ ID NO: 52455 - DNA, 20 bp, synthetic construct
  source 1..20: mol_type = other DNA
ccaggtcctgggtcttgtcc

SEQ ID NO: 52456 - DNA, 20 bp, synthetic construct
  source 1..20: mol_type = other DNA
cagaaaggtgccggcgggct

SEQ ID NO: 52457 - DNA, 20 bp, synthetic construct
  source 1..20: mol_type = other DNA
ctgctgcagaccatcgggaa

SEQ ID NO: 52458 - DNA, 20 bp, synthetic construct
  source 1..20: mol_type = other DNA
cctgggtactggcaacgact

SEQ ID NO: 52459 - DNA, 20 bp, synthetic construct
  source 1..20: mol_type = other DNA
ggttccacggcaagatcaca

SEQ ID NO: 52460 - DNA, 20 bp, synthetic construct
  source 1..20: mol_type = other DNA
aataggtatgtagttacctc

SEQ ID NO: 52461 - DNA, 20 bp, synthetic construct
  source 1..20: mol_type = other DNA
tacaggtaccacaggggtga

SEQ ID NO: 52462 - DNA, 20 bp, synthetic construct
  source 1..20: mol_type = other DNA
agccacagccgccttcaaca

SEQ ID NO: 52463 - DNA, 20 bp, synthetic construct
  source 1..20: mol_type = other DNA
aatgaagaaagtccagacct

SEQ ID NO: 52464 - DNA, 20 bp, synthetic construct
  source 1..20: mol_type = other DNA
cagcgatgtggagcagcagg

SEQ ID NO: 52465 - DNA, 20 bp, synthetic construct
  source 1..20: mol_type = other DNA
cgtgcacatgaatccccccc

SEQ ID NO: 52466 - DNA, 20 bp, synthetic construct
  source 1..20: mol_type = other DNA
ccgcacagtacctgcaaagg

SEQ ID NO: 52467 - DNA, 20 bp, synthetic construct
  source 1..20: mol_type = other DNA
ctgctcagtgccgagcccgc

SEQ ID NO: 52468 - DNA, 20 bp, synthetic construct
  source 1..20: mol_type = other DNA
agcactctgggaggctgagg

SEQ ID NO: 52469 - DNA, 20 bp, synthetic construct
  source 1..20: mol_type = other DNA
caaggtgcagagccgtctgg

SEQ ID NO: 52470 - DNA, 20 bp, synthetic construct
  source 1..20: mol_type = other DNA
gcaccccacagttcagccgc

SEQ ID NO: 52471 - DNA, 20 bp, synthetic construct
  source 1..20: mol_type = other DNA
agaggaggaggcggaggcgg

SEQ ID NO: 52472 - DNA, 20 bp, synthetic construct
  source 1..20: mol_type = other DNA
ccatcagtttgtggatgtta

SEQ ID NO: 52473 - DNA, 20 bp, synthetic construct
  source 1..20: mol_type = other DNA
gatattggctaaatacagaa

SEQ ID NO: 52474 - DNA, 20 bp, synthetic construct
  source 1..20: mol_type = other DNA
ctttcagaggaagcttggaa

SEQ ID NO: 52475 - DNA, 20 bp, synthetic construct
  source 1..20: mol_type = other DNA
aaggtgcatgatcgtccacc

SEQ ID NO: 52476 - DNA, 20 bp, synthetic construct
  source 1..20: mol_type = other DNA
tggaggacaatgactatggc

SEQ ID NO: 52477 - DNA, 20 bp, synthetic construct
  source 1..20: mol_type = other DNA
gcctgttgactccaattcag

SEQ ID NO: 52478 - DNA, 20 bp, synthetic construct
  source 1..20: mol_type = other DNA
agttctacagcggcagcctg

SEQ ID NO: 52479 - DNA, 20 bp, synthetic construct
  source 1..20: mol_type = other DNA
cctctcaggtttccagccca

SEQ ID NO: 52480 - DNA, 20 bp, synthetic construct
  source 1..20: mol_type = other DNA
tggagttgaaggtagtttcg

SEQ ID NO: 52481 - DNA, 20 bp, synthetic construct
  source 1..20: mol_type = other DNA
accgaattcagcaagaggtg

SEQ ID NO: 52482 - DNA, 20 bp, synthetic construct
  source 1..20: mol_type = other DNA
ctaggccagtcttcttctcc

SEQ ID NO: 52483 - DNA, 20 bp, synthetic construct
  source 1..20: mol_type = other DNA
caagagcggcggccgcgctt

SEQ ID NO: 52484 - DNA, 20 bp, synthetic construct
  source 1..20: mol_type = other DNA
tgtgcatatttattacatcg

SEQ ID NO: 52485 - DNA, 20 bp, synthetic construct
  source 1..20: mol_type = other DNA
cctcctgcaggccgcgctcg

SEQ ID NO: 52486 - DNA, 20 bp, synthetic construct
  source 1..20: mol_type = other DNA
agctgaaggtcttgaggcgc

SEQ ID NO: 52487 - DNA, 20 bp, synthetic construct
  source 1..20: mol_type = other DNA
tagaccgcaggtagtccaca

SEQ ID NO: 52488 - DNA, 20 bp, synthetic construct
  source 1..20: mol_type = other DNA
aagtcagagaaagctgtctg

SEQ ID NO: 52489 - DNA, 20 bp, synthetic construct
  source 1..20: mol_type = other DNA
cctcttcagagtgttgaaga

SEQ ID NO: 52490 - DNA, 20 bp, synthetic construct
  source 1..20: mol_type = other DNA
gatacctttatggtttcagt

SEQ ID NO: 52491 - DNA, 20 bp, synthetic construct
  source 1..20: mol_type = other DNA
gcggcagatccggagtacag

SEQ ID NO: 52492 - DNA, 20 bp, synthetic construct
  source 1..20: mol_type = other DNA
cctgcgcatccagtgtgagg

SEQ ID NO: 52493 - DNA, 20 bp, synthetic construct
  source 1..20: mol_type = other DNA
agtagaataagtacttcttg

SEQ ID NO: 52494 - DNA, 20 bp, synthetic construct
  source 1..20: mol_type = other DNA
gttacccacctaagcaggtc

SEQ ID NO: 52495 - DNA, 20 bp, synthetic construct
  source 1..20: mol_type = other DNA
cgagctgtcgcggatcagaa

SEQ ID NO: 52496 - DNA, 20 bp, synthetic construct
  source 1..20: mol_type = other DNA
ctcgtgcagtttctcatacc

SEQ ID NO: 52497 - DNA, 20 bp, synthetic construct
  source 1..20: mol_type = other DNA
ggtgcagagccgtctggtgg

SEQ ID NO: 52498 - DNA, 20 bp, synthetic construct
  source 1..20: mol_type = other DNA
gagccctgagagaggagggg

SEQ ID NO: 52499 - DNA, 20 bp, synthetic construct
  source 1..20: mol_type = other DNA
tggcggcacagctcctgcag

SEQ ID NO: 52500 - DNA, 20 bp, synthetic construct
  source 1..20: mol_type = other DNA
ctggcaggcctctatctcca

SEQ ID NO: 52501 - DNA, 20 bp, synthetic construct
  source 1..20: mol_type = other DNA
gcgggtgcagaccggcgagg

SEQ ID NO: 52502 - DNA, 20 bp, synthetic construct
  source 1..20: mol_type = other DNA
gcagaagggcaggtcctgct

SEQ ID NO: 52503 - DNA, 20 bp, synthetic construct
  source 1..20: mol_type = other DNA
gcttaccccaccccagttga

SEQ ID NO: 52504 - DNA, 20 bp, synthetic construct
  source 1..20: mol_type = other DNA
taagatccccaaaccagaag

SEQ ID NO: 52505 - DNA, 20 bp, synthetic construct
  source 1..20: mol_type = other DNA
ggcacggtgagctccccgca

SEQ ID NO: 52506 - DNA, 20 bp, synthetic construct
  source 1..20: mol_type = other DNA
acagaaatgcttgacttctg

SEQ ID NO: 52507 - DNA, 20 bp, synthetic construct
  source 1..20: mol_type = other DNA
gcggctgacgcagtgtcgcg

SEQ ID NO: 52508 - DNA, 20 bp, synthetic construct
  source 1..20: mol_type = other DNA
ttctctaccagatcctcaga

SEQ ID NO: 52509 - DNA, 20 bp, synthetic construct
  source 1..20: mol_type = other DNA
aggagcaggtgctggtctgg

SEQ ID NO: 52510 - DNA, 20 bp, synthetic construct
  source 1..20: mol_type = other DNA
cagatgcgaactcttggtgt

SEQ ID NO: 52511 - DNA, 20 bp, synthetic construct
  source 1..20: mol_type = other DNA
caccactacatgccgccccc

SEQ ID NO: 52512 - DNA, 20 bp, synthetic construct
  source 1..20: mol_type = other DNA
ttgctacagccaagagacaa

SEQ ID NO: 52513 - DNA, 20 bp, synthetic construct
  source 1..20: mol_type = other DNA
cacagcgtgacgacctgcaa

SEQ ID NO: 52514 - DNA, 20 bp, synthetic construct
  source 1..20: mol_type = other DNA
cgatcctgaaaattgaaaac

SEQ ID NO: 52515 - DNA, 20 bp, synthetic construct
  source 1..20: mol_type = other DNA
gaaaagatcacttttctctt

SEQ ID NO: 52516 - DNA, 20 bp, synthetic construct
  source 1..20: mol_type = other DNA
cagagctcaatcatctgcta

SEQ ID NO: 52517 - DNA, 20 bp, synthetic construct
  source 1..20: mol_type = other DNA
tgcccgcacagtacctgcaa

SEQ ID NO: 52518 - DNA, 20 bp, synthetic construct
  source 1..20: mol_type = other DNA
ccgtctgcccagccactccc

SEQ ID NO: 52519 - DNA, 20 bp, synthetic construct
  source 1..20: mol_type = other DNA
tgagccttgcctggaaatct

SEQ ID NO: 52520 - DNA, 20 bp, synthetic construct
  source 1..20: mol_type = other DNA
accatggtggcggatggcgg

SEQ ID NO: 52521 - DNA, 20 bp, synthetic construct
  source 1..20: mol_type = other DNA
aacactccagagatccacgg

SEQ ID NO: 52522 - DNA, 20 bp, synthetic construct
  source 1..20: mol_type = other DNA
cagacttttgacgcttgact

SEQ ID NO: 52523 - DNA, 20 bp, synthetic construct
  source 1..20: mol_type = other DNA
ccgggcggcgggggctgcgg

SEQ ID NO: 52524 - DNA, 20 bp, synthetic construct
  source 1..20: mol_type = other DNA
gtaggaagagccgcaccagc

SEQ ID NO: 52525 - DNA, 20 bp, synthetic construct
  source 1..20: mol_type = other DNA
ctggactggagcaagacttc

SEQ ID NO: 52526 - DNA, 20 bp, synthetic construct
  source 1..20: mol_type = other DNA
ctgaacatccccaggtgagg

SEQ ID NO: 52527 - DNA, 20 bp, synthetic construct
  source 1..20: mol_type = other DNA
ctctcctcagtaccacagca

SEQ ID NO: 52528 - DNA, 20 bp, synthetic construct
  source 1..20: mol_type = other DNA
gctcgccatccacctgcacc

SEQ ID NO: 52529 - DNA, 20 bp, synthetic construct
  source 1..20: mol_type = other DNA
tgatgagcttatcctcacca

SEQ ID NO: 52530 - DNA, 20 bp, synthetic construct
  source 1..20: mol_type = other DNA
tgtggaaggtgaacttctgc

SEQ ID NO: 52531 - DNA, 20 bp, synthetic construct
  source 1..20: mol_type = other DNA
ctgagatcgaaaacctctca

SEQ ID NO: 52532 - DNA, 20 bp, synthetic construct
  source 1..20: mol_type = other DNA
taccttggtgacggccacaa

SEQ ID NO: 52533 - DNA, 20 bp, synthetic construct
  source 1..20: mol_type = other DNA
agaggagccgtcaaatccag

SEQ ID NO: 52534 - DNA, 20 bp, synthetic construct
  source 1..20: mol_type = other DNA
cttaaagcggggcatcgtac

SEQ ID NO: 52535 - DNA, 20 bp, synthetic construct
  source 1..20: mol_type = other DNA
gctgttgaatttctctgggt

SEQ ID NO: 52536 - DNA, 20 bp, synthetic construct
  source 1..20: mol_type = other DNA
cgcggaggatccaggtgggc

SEQ ID NO: 52537 - DNA, 20 bp, synthetic construct
  source 1..20: mol_type = other DNA
taccatcagctatgaggccc

SEQ ID NO: 52538 - DNA, 20 bp, synthetic construct
  source 1..20: mol_type = other DNA
ttccctagcatgtttcgcca

SEQ ID NO: 52539 - DNA, 20 bp, synthetic construct
  source 1..20: mol_type = other DNA
tgtgcacatgaggtgtccac

SEQ ID NO: 52540 - DNA, 20 bp, synthetic construct
  source 1..20: mol_type = other DNA
gtctcagttcaaagacacga

SEQ ID NO: 52541 - DNA, 20 bp, synthetic construct
  source 1..20: mol_type = other DNA
gctccccgttacctgtgccg

SEQ ID NO: 52542 - DNA, 20 bp, synthetic construct
  source 1..20: mol_type = other DNA
cactgcaacctcctcctccc

SEQ ID NO: 52543 - DNA, 20 bp, synthetic construct
  source 1..20: mol_type = other DNA
ccagcgcaatgatgtggatg

SEQ ID NO: 52544 - DNA, 20 bp, synthetic construct
  source 1..20: mol_type = other DNA
catgcagatgagtgccctgg

SEQ ID NO: 52545 - DNA, 20 bp, synthetic construct
  source 1..20: mol_type = other DNA
tccgcgaggtggcggtgctg

SEQ ID NO: 52546 - DNA, 20 bp, synthetic construct
  source 1..20: mol_type = other DNA
cgtgcgggtgcagaccggcg

SEQ ID NO: 52547 - DNA, 20 bp, synthetic construct
  source 1..20: mol_type = other DNA
gttctacgccggggtgagtg

SEQ ID NO: 52548 - DNA, 20 bp, synthetic construct
  source 1..20: mol_type = other DNA
cttggcccgaaccctcaact

SEQ ID NO: 52549 - DNA, 20 bp, synthetic construct
  source 1..20: mol_type = other DNA
ggcaggatggcaacaggggg

SEQ ID NO: 52550 - DNA, 20 bp, synthetic construct
  source 1..20: mol_type = other DNA
catggtggcctggttgcgca

SEQ ID NO: 52551 - DNA, 20 bp, synthetic construct
  source 1..20: mol_type = other DNA
aggcatggctgaaatcttcc

SEQ ID NO: 52552 - DNA, 20 bp, synthetic construct
  source 1..20: mol_type = other DNA
gatatgaattatgagaccat

SEQ ID NO: 52553 - DNA, 20 bp, synthetic construct
  source 1..20: mol_type = other DNA
gaaagagatggcatatgagt

SEQ ID NO: 52554 - DNA, 20 bp, synthetic construct
  source 1..20: mol_type = other DNA
tttcatccaagaactaaatg

SEQ ID NO: 52555 - DNA, 20 bp, synthetic construct
  source 1..20: mol_type = other DNA
gttctccagtgagtcctcct

SEQ ID NO: 52556 - DNA, 20 bp, synthetic construct
  source 1..20: mol_type = other DNA
gtacaaagccaaaaacaagg

SEQ ID NO: 52557 - DNA, 20 bp, synthetic construct
  source 1..20: mol_type = other DNA
tcagggactatgtggaggta

SEQ ID NO: 52558 - DNA, 20 bp, synthetic construct
  source 1..20: mol_type = other DNA
ccgccaccccaagtacaaga

SEQ ID NO: 52559 - DNA, 20 bp, synthetic construct
  source 1..20: mol_type = other DNA
acaggtacgtgtgctccccg

SEQ ID NO: 52560 - DNA, 20 bp, synthetic construct
  source 1..20: mol_type = other DNA
tctaggggtcggtcagtgct

SEQ ID NO: 52561 - DNA, 20 bp, synthetic construct
  source 1..20: mol_type = other DNA
tcatcatctcatccagacat

SEQ ID NO: 52562 - DNA, 20 bp, synthetic construct
  source 1..20: mol_type = other DNA
ccgggcggcggcgggggcgg

SEQ ID NO: 52563 - DNA, 20 bp, synthetic construct
  source 1..20: mol_type = other DNA
acctggcgctgcacatgaaa

SEQ ID NO: 52564 - DNA, 20 bp, synthetic construct
  source 1..20: mol_type = other DNA
gctgcagctccagcagggcg

SEQ ID NO: 52565 - DNA, 20 bp, synthetic construct
  source 1..20: mol_type = other DNA
aaggtgcagagccgtctggt

SEQ ID NO: 52566 - DNA, 20 bp, synthetic construct
  source 1..20: mol_type = other DNA
gctaggagtcagcgacatat

SEQ ID NO: 52567 - DNA, 20 bp, synthetic construct
  source 1..20: mol_type = other DNA
tcttcgacctgagccaggga

SEQ ID NO: 52568 - DNA, 20 bp, synthetic construct
  source 1..20: mol_type = other DNA
cagccaactacgtccagaag

SEQ ID NO: 52569 - DNA, 20 bp, synthetic construct
  source 1..20: mol_type = other DNA
gctggactggagcaagactt

SEQ ID NO: 52570 - DNA, 20 bp, synthetic construct
  source 1..20: mol_type = other DNA
ggctgagggcagtgcctacg

SEQ ID NO: 52571 - DNA, 20 bp, synthetic construct
  source 1..20: mol_type = other DNA
ctcagtttgaggagcaagtg

SEQ ID NO: 52572 - DNA, 20 bp, synthetic construct
  source 1..20: mol_type = other DNA
ttggacaggtaaggtatttg

SEQ ID NO: 52573 - DNA, 20 bp, synthetic construct
  source 1..20: mol_type = other DNA
ccttgaacctgggggtggga

SEQ ID NO: 52574 - DNA, 20 bp, synthetic construct
  source 1..20: mol_type = other DNA
ctcgagactcgtggaactcc

SEQ ID NO: 52575 - DNA, 20 bp, synthetic construct
  source 1..20: mol_type = other DNA
tcaagaaggagccacactgg

SEQ ID NO: 52576 - DNA, 20 bp, synthetic construct
  source 1..20: mol_type = other DNA
catcttagagtttaacagat

SEQ ID NO: 52577 - DNA, 20 bp, synthetic construct
  source 1..20: mol_type = other DNA
acagattgtatatcttgtaa

SEQ ID NO: 52578 - DNA, 20 bp, synthetic construct
  source 1..20: mol_type = other DNA
ttctccagctgctcgatgca

SEQ ID NO: 52579 - DNA, 20 bp, synthetic construct
  source 1..20: mol_type = other DNA
gttccacggcaagatcacac

SEQ ID NO: 52580 - DNA, 20 bp, synthetic construct
  source 1..20: mol_type = other DNA
gaggaggagtggatggagga

SEQ ID NO: 52581 - DNA, 20 bp, synthetic construct
  source 1..20: mol_type = other DNA
cctgggccagcgcaatgatg

SEQ ID NO: 52582 - DNA, 20 bp, synthetic construct
  source 1..20: mol_type = other DNA
tcctctcatcaagcctggta

SEQ ID NO: 52583 - DNA, 20 bp, synthetic construct
  source 1..20: mol_type = other DNA
caagagcgagtaccagctgg

SEQ ID NO: 52584 - DNA, 20 bp, synthetic construct
  source 1..20: mol_type = other DNA
ggacggagggccacatgtag

SEQ ID NO: 52585 - DNA, 20 bp, synthetic construct
  source 1..20: mol_type = other DNA
gactgcagaaagaagagagg

SEQ ID NO: 52586 - DNA, 20 bp, synthetic construct
  source 1..20: mol_type = other DNA
ggcggcggcggaggaggagg

SEQ ID NO: 52587 - DNA, 20 bp, synthetic construct
  source 1..20: mol_type = other DNA
catctgcgcacgcacacagg

SEQ ID NO: 52588 - DNA, 20 bp, synthetic construct
  source 1..20: mol_type = other DNA
ctatgaggacctcatgcgct

SEQ ID NO: 52589 - DNA, 20 bp, synthetic construct
  source 1..20: mol_type = other DNA
ttgtaccagttggggtcctg

SEQ ID NO: 52590 - DNA, 20 bp, synthetic construct
  source 1..20: mol_type = other DNA
gggaggaggaggttgcagtg

SEQ ID NO: 52591 - DNA, 20 bp, synthetic construct
  source 1..20: mol_type = other DNA
gggtgtatccatctgagttg

SEQ ID NO: 52592 - DNA, 20 bp, synthetic construct
  source 1..20: mol_type = other DNA
aaaatatgcaaacatcactg

SEQ ID NO: 52593 - DNA, 20 bp, synthetic construct
  source 1..20: mol_type = other DNA
tccccagtctcttgtgtgcc

SEQ ID NO: 52594 - DNA, 20 bp, synthetic construct
  source 1..20: mol_type = other DNA
tgacgtgggcgtcaaagccc

SEQ ID NO: 52595 - DNA, 20 bp, synthetic construct
  source 1..20: mol_type = other DNA
tatcaacagaagatcaaggt

SEQ ID NO: 52596 - DNA, 20 bp, synthetic construct
  source 1..20: mol_type = other DNA
tcacgcccaggagctgcacc

SEQ ID NO: 52597 - DNA, 20 bp, synthetic construct
  source 1..20: mol_type = other DNA
ggggcagatcgcttgagccc

SEQ ID NO: 52598 - DNA, 20 bp, synthetic construct
  source 1..20: mol_type = other DNA
tggtgcagaaggccaagcgg

SEQ ID NO: 52599 - DNA, 20 bp, synthetic construct
  source 1..20: mol_type = other DNA
cacaactacctggctgtttg

SEQ ID NO: 52600 - DNA, 20 bp, synthetic construct
  source 1..20: mol_type = other DNA
ccgaattcagcaagaggtga

SEQ ID NO: 52601 - DNA, 20 bp, synthetic construct
  source 1..20: mol_type = other DNA
ctagagaaactgttgcataa

SEQ ID NO: 52602 - DNA, 20 bp, synthetic construct
  source 1..20: mol_type = other DNA
gtagaataagtacttcttga

SEQ ID NO: 52603 - DNA, 20 bp, synthetic construct
  source 1..20: mol_type = other DNA
gtaccagcctcagccttgag

SEQ ID NO: 52604 - DNA, 20 bp, synthetic construct
  source 1..20: mol_type = other DNA
gtgtcctacctgaaagagtc

SEQ ID NO: 52605 - DNA, 20 bp, synthetic construct
  source 1..20: mol_type = other DNA
gggttccatgatataatccc

SEQ ID NO: 52606 - DNA, 20 bp, synthetic construct
  source 1..20: mol_type = other DNA
gccacaggccccagccacag

SEQ ID NO: 52607 - DNA, 20 bp, synthetic construct
  source 1..20: mol_type = other DNA
taatagtcctctatgtcccc

SEQ ID NO: 52608 - DNA, 20 bp, synthetic construct
  source 1..20: mol_type = other DNA
atccagcgtaagaataacag

SEQ ID NO: 52609 - DNA, 20 bp, synthetic construct
  source 1..20: mol_type = other DNA
aggacctggtgtggaagctg

SEQ ID NO: 52610 - DNA, 20 bp, synthetic construct
  source 1..20: mol_type = other DNA
ggtgtagtgctgcagggtgt

SEQ ID NO: 52611 - DNA, 20 bp, synthetic construct
  source 1..20: mol_type = other DNA
gtgcacatgaggtgtccaca

SEQ ID NO: 52612 - DNA, 20 bp, synthetic construct
  source 1..20: mol_type = other DNA
ccatgtgccatccgtccttg

SEQ ID NO: 52613 - DNA, 20 bp, synthetic construct
  source 1..20: mol_type = other DNA
gcatgtcgacttctcctcgg

SEQ ID NO: 52614 - DNA, 20 bp, synthetic construct
  source 1..20: mol_type = other DNA
ggctcgccatccacctgcac

SEQ ID NO: 52615 - DNA, 20 bp, synthetic construct
  source 1..20: mol_type = other DNA
ctgcagctggtggcacagtc

SEQ ID NO: 52616 - DNA, 20 bp, synthetic construct
  source 1..20: mol_type = other DNA
ccatcacactggaggcgggc

SEQ ID NO: 52617 - DNA, 20 bp, synthetic construct
  source 1..20: mol_type = other DNA
cccgtggatctctggagtgt

SEQ ID NO: 52618 - DNA, 20 bp, synthetic construct
  source 1..20: mol_type = other DNA
tgcaccgattgcactgtact

SEQ ID NO: 52619 - DNA, 20 bp, synthetic construct
  source 1..20: mol_type = other DNA
ccatgaactgcagccacgga

SEQ ID NO: 52620 - DNA, 20 bp, synthetic construct
  source 1..20: mol_type = other DNA
aggtgtagtgctgcagggtg

SEQ ID NO: 52621 - DNA, 20 bp, synthetic construct
  source 1..20: mol_type = other DNA
tgagctgctgcgacccgagc

SEQ ID NO: 52622 - DNA, 20 bp, synthetic construct
  source 1..20: mol_type = other DNA
cgcggcatcttcccgccctg

SEQ ID NO: 52623 - DNA, 20 bp, synthetic construct
  source 1..20: mol_type = other DNA
gccctacagtccctcgcctg

SEQ ID NO: 52624 - DNA, 20 bp, synthetic construct
  source 1..20: mol_type = other DNA
ggatcatgaggaacacgtcc

SEQ ID NO: 52625 - DNA, 20 bp, synthetic construct
  source 1..20: mol_type = other DNA
caacactccagagatccacg

SEQ ID NO: 52626 - DNA, 20 bp, synthetic construct
  source 1..20: mol_type = other DNA
tatacaaactttgggaagct

SEQ ID NO: 52627 - DNA, 20 bp, synthetic construct
  source 1..20: mol_type = other DNA
gggcaactggaaaaaggtca

SEQ ID NO: 52628 - DNA, 20 bp, synthetic construct
  source 1..20: mol_type = other DNA
agaacatcttattccgaaag

SEQ ID NO: 52629 - DNA, 20 bp, synthetic construct
  source 1..20: mol_type = other DNA
gacgtccagcacctgcgtgg

SEQ ID NO: 52630 - DNA, 20 bp, synthetic construct
  source 1..20: mol_type = other DNA
ttccccagataatctgatag

SEQ ID NO: 52631 - DNA, 20 bp, synthetic construct
  source 1..20: mol_type = other DNA
tggcttcaccatgacgtcgt

SEQ ID NO: 52632 - DNA, 20 bp, synthetic construct
  source 1..20: mol_type = other DNA
ctcagacaccagcacattgc

SEQ ID NO: 52633 - DNA, 20 bp, synthetic construct
  source 1..20: mol_type = other DNA
cgcgcttcaacgccacgaaa

SEQ ID NO: 52634 - DNA, 20 bp, synthetic construct
  source 1..20: mol_type = other DNA
caggcgcaacaccaggtgca

SEQ ID NO: 52635 - DNA, 20 bp, synthetic construct
  source 1..20: mol_type = other DNA
cacagctcggtcttgtactt

SEQ ID NO: 52636 - DNA, 20 bp, synthetic construct
  source 1..20: mol_type = other DNA
ggttgccccacgcgttgcgg

SEQ ID NO: 52637 - DNA, 20 bp, synthetic construct
  source 1..20: mol_type = other DNA
ttcaggtgttgagccagtgc

SEQ ID NO: 52638 - DNA, 20 bp, synthetic construct
  source 1..20: mol_type = other DNA
gccatggcgcggcgggcgcg

SEQ ID NO: 52639 - DNA, 20 bp, synthetic construct
  source 1..20: mol_type = other DNA
cagaagttaagaaaacctcc

SEQ ID NO: 52640 - DNA, 20 bp, synthetic construct
  source 1..20: mol_type = other DNA
gtcggccagggcgagcgcgg

SEQ ID NO: 52641 - DNA, 20 bp, synthetic construct
  source 1..20: mol_type = other DNA
ctggaagtatgggtgagaca

SEQ ID NO: 52642 - DNA, 20 bp, synthetic construct
  source 1..20: mol_type = other DNA
gatgaccaactcttggatga

SEQ ID NO: 52643 - DNA, 20 bp, synthetic construct
  source 1..20: mol_type = other DNA
gtgtccgcccacctgcagcg

SEQ ID NO: 52644 - DNA, 20 bp, synthetic construct
  source 1..20: mol_type = other DNA
taccggagtgcgtcctcagg

SEQ ID NO: 52645 - DNA, 20 bp, synthetic construct
  source 1..20: mol_type = other DNA
acacactgcacagtggtgag

SEQ ID NO: 52646 - DNA, 20 bp, synthetic construct
  source 1..20: mol_type = other DNA
cctagcactttgggaggctg

SEQ ID NO: 52647 - DNA, 20 bp, synthetic construct
  source 1..20: mol_type = other DNA
tgcaggtgaagagctgattg

SEQ ID NO: 52648 - DNA, 20 bp, synthetic construct
  source 1..20: mol_type = other DNA
catcatctcatccagacatc

SEQ ID NO: 52649 - DNA, 20 bp, synthetic construct
  source 1..20: mol_type = other DNA
gaggagaccagcagtgacca

SEQ ID NO: 52650 - DNA, 20 bp, synthetic construct
  source 1..20: mol_type = other DNA
accaggcacacaagagactg

SEQ ID NO: 52651 - DNA, 20 bp, synthetic construct
  source 1..20: mol_type = other DNA
cacagtgcgccctgggggag

SEQ ID NO: 52652 - DNA, 20 bp, synthetic construct
  source 1..20: mol_type = other DNA
acctctgaattggagtcaac

SEQ ID NO: 52653 - DNA, 20 bp, synthetic construct
  source 1..20: mol_type = other DNA
gttcttgccctcctttgctc

SEQ ID NO: 52654 - DNA, 20 bp, synthetic construct
  source 1..20: mol_type = other DNA
cacctggatggacacgctga

SEQ ID NO: 52655 - DNA, 20 bp, synthetic construct
  source 1..20: mol_type = other DNA
cctgtgggcacaggaagctt

SEQ ID NO: 52656 - DNA, 20 bp, synthetic construct
  source 1..20: mol_type = other DNA
tgtatacctgtattattggt

SEQ ID NO: 52657 - DNA, 20 bp, synthetic construct
  source 1..20: mol_type = other DNA
tcctatcgagtgctggacgc

SEQ ID NO: 52658 - DNA, 20 bp, synthetic construct
  source 1..20: mol_type = other DNA
accaaaacagtaagtgtccc

SEQ ID NO: 52659 - DNA, 20 bp, synthetic construct
  source 1..20: mol_type = other DNA
aggctggtactggccctctg

SEQ ID NO: 52660 - DNA, 20 bp, synthetic construct
  source 1..20: mol_type = other DNA
cttacctggatatagtcaac

SEQ ID NO: 52661 - DNA, 20 bp, synthetic construct
  source 1..20: mol_type = other DNA
gctgactcctagccacggga

SEQ ID NO: 52662 - DNA, 20 bp, synthetic construct
  source 1..20: mol_type = other DNA
ggatgatctggccccctccg

SEQ ID NO: 52663 - DNA, 20 bp, synthetic construct
  source 1..20: mol_type = other DNA
gctgcgggcgacagggcaat

SEQ ID NO: 52664 - DNA, 20 bp, synthetic construct
  source 1..20: mol_type = other DNA
ccaggtgggcgggatgacca

SEQ ID NO: 52665 - DNA, 20 bp, synthetic construct
  source 1..20: mol_type = other DNA
aacatccccaggtgaggagg

SEQ ID NO: 52666 - DNA, 20 bp, synthetic construct
  source 1..20: mol_type = other DNA
ttgacatgaccgctaaagaa

SEQ ID NO: 52667 - DNA, 20 bp, synthetic construct
  source 1..20: mol_type = other DNA
gggagtcaatgaggttgatg

SEQ ID NO: 52668 - DNA, 20 bp, synthetic construct
  source 1..20: mol_type = other DNA
ttggcccgaaccctcaactg

SEQ ID NO: 52669 - DNA, 20 bp, synthetic construct
  source 1..20: mol_type = other DNA
acctagaagaaaaaacaaag

SEQ ID NO: 52670 - DNA, 20 bp, synthetic construct
  source 1..20: mol_type = other DNA
cttacaagttcaaccggagg

SEQ ID NO: 52671 - DNA, 20 bp, synthetic construct
  source 1..20: mol_type = other DNA
aaggacccttgatgagctca

SEQ ID NO: 52672 - DNA, 20 bp, synthetic construct
  source 1..20: mol_type = other DNA
cacaggccccagccacagtg

SEQ ID NO: 52673 - DNA, 20 bp, synthetic construct
  source 1..20: mol_type = other DNA
gccgctgtcgcagcacccgc

SEQ ID NO: 52674 - DNA, 20 bp, synthetic construct
  source 1..20: mol_type = other DNA
aggaggcctgtgagtgcggt

SEQ ID NO: 52675 - DNA, 20 bp, synthetic construct
  source 1..20: mol_type = other DNA
tgcaggagagcggcttctac

SEQ ID NO: 52676 - DNA, 20 bp, synthetic construct
  source 1..20: mol_type = other DNA
caagtgaactggtactcctc

SEQ ID NO: 52677 - DNA, 20 bp, synthetic construct
  source 1..20: mol_type = other DNA
cccatgcagatgagtgccct

SEQ ID NO: 52678 - DNA, 20 bp, synthetic construct
  source 1..20: mol_type = other DNA
cttctacacagttatttgcc

SEQ ID NO: 52679 - DNA, 20 bp, synthetic construct
  source 1..20: mol_type = other DNA
gtacacagacgacgccagga

SEQ ID NO: 52680 - DNA, 20 bp, synthetic construct
  source 1..20: mol_type = other DNA
ggcagcagcggcggcggcgg

SEQ ID NO: 52681 - DNA, 20 bp, synthetic construct
  source 1..20: mol_type = other DNA
ctgactcctagccacgggat

SEQ ID NO: 52682 - DNA, 20 bp, synthetic construct
  source 1..20: mol_type = other DNA
gcatgagaatcacttgaacc

SEQ ID NO: 52683 - DNA, 20 bp, synthetic construct
  source 1..20: mol_type = other DNA
ttcctgaacatccccaggtg

SEQ ID NO: 52684 - DNA, 20 bp, synthetic construct
  source 1..20: mol_type = other DNA
gtctctgaaattacaaagta

SEQ ID NO: 52685 - DNA, 20 bp, synthetic construct
  source 1..20: mol_type = other DNA
ctgggaagggcaacatctct

SEQ ID NO: 52686 - DNA, 20 bp, synthetic construct
  source 1..20: mol_type = other DNA
gtatgagaaactgcacgagt

SEQ ID NO: 52687 - DNA, 20 bp, synthetic construct
  source 1..20: mol_type = other DNA
ggaagacagaattatttacc

SEQ ID NO: 52688 - DNA, 20 bp, synthetic construct
  source 1..20: mol_type = other DNA
gggggctacggaggagctgg

SEQ ID NO: 52689 - DNA, 20 bp, synthetic construct
  source 1..20: mol_type = other DNA
ccaggagctgcaccgagctg

SEQ ID NO: 52690 - DNA, 20 bp, synthetic construct
  source 1..20: mol_type = other DNA
aggaggtggagaaggagaag

SEQ ID NO: 52691 - DNA, 20 bp, synthetic construct
  source 1..20: mol_type = other DNA
gacagaaatgcttgacttct

SEQ ID NO: 52692 - DNA, 20 bp, synthetic construct
  source 1..20: mol_type = other DNA
gccgacttacgatttccgag

SEQ ID NO: 52693 - DNA, 20 bp, synthetic construct
  source 1..20: mol_type = other DNA
cagctttggccatttatgag

SEQ ID NO: 52694 - DNA, 20 bp, synthetic construct
  source 1..20: mol_type = other DNA
acgaatacagccaacctccc

SEQ ID NO: 52695 - DNA, 20 bp, synthetic construct
  source 1..20: mol_type = other DNA
gtcggggattgagataccag

SEQ ID NO: 52696 - DNA, 20 bp, synthetic construct
  source 1..20: mol_type = other DNA
cgggctggcgaaagtggaga

SEQ ID NO: 52697 - DNA, 20 bp, synthetic construct
  source 1..20: mol_type = other DNA
caggagctgcaccgagctgg

SEQ ID NO: 52698 - DNA, 20 bp, synthetic construct
  source 1..20: mol_type = other DNA
ggcccagactgtgaacctgc

SEQ ID NO: 52699 - DNA, 20 bp, synthetic construct
  source 1..20: mol_type = other DNA
tggcaaaaccatcacccttg

SEQ ID NO: 52700 - DNA, 20 bp, synthetic construct
  source 1..20: mol_type = other DNA
cttaccaaaggtgctgctct

SEQ ID NO: 52701 - DNA, 20 bp, synthetic construct
  source 1..20: mol_type = other DNA
gaacgccgacgagcggatga

SEQ ID NO: 52702 - DNA, 20 bp, synthetic construct
  source 1..20: mol_type = other DNA
ataagatacctgctttgtag

SEQ ID NO: 52703 - DNA, 20 bp, synthetic construct
  source 1..20: mol_type = other DNA
agaggcagtcgaagctctcg

SEQ ID NO: 52704 - DNA, 20 bp, synthetic construct
  source 1..20: mol_type = other DNA
gtattacgacccgagtgacg

SEQ ID NO: 52705 - DNA, 20 bp, synthetic construct
  source 1..20: mol_type = other DNA
cctggttgcccccactcttg

SEQ ID NO: 52706 - DNA, 20 bp, synthetic construct
  source 1..20: mol_type = other DNA
ggatccagcccacctggggg

SEQ ID NO: 52707 - DNA, 20 bp, synthetic construct
  source 1..20: mol_type = other DNA
cctggggcctccgggcgcgg

SEQ ID NO: 52708 - DNA, 20 bp, synthetic construct
  source 1..20: mol_type = other DNA
ccatagaagcccacgatgta

SEQ ID NO: 52709 - DNA, 20 bp, synthetic construct
  source 1..20: mol_type = other DNA
ctagcttcttgtaggcaagg

SEQ ID NO: 52710 - DNA, 20 bp, synthetic construct
  source 1..20: mol_type = other DNA
caaagtcgtggtgctcccca

SEQ ID NO: 52711 - DNA, 20 bp, synthetic construct
  source 1..20: mol_type = other DNA
cgatgctgagcttgctggca

SEQ ID NO: 52712 - DNA, 20 bp, synthetic construct
  source 1..20: mol_type = other DNA
gtaccattcagcatcttgta

SEQ ID NO: 52713 - DNA, 20 bp, synthetic construct
  source 1..20: mol_type = other DNA
caccatcttcacggacgcca

SEQ ID NO: 52714 - DNA, 20 bp, synthetic construct
  source 1..20: mol_type = other DNA
agtactcacctggggcctcc

SEQ ID NO: 52715 - DNA, 20 bp, synthetic construct
  source 1..20: mol_type = other DNA
ctgcaaggcaggtgacacgt

SEQ ID NO: 52716 - DNA, 20 bp, synthetic construct
  source 1..20: mol_type = other DNA
caggaaggtgcccacgggct

SEQ ID NO: 52717 - DNA, 20 bp, synthetic construct
  source 1..20: mol_type = other DNA
tgccgtgagtaccacgagga

SEQ ID NO: 52718 - DNA, 20 bp, synthetic construct
  source 1..20: mol_type = other DNA
cttaccggtgcatctgccac

SEQ ID NO: 52719 - DNA, 20 bp, synthetic construct
  source 1..20: mol_type = other DNA
tgagtccacctgcttggcca

SEQ ID NO: 52720 - DNA, 20 bp, synthetic construct
  source 1..20: mol_type = other DNA
cgtctgcccagccactccct

SEQ ID NO: 52721 - DNA, 20 bp, synthetic construct
  source 1..20: mol_type = other DNA
gacggcaagtgtcggcactg

SEQ ID NO: 52722 - DNA, 20 bp, synthetic construct
  source 1..20: mol_type = other DNA
ctggtacaaagccaaaaaca

SEQ ID NO: 52723 - DNA, 20 bp, synthetic construct
  source 1..20: mol_type = other DNA
gctacaagaccgagctgtgc

SEQ ID NO: 52724 - DNA, 20 bp, synthetic construct
  source 1..20: mol_type = other DNA
ttactataacaacagtacca

SEQ ID NO: 52725 - DNA, 20 bp, synthetic construct
  source 1..20: mol_type = other DNA
ggaggagatcaaggagtaca

SEQ ID NO: 52726 - DNA, 20 bp, synthetic construct
  source 1..20: mol_type = other DNA
gtccagctacgccacccccg

SEQ ID NO: 52727 - DNA, 20 bp, synthetic construct
  source 1..20: mol_type = other DNA
tcgtgcatgcgaggtcccgg

SEQ ID NO: 52728 - DNA, 20 bp, synthetic construct
  source 1..20: mol_type = other DNA
tgtgggctctggagttgtgg

SEQ ID NO: 52729 - DNA, 20 bp, synthetic construct
  source 1..20: mol_type = other DNA
ctagtccaagatgttttcct

SEQ ID NO: 52730 - DNA, 20 bp, synthetic construct
  source 1..20: mol_type = other DNA
ctggcgaaagtggagaagga

SEQ ID NO: 52731 - DNA, 20 bp, synthetic construct
  source 1..20: mol_type = other DNA
tcccagacacgcctgcgtag

SEQ ID NO: 52732 - DNA, 20 bp, synthetic construct
  source 1..20: mol_type = other DNA
caggacaataagtcgagtta

SEQ ID NO: 52733 - DNA, 20 bp, synthetic construct
  source 1..20: mol_type = other DNA
caccaagagttcgcatctga

SEQ ID NO: 52734 - DNA, 20 bp, synthetic construct
  source 1..20: mol_type = other DNA
ctacgccgacctcatcacca

SEQ ID NO: 52735 - DNA, 20 bp, synthetic construct
  source 1..20: mol_type = other DNA
gagttctacagcggcagcct

SEQ ID NO: 52736 - DNA, 20 bp, synthetic construct
  source 1..20: mol_type = other DNA
gcaggcgtccaggagcgcgc

SEQ ID NO: 52737 - DNA, 20 bp, synthetic construct
  source 1..20: mol_type = other DNA
gcggctgcggaaccggctgg

SEQ ID NO: 52738 - DNA, 20 bp, synthetic construct
  source 1..20: mol_type = other DNA
cccacctgcagcgcggcctg

SEQ ID NO: 52739 - DNA, 20 bp, synthetic construct
  source 1..20: mol_type = other DNA
ataatcactcaggtgagtga

SEQ ID NO: 52740 - DNA, 20 bp, synthetic construct
  source 1..20: mol_type = other DNA
ttggtcaagatcttcacaaa

SEQ ID NO: 52741 - DNA, 20 bp, synthetic construct
  source 1..20: mol_type = other DNA
tgcacagtggtgagggggat

SEQ ID NO: 52742 - DNA, 20 bp, synthetic construct
  source 1..20: mol_type = other DNA
cagtgactatgatctgcatg

SEQ ID NO: 52743 - DNA, 20 bp, synthetic construct
  source 1..20: mol_type = other DNA
attacttggaacatcttcat

SEQ ID NO: 52744 - DNA, 20 bp, synthetic construct
  source 1..20: mol_type = other DNA
acctgaggacgcactccggt

SEQ ID NO: 52745 - DNA, 20 bp, synthetic construct
  source 1..20: mol_type = other DNA
gccgtcacaggtgcagctcg

SEQ ID NO: 52746 - DNA, 20 bp, synthetic construct
  source 1..20: mol_type = other DNA
agctgtctgtgggagacaga

SEQ ID NO: 52747 - DNA, 20 bp, synthetic construct
  source 1..20: mol_type = other DNA
ggagaattggaaaacaatgt

SEQ ID NO: 52748 - DNA, 20 bp, synthetic construct
  source 1..20: mol_type = other DNA
gaaaatgttctatagttttc

SEQ ID NO: 52749 - DNA, 20 bp, synthetic construct
  source 1..20: mol_type = other DNA
ccggctcaccgtggtccagc

SEQ ID NO: 52750 - DNA, 20 bp, synthetic construct
  source 1..20: mol_type = other DNA
gtgggtagatgagggcctga

SEQ ID NO: 52751 - DNA, 20 bp, synthetic construct
  source 1..20: mol_type = other DNA
ccgcaccctacggcatcgaa

SEQ ID NO: 52752 - DNA, 20 bp, synthetic construct
  source 1..20: mol_type = other DNA
gtgggacgtactcgctgtgc

SEQ ID NO: 52753 - DNA, 20 bp, synthetic construct
  source 1..20: mol_type = other DNA
cgcaccaggaaggtgcccac

SEQ ID NO: 52754 - DNA, 20 bp, synthetic construct
  source 1..20: mol_type = other DNA
ctgtgagtgaagcagcctct

SEQ ID NO: 52755 - DNA, 20 bp, synthetic construct
  source 1..20: mol_type = other DNA
ccccgcacgccaggatccgc

SEQ ID NO: 52756 - DNA, 20 bp, synthetic construct
  source 1..20: mol_type = other DNA
ctgaggctaaacggaagagt

SEQ ID NO: 52757 - DNA, 20 bp, synthetic construct
  source 1..20: mol_type = other DNA
taaggtctcacctgaaactt

SEQ ID NO: 52758 - DNA, 20 bp, synthetic construct
  source 1..20: mol_type = other DNA
tgtcccagtgccacgaactt

SEQ ID NO: 52759 - DNA, 20 bp, synthetic construct
  source 1..20: mol_type = other DNA
tcaggttatctgagaaagag

SEQ ID NO: 52760 - DNA, 20 bp, synthetic construct
  source 1..20: mol_type = other DNA
ggaggaggcagcggaggagg

SEQ ID NO: 52761 - DNA, 20 bp, synthetic construct
  source 1..20: mol_type = other DNA
tacaagatggatgcccccga

SEQ ID NO: 52762 - DNA, 20 bp, synthetic construct
  source 1..20: mol_type = other DNA
gtgaagaaatgtaggtgtca

SEQ ID NO: 52763 - DNA, 20 bp, synthetic construct
  source 1..20: mol_type = other DNA
ccgctccttgtagccaatga

SEQ ID NO: 52764 - DNA, 20 bp, synthetic construct
  source 1..20: mol_type = other DNA
cctcaccaaccacctgcacc

SEQ ID NO: 52765 - DNA, 20 bp, synthetic construct
  source 1..20: mol_type = other DNA
ccacaggccccagccacagt

SEQ ID NO: 52766 - DNA, 20 bp, synthetic construct
  source 1..20: mol_type = other DNA
ctgtaccataaatttggacc

SEQ ID NO: 52767 - DNA, 20 bp, synthetic construct
  source 1..20: mol_type = other DNA
caagagactggggaacagat

SEQ ID NO: 52768 - DNA, 20 bp, synthetic construct
  source 1..20: mol_type = other DNA
ctggcagcttgcccgtgtcc

SEQ ID NO: 52769 - DNA, 20 bp, synthetic construct
  source 1..20: mol_type = other DNA
taccaggcacacaagagact

SEQ ID NO: 52770 - DNA, 20 bp, synthetic construct
  source 1..20: mol_type = other DNA
cagtggtgccgtacaaaggt

SEQ ID NO: 52771 - DNA, 20 bp, synthetic construct
  source 1..20: mol_type = other DNA
tgtcagcattgaagcttcct

SEQ ID NO: 52772 - DNA, 20 bp, synthetic construct
  source 1..20: mol_type = other DNA
tgaataccagcaggctcagc

SEQ ID NO: 52773 - DNA, 20 bp, synthetic construct
  source 1..20: mol_type = other DNA
cccacaggccgcgctgcagg

SEQ ID NO: 52774 - DNA, 20 bp, synthetic construct
  source 1..20: mol_type = other DNA
acagctcaactccctgccac

SEQ ID NO: 52775 - DNA, 20 bp, synthetic construct
  source 1..20: mol_type = other DNA
aataggtactattaccaaag

SEQ ID NO: 52776 - DNA, 20 bp, synthetic construct
  source 1..20: mol_type = other DNA
ccatttacctgttggtggca

SEQ ID NO: 52777 - DNA, 20 bp, synthetic construct
  source 1..20: mol_type = other DNA
cagggggatcttctcgcccc

SEQ ID NO: 52778 - DNA, 20 bp, synthetic construct
  source 1..20: mol_type = other DNA
gcgctatcccatcaacgagg

SEQ ID NO: 52779 - DNA, 20 bp, synthetic construct
  source 1..20: mol_type = other DNA
ggcgcgcggcgcggcggcgg

SEQ ID NO: 52780 - DNA, 20 bp, synthetic construct
  source 1..20: mol_type = other DNA
aatatatcttcacctttagc

SEQ ID NO: 52781 - DNA, 20 bp, synthetic construct
  source 1..20: mol_type = other DNA
ggcaactggaaaaaggtcaa

SEQ ID NO: 52782 - DNA, 20 bp, synthetic construct
  source 1..20: mol_type = other DNA
tcaaactgtataggcagagc

SEQ ID NO: 52783 - DNA, 20 bp, synthetic construct
  source 1..20: mol_type = other DNA
ctcctgggagacaaggtgag

SEQ ID NO: 52784 - DNA, 20 bp, synthetic construct
  source 1..20: mol_type = other DNA
gcaatacattctgtaccgga

SEQ ID NO: 52785 - DNA, 20 bp, synthetic construct
  source 1..20: mol_type = other DNA
gcaggcgcccggctccgtgg

SEQ ID NO: 52786 - DNA, 20 bp, synthetic construct
  source 1..20: mol_type = other DNA
ttgagcacgcagtcgaagcg

SEQ ID NO: 52787 - DNA, 20 bp, synthetic construct
  source 1..20: mol_type = other DNA
ctcattcactgcaggtgcgt

SEQ ID NO: 52788 - DNA, 20 bp, synthetic construct
  source 1..20: mol_type = other DNA
cccggtcagcagcgcgaaca

SEQ ID NO: 52789 - DNA, 20 bp, synthetic construct
  source 1..20: mol_type = other DNA
aaaaggatattgtgcaactg

SEQ ID NO: 52790 - DNA, 20 bp, synthetic construct
  source 1..20: mol_type = other DNA
gcagaaaacgtggaagcact

SEQ ID NO: 52791 - DNA, 20 bp, synthetic construct
  source 1..20: mol_type = other DNA
ctcagataacctgaggacca

SEQ ID NO: 52792 - DNA, 20 bp, synthetic construct
  source 1..20: mol_type = other DNA
gggtatgcctgaaaaaggag

SEQ ID NO: 52793 - DNA, 20 bp, synthetic construct
  source 1..20: mol_type = other DNA
agggttccatgatataatcc

SEQ ID NO: 52794 - DNA, 20 bp, synthetic construct
  source 1..20: mol_type = other DNA
ctcagtcatgacgtgagtgg

SEQ ID NO: 52795 - DNA, 20 bp, synthetic construct
  source 1..20: mol_type = other DNA
gccagtacccaggggcagga

SEQ ID NO: 52796 - DNA, 20 bp, synthetic construct
  source 1..20: mol_type = other DNA
ttcaaacgctaaatcaagct

SEQ ID NO: 52797 - DNA, 20 bp, synthetic construct
  source 1..20: mol_type = other DNA
cactagcttcttgtaggcaa

SEQ ID NO: 52798 - DNA, 20 bp, synthetic construct
  source 1..20: mol_type = other DNA
aagcgtcaaaagtctgccag

SEQ ID NO: 52799 - DNA, 20 bp, synthetic construct
  source 1..20: mol_type = other DNA
gacacttacgttaaaagctg

SEQ ID NO: 52800 - DNA, 20 bp, synthetic construct
  source 1..20: mol_type = other DNA
gcccacgagagcaaagagtg

SEQ ID NO: 52801 - DNA, 20 bp, synthetic construct
  source 1..20: mol_type = other DNA
tgtagtgctgcagggtgtgg

SEQ ID NO: 52802 - DNA, 20 bp, synthetic construct
  source 1..20: mol_type = other DNA
tggtcattcctgttccaatg

SEQ ID NO: 52803 - DNA, 20 bp, synthetic construct
  source 1..20: mol_type = other DNA
taagacaggatgtgcacatg

SEQ ID NO: 52804 - DNA, 20 bp, synthetic construct
  source 1..20: mol_type = other DNA
ggaggtggaagaggaagagg

SEQ ID NO: 52805 - DNA, 20 bp, synthetic construct
  source 1..20: mol_type = other DNA
gcgggatgaccacggctgcg

SEQ ID NO: 52806 - DNA, 20 bp, synthetic construct
  source 1..20: mol_type = other DNA
catcagcctccagttcagca

SEQ ID NO: 52807 - DNA, 20 bp, synthetic construct
  source 1..20: mol_type = other DNA
caaggccatcgagagctcgg

SEQ ID NO: 52808 - DNA, 20 bp, synthetic construct
  source 1..20: mol_type = other DNA
tcaaagtcgtggtgctcccc

SEQ ID NO: 52809 - DNA, 20 bp, synthetic construct
  source 1..20: mol_type = other DNA
agaggaggaagaggaggagg

SEQ ID NO: 52810 - DNA, 20 bp, synthetic construct
  source 1..20: mol_type = other DNA
ccatgacgtcgttggtgagt

SEQ ID NO: 52811 - DNA, 20 bp, synthetic construct
  source 1..20: mol_type = other DNA
tgagctggaggaggaggagg

SEQ ID NO: 52812 - DNA, 20 bp, synthetic construct
  source 1..20: mol_type = other DNA
gcaacaggaagaggccgagg

SEQ ID NO: 52813 - DNA, 20 bp, synthetic construct
  source 1..20: mol_type = other DNA
gtctaggggtcggtcagtgc

SEQ ID NO: 52814 - DNA, 20 bp, synthetic construct
  source 1..20: mol_type = other DNA
ccatgcagatgagtgccctg

SEQ ID NO: 52815 - DNA, 20 bp, synthetic construct
  source 1..20: mol_type = other DNA
gtcttccctcaggaactgca

SEQ ID NO: 52816 - DNA, 20 bp, synthetic construct
  source 1..20: mol_type = other DNA
cactgcggtagaactcatcc

SEQ ID NO: 52817 - DNA, 20 bp, synthetic construct
  source 1..20: mol_type = other DNA
tggtgcaagcaggcagtgag

SEQ ID NO: 52818 - DNA, 20 bp, synthetic construct
  source 1..20: mol_type = other DNA
cagcaatacaggtaccacag

SEQ ID NO: 52819 - DNA, 20 bp, synthetic construct
  source 1..20: mol_type = other DNA
atacaaactttgggaagctg

SEQ ID NO: 52820 - DNA, 20 bp, synthetic construct
  source 1..20: mol_type = other DNA
cgggcatgtcgacttctcct

SEQ ID NO: 52821 - DNA, 20 bp, synthetic construct
  source 1..20: mol_type = other DNA
tgacgacctgcaatggcaag

SEQ ID NO: 52822 - DNA, 20 bp, synthetic construct
  source 1..20: mol_type = other DNA
tgaggagaccagcagtgacc

SEQ ID NO: 52823 - DNA, 20 bp, synthetic construct
  source 1..20: mol_type = other DNA
tagggaacaagggagccgtg

SEQ ID NO: 52824 - DNA, 20 bp, synthetic construct
  source 1..20: mol_type = other DNA
tctggtcagggctcggacac

SEQ ID NO: 52825 - DNA, 20 bp, synthetic construct
  source 1..20: mol_type = other DNA
tctgcgtgcgtgggaaggtg

SEQ ID NO: 52826 - DNA, 20 bp, synthetic construct
  source 1..20: mol_type = other DNA
ctgggccagcttccccaccg

SEQ ID NO: 52827 - DNA, 20 bp, synthetic construct
  source 1..20: mol_type = other DNA
acaggtaaggtatttggggg

SEQ ID NO: 52828 - DNA, 20 bp, synthetic construct
  source 1..20: mol_type = other DNA
gatgcttgccaccgtgcctg

SEQ ID NO: 52829 - DNA, 20 bp, synthetic construct
  source 1..20: mol_type = other DNA
cacgccgacgccatccaccg

SEQ ID NO: 52830 - DNA, 20 bp, synthetic construct
  source 1..20: mol_type = other DNA
ccacctggatcctccgcgcc

SEQ ID NO: 52831 - DNA, 20 bp, synthetic construct
  source 1..20: mol_type = other DNA
gagagacagattggttcctg

SEQ ID NO: 52832 - DNA, 20 bp, synthetic construct
  source 1..20: mol_type = other DNA
ttaagcagtcaatgtcaatc

SEQ ID NO: 52833 - DNA, 20 bp, synthetic construct
  source 1..20: mol_type = other DNA
catagctgatggtacccccc

SEQ ID NO: 52834 - DNA, 20 bp, synthetic construct
  source 1..20: mol_type = other DNA
acaaggtgggtcccgcgggc

SEQ ID NO: 52835 - DNA, 20 bp, synthetic construct
  source 1..20: mol_type = other DNA
tccgaccccatggtgcaggt

SEQ ID NO: 52836 - DNA, 20 bp, synthetic construct
  source 1..20: mol_type = other DNA
ttaccacatgttggcttaga

SEQ ID NO: 52837 - DNA, 20 bp, synthetic construct
  source 1..20: mol_type = other DNA
gctcgtcaggaggccgcttg

SEQ ID NO: 52838 - DNA, 20 bp, synthetic construct
  source 1..20: mol_type = other DNA
tttgcaccctggatgggatg

SEQ ID NO: 52839 - DNA, 20 bp, synthetic construct
  source 1..20: mol_type = other DNA
agctcctcccaggctgcagc

SEQ ID NO: 52840 - DNA, 20 bp, synthetic construct
  source 1..20: mol_type = other DNA
ggaggaggagtggatggagg

SEQ ID NO: 52841 - DNA, 20 bp, synthetic construct
  source 1..20: mol_type = other DNA
gtggcagacctacagtgtag

SEQ ID NO: 52842 - DNA, 20 bp, synthetic construct
  source 1..20: mol_type = other DNA
catctgccaaaagtcaccaa

SEQ ID NO: 52843 - DNA, 20 bp, synthetic construct
  source 1..20: mol_type = other DNA
tggattctaaagcagtgtcc

SEQ ID NO: 52844 - DNA, 20 bp, synthetic construct
  source 1..20: mol_type = other DNA
cgctgtcgcagatctacgag

SEQ ID NO: 52845 - DNA, 20 bp, synthetic construct
  source 1..20: mol_type = other DNA
gcccagtccactactactgg

SEQ ID NO: 52846 - DNA, 20 bp, synthetic construct
  source 1..20: mol_type = other DNA
cggatgaggaaggcccctcc

SEQ ID NO: 52847 - DNA, 20 bp, synthetic construct
  source 1..20: mol_type = other DNA
gaggaagttctccaggtcct

SEQ ID NO: 52848 - DNA, 20 bp, synthetic construct
  source 1..20: mol_type = other DNA
cctggtgcaggtggttggtg

SEQ ID NO: 52849 - DNA, 20 bp, synthetic construct
  source 1..20: mol_type = other DNA
aacctgccaaaactgtgcac

SEQ ID NO: 52850 - DNA, 20 bp, synthetic construct
  source 1..20: mol_type = other DNA
cctctcaggtaggcaggcgt

SEQ ID NO: 52851 - DNA, 20 bp, synthetic construct
  source 1..20: mol_type = other DNA
gggacccgccagagcgcagg

SEQ ID NO: 52852 - DNA, 20 bp, synthetic construct
  source 1..20: mol_type = other DNA
acagattcacaagtttgccc

SEQ ID NO: 52853 - DNA, 20 bp, synthetic construct
  source 1..20: mol_type = other DNA
atactgctccagatatgggt

SEQ ID NO: 52854 - DNA, 20 bp, synthetic construct
  source 1..20: mol_type = other DNA
attacctacagatttcagtg

SEQ ID NO: 52855 - DNA, 20 bp, synthetic construct
  source 1..20: mol_type = other DNA
acctgtctgaatgagccact

SEQ ID NO: 52856 - DNA, 20 bp, synthetic construct
  source 1..20: mol_type = other DNA
tccccagagagctggagcgg

SEQ ID NO: 52857 - DNA, 20 bp, synthetic construct
  source 1..20: mol_type = other DNA
ttctataaataaaaaaagaa

SEQ ID NO: 52858 - DNA, 20 bp, synthetic construct
  source 1..20: mol_type = other DNA
gcgctgcaggtgggcggaca

SEQ ID NO: 52859 - DNA, 20 bp, synthetic construct
  source 1..20: mol_type = other DNA
tctggattggcttcaggtag

SEQ ID NO: 52860 - DNA, 20 bp, synthetic construct
  source 1..20: mol_type = other DNA
cccaggggcaggatggcaac

SEQ ID NO: 52861 - DNA, 20 bp, synthetic construct
  source 1..20: mol_type = other DNA
gcttttctcccgtgtgtacc

SEQ ID NO: 52862 - DNA, 20 bp, synthetic construct
  source 1..20: mol_type = other DNA
ggtggtggcggcggcggcgg

SEQ ID NO: 52863 - DNA, 20 bp, synthetic construct
  source 1..20: mol_type = other DNA
gcgtgaggctgcaagcttgc

SEQ ID NO: 52864 - DNA, 20 bp, synthetic construct
  source 1..20: mol_type = other DNA
ctacagtcctggtaatggtg

SEQ ID NO: 52865 - DNA, 20 bp, synthetic construct
  source 1..20: mol_type = other DNA
gtgggctctggagttgtggt

SEQ ID NO: 52866 - DNA, 20 bp, synthetic construct
  source 1..20: mol_type = other DNA
tcaatgcagatgttgcactt

SEQ ID NO: 52867 - DNA, 20 bp, synthetic construct
  source 1..20: mol_type = other DNA
cacactggaggcgggcgggg

SEQ ID NO: 52868 - DNA, 20 bp, synthetic construct
  source 1..20: mol_type = other DNA
atctgcattgagaagaatgg

SEQ ID NO: 52869 - DNA, 20 bp, synthetic construct
  source 1..20: mol_type = other DNA
acagggacatcaaggtggtc

SEQ ID NO: 52870 - DNA, 20 bp, synthetic construct
  source 1..20: mol_type = other DNA
ccccccgcagcaagtcccct

SEQ ID NO: 52871 - DNA, 20 bp, synthetic construct
  source 1..20: mol_type = other DNA
ctcccaaactgacctctagg

SEQ ID NO: 52872 - DNA, 20 bp, synthetic construct
  source 1..20: mol_type = other DNA
tcatctggattatagaccag

SEQ ID NO: 52873 - DNA, 20 bp, synthetic construct
  source 1..20: mol_type = other DNA
gtacattgtataaagaccac

SEQ ID NO: 52874 - DNA, 20 bp, synthetic construct
  source 1..20: mol_type = other DNA
caagtccttgttagcctcca

SEQ ID NO: 52875 - DNA, 20 bp, synthetic construct
  source 1..20: mol_type = other DNA
agcggctgttgaatttctct

SEQ ID NO: 52876 - DNA, 20 bp, synthetic construct
  source 1..20: mol_type = other DNA
taggatggtagcacacaacc

SEQ ID NO: 52877 - DNA, 20 bp, synthetic construct
  source 1..20: mol_type = other DNA
gaatgatcatcaaacagcta

SEQ ID NO: 52878 - DNA, 20 bp, synthetic construct
  source 1..20: mol_type = other DNA
ttcccgttgggccaatccac

SEQ ID NO: 52879 - DNA, 20 bp, synthetic construct
  source 1..20: mol_type = other DNA
ggtgaaggtggtggtggtgg

SEQ ID NO: 52880 - DNA, 20 bp, synthetic construct
  source 1..20: mol_type = other DNA
ccgctccttggggaaggggt

SEQ ID NO: 52881 - DNA, 20 bp, synthetic construct
  source 1..20: mol_type = other DNA
gctgtattcgttatccacgt

SEQ ID NO: 52882 - DNA, 20 bp, synthetic construct
  source 1..20: mol_type = other DNA
aacctgcgcatccagtgtga

SEQ ID NO: 52883 - DNA, 20 bp, synthetic construct
  source 1..20: mol_type = other DNA
ttctacttagccaaacacag

SEQ ID NO: 52884 - DNA, 20 bp, synthetic construct
  source 1..20: mol_type = other DNA
tgacatccacattcagtctg

SEQ ID NO: 52885 - DNA, 20 bp, synthetic construct
  source 1..20: mol_type = other DNA
aggaccctgtgaaccacgtg

SEQ ID NO: 52886 - DNA, 20 bp, synthetic construct
  source 1..20: mol_type = other DNA
gactctgtgaacacaccaag

SEQ ID NO: 52887 - DNA, 20 bp, synthetic construct
  source 1..20: mol_type = other DNA
agtggagaatttctgccatg

SEQ ID NO: 52888 - DNA, 20 bp, synthetic construct
  source 1..20: mol_type = other DNA
gggacatcaaggtggtctgg

SEQ ID NO: 52889 - DNA, 20 bp, synthetic construct
  source 1..20: mol_type = other DNA
aacctgagaggggaagcaat

SEQ ID NO: 52890 - DNA, 20 bp, synthetic construct
  source 1..20: mol_type = other DNA
gcgccatggcccgaagaccc

SEQ ID NO: 52891 - DNA, 20 bp, synthetic construct
  source 1..20: mol_type = other DNA
agtggatcaccgcaggccca

SEQ ID NO: 52892 - DNA, 20 bp, synthetic construct
  source 1..20: mol_type = other DNA
gagggagatggcactgatgg

SEQ ID NO: 52893 - DNA, 20 bp, synthetic construct
  source 1..20: mol_type = other DNA
cattttgtgcttcagaaatg

SEQ ID NO: 52894 - DNA, 20 bp, synthetic construct
  source 1..20: mol_type = other DNA
atgtgcagtgccagcaccga

SEQ ID NO: 52895 - DNA, 20 bp, synthetic construct
  source 1..20: mol_type = other DNA
cccactcaccaacgacgtca

SEQ ID NO: 52896 - DNA, 20 bp, synthetic construct
  source 1..20: mol_type = other DNA
tccccagacgcccctgcacc

SEQ ID NO: 52897 - DNA, 20 bp, synthetic construct
  source 1..20: mol_type = other DNA
cgacaaggagcagctcaagg

SEQ ID NO: 52898 - DNA, 20 bp, synthetic construct
  source 1..20: mol_type = other DNA
cacaaggctcccctgggggc

SEQ ID NO: 52899 - DNA, 20 bp, synthetic construct
  source 1..20: mol_type = other DNA
catctatcaacagaagatca

SEQ ID NO: 52900 - DNA, 20 bp, synthetic construct
  source 1..20: mol_type = other DNA
acaccaagcagaaagcgaca

SEQ ID NO: 52901 - DNA, 20 bp, synthetic construct
  source 1..20: mol_type = other DNA
gtcccagatctacgagtgga

SEQ ID NO: 52902 - DNA, 20 bp, synthetic construct
  source 1..20: mol_type = other DNA
caaacaggtctccccgctgg

SEQ ID NO: 52903 - DNA, 20 bp, synthetic construct
  source 1..20: mol_type = other DNA
atttccatctggtaagaaat

SEQ ID NO: 52904 - DNA, 20 bp, synthetic construct
  source 1..20: mol_type = other DNA
cgctacaaaagaaccacaca

SEQ ID NO: 52905 - DNA, 20 bp, synthetic construct
  source 1..20: mol_type = other DNA
agtccattccatcacactgg

SEQ ID NO: 52906 - DNA, 20 bp, synthetic construct
  source 1..20: mol_type = other DNA
tgacatgaccgctaaagaac

SEQ ID NO: 52907 - DNA, 20 bp, synthetic construct
  source 1..20: mol_type = other DNA
cgtgtgcagaatgaaggaac

SEQ ID NO: 52908 - DNA, 20 bp, synthetic construct
  source 1..20: mol_type = other DNA
cagcaccaccaggagcacca

SEQ ID NO: 52909 - DNA, 20 bp, synthetic construct
  source 1..20: mol_type = other DNA
gagcaggagggcttcgccga

SEQ ID NO: 52910 - DNA, 20 bp, synthetic construct
  source 1..20: mol_type = other DNA
tgcaaataggccagtccctg

SEQ ID NO: 52911 - DNA, 20 bp, synthetic construct
  source 1..20: mol_type = other DNA
cggcccagtgggtcatcagg

SEQ ID NO: 52912 - DNA, 20 bp, synthetic construct
  source 1..20: mol_type = other DNA
ggtatgagaaactgcacgag

SEQ ID NO: 52913 - DNA, 20 bp, synthetic construct
  source 1..20: mol_type = other DNA
tgactccaattcagaggttc

SEQ ID NO: 52914 - DNA, 20 bp, synthetic construct
  source 1..20: mol_type = other DNA
tgatggtgcccgtcttcacc

SEQ ID NO: 52915 - DNA, 20 bp, synthetic construct
  source 1..20: mol_type = other DNA
tgttttggttcattcccgtt

SEQ ID NO: 52916 - DNA, 20 bp, synthetic construct
  source 1..20: mol_type = other DNA
cttggatgatggcaagacac

SEQ ID NO: 52917 - DNA, 20 bp, synthetic construct
  source 1..20: mol_type = other DNA
tccaggagctgcaccgagct

SEQ ID NO: 52918 - DNA, 20 bp, synthetic construct
  source 1..20: mol_type = other DNA
gaccacgttggggtgctcga

SEQ ID NO: 52919 - DNA, 20 bp, synthetic construct
  source 1..20: mol_type = other DNA
acggcaagtgtcggcactgt

SEQ ID NO: 52920 - DNA, 20 bp, synthetic construct
  source 1..20: mol_type = other DNA
ggcaagcatcatcctggccc

SEQ ID NO: 52921 - DNA, 20 bp, synthetic construct
  source 1..20: mol_type = other DNA
cagctgctcgtggtgcaagc

SEQ ID NO: 52922 - DNA, 20 bp, synthetic construct
  source 1..20: mol_type = other DNA
ccagcactgtgccggcgtgg

SEQ ID NO: 52923 - DNA, 20 bp, synthetic construct
  source 1..20: mol_type = other DNA
ttctaatatttaaataaaaa

SEQ ID NO: 52924 - DNA, 20 bp, synthetic construct
  source 1..20: mol_type = other DNA
gtgtagtgctgcagggtgtg

SEQ ID NO: 52925 - DNA, 20 bp, synthetic construct
  source 1..20: mol_type = other DNA
tttacataggtatctttagg

SEQ ID NO: 52926 - DNA, 20 bp, synthetic construct
  source 1..20: mol_type = other DNA
agaggaggaggatgaagagg

SEQ ID NO: 52927 - DNA, 20 bp, synthetic construct
  source 1..20: mol_type = other DNA
cgttgccagtacccaggggc

SEQ ID NO: 52928 - DNA, 20 bp, synthetic construct
  source 1..20: mol_type = other DNA
tgagataccagaggaaagac

SEQ ID NO: 52929 - DNA, 20 bp, synthetic construct
  source 1..20: mol_type = other DNA
ggctccacctcctgtggcac

SEQ ID NO: 52930 - DNA, 20 bp, synthetic construct
  source 1..20: mol_type = other DNA
cccagataatctgatagtgg

SEQ ID NO: 52931 - DNA, 20 bp, synthetic construct
  source 1..20: mol_type = other DNA
gcaagtgaactggtactcct

SEQ ID NO: 52932 - DNA, 20 bp, synthetic construct
  source 1..20: mol_type = other DNA
cgtgcacatgaacccccccc

SEQ ID NO: 52933 - DNA, 20 bp, synthetic construct
  source 1..20: mol_type = other DNA
gaaggtaacccttaaatgtg

SEQ ID NO: 52934 - DNA, 20 bp, synthetic construct
  source 1..20: mol_type = other DNA
aggctccaggaatgtccgcg

SEQ ID NO: 52935 - DNA, 20 bp, synthetic construct
  source 1..20: mol_type = other DNA
caggcagagcccaagaccca

SEQ ID NO: 52936 - DNA, 20 bp, synthetic construct
  source 1..20: mol_type = other DNA
gcgcaacaccaggtgcaggg

SEQ ID NO: 52937 - DNA, 20 bp, synthetic construct
  source 1..20: mol_type = other DNA
tgcggatgttccagagcgtg

SEQ ID NO: 52938 - DNA, 20 bp, synthetic construct
  source 1..20: mol_type = other DNA
caacttacaagttcaaccgg

SEQ ID NO: 52939 - DNA, 20 bp, synthetic construct
  source 1..20: mol_type = other DNA
acaataagaatattttcatt

SEQ ID NO: 52940 - DNA, 20 bp, synthetic construct
  source 1..20: mol_type = other DNA
tgcggaagtgcgtgtcgccg

SEQ ID NO: 52941 - DNA, 20 bp, synthetic construct
  source 1..20: mol_type = other DNA
tgtcccaggctggagtacag

SEQ ID NO: 52942 - DNA, 20 bp, synthetic construct
  source 1..20: mol_type = other DNA
ggcggcggcggcggaggagg

SEQ ID NO: 52943 - DNA, 20 bp, synthetic construct
  source 1..20: mol_type = other DNA
atccagacatcgggtagcca

SEQ ID NO: 52944 - DNA, 20 bp, synthetic construct
  source 1..20: mol_type = other DNA
agacagtcatgttccagacc

SEQ ID NO: 52945 - DNA, 20 bp, synthetic construct
  source 1..20: mol_type = other DNA
ctcaccatggtggcggatgg

SEQ ID NO: 52946 - DNA, 20 bp, synthetic construct
  source 1..20: mol_type = other DNA
ggcagcggaggaggaggagg

SEQ ID NO: 52947 - DNA, 20 bp, synthetic construct
  source 1..20: mol_type = other DNA
ccttcaggggctgtggccag

SEQ ID NO: 52948 - DNA, 20 bp, synthetic construct
  source 1..20: mol_type = other DNA
caggacctgcccttctgcaa

SEQ ID NO: 52949 - DNA, 20 bp, synthetic construct
  source 1..20: mol_type = other DNA
tacagtcctggtaatggtgt

SEQ ID NO: 52950 - DNA, 20 bp, synthetic construct
  source 1..20: mol_type = other DNA
tgacagagagtaagagcctg

SEQ ID NO: 52951 - DNA, 20 bp, synthetic construct
  source 1..20: mol_type = other DNA
acagtgaaatctcgatggag

SEQ ID NO: 52952 - DNA, 20 bp, synthetic construct
  source 1..20: mol_type = other DNA
tgcctggggcaggacgagag

SEQ ID NO: 52953 - DNA, 20 bp, synthetic construct
  source 1..20: mol_type = other DNA
cacactgcacagtggtgagg

SEQ ID NO: 52954 - DNA, 20 bp, synthetic construct
  source 1..20: mol_type = other DNA
aaggccagccccactgtggc

SEQ ID NO: 52955 - DNA, 20 bp, synthetic construct
  source 1..20: mol_type = other DNA
ccttttgagtgcaacatgtg

SEQ ID NO: 52956 - DNA, 20 bp, synthetic construct
  source 1..20: mol_type = other DNA
gggcccagccgcctgtgggg

SEQ ID NO: 52957 - DNA, 20 bp, synthetic construct
  source 1..20: mol_type = other DNA
aggcttaaaagaaatagatg

SEQ ID NO: 52958 - DNA, 20 bp, synthetic construct
  source 1..20: mol_type = other DNA
ggctgtattcgttatccacg

SEQ ID NO: 52959 - DNA, 20 bp, synthetic construct
  source 1..20: mol_type = other DNA
gcagcacaatgttctagtag

SEQ ID NO: 52960 - DNA, 20 bp, synthetic construct
  source 1..20: mol_type = other DNA
taccttgccagtaggcggtg

SEQ ID NO: 52961 - DNA, 20 bp, synthetic construct
  source 1..20: mol_type = other DNA
tacgaaacatcatgggttcc

SEQ ID NO: 52962 - DNA, 20 bp, synthetic construct
  source 1..20: mol_type = other DNA
ggacttcttcacggccacag

SEQ ID NO: 52963 - DNA, 20 bp, synthetic construct
  source 1..20: mol_type = other DNA
ccagaagcgggagggcgtga

SEQ ID NO: 52964 - DNA, 20 bp, synthetic construct
  source 1..20: mol_type = other DNA
ggtggcggtggtggcggtgg

SEQ ID NO: 52965 - DNA, 20 bp, synthetic construct
  source 1..20: mol_type = other DNA
cgaacaggaaggttatctgc

SEQ ID NO: 52966 - DNA, 20 bp, synthetic construct
  source 1..20: mol_type = other DNA
gaataggtactattaccaaa

SEQ ID NO: 52967 - DNA, 20 bp, synthetic construct
  source 1..20: mol_type = other DNA
tatacagtttgaataccagc

SEQ ID NO: 52968 - DNA, 20 bp, synthetic construct
  source 1..20: mol_type = other DNA
ggagaaggtaaaaataaatg

SEQ ID NO: 52969 - DNA, 20 bp, synthetic construct
  source 1..20: mol_type = other DNA
agggcttctcacctgcaggg

SEQ ID NO: 52970 - DNA, 20 bp, synthetic construct
  source 1..20: mol_type = other DNA
tggagcagctgagctcaggc

SEQ ID NO: 52971 - DNA, 20 bp, synthetic construct
  source 1..20: mol_type = other DNA
ggccaagcacatccgagtgg

SEQ ID NO: 52972 - DNA, 20 bp, synthetic construct
  source 1..20: mol_type = other DNA
ggaacactggtggagcgcct

SEQ ID NO: 52973 - DNA, 20 bp, synthetic construct
  source 1..20: mol_type = other DNA
accttacaaaacctcgtcca

SEQ ID NO: 52974 - DNA, 20 bp, synthetic construct
  source 1..20: mol_type = other DNA
acggcggacggcggcggtgg

SEQ ID NO: 52975 - DNA, 20 bp, synthetic construct
  source 1..20: mol_type = other DNA
acatcctcatcaatgatgct

SEQ ID NO: 52976 - DNA, 20 bp, synthetic construct
  source 1..20: mol_type = other DNA
actgacactggactcgtacc

SEQ ID NO: 52977 - DNA, 20 bp, synthetic construct
  source 1..20: mol_type = other DNA
ttctcatgatctggatctcc

SEQ ID NO: 52978 - DNA, 20 bp, synthetic construct
  source 1..20: mol_type = other DNA
ggaggaggaggagtggatgg

SEQ ID NO: 52979 - DNA, 20 bp, synthetic construct
  source 1..20: mol_type = other DNA
cagtgaaatctcgatggagt

SEQ ID NO: 52980 - DNA, 20 bp, synthetic construct
  source 1..20: mol_type = other DNA
agccctaccaggggaccccg

SEQ ID NO: 52981 - DNA, 20 bp, synthetic construct
  source 1..20: mol_type = other DNA
ttgtccatgtgattcagcag

SEQ ID NO: 52982 - DNA, 20 bp, synthetic construct
  source 1..20: mol_type = other DNA
agggcaccggcagaagctgg

SEQ ID NO: 52983 - DNA, 20 bp, synthetic construct
  source 1..20: mol_type = other DNA
ttgtccttcctgcagggagg

SEQ ID NO: 52984 - DNA, 20 bp, synthetic construct
  source 1..20: mol_type = other DNA
tcgggcgcagaagtcatagc

SEQ ID NO: 52985 - DNA, 20 bp, synthetic construct
  source 1..20: mol_type = other DNA
atactggccgtcaatggaag

SEQ ID NO: 52986 - DNA, 20 bp, synthetic construct
  source 1..20: mol_type = other DNA
tgagaatctcagttgatctg

SEQ ID NO: 52987 - DNA, 20 bp, synthetic construct
  source 1..20: mol_type = other DNA
tcattgtcctccagcacctg

SEQ ID NO: 52988 - DNA, 20 bp, synthetic construct
  source 1..20: mol_type = other DNA
gccggggcgctggcggtgct

SEQ ID NO: 52989 - DNA, 20 bp, synthetic construct
  source 1..20: mol_type = other DNA
gtgtggccggggcacccaca

SEQ ID NO: 52990 - DNA, 20 bp, synthetic construct
  source 1..20: mol_type = other DNA
tttgtgggacacagctgggc

SEQ ID NO: 52991 - DNA, 20 bp, synthetic construct
  source 1..20: mol_type = other DNA
gaagaagaagtaaccctggt

SEQ ID NO: 52992 - DNA, 20 bp, synthetic construct
  source 1..20: mol_type = other DNA
ggaggacaatgactatggcc

SEQ ID NO: 52993 - DNA, 20 bp, synthetic construct
  source 1..20: mol_type = other DNA
gaatggcatcctctacctgg

SEQ ID NO: 52994 - DNA, 20 bp, synthetic construct
  source 1..20: mol_type = other DNA
acccgagcggaagaccttcc

SEQ ID NO: 52995 - DNA, 20 bp, synthetic construct
  source 1..20: mol_type = other DNA
gcaggatgtggaccaacgtg

SEQ ID NO: 52996 - DNA, 20 bp, synthetic construct
  source 1..20: mol_type = other DNA
agccgctccacatacagtcc

SEQ ID NO: 52997 - DNA, 20 bp, synthetic construct
  source 1..20: mol_type = other DNA
catttcacagtcctttccca

SEQ ID NO: 52998 - DNA, 20 bp, synthetic construct
  source 1..20: mol_type = other DNA
gggcctgggggaggaagatg

SEQ ID NO: 52999 - DNA, 20 bp, synthetic construct
  source 1..20: mol_type = other DNA
gacttcttcacggccacaga

SEQ ID NO: 53000 - DNA, 20 bp, synthetic construct
  source 1..20: mol_type = other DNA
cccaagtaaggagactgggg

SEQ ID NO: 53001 - DNA, 20 bp, synthetic construct
  source 1..20: mol_type = other DNA
cctctccttgtacccaatga

SEQ ID NO: 53002 - DNA, 20 bp, synthetic construct
  source 1..20: mol_type = other DNA
gcggcggcagcagcaggagg

SEQ ID NO: 53003 - DNA, 20 bp, synthetic construct
  source 1..20: mol_type = other DNA
cagtttggggaagtatggat

SEQ ID NO: 53004 - DNA, 20 bp, synthetic construct
  source 1..20: mol_type = other DNA
gacatggaagagaaggtagc

SEQ ID NO: 53005 - DNA, 20 bp, synthetic construct
  source 1..20: mol_type = other DNA
ccgcgactcaccaagtacag

SEQ ID NO: 53006 - DNA, 20 bp, synthetic construct
  source 1..20: mol_type = other DNA
atccgccgagggatagcagg

SEQ ID NO: 53007 - DNA, 20 bp, synthetic construct
  source 1..20: mol_type = other DNA
aactcttttaatttgttctc

SEQ ID NO: 53008 - DNA, 20 bp, synthetic construct
  source 1..20: mol_type = other DNA
ctcggattggtgggaggagg

SEQ ID NO: 53009 - DNA, 20 bp, synthetic construct
  source 1..20: mol_type = other DNA
ccccgacaaggaggaggacg

SEQ ID NO: 53010 - DNA, 20 bp, synthetic construct
  source 1..20: mol_type = other DNA
aataaataccgggtgtttat

SEQ ID NO: 53011 - DNA, 20 bp, synthetic construct
  source 1..20: mol_type = other DNA
tctgcaccccagcccggacc

SEQ ID NO: 53012 - DNA, 20 bp, synthetic construct
  source 1..20: mol_type = other DNA
cctggctcagtgcgtgaacg

SEQ ID NO: 53013 - DNA, 20 bp, synthetic construct
  source 1..20: mol_type = other DNA
catcggtatctgggtaggag

SEQ ID NO: 53014 - DNA, 20 bp, synthetic construct
  source 1..20: mol_type = other DNA
ggcggcggcggcggcggcgc

SEQ ID NO: 53015 - DNA, 20 bp, synthetic construct
  source 1..20: mol_type = other DNA
gctgggggcggcggcggcgg

SEQ ID NO: 53016 - DNA, 20 bp, synthetic construct
  source 1..20: mol_type = other DNA
atcagcctccagttcagcaa

SEQ ID NO: 53017 - DNA, 20 bp, synthetic construct
  source 1..20: mol_type = other DNA
gacccaggtagaggaagata

SEQ ID NO: 53018 - DNA, 20 bp, synthetic construct
  source 1..20: mol_type = other DNA
catagacagattctgtgggg

SEQ ID NO: 53019 - DNA, 20 bp, synthetic construct
  source 1..20: mol_type = other DNA
agcaggccatgatggtgggt

SEQ ID NO: 53020 - DNA, 20 bp, synthetic construct
  source 1..20: mol_type = other DNA
ttaatgtatgacatgctgac

SEQ ID NO: 53021 - DNA, 20 bp, synthetic construct
  source 1..20: mol_type = other DNA
ggcggcgaggacggcggcgg

SEQ ID NO: 53022 - DNA, 20 bp, synthetic construct
  source 1..20: mol_type = other DNA
aattgaacttagctcattaa

SEQ ID NO: 53023 - DNA, 20 bp, synthetic construct
  source 1..20: mol_type = other DNA
acccccagaaccagcctgtg

SEQ ID NO: 53024 - DNA, 20 bp, synthetic construct
  source 1..20: mol_type = other DNA
gcccatttatcaattggatg

SEQ ID NO: 53025 - DNA, 20 bp, synthetic construct
  source 1..20: mol_type = other DNA
gcactacagtggatcaccgc

SEQ ID NO: 53026 - DNA, 20 bp, synthetic construct
  source 1..20: mol_type = other DNA
gtaacattacttggattacc

SEQ ID NO: 53027 - DNA, 20 bp, synthetic construct
  source 1..20: mol_type = other DNA
tacctttttaagcagatctc

SEQ ID NO: 53028 - DNA, 20 bp, synthetic construct
  source 1..20: mol_type = other DNA
gaggccggcagtgaggaggg

SEQ ID NO: 53029 - DNA, 20 bp, synthetic construct
  source 1..20: mol_type = other DNA
tactggccgtcaatggaaga

SEQ ID NO: 53030 - DNA, 20 bp, synthetic construct
  source 1..20: mol_type = other DNA
tcagcctccagttcagcaag

SEQ ID NO: 53031 - DNA, 20 bp, synthetic construct
  source 1..20: mol_type = other DNA
ctgatggacgatgatgccaa

SEQ ID NO: 53032 - DNA, 20 bp, synthetic construct
  source 1..20: mol_type = other DNA
ttctgatgaaatcagtaaca

SEQ ID NO: 53033 - DNA, 20 bp, synthetic construct
  source 1..20: mol_type = other DNA
caaaaaatcttatttctgac

SEQ ID NO: 53034 - DNA, 20 bp, synthetic construct
  source 1..20: mol_type = other DNA
gaagctttcaaaaagtcttc

SEQ ID NO: 53035 - DNA, 20 bp, synthetic construct
  source 1..20: mol_type = other DNA
caggtgaacacataggcctc

SEQ ID NO: 53036 - DNA, 20 bp, synthetic construct
  source 1..20: mol_type = other DNA
gcaatggtttgacggtgtga

SEQ ID NO: 53037 - DNA, 20 bp, synthetic construct
  source 1..20: mol_type = other DNA
cccatttatcaattggatga

SEQ ID NO: 53038 - DNA, 20 bp, synthetic construct
  source 1..20: mol_type = other DNA
tttttcatatattcagtaac

SEQ ID NO: 53039 - DNA, 20 bp, synthetic construct
  source 1..20: mol_type = other DNA
acggctcatctgaggaggtt

SEQ ID NO: 53040 - DNA, 20 bp, synthetic construct
  source 1..20: mol_type = other DNA
tcaagtactgcataataagg

SEQ ID NO: 53041 - DNA, 20 bp, synthetic construct
  source 1..20: mol_type = other DNA
tgatccgccgagggatagca

SEQ ID NO: 53042 - DNA, 20 bp, synthetic construct
  source 1..20: mol_type = other DNA
aacgttctcatgtctctctc

SEQ ID NO: 53043 - DNA, 20 bp, synthetic construct
  source 1..20: mol_type = other DNA
agaccagcacctgctcctgg

SEQ ID NO: 53044 - DNA, 20 bp, synthetic construct
  source 1..20: mol_type = other DNA
cccacgagagcaaagagtga

SEQ ID NO: 53045 - DNA, 20 bp, synthetic construct
  source 1..20: mol_type = other DNA
tgccctaaggagaagagggg

SEQ ID NO: 53046 - DNA, 20 bp, synthetic construct
  source 1..20: mol_type = other DNA
cggctgctgtgggtacaggc

SEQ ID NO: 53047 - DNA, 20 bp, synthetic construct
  source 1..20: mol_type = other DNA
cccaccgctccagctctctg

SEQ ID NO: 53048 - DNA, 20 bp, synthetic construct
  source 1..20: mol_type = other DNA
gaccaaagatggagtgagag

SEQ ID NO: 53049 - DNA, 20 bp, synthetic construct
  source 1..20: mol_type = other DNA
ctcacgccgatgcacacagc

SEQ ID NO: 53050 - DNA, 20 bp, synthetic construct
  source 1..20: mol_type = other DNA
gtgcactctcaggtggacct

SEQ ID NO: 53051 - DNA, 20 bp, synthetic construct
  source 1..20: mol_type = other DNA
tgatcaaagtggaggagggg

SEQ ID NO: 53052 - DNA, 20 bp, synthetic construct
  source 1..20: mol_type = other DNA
cggcgttcactttgctgccc

SEQ ID NO: 53053 - DNA, 20 bp, synthetic construct
  source 1..20: mol_type = other DNA
ggagggggtgggggcggggg

SEQ ID NO: 53054 - DNA, 20 bp, synthetic construct
  source 1..20: mol_type = other DNA
atttctcagccttggtttcc

SEQ ID NO: 53055 - DNA, 20 bp, synthetic construct
  source 1..20: mol_type = other DNA
attgtcctccagcacctgca

SEQ ID NO: 53056 - DNA, 20 bp, synthetic construct
  source 1..20: mol_type = other DNA
cgccgctgccgccgcggagg

SEQ ID NO: 53057 - DNA, 20 bp, synthetic construct
  source 1..20: mol_type = other DNA
aagacttctgctcggagctg

SEQ ID NO: 53058 - DNA, 20 bp, synthetic construct
  source 1..20: mol_type = other DNA
gaaccatcagttgtacccac

SEQ ID NO: 53059 - DNA, 20 bp, synthetic construct
  source 1..20: mol_type = other DNA
aacgcatctgcagatgccgg

SEQ ID NO: 53060 - DNA, 20 bp, synthetic construct
  source 1..20: mol_type = other DNA
tcagggcgcccttggcgccg

SEQ ID NO: 53061 - DNA, 20 bp, synthetic construct
  source 1..20: mol_type = other DNA
ttgccggcacgccaacatcg

SEQ ID NO: 53062 - DNA, 20 bp, synthetic construct
  source 1..20: mol_type = other DNA
cagccactgcaggctggggc

SEQ ID NO: 53063 - DNA, 20 bp, synthetic construct
  source 1..20: mol_type = other DNA
gtaattcatttttgaaccac

SEQ ID NO: 53064 - DNA, 20 bp, synthetic construct
  source 1..20: mol_type = other DNA
ctatctccaaggcatccggg

SEQ ID NO: 53065 - DNA, 20 bp, synthetic construct
  source 1..20: mol_type = other DNA
gtggggctgaaacacaaaga

SEQ ID NO: 53066 - DNA, 20 bp, synthetic construct
  source 1..20: mol_type = other DNA
ctccacttccccccaaggta

SEQ ID NO: 53067 - DNA, 20 bp, synthetic construct
  source 1..20: mol_type = other DNA
acctggaattcagcctctag

SEQ ID NO: 53068 - DNA, 20 bp, synthetic construct
  source 1..20: mol_type = other DNA
atagatcagtgggatacaac

SEQ ID NO: 53069 - DNA, 20 bp, synthetic construct
  source 1..20: mol_type = other DNA
cacttccggagccatcctgg

SEQ ID NO: 53070 - DNA, 20 bp, synthetic construct
  source 1..20: mol_type = other DNA
agaggacccagctttccggc

SEQ ID NO: 53071 - DNA, 20 bp, synthetic construct
  source 1..20: mol_type = other DNA
tgctgcgggccgcacaggga

SEQ ID NO: 53072 - DNA, 20 bp, synthetic construct
  source 1..20: mol_type = other DNA
tccctcactctttgctctcg

SEQ ID NO: 53073 - DNA, 20 bp, synthetic construct
  source 1..20: mol_type = other DNA
ccaggtaggagaagcgcagc

SEQ ID NO: 53074 - DNA, 20 bp, synthetic construct
  source 1..20: mol_type = other DNA
cagagtgagggttctgagag

SEQ ID NO: 53075 - DNA, 20 bp, synthetic construct
  source 1..20: mol_type = other DNA
tggccagaagggtgttaacc

SEQ ID NO: 53076 - DNA, 20 bp, synthetic construct
  source 1..20: mol_type = other DNA
aaccatcagttgtacccact

SEQ ID NO: 53077 - DNA, 20 bp, synthetic construct
  source 1..20: mol_type = other DNA
cggcgagcgagagtgaggag

SEQ ID NO: 53078 - DNA, 20 bp, synthetic construct
  source 1..20: mol_type = other DNA
agcccctcagccccacctgg

SEQ ID NO: 53079 - DNA, 20 bp, synthetic construct
  source 1..20: mol_type = other DNA
cgtggttcacagggtcctcc

SEQ ID NO: 53080 - DNA, 20 bp, synthetic construct
  source 1..20: mol_type = other DNA
ttctgaatactgctgagccc

SEQ ID NO: 53081 - DNA, 20 bp, synthetic construct
  source 1..20: mol_type = other DNA
attcgggtcagatcttccaa

SEQ ID NO: 53082 - DNA, 20 bp, synthetic construct
  source 1..20: mol_type = other DNA
ggatccccagagagctggag

SEQ ID NO: 53083 - DNA, 20 bp, synthetic construct
  source 1..20: mol_type = other DNA
ctcctgctctggtgcctgcc

SEQ ID NO: 53084 - DNA, 20 bp, synthetic construct
  source 1..20: mol_type = other DNA
atgatctggttccggattgc

SEQ ID NO: 53085 - DNA, 20 bp, synthetic construct
  source 1..20: mol_type = other DNA
aggaaatacattgctgcaca

SEQ ID NO: 53086 - DNA, 20 bp, synthetic construct
  source 1..20: mol_type = other DNA
gaacgcatctgcagatgccg

SEQ ID NO: 53087 - DNA, 20 bp, synthetic construct
  source 1..20: mol_type = other DNA
ctcgttgccgtggaaaagcc

SEQ ID NO: 53088 - DNA, 20 bp, synthetic construct
  source 1..20: mol_type = other DNA
gaaacattggccctttatgg

SEQ ID NO: 53089 - DNA, 20 bp, synthetic construct
  source 1..20: mol_type = other DNA
aggaatatatgaaatctatt

SEQ ID NO: 53090 - DNA, 20 bp, synthetic construct
  source 1..20: mol_type = other DNA
cccagactgaatcacagcct

SEQ ID NO: 53091 - DNA, 20 bp, synthetic construct
  source 1..20: mol_type = other DNA
gaaagtaggtgggggagagg

SEQ ID NO: 53092 - DNA, 20 bp, synthetic construct
  source 1..20: mol_type = other DNA
caaaaattagccaggtatgg

SEQ ID NO: 53093 - DNA, 20 bp, synthetic construct
  source 1..20: mol_type = other DNA
tcaggcgctgcagtttcacc

SEQ ID NO: 53094 - DNA, 20 bp, synthetic construct
  source 1..20: mol_type = other DNA
gcctctatctccaaggcatc

SEQ ID NO: 53095 - DNA, 20 bp, synthetic construct
  source 1..20: mol_type = other DNA
tgcgcatgcggtacacgccc

SEQ ID NO: 53096 - DNA, 20 bp, synthetic construct
  source 1..20: mol_type = other DNA
gggcccagccgggggccccc

SEQ ID NO: 53097 - DNA, 20 bp, synthetic construct
  source 1..20: mol_type = other DNA
ggtggaagaagaagtaaccc

SEQ ID NO: 53098 - DNA, 20 bp, synthetic construct
  source 1..20: mol_type = other DNA
gggtggcgcagggggcgctg

SEQ ID NO: 53099 - DNA, 20 bp, synthetic construct
  source 1..20: mol_type = other DNA
ccccggtcaggtacctggat

SEQ ID NO: 53100 - DNA, 20 bp, synthetic construct
  source 1..20: mol_type = other DNA
cccccgggtagggtggcggg

SEQ ID NO: 53101 - DNA, 20 bp, synthetic construct
  source 1..20: mol_type = other DNA
taaatctgagaagagagaat

SEQ ID NO: 53102 - DNA, 20 bp, synthetic construct
  source 1..20: mol_type = other DNA
acctgaggagagaagaaagg

SEQ ID NO: 53103 - DNA, 20 bp, synthetic construct
  source 1..20: mol_type = other DNA
gcatgctggaaaaaagcaga

SEQ ID NO: 53104 - DNA, 20 bp, synthetic construct
  source 1..20: mol_type = other DNA
taaaagccaagttcaacttg

SEQ ID NO: 53105 - DNA, 20 bp, synthetic construct
  source 1..20: mol_type = other DNA
actggccagcgagaccctgg

SEQ ID NO: 53106 - DNA, 20 bp, synthetic construct
  source 1..20: mol_type = other DNA
ttagatgaattaaataatct

SEQ ID NO: 53107 - DNA, 20 bp, synthetic construct
  source 1..20: mol_type = other DNA
atttccagctcatgtttaag

SEQ ID NO: 53108 - DNA, 20 bp, synthetic construct
  source 1..20: mol_type = other DNA
tgtgcactctcaggtggacc

SEQ ID NO: 53109 - DNA, 20 bp, synthetic construct
  source 1..20: mol_type = other DNA
aggcctcgaggcagcgcatg

SEQ ID NO: 53110 - DNA, 20 bp, synthetic construct
  source 1..20: mol_type = other DNA
gggagactcctatgacctca

SEQ ID NO: 53111 - DNA, 20 bp, synthetic construct
  source 1..20: mol_type = other DNA
gctggcactggaggttgctg

SEQ ID NO: 53112 - DNA, 20 bp, synthetic construct
  source 1..20: mol_type = other DNA
gaggaggagggaggtgtgga

SEQ ID NO: 53113 - DNA, 20 bp, synthetic construct
  source 1..20: mol_type = other DNA
ggtccagacgcaggatggca

SEQ ID NO: 53114 - DNA, 20 bp, synthetic construct
  source 1..20: mol_type = other DNA
tgctcggacgacgtggcgaa

SEQ ID NO: 53115 - DNA, 20 bp, synthetic construct
  source 1..20: mol_type = other DNA
ctgaatgggcggtgaggtgg

SEQ ID NO: 53116 - DNA, 20 bp, synthetic construct
  source 1..20: mol_type = other DNA
caggtgggagccaccacgcc

SEQ ID NO: 53117 - DNA, 20 bp, synthetic construct
  source 1..20: mol_type = other DNA
tcaactgagattctcataca

SEQ ID NO: 53118 - DNA, 20 bp, synthetic construct
  source 1..20: mol_type = other DNA
aagcccgtggcgccgcagga

SEQ ID NO: 53119 - DNA, 20 bp, synthetic construct
  source 1..20: mol_type = other DNA
cggcgcggcggcggcggcgg

SEQ ID NO: 53120 - DNA, 20 bp, synthetic construct
  source 1..20: mol_type = other DNA
gccttaggtaagcggggctg

SEQ ID NO: 53121 - DNA, 20 bp, synthetic construct
  source 1..20: mol_type = other DNA
cgtccgttgtcctgcttcag

SEQ ID NO: 53122 - DNA, 20 bp, synthetic construct
  source 1..20: mol_type = other DNA
cccaggagcaggtgctggtc

SEQ ID NO: 53123 - DNA, 20 bp, synthetic construct
  source 1..20: mol_type = other DNA
acagcttcttaaaactttat

SEQ ID NO: 53124 - DNA, 20 bp, synthetic construct
  source 1..20: mol_type = other DNA
accagatcgagtgagtgctc

SEQ ID NO: 53125 - DNA, 20 bp, synthetic construct
  source 1..20: mol_type = other DNA
agtgggtagatgagggcctg

SEQ ID NO: 53126 - DNA, 20 bp, synthetic construct
  source 1..20: mol_type = other DNA
tcatgaggcaaatgaggaac

SEQ ID NO: 53127 - DNA, 20 bp, synthetic construct
  source 1..20: mol_type = other DNA
actactactggtggctttga

SEQ ID NO: 53128 - DNA, 20 bp, synthetic construct
  source 1..20: mol_type = other DNA
gatcatccagctgtgacagg

SEQ ID NO: 53129 - DNA, 20 bp, synthetic construct
  source 1..20: mol_type = other DNA
tactgttgttatagtaacct

SEQ ID NO: 53130 - DNA, 20 bp, synthetic construct
  source 1..20: mol_type = other DNA
ccaccaaacagcccccgtcc

SEQ ID NO: 53131 - DNA, 20 bp, synthetic construct
  source 1..20: mol_type = other DNA
ggttctatccgtaaacagta

SEQ ID NO: 53132 - DNA, 20 bp, synthetic construct
  source 1..20: mol_type = other DNA
gccccctggggcagaggaga

SEQ ID NO: 53133 - DNA, 20 bp, synthetic construct
  source 1..20: mol_type = other DNA
gtccagcaggccatgatggt

SEQ ID NO: 53134 - DNA, 20 bp, synthetic construct
  source 1..20: mol_type = other DNA
tgagggttctgagaggggtt

SEQ ID NO: 53135 - DNA, 20 bp, synthetic construct
  source 1..20: mol_type = other DNA
accttgccagtaggcggtgg

SEQ ID NO: 53136 - DNA, 20 bp, synthetic construct
  source 1..20: mol_type = other DNA
cagcaccacggcggtggcgg

SEQ ID NO: 53137 - DNA, 20 bp, synthetic construct
  source 1..20: mol_type = other DNA
ttagctccctgggaatgaga

SEQ ID NO: 53138 - DNA, 20 bp, synthetic construct
  source 1..20: mol_type = other DNA
ataatgtcatagagctcatc

SEQ ID NO: 53139 - DNA, 20 bp, synthetic construct
  source 1..20: mol_type = other DNA
agcgctgggggcggcggcgg

SEQ ID NO: 53140 - DNA, 20 bp, synthetic construct
  source 1..20: mol_type = other DNA
gccgggaagtgctccaggta

SEQ ID NO: 53141 - DNA, 20 bp, synthetic construct
  source 1..20: mol_type = other DNA
agagtagtagatcttgctgc

SEQ ID NO: 53142 - DNA, 20 bp, synthetic construct
  source 1..20: mol_type = other DNA
ctaccagcctccccgactga

SEQ ID NO: 53143 - DNA, 20 bp, synthetic construct
  source 1..20: mol_type = other DNA
ggtccagacgcaggatggcg

SEQ ID NO: 53144 - DNA, 20 bp, synthetic construct
  source 1..20: mol_type = other DNA
gcagaaggtgggagaactga

SEQ ID NO: 53145 - DNA, 20 bp, synthetic construct
  source 1..20: mol_type = other DNA
gtgctcgatggggtacttca

SEQ ID NO: 53146 - DNA, 20 bp, synthetic construct
  source 1..20: mol_type = other DNA
agtacacgctgaccctcagg

SEQ ID NO: 53147 - DNA, 20 bp, synthetic construct
  source 1..20: mol_type = other DNA
gatccgccgagggatagcag

SEQ ID NO: 53148 - DNA, 20 bp, synthetic construct
  source 1..20: mol_type = other DNA
ggtagtttcgtggatgccac

SEQ ID NO: 53149 - DNA, 20 bp, synthetic construct
  source 1..20: mol_type = other DNA
gaagtcgtagataagtttag

SEQ ID NO: 53150 - DNA, 20 bp, synthetic construct
  source 1..20: mol_type = other DNA
ttggtactggggctctgtcg

SEQ ID NO: 53151 - DNA, 20 bp, synthetic construct
  source 1..20: mol_type = other DNA
agggtgtcccaatgaaagag

SEQ ID NO: 53152 - DNA, 20 bp, synthetic construct
  source 1..20: mol_type = other DNA
gggcttcgttaaacttcact

SEQ ID NO: 53153 - DNA, 20 bp, synthetic construct
  source 1..20: mol_type = other DNA
cctgagcagggagaaagcag

SEQ ID NO: 53154 - DNA, 20 bp, synthetic construct
  source 1..20: mol_type = other DNA
tagctccctgggaatgagag

SEQ ID NO: 53155 - DNA, 20 bp, synthetic construct
  source 1..20: mol_type = other DNA
tgactacctgcgcagtgtgc

SEQ ID NO: 53156 - DNA, 20 bp, synthetic construct
  source 1..20: mol_type = other DNA
gcgggaggaggagcaggagc

SEQ ID NO: 53157 - DNA, 20 bp, synthetic construct
  source 1..20: mol_type = other DNA
aaaagttcctgaacatattc

SEQ ID NO: 53158 - DNA, 20 bp, synthetic construct
  source 1..20: mol_type = other DNA
ccctgtgttctcgtacactg

SEQ ID NO: 53159 - DNA, 20 bp, synthetic construct
  source 1..20: mol_type = other DNA
agaagaatttattgtgtctt

SEQ ID NO: 53160 - DNA, 20 bp, synthetic construct
  source 1..20: mol_type = other DNA
aggctcgagacaaggtgtca

SEQ ID NO: 53161 - DNA, 20 bp, synthetic construct
  source 1..20: mol_type = other DNA
gcccggggcccgggccgccc

SEQ ID NO: 53162 - DNA, 20 bp, synthetic construct
  source 1..20: mol_type = other DNA
gccacctgtggatacaggca

SEQ ID NO: 53163 - DNA, 20 bp, synthetic construct
  source 1..20: mol_type = other DNA
cctgcctggtgtggaaggac

SEQ ID NO: 53164 - DNA, 20 bp, synthetic construct
  source 1..20: mol_type = other DNA
atgcccgaggaggctggggc

SEQ ID NO: 53165 - DNA, 20 bp, synthetic construct
  source 1..20: mol_type = other DNA
aaactccgtctggttggtgg

SEQ ID NO: 53166 - DNA, 20 bp, synthetic construct
  source 1..20: mol_type = other DNA
tgcacctagccatcatccac

SEQ ID NO: 53167 - DNA, 20 bp, synthetic construct
  source 1..20: mol_type = other DNA
ttctctgcttattagaatca

SEQ ID NO: 53168 - DNA, 20 bp, synthetic construct
  source 1..20: mol_type = other DNA
gagaagtcccgacctagcac

SEQ ID NO: 53169 - DNA, 20 bp, synthetic construct
  source 1..20: mol_type = other DNA
gagccttgcaaaggggaagt

SEQ ID NO: 53170 - DNA, 20 bp, synthetic construct
  source 1..20: mol_type = other DNA
catgagcacgccgtgcagct

SEQ ID NO: 53171 - DNA, 20 bp, synthetic construct
  source 1..20: mol_type = other DNA
ctcattgtatcctcccttca

SEQ ID NO: 53172 - DNA, 20 bp, synthetic construct
  source 1..20: mol_type = other DNA
cctgggaagggaaggagggg

SEQ ID NO: 53173 - DNA, 20 bp, synthetic construct
  source 1..20: mol_type = other DNA
tggagggcttgacatctgca

SEQ ID NO: 53174 - DNA, 20 bp, synthetic construct
  source 1..20: mol_type = other DNA
aggcggccggtccaccagga

SEQ ID NO: 53175 - DNA, 20 bp, synthetic construct
  source 1..20: mol_type = other DNA
gaagaccttccaggtcaagc

SEQ ID NO: 53176 - DNA, 20 bp, synthetic construct
  source 1..20: mol_type = other DNA
gtggagaatgaggaggcgga

SEQ ID NO: 53177 - DNA, 20 bp, synthetic construct
  source 1..20: mol_type = other DNA
caagaatggcatcctctacc

SEQ ID NO: 53178 - DNA, 20 bp, synthetic construct
  source 1..20: mol_type = other DNA
agtatttgacacatttactc

SEQ ID NO: 53179 - DNA, 20 bp, synthetic construct
  source 1..20: mol_type = other DNA
gtccgcaagggacagcgggg

SEQ ID NO: 53180 - DNA, 20 bp, synthetic construct
  source 1..20: mol_type = other DNA
tgtcatgctgaaccgcattg

SEQ ID NO: 53181 - DNA, 20 bp, synthetic construct
  source 1..20: mol_type = other DNA
ggtgatcctggtgaaggaga

SEQ ID NO: 53182 - DNA, 20 bp, synthetic construct
  source 1..20: mol_type = other DNA
acagtgagtgggagcccaga

SEQ ID NO: 53183 - DNA, 20 bp, synthetic construct
  source 1..20: mol_type = other DNA
cccgtggagatctctgccga

SEQ ID NO: 53184 - DNA, 20 bp, synthetic construct
  source 1..20: mol_type = other DNA
gggtgtggaacgcttgcgtt

SEQ ID NO: 53185 - DNA, 20 bp, synthetic construct
  source 1..20: mol_type = other DNA
acagttcacctattaccctc

SEQ ID NO: 53186 - DNA, 20 bp, synthetic construct
  source 1..20: mol_type = other DNA
ttcctccaggggccatgctg

SEQ ID NO: 53187 - DNA, 20 bp, synthetic construct
  source 1..20: mol_type = other DNA
ggatgacgttcaacacttca

SEQ ID NO: 53188 - DNA, 20 bp, synthetic construct
  source 1..20: mol_type = other DNA
atggtggagaatctccgagt

SEQ ID NO: 53189 - DNA, 20 bp, synthetic construct
  source 1..20: mol_type = other DNA
tttacttactttcacatatt

SEQ ID NO: 53190 - DNA, 20 bp, synthetic construct
  source 1..20: mol_type = other DNA
ctctccacaggtccaggaga

SEQ ID NO: 53191 - DNA, 20 bp, synthetic construct
  source 1..20: mol_type = other DNA
ggaaacttggccactctatg

SEQ ID NO: 53192 - DNA, 20 bp, synthetic construct
  source 1..20: mol_type = other DNA
gaacctctgctgatagtgtc

SEQ ID NO: 53193 - DNA, 20 bp, synthetic construct
  source 1..20: mol_type = other DNA
tccagaccagcacctgctcc

SEQ ID NO: 53194 - DNA, 20 bp, synthetic construct
  source 1..20: mol_type = other DNA
tacaggtgagcagagtgggc

SEQ ID NO: 53195 - DNA, 20 bp, synthetic construct
  source 1..20: mol_type = other DNA
cggcggcggcggcggcggcg

SEQ ID NO: 53196 - DNA, 20 bp, synthetic construct
  source 1..20: mol_type = other DNA
gtgctggaaggagcgcccag

SEQ ID NO: 53197 - DNA, 20 bp, synthetic construct
  source 1..20: mol_type = other DNA
ggagttgaggaggctggagt

SEQ ID NO: 53198 - DNA, 20 bp, synthetic construct
  source 1..20: mol_type = other DNA
tgtccccgcggcctccttgg

SEQ ID NO: 53199 - DNA, 20 bp, synthetic construct
  source 1..20: mol_type = other DNA
aatccagtgtgtgaagaagc

SEQ ID NO: 53200 - DNA, 20 bp, synthetic construct
  source 1..20: mol_type = other DNA
aaggaaaaagttgatttcct

SEQ ID NO: 53201 - DNA, 20 bp, synthetic construct
  source 1..20: mol_type = other DNA
cttctcttctggcagagcag

SEQ ID NO: 53202 - DNA, 20 bp, synthetic construct
  source 1..20: mol_type = other DNA
ctacatcgaacgggcgcagc

SEQ ID NO: 53203 - DNA, 20 bp, synthetic construct
  source 1..20: mol_type = other DNA
cgaggcccccctgaacccca

SEQ ID NO: 53204 - DNA, 20 bp, synthetic construct
  source 1..20: mol_type = other DNA
atcaagaggacccagctttc

SEQ ID NO: 53205 - DNA, 20 bp, synthetic construct
  source 1..20: mol_type = other DNA
cctacctgtgtagccagcta

SEQ ID NO: 53206 - DNA, 20 bp, synthetic construct
  source 1..20: mol_type = other DNA
tccgtctgcttggctccccc

SEQ ID NO: 53207 - DNA, 20 bp, synthetic construct
  source 1..20: mol_type = other DNA
acaaggagtcaaactcgtgg

SEQ ID NO: 53208 - DNA, 20 bp, synthetic construct
  source 1..20: mol_type = other DNA
aagtccttgttagcctccaa

SEQ ID NO: 53209 - DNA, 20 bp, synthetic construct
  source 1..20: mol_type = other DNA
ggccaggacccagctgaggg

SEQ ID NO: 53210 - DNA, 20 bp, synthetic construct
  source 1..20: mol_type = other DNA
aaggctcgagacaaggtgtc

SEQ ID NO: 53211 - DNA, 20 bp, synthetic construct
  source 1..20: mol_type = other DNA
acccacctgcgactccattc

SEQ ID NO: 53212 - DNA, 20 bp, synthetic construct
  source 1..20: mol_type = other DNA
gatgtagttcttgtggcact

SEQ ID NO: 53213 - DNA, 20 bp, synthetic construct
  source 1..20: mol_type = other DNA
cccgtccacctgcaccgggg

SEQ ID NO: 53214 - DNA, 20 bp, synthetic construct
  source 1..20: mol_type = other DNA
tcaccatatcttcctctacc

SEQ ID NO: 53215 - DNA, 20 bp, synthetic construct
  source 1..20: mol_type = other DNA
tccgcctccgccgccgccgc

SEQ ID NO: 53216 - DNA, 20 bp, synthetic construct
  source 1..20: mol_type = other DNA
tccctgggcaggtcgccgcg

SEQ ID NO: 53217 - DNA, 20 bp, synthetic construct
  source 1..20: mol_type = other DNA
cctgcagggtgtgtgtatgt

SEQ ID NO: 53218 - DNA, 20 bp, synthetic construct
  source 1..20: mol_type = other DNA
ctcctgaggccagggaggcc

SEQ ID NO: 53219 - DNA, 20 bp, synthetic construct
  source 1..20: mol_type = other DNA
tcccagcctgggctgaatcg

SEQ ID NO: 53220 - DNA, 20 bp, synthetic construct
  source 1..20: mol_type = other DNA
cctccccagcatcattgatg

SEQ ID NO: 53221 - DNA, 20 bp, synthetic construct
  source 1..20: mol_type = other DNA
tgagaaactgcacgagtggg

SEQ ID NO: 53222 - DNA, 20 bp, synthetic construct
  source 1..20: mol_type = other DNA
ccgcgagaacggcggtggtg

SEQ ID NO: 53223 - DNA, 20 bp, synthetic construct
  source 1..20: mol_type = other DNA
tggcactccgggctccggcg

SEQ ID NO: 53224 - DNA, 20 bp, synthetic construct
  source 1..20: mol_type = other DNA
ggtggcggtggcggtggtgg

SEQ ID NO: 53225 - DNA, 20 bp, synthetic construct
  source 1..20: mol_type = other DNA
ccttgggcttgtggttgggc

SEQ ID NO: 53226 - DNA, 20 bp, synthetic construct
  source 1..20: mol_type = other DNA
attggatggatatcagcata

SEQ ID NO: 53227 - DNA, 20 bp, synthetic construct
  source 1..20: mol_type = other DNA
gcggtcccggccccggcccc

SEQ ID NO: 53228 - DNA, 20 bp, synthetic construct
  source 1..20: mol_type = other DNA
tatgccagatgggaccttct

SEQ ID NO: 53229 - DNA, 20 bp, synthetic construct
  source 1..20: mol_type = other DNA
gatggagctgaaggaggagg

SEQ ID NO: 53230 - DNA, 20 bp, synthetic construct
  source 1..20: mol_type = other DNA
tacctgaatgggcggtgagg

SEQ ID NO: 53231 - DNA, 20 bp, synthetic construct
  source 1..20: mol_type = other DNA
acatttcacagtcctttccc

SEQ ID NO: 53232 - DNA, 20 bp, synthetic construct
  source 1..20: mol_type = other DNA
ggaatggactcctctcctca

SEQ ID NO: 53233 - DNA, 20 bp, synthetic construct
  source 1..20: mol_type = other DNA
agtttggccacatagttgct

SEQ ID NO: 53234 - DNA, 20 bp, synthetic construct
  source 1..20: mol_type = other DNA
aagatcctctaggttcttca

SEQ ID NO: 53235 - DNA, 20 bp, synthetic construct
  source 1..20: mol_type = other DNA
ggttctggggggcccagggg

SEQ ID NO: 53236 - DNA, 20 bp, synthetic construct
  source 1..20: mol_type = other DNA
tatgaggatttccttctgaa

SEQ ID NO: 53237 - DNA, 20 bp, synthetic construct
  source 1..20: mol_type = other DNA
tctgttcatatacaaagagc

SEQ ID NO: 53238 - DNA, 20 bp, synthetic construct
  source 1..20: mol_type = other DNA
tggggcgcggccacggcggg

SEQ ID NO: 53239 - DNA, 20 bp, synthetic construct
  source 1..20: mol_type = other DNA
gtttcctggggaaagagaga

SEQ ID NO: 53240 - DNA, 20 bp, synthetic construct
  source 1..20: mol_type = other DNA
tgctgacctgtttctggggc

SEQ ID NO: 53241 - DNA, 20 bp, synthetic construct
  source 1..20: mol_type = other DNA
taaacagcgaagctctttag

SEQ ID NO: 53242 - DNA, 20 bp, synthetic construct
  source 1..20: mol_type = other DNA
agagaagcccgtggcgccgc

SEQ ID NO: 53243 - DNA, 20 bp, synthetic construct
  source 1..20: mol_type = other DNA
caaaggtgggccggtcctct

SEQ ID NO: 53244 - DNA, 20 bp, synthetic construct
  source 1..20: mol_type = other DNA
gtccagacgcaggatggcat

SEQ ID NO: 53245 - DNA, 20 bp, synthetic construct
  source 1..20: mol_type = other DNA
cccgcggcggggcgctgcgg

SEQ ID NO: 53246 - DNA, 20 bp, synthetic construct
  source 1..20: mol_type = other DNA
atccactgtagtgcaggcat

SEQ ID NO: 53247 - DNA, 20 bp, synthetic construct
  source 1..20: mol_type = other DNA
agattcttacctgtaaatga

SEQ ID NO: 53248 - DNA, 20 bp, synthetic construct
  source 1..20: mol_type = other DNA
accattcccccaaggcctcg

SEQ ID NO: 53249 - DNA, 20 bp, synthetic construct
  source 1..20: mol_type = other DNA
ccccagagagctggagcggt

SEQ ID NO: 53250 - DNA, 20 bp, synthetic construct
  source 1..20: mol_type = other DNA
ccttttctaaggaaaatggc

SEQ ID NO: 53251 - DNA, 20 bp, synthetic construct
  source 1..20: mol_type = other DNA
actccagggctggcgtgcct

SEQ ID NO: 53252 - DNA, 20 bp, synthetic construct
  source 1..20: mol_type = other DNA
tcagcgtcctcctcctgagt

SEQ ID NO: 53253 - DNA, 20 bp, synthetic construct
  source 1..20: mol_type = other DNA
tacctgtttatgcacatctg

SEQ ID NO: 53254 - DNA, 20 bp, synthetic construct
  source 1..20: mol_type = other DNA
tccaaagctccaaacatctg

SEQ ID NO: 53255 - DNA, 20 bp, synthetic construct
  source 1..20: mol_type = other DNA
aggtgtttcaggaatactac

SEQ ID NO: 53256 - DNA, 20 bp, synthetic construct
  source 1..20: mol_type = other DNA
ggcggcgcgcgcagcagcag

SEQ ID NO: 53257 - DNA, 20 bp, synthetic construct
  source 1..20: mol_type = other DNA
gaccttgggaagaagaagcc

SEQ ID NO: 53258 - DNA, 20 bp, synthetic construct
  source 1..20: mol_type = other DNA
gctgcagggaatgggagaga

SEQ ID NO: 53259 - DNA, 20 bp, synthetic construct
  source 1..20: mol_type = other DNA
cctcacgggccaccaggcgc

SEQ ID NO: 53260 - DNA, 20 bp, synthetic construct
  source 1..20: mol_type = other DNA
tagcggtcatgtcaatggtt

SEQ ID NO: 53261 - DNA, 20 bp, synthetic construct
  source 1..20: mol_type = other DNA
agtccagctgccaggtgcag

SEQ ID NO: 53262 - DNA, 20 bp, synthetic construct
  source 1..20: mol_type = other DNA
gggcctggatgcctacgacc

SEQ ID NO: 53263 - DNA, 20 bp, synthetic construct
  source 1..20: mol_type = other DNA
cgggactgaagcccagggtg

SEQ ID NO: 53264 - DNA, 20 bp, synthetic construct
  source 1..20: mol_type = other DNA
ccttgttagcctccaagggt

SEQ ID NO: 53265 - DNA, 20 bp, synthetic construct
  source 1..20: mol_type = other DNA
gggctggtaaggctgagtgg

SEQ ID NO: 53266 - DNA, 20 bp, synthetic construct
  source 1..20: mol_type = other DNA
gggcctgtccctggtggagc

SEQ ID NO: 53267 - DNA, 20 bp, synthetic construct
  source 1..20: mol_type = other DNA
gtctctacacagtactgaaa

SEQ ID NO: 53268 - DNA, 20 bp, synthetic construct
  source 1..20: mol_type = other DNA
tgagggccaccagctgctgc

SEQ ID NO: 53269 - DNA, 20 bp, synthetic construct
  source 1..20: mol_type = other DNA
gaggatttccttctgaaggg

SEQ ID NO: 53270 - DNA, 20 bp, synthetic construct
  source 1..20: mol_type = other DNA
tcacagggtcctccaggtag

SEQ ID NO: 53271 - DNA, 20 bp, synthetic construct
  source 1..20: mol_type = other DNA
ccctctacagcctcctgctc

SEQ ID NO: 53272 - DNA, 20 bp, synthetic construct
  source 1..20: mol_type = other DNA
gggatgctgcagaggcccgg

SEQ ID NO: 53273 - DNA, 20 bp, synthetic construct
  source 1..20: mol_type = other DNA
tcggcctagcagtgctttgg

SEQ ID NO: 53274 - DNA, 20 bp, synthetic construct
  source 1..20: mol_type = other DNA
gatcatttacagctgtctga

SEQ ID NO: 53275 - DNA, 20 bp, synthetic construct
  source 1..20: mol_type = other DNA
tgcaactctccgtacatcgt

SEQ ID NO: 53276 - DNA, 20 bp, synthetic construct
  source 1..20: mol_type = other DNA
gttaaccagcaggacgttgc

SEQ ID NO: 53277 - DNA, 20 bp, synthetic construct
  source 1..20: mol_type = other DNA
cccaatgaaagagaggcgtc

SEQ ID NO: 53278 - DNA, 20 bp, synthetic construct
  source 1..20: mol_type = other DNA
gtccacgacgtccatccctg

SEQ ID NO: 53279 - DNA, 20 bp, synthetic construct
  source 1..20: mol_type = other DNA
gtgttctcgtgcctctccca

SEQ ID NO: 53280 - DNA, 20 bp, synthetic construct
  source 1..20: mol_type = other DNA
gagagcagccaggggaaggg

SEQ ID NO: 53281 - DNA, 20 bp, synthetic construct
  source 1..20: mol_type = other DNA
ggtccagcaggccatgatgg

SEQ ID NO: 53282 - DNA, 20 bp, synthetic construct
  source 1..20: mol_type = other DNA
agtagcatgtcagccaggat

SEQ ID NO: 53283 - DNA, 20 bp, synthetic construct
  source 1..20: mol_type = other DNA
ggtcaacggggcaggcatgg

SEQ ID NO: 53284 - DNA, 20 bp, synthetic construct
  source 1..20: mol_type = other DNA
agaggccgcggcgccggcgc

SEQ ID NO: 53285 - DNA, 20 bp, synthetic construct
  source 1..20: mol_type = other DNA
tatttggatacagatacttc

SEQ ID NO: 53286 - DNA, 20 bp, synthetic construct
  source 1..20: mol_type = other DNA
ggggctggaggaggaagaag

SEQ ID NO: 53287 - DNA, 20 bp, synthetic construct
  source 1..20: mol_type = other DNA
tgcacctctggatggtccag

SEQ ID NO: 53288 - DNA, 20 bp, synthetic construct
  source 1..20: mol_type = other DNA
ctccatcatgaagtgtgacg

SEQ ID NO: 53289 - DNA, 20 bp, synthetic construct
  source 1..20: mol_type = other DNA
gaccagccttcagaaggagg

SEQ ID NO: 53290 - DNA, 20 bp, synthetic construct
  source 1..20: mol_type = other DNA
tcaggtttttatccagattg

SEQ ID NO: 53291 - DNA, 20 bp, synthetic construct
  source 1..20: mol_type = other DNA
cctaaaaccatggaggaggg

SEQ ID NO: 53292 - DNA, 20 bp, synthetic construct
  source 1..20: mol_type = other DNA
gcagcttcctactagtggat

SEQ ID NO: 53293 - DNA, 20 bp, synthetic construct
  source 1..20: mol_type = other DNA
cactaacctttgggttttgg

SEQ ID NO: 53294 - DNA, 20 bp, synthetic construct
  source 1..20: mol_type = other DNA
gccaatgtttcatatcagac

SEQ ID NO: 53295 - DNA, 20 bp, synthetic construct
  source 1..20: mol_type = other DNA
aattcttatggaatatgaag

SEQ ID NO: 53296 - DNA, 20 bp, synthetic construct
  source 1..20: mol_type = other DNA
aacatgagaaaataccgaat

SEQ ID NO: 53297 - DNA, 20 bp, synthetic construct
  source 1..20: mol_type = other DNA
gggtccacgacgtccatccc

SEQ ID NO: 53298 - DNA, 20 bp, synthetic construct
  source 1..20: mol_type = other DNA
caatgactatggccgggccg

SEQ ID NO: 53299 - DNA, 20 bp, synthetic construct
  source 1..20: mol_type = other DNA
acgagggtcctgggagcatg

SEQ ID NO: 53300 - DNA, 20 bp, synthetic construct
  source 1..20: mol_type = other DNA
gctggttggtcggagagggg

SEQ ID NO: 53301 - DNA, 20 bp, synthetic construct
  source 1..20: mol_type = other DNA
tgctgcagccaagcaccatg

SEQ ID NO: 53302 - DNA, 20 bp, synthetic construct
  source 1..20: mol_type = other DNA
agcagcagcagcagcagcaa

SEQ ID NO: 53303 - DNA, 20 bp, synthetic construct
  source 1..20: mol_type = other DNA
aacatcctcatcaatgatgc

SEQ ID NO: 53304 - DNA, 20 bp, synthetic construct
  source 1..20: mol_type = other DNA
caacatgccagggaaggcct

SEQ ID NO: 53305 - DNA, 20 bp, synthetic construct
  source 1..20: mol_type = other DNA
ccaacctctggggtgatacc

SEQ ID NO: 53306 - DNA, 20 bp, synthetic construct
  source 1..20: mol_type = other DNA
caggtgggtcttgagattgc

SEQ ID NO: 53307 - DNA, 20 bp, synthetic construct
  source 1..20: mol_type = other DNA
tcggtatctgggtaggagag

SEQ ID NO: 53308 - DNA, 20 bp, synthetic construct
  source 1..20: mol_type = other DNA
caaagtcagctggaagcaga

SEQ ID NO: 53309 - DNA, 20 bp, synthetic construct
  source 1..20: mol_type = other DNA
ggaggaggaggaagtagagg

SEQ ID NO: 53310 - DNA, 20 bp, synthetic construct
  source 1..20: mol_type = other DNA
cagacacatagaggcgatag

SEQ ID NO: 53311 - DNA, 20 bp, synthetic construct
  source 1..20: mol_type = other DNA
gaagaatcctcaggctgtgc

SEQ ID NO: 53312 - DNA, 20 bp, synthetic construct
  source 1..20: mol_type = other DNA
ggcagccttgacataaatga

SEQ ID NO: 53313 - DNA, 20 bp, synthetic construct
  source 1..20: mol_type = other DNA
cttgagggagaagaccccag

SEQ ID NO: 53314 - DNA, 20 bp, synthetic construct
  source 1..20: mol_type = other DNA
aggcctcccagggaccgtaa

SEQ ID NO: 53315 - DNA, 20 bp, synthetic construct
  source 1..20: mol_type = other DNA
ctcctaccagttctccatgg

SEQ ID NO: 53316 - DNA, 20 bp, synthetic construct
  source 1..20: mol_type = other DNA
gtttcaccaggaggagctgc

SEQ ID NO: 53317 - DNA, 20 bp, synthetic construct
  source 1..20: mol_type = other DNA
gtctgccgtcgccgccgccg

SEQ ID NO: 53318 - DNA, 20 bp, synthetic construct
  source 1..20: mol_type = other DNA
cacactggattcccaggttc

SEQ ID NO: 53319 - DNA, 20 bp, synthetic construct
  source 1..20: mol_type = other DNA
ttctccagggataggatgac

SEQ ID NO: 53320 - DNA, 20 bp, synthetic construct
  source 1..20: mol_type = other DNA
tgtccttccacgtcttatgc

SEQ ID NO: 53321 - DNA, 20 bp, synthetic construct
  source 1..20: mol_type = other DNA
tggagttgaaggtggtctcg

SEQ ID NO: 53322 - DNA, 20 bp, synthetic construct
  source 1..20: mol_type = other DNA
ccgttgagctggcgctcgat

SEQ ID NO: 53323 - DNA, 20 bp, synthetic construct
  source 1..20: mol_type = other DNA
aaccccctgcagagtggtgg

SEQ ID NO: 53324 - DNA, 20 bp, synthetic construct
  source 1..20: mol_type = other DNA
caggaagtgaaaagaaactc

SEQ ID NO: 53325 - DNA, 20 bp, synthetic construct
  source 1..20: mol_type = other DNA
gccatttctggcttatggtt

SEQ ID NO: 53326 - DNA, 20 bp, synthetic construct
  source 1..20: mol_type = other DNA
actcacagaagaagatacac

SEQ ID NO: 53327 - DNA, 20 bp, synthetic construct
  source 1..20: mol_type = other DNA
agtcgcctatggggagaagg

SEQ ID NO: 53328 - DNA, 20 bp, synthetic construct
  source 1..20: mol_type = other DNA
gaggacggcgggggacgggc

SEQ ID NO: 53329 - DNA, 20 bp, synthetic construct
  source 1..20: mol_type = other DNA
taaaagattatccacctggg

SEQ ID NO: 53330 - DNA, 20 bp, synthetic construct
  source 1..20: mol_type = other DNA
cacaggaggagctgcaggac

SEQ ID NO: 53331 - DNA, 20 bp, synthetic construct
  source 1..20: mol_type = other DNA
aataacatattcagcaatgc

SEQ ID NO: 53332 - DNA, 20 bp, synthetic construct
  source 1..20: mol_type = other DNA
agcctgcaggaggaggtagg

SEQ ID NO: 53333 - DNA, 20 bp, synthetic construct
  source 1..20: mol_type = other DNA
gctggagacacccacttggg

SEQ ID NO: 53334 - DNA, 20 bp, synthetic construct
  source 1..20: mol_type = other DNA
ggtaccttgccagtaggcgg

SEQ ID NO: 53335 - DNA, 20 bp, synthetic construct
  source 1..20: mol_type = other DNA
gaagcccagtccactactac

SEQ ID NO: 53336 - DNA, 20 bp, synthetic construct
  source 1..20: mol_type = other DNA
ctcagccttggtttccggga

SEQ ID NO: 53337 - DNA, 20 bp, synthetic construct
  source 1..20: mol_type = other DNA
aaatatgtgtctctcatgtt

SEQ ID NO: 53338 - DNA, 20 bp, synthetic construct
  source 1..20: mol_type = other DNA
ctagcctgcagagcagtgtt

SEQ ID NO: 53339 - DNA, 20 bp, synthetic construct
  source 1..20: mol_type = other DNA
gagctgcccgctgtgtgcat

SEQ ID NO: 53340 - DNA, 20 bp, synthetic construct
  source 1..20: mol_type = other DNA
gatgcacttgtgcatgcggc

SEQ ID NO: 53341 - DNA, 20 bp, synthetic construct
  source 1..20: mol_type = other DNA
ctcacagaagaagatacaca

SEQ ID NO: 53342 - DNA, 20 bp, synthetic construct
  source 1..20: mol_type = other DNA
cgggcagccccgggcggcgg

SEQ ID NO: 53343 - DNA, 20 bp, synthetic construct
  source 1..20: mol_type = other DNA
gtcccattgtggtgcactgc

SEQ ID NO: 53344 - DNA, 20 bp, synthetic construct
  source 1..20: mol_type = other DNA
ctctcaggtaggcaggcgtg

SEQ ID NO: 53345 - DNA, 20 bp, synthetic construct
  source 1..20: mol_type = other DNA
caccagcttccggtaccctg

SEQ ID NO: 53346 - DNA, 20 bp, synthetic construct
  source 1..20: mol_type = other DNA
gtaccactgaagcaggacaa

SEQ ID NO: 53347 - DNA, 20 bp, synthetic construct
  source 1..20: mol_type = other DNA
cttagaagataaactttatg

SEQ ID NO: 53348 - DNA, 20 bp, synthetic construct
  source 1..20: mol_type = other DNA
tgcggggcctggaggcggag

SEQ ID NO: 53349 - DNA, 20 bp, synthetic construct
  source 1..20: mol_type = other DNA
cccaggacccaggccggcgc

SEQ ID NO: 53350 - DNA, 20 bp, synthetic construct
  source 1..20: mol_type = other DNA
tccaggacaccaaaggctgc

SEQ ID NO: 53351 - DNA, 20 bp, synthetic construct
  source 1..20: mol_type = other DNA
tgatgtattcacctgaaatg

SEQ ID NO: 53352 - DNA, 20 bp, synthetic construct
  source 1..20: mol_type = other DNA
ggagatgctgcagcgaggta

SEQ ID NO: 53353 - DNA, 20 bp, synthetic construct
  source 1..20: mol_type = other DNA
cggagctcctgggcaaggtg

SEQ ID NO: 53354 - DNA, 20 bp, synthetic construct
  source 1..20: mol_type = other DNA
tgccctcatccgcttcttgg

SEQ ID NO: 53355 - DNA, 20 bp, synthetic construct
  source 1..20: mol_type = other DNA
gaataagctgagcttataac

SEQ ID NO: 53356 - DNA, 20 bp, synthetic construct
  source 1..20: mol_type = other DNA
ggctcgagacaaggtgtcag

SEQ ID NO: 53357 - DNA, 20 bp, synthetic construct
  source 1..20: mol_type = other DNA
agaaatgaggaagtttcgga

SEQ ID NO: 53358 - DNA, 20 bp, synthetic construct
  source 1..20: mol_type = other DNA
tccagattagctatgtctgc

SEQ ID NO: 53359 - DNA, 20 bp, synthetic construct
  source 1..20: mol_type = other DNA
ctgcactccatgcttccaga

SEQ ID NO: 53360 - DNA, 20 bp, synthetic construct
  source 1..20: mol_type = other DNA
gttcttcctggagaataggt

SEQ ID NO: 53361 - DNA, 20 bp, synthetic construct
  source 1..20: mol_type = other DNA
gcggtcgatctccacccgct

SEQ ID NO: 53362 - DNA, 20 bp, synthetic construct
  source 1..20: mol_type = other DNA
gataaaacatatttcgtata

SEQ ID NO: 53363 - DNA, 20 bp, synthetic construct
  source 1..20: mol_type = other DNA
gcacctgaagagatgccagc

SEQ ID NO: 53364 - DNA, 20 bp, synthetic construct
  source 1..20: mol_type = other DNA
tccttgttagcctccaaggg

SEQ ID NO: 53365 - DNA, 20 bp, synthetic construct
  source 1..20: mol_type = other DNA
gtaagtaaagtacacctggc

SEQ ID NO: 53366 - DNA, 20 bp, synthetic construct
  source 1..20: mol_type = other DNA
ctggatgccatgagggtgag

SEQ ID NO: 53367 - DNA, 20 bp, synthetic construct
  source 1..20: mol_type = other DNA
cctgcagcggggagcgctcg

SEQ ID NO: 53368 - DNA, 20 bp, synthetic construct
  source 1..20: mol_type = other DNA
catgggagactttggccacg

SEQ ID NO: 53369 - DNA, 20 bp, synthetic construct
  source 1..20: mol_type = other DNA
gcggcggcggcagcagcagg

SEQ ID NO: 53370 - DNA, 20 bp, synthetic construct
  source 1..20: mol_type = other DNA
atccaggactgtatgtggag

SEQ ID NO: 53371 - DNA, 20 bp, synthetic construct
  source 1..20: mol_type = other DNA
agcacatgtggaggcccaag

SEQ ID NO: 53372 - DNA, 20 bp, synthetic construct
  source 1..20: mol_type = other DNA
gggcttctggccgtaggaca

SEQ ID NO: 53373 - DNA, 20 bp, synthetic construct
  source 1..20: mol_type = other DNA
gcgatggtgggcgccggtgt

SEQ ID NO: 53374 - DNA, 20 bp, synthetic construct
  source 1..20: mol_type = other DNA
ccggggctcaggaaggtccc

SEQ ID NO: 53375 - DNA, 20 bp, synthetic construct
  source 1..20: mol_type = other DNA
atccttgttgaaggcggctg

SEQ ID NO: 53376 - DNA, 20 bp, synthetic construct
  source 1..20: mol_type = other DNA
tagttcccaggcctcggggc

SEQ ID NO: 53377 - DNA, 20 bp, synthetic construct
  source 1..20: mol_type = other DNA
gggccccccggtagcgccca

SEQ ID NO: 53378 - DNA, 20 bp, synthetic construct
  source 1..20: mol_type = other DNA
gggcgtctggggatgaaagc

SEQ ID NO: 53379 - DNA, 20 bp, synthetic construct
  source 1..20: mol_type = other DNA
ctggaccaactcagccaaag

SEQ ID NO: 53380 - DNA, 20 bp, synthetic construct
  source 1..20: mol_type = other DNA
cacatccctccaccaagggt

SEQ ID NO: 53381 - DNA, 20 bp, synthetic construct
  source 1..20: mol_type = other DNA
gggcgcacaggaacctatat

SEQ ID NO: 53382 - DNA, 20 bp, synthetic construct
  source 1..20: mol_type = other DNA
gaagtgctccaggtaaggag

SEQ ID NO: 53383 - DNA, 20 bp, synthetic construct
  source 1..20: mol_type = other DNA
ctgtgtgtctccgatgcatg

SEQ ID NO: 53384 - DNA, 20 bp, synthetic construct
  source 1..20: mol_type = other DNA
gcggcgtgtggaggagctcc

SEQ ID NO: 53385 - DNA, 20 bp, synthetic construct
  source 1..20: mol_type = other DNA
gcacaggccatcagcgccag

SEQ ID NO: 53386 - DNA, 20 bp, synthetic construct
  source 1..20: mol_type = other DNA
gggacagcgccacctgctga

SEQ ID NO: 53387 - DNA, 20 bp, synthetic construct
  source 1..20: mol_type = other DNA
gcggccccagctggggccgt

SEQ ID NO: 53388 - DNA, 20 bp, synthetic construct
  source 1..20: mol_type = other DNA
ggtagaggaagatatggtga

SEQ ID NO: 53389 - DNA, 20 bp, synthetic construct
  source 1..20: mol_type = other DNA
ctcgaacatggacgtcaggt

SEQ ID NO: 53390 - DNA, 20 bp, synthetic construct
  source 1..20: mol_type = other DNA
tcatacttgctttccagggg

SEQ ID NO: 53391 - DNA, 20 bp, synthetic construct
  source 1..20: mol_type = other DNA
gatggagtaccaccaagcca

SEQ ID NO: 53392 - DNA, 20 bp, synthetic construct
  source 1..20: mol_type = other DNA
tgaaggggaagaagctcggg

SEQ ID NO: 53393 - DNA, 20 bp, synthetic construct
  source 1..20: mol_type = other DNA
tctaacttcagatccctgca

SEQ ID NO: 53394 - DNA, 20 bp, synthetic construct
  source 1..20: mol_type = other DNA
acagtacctggaggagaagg

SEQ ID NO: 53395 - DNA, 20 bp, synthetic construct
  source 1..20: mol_type = other DNA
tatttctcagccttggtttc

SEQ ID NO: 53396 - DNA, 20 bp, synthetic construct
  source 1..20: mol_type = other DNA
gatctaggcagatgttgggc

SEQ ID NO: 53397 - DNA, 20 bp, synthetic construct
  source 1..20: mol_type = other DNA
acctgggggagccaagcaga

SEQ ID NO: 53398 - DNA, 20 bp, synthetic construct
  source 1..20: mol_type = other DNA
tgcggccagcacagcccggt

SEQ ID NO: 53399 - DNA, 20 bp, synthetic construct
  source 1..20: mol_type = other DNA
actacgggagcgcggccgag

SEQ ID NO: 53400 - DNA, 20 bp, synthetic construct
  source 1..20: mol_type = other DNA
atacctctacttgaaccatc

SEQ ID NO: 53401 - DNA, 20 bp, synthetic construct
  source 1..20: mol_type = other DNA
cccctgctgtgagtgctggg

SEQ ID NO: 53402 - DNA, 20 bp, synthetic construct
  source 1..20: mol_type = other DNA
aggctgccgggcgtgctgtg

SEQ ID NO: 53403 - DNA, 20 bp, synthetic construct
  source 1..20: mol_type = other DNA
gtacatctcaccaccacctg

SEQ ID NO: 53404 - DNA, 20 bp, synthetic construct
  source 1..20: mol_type = other DNA
ccaatgcaccgcacaggaac

SEQ ID NO: 53405 - DNA, 20 bp, synthetic construct
  source 1..20: mol_type = other DNA
attactatcactaatgacaa

SEQ ID NO: 53406 - DNA, 20 bp, synthetic construct
  source 1..20: mol_type = other DNA
caaccagtgttggggaagga

SEQ ID NO: 53407 - DNA, 20 bp, synthetic construct
  source 1..20: mol_type = other DNA
agaggaagagaatctgcttc

SEQ ID NO: 53408 - DNA, 20 bp, synthetic construct
  source 1..20: mol_type = other DNA
tgttacactcgaaagggtca

SEQ ID NO: 53409 - DNA, 20 bp, synthetic construct
  source 1..20: mol_type = other DNA
cctgaggctgggggtgcccg

SEQ ID NO: 53410 - DNA, 20 bp, synthetic construct
  source 1..20: mol_type = other DNA
cgatctaggcagatgttggg

SEQ ID NO: 53411 - DNA, 20 bp, synthetic construct
  source 1..20: mol_type = other DNA
ctggtctggaggcacagaca

SEQ ID NO: 53412 - DNA, 20 bp, synthetic construct
  source 1..20: mol_type = other DNA
gttcaaatttcacagcctaa

SEQ ID NO: 53413 - DNA, 20 bp, synthetic construct
  source 1..20: mol_type = other DNA
gactccaaagtcaggccatg

SEQ ID NO: 53414 - DNA, 20 bp, synthetic construct
  source 1..20: mol_type = other DNA
cgacatgggcaaggtacgag

SEQ ID NO: 53415 - DNA, 20 bp, synthetic construct
  source 1..20: mol_type = other DNA
gacctgctacagcggctggg

SEQ ID NO: 53416 - DNA, 20 bp, synthetic construct
  source 1..20: mol_type = other DNA
gcctacctgtgtagccagct

SEQ ID NO: 53417 - DNA, 20 bp, synthetic construct
  source 1..20: mol_type = other DNA
tacacccacgtagtccggct

SEQ ID NO: 53418 - DNA, 20 bp, synthetic construct
  source 1..20: mol_type = other DNA
ttctgcaagaggcaaagcag

SEQ ID NO: 53419 - DNA, 20 bp, synthetic construct
  source 1..20: mol_type = other DNA
ccgaagccgtaggctggggg

SEQ ID NO: 53420 - DNA, 20 bp, synthetic construct
  source 1..20: mol_type = other DNA
tgggccaagggccaaggaag

SEQ ID NO: 53421 - DNA, 20 bp, synthetic construct
  source 1..20: mol_type = other DNA
cggggagcgggaggaggagc

SEQ ID NO: 53422 - DNA, 20 bp, synthetic construct
  source 1..20: mol_type = other DNA
gcgactggagggtgaggccc

SEQ ID NO: 53423 - DNA, 20 bp, synthetic construct
  source 1..20: mol_type = other DNA
ccccatgaccgaagcggtgg

SEQ ID NO: 53424 - DNA, 20 bp, synthetic construct
  source 1..20: mol_type = other DNA
atatagaatttgatcttttc

SEQ ID NO: 53425 - DNA, 20 bp, synthetic construct
  source 1..20: mol_type = other DNA
cgcgcacgcggtagtactcg

SEQ ID NO: 53426 - DNA, 20 bp, synthetic construct
  source 1..20: mol_type = other DNA
aggagcaagtgaggatcctc

SEQ ID NO: 53427 - DNA, 20 bp, synthetic construct
  source 1..20: mol_type = other DNA
ggatgaggaggagcccaagg

SEQ ID NO: 53428 - DNA, 20 bp, synthetic construct
  source 1..20: mol_type = other DNA
agcccagagatgatgggcct

SEQ ID NO: 53429 - DNA, 20 bp, synthetic construct
  source 1..20: mol_type = other DNA
catacttgctttccaggggt

SEQ ID NO: 53430 - DNA, 20 bp, synthetic construct
  source 1..20: mol_type = other DNA
tctaaccttggtagatgtcc

SEQ ID NO: 53431 - DNA, 20 bp, synthetic construct
  source 1..20: mol_type = other DNA
gaaccttgaggctacagaga

SEQ ID NO: 53432 - DNA, 20 bp, synthetic construct
  source 1..20: mol_type = other DNA
acccaggctcagggcacctg

SEQ ID NO: 53433 - DNA, 20 bp, synthetic construct
  source 1..20: mol_type = other DNA
gcttcttctcctccaagccc

SEQ ID NO: 53434 - DNA, 20 bp, synthetic construct
  source 1..20: mol_type = other DNA
gctcacgccgatgcacacag

SEQ ID NO: 53435 - DNA, 20 bp, synthetic construct
  source 1..20: mol_type = other DNA
actccctgggaaaggaggga

SEQ ID NO: 53436 - DNA, 20 bp, synthetic construct
  source 1..20: mol_type = other DNA
cctccaccgcttcggtcatg

SEQ ID NO: 53437 - DNA, 20 bp, synthetic construct
  source 1..20: mol_type = other DNA
agagtccaccaggactggga

SEQ ID NO: 53438 - DNA, 20 bp, synthetic construct
  source 1..20: mol_type = other DNA
gccgccgccgcccccagcgc

SEQ ID NO: 53439 - DNA, 20 bp, synthetic construct
  source 1..20: mol_type = other DNA
ggccctcgccgaagcccggg

SEQ ID NO: 53440 - DNA, 20 bp, synthetic construct
  source 1..20: mol_type = other DNA
gggtggccatctgcctcggc

SEQ ID NO: 53441 - DNA, 20 bp, synthetic construct
  source 1..20: mol_type = other DNA
agtacatgatggagttgctc

SEQ ID NO: 53442 - DNA, 20 bp, synthetic construct
  source 1..20: mol_type = other DNA
tgtgttcataccagacacat

SEQ ID NO: 53443 - DNA, 20 bp, synthetic construct
  source 1..20: mol_type = other DNA
ccccggtggggcgctgaccc

SEQ ID NO: 53444 - DNA, 20 bp, synthetic construct
  source 1..20: mol_type = other DNA
caggatgatgggataggggg

SEQ ID NO: 53445 - DNA, 20 bp, synthetic construct
  source 1..20: mol_type = other DNA
ctcggatgcagccttctagc

SEQ ID NO: 53446 - DNA, 20 bp, synthetic construct
  source 1..20: mol_type = other DNA
gggtgcgctgggtgctccgc

SEQ ID NO: 53447 - DNA, 20 bp, synthetic construct
  source 1..20: mol_type = other DNA
tttaaaggatcccgtatata

SEQ ID NO: 53448 - DNA, 20 bp, synthetic construct
  source 1..20: mol_type = other DNA
caactgaaacgcaagcgagg

SEQ ID NO: 53449 - DNA, 20 bp, synthetic construct
  source 1..20: mol_type = other DNA
ataaggaaggagaggagaca

SEQ ID NO: 53450 - DNA, 20 bp, synthetic construct
  source 1..20: mol_type = other DNA
gtgtctatcgttattggtgt

SEQ ID NO: 53451 - DNA, 20 bp, synthetic construct
  source 1..20: mol_type = other DNA
ggcctccaccgcttcggtca

SEQ ID NO: 53452 - DNA, 20 bp, synthetic construct
  source 1..20: mol_type = other DNA
ctccatgtgccgccctaggg

SEQ ID NO: 53453 - DNA, 20 bp, synthetic construct
  source 1..20: mol_type = other DNA
agtgggccggggaggagggg

SEQ ID NO: 53454 - DNA, 20 bp, synthetic construct
  source 1..20: mol_type = other DNA
gtcatgttccagacctggct

SEQ ID NO: 53455 - DNA, 20 bp, synthetic construct
  source 1..20: mol_type = other DNA
ccggctaggaaagagctgca

SEQ ID NO: 53456 - DNA, 20 bp, synthetic construct
  source 1..20: mol_type = other DNA
gtaaatggccgcccagctcc

SEQ ID NO: 53457 - DNA, 20 bp, synthetic construct
  source 1..20: mol_type = other DNA
cggcacactctgtgcctgcg

SEQ ID NO: 53458 - DNA, 20 bp, synthetic construct
  source 1..20: mol_type = other DNA
gggctgtaggccagggagga

SEQ ID NO: 53459 - DNA, 20 bp, synthetic construct
  source 1..20: mol_type = other DNA
tcgtcccccctgccgctctg

SEQ ID NO: 53460 - DNA, 20 bp, synthetic construct
  source 1..20: mol_type = other DNA
taggaggggactgggagtcc

SEQ ID NO: 53461 - DNA, 20 bp, synthetic construct
  source 1..20: mol_type = other DNA
cctcctcatcctcgttgccc

SEQ ID NO: 53462 - DNA, 20 bp, synthetic construct
  source 1..20: mol_type = other DNA
ctctgtctttgagacagtgg

SEQ ID NO: 53463 - DNA, 20 bp, synthetic construct
  source 1..20: mol_type = other DNA
cctcctccaccgtgtcgctg

SEQ ID NO: 53464 - DNA, 20 bp, synthetic construct
  source 1..20: mol_type = other DNA
taaatctacaaatgtttatt

SEQ ID NO: 53465 - DNA, 20 bp, synthetic construct
  source 1..20: mol_type = other DNA
ctggggagaagggtggacaa

SEQ ID NO: 53466 - DNA, 20 bp, synthetic construct
  source 1..20: mol_type = other DNA
gccggcaagttttcaatatg

SEQ ID NO: 53467 - DNA, 20 bp, synthetic construct
  source 1..20: mol_type = other DNA
gctcacctcggcctcgccgc

SEQ ID NO: 53468 - DNA, 20 bp, synthetic construct
  source 1..20: mol_type = other DNA
cattgtctatgatattgctc

SEQ ID NO: 53469 - DNA, 20 bp, synthetic construct
  source 1..20: mol_type = other DNA
ggccaggaggtcctggcacc

SEQ ID NO: 53470 - DNA, 20 bp, synthetic construct
  source 1..20: mol_type = other DNA
gccgtgggtctgtgcaggga

SEQ ID NO: 53471 - DNA, 20 bp, synthetic construct
  source 1..20: mol_type = other DNA
cccgaacgctggggaaggac

SEQ ID NO: 53472 - DNA, 20 bp, synthetic construct
  source 1..20: mol_type = other DNA
cggctgggcaggttctccct

SEQ ID NO: 53473 - DNA, 20 bp, synthetic construct
  source 1..20: mol_type = other DNA
gcagtggtttgacggggtga

SEQ ID NO: 53474 - DNA, 20 bp, synthetic construct
  source 1..20: mol_type = other DNA
cttggtgaccagcagcagcc

SEQ ID NO: 53475 - DNA, 20 bp, synthetic construct
  source 1..20: mol_type = other DNA
tcaggaacatggtgaggacg

SEQ ID NO: 53476 - DNA, 20 bp, synthetic construct
  source 1..20: mol_type = other DNA
aggggccccatcacggggcc

SEQ ID NO: 53477 - DNA, 20 bp, synthetic construct
  source 1..20: mol_type = other DNA
ccggccggaggggcgagcag

SEQ ID NO: 53478 - DNA, 20 bp, synthetic construct
  source 1..20: mol_type = other DNA
gcccccgggcggttccgagg

SEQ ID NO: 53479 - DNA, 20 bp, synthetic construct
  source 1..20: mol_type = other DNA
ctttcctagccggactacgt

SEQ ID NO: 53480 - DNA, 20 bp, synthetic construct
  source 1..20: mol_type = other DNA
ccttctactgcgagcgccgc

SEQ ID NO: 53481 - DNA, 20 bp, synthetic construct
  source 1..20: mol_type = other DNA
tcaccatcttcagtgccacc

SEQ ID NO: 53482 - DNA, 20 bp, synthetic construct
  source 1..20: mol_type = other DNA
tcggagctggcggggggctg

SEQ ID NO: 53483 - DNA, 20 bp, synthetic construct
  source 1..20: mol_type = other DNA
gcagcaggaggcggcggcgg

SEQ ID NO: 53484 - DNA, 20 bp, synthetic construct
  source 1..20: mol_type = other DNA
tgtcgtattcttggaagagc

SEQ ID NO: 53485 - DNA, 20 bp, synthetic construct
  source 1..20: mol_type = other DNA
cgatgactgtggtccactgc

SEQ ID NO: 53486 - DNA, 20 bp, synthetic construct
  source 1..20: mol_type = other DNA
tggctttgtgggacacagct

SEQ ID NO: 53487 - DNA, 20 bp, synthetic construct
  source 1..20: mol_type = other DNA
cggcccggcgcgggcggcgg

SEQ ID NO: 53488 - DNA, 20 bp, synthetic construct
  source 1..20: mol_type = other DNA
gaacatgagaaaataccgaa

SEQ ID NO: 53489 - DNA, 20 bp, synthetic construct
  source 1..20: mol_type = other DNA
tgtgatctctgtagtggaga

SEQ ID NO: 53490 - DNA, 20 bp, synthetic construct
  source 1..20: mol_type = other DNA
tccatcttgggcagacctgg

SEQ ID NO: 53491 - DNA, 20 bp, synthetic construct
  source 1..20: mol_type = other DNA
ttctggcagaggggcccgga

SEQ ID NO: 53492 - DNA, 20 bp, synthetic construct
  source 1..20: mol_type = other DNA
ccaaggtacggcacggaggg

SEQ ID NO: 53493 - DNA, 20 bp, synthetic construct
  source 1..20: mol_type = other DNA
tgggcccagccaggcccact

SEQ ID NO: 53494 - DNA, 20 bp, synthetic construct
  source 1..20: mol_type = other DNA
aggaggactggaggaccctt

SEQ ID NO: 53495 - DNA, 20 bp, synthetic construct
  source 1..20: mol_type = other DNA
tgtaaatgatcatagacatc

SEQ ID NO: 53496 - DNA, 20 bp, synthetic construct
  source 1..20: mol_type = other DNA
tccggtgaggggtgtggcac

SEQ ID NO: 53497 - DNA, 20 bp, synthetic construct
  source 1..20: mol_type = other DNA
caattgtgtctggcactgac

SEQ ID NO: 53498 - DNA, 20 bp, synthetic construct
  source 1..20: mol_type = other DNA
atcaccagagataactccca

SEQ ID NO: 53499 - DNA, 20 bp, synthetic construct
  source 1..20: mol_type = other DNA
gcccccgcacctggtgcagg

SEQ ID NO: 53500 - DNA, 20 bp, synthetic construct
  source 1..20: mol_type = other DNA
tgccgacagacaaggcctgg

SEQ ID NO: 53501 - DNA, 20 bp, synthetic construct
  source 1..20: mol_type = other DNA
ctgctacagcggctgggtgg

SEQ ID NO: 53502 - DNA, 20 bp, synthetic construct
  source 1..20: mol_type = other DNA
ccagtccggcgcgggcccca

SEQ ID NO: 53503 - DNA, 20 bp, synthetic construct
  source 1..20: mol_type = other DNA
cggggccggggcgcgggcgg

SEQ ID NO: 53504 - DNA, 20 bp, synthetic construct
  source 1..20: mol_type = other DNA
ccagaccccaatccaaggta

SEQ ID NO: 53505 - DNA, 20 bp, synthetic construct
  source 1..20: mol_type = other DNA
tgtctgccgggaagtgctcc

SEQ ID NO: 53506 - DNA, 20 bp, synthetic construct
  source 1..20: mol_type = other DNA
cagtccggcgcgggccccat

SEQ ID NO: 53507 - DNA, 20 bp, synthetic construct
  source 1..20: mol_type = other DNA
actttctccttccaaatcaa

SEQ ID NO: 53508 - DNA, 20 bp, synthetic construct
  source 1..20: mol_type = other DNA
acagctttggtaaggagccg

SEQ ID NO: 53509 - DNA, 20 bp, synthetic construct
  source 1..20: mol_type = other DNA
atatgaggatttccttctga

SEQ ID NO: 53510 - DNA, 20 bp, synthetic construct
  source 1..20: mol_type = other DNA
ggcagccaacatggcggcgg

SEQ ID NO: 53511 - DNA, 20 bp, synthetic construct
  source 1..20: mol_type = other DNA
tcatcagcgtggaggacctg

SEQ ID NO: 53512 - DNA, 20 bp, synthetic construct
  source 1..20: mol_type = other DNA
cctccccgttgactgtgggc

SEQ ID NO: 53513 - DNA, 20 bp, synthetic construct
  source 1..20: mol_type = other DNA
tgagcgcgtcttctgagggc

SEQ ID NO: 53514 - DNA, 20 bp, synthetic construct
  source 1..20: mol_type = other DNA
atgagccagagagaaagctc

SEQ ID NO: 53515 - DNA, 20 bp, synthetic construct
  source 1..20: mol_type = other DNA
cgtcatgctcaacagagtga

SEQ ID NO: 53516 - DNA, 20 bp, synthetic construct
  source 1..20: mol_type = other DNA
tgcgaggaggctgtgagtcc

SEQ ID NO: 53517 - DNA, 20 bp, synthetic construct
  source 1..20: mol_type = other DNA
agaaaagtggtgaggggagt

SEQ ID NO: 53518 - DNA, 20 bp, synthetic construct
  source 1..20: mol_type = other DNA
gcaggtgaacacataggcct

SEQ ID NO: 53519 - DNA, 20 bp, synthetic construct
  source 1..20: mol_type = other DNA
tgaccctagggggcgagaga

SEQ ID NO: 53520 - DNA, 20 bp, synthetic construct
  source 1..20: mol_type = other DNA
atcagcgtcctcctcctgag

SEQ ID NO: 53521 - DNA, 20 bp, synthetic construct
  source 1..20: mol_type = other DNA
ggcttaatcaacctcttcaa

SEQ ID NO: 53522 - DNA, 20 bp, synthetic construct
  source 1..20: mol_type = other DNA
tactggtgagtggcgcccag

SEQ ID NO: 53523 - DNA, 20 bp, synthetic construct
  source 1..20: mol_type = other DNA
gcacctctggatggtccagt

SEQ ID NO: 53524 - DNA, 20 bp, synthetic construct
  source 1..20: mol_type = other DNA
tgcacgtcagctgacacttt

SEQ ID NO: 53525 - DNA, 20 bp, synthetic construct
  source 1..20: mol_type = other DNA
agaaggcatcctccactccc

SEQ ID NO: 53526 - DNA, 20 bp, synthetic construct
  source 1..20: mol_type = other DNA
cggaggaaccgtttcaagtg

SEQ ID NO: 53527 - DNA, 20 bp, synthetic construct
  source 1..20: mol_type = other DNA
actgcagtgcaggcatcggc

SEQ ID NO: 53528 - DNA, 20 bp, synthetic construct
  source 1..20: mol_type = other DNA
tatgcacagaatgaggtgta

SEQ ID NO: 53529 - DNA, 20 bp, synthetic construct
  source 1..20: mol_type = other DNA
ctcgggcgcagaagtcatag

SEQ ID NO: 53530 - DNA, 20 bp, synthetic construct
  source 1..20: mol_type = other DNA
aacagcttgggcggcgcggg

SEQ ID NO: 53531 - DNA, 20 bp, synthetic construct
  source 1..20: mol_type = other DNA
agtctagggtaagaagggaa

SEQ ID NO: 53532 - DNA, 20 bp, synthetic construct
  source 1..20: mol_type = other DNA
ccactactgcctgttgtctt

SEQ ID NO: 53533 - DNA, 20 bp, synthetic construct
  source 1..20: mol_type = other DNA
agtacatgaattatgagata

SEQ ID NO: 53534 - DNA, 20 bp, synthetic construct
  source 1..20: mol_type = other DNA
gaggtgtgcagagccctggg

SEQ ID NO: 53535 - DNA, 20 bp, synthetic construct
  source 1..20: mol_type = other DNA
tgtgtgtctccgatgcatga

SEQ ID NO: 53536 - DNA, 20 bp, synthetic construct
  source 1..20: mol_type = other DNA
tcacccatgcagggcaggga

SEQ ID NO: 53537 - DNA, 20 bp, synthetic construct
  source 1..20: mol_type = other DNA
cacgacagcagtctgcatct

SEQ ID NO: 53538 - DNA, 20 bp, synthetic construct
  source 1..20: mol_type = other DNA
ccaaagacaacaggcagtag

SEQ ID NO: 53539 - DNA, 20 bp, synthetic construct
  source 1..20: mol_type = other DNA
aactagaaaacatacaaaat

SEQ ID NO: 53540 - DNA, 20 bp, synthetic construct
  source 1..20: mol_type = other DNA
atggactacagcctgctggt

SEQ ID NO: 53541 - DNA, 20 bp, synthetic construct
  source 1..20: mol_type = other DNA
ccacgggcacccccagcctc

SEQ ID NO: 53542 - DNA, 20 bp, synthetic construct
  source 1..20: mol_type = other DNA
tgcctgactatctggaggac

SEQ ID NO: 53543 - DNA, 20 bp, synthetic construct
  source 1..20: mol_type = other DNA
tccaatgcaccgcacaggaa

SEQ ID NO: 53544 - DNA, 20 bp, synthetic construct
  source 1..20: mol_type = other DNA
tcctacgcggaggacgggag

SEQ ID NO: 53545 - DNA, 20 bp, synthetic construct
  source 1..20: mol_type = other DNA
tgtcctccagcacctgagga

SEQ ID NO: 53546 - DNA, 20 bp, synthetic construct
  source 1..20: mol_type = other DNA
ggagagcatgcccttgaggt

SEQ ID NO: 53547 - DNA, 20 bp, synthetic construct
  source 1..20: mol_type = other DNA
tcctcaggtcacaccccaag

SEQ ID NO: 53548 - DNA, 20 bp, synthetic construct
  source 1..20: mol_type = other DNA
aactctagaatagtagggaa

SEQ ID NO: 53549 - DNA, 20 bp, synthetic construct
  source 1..20: mol_type = other DNA
ctcttcaatggtgggccctg

SEQ ID NO: 53550 - DNA, 20 bp, synthetic construct
  source 1..20: mol_type = other DNA
aggttaaatgtgcacagtac

SEQ ID NO: 53551 - DNA, 20 bp, synthetic construct
  source 1..20: mol_type = other DNA
aagaaagagcaagaaggcaa

SEQ ID NO: 53552 - DNA, 20 bp, synthetic construct
  source 1..20: mol_type = other DNA
gctactttgtggattctgct

SEQ ID NO: 53553 - DNA, 20 bp, synthetic construct
  source 1..20: mol_type = other DNA
agccgatggtgtggaaggtg

SEQ ID NO: 53554 - DNA, 20 bp, synthetic construct
  source 1..20: mol_type = other DNA
cccggtgtcgacgctgatgc

SEQ ID NO: 53555 - DNA, 20 bp, synthetic construct
  source 1..20: mol_type = other DNA
tttgctcaggtaggaagttt

SEQ ID NO: 53556 - DNA, 20 bp, synthetic construct
  source 1..20: mol_type = other DNA
agtgctggaattggccggac

SEQ ID NO: 53557 - DNA, 20 bp, synthetic construct
  source 1..20: mol_type = other DNA
ttaaactccgggacggccgc

SEQ ID NO: 53558 - DNA, 20 bp, synthetic construct
  source 1..20: mol_type = other DNA
gtgtgggagcagaaaagcag

SEQ ID NO: 53559 - DNA, 20 bp, synthetic construct
  source 1..20: mol_type = other DNA
tgtgcgcctccctcttcctg

SEQ ID NO: 53560 - DNA, 20 bp, synthetic construct
  source 1..20: mol_type = other DNA
catcatcgtccatcagtttg

SEQ ID NO: 53561 - DNA, 20 bp, synthetic construct
  source 1..20: mol_type = other DNA
ctgatcgctgacggcggcgg

SEQ ID NO: 53562 - DNA, 20 bp, synthetic construct
  source 1..20: mol_type = other DNA
ctgaggctgaacagaactgg

SEQ ID NO: 53563 - DNA, 20 bp, synthetic construct
  source 1..20: mol_type = other DNA
agggggctccaggccgggca

SEQ ID NO: 53564 - DNA, 20 bp, synthetic construct
  source 1..20: mol_type = other DNA
actcagcgtggccgtggagg

SEQ ID NO: 53565 - DNA, 20 bp, synthetic construct
  source 1..20: mol_type = other DNA
aagtccaagctctactccat

SEQ ID NO: 53566 - DNA, 20 bp, synthetic construct
  source 1..20: mol_type = other DNA
atagtatgggtggcaagagg

SEQ ID NO: 53567 - DNA, 20 bp, synthetic construct
  source 1..20: mol_type = other DNA
accttaataaaattatatct

SEQ ID NO: 53568 - DNA, 20 bp, synthetic construct
  source 1..20: mol_type = other DNA
cagggccgagggcaccgggc

SEQ ID NO: 53569 - DNA, 20 bp, synthetic construct
  source 1..20: mol_type = other DNA
atttgcggtggacgatggag

SEQ ID NO: 53570 - DNA, 20 bp, synthetic construct
  source 1..20: mol_type = other DNA
ggcctggtgggggaaacagg

SEQ ID NO: 53571 - DNA, 20 bp, synthetic construct
  source 1..20: mol_type = other DNA
gggtgcacatcaaagagcgg

SEQ ID NO: 53572 - DNA, 20 bp, synthetic construct
  source 1..20: mol_type = other DNA
ttccaaatggtaacgttcat

SEQ ID NO: 53573 - DNA, 20 bp, synthetic construct
  source 1..20: mol_type = other DNA
gtggcgccgcaggatggtgt

SEQ ID NO: 53574 - DNA, 20 bp, synthetic construct
  source 1..20: mol_type = other DNA
gagggcggagaactgggacg

SEQ ID NO: 53575 - DNA, 20 bp, synthetic construct
  source 1..20: mol_type = other DNA
atgcctgatggttcaagtag

SEQ ID NO: 53576 - DNA, 20 bp, synthetic construct
  source 1..20: mol_type = other DNA
cccatgacgtttggaccccg

SEQ ID NO: 53577 - DNA, 20 bp, synthetic construct
  source 1..20: mol_type = other DNA
ggccccggcggcggcggcgg

SEQ ID NO: 53578 - DNA, 20 bp, synthetic construct
  source 1..20: mol_type = other DNA
tcatagcatccttggcctgc

SEQ ID NO: 53579 - DNA, 20 bp, synthetic construct
  source 1..20: mol_type = other DNA
atgcggctgagaccccaccc

SEQ ID NO: 53580 - DNA, 20 bp, synthetic construct
  source 1..20: mol_type = other DNA
tggcatgttttgctgggcat

SEQ ID NO: 53581 - DNA, 20 bp, synthetic construct
  source 1..20: mol_type = other DNA
tggtacacttgctgacggtg

SEQ ID NO: 53582 - DNA, 20 bp, synthetic construct
  source 1..20: mol_type = other DNA
cattgataattcccactcaa

SEQ ID NO: 53583 - DNA, 20 bp, synthetic construct
  source 1..20: mol_type = other DNA
gctgccctgctcctgggtgc

SEQ ID NO: 53584 - DNA, 20 bp, synthetic construct
  source 1..20: mol_type = other DNA
agacaggagagagcaggggc

SEQ ID NO: 53585 - DNA, 20 bp, synthetic construct
  source 1..20: mol_type = other DNA
aggctgcgaagtcgcgtggt

SEQ ID NO: 53586 - DNA, 20 bp, synthetic construct
  source 1..20: mol_type = other DNA
ctggtccccggtcaggtacc

SEQ ID NO: 53587 - DNA, 20 bp, synthetic construct
  source 1..20: mol_type = other DNA
gttctcagagagccaacaac

SEQ ID NO: 53588 - DNA, 20 bp, synthetic construct
  source 1..20: mol_type = other DNA
gcaggagctggagctgctgc

SEQ ID NO: 53589 - DNA, 20 bp, synthetic construct
  source 1..20: mol_type = other DNA
cgcaagtactcggtgtggat

SEQ ID NO: 53590 - DNA, 20 bp, synthetic construct
  source 1..20: mol_type = other DNA
gaatagttgtcaaacctgtg

SEQ ID NO: 53591 - DNA, 20 bp, synthetic construct
  source 1..20: mol_type = other DNA
agcgtgcctggcgttcctcg

SEQ ID NO: 53592 - DNA, 20 bp, synthetic construct
  source 1..20: mol_type = other DNA
gctttggggtcagagttcct

SEQ ID NO: 53593 - DNA, 20 bp, synthetic construct
  source 1..20: mol_type = other DNA
tccttacctggagcacttcc

SEQ ID NO: 53594 - DNA, 20 bp, synthetic construct
  source 1..20: mol_type = other DNA
atcgaggaccaaggtgccca

SEQ ID NO: 53595 - DNA, 20 bp, synthetic construct
  source 1..20: mol_type = other DNA
ccatgcccaccaccatcgag

SEQ ID NO: 53596 - DNA, 20 bp, synthetic construct
  source 1..20: mol_type = other DNA
ccaccgcgacggcgtcgggg

SEQ ID NO: 53597 - DNA, 20 bp, synthetic construct
  source 1..20: mol_type = other DNA
ccgtgcgcatgttgatgtcc

SEQ ID NO: 53598 - DNA, 20 bp, synthetic construct
  source 1..20: mol_type = other DNA
gtagtcaggtgtcccacaga

SEQ ID NO: 53599 - DNA, 20 bp, synthetic construct
  source 1..20: mol_type = other DNA
ggatttcattaataatatct

SEQ ID NO: 53600 - DNA, 20 bp, synthetic construct
  source 1..20: mol_type = other DNA
gtggctggtgggctccagcc

SEQ ID NO: 53601 - DNA, 20 bp, synthetic construct
  source 1..20: mol_type = other DNA
gcagcctatcgctcctgaca

SEQ ID NO: 53602 - DNA, 20 bp, synthetic construct
  source 1..20: mol_type = other DNA
aagctgttggaggccgtgga

SEQ ID NO: 53603 - DNA, 20 bp, synthetic construct
  source 1..20: mol_type = other DNA
ggggtgctattggggcctcc

SEQ ID NO: 53604 - DNA, 20 bp, synthetic construct
  source 1..20: mol_type = other DNA
caggacaggggccaggaggt

SEQ ID NO: 53605 - DNA, 20 bp, synthetic construct
  source 1..20: mol_type = other DNA
tcacgtttctgaatacctgt

SEQ ID NO: 53606 - DNA, 20 bp, synthetic construct
  source 1..20: mol_type = other DNA
cactgcaggtgcgtgggatt

SEQ ID NO: 53607 - DNA, 20 bp, synthetic construct
  source 1..20: mol_type = other DNA
acaggcattgcaaacacact

SEQ ID NO: 53608 - DNA, 20 bp, synthetic construct
  source 1..20: mol_type = other DNA
aggtgccaaattcatcatgg

SEQ ID NO: 53609 - DNA, 20 bp, synthetic construct
  source 1..20: mol_type = other DNA
taatacagctggggacgacc

SEQ ID NO: 53610 - DNA, 20 bp, synthetic construct
  source 1..20: mol_type = other DNA
tgcggcccagcatcagctct

SEQ ID NO: 53611 - DNA, 20 bp, synthetic construct
  source 1..20: mol_type = other DNA
gaatgcatctgcagatgctg

SEQ ID NO: 53612 - DNA, 20 bp, synthetic construct
  source 1..20: mol_type = other DNA
taccccctgctatccctcgg

SEQ ID NO: 53613 - DNA, 20 bp, synthetic construct
  source 1..20: mol_type = other DNA
ccagacgcaggatggcatgg

SEQ ID NO: 53614 - DNA, 20 bp, synthetic construct
  source 1..20: mol_type = other DNA
acagtcctggtaatggtgtg

SEQ ID NO: 53615 - DNA, 20 bp, synthetic construct
  source 1..20: mol_type = other DNA
cttaaacctgaagggagaca

SEQ ID NO: 53616 - DNA, 20 bp, synthetic construct
  source 1..20: mol_type = other DNA
tttgtccatgtgattcagca

SEQ ID NO: 53617 - DNA, 20 bp, synthetic construct
  source 1..20: mol_type = other DNA
ttttctatggggagaggatg

SEQ ID NO: 53618 - DNA, 20 bp, synthetic construct
  source 1..20: mol_type = other DNA
cgaggatgaggaggagccca

SEQ ID NO: 53619 - DNA, 20 bp, synthetic construct
  source 1..20: mol_type = other DNA
tgtgtattaactaaaacaaa

SEQ ID NO: 53620 - DNA, 20 bp, synthetic construct
  source 1..20: mol_type = other DNA
gtccagacgcaggatggcgt

SEQ ID NO: 53621 - DNA, 20 bp, synthetic construct
  source 1..20: mol_type = other DNA
tcgccacccaggcatgccca

SEQ ID NO: 53622 - DNA, 20 bp, synthetic construct
  source 1..20: mol_type = other DNA
tggcatctcggcccagattg

SEQ ID NO: 53623 - DNA, 20 bp, synthetic construct
  source 1..20: mol_type = other DNA
gtcctgcagaaggacagggc

SEQ ID NO: 53624 - DNA, 20 bp, synthetic construct
  source 1..20: mol_type = other DNA
cgtgctcgatggggtacttc

SEQ ID NO: 53625 - DNA, 20 bp, synthetic construct
  source 1..20: mol_type = other DNA
tccagacgcaggatggcatg

SEQ ID NO: 53626 - DNA, 20 bp, synthetic construct
  source 1..20: mol_type = other DNA
acatgaggttgacctgctcc

SEQ ID NO: 53627 - DNA, 20 bp, synthetic construct
  source 1..20: mol_type = other DNA
tgaaaattgtaagaatggac

SEQ ID NO: 53628 - DNA, 20 bp, synthetic construct
  source 1..20: mol_type = other DNA
tcatcatctgtgaggagggc

SEQ ID NO: 53629 - DNA, 20 bp, synthetic construct
  source 1..20: mol_type = other DNA
gaaataggggacttggacaa

SEQ ID NO: 53630 - DNA, 20 bp, synthetic construct
  source 1..20: mol_type = other DNA
agaccgtcgtggggcagagt

SEQ ID NO: 53631 - DNA, 20 bp, synthetic construct
  source 1..20: mol_type = other DNA
gcgtcgccggggcctcgggg

SEQ ID NO: 53632 - DNA, 20 bp, synthetic construct
  source 1..20: mol_type = other DNA
aacttgacaatcatccctgc

SEQ ID NO: 53633 - DNA, 20 bp, synthetic construct
  source 1..20: mol_type = other DNA
tgactcaaaattcctggagc

SEQ ID NO: 53634 - DNA, 20 bp, synthetic construct
  source 1..20: mol_type = other DNA
atgaaagtgagatattgttc

SEQ ID NO: 53635 - DNA, 20 bp, synthetic construct
  source 1..20: mol_type = other DNA
acacttgtacttgtcctcca

SEQ ID NO: 53636 - DNA, 20 bp, synthetic construct
  source 1..20: mol_type = other DNA
tatgatctggttccggattg

SEQ ID NO: 53637 - DNA, 20 bp, synthetic construct
  source 1..20: mol_type = other DNA
cggctgggtggcggcacgta

SEQ ID NO: 53638 - DNA, 20 bp, synthetic construct
  source 1..20: mol_type = other DNA
tcaccttggtgctgcaagtg

SEQ ID NO: 53639 - DNA, 20 bp, synthetic construct
  source 1..20: mol_type = other DNA
tcctccagcacctgcacggg

SEQ ID NO: 53640 - DNA, 20 bp, synthetic construct
  source 1..20: mol_type = other DNA
gcagcagcgaaagcgccttg

SEQ ID NO: 53641 - DNA, 20 bp, synthetic construct
  source 1..20: mol_type = other DNA
tccaagtcaatggcatccct

SEQ ID NO: 53642 - DNA, 20 bp, synthetic construct
  source 1..20: mol_type = other DNA
tacctctcctcctgatcacc

SEQ ID NO: 53643 - DNA, 20 bp, synthetic construct
  source 1..20: mol_type = other DNA
aagacgttcagctgctgtcc

SEQ ID NO: 53644 - DNA, 20 bp, synthetic construct
  source 1..20: mol_type = other DNA
ctgtggagctgcagctgagt

SEQ ID NO: 53645 - DNA, 20 bp, synthetic construct
  source 1..20: mol_type = other DNA
agtggaggtggatagttttc

SEQ ID NO: 53646 - DNA, 20 bp, synthetic construct
  source 1..20: mol_type = other DNA
tatgacctgctacagcggct

SEQ ID NO: 53647 - DNA, 20 bp, synthetic construct
  source 1..20: mol_type = other DNA
ccggcagcagctgggctggg

SEQ ID NO: 53648 - DNA, 20 bp, synthetic construct
  source 1..20: mol_type = other DNA
agagacatcaagtatggtag

SEQ ID NO: 53649 - DNA, 20 bp, synthetic construct
  source 1..20: mol_type = other DNA
ggagctggtaccttgccagt

SEQ ID NO: 53650 - DNA, 20 bp, synthetic construct
  source 1..20: mol_type = other DNA
cttcttctggcaggtgctgg

SEQ ID NO: 53651 - DNA, 20 bp, synthetic construct
  source 1..20: mol_type = other DNA
gtgcacgagaaggatgtgat

SEQ ID NO: 53652 - DNA, 20 bp, synthetic construct
  source 1..20: mol_type = other DNA
ctcacctgctgggctgggcg

SEQ ID NO: 53653 - DNA, 20 bp, synthetic construct
  source 1..20: mol_type = other DNA
caatccaaggtacggcacgg

SEQ ID NO: 53654 - DNA, 20 bp, synthetic construct
  source 1..20: mol_type = other DNA
ttttgtcgtaatagtagcgt

SEQ ID NO: 53655 - DNA, 20 bp, synthetic construct
  source 1..20: mol_type = other DNA
ggacatctgcgggtcctcca

SEQ ID NO: 53656 - DNA, 20 bp, synthetic construct
  source 1..20: mol_type = other DNA
caggtctggaaccttctgtc

SEQ ID NO: 53657 - DNA, 20 bp, synthetic construct
  source 1..20: mol_type = other DNA
ccgcggctgggccctgcagg

SEQ ID NO: 53658 - DNA, 20 bp, synthetic construct
  source 1..20: mol_type = other DNA
ggcgctttagggaggagtca

SEQ ID NO: 53659 - DNA, 20 bp, synthetic construct
  source 1..20: mol_type = other DNA
agattctatggagtgggata

SEQ ID NO: 53660 - DNA, 20 bp, synthetic construct
  source 1..20: mol_type = other DNA
ttacacgggggcaggttgag

SEQ ID NO: 53661 - DNA, 20 bp, synthetic construct
  source 1..20: mol_type = other DNA
gcatggctgcgggagcgagc

SEQ ID NO: 53662 - DNA, 20 bp, synthetic construct
  source 1..20: mol_type = other DNA
ctgctacttttcccttctgg

SEQ ID NO: 53663 - DNA, 20 bp, synthetic construct
  source 1..20: mol_type = other DNA
gctgcagccaagcaccatgc

SEQ ID NO: 53664 - DNA, 20 bp, synthetic construct
  source 1..20: mol_type = other DNA
agtggtggcggcggcggcgg

SEQ ID NO: 53665 - DNA, 20 bp, synthetic construct
  source 1..20: mol_type = other DNA
ggcactgaagatggtgaaga

SEQ ID NO: 53666 - DNA, 20 bp, synthetic construct
  source 1..20: mol_type = other DNA
gttagctccctgggaatgag

SEQ ID NO: 53667 - DNA, 20 bp, synthetic construct
  source 1..20: mol_type = other DNA
tttgctgatgtttcaataaa

SEQ ID NO: 53668 - DNA, 20 bp, synthetic construct
  source 1..20: mol_type = other DNA
agcagcagcagcagcagcgg

SEQ ID NO: 53669 - DNA, 20 bp, synthetic construct
  source 1..20: mol_type = other DNA
attgtcgtagtttctggagg

SEQ ID NO: 53670 - DNA, 20 bp, synthetic construct
  source 1..20: mol_type = other DNA
ccagagataactcccatggt

SEQ ID NO: 53671 - DNA, 20 bp, synthetic construct
  source 1..20: mol_type = other DNA
gatgcatacagaacggaagg

SEQ ID NO: 53672 - DNA, 20 bp, synthetic construct
  source 1..20: mol_type = other DNA
cgagtttcttactcttggtg

SEQ ID NO: 53673 - DNA, 20 bp, synthetic construct
  source 1..20: mol_type = other DNA
aggcaccttcgggtaaggct

SEQ ID NO: 53674 - DNA, 20 bp, synthetic construct
  source 1..20: mol_type = other DNA
gtacggcaccgggggcgccg

SEQ ID NO: 53675 - DNA, 20 bp, synthetic construct
  source 1..20: mol_type = other DNA
tgtaccgactgtaagtataa

SEQ ID NO: 53676 - DNA, 20 bp, synthetic construct
  source 1..20: mol_type = other DNA
cagggccagcaggatggcca

SEQ ID NO: 53677 - DNA, 20 bp, synthetic construct
  source 1..20: mol_type = other DNA
ctgcaactgaaacgcaagcg

SEQ ID NO: 53678 - DNA, 20 bp, synthetic construct
  source 1..20: mol_type = other DNA
actgagcatcttggtggcgc

SEQ ID NO: 53679 - DNA, 20 bp, synthetic construct
  source 1..20: mol_type = other DNA
cttcgtgcggaggctgctct

SEQ ID NO: 53680 - DNA, 20 bp, synthetic construct
  source 1..20: mol_type = other DNA
tgaatacaaggagagctttg

SEQ ID NO: 53681 - DNA, 20 bp, synthetic construct
  source 1..20: mol_type = other DNA
atggggagctatggtcccca

SEQ ID NO: 53682 - DNA, 20 bp, synthetic construct
  source 1..20: mol_type = other DNA
ggccctggtggccaaacagg

SEQ ID NO: 53683 - DNA, 20 bp, synthetic construct
  source 1..20: mol_type = other DNA
tggggctgaaacacaaagat

SEQ ID NO: 53684 - DNA, 20 bp, synthetic construct
  source 1..20: mol_type = other DNA
tgcaactcgccgtacatcgt

SEQ ID NO: 53685 - DNA, 20 bp, synthetic construct
  source 1..20: mol_type = other DNA
gccaagcaggtgagaggtga

SEQ ID NO: 53686 - DNA, 20 bp, synthetic construct
  source 1..20: mol_type = other DNA
ctctacctgggtcacctgca

SEQ ID NO: 53687 - DNA, 20 bp, synthetic construct
  source 1..20: mol_type = other DNA
ttgaatcaaagtatggacac

SEQ ID NO: 53688 - DNA, 20 bp, synthetic construct
  source 1..20: mol_type = other DNA
ccagatggcggctgagctca

SEQ ID NO: 53689 - DNA, 20 bp, synthetic construct
  source 1..20: mol_type = other DNA
tgatgagggagccttctcct

SEQ ID NO: 53690 - DNA, 20 bp, synthetic construct
  source 1..20: mol_type = other DNA
cggatgggcatcgtggagcc

SEQ ID NO: 53691 - DNA, 20 bp, synthetic construct
  source 1..20: mol_type = other DNA
tgagggcagtgcctacgagg

SEQ ID NO: 53692 - DNA, 20 bp, synthetic construct
  source 1..20: mol_type = other DNA
gcgtgcctggcgttcctcgt

SEQ ID NO: 53693 - DNA, 20 bp, synthetic construct
  source 1..20: mol_type = other DNA
cgttccttccccagcctggg

SEQ ID NO: 53694 - DNA, 20 bp, synthetic construct
  source 1..20: mol_type = other DNA
ctcccagctcaccctgctgg

SEQ ID NO: 53695 - DNA, 20 bp, synthetic construct
  source 1..20: mol_type = other DNA
agagcaggatctactgggac

SEQ ID NO: 53696 - DNA, 20 bp, synthetic construct
  source 1..20: mol_type = other DNA
tataacatcggtatctgggt

SEQ ID NO: 53697 - DNA, 20 bp, synthetic construct
  source 1..20: mol_type = other DNA
ggcccggccagcgctggggg

SEQ ID NO: 53698 - DNA, 20 bp, synthetic construct
  source 1..20: mol_type = other DNA
gtatgatacctaaagtggag

SEQ ID NO: 53699 - DNA, 20 bp, synthetic construct
  source 1..20: mol_type = other DNA
ggtggaggggtatcaggaag

SEQ ID NO: 53700 - DNA, 20 bp, synthetic construct
  source 1..20: mol_type = other DNA
taaggaacaagagcctatta

SEQ ID NO: 53701 - DNA, 20 bp, synthetic construct
  source 1..20: mol_type = other DNA
agcagcccctttcccacgtg

SEQ ID NO: 53702 - DNA, 20 bp, synthetic construct
  source 1..20: mol_type = other DNA
gggagggtactgagaatgag

SEQ ID NO: 53703 - DNA, 20 bp, synthetic construct
  source 1..20: mol_type = other DNA
ggccgagcggctgctgcagg

SEQ ID NO: 53704 - DNA, 20 bp, synthetic construct
  source 1..20: mol_type = other DNA
agatcgatcagctaaagcac

SEQ ID NO: 53705 - DNA, 20 bp, synthetic construct
  source 1..20: mol_type = other DNA
catagccctttggcgcttcc

SEQ ID NO: 53706 - DNA, 20 bp, synthetic construct
  source 1..20: mol_type = other DNA
aggatcctgtgggaggggtg

SEQ ID NO: 53707 - DNA, 20 bp, synthetic construct
  source 1..20: mol_type = other DNA
cttcacctcctcagcctcac

SEQ ID NO: 53708 - DNA, 20 bp, synthetic construct
  source 1..20: mol_type = other DNA
gatctacagttagaagaaga

SEQ ID NO: 53709 - DNA, 20 bp, synthetic construct
  source 1..20: mol_type = other DNA
cctcacaaatgtggatattg

SEQ ID NO: 53710 - DNA, 20 bp, synthetic construct
  source 1..20: mol_type = other DNA
gttcagcatgacaactgctt

SEQ ID NO: 53711 - DNA, 20 bp, synthetic construct
  source 1..20: mol_type = other DNA
ctgcggttcctccttgaagg

SEQ ID NO: 53712 - DNA, 20 bp, synthetic construct
  source 1..20: mol_type = other DNA
gccaaaccataagccagaaa

SEQ ID NO: 53713 - DNA, 20 bp, synthetic construct
  source 1..20: mol_type = other DNA
agacacagtagcgaatgtca

SEQ ID NO: 53714 - DNA, 20 bp, synthetic construct
  source 1..20: mol_type = other DNA
taagcaatagcagcagcagt

SEQ ID NO: 53715 - DNA, 20 bp, synthetic construct
  source 1..20: mol_type = other DNA
acaggactccatgcctgaga

SEQ ID NO: 53716 - DNA, 20 bp, synthetic construct
  source 1..20: mol_type = other DNA
ttcgcccagtcctgaatcac

SEQ ID NO: 53717 - DNA, 20 bp, synthetic construct
  source 1..20: mol_type = other DNA
gatttcccgctcggccgtgg

SEQ ID NO: 53718 - DNA, 20 bp, synthetic construct
  source 1..20: mol_type = other DNA
atgagcagcacaggtgaggg

SEQ ID NO: 53719 - DNA, 20 bp, synthetic construct
  source 1..20: mol_type = other DNA
agcttcatcttgcggtatag

SEQ ID NO: 53720 - DNA, 20 bp, synthetic construct
  source 1..20: mol_type = other DNA
cggatttagtgtggagcgga

SEQ ID NO: 53721 - DNA, 20 bp, synthetic construct
  source 1..20: mol_type = other DNA
actcattcactgcaggtgcg

SEQ ID NO: 53722 - DNA, 20 bp, synthetic construct
  source 1..20: mol_type = other DNA
gcggtggacgatggaggggc

SEQ ID NO: 53723 - DNA, 20 bp, synthetic construct
  source 1..20: mol_type = other DNA
cctatgataaattctagagt

SEQ ID NO: 53724 - DNA, 20 bp, synthetic construct
  source 1..20: mol_type = other DNA
ggcagctgcacagctgggga

SEQ ID NO: 53725 - DNA, 20 bp, synthetic construct
  source 1..20: mol_type = other DNA
gctgttgatcagtgctctgt

SEQ ID NO: 53726 - DNA, 20 bp, synthetic construct
  source 1..20: mol_type = other DNA
cttcgccgtccaccctagag

SEQ ID NO: 53727 - DNA, 20 bp, synthetic construct
  source 1..20: mol_type = other DNA
gtctctctcaggtctggctg

SEQ ID NO: 53728 - DNA, 20 bp, synthetic construct
  source 1..20: mol_type = other DNA
accttccaccagagggtaat

SEQ ID NO: 53729 - DNA, 20 bp, synthetic construct
  source 1..20: mol_type = other DNA
gggacttctccatctctgtc

SEQ ID NO: 53730 - DNA, 20 bp, synthetic construct
  source 1..20: mol_type = other DNA
gccttccttagagccagtga

SEQ ID NO: 53731 - DNA, 20 bp, synthetic construct
  source 1..20: mol_type = other DNA
gggccaggacccagctgagg

SEQ ID NO: 53732 - DNA, 20 bp, synthetic construct
  source 1..20: mol_type = other DNA
tgacccctatccagaggtct

SEQ ID NO: 53733 - DNA, 20 bp, synthetic construct
  source 1..20: mol_type = other DNA
ggccacacaatagccagcac

SEQ ID NO: 53734 - DNA, 20 bp, synthetic construct
  source 1..20: mol_type = other DNA
cgccgccgcaggggaaggcc

SEQ ID NO: 53735 - DNA, 20 bp, synthetic construct
  source 1..20: mol_type = other DNA
acaggagactggacatcgtc

SEQ ID NO: 53736 - DNA, 20 bp, synthetic construct
  source 1..20: mol_type = other DNA
ggtggagaggatcccctggc

SEQ ID NO: 53737 - DNA, 20 bp, synthetic construct
  source 1..20: mol_type = other DNA
tggcccagacagcagacgcc

SEQ ID NO: 53738 - DNA, 20 bp, synthetic construct
  source 1..20: mol_type = other DNA
gaaccaggcctgatgggaga

SEQ ID NO: 53739 - DNA, 20 bp, synthetic construct
  source 1..20: mol_type = other DNA
gagacttcacactttccgtt

SEQ ID NO: 53740 - DNA, 20 bp, synthetic construct
  source 1..20: mol_type = other DNA
ttgcttccgttcccgtgggg

SEQ ID NO: 53741 - DNA, 20 bp, synthetic construct
  source 1..20: mol_type = other DNA
tgcctcaagaggcttggggt

SEQ ID NO: 53742 - DNA, 20 bp, synthetic construct
  source 1..20: mol_type = other DNA
ggcctggtgctggggctgct

SEQ ID NO: 53743 - DNA, 20 bp, synthetic construct
  source 1..20: mol_type = other DNA
tttcaccaggaggagctgct

SEQ ID NO: 53744 - DNA, 20 bp, synthetic construct
  source 1..20: mol_type = other DNA
cggaggggagcccctgccat

SEQ ID NO: 53745 - DNA, 20 bp, synthetic construct
  source 1..20: mol_type = other DNA
agaaatgcagtgctgtgtcg

SEQ ID NO: 53746 - DNA, 20 bp, synthetic construct
  source 1..20: mol_type = other DNA
gcatccttggcctgctggaa

SEQ ID NO: 53747 - DNA, 20 bp, synthetic construct
  source 1..20: mol_type = other DNA
tcacgttggtccacatcctg

SEQ ID NO: 53748 - DNA, 20 bp, synthetic construct
  source 1..20: mol_type = other DNA
atcctaatttctggatggat

SEQ ID NO: 53749 - DNA, 20 bp, synthetic construct
  source 1..20: mol_type = other DNA
ccttcagttgctaggtgggg

SEQ ID NO: 53750 - DNA, 20 bp, synthetic construct
  source 1..20: mol_type = other DNA
cgatcactagcagagaggac

SEQ ID NO: 53751 - DNA, 20 bp, synthetic construct
  source 1..20: mol_type = other DNA
taggaaagagctgcagggaa

SEQ ID NO: 53752 - DNA, 20 bp, synthetic construct
  source 1..20: mol_type = other DNA
caccatccactcgtagatct

SEQ ID NO: 53753 - DNA, 20 bp, synthetic construct
  source 1..20: mol_type = other DNA
caagaactatgatcacgacc

SEQ ID NO: 53754 - DNA, 20 bp, synthetic construct
  source 1..20: mol_type = other DNA
gtgtccaggcggccgtgctg

SEQ ID NO: 53755 - DNA, 20 bp, synthetic construct
  source 1..20: mol_type = other DNA
gtgtgctcaaaatcagatgg

SEQ ID NO: 53756 - DNA, 20 bp, synthetic construct
  source 1..20: mol_type = other DNA
tccgtctggttggtggtggc

SEQ ID NO: 53757 - DNA, 20 bp, synthetic construct
  source 1..20: mol_type = other DNA
cctcgagatggcggtggggg

SEQ ID NO: 53758 - DNA, 20 bp, synthetic construct
  source 1..20: mol_type = other DNA
ggtccacgacgtccatccct

SEQ ID NO: 53759 - DNA, 20 bp, synthetic construct
  source 1..20: mol_type = other DNA
catcctcatcaatgatgctg

SEQ ID NO: 53760 - DNA, 20 bp, synthetic construct
  source 1..20: mol_type = other DNA
ttagcggtcatgtcaatggt

SEQ ID NO: 53761 - DNA, 20 bp, synthetic construct
  source 1..20: mol_type = other DNA
gcaacttgacggtgcaccgg

SEQ ID NO: 53762 - DNA, 20 bp, synthetic construct
  source 1..20: mol_type = other DNA
cctccccgactgaaggaaaa

SEQ ID NO: 53763 - DNA, 20 bp, synthetic construct
  source 1..20: mol_type = other DNA
cagtccagctgccaggtgca

SEQ ID NO: 53764 - DNA, 20 bp, synthetic construct
  source 1..20: mol_type = other DNA
ctcgctgcgctcccgggatt

SEQ ID NO: 53765 - DNA, 20 bp, synthetic construct
  source 1..20: mol_type = other DNA
cacagacccagtgcagctcc

SEQ ID NO: 53766 - DNA, 20 bp, synthetic construct
  source 1..20: mol_type = other DNA
ttacttttacgtgtgatggt

SEQ ID NO: 53767 - DNA, 20 bp, synthetic construct
  source 1..20: mol_type = other DNA
gcatcctttccagtgtactc

SEQ ID NO: 53768 - DNA, 20 bp, synthetic construct
  source 1..20: mol_type = other DNA
cccagatgaggtaaggaagg

SEQ ID NO: 53769 - DNA, 20 bp, synthetic construct
  source 1..20: mol_type = other DNA
acatcttgtaagttatcact

SEQ ID NO: 53770 - DNA, 20 bp, synthetic construct
  source 1..20: mol_type = other DNA
tggacagcaaggtattgggg

SEQ ID NO: 53771 - DNA, 20 bp, synthetic construct
  source 1..20: mol_type = other DNA
cgtgcccaagagcccctctg

SEQ ID NO: 53772 - DNA, 20 bp, synthetic construct
  source 1..20: mol_type = other DNA
aggcaaatgctctcggggta

SEQ ID NO: 53773 - DNA, 20 bp, synthetic construct
  source 1..20: mol_type = other DNA
cgcgtactgagtccgcgcgc

SEQ ID NO: 53774 - DNA, 20 bp, synthetic construct
  source 1..20: mol_type = other DNA
cagtatctcaaggtatgtgc

SEQ ID NO: 53775 - DNA, 20 bp, synthetic construct
  source 1..20: mol_type = other DNA
gcgcgtgcacgtggccgcgc

SEQ ID NO: 53776 - DNA, 20 bp, synthetic construct
  source 1..20: mol_type = other DNA
gacctccggacctcagtccc

SEQ ID NO: 53777 - DNA, 20 bp, synthetic construct
  source 1..20: mol_type = other DNA
ccaccagggcctggagtgag

SEQ ID NO: 53778 - DNA, 20 bp, synthetic construct
  source 1..20: mol_type = other DNA
agatctaaggcaaagactca

SEQ ID NO: 53779 - DNA, 20 bp, synthetic construct
  source 1..20: mol_type = other DNA
aaattgaacttagctcatta

SEQ ID NO: 53780 - DNA, 20 bp, synthetic construct
  source 1..20: mol_type = other DNA
cagggaccggcagagctcca

SEQ ID NO: 53781 - DNA, 20 bp, synthetic construct
  source 1..20: mol_type = other DNA
ccctcactctttgctctcgt

SEQ ID NO: 53782 - DNA, 20 bp, synthetic construct
  source 1..20: mol_type = other DNA
tgcgcctggggtgggaggtg

SEQ ID NO: 53783 - DNA, 20 bp, synthetic construct
  source 1..20: mol_type = other DNA
caatagtaggggtccaggca

SEQ ID NO: 53784 - DNA, 20 bp, synthetic construct
  source 1..20: mol_type = other DNA
caagcggctgcggaaccggc

SEQ ID NO: 53785 - DNA, 20 bp, synthetic construct
  source 1..20: mol_type = other DNA
tcaccacacggttggtgtag

SEQ ID NO: 53786 - DNA, 20 bp, synthetic construct
  source 1..20: mol_type = other DNA
ctattgtaatactgcatagg

SEQ ID NO: 53787 - DNA, 20 bp, synthetic construct
  source 1..20: mol_type = other DNA
ggcagaaaaggagacttgct

SEQ ID NO: 53788 - DNA, 20 bp, synthetic construct
  source 1..20: mol_type = other DNA
tgtgctggaggacttcttca

SEQ ID NO: 53789 - DNA, 20 bp, synthetic construct
  source 1..20: mol_type = other DNA
tccacctggatgcaggggca

SEQ ID NO: 53790 - DNA, 20 bp, synthetic construct
  source 1..20: mol_type = other DNA
ggagtgttgcctttgggtac

SEQ ID NO: 53791 - DNA, 20 bp, synthetic construct
  source 1..20: mol_type = other DNA
gggtgcggctctccaggccc

SEQ ID NO: 53792 - DNA, 20 bp, synthetic construct
  source 1..20: mol_type = other DNA
gccgcagctcccgctggccg

SEQ ID NO: 53793 - DNA, 20 bp, synthetic construct
  source 1..20: mol_type = other DNA
aaaagacttggtgttgttga

SEQ ID NO: 53794 - DNA, 20 bp, synthetic construct
  source 1..20: mol_type = other DNA
gaatgaccaggaggccacgc

SEQ ID NO: 53795 - DNA, 20 bp, synthetic construct
  source 1..20: mol_type = other DNA
gtataagaatgaggatgtga

SEQ ID NO: 53796 - DNA, 20 bp, synthetic construct
  source 1..20: mol_type = other DNA
agtctcttgtcacttaggtc

SEQ ID NO: 53797 - DNA, 20 bp, synthetic construct
  source 1..20: mol_type = other DNA
gcctcagcctcccagagtgc

SEQ ID NO: 53798 - DNA, 20 bp, synthetic construct
  source 1..20: mol_type = other DNA
cagcttcctactagtggatg

SEQ ID NO: 53799 - DNA, 20 bp, synthetic construct
  source 1..20: mol_type = other DNA
atggggagccttgggcccaa

SEQ ID NO: 53800 - DNA, 20 bp, synthetic construct
  source 1..20: mol_type = other DNA
aaaaggaggggcccttgggg

SEQ ID NO: 53801 - DNA, 20 bp, synthetic construct
  source 1..20: mol_type = other DNA
gctacgggccacagagggcg

SEQ ID NO: 53802 - DNA, 20 bp, synthetic construct
  source 1..20: mol_type = other DNA
cgaccttctgtgaacactgt

SEQ ID NO: 53803 - DNA, 20 bp, synthetic construct
  source 1..20: mol_type = other DNA
tacatttccactataccaca

SEQ ID NO: 53804 - DNA, 20 bp, synthetic construct
  source 1..20: mol_type = other DNA
caaagacatccagtatctca

SEQ ID NO: 53805 - DNA, 20 bp, synthetic construct
  source 1..20: mol_type = other DNA
caccactacaggcctgtgga

SEQ ID NO: 53806 - DNA, 20 bp, synthetic construct
  source 1..20: mol_type = other DNA
caggaaggggcggcggcgct

SEQ ID NO: 53807 - DNA, 20 bp, synthetic construct
  source 1..20: mol_type = other DNA
cactgacttgctgaggggag

SEQ ID NO: 53808 - DNA, 20 bp, synthetic construct
  source 1..20: mol_type = other DNA
taatcttgtatctagaatcc

SEQ ID NO: 53809 - DNA, 20 bp, synthetic construct
  source 1..20: mol_type = other DNA
gcagcgggagctggagcaag

SEQ ID NO: 53810 - DNA, 20 bp, synthetic construct
  source 1..20: mol_type = other DNA
catagcctcttccctggccc

SEQ ID NO: 53811 - DNA, 20 bp, synthetic construct
  source 1..20: mol_type = other DNA
aataccagagaatgtgttga

SEQ ID NO: 53812 - DNA, 20 bp, synthetic construct
  source 1..20: mol_type = other DNA
ctgaatagttgtcaaacctg

SEQ ID NO: 53813 - DNA, 20 bp, synthetic construct
  source 1..20: mol_type = other DNA
tgactcccatccgctctagc

SEQ ID NO: 53814 - DNA, 20 bp, synthetic construct
  source 1..20: mol_type = other DNA
agcaccgtaatggggatgcc

SEQ ID NO: 53815 - DNA, 20 bp, synthetic construct
  source 1..20: mol_type = other DNA
ctctagtttggtgatattgg

SEQ ID NO: 53816 - DNA, 20 bp, synthetic construct
  source 1..20: mol_type = other DNA
ccccgcttgccgcgggctgg

SEQ ID NO: 53817 - DNA, 20 bp, synthetic construct
  source 1..20: mol_type = other DNA
ggctcccccaggtatgttgt

SEQ ID NO: 53818 - DNA, 20 bp, synthetic construct
  source 1..20: mol_type = other DNA
tgtcaaagatgggatgagaa

SEQ ID NO: 53819 - DNA, 20 bp, synthetic construct
  source 1..20: mol_type = other DNA
gcaccgggttctggtcgtgc

SEQ ID NO: 53820 - DNA, 20 bp, synthetic construct
  source 1..20: mol_type = other DNA
acatgcagcgctttccgtcg

SEQ ID NO: 53821 - DNA, 20 bp, synthetic construct
  source 1..20: mol_type = other DNA
agcaatgtctaacctgggca

SEQ ID NO: 53822 - DNA, 20 bp, synthetic construct
  source 1..20: mol_type = other DNA
cactcccaaaagggaaaggt

SEQ ID NO: 53823 - DNA, 20 bp, synthetic construct
  source 1..20: mol_type = other DNA
ggacctggtggcactgaaga

SEQ ID NO: 53824 - DNA, 20 bp, synthetic construct
  source 1..20: mol_type = other DNA
cggaacacaatggcatactg

SEQ ID NO: 53825 - DNA, 20 bp, synthetic construct
  source 1..20: mol_type = other DNA
caacgagatgctgtgcaaga

SEQ ID NO: 53826 - DNA, 20 bp, synthetic construct
  source 1..20: mol_type = other DNA
ccggccacgcgcctcggggc

SEQ ID NO: 53827 - DNA, 20 bp, synthetic construct
  source 1..20: mol_type = other DNA
gatcgaggaccaaggtgccc

SEQ ID NO: 53828 - DNA, 20 bp, synthetic construct
  source 1..20: mol_type = other DNA
cggagatggagggcagcgcg

SEQ ID NO: 53829 - DNA, 20 bp, synthetic construct
  source 1..20: mol_type = other DNA
cctacccacagcacccagct

SEQ ID NO: 53830 - DNA, 20 bp, synthetic construct
  source 1..20: mol_type = other DNA
tacatacctggtgcttgggc

SEQ ID NO: 53831 - DNA, 20 bp, synthetic construct
  source 1..20: mol_type = other DNA
cggcggccaggagctgggcc

SEQ ID NO: 53832 - DNA, 20 bp, synthetic construct
  source 1..20: mol_type = other DNA
agcagcttcctactagtgga

SEQ ID NO: 53833 - DNA, 20 bp, synthetic construct
  source 1..20: mol_type = other DNA
agaccaggtacctgagaggc

SEQ ID NO: 53834 - DNA, 20 bp, synthetic construct
  source 1..20: mol_type = other DNA
gcacctctgccgcagcctcg

SEQ ID NO: 53835 - DNA, 20 bp, synthetic construct
  source 1..20: mol_type = other DNA
ggggccccccggtagcgccc

SEQ ID NO: 53836 - DNA, 20 bp, synthetic construct
  source 1..20: mol_type = other DNA
acggtggggatgtactctcc

SEQ ID NO: 53837 - DNA, 20 bp, synthetic construct
  source 1..20: mol_type = other DNA
ggaggaggtggaggaggact

SEQ ID NO: 53838 - DNA, 20 bp, synthetic construct
  source 1..20: mol_type = other DNA
ggtttttccgaagagatgtt

SEQ ID NO: 53839 - DNA, 20 bp, synthetic construct
  source 1..20: mol_type = other DNA
ttttcggatagtttcggcgg

SEQ ID NO: 53840 - DNA, 20 bp, synthetic construct
  source 1..20: mol_type = other DNA
ggcttccaggccttctagca

SEQ ID NO: 53841 - DNA, 20 bp, synthetic construct
  source 1..20: mol_type = other DNA
tgaagcgtgcggcgggcggc

SEQ ID NO: 53842 - DNA, 20 bp, synthetic construct
  source 1..20: mol_type = other DNA
catccctgggggcctgagct

SEQ ID NO: 53843 - DNA, 20 bp, synthetic construct
  source 1..20: mol_type = other DNA
aggatttcattaataatatc

SEQ ID NO: 53844 - DNA, 20 bp, synthetic construct
  source 1..20: mol_type = other DNA
ttcatgagggctgaccacaa

SEQ ID NO: 53845 - DNA, 20 bp, synthetic construct
  source 1..20: mol_type = other DNA
aagctggattatttccacaa

SEQ ID NO: 53846 - DNA, 20 bp, synthetic construct
  source 1..20: mol_type = other DNA
caccatatcttcctctacct

SEQ ID NO: 53847 - DNA, 20 bp, synthetic construct
  source 1..20: mol_type = other DNA
aagttcagctattgggtaag

SEQ ID NO: 53848 - DNA, 20 bp, synthetic construct
  source 1..20: mol_type = other DNA
gcggcgccggcggctgcgcg

SEQ ID NO: 53849 - DNA, 20 bp, synthetic construct
  source 1..20: mol_type = other DNA
tctggtaatgcccccgaccc

SEQ ID NO: 53850 - DNA, 20 bp, synthetic construct
  source 1..20: mol_type = other DNA
ggtcgtaagtaaagtacacc

SEQ ID NO: 53851 - DNA, 20 bp, synthetic construct
  source 1..20: mol_type = other DNA
tgccacctgtggatacaggc

SEQ ID NO: 53852 - DNA, 20 bp, synthetic construct
  source 1..20: mol_type = other DNA
ggtcgccctcacgggccacc

SEQ ID NO: 53853 - DNA, 20 bp, synthetic construct
  source 1..20: mol_type = other DNA
tctacctgggtcacctgcac

SEQ ID NO: 53854 - DNA, 20 bp, synthetic construct
  source 1..20: mol_type = other DNA
tccacaagaaggtggagaag

SEQ ID NO: 53855 - DNA, 20 bp, synthetic construct
  source 1..20: mol_type = other DNA
actccgactgctccaagagc

SEQ ID NO: 53856 - DNA, 20 bp, synthetic construct
  source 1..20: mol_type = other DNA
tcaggtaatgggacaggcta

SEQ ID NO: 53857 - DNA, 20 bp, synthetic construct
  source 1..20: mol_type = other DNA
ttaactgaaaaaggaaaaca

SEQ ID NO: 53858 - DNA, 20 bp, synthetic construct
  source 1..20: mol_type = other DNA
acagagcttgatctccccac

SEQ ID NO: 53859 - DNA, 20 bp, synthetic construct
  source 1..20: mol_type = other DNA
ccacacccctgcagattgag

SEQ ID NO: 53860 - DNA, 20 bp, synthetic construct
  source 1..20: mol_type = other DNA
tttaaactatgcgatgcttg

SEQ ID NO: 53861 - DNA, 20 bp, synthetic construct
  source 1..20: mol_type = other DNA
ccaaatggtaacgttcatgg

SEQ ID NO: 53862 - DNA, 20 bp, synthetic construct
  source 1..20: mol_type = other DNA
tggtcagcatgtggctggag

SEQ ID NO: 53863 - DNA, 20 bp, synthetic construct
  source 1..20: mol_type = other DNA
ctccctccaggctctcgggc

SEQ ID NO: 53864 - DNA, 20 bp, synthetic construct
  source 1..20: mol_type = other DNA
aacactccggccgctgcctc

SEQ ID NO: 53865 - DNA, 20 bp, synthetic construct
  source 1..20: mol_type = other DNA
gggaggaggggaagaaaccg

SEQ ID NO: 53866 - DNA, 20 bp, synthetic construct
  source 1..20: mol_type = other DNA
gactcgcagacgccctctgc

SEQ ID NO: 53867 - DNA, 20 bp, synthetic construct
  source 1..20: mol_type = other DNA
atatttctgcttcactgtgt

SEQ ID NO: 53868 - DNA, 20 bp, synthetic construct
  source 1..20: mol_type = other DNA
ccgcaagaagctggtggtgg

SEQ ID NO: 53869 - DNA, 20 bp, synthetic construct
  source 1..20: mol_type = other DNA
atggagggtttcgtgctgga

SEQ ID NO: 53870 - DNA, 20 bp, synthetic construct
  source 1..20: mol_type = other DNA
tacagcctcctcgagacctc

SEQ ID NO: 53871 - DNA, 20 bp, synthetic construct
  source 1..20: mol_type = other DNA
caggcaggcaaatgctctcg

SEQ ID NO: 53872 - DNA, 20 bp, synthetic construct
  source 1..20: mol_type = other DNA
ttgacaatcgtgagtagcga

SEQ ID NO: 53873 - DNA, 20 bp, synthetic construct
  source 1..20: mol_type = other DNA
agatcatttccagtacccag

SEQ ID NO: 53874 - DNA, 20 bp, synthetic construct
  source 1..20: mol_type = other DNA
tgggacaccctactggtgag

SEQ ID NO: 53875 - DNA, 20 bp, synthetic construct
  source 1..20: mol_type = other DNA
acgcacgacatcaggctgga

SEQ ID NO: 53876 - DNA, 20 bp, synthetic construct
  source 1..20: mol_type = other DNA
gccgctgtagcaggtcatag

SEQ ID NO: 53877 - DNA, 20 bp, synthetic construct
  source 1..20: mol_type = other DNA
cgcgctgatgctcaagtgcg

SEQ ID NO: 53878 - DNA, 20 bp, synthetic construct
  source 1..20: mol_type = other DNA
ggaggtctgggtcttcaaca

SEQ ID NO: 53879 - DNA, 20 bp, synthetic construct
  source 1..20: mol_type = other DNA
agaaaagccacatgaatgcc

SEQ ID NO: 53880 - DNA, 20 bp, synthetic construct
  source 1..20: mol_type = other DNA
ccacatgctgtccgagctgg

SEQ ID NO: 53881 - DNA, 20 bp, synthetic construct
  source 1..20: mol_type = other DNA
gggttaagccaagtaactgt

SEQ ID NO: 53882 - DNA, 20 bp, synthetic construct
  source 1..20: mol_type = other DNA
gattactatcactaatgaca

SEQ ID NO: 53883 - DNA, 20 bp, synthetic construct
  source 1..20: mol_type = other DNA
gccgcccgcgccgcccccgc

SEQ ID NO: 53884 - DNA, 20 bp, synthetic construct
  source 1..20: mol_type = other DNA
acttctctacagccgaaaag

SEQ ID NO: 53885 - DNA, 20 bp, synthetic construct
  source 1..20: mol_type = other DNA
tatacttgaaaaaattcata

SEQ ID NO: 53886 - DNA, 20 bp, synthetic construct
  source 1..20: mol_type = other DNA
gtgcgaggaggctgtgagtc

SEQ ID NO: 53887 - DNA, 20 bp, synthetic construct
  source 1..20: mol_type = other DNA
tccccgccggcagagccgct

SEQ ID NO: 53888 - DNA, 20 bp, synthetic construct
  source 1..20: mol_type = other DNA
actgaatgcgaatgattggc

SEQ ID NO: 53889 - DNA, 20 bp, synthetic construct
  source 1..20: mol_type = other DNA
cttcatcaaagggaacaggc

SEQ ID NO: 53890 - DNA, 20 bp, synthetic construct
  source 1..20: mol_type = other DNA
gttcgatggccgtgatgccc

SEQ ID NO: 53891 - DNA, 20 bp, synthetic construct
  source 1..20: mol_type = other DNA
tgacgcggctgtaggggagg

SEQ ID NO: 53892 - DNA, 20 bp, synthetic construct
  source 1..20: mol_type = other DNA
actgtgcctggaggggccca

SEQ ID NO: 53893 - DNA, 20 bp, synthetic construct
  source 1..20: mol_type = other DNA
cagcgccctgggcccccagc

SEQ ID NO: 53894 - DNA, 20 bp, synthetic construct
  source 1..20: mol_type = other DNA
gtggacatggcagcacaggt

SEQ ID NO: 53895 - DNA, 20 bp, synthetic construct
  source 1..20: mol_type = other DNA
acagagccccagtaccaacc

SEQ ID NO: 53896 - DNA, 20 bp, synthetic construct
  source 1..20: mol_type = other DNA
gttggtgaacgtaggaccca

SEQ ID NO: 53897 - DNA, 20 bp, synthetic construct
  source 1..20: mol_type = other DNA
ggtctctcgtctttctcagc

SEQ ID NO: 53898 - DNA, 20 bp, synthetic construct
  source 1..20: mol_type = other DNA
tgtggccacacgttggtaca

SEQ ID NO: 53899 - DNA, 20 bp, synthetic construct
  source 1..20: mol_type = other DNA
ctcccctggacatgagagag

SEQ ID NO: 53900 - DNA, 20 bp, synthetic construct
  source 1..20: mol_type = other DNA
attcactttctatccgtgat

SEQ ID NO: 53901 - DNA, 20 bp, synthetic construct
  source 1..20: mol_type = other DNA
ttctgctagtcatgactgtc

SEQ ID NO: 53902 - DNA, 20 bp, synthetic construct
  source 1..20: mol_type = other DNA
tcaccacagaggggacgccg

SEQ ID NO: 53903 - DNA, 20 bp, synthetic construct
  source 1..20: mol_type = other DNA
acctccatcttgggcagacc

SEQ ID NO: 53904 - DNA, 20 bp, synthetic construct
  source 1..20: mol_type = other DNA
gacctctccaccacctcggg

SEQ ID NO: 53905 - DNA, 20 bp, synthetic construct
  source 1..20: mol_type = other DNA
caaggttagagaaaggacaa

SEQ ID NO: 53906 - DNA, 20 bp, synthetic construct
  source 1..20: mol_type = other DNA
ccggaacatcaagatcctag

SEQ ID NO: 53907 - DNA, 20 bp, synthetic construct
  source 1..20: mol_type = other DNA
tatcctatccgcaaacagta

SEQ ID NO: 53908 - DNA, 20 bp, synthetic construct
  source 1..20: mol_type = other DNA
tcctgaattatcccagcccc

SEQ ID NO: 53909 - DNA, 20 bp, synthetic construct
  source 1..20: mol_type = other DNA
accctggttggtgaagcagc

SEQ ID NO: 53910 - DNA, 20 bp, synthetic construct
  source 1..20: mol_type = other DNA
aggcaccgggcagtcctcca

SEQ ID NO: 53911 - DNA, 20 bp, synthetic construct
  source 1..20: mol_type = other DNA
actcccatcacctatccgca

SEQ ID NO: 53912 - DNA, 20 bp, synthetic construct
  source 1..20: mol_type = other DNA
aggaggagcccaaggaggtg

SEQ ID NO: 53913 - DNA, 20 bp, synthetic construct
  source 1..20: mol_type = other DNA
atcctcagggtcctgcccat

SEQ ID NO: 53914 - DNA, 20 bp, synthetic construct
  source 1..20: mol_type = other DNA
caagcacccagcagcacctg

SEQ ID NO: 53915 - DNA, 20 bp, synthetic construct
  source 1..20: mol_type = other DNA
agcccagtcaaattttctcc

SEQ ID NO: 53916 - DNA, 20 bp, synthetic construct
  source 1..20: mol_type = other DNA
ggggggtgtccggaacacaa

SEQ ID NO: 53917 - DNA, 20 bp, synthetic construct
  source 1..20: mol_type = other DNA
agcaggatgaggaggatgac

SEQ ID NO: 53918 - DNA, 20 bp, synthetic construct
  source 1..20: mol_type = other DNA
acccacggcctccaccgctt

SEQ ID NO: 53919 - DNA, 20 bp, synthetic construct
  source 1..20: mol_type = other DNA
accccccacaatagggggcc

SEQ ID NO: 53920 - DNA, 20 bp, synthetic construct
  source 1..20: mol_type = other DNA
cgtagttacagatctaggag

SEQ ID NO: 53921 - DNA, 20 bp, synthetic construct
  source 1..20: mol_type = other DNA
cagggctccttactgcagaa

SEQ ID NO: 53922 - DNA, 20 bp, synthetic construct
  source 1..20: mol_type = other DNA
gagcgcgtatgcccgggaga

SEQ ID NO: 53923 - DNA, 20 bp, synthetic construct
  source 1..20: mol_type = other DNA
ctggtggccctcacggaggc

SEQ ID NO: 53924 - DNA, 20 bp, synthetic construct
  source 1..20: mol_type = other DNA
tggctcccccaggtatgttg

SEQ ID NO: 53925 - DNA, 20 bp, synthetic construct
  source 1..20: mol_type = other DNA
gcacctgctgcgggccgcac

SEQ ID NO: 53926 - DNA, 20 bp, synthetic construct
  source 1..20: mol_type = other DNA
tctttcctagccggactacg

SEQ ID NO: 53927 - DNA, 20 bp, synthetic construct
  source 1..20: mol_type = other DNA
caggcacacggccaccaggt

SEQ ID NO: 53928 - DNA, 20 bp, synthetic construct
  source 1..20: mol_type = other DNA
ggcatgagaaaggggctccg

SEQ ID NO: 53929 - DNA, 20 bp, synthetic construct
  source 1..20: mol_type = other DNA
acgtcttcagggagcaccaa

SEQ ID NO: 53930 - DNA, 20 bp, synthetic construct
  source 1..20: mol_type = other DNA
cgcgggcaggcagcggcgaa

SEQ ID NO: 53931 - DNA, 20 bp, synthetic construct
  source 1..20: mol_type = other DNA
tgtgggaactggaactttaa

SEQ ID NO: 53932 - DNA, 20 bp, synthetic construct
  source 1..20: mol_type = other DNA
gcagatcgacgtggccatca

SEQ ID NO: 53933 - DNA, 20 bp, synthetic construct
  source 1..20: mol_type = other DNA
ctatgacagcttcgactcag

SEQ ID NO: 53934 - DNA, 20 bp, synthetic construct
  source 1..20: mol_type = other DNA
ggcggcggaggtggtagtgg

SEQ ID NO: 53935 - DNA, 20 bp, synthetic construct
  source 1..20: mol_type = other DNA
cgaggtgacagcagcattgc

SEQ ID NO: 53936 - DNA, 20 bp, synthetic construct
  source 1..20: mol_type = other DNA
ctgagcacatagcatcgacg

SEQ ID NO: 53937 - DNA, 20 bp, synthetic construct
  source 1..20: mol_type = other DNA
agaatgaggctggtgattca

SEQ ID NO: 53938 - DNA, 20 bp, synthetic construct
  source 1..20: mol_type = other DNA
ccccgctgccctccactcgc

SEQ ID NO: 53939 - DNA, 20 bp, synthetic construct
  source 1..20: mol_type = other DNA
catagatttgtttcgaggca

SEQ ID NO: 53940 - DNA, 20 bp, synthetic construct
  source 1..20: mol_type = other DNA
agcaggagcgctacatcgaa

SEQ ID NO: 53941 - DNA, 20 bp, synthetic construct
  source 1..20: mol_type = other DNA
tgtgtctggagagggcggcc

SEQ ID NO: 53942 - DNA, 20 bp, synthetic construct
  source 1..20: mol_type = other DNA
gcacaacatcccacagcggg

SEQ ID NO: 53943 - DNA, 20 bp, synthetic construct
  source 1..20: mol_type = other DNA
ttaggtctggggacgaagta

SEQ ID NO: 53944 - DNA, 20 bp, synthetic construct
  source 1..20: mol_type = other DNA
ctcaaactccgtctggttgg

SEQ ID NO: 53945 - DNA, 20 bp, synthetic construct
  source 1..20: mol_type = other DNA
ccagaccagcacctgctcct

SEQ ID NO: 53946 - DNA, 20 bp, synthetic construct
  source 1..20: mol_type = other DNA
tgcccccttccagaaagctc

SEQ ID NO: 53947 - DNA, 20 bp, synthetic construct
  source 1..20: mol_type = other DNA
cgttcccaaaaccatccaga

SEQ ID NO: 53948 - DNA, 20 bp, synthetic construct
  source 1..20: mol_type = other DNA
agatgatggcagtccctaga

SEQ ID NO: 53949 - DNA, 20 bp, synthetic construct
  source 1..20: mol_type = other DNA
ggcggccagcaggtaggtgc

SEQ ID NO: 53950 - DNA, 20 bp, synthetic construct
  source 1..20: mol_type = other DNA
gcaggtgtgggctctaggct

SEQ ID NO: 53951 - DNA, 20 bp, synthetic construct
  source 1..20: mol_type = other DNA
actttcagaatggtccaccc

SEQ ID NO: 53952 - DNA, 20 bp, synthetic construct
  source 1..20: mol_type = other DNA
tgagtctccaggagaggtcc

SEQ ID NO: 53953 - DNA, 20 bp, synthetic construct
  source 1..20: mol_type = other DNA
caagagtaggtttttctctt

SEQ ID NO: 53954 - DNA, 20 bp, synthetic construct
  source 1..20: mol_type = other DNA
atccgcaggaaggggacagg

SEQ ID NO: 53955 - DNA, 20 bp, synthetic construct
  source 1..20: mol_type = other DNA
ctagaagagatgctgctggc

SEQ ID NO: 53956 - DNA, 20 bp, synthetic construct
  source 1..20: mol_type = other DNA
cagccagcttcttgtgctgt

SEQ ID NO: 53957 - DNA, 20 bp, synthetic construct
  source 1..20: mol_type = other DNA
ccacgatgactgcctgcaag

SEQ ID NO: 53958 - DNA, 20 bp, synthetic construct
  source 1..20: mol_type = other DNA
tcctcaatgtccccaatgga

SEQ ID NO: 53959 - DNA, 20 bp, synthetic construct
  source 1..20: mol_type = other DNA
gctcattgtatcctcccttc

SEQ ID NO: 53960 - DNA, 20 bp, synthetic construct
  source 1..20: mol_type = other DNA
aaacatcagaggaataatgt

SEQ ID NO: 53961 - DNA, 20 bp, synthetic construct
  source 1..20: mol_type = other DNA
ctccgtgttctgactcttga

SEQ ID NO: 53962 - DNA, 20 bp, synthetic construct
  source 1..20: mol_type = other DNA
agctgaagtctagcagctcc

SEQ ID NO: 53963 - DNA, 20 bp, synthetic construct
  source 1..20: mol_type = other DNA
ccccgagaagtgggtccccg

SEQ ID NO: 53964 - DNA, 20 bp, synthetic construct
  source 1..20: mol_type = other DNA
atcctcatgcttgttccact

SEQ ID NO: 53965 - DNA, 20 bp, synthetic construct
  source 1..20: mol_type = other DNA
gtgcaactctccgtacatcg

SEQ ID NO: 53966 - DNA, 20 bp, synthetic construct
  source 1..20: mol_type = other DNA
agtgatctgaaggaagaggt

SEQ ID NO: 53967 - DNA, 20 bp, synthetic construct
  source 1..20: mol_type = other DNA
ccagctcaagctgcagttcg

SEQ ID NO: 53968 - DNA, 20 bp, synthetic construct
  source 1..20: mol_type = other DNA
atatccccagatctactggg

SEQ ID NO: 53969 - DNA, 20 bp, synthetic construct
  source 1..20: mol_type = other DNA
tccttcatttcaagtgtaag

SEQ ID NO: 53970 - DNA, 20 bp, synthetic construct
  source 1..20: mol_type = other DNA
caaggactcaccgtctttgg

SEQ ID NO: 53971 - DNA, 20 bp, synthetic construct
  source 1..20: mol_type = other DNA
caaaactgtgcacaggtatg

SEQ ID NO: 53972 - DNA, 20 bp, synthetic construct
  source 1..20: mol_type = other DNA
aaggtgcagctgggcggtgt

SEQ ID NO: 53973 - DNA, 20 bp, synthetic construct
  source 1..20: mol_type = other DNA
accagtaccaatatacaaac

SEQ ID NO: 53974 - DNA, 20 bp, synthetic construct
  source 1..20: mol_type = other DNA
ctgcccgccctcgcgtcgcc

SEQ ID NO: 53975 - DNA, 20 bp, synthetic construct
  source 1..20: mol_type = other DNA
acatagatattctctccctt

SEQ ID NO: 53976 - DNA, 20 bp, synthetic construct
  source 1..20: mol_type = other DNA
accgggggtataggtggagc

SEQ ID NO: 53977 - DNA, 20 bp, synthetic construct
  source 1..20: mol_type = other DNA
ctggtgggggcttccctcgg

SEQ ID NO: 53978 - DNA, 20 bp, synthetic construct
  source 1..20: mol_type = other DNA
ggcttattgagatccacatc

SEQ ID NO: 53979 - DNA, 20 bp, synthetic construct
  source 1..20: mol_type = other DNA
gcataggtgctgacttcaca

SEQ ID NO: 53980 - DNA, 20 bp, synthetic construct
  source 1..20: mol_type = other DNA
ctgctggtgttcgcgagctc

SEQ ID NO: 53981 - DNA, 20 bp, synthetic construct
  source 1..20: mol_type = other DNA
acatcctttaatcaggtatg

SEQ ID NO: 53982 - DNA, 20 bp, synthetic construct
  source 1..20: mol_type = other DNA
atatgtaccaagcagttatc

SEQ ID NO: 53983 - DNA, 20 bp, synthetic construct
  source 1..20: mol_type = other DNA
ggagtatgtgaatgtgtccc

SEQ ID NO: 53984 - DNA, 20 bp, synthetic construct
  source 1..20: mol_type = other DNA
agagaaaatggcggcggcgg

SEQ ID NO: 53985 - DNA, 20 bp, synthetic construct
  source 1..20: mol_type = other DNA
atggagcatggaatatacac

SEQ ID NO: 53986 - DNA, 20 bp, synthetic construct
  source 1..20: mol_type = other DNA
catcgatctcatttttcgtg

SEQ ID NO: 53987 - DNA, 20 bp, synthetic construct
  source 1..20: mol_type = other DNA
agcacttgtggggccgctcc

SEQ ID NO: 53988 - DNA, 20 bp, synthetic construct
  source 1..20: mol_type = other DNA
gggggctaatgtgagcgatg

SEQ ID NO: 53989 - DNA, 20 bp, synthetic construct
  source 1..20: mol_type = other DNA
ccacagtagtacacgtcatc

SEQ ID NO: 53990 - DNA, 20 bp, synthetic construct
  source 1..20: mol_type = other DNA
cccgctgcgtccgcgggctc

SEQ ID NO: 53991 - DNA, 20 bp, synthetic construct
  source 1..20: mol_type = other DNA
tgggtgggctgtgacctctc

SEQ ID NO: 53992 - DNA, 20 bp, synthetic construct
  source 1..20: mol_type = other DNA
gctaatctggagctctgaca

SEQ ID NO: 53993 - DNA, 20 bp, synthetic construct
  source 1..20: mol_type = other DNA
actgatattttatattgaaa

SEQ ID NO: 53994 - DNA, 20 bp, synthetic construct
  source 1..20: mol_type = other DNA
gagggttaaaggcagtggag

SEQ ID NO: 53995 - DNA, 20 bp, synthetic construct
  source 1..20: mol_type = other DNA
tctttggagcagctgagctc

SEQ ID NO: 53996 - DNA, 20 bp, synthetic construct
  source 1..20: mol_type = other DNA
atttccctgcaataataccc

SEQ ID NO: 53997 - DNA, 20 bp, synthetic construct
  source 1..20: mol_type = other DNA
cgatgacagtggtccactgc

SEQ ID NO: 53998 - DNA, 20 bp, synthetic construct
  source 1..20: mol_type = other DNA
tattggccttcatgcctccc

SEQ ID NO: 53999 - DNA, 20 bp, synthetic construct
  source 1..20: mol_type = other DNA
ctcggcgatggtagggttga

SEQ ID NO: 54000 - DNA, 20 bp, synthetic construct
  source 1..20: mol_type = other DNA
agcatctcacggtgttggct

SEQ ID NO: 54001 - DNA, 20 bp, synthetic construct
  source 1..20: mol_type = other DNA
gataaggtagtgatagggag

SEQ ID NO: 54002 - DNA, 20 bp, synthetic construct
  source 1..20: mol_type = other DNA
ggcccttgggcatgcctggg

SEQ ID NO: 54003 - DNA, 20 bp, synthetic construct
  source 1..20: mol_type = other DNA
atggagaagcagcggtcctc

SEQ ID NO: 54004 - DNA, 20 bp, synthetic construct
  source 1..20: mol_type = other DNA
cagcggagcctggaagcgcc

SEQ ID NO: 54005 - DNA, 20 bp, synthetic construct
  source 1..20: mol_type = other DNA
gcagcaacttgacggtgcac

SEQ ID NO: 54006 - DNA, 20 bp, synthetic construct
  source 1..20: mol_type = other DNA
ggagtcgttgtgctgcacaa

SEQ ID NO: 54007 - DNA, 20 bp, synthetic construct
  source 1..20: mol_type = other DNA
caaactcgtggaggcctgcg

SEQ ID NO: 54008 - DNA, 20 bp, synthetic construct
  source 1..20: mol_type = other DNA
aaactggcgtcccagcactg

SEQ ID NO: 54009 - DNA, 20 bp, synthetic construct
  source 1..20: mol_type = other DNA
gattcatgccatgccagttc

SEQ ID NO: 54010 - DNA, 20 bp, synthetic construct
  source 1..20: mol_type = other DNA
aacaacttacgcaattcttc

SEQ ID NO: 54011 - DNA, 20 bp, synthetic construct
  source 1..20: mol_type = other DNA
gtaattaatgatcctatcca

SEQ ID NO: 54012 - DNA, 20 bp, synthetic construct
  source 1..20: mol_type = other DNA
gaggttggagcacagggaat

SEQ ID NO: 54013 - DNA, 20 bp, synthetic construct
  source 1..20: mol_type = other DNA
gtccttccgagacttggcat

SEQ ID NO: 54014 - DNA, 20 bp, synthetic construct
  source 1..20: mol_type = other DNA
ggctgccgggcgtgctgtgt

SEQ ID NO: 54015 - DNA, 20 bp, synthetic construct
  source 1..20: mol_type = other DNA
agtggcctgtcaactcccca

SEQ ID NO: 54016 - DNA, 20 bp, synthetic construct
  source 1..20: mol_type = other DNA
gaagggaagagcatgtttgc

SEQ ID NO: 54017 - DNA, 20 bp, synthetic construct
  source 1..20: mol_type = other DNA
tttcttctaaaatagtccat

SEQ ID NO: 54018 - DNA, 20 bp, synthetic construct
  source 1..20: mol_type = other DNA
gctgccatcaaggctggtaa

SEQ ID NO: 54019 - DNA, 20 bp, synthetic construct
  source 1..20: mol_type = other DNA
ggcagagcaggaggagatgg

SEQ ID NO: 54020 - DNA, 20 bp, synthetic construct
  source 1..20: mol_type = other DNA
ccaggccaaggacccccggg

SEQ ID NO: 54021 - DNA, 20 bp, synthetic construct
  source 1..20: mol_type = other DNA
gcttcgttgaagcaggagaa

SEQ ID NO: 54022 - DNA, 20 bp, synthetic construct
  source 1..20: mol_type = other DNA
cctccgctgtggcatgggca

SEQ ID NO: 54023 - DNA, 20 bp, synthetic construct
  source 1..20: mol_type = other DNA
ccagacacaccatctccagt

SEQ ID NO: 54024 - DNA, 20 bp, synthetic construct
  source 1..20: mol_type = other DNA
tgaacttgagaaactattgc

SEQ ID NO: 54025 - DNA, 20 bp, synthetic construct
  source 1..20: mol_type = other DNA
tgacctggctgcacgcactg

SEQ ID NO: 54026 - DNA, 20 bp, synthetic construct
  source 1..20: mol_type = other DNA
ccatgtctctgggctaggcc

SEQ ID NO: 54027 - DNA, 20 bp, synthetic construct
  source 1..20: mol_type = other DNA
tgatgacggcttccatttcg

SEQ ID NO: 54028 - DNA, 20 bp, synthetic construct
  source 1..20: mol_type = other DNA
ttggtgtagacagatggcca

SEQ ID NO: 54029 - DNA, 20 bp, synthetic construct
  source 1..20: mol_type = other DNA
gtgcaccctctcaggtaggc

SEQ ID NO: 54030 - DNA, 20 bp, synthetic construct
  source 1..20: mol_type = other DNA
tgaggagatgctagcagagc

SEQ ID NO: 54031 - DNA, 20 bp, synthetic construct
  source 1..20: mol_type = other DNA
gcctagatcggctagaaaac

SEQ ID NO: 54032 - DNA, 20 bp, synthetic construct
  source 1..20: mol_type = other DNA
ctggaggtaaaggaggaggt

SEQ ID NO: 54033 - DNA, 20 bp, synthetic construct
  source 1..20: mol_type = other DNA
ccacctctttgccctgatgc

SEQ ID NO: 54034 - DNA, 20 bp, synthetic construct
  source 1..20: mol_type = other DNA
tgcccgggagatggactcgc

SEQ ID NO: 54035 - DNA, 20 bp, synthetic construct
  source 1..20: mol_type = other DNA
catgatgggcaggcagagaa

SEQ ID NO: 54036 - DNA, 20 bp, synthetic construct
  source 1..20: mol_type = other DNA
atgagaacgtgcggcacaag

SEQ ID NO: 54037 - DNA, 20 bp, synthetic construct
  source 1..20: mol_type = other DNA
cgatgtagttcatctagact

SEQ ID NO: 54038 - DNA, 20 bp, synthetic construct
  source 1..20: mol_type = other DNA
aagatgggatgagaaaggac

SEQ ID NO: 54039 - DNA, 20 bp, synthetic construct
  source 1..20: mol_type = other DNA
actccactgggcagttttgg

SEQ ID NO: 54040 - DNA, 20 bp, synthetic construct
  source 1..20: mol_type = other DNA
atacactaacctttgggttt

SEQ ID NO: 54041 - DNA, 20 bp, synthetic construct
  source 1..20: mol_type = other DNA
atctctcaggtttgaggtag

SEQ ID NO: 54042 - DNA, 20 bp, synthetic construct
  source 1..20: mol_type = other DNA
gccgcatatgccctaggaaa

SEQ ID NO: 54043 - DNA, 20 bp, synthetic construct
  source 1..20: mol_type = other DNA
atggagcccgaggccggcgc

SEQ ID NO: 54044 - DNA, 20 bp, synthetic construct
  source 1..20: mol_type = other DNA
gaacatggacgtcaggtggg

SEQ ID NO: 54045 - DNA, 20 bp, synthetic construct
  source 1..20: mol_type = other DNA
ccccccacaatagggggccg

SEQ ID NO: 54046 - DNA, 20 bp, synthetic construct
  source 1..20: mol_type = other DNA
atagagttatagatggccag

SEQ ID NO: 54047 - DNA, 20 bp, synthetic construct
  source 1..20: mol_type = other DNA
aatattgttttggcaagtac

SEQ ID NO: 54048 - DNA, 20 bp, synthetic construct
  source 1..20: mol_type = other DNA
cactcagcatctggtcatgc

SEQ ID NO: 54049 - DNA, 20 bp, synthetic construct
  source 1..20: mol_type = other DNA
atggagtcagatatcaggat

SEQ ID NO: 54050 - DNA, 20 bp, synthetic construct
  source 1..20: mol_type = other DNA
ccagagtgagggttctgaga

SEQ ID NO: 54051 - DNA, 20 bp, synthetic construct
  source 1..20: mol_type = other DNA
tgttggtctataaccaatca

SEQ ID NO: 54052 - DNA, 20 bp, synthetic construct
  source 1..20: mol_type = other DNA
ctctgagtcgaagctgtcat

SEQ ID NO: 54053 - DNA, 20 bp, synthetic construct
  source 1..20: mol_type = other DNA
gctcatctactgcctgaagg

SEQ ID NO: 54054 - DNA, 20 bp, synthetic construct
  source 1..20: mol_type = other DNA
gtgccgacagctctcacagt

SEQ ID NO: 54055 - DNA, 20 bp, synthetic construct
  source 1..20: mol_type = other DNA
ttgatgaggtatgtgcattc

SEQ ID NO: 54056 - DNA, 20 bp, synthetic construct
  source 1..20: mol_type = other DNA
atctagactaggatgaggct

SEQ ID NO: 54057 - DNA, 20 bp, synthetic construct
  source 1..20: mol_type = other DNA
tgtaccaggacaggcacgag

SEQ ID NO: 54058 - DNA, 20 bp, synthetic construct
  source 1..20: mol_type = other DNA
ggagtcgtaggtgactttca

SEQ ID NO: 54059 - DNA, 20 bp, synthetic construct
  source 1..20: mol_type = other DNA
ctagcatgtaccagcgccta

SEQ ID NO: 54060 - DNA, 20 bp, synthetic construct
  source 1..20: mol_type = other DNA
ccagtgcgagccgcaggccc

SEQ ID NO: 54061 - DNA, 20 bp, synthetic construct
  source 1..20: mol_type = other DNA
aaggagttacatcttaacac

SEQ ID NO: 54062 - DNA, 20 bp, synthetic construct
  source 1..20: mol_type = other DNA
gcgcctccgggaagtgctcc

SEQ ID NO: 54063 - DNA, 20 bp, synthetic construct
  source 1..20: mol_type = other DNA
tgtcacacctagtggcccct

SEQ ID NO: 54064 - DNA, 20 bp, synthetic construct
  source 1..20: mol_type = other DNA
ttcagacatgagaacatcat

SEQ ID NO: 54065 - DNA, 20 bp, synthetic construct
  source 1..20: mol_type = other DNA
caggcgtgtgccaccatacc

SEQ ID NO: 54066 - DNA, 20 bp, synthetic construct
  source 1..20: mol_type = other DNA
cagcgacccagaggagctca

SEQ ID NO: 54067 - DNA, 20 bp, synthetic construct
  source 1..20: mol_type = other DNA
aaaagggaaagtccgaatta

SEQ ID NO: 54068 - DNA, 20 bp, synthetic construct
  source 1..20: mol_type = other DNA
cttgttagcctccaagggtg

SEQ ID NO: 54069 - DNA, 20 bp, synthetic construct
  source 1..20: mol_type = other DNA
ccgtgttcgcgctgctgacc

SEQ ID NO: 54070 - DNA, 20 bp, synthetic construct
  source 1..20: mol_type = other DNA
ccccgcggccaccactggca

SEQ ID NO: 54071 - DNA, 20 bp, synthetic construct
  source 1..20: mol_type = other DNA
tgatgcacccagcaccccac

SEQ ID NO: 54072 - DNA, 20 bp, synthetic construct
  source 1..20: mol_type = other DNA
agcccagcaggctggggctc

SEQ ID NO: 54073 - DNA, 20 bp, synthetic construct
  source 1..20: mol_type = other DNA
ccagtccagctgccaggtgc

SEQ ID NO: 54074 - DNA, 20 bp, synthetic construct
  source 1..20: mol_type = other DNA
gttcaattctttgaatgagc

SEQ ID NO: 54075 - DNA, 20 bp, synthetic construct
  source 1..20: mol_type = other DNA
gatgacctgagttttcacaa

SEQ ID NO: 54076 - DNA, 20 bp, synthetic construct
  source 1..20: mol_type = other DNA
ggaggccgtgggtctgtgca

SEQ ID NO: 54077 - DNA, 20 bp, synthetic construct
  source 1..20: mol_type = other DNA
gtcccctgtgctctgtttgg

SEQ ID NO: 54078 - DNA, 20 bp, synthetic construct
  source 1..20: mol_type = other DNA
acgcccttacgcttgcccag

SEQ ID NO: 54079 - DNA, 20 bp, synthetic construct
  source 1..20: mol_type = other DNA
acgggtctgagatgtccagc

SEQ ID NO: 54080 - DNA, 20 bp, synthetic construct
  source 1..20: mol_type = other DNA
gagaagtggctcaacgatgc

SEQ ID NO: 54081 - DNA, 20 bp, synthetic construct
  source 1..20: mol_type = other DNA
acagaaccggagaacagcac

SEQ ID NO: 54082 - DNA, 20 bp, synthetic construct
  source 1..20: mol_type = other DNA
agggtctcctagacatacct

SEQ ID NO: 54083 - DNA, 20 bp, synthetic construct
  source 1..20: mol_type = other DNA
agggattccagtgccaaggt

SEQ ID NO: 54084 - DNA, 20 bp, synthetic construct
  source 1..20: mol_type = other DNA
agtcccgggacctggaacag

SEQ ID NO: 54085 - DNA, 20 bp, synthetic construct
  source 1..20: mol_type = other DNA
aaactgttgatgatttctgg

SEQ ID NO: 54086 - DNA, 20 bp, synthetic construct
  source 1..20: mol_type = other DNA
aaatgtggagagccaccagg

SEQ ID NO: 54087 - DNA, 20 bp, synthetic construct
  source 1..20: mol_type = other DNA
aatccaaggtacggcacgga

SEQ ID NO: 54088 - DNA, 20 bp, synthetic construct
  source 1..20: mol_type = other DNA
tgggcaaccagtgttgggga

SEQ ID NO: 54089 - DNA, 20 bp, synthetic construct
  source 1..20: mol_type = other DNA
cctcccagctcaccctgctg

SEQ ID NO: 54090 - DNA, 20 bp, synthetic construct
  source 1..20: mol_type = other DNA
catggacaaagtcgtaggtg

SEQ ID NO: 54091 - DNA, 20 bp, synthetic construct
  source 1..20: mol_type = other DNA
cgcacagtggcgaacaaatt

SEQ ID NO: 54092 - DNA, 20 bp, synthetic construct
  source 1..20: mol_type = other DNA
tcctaccattatgtacccaa

SEQ ID NO: 54093 - DNA, 20 bp, synthetic construct
  source 1..20: mol_type = other DNA
cgggatgatgcccggtgtgg

SEQ ID NO: 54094 - DNA, 20 bp, synthetic construct
  source 1..20: mol_type = other DNA
cctggagtgaggggaaggtg

SEQ ID NO: 54095 - DNA, 20 bp, synthetic construct
  source 1..20: mol_type = other DNA
gaatggcatatcagcaaacc

SEQ ID NO: 54096 - DNA, 20 bp, synthetic construct
  source 1..20: mol_type = other DNA
tggtgcgttccacctccacg

SEQ ID NO: 54097 - DNA, 20 bp, synthetic construct
  source 1..20: mol_type = other DNA
ccggttgaataagatggagg

SEQ ID NO: 54098 - DNA, 20 bp, synthetic construct
  source 1..20: mol_type = other DNA
atggtcatcgggtaccgctg

SEQ ID NO: 54099 - DNA, 20 bp, synthetic construct
  source 1..20: mol_type = other DNA
ggcagcccctcgcccgggcc

SEQ ID NO: 54100 - DNA, 20 bp, synthetic construct
  source 1..20: mol_type = other DNA
gtcgttgtgctgcacaaggg

SEQ ID NO: 54101 - DNA, 20 bp, synthetic construct
  source 1..20: mol_type = other DNA
cgagagtggtgagcctgtga

SEQ ID NO: 54102 - DNA, 20 bp, synthetic construct
  source 1..20: mol_type = other DNA
cctggcggcggcgaggacgg

SEQ ID NO: 54103 - DNA, 20 bp, synthetic construct
  source 1..20: mol_type = other DNA
cgtagtgccggttaaccagc

SEQ ID NO: 54104 - DNA, 20 bp, synthetic construct
  source 1..20: mol_type = other DNA
ggcagcttaggaggtggctg

SEQ ID NO: 54105 - DNA, 20 bp, synthetic construct
  source 1..20: mol_type = other DNA
gggggaatgagaagctgagg

SEQ ID NO: 54106 - DNA, 20 bp, synthetic construct
  source 1..20: mol_type = other DNA
cccgtagtagaggtggtagg

SEQ ID NO: 54107 - DNA, 20 bp, synthetic construct
  source 1..20: mol_type = other DNA
aaaccaattcaaaaatgtga

SEQ ID NO: 54108 - DNA, 20 bp, synthetic construct
  source 1..20: mol_type = other DNA
ctcaagtatgcaagcctgtg

SEQ ID NO: 54109 - DNA, 20 bp, synthetic construct
  source 1..20: mol_type = other DNA
ctgagtctgactgggggcac

SEQ ID NO: 54110 - DNA, 20 bp, synthetic construct
  source 1..20: mol_type = other DNA
ttcttcttgatttgatccca

SEQ ID NO: 54111 - DNA, 20 bp, synthetic construct
  source 1..20: mol_type = other DNA
gtccaccagggcctggagtg

SEQ ID NO: 54112 - DNA, 20 bp, synthetic construct
  source 1..20: mol_type = other DNA
tagagaacttggcgtatcac

SEQ ID NO: 54113 - DNA, 20 bp, synthetic construct
  source 1..20: mol_type = other DNA
agcttccggtaccctgcgga

SEQ ID NO: 54114 - DNA, 20 bp, synthetic construct
  source 1..20: mol_type = other DNA
tggtcaacaaaatccacgtc

SEQ ID NO: 54115 - DNA, 20 bp, synthetic construct
  source 1..20: mol_type = other DNA
catctcttcggaaaaacctc

SEQ ID NO: 54116 - DNA, 20 bp, synthetic construct
  source 1..20: mol_type = other DNA
tccttttgtggagattgagg

SEQ ID NO: 54117 - DNA, 20 bp, synthetic construct
  source 1..20: mol_type = other DNA
aaagagagaagaaggggaca

SEQ ID NO: 54118 - DNA, 20 bp, synthetic construct
  source 1..20: mol_type = other DNA
aaacttatctttaaggaact

SEQ ID NO: 54119 - DNA, 20 bp, synthetic construct
  source 1..20: mol_type = other DNA
gacaggcattgcaaacacac

SEQ ID NO: 54120 - DNA, 20 bp, synthetic construct
  source 1..20: mol_type = other DNA
ttttacctcgtagggttctc

SEQ ID NO: 54121 - DNA, 20 bp, synthetic construct
  source 1..20: mol_type = other DNA
gttgacctgctccaggtcgt

SEQ ID NO: 54122 - DNA, 20 bp, synthetic construct
  source 1..20: mol_type = other DNA
ggctgcgaagtcgcgtggtg

SEQ ID NO: 54123 - DNA, 20 bp, synthetic construct
  source 1..20: mol_type = other DNA
gcactgcagtgcaccacaac

SEQ ID NO: 54124 - DNA, 20 bp, synthetic construct
  source 1..20: mol_type = other DNA
ggtgggaatatacccctcag

SEQ ID NO: 54125 - DNA, 20 bp, synthetic construct
  source 1..20: mol_type = other DNA
gatccccatgaccgaagcgg

SEQ ID NO: 54126 - DNA, 20 bp, synthetic construct
  source 1..20: mol_type = other DNA
tgcatggctgtgtctccagg

SEQ ID NO: 54127 - DNA, 20 bp, synthetic construct
  source 1..20: mol_type = other DNA
tcgcccacgccgtccccgca

SEQ ID NO: 54128 - DNA, 20 bp, synthetic construct
  source 1..20: mol_type = other DNA
ggacagaaatgcttgacttc

SEQ ID NO: 54129 - DNA, 20 bp, synthetic construct
  source 1..20: mol_type = other DNA
tgcttatggtcagaagcagt

SEQ ID NO: 54130 - DNA, 20 bp, synthetic construct
  source 1..20: mol_type = other DNA
caagtagggattggcatctt

SEQ ID NO: 54131 - DNA, 20 bp, synthetic construct
  source 1..20: mol_type = other DNA
ggccgccacggtgcccagca

SEQ ID NO: 54132 - DNA, 20 bp, synthetic construct
  source 1..20: mol_type = other DNA
cagcaatttagatgaacagc

SEQ ID NO: 54133 - DNA, 20 bp, synthetic construct
  source 1..20: mol_type = other DNA
cagcaggagcttgttgaaag

SEQ ID NO: 54134 - DNA, 20 bp, synthetic construct
  source 1..20: mol_type = other DNA
ccaggaggctgatcgcggcg

SEQ ID NO: 54135 - DNA, 20 bp, synthetic construct
  source 1..20: mol_type = other DNA
gcaggttttatttccggaac

SEQ ID NO: 54136 - DNA, 20 bp, synthetic construct
  source 1..20: mol_type = other DNA
agttatgtttgaatgcgata

SEQ ID NO: 54137 - DNA, 20 bp, synthetic construct
  source 1..20: mol_type = other DNA
tgatgaattcttcatacccc

SEQ ID NO: 54138 - DNA, 20 bp, synthetic construct
  source 1..20: mol_type = other DNA
ctgggccttgtgcagcctgg

SEQ ID NO: 54139 - DNA, 20 bp, synthetic construct
  source 1..20: mol_type = other DNA
ttctactgaggactgtgaag

SEQ ID NO: 54140 - DNA, 20 bp, synthetic construct
  source 1..20: mol_type = other DNA
cccccacgccatcctgcgtc

SEQ ID NO: 54141 - DNA, 20 bp, synthetic construct
  source 1..20: mol_type = other DNA
tctgttcttcttacagagta

SEQ ID NO: 54142 - DNA, 20 bp, synthetic construct
  source 1..20: mol_type = other DNA
ccgcggcgggcgggctgagc

SEQ ID NO: 54143 - DNA, 20 bp, synthetic construct
  source 1..20: mol_type = other DNA
gggctgcatcagaaggagag

SEQ ID NO: 54144 - DNA, 20 bp, synthetic construct
  source 1..20: mol_type = other DNA
tgatgtctccacccttcaga

SEQ ID NO: 54145 - DNA, 20 bp, synthetic construct
  source 1..20: mol_type = other DNA
catggtttccaccaagatcc

SEQ ID NO: 54146 - DNA, 20 bp, synthetic construct
  source 1..20: mol_type = other DNA
ccaaagtcagctggaagcag

SEQ ID NO: 54147 - DNA, 20 bp, synthetic construct
  source 1..20: mol_type = other DNA
cacctcccagctcaccctgc

SEQ ID NO: 54148 - DNA, 20 bp, synthetic construct
  source 1..20: mol_type = other DNA
acgctggcggggtgcaggtg

SEQ ID NO: 54149 - DNA, 20 bp, synthetic construct
  source 1..20: mol_type = other DNA
ttgctgaggtttgcgtagac

SEQ ID NO: 54150 - DNA, 20 bp, synthetic construct
  source 1..20: mol_type = other DNA
gcctgagaggaagatgtggg

SEQ ID NO: 54151 - DNA, 20 bp, synthetic construct
  source 1..20: mol_type = other DNA
ggacgtagcgcggcgtgtgg

SEQ ID NO: 54152 - DNA, 20 bp, synthetic construct
  source 1..20: mol_type = other DNA
cgaacatcttccgtgtccgg

SEQ ID NO: 54153 - DNA, 20 bp, synthetic construct
  source 1..20: mol_type = other DNA
ttataatgcaagccctttgc

SEQ ID NO: 54154 - DNA, 20 bp, synthetic construct
  source 1..20: mol_type = other DNA
cctgtcagaacagcaggaga

SEQ ID NO: 54155 - DNA, 20 bp, synthetic construct
  source 1..20: mol_type = other DNA
agacagtgaccaacaccttc

SEQ ID NO: 54156 - DNA, 20 bp, synthetic construct
  source 1..20: mol_type = other DNA
tcatcttgtagtaccgctcc

SEQ ID NO: 54157 - DNA, 20 bp, synthetic construct
  source 1..20: mol_type = other DNA
agctgtggacaaggagggtc

SEQ ID NO: 54158 - DNA, 20 bp, synthetic construct
  source 1..20: mol_type = other DNA
gcccagcaccatgaagatca

SEQ ID NO: 54159 - DNA, 20 bp, synthetic construct
  source 1..20: mol_type = other DNA
gagatgagtccccgctacct

SEQ ID NO: 54160 - DNA, 20 bp, synthetic construct
  source 1..20: mol_type = other DNA
ttcagtgaaagccatctcgg

SEQ ID NO: 54161 - DNA, 20 bp, synthetic construct
  source 1..20: mol_type = other DNA
ggtgatcctggtgttggttg

SEQ ID NO: 54162 - DNA, 20 bp, synthetic construct
  source 1..20: mol_type = other DNA
gatcttgtggacgctgtgct

SEQ ID NO: 54163 - DNA, 20 bp, synthetic construct
  source 1..20: mol_type = other DNA
gctgtagaagccaaacaagt

SEQ ID NO: 54164 - DNA, 20 bp, synthetic construct
  source 1..20: mol_type = other DNA
tgatgggcagctgagcccgg

SEQ ID NO: 54165 - DNA, 20 bp, synthetic construct
  source 1..20: mol_type = other DNA
tgcactggcggattggtggg

SEQ ID NO: 54166 - DNA, 20 bp, synthetic construct
  source 1..20: mol_type = other DNA
acgcatgccaggcctggttg

SEQ ID NO: 54167 - DNA, 20 bp, synthetic construct
  source 1..20: mol_type = other DNA
gagccatggtggccatgaag

SEQ ID NO: 54168 - DNA, 20 bp, synthetic construct
  source 1..20: mol_type = other DNA
ggagaaaggagagttcaggt

SEQ ID NO: 54169 - DNA, 20 bp, synthetic construct
  source 1..20: mol_type = other DNA
tgggattacctttaatgtca

SEQ ID NO: 54170 - DNA, 20 bp, synthetic construct
  source 1..20: mol_type = other DNA
gattcactggtggagagtcc

SEQ ID NO: 54171 - DNA, 20 bp, synthetic construct
  source 1..20: mol_type = other DNA
atgggatgagaaaggacagg

SEQ ID NO: 54172 - DNA, 20 bp, synthetic construct
  source 1..20: mol_type = other DNA
tccaaatggtaacgttcatg

SEQ ID NO: 54173 - DNA, 20 bp, synthetic construct
  source 1..20: mol_type = other DNA
caagccccggagaacctgca

SEQ ID NO: 54174 - DNA, 20 bp, synthetic construct
  source 1..20: mol_type = other DNA
cgaagctggggtagtgctga

SEQ ID NO: 54175 - DNA, 20 bp, synthetic construct
  source 1..20: mol_type = other DNA
tgcagtaatgtcagcgagaa

SEQ ID NO: 54176 - DNA, 20 bp, synthetic construct
  source 1..20: mol_type = other DNA
ctctttcaaaatcatagaag

SEQ ID NO: 54177 - DNA, 20 bp, synthetic construct
  source 1..20: mol_type = other DNA
cagaagcagcagcagcagtc

SEQ ID NO: 54178 - DNA, 20 bp, synthetic construct
  source 1..20: mol_type = other DNA
aactaaggcccagagaagtg

SEQ ID NO: 54179 - DNA, 20 bp, synthetic construct
  source 1..20: mol_type = other DNA
tgttggcgtacaggtctttg

SEQ ID NO: 54180 - DNA, 20 bp, synthetic construct
  source 1..20: mol_type = other DNA
aaagccattgaccagggcct

SEQ ID NO: 54181 - DNA, 20 bp, synthetic construct
  source 1..20: mol_type = other DNA
gctctactacatcggagggg

SEQ ID NO: 54182 - DNA, 20 bp, synthetic construct
  source 1..20: mol_type = other DNA
catccctgggcaggtcgccg

SEQ ID NO: 54183 - DNA, 20 bp, synthetic construct
  source 1..20: mol_type = other DNA
catagacctggaccagccag

SEQ ID NO: 54184 - DNA, 20 bp, synthetic construct
  source 1..20: mol_type = other DNA
ttctgaatcatgtctgataa

SEQ ID NO: 54185 - DNA, 20 bp, synthetic construct
  source 1..20: mol_type = other DNA
caaatcttgggagaggctta

SEQ ID NO: 54186 - DNA, 20 bp, synthetic construct
  source 1..20: mol_type = other DNA
gagggcacctgagaaggaac

SEQ ID NO: 54187 - DNA, 20 bp, synthetic construct
  source 1..20: mol_type = other DNA
agaatatcagttagtacaag

SEQ ID NO: 54188 - DNA, 20 bp, synthetic construct
  source 1..20: mol_type = other DNA
atagtttctcaagttcagct

SEQ ID NO: 54189 - DNA, 20 bp, synthetic construct
  source 1..20: mol_type = other DNA
ctacatggaaaacaagcctc

SEQ ID NO: 54190 - DNA, 20 bp, synthetic construct
  source 1..20: mol_type = other DNA
gtcacacttatactcatgtt

SEQ ID NO: 54191 - DNA, 20 bp, synthetic construct
  source 1..20: mol_type = other DNA
ggtcgttgaacctggccacc

SEQ ID NO: 54192 - DNA, 20 bp, synthetic construct
  source 1..20: mol_type = other DNA
ggcctcaggttctcggcccc

SEQ ID NO: 54193 - DNA, 20 bp, synthetic construct
  source 1..20: mol_type = other DNA
cctctacgaggaggagatgc

SEQ ID NO: 54194 - DNA, 20 bp, synthetic construct
  source 1..20: mol_type = other DNA
agggatacgggtactggccc

SEQ ID NO: 54195 - DNA, 20 bp, synthetic construct
  source 1..20: mol_type = other DNA
aaacgctggaggaattagac

SEQ ID NO: 54196 - DNA, 20 bp, synthetic construct
  source 1..20: mol_type = other DNA
ttcctccccggagtccctgc

SEQ ID NO: 54197 - DNA, 20 bp, synthetic construct
  source 1..20: mol_type = other DNA
agactactggcgagaactgg

SEQ ID NO: 54198 - DNA, 20 bp, synthetic construct
  source 1..20: mol_type = other DNA
atcaacagctttagctgtca

SEQ ID NO: 54199 - DNA, 20 bp, synthetic construct
  source 1..20: mol_type = other DNA
gagaacagactccgcagatc

SEQ ID NO: 54200 - DNA, 20 bp, synthetic construct
  source 1..20: mol_type = other DNA
ttcacaaggcagggctttca

SEQ ID NO: 54201 - DNA, 20 bp, synthetic construct
  source 1..20: mol_type = other DNA
agggtaccggaagctggtga

SEQ ID NO: 54202 - DNA, 20 bp, synthetic construct
  source 1..20: mol_type = other DNA
ccaggatggcggcaaccgca

SEQ ID NO: 54203 - DNA, 20 bp, synthetic construct
  source 1..20: mol_type = other DNA
ctgtacccgcagagcctcag

SEQ ID NO: 54204 - DNA, 20 bp, synthetic construct
  source 1..20: mol_type = other DNA
cccccatgccatcctgcgtc

SEQ ID NO: 54205 - DNA, 20 bp, synthetic construct
  source 1..20: mol_type = other DNA
caagtggggcttcggcgcca

SEQ ID NO: 54206 - DNA, 20 bp, synthetic construct
  source 1..20: mol_type = other DNA
gcagtttctgtttaagagat

SEQ ID NO: 54207 - DNA, 20 bp, synthetic construct
  source 1..20: mol_type = other DNA
ctttggcactcctgacaaat

SEQ ID NO: 54208 - DNA, 20 bp, synthetic construct
  source 1..20: mol_type = other DNA
tccgccaggtggctgtatga

SEQ ID NO: 54209 - DNA, 20 bp, synthetic construct
  source 1..20: mol_type = other DNA
atcatcatctgtgaggaggg

SEQ ID NO: 54210 - DNA, 20 bp, synthetic construct
  source 1..20: mol_type = other DNA
acagacagatcggtaagcct

SEQ ID NO: 54211 - DNA, 20 bp, synthetic construct
  source 1..20: mol_type = other DNA
cgctgcattgagtgtgcgtg

SEQ ID NO: 54212 - DNA, 20 bp, synthetic construct
  source 1..20: mol_type = other DNA
acatacaaattgacatgcag

SEQ ID NO: 54213 - DNA, 20 bp, synthetic construct
  source 1..20: mol_type = other DNA
caattctcggaggtgttgct

SEQ ID NO: 54214 - DNA, 20 bp, synthetic construct
  source 1..20: mol_type = other DNA
gtagattataagtgtaaaaa

SEQ ID NO: 54215 - DNA, 20 bp, synthetic construct
  source 1..20: mol_type = other DNA
aaggctataaatacctcggc

SEQ ID NO: 54216 - DNA, 20 bp, synthetic construct
  source 1..20: mol_type = other DNA
attttcgtggagaaagcccc

SEQ ID NO: 54217 - DNA, 20 bp, synthetic construct
  source 1..20: mol_type = other DNA
ctggtaaatcgtagcccctc

SEQ ID NO: 54218 - DNA, 20 bp, synthetic construct
  source 1..20: mol_type = other DNA
ctcagctcctgtagcagcta

SEQ ID NO: 54219 - DNA, 20 bp, synthetic construct
  source 1..20: mol_type = other DNA
ctcgctctcccgaaccagga

SEQ ID NO: 54220 - DNA, 20 bp, synthetic construct
  source 1..20: mol_type = other DNA
ctgatggggtagggagggca

SEQ ID NO: 54221 - DNA, 20 bp, synthetic construct
  source 1..20: mol_type = other DNA
gaggatgattctcttggctg

SEQ ID NO: 54222 - DNA, 20 bp, synthetic construct
  source 1..20: mol_type = other DNA
aggggcctcccgcgcccccc

SEQ ID NO: 54223 - DNA, 20 bp, synthetic construct
  source 1..20: mol_type = other DNA
acacccctgagccaggtgag

SEQ ID NO: 54224 - DNA, 20 bp, synthetic construct
  source 1..20: mol_type = other DNA
acacagccactgttgattat

SEQ ID NO: 54225 - DNA, 20 bp, synthetic construct
  source 1..20: mol_type = other DNA
ttatacagctgcgtaaagtg

SEQ ID NO: 54226 - DNA, 20 bp, synthetic construct
  source 1..20: mol_type = other DNA
gttcacagagcgaggaggga

SEQ ID NO: 54227 - DNA, 20 bp, synthetic construct
  source 1..20: mol_type = other DNA
cgttgactcatgtgagttgg

SEQ ID NO: 54228 - DNA, 20 bp, synthetic construct
  source 1..20: mol_type = other DNA
aggaattcgtgcggcgccta

SEQ ID NO: 54229 - DNA, 20 bp, synthetic construct
  source 1..20: mol_type = other DNA
aaaccagcccgattcaagga

SEQ ID NO: 54230 - DNA, 20 bp, synthetic construct
  source 1..20: mol_type = other DNA
ctctgtcttgctctcgaagt

SEQ ID NO: 54231 - DNA, 20 bp, synthetic construct
  source 1..20: mol_type = other DNA
agatagagatgatctctaga

SEQ ID NO: 54232 - DNA, 20 bp, synthetic construct
  source 1..20: mol_type = other DNA
gcccttctcactggaggcac

SEQ ID NO: 54233 - DNA, 20 bp, synthetic construct
  source 1..20: mol_type = other DNA
tgctttcacacgctccagga

SEQ ID NO: 54234 - DNA, 20 bp, synthetic construct
  source 1..20: mol_type = other DNA
tgtcactgcaaaggtcaccc

SEQ ID NO: 54235 - DNA, 20 bp, synthetic construct
  source 1..20: mol_type = other DNA
cttactcacctctcctggtc

SEQ ID NO: 54236 - DNA, 20 bp, synthetic construct
  source 1..20: mol_type = other DNA
atccaggccctcggattggt

SEQ ID NO: 54237 - DNA, 20 bp, synthetic construct
  source 1..20: mol_type = other DNA
cctgcctggatgggtgtttt

SEQ ID NO: 54238 - DNA, 20 bp, synthetic construct
  source 1..20: mol_type = other DNA
atgataaaaattttcccttc

SEQ ID NO: 54239 - DNA, 20 bp, synthetic construct
  source 1..20: mol_type = other DNA
tatgagaatctcagttgatc

SEQ ID NO: 54240 - DNA, 20 bp, synthetic construct
  source 1..20: mol_type = other DNA
ggcacagctccgtcttgtag

SEQ ID NO: 54241 - DNA, 20 bp, synthetic construct
  source 1..20: mol_type = other DNA
cgcaagtactccgtgtggat

SEQ ID NO: 54242 - DNA, 20 bp, synthetic construct
  source 1..20: mol_type = other DNA
gattttgatggctctgtggt

SEQ ID NO: 54243 - DNA, 20 bp, synthetic construct
  source 1..20: mol_type = other DNA
ggaggccacagagcggcagg

SEQ ID NO: 54244 - DNA, 20 bp, synthetic construct
  source 1..20: mol_type = other DNA
agcacctgcaatgcagaaga

SEQ ID NO: 54245 - DNA, 20 bp, synthetic construct
  source 1..20: mol_type = other DNA
gcagacatgcaagatctgaa

SEQ ID NO: 54246 - DNA, 20 bp, synthetic construct
  source 1..20: mol_type = other DNA
tccccatacgcaggtcctgc

SEQ ID NO: 54247 - DNA, 20 bp, synthetic construct
  source 1..20: mol_type = other DNA
gcaggttctggaactggagc

SEQ ID NO: 54248 - DNA, 20 bp, synthetic construct
  source 1..20: mol_type = other DNA
aaaaccctcaagagtcaagg

SEQ ID NO: 54249 - DNA, 20 bp, synthetic construct
  source 1..20: mol_type = other DNA
ataaaagccaagttcaactt

SEQ ID NO: 54250 - DNA, 20 bp, synthetic construct
  source 1..20: mol_type = other DNA
ttagaagaggtgtcaaggct

SEQ ID NO: 54251 - DNA, 20 bp, synthetic construct
  source 1..20: mol_type = other DNA
gcggacctcgtgaaggacaa

SEQ ID NO: 54252 - DNA, 20 bp, synthetic construct
  source 1..20: mol_type = other DNA
cggtgggcacgtacacctcg

SEQ ID NO: 54253 - DNA, 20 bp, synthetic construct
  source 1..20: mol_type = other DNA
ctctagaaaccaaaagaaaa

SEQ ID NO: 54254 - DNA, 20 bp, synthetic construct
  source 1..20: mol_type = other DNA
tctttgctttgcatcagcgc

SEQ ID NO: 54255 - DNA, 20 bp, synthetic construct
  source 1..20: mol_type = other DNA
actattttaatgtccccgag

SEQ ID NO: 54256 - DNA, 20 bp, synthetic construct
  source 1..20: mol_type = other DNA
ccgaagagatgttgggtcat

SEQ ID NO: 54257 - DNA, 20 bp, synthetic construct
  source 1..20: mol_type = other DNA
tgcgagacaaggtgggagtg

SEQ ID NO: 54258 - DNA, 20 bp, synthetic construct
  source 1..20: mol_type = other DNA
gcggcacttaccccgcctgg

SEQ ID NO: 54259 - DNA, 20 bp, synthetic construct
  source 1..20: mol_type = other DNA
tcaggtccacattattgtcc

SEQ ID NO: 54260 - DNA, 20 bp, synthetic construct
  source 1..20: mol_type = other DNA
atgttgatgggggacaccgg

SEQ ID NO: 54261 - DNA, 20 bp, synthetic construct
  source 1..20: mol_type = other DNA
catgtccttcacgagttcct

SEQ ID NO: 54262 - DNA, 20 bp, synthetic construct
  source 1..20: mol_type = other DNA
cataaaaattttcatgctga

SEQ ID NO: 54263 - DNA, 20 bp, synthetic construct
  source 1..20: mol_type = other DNA
cagcaacgtggctgtgaacg

SEQ ID NO: 54264 - DNA, 20 bp, synthetic construct
  source 1..20: mol_type = other DNA
tgaggatgcggatgaggatg

SEQ ID NO: 54265 - DNA, 20 bp, synthetic construct
  source 1..20: mol_type = other DNA
gtcgaagaagacaatgacag

SEQ ID NO: 54266 - DNA, 20 bp, synthetic construct
  source 1..20: mol_type = other DNA
tgagctgcccaatgggctgg

SEQ ID NO: 54267 - DNA, 20 bp, synthetic construct
  source 1..20: mol_type = other DNA
taaaagttatgaatagcgct

SEQ ID NO: 54268 - DNA, 20 bp, synthetic construct
  source 1..20: mol_type = other DNA
gtcctccagggtgagctgct

SEQ ID NO: 54269 - DNA, 20 bp, synthetic construct
  source 1..20: mol_type = other DNA
gtaaaatcgttaaggtagtc

SEQ ID NO: 54270 - DNA, 20 bp, synthetic construct
  source 1..20: mol_type = other DNA
tgattaagcatgatattctc

SEQ ID NO: 54271 - DNA, 20 bp, synthetic construct
  source 1..20: mol_type = other DNA
tcgctggtctggagagaggg

SEQ ID NO: 54272 - DNA, 20 bp, synthetic construct
  source 1..20: mol_type = other DNA
gcagtctctcccaccagatc

SEQ ID NO: 54273 - DNA, 20 bp, synthetic construct
  source 1..20: mol_type = other DNA
tgaacattctggctggtgac

SEQ ID NO: 54274 - DNA, 20 bp, synthetic construct
  source 1..20: mol_type = other DNA
acaagaagggacagcaaggc

SEQ ID NO: 54275 - DNA, 20 bp, synthetic construct
  source 1..20: mol_type = other DNA
cacagactcgaatgacgtta

SEQ ID NO: 54276 - DNA, 20 bp, synthetic construct
  source 1..20: mol_type = other DNA
ctacgcggaggacgggagcg

SEQ ID NO: 54277 - DNA, 20 bp, synthetic construct
  source 1..20: mol_type = other DNA
gggccatatgtgccatccat

SEQ ID NO: 54278 - DNA, 20 bp, synthetic construct
  source 1..20: mol_type = other DNA
acacccggtatttattgtct

SEQ ID NO: 54279 - DNA, 20 bp, synthetic construct
  source 1..20: mol_type = other DNA
cctcattctcggggctgccc

SEQ ID NO: 54280 - DNA, 20 bp, synthetic construct
  source 1..20: mol_type = other DNA
gagctgagtcagggagatag

SEQ ID NO: 54281 - DNA, 20 bp, synthetic construct
  source 1..20: mol_type = other DNA
gattcagatgctgaggctca

SEQ ID NO: 54282 - DNA, 20 bp, synthetic construct
  source 1..20: mol_type = other DNA
caccgtcatccaggtacaac

SEQ ID NO: 54283 - DNA, 20 bp, synthetic construct
  source 1..20: mol_type = other DNA
cgatgcagtactcagtaagc

SEQ ID NO: 54284 - DNA, 20 bp, synthetic construct
  source 1..20: mol_type = other DNA
tccccccaaggtaaggccct

SEQ ID NO: 54285 - DNA, 20 bp, synthetic construct
  source 1..20: mol_type = other DNA
actggggttagggcgagggg

SEQ ID NO: 54286 - DNA, 20 bp, synthetic construct
  source 1..20: mol_type = other DNA
ccagcacggggctgcaggcc

SEQ ID NO: 54287 - DNA, 20 bp, synthetic construct
  source 1..20: mol_type = other DNA
atagaccttaggttgactac

SEQ ID NO: 54288 - DNA, 20 bp, synthetic construct
  source 1..20: mol_type = other DNA
cttcgggaggggcggtccaa

SEQ ID NO: 54289 - DNA, 20 bp, synthetic construct
  source 1..20: mol_type = other DNA
caagaacggtaagcaaagga

SEQ ID NO: 54290 - DNA, 20 bp, synthetic construct
  source 1..20: mol_type = other DNA
ctcgggccgggcgcgccctc

SEQ ID NO: 54291 - DNA, 20 bp, synthetic construct
  source 1..20: mol_type = other DNA
ggatccccaccggcacctcc

SEQ ID NO: 54292 - DNA, 20 bp, synthetic construct
  source 1..20: mol_type = other DNA
gaccacaccaatccgtctgc

SEQ ID NO: 54293 - DNA, 20 bp, synthetic construct
  source 1..20: mol_type = other DNA
gcagaggctgaggaagaggg

SEQ ID NO: 54294 - DNA, 20 bp, synthetic construct
  source 1..20: mol_type = other DNA
ccaccaaggcatttgactgc

SEQ ID NO: 54295 - DNA, 20 bp, synthetic construct
  source 1..20: mol_type = other DNA
cttctcctccaagcccagga

SEQ ID NO: 54296 - DNA, 20 bp, synthetic construct
  source 1..20: mol_type = other DNA
aacaaaaagcatgttctata

SEQ ID NO: 54297 - DNA, 20 bp, synthetic construct
  source 1..20: mol_type = other DNA
ggatgaggaaggcccctcca

SEQ ID NO: 54298 - DNA, 20 bp, synthetic construct
  source 1..20: mol_type = other DNA
tgaagatgccccagtggagg

SEQ ID NO: 54299 - DNA, 20 bp, synthetic construct
  source 1..20: mol_type = other DNA
tgctgtcattctccaggatg

SEQ ID NO: 54300 - DNA, 20 bp, synthetic construct
  source 1..20: mol_type = other DNA
ttggagccaccatgcatgct

SEQ ID NO: 54301 - DNA, 20 bp, synthetic construct
  source 1..20: mol_type = other DNA
gccaacatcgtggcctacca

SEQ ID NO: 54302 - DNA, 20 bp, synthetic construct
  source 1..20: mol_type = other DNA
atcagaggtgacgcagagcc

SEQ ID NO: 54303 - DNA, 20 bp, synthetic construct
  source 1..20: mol_type = other DNA
gctacagcagccggaggcag

SEQ ID NO: 54304 - DNA, 20 bp, synthetic construct
  source 1..20: mol_type = other DNA
agctgagtgggtccgggctg

SEQ ID NO: 54305 - DNA, 20 bp, synthetic construct
  source 1..20: mol_type = other DNA
tatctgattagaaagaaacc

SEQ ID NO: 54306 - DNA, 20 bp, synthetic construct
  source 1..20: mol_type = other DNA
ggacagtttataaagtgttc

SEQ ID NO: 54307 - DNA, 20 bp, synthetic construct
  source 1..20: mol_type = other DNA
ggaggcagaggcaggggagg

SEQ ID NO: 54308 - DNA, 20 bp, synthetic construct
  source 1..20: mol_type = other DNA
atgagggcaacgtaagggct

SEQ ID NO: 54309 - DNA, 20 bp, synthetic construct
  source 1..20: mol_type = other DNA
gaacctggaagtggtccttc

SEQ ID NO: 54310 - DNA, 20 bp, synthetic construct
  source 1..20: mol_type = other DNA
gcaagccccttccacccgga

SEQ ID NO: 54311 - DNA, 20 bp, synthetic construct
  source 1..20: mol_type = other DNA
cactctacatgggaagtcac

SEQ ID NO: 54312 - DNA, 20 bp, synthetic construct
  source 1..20: mol_type = other DNA
taccagagtaatggtccacc

SEQ ID NO: 54313 - DNA, 20 bp, synthetic construct
  source 1..20: mol_type = other DNA
aacattcagaatatttcaac

SEQ ID NO: 54314 - DNA, 20 bp, synthetic construct
  source 1..20: mol_type = other DNA
ccacgacagcactatcccta

SEQ ID NO: 54315 - DNA, 20 bp, synthetic construct
  source 1..20: mol_type = other DNA
catgacgcggctgtagggga

SEQ ID NO: 54316 - DNA, 20 bp, synthetic construct
  source 1..20: mol_type = other DNA
atctgagaagagagaatcgg

SEQ ID NO: 54317 - DNA, 20 bp, synthetic construct
  source 1..20: mol_type = other DNA
ggagattggtggattgactc

SEQ ID NO: 54318 - DNA, 20 bp, synthetic construct
  source 1..20: mol_type = other DNA
tacagaagcagtacgagaac

SEQ ID NO: 54319 - DNA, 20 bp, synthetic construct
  source 1..20: mol_type = other DNA
gcaaccagtgttggggaagg

SEQ ID NO: 54320 - DNA, 20 bp, synthetic construct
  source 1..20: mol_type = other DNA
ctgcagggcgggcaagagaa

SEQ ID NO: 54321 - DNA, 20 bp, synthetic construct
  source 1..20: mol_type = other DNA
tgggtggagcaccaggatga

SEQ ID NO: 54322 - DNA, 20 bp, synthetic construct
  source 1..20: mol_type = other DNA
atgaggtgagccggcagcgc

SEQ ID NO: 54323 - DNA, 20 bp, synthetic construct
  source 1..20: mol_type = other DNA
aatgggtatgaggttctcga

SEQ ID NO: 54324 - DNA, 20 bp, synthetic construct
  source 1..20: mol_type = other DNA
tcacctctgggggacagagg

SEQ ID NO: 54325 - DNA, 20 bp, synthetic construct
  source 1..20: mol_type = other DNA
gaaatgaggaagtttcggat

SEQ ID NO: 54326 - DNA, 20 bp, synthetic construct
  source 1..20: mol_type = other DNA
atatccatctctatgatcac

SEQ ID NO: 54327 - DNA, 20 bp, synthetic construct
  source 1..20: mol_type = other DNA
aagtcggggagtgtgaggcc

SEQ ID NO: 54328 - DNA, 20 bp, synthetic construct
  source 1..20: mol_type = other DNA
catgaaccccccccaggtga

SEQ ID NO: 54329 - DNA, 20 bp, synthetic construct
  source 1..20: mol_type = other DNA
gctctggaacatccgcatcg

SEQ ID NO: 54330 - DNA, 20 bp, synthetic construct
  source 1..20: mol_type = other DNA
aatcacctatttttactgtg

SEQ ID NO: 54331 - DNA, 20 bp, synthetic construct
  source 1..20: mol_type = other DNA
gggatggagttccaggcccg

SEQ ID NO: 54332 - DNA, 20 bp, synthetic construct
  source 1..20: mol_type = other DNA
aacgatgttattgagccggc

SEQ ID NO: 54333 - DNA, 20 bp, synthetic construct
  source 1..20: mol_type = other DNA
ttggctgaactcgaggtctg

SEQ ID NO: 54334 - DNA, 20 bp, synthetic construct
  source 1..20: mol_type = other DNA
ctacctgcgcagtgtgctgg

SEQ ID NO: 54335 - DNA, 20 bp, synthetic construct
  source 1..20: mol_type = other DNA
cttcaaggtgggagtgcccc

SEQ ID NO: 54336 - DNA, 20 bp, synthetic construct
  source 1..20: mol_type = other DNA
gctggtcagtctcaccctca

SEQ ID NO: 54337 - DNA, 20 bp, synthetic construct
  source 1..20: mol_type = other DNA
gggctttatcagtaaggagc

SEQ ID NO: 54338 - DNA, 20 bp, synthetic construct
  source 1..20: mol_type = other DNA
gcgtgactcatcctccctgg

SEQ ID NO: 54339 - DNA, 20 bp, synthetic construct
  source 1..20: mol_type = other DNA
agggtcagtcagggggcctc

SEQ ID NO: 54340 - DNA, 20 bp, synthetic construct
  source 1..20: mol_type = other DNA
caagacatcatggcctatcg

SEQ ID NO: 54341 - DNA, 20 bp, synthetic construct
  source 1..20: mol_type = other DNA
ataaagatctatcaccggga

SEQ ID NO: 54342 - DNA, 20 bp, synthetic construct
  source 1..20: mol_type = other DNA
ttatcacaaccaagtagaac

SEQ ID NO: 54343 - DNA, 20 bp, synthetic construct
  source 1..20: mol_type = other DNA
ttcaaggatatcactcagag

SEQ ID NO: 54344 - DNA, 20 bp, synthetic construct
  source 1..20: mol_type = other DNA
ggttgaaactagagatggac

SEQ ID NO: 54345 - DNA, 20 bp, synthetic construct
  source 1..20: mol_type = other DNA
cttctcgggttctgtctcta

SEQ ID NO: 54346 - DNA, 20 bp, synthetic construct
  source 1..20: mol_type = other DNA
ctcgtagctcttctccaggg

SEQ ID NO: 54347 - DNA, 20 bp, synthetic construct
  source 1..20: mol_type = other DNA
gatttgcaatggtgtcacca

SEQ ID NO: 54348 - DNA, 20 bp, synthetic construct
  source 1..20: mol_type = other DNA
caccttgatcttcatggtgc

SEQ ID NO: 54349 - DNA, 20 bp, synthetic construct
  source 1..20: mol_type = other DNA
gacagctttggtaaggagcc

SEQ ID NO: 54350 - DNA, 20 bp, synthetic construct
  source 1..20: mol_type = other DNA
ctcttcctcatgaccaagag

SEQ ID NO: 54351 - DNA, 20 bp, synthetic construct
  source 1..20: mol_type = other DNA
ggacttaacccctggctcac

SEQ ID NO: 54352 - DNA, 20 bp, synthetic construct
  source 1..20: mol_type = other DNA
cttaacaagaagggacagca

SEQ ID NO: 54353 - DNA, 20 bp, synthetic construct
  source 1..20: mol_type = other DNA
gggcgcacacctcgggggcc

SEQ ID NO: 54354 - DNA, 20 bp, synthetic construct
  source 1..20: mol_type = other DNA
agtccagccgggagctgggc

SEQ ID NO: 54355 - DNA, 20 bp, synthetic construct
  source 1..20: mol_type = other DNA
ccctgtgccgctggaggaag

SEQ ID NO: 54356 - DNA, 20 bp, synthetic construct
  source 1..20: mol_type = other DNA
ctatgacctgctacagcggc

SEQ ID NO: 54357 - DNA, 20 bp, synthetic construct
  source 1..20: mol_type = other DNA
tccgtcaatttgcatgggaa

SEQ ID NO: 54358 - DNA, 20 bp, synthetic construct
  source 1..20: mol_type = other DNA
cacaggaacagagcggctgc

SEQ ID NO: 54359 - DNA, 20 bp, synthetic construct
  source 1..20: mol_type = other DNA
ggcgggcgcgggcccggaga

SEQ ID NO: 54360 - DNA, 20 bp, synthetic construct
  source 1..20: mol_type = other DNA
cactttctgcagtgactcct

SEQ ID NO: 54361 - DNA, 20 bp, synthetic construct
  source 1..20: mol_type = other DNA
ctatgctttcaaaagagtcc

SEQ ID NO: 54362 - DNA, 20 bp, synthetic construct
  source 1..20: mol_type = other DNA
ggactgctcgcttctgctga

SEQ ID NO: 54363 - DNA, 20 bp, synthetic construct
  source 1..20: mol_type = other DNA
gtctcctccaacgcctcggg

SEQ ID NO: 54364 - DNA, 20 bp, synthetic construct
  source 1..20: mol_type = other DNA
gttccgttctccatcagacg

SEQ ID NO: 54365 - DNA, 20 bp, synthetic construct
  source 1..20: mol_type = other DNA
acatcctgctggcccggctg

SEQ ID NO: 54366 - DNA, 20 bp, synthetic construct
  source 1..20: mol_type = other DNA
gccaagtctcggaaggacat

SEQ ID NO: 54367 - DNA, 20 bp, synthetic construct
  source 1..20: mol_type = other DNA
ggagaacttgctttgattta

SEQ ID NO: 54368 - DNA, 20 bp, synthetic construct
  source 1..20: mol_type = other DNA
gctggaacagcaggaggcgg

SEQ ID NO: 54369 - DNA, 20 bp, synthetic construct
  source 1..20: mol_type = other DNA
ttctcctgcttctggaaggt

SEQ ID NO: 54370 - DNA, 20 bp, synthetic construct
  source 1..20: mol_type = other DNA
ggtgatggcctggacaacca

SEQ ID NO: 54371 - DNA, 20 bp, synthetic construct
  source 1..20: mol_type = other DNA
agctggcttgttctcttgga

SEQ ID NO: 54372 - DNA, 20 bp, synthetic construct
  source 1..20: mol_type = other DNA
gctctgcggggttcttcctc

SEQ ID NO: 54373 - DNA, 20 bp, synthetic construct
  source 1..20: mol_type = other DNA
gagaccccggtcacagacgc

SEQ ID NO: 54374 - DNA, 20 bp, synthetic construct
  source 1..20: mol_type = other DNA
gggatgaaaatgcagaaggc

SEQ ID NO: 54375 - DNA, 20 bp, synthetic construct
  source 1..20: mol_type = other DNA
cgctaggcaatgtcactgcc

SEQ ID NO: 54376 - DNA, 20 bp, synthetic construct
  source 1..20: mol_type = other DNA
gcggcttctttcctctccac

SEQ ID NO: 54377 - DNA, 20 bp, synthetic construct
  source 1..20: mol_type = other DNA
ctcgtggctggtggtggaca

SEQ ID NO: 54378 - DNA, 20 bp, synthetic construct
  source 1..20: mol_type = other DNA
ggttcctgactgttggcgag

SEQ ID NO: 54379 - DNA, 20 bp, synthetic construct
  source 1..20: mol_type = other DNA
cttctgcagtgccactctcg

SEQ ID NO: 54380 - DNA, 20 bp, synthetic construct
  source 1..20: mol_type = other DNA
gtcccttgagagctgcaggg

SEQ ID NO: 54381 - DNA, 20 bp, synthetic construct
  source 1..20: mol_type = other DNA
agtggtgaaacaggagcccc

SEQ ID NO: 54382 - DNA, 20 bp, synthetic construct
  source 1..20: mol_type = other DNA
cagagagcgatttaatatca

SEQ ID NO: 54383 - DNA, 20 bp, synthetic construct
  source 1..20: mol_type = other DNA
gcgactacatcgacaccacc

SEQ ID NO: 54384 - DNA, 20 bp, synthetic construct
  source 1..20: mol_type = other DNA
taacagcggcccaaagcccc

SEQ ID NO: 54385 - DNA, 20 bp, synthetic construct
  source 1..20: mol_type = other DNA
cagaagatgacttcttggta

SEQ ID NO: 54386 - DNA, 20 bp, synthetic construct
  source 1..20: mol_type = other DNA
cttccaaatggtaacgttca

SEQ ID NO: 54387 - DNA, 20 bp, synthetic construct
  source 1..20: mol_type = other DNA
acatgctgatgaggattccc

SEQ ID NO: 54388 - DNA, 20 bp, synthetic construct
  source 1..20: mol_type = other DNA
tgaccgcatgtgttaggcaa

SEQ ID NO: 54389 - DNA, 20 bp, synthetic construct
  source 1..20: mol_type = other DNA
aggcggtggaggggtaggga

SEQ ID NO: 54390 - DNA, 20 bp, synthetic construct
  source 1..20: mol_type = other DNA
ggagggccaggcgcacctgg

SEQ ID NO: 54391 - DNA, 20 bp, synthetic construct
  source 1..20: mol_type = other DNA
ttggggttactgtagccata

SEQ ID NO: 54392 - DNA, 20 bp, synthetic construct
  source 1..20: mol_type = other DNA
caggatactcactgctgtca

SEQ ID NO: 54393 - DNA, 20 bp, synthetic construct
  source 1..20: mol_type = other DNA
ggtcccctgtgctctgtttg

SEQ ID NO: 54394 - DNA, 20 bp, synthetic construct
  source 1..20: mol_type = other DNA
ttcttggaagagctggtgat

SEQ ID NO: 54395 - DNA, 20 bp, synthetic construct
  source 1..20: mol_type = other DNA
caggtaggggccatcagctg

SEQ ID NO: 54396 - DNA, 20 bp, synthetic construct
  source 1..20: mol_type = other DNA
gggcggcggaagtggctctg

SEQ ID NO: 54397 - DNA, 20 bp, synthetic construct
  source 1..20: mol_type = other DNA
cagtgtctgtaagaacaggg

SEQ ID NO: 54398 - DNA, 20 bp, synthetic construct
  source 1..20: mol_type = other DNA
ctgagcatcttggtggcgct

SEQ ID NO: 54399 - DNA, 20 bp, synthetic construct
  source 1..20: mol_type = other DNA
attcttacatacagccgaat

SEQ ID NO: 54400 - DNA, 20 bp, synthetic construct
  source 1..20: mol_type = other DNA
gctggtaaggaggccctcgc

SEQ ID NO: 54401 - DNA, 20 bp, synthetic construct
  source 1..20: mol_type = other DNA
taagcaggtgagtgagcaaa

SEQ ID NO: 54402 - DNA, 20 bp, synthetic construct
  source 1..20: mol_type = other DNA
tttgtttgaaccattggctt

SEQ ID NO: 54403 - DNA, 20 bp, synthetic construct
  source 1..20: mol_type = other DNA
aatgacgtccagcacctgcg

SEQ ID NO: 54404 - DNA, 20 bp, synthetic construct
  source 1..20: mol_type = other DNA
gttcgcactacagcgggagc

SEQ ID NO: 54405 - DNA, 20 bp, synthetic construct
  source 1..20: mol_type = other DNA
acaatcccacggaacccaaa

SEQ ID NO: 54406 - DNA, 20 bp, synthetic construct
  source 1..20: mol_type = other DNA
atagacaaaggcttccagca

SEQ ID NO: 54407 - DNA, 20 bp, synthetic construct
  source 1..20: mol_type = other DNA
cctattgtggggggtaacaa

SEQ ID NO: 54408 - DNA, 20 bp, synthetic construct
  source 1..20: mol_type = other DNA
ggaggccagcaccaccctcc

SEQ ID NO: 54409 - DNA, 20 bp, synthetic construct
  source 1..20: mol_type = other DNA
ggccggcagcatgatgaaga

SEQ ID NO: 54410 - DNA, 20 bp, synthetic construct
  source 1..20: mol_type = other DNA
ccttgttagggttgcacaca

SEQ ID NO: 54411 - DNA, 20 bp, synthetic construct
  source 1..20: mol_type = other DNA
cttccctgtctcggaagtcc

SEQ ID NO: 54412 - DNA, 20 bp, synthetic construct
  source 1..20: mol_type = other DNA
tggaaggctcatctttacct

SEQ ID NO: 54413 - DNA, 20 bp, synthetic construct
  source 1..20: mol_type = other DNA
attttcaatcaacgccttga

SEQ ID NO: 54414 - DNA, 20 bp, synthetic construct
  source 1..20: mol_type = other DNA
agttccctagcatcactgtc

SEQ ID NO: 54415 - DNA, 20 bp, synthetic construct
  source 1..20: mol_type = other DNA
taaatcattcacctgctgcc

SEQ ID NO: 54416 - DNA, 20 bp, synthetic construct
  source 1..20: mol_type = other DNA
agttggatactcagcgtcgc

SEQ ID NO: 54417 - DNA, 20 bp, synthetic construct
  source 1..20: mol_type = other DNA
aagtgttctggaggccgaag

SEQ ID NO: 54418 - DNA, 20 bp, synthetic construct
  source 1..20: mol_type = other DNA
taggagaagagctgcatcca

SEQ ID NO: 54419 - DNA, 20 bp, synthetic construct
  source 1..20: mol_type = other DNA
tgagtgggctcacctggcag

SEQ ID NO: 54420 - DNA, 20 bp, synthetic construct
  source 1..20: mol_type = other DNA
cataggagggaacacgctgc

SEQ ID NO: 54421 - DNA, 20 bp, synthetic construct
  source 1..20: mol_type = other DNA
ttgctggccctgatggggtg

SEQ ID NO: 54422 - DNA, 20 bp, synthetic construct
  source 1..20: mol_type = other DNA
agcagaggcagatggagagc

SEQ ID NO: 54423 - DNA, 20 bp, synthetic construct
  source 1..20: mol_type = other DNA
tggggctgcagactccagcc

SEQ ID NO: 54424 - DNA, 20 bp, synthetic construct
  source 1..20: mol_type = other DNA
ctgagacccagggtgagacc

SEQ ID NO: 54425 - DNA, 20 bp, synthetic construct
  source 1..20: mol_type = other DNA
gacaaagacgagaagtgggt

SEQ ID NO: 54426 - DNA, 20 bp, synthetic construct
  source 1..20: mol_type = other DNA
ccccctccggatccacagca

SEQ ID NO: 54427 - DNA, 20 bp, synthetic construct
  source 1..20: mol_type = other DNA
tccagaaccgaaggatgaag

SEQ ID NO: 54428 - DNA, 20 bp, synthetic construct
  source 1..20: mol_type = other DNA
agacccctggaggtccaggg

SEQ ID NO: 54429 - DNA, 20 bp, synthetic construct
  source 1..20: mol_type = other DNA
cttgcgcttgcggcacttgg

SEQ ID NO: 54430 - DNA, 20 bp, synthetic construct
  source 1..20: mol_type = other DNA
ccagaagaaactgccatagc

SEQ ID NO: 54431 - DNA, 20 bp, synthetic construct
  source 1..20: mol_type = other DNA
ctggggactttgcttcctca

SEQ ID NO: 54432 - DNA, 20 bp, synthetic construct
  source 1..20: mol_type = other DNA
ctatcaattccagaacaacc

SEQ ID NO: 54433 - DNA, 20 bp, synthetic construct
  source 1..20: mol_type = other DNA
tccccgtgattcggtgcacc

SEQ ID NO: 54434 - DNA, 20 bp, synthetic construct
  source 1..20: mol_type = other DNA
agcagtcaaatgccttggtg

SEQ ID NO: 54435 - DNA, 20 bp, synthetic construct
  source 1..20: mol_type = other DNA
gcgtggtaccacctgagaac

SEQ ID NO: 54436 - DNA, 20 bp, synthetic construct
  source 1..20: mol_type = other DNA
ctgcacctagccatcatcca

SEQ ID NO: 54437 - DNA, 20 bp, synthetic construct
  source 1..20: mol_type = other DNA
tagaggcatcctggagagtt

SEQ ID NO: 54438 - DNA, 20 bp, synthetic construct
  source 1..20: mol_type = other DNA
ggccccaggcccctccccaa

SEQ ID NO: 54439 - DNA, 20 bp, synthetic construct
  source 1..20: mol_type = other DNA
gggactggaaagctggtgct

SEQ ID NO: 54440 - DNA, 20 bp, synthetic construct
  source 1..20: mol_type = other DNA
gagaggatgggatgactggt

SEQ ID NO: 54441 - DNA, 20 bp, synthetic construct
  source 1..20: mol_type = other DNA
taaagtgagtgtaactcttt

SEQ ID NO: 54442 - DNA, 20 bp, synthetic construct
  source 1..20: mol_type = other DNA
acacttcatgatggagttga

SEQ ID NO: 54443 - DNA, 20 bp, synthetic construct
  source 1..20: mol_type = other DNA
aagaggaagattgctgatga

SEQ ID NO: 54444 - DNA, 20 bp, synthetic construct
  source 1..20: mol_type = other DNA
ctgggaggagaagacgagag

SEQ ID NO: 54445 - DNA, 20 bp, synthetic construct
  source 1..20: mol_type = other DNA
gcgctcaaactccgtctggt

SEQ ID NO: 54446 - DNA, 20 bp, synthetic construct
  source 1..20: mol_type = other DNA
gggggaactggtgggagtga

SEQ ID NO: 54447 - DNA, 20 bp, synthetic construct
  source 1..20: mol_type = other DNA
tgatatccttgaaggaaaag

SEQ ID NO: 54448 - DNA, 20 bp, synthetic construct
  source 1..20: mol_type = other DNA
ccagggggcttgtgggcatc

SEQ ID NO: 54449 - DNA, 20 bp, synthetic construct
  source 1..20: mol_type = other DNA
gctatgttcctggggagact

SEQ ID NO: 54450 - DNA, 20 bp, synthetic construct
  source 1..20: mol_type = other DNA
tagcgtcagggcctccatgc

SEQ ID NO: 54451 - DNA, 20 bp, synthetic construct
  source 1..20: mol_type = other DNA
aaggtttcatagccaggacg

SEQ ID NO: 54452 - DNA, 20 bp, synthetic construct
  source 1..20: mol_type = other DNA
ttcagaatctcaagattcag

SEQ ID NO: 54453 - DNA, 20 bp, synthetic construct
  source 1..20: mol_type = other DNA
ggagcaggcccccatctgcc

SEQ ID NO: 54454 - DNA, 20 bp, synthetic construct
  source 1..20: mol_type = other DNA
cctggggagaagggtggaca

SEQ ID NO: 54455 - DNA, 20 bp, synthetic construct
  source 1..20: mol_type = other DNA
acctgggcggcccgggcccc

SEQ ID NO: 54456 - DNA, 20 bp, synthetic construct
  source 1..20: mol_type = other DNA
ggcgcaaggagttgctctcc

SEQ ID NO: 54457 - DNA, 20 bp, synthetic construct
  source 1..20: mol_type = other DNA
tttgtggagattgaggtggc

SEQ ID NO: 54458 - DNA, 20 bp, synthetic construct
  source 1..20: mol_type = other DNA
gttctctgtgttcagattgc

SEQ ID NO: 54459 - DNA, 20 bp, synthetic construct
  source 1..20: mol_type = other DNA
tgtgaggtgaggcaggcggg

SEQ ID NO: 54460 - DNA, 20 bp, synthetic construct
  source 1..20: mol_type = other DNA
ggtgatactggttcgtccag

SEQ ID NO: 54461 - DNA, 20 bp, synthetic construct
  source 1..20: mol_type = other DNA
cttggagatagaggcctgcc

SEQ ID NO: 54462 - DNA, 20 bp, synthetic construct
  source 1..20: mol_type = other DNA
gagtctcttgggcagatggg

SEQ ID NO: 54463 - DNA, 20 bp, synthetic construct
  source 1..20: mol_type = other DNA
gtagctatatattaaaagga

SEQ ID NO: 54464 - DNA, 20 bp, synthetic construct
  source 1..20: mol_type = other DNA
ttgataagcttcctagagga

SEQ ID NO: 54465 - DNA, 20 bp, synthetic construct
  source 1..20: mol_type = other DNA
tcgcaccctccgctgtggca

SEQ ID NO: 54466 - DNA, 20 bp, synthetic construct
  source 1..20: mol_type = other DNA
ttgatgacaagatgtccctc

SEQ ID NO: 54467 - DNA, 20 bp, synthetic construct
  source 1..20: mol_type = other DNA
cagtcttttatcagctggac

SEQ ID NO: 54468 - DNA, 20 bp, synthetic construct
  source 1..20: mol_type = other DNA
tatgaatacctctgacatga

SEQ ID NO: 54469 - DNA, 20 bp, synthetic construct
  source 1..20: mol_type = other DNA
gctgcgggccgcacagggag

SEQ ID NO: 54470 - DNA, 20 bp, synthetic construct
  source 1..20: mol_type = other DNA
tgctgaggaggagttggagc

SEQ ID NO: 54471 - DNA, 20 bp, synthetic construct
  source 1..20: mol_type = other DNA
gtgtgtcatacagaaagagc

SEQ ID NO: 54472 - DNA, 20 bp, synthetic construct
  source 1..20: mol_type = other DNA
ccatggtactgtggggggcc

SEQ ID NO: 54473 - DNA, 20 bp, synthetic construct
  source 1..20: mol_type = other DNA
tatcttcaattactctagca

SEQ ID NO: 54474 - DNA, 20 bp, synthetic construct
  source 1..20: mol_type = other DNA
ctcgcacccacacatgtgat

SEQ ID NO: 54475 - DNA, 20 bp, synthetic construct
  source 1..20: mol_type = other DNA
ggctgctgcagaagctggag

SEQ ID NO: 54476 - DNA, 20 bp, synthetic construct
  source 1..20: mol_type = other DNA
tgggtgaaaagccatctgtg

SEQ ID NO: 54477 - DNA, 20 bp, synthetic construct
  source 1..20: mol_type = other DNA
ctcaacatgcaaaaagctgg

SEQ ID NO: 54478 - DNA, 20 bp, synthetic construct
  source 1..20: mol_type = other DNA
gatgcgagtggctgaatacc

SEQ ID NO: 54479 - DNA, 20 bp, synthetic construct
  source 1..20: mol_type = other DNA
cgtcaccaactgggacgaca

SEQ ID NO: 54480 - DNA, 20 bp, synthetic construct
  source 1..20: mol_type = other DNA
tcatcatctcccaggatccc

SEQ ID NO: 54481 - DNA, 20 bp, synthetic construct
  source 1..20: mol_type = other DNA
agagtaaatgtgtcaaatac

SEQ ID NO: 54482 - DNA, 20 bp, synthetic construct
  source 1..20: mol_type = other DNA
agacattgaacgtatggtcc

SEQ ID NO: 54483 - DNA, 20 bp, synthetic construct
  source 1..20: mol_type = other DNA
cactaagggaatgaaggagg

SEQ ID NO: 54484 - DNA, 20 bp, synthetic construct
  source 1..20: mol_type = other DNA
tcttggaggtggaaacgtcg

SEQ ID NO: 54485 - DNA, 20 bp, synthetic construct
  source 1..20: mol_type = other DNA
aggcaaagccatcgtccagg

SEQ ID NO: 54486 - DNA, 20 bp, synthetic construct
  source 1..20: mol_type = other DNA
gcagaagacctgtgcaagat

SEQ ID NO: 54487 - DNA, 20 bp, synthetic construct
  source 1..20: mol_type = other DNA
gtggactcatacacatacat

SEQ ID NO: 54488 - DNA, 20 bp, synthetic construct
  source 1..20: mol_type = other DNA
gggcctggccggggggccct

SEQ ID NO: 54489 - DNA, 20 bp, synthetic construct
  source 1..20: mol_type = other DNA
gggaaatcctggagcggcgg

SEQ ID NO: 54490 - DNA, 20 bp, synthetic construct
  source 1..20: mol_type = other DNA
gtctgcatgaccttcaggaa

SEQ ID NO: 54491 - DNA, 20 bp, synthetic construct
  source 1..20: mol_type = other DNA
gcccccgacggagacaagga

SEQ ID NO: 54492 - DNA, 20 bp, synthetic construct
  source 1..20: mol_type = other DNA
tcggtttctacataatgatc

SEQ ID NO: 54493 - DNA, 20 bp, synthetic construct
  source 1..20: mol_type = other DNA
gcttccgttctgggtgcttg

SEQ ID NO: 54494 - DNA, 20 bp, synthetic construct
  source 1..20: mol_type = other DNA
agtgaggggaaggtgaggcg

SEQ ID NO: 54495 - DNA, 20 bp, synthetic construct
  source 1..20: mol_type = other DNA
tggagaacaggatgatcagt

SEQ ID NO: 54496 - DNA, 20 bp, synthetic construct
  source 1..20: mol_type = other DNA
ctcatggatctcggcaatgc

SEQ ID NO: 54497 - DNA, 20 bp, synthetic construct
  source 1..20: mol_type = other DNA
ctcctccattgtggaaccca

SEQ ID NO: 54498 - DNA, 20 bp, synthetic construct
  source 1..20: mol_type = other DNA
gtagtggctcctcccagccc

SEQ ID NO: 54499 - DNA, 20 bp, synthetic construct
  source 1..20: mol_type = other DNA
actctgtgggcgagttgggc

SEQ ID NO: 54500 - DNA, 20 bp, synthetic construct
  source 1..20: mol_type = other DNA
ctctccctgctgtagggata

SEQ ID NO: 54501 - DNA, 20 bp, synthetic construct
  source 1..20: mol_type = other DNA
atgtcagctctcagctcgtc

SEQ ID NO: 54502 - DNA, 20 bp, synthetic construct
  source 1..20: mol_type = other DNA
agccagatgccgacgagtga

SEQ ID NO: 54503 - DNA, 20 bp, synthetic construct
  source 1..20: mol_type = other DNA
ataggactcaagtgaattct

SEQ ID NO: 54504 - DNA, 20 bp, synthetic construct
  source 1..20: mol_type = other DNA
agctgcaggaggagaaggag

SEQ ID NO: 54505 - DNA, 20 bp, synthetic construct
  source 1..20: mol_type = other DNA
ggtctagagcagcgagaggg

SEQ ID NO: 54506 - DNA, 20 bp, synthetic construct
  source 1..20: mol_type = other DNA
aaggcagctttggcaaggta

SEQ ID NO: 54507 - DNA, 20 bp, synthetic construct
  source 1..20: mol_type = other DNA
acgcggagataaggctgagc

SEQ ID NO: 54508 - DNA, 20 bp, synthetic construct
  source 1..20: mol_type = other DNA
ctatgatacaaaaacttcag

SEQ ID NO: 54509 - DNA, 20 bp, synthetic construct
  source 1..20: mol_type = other DNA
gtgcagatcctacctctgaa

SEQ ID NO: 54510 - DNA, 20 bp, synthetic construct
  source 1..20: mol_type = other DNA
ggatcttcataagtgttgct

SEQ ID NO: 54511 - DNA, 20 bp, synthetic construct
  source 1..20: mol_type = other DNA
ctctgaacttggagaggctg

SEQ ID NO: 54512 - DNA, 20 bp, synthetic construct
  source 1..20: mol_type = other DNA
ggcctggaacaggacaggca

SEQ ID NO: 54513 - DNA, 20 bp, synthetic construct
  source 1..20: mol_type = other DNA
acaacagagtaccaggtagc

SEQ ID NO: 54514 - DNA, 20 bp, synthetic construct
  source 1..20: mol_type = other DNA
gactccgcagatctgggtcg

SEQ ID NO: 54515 - DNA, 20 bp, synthetic construct
  source 1..20: mol_type = other DNA
tactggatgtaatttagata

SEQ ID NO: 54516 - DNA, 20 bp, synthetic construct
  source 1..20: mol_type = other DNA
agtccaggagcacttcccgg

SEQ ID NO: 54517 - DNA, 20 bp, synthetic construct
  source 1..20: mol_type = other DNA
gacggagtctcttgggcaga

SEQ ID NO: 54518 - DNA, 20 bp, synthetic construct
  source 1..20: mol_type = other DNA
ctcttggaactgctggagga

SEQ ID NO: 54519 - DNA, 20 bp, synthetic construct
  source 1..20: mol_type = other DNA
acatgatccgcggtgggggc

SEQ ID NO: 54520 - DNA, 20 bp, synthetic construct
  source 1..20: mol_type = other DNA
cctatggcaaagcaaaagga

SEQ ID NO: 54521 - DNA, 20 bp, synthetic construct
  source 1..20: mol_type = other DNA
gggagttcccccgccggccg

SEQ ID NO: 54522 - DNA, 20 bp, synthetic construct
  source 1..20: mol_type = other DNA
tggccaccatgtctgggaga

SEQ ID NO: 54523 - DNA, 20 bp, synthetic construct
  source 1..20: mol_type = other DNA
ccagggtccttaccactgtc

SEQ ID NO: 54524 - DNA, 20 bp, synthetic construct
  source 1..20: mol_type = other DNA
cagcgggaaggtgcggcgtt

SEQ ID NO: 54525 - DNA, 20 bp, synthetic construct
  source 1..20: mol_type = other DNA
ctcatcatggcctcacttcc

SEQ ID NO: 54526 - DNA, 20 bp, synthetic construct
  source 1..20: mol_type = other DNA
catgagcggctgctggtagg

SEQ ID NO: 54527 - DNA, 20 bp, synthetic construct
  source 1..20: mol_type = other DNA
ctgggctgtggcctggagtc

SEQ ID NO: 54528 - DNA, 20 bp, synthetic construct
  source 1..20: mol_type = other DNA
gcagccggccagcaatagct

SEQ ID NO: 54529 - DNA, 20 bp, synthetic construct
  source 1..20: mol_type = other DNA
atgtggccacacgttggtac

SEQ ID NO: 54530 - DNA, 20 bp, synthetic construct
  source 1..20: mol_type = other DNA
gtgttcaacctcctaaagga

SEQ ID NO: 54531 - DNA, 20 bp, synthetic construct
  source 1..20: mol_type = other DNA
tccatagtgggcatttgcct

SEQ ID NO: 54532 - DNA, 20 bp, synthetic construct
  source 1..20: mol_type = other DNA
ggcccagcgggcccaattct

SEQ ID NO: 54533 - DNA, 20 bp, synthetic construct
  source 1..20: mol_type = other DNA
cgcctaatgcaaggaaaaag

SEQ ID NO: 54534 - DNA, 20 bp, synthetic construct
  source 1..20: mol_type = other DNA
ttactgtgattaggggctgt

SEQ ID NO: 54535 - DNA, 20 bp, synthetic construct
  source 1..20: mol_type = other DNA
gctggtaccttgccagtagg

SEQ ID NO: 54536 - DNA, 20 bp, synthetic construct
  source 1..20: mol_type = other DNA
tgctttggaagccctttctc

SEQ ID NO: 54537 - DNA, 20 bp, synthetic construct
  source 1..20: mol_type = other DNA
tcagaggaagaccctgatga

SEQ ID NO: 54538 - DNA, 20 bp, synthetic construct
  source 1..20: mol_type = other DNA
ccggagggcctgcggctggt

SEQ ID NO: 54539 - DNA, 20 bp, synthetic construct
  source 1..20: mol_type = other DNA
ctcgccactgacgtagcacc

SEQ ID NO: 54540 - DNA, 20 bp, synthetic construct
  source 1..20: mol_type = other DNA
caccgatggggacttcgatc

SEQ ID NO: 54541 - DNA, 20 bp, synthetic construct
  source 1..20: mol_type = other DNA
aaaattagcaatggaaacgc

SEQ ID NO: 54542 - DNA, 20 bp, synthetic construct
  source 1..20: mol_type = other DNA
tcataaagttatcttgggcc

SEQ ID NO: 54543 - DNA, 20 bp, synthetic construct
  source 1..20: mol_type = other DNA
tttccacctttggaaagaac

SEQ ID NO: 54544 - DNA, 20 bp, synthetic construct
  source 1..20: mol_type = other DNA
tcagcatggatgtcagcacc

SEQ ID NO: 54545 - DNA, 20 bp, synthetic construct
  source 1..20: mol_type = other DNA
gtggcactgggagcacttgt

SEQ ID NO: 54546 - DNA, 20 bp, synthetic construct
  source 1..20: mol_type = other DNA
gctccacactaaatccgcag

SEQ ID NO: 54547 - DNA, 20 bp, synthetic construct
  source 1..20: mol_type = other DNA
cagaccctggtatacatata

SEQ ID NO: 54548 - DNA, 20 bp, synthetic construct
  source 1..20: mol_type = other DNA
agccagtgccatggctcact

SEQ ID NO: 54549 - DNA, 20 bp, synthetic construct
  source 1..20: mol_type = other DNA
actcgaacatggacgtcagg

SEQ ID NO: 54550 - DNA, 20 bp, synthetic construct
  source 1..20: mol_type = other DNA
gtattcacctgaaatgaggc

SEQ ID NO: 54551 - DNA, 20 bp, synthetic construct
  source 1..20: mol_type = other DNA
agctaccccctgctatccct

SEQ ID NO: 54552 - DNA, 20 bp, synthetic construct
  source 1..20: mol_type = other DNA
ggagtgcccgcagggtgtgg

SEQ ID NO: 54553 - DNA, 20 bp, synthetic construct
  source 1..20: mol_type = other DNA
atattccgtcatcgctcctc

SEQ ID NO: 54554 - DNA, 20 bp, synthetic construct
  source 1..20: mol_type = other DNA
ctacctgctgtgctcctggc

SEQ ID NO: 54555 - DNA, 20 bp, synthetic construct
  source 1..20: mol_type = other DNA
ccaggattcgtttgggtggc

SEQ ID NO: 54556 - DNA, 20 bp, synthetic construct
  source 1..20: mol_type = other DNA
tttacactgggtgtgtaaga

SEQ ID NO: 54557 - DNA, 20 bp, synthetic construct
  source 1..20: mol_type = other DNA
ataatctgagaagggacaag

SEQ ID NO: 54558 - DNA, 20 bp, synthetic construct
  source 1..20: mol_type = other DNA
atgtgcctggcacctggaga

SEQ ID NO: 54559 - DNA, 20 bp, synthetic construct
  source 1..20: mol_type = other DNA
caccttcaagctgtacgaca

SEQ ID NO: 54560 - DNA, 20 bp, synthetic construct
  source 1..20: mol_type = other DNA
cctgaaccggaatgaccagg

SEQ ID NO: 54561 - DNA, 20 bp, synthetic construct
  source 1..20: mol_type = other DNA
ccgtacatcgtgggcttcta

SEQ ID NO: 54562 - DNA, 20 bp, synthetic construct
  source 1..20: mol_type = other DNA
gggccaaccacgaaggctcg

SEQ ID NO: 54563 - DNA, 20 bp, synthetic construct
  source 1..20: mol_type = other DNA
tgtacaagtgcgaacactgc

SEQ ID NO: 54564 - DNA, 20 bp, synthetic construct
  source 1..20: mol_type = other DNA
tcccaggagttctcttggta

SEQ ID NO: 54565 - DNA, 20 bp, synthetic construct
  source 1..20: mol_type = other DNA
tcgtctgggagctggtcctg

SEQ ID NO: 54566 - DNA, 20 bp, synthetic construct
  source 1..20: mol_type = other DNA
ctactggctgagacagcgcc

SEQ ID NO: 54567 - DNA, 20 bp, synthetic construct
  source 1..20: mol_type = other DNA
ccccaggtatgttgtggggt

SEQ ID NO: 54568 - DNA, 20 bp, synthetic construct
  source 1..20: mol_type = other DNA
ggggctccaggtaagggggc

SEQ ID NO: 54569 - DNA, 20 bp, synthetic construct
  source 1..20: mol_type = other DNA
aggagggtctggggtccaag

SEQ ID NO: 54570 - DNA, 20 bp, synthetic construct
  source 1..20: mol_type = other DNA
tacaggattggaaatgcctt

SEQ ID NO: 54571 - DNA, 20 bp, synthetic construct
  source 1..20: mol_type = other DNA
gctatgtgttgctgttgaac

SEQ ID NO: 54572 - DNA, 20 bp, synthetic construct
  source 1..20: mol_type = other DNA
tgtacagccagccattgtca

SEQ ID NO: 54573 - DNA, 20 bp, synthetic construct
  source 1..20: mol_type = other DNA
ccggcgggagaggaacaagc

SEQ ID NO: 54574 - DNA, 20 bp, synthetic construct
  source 1..20: mol_type = other DNA
ctcccagtaaccacggcacc

SEQ ID NO: 54575 - DNA, 20 bp, synthetic construct
  source 1..20: mol_type = other DNA
ggtcaaggctctgcttgtac

SEQ ID NO: 54576 - DNA, 20 bp, synthetic construct
  source 1..20: mol_type = other DNA
ttgtctcgagccttgcaaag

SEQ ID NO: 54577 - DNA, 20 bp, synthetic construct
  source 1..20: mol_type = other DNA
caactgggtcattggagggg

SEQ ID NO: 54578 - DNA, 20 bp, synthetic construct
  source 1..20: mol_type = other DNA
agagctgatggagctgctcc

SEQ ID NO: 54579 - DNA, 20 bp, synthetic construct
  source 1..20: mol_type = other DNA
gctccaggtcgtaggcatcc

SEQ ID NO: 54580 - DNA, 20 bp, synthetic construct
  source 1..20: mol_type = other DNA
aaaaaactggagagacagat

SEQ ID NO: 54581 - DNA, 20 bp, synthetic construct
  source 1..20: mol_type = other DNA
tcaaatgcaccagtaggaac

SEQ ID NO: 54582 - DNA, 20 bp, synthetic construct
  source 1..20: mol_type = other DNA
agtcctccagcacactgcgc

SEQ ID NO: 54583 - DNA, 20 bp, synthetic construct
  source 1..20: mol_type = other DNA
tgaagagaaaaacaattgga

SEQ ID NO: 54584 - DNA, 20 bp, synthetic construct
  source 1..20: mol_type = other DNA
tcactaacttcctggtcaga

SEQ ID NO: 54585 - DNA, 20 bp, synthetic construct
  source 1..20: mol_type = other DNA
cgacagacaacctcacccag

SEQ ID NO: 54586 - DNA, 20 bp, synthetic construct
  source 1..20: mol_type = other DNA
actctccatgtctctgggct

SEQ ID NO: 54587 - DNA, 20 bp, synthetic construct
  source 1..20: mol_type = other DNA
ttccttatatttggagcagg

SEQ ID NO: 54588 - DNA, 20 bp, synthetic construct
  source 1..20: mol_type = other DNA
aagtagctgccagtttcttc

SEQ ID NO: 54589 - DNA, 20 bp, synthetic construct
  source 1..20: mol_type = other DNA
accaaacaggtgcaggggga

SEQ ID NO: 54590 - DNA, 20 bp, synthetic construct
  source 1..20: mol_type = other DNA
ctcttcccacattgtccggg

SEQ ID NO: 54591 - DNA, 20 bp, synthetic construct
  source 1..20: mol_type = other DNA
ctgcgatgccttctagggac

SEQ ID NO: 54592 - DNA, 20 bp, synthetic construct
  source 1..20: mol_type = other DNA
ccgtagaagcccacgatgta

SEQ ID NO: 54593 - DNA, 20 bp, synthetic construct
  source 1..20: mol_type = other DNA
gttcacttctgggtcgcaca

SEQ ID NO: 54594 - DNA, 20 bp, synthetic construct
  source 1..20: mol_type = other DNA
tatcagaatgtggagagtaa

SEQ ID NO: 54595 - DNA, 20 bp, synthetic construct
  source 1..20: mol_type = other DNA
gacgagggtcctgggagcat

SEQ ID NO: 54596 - DNA, 20 bp, synthetic construct
  source 1..20: mol_type = other DNA
catactattatctgatgtca

SEQ ID NO: 54597 - DNA, 20 bp, synthetic construct
  source 1..20: mol_type = other DNA
tgacacgttgccatcacaac

SEQ ID NO: 54598 - DNA, 20 bp, synthetic construct
  source 1..20: mol_type = other DNA
ggaacatatagaggccctat

SEQ ID NO: 54599 - DNA, 20 bp, synthetic construct
  source 1..20: mol_type = other DNA
cgtccatgtaggagtggctg

SEQ ID NO: 54600 - DNA, 20 bp, synthetic construct
  source 1..20: mol_type = other DNA
tctggcactggctgtgatac

SEQ ID NO: 54601 - DNA, 20 bp, synthetic construct
  source 1..20: mol_type = other DNA
ctacccggagccgggcgcgc

SEQ ID NO: 54602 - DNA, 20 bp, synthetic construct
  source 1..20: mol_type = other DNA
acgggccaccaggcgcagga

SEQ ID NO: 54603 - DNA, 20 bp, synthetic construct
  source 1..20: mol_type = other DNA
ctacctgcttccatggtcac

SEQ ID NO: 54604 - DNA, 20 bp, synthetic construct
  source 1..20: mol_type = other DNA
ggcaacaaaacttctgagca

SEQ ID NO: 54605 - DNA, 20 bp, synthetic construct
  source 1..20: mol_type = other DNA
ccaggagagcgcagatgccc

SEQ ID NO: 54606 - DNA, 20 bp, synthetic construct
  source 1..20: mol_type = other DNA
ggaggcgcagacacttagct

SEQ ID NO: 54607 - DNA, 20 bp, synthetic construct
  source 1..20: mol_type = other DNA
agcttcgctgtttatagctt

SEQ ID NO: 54608 - DNA, 20 bp, synthetic construct
  source 1..20: mol_type = other DNA
caaaagcgatctcctccaga

SEQ ID NO: 54609 - DNA, 20 bp, synthetic construct
  source 1..20: mol_type = other DNA
ggtgacctcagtcccttcag

SEQ ID NO: 54610 - DNA, 20 bp, synthetic construct
  source 1..20: mol_type = other DNA
tcgtctttctcagctggata

SEQ ID NO: 54611 - DNA, 20 bp, synthetic construct
  source 1..20: mol_type = other DNA
taggctgcgaagtcgcgtgg

SEQ ID NO: 54612 - DNA, 20 bp, synthetic construct
  source 1..20: mol_type = other DNA
cctgtgttctcgtacactgt

SEQ ID NO: 54613 - DNA, 20 bp, synthetic construct
  source 1..20: mol_type = other DNA
tctgtggccatcctgcccct

SEQ ID NO: 54614 - DNA, 20 bp, synthetic construct
  source 1..20: mol_type = other DNA
ttctgttcataccgacatgt

SEQ ID NO: 54615 - DNA, 20 bp, synthetic construct
  source 1..20: mol_type = other DNA
ggggtaaaagtactgtcccg

SEQ ID NO: 54616 - DNA, 20 bp, synthetic construct
  source 1..20: mol_type = other DNA
gggccggagcagccaggagc

SEQ ID NO: 54617 - DNA, 20 bp, synthetic construct
  source 1..20: mol_type = other DNA
tccttcacccactggtgatt

SEQ ID NO: 54618 - DNA, 20 bp, synthetic construct
  source 1..20: mol_type = other DNA
cgcacccgggacccccggtg

SEQ ID NO: 54619 - DNA, 20 bp, synthetic construct
  source 1..20: mol_type = other DNA
agaggtgctgctgaaggtca

SEQ ID NO: 54620 - DNA, 20 bp, synthetic construct
  source 1..20: mol_type = other DNA
gtagataagtttagaggtct

SEQ ID NO: 54621 - DNA, 20 bp, synthetic construct
  source 1..20: mol_type = other DNA
ggttgaggcggcgcaggctg

SEQ ID NO: 54622 - DNA, 20 bp, synthetic construct
  source 1..20: mol_type = other DNA
agtgtgcactcaactgcaac

SEQ ID NO: 54623 - DNA, 20 bp, synthetic construct
  source 1..20: mol_type = other DNA
ctcctcccgctgctgctgct

SEQ ID NO: 54624 - DNA, 20 bp, synthetic construct
  source 1..20: mol_type = other DNA
tgaggtagaggctgtggggc

SEQ ID NO: 54625 - DNA, 20 bp, synthetic construct
  source 1..20: mol_type = other DNA
gaacagtctacaagggaaag

SEQ ID NO: 54626 - DNA, 20 bp, synthetic construct
  source 1..20: mol_type = other DNA
ttccttgtccttgtccacgg

SEQ ID NO: 54627 - DNA, 20 bp, synthetic construct
  source 1..20: mol_type = other DNA
gaaggtgatctcagagcact

SEQ ID NO: 54628 - DNA, 20 bp, synthetic construct
  source 1..20: mol_type = other DNA
atctcgggcagccaccacat

SEQ ID NO: 54629 - DNA, 20 bp, synthetic construct
  source 1..20: mol_type = other DNA
atgttggagggcttcacatc

SEQ ID NO: 54630 - DNA, 20 bp, synthetic construct
  source 1..20: mol_type = other DNA
ctgaagtaccccatcgagca

SEQ ID NO: 54631 - DNA, 20 bp, synthetic construct
  source 1..20: mol_type = other DNA
atcattagcctcatgagcgc

SEQ ID NO: 54632 - DNA, 20 bp, synthetic construct
  source 1..20: mol_type = other DNA
tagaggcgatagaggtccag

SEQ ID NO: 54633 - DNA, 20 bp, synthetic construct
  source 1..20: mol_type = other DNA
ctccaaggagtgccgatggc

SEQ ID NO: 54634 - DNA, 20 bp, synthetic construct
  source 1..20: mol_type = other DNA
gtgccaattctgcgaggagg

SEQ ID NO: 54635 - DNA, 20 bp, synthetic construct
  source 1..20: mol_type = other DNA
tacaaaaacttcagaggcag

SEQ ID NO: 54636 - DNA, 20 bp, synthetic construct
  source 1..20: mol_type = other DNA
ccatgagtgcgtactggctg

SEQ ID NO: 54637 - DNA, 20 bp, synthetic construct
  source 1..20: mol_type = other DNA
gtgatcgcctcacccagtcc

SEQ ID NO: 54638 - DNA, 20 bp, synthetic construct
  source 1..20: mol_type = other DNA
agttctctattatgcctgcc

SEQ ID NO: 54639 - DNA, 20 bp, synthetic construct
  source 1..20: mol_type = other DNA
cccccaggtatgttgtgggg

SEQ ID NO: 54640 - DNA, 20 bp, synthetic construct
  source 1..20: mol_type = other DNA
aagggagtgtgctacagtgc

SEQ ID NO: 54641 - DNA, 20 bp, synthetic construct
  source 1..20: mol_type = other DNA
ggcgctggagaggaggcttt

SEQ ID NO: 54642 - DNA, 20 bp, synthetic construct
  source 1..20: mol_type = other DNA
ttcttgactaccagggggta

SEQ ID NO: 54643 - DNA, 20 bp, synthetic construct
  source 1..20: mol_type = other DNA
gtattaagttcaagtcttca

SEQ ID NO: 54644 - DNA, 20 bp, synthetic construct
  source 1..20: mol_type = other DNA
gggagcagagatgtgggaat

SEQ ID NO: 54645 - DNA, 20 bp, synthetic construct
  source 1..20: mol_type = other DNA
ttggtgtttcataatctcct

SEQ ID NO: 54646 - DNA, 20 bp, synthetic construct
  source 1..20: mol_type = other DNA
tttgggaacagcctgttcca

SEQ ID NO: 54647 - DNA, 20 bp, synthetic construct
  source 1..20: mol_type = other DNA
gcagcacctccatcactgtg

SEQ ID NO: 54648 - DNA, 20 bp, synthetic construct
  source 1..20: mol_type = other DNA
gggtgccatcaagcaggcaa

SEQ ID NO: 54649 - DNA, 20 bp, synthetic construct
  source 1..20: mol_type = other DNA
atgttggataatggcttatc

SEQ ID NO: 54650 - DNA, 20 bp, synthetic construct
  source 1..20: mol_type = other DNA
ggacagatggtctggggctg

SEQ ID NO: 54651 - DNA, 20 bp, synthetic construct
  source 1..20: mol_type = other DNA
ttatgtcaaggctgcctcct

SEQ ID NO: 54652 - DNA, 20 bp, synthetic construct
  source 1..20: mol_type = other DNA
ccagacgcaggatggcgtgg

SEQ ID NO: 54653 - DNA, 20 bp, synthetic construct
  source 1..20: mol_type = other DNA
ccctctcaggtaggcaggcg

SEQ ID NO: 54654 - DNA, 20 bp, synthetic construct
  source 1..20: mol_type = other DNA
gcaacagttcccaggggagc

SEQ ID NO: 54655 - DNA, 20 bp, synthetic construct
  source 1..20: mol_type = other DNA
ggggagaggagaggtaggct

SEQ ID NO: 54656 - DNA, 20 bp, synthetic construct
  source 1..20: mol_type = other DNA
taaacaggtacccagggcta

SEQ ID NO: 54657 - DNA, 20 bp, synthetic construct
  source 1..20: mol_type = other DNA
aggagtttccagaccctcag

SEQ ID NO: 54658 - DNA, 20 bp, synthetic construct
  source 1..20: mol_type = other DNA
agatgtactctagctggtgg

SEQ ID NO: 54659 - DNA, 20 bp, synthetic construct
  source 1..20: mol_type = other DNA
taagaaaatcactgtgttac

SEQ ID NO: 54660 - DNA, 20 bp, synthetic construct
  source 1..20: mol_type = other DNA
ggagcggctggatccagccg

SEQ ID NO: 54661 - DNA, 20 bp, synthetic construct
  source 1..20: mol_type = other DNA
catggcatcaattccgatat

SEQ ID NO: 54662 - DNA, 20 bp, synthetic construct
  source 1..20: mol_type = other DNA
cctgaaattcgtcaaatgtt

SEQ ID NO: 54663 - DNA, 20 bp, synthetic construct
  source 1..20: mol_type = other DNA
tgtgaaggcccctcccatgg

SEQ ID NO: 54664 - DNA, 20 bp, synthetic construct
  source 1..20: mol_type = other DNA
agccagcttcttgtgctgta

SEQ ID NO: 54665 - DNA, 20 bp, synthetic construct
  source 1..20: mol_type = other DNA
ttggccagctccttcaggta

SEQ ID NO: 54666 - DNA, 20 bp, synthetic construct
  source 1..20: mol_type = other DNA
actactattctcaggaggcc

SEQ ID NO: 54667 - DNA, 20 bp, synthetic construct
  source 1..20: mol_type = other DNA
ttcacccagggactcttcac

SEQ ID NO: 54668 - DNA, 20 bp, synthetic construct
  source 1..20: mol_type = other DNA
aggccacgctggaaatggtg

SEQ ID NO: 54669 - DNA, 20 bp, synthetic construct
  source 1..20: mol_type = other DNA
tgtgacctgcaaaacaaaca

SEQ ID NO: 54670 - DNA, 20 bp, synthetic construct
  source 1..20: mol_type = other DNA
tattttggattccaagatga

SEQ ID NO: 54671 - DNA, 20 bp, synthetic construct
  source 1..20: mol_type = other DNA
ctagaaggaagagaaacaga

SEQ ID NO: 54672 - DNA, 20 bp, synthetic construct
  source 1..20: mol_type = other DNA
ggagagatgaatatcgcctc

SEQ ID NO: 54673 - DNA, 20 bp, synthetic construct
  source 1..20: mol_type = other DNA
ggagggcgaggccacgctcc

SEQ ID NO: 54674 - DNA, 20 bp, synthetic construct
  source 1..20: mol_type = other DNA
acgccaggctggaggagcgg

SEQ ID NO: 54675 - DNA, 20 bp, synthetic construct
  source 1..20: mol_type = other DNA
atgagtccccgctaccttgg

SEQ ID NO: 54676 - DNA, 20 bp, synthetic construct
  source 1..20: mol_type = other DNA
ggctccggcatgtgcaaagc

SEQ ID NO: 54677 - DNA, 20 bp, synthetic construct
  source 1..20: mol_type = other DNA
tcaaaggtgggccggtcctc

SEQ ID NO: 54678 - DNA, 20 bp, synthetic construct
  source 1..20: mol_type = other DNA
ccttgccatggcagaggctg

SEQ ID NO: 54679 - DNA, 20 bp, synthetic construct
  source 1..20: mol_type = other DNA
agatatgtctcttcatgtgg

SEQ ID NO: 54680 - DNA, 20 bp, synthetic construct
  source 1..20: mol_type = other DNA
ttgtggtgcagggagaacca

SEQ ID NO: 54681 - DNA, 20 bp, synthetic construct
  source 1..20: mol_type = other DNA
aggcggccgtggggcccgga

SEQ ID NO: 54682 - DNA, 20 bp, synthetic construct
  source 1..20: mol_type = other DNA
tcacctcccaggtgtggcct

SEQ ID NO: 54683 - DNA, 20 bp, synthetic construct
  source 1..20: mol_type = other DNA
cctggatctgctcggggctc

SEQ ID NO: 54684 - DNA, 20 bp, synthetic construct
  source 1..20: mol_type = other DNA
atcagagcacacaggtgggt

SEQ ID NO: 54685 - DNA, 20 bp, synthetic construct
  source 1..20: mol_type = other DNA
ccgaaggcgcagccgggtca

SEQ ID NO: 54686 - DNA, 20 bp, synthetic construct
  source 1..20: mol_type = other DNA
catccaggccctcggattgg

SEQ ID NO: 54687 - DNA, 20 bp, synthetic construct
  source 1..20: mol_type = other DNA
ttgacattcaggtaaagaaa

SEQ ID NO: 54688 - DNA, 20 bp, synthetic construct
  source 1..20: mol_type = other DNA
agtgctccagggtgcggcga

SEQ ID NO: 54689 - DNA, 20 bp, synthetic construct
  source 1..20: mol_type = other DNA
tagcagagttgtctggtaac

SEQ ID NO: 54690 - DNA, 20 bp, synthetic construct
  source 1..20: mol_type = other DNA
acctgtttatgcacatctgt

SEQ ID NO: 54691 - DNA, 20 bp, synthetic construct
  source 1..20: mol_type = other DNA
tgaaggggatgaagccttcc

SEQ ID NO: 54692 - DNA, 20 bp, synthetic construct
  source 1..20: mol_type = other DNA
cttcttggacaacctggtag

SEQ ID NO: 54693 - DNA, 20 bp, synthetic construct
  source 1..20: mol_type = other DNA
cggggctcatgggcgcgtgg

SEQ ID NO: 54694 - DNA, 20 bp, synthetic construct
  source 1..20: mol_type = other DNA
cagagcagtccgtacccagg

SEQ ID NO: 54695 - DNA, 20 bp, synthetic construct
  source 1..20: mol_type = other DNA
cgtcaatggaagagggcact

SEQ ID NO: 54696 - DNA, 20 bp, synthetic construct
  source 1..20: mol_type = other DNA
ggaaaactccgtagtgacgc

SEQ ID NO: 54697 - DNA, 20 bp, synthetic construct
  source 1..20: mol_type = other DNA
atttctggatggatgggaag

SEQ ID NO: 54698 - DNA, 20 bp, synthetic construct
  source 1..20: mol_type = other DNA
cgactacaagacatggggtc

SEQ ID NO: 54699 - DNA, 20 bp, synthetic construct
  source 1..20: mol_type = other DNA
agagcctggaaggagataga

SEQ ID NO: 54700 - DNA, 20 bp, synthetic construct
  source 1..20: mol_type = other DNA
gcaagttcacaagcaggtac

SEQ ID NO: 54701 - DNA, 20 bp, synthetic construct
  source 1..20: mol_type = other DNA
ttgatagtcttatggtcatt

SEQ ID NO: 54702 - DNA, 20 bp, synthetic construct
  source 1..20: mol_type = other DNA
ttcatattggggtagcctgg

SEQ ID NO: 54703 - DNA, 20 bp, synthetic construct
  source 1..20: mol_type = other DNA
ccccaggatggctccggaag

SEQ ID NO: 54704 - DNA, 20 bp, synthetic construct
  source 1..20: mol_type = other DNA
ggccctgcgagcagggcgag

SEQ ID NO: 54705 - DNA, 20 bp, synthetic construct
  source 1..20: mol_type = other DNA
cccgtgattcagaggacagc

SEQ ID NO: 54706 - DNA, 20 bp, synthetic construct
  source 1..20: mol_type = other DNA
caccattcagcatgagaacc

SEQ ID NO: 54707 - DNA, 20 bp, synthetic construct
  source 1..20: mol_type = other DNA
catctcctgagatactggtc

SEQ ID NO: 54708 - DNA, 20 bp, synthetic construct
  source 1..20: mol_type = other DNA
ttgtgatggagttcctcaac

SEQ ID NO: 54709 - DNA, 20 bp, synthetic construct
  source 1..20: mol_type = other DNA
tggttgtttgtcattcctct

SEQ ID NO: 54710 - DNA, 20 bp, synthetic construct
  source 1..20: mol_type = other DNA
atctccctccaggactaggc

SEQ ID NO: 54711 - DNA, 20 bp, synthetic construct
  source 1..20: mol_type = other DNA
ccacacatgtgattggacct

SEQ ID NO: 54712 - DNA, 20 bp, synthetic construct
  source 1..20: mol_type = other DNA
gccagaggccccatggtggg

SEQ ID NO: 54713 - DNA, 20 bp, synthetic construct
  source 1..20: mol_type = other DNA
tatgccacacagctccaggt

SEQ ID NO: 54714 - DNA, 20 bp, synthetic construct
  source 1..20: mol_type = other DNA
cttctcctttgggtctgcag

SEQ ID NO: 54715 - DNA, 20 bp, synthetic construct
  source 1..20: mol_type = other DNA
ttaccctccgcagaaagtgg

SEQ ID NO: 54716 - DNA, 20 bp, synthetic construct
  source 1..20: mol_type = other DNA
tagcaacccctgcccctgcc

SEQ ID NO: 54717 - DNA, 20 bp, synthetic construct
  source 1..20: mol_type = other DNA
accccccccagaggaggctg

SEQ ID NO: 54718 - DNA, 20 bp, synthetic construct
  source 1..20: mol_type = other DNA
aagcgcatgccccgctgctt

SEQ ID NO: 54719 - DNA, 20 bp, synthetic construct
  source 1..20: mol_type = other DNA
cttccagatggtgagtgagg

SEQ ID NO: 54720 - DNA, 20 bp, synthetic construct
  source 1..20: mol_type = other DNA
atcgcagttcatctttccac

SEQ ID NO: 54721 - DNA, 20 bp, synthetic construct
  source 1..20: mol_type = other DNA
gggcatggcctacctggaag

SEQ ID NO: 54722 - DNA, 20 bp, synthetic construct
  source 1..20: mol_type = other DNA
tgtggagcctttttaatagt

SEQ ID NO: 54723 - DNA, 20 bp, synthetic construct
  source 1..20: mol_type = other DNA
aggctgggggccggggaagc

SEQ ID NO: 54724 - DNA, 20 bp, synthetic construct
  source 1..20: mol_type = other DNA
cttcagacaggacttgctgg

SEQ ID NO: 54725 - DNA, 20 bp, synthetic construct
  source 1..20: mol_type = other DNA
agataaacctctaagtgctc

SEQ ID NO: 54726 - DNA, 20 bp, synthetic construct
  source 1..20: mol_type = other DNA
aaatatgaggataggtgccc

SEQ ID NO: 54727 - DNA, 20 bp, synthetic construct
  source 1..20: mol_type = other DNA
atggtgatgacctggccgtc

SEQ ID NO: 54728 - DNA, 20 bp, synthetic construct
  source 1..20: mol_type = other DNA
cgacacagcagtgcccacag

SEQ ID NO: 54729 - DNA, 20 bp, synthetic construct
  source 1..20: mol_type = other DNA
caagtgctcgaccctgggaa

SEQ ID NO: 54730 - DNA, 20 bp, synthetic construct
  source 1..20: mol_type = other DNA
gtttgcaggaaagcagatgg

SEQ ID NO: 54731 - DNA, 20 bp, synthetic construct
  source 1..20: mol_type = other DNA
tccagagcaaggttctctgc

SEQ ID NO: 54732 - DNA, 20 bp, synthetic construct
  source 1..20: mol_type = other DNA
atcttgggggggatcccaca

SEQ ID NO: 54733 - DNA, 20 bp, synthetic construct
  source 1..20: mol_type = other DNA
ccagctctgctggatcggca

SEQ ID NO: 54734 - DNA, 20 bp, synthetic construct
  source 1..20: mol_type = other DNA
catgaatcccccccaggtga

SEQ ID NO: 54735 - DNA, 20 bp, synthetic construct
  source 1..20: mol_type = other DNA
gtgaactacgacaccaagag

SEQ ID NO: 54736 - DNA, 20 bp, synthetic construct
  source 1..20: mol_type = other DNA
tgccccaggtgaatggagtg

SEQ ID NO: 54737 - DNA, 20 bp, synthetic construct
  source 1..20: mol_type = other DNA
ctgatttacaagctgtacat

SEQ ID NO: 54738 - DNA, 20 bp, synthetic construct
  source 1..20: mol_type = other DNA
cctcagagtgagtcggaggc

SEQ ID NO: 54739 - DNA, 20 bp, synthetic construct
  source 1..20: mol_type = other DNA
caataactttgtagccatcc

SEQ ID NO: 54740 - DNA, 20 bp, synthetic construct
  source 1..20: mol_type = other DNA
gaactgcaagacaggaagag

SEQ ID NO: 54741 - DNA, 20 bp, synthetic construct
  source 1..20: mol_type = other DNA
ttcctcttctatgaactgca

SEQ ID NO: 54742 - DNA, 20 bp, synthetic construct
  source 1..20: mol_type = other DNA
tagggatggatctcagcaaa

SEQ ID NO: 54743 - DNA, 20 bp, synthetic construct
  source 1..20: mol_type = other DNA
ctgagctttctaggacctcc

SEQ ID NO: 54744 - DNA, 20 bp, synthetic construct
  source 1..20: mol_type = other DNA
ccgttactcagggatatact

SEQ ID NO: 54745 - DNA, 20 bp, synthetic construct
  source 1..20: mol_type = other DNA
ccaggacaccaaaggctgcc

SEQ ID NO: 54746 - DNA, 20 bp, synthetic construct
  source 1..20: mol_type = other DNA
accattataataactggaaa

SEQ ID NO: 54747 - DNA, 20 bp, synthetic construct
  source 1..20: mol_type = other DNA
aacaacatcaagtactacga

SEQ ID NO: 54748 - DNA, 20 bp, synthetic construct
  source 1..20: mol_type = other DNA
ttgaaagtgtatttcgtatt

SEQ ID NO: 54749 - DNA, 20 bp, synthetic construct
  source 1..20: mol_type = other DNA
tttctttcagagcatcccgc

SEQ ID NO: 54750 - DNA, 20 bp, synthetic construct
  source 1..20: mol_type = other DNA
aggccacatggggcagaagc

SEQ ID NO: 54751 - DNA, 20 bp, synthetic construct
  source 1..20: mol_type = other DNA
aagcaggagtatgacgagtc

SEQ ID NO: 54752 - DNA, 20 bp, synthetic construct
  source 1..20: mol_type = other DNA
acaaggaggggacagctgtc

SEQ ID NO: 54753 - DNA, 20 bp, synthetic construct
  source 1..20: mol_type = other DNA
cagcattccaagcgtgcaca

SEQ ID NO: 54754 - DNA, 20 bp, synthetic construct
  source 1..20: mol_type = other DNA
gctgagaagacagaggaatg

SEQ ID NO: 54755 - DNA, 20 bp, synthetic construct
  source 1..20: mol_type = other DNA
aggcggccgtgctgtggatc

SEQ ID NO: 54756 - DNA, 20 bp, synthetic construct
  source 1..20: mol_type = other DNA
ctccgtcaatttgcatggga

SEQ ID NO: 54757 - DNA, 20 bp, synthetic construct
  source 1..20: mol_type = other DNA
tgagaacgagtgtctaggga

SEQ ID NO: 54758 - DNA, 20 bp, synthetic construct
  source 1..20: mol_type = other DNA
attatgtcacccccgtgaac

SEQ ID NO: 54759 - DNA, 20 bp, synthetic construct
  source 1..20: mol_type = other DNA
taatccattaacttcaggtt

SEQ ID NO: 54760 - DNA, 20 bp, synthetic construct
  source 1..20: mol_type = other DNA
accagtccctctgagctctg

SEQ ID NO: 54761 - DNA, 20 bp, synthetic construct
  source 1..20: mol_type = other DNA
gcagcaatgctgagttcaca

SEQ ID NO: 54762 - DNA, 20 bp, synthetic construct
  source 1..20: mol_type = other DNA
ggcggcatatgctgcggctg

SEQ ID NO: 54763 - DNA, 20 bp, synthetic construct
  source 1..20: mol_type = other DNA
ggtaattcttgtaaagcctg

SEQ ID NO: 54764 - DNA, 20 bp, synthetic construct
  source 1..20: mol_type = other DNA
gcggataaataatgttttca

SEQ ID NO: 54765 - DNA, 20 bp, synthetic construct
  source 1..20: mol_type = other DNA
agtccatggggtcctcgcct

SEQ ID NO: 54766 - DNA, 20 bp, synthetic construct
  source 1..20: mol_type = other DNA
ccgagctcccctgcagatgg

SEQ ID NO: 54767 - DNA, 20 bp, synthetic construct
  source 1..20: mol_type = other DNA
gcgcctgggggtggcggcgg

SEQ ID NO: 54768 - DNA, 20 bp, synthetic construct
  source 1..20: mol_type = other DNA
ctcccaccattgtggtgggc

SEQ ID NO: 54769 - DNA, 20 bp, synthetic construct
  source 1..20: mol_type = other DNA
agatgattgcacataccacg

SEQ ID NO: 54770 - DNA, 20 bp, synthetic construct
  source 1..20: mol_type = other DNA
ccagcttcacagagcctgga

SEQ ID NO: 54771 - DNA, 20 bp, synthetic construct
  source 1..20: mol_type = other DNA
agaactcaagtagatccttc

SEQ ID NO: 54772 - DNA, 20 bp, synthetic construct
  source 1..20: mol_type = other DNA
cccgggtagagcccggcgcg

SEQ ID NO: 54773 - DNA, 20 bp, synthetic construct
  source 1..20: mol_type = other DNA
tccaatggtgatgaaggtcc

SEQ ID NO: 54774 - DNA, 20 bp, synthetic construct
  source 1..20: mol_type = other DNA
caagcagaagacagagtttg

SEQ ID NO: 54775 - DNA, 20 bp, synthetic construct
  source 1..20: mol_type = other DNA
ctaaagaagggcctcgaaag

SEQ ID NO: 54776 - DNA, 20 bp, synthetic construct
  source 1..20: mol_type = other DNA
ggaaataatcaccacaggga

SEQ ID NO: 54777 - DNA, 20 bp, synthetic construct
  source 1..20: mol_type = other DNA
tgcagaatactggccgtcaa

SEQ ID NO: 54778 - DNA, 20 bp, synthetic construct
  source 1..20: mol_type = other DNA
ctaccttgatgatgctgctc

SEQ ID NO: 54779 - DNA, 20 bp, synthetic construct
  source 1..20: mol_type = other DNA
agaaaagagaaagaagaaac

SEQ ID NO: 54780 - DNA, 20 bp, synthetic construct
  source 1..20: mol_type = other DNA
ttgcacttttgcaatgatgt

SEQ ID NO: 54781 - DNA, 20 bp, synthetic construct
  source 1..20: mol_type = other DNA
tgagccacctgagaaggaac

SEQ ID NO: 54782 - DNA, 20 bp, synthetic construct
  source 1..20: mol_type = other DNA
attgcaaaagtgcaacgtaa

SEQ ID NO: 54783 - DNA, 20 bp, synthetic construct
  source 1..20: mol_type = other DNA
acggaggcgctggtttctgg

SEQ ID NO: 54784 - DNA, 20 bp, synthetic construct
  source 1..20: mol_type = other DNA
gcagctgcagctggtgagtg

SEQ ID NO: 54785 - DNA, 20 bp, synthetic construct
  source 1..20: mol_type = other DNA
caaagttcccgggataatcc

SEQ ID NO: 54786 - DNA, 20 bp, synthetic construct
  source 1..20: mol_type = other DNA
ggaggcggggggcgaggcgg

SEQ ID NO: 54787 - DNA, 20 bp, synthetic construct
  source 1..20: mol_type = other DNA
gagactgaccagccttcaga

SEQ ID NO: 54788 - DNA, 20 bp, synthetic construct
  source 1..20: mol_type = other DNA
gcccaatgcctgcactacag

SEQ ID NO: 54789 - DNA, 20 bp, synthetic construct
  source 1..20: mol_type = other DNA
tcctgacattcccaaggagg

SEQ ID NO: 54790 - DNA, 20 bp, synthetic construct
  source 1..20: mol_type = other DNA
ggcgggggccgactgcgtga

SEQ ID NO: 54791 - DNA, 20 bp, synthetic construct
  source 1..20: mol_type = other DNA
tgcgctacctcccccatgtg

SEQ ID NO: 54792 - DNA, 20 bp, synthetic construct
  source 1..20: mol_type = other DNA
ccagacaccaggtgagtgga

SEQ ID NO: 54793 - DNA, 20 bp, synthetic construct
  source 1..20: mol_type = other DNA
ccattccagtgtaatcagtg

SEQ ID NO: 54794 - DNA, 20 bp, synthetic construct
  source 1..20: mol_type = other DNA
cttctggcagtggtttgacg

SEQ ID NO: 54795 - DNA, 20 bp, synthetic construct
  source 1..20: mol_type = other DNA
ggtccgagaacaagtataag

SEQ ID NO: 54796 - DNA, 20 bp, synthetic construct
  source 1..20: mol_type = other DNA
actgcccagggccacggctg

SEQ ID NO: 54797 - DNA, 20 bp, synthetic construct
  source 1..20: mol_type = other DNA
tatcaggcctgcagagtaac

SEQ ID NO: 54798 - DNA, 20 bp, synthetic construct
  source 1..20: mol_type = other DNA
ccgcgccatcgagagctccc

SEQ ID NO: 54799 - DNA, 20 bp, synthetic construct
  source 1..20: mol_type = other DNA
tgctgagaacagaaaggaga

SEQ ID NO: 54800 - DNA, 20 bp, synthetic construct
  source 1..20: mol_type = other DNA
tcgggacctcctccaccacc

SEQ ID NO: 54801 - DNA, 20 bp, synthetic construct
  source 1..20: mol_type = other DNA
gggtacccatgtccttgctg

SEQ ID NO: 54802 - DNA, 20 bp, synthetic construct
  source 1..20: mol_type = other DNA
cagtggaggaccttcagaag

SEQ ID NO: 54803 - DNA, 20 bp, synthetic construct
  source 1..20: mol_type = other DNA
tcatggatggctgcgaggcg

SEQ ID NO: 54804 - DNA, 20 bp, synthetic construct
  source 1..20: mol_type = other DNA
cattctgggtgtgcatctca

SEQ ID NO: 54805 - DNA, 20 bp, synthetic construct
  source 1..20: mol_type = other DNA
caccatccggcggcacctag

SEQ ID NO: 54806 - DNA, 20 bp, synthetic construct
  source 1..20: mol_type = other DNA
gagtctgtaaaaaagacaaa

SEQ ID NO: 54807 - DNA, 20 bp, synthetic construct
  source 1..20: mol_type = other DNA
tccctttgatgaagagagta

SEQ ID NO: 54808 - DNA, 20 bp, synthetic construct
  source 1..20: mol_type = other DNA
gttttccggaggatgcccac

SEQ ID NO: 54809 - DNA, 20 bp, synthetic construct
  source 1..20: mol_type = other DNA
attccagtgtaatcagtgtg

SEQ ID NO: 54810 - DNA, 20 bp, synthetic construct
  source 1..20: mol_type = other DNA
taaaggatggtcctgagata

SEQ ID NO: 54811 - DNA, 20 bp, synthetic construct
  source 1..20: mol_type = other DNA
caggacgggcagctccggcc

SEQ ID NO: 54812 - DNA, 20 bp, synthetic construct
  source 1..20: mol_type = other DNA
cgccctgagggccgcggctc

SEQ ID NO: 54813 - DNA, 20 bp, synthetic construct
  source 1..20: mol_type = other DNA
ccaggtcaggaaccggtggt

SEQ ID NO: 54814 - DNA, 20 bp, synthetic construct
  source 1..20: mol_type = other DNA
tgaacctcaacaaggcctgc

SEQ ID NO: 54815 - DNA, 20 bp, synthetic construct
  source 1..20: mol_type = other DNA
tgggcatttctgctcgaacc

SEQ ID NO: 54816 - DNA, 20 bp, synthetic construct
  source 1..20: mol_type = other DNA
gcgcagagccctgcgccgcg

SEQ ID NO: 54817 - DNA, 20 bp, synthetic construct
  source 1..20: mol_type = other DNA
agctgtagccgcgctcggtg

SEQ ID NO: 54818 - DNA, 20 bp, synthetic construct
  source 1..20: mol_type = other DNA
tacctgaacggggacgggat

SEQ ID NO: 54819 - DNA, 20 bp, synthetic construct
  source 1..20: mol_type = other DNA
cagtgcgggacccatcaggc

SEQ ID NO: 54820 - DNA, 20 bp, synthetic construct
  source 1..20: mol_type = other DNA
ctgaacctccagatctactg

SEQ ID NO: 54821 - DNA, 20 bp, synthetic construct
  source 1..20: mol_type = other DNA
ccccacctcaccgcccattc

SEQ ID NO: 54822 - DNA, 20 bp, synthetic construct
  source 1..20: mol_type = other DNA
ctcgcaggacgcgctccgcg

SEQ ID NO: 54823 - DNA, 20 bp, synthetic construct
  source 1..20: mol_type = other DNA
cgtcttcggttccctggata

SEQ ID NO: 54824 - DNA, 20 bp, synthetic construct
  source 1..20: mol_type = other DNA
tggtctctttccgttccagc

SEQ ID NO: 54825 - DNA, 20 bp, synthetic construct
  source 1..20: mol_type = other DNA
ctggtgcgggagaaggccac

SEQ ID NO: 54826 - DNA, 20 bp, synthetic construct
  source 1..20: mol_type = other DNA
cacgttgcagacgatctccc

SEQ ID NO: 54827 - DNA, 20 bp, synthetic construct
  source 1..20: mol_type = other DNA
agtaccattgctgtgttaca

SEQ ID NO: 54828 - DNA, 20 bp, synthetic construct
  source 1..20: mol_type = other DNA
atctggaggcggcaggctgc

SEQ ID NO: 54829 - DNA, 20 bp, synthetic construct
  source 1..20: mol_type = other DNA
ctaccgggaaatcctcgtga

SEQ ID NO: 54830 - DNA, 20 bp, synthetic construct
  source 1..20: mol_type = other DNA
gctcttcgaggatggcgaga

SEQ ID NO: 54831 - DNA, 20 bp, synthetic construct
  source 1..20: mol_type = other DNA
ggtgagtgggggcttgggac

SEQ ID NO: 54832 - DNA, 20 bp, synthetic construct
  source 1..20: mol_type = other DNA
ctcacattcagttcaccagc

SEQ ID NO: 54833 - DNA, 20 bp, synthetic construct
  source 1..20: mol_type = other DNA
caatcttcatcttgtgatag

SEQ ID NO: 54834 - DNA, 20 bp, synthetic construct
  source 1..20: mol_type = other DNA
ttattatattatgcaggaca

SEQ ID NO: 54835 - DNA, 20 bp, synthetic construct
  source 1..20: mol_type = other DNA
ctgtctcagtactggactat

SEQ ID NO: 54836 - DNA, 20 bp, synthetic construct
  source 1..20: mol_type = other DNA
caaggtacggcacggaggga

SEQ ID NO: 54837 - DNA, 20 bp, synthetic construct
  source 1..20: mol_type = other DNA
cagccaggtgagcggggatg

SEQ ID NO: 54838 - DNA, 20 bp, synthetic construct
  source 1..20: mol_type = other DNA
ccaaccacctgcaccaggtg

SEQ ID NO: 54839 - DNA, 20 bp, synthetic construct
  source 1..20: mol_type = other DNA
ctaaagcgcctgacccgctg

SEQ ID NO: 54840 - DNA, 20 bp, synthetic construct
  source 1..20: mol_type = other DNA
cacccccgacagactcccct

SEQ ID NO: 54841 - DNA, 20 bp, synthetic construct
  source 1..20: mol_type = other DNA
tgggctgcaccatccactgc

SEQ ID NO: 54842 - DNA, 20 bp, synthetic construct
  source 1..20: mol_type = other DNA
atatcagttgctaacacctt

SEQ ID NO: 54843 - DNA, 20 bp, synthetic construct
  source 1..20: mol_type = other DNA
gggggacgtgccggatggta

SEQ ID NO: 54844 - DNA, 20 bp, synthetic construct
  source 1..20: mol_type = other DNA
agtaaccagtgtagaaaggc

SEQ ID NO: 54845 - DNA, 20 bp, synthetic construct
  source 1..20: mol_type = other DNA
tcaaagttactcgtatcccc

SEQ ID NO: 54846 - DNA, 20 bp, synthetic construct
  source 1..20: mol_type = other DNA
ccgattctttctccacaatg

SEQ ID NO: 54847 - DNA, 20 bp, synthetic construct
  source 1..20: mol_type = other DNA
tgcaggtggacggggagccc

SEQ ID NO: 54848 - DNA, 20 bp, synthetic construct
  source 1..20: mol_type = other DNA
tatgacaatattggatttgt

SEQ ID NO: 54849 - DNA, 20 bp, synthetic construct
  source 1..20: mol_type = other DNA
tgttgatggcaaacacacac

SEQ ID NO: 54850 - DNA, 20 bp, synthetic construct
  source 1..20: mol_type = other DNA
tgctgggactgctgagactg

SEQ ID NO: 54851 - DNA, 20 bp, synthetic construct
  source 1..20: mol_type = other DNA
cgtgcacggtggaactgcca

SEQ ID NO: 54852 - DNA, 20 bp, synthetic construct
  source 1..20: mol_type = other DNA
gagaccgtcatccaggcggt

SEQ ID NO: 54853 - DNA, 20 bp, synthetic construct
  source 1..20: mol_type = other DNA
gaatctatgccttttgcaca

SEQ ID NO: 54854 - DNA, 20 bp, synthetic construct
  source 1..20: mol_type = other DNA
tctattgaagtctcccgggc

SEQ ID NO: 54855 - DNA, 20 bp, synthetic construct
  source 1..20: mol_type = other DNA
aaggaagaatgtcaacataa

SEQ ID NO: 54856 - DNA, 20 bp, synthetic construct
  source 1..20: mol_type = other DNA
catatggaacccacggtggc

SEQ ID NO: 54857 - DNA, 20 bp, synthetic construct
  source 1..20: mol_type = other DNA
ctcaacctgagctacttcta

SEQ ID NO: 54858 - DNA, 20 bp, synthetic construct
  source 1..20: mol_type = other DNA
cccgagtcagtctctcaaaa

SEQ ID NO: 54859 - DNA, 20 bp, synthetic construct
  source 1..20: mol_type = other DNA
acttgctcctcaaactgaga

SEQ ID NO: 54860 - DNA, 20 bp, synthetic construct
  source 1..20: mol_type = other DNA
cgccttttgccgcttgcact

SEQ ID NO: 54861 - DNA, 20 bp, synthetic construct
  source 1..20: mol_type = other DNA
actcacccgagaactggaag

SEQ ID NO: 54862 - DNA, 20 bp, synthetic construct
  source 1..20: mol_type = other DNA
agaggggccccggggagccg

SEQ ID NO: 54863 - DNA, 20 bp, synthetic construct
  source 1..20: mol_type = other DNA
cgggaggcgttggccgtcag

SEQ ID NO: 54864 - DNA, 20 bp, synthetic construct
  source 1..20: mol_type = other DNA
tgctgttctccggttctgtg

SEQ ID NO: 54865 - DNA, 20 bp, synthetic construct
  source 1..20: mol_type = other DNA
ggcggcagctgcgcaaagtg

SEQ ID NO: 54866 - DNA, 20 bp, synthetic construct
  source 1..20: mol_type = other DNA
atcagagaggcctgagacaa

SEQ ID NO: 54867 - DNA, 20 bp, synthetic construct
  source 1..20: mol_type = other DNA
agagaacattcgactcttgc

SEQ ID NO: 54868 - DNA, 20 bp, synthetic construct
  source 1..20: mol_type = other DNA
cgctcaaggccgagaacgcg

SEQ ID NO: 54869 - DNA, 20 bp, synthetic construct
  source 1..20: mol_type = other DNA
aattgagcctggaggtgaga

SEQ ID NO: 54870 - DNA, 20 bp, synthetic construct
  source 1..20: mol_type = other DNA
tgatcttgatctggaaggga

SEQ ID NO: 54871 - DNA, 20 bp, synthetic construct
  source 1..20: mol_type = other DNA
gggcagtcagctggtggccc

SEQ ID NO: 54872 - DNA, 20 bp, synthetic construct
  source 1..20: mol_type = other DNA
ccccttcatcacctaaaaga

SEQ ID NO: 54873 - DNA, 20 bp, synthetic construct
  source 1..20: mol_type = other DNA
gggctgcggcgaggggctcc

SEQ ID NO: 54874 - DNA, 20 bp, synthetic construct
  source 1..20: mol_type = other DNA
acctgagagaggaaggataa

SEQ ID NO: 54875 - DNA, 20 bp, synthetic construct
  source 1..20: mol_type = other DNA
gcagggactggaaggggaaa

SEQ ID NO: 54876 - DNA, 20 bp, synthetic construct
  source 1..20: mol_type = other DNA
tcattggcctcacttccttc

SEQ ID NO: 54877 - DNA, 20 bp, synthetic construct
  source 1..20: mol_type = other DNA
actcagccatcttagcctgc

SEQ ID NO: 54878 - DNA, 20 bp, synthetic construct
  source 1..20: mol_type = other DNA
tgattctgtagttgccatcc

SEQ ID NO: 54879 - DNA, 20 bp, synthetic construct
  source 1..20: mol_type = other DNA
tcagaaactagtgtgaacag

SEQ ID NO: 54880 - DNA, 20 bp, synthetic construct
  source 1..20: mol_type = other DNA
attccacagtgcgtgcagcc

SEQ ID NO: 54881 - DNA, 20 bp, synthetic construct
  source 1..20: mol_type = other DNA
aatgtcatctacaaggaaaa

SEQ ID NO: 54882 - DNA, 20 bp, synthetic construct
  source 1..20: mol_type = other DNA
caggtgagaggagcagcctt

SEQ ID NO: 54883 - DNA, 20 bp, synthetic construct
  source 1..20: mol_type = other DNA
tgttccacgatcaccaggta

SEQ ID NO: 54884 - DNA, 20 bp, synthetic construct
  source 1..20: mol_type = other DNA
agtgccacttaaacatgagc

SEQ ID NO: 54885 - DNA, 20 bp, synthetic construct
  source 1..20: mol_type = other DNA
caggctttggggagctccgg

SEQ ID NO: 54886 - DNA, 20 bp, synthetic construct
  source 1..20: mol_type = other DNA
atgcggcccagcatcagctc

SEQ ID NO: 54887 - DNA, 20 bp, synthetic construct
  source 1..20: mol_type = other DNA
ctcttccacacggtgcgctt

SEQ ID NO: 54888 - DNA, 20 bp, synthetic construct
  source 1..20: mol_type = other DNA
gacgagtgatggcactgaag

SEQ ID NO: 54889 - DNA, 20 bp, synthetic construct
  source 1..20: mol_type = other DNA
agacatcatcatctgtgagg

SEQ ID NO: 54890 - DNA, 20 bp, synthetic construct
  source 1..20: mol_type = other DNA
tgcagcagggggacgtggac

SEQ ID NO: 54891 - DNA, 20 bp, synthetic construct
  source 1..20: mol_type = other DNA
cacgttgccaaagcccacac

SEQ ID NO: 54892 - DNA, 20 bp, synthetic construct
  source 1..20: mol_type = other DNA
accgcagcagggccaggcac

SEQ ID NO: 54893 - DNA, 20 bp, synthetic construct
  source 1..20: mol_type = other DNA
cctatgctgcgtggtggtcc

SEQ ID NO: 54894 - DNA, 20 bp, synthetic construct
  source 1..20: mol_type = other DNA
ggggccacgagcaacaactg

SEQ ID NO: 54895 - DNA, 20 bp, synthetic construct
  source 1..20: mol_type = other DNA
tgattgacttaagttttact

SEQ ID NO: 54896 - DNA, 20 bp, synthetic construct
  source 1..20: mol_type = other DNA
agggagcgctggaaggacgc

SEQ ID NO: 54897 - DNA, 20 bp, synthetic construct
  source 1..20: mol_type = other DNA
gtaattgtggaacatgttcc

SEQ ID NO: 54898 - DNA, 20 bp, synthetic construct
  source 1..20: mol_type = other DNA
agtctttgcacatcattcgt

SEQ ID NO: 54899 - DNA, 20 bp, synthetic construct
  source 1..20: mol_type = other DNA
ctgtggagaatactggtaca

SEQ ID NO: 54900 - DNA, 20 bp, synthetic construct
  source 1..20: mol_type = other DNA
ggaggccttgcagaagaagc

SEQ ID NO: 54901 - DNA, 20 bp, synthetic construct
  source 1..20: mol_type = other DNA
ctcggagcccgtgtccatgc

SEQ ID NO: 54902 - DNA, 20 bp, synthetic construct
  source 1..20: mol_type = other DNA
gccccgtacctcaggggtga

SEQ ID NO: 54903 - DNA, 20 bp, synthetic construct
  source 1..20: mol_type = other DNA
gcgaaggccacgatgttgac

SEQ ID NO: 54904 - DNA, 20 bp, synthetic construct
  source 1..20: mol_type = other DNA
catagcaaaggcagatgccc

SEQ ID NO: 54905 - DNA, 20 bp, synthetic construct
  source 1..20: mol_type = other DNA
tggggaggcccgaaagacag

SEQ ID NO: 54906 - DNA, 20 bp, synthetic construct
  source 1..20: mol_type = other DNA
aattcagcctctagtggaga

SEQ ID NO: 54907 - DNA, 20 bp, synthetic construct
  source 1..20: mol_type = other DNA
aacatcctttaatcaggtat

SEQ ID NO: 54908 - DNA, 20 bp, synthetic construct
  source 1..20: mol_type = other DNA
atagcattagcagcccaggc

SEQ ID NO: 54909 - DNA, 20 bp, synthetic construct
  source 1..20: mol_type = other DNA
gcttaaaaagttggaggaat

SEQ ID NO: 54910 - DNA, 20 bp, synthetic construct
  source 1..20: mol_type = other DNA
ggcatgagcgcggtgagctg

SEQ ID NO: 54911 - DNA, 20 bp, synthetic construct
  source 1..20: mol_type = other DNA
gtggagaggtcctcggggat

SEQ ID NO: 54912 - DNA, 20 bp, synthetic construct
  source 1..20: mol_type = other DNA
cttccagagcccctggagga

SEQ ID NO: 54913 - DNA, 20 bp, synthetic construct
  source 1..20: mol_type = other DNA
agcagagtgcccgcatgctg

SEQ ID NO: 54914 - DNA, 20 bp, synthetic construct
  source 1..20: mol_type = other DNA
cacatggcacccgatggctg

SEQ ID NO: 54915 - DNA, 20 bp, synthetic construct
  source 1..20: mol_type = other DNA
cttcaagaactttgaggtgg

SEQ ID NO: 54916 - DNA, 20 bp, synthetic construct
  source 1..20: mol_type = other DNA
tatgtaatgagttatttctt

SEQ ID NO: 54917 - DNA, 20 bp, synthetic construct
  source 1..20: mol_type = other DNA
cctgtagacgtcactggctg

SEQ ID NO: 54918 - DNA, 20 bp, synthetic construct
  source 1..20: mol_type = other DNA
gtatagccgtggtagatgat

SEQ ID NO: 54919 - DNA, 20 bp, synthetic construct
  source 1..20: mol_type = other DNA
ggtagccactcttggtcatg

SEQ ID NO: 54920 - DNA, 20 bp, synthetic construct
  source 1..20: mol_type = other DNA
ttgacctttacaggtaccag

SEQ ID NO: 54921 - DNA, 20 bp, synthetic construct
  source 1..20: mol_type = other DNA
tggctcacacgaaggagtac

SEQ ID NO: 54922 - DNA, 20 bp, synthetic construct
  source 1..20: mol_type = other DNA
tgagacccagcccaggtaga

SEQ ID NO: 54923 - DNA, 20 bp, synthetic construct
  source 1..20: mol_type = other DNA
taatcggagcctgagacaaa

SEQ ID NO: 54924 - DNA, 20 bp, synthetic construct
  source 1..20: mol_type = other DNA
agaaagggttgacgcagcag

SEQ ID NO: 54925 - DNA, 20 bp, synthetic construct
  source 1..20: mol_type = other DNA
caggccctcggattggtggg

SEQ ID NO: 54926 - DNA, 20 bp, synthetic construct
  source 1..20: mol_type = other DNA
aaccttgggcagggaccaaa

SEQ ID NO: 54927 - DNA, 20 bp, synthetic construct
  source 1..20: mol_type = other DNA
cttcattgtgctgggtgcca

SEQ ID NO: 54928 - DNA, 20 bp, synthetic construct
  source 1..20: mol_type = other DNA
ggccatgatgctggcccagc

SEQ ID NO: 54929 - DNA, 20 bp, synthetic construct
  source 1..20: mol_type = other DNA
tgaaggcgatgatacctcta

SEQ ID NO: 54930 - DNA, 20 bp, synthetic construct
  source 1..20: mol_type = other DNA
agaaggggccccagcagggg

SEQ ID NO: 54931 - DNA, 20 bp, synthetic construct
  source 1..20: mol_type = other DNA
ccagctctgagctaaggatt

SEQ ID NO: 54932 - DNA, 20 bp, synthetic construct
  source 1..20: mol_type = other DNA
agctgtggagtgggggatga

SEQ ID NO: 54933 - DNA, 20 bp, synthetic construct
  source 1..20: mol_type = other DNA
gtgggaagcacaaagtattt

SEQ ID NO: 54934 - DNA, 20 bp, synthetic construct
  source 1..20: mol_type = other DNA
ccaccaggctgtgggcatgc

SEQ ID NO: 54935 - DNA, 20 bp, synthetic construct
  source 1..20: mol_type = other DNA
aaaaactttaaacgatctgc

SEQ ID NO: 54936 - DNA, 20 bp, synthetic construct
  source 1..20: mol_type = other DNA
ctcgcagctcctctgcctgg

SEQ ID NO: 54937 - DNA, 20 bp, synthetic construct
  source 1..20: mol_type = other DNA
cccggcccagagggcggcgg

SEQ ID NO: 54938 - DNA, 20 bp, synthetic construct
  source 1..20: mol_type = other DNA
acagcaggctctgtgcgggg

SEQ ID NO: 54939 - DNA, 20 bp, synthetic construct
  source 1..20: mol_type = other DNA
ggaggataaggaagtggccc

SEQ ID NO: 54940 - DNA, 20 bp, synthetic construct
  source 1..20: mol_type = other DNA
gcctggaggaggccgtgtgg

SEQ ID NO: 54941 - DNA, 20 bp, synthetic construct
  source 1..20: mol_type = other DNA
acaggcaccctttgaagggg

SEQ ID NO: 54942 - DNA, 20 bp, synthetic construct
  source 1..20: mol_type = other DNA
cgactccaagacgtggtggc

SEQ ID NO: 54943 - DNA, 20 bp, synthetic construct
  source 1..20: mol_type = other DNA
acaagtgtctaccagagaga

SEQ ID NO: 54944 - DNA, 20 bp, synthetic construct
  source 1..20: mol_type = other DNA
atcgaagaagatcaaaaagc

SEQ ID NO: 54945 - DNA, 20 bp, synthetic construct
  source 1..20: mol_type = other DNA
ttttctcttcctcttcttca

SEQ ID NO: 54946 - DNA, 20 bp, synthetic construct
  source 1..20: mol_type = other DNA
tacattttggggtccttaaa

SEQ ID NO: 54947 - DNA, 20 bp, synthetic construct
  source 1..20: mol_type = other DNA
tcgcacagattgcagtagac

SEQ ID NO: 54948 - DNA, 20 bp, synthetic construct
  source 1..20: mol_type = other DNA
gttctgtgctgtctgccgca

SEQ ID NO: 54949 - DNA, 20 bp, synthetic construct
  source 1..20: mol_type = other DNA
cgggggatgtcgagatggac

SEQ ID NO: 54950 - DNA, 20 bp, synthetic construct
  source 1..20: mol_type = other DNA
gccagcttcttgtgctgtag

SEQ ID NO: 54951 - DNA, 20 bp, synthetic construct
  source 1..20: mol_type = other DNA
cacggtggtgctgcttcgct

SEQ ID NO: 54952 - DNA, 20 bp, synthetic construct
  source 1..20: mol_type = other DNA
gacatcatcatctgtgagga

SEQ ID NO: 54953 - DNA, 20 bp, synthetic construct
  source 1..20: mol_type = other DNA
gggggattatgtatccacgg

SEQ ID NO: 54954 - DNA, 20 bp, synthetic construct
  source 1..20: mol_type = other DNA
ctccaatggtgatgaaggtc

SEQ ID NO: 54955 - DNA, 20 bp, synthetic construct
  source 1..20: mol_type = other DNA
aggggaggagctggcaatgc

SEQ ID NO: 54956 - DNA, 20 bp, synthetic construct
  source 1..20: mol_type = other DNA
ttcttctagttgatcatacc

SEQ ID NO: 54957 - DNA, 20 bp, synthetic construct
  source 1..20: mol_type = other DNA
ggccggctctgggagccgag

SEQ ID NO: 54958 - DNA, 20 bp, synthetic construct
  source 1..20: mol_type = other DNA
ggaagagccccacactttgc

SEQ ID NO: 54959 - DNA, 20 bp, synthetic construct
  source 1..20: mol_type = other DNA
gtactcccctacagacgtgc

SEQ ID NO: 54960 - DNA, 20 bp, synthetic construct
  source 1..20: mol_type = other DNA
ctttggctggccaaccaggt

SEQ ID NO: 54961 - DNA, 20 bp, synthetic construct
  source 1..20: mol_type = other DNA
ggctccagtccttgtggcgc

SEQ ID NO: 54962 - DNA, 20 bp, synthetic construct
  source 1..20: mol_type = other DNA
acaggcctcctcccagggcc

SEQ ID NO: 54963 - DNA, 20 bp, synthetic construct
  source 1..20: mol_type = other DNA
tggtgttcagcagggcctcc

SEQ ID NO: 54964 - DNA, 20 bp, synthetic construct
  source 1..20: mol_type = other DNA
tcaagagagccctggagctg

SEQ ID NO: 54965 - DNA, 20 bp, synthetic construct
  source 1..20: mol_type = other DNA
cttgtccctgcacacaagcc

SEQ ID NO: 54966 - DNA, 20 bp, synthetic construct
  source 1..20: mol_type = other DNA
gaggacgactatcacaaccc

SEQ ID NO: 54967 - DNA, 20 bp, synthetic construct
  source 1..20: mol_type = other DNA
ttgcagaaaaaagcaatgtt

SEQ ID NO: 54968 - DNA, 20 bp, synthetic construct
  source 1..20: mol_type = other DNA
ttcttttcttacagaccctg

SEQ ID NO: 54969 - DNA, 20 bp, synthetic construct
  source 1..20: mol_type = other DNA
catgcccccagcacttgaaa

SEQ ID NO: 54970 - DNA, 20 bp, synthetic construct
  source 1..20: mol_type = other DNA
agatgtcctgcacaccatca

SEQ ID NO: 54971 - DNA, 20 bp, synthetic construct
  source 1..20: mol_type = other DNA
gcttcaggtcaccgtgggag

SEQ ID NO: 54972 - DNA, 20 bp, synthetic construct
  source 1..20: mol_type = other DNA
aaagagttccttgaggttcc

SEQ ID NO: 54973 - DNA, 20 bp, synthetic construct
  source 1..20: mol_type = other DNA
tgactacttacagagcgtcc

SEQ ID NO: 54974 - DNA, 20 bp, synthetic construct
  source 1..20: mol_type = other DNA
aaaggagcggccagggccga

SEQ ID NO: 54975 - DNA, 20 bp, synthetic construct
  source 1..20: mol_type = other DNA
gatgaagccgcagatgaggg

SEQ ID NO: 54976 - DNA, 20 bp, synthetic construct
  source 1..20: mol_type = other DNA
ctgtagggggcgcctgggag

SEQ ID NO: 54977 - DNA, 20 bp, synthetic construct
  source 1..20: mol_type = other DNA
tccctactggatggctcctg

SEQ ID NO: 54978 - DNA, 20 bp, synthetic construct
  source 1..20: mol_type = other DNA
atgcagccactgcaagagtc

SEQ ID NO: 54979 - DNA, 20 bp, synthetic construct
  source 1..20: mol_type = other DNA
ctctttttcataaaagccaa

SEQ ID NO: 54980 - DNA, 20 bp, synthetic construct
  source 1..20: mol_type = other DNA
cagcactacttactctgcac

SEQ ID NO: 54981 - DNA, 20 bp, synthetic construct
  source 1..20: mol_type = other DNA
ggagtgcctccgtttcccac

SEQ ID NO: 54982 - DNA, 20 bp, synthetic construct
  source 1..20: mol_type = other DNA
tcggtggtaggtcgccactt

SEQ ID NO: 54983 - DNA, 20 bp, synthetic construct
  source 1..20: mol_type = other DNA
taaagaccgtcaagttctcc

SEQ ID NO: 54984 - DNA, 20 bp, synthetic construct
  source 1..20: mol_type = other DNA
tatggtgcgttctacagcga

SEQ ID NO: 54985 - DNA, 20 bp, synthetic construct
  source 1..20: mol_type = other DNA
agccgggaggtcggggatca

SEQ ID NO: 54986 - DNA, 20 bp, synthetic construct
  source 1..20: mol_type = other DNA
cgatggggtacttcagggtg

SEQ ID NO: 54987 - DNA, 20 bp, synthetic construct
  source 1..20: mol_type = other DNA
tccaatatgctgggccagga

SEQ ID NO: 54988 - DNA, 20 bp, synthetic construct
  source 1..20: mol_type = other DNA
tcagccatccagaatgggtc

SEQ ID NO: 54989 - DNA, 20 bp, synthetic construct
  source 1..20: mol_type = other DNA
gtgttgtaatgaattcatta

SEQ ID NO: 54990 - DNA, 20 bp, synthetic construct
  source 1..20: mol_type = other DNA
gctggtgatagaccttaagc

SEQ ID NO: 54991 - DNA, 20 bp, synthetic construct
  source 1..20: mol_type = other DNA
ggccccaaaggtggcctgga

SEQ ID NO: 54992 - DNA, 20 bp, synthetic construct
  source 1..20: mol_type = other DNA
gagcagcatataccctctcg

SEQ ID NO: 54993 - DNA, 20 bp, synthetic construct
  source 1..20: mol_type = other DNA
gtggaaatgctcttcatcct

SEQ ID NO: 54994 - DNA, 20 bp, synthetic construct
  source 1..20: mol_type = other DNA
ttcaatctcagcaacgtgac

SEQ ID NO: 54995 - DNA, 20 bp, synthetic construct
  source 1..20: mol_type = other DNA
tgctggtaaggaggccctcg

SEQ ID NO: 54996 - DNA, 20 bp, synthetic construct
  source 1..20: mol_type = other DNA
ggatgcctacgacctggagc

SEQ ID NO: 54997 - DNA, 20 bp, synthetic construct
  source 1..20: mol_type = other DNA
acttcggttcttttctatat

SEQ ID NO: 54998 - DNA, 20 bp, synthetic construct
  source 1..20: mol_type = other DNA
cgtgctgacagacagggggc

SEQ ID NO: 54999 - DNA, 20 bp, synthetic construct
  source 1..20: mol_type = other DNA
tcggagtgagtcctgcggtg

SEQ ID NO: 55000 - DNA, 20 bp, synthetic construct
  source 1..20: mol_type = other DNA
ggagcaggagctgggtcggg

SEQ ID NO: 55001 - DNA, 20 bp, synthetic construct
  source 1..20: mol_type = other DNA
tccccagcgttcgggaactt

SEQ ID NO: 55002 - DNA, 20 bp, synthetic construct
  source 1..20: mol_type = other DNA
catctcagccagcttgtgga

SEQ ID NO: 55003 - DNA, 20 bp, synthetic construct
  source 1..20: mol_type = other DNA
cttgttgcagcgccagtgcg

SEQ ID NO: 55004 - DNA, 20 bp, synthetic construct
  source 1..20: mol_type = other DNA
gctgcaagtggaggaggagg

SEQ ID NO: 55005 - DNA, 20 bp, synthetic construct
  source 1..20: mol_type = other DNA
ttcgtgcttctgtctattga

SEQ ID NO: 55006 - DNA, 20 bp, synthetic construct
  source 1..20: mol_type = other DNA
agcatgctggctcgagcaat

SEQ ID NO: 55007 - DNA, 20 bp, synthetic construct
  source 1..20: mol_type = other DNA
tgctagacctgcccagctcc

SEQ ID NO: 55008 - DNA, 20 bp, synthetic construct
  source 1..20: mol_type = other DNA
tcatcctgcgctggggcgga

SEQ ID NO: 55009 - DNA, 20 bp, synthetic construct
  source 1..20: mol_type = other DNA
caaggccaagttggtgccct

SEQ ID NO: 55010 - DNA, 20 bp, synthetic construct
  source 1..20: mol_type = other DNA
ataaattatctggtctggta

SEQ ID NO: 55011 - DNA, 20 bp, synthetic construct
  source 1..20: mol_type = other DNA
agaggcggaaagggcgccgc

SEQ ID NO: 55012 - DNA, 20 bp, synthetic construct
  source 1..20: mol_type = other DNA
ccgagaattgtacctctggg

SEQ ID NO: 55013 - DNA, 20 bp, synthetic construct
  source 1..20: mol_type = other DNA
cccaacgcgcctgggggtgg

SEQ ID NO: 55014 - DNA, 20 bp, synthetic construct
  source 1..20: mol_type = other DNA
tttacccgaacaccttgaaa

SEQ ID NO: 55015 - DNA, 20 bp, synthetic construct
  source 1..20: mol_type = other DNA
cctgggaatgagaggggata

SEQ ID NO: 55016 - DNA, 20 bp, synthetic construct
  source 1..20: mol_type = other DNA
ctggcaggctggggctgggc

SEQ ID NO: 55017 - DNA, 20 bp, synthetic construct
  source 1..20: mol_type = other DNA
agcctggtctatcatttgtt

SEQ ID NO: 55018 - DNA, 20 bp, synthetic construct
  source 1..20: mol_type = other DNA
aagaacccggggtgggtttc

SEQ ID NO: 55019 - DNA, 20 bp, synthetic construct
  source 1..20: mol_type = other DNA
accagatgttgttttactgc

SEQ ID NO: 55020 - DNA, 20 bp, synthetic construct
  source 1..20: mol_type = other DNA
catgacatcgccctggtgag

SEQ ID NO: 55021 - DNA, 20 bp, synthetic construct
  source 1..20: mol_type = other DNA
tttcggatgtaactgacaac

SEQ ID NO: 55022 - DNA, 20 bp, synthetic construct
  source 1..20: mol_type = other DNA
tgaagatggagacacagaac

SEQ ID NO: 55023 - DNA, 20 bp, synthetic construct
  source 1..20: mol_type = other DNA
caacagccggtagccgcgtg

SEQ ID NO: 55024 - DNA, 20 bp, synthetic construct
  source 1..20: mol_type = other DNA
aaagaccgtcaagttctccc

SEQ ID NO: 55025 - DNA, 20 bp, synthetic construct
  source 1..20: mol_type = other DNA
gatgtcccctctctggctcc

SEQ ID NO: 55026 - DNA, 20 bp, synthetic construct
  source 1..20: mol_type = other DNA
acactgagtggcaggcttat

SEQ ID NO: 55027 - DNA, 20 bp, synthetic construct
  source 1..20: mol_type = other DNA
gctgcccacagagcgtgggc

SEQ ID NO: 55028 - DNA, 20 bp, synthetic construct
  source 1..20: mol_type = other DNA
gtttcttcaggttcccaaag

SEQ ID NO: 55029 - DNA, 20 bp, synthetic construct
  source 1..20: mol_type = other DNA
ctcactaagacaaaaggaag

SEQ ID NO: 55030 - DNA, 20 bp, synthetic construct
  source 1..20: mol_type = other DNA
tgtgaacttctcctctgtca

SEQ ID NO: 55031 - DNA, 20 bp, synthetic construct
  source 1..20: mol_type = other DNA
ctcagctccgtaaaggtggg

SEQ ID NO: 55032 - DNA, 20 bp, synthetic construct
  source 1..20: mol_type = other DNA
aaccgaggtcctggcgcagc

SEQ ID NO: 55033 - DNA, 20 bp, synthetic construct
  source 1..20: mol_type = other DNA
ataactaaatgagaaaagaa

SEQ ID NO: 55034 - DNA, 20 bp, synthetic construct
  source 1..20: mol_type = other DNA
gacggtgagtccttggcccc

SEQ ID NO: 55035 - DNA, 20 bp, synthetic construct
  source 1..20: mol_type = other DNA
gcctccaccgcttcggtcat

SEQ ID NO: 55036 - DNA, 20 bp, synthetic construct
  source 1..20: mol_type = other DNA
ggccttaggtaagcggggct

SEQ ID NO: 55037 - DNA, 20 bp, synthetic construct
  source 1..20: mol_type = other DNA
tgaggacttccgcatctccc

SEQ ID NO: 55038 - DNA, 20 bp, synthetic construct
  source 1..20: mol_type = other DNA
tcaccagctggccagaccac

SEQ ID NO: 55039 - DNA, 20 bp, synthetic construct
  source 1..20: mol_type = other DNA
tcacactttagttttccgtt

SEQ ID NO: 55040 - DNA, 20 bp, synthetic construct
  source 1..20: mol_type = other DNA
tcccacatctctgctccctc

SEQ ID NO: 55041 - DNA, 20 bp, synthetic construct
  source 1..20: mol_type = other DNA
gcgagcccccggcgatgaga

SEQ ID NO: 55042 - DNA, 20 bp, synthetic construct
  source 1..20: mol_type = other DNA
agctaatctggagctctgac

SEQ ID NO: 55043 - DNA, 20 bp, synthetic construct
  source 1..20: mol_type = other DNA
ctggccctggtacctgctgc

SEQ ID NO: 55044 - DNA, 20 bp, synthetic construct
  source 1..20: mol_type = other DNA
agccaacccaaggtgcccgg

SEQ ID NO: 55045 - DNA, 20 bp, synthetic construct
  source 1..20: mol_type = other DNA
ggccctgcttgtagatgccc

SEQ ID NO: 55046 - DNA, 20 bp, synthetic construct
  source 1..20: mol_type = other DNA
tggcgtcatacgtatgtcca

SEQ ID NO: 55047 - DNA, 20 bp, synthetic construct
  source 1..20: mol_type = other DNA
aaaactatatatcagggtgc

SEQ ID NO: 55048 - DNA, 20 bp, synthetic construct
  source 1..20: mol_type = other DNA
tccctgtcccctgccctggc

SEQ ID NO: 55049 - DNA, 20 bp, synthetic construct
  source 1..20: mol_type = other DNA
tgagatccccatgaccgaag

SEQ ID NO: 55050 - DNA, 20 bp, synthetic construct
  source 1..20: mol_type = other DNA
atgaagatcaaggtgagtcg

SEQ ID NO: 55051 - DNA, 20 bp, synthetic construct
  source 1..20: mol_type = other DNA
ctcaggtacacagctgagtg

SEQ ID NO: 55052 - DNA, 20 bp, synthetic construct
  source 1..20: mol_type = other DNA
cgccctggagaaggtcagtg

SEQ ID NO: 55053 - DNA, 20 bp, synthetic construct
  source 1..20: mol_type = other DNA
gtggactccgacctggggaa

SEQ ID NO: 55054 - DNA, 20 bp, synthetic construct
  source 1..20: mol_type = other DNA
gcagaagtcatagcgggctt

SEQ ID NO: 55055 - DNA, 20 bp, synthetic construct
  source 1..20: mol_type = other DNA
cattaaagactgtgcagaac

SEQ ID NO: 55056 - DNA, 20 bp, synthetic construct
  source 1..20: mol_type = other DNA
gatgtaaactctggctcata

SEQ ID NO: 55057 - DNA, 20 bp, synthetic construct
  source 1..20: mol_type = other DNA
agcagttttactcagtggat

SEQ ID NO: 55058 - DNA, 20 bp, synthetic construct
  source 1..20: mol_type = other DNA
acccacgaggtgctggtgac

SEQ ID NO: 55059 - DNA, 20 bp, synthetic construct
  source 1..20: mol_type = other DNA
ggtaataaacagggtggaca

SEQ ID NO: 55060 - DNA, 20 bp, synthetic construct
  source 1..20: mol_type = other DNA
atcatctcagccaactgggt

SEQ ID NO: 55061 - DNA, 20 bp, synthetic construct
  source 1..20: mol_type = other DNA
tttccttcagtcggggaggc

SEQ ID NO: 55062 - DNA, 20 bp, synthetic construct
  source 1..20: mol_type = other DNA
gctggaaggggttcaggagc

SEQ ID NO: 55063 - DNA, 20 bp, synthetic construct
  source 1..20: mol_type = other DNA
ctcaggaggccgcgcgcgcc

SEQ ID NO: 55064 - DNA, 20 bp, synthetic construct
  source 1..20: mol_type = other DNA
gcgggtctcgtacaagggcc

SEQ ID NO: 55065 - DNA, 20 bp, synthetic construct
  source 1..20: mol_type = other DNA
ctcttagacgttccggttca

SEQ ID NO: 55066 - DNA, 20 bp, synthetic construct
  source 1..20: mol_type = other DNA
tgtactcccctacagacgtg

SEQ ID NO: 55067 - DNA, 20 bp, synthetic construct
  source 1..20: mol_type = other DNA
ctgacagcggtcgcagcgcc

SEQ ID NO: 55068 - DNA, 20 bp, synthetic construct
  source 1..20: mol_type = other DNA
ggaggaatccggcttccgaa

SEQ ID NO: 55069 - DNA, 20 bp, synthetic construct
  source 1..20: mol_type = other DNA
tggacatcaagaagaacgag

SEQ ID NO: 55070 - DNA, 20 bp, synthetic construct
  source 1..20: mol_type = other DNA
tggggaggaccagtcgtggt

SEQ ID NO: 55071 - DNA, 20 bp, synthetic construct
  source 1..20: mol_type = other DNA
catcagcatccatggtcctc

SEQ ID NO: 55072 - DNA, 20 bp, synthetic construct
  source 1..20: mol_type = other DNA
acacaggaggtagaactgtc

SEQ ID NO: 55073 - DNA, 20 bp, synthetic construct
  source 1..20: mol_type = other DNA
agtctccaatatgctgggcc

SEQ ID NO: 55074 - DNA, 20 bp, synthetic construct
  source 1..20: mol_type = other DNA
gacaaggtcctcacccagat

SEQ ID NO: 55075 - DNA, 20 bp, synthetic construct
  source 1..20: mol_type = other DNA
ggtaattgaggtcttccctc

SEQ ID NO: 55076 - DNA, 20 bp, synthetic construct
  source 1..20: mol_type = other DNA
cgtgggctgagggcacagca

SEQ ID NO: 55077 - DNA, 20 bp, synthetic construct
  source 1..20: mol_type = other DNA
gactcgccataatcacctca

SEQ ID NO: 55078 - DNA, 20 bp, synthetic construct
  source 1..20: mol_type = other DNA
gaaaatgtccgtgcaaaggt

SEQ ID NO: 55079 - DNA, 20 bp, synthetic construct
  source 1..20: mol_type = other DNA
ggcacctgcatggagctctt

SEQ ID NO: 55080 - DNA, 20 bp, synthetic construct
  source 1..20: mol_type = other DNA
tgaaggtgcgcccggggtgt

SEQ ID NO: 55081 - DNA, 20 bp, synthetic construct
  source 1..20: mol_type = other DNA
agacaaagagaatatcccag

SEQ ID NO: 55082 - DNA, 20 bp, synthetic construct
  source 1..20: mol_type = other DNA
aagtatgacctcaaggtaaa

SEQ ID NO: 55083 - DNA, 20 bp, synthetic construct
  source 1..20: mol_type = other DNA
gcccttggccgggacttgtg

SEQ ID NO: 55084 - DNA, 20 bp, synthetic construct
  source 1..20: mol_type = other DNA
cccagagttaagcacagcct

SEQ ID NO: 55085 - DNA, 20 bp, synthetic construct
  source 1..20: mol_type = other DNA
tgacaccctgagaagcatgc

SEQ ID NO: 55086 - DNA, 20 bp, synthetic construct
  source 1..20: mol_type = other DNA
tcaaggtcttccaccgagat

SEQ ID NO: 55087 - DNA, 20 bp, synthetic construct
  source 1..20: mol_type = other DNA
ggccgcgctggccgtcggac

SEQ ID NO: 55088 - DNA, 20 bp, synthetic construct
  source 1..20: mol_type = other DNA
agacttccaggacagggtgc

SEQ ID NO: 55089 - DNA, 20 bp, synthetic construct
  source 1..20: mol_type = other DNA
agactggctgagcctggtga

SEQ ID NO: 55090 - DNA, 20 bp, synthetic construct
  source 1..20: mol_type = other DNA
ggaaaacctcttttttgtga

SEQ ID NO: 55091 - DNA, 20 bp, synthetic construct
  source 1..20: mol_type = other DNA
gctgtgtacctgaggggtcc

SEQ ID NO: 55092 - DNA, 20 bp, synthetic construct
  source 1..20: mol_type = other DNA
tacgaatcatggagtctatt

SEQ ID NO: 55093 - DNA, 20 bp, synthetic construct
  source 1..20: mol_type = other DNA
gtgctctgtttggggggagt

SEQ ID NO: 55094 - DNA, 20 bp, synthetic construct
  source 1..20: mol_type = other DNA
tgatgttgaagatgtaaagc

SEQ ID NO: 55095 - DNA, 20 bp, synthetic construct
  source 1..20: mol_type = other DNA
caggagttcctgcggatgat

SEQ ID NO: 55096 - DNA, 20 bp, synthetic construct
  source 1..20: mol_type = other DNA
ccaccgcaaatgcttctagg

SEQ ID NO: 55097 - DNA, 20 bp, synthetic construct
  source 1..20: mol_type = other DNA
acaacaacttccacgcagcc

SEQ ID NO: 55098 - DNA, 20 bp, synthetic construct
  source 1..20: mol_type = other DNA
cctggactgcaggctgggcc

SEQ ID NO: 55099 - DNA, 20 bp, synthetic construct
  source 1..20: mol_type = other DNA
atccctgggcaggtcgccgc

SEQ ID NO: 55100 - DNA, 20 bp, synthetic construct
  source 1..20: mol_type = other DNA
aggtgaacacataggcctcg

SEQ ID NO: 55101 - DNA, 20 bp, synthetic construct
  source 1..20: mol_type = other DNA
agacttcgggctgtgcaagg

SEQ ID NO: 55102 - DNA, 20 bp, synthetic construct
  source 1..20: mol_type = other DNA
cggatgcaagtccaggccca

SEQ ID NO: 55103 - DNA, 20 bp, synthetic construct
  source 1..20: mol_type = other DNA
cgagataattgccaatgatc

SEQ ID NO: 55104 - DNA, 20 bp, synthetic construct
  source 1..20: mol_type = other DNA
accttcctccgctgacttca

SEQ ID NO: 55105 - DNA, 20 bp, synthetic construct
  source 1..20: mol_type = other DNA
agatccagttcagttcaccc

SEQ ID NO: 55106 - DNA, 20 bp, synthetic construct
  source 1..20: mol_type = other DNA
tgatctggtgcttctctcgg

SEQ ID NO: 55107 - DNA, 20 bp, synthetic construct
  source 1..20: mol_type = other DNA
gacagcaagccagtgaacct

SEQ ID NO: 55108 - DNA, 20 bp, synthetic construct
  source 1..20: mol_type = other DNA
cacgtcctggtttctctcca

SEQ ID NO: 55109 - DNA, 20 bp, synthetic construct
  source 1..20: mol_type = other DNA
agggactccaaaatctggcc

SEQ ID NO: 55110 - DNA, 20 bp, synthetic construct
  source 1..20: mol_type = other DNA
cctgagagggagacaagaga

SEQ ID NO: 55111 - DNA, 20 bp, synthetic construct
  source 1..20: mol_type = other DNA
gcagctgcagccacggtagc

SEQ ID NO: 55112 - DNA, 20 bp, synthetic construct
  source 1..20: mol_type = other DNA
ctgcagcgaggtatggactc

SEQ ID NO: 55113 - DNA, 20 bp, synthetic construct
  source 1..20: mol_type = other DNA
tgtgggagagaagtccccaa

SEQ ID NO: 55114 - DNA, 20 bp, synthetic construct
  source 1..20: mol_type = other DNA
atcatctgcagccatttacc

SEQ ID NO: 55115 - DNA, 20 bp, synthetic construct
  source 1..20: mol_type = other DNA
attgatcatccagctgtgac

SEQ ID NO: 55116 - DNA, 20 bp, synthetic construct
  source 1..20: mol_type = other DNA
cacctccctgcaggcggaaa

SEQ ID NO: 55117 - DNA, 20 bp, synthetic construct
  source 1..20: mol_type = other DNA
actcgtaccggtcctggctg

SEQ ID NO: 55118 - DNA, 20 bp, synthetic construct
  source 1..20: mol_type = other DNA
tcttccagctgcattcccta

SEQ ID NO: 55119 - DNA, 20 bp, synthetic construct
  source 1..20: mol_type = other DNA
ccgaagcgcagggccaccga

SEQ ID NO: 55120 - DNA, 20 bp, synthetic construct
  source 1..20: mol_type = other DNA
cctcttctcctttggcaggt

SEQ ID NO: 55121 - DNA, 20 bp, synthetic construct
  source 1..20: mol_type = other DNA
ggatgctcccggagagaggt

SEQ ID NO: 55122 - DNA, 20 bp, synthetic construct
  source 1..20: mol_type = other DNA
tggattcatacctgctgatg

SEQ ID NO: 55123 - DNA, 20 bp, synthetic construct
  source 1..20: mol_type = other DNA
ccttgccctcatccgcttct

SEQ ID NO: 55124 - DNA, 20 bp, synthetic construct
  source 1..20: mol_type = other DNA
acgaggggatgaaagctggc

SEQ ID NO: 55125 - DNA, 20 bp, synthetic construct
  source 1..20: mol_type = other DNA
gcatgggcatctggttcttg

SEQ ID NO: 55126 - DNA, 20 bp, synthetic construct
  source 1..20: mol_type = other DNA
aacggcggtggtggggtgcc

SEQ ID NO: 55127 - DNA, 20 bp, synthetic construct
  source 1..20: mol_type = other DNA
gaccttgaattggctgtgcc

SEQ ID NO: 55128 - DNA, 20 bp, synthetic construct
  source 1..20: mol_type = other DNA
aagataaaccacttgcagag

SEQ ID NO: 55129 - DNA, 20 bp, synthetic construct
  source 1..20: mol_type = other DNA
ggctgagggtggttgtcaat

SEQ ID NO: 55130 - DNA, 20 bp, synthetic construct
  source 1..20: mol_type = other DNA
atcattggcatatgtggagg

SEQ ID NO: 55131 - DNA, 20 bp, synthetic construct
  source 1..20: mol_type = other DNA
ggatgtagttcttgtggcac

SEQ ID NO: 55132 - DNA, 20 bp, synthetic construct
  source 1..20: mol_type = other DNA
gccagccattgtcaaggcag

SEQ ID NO: 55133 - DNA, 20 bp, synthetic construct
  source 1..20: mol_type = other DNA
aatactggtacagggaagcc

SEQ ID NO: 55134 - DNA, 20 bp, synthetic construct
  source 1..20: mol_type = other DNA
actgctgtgccctaatccgc

SEQ ID NO: 55135 - DNA, 20 bp, synthetic construct
  source 1..20: mol_type = other DNA
agatggaaaaccggtgaatc

SEQ ID NO: 55136 - DNA, 20 bp, synthetic construct
  source 1..20: mol_type = other DNA
taaataaacttaccacatgt

SEQ ID NO: 55137 - DNA, 20 bp, synthetic construct
  source 1..20: mol_type = other DNA
tagcgcttgtggaaaaccgt

SEQ ID NO: 55138 - DNA, 20 bp, synthetic construct
  source 1..20: mol_type = other DNA
cggcacctagtggtgcacac

SEQ ID NO: 55139 - DNA, 20 bp, synthetic construct
  source 1..20: mol_type = other DNA
gccagggaacttccaaagcc

SEQ ID NO: 55140 - DNA, 20 bp, synthetic construct
  source 1..20: mol_type = other DNA
caagattctaaattccccaa

SEQ ID NO: 55141 - DNA, 20 bp, synthetic construct
  source 1..20: mol_type = other DNA
ggagccgtcactgcccgaga

SEQ ID NO: 55142 - DNA, 20 bp, synthetic construct
  source 1..20: mol_type = other DNA
ccacacggtgcccatctacg

SEQ ID NO: 55143 - DNA, 20 bp, synthetic construct
  source 1..20: mol_type = other DNA
tttcacaatggagactatcc

SEQ ID NO: 55144 - DNA, 20 bp, synthetic construct
  source 1..20: mol_type = other DNA
gatggaaggaaacacggctc

SEQ ID NO: 55145 - DNA, 20 bp, synthetic construct
  source 1..20: mol_type = other DNA
cagcctgccagactcagaca

SEQ ID NO: 55146 - DNA, 20 bp, synthetic construct
  source 1..20: mol_type = other DNA
tgtcccggcccacgccccgc

SEQ ID NO: 55147 - DNA, 20 bp, synthetic construct
  source 1..20: mol_type = other DNA
ctttctccttgttggggcat

SEQ ID NO: 55148 - DNA, 20 bp, synthetic construct
  source 1..20: mol_type = other DNA
ctcggcaaacttcctgggaa

SEQ ID NO: 55149 - DNA, 20 bp, synthetic construct
  source 1..20: mol_type = other DNA
tgacgtaaagggatagggct

SEQ ID NO: 55150 - DNA, 20 bp, synthetic construct
  source 1..20: mol_type = other DNA
gccgccgccgccgcccgcgc

SEQ ID NO: 55151 - DNA, 20 bp, synthetic construct
  source 1..20: mol_type = other DNA
ccagctggaaaaggagagag

SEQ ID NO: 55152 - DNA, 20 bp, synthetic construct
  source 1..20: mol_type = other DNA
tgcaaaagacttccaggaca

SEQ ID NO: 55153 - DNA, 20 bp, synthetic construct
  source 1..20: mol_type = other DNA
acgtggccaaagtctcccat

SEQ ID NO: 55154 - DNA, 20 bp, synthetic construct
  source 1..20: mol_type = other DNA
cggggcggccgcgccacccc

SEQ ID NO: 55155 - DNA, 20 bp, synthetic construct
  source 1..20: mol_type = other DNA
tgtaccccagcaggctctgc

SEQ ID NO: 55156 - DNA, 20 bp, synthetic construct
  source 1..20: mol_type = other DNA
ctggccgaccaccctccaga

SEQ ID NO: 55157 - DNA, 20 bp, synthetic construct
  source 1..20: mol_type = other DNA
accaggggctcggatcaacc

SEQ ID NO: 55158 - DNA, 20 bp, synthetic construct
  source 1..20: mol_type = other DNA
taaaatggtattctcatctc

SEQ ID NO: 55159 - DNA, 20 bp, synthetic construct
  source 1..20: mol_type = other DNA
cacggacagaaatgggatcc

SEQ ID NO: 55160 - DNA, 20 bp, synthetic construct
  source 1..20: mol_type = other DNA
ctccgtagcaggtgtgtctt

SEQ ID NO: 55161 - DNA, 20 bp, synthetic construct
  source 1..20: mol_type = other DNA
tctgcggaaggggtgtttga

SEQ ID NO: 55162 - DNA, 20 bp, synthetic construct
  source 1..20: mol_type = other DNA
tgatggagaaacctgtctct

SEQ ID NO: 55163 - DNA, 20 bp, synthetic construct
  source 1..20: mol_type = other DNA
tcctgccaggatgaggggtg

SEQ ID NO: 55164 - DNA, 20 bp, synthetic construct
  source 1..20: mol_type = other DNA
ccagcacagcccggtgggcc

SEQ ID NO: 55165 - DNA, 20 bp, synthetic construct
  source 1..20: mol_type = other DNA
gctccgggagctcagcaccc

SEQ ID NO: 55166 - DNA, 20 bp, synthetic construct
  source 1..20: mol_type = other DNA
ctgctggggggttttcccag

SEQ ID NO: 55167 - DNA, 20 bp, synthetic construct
  source 1..20: mol_type = other DNA
cttggtggaacagggggagc

SEQ ID NO: 55168 - DNA, 20 bp, synthetic construct
  source 1..20: mol_type = other DNA
ctacgagtgcgagggccgct

SEQ ID NO: 55169 - DNA, 20 bp, synthetic construct
  source 1..20: mol_type = other DNA
gtctgcaacgtgaccctagg

SEQ ID NO: 55170 - DNA, 20 bp, synthetic construct
  source 1..20: mol_type = other DNA
aactataagccaaattttag

SEQ ID NO: 55171 - DNA, 20 bp, synthetic construct
  source 1..20: mol_type = other DNA
cgataggctgcgaagtcgcg

SEQ ID NO: 55172 - DNA, 20 bp, synthetic construct
  source 1..20: mol_type = other DNA
gcatctagccacagagatgg

SEQ ID NO: 55173 - DNA, 20 bp, synthetic construct
  source 1..20: mol_type = other DNA
gcctccactacctggccacc

SEQ ID NO: 55174 - DNA, 20 bp, synthetic construct
  source 1..20: mol_type = other DNA
gatgaaaaaaggttaacttg

SEQ ID NO: 55175 - DNA, 20 bp, synthetic construct
  source 1..20: mol_type = other DNA
ctgtcggcaacagttcccag

SEQ ID NO: 55176 - DNA, 20 bp, synthetic construct
  source 1..20: mol_type = other DNA
tttgtccggggagctctcga

SEQ ID NO: 55177 - DNA, 20 bp, synthetic construct
  source 1..20: mol_type = other DNA
tcagggtccagctctggcag

SEQ ID NO: 55178 - DNA, 20 bp, synthetic construct
  source 1..20: mol_type = other DNA
ggcggtgcgggtccaggtgg

SEQ ID NO: 55179 - DNA, 20 bp, synthetic construct
  source 1..20: mol_type = other DNA
cagtgagtgggagcccagat

SEQ ID NO: 55180 - DNA, 20 bp, synthetic construct
  source 1..20: mol_type = other DNA
cttcatgaccggcatggccc

SEQ ID NO: 55181 - DNA, 20 bp, synthetic construct
  source 1..20: mol_type = other DNA
tcggctttgtcgggagttgg

SEQ ID NO: 55182 - DNA, 20 bp, synthetic construct
  source 1..20: mol_type = other DNA
gctgtgggtacaggccgggc

SEQ ID NO: 55183 - DNA, 20 bp, synthetic construct
  source 1..20: mol_type = other DNA
ggtcccgcggcggggcgctg

SEQ ID NO: 55184 - DNA, 20 bp, synthetic construct
  source 1..20: mol_type = other DNA
tgagaaagaagtgttgtcac

SEQ ID NO: 55185 - DNA, 20 bp, synthetic construct
  source 1..20: mol_type = other DNA
gcggggctgctggcctgcag

SEQ ID NO: 55186 - DNA, 20 bp, synthetic construct
  source 1..20: mol_type = other DNA
tcttcccaaacaggctggct

SEQ ID NO: 55187 - DNA, 20 bp, synthetic construct
  source 1..20: mol_type = other DNA
caatagcattgctgtaatga

SEQ ID NO: 55188 - DNA, 20 bp, synthetic construct
  source 1..20: mol_type = other DNA
agctgggaaaagaacttcga

SEQ ID NO: 55189 - DNA, 20 bp, synthetic construct
  source 1..20: mol_type = other DNA
ctgagcagaatctacccggc

SEQ ID NO: 55190 - DNA, 20 bp, synthetic construct
  source 1..20: mol_type = other DNA
tccccacagagccaagcata

SEQ ID NO: 55191 - DNA, 20 bp, synthetic construct
  source 1..20: mol_type = other DNA
caaggtcagaggctgagccc

SEQ ID NO: 55192 - DNA, 20 bp, synthetic construct
  source 1..20: mol_type = other DNA
ccatcctctggcatgagatg

SEQ ID NO: 55193 - DNA, 20 bp, synthetic construct
  source 1..20: mol_type = other DNA
gcagctcgtgagcagatcgc

SEQ ID NO: 55194 - DNA, 20 bp, synthetic construct
  source 1..20: mol_type = other DNA
ggctgtatgagggcctgagc

SEQ ID NO: 55195 - DNA, 20 bp, synthetic construct
  source 1..20: mol_type = other DNA
tatgtggatttggaacacca

SEQ ID NO: 55196 - DNA, 20 bp, synthetic construct
  source 1..20: mol_type = other DNA
ggagaaatggtgcgagaagg

SEQ ID NO: 55197 - DNA, 20 bp, synthetic construct
  source 1..20: mol_type = other DNA
tcccatcaacgaggaggcac

SEQ ID NO: 55198 - DNA, 20 bp, synthetic construct
  source 1..20: mol_type = other DNA
ggcccaccagctccaggggg

SEQ ID NO: 55199 - DNA, 20 bp, synthetic construct
  source 1..20: mol_type = other DNA
gtgtctcgggttgtctggtg

SEQ ID NO: 55200 - DNA, 20 bp, synthetic construct
  source 1..20: mol_type = other DNA
gttccagcagctgggaatgt

SEQ ID NO: 55201 - DNA, 20 bp, synthetic construct
  source 1..20: mol_type = other DNA
atccgtgggctccgtcttga

SEQ ID NO: 55202 - DNA, 20 bp, synthetic construct
  source 1..20: mol_type = other DNA
ccttgccctgttggatgaat

SEQ ID NO: 55203 - DNA, 20 bp, synthetic construct
  source 1..20: mol_type = other DNA
tgatgtgcaccctctcaggt

SEQ ID NO: 55204 - DNA, 20 bp, synthetic construct
  source 1..20: mol_type = other DNA
ctctccgctcgaagtggagc

SEQ ID NO: 55205 - DNA, 20 bp, synthetic construct
  source 1..20: mol_type = other DNA
tttcaaggatataaccagga

SEQ ID NO: 55206 - DNA, 20 bp, synthetic construct
  source 1..20: mol_type = other DNA
cccgctcgcggtgaaagttt

SEQ ID NO: 55207 - DNA, 20 bp, synthetic construct
  source 1..20: mol_type = other DNA
cactgggaaaaccccagcag

SEQ ID NO: 55208 - DNA, 20 bp, synthetic construct
  source 1..20: mol_type = other DNA
ggtgcctccaccctggtcat

SEQ ID NO: 55209 - DNA, 20 bp, synthetic construct
  source 1..20: mol_type = other DNA
gaacggggatggtgagggcc

SEQ ID NO: 55210 - DNA, 20 bp, synthetic construct
  source 1..20: mol_type = other DNA
ctaacagaactggaggagag

SEQ ID NO: 55211 - DNA, 20 bp, synthetic construct
  source 1..20: mol_type = other DNA
gttaatggaacctggttgga

SEQ ID NO: 55212 - DNA, 20 bp, synthetic construct
  source 1..20: mol_type = other DNA
attttaaccctctgaggatc

SEQ ID NO: 55213 - DNA, 20 bp, synthetic construct
  source 1..20: mol_type = other DNA
agagatggatgtgacaggtc

SEQ ID NO: 55214 - DNA, 20 bp, synthetic construct
  source 1..20: mol_type = other DNA
tggcaaagtaagtcttaatc

SEQ ID NO: 55215 - DNA, 20 bp, synthetic construct
  source 1..20: mol_type = other DNA
ccagcctgacactggaagtg

SEQ ID NO: 55216 - DNA, 20 bp, synthetic construct
  source 1..20: mol_type = other DNA
cggagagttcggcatgagcg

SEQ ID NO: 55217 - DNA, 20 bp, synthetic construct
  source 1..20: mol_type = other DNA
ctcggaatcggctcgctgca

SEQ ID NO: 55218 - DNA, 20 bp, synthetic construct
  source 1..20: mol_type = other DNA
aggatgtcccgtagtagagg

SEQ ID NO: 55219 - DNA, 20 bp, synthetic construct
  source 1..20: mol_type = other DNA
ccacactcatggaggagcgc

SEQ ID NO: 55220 - DNA, 20 bp, synthetic construct
  source 1..20: mol_type = other DNA
ctgtgtgacttcggggtgag

SEQ ID NO: 55221 - DNA, 20 bp, synthetic construct
  source 1..20: mol_type = other DNA
gatcccacaaggcgagtccg

SEQ ID NO: 55222 - DNA, 20 bp, synthetic construct
  source 1..20: mol_type = other DNA
aggccagcttcagcagcccc

SEQ ID NO: 55223 - DNA, 20 bp, synthetic construct
  source 1..20: mol_type = other DNA
gtggtgcccggccggccaga

SEQ ID NO: 55224 - DNA, 20 bp, synthetic construct
  source 1..20: mol_type = other DNA
tgccttatccctaccagaac

SEQ ID NO: 55225 - DNA, 20 bp, synthetic construct
  source 1..20: mol_type = other DNA
gataagggtttttacctcga

SEQ ID NO: 55226 - DNA, 20 bp, synthetic construct
  source 1..20: mol_type = other DNA
acatcagaatttttaaaaaa

SEQ ID NO: 55227 - DNA, 20 bp, synthetic construct
  source 1..20: mol_type = other DNA
gttgggcaggacccgggggt

SEQ ID NO: 55228 - DNA, 20 bp, synthetic construct
  source 1..20: mol_type = other DNA
aatatcagacgctgctggtc

SEQ ID NO: 55229 - DNA, 20 bp, synthetic construct
  source 1..20: mol_type = other DNA
tgctaaaaaccttgtaccta

SEQ ID NO: 55230 - DNA, 20 bp, synthetic construct
  source 1..20: mol_type = other DNA
tgaacttgtgtccattgatc

SEQ ID NO: 55231 - DNA, 20 bp, synthetic construct
  source 1..20: mol_type = other DNA
agtagtgctggctggggcaa

SEQ ID NO: 55232 - DNA, 20 bp, synthetic construct
  source 1..20: mol_type = other DNA
gatctccttctgcatcctgt

SEQ ID NO: 55233 - DNA, 20 bp, synthetic construct
  source 1..20: mol_type = other DNA
actggtccatggagtcgatg

SEQ ID NO: 55234 - DNA, 20 bp, synthetic construct
  source 1..20: mol_type = other DNA
cgaagacgacgaggaggcgg

SEQ ID NO: 55235 - DNA, 20 bp, synthetic construct
  source 1..20: mol_type = other DNA
ttaatgaagagaaaagcaac

SEQ ID NO: 55236 - DNA, 20 bp, synthetic construct
  source 1..20: mol_type = other DNA
aggggacctctctggaccca

SEQ ID NO: 55237 - DNA, 20 bp, synthetic construct
  source 1..20: mol_type = other DNA
cgctgtccccaggccacacc

SEQ ID NO: 55238 - DNA, 20 bp, synthetic construct
  source 1..20: mol_type = other DNA
cgtcgtggatgcccaccagc

SEQ ID NO: 55239 - DNA, 20 bp, synthetic construct
  source 1..20: mol_type = other DNA
tattgtcggaatgaaagcag

SEQ ID NO: 55240 - DNA, 20 bp, synthetic construct
  source 1..20: mol_type = other DNA
cggccaagacccggcaggtg

SEQ ID NO: 55241 - DNA, 20 bp, synthetic construct
  source 1..20: mol_type = other DNA
caacaagacagttctgcact

SEQ ID NO: 55242 - DNA, 20 bp, synthetic construct
  source 1..20: mol_type = other DNA
accagagtaatggtccacca

SEQ ID NO: 55243 - DNA, 20 bp, synthetic construct
  source 1..20: mol_type = other DNA
gctggagatggagacaacag

SEQ ID NO: 55244 - DNA, 20 bp, synthetic construct
  source 1..20: mol_type = other DNA
ggtaattcaagtctcccaag

SEQ ID NO: 55245 - DNA, 20 bp, synthetic construct
  source 1..20: mol_type = other DNA
cagccagtacgcactcatgg

SEQ ID NO: 55246 - DNA, 20 bp, synthetic construct
  source 1..20: mol_type = other DNA
gcagtgctggggacagagtg

SEQ ID NO: 55247 - DNA, 20 bp, synthetic construct
  source 1..20: mol_type = other DNA
gcgccttctgcaccccagcc

SEQ ID NO: 55248 - DNA, 20 bp, synthetic construct
  source 1..20: mol_type = other DNA
cacactgcgcaggtagtcaa

SEQ ID NO: 55249 - DNA, 20 bp, synthetic construct
  source 1..20: mol_type = other DNA
taacctgcaaaatgaaaaag

SEQ ID NO: 55250 - DNA, 20 bp, synthetic construct
  source 1..20: mol_type = other DNA
tcaatcttcatcttgtgata

SEQ ID NO: 55251 - DNA, 20 bp, synthetic construct
  source 1..20: mol_type = other DNA
agtaactcaagtgggactta

SEQ ID NO: 55252 - DNA, 20 bp, synthetic construct
  source 1..20: mol_type = other DNA
atgaatgcactgcctgagcc

SEQ ID NO: 55253 - DNA, 20 bp, synthetic construct
  source 1..20: mol_type = other DNA
tcttcctccacgtagttggc

SEQ ID NO: 55254 - DNA, 20 bp, synthetic construct
  source 1..20: mol_type = other DNA
gcaacccgtaccccgagctg

SEQ ID NO: 55255 - DNA, 20 bp, synthetic construct
  source 1..20: mol_type = other DNA
ctttccagctgcggaaggtc

SEQ ID NO: 55256 - DNA, 20 bp, synthetic construct
  source 1..20: mol_type = other DNA
cacatacaatggtgagtgca

SEQ ID NO: 55257 - DNA, 20 bp, synthetic construct
  source 1..20: mol_type = other DNA
gcgctcaggacgggcagctc

SEQ ID NO: 55258 - DNA, 20 bp, synthetic construct
  source 1..20: mol_type = other DNA
cagaaggatttaaatattga

SEQ ID NO: 55259 - DNA, 20 bp, synthetic construct
  source 1..20: mol_type = other DNA
gaagaagaatcagcttcccc

SEQ ID NO: 55260 - DNA, 20 bp, synthetic construct
  source 1..20: mol_type = other DNA
ggccagctcttccgctgggc

SEQ ID NO: 55261 - DNA, 20 bp, synthetic construct
  source 1..20: mol_type = other DNA
ctgctggacagaaaggcagt

SEQ ID NO: 55262 - DNA, 20 bp, synthetic construct
  source 1..20: mol_type = other DNA
agctgatacaaggtgagtca

SEQ ID NO: 55263 - DNA, 20 bp, synthetic construct
  source 1..20: mol_type = other DNA
tgccgccggctgaggtgagg

SEQ ID NO: 55264 - DNA, 20 bp, synthetic construct
  source 1..20: mol_type = other DNA
caaggtccaatcacatgtgt

SEQ ID NO: 55265 - DNA, 20 bp, synthetic construct
  source 1..20: mol_type = other DNA
aaaataatttcataaatcag

SEQ ID NO: 55266 - DNA, 20 bp, synthetic construct
  source 1..20: mol_type = other DNA
accagcaggaggaggctggg

SEQ ID NO: 55267 - DNA, 20 bp, synthetic construct
  source 1..20: mol_type = other DNA
tcctaccttagggccactct

SEQ ID NO: 55268 - DNA, 20 bp, synthetic construct
  source 1..20: mol_type = other DNA
accagcggcttgggccaagt

SEQ ID NO: 55269 - DNA, 20 bp, synthetic construct
  source 1..20: mol_type = other DNA
ttcgactgcgtgatggtacc

SEQ ID NO: 55270 - DNA, 20 bp, synthetic construct
  source 1..20: mol_type = other DNA
ttgactggcagcggcggccg

SEQ ID NO: 55271 - DNA, 20 bp, synthetic construct
  source 1..20: mol_type = other DNA
agcgatgtcttgtgaggtga

SEQ ID NO: 55272 - DNA, 20 bp, synthetic construct
  source 1..20: mol_type = other DNA
cgccagggggcgctcccgac

SEQ ID NO: 55273 - DNA, 20 bp, synthetic construct
  source 1..20: mol_type = other DNA
aaatattcctgacgtggtcc

SEQ ID NO: 55274 - DNA, 20 bp, synthetic construct
  source 1..20: mol_type = other DNA
ttccagagcaccctgtgtgt

SEQ ID NO: 55275 - DNA, 20 bp, synthetic construct
  source 1..20: mol_type = other DNA
aaatggttaccatcagtggt

SEQ ID NO: 55276 - DNA, 20 bp, synthetic construct
  source 1..20: mol_type = other DNA
tgggaatacggtgtcccctg

SEQ ID NO: 55277 - DNA, 20 bp, synthetic construct
  source 1..20: mol_type = other DNA
tttgtcctcggagcgtagaa

SEQ ID NO: 55278 - DNA, 20 bp, synthetic construct
  source 1..20: mol_type = other DNA
ctaccttatcctcagctgtg

SEQ ID NO: 55279 - DNA, 20 bp, synthetic construct
  source 1..20: mol_type = other DNA
cttaggtctggggacgaagt

SEQ ID NO: 55280 - DNA, 20 bp, synthetic construct
  source 1..20: mol_type = other DNA
gcaaggactcctgagggaga

SEQ ID NO: 55281 - DNA, 20 bp, synthetic construct
  source 1..20: mol_type = other DNA
ggagctgctccgcgttgtca

SEQ ID NO: 55282 - DNA, 20 bp, synthetic construct
  source 1..20: mol_type = other DNA
aggccgaggtgagcccccgc

SEQ ID NO: 55283 - DNA, 20 bp, synthetic construct
  source 1..20: mol_type = other DNA
ctcatcaccacctgttccct

SEQ ID NO: 55284 - DNA, 20 bp, synthetic construct
  source 1..20: mol_type = other DNA
catggacagcggctacgtgg

SEQ ID NO: 55285 - DNA, 20 bp, synthetic construct
  source 1..20: mol_type = other DNA
tcctggggacagagcaagcg

SEQ ID NO: 55286 - DNA, 20 bp, synthetic construct
  source 1..20: mol_type = other DNA
cggaaactcggtcagggcca

SEQ ID NO: 55287 - DNA, 20 bp, synthetic construct
  source 1..20: mol_type = other DNA
agagtgctgctgacagcaca

SEQ ID NO: 55288 - DNA, 20 bp, synthetic construct
  source 1..20: mol_type = other DNA
tttgtggatgaaatggtagc

SEQ ID NO: 55289 - DNA, 20 bp, synthetic construct
  source 1..20: mol_type = other DNA
ggacatggagaggtgggact

SEQ ID NO: 55290 - DNA, 20 bp, synthetic construct
  source 1..20: mol_type = other DNA
agtcatctggccgtgagggg

SEQ ID NO: 55291 - DNA, 20 bp, synthetic construct
  source 1..20: mol_type = other DNA
gctgcgctatcccatcaacg

SEQ ID NO: 55292 - DNA, 20 bp, synthetic construct
  source 1..20: mol_type = other DNA
tggctgctgacggagagagc

SEQ ID NO: 55293 - DNA, 20 bp, synthetic construct
  source 1..20: mol_type = other DNA
cgagggctactatttctgct

SEQ ID NO: 55294 - DNA, 20 bp, synthetic construct
  source 1..20: mol_type = other DNA
tctgaaatacactgagtggc

SEQ ID NO: 55295 - DNA, 20 bp, synthetic construct
  source 1..20: mol_type = other DNA
catgcaactcacggtcactg

SEQ ID NO: 55296 - DNA, 20 bp, synthetic construct
  source 1..20: mol_type = other DNA
tgtggagggagggaagcggg

SEQ ID NO: 55297 - DNA, 20 bp, synthetic construct
  source 1..20: mol_type = other DNA
aactctcacggacgaggagc

SEQ ID NO: 55298 - DNA, 20 bp, synthetic construct
  source 1..20: mol_type = other DNA
cgggagagccagaccaggag

SEQ ID NO: 55299 - DNA, 20 bp, synthetic construct
  source 1..20: mol_type = other DNA
aagaaagaaaaggaaatgaa

SEQ ID NO: 55300 - DNA, 20 bp, synthetic construct
  source 1..20: mol_type = other DNA
gtgatgccatccttctccag

SEQ ID NO: 55301 - DNA, 20 bp, synthetic construct
  source 1..20: mol_type = other DNA
cgggggcgtctacgccggcc

SEQ ID NO: 55302 - DNA, 20 bp, synthetic construct
  source 1..20: mol_type = other DNA
cctgagcccgggggatgtgg

SEQ ID NO: 55303 - DNA, 20 bp, synthetic construct
  source 1..20: mol_type = other DNA
cataagcaacagcttcatca

SEQ ID NO: 55304 - DNA, 20 bp, synthetic construct
  source 1..20: mol_type = other DNA
gctgcatcacacgctcatcc

SEQ ID NO: 55305 - DNA, 20 bp, synthetic construct
  source 1..20: mol_type = other DNA
tgtcctccaggcagcccagc

SEQ ID NO: 55306 - DNA, 20 bp, synthetic construct
  source 1..20: mol_type = other DNA
taaagatacacctgaagaac

SEQ ID NO: 55307 - DNA, 20 bp, synthetic construct
  source 1..20: mol_type = other DNA
tctgtcggcaaatgacagcc

SEQ ID NO: 55308 - DNA, 20 bp, synthetic construct
  source 1..20: mol_type = other DNA
tatcatcgtacctcctggtt

SEQ ID NO: 55309 - DNA, 20 bp, synthetic construct
  source 1..20: mol_type = other DNA
ctccagagaagaggaggatg

SEQ ID NO: 55310 - DNA, 20 bp, synthetic construct
  source 1..20: mol_type = other DNA
acgtgctcaccaaggtgagc

SEQ ID NO: 55311 - DNA, 20 bp, synthetic construct
  source 1..20: mol_type = other DNA
gaagcagaaacacgacgggc

SEQ ID NO: 55312 - DNA, 20 bp, synthetic construct
  source 1..20: mol_type = other DNA
ctctgccattaatctcttca

SEQ ID NO: 55313 - DNA, 20 bp, synthetic construct
  source 1..20: mol_type = other DNA
ccgggagcagcggcggcggg

SEQ ID NO: 55314 - DNA, 20 bp, synthetic construct
  source 1..20: mol_type = other DNA
gactgactggccagcagagt

SEQ ID NO: 55315 - DNA, 20 bp, synthetic construct
  source 1..20: mol_type = other DNA
cctttgggttttggtggcac

SEQ ID NO: 55316 - DNA, 20 bp, synthetic construct
  source 1..20: mol_type = other DNA
ggcgtcatacgtatgtccat

SEQ ID NO: 55317 - DNA, 20 bp, synthetic construct
  source 1..20: mol_type = other DNA
agatcttccaagggcagccc

SEQ ID NO: 55318 - DNA, 20 bp, synthetic construct
  source 1..20: mol_type = other DNA
cggcccaccacaatggtggg

SEQ ID NO: 55319 - DNA, 20 bp, synthetic construct
  source 1..20: mol_type = other DNA
gtttctcataccaggtagcc

SEQ ID NO: 55320 - DNA, 20 bp, synthetic construct
  source 1..20: mol_type = other DNA
aggctacctcggggagatcc

SEQ ID NO: 55321 - DNA, 20 bp, synthetic construct
  source 1..20: mol_type = other DNA
caccagttccttccctgggg

SEQ ID NO: 55322 - DNA, 20 bp, synthetic construct
  source 1..20: mol_type = other DNA
gtcccgtagttaatggcttc

SEQ ID NO: 55323 - DNA, 20 bp, synthetic construct
  source 1..20: mol_type = other DNA
gccgaggacttcgcctgggt

SEQ ID NO: 55324 - DNA, 20 bp, synthetic construct
  source 1..20: mol_type = other DNA
ggctggtcagtctcaccctc

SEQ ID NO: 55325 - DNA, 20 bp, synthetic construct
  source 1..20: mol_type = other DNA
tcgaggttgttcacctgccc

SEQ ID NO: 55326 - DNA, 20 bp, synthetic construct
  source 1..20: mol_type = other DNA
acccctcgaccgaagctgga

SEQ ID NO: 55327 - DNA, 20 bp, synthetic construct
  source 1..20: mol_type = other DNA
tgaaggtgaagtccagctca

SEQ ID NO: 55328 - DNA, 20 bp, synthetic construct
  source 1..20: mol_type = other DNA
caatgtcactcagcaaggtg

SEQ ID NO: 55329 - DNA, 20 bp, synthetic construct
  source 1..20: mol_type = other DNA
tccccactgtgagggcatcc

SEQ ID NO: 55330 - DNA, 20 bp, synthetic construct
  source 1..20: mol_type = other DNA
caaagaacatacaggcgctt

SEQ ID NO: 55331 - DNA, 20 bp, synthetic construct
  source 1..20: mol_type = other DNA
cgccgaggtcctgggcgtgg

SEQ ID NO: 55332 - DNA, 20 bp, synthetic construct
  source 1..20: mol_type = other DNA
tctacaggacaacactgggg

SEQ ID NO: 55333 - DNA, 20 bp, synthetic construct
  source 1..20: mol_type = other DNA
atgctctcagccggtgcact

SEQ ID NO: 55334 - DNA, 20 bp, synthetic construct
  source 1..20: mol_type = other DNA
actctgtgggggcagacgag

SEQ ID NO: 55335 - DNA, 20 bp, synthetic construct
  source 1..20: mol_type = other DNA
tcctcctcccaccaatccga

SEQ ID NO: 55336 - DNA, 20 bp, synthetic construct
  source 1..20: mol_type = other DNA
acaggaggctgactagcagc

SEQ ID NO: 55337 - DNA, 20 bp, synthetic construct
  source 1..20: mol_type = other DNA
ccttggagctgggccgcccg

SEQ ID NO: 55338 - DNA, 20 bp, synthetic construct
  source 1..20: mol_type = other DNA
cgaggcgttggaggagactg

SEQ ID NO: 55339 - DNA, 20 bp, synthetic construct
  source 1..20: mol_type = other DNA
tgatggaaaacgagaaggag

SEQ ID NO: 55340 - DNA, 20 bp, synthetic construct
  source 1..20: mol_type = other DNA
gtacagcttgaaggtgactg

SEQ ID NO: 55341 - DNA, 20 bp, synthetic construct
  source 1..20: mol_type = other DNA
caaattctgatgtgaacatg

SEQ ID NO: 55342 - DNA, 20 bp, synthetic construct
  source 1..20: mol_type = other DNA
cctgcatcagcgtcgacacc

SEQ ID NO: 55343 - DNA, 20 bp, synthetic construct
  source 1..20: mol_type = other DNA
agggtcactcagcttgatga

SEQ ID NO: 55344 - DNA, 20 bp, synthetic construct
  source 1..20: mol_type = other DNA
cctctggacgtgtttgctaa

SEQ ID NO: 55345 - DNA, 20 bp, synthetic construct
  source 1..20: mol_type = other DNA
ctaggctgttagtaacaggc

SEQ ID NO: 55346 - DNA, 20 bp, synthetic construct
  source 1..20: mol_type = other DNA
accgtacgcctgctggtggg

SEQ ID NO: 55347 - DNA, 20 bp, synthetic construct
  source 1..20: mol_type = other DNA
ccacgatgcccatccggggc

SEQ ID NO: 55348 - DNA, 20 bp, synthetic construct
  source 1..20: mol_type = other DNA
tgttgacatccacatcgcct

SEQ ID NO: 55349 - DNA, 20 bp, synthetic construct
  source 1..20: mol_type = other DNA
ttggttgagggtgggggtgg

SEQ ID NO: 55350 - DNA, 20 bp, synthetic construct
  source 1..20: mol_type = other DNA
caagcaccagctgctggagc

SEQ ID NO: 55351 - DNA, 20 bp, synthetic construct
  source 1..20: mol_type = other DNA
gtcgtgatggcgttgatggt

SEQ ID NO: 55352 - DNA, 20 bp, synthetic construct
  source 1..20: mol_type = other DNA
ttcgatggccatgatgccca

SEQ ID NO: 55353 - DNA, 20 bp, synthetic construct
  source 1..20: mol_type = other DNA
cagcgcatcagctggttcaa

SEQ ID NO: 55354 - DNA, 20 bp, synthetic construct
  source 1..20: mol_type = other DNA
gtcccagaccaaattctacc

SEQ ID NO: 55355 - DNA, 20 bp, synthetic construct
  source 1..20: mol_type = other DNA
ggtggccatgaaggggctct

SEQ ID NO: 55356 - DNA, 20 bp, synthetic construct
  source 1..20: mol_type = other DNA
aatgacctacatcacggaaa

SEQ ID NO: 55357 - DNA, 20 bp, synthetic construct
  source 1..20: mol_type = other DNA
ttttgatgcccatatcaaca

SEQ ID NO: 55358 - DNA, 20 bp, synthetic construct
  source 1..20: mol_type = other DNA
cggctgggcaccggcggctt

SEQ ID NO: 55359 - DNA, 20 bp, synthetic construct
  source 1..20: mol_type = other DNA
atttcactgactatgcctcc

SEQ ID NO: 55360 - DNA, 20 bp, synthetic construct
  source 1..20: mol_type = other DNA
acacactgtgtttctggtcg

SEQ ID NO: 55361 - DNA, 20 bp, synthetic construct
  source 1..20: mol_type = other DNA
ctcttccagccttccttcct

SEQ ID NO: 55362 - DNA, 20 bp, synthetic construct
  source 1..20: mol_type = other DNA
agcaggtcaacctcatgttc

SEQ ID NO: 55363 - DNA, 20 bp, synthetic construct
  source 1..20: mol_type = other DNA
cctgctcaaatgagaccctc

SEQ ID NO: 55364 - DNA, 20 bp, synthetic construct
  source 1..20: mol_type = other DNA
ctagcggggctcaagcaaag

SEQ ID NO: 55365 - DNA, 20 bp, synthetic construct
  source 1..20: mol_type = other DNA
tgaggaatcattgtacatca

SEQ ID NO: 55366 - DNA, 20 bp, synthetic construct
  source 1..20: mol_type = other DNA
cctgggagaggcgaggggat

SEQ ID NO: 55367 - DNA, 20 bp, synthetic construct
  source 1..20: mol_type = other DNA
gggcactgaggactcaggtg

SEQ ID NO: 55368 - DNA, 20 bp, synthetic construct
  source 1..20: mol_type = other DNA
gtatgaaaatcaggtgttcc

SEQ ID NO: 55369 - DNA, 20 bp, synthetic construct
  source 1..20: mol_type = other DNA
gccggtgccctgcagagcac

SEQ ID NO: 55370 - DNA, 20 bp, synthetic construct
  source 1..20: mol_type = other DNA
atcacctacactctcctcct

SEQ ID NO: 55371 - DNA, 20 bp, synthetic construct
  source 1..20: mol_type = other DNA
ggtccctgccaggcacgagg

SEQ ID NO: 55372 - DNA, 20 bp, synthetic construct
  source 1..20: mol_type = other DNA
agcatctcctccactgggcc

SEQ ID NO: 55373 - DNA, 20 bp, synthetic construct
  source 1..20: mol_type = other DNA
gaccccccagtgcgagccgc

SEQ ID NO: 55374 - DNA, 20 bp, synthetic construct
  source 1..20: mol_type = other DNA
gggaacattttcgttgctgt

SEQ ID NO: 55375 - DNA, 20 bp, synthetic construct
  source 1..20: mol_type = other DNA
gatgtacctatggtgctagt

SEQ ID NO: 55376 - DNA, 20 bp, synthetic construct
  source 1..20: mol_type = other DNA
tctgggcgtggagcaatcac

SEQ ID NO: 55377 - DNA, 20 bp, synthetic construct
  source 1..20: mol_type = other DNA
agcgagctcgggagagaagt

SEQ ID NO: 55378 - DNA, 20 bp, synthetic construct
  source 1..20: mol_type = other DNA
gaaaggcatgtttgaggtgc

SEQ ID NO: 55379 - DNA, 20 bp, synthetic construct
  source 1..20: mol_type = other DNA
tgatgggcgtttcgcccacc

SEQ ID NO: 55380 - DNA, 20 bp, synthetic construct
  source 1..20: mol_type = other DNA
gaacggaaagagaccagagc

SEQ ID NO: 55381 - DNA, 20 bp, synthetic construct
  source 1..20: mol_type = other DNA
cgtgaaactggaataaatac

SEQ ID NO: 55382 - DNA, 20 bp, synthetic construct
  source 1..20: mol_type = other DNA
tggcagcatgtgttaggaag

SEQ ID NO: 55383 - DNA, 20 bp, synthetic construct
  source 1..20: mol_type = other DNA
ctgacccgagcattcctcgc

SEQ ID NO: 55384 - DNA, 20 bp, synthetic construct
  source 1..20: mol_type = other DNA
cagtcggagactcgtccctg

SEQ ID NO: 55385 - DNA, 20 bp, synthetic construct
  source 1..20: mol_type = other DNA
gatggggtcagccccctgat

SEQ ID NO: 55386 - DNA, 20 bp, synthetic construct
  source 1..20: mol_type = other DNA
tggcctggcgcagttttctc

SEQ ID NO: 55387 - DNA, 20 bp, synthetic construct
  source 1..20: mol_type = other DNA
ccaagagttttttcaagcca

SEQ ID NO: 55388 - DNA, 20 bp, synthetic construct
  source 1..20: mol_type = other DNA
tcggtatgtatgcaaggggc

SEQ ID NO: 55389 - DNA, 20 bp, synthetic construct
  source 1..20: mol_type = other DNA
tgccgagctcttctcacaga

SEQ ID NO: 55390 - DNA, 20 bp, synthetic construct
  source 1..20: mol_type = other DNA
atttcagatccaggatactg

SEQ ID NO: 55391 - DNA, 20 bp, synthetic construct
  source 1..20: mol_type = other DNA
gtgaagatctcatctatttc

SEQ ID NO: 55392 - DNA, 20 bp, synthetic construct
  source 1..20: mol_type = other DNA
gattcgggtcagatcttcca

SEQ ID NO: 55393 - DNA, 20 bp, synthetic construct
  source 1..20: mol_type = other DNA
agcgttccccggtcttaagc

SEQ ID NO: 55394 - DNA, 20 bp, synthetic construct
  source 1..20: mol_type = other DNA
cgcttgcgacgagccggggt

SEQ ID NO: 55395 - DNA, 20 bp, synthetic construct
  source 1..20: mol_type = other DNA
gctatgctggttgcatgggg

SEQ ID NO: 55396 - DNA, 20 bp, synthetic construct
  source 1..20: mol_type = other DNA
tggagggcttcacatctgcc

SEQ ID NO: 55397 - DNA, 20 bp, synthetic construct
  source 1..20: mol_type = other DNA
gttctgtatgaattgatgac

SEQ ID NO: 55398 - DNA, 20 bp, synthetic construct
  source 1..20: mol_type = other DNA
aatgtgcttatcactcgtga

SEQ ID NO: 55399 - DNA, 20 bp, synthetic construct
  source 1..20: mol_type = other DNA
ctccatcaatcctgtctgga

SEQ ID NO: 55400 - DNA, 20 bp, synthetic construct
  source 1..20: mol_type = other DNA
taaaatcggtcagtttcatc

SEQ ID NO: 55401 - DNA, 20 bp, synthetic construct
  source 1..20: mol_type = other DNA
ttataagaagaatcctatgg

SEQ ID NO: 55402 - DNA, 20 bp, synthetic construct
  source 1..20: mol_type = other DNA
caaagtacatatcacagtgc

SEQ ID NO: 55403 - DNA, 20 bp, synthetic construct
  source 1..20: mol_type = other DNA
cactgtattccgcttggcca

SEQ ID NO: 55404 - DNA, 20 bp, synthetic construct
  source 1..20: mol_type = other DNA
tcttgacatgacgcgtcagg

SEQ ID NO: 55405 - DNA, 20 bp, synthetic construct
  source 1..20: mol_type = other DNA
aaccagcatccagattgacc

SEQ ID NO: 55406 - DNA, 20 bp, synthetic construct
  source 1..20: mol_type = other DNA
gcgctgcctcgaggccttgg

SEQ ID NO: 55407 - DNA, 20 bp, synthetic construct
  source 1..20: mol_type = other DNA
aggatatgctcctcattctc

SEQ ID NO: 55408 - DNA, 20 bp, synthetic construct
  source 1..20: mol_type = other DNA
tcggccagcatctcctccac

SEQ ID NO: 55409 - DNA, 20 bp, synthetic construct
  source 1..20: mol_type = other DNA
gcactgcagctgtaactgct

SEQ ID NO: 55410 - DNA, 20 bp, synthetic construct
  source 1..20: mol_type = other DNA
ctctgcagaattcaaacact

SEQ ID NO: 55411 - DNA, 20 bp, synthetic construct
  source 1..20: mol_type = other DNA
gtgctgaaaaatgagaagga

SEQ ID NO: 55412 - DNA, 20 bp, synthetic construct
  source 1..20: mol_type = other DNA
tgaagcagctggtcagcgag

SEQ ID NO: 55413 - DNA, 20 bp, synthetic construct
  source 1..20: mol_type = other DNA
agtaggagaggaggccgtcc

SEQ ID NO: 55414 - DNA, 20 bp, synthetic construct
  source 1..20: mol_type = other DNA
cccgcccaccagcaggcgta

SEQ ID NO: 55415 - DNA, 20 bp, synthetic construct
  source 1..20: mol_type = other DNA
cagagcagaagtgtgaagag

SEQ ID NO: 55416 - DNA, 20 bp, synthetic construct
  source 1..20: mol_type = other DNA
gagaaagggaagaaagagaa

SEQ ID NO: 55417 - DNA, 20 bp, synthetic construct
  source 1..20: mol_type = other DNA
aaattcatttcttacctcaa

SEQ ID NO: 55418 - DNA, 20 bp, synthetic construct
  source 1..20: mol_type = other DNA
cagggttgcgtccctcatac

SEQ ID NO: 55419 - DNA, 20 bp, synthetic construct
  source 1..20: mol_type = other DNA
atatcacttcgtgcctcttc

SEQ ID NO: 55420 - DNA, 20 bp, synthetic construct
  source 1..20: mol_type = other DNA
aaggcccatcatctctgggc

SEQ ID NO: 55421 - DNA, 20 bp, synthetic construct
  source 1..20: mol_type = other DNA
ttgctgatcgcagatctcta

SEQ ID NO: 55422 - DNA, 20 bp, synthetic construct
  source 1..20: mol_type = other DNA
gtcagccaggatgggcagct

SEQ ID NO: 55423 - DNA, 20 bp, synthetic construct
  source 1..20: mol_type = other DNA
gtggcagtgccccagccgct

SEQ ID NO: 55424 - DNA, 20 bp, synthetic construct
  source 1..20: mol_type = other DNA
ccgtctagggtgcagtccac

SEQ ID NO: 55425 - DNA, 20 bp, synthetic construct
  source 1..20: mol_type = other DNA
aagctgagtgggtccgggct

SEQ ID NO: 55426 - DNA, 20 bp, synthetic construct
  source 1..20: mol_type = other DNA
gtagatcctcatcatcctgt

SEQ ID NO: 55427 - DNA, 20 bp, synthetic construct
  source 1..20: mol_type = other DNA
agaagcagcagcagcagtca

SEQ ID NO: 55428 - DNA, 20 bp, synthetic construct
  source 1..20: mol_type = other DNA
agctacaattttatgaagat

SEQ ID NO: 55429 - DNA, 20 bp, synthetic construct
  source 1..20: mol_type = other DNA
ttacctgtagactattcctt

SEQ ID NO: 55430 - DNA, 20 bp, synthetic construct
  source 1..20: mol_type = other DNA
caggtcacagccaggggctt

SEQ ID NO: 55431 - DNA, 20 bp, synthetic construct
  source 1..20: mol_type = other DNA
cacataaccgtcttttctgt

SEQ ID NO: 55432 - DNA, 20 bp, synthetic construct
  source 1..20: mol_type = other DNA
cataggcaaaggtgtgcagt

SEQ ID NO: 55433 - DNA, 20 bp, synthetic construct
  source 1..20: mol_type = other DNA
cattcagtgtcttctctata

SEQ ID NO: 55434 - DNA, 20 bp, synthetic construct
  source 1..20: mol_type = other DNA
tggcctgtttgatggctccg

SEQ ID NO: 55435 - DNA, 20 bp, synthetic construct
  source 1..20: mol_type = other DNA
catgatgaagtgagcagggt

SEQ ID NO: 55436 - DNA, 20 bp, synthetic construct
  source 1..20: mol_type = other DNA
ggggagccacctggaaattt

SEQ ID NO: 55437 - DNA, 20 bp, synthetic construct
  source 1..20: mol_type = other DNA
atcagagtagaggatgagtt

SEQ ID NO: 55438 - DNA, 20 bp, synthetic construct
  source 1..20: mol_type = other DNA
ggagaaggaaagcaaacata

SEQ ID NO: 55439 - DNA, 20 bp, synthetic construct
  source 1..20: mol_type = other DNA
cggactaggaaggtgccatc

SEQ ID NO: 55440 - DNA, 20 bp, synthetic construct
  source 1..20: mol_type = other DNA
ggagggaggcggcttggagc

SEQ ID NO: 55441 - DNA, 20 bp, synthetic construct
  source 1..20: mol_type = other DNA
acgagagtaagtaaaactac

SEQ ID NO: 55442 - DNA, 20 bp, synthetic construct
  source 1..20: mol_type = other DNA
gggcaggacctgcaaggaga

SEQ ID NO: 55443 - DNA, 20 bp, synthetic construct
  source 1..20: mol_type = other DNA
aaatgtacaagactgctgga

SEQ ID NO: 55444 - DNA, 20 bp, synthetic construct
  source 1..20: mol_type = other DNA
tcgaatatatcctgtgatgt

SEQ ID NO: 55445 - DNA, 20 bp, synthetic construct
  source 1..20: mol_type = other DNA
caagctgagccgggacccct

SEQ ID NO: 55446 - DNA, 20 bp, synthetic construct
  source 1..20: mol_type = other DNA
ctagcctgagcttgtcctcc

SEQ ID NO: 55447 - DNA, 20 bp, synthetic construct
  source 1..20: mol_type = other DNA
agccatgggataaagatgcc

SEQ ID NO: 55448 - DNA, 20 bp, synthetic construct
  source 1..20: mol_type = other DNA
agaggagctgcgagacaagg

SEQ ID NO: 55449 - DNA, 20 bp, synthetic construct
  source 1..20: mol_type = other DNA
ccagttggcaggtcctgggg

SEQ ID NO: 55450 - DNA, 20 bp, synthetic construct
  source 1..20: mol_type = other DNA
gtcgttccattctggccttc

SEQ ID NO: 55451 - DNA, 20 bp, synthetic construct
  source 1..20: mol_type = other DNA
tccggttcatgccccctggt

SEQ ID NO: 55452 - DNA, 20 bp, synthetic construct
  source 1..20: mol_type = other DNA
ctccttcatcatggggaagg

SEQ ID NO: 55453 - DNA, 20 bp, synthetic construct
  source 1..20: mol_type = other DNA
cttttctttcttcatcttct

SEQ ID NO: 55454 - DNA, 20 bp, synthetic construct
  source 1..20: mol_type = other DNA
acacgtgccatcaaggcgtc

SEQ ID NO: 55455 - DNA, 20 bp, synthetic construct
  source 1..20: mol_type = other DNA
cagcgacacggggggcgccg

SEQ ID NO: 55456 - DNA, 20 bp, synthetic construct
  source 1..20: mol_type = other DNA
cactgtacagtccccagggg

SEQ ID NO: 55457 - DNA, 20 bp, synthetic construct
  source 1..20: mol_type = other DNA
cacggcgcgcgcggatcagg

SEQ ID NO: 55458 - DNA, 20 bp, synthetic construct
  source 1..20: mol_type = other DNA
ttttccccacctgttaatag

SEQ ID NO: 55459 - DNA, 20 bp, synthetic construct
  source 1..20: mol_type = other DNA
ctttcccacagtcccccaac

SEQ ID NO: 55460 - DNA, 20 bp, synthetic construct
  source 1..20: mol_type = other DNA
accgctgtcagaaaaagatc

SEQ ID NO: 55461 - DNA, 20 bp, synthetic construct
  source 1..20: mol_type = other DNA
cacctggcggagcgaaagag

SEQ ID NO: 55462 - DNA, 20 bp, synthetic construct
  source 1..20: mol_type = other DNA
tctggatatttgggatttcg

SEQ ID NO: 55463 - DNA, 20 bp, synthetic construct
  source 1..20: mol_type = other DNA
aaatatcagttctgtcgaat

SEQ ID NO: 55464 - DNA, 20 bp, synthetic construct
  source 1..20: mol_type = other DNA
cctactgtccactctgattc

SEQ ID NO: 55465 - DNA, 20 bp, synthetic construct
  source 1..20: mol_type = other DNA
gtcttcatcgtcctcctcct

SEQ ID NO: 55466 - DNA, 20 bp, synthetic construct
  source 1..20: mol_type = other DNA
ttgaacttgtgcttgctcct

SEQ ID NO: 55467 - DNA, 20 bp, synthetic construct
  source 1..20: mol_type = other DNA
cctccagtctcagctcttgt

SEQ ID NO: 55468 - DNA, 20 bp, synthetic construct
  source 1..20: mol_type = other DNA
caccttcctcagctggaaga

SEQ ID NO: 55469 - DNA, 20 bp, synthetic construct
  source 1..20: mol_type = other DNA
caggtgagggcctgggggcg

SEQ ID NO: 55470 - DNA, 20 bp, synthetic construct
  source 1..20: mol_type = other DNA
cagttcgctggtctggagag

SEQ ID NO: 55471 - DNA, 20 bp, synthetic construct
  source 1..20: mol_type = other DNA
ggcgccggtgttggtggtcg

SEQ ID NO: 55472 - DNA, 20 bp, synthetic construct
  source 1..20: mol_type = other DNA
tgcactccacgtcatcatct

SEQ ID NO: 55473 - DNA, 20 bp, synthetic construct
  source 1..20: mol_type = other DNA
cctggaaggcgtgcaggagc

SEQ ID NO: 55474 - DNA, 20 bp, synthetic construct
  source 1..20: mol_type = other DNA
acacatttcaaaaaaatcca

SEQ ID NO: 55475 - DNA, 20 bp, synthetic construct
  source 1..20: mol_type = other DNA
aggggtagcaaggtctttgc

SEQ ID NO: 55476 - DNA, 20 bp, synthetic construct
  source 1..20: mol_type = other DNA
gcactacaaaattagaagtc

SEQ ID NO: 55477 - DNA, 20 bp, synthetic construct
  source 1..20: mol_type = other DNA
cagagcaggatctactggga

SEQ ID NO: 55478 - DNA, 20 bp, synthetic construct
  source 1..20: mol_type = other DNA
cccgcggcctgtctgccggc

SEQ ID NO: 55479 - DNA, 20 bp, synthetic construct
  source 1..20: mol_type = other DNA
ccagatcaaccagacgtttg

SEQ ID NO: 55480 - DNA, 20 bp, synthetic construct
  source 1..20: mol_type = other DNA
agccaagcagacggaaagtg

SEQ ID NO: 55481 - DNA, 20 bp, synthetic construct
  source 1..20: mol_type = other DNA
aggagctgtttggtcatttg

SEQ ID NO: 55482 - DNA, 20 bp, synthetic construct
  source 1..20: mol_type = other DNA
ctggtagccctcggcgtccg

SEQ ID NO: 55483 - DNA, 20 bp, synthetic construct
  source 1..20: mol_type = other DNA
tctgctcgctgcccgagccc

SEQ ID NO: 55484 - DNA, 20 bp, synthetic construct
  source 1..20: mol_type = other DNA
ccgctgtagctctggtgagt

SEQ ID NO: 55485 - DNA, 20 bp, synthetic construct
  source 1..20: mol_type = other DNA
ttgcagcagcaccggtctgg

SEQ ID NO: 55486 - DNA, 20 bp, synthetic construct
  source 1..20: mol_type = other DNA
gggaccagtagtttgccaac

SEQ ID NO: 55487 - DNA, 20 bp, synthetic construct
  source 1..20: mol_type = other DNA
agatcgacaagtccgggagc

SEQ ID NO: 55488 - DNA, 20 bp, synthetic construct
  source 1..20: mol_type = other DNA
ttgatgaagtaatgattgag

SEQ ID NO: 55489 - DNA, 20 bp, synthetic construct
  source 1..20: mol_type = other DNA
cagggctttgacaaagccgt

SEQ ID NO: 55490 - DNA, 20 bp, synthetic construct
  source 1..20: mol_type = other DNA
gatgcgactgcggaggcgca

SEQ ID NO: 55491 - DNA, 20 bp, synthetic construct
  source 1..20: mol_type = other DNA
aaagaagcatgtcaggtaag

SEQ ID NO: 55492 - DNA, 20 bp, synthetic construct
  source 1..20: mol_type = other DNA
ccggttctcgtgctcaggct

SEQ ID NO: 55493 - DNA, 20 bp, synthetic construct
  source 1..20: mol_type = other DNA
gatggaggggaagacggccc

SEQ ID NO: 55494 - DNA, 20 bp, synthetic construct
  source 1..20: mol_type = other DNA
cattcaatcttttggtaagt

SEQ ID NO: 55495 - DNA, 20 bp, synthetic construct
  source 1..20: mol_type = other DNA
cgttgtggatgaagtggcag

SEQ ID NO: 55496 - DNA, 20 bp, synthetic construct
  source 1..20: mol_type = other DNA
gtttcttctctggagtaaac

SEQ ID NO: 55497 - DNA, 20 bp, synthetic construct
  source 1..20: mol_type = other DNA
gaaatggaaaatgtggacag

SEQ ID NO: 55498 - DNA, 20 bp, synthetic construct
  source 1..20: mol_type = other DNA
gtagggttgcccgaagccgt

SEQ ID NO: 55499 - DNA, 20 bp, synthetic construct
  source 1..20: mol_type = other DNA
tttccaacaaaatatctgca

SEQ ID NO: 55500 - DNA, 20 bp, synthetic construct
  source 1..20: mol_type = other DNA
tacttctggtgcagcatagt

SEQ ID NO: 55501 - DNA, 20 bp, synthetic construct
  source 1..20: mol_type = other DNA
cggtgcccagcagggactcc

SEQ ID NO: 55502 - DNA, 20 bp, synthetic construct
  source 1..20: mol_type = other DNA
gagctagatccctaaaggag

SEQ ID NO: 55503 - DNA, 20 bp, synthetic construct
  source 1..20: mol_type = other DNA
atttattccacttgctcgcc

SEQ ID NO: 55504 - DNA, 20 bp, synthetic construct
  source 1..20: mol_type = other DNA
gacacatgcctcttccaggt

SEQ ID NO: 55505 - DNA, 20 bp, synthetic construct
  source 1..20: mol_type = other DNA
tcttaggtaagatattaact

SEQ ID NO: 55506 - DNA, 20 bp, synthetic construct
  source 1..20: mol_type = other DNA
cagagggatggtcaaggtca

SEQ ID NO: 55507 - DNA, 20 bp, synthetic construct
  source 1..20: mol_type = other DNA
ctgacacaccacgtgcacca

SEQ ID NO: 55508 - DNA, 20 bp, synthetic construct
  source 1..20: mol_type = other DNA
tgaagatctgttattttgta

SEQ ID NO: 55509 - DNA, 20 bp, synthetic construct
  source 1..20: mol_type = other DNA
gtctgcgtcaaagagatcgg

SEQ ID NO: 55510 - DNA, 20 bp, synthetic construct
  source 1..20: mol_type = other DNA
agaacaaattaaaagagtta

SEQ ID NO: 55511 - DNA, 20 bp, synthetic construct
  source 1..20: mol_type = other DNA
tgagatagcattgctgcctg

SEQ ID NO: 55512 - DNA, 20 bp, synthetic construct
  source 1..20: mol_type = other DNA
agggcaggacctgcaaggag

SEQ ID NO: 55513 - DNA, 20 bp, synthetic construct
  source 1..20: mol_type = other DNA
cgatctcttcaagctcttca

SEQ ID NO: 55514 - DNA, 20 bp, synthetic construct
  source 1..20: mol_type = other DNA
cagggggtagagaggagggc

SEQ ID NO: 55515 - DNA, 20 bp, synthetic construct
  source 1..20: mol_type = other DNA
gctcctggaggctgcgaggc

SEQ ID NO: 55516 - DNA, 20 bp, synthetic construct
  source 1..20: mol_type = other DNA
gaaacacggaaactgagtat

SEQ ID NO: 55517 - DNA, 20 bp, synthetic construct
  source 1..20: mol_type = other DNA
tgccgcacaaggtccaagtg

SEQ ID NO: 55518 - DNA, 20 bp, synthetic construct
  source 1..20: mol_type = other DNA
ctgcaaaggtcaccccggcc

SEQ ID NO: 55519 - DNA, 20 bp, synthetic construct
  source 1..20: mol_type = other DNA
gtgtttagctggtcagcaga

SEQ ID NO: 55520 - DNA, 20 bp, synthetic construct
  source 1..20: mol_type = other DNA
gttctgattcagagcgaggt

SEQ ID NO: 55521 - DNA, 20 bp, synthetic construct
  source 1..20: mol_type = other DNA
gatcttgatctggaagggaa

SEQ ID NO: 55522 - DNA, 20 bp, synthetic construct
  source 1..20: mol_type = other DNA
agctggcggtctccaggacc

SEQ ID NO: 55523 - DNA, 20 bp, synthetic construct
  source 1..20: mol_type = other DNA
tcccaaatcccatgaggcct

SEQ ID NO: 55524 - DNA, 20 bp, synthetic construct
  source 1..20: mol_type = other DNA
ggaagccgtggcagcccatg

SEQ ID NO: 55525 - DNA, 20 bp, synthetic construct
  source 1..20: mol_type = other DNA
gtaagagcctgaggagaaag

SEQ ID NO: 55526 - DNA, 20 bp, synthetic construct
  source 1..20: mol_type = other DNA
agtcctttgggtgaccatgt

SEQ ID NO: 55527 - DNA, 20 bp, synthetic construct
  source 1..20: mol_type = other DNA
cctgcatgggtgaactctgc

SEQ ID NO: 55528 - DNA, 20 bp, synthetic construct
  source 1..20: mol_type = other DNA
cagtcctcgcttggtggtgg

SEQ ID NO: 55529 - DNA, 20 bp, synthetic construct
  source 1..20: mol_type = other DNA
gatgctggaggagagaatcg

SEQ ID NO: 55530 - DNA, 20 bp, synthetic construct
  source 1..20: mol_type = other DNA
aatgcaccatgaccgagaaa

SEQ ID NO: 55531 - DNA, 20 bp, synthetic construct
  source 1..20: mol_type = other DNA
ctggtgcatatgttcccggg

SEQ ID NO: 55532 - DNA, 20 bp, synthetic construct
  source 1..20: mol_type = other DNA
gttcaaagtaatggagacag

SEQ ID NO: 55533 - DNA, 20 bp, synthetic construct
  source 1..20: mol_type = other DNA
gccttgtttgactttatctg

SEQ ID NO: 55534 - DNA, 20 bp, synthetic construct
  source 1..20: mol_type = other DNA
ccagctcggtcacgcggttc

SEQ ID NO: 55535 - DNA, 20 bp, synthetic construct
  source 1..20: mol_type = other DNA
ctcggccgctgcgggactcg

SEQ ID NO: 55536 - DNA, 20 bp, synthetic construct
  source 1..20: mol_type = other DNA
tcttcctcattctcttcact

SEQ ID NO: 55537 - DNA, 20 bp, synthetic construct
  source 1..20: mol_type = other DNA
tctgacatttaattccgtgg

SEQ ID NO: 55538 - DNA, 20 bp, synthetic construct
  source 1..20: mol_type = other DNA
gtgcgccgtggggagcggca

SEQ ID NO: 55539 - DNA, 20 bp, synthetic construct
  source 1..20: mol_type = other DNA
agtctgtggacaagacatcc

SEQ ID NO: 55540 - DNA, 20 bp, synthetic construct
  source 1..20: mol_type = other DNA
ctctggctgggcagggccag

SEQ ID NO: 55541 - DNA, 20 bp, synthetic construct
  source 1..20: mol_type = other DNA
ctttgtactggggccagttg

SEQ ID NO: 55542 - DNA, 20 bp, synthetic construct
  source 1..20: mol_type = other DNA
gcggccccgccaggtgagcc

SEQ ID NO: 55543 - DNA, 20 bp, synthetic construct
  source 1..20: mol_type = other DNA
agatgctgatgctgagctgt

SEQ ID NO: 55544 - DNA, 20 bp, synthetic construct
  source 1..20: mol_type = other DNA
gaactcggagctggcgtcca

SEQ ID NO: 55545 - DNA, 20 bp, synthetic construct
  source 1..20: mol_type = other DNA
ggccctgacatcccccctgc

SEQ ID NO: 55546 - DNA, 20 bp, synthetic construct
  source 1..20: mol_type = other DNA
ttatgtgaaatttaactaca

SEQ ID NO: 55547 - DNA, 20 bp, synthetic construct
  source 1..20: mol_type = other DNA
ctccgactgctccaagagct

SEQ ID NO: 55548 - DNA, 20 bp, synthetic construct
  source 1..20: mol_type = other DNA
gccctcatacagccacctgg

SEQ ID NO: 55549 - DNA, 20 bp, synthetic construct
  source 1..20: mol_type = other DNA
ccaaccgtgtggtgacactc

SEQ ID NO: 55550 - DNA, 20 bp, synthetic construct
  source 1..20: mol_type = other DNA
aagtactgtgggaaagcctt

SEQ ID NO: 55551 - DNA, 20 bp, synthetic construct
  source 1..20: mol_type = other DNA
tgcgggagccgctgctgcgg

SEQ ID NO: 55552 - DNA, 20 bp, synthetic construct
  source 1..20: mol_type = other DNA
ggacttggaaggtaggctgt

SEQ ID NO: 55553 - DNA, 20 bp, synthetic construct
  source 1..20: mol_type = other DNA
ggctgcagcccatgcgcagt

SEQ ID NO: 55554 - DNA, 20 bp, synthetic construct
  source 1..20: mol_type = other DNA
caagaaaatggacaccaaca

SEQ ID NO: 55555 - DNA, 20 bp, synthetic construct
  source 1..20: mol_type = other DNA
atagggctggtaatgcttgc

SEQ ID NO: 55556 - DNA, 20 bp, synthetic construct
  source 1..20: mol_type = other DNA
tatgcagtgacaggttgtgc

SEQ ID NO: 55557 - DNA, 20 bp, synthetic construct
  source 1..20: mol_type = other DNA
acccaccgctccagctctct

SEQ ID NO: 55558 - DNA, 20 bp, synthetic construct
  source 1..20: mol_type = other DNA
cagctgaacccggcccccga

SEQ ID NO: 55559 - DNA, 20 bp, synthetic construct
  source 1..20: mol_type = other DNA
acttcacaaattgataatat

SEQ ID NO: 55560 - DNA, 20 bp, synthetic construct
  source 1..20: mol_type = other DNA
gggaaactgactccctccct

SEQ ID NO: 55561 - DNA, 20 bp, synthetic construct
  source 1..20: mol_type = other DNA
gtagattttactttcctcgt

SEQ ID NO: 55562 - DNA, 20 bp, synthetic construct
  source 1..20: mol_type = other DNA
gatcgtggaacagcctaagc

SEQ ID NO: 55563 - DNA, 20 bp, synthetic construct
  source 1..20: mol_type = other DNA
tttttatagttgaacgcatg

SEQ ID NO: 55564 - DNA, 20 bp, synthetic construct
  source 1..20: mol_type = other DNA
cggtgaacaggcgctgccca

SEQ ID NO: 55565 - DNA, 20 bp, synthetic construct
  source 1..20: mol_type = other DNA
tccaggagctcgggggtcac

SEQ ID NO: 55566 - DNA, 20 bp, synthetic construct
  source 1..20: mol_type = other DNA
ttccttccgcaggatcttca

SEQ ID NO: 55567 - DNA, 20 bp, synthetic construct
  source 1..20: mol_type = other DNA
aaaaacactgtaaacctctt

SEQ ID NO: 55568 - DNA, 20 bp, synthetic construct
  source 1..20: mol_type = other DNA
atgcgtgttggaagcgttgc

SEQ ID NO: 55569 - DNA, 20 bp, synthetic construct
  source 1..20: mol_type = other DNA
gggcgatgtcatggtgacta

SEQ ID NO: 55570 - DNA, 20 bp, synthetic construct
  source 1..20: mol_type = other DNA
aaaggagaaggggccccagc

SEQ ID NO: 55571 - DNA, 20 bp, synthetic construct
  source 1..20: mol_type = other DNA
cactgtggctcactgctctg

SEQ ID NO: 55572 - DNA, 20 bp, synthetic construct
  source 1..20: mol_type = other DNA
ggtgctgcgttatgtagctc

SEQ ID NO: 55573 - DNA, 20 bp, synthetic construct
  source 1..20: mol_type = other DNA
acccacagccctctttcaac

SEQ ID NO: 55574 - DNA, 20 bp, synthetic construct
  source 1..20: mol_type = other DNA
gggctccctgtcagaacagc

SEQ ID NO: 55575 - DNA, 20 bp, synthetic construct
  source 1..20: mol_type = other DNA
gcacagccgggggcgcggcg

SEQ ID NO: 55576 - DNA, 20 bp, synthetic construct
  source 1..20: mol_type = other DNA
aaagaagttgaacgagtggt

SEQ ID NO: 55577 - DNA, 20 bp, synthetic construct
  source 1..20: mol_type = other DNA
acggctgctggcagccgttc

SEQ ID NO: 55578 - DNA, 20 bp, synthetic construct
  source 1..20: mol_type = other DNA
ccagaaggagatcacccagg

SEQ ID NO: 55579 - DNA, 20 bp, synthetic construct
  source 1..20: mol_type = other DNA
aagtgaggcctgggctgggc

SEQ ID NO: 55580 - DNA, 20 bp, synthetic construct
  source 1..20: mol_type = other DNA
ccctacaaatgtgagttttg

SEQ ID NO: 55581 - DNA, 20 bp, synthetic construct
  source 1..20: mol_type = other DNA
caacctccgggctccatctg

SEQ ID NO: 55582 - DNA, 20 bp, synthetic construct
  source 1..20: mol_type = other DNA
cgggagcctgggactcaggt

SEQ ID NO: 55583 - DNA, 20 bp, synthetic construct
  source 1..20: mol_type = other DNA
cttctagttctgcctcctct

SEQ ID NO: 55584 - DNA, 20 bp, synthetic construct
  source 1..20: mol_type = other DNA
cggccctctgtgtggtgggg

SEQ ID NO: 55585 - DNA, 20 bp, synthetic construct
  source 1..20: mol_type = other DNA
actccgatggtggaacacac

SEQ ID NO: 55586 - DNA, 20 bp, synthetic construct
  source 1..20: mol_type = other DNA
catgctgtggagcggaagcc

SEQ ID NO: 55587 - DNA, 20 bp, synthetic construct
  source 1..20: mol_type = other DNA
tctgttatccaatacctaca

SEQ ID NO: 55588 - DNA, 20 bp, synthetic construct
  source 1..20: mol_type = other DNA
cagtatccttttggtggcag

SEQ ID NO: 55589 - DNA, 20 bp, synthetic construct
  source 1..20: mol_type = other DNA
tgctcccaggatggtgctcc

SEQ ID NO: 55590 - DNA, 20 bp, synthetic construct
  source 1..20: mol_type = other DNA
tttgaggtcaagtctacagc

SEQ ID NO: 55591 - DNA, 20 bp, synthetic construct
  source 1..20: mol_type = other DNA
cagagcgagtgttcgagacc

SEQ ID NO: 55592 - DNA, 20 bp, synthetic construct
  source 1..20: mol_type = other DNA
ggagcctggggcaggacttg

SEQ ID NO: 55593 - DNA, 20 bp, synthetic construct
  source 1..20: mol_type = other DNA
tatatttgtaaatctttttc

SEQ ID NO: 55594 - DNA, 20 bp, synthetic construct
  source 1..20: mol_type = other DNA
agatgattcctttatcatgg

SEQ ID NO: 55595 - DNA, 20 bp, synthetic construct
  source 1..20: mol_type = other DNA
cgaggttggagaaatatttc

SEQ ID NO: 55596 - DNA, 20 bp, synthetic construct
  source 1..20: mol_type = other DNA
ggctttcatggtgtgaagga

SEQ ID NO: 55597 - DNA, 20 bp, synthetic construct
  source 1..20: mol_type = other DNA
gcctgatggggcccctgccc

SEQ ID NO: 55598 - DNA, 20 bp, synthetic construct
  source 1..20: mol_type = other DNA
caattcttcaggaacatcac

SEQ ID NO: 55599 - DNA, 20 bp, synthetic construct
  source 1..20: mol_type = other DNA
cccggagggcctgcggctgg

SEQ ID NO: 55600 - DNA, 20 bp, synthetic construct
  source 1..20: mol_type = other DNA
tgctcattgctgttgggcga

SEQ ID NO: 55601 - DNA, 20 bp, synthetic construct
  source 1..20: mol_type = other DNA
attccagccagcgacacaga

SEQ ID NO: 55602 - DNA, 20 bp, synthetic construct
  source 1..20: mol_type = other DNA
gctccttcacgaggatttcc

SEQ ID NO: 55603 - DNA, 20 bp, synthetic construct
  source 1..20: mol_type = other DNA
gcgactacacgctctctttc

SEQ ID NO: 55604 - DNA, 20 bp, synthetic construct
  source 1..20: mol_type = other DNA
cctctgtgcattgatgccac

SEQ ID NO: 55605 - DNA, 20 bp, synthetic construct
  source 1..20: mol_type = other DNA
cttctcctggtccttctacc

SEQ ID NO: 55606 - DNA, 20 bp, synthetic construct
  source 1..20: mol_type = other DNA
cgcggtgaccgtgggcacga

SEQ ID NO: 55607 - DNA, 20 bp, synthetic construct
  source 1..20: mol_type = other DNA
acaatcccttttacccacgg

SEQ ID NO: 55608 - DNA, 20 bp, synthetic construct
  source 1..20: mol_type = other DNA
gctgtgtctgtgagtggcct

SEQ ID NO: 55609 - DNA, 20 bp, synthetic construct
  source 1..20: mol_type = other DNA
agcaactccaactcctctgg

SEQ ID NO: 55610 - DNA, 20 bp, synthetic construct
  source 1..20: mol_type = other DNA
tgccatacaggacactgtga

SEQ ID NO: 55611 - DNA, 20 bp, synthetic construct
  source 1..20: mol_type = other DNA
gctccaggcagatggcaatg

SEQ ID NO: 55612 - DNA, 20 bp, synthetic construct
  source 1..20: mol_type = other DNA
aggctctcgtcactctccac

SEQ ID NO: 55613 - DNA, 20 bp, synthetic construct
  source 1..20: mol_type = other DNA
ccatactttgattcaactgt

SEQ ID NO: 55614 - DNA, 20 bp, synthetic construct
  source 1..20: mol_type = other DNA
tgcatgcggccagcacagcc

SEQ ID NO: 55615 - DNA, 20 bp, synthetic construct
  source 1..20: mol_type = other DNA
tcgtagtaaatgatgtcttg

SEQ ID NO: 55616 - DNA, 20 bp, synthetic construct
  source 1..20: mol_type = other DNA
aaatggtacgagagagtaac

SEQ ID NO: 55617 - DNA, 20 bp, synthetic construct
  source 1..20: mol_type = other DNA
cccgctctgtccttggcgtc

SEQ ID NO: 55618 - DNA, 20 bp, synthetic construct
  source 1..20: mol_type = other DNA
accctggacctccctgctgc

SEQ ID NO: 55619 - DNA, 20 bp, synthetic construct
  source 1..20: mol_type = other DNA
atctggctcaggttgactgc

SEQ ID NO: 55620 - DNA, 20 bp, synthetic construct
  source 1..20: mol_type = other DNA
tggtacatcgggctgatgac

SEQ ID NO: 55621 - DNA, 20 bp, synthetic construct
  source 1..20: mol_type = other DNA
agtggttccatgggaagcta

SEQ ID NO: 55622 - DNA, 20 bp, synthetic construct
  source 1..20: mol_type = other DNA
gtgctgctggtggggcggcg

SEQ ID NO: 55623 - DNA, 20 bp, synthetic construct
  source 1..20: mol_type = other DNA
tacgaaggtctgatctgagt

SEQ ID NO: 55624 - DNA, 20 bp, synthetic construct
  source 1..20: mol_type = other DNA
tgctgtgggtaggaaacctc

SEQ ID NO: 55625 - DNA, 20 bp, synthetic construct
  source 1..20: mol_type = other DNA
actgcagatcatctcaaccc

SEQ ID NO: 55626 - DNA, 20 bp, synthetic construct
  source 1..20: mol_type = other DNA
tacttccttctcttccatgg

SEQ ID NO: 55627 - DNA, 20 bp, synthetic construct
  source 1..20: mol_type = other DNA
tcaggaaggggcggcggcgc

SEQ ID NO: 55628 - DNA, 20 bp, synthetic construct
  source 1..20: mol_type = other DNA
agagaccactccgagatagc

SEQ ID NO: 55629 - DNA, 20 bp, synthetic construct
  source 1..20: mol_type = other DNA
gtgactaaattcatggagaa

SEQ ID NO: 55630 - DNA, 20 bp, synthetic construct
  source 1..20: mol_type = other DNA
cgaaatccaaagcagaggcc

SEQ ID NO: 55631 - DNA, 20 bp, synthetic construct
  source 1..20: mol_type = other DNA
cctttgaatgcaagattgaa

SEQ ID NO: 55632 - DNA, 20 bp, synthetic construct
  source 1..20: mol_type = other DNA
catggccgccggcgcggggt

SEQ ID NO: 55633 - DNA, 20 bp, synthetic construct
  source 1..20: mol_type = other DNA
accggggcaacagcctggac

SEQ ID NO: 55634 - DNA, 20 bp, synthetic construct
  source 1..20: mol_type = other DNA
gtagcacctggcgacaggga

SEQ ID NO: 55635 - DNA, 20 bp, synthetic construct
  source 1..20: mol_type = other DNA
tgcactaggctgttagtaac

SEQ ID NO: 55636 - DNA, 20 bp, synthetic construct
  source 1..20: mol_type = other DNA
accagactctgatagcaatc

SEQ ID NO: 55637 - DNA, 20 bp, synthetic construct
  source 1..20: mol_type = other DNA
tggaagtggaagggcttggc

SEQ ID NO: 55638 - DNA, 20 bp, synthetic construct
  source 1..20: mol_type = other DNA
ttaccagccttgatggcagc

SEQ ID NO: 55639 - DNA, 20 bp, synthetic construct
  source 1..20: mol_type = other DNA
ggcctggcccataagggggg

SEQ ID NO: 55640 - DNA, 20 bp, synthetic construct
  source 1..20: mol_type = other DNA
cattatctcgtttccggaaa

SEQ ID NO: 55641 - DNA, 20 bp, synthetic construct
  source 1..20: mol_type = other DNA
agcttaggaggtggctgtgg

SEQ ID NO: 55642 - DNA, 20 bp, synthetic construct
  source 1..20: mol_type = other DNA
atttataaaatggttgaagg

SEQ ID NO: 55643 - DNA, 20 bp, synthetic construct
  source 1..20: mol_type = other DNA
agcagcgctgggcgggttcc

SEQ ID NO: 55644 - DNA, 20 bp, synthetic construct
  source 1..20: mol_type = other DNA
tgtggccacgcgctggtacc

SEQ ID NO: 55645 - DNA, 20 bp, synthetic construct
  source 1..20: mol_type = other DNA
aatccagggactcaggactc

SEQ ID NO: 55646 - DNA, 20 bp, synthetic construct
  source 1..20: mol_type = other DNA
tttgattatatctgtaagaa

SEQ ID NO: 55647 - DNA, 20 bp, synthetic construct
  source 1..20: mol_type = other DNA
ccccagcgccaggtagacct

SEQ ID NO: 55648 - DNA, 20 bp, synthetic construct
  source 1..20: mol_type = other DNA
gcagcgaggtatggactccg

SEQ ID NO: 55649 - DNA, 20 bp, synthetic construct
  source 1..20: mol_type = other DNA
gcagcgtttatggacgacac

SEQ ID NO: 55650 - DNA, 20 bp, synthetic construct
  source 1..20: mol_type = other DNA
tgggcattgtggcaccggct

SEQ ID NO: 55651 - DNA, 20 bp, synthetic construct
  source 1..20: mol_type = other DNA
ccagggtgtgattgaataca

SEQ ID NO: 55652 - DNA, 20 bp, synthetic construct
  source 1..20: mol_type = other DNA
tacctcagccagggtctcgg

SEQ ID NO: 55653 - DNA, 20 bp, synthetic construct
  source 1..20: mol_type = other DNA
atcgggtaagtggattctga

SEQ ID NO: 55654 - DNA, 20 bp, synthetic construct
  source 1..20: mol_type = other DNA
ggtaataaaatgggagaggg

SEQ ID NO: 55655 - DNA, 20 bp, synthetic construct
  source 1..20: mol_type = other DNA
tagtggaggcagacagtttg

SEQ ID NO: 55656 - DNA, 20 bp, synthetic construct
  source 1..20: mol_type = other DNA
tgagctctggaaaaagacat

SEQ ID NO: 55657 - DNA, 20 bp, synthetic construct
  source 1..20: mol_type = other DNA
ggagatcttcacaaagaggg

SEQ ID NO: 55658 - DNA, 20 bp, synthetic construct
  source 1..20: mol_type = other DNA
taaaaggcctgacatatctg

SEQ ID NO: 55659 - DNA, 20 bp, synthetic construct
  source 1..20: mol_type = other DNA
cttcattgccttgtacttga

SEQ ID NO: 55660 - DNA, 20 bp, synthetic construct
  source 1..20: mol_type = other DNA
gttccatggtgacatagtgc

SEQ ID NO: 55661 - DNA, 20 bp, synthetic construct
  source 1..20: mol_type = other DNA
cctcatcagccaagacaagg

SEQ ID NO: 55662 - DNA, 20 bp, synthetic construct
  source 1..20: mol_type = other DNA
cagcccctaccagtccggcg

SEQ ID NO: 55663 - DNA, 20 bp, synthetic construct
  source 1..20: mol_type = other DNA
cgatgctgccaggttcagac

SEQ ID NO: 55664 - DNA, 20 bp, synthetic construct
  source 1..20: mol_type = other DNA
gagccccgtgacgcccgcaa

SEQ ID NO: 55665 - DNA, 20 bp, synthetic construct
  source 1..20: mol_type = other DNA
gtggcggtgccgggggcagc

SEQ ID NO: 55666 - DNA, 20 bp, synthetic construct
  source 1..20: mol_type = other DNA
aaatcaacgcccctccttta

SEQ ID NO: 55667 - DNA, 20 bp, synthetic construct
  source 1..20: mol_type = other DNA
ctcggcgtccgtgctgggcg

SEQ ID NO: 55668 - DNA, 20 bp, synthetic construct
  source 1..20: mol_type = other DNA
tgcgggaaatcctggagcgg

SEQ ID NO: 55669 - DNA, 20 bp, synthetic construct
  source 1..20: mol_type = other DNA
ggctgggtggcggcacgtat

SEQ ID NO: 55670 - DNA, 20 bp, synthetic construct
  source 1..20: mol_type = other DNA
ataatgcttccctggaaaga

SEQ ID NO: 55671 - DNA, 20 bp, synthetic construct
  source 1..20: mol_type = other DNA
atcatcttatcattgacaat

SEQ ID NO: 55672 - DNA, 20 bp, synthetic construct
  source 1..20: mol_type = other DNA
aaggaggaggaacaggacca

SEQ ID NO: 55673 - DNA, 20 bp, synthetic construct
  source 1..20: mol_type = other DNA
gtgggctctaggctcggatc

SEQ ID NO: 55674 - DNA, 20 bp, synthetic construct
  source 1..20: mol_type = other DNA
cgaggtaccttcataggacg

SEQ ID NO: 55675 - DNA, 20 bp, synthetic construct
  source 1..20: mol_type = other DNA
aattacccaggtcgacgtct

SEQ ID NO: 55676 - DNA, 20 bp, synthetic construct
  source 1..20: mol_type = other DNA
gcagcatctcttctaggagt

SEQ ID NO: 55677 - DNA, 20 bp, synthetic construct
  source 1..20: mol_type = other DNA
ctcccctacagacgtgcggg

SEQ ID NO: 55678 - DNA, 20 bp, synthetic construct
  source 1..20: mol_type = other DNA
ccgggtgaggtcacgcagga

SEQ ID NO: 55679 - DNA, 20 bp, synthetic construct
  source 1..20: mol_type = other DNA
gcttacagaccagaacgagc

SEQ ID NO: 55680 - DNA, 20 bp, synthetic construct
  source 1..20: mol_type = other DNA
ccgctgggcgccccggacgc

SEQ ID NO: 55681 - DNA, 20 bp, synthetic construct
  source 1..20: mol_type = other DNA
agatgccttcttgtgccgtg

SEQ ID NO: 55682 - DNA, 20 bp, synthetic construct
  source 1..20: mol_type = other DNA
cgagcagctgaccgcattcc

SEQ ID NO: 55683 - DNA, 20 bp, synthetic construct
  source 1..20: mol_type = other DNA
gggttaatactggaggccgt

SEQ ID NO: 55684 - DNA, 20 bp, synthetic construct
  source 1..20: mol_type = other DNA
atagtccttgaaggtgccct

SEQ ID NO: 55685 - DNA, 20 bp, synthetic construct
  source 1..20: mol_type = other DNA
aaaagttatgaatagcgctg

SEQ ID NO: 55686 - DNA, 20 bp, synthetic construct
  source 1..20: mol_type = other DNA
cagtatggaggctcctactc

SEQ ID NO: 55687 - DNA, 20 bp, synthetic construct
  source 1..20: mol_type = other DNA
ctggtgcggcccgagggctg

SEQ ID NO: 55688 - DNA, 20 bp, synthetic construct
  source 1..20: mol_type = other DNA
gaaagtggtagagaatctcc

SEQ ID NO: 55689 - DNA, 20 bp, synthetic construct
  source 1..20: mol_type = other DNA
atgttccggtggctctgtgc

SEQ ID NO: 55690 - DNA, 20 bp, synthetic construct
  source 1..20: mol_type = other DNA
tgggaagttgctggattctg

SEQ ID NO: 55691 - DNA, 20 bp, synthetic construct
  source 1..20: mol_type = other DNA
tcaacaagaacaaaaaatgg

SEQ ID NO: 55692 - DNA, 20 bp, synthetic construct
  source 1..20: mol_type = other DNA
ccagtacatgcgcaccgggg

SEQ ID NO: 55693 - DNA, 20 bp, synthetic construct
  source 1..20: mol_type = other DNA
ggagtggggataatgaggtg

SEQ ID NO: 55694 - DNA, 20 bp, synthetic construct
  source 1..20: mol_type = other DNA
ctccgcctattttgagagtc

SEQ ID NO: 55695 - DNA, 20 bp, synthetic construct
  source 1..20: mol_type = other DNA
ctacctgcggagcttaaggg

SEQ ID NO: 55696 - DNA, 20 bp, synthetic construct
  source 1..20: mol_type = other DNA
acatacgatggtactgctgc

SEQ ID NO: 55697 - DNA, 20 bp, synthetic construct
  source 1..20: mol_type = other DNA
aaaagattctagagtgattt

SEQ ID NO: 55698 - DNA, 20 bp, synthetic construct
  source 1..20: mol_type = other DNA
taggaggtgtttccaactgc

SEQ ID NO: 55699 - DNA, 20 bp, synthetic construct
  source 1..20: mol_type = other DNA
acctgcacagcttccaggtt

SEQ ID NO: 55700 - DNA, 20 bp, synthetic construct
  source 1..20: mol_type = other DNA
gccgcaaggtggaggagctg

SEQ ID NO: 55701 - DNA, 20 bp, synthetic construct
  source 1..20: mol_type = other DNA
gcagcgagagggaccagttg

SEQ ID NO: 55702 - DNA, 20 bp, synthetic construct
  source 1..20: mol_type = other DNA
agccggattttggtgtgtgg

SEQ ID NO: 55703 - DNA, 20 bp, synthetic construct
  source 1..20: mol_type = other DNA
tcatctgttccagccacgct

SEQ ID NO: 55704 - DNA, 20 bp, synthetic construct
  source 1..20: mol_type = other DNA
ggagcttcttttactcagaa

SEQ ID NO: 55705 - DNA, 20 bp, synthetic construct
  source 1..20: mol_type = other DNA
tcctgaatcttggctagttt

SEQ ID NO: 55706 - DNA, 20 bp, synthetic construct
  source 1..20: mol_type = other DNA
ccacagccgcggccgcatcg

SEQ ID NO: 55707 - DNA, 20 bp, synthetic construct
  source 1..20: mol_type = other DNA
tagattttatgtgggtcgtg

SEQ ID NO: 55708 - DNA, 20 bp, synthetic construct
  source 1..20: mol_type = other DNA
gtctcggctgaccggctgct

SEQ ID NO: 55709 - DNA, 20 bp, synthetic construct
  source 1..20: mol_type = other DNA
gcccggggtggacttgacga

SEQ ID NO: 55710 - DNA, 20 bp, synthetic construct
  source 1..20: mol_type = other DNA
agtttattctaatccatgcc

SEQ ID NO: 55711 - DNA, 20 bp, synthetic construct
  source 1..20: mol_type = other DNA
tgtcactccaactcgggacg

SEQ ID NO: 55712 - DNA, 20 bp, synthetic construct
  source 1..20: mol_type = other DNA
aggtccacttcttgtgtcaa

SEQ ID NO: 55713 - DNA, 20 bp, synthetic construct
  source 1..20: mol_type = other DNA
gctttacagatactgtgata

SEQ ID NO: 55714 - DNA, 20 bp, synthetic construct
  source 1..20: mol_type = other DNA
cagtgcctcaccttctttgt

SEQ ID NO: 55715 - DNA, 20 bp, synthetic construct
  source 1..20: mol_type = other DNA
tcaggcactctggcagaaac

SEQ ID NO: 55716 - DNA, 20 bp, synthetic construct
  source 1..20: mol_type = other DNA
ggacctgaagcccagcaacg

SEQ ID NO: 55717 - DNA, 20 bp, synthetic construct
  source 1..20: mol_type = other DNA
ggtgggaaggtgttctcaac

SEQ ID NO: 55718 - DNA, 20 bp, synthetic construct
  source 1..20: mol_type = other DNA
ggcctccggtgagtgttcat

SEQ ID NO: 55719 - DNA, 20 bp, synthetic construct
  source 1..20: mol_type = other DNA
caagaagttcctggttggca

SEQ ID NO: 55720 - DNA, 20 bp, synthetic construct
  source 1..20: mol_type = other DNA
ttaccacctgcttgagcagg

SEQ ID NO: 55721 - DNA, 20 bp, synthetic construct
  source 1..20: mol_type = other DNA
tggtgggccctagaggagaa

SEQ ID NO: 55722 - DNA, 20 bp, synthetic construct
  source 1..20: mol_type = other DNA
tcctttagggatgtgatgat

SEQ ID NO: 55723 - DNA, 20 bp, synthetic construct
  source 1..20: mol_type = other DNA
tggcaccagaggtggttaca

SEQ ID NO: 55724 - DNA, 20 bp, synthetic construct
  source 1..20: mol_type = other DNA
gcatgggcttcccgcacagt

SEQ ID NO: 55725 - DNA, 20 bp, synthetic construct
  source 1..20: mol_type = other DNA
ggcggtccgcggctctgcgg

SEQ ID NO: 55726 - DNA, 20 bp, synthetic construct
  source 1..20: mol_type = other DNA
gccgccactcacttgggtac

SEQ ID NO: 55727 - DNA, 20 bp, synthetic construct
  source 1..20: mol_type = other DNA
gccagccatcatgagagcaa

SEQ ID NO: 55728 - DNA, 20 bp, synthetic construct
  source 1..20: mol_type = other DNA
tcaaaagtgcaaagagaaga

SEQ ID NO: 55729 - DNA, 20 bp, synthetic construct
  source 1..20: mol_type = other DNA
gtcagcgcccaaggagcagc

SEQ ID NO: 55730 - DNA, 20 bp, synthetic construct
  source 1..20: mol_type = other DNA
cgactttacccttcgactag

SEQ ID NO: 55731 - DNA, 20 bp, synthetic construct
  source 1..20: mol_type = other DNA
tggcgctgccagggtaccga

SEQ ID NO: 55732 - DNA, 20 bp, synthetic construct
  source 1..20: mol_type = other DNA
catgagagcaatggctttgc

SEQ ID NO: 55733 - DNA, 20 bp, synthetic construct
  source 1..20: mol_type = other DNA
gtctgatggagaacggaact

SEQ ID NO: 55734 - DNA, 20 bp, synthetic construct
  source 1..20: mol_type = other DNA
tactcggtgacgatgtagat

SEQ ID NO: 55735 - DNA, 20 bp, synthetic construct
  source 1..20: mol_type = other DNA
tccacgttatgatttagacg

SEQ ID NO: 55736 - DNA, 20 bp, synthetic construct
  source 1..20: mol_type = other DNA
gacggactggtgagaatttg

SEQ ID NO: 55737 - DNA, 20 bp, synthetic construct
  source 1..20: mol_type = other DNA
tgttacagctgtccttcaga

SEQ ID NO: 55738 - DNA, 20 bp, synthetic construct
  source 1..20: mol_type = other DNA
tgtctgcgggtcagggaggg

SEQ ID NO: 55739 - DNA, 20 bp, synthetic construct
  source 1..20: mol_type = other DNA
agcctccccttggcatggga

SEQ ID NO: 55740 - DNA, 20 bp, synthetic construct
  source 1..20: mol_type = other DNA
caccatccaggtggcccaga

SEQ ID NO: 55741 - DNA, 20 bp, synthetic construct
  source 1..20: mol_type = other DNA
gtgttcggcgtggggaaggt

SEQ ID NO: 55742 - DNA, 20 bp, synthetic construct
  source 1..20: mol_type = other DNA
ccggcttgctctcccggggg

SEQ ID NO: 55743 - DNA, 20 bp, synthetic construct
  source 1..20: mol_type = other DNA
gaagggcttctcaccggtgt

SEQ ID NO: 55744 - DNA, 20 bp, synthetic construct
  source 1..20: mol_type = other DNA
ccggacaccccacaggggct

SEQ ID NO: 55745 - DNA, 20 bp, synthetic construct
  source 1..20: mol_type = other DNA
cagccaggtcaatggggcgt

SEQ ID NO: 55746 - DNA, 20 bp, synthetic construct
  source 1..20: mol_type = other DNA
acttgagggcttgaatgtct

SEQ ID NO: 55747 - DNA, 20 bp, synthetic construct
  source 1..20: mol_type = other DNA
gccatggagaatggagaagg

SEQ ID NO: 55748 - DNA, 20 bp, synthetic construct
  source 1..20: mol_type = other DNA
cctgttcatagaggtcaatg

SEQ ID NO: 55749 - DNA, 20 bp, synthetic construct
  source 1..20: mol_type = other DNA
ctcagaaatgtcctctgaac

SEQ ID NO: 55750 - DNA, 20 bp, synthetic construct
  source 1..20: mol_type = other DNA
tgccaaagccccccttaccc

SEQ ID NO: 55751 - DNA, 20 bp, synthetic construct
  source 1..20: mol_type = other DNA
tgacatcaactccaagggat

SEQ ID NO: 55752 - DNA, 20 bp, synthetic construct
  source 1..20: mol_type = other DNA
cctcatggttctattctccc

SEQ ID NO: 55753 - DNA, 20 bp, synthetic construct
  source 1..20: mol_type = other DNA
gtggcagggagttgagctgt

SEQ ID NO: 55754 - DNA, 20 bp, synthetic construct
  source 1..20: mol_type = other DNA
ttcatagataagaaccccca

SEQ ID NO: 55755 - DNA, 20 bp, synthetic construct
  source 1..20: mol_type = other DNA
actggtaggggctgtaggcc

SEQ ID NO: 55756 - DNA, 20 bp, synthetic construct
  source 1..20: mol_type = other DNA
tggaaacacgcctgtgatcc

SEQ ID NO: 55757 - DNA, 20 bp, synthetic construct
  source 1..20: mol_type = other DNA
tgatgtctctgtgaatgacc

SEQ ID NO: 55758 - DNA, 20 bp, synthetic construct
  source 1..20: mol_type = other DNA
ggagcagatccgagagctgg

SEQ ID NO: 55759 - DNA, 20 bp, synthetic construct
  source 1..20: mol_type = other DNA
tgaactatgagacaatgggg

SEQ ID NO: 55760 - DNA, 20 bp, synthetic construct
  source 1..20: mol_type = other DNA
ttgtgggtgccatgtccgcc

SEQ ID NO: 55761 - DNA, 20 bp, synthetic construct
  source 1..20: mol_type = other DNA
cagaagatgccgcaggtgtt

SEQ ID NO: 55762 - DNA, 20 bp, synthetic construct
  source 1..20: mol_type = other DNA
ctcaaatctcttggtgcagg

SEQ ID NO: 55763 - DNA, 20 bp, synthetic construct
  source 1..20: mol_type = other DNA
cccttcatcctgttgcactg

SEQ ID NO: 55764 - DNA, 20 bp, synthetic construct
  source 1..20: mol_type = other DNA
agcagctggccgcggcggcc

SEQ ID NO: 55765 - DNA, 20 bp, synthetic construct
  source 1..20: mol_type = other DNA
ttctaaaacgagagataaag

SEQ ID NO: 55766 - DNA, 20 bp, synthetic construct
  source 1..20: mol_type = other DNA
caggctacatgtttggtaaa

SEQ ID NO: 55767 - DNA, 20 bp, synthetic construct
  source 1..20: mol_type = other DNA
ctacttgggctgaggatgtg

SEQ ID NO: 55768 - DNA, 20 bp, synthetic construct
  source 1..20: mol_type = other DNA
caggtaagtggcccccgcgg

SEQ ID NO: 55769 - DNA, 20 bp, synthetic construct
  source 1..20: mol_type = other DNA
agcggccaggtgcacgagcg

SEQ ID NO: 55770 - DNA, 20 bp, synthetic construct
  source 1..20: mol_type = other DNA
acggcgctgctgcacgtggc

SEQ ID NO: 55771 - DNA, 20 bp, synthetic construct
  source 1..20: mol_type = other DNA
cgacatcccattcacgaggc

SEQ ID NO: 55772 - DNA, 20 bp, synthetic construct
  source 1..20: mol_type = other DNA
gggaccagccaagatcgagg

SEQ ID NO: 55773 - DNA, 20 bp, synthetic construct
  source 1..20: mol_type = other DNA
ggtacagtctctggagcagc

SEQ ID NO: 55774 - DNA, 20 bp, synthetic construct
  source 1..20: mol_type = other DNA
cagctggacgcggggctgca

SEQ ID NO: 55775 - DNA, 20 bp, synthetic construct
  source 1..20: mol_type = other DNA
tggttgtgtaactgatcagt

SEQ ID NO: 55776 - DNA, 20 bp, synthetic construct
  source 1..20: mol_type = other DNA
ccagatggctctaacctcag

SEQ ID NO: 55777 - DNA, 20 bp, synthetic construct
  source 1..20: mol_type = other DNA
cacaaggcgcctggaacccg

SEQ ID NO: 55778 - DNA, 20 bp, synthetic construct
  source 1..20: mol_type = other DNA
ccacatccatctcgagacag

SEQ ID NO: 55779 - DNA, 20 bp, synthetic construct
  source 1..20: mol_type = other DNA
tccttcagcgcctcgggtgg

SEQ ID NO: 55780 - DNA, 20 bp, synthetic construct
  source 1..20: mol_type = other DNA
ggtggatgaagatgcccgtg

SEQ ID NO: 55781 - DNA, 20 bp, synthetic construct
  source 1..20: mol_type = other DNA
atgaaacggcacatgtagcc

SEQ ID NO: 55782 - DNA, 20 bp, synthetic construct
  source 1..20: mol_type = other DNA
actgggtgccagcagcagtg

SEQ ID NO: 55783 - DNA, 20 bp, synthetic construct
  source 1..20: mol_type = other DNA
cgtccccaaagtggacctgc

SEQ ID NO: 55784 - DNA, 20 bp, synthetic construct
  source 1..20: mol_type = other DNA
cagacccaggaggagctcaa

SEQ ID NO: 55785 - DNA, 20 bp, synthetic construct
  source 1..20: mol_type = other DNA
tcaaggatgtttgcaagaac

SEQ ID NO: 55786 - DNA, 20 bp, synthetic construct
  source 1..20: mol_type = other DNA
cggccgcgtgctcttcatca

SEQ ID NO: 55787 - DNA, 20 bp, synthetic construct
  source 1..20: mol_type = other DNA
gacgtggcggccgacatgct

SEQ ID NO: 55788 - DNA, 20 bp, synthetic construct
  source 1..20: mol_type = other DNA
aggctggtttgtggagtgcc

SEQ ID NO: 55789 - DNA, 20 bp, synthetic construct
  source 1..20: mol_type = other DNA
gggaggactgaaggaaaaga

SEQ ID NO: 55790 - DNA, 20 bp, synthetic construct
  source 1..20: mol_type = other DNA
cgcatagactgtttgcaatc

SEQ ID NO: 55791 - DNA, 20 bp, synthetic construct
  source 1..20: mol_type = other DNA
gcagcccttgtccaggtcca

SEQ ID NO: 55792 - DNA, 20 bp, synthetic construct
  source 1..20: mol_type = other DNA
ctggacgaccgccacgacag

SEQ ID NO: 55793 - DNA, 20 bp, synthetic construct
  source 1..20: mol_type = other DNA
acaacaaggaatgacttcat

SEQ ID NO: 55794 - DNA, 20 bp, synthetic construct
  source 1..20: mol_type = other DNA
gttgcagaagggacatttaa

SEQ ID NO: 55795 - DNA, 20 bp, synthetic construct
  source 1..20: mol_type = other DNA
cagcagcgtggatccgcagg

SEQ ID NO: 55796 - DNA, 20 bp, synthetic construct
  source 1..20: mol_type = other DNA
gagcttgggcttggcccctg

SEQ ID NO: 55797 - DNA, 20 bp, synthetic construct
  source 1..20: mol_type = other DNA
gctccttacctttgcttttg

SEQ ID NO: 55798 - DNA, 20 bp, synthetic construct
  source 1..20: mol_type = other DNA
tgtgaaattgcaggatgcag

SEQ ID NO: 55799 - DNA, 20 bp, synthetic construct
  source 1..20: mol_type = other DNA
caggaaggagaaaatgaaga

SEQ ID NO: 55800 - DNA, 20 bp, synthetic construct
  source 1..20: mol_type = other DNA
aggagtcttcaagtgccctg

SEQ ID NO: 55801 - DNA, 20 bp, synthetic construct
  source 1..20: mol_type = other DNA
aatgcaagagagtcctaaaa

SEQ ID NO: 55802 - DNA, 20 bp, synthetic construct
  source 1..20: mol_type = other DNA
tacactccgggactcctccc

SEQ ID NO: 55803 - DNA, 20 bp, synthetic construct
  source 1..20: mol_type = other DNA
attcgatgacaagattctgg

SEQ ID NO: 55804 - DNA, 20 bp, synthetic construct
  source 1..20: mol_type = other DNA
tcactgggctggaggctgcc

SEQ ID NO: 55805 - DNA, 20 bp, synthetic construct
  source 1..20: mol_type = other DNA
caagttctccgtcatctggg

SEQ ID NO: 55806 - DNA, 20 bp, synthetic construct
  source 1..20: mol_type = other DNA
tctggaggagagaggagtag

SEQ ID NO: 55807 - DNA, 20 bp, synthetic construct
  source 1..20: mol_type = other DNA
acctggatgcgcaactgctc

SEQ ID NO: 55808 - DNA, 20 bp, synthetic construct
  source 1..20: mol_type = other DNA
acaattctaggtacaacttt

SEQ ID NO: 55809 - DNA, 20 bp, synthetic construct
  source 1..20: mol_type = other DNA
agctgggcgtggagggcgac

SEQ ID NO: 55810 - DNA, 20 bp, synthetic construct
  source 1..20: mol_type = other DNA
acccccccaagcagcgttgc

SEQ ID NO: 55811 - DNA, 20 bp, synthetic construct
  source 1..20: mol_type = other DNA
attggctggtttaggcagaa

SEQ ID NO: 55812 - DNA, 20 bp, synthetic construct
  source 1..20: mol_type = other DNA
ctggggggactcccagggag

SEQ ID NO: 55813 - DNA, 20 bp, synthetic construct
  source 1..20: mol_type = other DNA
ccctggaaggcttgatgtct

SEQ ID NO: 55814 - DNA, 20 bp, synthetic construct
  source 1..20: mol_type = other DNA
catcgcgcgcctggaggaca

SEQ ID NO: 55815 - DNA, 20 bp, synthetic construct
  source 1..20: mol_type = other DNA
ccaaaggacagttctggtca

SEQ ID NO: 55816 - DNA, 20 bp, synthetic construct
  source 1..20: mol_type = other DNA
gcccagctctccatcctcct

SEQ ID NO: 55817 - DNA, 20 bp, synthetic construct
  source 1..20: mol_type = other DNA
acagaactcaccgcacccga

SEQ ID NO: 55818 - DNA, 20 bp, synthetic construct
  source 1..20: mol_type = other DNA
agtcccccaacaagcacaac

SEQ ID NO: 55819 - DNA, 20 bp, synthetic construct
  source 1..20: mol_type = other DNA
tgcaaagagcaaaaccgtga

SEQ ID NO: 55820 - DNA, 20 bp, synthetic construct
  source 1..20: mol_type = other DNA
cagctgctgagacctacgag

SEQ ID NO: 55821 - DNA, 20 bp, synthetic construct
  source 1..20: mol_type = other DNA
ctcctggctgcggccggcgg

SEQ ID NO: 55822 - DNA, 20 bp, synthetic construct
  source 1..20: mol_type = other DNA
ttggtctgatgagagagatg

SEQ ID NO: 55823 - DNA, 20 bp, synthetic construct
  source 1..20: mol_type = other DNA
caaactgggtgaacttggca

SEQ ID NO: 55824 - DNA, 20 bp, synthetic construct
  source 1..20: mol_type = other DNA
cactacactcaacacgccgc

SEQ ID NO: 55825 - DNA, 20 bp, synthetic construct
  source 1..20: mol_type = other DNA
agcatttctggtctttcagg

SEQ ID NO: 55826 - DNA, 20 bp, synthetic construct
  source 1..20: mol_type = other DNA
ctggcaggagcccgtggggc

SEQ ID NO: 55827 - DNA, 20 bp, synthetic construct
  source 1..20: mol_type = other DNA
ccaaaaggaaagcagaaacc

SEQ ID NO: 55828 - DNA, 20 bp, synthetic construct
  source 1..20: mol_type = other DNA
aaggtgagctcgggtttctc

SEQ ID NO: 55829 - DNA, 20 bp, synthetic construct
  source 1..20: mol_type = other DNA
gccaattccactaattgttt

SEQ ID NO: 55830 - DNA, 20 bp, synthetic construct
  source 1..20: mol_type = other DNA
tgcctagctgtggcttctcc

SEQ ID NO: 55831 - DNA, 20 bp, synthetic construct
  source 1..20: mol_type = other DNA
caccaaatgcacctgaggga

SEQ ID NO: 55832 - DNA, 20 bp, synthetic construct
  source 1..20: mol_type = other DNA
tggcggccaggatggttctt

SEQ ID NO: 55833 - DNA, 20 bp, synthetic construct
  source 1..20: mol_type = other DNA
gatcttccacaggttaactg

SEQ ID NO: 55834 - DNA, 20 bp, synthetic construct
  source 1..20: mol_type = other DNA
ttcctcaaggaatgattcgg

SEQ ID NO: 55835 - DNA, 20 bp, synthetic construct
  source 1..20: mol_type = other DNA
atgggcagtcctattacagc

SEQ ID NO: 55836 - DNA, 20 bp, synthetic construct
  source 1..20: mol_type = other DNA
aggcctcagccaaaagcttc

SEQ ID NO: 55837 - DNA, 20 bp, synthetic construct
  source 1..20: mol_type = other DNA
taggtggtccaatttttcct

SEQ ID NO: 55838 - DNA, 20 bp, synthetic construct
  source 1..20: mol_type = other DNA
atgggcactgaagaacttaa

SEQ ID NO: 55839 - DNA, 20 bp, synthetic construct
  source 1..20: mol_type = other DNA
ttacaccgcagaaccaccag

SEQ ID NO: 55840 - DNA, 20 bp, synthetic construct
  source 1..20: mol_type = other DNA
caaccgcacggcctgcagga

SEQ ID NO: 55841 - DNA, 20 bp, synthetic construct
  source 1..20: mol_type = other DNA
tttcacttcctgaagtcaag

SEQ ID NO: 55842 - DNA, 20 bp, synthetic construct
  source 1..20: mol_type = other DNA
cttcaggtgggtgcgagggt

SEQ ID NO: 55843 - DNA, 20 bp, synthetic construct
  source 1..20: mol_type = other DNA
acagctggagaggctttgtt

SEQ ID NO: 55844 - DNA, 20 bp, synthetic construct
  source 1..20: mol_type = other DNA
agagaccattggtcagtgca

SEQ ID NO: 55845 - DNA, 20 bp, synthetic construct
  source 1..20: mol_type = other DNA
ttctctctcaattcttcatt

SEQ ID NO: 55846 - DNA, 20 bp, synthetic construct
  source 1..20: mol_type = other DNA
ccacgagttcctggccctct

SEQ ID NO: 55847 - DNA, 20 bp, synthetic construct
  source 1..20: mol_type = other DNA
caccagggtaagatgggtcg

SEQ ID NO: 55848 - DNA, 20 bp, synthetic construct
  source 1..20: mol_type = other DNA
tttggccgggccatgggtgc

SEQ ID NO: 55849 - DNA, 20 bp, synthetic construct
  source 1..20: mol_type = other DNA
ccctgccccagccagcaaag

SEQ ID NO: 55850 - DNA, 20 bp, synthetic construct
  source 1..20: mol_type = other DNA
ccatgcagtgcctggggatc

SEQ ID NO: 55851 - DNA, 20 bp, synthetic construct
  source 1..20: mol_type = other DNA
cagtaatgtccgggatgggg

SEQ ID NO: 55852 - DNA, 20 bp, synthetic construct
  source 1..20: mol_type = other DNA
aggacgtgatcttcttggga

SEQ ID NO: 55853 - DNA, 20 bp, synthetic construct
  source 1..20: mol_type = other DNA
atcaaacagaggccgcatgc

SEQ ID NO: 55854 - DNA, 20 bp, synthetic construct
  source 1..20: mol_type = other DNA
gacgtccctatcaaaggagc

SEQ ID NO: 55855 - DNA, 20 bp, synthetic construct
  source 1..20: mol_type = other DNA
aaacaaaaccactgaatggg

SEQ ID NO: 55856 - DNA, 20 bp, synthetic construct
  source 1..20: mol_type = other DNA
gcggcagggcagccccaccc

SEQ ID NO: 55857 - DNA, 20 bp, synthetic construct
  source 1..20: mol_type = other DNA
tgtcccgcaggaatatctgc

SEQ ID NO: 55858 - DNA, 20 bp, synthetic construct
  source 1..20: mol_type = other DNA
cgaggggtcgatgcactctg

SEQ ID NO: 55859 - DNA, 20 bp, synthetic construct
  source 1..20: mol_type = other DNA
acactgttcctctgtagtgc

SEQ ID NO: 55860 - DNA, 20 bp, synthetic construct
  source 1..20: mol_type = other DNA
caactagacaccggggtgcc

SEQ ID NO: 55861 - DNA, 20 bp, synthetic construct
  source 1..20: mol_type = other DNA
tgcgcctgcatggtgccccc

SEQ ID NO: 55862 - DNA, 20 bp, synthetic construct
  source 1..20: mol_type = other DNA
tttctggcatgtcggggact

SEQ ID NO: 55863 - DNA, 20 bp, synthetic construct
  source 1..20: mol_type = other DNA
atgtgaggggactcggacat

SEQ ID NO: 55864 - DNA, 20 bp, synthetic construct
  source 1..20: mol_type = other DNA
acttccagagaatttgtcac

SEQ ID NO: 55865 - DNA, 20 bp, synthetic construct
  source 1..20: mol_type = other DNA
tggatgacctggaacatctg

SEQ ID NO: 55866 - DNA, 20 bp, synthetic construct
  source 1..20: mol_type = other DNA
agcgtaagccaatactgatg

SEQ ID NO: 55867 - DNA, 20 bp, synthetic construct
  source 1..20: mol_type = other DNA
gatcttccccttcagttgct

SEQ ID NO: 55868 - DNA, 20 bp, synthetic construct
  source 1..20: mol_type = other DNA
agacccaggcagcagcagca

SEQ ID NO: 55869 - DNA, 20 bp, synthetic construct
  source 1..20: mol_type = other DNA
gctctaatatttgaaggtat

SEQ ID NO: 55870 - DNA, 20 bp, synthetic construct
  source 1..20: mol_type = other DNA
ggtggaggtctttccattct

SEQ ID NO: 55871 - DNA, 20 bp, synthetic construct
  source 1..20: mol_type = other DNA
aacacacggaggtgaggggc

SEQ ID NO: 55872 - DNA, 20 bp, synthetic construct
  source 1..20: mol_type = other DNA
gtgtaccgcagcccaaacca

SEQ ID NO: 55873 - DNA, 20 bp, synthetic construct
  source 1..20: mol_type = other DNA
gcaggacctgggcgtgacca

SEQ ID NO: 55874 - DNA, 20 bp, synthetic construct
  source 1..20: mol_type = other DNA
gcaggcgccgccctacagca

SEQ ID NO: 55875 - DNA, 20 bp, synthetic construct
  source 1..20: mol_type = other DNA
cctcatgtattggtctctca

SEQ ID NO: 55876 - DNA, 20 bp, synthetic construct
  source 1..20: mol_type = other DNA
tgacagccttgtcatagtag

SEQ ID NO: 55877 - DNA, 20 bp, synthetic construct
  source 1..20: mol_type = other DNA
cagcaccacctccaggggca

SEQ ID NO: 55878 - DNA, 20 bp, synthetic construct
  source 1..20: mol_type = other DNA
gggcgtggtgactatcgtac

SEQ ID NO: 55879 - DNA, 20 bp, synthetic construct
  source 1..20: mol_type = other DNA
ggcacctcttgaggaccagt

SEQ ID NO: 55880 - DNA, 20 bp, synthetic construct
  source 1..20: mol_type = other DNA
tcgtcacaattgaatgtggg

SEQ ID NO: 55881 - DNA, 20 bp, synthetic construct
  source 1..20: mol_type = other DNA
ttgagaaagctgttcctgca

SEQ ID NO: 55882 - DNA, 20 bp, synthetic construct
  source 1..20: mol_type = other DNA
gctgcggggagaaggggcga

SEQ ID NO: 55883 - DNA, 20 bp, synthetic construct
  source 1..20: mol_type = other DNA
acaggtattctcaggaatgg

SEQ ID NO: 55884 - DNA, 20 bp, synthetic construct
  source 1..20: mol_type = other DNA
acaaccagatgcatggacaa

SEQ ID NO: 55885 - DNA, 20 bp, synthetic construct
  source 1..20: mol_type = other DNA
taagaatgagttttgtgaaa

SEQ ID NO: 55886 - DNA, 20 bp, synthetic construct
  source 1..20: mol_type = other DNA
gaagtggatactggagagca

SEQ ID NO: 55887 - DNA, 20 bp, synthetic construct
  source 1..20: mol_type = other DNA
gcctcaggtagatcccacgc

SEQ ID NO: 55888 - DNA, 20 bp, synthetic construct
  source 1..20: mol_type = other DNA
ggagtacgcgcggctggtga

SEQ ID NO: 55889 - DNA, 20 bp, synthetic construct
  source 1..20: mol_type = other DNA
gccatagcgcttaaaactac

SEQ ID NO: 55890 - DNA, 20 bp, synthetic construct
  source 1..20: mol_type = other DNA
cctcctcctcctcctcgtcc

SEQ ID NO: 55891 - DNA, 20 bp, synthetic construct
  source 1..20: mol_type = other DNA
caccactccagggggatttt

SEQ ID NO: 55892 - DNA, 20 bp, synthetic construct
  source 1..20: mol_type = other DNA
ctccgagggcagcatccacg

SEQ ID NO: 55893 - DNA, 20 bp, synthetic construct
  source 1..20: mol_type = other DNA
tcagacaccaggactgatga

SEQ ID NO: 55894 - DNA, 20 bp, synthetic construct
  source 1..20: mol_type = other DNA
gcccagcagggactccgggg

SEQ ID NO: 55895 - DNA, 20 bp, synthetic construct
  source 1..20: mol_type = other DNA
tcagaatgtgaatattaata

SEQ ID NO: 55896 - DNA, 20 bp, synthetic construct
  source 1..20: mol_type = other DNA
ttgttggtgacgcggttggc

SEQ ID NO: 55897 - DNA, 20 bp, synthetic construct
  source 1..20: mol_type = other DNA
gcctacaattatatggagat

SEQ ID NO: 55898 - DNA, 20 bp, synthetic construct
  source 1..20: mol_type = other DNA
ggccttgaaccaagtcaccc

SEQ ID NO: 55899 - DNA, 20 bp, synthetic construct
  source 1..20: mol_type = other DNA
gagccagtcagtggagcagg

SEQ ID NO: 55900 - DNA, 20 bp, synthetic construct
  source 1..20: mol_type = other DNA
gctctgcccggtccacgtcg

SEQ ID NO: 55901 - DNA, 20 bp, synthetic construct
  source 1..20: mol_type = other DNA
agttgctcatgcaggatttc

SEQ ID NO: 55902 - DNA, 20 bp, synthetic construct
  source 1..20: mol_type = other DNA
ccagtcacacatgagaatgt

SEQ ID NO: 55903 - DNA, 20 bp, synthetic construct
  source 1..20: mol_type = other DNA
gaggctatgaaagaagctgc

SEQ ID NO: 55904 - DNA, 20 bp, synthetic construct
  source 1..20: mol_type = other DNA
cacccatcaccaccactggc

SEQ ID NO: 55905 - DNA, 20 bp, synthetic construct
  source 1..20: mol_type = other DNA
tcgccgaatagattcaacaa

SEQ ID NO: 55906 - DNA, 20 bp, synthetic construct
  source 1..20: mol_type = other DNA
cacgggtgagggcgaggggc

SEQ ID NO: 55907 - DNA, 20 bp, synthetic construct
  source 1..20: mol_type = other DNA
agaagccgcccagctggccg

SEQ ID NO: 55908 - DNA, 20 bp, synthetic construct
  source 1..20: mol_type = other DNA
gaaaaatgatctctggtgtg

SEQ ID NO: 55909 - DNA, 20 bp, synthetic construct
  source 1..20: mol_type = other DNA
cggagttggggaaacaatac

SEQ ID NO: 55910 - DNA, 20 bp, synthetic construct
  source 1..20: mol_type = other DNA
gcacttaccaccagtcttgt

SEQ ID NO: 55911 - DNA, 20 bp, synthetic construct
  source 1..20: mol_type = other DNA
aaaggtgatccaagacttgg

SEQ ID NO: 55912 - DNA, 20 bp, synthetic construct
  source 1..20: mol_type = other DNA
gctggtaggtatctggtagc

SEQ ID NO: 55913 - DNA, 20 bp, synthetic construct
  source 1..20: mol_type = other DNA
tgccttctgggcccagccct

SEQ ID NO: 55914 - DNA, 20 bp, synthetic construct
  source 1..20: mol_type = other DNA
gtgacatcagggctcggttc

SEQ ID NO: 55915 - DNA, 20 bp, synthetic construct
  source 1..20: mol_type = other DNA
atagtcaaagagatcctggg

SEQ ID NO: 55916 - DNA, 20 bp, synthetic construct
  source 1..20: mol_type = other DNA
agggcgggtcacggcctggt

SEQ ID NO: 55917 - DNA, 20 bp, synthetic construct
  source 1..20: mol_type = other DNA
gcctggagatctcctgcttg

SEQ ID NO: 55918 - DNA, 20 bp, synthetic construct
  source 1..20: mol_type = other DNA
ggagagatgcctacatcagt

SEQ ID NO: 55919 - DNA, 20 bp, synthetic construct
  source 1..20: mol_type = other DNA
cgaacaccaggagattttag

SEQ ID NO: 55920 - DNA, 20 bp, synthetic construct
  source 1..20: mol_type = other DNA
cctccagaacttgagtgcgc

SEQ ID NO: 55921 - DNA, 20 bp, synthetic construct
  source 1..20: mol_type = other DNA
agtccctgtaagtatccacg

SEQ ID NO: 55922 - DNA, 20 bp, synthetic construct
  source 1..20: mol_type = other DNA
actgaatgtgcatggaattg

SEQ ID NO: 55923 - DNA, 20 bp, synthetic construct
  source 1..20: mol_type = other DNA
ccatcccgaactggaagagc

SEQ ID NO: 55924 - DNA, 20 bp, synthetic construct
  source 1..20: mol_type = other DNA
caccggtgtgggtgcggata

SEQ ID NO: 55925 - DNA, 20 bp, synthetic construct
  source 1..20: mol_type = other DNA
tttgatgtgggttgcctagg

SEQ ID NO: 55926 - DNA, 20 bp, synthetic construct
  source 1..20: mol_type = other DNA
tatgctgtcggatgagtcct

SEQ ID NO: 55927 - DNA, 20 bp, synthetic construct
  source 1..20: mol_type = other DNA
ttcgaggagtcccaggtggc

SEQ ID NO: 55928 - DNA, 20 bp, synthetic construct
  source 1..20: mol_type = other DNA
gctgacaaggacaacatcac

SEQ ID NO: 55929 - DNA, 20 bp, synthetic construct
  source 1..20: mol_type = other DNA
gcatgctgacgcgactcacc

SEQ ID NO: 55930 - DNA, 20 bp, synthetic construct
  source 1..20: mol_type = other DNA
ttctaggtggctggtcggaa

SEQ ID NO: 55931 - DNA, 20 bp, synthetic construct
  source 1..20: mol_type = other DNA
attgaacaacccaggcagag

SEQ ID NO: 55932 - DNA, 20 bp, synthetic construct
  source 1..20: mol_type = other DNA
cccgacggaatatcgagcga

SEQ ID NO: 55933 - DNA, 20 bp, synthetic construct
  source 1..20: mol_type = other DNA
atgggagactcagctgggcc

SEQ ID NO: 55934 - DNA, 20 bp, synthetic construct
  source 1..20: mol_type = other DNA
ttgacctgagtgtcgtctat

SEQ ID NO: 55935 - DNA, 20 bp, synthetic construct
  source 1..20: mol_type = other DNA
cccaatgtggtggcctacat

SEQ ID NO: 55936 - DNA, 20 bp, synthetic construct
  source 1..20: mol_type = other DNA
ccaagtgccggaaccgacgc

SEQ ID NO: 55937 - DNA, 20 bp, synthetic construct
  source 1..20: mol_type = other DNA
cagcaccttcaggcctcggt

SEQ ID NO: 55938 - DNA, 20 bp, synthetic construct
  source 1..20: mol_type = other DNA
ggacaccacggtggctgcaa

SEQ ID NO: 55939 - DNA, 20 bp, synthetic construct
  source 1..20: mol_type = other DNA
ccctcctccttctgaggaag

SEQ ID NO: 55940 - DNA, 20 bp, synthetic construct
  source 1..20: mol_type = other DNA
agccgccccagctctctccc

SEQ ID NO: 55941 - DNA, 20 bp, synthetic construct
  source 1..20: mol_type = other DNA
catcaagtggacggcccccg

SEQ ID NO: 55942 - DNA, 20 bp, synthetic construct
  source 1..20: mol_type = other DNA
atccagtatctctgctgtac

SEQ ID NO: 55943 - DNA, 20 bp, synthetic construct
  source 1..20: mol_type = other DNA
cacacggaggtgaggggcag

SEQ ID NO: 55944 - DNA, 20 bp, synthetic construct
  source 1..20: mol_type = other DNA
attaggtcactgtcagtgtg

SEQ ID NO: 55945 - DNA, 20 bp, synthetic construct
  source 1..20: mol_type = other DNA
tggaaggagctgactccgac

SEQ ID NO: 55946 - DNA, 20 bp, synthetic construct
  source 1..20: mol_type = other DNA
tcaccaatggtctccttcag

SEQ ID NO: 55947 - DNA, 20 bp, synthetic construct
  source 1..20: mol_type = other DNA
acattgtgaattacttggac

SEQ ID NO: 55948 - DNA, 20 bp, synthetic construct
  source 1..20: mol_type = other DNA
tcggggagggggcgccttga

SEQ ID NO: 55949 - DNA, 20 bp, synthetic construct
  source 1..20: mol_type = other DNA
cgtgctcgtcgctcagcgcc

SEQ ID NO: 55950 - DNA, 20 bp, synthetic construct
  source 1..20: mol_type = other DNA
aaaactatccacctccactt

SEQ ID NO: 55951 - DNA, 20 bp, synthetic construct
  source 1..20: mol_type = other DNA
tgaggaggacacaggtaggg

SEQ ID NO: 55952 - DNA, 20 bp, synthetic construct
  source 1..20: mol_type = other DNA
atataggcacttcggatcga

SEQ ID NO: 55953 - DNA, 20 bp, synthetic construct
  source 1..20: mol_type = other DNA
gcatttgaaatgtcaagaag

SEQ ID NO: 55954 - DNA, 20 bp, synthetic construct
  source 1..20: mol_type = other DNA
gctgcaccgagtcgtagtcg

SEQ ID NO: 55955 - DNA, 20 bp, synthetic construct
  source 1..20: mol_type = other DNA
gtgatggagttcctcaacgg

SEQ ID NO: 55956 - DNA, 20 bp, synthetic construct
  source 1..20: mol_type = other DNA
ttgtaggtgttttcaggacc

SEQ ID NO: 55957 - DNA, 20 bp, synthetic construct
  source 1..20: mol_type = other DNA
agctgggggctgcaggcagt

SEQ ID NO: 55958 - DNA, 20 bp, synthetic construct
  source 1..20: mol_type = other DNA
tgtgctagtggatctacttg

SEQ ID NO: 55959 - DNA, 20 bp, synthetic construct
  source 1..20: mol_type = other DNA
gtatacacgtaaattttcta

SEQ ID NO: 55960 - DNA, 20 bp, synthetic construct
  source 1..20: mol_type = other DNA
acaggttttcagctttgttt

SEQ ID NO: 55961 - DNA, 20 bp, synthetic construct
  source 1..20: mol_type = other DNA
tttggcagaggagattgaag

SEQ ID NO: 55962 - DNA, 20 bp, synthetic construct
  source 1..20: mol_type = other DNA
ttctgtcgtagaagagaatg

SEQ ID NO: 55963 - DNA, 20 bp, synthetic construct
  source 1..20: mol_type = other DNA
tgttcaggtcggcgcccatc

SEQ ID NO: 55964 - DNA, 20 bp, synthetic construct
  source 1..20: mol_type = other DNA
gtgggaaaacactgtgagga

SEQ ID NO: 55965 - DNA, 20 bp, synthetic construct
  source 1..20: mol_type = other DNA
tacctgcacgagaatgagtt

SEQ ID NO: 55966 - DNA, 20 bp, synthetic construct
  source 1..20: mol_type = other DNA
gtacggtaggaaggagggga

SEQ ID NO: 55967 - DNA, 20 bp, synthetic construct
  source 1..20: mol_type = other DNA
agatcaaagttcctgttgac

SEQ ID NO: 55968 - DNA, 20 bp, synthetic construct
  source 1..20: mol_type = other DNA
caggaccctaagctccagat

SEQ ID NO: 55969 - DNA, 20 bp, synthetic construct
  source 1..20: mol_type = other DNA
aggggtcgacgaccgggggc

SEQ ID NO: 55970 - DNA, 20 bp, synthetic construct
  source 1..20: mol_type = other DNA
tacttccactcaagaatcgt

SEQ ID NO: 55971 - DNA, 20 bp, synthetic construct
  source 1..20: mol_type = other DNA
cctttgaggtaagtggccat

SEQ ID NO: 55972 - DNA, 20 bp, synthetic construct
  source 1..20: mol_type = other DNA
agaaacaaaaactcttacac

SEQ ID NO: 55973 - DNA, 20 bp, synthetic construct
  source 1..20: mol_type = other DNA
tggcgtgcagatcaatgtcc

SEQ ID NO: 55974 - DNA, 20 bp, synthetic construct
  source 1..20: mol_type = other DNA
agagttcacggagttcacag

SEQ ID NO: 55975 - DNA, 20 bp, synthetic construct
  source 1..20: mol_type = other DNA
ctaatagacacaaaaagaag

SEQ ID NO: 55976 - DNA, 20 bp, synthetic construct
  source 1..20: mol_type = other DNA
agcaatttgtacatcctggc

SEQ ID NO: 55977 - DNA, 20 bp, synthetic construct
  source 1..20: mol_type = other DNA
tctgtcaggagtgggaggaa

SEQ ID NO: 55978 - DNA, 20 bp, synthetic construct
  source 1..20: mol_type = other DNA
ggtgcaccagcgagtggtct

SEQ ID NO: 55979 - DNA, 20 bp, synthetic construct
  source 1..20: mol_type = other DNA
cacccgacggccggcgcgcc

SEQ ID NO: 55980 - DNA, 20 bp, synthetic construct
  source 1..20: mol_type = other DNA
ggacagaggccaggcccggc

SEQ ID NO: 55981 - DNA, 20 bp, synthetic construct
  source 1..20: mol_type = other DNA
gctgaaccggcagctgcgcg

SEQ ID NO: 55982 - DNA, 20 bp, synthetic construct
  source 1..20: mol_type = other DNA
tgaccgtgtcgcgggcctgc

SEQ ID NO: 55983 - DNA, 20 bp, synthetic construct
  source 1..20: mol_type = other DNA
caaagttactcgtatcccca

SEQ ID NO: 55984 - DNA, 20 bp, synthetic construct
  source 1..20: mol_type = other DNA
tccttgcttctatcatcaga

SEQ ID NO: 55985 - DNA, 20 bp, synthetic construct
  source 1..20: mol_type = other DNA
ttacctcctttctctccttc

SEQ ID NO: 55986 - DNA, 20 bp, synthetic construct
  source 1..20: mol_type = other DNA
ggtagcaaccggggacgggt

SEQ ID NO: 55987 - DNA, 20 bp, synthetic construct
  source 1..20: mol_type = other DNA
acaggatgatgaggatctac

SEQ ID NO: 55988 - DNA, 20 bp, synthetic construct
  source 1..20: mol_type = other DNA
gtgggatgttgtgctgctgc

SEQ ID NO: 55989 - DNA, 20 bp, synthetic construct
  source 1..20: mol_type = other DNA
cgtggccatgatgagtgaca

SEQ ID NO: 55990 - DNA, 20 bp, synthetic construct
  source 1..20: mol_type = other DNA
cagcccaggcagcaccagcg

SEQ ID NO: 55991 - DNA, 20 bp, synthetic construct
  source 1..20: mol_type = other DNA
tggtcaaatccacctgcagc

SEQ ID NO: 55992 - DNA, 20 bp, synthetic construct
  source 1..20: mol_type = other DNA
gtcgtccctcgggtggagaa

SEQ ID NO: 55993 - DNA, 20 bp, synthetic construct
  source 1..20: mol_type = other DNA
ccatctgcagggttttctac

SEQ ID NO: 55994 - DNA, 20 bp, synthetic construct
  source 1..20: mol_type = other DNA
ggggaagccactgtgcacag

SEQ ID NO: 55995 - DNA, 20 bp, synthetic construct
  source 1..20: mol_type = other DNA
acatgggggtgccggccacc

SEQ ID NO: 55996 - DNA, 20 bp, synthetic construct
  source 1..20: mol_type = other DNA
cctcgtgaccaagtttaaaa

SEQ ID NO: 55997 - DNA, 20 bp, synthetic construct
  source 1..20: mol_type = other DNA
ccaaattccccagaaatatt

SEQ ID NO: 55998 - DNA, 20 bp, synthetic construct
  source 1..20: mol_type = other DNA
catgacaccattagcaactc

SEQ ID NO: 55999 - DNA, 20 bp, synthetic construct
  source 1..20: mol_type = other DNA
tgctggtctagcaggtactc

SEQ ID NO: 56000 - DNA, 20 bp, synthetic construct
  source 1..20: mol_type = other DNA
cagtcagctcccggatttga

SEQ ID NO: 56001 - DNA, 20 bp, synthetic construct
  source 1..20: mol_type = other DNA
cacggccgaccagctggaga

SEQ ID NO: 56002 - DNA, 20 bp, synthetic construct
  source 1..20: mol_type = other DNA
cagaggacttgatgctgatg

SEQ ID NO: 56003 - DNA, 20 bp, synthetic construct
  source 1..20: mol_type = other DNA
ggactgcctgcgctactgga

SEQ ID NO: 56004 - DNA, 20 bp, synthetic construct
  source 1..20: mol_type = other DNA
tgctgtttctgcagccgctt

SEQ ID NO: 56005 - DNA, 20 bp, synthetic construct
  source 1..20: mol_type = other DNA
ggcaggactgggcatagccg

SEQ ID NO: 56006 - DNA, 20 bp, synthetic construct
  source 1..20: mol_type = other DNA
cagggcggcagggggctggt

SEQ ID NO: 56007 - DNA, 20 bp, synthetic construct
  source 1..20: mol_type = other DNA
gcagggggctggtgggctgc

SEQ ID NO: 56008 - DNA, 20 bp, synthetic construct
  source 1..20: mol_type = other DNA
ttttaaggataactaccttg

SEQ ID NO: 56009 - DNA, 20 bp, synthetic construct
  source 1..20: mol_type = other DNA
taactgtgatgtgattgaga

SEQ ID NO: 56010 - DNA, 20 bp, synthetic construct
  source 1..20: mol_type = other DNA
ctcgtactcctcgtctttca

SEQ ID NO: 56011 - DNA, 20 bp, synthetic construct
  source 1..20: mol_type = other DNA
gccgcctgcccgggacgagg

SEQ ID NO: 56012 - DNA, 20 bp, synthetic construct
  source 1..20: mol_type = other DNA
atctctaggtcataggccgt

SEQ ID NO: 56013 - DNA, 20 bp, synthetic construct
  source 1..20: mol_type = other DNA
cagcagcgaggccaacggga

SEQ ID NO: 56014 - DNA, 20 bp, synthetic construct
  source 1..20: mol_type = other DNA
accacgcctttgttacctcg

SEQ ID NO: 56015 - DNA, 20 bp, synthetic construct
  source 1..20: mol_type = other DNA
accagaaacagcgggactcc

SEQ ID NO: 56016 - DNA, 20 bp, synthetic construct
  source 1..20: mol_type = other DNA
gatgattggaaatgggaggc

SEQ ID NO: 56017 - DNA, 20 bp, synthetic construct
  source 1..20: mol_type = other DNA
ctggtggaagtggttggaaa

SEQ ID NO: 56018 - DNA, 20 bp, synthetic construct
  source 1..20: mol_type = other DNA
agggcattcatcatgcagat

SEQ ID NO: 56019 - DNA, 20 bp, synthetic construct
  source 1..20: mol_type = other DNA
tggcgagctgtggtggcagg

SEQ ID NO: 56020 - DNA, 20 bp, synthetic construct
  source 1..20: mol_type = other DNA
ccagccagctgagaagacag

SEQ ID NO: 56021 - DNA, 20 bp, synthetic construct
  source 1..20: mol_type = other DNA
ttagctcctgcccatccagc

SEQ ID NO: 56022 - DNA, 20 bp, synthetic construct
  source 1..20: mol_type = other DNA
ataagtcagaagaatggata

SEQ ID NO: 56023 - DNA, 20 bp, synthetic construct
  source 1..20: mol_type = other DNA
gctggagctggaggtgcccc

SEQ ID NO: 56024 - DNA, 20 bp, synthetic construct
  source 1..20: mol_type = other DNA
cagccccccggactcgctgt

SEQ ID NO: 56025 - DNA, 20 bp, synthetic construct
  source 1..20: mol_type = other DNA
gcaaatgagcacattctcgt

SEQ ID NO: 56026 - DNA, 20 bp, synthetic construct
  source 1..20: mol_type = other DNA
agcaatcagtggagtgaggc

SEQ ID NO: 56027 - DNA, 20 bp, synthetic construct
  source 1..20: mol_type = other DNA
acatcagcacccttgaggtg

SEQ ID NO: 56028 - DNA, 20 bp, synthetic construct
  source 1..20: mol_type = other DNA
gcttggtgagatctacctgc

SEQ ID NO: 56029 - DNA, 20 bp, synthetic construct
  source 1..20: mol_type = other DNA
ctgagaggtttgtgcttgtc

SEQ ID NO: 56030 - DNA, 20 bp, synthetic construct
  source 1..20: mol_type = other DNA
caggtgagccggggaaggag

SEQ ID NO: 56031 - DNA, 20 bp, synthetic construct
  source 1..20: mol_type = other DNA
acagatgggtaaggatggca

SEQ ID NO: 56032 - DNA, 20 bp, synthetic construct
  source 1..20: mol_type = other DNA
gccatacccaggtaagagca

SEQ ID NO: 56033 - DNA, 20 bp, synthetic construct
  source 1..20: mol_type = other DNA
ccatattcggtctgtgcaga

SEQ ID NO: 56034 - DNA, 20 bp, synthetic construct
  source 1..20: mol_type = other DNA
atcacatcgggcagctctgg

SEQ ID NO: 56035 - DNA, 20 bp, synthetic construct
  source 1..20: mol_type = other DNA
tctgcacaggaagaaaaaca

SEQ ID NO: 56036 - DNA, 20 bp, synthetic construct
  source 1..20: mol_type = other DNA
tggagtacttccaggccacc

SEQ ID NO: 56037 - DNA, 20 bp, synthetic construct
  source 1..20: mol_type = other DNA
ccgttccaactcgaagtgcc

SEQ ID NO: 56038 - DNA, 20 bp, synthetic construct
  source 1..20: mol_type = other DNA
tgaactgacatgtcaggctg

SEQ ID NO: 56039 - DNA, 20 bp, synthetic construct
  source 1..20: mol_type = other DNA
agaaggcaaacccctgctga

SEQ ID NO: 56040 - DNA, 20 bp, synthetic construct
  source 1..20: mol_type = other DNA
tctatgacttcagtcactat

SEQ ID NO: 56041 - DNA, 20 bp, synthetic construct
  source 1..20: mol_type = other DNA
gaaaggagcagcacttcagg

SEQ ID NO: 56042 - DNA, 20 bp, synthetic construct
  source 1..20: mol_type = other DNA
taagctcgccgaccccgatg

SEQ ID NO: 56043 - DNA, 20 bp, synthetic construct
  source 1..20: mol_type = other DNA
tggcaatgccagctgtacca

SEQ ID NO: 56044 - DNA, 20 bp, synthetic construct
  source 1..20: mol_type = other DNA
aacaaaacagcaactggcta

SEQ ID NO: 56045 - DNA, 20 bp, synthetic construct
  source 1..20: mol_type = other DNA
tgcagagcccaggggctggc

SEQ ID NO: 56046 - DNA, 20 bp, synthetic construct
  source 1..20: mol_type = other DNA
gcggctggcagtggtggctg

SEQ ID NO: 56047 - DNA, 20 bp, synthetic construct
  source 1..20: mol_type = other DNA
gcagcactttgaagccgagg

SEQ ID NO: 56048 - DNA, 20 bp, synthetic construct
  source 1..20: mol_type = other DNA
cgctggccgagtaggagaac

SEQ ID NO: 56049 - DNA, 20 bp, synthetic construct
  source 1..20: mol_type = other DNA
atttccagggctgggaacgc

SEQ ID NO: 56050 - DNA, 20 bp, synthetic construct
  source 1..20: mol_type = other DNA
ggaaggcctagttcagatcc

SEQ ID NO: 56051 - DNA, 20 bp, synthetic construct
  source 1..20: mol_type = other DNA
cctaggtggcggggggcgtc

SEQ ID NO: 56052 - DNA, 20 bp, synthetic construct
  source 1..20: mol_type = other DNA
tctgctgggcaactggtccc

SEQ ID NO: 56053 - DNA, 20 bp, synthetic construct
  source 1..20: mol_type = other DNA
atggtctccagaggggtaat

SEQ ID NO: 56054 - DNA, 20 bp, synthetic construct
  source 1..20: mol_type = other DNA
tggacttcatcctgtccatg

SEQ ID NO: 56055 - DNA, 20 bp, synthetic construct
  source 1..20: mol_type = other DNA
agtgactcctgcctcaaatg

SEQ ID NO: 56056 - DNA, 20 bp, synthetic construct
  source 1..20: mol_type = other DNA
attcctcaatggctcggtcc

SEQ ID NO: 56057 - DNA, 20 bp, synthetic construct
  source 1..20: mol_type = other DNA
ccgcctcacagatcgactcc

SEQ ID NO: 56058 - DNA, 20 bp, synthetic construct
  source 1..20: mol_type = other DNA
gggggcggtggaggcggcgg

SEQ ID NO: 56059 - DNA, 20 bp, synthetic construct
  source 1..20: mol_type = other DNA
aacacagtctcaccacattg

SEQ ID NO: 56060 - DNA, 20 bp, synthetic construct
  source 1..20: mol_type = other DNA
catcgacgagaccatgaagc

SEQ ID NO: 56061 - DNA, 20 bp, synthetic construct
  source 1..20: mol_type = other DNA
tacccaagctatgattaaca

SEQ ID NO: 56062 - DNA, 20 bp, synthetic construct
  source 1..20: mol_type = other DNA
tctgaagaagttgctctcac

SEQ ID NO: 56063 - DNA, 20 bp, synthetic construct
  source 1..20: mol_type = other DNA
catagagctggaagatgacc

SEQ ID NO: 56064 - DNA, 20 bp, synthetic construct
  source 1..20: mol_type = other DNA
gaagctggagtcactgctgt

SEQ ID NO: 56065 - DNA, 20 bp, synthetic construct
  source 1..20: mol_type = other DNA
ctaccagctgcctctgtgcc

SEQ ID NO: 56066 - DNA, 20 bp, synthetic construct
  source 1..20: mol_type = other DNA
atggccggggggccgggccc

SEQ ID NO: 56067 - DNA, 20 bp, synthetic construct
  source 1..20: mol_type = other DNA
gatcctcagggctgggcagg

SEQ ID NO: 56068 - DNA, 20 bp, synthetic construct
  source 1..20: mol_type = other DNA
caaaaagcaggaggtgagcc

SEQ ID NO: 56069 - DNA, 20 bp, synthetic construct
  source 1..20: mol_type = other DNA
aagaggaagtccagcaagaa

SEQ ID NO: 56070 - DNA, 20 bp, synthetic construct
  source 1..20: mol_type = other DNA
gtctcataggatcccccggc

SEQ ID NO: 56071 - DNA, 20 bp, synthetic construct
  source 1..20: mol_type = other DNA
agtccaggaaggtcatgggt

SEQ ID NO: 56072 - DNA, 20 bp, synthetic construct
  source 1..20: mol_type = other DNA
ggcagtggaggagtgtctgc

SEQ ID NO: 56073 - DNA, 20 bp, synthetic construct
  source 1..20: mol_type = other DNA
cgatgccacccgagtcccag

SEQ ID NO: 56074 - DNA, 20 bp, synthetic construct
  source 1..20: mol_type = other DNA
gaaccagatgcccatgctca

SEQ ID NO: 56075 - DNA, 20 bp, synthetic construct
  source 1..20: mol_type = other DNA
ttcatctgcatgtacttatc

SEQ ID NO: 56076 - DNA, 20 bp, synthetic construct
  source 1..20: mol_type = other DNA
gtgccagggtctacctgaac

SEQ ID NO: 56077 - DNA, 20 bp, synthetic construct
  source 1..20: mol_type = other DNA
atgaggtatggccagagccc

SEQ ID NO: 56078 - DNA, 20 bp, synthetic construct
  source 1..20: mol_type = other DNA
tgaagaatctgagcacagag

SEQ ID NO: 56079 - DNA, 20 bp, synthetic construct
  source 1..20: mol_type = other DNA
acctcaggagcagcagcccc

SEQ ID NO: 56080 - DNA, 20 bp, synthetic construct
  source 1..20: mol_type = other DNA
taggtatatccagagtcttc

SEQ ID NO: 56081 - DNA, 20 bp, synthetic construct
  source 1..20: mol_type = other DNA
atcatggtagttgccttcct

SEQ ID NO: 56082 - DNA, 20 bp, synthetic construct
  source 1..20: mol_type = other DNA
catctggtaggtgccgggcc

SEQ ID NO: 56083 - DNA, 20 bp, synthetic construct
  source 1..20: mol_type = other DNA
tgaatatgatcccaccatag

SEQ ID NO: 56084 - DNA, 20 bp, synthetic construct
  source 1..20: mol_type = other DNA
gtggaatacagagcggaggt

SEQ ID NO: 56085 - DNA, 20 bp, synthetic construct
  source 1..20: mol_type = other DNA
gaaatatgttggttgactgc

SEQ ID NO: 56086 - DNA, 20 bp, synthetic construct
  source 1..20: mol_type = other DNA
cggttacgaccatcttcagt

SEQ ID NO: 56087 - DNA, 20 bp, synthetic construct
  source 1..20: mol_type = other DNA
gccagacccggagccggagc

SEQ ID NO: 56088 - DNA, 20 bp, synthetic construct
  source 1..20: mol_type = other DNA
ttttaaacgaaagtccaact

SEQ ID NO: 56089 - DNA, 20 bp, synthetic construct
  source 1..20: mol_type = other DNA
agatatctgccagatgaaaa

SEQ ID NO: 56090 - DNA, 20 bp, synthetic construct
  source 1..20: mol_type = other DNA
gcaccttcccttcgtgcagc

SEQ ID NO: 56091 - DNA, 20 bp, synthetic construct
  source 1..20: mol_type = other DNA
cagctacaacctgggtgctg

SEQ ID NO: 56092 - DNA, 20 bp, synthetic construct
  source 1..20: mol_type = other DNA
agaatagggtctatagatga

SEQ ID NO: 56093 - DNA, 20 bp, synthetic construct
  source 1..20: mol_type = other DNA
aggacctcctgcttagcctt

SEQ ID NO: 56094 - DNA, 20 bp, synthetic construct
  source 1..20: mol_type = other DNA
tggtgacagagaagcaggcg

SEQ ID NO: 56095 - DNA, 20 bp, synthetic construct
  source 1..20: mol_type = other DNA
aggaggccgtggggcttctc

SEQ ID NO: 56096 - DNA, 20 bp, synthetic construct
  source 1..20: mol_type = other DNA
tcatgactgaggcttcagcc

SEQ ID NO: 56097 - DNA, 20 bp, synthetic construct
  source 1..20: mol_type = other DNA
gctgaaggtgaggggcggtg

SEQ ID NO: 56098 - DNA, 20 bp, synthetic construct
  source 1..20: mol_type = other DNA
accctcggcacgggctcctt

SEQ ID NO: 56099 - DNA, 20 bp, synthetic construct
  source 1..20: mol_type = other DNA
agccgccagactgccattgg

SEQ ID NO: 56100 - DNA, 20 bp, synthetic construct
  source 1..20: mol_type = other DNA
ttgtacagggactgctggct

SEQ ID NO: 56101 - DNA, 20 bp, synthetic construct
  source 1..20: mol_type = other DNA
catgcagatccggcactgga

SEQ ID NO: 56102 - DNA, 20 bp, synthetic construct
  source 1..20: mol_type = other DNA
agccctggagtaagccccag

SEQ ID NO: 56103 - DNA, 20 bp, synthetic construct
  source 1..20: mol_type = other DNA
taagaggaaaaaaggtaggt

SEQ ID NO: 56104 - DNA, 20 bp, synthetic construct
  source 1..20: mol_type = other DNA
cagtgacttatcagatgccc

SEQ ID NO: 56105 - DNA, 20 bp, synthetic construct
  source 1..20: mol_type = other DNA
tggcatccattatctcttcg

SEQ ID NO: 56106 - DNA, 20 bp, synthetic construct
  source 1..20: mol_type = other DNA
tccagccccttcttctacca

SEQ ID NO: 56107 - DNA, 20 bp, synthetic construct
  source 1..20: mol_type = other DNA
cagcagccgccgcatcatgc

SEQ ID NO: 56108 - DNA, 20 bp, synthetic construct
  source 1..20: mol_type = other DNA
cagcgtttcctcagggcact

SEQ ID NO: 56109 - DNA, 20 bp, synthetic construct
  source 1..20: mol_type = other DNA
aaccttgaaaacaacatggt

SEQ ID NO: 56110 - DNA, 20 bp, synthetic construct
  source 1..20: mol_type = other DNA
acgcaaagctaggccaggca

SEQ ID NO: 56111 - DNA, 20 bp, synthetic construct
  source 1..20: mol_type = other DNA
gtccaagggtgacagatggg

SEQ ID NO: 56112 - DNA, 20 bp, synthetic construct
  source 1..20: mol_type = other DNA
cagactgatcaagaattgta

SEQ ID NO: 56113 - DNA, 20 bp, synthetic construct
  source 1..20: mol_type = other DNA
gcccgagttggaggaggagc

SEQ ID NO: 56114 - DNA, 20 bp, synthetic construct
  source 1..20: mol_type = other DNA
gacgctcaaggccgagaacg

SEQ ID NO: 56115 - DNA, 20 bp, synthetic construct
  source 1..20: mol_type = other DNA
tcactgtcggaggagttgtc

SEQ ID NO: 56116 - DNA, 20 bp, synthetic construct
  source 1..20: mol_type = other DNA
tggggggaataggcgagccc

SEQ ID NO: 56117 - DNA, 20 bp, synthetic construct
  source 1..20: mol_type = other DNA
atcagcctcctgccaccact

SEQ ID NO: 56118 - DNA, 20 bp, synthetic construct
  source 1..20: mol_type = other DNA
aggagtgtttgacatagacc

SEQ ID NO: 56119 - DNA, 20 bp, synthetic construct
  source 1..20: mol_type = other DNA
ttgatctgctcagccaactc

SEQ ID NO: 56120 - DNA, 20 bp, synthetic construct
  source 1..20: mol_type = other DNA
ccgtatagctgttggggagg

SEQ ID NO: 56121 - DNA, 20 bp, synthetic construct
  source 1..20: mol_type = other DNA
agctctgtcacctttggggg

SEQ ID NO: 56122 - DNA, 20 bp, synthetic construct
  source 1..20: mol_type = other DNA
gcatggaccaggtaggcctg

SEQ ID NO: 56123 - DNA, 20 bp, synthetic construct
  source 1..20: mol_type = other DNA
gggagttttggaaaggtaag

SEQ ID NO: 56124 - DNA, 20 bp, synthetic construct
  source 1..20: mol_type = other DNA
agctaaagctatgctggagg

SEQ ID NO: 56125 - DNA, 20 bp, synthetic construct
  source 1..20: mol_type = other DNA
gtgatctggaccaagatgga

SEQ ID NO: 56126 - DNA, 20 bp, synthetic construct
  source 1..20: mol_type = other DNA
ggtggcagcggcggtggcag

SEQ ID NO: 56127 - DNA, 20 bp, synthetic construct
  source 1..20: mol_type = other DNA
ttacgttagaggcagaggtt

SEQ ID NO: 56128 - DNA, 20 bp, synthetic construct
  source 1..20: mol_type = other DNA
caaagtggaagggcagaggc

SEQ ID NO: 56129 - DNA, 20 bp, synthetic construct
  source 1..20: mol_type = other DNA
gaactcctcatcaaaatacc

SEQ ID NO: 56130 - DNA, 20 bp, synthetic construct
  source 1..20: mol_type = other DNA
gccgcagtggtcacagaagg

SEQ ID NO: 56131 - DNA, 20 bp, synthetic construct
  source 1..20: mol_type = other DNA
cacaaagactgggcagccag

SEQ ID NO: 56132 - DNA, 20 bp, synthetic construct
  source 1..20: mol_type = other DNA
ccccatactccccagcccac

SEQ ID NO: 56133 - DNA, 20 bp, synthetic construct
  source 1..20: mol_type = other DNA
caaagctaaagctatgctgg

SEQ ID NO: 56134 - DNA, 20 bp, synthetic construct
  source 1..20: mol_type = other DNA
gcagaggggcccctgtcagc

SEQ ID NO: 56135 - DNA, 20 bp, synthetic construct
  source 1..20: mol_type = other DNA
tccagagtgagggttctgag

SEQ ID NO: 56136 - DNA, 20 bp, synthetic construct
  source 1..20: mol_type = other DNA
tcggggtgggcggggtctgc

SEQ ID NO: 56137 - DNA, 20 bp, synthetic construct
  source 1..20: mol_type = other DNA
ccacagatgtcgcaggcgaa

SEQ ID NO: 56138 - DNA, 20 bp, synthetic construct
  source 1..20: mol_type = other DNA
atggtgaaatgtccaaatga

SEQ ID NO: 56139 - DNA, 20 bp, synthetic construct
  source 1..20: mol_type = other DNA
caaactctacatcatatccc

SEQ ID NO: 56140 - DNA, 20 bp, synthetic construct
  source 1..20: mol_type = other DNA
tgcgccgacactcaactgac

SEQ ID NO: 56141 - DNA, 20 bp, synthetic construct
  source 1..20: mol_type = other DNA
tgcagaaagaaacgtttcct

SEQ ID NO: 56142 - DNA, 20 bp, synthetic construct
  source 1..20: mol_type = other DNA
cacctggccgctgcccaggc

SEQ ID NO: 56143 - DNA, 20 bp, synthetic construct
  source 1..20: mol_type = other DNA
gatatctgagagagttcggc

SEQ ID NO: 56144 - DNA, 20 bp, synthetic construct
  source 1..20: mol_type = other DNA
atgaaatacacctccttctt

SEQ ID NO: 56145 - DNA, 20 bp, synthetic construct
  source 1..20: mol_type = other DNA
caagatgctgaatggtactg

SEQ ID NO: 56146 - DNA, 20 bp, synthetic construct
  source 1..20: mol_type = other DNA
ctcgctgaagtcttcggtga

SEQ ID NO: 56147 - DNA, 20 bp, synthetic construct
  source 1..20: mol_type = other DNA
ctgggggtcgtggaaagaca

SEQ ID NO: 56148 - DNA, 20 bp, synthetic construct
  source 1..20: mol_type = other DNA
ggcattcatacttgctttcc

SEQ ID NO: 56149 - DNA, 20 bp, synthetic construct
  source 1..20: mol_type = other DNA
ctggatggaccttccacccc

SEQ ID NO: 56150 - DNA, 20 bp, synthetic construct
  source 1..20: mol_type = other DNA
tgtcatagccgagaacaatg

SEQ ID NO: 56151 - DNA, 20 bp, synthetic construct
  source 1..20: mol_type = other DNA
tgtagcccttctccacccga

SEQ ID NO: 56152 - DNA, 20 bp, synthetic construct
  source 1..20: mol_type = other DNA
catggctaaggagattggta

SEQ ID NO: 56153 - DNA, 20 bp, synthetic construct
  source 1..20: mol_type = other DNA
cagccgcagggcctggtagc

SEQ ID NO: 56154 - DNA, 20 bp, synthetic construct
  source 1..20: mol_type = other DNA
ctggatgtggctcatgccgg

SEQ ID NO: 56155 - DNA, 20 bp, synthetic construct
  source 1..20: mol_type = other DNA
agaaggcggccgttccacct

SEQ ID NO: 56156 - DNA, 20 bp, synthetic construct
  source 1..20: mol_type = other DNA
tggacgatcatgcaccttgc

SEQ ID NO: 56157 - DNA, 20 bp, synthetic construct
  source 1..20: mol_type = other DNA
cgagtctcaatatctgtctt

SEQ ID NO: 56158 - DNA, 20 bp, synthetic construct
  source 1..20: mol_type = other DNA
ccctacttccctcattaaga

SEQ ID NO: 56159 - DNA, 20 bp, synthetic construct
  source 1..20: mol_type = other DNA
cacatggaagttcttcaaaa

SEQ ID NO: 56160 - DNA, 20 bp, synthetic construct
  source 1..20: mol_type = other DNA
gcgaccgagggagttcccaa

SEQ ID NO: 56161 - DNA, 20 bp, synthetic construct
  source 1..20: mol_type = other DNA
tgaaatatggtgagggatgg

SEQ ID NO: 56162 - DNA, 20 bp, synthetic construct
  source 1..20: mol_type = other DNA
tatctcagcggcataaaacc

SEQ ID NO: 56163 - DNA, 20 bp, synthetic construct
  source 1..20: mol_type = other DNA
ctctgacattagcttaaagt

SEQ ID NO: 56164 - DNA, 20 bp, synthetic construct
  source 1..20: mol_type = other DNA
ctgcttctaggcaccagaga

SEQ ID NO: 56165 - DNA, 20 bp, synthetic construct
  source 1..20: mol_type = other DNA
gcggtgggaggaggtgtgcc

SEQ ID NO: 56166 - DNA, 20 bp, synthetic construct
  source 1..20: mol_type = other DNA
gatcacaaactctgtatcac

SEQ ID NO: 56167 - DNA, 20 bp, synthetic construct
  source 1..20: mol_type = other DNA
ccaggctgtgggcatgcagg

SEQ ID NO: 56168 - DNA, 20 bp, synthetic construct
  source 1..20: mol_type = other DNA
aggaggtgagggggtactga

SEQ ID NO: 56169 - DNA, 20 bp, synthetic construct
  source 1..20: mol_type = other DNA
ttgcagtcaggacgcacaca

SEQ ID NO: 56170 - DNA, 20 bp, synthetic construct
  source 1..20: mol_type = other DNA
aggtgcagcagatgaaacag

SEQ ID NO: 56171 - DNA, 20 bp, synthetic construct
  source 1..20: mol_type = other DNA
gaagtagccgccctggggga

SEQ ID NO: 56172 - DNA, 20 bp, synthetic construct
  source 1..20: mol_type = other DNA
ggcgcctcccgaggacgcag

SEQ ID NO: 56173 - DNA, 20 bp, synthetic construct
  source 1..20: mol_type = other DNA
atgcttgttctgtatccaga

SEQ ID NO: 56174 - DNA, 20 bp, synthetic construct
  source 1..20: mol_type = other DNA
gaggagtccacttggcagtg

SEQ ID NO: 56175 - DNA, 20 bp, synthetic construct
  source 1..20: mol_type = other DNA
tccacagatgtcgcaggcga

SEQ ID NO: 56176 - DNA, 20 bp, synthetic construct
  source 1..20: mol_type = other DNA
ccggggacttctgctacgtt

SEQ ID NO: 56177 - DNA, 20 bp, synthetic construct
  source 1..20: mol_type = other DNA
cagcactagcagtggcacgg

SEQ ID NO: 56178 - DNA, 20 bp, synthetic construct
  source 1..20: mol_type = other DNA
ctatgagtgcagtcgttaca

SEQ ID NO: 56179 - DNA, 20 bp, synthetic construct
  source 1..20: mol_type = other DNA
ctctttagtattgattgtgc

SEQ ID NO: 56180 - DNA, 20 bp, synthetic construct
  source 1..20: mol_type = other DNA
gtcgagcctgtcagctgtcc

SEQ ID NO: 56181 - DNA, 20 bp, synthetic construct
  source 1..20: mol_type = other DNA
aattgaacaacccaggcaga

SEQ ID NO: 56182 - DNA, 20 bp, synthetic construct
  source 1..20: mol_type = other DNA
ctgtatgtggagcggcttct

SEQ ID NO: 56183 - DNA, 20 bp, synthetic construct
  source 1..20: mol_type = other DNA
cggcgaagagtagactcacc

SEQ ID NO: 56184 - DNA, 20 bp, synthetic construct
  source 1..20: mol_type = other DNA
cccttggaagagctttcgac

SEQ ID NO: 56185 - DNA, 20 bp, synthetic construct
  source 1..20: mol_type = other DNA
cactgccaggatgttctcga

SEQ ID NO: 56186 - DNA, 20 bp, synthetic construct
  source 1..20: mol_type = other DNA
ggtctatttgcctcgcgtgc

SEQ ID NO: 56187 - DNA, 20 bp, synthetic construct
  source 1..20: mol_type = other DNA
tcccgagtagctgggattac

SEQ ID NO: 56188 - DNA, 20 bp, synthetic construct
  source 1..20: mol_type = other DNA
gtcagtgctcgggcttcccc

SEQ ID NO: 56189 - DNA, 20 bp, synthetic construct
  source 1..20: mol_type = other DNA
actaggcaaagacctacttc

SEQ ID NO: 56190 - DNA, 20 bp, synthetic construct
  source 1..20: mol_type = other DNA
tacacagagttatatgtcca

SEQ ID NO: 56191 - DNA, 20 bp, synthetic construct
  source 1..20: mol_type = other DNA
cgggagccagtcagtggagc

SEQ ID NO: 56192 - DNA, 20 bp, synthetic construct
  source 1..20: mol_type = other DNA
catctgcagctcctggagga

SEQ ID NO: 56193 - DNA, 20 bp, synthetic construct
  source 1..20: mol_type = other DNA
cacagagggcccttgggcgt

SEQ ID NO: 56194 - DNA, 20 bp, synthetic construct
  source 1..20: mol_type = other DNA
cttgctcactgctgctcctc

SEQ ID NO: 56195 - DNA, 20 bp, synthetic construct
  source 1..20: mol_type = other DNA
cttcatgagcggggaggggg

SEQ ID NO: 56196 - DNA, 20 bp, synthetic construct
  source 1..20: mol_type = other DNA
ccaggaccctaagctccaga

SEQ ID NO: 56197 - DNA, 20 bp, synthetic construct
  source 1..20: mol_type = other DNA
ccagcagatccaggcactca

SEQ ID NO: 56198 - DNA, 20 bp, synthetic construct
  source 1..20: mol_type = other DNA
tcaccagcatggagtttgtc

SEQ ID NO: 56199 - DNA, 20 bp, synthetic construct
  source 1..20: mol_type = other DNA
gatttctatgacctgtatgg

SEQ ID NO: 56200 - DNA, 20 bp, synthetic construct
  source 1..20: mol_type = other DNA
ttctggatggtacatgacag

SEQ ID NO: 56201 - DNA, 20 bp, synthetic construct
  source 1..20: mol_type = other DNA
gtatgaagggagcttccacc

SEQ ID NO: 56202 - DNA, 20 bp, synthetic construct
  source 1..20: mol_type = other DNA
tcttgacaaagcagcctgga

SEQ ID NO: 56203 - DNA, 20 bp, synthetic construct
  source 1..20: mol_type = other DNA
ccagacggagccgtaggcgc

SEQ ID NO: 56204 - DNA, 20 bp, synthetic construct
  source 1..20: mol_type = other DNA
aagacccatttacctgttgg

SEQ ID NO: 56205 - DNA, 20 bp, synthetic construct
  source 1..20: mol_type = other DNA
acccacactcgaattcactc

SEQ ID NO: 56206 - DNA, 20 bp, synthetic construct
  source 1..20: mol_type = other DNA
tctggaaggtgcagatgagg

SEQ ID NO: 56207 - DNA, 20 bp, synthetic construct
  source 1..20: mol_type = other DNA
caaatgggcaagccttgcgg

SEQ ID NO: 56208 - DNA, 20 bp, synthetic construct
  source 1..20: mol_type = other DNA
atcataaccaaaggaggtgg

SEQ ID NO: 56209 - DNA, 20 bp, synthetic construct
  source 1..20: mol_type = other DNA
agccagtgttgagtttttgc

SEQ ID NO: 56210 - DNA, 20 bp, synthetic construct
  source 1..20: mol_type = other DNA
aggggttggtccgttgggat

SEQ ID NO: 56211 - DNA, 20 bp, synthetic construct
  source 1..20: mol_type = other DNA
caaaatgaagcctttgtggc

SEQ ID NO: 56212 - DNA, 20 bp, synthetic construct
  source 1..20: mol_type = other DNA
gcagcaaatctccaaaatga

SEQ ID NO: 56213 - DNA, 20 bp, synthetic construct
  source 1..20: mol_type = other DNA
ggtggcggtgctgaggcacc

SEQ ID NO: 56214 - DNA, 20 bp, synthetic construct
  source 1..20: mol_type = other DNA
actcgtaagtggcggaggcc

SEQ ID NO: 56215 - DNA, 20 bp, synthetic construct
  source 1..20: mol_type = other DNA
tgagggcttgaattctgcct

SEQ ID NO: 56216 - DNA, 20 bp, synthetic construct
  source 1..20: mol_type = other DNA
tggggaaacccttagccacc

SEQ ID NO: 56217 - DNA, 20 bp, synthetic construct
  source 1..20: mol_type = other DNA
tgtgctgccccttggggagc

SEQ ID NO: 56218 - DNA, 20 bp, synthetic construct
  source 1..20: mol_type = other DNA
gaatcctgttgactatatcc

SEQ ID NO: 56219 - DNA, 20 bp, synthetic construct
  source 1..20: mol_type = other DNA
ccgggaggtgctggagcagg

SEQ ID NO: 56220 - DNA, 20 bp, synthetic construct
  source 1..20: mol_type = other DNA
aaagatcatcagaagaaata

SEQ ID NO: 56221 - DNA, 20 bp, synthetic construct
  source 1..20: mol_type = other DNA
gcttcaaatagaaaagtcac

SEQ ID NO: 56222 - DNA, 20 bp, synthetic construct
  source 1..20: mol_type = other DNA
gctgagcctgagtgagcagg

SEQ ID NO: 56223 - DNA, 20 bp, synthetic construct
  source 1..20: mol_type = other DNA
ggggagctggtggtgaagtt

SEQ ID NO: 56224 - DNA, 20 bp, synthetic construct
  source 1..20: mol_type = other DNA
tcttttgtttttgatgcagg

SEQ ID NO: 56225 - DNA, 20 bp, synthetic construct
  source 1..20: mol_type = other DNA
ccggcgccctcgccctcgcc

SEQ ID NO: 56226 - DNA, 20 bp, synthetic construct
  source 1..20: mol_type = other DNA
cttttggtgactggagcctt

SEQ ID NO: 56227 - DNA, 20 bp, synthetic construct
  source 1..20: mol_type = other DNA
cgtggttgagacctggaaga

SEQ ID NO: 56228 - DNA, 20 bp, synthetic construct
  source 1..20: mol_type = other DNA
ggcaagcgtaagggcgttcg

SEQ ID NO: 56229 - DNA, 20 bp, synthetic construct
  source 1..20: mol_type = other DNA
caccatctgggccacctgga

SEQ ID NO: 56230 - DNA, 20 bp, synthetic construct
  source 1..20: mol_type = other DNA
acaccgctggataaatccag

SEQ ID NO: 56231 - DNA, 20 bp, synthetic construct
  source 1..20: mol_type = other DNA
caccagtgtgaccgatcccc

SEQ ID NO: 56232 - DNA, 20 bp, synthetic construct
  source 1..20: mol_type = other DNA
cacccagaggaagtacttcc

SEQ ID NO: 56233 - DNA, 20 bp, synthetic construct
  source 1..20: mol_type = other DNA
gctaaagctatgctggaggc

SEQ ID NO: 56234 - DNA, 20 bp, synthetic construct
  source 1..20: mol_type = other DNA
cccctggaaaccacctgggt

SEQ ID NO: 56235 - DNA, 20 bp, synthetic construct
  source 1..20: mol_type = other DNA
agcagcagcagcagcggggg

SEQ ID NO: 56236 - DNA, 20 bp, synthetic construct
  source 1..20: mol_type = other DNA
agcagcttcaagaagcccac

SEQ ID NO: 56237 - DNA, 20 bp, synthetic construct
  source 1..20: mol_type = other DNA
aggcggaggagctgctttcc

SEQ ID NO: 56238 - DNA, 20 bp, synthetic construct
  source 1..20: mol_type = other DNA
tgtggggctgcaggggagct

SEQ ID NO: 56239 - DNA, 20 bp, synthetic construct
  source 1..20: mol_type = other DNA
ctctgtggactatggggagc

SEQ ID NO: 56240 - DNA, 20 bp, synthetic construct
  source 1..20: mol_type = other DNA
tgtccatctgaaagccagag

SEQ ID NO: 56241 - DNA, 20 bp, synthetic construct
  source 1..20: mol_type = other DNA
aaccccaaaggtaaggggta

SEQ ID NO: 56242 - DNA, 20 bp, synthetic construct
  source 1..20: mol_type = other DNA
aaccgtgccccgtaggtgct

SEQ ID NO: 56243 - DNA, 20 bp, synthetic construct
  source 1..20: mol_type = other DNA
ttttggggacgaggcccacc

SEQ ID NO: 56244 - DNA, 20 bp, synthetic construct
  source 1..20: mol_type = other DNA
tccggctgaagcagaagagg

SEQ ID NO: 56245 - DNA, 20 bp, synthetic construct
  source 1..20: mol_type = other DNA
cactcccatcacagtagccc

SEQ ID NO: 56246 - DNA, 20 bp, synthetic construct
  source 1..20: mol_type = other DNA
catgggcatgaagtacttgg

SEQ ID NO: 56247 - DNA, 20 bp, synthetic construct
  source 1..20: mol_type = other DNA
cagcccctatgttgaccaca

SEQ ID NO: 56248 - DNA, 20 bp, synthetic construct
  source 1..20: mol_type = other DNA
acggggacgggatggggaag

SEQ ID NO: 56249 - DNA, 20 bp, synthetic construct
  source 1..20: mol_type = other DNA
aaatacaaacaggacgtgga

SEQ ID NO: 56250 - DNA, 20 bp, synthetic construct
  source 1..20: mol_type = other DNA
ccaggggataagacttccag

SEQ ID NO: 56251 - DNA, 20 bp, synthetic construct
  source 1..20: mol_type = other DNA
ggggcccacggcctgtgtcc

SEQ ID NO: 56252 - DNA, 20 bp, synthetic construct
  source 1..20: mol_type = other DNA
tcactttctggctctctcac

SEQ ID NO: 56253 - DNA, 20 bp, synthetic construct
  source 1..20: mol_type = other DNA
acgttgaggggcatcgtcgc

SEQ ID NO: 56254 - DNA, 20 bp, synthetic construct
  source 1..20: mol_type = other DNA
tggacttagatcattcctgt

SEQ ID NO: 56255 - DNA, 20 bp, synthetic construct
  source 1..20: mol_type = other DNA
agttctggtaaaagagaagg

SEQ ID NO: 56256 - DNA, 20 bp, synthetic construct
  source 1..20: mol_type = other DNA
atgagctgcggagccgcatc

SEQ ID NO: 56257 - DNA, 20 bp, synthetic construct
  source 1..20: mol_type = other DNA
acgacctggccaagctgctg

SEQ ID NO: 56258 - DNA, 20 bp, synthetic construct
  source 1..20: mol_type = other DNA
ccaagacaccttcttggcct

SEQ ID NO: 56259 - DNA, 20 bp, synthetic construct
  source 1..20: mol_type = other DNA
catagccctggattctacac

SEQ ID NO: 56260 - DNA, 20 bp, synthetic construct
  source 1..20: mol_type = other DNA
ccatgtcttctcatcatgat

SEQ ID NO: 56261 - DNA, 20 bp, synthetic construct
  source 1..20: mol_type = other DNA
ccccagactcagtgatggcg

SEQ ID NO: 56262 - DNA, 20 bp, synthetic construct
  source 1..20: mol_type = other DNA
tggtaatggttcgttttacc

SEQ ID NO: 56263 - DNA, 20 bp, synthetic construct
  source 1..20: mol_type = other DNA
tcagtagaatgcatttcctg

SEQ ID NO: 56264 - DNA, 20 bp, synthetic construct
  source 1..20: mol_type = other DNA
tgcaggctttgcagaaccta

SEQ ID NO: 56265 - DNA, 20 bp, synthetic construct
  source 1..20: mol_type = other DNA
aagacaagaccatcaaatcc

SEQ ID NO: 56266 - DNA, 20 bp, synthetic construct
  source 1..20: mol_type = other DNA
ctgggaggacctgcgcaagc

SEQ ID NO: 56267 - DNA, 20 bp, synthetic construct
  source 1..20: mol_type = other DNA
gccaggtgcacgagcgcggc

SEQ ID NO: 56268 - DNA, 20 bp, synthetic construct
  source 1..20: mol_type = other DNA
tcctcgacaaacagaaggtg

SEQ ID NO: 56269 - DNA, 20 bp, synthetic construct
  source 1..20: mol_type = other DNA
ggacaccgagagcaacaacg

SEQ ID NO: 56270 - DNA, 20 bp, synthetic construct
  source 1..20: mol_type = other DNA
gtccgggagagcagtaaaca

SEQ ID NO: 56271 - DNA, 20 bp, synthetic construct
  source 1..20: mol_type = other DNA
tcgacgaacactacgagtac

SEQ ID NO: 56272 - DNA, 20 bp, synthetic construct
  source 1..20: mol_type = other DNA
gggtctacctgaacggggac

SEQ ID NO: 56273 - DNA, 20 bp, synthetic construct
  source 1..20: mol_type = other DNA
tccatgtcttctcatcatga

SEQ ID NO: 56274 - DNA, 20 bp, synthetic construct
  source 1..20: mol_type = other DNA
gtagaagcggctggcagtgg

SEQ ID NO: 56275 - DNA, 20 bp, synthetic construct
  source 1..20: mol_type = other DNA
gttcaggaagctccgaggaa

SEQ ID NO: 56276 - DNA, 20 bp, synthetic construct
  source 1..20: mol_type = other DNA
tggggagtccagctcctggt

SEQ ID NO: 56277 - DNA, 20 bp, synthetic construct
  source 1..20: mol_type = other DNA
gccatccacctgcaccggga

SEQ ID NO: 56278 - DNA, 20 bp, synthetic construct
  source 1..20: mol_type = other DNA
tatgctgcagaaataagaat

SEQ ID NO: 56279 - DNA, 20 bp, synthetic construct
  source 1..20: mol_type = other DNA
ccgcgtctttccctgcccct

SEQ ID NO: 56280 - DNA, 20 bp, synthetic construct
  source 1..20: mol_type = other DNA
ctccagaagggaaaagtagc

SEQ ID NO: 56281 - DNA, 20 bp, synthetic construct
  source 1..20: mol_type = other DNA
ggctaggtgcagtggtctgg

SEQ ID NO: 56282 - DNA, 20 bp, synthetic construct
  source 1..20: mol_type = other DNA
tagagcactgcagtgagggc

SEQ ID NO: 56283 - DNA, 20 bp, synthetic construct
  source 1..20: mol_type = other DNA
cctccgctggggcttactcc

SEQ ID NO: 56284 - DNA, 20 bp, synthetic construct
  source 1..20: mol_type = other DNA
atctgcgtgtggtatttagg

SEQ ID NO: 56285 - DNA, 20 bp, synthetic construct
  source 1..20: mol_type = other DNA
ctagaaagaggttatctgta

SEQ ID NO: 56286 - DNA, 20 bp, synthetic construct
  source 1..20: mol_type = other DNA
gtgcatcaccatccccaggt

SEQ ID NO: 56287 - DNA, 20 bp, synthetic construct
  source 1..20: mol_type = other DNA
gccctgatagtttaggtgag

SEQ ID NO: 56288 - DNA, 20 bp, synthetic construct
  source 1..20: mol_type = other DNA
gaaagcaagcagctctggtt

SEQ ID NO: 56289 - DNA, 20 bp, synthetic construct
  source 1..20: mol_type = other DNA
catccacattgtcgtcacaa

SEQ ID NO: 56290 - DNA, 20 bp, synthetic construct
  source 1..20: mol_type = other DNA
cacatgaccagggagagtat

SEQ ID NO: 56291 - DNA, 20 bp, synthetic construct
  source 1..20: mol_type = other DNA
gggcacaccttgcattggta

SEQ ID NO: 56292 - DNA, 20 bp, synthetic construct
  source 1..20: mol_type = other DNA
acatgcaggaacagaacggg

SEQ ID NO: 56293 - DNA, 20 bp, synthetic construct
  source 1..20: mol_type = other DNA
aacctcatgctggacaagga

SEQ ID NO: 56294 - DNA, 20 bp, synthetic construct
  source 1..20: mol_type = other DNA
gctgaaagaaacaatacagg

SEQ ID NO: 56295 - DNA, 20 bp, synthetic construct
  source 1..20: mol_type = other DNA
ggccgcgtagaaacgggcat

SEQ ID NO: 56296 - DNA, 20 bp, synthetic construct
  source 1..20: mol_type = other DNA
cctgcactcggagaagaacg

SEQ ID NO: 56297 - DNA, 20 bp, synthetic construct
  source 1..20: mol_type = other DNA
tgcaaacgccatgcggccat

SEQ ID NO: 56298 - DNA, 20 bp, synthetic construct
  source 1..20: mol_type = other DNA
ttgtatatctgaaaagaaag

SEQ ID NO: 56299 - DNA, 20 bp, synthetic construct
  source 1..20: mol_type = other DNA
gagatgtcaggaaaagactc

SEQ ID NO: 56300 - DNA, 20 bp, synthetic construct
  source 1..20: mol_type = other DNA
cgactacaagcggcggaagc

SEQ ID NO: 56301 - DNA, 20 bp, synthetic construct
  source 1..20: mol_type = other DNA
tcaaaagtgacttcaatctg

SEQ ID NO: 56302 - DNA, 20 bp, synthetic construct
  source 1..20: mol_type = other DNA
tgttatccatgtcacactcc

SEQ ID NO: 56303 - DNA, 20 bp, synthetic construct
  source 1..20: mol_type = other DNA
gcaaacacactgggtgagca

SEQ ID NO: 56304 - DNA, 20 bp, synthetic construct
  source 1..20: mol_type = other DNA
ctccacgggaatggcagtgc

SEQ ID NO: 56305 - DNA, 20 bp, synthetic construct
  source 1..20: mol_type = other DNA
gccaggggacagcagggggc

SEQ ID NO: 56306 - DNA, 20 bp, synthetic construct
  source 1..20: mol_type = other DNA
tgggagagaaggtccccggg

SEQ ID NO: 56307 - DNA, 20 bp, synthetic construct
  source 1..20: mol_type = other DNA
ggcccccgtggggtcgggct

SEQ ID NO: 56308 - DNA, 20 bp, synthetic construct
  source 1..20: mol_type = other DNA
gtggaggtcctcttcatcct

SEQ ID NO: 56309 - DNA, 20 bp, synthetic construct
  source 1..20: mol_type = other DNA
ccaggtagtccaccatggga

SEQ ID NO: 56310 - DNA, 20 bp, synthetic construct
  source 1..20: mol_type = other DNA
actaacagtctactgaaagg

SEQ ID NO: 56311 - DNA, 20 bp, synthetic construct
  source 1..20: mol_type = other DNA
cctccaaaaatatttcctgt

SEQ ID NO: 56312 - DNA, 20 bp, synthetic construct
  source 1..20: mol_type = other DNA
acagcagagagaaaccaagg

SEQ ID NO: 56313 - DNA, 20 bp, synthetic construct
  source 1..20: mol_type = other DNA
tcagtttgtcaagaagatcc

SEQ ID NO: 56314 - DNA, 20 bp, synthetic construct
  source 1..20: mol_type = other DNA
ggacaaggtgaagacgctca

SEQ ID NO: 56315 - DNA, 20 bp, synthetic construct
  source 1..20: mol_type = other DNA
tgcgtagttgtgctgatgtg

SEQ ID NO: 56316 - DNA, 20 bp, synthetic construct
  source 1..20: mol_type = other DNA
tccccatcccgtccccgttc

SEQ ID NO: 56317 - DNA, 20 bp, synthetic construct
  source 1..20: mol_type = other DNA
aagcaagcaagaagaagaag

SEQ ID NO: 56318 - DNA, 20 bp, synthetic construct
  source 1..20: mol_type = other DNA
agccctggagatgcctgacc

SEQ ID NO: 56319 - DNA, 20 bp, synthetic construct
  source 1..20: mol_type = other DNA
aatatgacagccacctccct

SEQ ID NO: 56320 - DNA, 20 bp, synthetic construct
  source 1..20: mol_type = other DNA
tagaatctgcaaaagaaaac

SEQ ID NO: 56321 - DNA, 20 bp, synthetic construct
  source 1..20: mol_type = other DNA
cctcatccagcaacgccagg

SEQ ID NO: 56322 - DNA, 20 bp, synthetic construct
  source 1..20: mol_type = other DNA
cgagcgctacaaggagctgg

SEQ ID NO: 56323 - DNA, 20 bp, synthetic construct
  source 1..20: mol_type = other DNA
ggtgacagagaagcaggcgc

SEQ ID NO: 56324 - DNA, 20 bp, synthetic construct
  source 1..20: mol_type = other DNA
atctcccaaatgacgtcgag

SEQ ID NO: 56325 - DNA, 20 bp, synthetic construct
  source 1..20: mol_type = other DNA
gaggtgaaaagaccggcagg

SEQ ID NO: 56326 - DNA, 20 bp, synthetic construct
  source 1..20: mol_type = other DNA
attgaagaccttggagaagc

SEQ ID NO: 56327 - DNA, 20 bp, synthetic construct
  source 1..20: mol_type = other DNA
agcccagctctccatcctcc

SEQ ID NO: 56328 - DNA, 20 bp, synthetic construct
  source 1..20: mol_type = other DNA
cccactgcttcatggggtcg

SEQ ID NO: 56329 - DNA, 20 bp, synthetic construct
  source 1..20: mol_type = other DNA
ctcttacactaaggtaagcc

SEQ ID NO: 56330 - DNA, 20 bp, synthetic construct
  source 1..20: mol_type = other DNA
gaggatcctcaggcaccccg

SEQ ID NO: 56331 - DNA, 20 bp, synthetic construct
  source 1..20: mol_type = other DNA
cccccaggagtgggccatgg

SEQ ID NO: 56332 - DNA, 20 bp, synthetic construct
  source 1..20: mol_type = other DNA
ccaaacctcccattttcatc

SEQ ID NO: 56333 - DNA, 20 bp, synthetic construct
  source 1..20: mol_type = other DNA
tcacgtcggagactgacacc

SEQ ID NO: 56334 - DNA, 20 bp, synthetic construct
  source 1..20: mol_type = other DNA
gccgtggactggtgggccct

SEQ ID NO: 56335 - DNA, 20 bp, synthetic construct
  source 1..20: mol_type = other DNA
gtcctccagctcctatatga

SEQ ID NO: 56336 - DNA, 20 bp, synthetic construct
  source 1..20: mol_type = other DNA
caagtgccggaaccgacgcc

SEQ ID NO: 56337 - DNA, 20 bp, synthetic construct
  source 1..20: mol_type = other DNA
gtacatcaagacgggaaggc

SEQ ID NO: 56338 - DNA, 20 bp, synthetic construct
  source 1..20: mol_type = other DNA
atctgctggatgctgtgggc

SEQ ID NO: 56339 - DNA, 20 bp, synthetic construct
  source 1..20: mol_type = other DNA
gggcactctaatcgtccgcc

SEQ ID NO: 56340 - DNA, 20 bp, synthetic construct
  source 1..20: mol_type = other DNA
actcgacagccccgcgttct

SEQ ID NO: 56341 - DNA, 20 bp, synthetic construct
  source 1..20: mol_type = other DNA
gtgcaaagtgttcaggtggc

SEQ ID NO: 56342 - DNA, 20 bp, synthetic construct
  source 1..20: mol_type = other DNA
ggagtctctcaatgtgggca

SEQ ID NO: 56343 - DNA, 20 bp, synthetic construct
  source 1..20: mol_type = other DNA
tctttgatgtgcaccctctc

SEQ ID NO: 56344 - DNA, 20 bp, synthetic construct
  source 1..20: mol_type = other DNA
aatctccaaaatgatggagc

SEQ ID NO: 56345 - DNA, 20 bp, synthetic construct
  source 1..20: mol_type = other DNA
gcagagccccccaaggtaca

SEQ ID NO: 56346 - DNA, 20 bp, synthetic construct
  source 1..20: mol_type = other DNA
ctgattgatggcttcaggga

SEQ ID NO: 56347 - DNA, 20 bp, synthetic construct
  source 1..20: mol_type = other DNA
gcacctacggtgaggcgccc

SEQ ID NO: 56348 - DNA, 20 bp, synthetic construct
  source 1..20: mol_type = other DNA
ttgttgcagcgccagtgcga

SEQ ID NO: 56349 - DNA, 20 bp, synthetic construct
  source 1..20: mol_type = other DNA
taccctggaagggccaaggg

SEQ ID NO: 56350 - DNA, 20 bp, synthetic construct
  source 1..20: mol_type = other DNA
tggggtggtcctggcccaga

SEQ ID NO: 56351 - DNA, 20 bp, synthetic construct
  source 1..20: mol_type = other DNA
tgggggaggccctgacctcc

SEQ ID NO: 56352 - DNA, 20 bp, synthetic construct
  source 1..20: mol_type = other DNA
caggtagaccacaaggtagt

SEQ ID NO: 56353 - DNA, 20 bp, synthetic construct
  source 1..20: mol_type = other DNA
ccaactaaatcatgaggatg

SEQ ID NO: 56354 - DNA, 20 bp, synthetic construct
  source 1..20: mol_type = other DNA
caggtagtccaccatgggat

SEQ ID NO: 56355 - DNA, 20 bp, synthetic construct
  source 1..20: mol_type = other DNA
aaagaaatggtagaaggaat

SEQ ID NO: 56356 - DNA, 20 bp, synthetic construct
  source 1..20: mol_type = other DNA
cggggacttctgctacgttg

SEQ ID NO: 56357 - DNA, 20 bp, synthetic construct
  source 1..20: mol_type = other DNA
tgtggaggacgtattctcca

SEQ ID NO: 56358 - DNA, 20 bp, synthetic construct
  source 1..20: mol_type = other DNA
gtgggcatttgcctgggcgt

SEQ ID NO: 56359 - DNA, 20 bp, synthetic construct
  source 1..20: mol_type = other DNA
gtgagctggagcatctggac

SEQ ID NO: 56360 - DNA, 20 bp, synthetic construct
  source 1..20: mol_type = other DNA
ctggaagcgcaggtccatgt

SEQ ID NO: 56361 - DNA, 20 bp, synthetic construct
  source 1..20: mol_type = other DNA
gcaaaccaggactcctccac

SEQ ID NO: 56362 - DNA, 20 bp, synthetic construct
  source 1..20: mol_type = other DNA
gcccgccgcggcgtcggggt

SEQ ID NO: 56363 - DNA, 20 bp, synthetic construct
  source 1..20: mol_type = other DNA
actccggggggctgtacact

SEQ ID NO: 56364 - DNA, 20 bp, synthetic construct
  source 1..20: mol_type = other DNA
gcagctccagagtcaccagg

SEQ ID NO: 56365 - DNA, 20 bp, synthetic construct
  source 1..20: mol_type = other DNA
gcacccagagaagtgcaggt

SEQ ID NO: 56366 - DNA, 20 bp, synthetic construct
  source 1..20: mol_type = other DNA
gctggtgggtggcctgtgag

SEQ ID NO: 56367 - DNA, 20 bp, synthetic construct
  source 1..20: mol_type = other DNA
atcagtctgaagcacctgta

SEQ ID NO: 56368 - DNA, 20 bp, synthetic construct
  source 1..20: mol_type = other DNA
tttaaggataactaccttgg

SEQ ID NO: 56369 - DNA, 20 bp, synthetic construct
  source 1..20: mol_type = other DNA
ctcggtcgatcctgtagaag

SEQ ID NO: 56370 - DNA, 20 bp, synthetic construct
  source 1..20: mol_type = other DNA
cagggggcctgccctagggg

SEQ ID NO: 56371 - DNA, 20 bp, synthetic construct
  source 1..20: mol_type = other DNA
ctacaagcggcggaagcagg

SEQ ID NO: 56372 - DNA, 20 bp, synthetic construct
  source 1..20: mol_type = other DNA
ttcatcttttccttcttggg

SEQ ID NO: 56373 - DNA, 20 bp, synthetic construct
  source 1..20: mol_type = other DNA
tggacaacccgtacatcgtg

SEQ ID NO: 56374 - DNA, 20 bp, synthetic construct
  source 1..20: mol_type = other DNA
taagacaagaccatcaaatc

SEQ ID NO: 56375 - DNA, 20 bp, synthetic construct
  source 1..20: mol_type = other DNA
tgtccttcataacctaggag

SEQ ID NO: 56376 - DNA, 20 bp, synthetic construct
  source 1..20: mol_type = other DNA
agccacctgcgaatccacac

SEQ ID NO: 56377 - DNA, 20 bp, synthetic construct
  source 1..20: mol_type = other DNA
tgcagactatgggaagggat

SEQ ID NO: 56378 - DNA, 20 bp, synthetic construct
  source 1..20: mol_type = other DNA
tcaccagggaaggggtgacc

SEQ ID NO: 56379 - DNA, 20 bp, synthetic construct
  source 1..20: mol_type = other DNA
cctggatagaagggtatgtt

SEQ ID NO: 56380 - DNA, 20 bp, synthetic construct
  source 1..20: mol_type = other DNA
gtccaggcagccatcttgtc

SEQ ID NO: 56381 - DNA, 20 bp, synthetic construct
  source 1..20: mol_type = other DNA
ggactggcggcggcgccgcg

SEQ ID NO: 56382 - DNA, 20 bp, synthetic construct
  source 1..20: mol_type = other DNA
gcaggaaggaggatgaggga

SEQ ID NO: 56383 - DNA, 20 bp, synthetic construct
  source 1..20: mol_type = other DNA
atagcttggtacttagcagc

SEQ ID NO: 56384 - DNA, 20 bp, synthetic construct
  source 1..20: mol_type = other DNA
gccagctgatgaagacggag

SEQ ID NO: 56385 - DNA, 20 bp, synthetic construct
  source 1..20: mol_type = other DNA
tatatacttacacatcttga

SEQ ID NO: 56386 - DNA, 20 bp, synthetic construct
  source 1..20: mol_type = other DNA
agcaggctcataatcatcag

SEQ ID NO: 56387 - DNA, 20 bp, synthetic construct
  source 1..20: mol_type = other DNA
gccgacgccatccaccgcgg

SEQ ID NO: 56388 - DNA, 20 bp, synthetic construct
  source 1..20: mol_type = other DNA
tgtgtatgacggcccggagc

SEQ ID NO: 56389 - DNA, 20 bp, synthetic construct
  source 1..20: mol_type = other DNA
agatggtaggcaactgccaa

SEQ ID NO: 56390 - DNA, 20 bp, synthetic construct
  source 1..20: mol_type = other DNA
cgccacatccgcatccacac

SEQ ID NO: 56391 - DNA, 20 bp, synthetic construct
  source 1..20: mol_type = other DNA
gcagatggtcaaggagctgc

SEQ ID NO: 56392 - DNA, 20 bp, synthetic construct
  source 1..20: mol_type = other DNA
cacctgcagtgaatgagtag

SEQ ID NO: 56393 - DNA, 20 bp, synthetic construct
  source 1..20: mol_type = other DNA
tatctatttggatgtctgca

SEQ ID NO: 56394 - DNA, 20 bp, synthetic construct
  source 1..20: mol_type = other DNA
gaggagggcgccgccgggtg

SEQ ID NO: 56395 - DNA, 20 bp, synthetic construct
  source 1..20: mol_type = other DNA
acctctgtactgatggaggt

SEQ ID NO: 56396 - DNA, 20 bp, synthetic construct
  source 1..20: mol_type = other DNA
tgttaccatacagagaacat

SEQ ID NO: 56397 - DNA, 20 bp, synthetic construct
  source 1..20: mol_type = other DNA
ctgctggagtctctcaatgt

SEQ ID NO: 56398 - DNA, 20 bp, synthetic construct
  source 1..20: mol_type = other DNA
accagtgttggcatgggctg

SEQ ID NO: 56399 - DNA, 20 bp, synthetic construct
  source 1..20: mol_type = other DNA
gggagtcgttgtgctgcaca

SEQ ID NO: 56400 - DNA, 20 bp, synthetic construct
  source 1..20: mol_type = other DNA
ccatgaccagaactgtcctt

SEQ ID NO: 56401 - DNA, 20 bp, synthetic construct
  source 1..20: mol_type = other DNA
atagacagcgtgtgcgtggg

SEQ ID NO: 56402 - DNA, 20 bp, synthetic construct
  source 1..20: mol_type = other DNA
ttgatgacctctttatctac

SEQ ID NO: 56403 - DNA, 20 bp, synthetic construct
  source 1..20: mol_type = other DNA
caaccgggaggtgctggagc

SEQ ID NO: 56404 - DNA, 20 bp, synthetic construct
  source 1..20: mol_type = other DNA
tgccgcacctttcataccat

SEQ ID NO: 56405 - DNA, 20 bp, synthetic construct
  source 1..20: mol_type = other DNA
ctgcaagcgtttgctcacca

SEQ ID NO: 56406 - DNA, 20 bp, synthetic construct
  source 1..20: mol_type = other DNA
ccaacagtggggcggctggg

SEQ ID NO: 56407 - DNA, 20 bp, synthetic construct
  source 1..20: mol_type = other DNA
cctggaagggccaagggagg

SEQ ID NO: 56408 - DNA, 20 bp, synthetic construct
  source 1..20: mol_type = other DNA
cgaggaacaggaggaggcgg

SEQ ID NO: 56409 - DNA, 20 bp, synthetic construct
  source 1..20: mol_type = other DNA
gctgtcggagctgtgaggca

SEQ ID NO: 56410 - DNA, 20 bp, synthetic construct
  source 1..20: mol_type = other DNA
agaccaagagcgcatcaaag

SEQ ID NO: 56411 - DNA, 20 bp, synthetic construct
  source 1..20: mol_type = other DNA
atggtggtgctgtgccaccc

SEQ ID NO: 56412 - DNA, 20 bp, synthetic construct
  source 1..20: mol_type = other DNA
tgaactccatgtgccgccct

SEQ ID NO: 56413 - DNA, 20 bp, synthetic construct
  source 1..20: mol_type = other DNA
aaagccaactctacctgtaa

SEQ ID NO: 56414 - DNA, 20 bp, synthetic construct
  source 1..20: mol_type = other DNA
gtgacttctcgctctccgtc

SEQ ID NO: 56415 - DNA, 20 bp, synthetic construct
  source 1..20: mol_type = other DNA
gaacaagcactcagagcagc

SEQ ID NO: 56416 - DNA, 20 bp, synthetic construct
  source 1..20: mol_type = other DNA
acaaagttagaataatcatc

SEQ ID NO: 56417 - DNA, 20 bp, synthetic construct
  source 1..20: mol_type = other DNA
ggtggcaaaggaggagcccc

SEQ ID NO: 56418 - DNA, 20 bp, synthetic construct
  source 1..20: mol_type = other DNA
ggagtacgagcagatggtca

SEQ ID NO: 56419 - DNA, 20 bp, synthetic construct
  source 1..20: mol_type = other DNA
ggggcacgcccagaatccca

SEQ ID NO: 56420 - DNA, 20 bp, synthetic construct
  source 1..20: mol_type = other DNA
aggatgacagtattctcagc

SEQ ID NO: 56421 - DNA, 20 bp, synthetic construct
  source 1..20: mol_type = other DNA
gcagggctttcatggcacac

SEQ ID NO: 56422 - DNA, 20 bp, synthetic construct
  source 1..20: mol_type = other DNA
acctaaacaggaaaaaacac

SEQ ID NO: 56423 - DNA, 20 bp, synthetic construct
  source 1..20: mol_type = other DNA
atacctcatccacagaagac

SEQ ID NO: 56424 - DNA, 20 bp, synthetic construct
  source 1..20: mol_type = other DNA
ccacgtggaggaggggaacg

SEQ ID NO: 56425 - DNA, 20 bp, synthetic construct
  source 1..20: mol_type = other DNA
ttacaaggcgaccctctaac

SEQ ID NO: 56426 - DNA, 20 bp, synthetic construct
  source 1..20: mol_type = other DNA
tggtggatgaagagaaagaa

SEQ ID NO: 56427 - DNA, 20 bp, synthetic construct
  source 1..20: mol_type = other DNA
cgtcactgagtacatggcca

SEQ ID NO: 56428 - DNA, 20 bp, synthetic construct
  source 1..20: mol_type = other DNA
ttgtaaggcgtattgtaccc

SEQ ID NO: 56429 - DNA, 20 bp, synthetic construct
  source 1..20: mol_type = other DNA
tggctaggtgcagtggtctg

SEQ ID NO: 56430 - DNA, 20 bp, synthetic construct
  source 1..20: mol_type = other DNA
gctggtctagcaggtactca

SEQ ID NO: 56431 - DNA, 20 bp, synthetic construct
  source 1..20: mol_type = other DNA
ggaacaggaggaggcggagg

SEQ ID NO: 56432 - DNA, 20 bp, synthetic construct
  source 1..20: mol_type = other DNA
agagtccagtttgtatctgt

SEQ ID NO: 56433 - DNA, 20 bp, synthetic construct
  source 1..20: mol_type = other DNA
actatgaggaagaagaaatc

SEQ ID NO: 56434 - DNA, 20 bp, synthetic construct
  source 1..20: mol_type = other DNA
gatgatctttaacctccttc

SEQ ID NO: 56435 - DNA, 20 bp, synthetic construct
  source 1..20: mol_type = other DNA
tttaattcaccagaagaact

SEQ ID NO: 56436 - DNA, 20 bp, synthetic construct
  source 1..20: mol_type = other DNA
aacgttgaggggcatcgtcg

SEQ ID NO: 56437 - DNA, 20 bp, synthetic construct
  source 1..20: mol_type = other DNA
ttgtagcccttctccacccg

SEQ ID NO: 56438 - DNA, 20 bp, synthetic construct
  source 1..20: mol_type = other DNA
cctcacagtgttttcccacc

SEQ ID NO: 56439 - DNA, 20 bp, synthetic construct
  source 1..20: mol_type = other DNA
tcacggcatgaggctgagtt

SEQ ID NO: 56440 - DNA, 20 bp, synthetic construct
  source 1..20: mol_type = other DNA
cctccgtctgcgcctgggcc

SEQ ID NO: 56441 - DNA, 20 bp, synthetic construct
  source 1..20: mol_type = other DNA
cttcgacatctagactgggg

SEQ ID NO: 56442 - DNA, 20 bp, synthetic construct
  source 1..20: mol_type = other DNA
gtctatcttattggtgacct

SEQ ID NO: 56443 - DNA, 20 bp, synthetic construct
  source 1..20: mol_type = other DNA
tcactgctgtcggagctgtg

SEQ ID NO: 56444 - DNA, 20 bp, synthetic construct
  source 1..20: mol_type = other DNA
ccactgccagccgcttctac

SEQ ID NO: 56445 - DNA, 20 bp, synthetic construct
  source 1..20: mol_type = other DNA
tgttactcatgtaacccaac

SEQ ID NO: 56446 - DNA, 20 bp, synthetic construct
  source 1..20: mol_type = other DNA
tgtgatacaggtccttggtc

SEQ ID NO: 56447 - DNA, 20 bp, synthetic construct
  source 1..20: mol_type = other DNA
acgaatgcgtggcggagatc

SEQ ID NO: 56448 - DNA, 20 bp, synthetic construct
  source 1..20: mol_type = other DNA
gagcctcttgaaatagatat

SEQ ID NO: 56449 - DNA, 20 bp, synthetic construct
  source 1..20: mol_type = other DNA
tcttacactaaggtaagcca

SEQ ID NO: 56450 - DNA, 20 bp, synthetic construct
  source 1..20: mol_type = other DNA
cagcggccttcacttccacc

SEQ ID NO: 56451 - DNA, 20 bp, synthetic construct
  source 1..20: mol_type = other DNA
gccggtcgcagtggtcacag

SEQ ID NO: 56452 - DNA, 20 bp, synthetic construct
  source 1..20: mol_type = other DNA
cctgcctgtaggtactgggc

SEQ ID NO: 56453 - DNA, 20 bp, synthetic construct
  source 1..20: mol_type = other DNA
agaagagggcatccttcaag

SEQ ID NO: 56454 - DNA, 20 bp, synthetic construct
  source 1..20: mol_type = other DNA
accgtccaggaagcaccact

SEQ ID NO: 56455 - DNA, 20 bp, synthetic construct
  source 1..20: mol_type = other DNA
ggattctacactggcaaacc

SEQ ID NO: 56456 - DNA, 20 bp, synthetic construct
  source 1..20: mol_type = other DNA
tcaggttgtctttattggcc

SEQ ID NO: 56457 - DNA, 20 bp, synthetic construct
  source 1..20: mol_type = other DNA
ctttaccgcagtagatctgg

SEQ ID NO: 56458 - DNA, 20 bp, synthetic construct
  source 1..20: mol_type = other DNA
tagaccctgcggataggtga

SEQ ID NO: 56459 - DNA, 20 bp, synthetic construct
  source 1..20: mol_type = other DNA
tgtataaggggctataatcc

SEQ ID NO: 56460 - DNA, 20 bp, synthetic construct
  source 1..20: mol_type = other DNA
tgccgcaccttccacaccat

SEQ ID NO: 56461 - DNA, 20 bp, synthetic construct
  source 1..20: mol_type = other DNA
ccttggctgtcaacagtccc

SEQ ID NO: 56462 - DNA, 20 bp, synthetic construct
  source 1..20: mol_type = other DNA
gcacacaaaagtgatgaaca

SEQ ID NO: 56463 - DNA, 20 bp, synthetic construct
  source 1..20: mol_type = other DNA
tggtgctggccacgtcatca

SEQ ID NO: 56464 - DNA, 20 bp, synthetic construct
  source 1..20: mol_type = other DNA
cttcaggccttctggaagca

SEQ ID NO: 56465 - DNA, 20 bp, synthetic construct
  source 1..20: mol_type = other DNA
agtggctgaatacctggatt

SEQ ID NO: 56466 - DNA, 20 bp, synthetic construct
  source 1..20: mol_type = other DNA
ccagttccaggtagaagagg

SEQ ID NO: 56467 - DNA, 20 bp, synthetic construct
  source 1..20: mol_type = other DNA
tctgcagcttgatctccccc

SEQ ID NO: 56468 - DNA, 20 bp, synthetic construct
  source 1..20: mol_type = other DNA
ctcccggtgagtcggaccgc

SEQ ID NO: 56469 - DNA, 20 bp, synthetic construct
  source 1..20: mol_type = other DNA
tccagaatggagtcgcaggt

SEQ ID NO: 56470 - DNA, 20 bp, synthetic construct
  source 1..20: mol_type = other DNA
ctggctgaaagaaacaatac

SEQ ID NO: 56471 - DNA, 20 bp, synthetic construct
  source 1..20: mol_type = other DNA
gcatcgtcgcgggaggctgc

SEQ ID NO: 56472 - DNA, 20 bp, synthetic construct
  source 1..20: mol_type = other DNA
tgcgctccagcttccgcttc

SEQ ID NO: 56473 - DNA, 20 bp, synthetic construct
  source 1..20: mol_type = other DNA
cccgccaggccccggccctc

SEQ ID NO: 56474 - DNA, 20 bp, synthetic construct
  source 1..20: mol_type = other DNA
tccgtcgtccttcagagtct

SEQ ID NO: 56475 - DNA, 20 bp, synthetic construct
  source 1..20: mol_type = other DNA
gtgggtgggcctcacccgcc

SEQ ID NO: 56476 - DNA, 20 bp, synthetic construct
  source 1..20: mol_type = other DNA
gtgtaaacgggaggtggctc

SEQ ID NO: 56477 - DNA, 20 bp, synthetic construct
  source 1..20: mol_type = other DNA
catcgagaacatcctggcag

SEQ ID NO: 56478 - DNA, 20 bp, synthetic construct
  source 1..20: mol_type = other DNA
agtttctgatagcagtactt

SEQ ID NO: 56479 - DNA, 20 bp, synthetic construct
  source 1..20: mol_type = other DNA
gcgcatgcacagtttgtacc

SEQ ID NO: 56480 - DNA, 20 bp, synthetic construct
  source 1..20: mol_type = other DNA
ctgtgggtgaccatggcgca

SEQ ID NO: 56481 - DNA, 20 bp, synthetic construct
  source 1..20: mol_type = other DNA
catctaccaaggttagagaa

SEQ ID NO: 56482 - DNA, 20 bp, synthetic construct
  source 1..20: mol_type = other DNA
gatatagtcaaagagatcct

SEQ ID NO: 56483 - DNA, 20 bp, synthetic construct
  source 1..20: mol_type = other DNA
acgcctggggctctgcccca

SEQ ID NO: 56484 - DNA, 20 bp, synthetic construct
  source 1..20: mol_type = other DNA
actatccacatgggctgcca

SEQ ID NO: 56485 - DNA, 20 bp, synthetic construct
  source 1..20: mol_type = other DNA
acctgaatggctgcggcagc

SEQ ID NO: 56486 - DNA, 20 bp, synthetic construct
  source 1..20: mol_type = other DNA
tggacggtgagtctactccc

SEQ ID NO: 56487 - DNA, 20 bp, synthetic construct
  source 1..20: mol_type = other DNA
cggaagaaactggtgattgt

SEQ ID NO: 56488 - DNA, 20 bp, synthetic construct
  source 1..20: mol_type = other DNA
ctacctgaacggggacggga

SEQ ID NO: 56489 - DNA, 20 bp, synthetic construct
  source 1..20: mol_type = other DNA
cggggacgcctcgcgctccg

SEQ ID NO: 56490 - DNA, 20 bp, synthetic construct
  source 1..20: mol_type = other DNA
caccatggtaaatctcctgc

SEQ ID NO: 56491 - DNA, 20 bp, synthetic construct
  source 1..20: mol_type = other DNA
tatcctacagatgatgcgag

SEQ ID NO: 56492 - DNA, 20 bp, synthetic construct
  source 1..20: mol_type = other DNA
acgatatcaagaaccacaag

SEQ ID NO: 56493 - DNA, 20 bp, synthetic construct
  source 1..20: mol_type = other DNA
gtgattatactcttacacta

SEQ ID NO: 56494 - DNA, 20 bp, synthetic construct
  source 1..20: mol_type = other DNA
tcaggatggagaattcgacc

SEQ ID NO: 56495 - DNA, 20 bp, synthetic construct
  source 1..20: mol_type = other DNA
cttgcatctagccacagaga

SEQ ID NO: 56496 - DNA, 20 bp, synthetic construct
  source 1..20: mol_type = other DNA
acagtgacagtaggggtggc

SEQ ID NO: 56497 - DNA, 20 bp, synthetic construct
  source 1..20: mol_type = other DNA
gggagatgttctcacaccta

SEQ ID NO: 56498 - DNA, 20 bp, synthetic construct
  source 1..20: mol_type = other DNA
cgactttggtctcaccaagg

SEQ ID NO: 56499 - DNA, 20 bp, synthetic construct
  source 1..20: mol_type = other DNA
cccatgaacccggagcccgc

SEQ ID NO: 56500 - DNA, 20 bp, synthetic construct
  source 1..20: mol_type = other DNA
gtgaagcaccgagtggcaga

SEQ ID NO: 56501 - DNA, 20 bp, synthetic construct
  source 1..20: mol_type = other DNA
gttctccagcgccacctggg

SEQ ID NO: 56502 - DNA, 20 bp, synthetic construct
  source 1..20: mol_type = other DNA
gccaggtgcaggggcgtctg

SEQ ID NO: 56503 - DNA, 20 bp, synthetic construct
  source 1..20: mol_type = other DNA
tacagccagcctttctacac

SEQ ID NO: 56504 - DNA, 20 bp, synthetic construct
  source 1..20: mol_type = other DNA
ggtggggagaggggaagtgg

SEQ ID NO: 56505 - DNA, 20 bp, synthetic construct
  source 1..20: mol_type = other DNA
aaggccataaatttgtgata

SEQ ID NO: 56506 - DNA, 20 bp, synthetic construct
  source 1..20: mol_type = other DNA
tgtgccagggtctacctgaa

SEQ ID NO: 56507 - DNA, 20 bp, synthetic construct
  source 1..20: mol_type = other DNA
gctgaagaaggagcggctac

SEQ ID NO: 56508 - DNA, 20 bp, synthetic construct
  source 1..20: mol_type = other DNA
tattcaacttagaaaagaat

SEQ ID NO: 56509 - DNA, 20 bp, synthetic construct
  source 1..20: mol_type = other DNA
gtccatgaaggtgctgaagc

SEQ ID NO: 56510 - DNA, 20 bp, synthetic construct
  source 1..20: mol_type = other DNA
tccatgtgccgccctagggt

SEQ ID NO: 56511 - DNA, 20 bp, synthetic construct
  source 1..20: mol_type = other DNA
cctcagcgtcctgatgtggg

SEQ ID NO: 56512 - DNA, 20 bp, synthetic construct
  source 1..20: mol_type = other DNA
tgcccacactcggtctgctt

SEQ ID NO: 56513 - DNA, 20 bp, synthetic construct
  source 1..20: mol_type = other DNA
cagcaaagctaaagctatgc

SEQ ID NO: 56514 - DNA, 20 bp, synthetic construct
  source 1..20: mol_type = other DNA
ccgtccaggaagcaccactt

SEQ ID NO: 56515 - DNA, 20 bp, synthetic construct
  source 1..20: mol_type = other DNA
ggagcgcatcgcgcgcctgg

SEQ ID NO: 56516 - DNA, 20 bp, synthetic construct
  source 1..20: mol_type = other DNA
agggcacctgggagaacagg

SEQ ID NO: 56517 - DNA, 20 bp, synthetic construct
  source 1..20: mol_type = other DNA
tgaatccagcacactctccc

SEQ ID NO: 56518 - DNA, 20 bp, synthetic construct
  source 1..20: mol_type = other DNA
taactggcacatacaagtaa

SEQ ID NO: 56519 - DNA, 20 bp, synthetic construct
  source 1..20: mol_type = other DNA
tgagccatgctgctgccggc

SEQ ID NO: 56520 - DNA, 20 bp, synthetic construct
  source 1..20: mol_type = other DNA
cgtgcacctggccgctgccc

SEQ ID NO: 56521 - DNA, 20 bp, synthetic construct
  source 1..20: mol_type = other DNA
ccgtaggcgccggagcccac

SEQ ID NO: 56522 - DNA, 20 bp, synthetic construct
  source 1..20: mol_type = other DNA
tcccagacctggggacccag

SEQ ID NO: 56523 - DNA, 20 bp, synthetic construct
  source 1..20: mol_type = other DNA
gacgttggagatcaccacaa

SEQ ID NO: 56524 - DNA, 20 bp, synthetic construct
  source 1..20: mol_type = other DNA
agagaaaccataccaatgca

SEQ ID NO: 56525 - DNA, 20 bp, synthetic construct
  source 1..20: mol_type = other DNA
ctccagaatggagtcgcagg

SEQ ID NO: 56526 - DNA, 20 bp, synthetic construct
  source 1..20: mol_type = other DNA
cattcccatcgagaacatcc

SEQ ID NO: 56527 - DNA, 20 bp, synthetic construct
  source 1..20: mol_type = other DNA
aggcccaaccgctcgggagc

SEQ ID NO: 56528 - DNA, 20 bp, synthetic construct
  source 1..20: mol_type = other DNA
tggtgagatctacctgcagg

SEQ ID NO: 56529 - DNA, 20 bp, synthetic construct
  source 1..20: mol_type = other DNA
tcaagaaggaccccaagcag

SEQ ID NO: 56530 - DNA, 20 bp, synthetic construct
  source 1..20: mol_type = other DNA
ccttcattggctacaaggag

SEQ ID NO: 56531 - DNA, 20 bp, synthetic construct
  source 1..20: mol_type = other DNA
atccagttgagcatgatctc

SEQ ID NO: 56532 - DNA, 20 bp, synthetic construct
  source 1..20: mol_type = other DNA
acccctgtcttcaagaccag

SEQ ID NO: 56533 - DNA, 20 bp, synthetic construct
  source 1..20: mol_type = other DNA
gaactccatgtgccgcccta

SEQ ID NO: 56534 - DNA, 20 bp, synthetic construct
  source 1..20: mol_type = other DNA
gcaggtacaaggcgcgttcc

SEQ ID NO: 56535 - DNA, 20 bp, synthetic construct
  source 1..20: mol_type = other DNA
tgggaatgctgtagagaggc

SEQ ID NO: 56536 - DNA, 20 bp, synthetic construct
  source 1..20: mol_type = other DNA
gctggagggtgcaattgaga

SEQ ID NO: 56537 - DNA, 20 bp, synthetic construct
  source 1..20: mol_type = other DNA
cgcatgcacagtttgtaccc

SEQ ID NO: 56538 - DNA, 20 bp, synthetic construct
  source 1..20: mol_type = other DNA
gcacacatcatggccagatg

SEQ ID NO: 56539 - DNA, 20 bp, synthetic construct
  source 1..20: mol_type = other DNA
tacctgcagtgcaccacaat

SEQ ID NO: 56540 - DNA, 20 bp, synthetic construct
  source 1..20: mol_type = other DNA
gatgcgtctactaaaatgca

SEQ ID NO: 56541 - DNA, 20 bp, synthetic construct
  source 1..20: mol_type = other DNA
atctcagcggcataaaacct

SEQ ID NO: 56542 - DNA, 20 bp, synthetic construct
  source 1..20: mol_type = other DNA
gcttaaacggccaaggaagc

SEQ ID NO: 56543 - DNA, 20 bp, synthetic construct
  source 1..20: mol_type = other DNA
tcgcctgcccttctacaacc

SEQ ID NO: 56544 - DNA, 20 bp, synthetic construct
  source 1..20: mol_type = other DNA
tgcactttttttaaagctac

SEQ ID NO: 56545 - DNA, 20 bp, synthetic construct
  source 1..20: mol_type = other DNA
agcagtgcacgcagcagctc

SEQ ID NO: 56546 - DNA, 20 bp, synthetic construct
  source 1..20: mol_type = other DNA
gcttgccagggtcttcaaca

SEQ ID NO: 56547 - DNA, 20 bp, synthetic construct
  source 1..20: mol_type = other DNA
catagaaatcccctgagttc

SEQ ID NO: 56548 - DNA, 20 bp, synthetic construct
  source 1..20: mol_type = other DNA
tgatgatttgaaaggggact

SEQ ID NO: 56549 - DNA, 20 bp, synthetic construct
  source 1..20: mol_type = other DNA
tgcacaagcgtctgcacacc

SEQ ID NO: 56550 - DNA, 20 bp, synthetic construct
  source 1..20: mol_type = other DNA
cagcaggcggccgcgggcat

SEQ ID NO: 56551 - DNA, 20 bp, synthetic construct
  source 1..20: mol_type = other DNA
atcaggcctcgattcagccc

SEQ ID NO: 56552 - DNA, 20 bp, synthetic construct
  source 1..20: mol_type = other DNA
gagtggctgaatacctggat

SEQ ID NO: 56553 - DNA, 20 bp, synthetic construct
  source 1..20: mol_type = other DNA
ccctcaagggattttcattg

SEQ ID NO: 56554 - DNA, 20 bp, synthetic construct
  source 1..20: mol_type = other DNA
gtcgatcctgtagaagcggc

SEQ ID NO: 56555 - DNA, 20 bp, synthetic construct
  source 1..20: mol_type = other DNA
tccgaactcccccttcccga

SEQ ID NO: 56556 - DNA, 20 bp, synthetic construct
  source 1..20: mol_type = other DNA
tctggaaattcttccagttt

SEQ ID NO: 56557 - DNA, 20 bp, synthetic construct
  source 1..20: mol_type = other DNA
tccttggctgtcaacagtcc

SEQ ID NO: 56558 - DNA, 20 bp, synthetic construct
  source 1..20: mol_type = other DNA
tggatgtacagcgcacgctc

SEQ ID NO: 56559 - DNA, 20 bp, synthetic construct
  source 1..20: mol_type = other DNA
gcccacactcggtctgcttc

SEQ ID NO: 56560 - DNA, 20 bp, synthetic construct
  source 1..20: mol_type = other DNA
accacgactttgagccccag

SEQ ID NO: 56561 - DNA, 20 bp, synthetic construct
  source 1..20: mol_type = other DNA
ctgggacttggtcttcaatg

SEQ ID NO: 56562 - DNA, 20 bp, synthetic construct
  source 1..20: mol_type = other DNA
gctgacagccgttgctgacg

SEQ ID NO: 56563 - DNA, 20 bp, synthetic construct
  source 1..20: mol_type = other DNA
catgcagatgcggcactgga

SEQ ID NO: 56564 - DNA, 20 bp, synthetic construct
  source 1..20: mol_type = other DNA
atgccgcagttgcctggggc

SEQ ID NO: 56565 - DNA, 20 bp, synthetic construct
  source 1..20: mol_type = other DNA
agggtctacctgaacgggga

SEQ ID NO: 56566 - DNA, 20 bp, synthetic construct
  source 1..20: mol_type = other DNA
gctgctctcgcggatgagga

SEQ ID NO: 56567 - DNA, 20 bp, synthetic construct
  source 1..20: mol_type = other DNA
ctgtttcagtttcaccacct

SEQ ID NO: 56568 - DNA, 20 bp, synthetic construct
  source 1..20: mol_type = other DNA
tagccaggtatcaatctgga

SEQ ID NO: 56569 - DNA, 20 bp, synthetic construct
  source 1..20: mol_type = other DNA
acccaccatggggagttgac

SEQ ID NO: 56570 - DNA, 20 bp, synthetic construct
  source 1..20: mol_type = other DNA
gcagtggtttgatggtgtcc

SEQ ID NO: 56571 - DNA, 20 bp, synthetic construct
  source 1..20: mol_type = other DNA
atggccatctcaatctgcag

SEQ ID NO: 56572 - DNA, 20 bp, synthetic construct
  source 1..20: mol_type = other DNA
ttgaggggcatcgtcgcggg

SEQ ID NO: 56573 - DNA, 20 bp, synthetic construct
  source 1..20: mol_type = other DNA
gacatgatcaccatcttcat

SEQ ID NO: 56574 - DNA, 20 bp, synthetic construct
  source 1..20: mol_type = other DNA
atagttgaggtgctcctgtg

SEQ ID NO: 56575 - DNA, 20 bp, synthetic construct
  source 1..20: mol_type = other DNA
agctctaggtcactgtctcc

SEQ ID NO: 56576 - DNA, 20 bp, synthetic construct
  source 1..20: mol_type = other DNA
acacactgggtgagcagggc

SEQ ID NO: 56577 - DNA, 20 bp, synthetic construct
  source 1..20: mol_type = other DNA
ggacagggtcttccccatga

SEQ ID NO: 56578 - DNA, 20 bp, synthetic construct
  source 1..20: mol_type = other DNA
caccaaaagaggtctcaatg

SEQ ID NO: 56579 - DNA, 20 bp, synthetic construct
  source 1..20: mol_type = other DNA
catcaaaagtgccacctccc

SEQ ID NO: 56580 - DNA, 20 bp, synthetic construct
  source 1..20: mol_type = other DNA
cttggggcacaggaactggg

SEQ ID NO: 56581 - DNA, 20 bp, synthetic construct
  source 1..20: mol_type = other DNA
tggccgctcaggtaggcgga

SEQ ID NO: 56582 - DNA, 20 bp, synthetic construct
  source 1..20: mol_type = other DNA
aacatggatccaatgacagt

SEQ ID NO: 56583 - DNA, 20 bp, synthetic construct
  source 1..20: mol_type = other DNA
gctgggccacctgctcccgg

SEQ ID NO: 56584 - DNA, 20 bp, synthetic construct
  source 1..20: mol_type = other DNA
ggcagtggagaagctggagg

SEQ ID NO: 56585 - DNA, 20 bp, synthetic construct
  source 1..20: mol_type = other DNA
gagcatatcatcgcgggcgc

SEQ ID NO: 56586 - DNA, 20 bp, synthetic construct
  source 1..20: mol_type = other DNA
tagttgaggtgctcctgtgg

SEQ ID NO: 56587 - DNA, 20 bp, synthetic construct
  source 1..20: mol_type = other DNA
ctacgacaaggagcagctca

SEQ ID NO: 56588 - DNA, 20 bp, synthetic construct
  source 1..20: mol_type = other DNA
tcacaagaaacctgtctcct

SEQ ID NO: 56589 - DNA, 20 bp, synthetic construct
  source 1..20: mol_type = other DNA
tgtgatagggtcatgttcgt

SEQ ID NO: 56590 - DNA, 20 bp, synthetic construct
  source 1..20: mol_type = other DNA
ccacagtgatcgcagaaggt

SEQ ID NO: 56591 - DNA, 20 bp, synthetic construct
  source 1..20: mol_type = other DNA
aggcgtattgtaccctggaa

SEQ ID NO: 56592 - DNA, 20 bp, synthetic construct
  source 1..20: mol_type = other DNA
gggccagcaagggaggaagg

SEQ ID NO: 56593 - DNA, 20 bp, synthetic construct
  source 1..20: mol_type = other DNA
tgtagaaaggctggctgtaa

SEQ ID NO: 56594 - DNA, 20 bp, synthetic construct
  source 1..20: mol_type = other DNA
tctgacagcgacgaatccta

SEQ ID NO: 56595 - DNA, 20 bp, synthetic construct
  source 1..20: mol_type = other DNA
atgcagatccggcactggaa

SEQ ID NO: 56596 - DNA, 20 bp, synthetic construct
  source 1..20: mol_type = other DNA
cacctgctcccggaggaggc

SEQ ID NO: 56597 - DNA, 20 bp, synthetic construct
  source 1..20: mol_type = other DNA
gcacaagcgtctgcacaccc

SEQ ID NO: 56598 - DNA, 20 bp, synthetic construct
  source 1..20: mol_type = other DNA
gctctaggtcactgtctcct

SEQ ID NO: 56599 - DNA, 20 bp, synthetic construct
  source 1..20: mol_type = other DNA
tggcagggcacaccttgcat

SEQ ID NO: 56600 - DNA, 20 bp, synthetic construct
  source 1..20: mol_type = other DNA
gggataagggagggccggtg

SEQ ID NO: 56601 - DNA, 20 bp, synthetic construct
  source 1..20: mol_type = other DNA
ccccatgacatttacgtgat

SEQ ID NO: 56602 - DNA, 20 bp, synthetic construct
  source 1..20: mol_type = other DNA
attcatcttgtaaatcttcc

SEQ ID NO: 56603 - DNA, 20 bp, synthetic construct
  source 1..20: mol_type = other DNA
ggagctgcagctggagcccg

SEQ ID NO: 56604 - DNA, 20 bp, synthetic construct
  source 1..20: mol_type = other DNA
agttagctggctgaaccccg

SEQ ID NO: 56605 - DNA, 20 bp, synthetic construct
  source 1..20: mol_type = other DNA
gctagcccgggcttcgtccc

SEQ ID NO: 56606 - DNA, 20 bp, synthetic construct
  source 1..20: mol_type = other DNA
gggccacctgctcccggagg

SEQ ID NO: 56607 - DNA, 20 bp, synthetic construct
  source 1..20: mol_type = other DNA
caagagtgacaatattctgt

SEQ ID NO: 56608 - DNA, 20 bp, synthetic construct
  source 1..20: mol_type = other DNA
cactgagtacatggccaagg

SEQ ID NO: 56609 - DNA, 20 bp, synthetic construct
  source 1..20: mol_type = other DNA
gtggtaggtaaattcatggt

SEQ ID NO: 56610 - DNA, 20 bp, synthetic construct
  source 1..20: mol_type = other DNA
ccatgcagctctcgcagaag

SEQ ID NO: 56611 - DNA, 20 bp, synthetic construct
  source 1..20: mol_type = other DNA
cagctccagagtcaccaggt

SEQ ID NO: 56612 - DNA, 20 bp, synthetic construct
  source 1..20: mol_type = other DNA
aaggcgtattgtaccctgga

SEQ ID NO: 56613 - DNA, 20 bp, synthetic construct
  source 1..20: mol_type = other DNA
cgctccgtcttcacaaagtc

SEQ ID NO: 56614 - DNA, 20 bp, synthetic construct
  source 1..20: mol_type = other DNA
gcccccaccgcctactggca

SEQ ID NO: 56615 - DNA, 20 bp, synthetic construct
  source 1..20: mol_type = other DNA
gcgggactagagggagctga

SEQ ID NO: 56616 - DNA, 20 bp, synthetic construct
  source 1..20: mol_type = other DNA
cctgtagaagcggctggcag

SEQ ID NO: 56617 - DNA, 20 bp, synthetic construct
  source 1..20: mol_type = other DNA
gcctcaaatgtggcaaagac

SEQ ID NO: 56618 - DNA, 20 bp, synthetic construct
  source 1..20: mol_type = other DNA
ggctctacgctgtggtcacc

SEQ ID NO: 56619 - DNA, 20 bp, synthetic construct
  source 1..20: mol_type = other DNA
aacgcaccctcagaggccgc

SEQ ID NO: 56620 - DNA, 20 bp, synthetic construct
  source 1..20: mol_type = other DNA
atgcagatgcggcactggaa

SEQ ID NO: 56621 - DNA, 20 bp, synthetic construct
  source 1..20: mol_type = other DNA
cattgatggggaccgtgaga

SEQ ID NO: 56622 - DNA, 20 bp, synthetic construct
  source 1..20: mol_type = other DNA
cttgaggttcccaaagcgct

SEQ ID NO: 56623 - DNA, 20 bp, synthetic construct
  source 1..20: mol_type = other DNA
cagtacagatgtggctgatc

SEQ ID NO: 56624 - DNA, 20 bp, synthetic construct
  source 1..20: mol_type = other DNA
gttttagctcgttcctcctc

SEQ ID NO: 56625 - DNA, 20 bp, synthetic construct
  source 1..20: mol_type = other DNA
cctccatggcccactcctgg

SEQ ID NO: 56626 - DNA, 20 bp, synthetic construct
  source 1..20: mol_type = other DNA
ggtactggggagatatctcg

SEQ ID NO: 56627 - DNA, 20 bp, synthetic construct
  source 1..20: mol_type = other DNA
agcgcaagcggctgcggaac

SEQ ID NO: 56628 - DNA, 20 bp, synthetic construct
  source 1..20: mol_type = other DNA
gattctacactggcaaaccc

SEQ ID NO: 56629 - DNA, 20 bp, synthetic construct
  source 1..20: mol_type = other DNA
ctgtgaagttgaggtaacaa

SEQ ID NO: 56630 - DNA, 20 bp, synthetic construct
  source 1..20: mol_type = other DNA
tcacaaagtctggaaggaaa

SEQ ID NO: 56631 - DNA, 20 bp, synthetic construct
  source 1..20: mol_type = other DNA
aacgtgcccatcatcctggt

SEQ ID NO: 56632 - DNA, 20 bp, synthetic construct
  source 1..20: mol_type = other DNA
gcagaagcggtgcccacact

SEQ ID NO: 56633 - DNA, 20 bp, synthetic construct
  source 1..20: mol_type = other DNA
gggaccaccacagtgcccag

SEQ ID NO: 56634 - DNA, 20 bp, synthetic construct
  source 1..20: mol_type = other DNA
gagcccaggtgagcgattgc

SEQ ID NO: 56635 - DNA, 20 bp, synthetic construct
  source 1..20: mol_type = other DNA
agttgaggtgctcctgtggg

SEQ ID NO: 56636 - DNA, 20 bp, synthetic construct
  source 1..20: mol_type = other DNA
ctacaggatcgaccgagccc

SEQ ID NO: 56637 - DNA, 20 bp, synthetic construct
  source 1..20: mol_type = other DNA
cagcgacgaatcctatggta

SEQ ID NO: 56638 - DNA, 20 bp, synthetic construct
  source 1..20: mol_type = other DNA
ggcgcaaagaagaagaggag

SEQ ID NO: 56639 - DNA, 20 bp, synthetic construct
  source 1..20: mol_type = other DNA
acggagcagcccaagcagcg

SEQ ID NO: 56640 - DNA, 20 bp, synthetic construct
  source 1..20: mol_type = other DNA
cgtccaggaagcaccacttg

SEQ ID NO: 56641 - DNA, 20 bp, synthetic construct
  source 1..20: mol_type = other DNA
gcccaaggacggaagcgctt

SEQ ID NO: 56642 - DNA, 20 bp, synthetic construct
  source 1..20: mol_type = other DNA
gtagaaaggctggctgtaaa

SEQ ID NO: 56643 - DNA, 20 bp, synthetic construct
  source 1..20: mol_type = other DNA
aaagacgcgggacgactctg

SEQ ID NO: 56644 - DNA, 20 bp, synthetic construct
  source 1..20: mol_type = other DNA
aagtggagcgcaagcggctg

SEQ ID NO: 56645 - DNA, 20 bp, synthetic construct
  source 1..20: mol_type = other DNA
actgagtacatggccaaggt

SEQ ID NO: 56646 - DNA, 20 bp, synthetic construct
  source 1..20: mol_type = other DNA
ctagagattcattccggtag

SEQ ID NO: 56647 - DNA, 20 bp, synthetic construct
  source 1..20: mol_type = other DNA
ttcagtttcaccacctggga

SEQ ID NO: 56648 - DNA, 20 bp, synthetic construct
  source 1..20: mol_type = other DNA
tacaagatgctgaatggtac

SEQ ID NO: 56649 - DNA, 20 bp, synthetic construct
  source 1..20: mol_type = other DNA
cagcccggagccgagtcgga

SEQ ID NO: 56650 - DNA, 20 bp, synthetic construct
  source 1..20: mol_type = other DNA
ccaaggggcagggaaagacg

SEQ ID NO: 56651 - DNA, 20 bp, synthetic construct
  source 1..20: mol_type = other DNA
ttctatatgaaaatcaagac

SEQ ID NO: 56652 - DNA, 20 bp, synthetic construct
  source 1..20: mol_type = other DNA
gtaggcggacgggtggtaga

SEQ ID NO: 56653 - DNA, 20 bp, synthetic construct
  source 1..20: mol_type = other DNA
ggtagacggtgaggcgcttc

SEQ ID NO: 56654 - DNA, 20 bp, synthetic construct
  source 1..20: mol_type = other DNA
tgaggcgcttctggttgcac

SEQ ID NO: 56655 - DNA, 20 bp, synthetic construct
  source 1..20: mol_type = other DNA
gtccaggaagcaccacttgg

SEQ ID NO: 56656 - DNA, 20 bp, synthetic construct
  source 1..20: mol_type = other DNA
gtccaccaatggcagtctgg

SEQ ID NO: 56657 - DNA, 20 bp, synthetic construct
  source 1..20: mol_type = other DNA
agcgacgaatcctatggtaa

SEQ ID NO: 56658 - DNA, 20 bp, synthetic construct
  source 1..20: mol_type = other DNA
cctcaaatgtggcaaagaca

SEQ ID NO: 56659 - DNA, 20 bp, synthetic construct
  source 1..20: mol_type = other DNA
cggagcgtgatgaatccagt

SEQ ID NO: 56660 - DNA, 20 bp, synthetic construct
  source 1..20: mol_type = other DNA
cttaaacggccaaggaagca

SEQ ID NO: 56661 - DNA, 20 bp, synthetic construct
  source 1..20: mol_type = other DNA
cactcacccgcagggaggag

SEQ ID NO: 56662 - DNA, 20 bp, synthetic construct
  source 1..20: mol_type = other DNA
ttcacaaagtctggaaggaa

SEQ ID NO: 56663 - DNA, 20 bp, synthetic construct
  source 1..20: mol_type = other DNA
cggacgggtggtagacggtg

SEQ ID NO: 56664 - DNA, 20 bp, synthetic construct
  source 1..20: mol_type = other DNA
agcgcaggtccatgtcggct

SEQ ID NO: 56665 - DNA, 20 bp, synthetic construct
  source 1..20: mol_type = other DNA
tcccaccgtgtgcatgctgg

SEQ ID NO: 56666 - DNA, 20 bp, synthetic construct
  source 1..20: mol_type = other DNA
tgccagggtctacctgaacg

SEQ ID NO: 56667 - DNA, 20 bp, synthetic construct
  source 1..20: mol_type = other DNA
cacccgtccgcctacctgag

SEQ ID NO: 56668 - DNA, 20 bp, synthetic construct
  source 1..20: mol_type = other DNA
acccacatccgcacccacac

SEQ ID NO: 56669 - DNA, 20 bp, synthetic construct
  source 1..20: mol_type = other DNA
tcagtttcaccacctgggaa

SEQ ID NO: 56670 - DNA, 20 bp, synthetic construct
  source 1..20: mol_type = other DNA
aagacgagggagaagctcta

SEQ ID NO: 56671 - DNA, 20 bp, synthetic construct
  source 1..20: mol_type = other DNA
cggtacatgcccaggaactg

SEQ ID NO: 56672 - DNA, 20 bp, synthetic construct
  source 1..20: mol_type = other DNA
cctccagcttctccactgcc

SEQ ID NO: 56673 - DNA, 20 bp, synthetic construct
  source 1..20: mol_type = other DNA
cgagcagcccggagccgagt

SEQ ID NO: 56674 - DNA, 20 bp, synthetic construct
  source 1..20: mol_type = other DNA
gacggacaggatgtatgctg

SEQ ID NO: 56675 - DNA, 20 bp, synthetic construct
  source 1..20: mol_type = other DNA
cgctcaggtaggcggacggg

SEQ ID NO: 56676 - DNA, 20 bp, synthetic construct
  source 1..20: mol_type = other DNA
taagaacgacgccactgccc

SEQ ID NO: 56677 - DNA, 20 bp, synthetic construct
  source 1..20: mol_type = other DNA
ggggatttctatgacctgta

SEQ ID NO: 56678 - DNA, 20 bp, synthetic construct
  source 1..20: mol_type = other DNA
acggagcgtgatgaatccag

SEQ ID NO: 56679 - DNA, 20 bp, synthetic construct
  source 1..20: mol_type = other DNA
cctcgtctttcatggagtcc

SEQ ID NO: 56680 - DNA, 20 bp, synthetic construct
  source 1..20: mol_type = other DNA
ggcacttggtggccgccagc

SEQ ID NO: 56681 - DNA, 20 bp, synthetic construct
  source 1..20: mol_type = other DNA
acaggaaaacccaaaaggtc

SEQ ID NO: 56682 - DNA, 20 bp, synthetic construct
  source 1..20: mol_type = other DNA
ctggctctcccggatgagga

SEQ ID NO: 56683 - DNA, 20 bp, synthetic construct
  source 1..20: mol_type = other DNA
catcctggcagtggagaagc

SEQ ID NO: 56684 - DNA, 20 bp, synthetic construct
  source 1..20: mol_type = other DNA
gtcctggtcgcagttcaaca

SEQ ID NO: 56685 - DNA, 20 bp, synthetic construct
  source 1..20: mol_type = other DNA
ccgtcttcacaaagtctgga

SEQ ID NO: 56686 - DNA, 20 bp, synthetic construct
  source 1..20: mol_type = other DNA
acgttggagatcaccacaac

SEQ ID NO: 56687 - DNA, 20 bp, synthetic construct
  source 1..20: mol_type = other DNA
tggctataagatgtgtgcca

SEQ ID NO: 56688 - DNA, 20 bp, synthetic construct
  source 1..20: mol_type = other DNA
cagcgactttggtctcacca

SEQ ID NO: 56689 - DNA, 20 bp, synthetic construct
  source 1..20: mol_type = other DNA
cagccagtggccgctcaggt

SEQ ID NO: 56690 - DNA, 20 bp, synthetic construct
  source 1..20: mol_type = other DNA
acgacggacagcacatgtgg

SEQ ID NO: 56691 - DNA, 20 bp, synthetic construct
  source 1..20: mol_type = other DNA
gcatctctggtcctcttcaa

SEQ ID NO: 56692 - DNA, 20 bp, synthetic construct
  source 1..20: mol_type = other DNA
ccagtggccgctcaggtagg

SEQ ID NO: 56693 - DNA, 20 bp, synthetic construct
  source 1..20: mol_type = other DNA
agcacagccagtggccgctc

SEQ ID NO: 56694 - DNA, 20 bp, synthetic construct
  source 1..20: mol_type = other DNA
agtccaggccgctgtcgtgg

SEQ ID NO: 56695 - DNA, 20 bp, synthetic construct
  source 1..20: mol_type = other DNA
ccgccagtctcctccagccc

SEQ ID NO: 56696 - DNA, 20 bp, synthetic construct
  source 1..20: mol_type = other DNA
ggcggtgaagagcctgaagc

SEQ ID NO: 56697 - DNA, 20 bp, synthetic construct
  source 1..20: mol_type = other DNA
gagtgaaggtgggtaccact

SEQ ID NO: 56698 - DNA, 20 bp, synthetic construct
  source 1..20: mol_type = other DNA
cggccacttccctgctgagc

SEQ ID NO: 56699 - DNA, 20 bp, synthetic construct
  source 1..20: mol_type = other DNA
gagcactcactcgatctggt

SEQ ID NO: 56700 - DNA, 20 bp, synthetic construct
  source 1..20: mol_type = other DNA
ctcagatgtggctgtgagca

SEQ ID NO: 56701 - DNA, 20 bp, synthetic construct
  source 1..20: mol_type = other DNA
gttctgaatcacctccgggt

SEQ ID NO: 56702 - DNA, 20 bp, synthetic construct
  source 1..20: mol_type = other DNA
gccatcaagtgtgtggtggt

SEQ ID NO: 56703 - DNA, 20 bp, synthetic construct
  source 1..20: mol_type = other DNA
gggccagcacccagcgctgc

SEQ ID NO: 56704 - DNA, 20 bp, synthetic construct
  source 1..20: mol_type = other DNA
ctcggccaggaaggcgtccg

SEQ ID NO: 56705 - DNA, 20 bp, synthetic construct
  source 1..20: mol_type = other DNA
ccaggcaggtaagggcctgt

SEQ ID NO: 56706 - DNA, 20 bp, synthetic construct
  source 1..20: mol_type = other DNA
cggcacccagtgctttggag

SEQ ID NO: 56707 - DNA, 20 bp, synthetic construct
  source 1..20: mol_type = other DNA
caagagaattgaagaagaag

SEQ ID NO: 56708 - DNA, 20 bp, synthetic construct
  source 1..20: mol_type = other DNA
ctgcgcacctggcattcatg

SEQ ID NO: 56709 - DNA, 20 bp, synthetic construct
  source 1..20: mol_type = other DNA
tcactcaccctgttgtcttc

SEQ ID NO: 56710 - DNA, 20 bp, synthetic construct
  source 1..20: mol_type = other DNA
gaggtttcaggaaccgttgc

SEQ ID NO: 56711 - DNA, 20 bp, synthetic construct
  source 1..20: mol_type = other DNA
gctgatccacatctgctgga

SEQ ID NO: 56712 - DNA, 20 bp, synthetic construct
  source 1..20: mol_type = other DNA
ccgaaatggctctgaggtgc

SEQ ID NO: 56713 - DNA, 20 bp, synthetic construct
  source 1..20: mol_type = other DNA
catagccgcccagcgagcgc

SEQ ID NO: 56714 - DNA, 20 bp, synthetic construct
  source 1..20: mol_type = other DNA
ctcagagagccaacaacggg

SEQ ID NO: 56715 - DNA, 20 bp, synthetic construct
  source 1..20: mol_type = other DNA
gtagagattggctgcgccag

SEQ ID NO: 56716 - DNA, 20 bp, synthetic construct
  source 1..20: mol_type = other DNA
ggccatcaagtgtgtggtgg

SEQ ID NO: 56717 - DNA, 20 bp, synthetic construct
  source 1..20: mol_type = other DNA
cctcggccaggaaggcgtcc

SEQ ID NO: 56718 - DNA, 20 bp, synthetic construct
  source 1..20: mol_type = other DNA
tcccaaactctgctacctgc

SEQ ID NO: 56719 - DNA, 20 bp, synthetic construct
  source 1..20: mol_type = other DNA
ggtcatccctacgggttgat

SEQ ID NO: 56720 - DNA, 20 bp, synthetic construct
  source 1..20: mol_type = other DNA
gcttacctcctccattatgt

SEQ ID NO: 56721 - DNA, 20 bp, synthetic construct
  source 1..20: mol_type = other DNA
accctgaaaggaagtgaaaa

SEQ ID NO: 56722 - DNA, 20 bp, synthetic construct
  source 1..20: mol_type = other DNA
cctcttccctgccaactacg

SEQ ID NO: 56723 - DNA, 20 bp, synthetic construct
  source 1..20: mol_type = other DNA
tctggaagggcacaaaggtc

SEQ ID NO: 56724 - DNA, 20 bp, synthetic construct
  source 1..20: mol_type = other DNA
ttcatcttctgctcaagccg

SEQ ID NO: 56725 - DNA, 20 bp, synthetic construct
  source 1..20: mol_type = other DNA
gatgaagacctggtagagat

SEQ ID NO: 56726 - DNA, 20 bp, synthetic construct
  source 1..20: mol_type = other DNA
tcctgaaatgagaaaagccg

SEQ ID NO: 56727 - DNA, 20 bp, synthetic construct
  source 1..20: mol_type = other DNA
tgaagcatctgcgaggacga

SEQ ID NO: 56728 - DNA, 20 bp, synthetic construct
  source 1..20: mol_type = other DNA
cttcgtcttctccatcagca

SEQ ID NO: 56729 - DNA, 20 bp, synthetic construct
  source 1..20: mol_type = other DNA
cctggggtcaccttgcagtg

SEQ ID NO: 56730 - DNA, 20 bp, synthetic construct
  source 1..20: mol_type = other DNA
cccaccgcactcgctgttgg

SEQ ID NO: 56731 - DNA, 20 bp, synthetic construct
  source 1..20: mol_type = other DNA
gcagcgagcataggcttcca

SEQ ID NO: 56732 - DNA, 20 bp, synthetic construct
  source 1..20: mol_type = other DNA
agatgaacagacaggtcctg

SEQ ID NO: 56733 - DNA, 20 bp, synthetic construct
  source 1..20: mol_type = other DNA
agcactgccgtatccactcc

SEQ ID NO: 56734 - DNA, 20 bp, synthetic construct
  source 1..20: mol_type = other DNA
gtgctctggtcaggctcgcg

SEQ ID NO: 56735 - DNA, 20 bp, synthetic construct
  source 1..20: mol_type = other DNA
gtgagctggtgacacacaca

SEQ ID NO: 56736 - DNA, 20 bp, synthetic construct
  source 1..20: mol_type = other DNA
cggccagttccaaaccctgg

SEQ ID NO: 56737 - DNA, 20 bp, synthetic construct
  source 1..20: mol_type = other DNA
catgcagttctcacacactg

SEQ ID NO: 56738 - DNA, 20 bp, synthetic construct
  source 1..20: mol_type = other DNA
caacacaatgataaaaacat

SEQ ID NO: 56739 - DNA, 20 bp, synthetic construct
  source 1..20: mol_type = other DNA
agacttggtatgagcatgca

SEQ ID NO: 56740 - DNA, 20 bp, synthetic construct
  source 1..20: mol_type = other DNA
tgcagatcccacaggcgccc

SEQ ID NO: 56741 - DNA, 20 bp, synthetic construct
  source 1..20: mol_type = other DNA
cgtcccagtagatcctgctc

SEQ ID NO: 56742 - DNA, 20 bp, synthetic construct
  source 1..20: mol_type = other DNA
ccctgtaggttcctcgtcta

SEQ ID NO: 56743 - DNA, 20 bp, synthetic construct
  source 1..20: mol_type = other DNA
taaacagtgcccaagcctgg

SEQ ID NO: 56744 - DNA, 20 bp, synthetic construct
  source 1..20: mol_type = other DNA
ccccacagatggtttcacga

SEQ ID NO: 56745 - DNA, 20 bp, synthetic construct
  source 1..20: mol_type = other DNA
ttacttgggctgccatgtcc

SEQ ID NO: 56746 - DNA, 20 bp, synthetic construct
  source 1..20: mol_type = other DNA
ctctcccgcatctaccccaa

SEQ ID NO: 56747 - DNA, 20 bp, synthetic construct
  source 1..20: mol_type = other DNA
cttgagagaagtatggtggc

SEQ ID NO: 56748 - DNA, 20 bp, synthetic construct
  source 1..20: mol_type = other DNA
aaagtatgccaggctggctt

SEQ ID NO: 56749 - DNA, 20 bp, synthetic construct
  source 1..20: mol_type = other DNA
agaaggtggggctttgacgc

SEQ ID NO: 56750 - DNA, 20 bp, synthetic construct
  source 1..20: mol_type = other DNA
tgatgagctgttcttccagg

SEQ ID NO: 56751 - DNA, 20 bp, synthetic construct
  source 1..20: mol_type = other DNA
cccagaagccccagaagccg

SEQ ID NO: 56752 - DNA, 20 bp, synthetic construct
  source 1..20: mol_type = other DNA
cgttaatgtgcactggtatc

SEQ ID NO: 56753 - DNA, 20 bp, synthetic construct
  source 1..20: mol_type = other DNA
gcatggcattcattgaagag

SEQ ID NO: 56754 - DNA, 20 bp, synthetic construct
  source 1..20: mol_type = other DNA
acagttgccgattacaggta

SEQ ID NO: 56755 - DNA, 20 bp, synthetic construct
  source 1..20: mol_type = other DNA
cgggcccttaccgatgtaca

SEQ ID NO: 56756 - DNA, 20 bp, synthetic construct
  source 1..20: mol_type = other DNA
tacagtgtagtagctgtcgt

SEQ ID NO: 56757 - DNA, 20 bp, synthetic construct
  source 1..20: mol_type = other DNA
tgacccttaccgtaagcccc

SEQ ID NO: 56758 - DNA, 20 bp, synthetic construct
  source 1..20: mol_type = other DNA
gatgtacatggagttggagt

SEQ ID NO: 56759 - DNA, 20 bp, synthetic construct
  source 1..20: mol_type = other DNA
gatctacaagtgagtgccag

SEQ ID NO: 56760 - DNA, 20 bp, synthetic construct
  source 1..20: mol_type = other DNA
ccgcctagaagcatttgcgg

SEQ ID NO: 56761 - DNA, 20 bp, synthetic construct
  source 1..20: mol_type = other DNA
tatcaccaacataatggagg

SEQ ID NO: 56762 - DNA, 20 bp, synthetic construct
  source 1..20: mol_type = other DNA
cacgaagctctccgatgtgt

SEQ ID NO: 56763 - DNA, 20 bp, synthetic construct
  source 1..20: mol_type = other DNA
tcagccagctccttacatga

SEQ ID NO: 56764 - DNA, 20 bp, synthetic construct
  source 1..20: mol_type = other DNA
attggttgtcccaggacgag

SEQ ID NO: 56765 - DNA, 20 bp, synthetic construct
  source 1..20: mol_type = other DNA
cgctgcggctggagaacttg

SEQ ID NO: 56766 - DNA, 20 bp, synthetic construct
  source 1..20: mol_type = other DNA
caccttcactctcaggaaca

SEQ ID NO: 56767 - DNA, 20 bp, synthetic construct
  source 1..20: mol_type = other DNA
gggcgatcctcccacctgtg

SEQ ID NO: 56768 - DNA, 20 bp, synthetic construct
  source 1..20: mol_type = other DNA
ccgacccagggtactacaac

SEQ ID NO: 56769 - DNA, 20 bp, synthetic construct
  source 1..20: mol_type = other DNA
agccggccagttccaaaccc

SEQ ID NO: 56770 - DNA, 20 bp, synthetic construct
  source 1..20: mol_type = other DNA
atggcctcctccatctgcag

SEQ ID NO: 56771 - DNA, 20 bp, synthetic construct
  source 1..20: mol_type = other DNA
aaggagccgtgagtgttccc

SEQ ID NO: 56772 - DNA, 20 bp, synthetic construct
  source 1..20: mol_type = other DNA
ggctgccagaaattgtttgg

SEQ ID NO: 56773 - DNA, 20 bp, synthetic construct
  source 1..20: mol_type = other DNA
ctgcagctcctcctgtgagt

SEQ ID NO: 56774 - DNA, 20 bp, synthetic construct
  source 1..20: mol_type = other DNA
caaatatcacctccttctcc

SEQ ID NO: 56775 - DNA, 20 bp, synthetic construct
  source 1..20: mol_type = other DNA
tgctgccgtagaagaagggc

SEQ ID NO: 56776 - DNA, 20 bp, synthetic construct
  source 1..20: mol_type = other DNA
tcagatactccaccagctgc

SEQ ID NO: 56777 - DNA, 20 bp, synthetic construct
  source 1..20: mol_type = other DNA
gaggaggtaagctctagagc

SEQ ID NO: 56778 - DNA, 20 bp, synthetic construct
  source 1..20: mol_type = other DNA
atcatacccacctagtgtga

SEQ ID NO: 56779 - DNA, 20 bp, synthetic construct
  source 1..20: mol_type = other DNA
atgtacatggagttggagtt

SEQ ID NO: 56780 - DNA, 20 bp, synthetic construct
  source 1..20: mol_type = other DNA
agaagtcccctggggagctc

SEQ ID NO: 56781 - DNA, 20 bp, synthetic construct
  source 1..20: mol_type = other DNA
attttgcagacgctctcagc

SEQ ID NO: 56782 - DNA, 20 bp, synthetic construct
  source 1..20: mol_type = other DNA
ccagaatgttggcagcccga

SEQ ID NO: 56783 - DNA, 20 bp, synthetic construct
  source 1..20: mol_type = other DNA
tcatacccacctagtgtgaa

SEQ ID NO: 56784 - DNA, 20 bp, synthetic construct
  source 1..20: mol_type = other DNA
ggaatccagtcgctggccct

SEQ ID NO: 56785 - DNA, 20 bp, synthetic construct
  source 1..20: mol_type = other DNA
gcaccaggccctccaggagc

SEQ ID NO: 56786 - DNA, 20 bp, synthetic construct
  source 1..20: mol_type = other DNA
catctccatgaccagcatga

SEQ ID NO: 56787 - DNA, 20 bp, synthetic construct
  source 1..20: mol_type = other DNA
cagatactccaccagctgca

SEQ ID NO: 56788 - DNA, 20 bp, synthetic construct
  source 1..20: mol_type = other DNA
cccgcactgattgcactgga

SEQ ID NO: 56789 - DNA, 20 bp, synthetic construct
  source 1..20: mol_type = other DNA
tcaggtatggggcagcgcct

SEQ ID NO: 56790 - DNA, 20 bp, synthetic construct
  source 1..20: mol_type = other DNA
gcctcggccaggaaggcgtc

SEQ ID NO: 56791 - DNA, 20 bp, synthetic construct
  source 1..20: mol_type = other DNA
atgggagatccggcagccct

SEQ ID NO: 56792 - DNA, 20 bp, synthetic construct
  source 1..20: mol_type = other DNA
cgagctggggttccacagcg

SEQ ID NO: 56793 - DNA, 20 bp, synthetic construct
  source 1..20: mol_type = other DNA
gcaagaggtgagcaccgggt

SEQ ID NO: 56794 - DNA, 20 bp, synthetic construct
  source 1..20: mol_type = other DNA
ggcccagacagcagacgcca

SEQ ID NO: 56795 - DNA, 20 bp, synthetic construct
  source 1..20: mol_type = other DNA
tggccggcccaagatcgacg

SEQ ID NO: 56796 - DNA, 20 bp, synthetic construct
  source 1..20: mol_type = other DNA
cactcgtaccttgcccatgt

SEQ ID NO: 56797 - DNA, 20 bp, synthetic construct
  source 1..20: mol_type = other DNA
gcccaggacctctgagcgaa

SEQ ID NO: 56798 - DNA, 20 bp, synthetic construct
  source 1..20: mol_type = other DNA
gcatttgaagggcttctccc

SEQ ID NO: 56799 - DNA, 20 bp, synthetic construct
  source 1..20: mol_type = other DNA
cttctccatcagcatggcgt

SEQ ID NO: 56800 - DNA, 20 bp, synthetic construct
  source 1..20: mol_type = other DNA
catactttgaagatcgtcat

SEQ ID NO: 56801 - DNA, 20 bp, synthetic construct
  source 1..20: mol_type = other DNA
ggtcctgcatggtatagagc

SEQ ID NO: 56802 - DNA, 20 bp, synthetic construct
  source 1..20: mol_type = other DNA
catgtccaggagtttgttga

SEQ ID NO: 56803 - DNA, 20 bp, synthetic construct
  source 1..20: mol_type = other DNA
caaggtgaccccaggcagca

SEQ ID NO: 56804 - DNA, 20 bp, synthetic construct
  source 1..20: mol_type = other DNA
cagggaagtggccgctcaag

SEQ ID NO: 56805 - DNA, 20 bp, synthetic construct
  source 1..20: mol_type = other DNA
cgcacgaggaaggagccgtc

SEQ ID NO: 56806 - DNA, 20 bp, synthetic construct
  source 1..20: mol_type = other DNA
tgtacttctcctccgtctgc

SEQ ID NO: 56807 - DNA, 20 bp, synthetic construct
  source 1..20: mol_type = other DNA
cctttgcccatgtggatctg

SEQ ID NO: 56808 - DNA, 20 bp, synthetic construct
  source 1..20: mol_type = other DNA
tgtggcgccaatgcacccac

SEQ ID NO: 56809 - DNA, 20 bp, synthetic construct
  source 1..20: mol_type = other DNA
ggaggtaagctctagagcag

SEQ ID NO: 56810 - DNA, 20 bp, synthetic construct
  source 1..20: mol_type = other DNA
caaccctggcttctatgtag

SEQ ID NO: 56811 - DNA, 20 bp, synthetic construct
  source 1..20: mol_type = other DNA
caggatgactgggtacctgc

SEQ ID NO: 56812 - DNA, 20 bp, synthetic construct
  source 1..20: mol_type = other DNA
agaccccttacgagagatcg

SEQ ID NO: 56813 - DNA, 20 bp, synthetic construct
  source 1..20: mol_type = other DNA
cgcccagccaccgcgtgacc

SEQ ID NO: 56814 - DNA, 20 bp, synthetic construct
  source 1..20: mol_type = other DNA
tccaggacaaactacatcgc

SEQ ID NO: 56815 - DNA, 20 bp, synthetic construct
  source 1..20: mol_type = other DNA
gcttcaaagagagggtgaga

SEQ ID NO: 56816 - DNA, 20 bp, synthetic construct
  source 1..20: mol_type = other DNA
gtgtcccaggaactgcatcc

SEQ ID NO: 56817 - DNA, 20 bp, synthetic construct
  source 1..20: mol_type = other DNA
ccccagctcgtcatcctcca

SEQ ID NO: 56818 - DNA, 20 bp, synthetic construct
  source 1..20: mol_type = other DNA
cagagatggagaagtcccct

SEQ ID NO: 56819 - DNA, 20 bp, synthetic construct
  source 1..20: mol_type = other DNA
gcagggctcaggacaaaaag

SEQ ID NO: 56820 - DNA, 20 bp, synthetic construct
  source 1..20: mol_type = other DNA
ctctgaggtttggtttggag

SEQ ID NO: 56821 - DNA, 20 bp, synthetic construct
  source 1..20: mol_type = other DNA
ctccaggcatgtgagaggat

SEQ ID NO: 56822 - DNA, 20 bp, synthetic construct
  source 1..20: mol_type = other DNA
cagcacgcaggggaccagga

SEQ ID NO: 56823 - DNA, 20 bp, synthetic construct
  source 1..20: mol_type = other DNA
tcactctatatgctctgtac

SEQ ID NO: 56824 - DNA, 20 bp, synthetic construct
  source 1..20: mol_type = other DNA
ctacctcatcagccaagaca

SEQ ID NO: 56825 - DNA, 20 bp, synthetic construct
  source 1..20: mol_type = other DNA
gcaggtttacaaagtccttg

SEQ ID NO: 56826 - DNA, 20 bp, synthetic construct
  source 1..20: mol_type = other DNA
cccaccatcacgccctggga

SEQ ID NO: 56827 - DNA, 20 bp, synthetic construct
  source 1..20: mol_type = other DNA
ccgggagagcgagagcaccg

SEQ ID NO: 56828 - DNA, 20 bp, synthetic construct
  source 1..20: mol_type = other DNA
ctctactcatctgtaagcgc

SEQ ID NO: 56829 - DNA, 20 bp, synthetic construct
  source 1..20: mol_type = other DNA
tacaaaccttgagagaagta

SEQ ID NO: 56830 - DNA, 20 bp, synthetic construct
  source 1..20: mol_type = other DNA
cctacgggttgatgggtgaa

SEQ ID NO: 56831 - DNA, 20 bp, synthetic construct
  source 1..20: mol_type = other DNA
tgctcttagaaagataaacc

SEQ ID NO: 56832 - DNA, 20 bp, synthetic construct
  source 1..20: mol_type = other DNA
ggcaagtactgcattcccga

SEQ ID NO: 56833 - DNA, 20 bp, synthetic construct
  source 1..20: mol_type = other DNA
catggggatgaagtacctgg

SEQ ID NO: 56834 - DNA, 20 bp, synthetic construct
  source 1..20: mol_type = other DNA
tgccatagtatttcagatcc

SEQ ID NO: 56835 - DNA, 20 bp, synthetic construct
  source 1..20: mol_type = other DNA
gcccttactctcttcatcaa

SEQ ID NO: 56836 - DNA, 20 bp, synthetic construct
  source 1..20: mol_type = other DNA
aactgggctggcggccagga

SEQ ID NO: 56837 - DNA, 20 bp, synthetic construct
  source 1..20: mol_type = other DNA
tcttgtaggtgtgctgatgt

SEQ ID NO: 56838 - DNA, 20 bp, synthetic construct
  source 1..20: mol_type = other DNA
ccttcccaggatgaagatga

SEQ ID NO: 56839 - DNA, 20 bp, synthetic construct
  source 1..20: mol_type = other DNA
gggagatccggcagccctcg

SEQ ID NO: 56840 - DNA, 20 bp, synthetic construct
  source 1..20: mol_type = other DNA
ctggaggaggaatgccaatg

SEQ ID NO: 56841 - DNA, 20 bp, synthetic construct
  source 1..20: mol_type = other DNA
ctaccttcagattggagagc

SEQ ID NO: 56842 - DNA, 20 bp, synthetic construct
  source 1..20: mol_type = other DNA
gctacctgtgagtggccagg

SEQ ID NO: 56843 - DNA, 20 bp, synthetic construct
  source 1..20: mol_type = other DNA
ttcctgggaaatctacggga

SEQ ID NO: 56844 - DNA, 20 bp, synthetic construct
  source 1..20: mol_type = other DNA
actcacgaggccgtttgaac

SEQ ID NO: 56845 - DNA, 20 bp, synthetic construct
  source 1..20: mol_type = other DNA
acacgccacattcaaagcca

SEQ ID NO: 56846 - DNA, 20 bp, synthetic construct
  source 1..20: mol_type = other DNA
ccttgctgactatttcaaga

SEQ ID NO: 56847 - DNA, 20 bp, synthetic construct
  source 1..20: mol_type = other DNA
tctaacctgggtaagggatg

SEQ ID NO: 56848 - DNA, 20 bp, synthetic construct
  source 1..20: mol_type = other DNA
gaccagtctctggctcacta

SEQ ID NO: 56849 - DNA, 20 bp, synthetic construct
  source 1..20: mol_type = other DNA
tccaggttctgaatcacctc

SEQ ID NO: 56850 - DNA, 20 bp, synthetic construct
  source 1..20: mol_type = other DNA
cttctgtaatacacttggag

SEQ ID NO: 56851 - DNA, 20 bp, synthetic construct
  source 1..20: mol_type = other DNA
ccaactcacatgagtcaacg

SEQ ID NO: 56852 - DNA, 20 bp, synthetic construct
  source 1..20: mol_type = other DNA
ggatggttcttaggtaggtg

SEQ ID NO: 56853 - DNA, 20 bp, synthetic construct
  source 1..20: mol_type = other DNA
tccagcagtgattcataatc

SEQ ID NO: 56854 - DNA, 20 bp, synthetic construct
  source 1..20: mol_type = other DNA
cctgtctcttcaggaaaccg

SEQ ID NO: 56855 - DNA, 20 bp, synthetic construct
  source 1..20: mol_type = other DNA
tctattgaaggagcagggac

SEQ ID NO: 56856 - DNA, 20 bp, synthetic construct
  source 1..20: mol_type = other DNA
cgggctcatctactgcctga

SEQ ID NO: 56857 - DNA, 20 bp, synthetic construct
  source 1..20: mol_type = other DNA
cgggagagcgagagcaccgc

SEQ ID NO: 56858 - DNA, 20 bp, synthetic construct
  source 1..20: mol_type = other DNA
cttcatctgcacgtcctccc

SEQ ID NO: 56859 - DNA, 20 bp, synthetic construct
  source 1..20: mol_type = other DNA
ggagaagtacactgacacgc

SEQ ID NO: 56860 - DNA, 20 bp, synthetic construct
  source 1..20: mol_type = other DNA
gcccagccaccgcgtgacct

SEQ ID NO: 56861 - DNA, 20 bp, synthetic construct
  source 1..20: mol_type = other DNA
caggcagagaacttactcat

SEQ ID NO: 56862 - DNA, 20 bp, synthetic construct
  source 1..20: mol_type = other DNA
gagacttggtatgagcatgc

SEQ ID NO: 56863 - DNA, 20 bp, synthetic construct
  source 1..20: mol_type = other DNA
gtcgggcccccagcacctgt

SEQ ID NO: 56864 - DNA, 20 bp, synthetic construct
  source 1..20: mol_type = other DNA
ttgcaagtctgacatttgaa

SEQ ID NO: 56865 - DNA, 20 bp, synthetic construct
  source 1..20: mol_type = other DNA
tgagtagagctttgtcgagc

SEQ ID NO: 56866 - DNA, 20 bp, synthetic construct
  source 1..20: mol_type = other DNA
ggactcactgctccaggatg

SEQ ID NO: 56867 - DNA, 20 bp, synthetic construct
  source 1..20: mol_type = other DNA
ccagggggcaaccgtgtctg

SEQ ID NO: 56868 - DNA, 20 bp, synthetic construct
  source 1..20: mol_type = other DNA
ccgcaggcgcgtcttccagg

SEQ ID NO: 56869 - DNA, 20 bp, synthetic construct
  source 1..20: mol_type = other DNA
atctacaagtgagtgccagt

SEQ ID NO: 56870 - DNA, 20 bp, synthetic construct
  source 1..20: mol_type = other DNA
cgccagatcacgtggagccg

SEQ ID NO: 56871 - DNA, 20 bp, synthetic construct
  source 1..20: mol_type = other DNA
ctcctggaaacaggacacaa

SEQ ID NO: 56872 - DNA, 20 bp, synthetic construct
  source 1..20: mol_type = other DNA
tcctcgcagatgcttcagat

SEQ ID NO: 56873 - DNA, 20 bp, synthetic construct
  source 1..20: mol_type = other DNA
tggcatccagggccagccgc

SEQ ID NO: 56874 - DNA, 20 bp, synthetic construct
  source 1..20: mol_type = other DNA
cagagcttgtgcattgacat

SEQ ID NO: 56875 - DNA, 20 bp, synthetic construct
  source 1..20: mol_type = other DNA
tttcagatccaggatactga

SEQ ID NO: 56876 - DNA, 20 bp, synthetic construct
  source 1..20: mol_type = other DNA
cctcgatcaggaggaacatg

SEQ ID NO: 56877 - DNA, 20 bp, synthetic construct
  source 1..20: mol_type = other DNA
ggtccaggacagagcagaca

SEQ ID NO: 56878 - DNA, 20 bp, synthetic construct
  source 1..20: mol_type = other DNA
gagggctcacctgggacatc

SEQ ID NO: 56879 - DNA, 20 bp, synthetic construct
  source 1..20: mol_type = other DNA
ctatcaaaaccattcgggaa

SEQ ID NO: 56880 - DNA, 20 bp, synthetic construct
  source 1..20: mol_type = other DNA
tgtactcgttgtcctcaatg

SEQ ID NO: 56881 - DNA, 20 bp, synthetic construct
  source 1..20: mol_type = other DNA
gcgtctgcaaaatgacccac

SEQ ID NO: 56882 - DNA, 20 bp, synthetic construct
  source 1..20: mol_type = other DNA
gccctcaacttccagacccc

SEQ ID NO: 56883 - DNA, 20 bp, synthetic construct
  source 1..20: mol_type = other DNA
ccaggcagagaacttactca

SEQ ID NO: 56884 - DNA, 20 bp, synthetic construct
  source 1..20: mol_type = other DNA
gcatactttgaagatcgtca

SEQ ID NO: 56885 - DNA, 20 bp, synthetic construct
  source 1..20: mol_type = other DNA
agggctcacctgggacatct

SEQ ID NO: 56886 - DNA, 20 bp, synthetic construct
  source 1..20: mol_type = other DNA
tcttcgtggctttctgtgga

SEQ ID NO: 56887 - DNA, 20 bp, synthetic construct
  source 1..20: mol_type = other DNA
tgttctcagagagccaacaa

SEQ ID NO: 56888 - DNA, 20 bp, synthetic construct
  source 1..20: mol_type = other DNA
ctctccagagaccagaagat

SEQ ID NO: 56889 - DNA, 20 bp, synthetic construct
  source 1..20: mol_type = other DNA
cttacccaggttagagccaa

SEQ ID NO: 56890 - DNA, 20 bp, synthetic construct
  source 1..20: mol_type = other DNA
cctcccagccatccgtcctg

SEQ ID NO: 56891 - DNA, 20 bp, synthetic construct
  source 1..20: mol_type = other DNA
tagttgagctgcaaagagaa

SEQ ID NO: 56892 - DNA, 20 bp, synthetic construct
  source 1..20: mol_type = other DNA
ccatgagtaagttctctgcc

SEQ ID NO: 56893 - DNA, 20 bp, synthetic construct
  source 1..20: mol_type = other DNA
cctgcagagaaacacacttg

SEQ ID NO: 56894 - DNA, 20 bp, synthetic construct
  source 1..20: mol_type = other DNA
cggtgcccacctcgaggctg

SEQ ID NO: 56895 - DNA, 20 bp, synthetic construct
  source 1..20: mol_type = other DNA
ttgcagctgcttcatgaggt

SEQ ID NO: 56896 - DNA, 20 bp, synthetic construct
  source 1..20: mol_type = other DNA
gaaggtacctctgagatgca

SEQ ID NO: 56897 - DNA, 20 bp, synthetic construct
  source 1..20: mol_type = other DNA
cagccccagctcatatgcac

SEQ ID NO: 56898 - DNA, 20 bp, synthetic construct
  source 1..20: mol_type = other DNA
gtccctcatctatgggaaga

SEQ ID NO: 56899 - DNA, 20 bp, synthetic construct
  source 1..20: mol_type = other DNA
atcagggctaccgctgccat

SEQ ID NO: 56900 - DNA, 20 bp, synthetic construct
  source 1..20: mol_type = other DNA
gccagaccacggggtgcctg

SEQ ID NO: 56901 - DNA, 20 bp, synthetic construct
  source 1..20: mol_type = other DNA
acttacggcacccggagctt

SEQ ID NO: 56902 - DNA, 20 bp, synthetic construct
  source 1..20: mol_type = other DNA
cgtagggatgaccaacccgg

SEQ ID NO: 56903 - DNA, 20 bp, synthetic construct
  source 1..20: mol_type = other DNA
cacgcaggaggcgatggaga

SEQ ID NO: 56904 - DNA, 20 bp, synthetic construct
  source 1..20: mol_type = other DNA
ctgcagttttagcatctgtg

SEQ ID NO: 56905 - DNA, 20 bp, synthetic construct
  source 1..20: mol_type = other DNA
tacactgatacatccctcga

SEQ ID NO: 56906 - DNA, 20 bp, synthetic construct
  source 1..20: mol_type = other DNA
catcatcttcatcctgggaa

SEQ ID NO: 56907 - DNA, 20 bp, synthetic construct
  source 1..20: mol_type = other DNA
cccttacctgcctggcagcc

SEQ ID NO: 56908 - DNA, 20 bp, synthetic construct
  source 1..20: mol_type = other DNA
tacagttcgggtggacactc

SEQ ID NO: 56909 - DNA, 20 bp, synthetic construct
  source 1..20: mol_type = other DNA
cctccatctgcaggggagct

SEQ ID NO: 56910 - DNA, 20 bp, synthetic construct
  source 1..20: mol_type = other DNA
cttcctgcccacacagtgat

SEQ ID NO: 56911 - DNA, 20 bp, synthetic construct
  source 1..20: mol_type = other DNA
ctcatgagtgcgtacagttc

SEQ ID NO: 56912 - DNA, 20 bp, synthetic construct
  source 1..20: mol_type = other DNA
tgactgccacagatccacat

SEQ ID NO: 56913 - DNA, 20 bp, synthetic construct
  source 1..20: mol_type = other DNA
ccgctgcacaagttcctggt

SEQ ID NO: 56914 - DNA, 20 bp, synthetic construct
  source 1..20: mol_type = other DNA
ttcctgcccacacagtgata

SEQ ID NO: 56915 - DNA, 20 bp, synthetic construct
  source 1..20: mol_type = other DNA
gaagccccagaagccgtggt

SEQ ID NO: 56916 - DNA, 20 bp, synthetic construct
  source 1..20: mol_type = other DNA
gcaggtaggaggtctcagac

SEQ ID NO: 56917 - DNA, 20 bp, synthetic construct
  source 1..20: mol_type = other DNA
cgtagagccgaaccagccgc

SEQ ID NO: 56918 - DNA, 20 bp, synthetic construct
  source 1..20: mol_type = other DNA
cttgtagggcttctggccgt

SEQ ID NO: 56919 - DNA, 20 bp, synthetic construct
  source 1..20: mol_type = other DNA
aagccctacaaggcaggcgc

SEQ ID NO: 56920 - DNA, 20 bp, synthetic construct
  source 1..20: mol_type = other DNA
cactcaccctcatggcatcc

SEQ ID NO: 56921 - DNA, 20 bp, synthetic construct
  source 1..20: mol_type = other DNA
cgcagatcaaagagagcctg

SEQ ID NO: 56922 - DNA, 20 bp, synthetic construct
  source 1..20: mol_type = other DNA
gggcaagtactgcattcccg

SEQ ID NO: 56923 - DNA, 20 bp, synthetic construct
  source 1..20: mol_type = other DNA
actcatgagtgcgtacagtt

SEQ ID NO: 56924 - DNA, 20 bp, synthetic construct
  source 1..20: mol_type = other DNA
gcaggtcctactcggaggga

SEQ ID NO: 56925 - DNA, 20 bp, synthetic construct
  source 1..20: mol_type = other DNA
atgtggaagtcacgcccgtt

SEQ ID NO: 56926 - DNA, 20 bp, synthetic construct
  source 1..20: mol_type = other DNA
atagttgagctgcaaagaga

SEQ ID NO: 56927 - DNA, 20 bp, synthetic construct
  source 1..20: mol_type = other DNA
ttgagagaagtatggtggca

SEQ ID NO: 56928 - DNA, 20 bp, synthetic construct
  source 1..20: mol_type = other DNA
ctgagccaggtcctggggag

SEQ ID NO: 56929 - DNA, 20 bp, synthetic construct
  source 1..20: mol_type = other DNA
gccctgctcgtggtgaccga

SEQ ID NO: 56930 - DNA, 20 bp, synthetic construct
  source 1..20: mol_type = other DNA
gttccctgccaactacgtgg

SEQ ID NO: 56931 - DNA, 20 bp, synthetic construct
  source 1..20: mol_type = other DNA
ccagaagttccccaagctcc

SEQ ID NO: 56932 - DNA, 20 bp, synthetic construct
  source 1..20: mol_type = other DNA
tctgtgccaagagataaagc

SEQ ID NO: 56933 - DNA, 20 bp, synthetic construct
  source 1..20: mol_type = other DNA
agcgtctgcaaaatgaccca

SEQ ID NO: 56934 - DNA, 20 bp, synthetic construct
  source 1..20: mol_type = other DNA
tgaagcagctgcaacaccag

SEQ ID NO: 56935 - DNA, 20 bp, synthetic construct
  source 1..20: mol_type = other DNA
ccatgccatcaacctgcgtg

SEQ ID NO: 56936 - DNA, 20 bp, synthetic construct
  source 1..20: mol_type = other DNA
ggccggtctgtggaaacaca

SEQ ID NO: 56937 - DNA, 20 bp, synthetic construct
  source 1..20: mol_type = other DNA
gccacagcccatggtccctg

SEQ ID NO: 56938 - DNA, 20 bp, synthetic construct
  source 1..20: mol_type = other DNA
ctgcccgctcacctggctca

SEQ ID NO: 56939 - DNA, 20 bp, synthetic construct
  source 1..20: mol_type = other DNA
aggacctgtctgttcatctc

SEQ ID NO: 56940 - DNA, 20 bp, synthetic construct
  source 1..20: mol_type = other DNA
gcgccctgacaactgtccag

SEQ ID NO: 56941 - DNA, 20 bp, synthetic construct
  source 1..20: mol_type = other DNA
tgggagatccggcagccctc

SEQ ID NO: 56942 - DNA, 20 bp, synthetic construct
  source 1..20: mol_type = other DNA
tgtacatggagttggagttg

SEQ ID NO: 56943 - DNA, 20 bp, synthetic construct
  source 1..20: mol_type = other DNA
cagtgagggcgtccctccgg

SEQ ID NO: 56944 - DNA, 20 bp, synthetic construct
  source 1..20: mol_type = other DNA
gctccagacatcgctgcggc

SEQ ID NO: 56945 - DNA, 20 bp, synthetic construct
  source 1..20: mol_type = other DNA
aagggaagataatggaacgg

SEQ ID NO: 56946 - DNA, 20 bp, synthetic construct
  source 1..20: mol_type = other DNA
cgcgccagatcacgtggagc

SEQ ID NO: 56947 - DNA, 20 bp, synthetic construct
  source 1..20: mol_type = other DNA
tgagctgcagccacagccca

SEQ ID NO: 56948 - DNA, 20 bp, synthetic construct
  source 1..20: mol_type = other DNA
actcacccaggaaggaaggc

SEQ ID NO: 56949 - DNA, 20 bp, synthetic construct
  source 1..20: mol_type = other DNA
gaatttatcatttcgtggtg

SEQ ID NO: 56950 - DNA, 20 bp, synthetic construct
  source 1..20: mol_type = other DNA
ggttccttccttgtaggcca

SEQ ID NO: 56951 - DNA, 20 bp, synthetic construct
  source 1..20: mol_type = other DNA
accgagacaacaagaaggtg

SEQ ID NO: 56952 - DNA, 20 bp, synthetic construct
  source 1..20: mol_type = other DNA
agatggagactttatatgct

SEQ ID NO: 56953 - DNA, 20 bp, synthetic construct
  source 1..20: mol_type = other DNA
ggcagcggagacagtaagtg

SEQ ID NO: 56954 - DNA, 20 bp, synthetic construct
  source 1..20: mol_type = other DNA
gatggagccgccgatccaca

SEQ ID NO: 56955 - DNA, 20 bp, synthetic construct
  source 1..20: mol_type = other DNA
ctccaccagctcctagaagg

SEQ ID NO: 56956 - DNA, 20 bp, synthetic construct
  source 1..20: mol_type = other DNA
cagatacctggtggaaatgg

SEQ ID NO: 56957 - DNA, 20 bp, synthetic construct
  source 1..20: mol_type = other DNA
caggtcctactcggagggaa

SEQ ID NO: 56958 - DNA, 20 bp, synthetic construct
  source 1..20: mol_type = other DNA
caggttgcagggcagcccgt

SEQ ID NO: 56959 - DNA, 20 bp, synthetic construct
  source 1..20: mol_type = other DNA
gtaggacaaggcctcccaca

SEQ ID NO: 56960 - DNA, 20 bp, synthetic construct
  source 1..20: mol_type = other DNA
gactgacatggaacagggga

SEQ ID NO: 56961 - DNA, 20 bp, synthetic construct
  source 1..20: mol_type = other DNA
tcttacctctcaatctgcag

SEQ ID NO: 56962 - DNA, 20 bp, synthetic construct
  source 1..20: mol_type = other DNA
aaaccttgagagaagtatgg

SEQ ID NO: 56963 - DNA, 20 bp, synthetic construct
  source 1..20: mol_type = other DNA
tacttacggcacccggagct

SEQ ID NO: 56964 - DNA, 20 bp, synthetic construct
  source 1..20: mol_type = other DNA
ctctggcacactgtggggga

SEQ ID NO: 56965 - DNA, 20 bp, synthetic construct
  source 1..20: mol_type = other DNA
agctcaccaatctgacaagc

SEQ ID NO: 56966 - DNA, 20 bp, synthetic construct
  source 1..20: mol_type = other DNA
agaagggcaggtgcgccgcg

SEQ ID NO: 56967 - DNA, 20 bp, synthetic construct
  source 1..20: mol_type = other DNA
tcatgaggttggcctcggcc

SEQ ID NO: 56968 - DNA, 20 bp, synthetic construct
  source 1..20: mol_type = other DNA
acggaggaagaagattgccc

SEQ ID NO: 56969 - DNA, 20 bp, synthetic construct
  source 1..20: mol_type = other DNA
aggaggtaagctctagagca

SEQ ID NO: 56970 - DNA, 20 bp, synthetic construct
  source 1..20: mol_type = other DNA
actgacatggaacaggggaa

SEQ ID NO: 56971 - DNA, 20 bp, synthetic construct
  source 1..20: mol_type = other DNA
tcttcatcaaatacaaggag

SEQ ID NO: 56972 - DNA, 20 bp, synthetic construct
  source 1..20: mol_type = other DNA
cgctgatcttggcgtagtgc

SEQ ID NO: 56973 - DNA, 20 bp, synthetic construct
  source 1..20: mol_type = other DNA
ccacagcccatggtccctga

SEQ ID NO: 56974 - DNA, 20 bp, synthetic construct
  source 1..20: mol_type = other DNA
tcaccttgcagtggggaagc

SEQ ID NO: 56975 - DNA, 20 bp, synthetic construct
  source 1..20: mol_type = other DNA
ggcaggcgtagttgcagagg

SEQ ID NO: 56976 - DNA, 20 bp, synthetic construct
  source 1..20: mol_type = other DNA
gtctgtcaagaagaacttgg

SEQ ID NO: 56977 - DNA, 20 bp, synthetic construct
  source 1..20: mol_type = other DNA
ccgcctcaccaggttctcaa

SEQ ID NO: 56978 - DNA, 20 bp, synthetic construct
  source 1..20: mol_type = other DNA
gcggcagaggtgcagcacct

SEQ ID NO: 56979 - DNA, 20 bp, synthetic construct
  source 1..20: mol_type = other DNA
gaatccagtcgctggccctt

SEQ ID NO: 56980 - DNA, 20 bp, synthetic construct
  source 1..20: mol_type = other DNA
ctctgccgcagcctcgaggt

SEQ ID NO: 56981 - DNA, 20 bp, synthetic construct
  source 1..20: mol_type = other DNA
gcccacaggcattgcagaca

SEQ ID NO: 56982 - DNA, 20 bp, synthetic construct
  source 1..20: mol_type = other DNA
gacagaaatggctgcaacca

SEQ ID NO: 56983 - DNA, 20 bp, synthetic construct
  source 1..20: mol_type = other DNA
agcgcagaaaggcaaattca

SEQ ID NO: 56984 - DNA, 20 bp, synthetic construct
  source 1..20: mol_type = other DNA
caggtcacgcggtggctggg

SEQ ID NO: 56985 - DNA, 20 bp, synthetic construct
  source 1..20: mol_type = other DNA
gcggccacttccctgctgag

SEQ ID NO: 56986 - DNA, 20 bp, synthetic construct
  source 1..20: mol_type = other DNA
gtactacaacgggcacacga

SEQ ID NO: 56987 - DNA, 20 bp, synthetic construct
  source 1..20: mol_type = other DNA
ctcgtcacaacaacaggtgc

SEQ ID NO: 56988 - DNA, 20 bp, synthetic construct
  source 1..20: mol_type = other DNA
ttgcagccctcgattccagc

SEQ ID NO: 56989 - DNA, 20 bp, synthetic construct
  source 1..20: mol_type = other DNA
actgagccaggtcctgggga

SEQ ID NO: 56990 - DNA, 20 bp, synthetic construct
  source 1..20: mol_type = other DNA
agatccagtagtgggaaaga

SEQ ID NO: 56991 - DNA, 20 bp, synthetic construct
  source 1..20: mol_type = other DNA
ctgaacttgtcgtctactgc

SEQ ID NO: 56992 - DNA, 20 bp, synthetic construct
  source 1..20: mol_type = other DNA
cactcgccgctcctgcgcca

SEQ ID NO: 56993 - DNA, 20 bp, synthetic construct
  source 1..20: mol_type = other DNA
ggagctatggggtcaccatg

SEQ ID NO: 56994 - DNA, 20 bp, synthetic construct
  source 1..20: mol_type = other DNA
cgagagagtgagaccttcgt

SEQ ID NO: 56995 - DNA, 20 bp, synthetic construct
  source 1..20: mol_type = other DNA
tacaacaccatgaggacata

SEQ ID NO: 56996 - DNA, 20 bp, synthetic construct
  source 1..20: mol_type = other DNA
tgaagaacagctcatagccc

SEQ ID NO: 56997 - DNA, 20 bp, synthetic construct
  source 1..20: mol_type = other DNA
cgcagcagtctggagaaggc

SEQ ID NO: 56998 - DNA, 20 bp, synthetic construct
  source 1..20: mol_type = other DNA
tcttgaaggggctcactaaa

SEQ ID NO: 56999 - DNA, 20 bp, synthetic construct
  source 1..20: mol_type = other DNA
ctggaagtcatgcccgttgg

SEQ ID NO: 57000 - DNA, 20 bp, synthetic construct
  source 1..20: mol_type = other DNA
cctatccaggtacctgaccg

SEQ ID NO: 57001 - DNA, 20 bp, synthetic construct
  source 1..20: mol_type = other DNA
ttctgtctattgaaggagca

SEQ ID NO: 57002 - DNA, 20 bp, synthetic construct
  source 1..20: mol_type = other DNA
ccgtctgctggatctcccgc

SEQ ID NO: 57003 - DNA, 20 bp, synthetic construct
  source 1..20: mol_type = other DNA
ccaggtgagcgggcagaggt

SEQ ID NO: 57004 - DNA, 20 bp, synthetic construct
  source 1..20: mol_type = other DNA
acagcacaagaagctggctg

SEQ ID NO: 57005 - DNA, 20 bp, synthetic construct
  source 1..20: mol_type = other DNA
cgaggaggagatccagtagt

SEQ ID NO: 57006 - DNA, 20 bp, synthetic construct
  source 1..20: mol_type = other DNA
gaccgagacaacaagaaggt

SEQ ID NO: 57007 - DNA, 20 bp, synthetic construct
  source 1..20: mol_type = other DNA
ggccagaagccctacaaggc

SEQ ID NO: 57008 - DNA, 20 bp, synthetic construct
  source 1..20: mol_type = other DNA
ggcggcaggcgtagttgcag

SEQ ID NO: 57009 - DNA, 20 bp, synthetic construct
  source 1..20: mol_type = other DNA
cctcgtcacaacaacaggtg

SEQ ID NO: 57010 - DNA, 20 bp, synthetic construct
  source 1..20: mol_type = other DNA
caccatgaggacatatggat

SEQ ID NO: 57011 - DNA, 20 bp, synthetic construct
  source 1..20: mol_type = other DNA
ttacactgatacatccctcg

SEQ ID NO: 57012 - DNA, 20 bp, synthetic construct
  source 1..20: mol_type = other DNA
ggccacctgaggacgcactc

SEQ ID NO: 57013 - DNA, 20 bp, synthetic construct
  source 1..20: mol_type = other DNA
tccagaagttccccaagctc

SEQ ID NO: 57014 - DNA, 20 bp, synthetic construct
  source 1..20: mol_type = other DNA
cctccaccacctccccgctg

SEQ ID NO: 57015 - DNA, 20 bp, synthetic construct
  source 1..20: mol_type = other DNA
tccatggctaccgcctgccc

SEQ ID NO: 57016 - DNA, 20 bp, synthetic construct
  source 1..20: mol_type = other DNA
ccactggctcatccagtgcc

SEQ ID NO: 57017 - DNA, 20 bp, synthetic construct
  source 1..20: mol_type = other DNA
tggagtccaggccgctgtcg

SEQ ID NO: 57018 - DNA, 20 bp, synthetic construct
  source 1..20: mol_type = other DNA
catccgcaggcagcgagcat

SEQ ID NO: 57019 - DNA, 20 bp, synthetic construct
  source 1..20: mol_type = other DNA
ggcacagaggcacagagctt

SEQ ID NO: 57020 - DNA, 20 bp, synthetic construct
  source 1..20: mol_type = other DNA
ttcctctataggtatcttga

SEQ ID NO: 57021 - DNA, 20 bp, synthetic construct
  source 1..20: mol_type = other DNA
caccatcagcaggtcccgca

SEQ ID NO: 57022 - DNA, 20 bp, synthetic construct
  source 1..20: mol_type = other DNA
aatgagcttctccacctgcg

SEQ ID NO: 57023 - DNA, 20 bp, synthetic construct
  source 1..20: mol_type = other DNA
gaacttaccagccttcgctt

SEQ ID NO: 57024 - DNA, 20 bp, synthetic construct
  source 1..20: mol_type = other DNA
ggccactgtcaatagagaga

SEQ ID NO: 57025 - DNA, 20 bp, synthetic construct
  source 1..20: mol_type = other DNA
tacacctatatattcctcgt

SEQ ID NO: 57026 - DNA, 20 bp, synthetic construct
  source 1..20: mol_type = other DNA
gagcagggctggggagaagg

SEQ ID NO: 57027 - DNA, 20 bp, synthetic construct
  source 1..20: mol_type = other DNA
ccacatgttcctcctgatcg

SEQ ID NO: 57028 - DNA, 20 bp, synthetic construct
  source 1..20: mol_type = other DNA
gctccacggtcaggaagtcg

SEQ ID NO: 57029 - DNA, 20 bp, synthetic construct
  source 1..20: mol_type = other DNA
gcaccaagtttgacacgctc

SEQ ID NO: 57030 - DNA, 20 bp, synthetic construct
  source 1..20: mol_type = other DNA
agttggaggaatccagtcgc

SEQ ID NO: 57031 - DNA, 20 bp, synthetic construct
  source 1..20: mol_type = other DNA
cttccacatgagcgtggtca

SEQ ID NO: 57032 - DNA, 20 bp, synthetic construct
  source 1..20: mol_type = other DNA
ctcttacctcttcctccgcg

SEQ ID NO: 57033 - DNA, 20 bp, synthetic construct
  source 1..20: mol_type = other DNA
tcctctataggtatcttgaa

SEQ ID NO: 57034 - DNA, 20 bp, synthetic construct
  source 1..20: mol_type = other DNA
ggtgttgcagctgcttcatg

SEQ ID NO: 57035 - DNA, 20 bp, synthetic construct
  source 1..20: mol_type = other DNA
tctgcacacaaggagtgtct

SEQ ID NO: 57036 - DNA, 20 bp, synthetic construct
  source 1..20: mol_type = other DNA
accgcccagacgactggcca

SEQ ID NO: 57037 - DNA, 20 bp, synthetic construct
  source 1..20: mol_type = other DNA
ctcactcgatctggtcggac

SEQ ID NO: 57038 - DNA, 20 bp, synthetic construct
  source 1..20: mol_type = other DNA
agcagagtttgggatccagc

SEQ ID NO: 57039 - DNA, 20 bp, synthetic construct
  source 1..20: mol_type = other DNA
gagaagtacactgacacgct

SEQ ID NO: 57040 - DNA, 20 bp, synthetic construct
  source 1..20: mol_type = other DNA
ggtaccagggcatccgctcg

SEQ ID NO: 57041 - DNA, 20 bp, synthetic construct
  source 1..20: mol_type = other DNA
acagagagggagaagtcccc

SEQ ID NO: 57042 - DNA, 20 bp, synthetic construct
  source 1..20: mol_type = other DNA
gagctatggggtcaccatgt

SEQ ID NO: 57043 - DNA, 20 bp, synthetic construct
  source 1..20: mol_type = other DNA
gcattgacattggttgtccc

SEQ ID NO: 57044 - DNA, 20 bp, synthetic construct
  source 1..20: mol_type = other DNA
tgggcaaggtacgagtggga

SEQ ID NO: 57045 - DNA, 20 bp, synthetic construct
  source 1..20: mol_type = other DNA
tcctccaggtctgcccaaga

SEQ ID NO: 57046 - DNA, 20 bp, synthetic construct
  source 1..20: mol_type = other DNA
acagagatggagaagtcccc

SEQ ID NO: 57047 - DNA, 20 bp, synthetic construct
  source 1..20: mol_type = other DNA
acctggaaggtcttccgctc

SEQ ID NO: 57048 - DNA, 20 bp, synthetic construct
  source 1..20: mol_type = other DNA
agagatggagaagtcccctg

SEQ ID NO: 57049 - DNA, 20 bp, synthetic construct
  source 1..20: mol_type = other DNA
cttacggcacccggagcttg

SEQ ID NO: 57050 - DNA, 20 bp, synthetic construct
  source 1..20: mol_type = other DNA
actcacctgataagaggcag

SEQ ID NO: 57051 - DNA, 20 bp, synthetic construct
  source 1..20: mol_type = other DNA
ccatggctaccgcctgccca

SEQ ID NO: 57052 - DNA, 20 bp, synthetic construct
  source 1..20: mol_type = other DNA
gccggtccaccaggatgggt

SEQ ID NO: 57053 - DNA, 20 bp, synthetic construct
  source 1..20: mol_type = other DNA
agttgagctgcaaagagaag

SEQ ID NO: 57054 - DNA, 20 bp, synthetic construct
  source 1..20: mol_type = other DNA
gcccatggtccctgagggaa

SEQ ID NO: 57055 - DNA, 20 bp, synthetic construct
  source 1..20: mol_type = other DNA
cacagttgccgattacaggt

SEQ ID NO: 57056 - DNA, 20 bp, synthetic construct
  source 1..20: mol_type = other DNA
gcagggctggggagaaggtg

SEQ ID NO: 57057 - DNA, 20 bp, synthetic construct
  source 1..20: mol_type = other DNA
agtgccatggctgctctccc

SEQ ID NO: 57058 - DNA, 20 bp, synthetic construct
  source 1..20: mol_type = other DNA
tcacgcactgagccaggtcc

SEQ ID NO: 57059 - DNA, 20 bp, synthetic construct
  source 1..20: mol_type = other DNA
agaagtcgcagcgacccgag

SEQ ID NO: 57060 - DNA, 20 bp, synthetic construct
  source 1..20: mol_type = other DNA
tgctgcaccaggtgtccatg

SEQ ID NO: 57061 - DNA, 20 bp, synthetic construct
  source 1..20: mol_type = other DNA
tcagcagggaggccaactcc

SEQ ID NO: 57062 - DNA, 20 bp, synthetic construct
  source 1..20: mol_type = other DNA
cctccagagtgtggttgtgg

SEQ ID NO: 57063 - DNA, 20 bp, synthetic construct
  source 1..20: mol_type = other DNA
gcgaggaggagatccagtag

SEQ ID NO: 57064 - DNA, 20 bp, synthetic construct
  source 1..20: mol_type = other DNA
gacctggaaggtcttccgct

SEQ ID NO: 57065 - DNA, 20 bp, synthetic construct
  source 1..20: mol_type = other DNA
tgggtaagggatgcggccgt

SEQ ID NO: 57066 - DNA, 20 bp, synthetic construct
  source 1..20: mol_type = other DNA
caggacctggagcagcgcag

SEQ ID NO: 57067 - DNA, 20 bp, synthetic construct
  source 1..20: mol_type = other DNA
cacacaaggagtgtctgggg

SEQ ID NO: 57068 - DNA, 20 bp, synthetic construct
  source 1..20: mol_type = other DNA
ctgtctcttcaggaaaccgc

SEQ ID NO: 57069 - DNA, 20 bp, synthetic construct
  source 1..20: mol_type = other DNA
caatgtcaatgcacaagctc

SEQ ID NO: 57070 - DNA, 20 bp, synthetic construct
  source 1..20: mol_type = other DNA
aacctttctgagaatgctcc

SEQ ID NO: 57071 - DNA, 20 bp, synthetic construct
  source 1..20: mol_type = other DNA
ccgaccaggaacttgtgcag

SEQ ID NO: 57072 - DNA, 20 bp, synthetic construct
  source 1..20: mol_type = other DNA
tccagcacagcctcatgagt

SEQ ID NO: 57073 - DNA, 20 bp, synthetic construct
  source 1..20: mol_type = other DNA
gtcacgcaccggcatggaca

SEQ ID NO: 57074 - DNA, 20 bp, synthetic construct
  source 1..20: mol_type = other DNA
cccttcggtcaccacgagca

SEQ ID NO: 57075 - DNA, 20 bp, synthetic construct
  source 1..20: mol_type = other DNA
cctgggacatctgggggcgc

SEQ ID NO: 57076 - DNA, 20 bp, synthetic construct
  source 1..20: mol_type = other DNA
cgaagagctcgctccgcttg

SEQ ID NO: 57077 - DNA, 20 bp, synthetic construct
  source 1..20: mol_type = other DNA
tgccaggctgaggccgcgga

SEQ ID NO: 57078 - DNA, 20 bp, synthetic construct
  source 1..20: mol_type = other DNA
ttacacctatatattcctcg

SEQ ID NO: 57079 - DNA, 20 bp, synthetic construct
  source 1..20: mol_type = other DNA
aatccagtcgctggcccttg

SEQ ID NO: 57080 - DNA, 20 bp, synthetic construct
  source 1..20: mol_type = other DNA
cggcccacgagcggatgccc

SEQ ID NO: 57081 - DNA, 20 bp, synthetic construct
  source 1..20: mol_type = other DNA
agcaggaaggcatacctgga

SEQ ID NO: 57082 - DNA, 20 bp, synthetic construct
  source 1..20: mol_type = other DNA
ctcaccagagatgaacagac

SEQ ID NO: 57083 - DNA, 20 bp, synthetic construct
  source 1..20: mol_type = other DNA
ctggattacctcttgccctc

SEQ ID NO: 57084 - DNA, 20 bp, synthetic construct
  source 1..20: mol_type = other DNA
cctgcagattgcagaaggca

SEQ ID NO: 57085 - DNA, 20 bp, synthetic construct
  source 1..20: mol_type = other DNA
ctgcgcaggtagtcaaaggt

SEQ ID NO: 57086 - DNA, 20 bp, synthetic construct
  source 1..20: mol_type = other DNA
agatgcagtcgggcactcac

SEQ ID NO: 57087 - DNA, 20 bp, synthetic construct
  source 1..20: mol_type = other DNA
gggcggtgctacaactgggc

SEQ ID NO: 57088 - DNA, 20 bp, synthetic construct
  source 1..20: mol_type = other DNA
gctgcagtcgattgtactga

SEQ ID NO: 57089 - DNA, 20 bp, synthetic construct
  source 1..20: mol_type = other DNA
gaagaagggcaggtgcgccg

SEQ ID NO: 57090 - DNA, 20 bp, synthetic construct
  source 1..20: mol_type = other DNA
tgcagcgacagcccatccgc

SEQ ID NO: 57091 - DNA, 20 bp, synthetic construct
  source 1..20: mol_type = other DNA
tgcagtggtcctcaatggac

SEQ ID NO: 57092 - DNA, 20 bp, synthetic construct
  source 1..20: mol_type = other DNA
gccgtcacctgaggcgttgc

SEQ ID NO: 57093 - DNA, 20 bp, synthetic construct
  source 1..20: mol_type = other DNA
acctgttgttgtgacgaggc

SEQ ID NO: 57094 - DNA, 20 bp, synthetic construct
  source 1..20: mol_type = other DNA
acaggatgactgggtacctg

SEQ ID NO: 57095 - DNA, 20 bp, synthetic construct
  source 1..20: mol_type = other DNA
ccgcactgattgcactggaa

SEQ ID NO: 57096 - DNA, 20 bp, synthetic construct
  source 1..20: mol_type = other DNA
cctcagacacggttgccccc

SEQ ID NO: 57097 - DNA, 20 bp, synthetic construct
  source 1..20: mol_type = other DNA
tcccaggtcacgcggtggct

SEQ ID NO: 57098 - DNA, 20 bp, synthetic construct
  source 1..20: mol_type = other DNA
ctactcacgggatggggagc

SEQ ID NO: 57099 - DNA, 20 bp, synthetic construct
  source 1..20: mol_type = other DNA
acgactggccagggcgcctg

SEQ ID NO: 57100 - DNA, 20 bp, synthetic construct
  source 1..20: mol_type = other DNA
ctcagaggtaccttctatca

SEQ ID NO: 57101 - DNA, 20 bp, synthetic construct
  source 1..20: mol_type = other DNA
acgcactgagccaggtcctg

SEQ ID NO: 57102 - DNA, 20 bp, synthetic construct
  source 1..20: mol_type = other DNA
gtcctcttcgtggctttctg

SEQ ID NO: 57103 - DNA, 20 bp, synthetic construct
  source 1..20: mol_type = other DNA
tcgccccgacttcctgaccg

SEQ ID NO: 57104 - DNA, 20 bp, synthetic construct
  source 1..20: mol_type = other DNA
gatgacctgtgacggggcag

SEQ ID NO: 57105 - DNA, 20 bp, synthetic construct
  source 1..20: mol_type = other DNA
gtaccagggcatccgctcgt

SEQ ID NO: 57106 - DNA, 20 bp, synthetic construct
  source 1..20: mol_type = other DNA
gcacgaggaaggagccgtca

SEQ ID NO: 57107 - DNA, 20 bp, synthetic construct
  source 1..20: mol_type = other DNA
aggttgtctgtaaagacaag

SEQ ID NO: 57108 - DNA, 20 bp, synthetic construct
  source 1..20: mol_type = other DNA
tgaagaggattccatccagc

SEQ ID NO: 57109 - DNA, 20 bp, synthetic construct
  source 1..20: mol_type = other DNA
acagctctggcacactgtgg

SEQ ID NO: 57110 - DNA, 20 bp, synthetic construct
  source 1..20: mol_type = other DNA
ccccttcggtcaccacgagc

SEQ ID NO: 57111 - DNA, 20 bp, synthetic construct
  source 1..20: mol_type = other DNA
gggcaggaagcagatcgacg

SEQ ID NO: 57112 - DNA, 20 bp, synthetic construct
  source 1..20: mol_type = other DNA
cagtaagtgtggcatcacca

SEQ ID NO: 57113 - DNA, 20 bp, synthetic construct
  source 1..20: mol_type = other DNA
cttaccttgtcagaaaatgg

SEQ ID NO: 57114 - DNA, 20 bp, synthetic construct
  source 1..20: mol_type = other DNA
gccgaacttctcacagcagg

SEQ ID NO: 57115 - DNA, 20 bp, synthetic construct
  source 1..20: mol_type = other DNA
tgcagtagcggccatagacg

SEQ ID NO: 57116 - DNA, 20 bp, synthetic construct
  source 1..20: mol_type = other DNA
ctgacaggccttgcaggatg

SEQ ID NO: 57117 - DNA, 20 bp, synthetic construct
  source 1..20: mol_type = other DNA
aggtttcaggaaccgttgca

SEQ ID NO: 57118 - DNA, 20 bp, synthetic construct
  source 1..20: mol_type = other DNA
gactcactctgaggccacaa

SEQ ID NO: 57119 - DNA, 20 bp, synthetic construct
  source 1..20: mol_type = other DNA
cgtcctcaggtggccagtga

SEQ ID NO: 57120 - DNA, 20 bp, synthetic construct
  source 1..20: mol_type = other DNA
catgtggaagtcacgcccgt

SEQ ID NO: 57121 - DNA, 20 bp, synthetic construct
  source 1..20: mol_type = other DNA
cgggctcactggtgtaatgg

SEQ ID NO: 57122 - DNA, 20 bp, synthetic construct
  source 1..20: mol_type = other DNA
ttaccgtcagccgctctcgg

SEQ ID NO: 57123 - DNA, 20 bp, synthetic construct
  source 1..20: mol_type = other DNA
tcgggtgcgtaccacttgag

SEQ ID NO: 57124 - DNA, 20 bp, synthetic construct
  source 1..20: mol_type = other DNA
ctgcacacaaggagtgtctg

SEQ ID NO: 57125 - DNA, 20 bp, synthetic construct
  source 1..20: mol_type = other DNA
gttccccgtcgatcttgggc

SEQ ID NO: 57126 - DNA, 20 bp, synthetic construct
  source 1..20: mol_type = other DNA
gcagatcaaagagagcctgc

SEQ ID NO: 57127 - DNA, 20 bp, synthetic construct
  source 1..20: mol_type = other DNA
ggaggaggacgctgatcagc

SEQ ID NO: 57128 - DNA, 20 bp, synthetic construct
  source 1..20: mol_type = other DNA
gtcctgaaagagtcaagata

SEQ ID NO: 57129 - DNA, 20 bp, synthetic construct
  source 1..20: mol_type = other DNA
tttccaggagcctgactacg

SEQ ID NO: 57130 - DNA, 20 bp, synthetic construct
  source 1..20: mol_type = other DNA
aagaagggcaggtgcgccgc

SEQ ID NO: 57131 - DNA, 20 bp, synthetic construct
  source 1..20: mol_type = other DNA
ggctcacctgggacatctgg

SEQ ID NO: 57132 - DNA, 20 bp, synthetic construct
  source 1..20: mol_type = other DNA
cttgcagccctcgattccag

SEQ ID NO: 57133 - DNA, 20 bp, synthetic construct
  source 1..20: mol_type = other DNA
tcacgcaccggcatggacac

SEQ ID NO: 57134 - DNA, 20 bp, synthetic construct
  source 1..20: mol_type = other DNA
cacagtgtgtgagaactgca

SEQ ID NO: 57135 - DNA, 20 bp, synthetic construct
  source 1..20: mol_type = other DNA
gtcgagcaggaaggcatacc

SEQ ID NO: 57136 - DNA, 20 bp, synthetic construct
  source 1..20: mol_type = other DNA
cacacgcaagtgagtgcggc

SEQ ID NO: 57137 - DNA, 20 bp, synthetic construct
  source 1..20: mol_type = other DNA
ctccaggtacttcatcccca

SEQ ID NO: 57138 - DNA, 20 bp, synthetic construct
  source 1..20: mol_type = other DNA
ctccccaggcccgctcagca

SEQ ID NO: 57139 - DNA, 20 bp, synthetic construct
  source 1..20: mol_type = other DNA
cttaccgatgtacatggagt

SEQ ID NO: 57140 - DNA, 20 bp, synthetic construct
  source 1..20: mol_type = other DNA
cctcgcacaacacgtgagtg

SEQ ID NO: 57141 - DNA, 20 bp, synthetic construct
  source 1..20: mol_type = other DNA
ggtttcaggaaccgttgcag

SEQ ID NO: 57142 - DNA, 20 bp, synthetic construct
  source 1..20: mol_type = other DNA
cccggcactggatgagccag

SEQ ID NO: 57143 - DNA, 20 bp, synthetic construct
  source 1..20: mol_type = other DNA
gaaacactacctggtacaca

SEQ ID NO: 57144 - DNA, 20 bp, synthetic construct
  source 1..20: mol_type = other DNA
ttaccttcccgctggaatcg

SEQ ID NO: 57145 - DNA, 20 bp, synthetic construct
  source 1..20: mol_type = other DNA
catagctccagacatcgctg

SEQ ID NO: 57146 - DNA, 20 bp, synthetic construct
  source 1..20: mol_type = other DNA
tggttccagatataacgtcg

SEQ ID NO: 57147 - DNA, 20 bp, synthetic construct
  source 1..20: mol_type = other DNA
agagctcagggtgacaggtg

SEQ ID NO: 57148 - DNA, 20 bp, synthetic construct
  source 1..20: mol_type = other DNA
gacaagttcagagagctcca

SEQ ID NO: 57149 - DNA, 20 bp, synthetic construct
  source 1..20: mol_type = other DNA
cagcacaagaagctggctga

SEQ ID NO: 57150 - DNA, 20 bp, synthetic construct
  source 1..20: mol_type = other DNA
ttgcaggtacgcaggcccca

SEQ ID NO: 57151 - DNA, 20 bp, synthetic construct
  source 1..20: mol_type = other DNA
gtaccttgaaagttggcata

SEQ ID NO: 57152 - DNA, 20 bp, synthetic construct
  source 1..20: mol_type = other DNA
cttgaaggggctcactaaag

SEQ ID NO: 57153 - DNA, 20 bp, synthetic construct
  source 1..20: mol_type = other DNA
ccacctcgaggctgcggcag

SEQ ID NO: 57154 - DNA, 20 bp, synthetic construct
  source 1..20: mol_type = other DNA
agaagcgagccccatcgatg

SEQ ID NO: 57155 - DNA, 20 bp, synthetic construct
  source 1..20: mol_type = other DNA
aggaggactcactggagaac

SEQ ID NO: 57156 - DNA, 20 bp, synthetic construct
  source 1..20: mol_type = other DNA
gtcatccttcccggaaacca

SEQ ID NO: 57157 - DNA, 20 bp, synthetic construct
  source 1..20: mol_type = other DNA
gctgaggccgcggaaggagc

SEQ ID NO: 57158 - DNA, 20 bp, synthetic construct
  source 1..20: mol_type = other DNA
ggcgcaggagcggcgagtgg

SEQ ID NO: 57159 - DNA, 20 bp, synthetic construct
  source 1..20: mol_type = other DNA
gtaggccatggctttgaatg

SEQ ID NO: 57160 - DNA, 20 bp, synthetic construct
  source 1..20: mol_type = other DNA
gatggagactttatatgctg

SEQ ID NO: 57161 - DNA, 20 bp, synthetic construct
  source 1..20: mol_type = other DNA
aacccacagcgacacggtgg

SEQ ID NO: 57162 - DNA, 20 bp, synthetic construct
  source 1..20: mol_type = other DNA
ggccaggatggttcttaggt

SEQ ID NO: 57163 - DNA, 20 bp, synthetic construct
  source 1..20: mol_type = other DNA
acgaagcaggtcctactcgg

SEQ ID NO: 57164 - DNA, 20 bp, synthetic construct
  source 1..20: mol_type = other DNA
cacgaggaaggagccgtcag

SEQ ID NO: 57165 - DNA, 20 bp, synthetic construct
  source 1..20: mol_type = other DNA
ccttcttgaaatagtcagca

SEQ ID NO: 57166 - DNA, 20 bp, synthetic construct
  source 1..20: mol_type = other DNA
ccggcactggatgagccagt

SEQ ID NO: 57167 - DNA, 20 bp, synthetic construct
  source 1..20: mol_type = other DNA
agggcatgtcaatattactg

SEQ ID NO: 57168 - DNA, 20 bp, synthetic construct
  source 1..20: mol_type = other DNA
cttctgtctattgaaggagc

SEQ ID NO: 57169 - DNA, 20 bp, synthetic construct
  source 1..20: mol_type = other DNA
agtcctgaaagagtcaagat

SEQ ID NO: 57170 - DNA, 20 bp, synthetic construct
  source 1..20: mol_type = other DNA
ctctcttacctcttcctccg

SEQ ID NO: 57171 - DNA, 20 bp, synthetic construct
  source 1..20: mol_type = other DNA
aaacactacctggtacacac

SEQ ID NO: 57172 - DNA, 20 bp, synthetic construct
  source 1..20: mol_type = other DNA
cctctataggtatcttgaag

SEQ ID NO: 57173 - DNA, 20 bp, synthetic construct
  source 1..20: mol_type = other DNA
gcattggcgccacagctcca

SEQ ID NO: 57174 - DNA, 20 bp, synthetic construct
  source 1..20: mol_type = other DNA
gtttccaggagcctgactac

SEQ ID NO: 57175 - DNA, 20 bp, synthetic construct
  source 1..20: mol_type = other DNA
cacatacaggaacttgccgt

SEQ ID NO: 57176 - DNA, 20 bp, synthetic construct
  source 1..20: mol_type = other DNA
gcaggatgtggtctcctcaa

SEQ ID NO: 57177 - DNA, 20 bp, synthetic construct
  source 1..20: mol_type = other DNA
gcagatggaggaggccatcc

SEQ ID NO: 57178 - DNA, 20 bp, synthetic construct
  source 1..20: mol_type = other DNA
ggaactcaagatcacctcgg

SEQ ID NO: 57179 - DNA, 20 bp, synthetic construct
  source 1..20: mol_type = other DNA
tgtaccttgaaagttggcat

SEQ ID NO: 57180 - DNA, 20 bp, synthetic construct
  source 1..20: mol_type = other DNA
tccaggtctgcccaagatgg

SEQ ID NO: 57181 - DNA, 20 bp, synthetic construct
  source 1..20: mol_type = other DNA
gcggtgaagagcctgaagca

SEQ ID NO: 57182 - DNA, 20 bp, synthetic construct
  source 1..20: mol_type = other DNA
tattatgtctgctaccccag

SEQ ID NO: 57183 - DNA, 20 bp, synthetic construct
  source 1..20: mol_type = other DNA
agagacaggtaaagctctca

SEQ ID NO: 57184 - DNA, 20 bp, synthetic construct
  source 1..20: mol_type = other DNA
ccacagcgacacggtggagg

SEQ ID NO: 57185 - DNA, 20 bp, synthetic construct
  source 1..20: mol_type = other DNA
agagaagggtagccagtacc

SEQ ID NO: 57186 - DNA, 20 bp, synthetic construct
  source 1..20: mol_type = other DNA
tgacgttacctcgtgcggcc

SEQ ID NO: 57187 - DNA, 20 bp, synthetic construct
  source 1..20: mol_type = other DNA
cgactggccagggcgcctgt

SEQ ID NO: 57188 - DNA, 20 bp, synthetic construct
  source 1..20: mol_type = other DNA
gacacagaaggacaccatcc

SEQ ID NO: 57189 - DNA, 20 bp, synthetic construct
  source 1..20: mol_type = other DNA
cacacagctctggcacactg

SEQ ID NO: 57190 - DNA, 20 bp, synthetic construct
  source 1..20: mol_type = other DNA
ggcctcagcctggcagggga

SEQ ID NO: 57191 - DNA, 20 bp, synthetic construct
  source 1..20: mol_type = other DNA
aaggagaggtgagacccagc

SEQ ID NO: 57192 - DNA, 20 bp, synthetic construct
  source 1..20: mol_type = other DNA
cacagctctggcacactgtg

SEQ ID NO: 57193 - DNA, 20 bp, synthetic construct
  source 1..20: mol_type = other DNA
acagaaggacaccatcccgg

SEQ ID NO: 57194 - DNA, 20 bp, synthetic construct
  source 1..20: mol_type = other DNA
cacagtgtgccagagctgtg

SEQ ID NO: 57195 - DNA, 20 bp, synthetic construct
  source 1..20: mol_type = other DNA
gaagaacagctcatagccct

SEQ ID NO: 57196 - DNA, 20 bp, synthetic construct
  source 1..20: mol_type = other DNA
cagaaggacaccatcccgga

SEQ ID NO: 57197 - DNA, 20 bp, synthetic construct
  source 1..20: mol_type = other DNA
ggatgagccagtgggtgcat

SEQ ID NO: 57198 - DNA, 20 bp, synthetic construct
  source 1..20: mol_type = other DNA
ccaagaaagtcccgtccgag

SEQ ID NO: 57199 - DNA, 20 bp, synthetic construct
  source 1..20: mol_type = other DNA
ccgggaaggatgacatgtcc

SEQ ID NO: 57200 - DNA, 20 bp, synthetic construct
  source 1..20: mol_type = other DNA
agcaggagccccagcacgca

SEQ ID NO: 57201 - DNA, 20 bp, synthetic construct
  source 1..20: mol_type = other DNA
cccactcacctggcagtctg

SEQ ID NO: 57202 - DNA, 20 bp, synthetic construct
  source 1..20: mol_type = other DNA
cgaagcaggtcctactcgga

SEQ ID NO: 57203 - DNA, 20 bp, synthetic construct
  source 1..20: mol_type = other DNA
gccatcaaggtgctgaagca

SEQ ID NO: 57204 - DNA, 20 bp, synthetic construct
  source 1..20: mol_type = other DNA
tctggcacactgtgggggaa

SEQ ID NO: 57205 - DNA, 20 bp, synthetic construct
  source 1..20: mol_type = other DNA
actcaccctcatggcatcca

SEQ ID NO: 57206 - DNA, 20 bp, synthetic construct
  source 1..20: mol_type = other DNA
ctgaggccgcggaaggagca

SEQ ID NO: 57207 - DNA, 20 bp, synthetic construct
  source 1..20: mol_type = other DNA
tgtttccaggagcctgacta

SEQ ID NO: 57208 - DNA, 20 bp, synthetic construct
  source 1..20: mol_type = other DNA
aggtgagcccactcaggagg

SEQ ID NO: 57209 - DNA, 20 bp, synthetic construct
  source 1..20: mol_type = other DNA
cctacctgctggcctgctga

SEQ ID NO: 57210 - DNA, 20 bp, synthetic construct
  source 1..20: mol_type = other DNA
tcttacctcttcctccgcgg

SEQ ID NO: 57211 - DNA, 20 bp, synthetic construct
  source 1..20: mol_type = other DNA
gtccacctgagagtgcacag

SEQ ID NO: 57212 - DNA, 20 bp, synthetic construct
  source 1..20: mol_type = other DNA
tcatgacggtgcccacctcg

SEQ ID NO: 57213 - DNA, 20 bp, synthetic construct
  source 1..20: mol_type = other DNA
gtcaggtacctggataggca

SEQ ID NO: 57214 - DNA, 20 bp, synthetic construct
  source 1..20: mol_type = other DNA
taccttcccgctggaatcga

SEQ ID NO: 57215 - DNA, 20 bp, synthetic construct
  source 1..20: mol_type = other DNA
acacagctctggcacactgt

SEQ ID NO: 57216 - DNA, 20 bp, synthetic construct
  source 1..20: mol_type = other DNA
gcaggagccccagcacgcag

SEQ ID NO: 57217 - DNA, 20 bp, synthetic construct
  source 1..20: mol_type = other DNA
gggctcacctgggacatctg

SEQ ID NO: 57218 - DNA, 20 bp, synthetic construct
  source 1..20: mol_type = other DNA
tgggcggcagcacccggcac

SEQ ID NO: 57219 - DNA, 20 bp, synthetic construct
  source 1..20: mol_type = other DNA
cacacacagtgccatcaaca

SEQ ID NO: 57220 - DNA, 20 bp, synthetic construct
  source 1..20: mol_type = other DNA
agtggacatctgcatcactg

SEQ ID NO: 57221 - DNA, 20 bp, synthetic construct
  source 1..20: mol_type = other DNA
gtggacatctgcatcactgg

SEQ ID NO: 57222 - DNA, 20 bp, synthetic construct
  source 1..20: mol_type = other DNA
ccccaggcccttccccaccg

SEQ ID NO: 57223 - DNA, 20 bp, synthetic construct
  source 1..20: mol_type = other DNA
cgcccagcgagcgcaggcac

SEQ ID NO: 57224 - DNA, 20 bp, synthetic construct
  source 1..20: mol_type = other DNA
acttcgataatgaacttgca

SEQ ID NO: 57225 - DNA, 20 bp, synthetic construct
  source 1..20: mol_type = other DNA
gcctcagcctggcaggggaa

SEQ ID NO: 57226 - DNA, 20 bp, synthetic construct
  source 1..20: mol_type = other DNA
gcctaccgagtgattccggc

SEQ ID NO: 57227 - DNA, 20 bp, synthetic construct
  source 1..20: mol_type = other DNA
tggccaggatgggcagcagc

SEQ ID NO: 57228 - DNA, 20 bp, synthetic construct
  source 1..20: mol_type = other DNA
cagcaggagccccagcacgc

SEQ ID NO: 57229 - DNA, 20 bp, synthetic construct
  source 1..20: mol_type = other DNA
agcagggctggggagaaggt

SEQ ID NO: 57230 - DNA, 20 bp, synthetic construct
  source 1..20: mol_type = other DNA
tgagcagaagatgaaagggc

SEQ ID NO: 57231 - DNA, 20 bp, synthetic construct
  source 1..20: mol_type = other DNA
ctgtgcatatgagctggggc

SEQ ID NO: 57232 - DNA, 20 bp, synthetic construct
  source 1..20: mol_type = other DNA
gaatccatcttcctgaccct

SEQ ID NO: 57233 - DNA, 20 bp, synthetic construct
  source 1..20: mol_type = other DNA
gtacctggataggcaaggag

SEQ ID NO: 57234 - DNA, 20 bp, synthetic construct
  source 1..20: mol_type = other DNA
ggcacactgtgggggaaggg

SEQ ID NO: 57235 - DNA, 20 bp, synthetic construct
  source 1..20: mol_type = other DNA
caccctacctggaaactgac

SEQ ID NO: 57236 - DNA, 20 bp, synthetic construct
  source 1..20: mol_type = other DNA
cacgagcagggctggggaga

SEQ ID NO: 57237 - DNA, 20 bp, synthetic construct
  source 1..20: mol_type = other DNA
agtacaggcagatgtgcagc

SEQ ID NO: 57238 - DNA, 20 bp, synthetic construct
  source 1..20: mol_type = other DNA
gacgttacctcgtgcggccc

SEQ ID NO: 57239 - DNA, 20 bp, synthetic construct
  source 1..20: mol_type = other DNA
tggagaactggtccccggtc

SEQ ID NO: 57240 - DNA, 20 bp, synthetic construct
  source 1..20: mol_type = other DNA
aatccatcttcctgaccctt

SEQ ID NO: 57241 - DNA, 20 bp, synthetic construct
  source 1..20: mol_type = other DNA
tgagcagtccccacatcagc

SEQ ID NO: 57242 - DNA, 20 bp, synthetic construct
  source 1..20: mol_type = other DNA
ccagggagatggccccacag

SEQ ID NO: 57243 - DNA, 20 bp, synthetic construct
  source 1..20: mol_type = other DNA
ggtgacaggtgcggcctcgg

SEQ ID NO: 57244 - DNA, 20 bp, synthetic construct
  source 1..20: mol_type = other DNA
tgtagcaccgcccagacgac

SEQ ID NO: 57245 - DNA, 20 bp, synthetic construct
  source 1..20: mol_type = other DNA
tccaggcatgcagatcccac

SEQ ID NO: 57246 - DNA, 20 bp, synthetic construct
  source 1..20: mol_type = other DNA
tgtgcatatgagctggggct

SEQ ID NO: 57247 - DNA, 20 bp, synthetic construct
  source 1..20: mol_type = other DNA
cttgcattcacagttcaaca

SEQ ID NO: 57248 - DNA, 20 bp, synthetic construct
  source 1..20: mol_type = other DNA
ggatacagggctctacacag

SEQ ID NO: 57249 - DNA, 20 bp, synthetic construct
  source 1..20: mol_type = other DNA
ggtccaccttgtcttcccgt

SEQ ID NO: 57250 - DNA, 20 bp, synthetic construct
  source 1..20: mol_type = other DNA
gatcagcaggaaaacacagc

SEQ ID NO: 57251 - DNA, 20 bp, synthetic construct
  source 1..20: mol_type = other DNA
gggtccaccttgtcttcccg

SEQ ID NO: 57252 - DNA, 20 bp, synthetic construct
  source 1..20: mol_type = other DNA
cacctacctaagaaccatcc

SEQ ID NO: 57253 - DNA, 20 bp, synthetic construct
  source 1..20: mol_type = other DNA
ggagatggccccacagaggt

SEQ ID NO: 57254 - DNA, 20 bp, synthetic construct
  source 1..20: mol_type = other DNA
cccaggtgaagagaagcctc

SEQ ID NO: 57255 - DNA, 20 bp, synthetic construct
  source 1..20: mol_type = other DNA
gccaggtgagcccactcagg

SEQ ID NO: 57256 - DNA, 20 bp, synthetic construct
  source 1..20: mol_type = other DNA
tcaccctgagctctgcccgc

SEQ ID NO: 57257 - DNA, 20 bp, synthetic construct
  source 1..20: mol_type = other DNA
ccgcacctgttgttgtgacg

SEQ ID NO: 57258 - DNA, 20 bp, synthetic construct
  source 1..20: mol_type = other DNA
gcagtgacctggaagatgga

SEQ ID NO: 57259 - DNA, 20 bp, synthetic construct
  source 1..20: mol_type = other DNA
ccctgcagtgacctggaaga

SEQ ID NO: 57260 - DNA, 20 bp, synthetic construct
  source 1..20: mol_type = other DNA
ggtgttgaaggtctcaaaca

SEQ ID NO: 57261 - DNA, 20 bp, synthetic construct
  source 1..20: mol_type = other DNA
tgagcgcaagtactccgtgt

SEQ ID NO: 57262 - DNA, 20 bp, synthetic construct
  source 1..20: mol_type = other DNA
tccatcatgaagtgtgacgt

SEQ ID NO: 57263 - DNA, 20 bp, synthetic construct
  source 1..20: mol_type = other DNA
cgcacgatttcccgctcggc

SEQ ID NO: 57264 - DNA, 20 bp, synthetic construct
  source 1..20: mol_type = other DNA
tggcaccacaccttctacaa

SEQ ID NO: 57265 - DNA, 20 bp, synthetic construct
  source 1..20: mol_type = other DNA
agggatagcacagcctggat

SEQ ID NO: 57266 - DNA, 20 bp, synthetic construct
  source 1..20: mol_type = other DNA
gccaggtccagacgcaggat

SEQ ID NO: 57267 - DNA, 20 bp, synthetic construct
  source 1..20: mol_type = other DNA
cggagccgttgtcgacgacg

SEQ ID NO: 57268 - DNA, 20 bp, synthetic construct
  source 1..20: mol_type = other DNA
cggccgagcgggaaatcgtg

SEQ ID NO: 57269 - DNA, 20 bp, synthetic construct
  source 1..20: mol_type = other DNA
gcagcacggggtgctcctcg

SEQ ID NO: 57270 - DNA, 20 bp, synthetic construct
  source 1..20: mol_type = other DNA
tgaagtaccccatcgagcac

SEQ ID NO: 57271 - DNA, 20 bp, synthetic construct
  source 1..20: mol_type = other DNA
cccagttggtgacgatgccg

SEQ ID NO: 57272 - DNA, 20 bp, synthetic construct
  source 1..20: mol_type = other DNA
gttgaaggtagtttcgtgga

SEQ ID NO: 57273 - DNA, 20 bp, synthetic construct
  source 1..20: mol_type = other DNA
gccggagccgttgtcgacga

SEQ ID NO: 57274 - DNA, 20 bp, synthetic construct
  source 1..20: mol_type = other DNA
ccagggcagtgatctccttc

SEQ ID NO: 57275 - DNA, 20 bp, synthetic construct
  source 1..20: mol_type = other DNA
ggagttgaaggtagtttcgt

SEQ ID NO: 57276 - DNA, 20 bp, synthetic construct
  source 1..20: mol_type = other DNA
gtccaccttccagcagatgt

SEQ ID NO: 57277 - DNA, 20 bp, synthetic construct
  source 1..20: mol_type = other DNA
agtcaggtcccggccagcca

SEQ ID NO: 57278 - DNA, 20 bp, synthetic construct
  source 1..20: mol_type = other DNA
ggcgtacaggtctttgcgga

SEQ ID NO: 57279 - DNA, 20 bp, synthetic construct
  source 1..20: mol_type = other DNA
cggagtacttgcgctcagga

SEQ ID NO: 57280 - DNA, 20 bp, synthetic construct
  source 1..20: mol_type = other DNA
ggccagaggcgtacagggat

SEQ ID NO: 57281 - DNA, 20 bp, synthetic construct
  source 1..20: mol_type = other DNA
gtagcacagcttctccttaa

SEQ ID NO: 57282 - DNA, 20 bp, synthetic construct
  source 1..20: mol_type = other DNA
acacccaccttgatcttcat

SEQ ID NO: 57283 - DNA, 20 bp, synthetic construct
  source 1..20: mol_type = other DNA
ggggtacttcagggtgagga

SEQ ID NO: 57284 - DNA, 20 bp, synthetic construct
  source 1..20: mol_type = other DNA
cgatccacacggagtacttg

SEQ ID NO: 57285 - DNA, 20 bp, synthetic construct
  source 1..20: mol_type = other DNA
agggcagcggaaccgctcat

SEQ ID NO: 57286 - DNA, 20 bp, synthetic construct
  source 1..20: mol_type = other DNA
cctcagatcattgctcctcc

SEQ ID NO: 57287 - DNA, 20 bp, synthetic construct
  source 1..20: mol_type = other DNA
cagcactgtgttggcgtaca

SEQ ID NO: 57288 - DNA, 20 bp, synthetic construct
  source 1..20: mol_type = other DNA
gatgtccacgtcacacttca

SEQ ID NO: 57289 - DNA, 20 bp, synthetic construct
  source 1..20: mol_type = other DNA
gatggagttgaaggtagttt

SEQ ID NO: 57290 - DNA, 20 bp, synthetic construct
  source 1..20: mol_type = other DNA
ggacctgactgactacctca

SEQ ID NO: 57291 - DNA, 20 bp, synthetic construct
  source 1..20: mol_type = other DNA
gtgggtgaccccgtcaccgg

SEQ ID NO: 57292 - DNA, 20 bp, synthetic construct
  source 1..20: mol_type = other DNA
ccgcaggatgtggaccaacg

SEQ ID NO: 57293 - DNA, 20 bp, synthetic construct
  source 1..20: mol_type = other DNA
ctgcagtggaccactgtcat

SEQ ID NO: 57294 - DNA, 20 bp, synthetic construct
  source 1..20: mol_type = other DNA
ccaacaccttcatcatccgc

SEQ ID NO: 57295 - DNA, 20 bp, synthetic construct
  source 1..20: mol_type = other DNA
ggtccactgcaggcagcgga

SEQ ID NO: 57296 - DNA, 20 bp, synthetic construct
  source 1..20: mol_type = other DNA
gagaagatcaccaagttgta

SEQ ID NO: 57297 - DNA, 20 bp, synthetic construct
  source 1..20: mol_type = other DNA
tggcaaaggaggagcccctg

SEQ ID NO: 57298 - DNA, 20 bp, synthetic construct
  source 1..20: mol_type = other DNA
acactgaagaaatttcttgt

SEQ ID NO: 57299 - DNA, 20 bp, synthetic construct
  source 1..20: mol_type = other DNA
gcacttcatctgtaatcttc

SEQ ID NO: 57300 - DNA, 20 bp, synthetic construct
  source 1..20: mol_type = other DNA
ccgaatagattcaacaaggg

SEQ ID NO: 57301 - DNA, 20 bp, synthetic construct
  source 1..20: mol_type = other DNA
aaacttagaaatataaaact

SEQ ID NO: 57302 - DNA, 20 bp, synthetic construct
  source 1..20: mol_type = other DNA
gtgtgagaaaatcatagctg

SEQ ID NO: 57303 - DNA, 20 bp, synthetic construct
  source 1..20: mol_type = other DNA
caggaaaacccaaaaggtct

SEQ ID NO: 57304 - DNA, 20 bp, synthetic construct
  source 1..20: mol_type = other DNA
gggaagtgtagttgaagaga

SEQ ID NO: 57305 - DNA, 20 bp, synthetic construct
  source 1..20: mol_type = other DNA
ctcagtagagaagacactga

SEQ ID NO: 57306 - DNA, 20 bp, synthetic construct
  source 1..20: mol_type = other DNA
cagatgaagtgctgaaactt

SEQ ID NO: 57307 - DNA, 20 bp, synthetic construct
  source 1..20: mol_type = other DNA
gtgcaaaaaaaatactcagt

SEQ ID NO: 57308 - DNA, 20 bp, synthetic construct
  source 1..20: mol_type = other DNA
atacagaagattacagatga

SEQ ID NO: 57309 - DNA, 20 bp, synthetic construct
  source 1..20: mol_type = other DNA
agagacattttgatcatcta

SEQ ID NO: 57310 - DNA, 20 bp, synthetic construct
  source 1..20: mol_type = other DNA
cgccgaatagattcaacaag

SEQ ID NO: 57311 - DNA, 20 bp, synthetic construct
  source 1..20: mol_type = other DNA
gaagattacagatgaagtgc

SEQ ID NO: 57312 - DNA, 20 bp, synthetic construct
  source 1..20: mol_type = other DNA
gttcgacaagaaatttcttc

SEQ ID NO: 57313 - DNA, 20 bp, synthetic construct
  source 1..20: mol_type = other DNA
tagattcaacaagggtgtcc

SEQ ID NO: 57314 - DNA, 20 bp, synthetic construct
  source 1..20: mol_type = other DNA
agaaacatctcactagagtt

SEQ ID NO: 57315 - DNA, 20 bp, synthetic construct
  source 1..20: mol_type = other DNA
cccagacctggggacccagg

SEQ ID NO: 57316 - DNA, 20 bp, synthetic construct
  source 1..20: mol_type = other DNA
accctgacctgctcacctgt

SEQ ID NO: 57317 - DNA, 20 bp, synthetic construct
  source 1..20: mol_type = other DNA
cttgcatgttgtgcaaatgt

SEQ ID NO: 57318 - DNA, 20 bp, synthetic construct
  source 1..20: mol_type = other DNA
tgacctgctcacctgtggcc

SEQ ID NO: 57319 - DNA, 20 bp, synthetic construct
  source 1..20: mol_type = other DNA
gccacaggtgagcaggtcag

SEQ ID NO: 57320 - DNA, 20 bp, synthetic construct
  source 1..20: mol_type = other DNA
gcgcgcacgcgtagttgcac

SEQ ID NO: 57321 - DNA, 20 bp, synthetic construct
  source 1..20: mol_type = other DNA
catttgacactggccacagg

SEQ ID NO: 57322 - DNA, 20 bp, synthetic construct
  source 1..20: mol_type = other DNA
ctgggacaagtgctgcgggt

SEQ ID NO: 57323 - DNA, 20 bp, synthetic construct
  source 1..20: mol_type = other DNA
ggaaccacgcgctgttgaag

SEQ ID NO: 57324 - DNA, 20 bp, synthetic construct
  source 1..20: mol_type = other DNA
acgcacgggcagatcggcaa

SEQ ID NO: 57325 - DNA, 20 bp, synthetic construct
  source 1..20: mol_type = other DNA
ggggaagttcatttgacact

SEQ ID NO: 57326 - DNA, 20 bp, synthetic construct
  source 1..20: mol_type = other DNA
aaccaggatgtcccccaagg

SEQ ID NO: 57327 - DNA, 20 bp, synthetic construct
  source 1..20: mol_type = other DNA
caggatgtcccccaagggga

SEQ ID NO: 57328 - DNA, 20 bp, synthetic construct
  source 1..20: mol_type = other DNA
gccgccacactgcttccttt

SEQ ID NO: 57329 - DNA, 20 bp, synthetic construct
  source 1..20: mol_type = other DNA
ggccttacaagtgcgagctg

SEQ ID NO: 57330 - DNA, 20 bp, synthetic construct
  source 1..20: mol_type = other DNA
agcacaaaaggaagcagtgt

SEQ ID NO: 57331 - DNA, 20 bp, synthetic construct
  source 1..20: mol_type = other DNA
ctgttgaagggctgcttgca

SEQ ID NO: 57332 - DNA, 20 bp, synthetic construct
  source 1..20: mol_type = other DNA
acaagtgctgcgggttgccc

SEQ ID NO: 57333 - DNA, 20 bp, synthetic construct
  source 1..20: mol_type = other DNA
tttgacactggccacaggtg

SEQ ID NO: 57334 - DNA, 20 bp, synthetic construct
  source 1..20: mol_type = other DNA
ccgcaaacagggcaacccgc

SEQ ID NO: 57335 - DNA, 20 bp, synthetic construct
  source 1..20: mol_type = other DNA
ccacatgaagacgcacgggc

SEQ ID NO: 57336 - DNA, 20 bp, synthetic construct
  source 1..20: mol_type = other DNA
ggacatcctggtttttatag

SEQ ID NO: 57337 - DNA, 20 bp, synthetic construct
  source 1..20: mol_type = other DNA
ctccaggtagatgcggaagc

SEQ ID NO: 57338 - DNA, 20 bp, synthetic construct
  source 1..20: mol_type = other DNA
gcaactacgcgtgcgcgcag

SEQ ID NO: 57339 - DNA, 20 bp, synthetic construct
  source 1..20: mol_type = other DNA
gctgaagggcatctggcaga

SEQ ID NO: 57340 - DNA, 20 bp, synthetic construct
  source 1..20: mol_type = other DNA
ggggacatcctggtttttat

SEQ ID NO: 57341 - DNA, 20 bp, synthetic construct
  source 1..20: mol_type = other DNA
acactggccacaggtgagca

SEQ ID NO: 57342 - DNA, 20 bp, synthetic construct
  source 1..20: mol_type = other DNA
gtcgcagcggtacacctcct

SEQ ID NO: 57343 - DNA, 20 bp, synthetic construct
  source 1..20: mol_type = other DNA
ggtgagcaggtcagggtcgg

SEQ ID NO: 57344 - DNA, 20 bp, synthetic construct
  source 1..20: mol_type = other DNA
tagagcacaaaaggaagcag

SEQ ID NO: 57345 - DNA, 20 bp, synthetic construct
  source 1..20: mol_type = other DNA
ccgccgcaaacagggcaacc

SEQ ID NO: 57346 - DNA, 20 bp, synthetic construct
  source 1..20: mol_type = other DNA
gccgcagtactcgcacgtgt

SEQ ID NO: 57347 - DNA, 20 bp, synthetic construct
  source 1..20: mol_type = other DNA
tatagagcacaaaaggaagc

SEQ ID NO: 57348 - DNA, 20 bp, synthetic construct
  source 1..20: mol_type = other DNA
cccccaaggggaagttcatt

SEQ ID NO: 57349 - DNA, 20 bp, synthetic construct
  source 1..20: mol_type = other DNA
caatgtcccgccgcaaacag

SEQ ID NO: 57350 - DNA, 20 bp, synthetic construct
  source 1..20: mol_type = other DNA
tgcacagctcgcacttgtaa

SEQ ID NO: 57351 - DNA, 20 bp, synthetic construct
  source 1..20: mol_type = other DNA
gtgctctataaaaaccagga

SEQ ID NO: 57352 - DNA, 20 bp, synthetic construct
  source 1..20: mol_type = other DNA
ccagcagaggctgaccatgt

SEQ ID NO: 57353 - DNA, 20 bp, synthetic construct
  source 1..20: mol_type = other DNA
ttgaagggctgcttgcatgt

SEQ ID NO: 57354 - DNA, 20 bp, synthetic construct
  source 1..20: mol_type = other DNA
ttgtgcaaatgtagctggaa

SEQ ID NO: 57355 - DNA, 20 bp, synthetic construct
  source 1..20: mol_type = other DNA
ccatacctgcaatgttctcc

SEQ ID NO: 57356 - DNA, 20 bp, synthetic construct
  source 1..20: mol_type = other DNA
ccaggtactgtgaaccacac

SEQ ID NO: 57357 - DNA, 20 bp, synthetic construct
  source 1..20: mol_type = other DNA
cagcagctcgcagcgttgca

SEQ ID NO: 57358 - DNA, 20 bp, synthetic construct
  source 1..20: mol_type = other DNA
ctcacgcacttcctgatgaa

SEQ ID NO: 57359 - DNA, 20 bp, synthetic construct
  source 1..20: mol_type = other DNA
cactccacattctcccacaa

SEQ ID NO: 57360 - DNA, 20 bp, synthetic construct
  source 1..20: mol_type = other DNA
cgtcagtgtaaggtcattga

SEQ ID NO: 57361 - DNA, 20 bp, synthetic construct
  source 1..20: mol_type = other DNA
cagcatgaccgtgttcatgc

SEQ ID NO: 57362 - DNA, 20 bp, synthetic construct
  source 1..20: mol_type = other DNA
gaagagcacgatggggtaga

SEQ ID NO: 57363 - DNA, 20 bp, synthetic construct
  source 1..20: mol_type = other DNA
ggtcatcaagctgcagcagc

SEQ ID NO: 57364 - DNA, 20 bp, synthetic construct
  source 1..20: mol_type = other DNA
tgaaatgtacaagcaccgca

SEQ ID NO: 57365 - DNA, 20 bp, synthetic construct
  source 1..20: mol_type = other DNA
tgaaggccaaggacctgcaa

SEQ ID NO: 57366 - DNA, 20 bp, synthetic construct
  source 1..20: mol_type = other DNA
aaggacgacaactacaactt

SEQ ID NO: 57367 - DNA, 20 bp, synthetic construct
  source 1..20: mol_type = other DNA
atggaggaggaatgtaagct

SEQ ID NO: 57368 - DNA, 20 bp, synthetic construct
  source 1..20: mol_type = other DNA
gacgaactggaggagaagag

SEQ ID NO: 57369 - DNA, 20 bp, synthetic construct
  source 1..20: mol_type = other DNA
ctcccagaaagctgctgccc

SEQ ID NO: 57370 - DNA, 20 bp, synthetic construct
  source 1..20: mol_type = other DNA
cagctggaggaggtggagcg

SEQ ID NO: 57371 - DNA, 20 bp, synthetic construct
  source 1..20: mol_type = other DNA
gtccaggatggccttgtctg

SEQ ID NO: 57372 - DNA, 20 bp, synthetic construct
  source 1..20: mol_type = other DNA
agtaccgctcctggaaggtt

SEQ ID NO: 57373 - DNA, 20 bp, synthetic construct
  source 1..20: mol_type = other DNA
ggggcagcagctttctggga

SEQ ID NO: 57374 - DNA, 20 bp, synthetic construct
  source 1..20: mol_type = other DNA
ttggacttgatcaagtctct

SEQ ID NO: 57375 - DNA, 20 bp, synthetic construct
  source 1..20: mol_type = other DNA
atgcacctggatgcccttca

SEQ ID NO: 57376 - DNA, 20 bp, synthetic construct
  source 1..20: mol_type = other DNA
agttcaccatctgcaagtca

SEQ ID NO: 57377 - DNA, 20 bp, synthetic construct
  source 1..20: mol_type = other DNA
ggaggaggaatgtaagctgg

SEQ ID NO: 57378 - DNA, 20 bp, synthetic construct
  source 1..20: mol_type = other DNA
gggctatgtggtcttcttgg

SEQ ID NO: 57379 - DNA, 20 bp, synthetic construct
  source 1..20: mol_type = other DNA
gtggagcgggagcgggacca

SEQ ID NO: 57380 - DNA, 20 bp, synthetic construct
  source 1..20: mol_type = other DNA
ctgcaggttgtagatcctgt

SEQ ID NO: 57381 - DNA, 20 bp, synthetic construct
  source 1..20: mol_type = other DNA
cctggcaggccttccactcc

SEQ ID NO: 57382 - DNA, 20 bp, synthetic construct
  source 1..20: mol_type = other DNA
agcctccagcaggcagtgct

SEQ ID NO: 57383 - DNA, 20 bp, synthetic construct
  source 1..20: mol_type = other DNA
ttcctccactgtggagaggg

SEQ ID NO: 57384 - DNA, 20 bp, synthetic construct
  source 1..20: mol_type = other DNA
cgcagctcctctgcctggcg

SEQ ID NO: 57385 - DNA, 20 bp, synthetic construct
  source 1..20: mol_type = other DNA
acgcgcaggaactcctcctc

SEQ ID NO: 57386 - DNA, 20 bp, synthetic construct
  source 1..20: mol_type = other DNA
cgggagcgggaccaggtaca

SEQ ID NO: 57387 - DNA, 20 bp, synthetic construct
  source 1..20: mol_type = other DNA
gagcgggacagctacaatga

SEQ ID NO: 57388 - DNA, 20 bp, synthetic construct
  source 1..20: mol_type = other DNA
cagctcaccatcttggtgaa

SEQ ID NO: 57389 - DNA, 20 bp, synthetic construct
  source 1..20: mol_type = other DNA
aggacagccaaggggcacga

SEQ ID NO: 57390 - DNA, 20 bp, synthetic construct
  source 1..20: mol_type = other DNA
ggaggagggtccgaaggagt

SEQ ID NO: 57391 - DNA, 20 bp, synthetic construct
  source 1..20: mol_type = other DNA
taagcacttcatcttcatcc

SEQ ID NO: 57392 - DNA, 20 bp, synthetic construct
  source 1..20: mol_type = other DNA
ctcccgagttgagcagcctc

SEQ ID NO: 57393 - DNA, 20 bp, synthetic construct
  source 1..20: mol_type = other DNA
tccgcagggtaccggaagct

SEQ ID NO: 57394 - DNA, 20 bp, synthetic construct
  source 1..20: mol_type = other DNA
gaggagctgctgggctctgg

SEQ ID NO: 57395 - DNA, 20 bp, synthetic construct
  source 1..20: mol_type = other DNA
ggacaagatcggcgaggagc

SEQ ID NO: 57396 - DNA, 20 bp, synthetic construct
  source 1..20: mol_type = other DNA
gcgagacaaggtgggagtgg

SEQ ID NO: 57397 - DNA, 20 bp, synthetic construct
  source 1..20: mol_type = other DNA
ggatgagaagaagcagatga

SEQ ID NO: 57398 - DNA, 20 bp, synthetic construct
  source 1..20: mol_type = other DNA
ccccacatgtcaggttccac

SEQ ID NO: 57399 - DNA, 20 bp, synthetic construct
  source 1..20: mol_type = other DNA
ttggaggtctcggctcctca

SEQ ID NO: 57400 - DNA, 20 bp, synthetic construct
  source 1..20: mol_type = other DNA
gatgaacgaggtcatcaagc

SEQ ID NO: 57401 - DNA, 20 bp, synthetic construct
  source 1..20: mol_type = other DNA
gggagtggaaggcctgccag

SEQ ID NO: 57402 - DNA, 20 bp, synthetic construct
  source 1..20: mol_type = other DNA
tgtccaacagccggcctagg

SEQ ID NO: 57403 - DNA, 20 bp, synthetic construct
  source 1..20: mol_type = other DNA
ccggatgaagagcacgatgg

SEQ ID NO: 57404 - DNA, 20 bp, synthetic construct
  source 1..20: mol_type = other DNA
ctttcccagggtcgagcact

SEQ ID NO: 57405 - DNA, 20 bp, synthetic construct
  source 1..20: mol_type = other DNA
tgtggagtgtaaccggcaca

SEQ ID NO: 57406 - DNA, 20 bp, synthetic construct
  source 1..20: mol_type = other DNA
atcgtcagacgctacaagga

SEQ ID NO: 57407 - DNA, 20 bp, synthetic construct
  source 1..20: mol_type = other DNA
gtcctccagggcctccttgc

SEQ ID NO: 57408 - DNA, 20 bp, synthetic construct
  source 1..20: mol_type = other DNA
atgcgctacgcacagctcag

SEQ ID NO: 57409 - DNA, 20 bp, synthetic construct
  source 1..20: mol_type = other DNA
ctccagggcctccttgcggt

SEQ ID NO: 57410 - DNA, 20 bp, synthetic construct
  source 1..20: mol_type = other DNA
gcacttacccacaatggtgg

SEQ ID NO: 57411 - DNA, 20 bp, synthetic construct
  source 1..20: mol_type = other DNA
caccagtttgtacagttctg

SEQ ID NO: 57412 - DNA, 20 bp, synthetic construct
  source 1..20: mol_type = other DNA
ttagcagctccacgcgcgtc

SEQ ID NO: 57413 - DNA, 20 bp, synthetic construct
  source 1..20: mol_type = other DNA
gatgaagagcacgatggggt

SEQ ID NO: 57414 - DNA, 20 bp, synthetic construct
  source 1..20: mol_type = other DNA
gttcatcaggaagtgcgtga

SEQ ID NO: 57415 - DNA, 20 bp, synthetic construct
  source 1..20: mol_type = other DNA
aggggctatgtggtcttctt

SEQ ID NO: 57416 - DNA, 20 bp, synthetic construct
  source 1..20: mol_type = other DNA
ccgccccacctggtccaggt

SEQ ID NO: 57417 - DNA, 20 bp, synthetic construct
  source 1..20: mol_type = other DNA
cttggagaggcgccgcagct

SEQ ID NO: 57418 - DNA, 20 bp, synthetic construct
  source 1..20: mol_type = other DNA
ctccagttcgtcagcaggtc

SEQ ID NO: 57419 - DNA, 20 bp, synthetic construct
  source 1..20: mol_type = other DNA
gccctacctgaacctcttga

SEQ ID NO: 57420 - DNA, 20 bp, synthetic construct
  source 1..20: mol_type = other DNA
tgccagagctggaccctgag

SEQ ID NO: 57421 - DNA, 20 bp, synthetic construct
  source 1..20: mol_type = other DNA
gaagagcgggacagctacaa

SEQ ID NO: 57422 - DNA, 20 bp, synthetic construct
  source 1..20: mol_type = other DNA
ggcctggatgcctacgacct

SEQ ID NO: 57423 - DNA, 20 bp, synthetic construct
  source 1..20: mol_type = other DNA
tgacgatgcaggcctcccgc

SEQ ID NO: 57424 - DNA, 20 bp, synthetic construct
  source 1..20: mol_type = other DNA
cagccactcgtgcctgtcct

SEQ ID NO: 57425 - DNA, 20 bp, synthetic construct
  source 1..20: mol_type = other DNA
gccaaggacctgcaacgctg

SEQ ID NO: 57426 - DNA, 20 bp, synthetic construct
  source 1..20: mol_type = other DNA
tggaaggcctgccagggaga

SEQ ID NO: 57427 - DNA, 20 bp, synthetic construct
  source 1..20: mol_type = other DNA
ttcccagggtcgagcacttg

SEQ ID NO: 57428 - DNA, 20 bp, synthetic construct
  source 1..20: mol_type = other DNA
ccgcaacctggccagcagct

SEQ ID NO: 57429 - DNA, 20 bp, synthetic construct
  source 1..20: mol_type = other DNA
gatgacctcgttcatcagga

SEQ ID NO: 57430 - DNA, 20 bp, synthetic construct
  source 1..20: mol_type = other DNA
ctgctgcagcttgatgacct

SEQ ID NO: 57431 - DNA, 20 bp, synthetic construct
  source 1..20: mol_type = other DNA
gctggccaagacgctggtgc

SEQ ID NO: 57432 - DNA, 20 bp, synthetic construct
  source 1..20: mol_type = other DNA
ccaagctcacgccctacctg

SEQ ID NO: 57433 - DNA, 20 bp, synthetic construct
  source 1..20: mol_type = other DNA
gtcattgatgagcaggatga

SEQ ID NO: 57434 - DNA, 20 bp, synthetic construct
  source 1..20: mol_type = other DNA
tggcaggccttccactcccg

SEQ ID NO: 57435 - DNA, 20 bp, synthetic construct
  source 1..20: mol_type = other DNA
ctctccaggttgacgatgca

SEQ ID NO: 57436 - DNA, 20 bp, synthetic construct
  source 1..20: mol_type = other DNA
tccttcaggtaaggctctcc

SEQ ID NO: 57437 - DNA, 20 bp, synthetic construct
  source 1..20: mol_type = other DNA
accaaggggcaaaggggcta

SEQ ID NO: 57438 - DNA, 20 bp, synthetic construct
  source 1..20: mol_type = other DNA
gagcagcgcaagaccatctg

SEQ ID NO: 57439 - DNA, 20 bp, synthetic construct
  source 1..20: mol_type = other DNA
caggcaggagctggtcaaca

SEQ ID NO: 57440 - DNA, 20 bp, synthetic construct
  source 1..20: mol_type = other DNA
atgtagaatgtccaacagcc

SEQ ID NO: 57441 - DNA, 20 bp, synthetic construct
  source 1..20: mol_type = other DNA
gagtggaaggcctgccaggg

SEQ ID NO: 57442 - DNA, 20 bp, synthetic construct
  source 1..20: mol_type = other DNA
gttcaggttcagccggatgt

SEQ ID NO: 57443 - DNA, 20 bp, synthetic construct
  source 1..20: mol_type = other DNA
ccagagctggaccctgagag

SEQ ID NO: 57444 - DNA, 20 bp, synthetic construct
  source 1..20: mol_type = other DNA
ggacattctacataccaagg

SEQ ID NO: 57445 - DNA, 20 bp, synthetic construct
  source 1..20: mol_type = other DNA
gcagatatcgtcacaagaga

SEQ ID NO: 57446 - DNA, 20 bp, synthetic construct
  source 1..20: mol_type = other DNA
ctggaggagaaggaggacct

SEQ ID NO: 57447 - DNA, 20 bp, synthetic construct
  source 1..20: mol_type = other DNA
ccacccaggccgggaagcgc

SEQ ID NO: 57448 - DNA, 20 bp, synthetic construct
  source 1..20: mol_type = other DNA
gccacccacctgcgatgggg

SEQ ID NO: 57449 - DNA, 20 bp, synthetic construct
  source 1..20: mol_type = other DNA
tcacagtacctggaggagaa

SEQ ID NO: 57450 - DNA, 20 bp, synthetic construct
  source 1..20: mol_type = other DNA
agatgaaggaagagcgggac

SEQ ID NO: 57451 - DNA, 20 bp, synthetic construct
  source 1..20: mol_type = other DNA
ccttacactgacgcaggtag

SEQ ID NO: 57452 - DNA, 20 bp, synthetic construct
  source 1..20: mol_type = other DNA
agttgagcagcctctgcacc

SEQ ID NO: 57453 - DNA, 20 bp, synthetic construct
  source 1..20: mol_type = other DNA
tcgcagcgttgcaggtcctt

SEQ ID NO: 57454 - DNA, 20 bp, synthetic construct
  source 1..20: mol_type = other DNA
tggtggagaatctccgagtg

SEQ ID NO: 57455 - DNA, 20 bp, synthetic construct
  source 1..20: mol_type = other DNA
tcacagtcctttcccagggt

SEQ ID NO: 57456 - DNA, 20 bp, synthetic construct
  source 1..20: mol_type = other DNA
agcagctccacgcgcgtcag

SEQ ID NO: 57457 - DNA, 20 bp, synthetic construct
  source 1..20: mol_type = other DNA
caacagccggcctaggggaa

SEQ ID NO: 57458 - DNA, 20 bp, synthetic construct
  source 1..20: mol_type = other DNA
cctgatgaacgaggtcatca

SEQ ID NO: 57459 - DNA, 20 bp, synthetic construct
  source 1..20: mol_type = other DNA
gagctgcagtccatcatcca

SEQ ID NO: 57460 - DNA, 20 bp, synthetic construct
  source 1..20: mol_type = other DNA
gttgatatagcggctgagca

SEQ ID NO: 57461 - DNA, 20 bp, synthetic construct
  source 1..20: mol_type = other DNA
gaggacgccttgtgggagaa

SEQ ID NO: 57462 - DNA, 20 bp, synthetic construct
  source 1..20: mol_type = other DNA
tgagcaggatgaagatgaag

SEQ ID NO: 57463 - DNA, 20 bp, synthetic construct
  source 1..20: mol_type = other DNA
gactgggaaagagcccactc

SEQ ID NO: 57464 - DNA, 20 bp, synthetic construct
  source 1..20: mol_type = other DNA
ccagcacggtgggtgtgaag

SEQ ID NO: 57465 - DNA, 20 bp, synthetic construct
  source 1..20: mol_type = other DNA
tcctccagctgccgcaacct

SEQ ID NO: 57466 - DNA, 20 bp, synthetic construct
  source 1..20: mol_type = other DNA
gctctccaagaagaccacat

SEQ ID NO: 57467 - DNA, 20 bp, synthetic construct
  source 1..20: mol_type = other DNA
ccagggcctccttgcggtcg

SEQ ID NO: 57468 - DNA, 20 bp, synthetic construct
  source 1..20: mol_type = other DNA
gctgtaggggatgaggctga

SEQ ID NO: 57469 - DNA, 20 bp, synthetic construct
  source 1..20: mol_type = other DNA
ccgagatgaagctcagacac

SEQ ID NO: 57470 - DNA, 20 bp, synthetic construct
  source 1..20: mol_type = other DNA
atgtagaacgagtcccccga

SEQ ID NO: 57471 - DNA, 20 bp, synthetic construct
  source 1..20: mol_type = other DNA
ttggaacacgaccgcaagga

SEQ ID NO: 57472 - DNA, 20 bp, synthetic construct
  source 1..20: mol_type = other DNA
cacctcgagttggaggtctc

SEQ ID NO: 57473 - DNA, 20 bp, synthetic construct
  source 1..20: mol_type = other DNA
gggcgtgagcttggcagggt

SEQ ID NO: 57474 - DNA, 20 bp, synthetic construct
  source 1..20: mol_type = other DNA
tgccaagctcacgccctacc

SEQ ID NO: 57475 - DNA, 20 bp, synthetic construct
  source 1..20: mol_type = other DNA
aaggagctggccaaaaagga

SEQ ID NO: 57476 - DNA, 20 bp, synthetic construct
  source 1..20: mol_type = other DNA
aggccaaggacctgcaacgc

SEQ ID NO: 57477 - DNA, 20 bp, synthetic construct
  source 1..20: mol_type = other DNA
ctgcagcatgaccgtgttca

SEQ ID NO: 57478 - DNA, 20 bp, synthetic construct
  source 1..20: mol_type = other DNA
gggcctcacgcacttcctga

SEQ ID NO: 57479 - DNA, 20 bp, synthetic construct
  source 1..20: mol_type = other DNA
tgacaccatgtaccaggaca

SEQ ID NO: 57480 - DNA, 20 bp, synthetic construct
  source 1..20: mol_type = other DNA
gctcacgccctacctgcgtc

SEQ ID NO: 57481 - DNA, 20 bp, synthetic construct
  source 1..20: mol_type = other DNA
ggaaggccacgagggcctca

SEQ ID NO: 57482 - DNA, 20 bp, synthetic construct
  source 1..20: mol_type = other DNA
tgcccctatgctgccatcca

SEQ ID NO: 57483 - DNA, 20 bp, synthetic construct
  source 1..20: mol_type = other DNA
ggcagcagctttctgggagg

SEQ ID NO: 57484 - DNA, 20 bp, synthetic construct
  source 1..20: mol_type = other DNA
ccctacctgcgtcagtgtaa

SEQ ID NO: 57485 - DNA, 20 bp, synthetic construct
  source 1..20: mol_type = other DNA
tcccagtcaccagtttgtac

SEQ ID NO: 57486 - DNA, 20 bp, synthetic construct
  source 1..20: mol_type = other DNA
agtgtaaccggcacatgctc

SEQ ID NO: 57487 - DNA, 20 bp, synthetic construct
  source 1..20: mol_type = other DNA
cggatgtagaacgagtcccc

SEQ ID NO: 57488 - DNA, 20 bp, synthetic construct
  source 1..20: mol_type = other DNA
cacgtaccatccagatctaa

SEQ ID NO: 57489 - DNA, 20 bp, synthetic construct
  source 1..20: mol_type = other DNA
gaccaggtacaggcaccacc

SEQ ID NO: 57490 - DNA, 20 bp, synthetic construct
  source 1..20: mol_type = other DNA
gcatccaggtgcatgggtgt

SEQ ID NO: 57491 - DNA, 20 bp, synthetic construct
  source 1..20: mol_type = other DNA
tgaagtgcttaatgccccta

SEQ ID NO: 57492 - DNA, 20 bp, synthetic construct
  source 1..20: mol_type = other DNA
ctgaaggagctggccaaaaa

SEQ ID NO: 57493 - DNA, 20 bp, synthetic construct
  source 1..20: mol_type = other DNA
aacaggatctacaacctgca

SEQ ID NO: 57494 - DNA, 20 bp, synthetic construct
  source 1..20: mol_type = other DNA
cacgaccgcaaggaggccct

SEQ ID NO: 57495 - DNA, 20 bp, synthetic construct
  source 1..20: mol_type = other DNA
gtagggcgtgagcttggcag

SEQ ID NO: 57496 - DNA, 20 bp, synthetic construct
  source 1..20: mol_type = other DNA
cgcacagctcagtgaggaga

SEQ ID NO: 57497 - DNA, 20 bp, synthetic construct
  source 1..20: mol_type = other DNA
tcctccagctgcagcatgac

SEQ ID NO: 57498 - DNA, 20 bp, synthetic construct
  source 1..20: mol_type = other DNA
agcttcaatgttggcagggg

SEQ ID NO: 57499 - DNA, 20 bp, synthetic construct
  source 1..20: mol_type = other DNA
ggagaatgtggagtgtaacc

SEQ ID NO: 57500 - DNA, 20 bp, synthetic construct
  source 1..20: mol_type = other DNA
ggagctgctgggctctgggg

SEQ ID NO: 57501 - DNA, 20 bp, synthetic construct
  source 1..20: mol_type = other DNA
cgatggagtcgtttcccggg

SEQ ID NO: 57502 - DNA, 20 bp, synthetic construct
  source 1..20: mol_type = other DNA
gttgtcaaggacaagatcgg

SEQ ID NO: 57503 - DNA, 20 bp, synthetic construct
  source 1..20: mol_type = other DNA
tggccagcagctcgcagcgt

SEQ ID NO: 57504 - DNA, 20 bp, synthetic construct
  source 1..20: mol_type = other DNA
ctgcgtcagtgtaaggtcat

SEQ ID NO: 57505 - DNA, 20 bp, synthetic construct
  source 1..20: mol_type = other DNA
ggaaggttagcagctccacg

SEQ ID NO: 57506 - DNA, 20 bp, synthetic construct
  source 1..20: mol_type = other DNA
tcccctcaccagcagcagct

SEQ ID NO: 57507 - DNA, 20 bp, synthetic construct
  source 1..20: mol_type = other DNA
tgagaagaagcagatgacgc

SEQ ID NO: 57508 - DNA, 20 bp, synthetic construct
  source 1..20: mol_type = other DNA
gaggaactcatctcttgtga

SEQ ID NO: 57509 - DNA, 20 bp, synthetic construct
  source 1..20: mol_type = other DNA
gatgcattcgaacgcgttgg

SEQ ID NO: 57510 - DNA, 20 bp, synthetic construct
  source 1..20: mol_type = other DNA
ggacttgatcaagtctcttg

SEQ ID NO: 57511 - DNA, 20 bp, synthetic construct
  source 1..20: mol_type = other DNA
ctcaactcgggaggtgccat

SEQ ID NO: 57512 - DNA, 20 bp, synthetic construct
  source 1..20: mol_type = other DNA
tcggattggtgggaggagga

SEQ ID NO: 57513 - DNA, 20 bp, synthetic construct
  source 1..20: mol_type = other DNA
ttcaccatctgcaagtcagg

SEQ ID NO: 57514 - DNA, 20 bp, synthetic construct
  source 1..20: mol_type = other DNA
ctgagctgtgcgtagcgcat

SEQ ID NO: 57515 - DNA, 20 bp, synthetic construct
  source 1..20: mol_type = other DNA
tgaagagcacgggccggcgg

SEQ ID NO: 57516 - DNA, 20 bp, synthetic construct
  source 1..20: mol_type = other DNA
gaggaggaggaggagtggat

SEQ ID NO: 57517 - DNA, 20 bp, synthetic construct
  source 1..20: mol_type = other DNA
cgccatgttcttctcctcac

SEQ ID NO: 57518 - DNA, 20 bp, synthetic construct
  source 1..20: mol_type = other DNA
gctgcagtccatcatccagg

SEQ ID NO: 57519 - DNA, 20 bp, synthetic construct
  source 1..20: mol_type = other DNA
cttgatgacctcgttcatca

SEQ ID NO: 57520 - DNA, 20 bp, synthetic construct
  source 1..20: mol_type = other DNA
ctgcagatgacagtcacgaa

SEQ ID NO: 57521 - DNA, 20 bp, synthetic construct
  source 1..20: mol_type = other DNA
tgttccaagatgtccaggat

SEQ ID NO: 57522 - DNA, 20 bp, synthetic construct
  source 1..20: mol_type = other DNA
cctgccagagctggaccctg

SEQ ID NO: 57523 - DNA, 20 bp, synthetic construct
  source 1..20: mol_type = other DNA
ggagaagaacatggcggtca

SEQ ID NO: 57524 - DNA, 20 bp, synthetic construct
  source 1..20: mol_type = other DNA
gtagttgtcgtccttcacct

SEQ ID NO: 57525 - DNA, 20 bp, synthetic construct
  source 1..20: mol_type = other DNA
gtgaactccatggcacctcc

SEQ ID NO: 57526 - DNA, 20 bp, synthetic construct
  source 1..20: mol_type = other DNA
ccagctgccgcaacctggcc

SEQ ID NO: 57527 - DNA, 20 bp, synthetic construct
  source 1..20: mol_type = other DNA
ctgggaaagagcccactcgg

SEQ ID NO: 57528 - DNA, 20 bp, synthetic construct
  source 1..20: mol_type = other DNA
ggccagcacggtgggtgtga

SEQ ID NO: 57529 - DNA, 20 bp, synthetic construct
  source 1..20: mol_type = other DNA
ggaggagaaggaggacctgg

SEQ ID NO: 57530 - DNA, 20 bp, synthetic construct
  source 1..20: mol_type = other DNA
ggtcgagcacttgagctcca

SEQ ID NO: 57531 - DNA, 20 bp, synthetic construct
  source 1..20: mol_type = other DNA
gatgaagatgaagtgcttaa

SEQ ID NO: 57532 - DNA, 20 bp, synthetic construct
  source 1..20: mol_type = other DNA
gaggaggcccgccaggcaga

SEQ ID NO: 57533 - DNA, 20 bp, synthetic construct
  source 1..20: mol_type = other DNA
ccacccagatggtcttgcgc

SEQ ID NO: 57534 - DNA, 20 bp, synthetic construct
  source 1..20: mol_type = other DNA
gcggagcagctcctctacgc

SEQ ID NO: 57535 - DNA, 20 bp, synthetic construct
  source 1..20: mol_type = other DNA
ccagttcgtcagcaggtccg

SEQ ID NO: 57536 - DNA, 20 bp, synthetic construct
  source 1..20: mol_type = other DNA
aggtactgtgaaccacacag

SEQ ID NO: 57537 - DNA, 20 bp, synthetic construct
  source 1..20: mol_type = other DNA
ctccagctgcagcatgaccg

SEQ ID NO: 57538 - DNA, 20 bp, synthetic construct
  source 1..20: mol_type = other DNA
gctatgtggtcttcttggag

SEQ ID NO: 57539 - DNA, 20 bp, synthetic construct
  source 1..20: mol_type = other DNA
aagtacaggaagcagatccg

SEQ ID NO: 57540 - DNA, 20 bp, synthetic construct
  source 1..20: mol_type = other DNA
agcacgatggggtagatgtt

SEQ ID NO: 57541 - DNA, 20 bp, synthetic construct
  source 1..20: mol_type = other DNA
gcgccgcagcttgctctcca

SEQ ID NO: 57542 - DNA, 20 bp, synthetic construct
  source 1..20: mol_type = other DNA
tccatcgtcagacgctacaa

SEQ ID NO: 57543 - DNA, 20 bp, synthetic construct
  source 1..20: mol_type = other DNA
aggaggaatgtaagctggag

SEQ ID NO: 57544 - DNA, 20 bp, synthetic construct
  source 1..20: mol_type = other DNA
atgtccaggatggccttgtc

SEQ ID NO: 57545 - DNA, 20 bp, synthetic construct
  source 1..20: mol_type = other DNA
caggcagtgcttgttctgcg

SEQ ID NO: 57546 - DNA, 20 bp, synthetic construct
  source 1..20: mol_type = other DNA
ggaggagaagaacgacgaga

SEQ ID NO: 57547 - DNA, 20 bp, synthetic construct
  source 1..20: mol_type = other DNA
ggcctcaccggctgtagctg

SEQ ID NO: 57548 - DNA, 20 bp, synthetic construct
  source 1..20: mol_type = other DNA
aggttccaccgtggcgtaca

SEQ ID NO: 57549 - DNA, 20 bp, synthetic construct
  source 1..20: mol_type = other DNA
ccccacctggtccaggttgt

SEQ ID NO: 57550 - DNA, 20 bp, synthetic construct
  source 1..20: mol_type = other DNA
ccgagacctccaactcgagg

SEQ ID NO: 57551 - DNA, 20 bp, synthetic construct
  source 1..20: mol_type = other DNA
tatcaaccctgccaagctca

SEQ ID NO: 57552 - DNA, 20 bp, synthetic construct
  source 1..20: mol_type = other DNA
gaaaggtaccccagtgaagg

SEQ ID NO: 57553 - DNA, 20 bp, synthetic construct
  source 1..20: mol_type = other DNA
tcacctggatgatggactgc

SEQ ID NO: 57554 - DNA, 20 bp, synthetic construct
  source 1..20: mol_type = other DNA
tgacctcgttcatcaggaag

SEQ ID NO: 57555 - DNA, 20 bp, synthetic construct
  source 1..20: mol_type = other DNA
ctggaaggttagcagctcca

SEQ ID NO: 57556 - DNA, 20 bp, synthetic construct
  source 1..20: mol_type = other DNA
ttgcagatggtgaactccat

SEQ ID NO: 57557 - DNA, 20 bp, synthetic construct
  source 1..20: mol_type = other DNA
cttggccagcacggtgggtg

SEQ ID NO: 57558 - DNA, 20 bp, synthetic construct
  source 1..20: mol_type = other DNA
gcaggtccttggccttcatc

SEQ ID NO: 57559 - DNA, 20 bp, synthetic construct
  source 1..20: mol_type = other DNA
ctcagacacagtactcgcag

SEQ ID NO: 57560 - DNA, 20 bp, synthetic construct
  source 1..20: mol_type = other DNA
gtagatgttggacttgatca

SEQ ID NO: 57561 - DNA, 20 bp, synthetic construct
  source 1..20: mol_type = other DNA
gatgaagaggacgccttgtg

SEQ ID NO: 57562 - DNA, 20 bp, synthetic construct
  source 1..20: mol_type = other DNA
cttgaccagctcgtcattgt

SEQ ID NO: 57563 - DNA, 20 bp, synthetic construct
  source 1..20: mol_type = other DNA
cttagccatgcgctacgcac

SEQ ID NO: 57564 - DNA, 20 bp, synthetic construct
  source 1..20: mol_type = other DNA
cgcaggtagggcgtgagctt

SEQ ID NO: 57565 - DNA, 20 bp, synthetic construct
  source 1..20: mol_type = other DNA
gtagcgcatggctaagttgt

SEQ ID NO: 57566 - DNA, 20 bp, synthetic construct
  source 1..20: mol_type = other DNA
ccgcagcttgctctccaggt

SEQ ID NO: 57567 - DNA, 20 bp, synthetic construct
  source 1..20: mol_type = other DNA
cttctgaggaactcatctct

SEQ ID NO: 57568 - DNA, 20 bp, synthetic construct
  source 1..20: mol_type = other DNA
ctccacattctcccacaagg

SEQ ID NO: 57569 - DNA, 20 bp, synthetic construct
  source 1..20: mol_type = other DNA
gcactgcctgctggaggctg

SEQ ID NO: 57570 - DNA, 20 bp, synthetic construct
  source 1..20: mol_type = other DNA
tctgcaccagcgtcttggcc

SEQ ID NO: 57571 - DNA, 20 bp, synthetic construct
  source 1..20: mol_type = other DNA
acactgacgcaggtagggcg

SEQ ID NO: 57572 - DNA, 20 bp, synthetic construct
  source 1..20: mol_type = other DNA
atggcagcataggggcatta

SEQ ID NO: 57573 - DNA, 20 bp, synthetic construct
  source 1..20: mol_type = other DNA
agtgcttaatgcccctatgc

SEQ ID NO: 57574 - DNA, 20 bp, synthetic construct
  source 1..20: mol_type = other DNA
cctacccggagtgcccgcag

SEQ ID NO: 57575 - DNA, 20 bp, synthetic construct
  source 1..20: mol_type = other DNA
ctcgttcatcaggaagtgcg

SEQ ID NO: 57576 - DNA, 20 bp, synthetic construct
  source 1..20: mol_type = other DNA
cctgtacctggtcccgctcc

SEQ ID NO: 57577 - DNA, 20 bp, synthetic construct
  source 1..20: mol_type = other DNA
gtcaaggacaagatcggcga

SEQ ID NO: 57578 - DNA, 20 bp, synthetic construct
  source 1..20: mol_type = other DNA
gctcaccatcttggtgaagg

SEQ ID NO: 57579 - DNA, 20 bp, synthetic construct
  source 1..20: mol_type = other DNA
aaaggactgtgaaatgtaca

SEQ ID NO: 57580 - DNA, 20 bp, synthetic construct
  source 1..20: mol_type = other DNA
catccaagatcaaccgagca

SEQ ID NO: 57581 - DNA, 20 bp, synthetic construct
  source 1..20: mol_type = other DNA
tccacagtggaggaaggcca

SEQ ID NO: 57582 - DNA, 20 bp, synthetic construct
  source 1..20: mol_type = other DNA
ccctcacctggatgatggac

SEQ ID NO: 57583 - DNA, 20 bp, synthetic construct
  source 1..20: mol_type = other DNA
acccctcacctcgagttgga

SEQ ID NO: 57584 - DNA, 20 bp, synthetic construct
  source 1..20: mol_type = other DNA
agaagaccacatagcccctt

SEQ ID NO: 57585 - DNA, 20 bp, synthetic construct
  source 1..20: mol_type = other DNA
ctcctgcaggttgtagatcc

SEQ ID NO: 57586 - DNA, 20 bp, synthetic construct
  source 1..20: mol_type = other DNA
ttacctgctcggttgatctt

SEQ ID NO: 57587 - DNA, 20 bp, synthetic construct
  source 1..20: mol_type = other DNA
ctcagccgctatatcaaccc

SEQ ID NO: 57588 - DNA, 20 bp, synthetic construct
  source 1..20: mol_type = other DNA
acagtcctttcccagggtcg

SEQ ID NO: 57589 - DNA, 20 bp, synthetic construct
  source 1..20: mol_type = other DNA
gatgagcaggatgaagatga

SEQ ID NO: 57590 - DNA, 20 bp, synthetic construct
  source 1..20: mol_type = other DNA
cgcaagaccatctgggtgga

SEQ ID NO: 57591 - DNA, 20 bp, synthetic construct
  source 1..20: mol_type = other DNA
gtagaacgagtcccccgatg

SEQ ID NO: 57592 - DNA, 20 bp, synthetic construct
  source 1..20: mol_type = other DNA
agagacagattggttcctgt

SEQ ID NO: 57593 - DNA, 20 bp, synthetic construct
  source 1..20: mol_type = other DNA
gtgtcttaggtatatttgaa

SEQ ID NO: 57594 - DNA, 20 bp, synthetic construct
  source 1..20: mol_type = other DNA
gcatcttcccgccctgaggc

SEQ ID NO: 57595 - DNA, 20 bp, synthetic construct
  source 1..20: mol_type = other DNA
gcggcatcttcccgccctga

SEQ ID NO: 57596 - DNA, 20 bp, synthetic construct
  source 1..20: mol_type = other DNA
tgacagcaggaggatgcatt

SEQ ID NO: 57597 - DNA, 20 bp, synthetic construct
  source 1..20: mol_type = other DNA
ttgcaggcaagaagacaaca

SEQ ID NO: 57598 - DNA, 20 bp, synthetic construct
  source 1..20: mol_type = other DNA
cgaccagagaagcaagttcg

SEQ ID NO: 57599 - DNA, 20 bp, synthetic construct
  source 1..20: mol_type = other DNA
cacgacgcgcggcatcttcc

SEQ ID NO: 57600 - DNA, 20 bp, synthetic construct
  source 1..20: mol_type = other DNA
tccgagcggccgtcgcggca

SEQ ID NO: 57601 - DNA, 20 bp, synthetic construct
  source 1..20: mol_type = other DNA
cccgaccagagaagcaagtt

SEQ ID NO: 57602 - DNA, 20 bp, synthetic construct
  source 1..20: mol_type = other DNA
ggatctaccacgatgggttc

SEQ ID NO: 57603 - DNA, 20 bp, synthetic construct
  source 1..20: mol_type = other DNA
gaatgtggagcccatctcac

SEQ ID NO: 57604 - DNA, 20 bp, synthetic construct
  source 1..20: mol_type = other DNA
tgccaggatgtaagacagga

SEQ ID NO: 57605 - DNA, 20 bp, synthetic construct
  source 1..20: mol_type = other DNA
ctgaagatgagggacagttt

SEQ ID NO: 57606 - DNA, 20 bp, synthetic construct
  source 1..20: mol_type = other DNA
tggtagatccgtttgatcct

SEQ ID NO: 57607 - DNA, 20 bp, synthetic construct
  source 1..20: mol_type = other DNA
aagacaggatgtgcacatga

SEQ ID NO: 57608 - DNA, 20 bp, synthetic construct
  source 1..20: mol_type = other DNA
attttacatagttggaatgt

SEQ ID NO: 57609 - DNA, 20 bp, synthetic construct
  source 1..20: mol_type = other DNA
gacacctcatgtgcacatcc

SEQ ID NO: 57610 - DNA, 20 bp, synthetic construct
  source 1..20: mol_type = other DNA
tgataaggatgtaaagattg

SEQ ID NO: 57611 - DNA, 20 bp, synthetic construct
  source 1..20: mol_type = other DNA
tgcacatgaggtgtccacag

SEQ ID NO: 57612 - DNA, 20 bp, synthetic construct
  source 1..20: mol_type = other DNA
tgtaagacaggatgtgcaca

SEQ ID NO: 57613 - DNA, 20 bp, synthetic construct
  source 1..20: mol_type = other DNA
tttacatagttggaatgtgg

SEQ ID NO: 57614 - DNA, 20 bp, synthetic construct
  source 1..20: mol_type = other DNA
aatgataaggatgtaaagat

SEQ ID NO: 57615 - DNA, 20 bp, synthetic construct
  source 1..20: mol_type = other DNA
ccaggatgtaagacaggatg

SEQ ID NO: 57616 - DNA, 20 bp, synthetic construct
  source 1..20: mol_type = other DNA
gaacaatatgaattatactg

SEQ ID NO: 57617 - DNA, 20 bp, synthetic construct
  source 1..20: mol_type = other DNA
gacaggatgtgcacatgagg

SEQ ID NO: 57618 - DNA, 20 bp, synthetic construct
  source 1..20: mol_type = other DNA
agctcatggacaaagtggta

SEQ ID NO: 57619 - DNA, 20 bp, synthetic construct
  source 1..20: mol_type = other DNA
ggcaagaggtgcacatcaaa

SEQ ID NO: 57620 - DNA, 20 bp, synthetic construct
  source 1..20: mol_type = other DNA
ggcatttgatgtgcacctct

SEQ ID NO: 57621 - DNA, 20 bp, synthetic construct
  source 1..20: mol_type = other DNA
ctcacatatgatgaagttaa

SEQ ID NO: 57622 - DNA, 20 bp, synthetic construct
  source 1..20: mol_type = other DNA
ttgcactcgattgggacagt

SEQ ID NO: 57623 - DNA, 20 bp, synthetic construct
  source 1..20: mol_type = other DNA
gtattcagacagtgccttca

SEQ ID NO: 57624 - DNA, 20 bp, synthetic construct
  source 1..20: mol_type = other DNA
tacttacaatccttccctgc

SEQ ID NO: 57625 - DNA, 20 bp, synthetic construct
  source 1..20: mol_type = other DNA
tttatatggtcatgaggtgt

SEQ ID NO: 57626 - DNA, 20 bp, synthetic construct
  source 1..20: mol_type = other DNA
caatggcccactgtcccaat

SEQ ID NO: 57627 - DNA, 20 bp, synthetic construct
  source 1..20: mol_type = other DNA
agaacttaccactttgtcca

SEQ ID NO: 57628 - DNA, 20 bp, synthetic construct
  source 1..20: mol_type = other DNA
gaaaggtaaaactagaaaca

SEQ ID NO: 57629 - DNA, 20 bp, synthetic construct
  source 1..20: mol_type = other DNA
tgcacagaactatcgtacca

SEQ ID NO: 57630 - DNA, 20 bp, synthetic construct
  source 1..20: mol_type = other DNA
gtgacacatccaggttacat

SEQ ID NO: 57631 - DNA, 20 bp, synthetic construct
  source 1..20: mol_type = other DNA
ctgccatgccgtaaggcaag

SEQ ID NO: 57632 - DNA, 20 bp, synthetic construct
  source 1..20: mol_type = other DNA
gttgcactcgattgggacag

SEQ ID NO: 57633 - DNA, 20 bp, synthetic construct
  source 1..20: mol_type = other DNA
ccaggccagagctaatctgg

SEQ ID NO: 57634 - DNA, 20 bp, synthetic construct
  source 1..20: mol_type = other DNA
agccattgcttccaggccag

SEQ ID NO: 57635 - DNA, 20 bp, synthetic construct
  source 1..20: mol_type = other DNA
ccccctaagcaagctgccgc

SEQ ID NO: 57636 - DNA, 20 bp, synthetic construct
  source 1..20: mol_type = other DNA
tcacatagccaatggcccac

SEQ ID NO: 57637 - DNA, 20 bp, synthetic construct
  source 1..20: mol_type = other DNA
atcttacagagctgaaaagt

SEQ ID NO: 57638 - DNA, 20 bp, synthetic construct
  source 1..20: mol_type = other DNA
tgccaaccgattcatcatca

SEQ ID NO: 57639 - DNA, 20 bp, synthetic construct
  source 1..20: mol_type = other DNA
ggcccactgtcccaatcgag

SEQ ID NO: 57640 - DNA, 20 bp, synthetic construct
  source 1..20: mol_type = other DNA
actggtgagttctgcctgtc

SEQ ID NO: 57641 - DNA, 20 bp, synthetic construct
  source 1..20: mol_type = other DNA
tccatggtacgatagttctg

SEQ ID NO: 57642 - DNA, 20 bp, synthetic construct
  source 1..20: mol_type = other DNA
gtttaggagtcggatggtca

SEQ ID NO: 57643 - DNA, 20 bp, synthetic construct
  source 1..20: mol_type = other DNA
catatgatgaagttaaagca

SEQ ID NO: 57644 - DNA, 20 bp, synthetic construct
  source 1..20: mol_type = other DNA
cttacagagctgaaaagtgg

SEQ ID NO: 57645 - DNA, 20 bp, synthetic construct
  source 1..20: mol_type = other DNA
gcagctatattttccggtta

SEQ ID NO: 57646 - DNA, 20 bp, synthetic construct
  source 1..20: mol_type = other DNA
acagaccatacctcataaca

SEQ ID NO: 57647 - DNA, 20 bp, synthetic construct
  source 1..20: mol_type = other DNA
cacaggtaaggataattgct

SEQ ID NO: 57648 - DNA, 20 bp, synthetic construct
  source 1..20: mol_type = other DNA
agcttccaagtcttctccac

SEQ ID NO: 57649 - DNA, 20 bp, synthetic construct
  source 1..20: mol_type = other DNA
atggcccactgtcccaatcg

SEQ ID NO: 57650 - DNA, 20 bp, synthetic construct
  source 1..20: mol_type = other DNA
gaggaggaggagaaagccgg

SEQ ID NO: 57651 - DNA, 20 bp, synthetic construct
  source 1..20: mol_type = other DNA
aatgacaaagatgtcaagat

SEQ ID NO: 57652 - DNA, 20 bp, synthetic construct
  source 1..20: mol_type = other DNA
tgccatgccgtaaggcaaga

SEQ ID NO: 57653 - DNA, 20 bp, synthetic construct
  source 1..20: mol_type = other DNA
aagtcttaccttccgggttt

SEQ ID NO: 57654 - DNA, 20 bp, synthetic construct
  source 1..20: mol_type = other DNA
gggtccacgattatgggctc

SEQ ID NO: 57655 - DNA, 20 bp, synthetic construct
  source 1..20: mol_type = other DNA
cagtgcactagaacagaaaa

SEQ ID NO: 57656 - DNA, 20 bp, synthetic construct
  source 1..20: mol_type = other DNA
attatacctgccatgccgta

SEQ ID NO: 57657 - DNA, 20 bp, synthetic construct
  source 1..20: mol_type = other DNA
ccatgccgtaaggcaagagg

SEQ ID NO: 57658 - DNA, 20 bp, synthetic construct
  source 1..20: mol_type = other DNA
gcatggcaggtataatcatt

SEQ ID NO: 57659 - DNA, 20 bp, synthetic construct
  source 1..20: mol_type = other DNA
atcaatcagggcttgaaata

SEQ ID NO: 57660 - DNA, 20 bp, synthetic construct
  source 1..20: mol_type = other DNA
ccaagtcttctccacggtcc

SEQ ID NO: 57661 - DNA, 20 bp, synthetic construct
  source 1..20: mol_type = other DNA
tgtgacacatccaggttaca

SEQ ID NO: 57662 - DNA, 20 bp, synthetic construct
  source 1..20: mol_type = other DNA
gtgcactagaacagaaaaag

SEQ ID NO: 57663 - DNA, 20 bp, synthetic construct
  source 1..20: mol_type = other DNA
ggtattattgatgctattca

SEQ ID NO: 57664 - DNA, 20 bp, synthetic construct
  source 1..20: mol_type = other DNA
gggtattattgatgctattc

SEQ ID NO: 57665 - DNA, 20 bp, synthetic construct
  source 1..20: mol_type = other DNA
tgtttaggagtcggatggtc

SEQ ID NO: 57666 - DNA, 20 bp, synthetic construct
  source 1..20: mol_type = other DNA
tcaatcagggcttgaaataa

SEQ ID NO: 57667 - DNA, 20 bp, synthetic construct
  source 1..20: mol_type = other DNA
tggtgagttctgcctgtcag

SEQ ID NO: 57668 - DNA, 20 bp, synthetic construct
  source 1..20: mol_type = other DNA
atgcccacaaggctcaatct

SEQ ID NO: 57669 - DNA, 20 bp, synthetic construct
  source 1..20: mol_type = other DNA
gtgatgtgactggtgagttc

SEQ ID NO: 57670 - DNA, 20 bp, synthetic construct
  source 1..20: mol_type = other DNA
actgagttgggcaagtttct

SEQ ID NO: 57671 - DNA, 20 bp, synthetic construct
  source 1..20: mol_type = other DNA
tgaaataagggcttgttatg

SEQ ID NO: 57672 - DNA, 20 bp, synthetic construct
  source 1..20: mol_type = other DNA
tgcacatcaaatgcccacaa

SEQ ID NO: 57673 - DNA, 20 bp, synthetic construct
  source 1..20: mol_type = other DNA
gttctagtgcactgacaggc

SEQ ID NO: 57674 - DNA, 20 bp, synthetic construct
  source 1..20: mol_type = other DNA
ccagcatgtgactgaagata

SEQ ID NO: 57675 - DNA, 20 bp, synthetic construct
  source 1..20: mol_type = other DNA
ttcatattgttcctggaatt

SEQ ID NO: 57676 - DNA, 20 bp, synthetic construct
  source 1..20: mol_type = other DNA
ctcactttatgctagggagg

SEQ ID NO: 57677 - DNA, 20 bp, synthetic construct
  source 1..20: mol_type = other DNA
cgcagatcgcaggaccgtgg

SEQ ID NO: 57678 - DNA, 20 bp, synthetic construct
  source 1..20: mol_type = other DNA
gtgcacatcaaatgcccaca

SEQ ID NO: 57679 - DNA, 20 bp, synthetic construct
  source 1..20: mol_type = other DNA
tcctttaggtcttgtgataa

SEQ ID NO: 57680 - DNA, 20 bp, synthetic construct
  source 1..20: mol_type = other DNA
ctgaagataagggacagttt

SEQ ID NO: 57681 - DNA, 20 bp, synthetic construct
  source 1..20: mol_type = other DNA
agcaagctgccgcagatcgc

SEQ ID NO: 57682 - DNA, 20 bp, synthetic construct
  source 1..20: mol_type = other DNA
gtcttaccttccgggtttgg

SEQ ID NO: 57683 - DNA, 20 bp, synthetic construct
  source 1..20: mol_type = other DNA
cttcttacctgtcctgtgac

SEQ ID NO: 57684 - DNA, 20 bp, synthetic construct
  source 1..20: mol_type = other DNA
gctctgtaagatttgtgcag

SEQ ID NO: 57685 - DNA, 20 bp, synthetic construct
  source 1..20: mol_type = other DNA
gaaggcaaggagagaatgta

SEQ ID NO: 57686 - DNA, 20 bp, synthetic construct
  source 1..20: mol_type = other DNA
attcagacagtgccttcatg

SEQ ID NO: 57687 - DNA, 20 bp, synthetic construct
  source 1..20: mol_type = other DNA
caatcagggcttgaaataag

SEQ ID NO: 57688 - DNA, 20 bp, synthetic construct
  source 1..20: mol_type = other DNA
acctgccatgccgtaaggca

SEQ ID NO: 57689 - DNA, 20 bp, synthetic construct
  source 1..20: mol_type = other DNA
gctatattttccggttaagt

SEQ ID NO: 57690 - DNA, 20 bp, synthetic construct
  source 1..20: mol_type = other DNA
tctgaatactttccatggta

SEQ ID NO: 57691 - DNA, 20 bp, synthetic construct
  source 1..20: mol_type = other DNA
tctacctttggtgaacccgt

SEQ ID NO: 57692 - DNA, 20 bp, synthetic construct
  source 1..20: mol_type = other DNA
gccgcagatcgcaggaccgt

SEQ ID NO: 57693 - DNA, 20 bp, synthetic construct
  source 1..20: mol_type = other DNA
ttatacctgccatgccgtaa

SEQ ID NO: 57694 - DNA, 20 bp, synthetic construct
  source 1..20: mol_type = other DNA
gacgacgatgatgatcgtga

SEQ ID NO: 57695 - DNA, 20 bp, synthetic construct
  source 1..20: mol_type = other DNA
gtgaagagagccttagagat

SEQ ID NO: 57696 - DNA, 20 bp, synthetic construct
  source 1..20: mol_type = other DNA
tcatcatcaaggactcctca

SEQ ID NO: 57697 - DNA, 20 bp, synthetic construct
  source 1..20: mol_type = other DNA
caggccagagctaatctggt

SEQ ID NO: 57698 - DNA, 20 bp, synthetic construct
  source 1..20: mol_type = other DNA
ttacctgtgtaacttttata

SEQ ID NO: 57699 - DNA, 20 bp, synthetic construct
  source 1..20: mol_type = other DNA
tttccatggtacgatagttc

SEQ ID NO: 57700 - DNA, 20 bp, synthetic construct
  source 1..20: mol_type = other DNA
tttaggagtcggatggtcag

SEQ ID NO: 57701 - DNA, 20 bp, synthetic construct
  source 1..20: mol_type = other DNA
cactctcaggaacaaggcag

SEQ ID NO: 57702 - DNA, 20 bp, synthetic construct
  source 1..20: mol_type = other DNA
ccagcgccggaggggcaagg

SEQ ID NO: 57703 - DNA, 20 bp, synthetic construct
  source 1..20: mol_type = other DNA
ctcactgccttgttcctgag

SEQ ID NO: 57704 - DNA, 20 bp, synthetic construct
  source 1..20: mol_type = other DNA
gagaatgacaccatagatga

SEQ ID NO: 57705 - DNA, 20 bp, synthetic construct
  source 1..20: mol_type = other DNA
ccctacctgtaatcggcaac

SEQ ID NO: 57706 - DNA, 20 bp, synthetic construct
  source 1..20: mol_type = other DNA
gatccagcaggccaaagctc

SEQ ID NO: 57707 - DNA, 20 bp, synthetic construct
  source 1..20: mol_type = other DNA
agtgaaggtgggtaccactg

SEQ ID NO: 57708 - DNA, 20 bp, synthetic construct
  source 1..20: mol_type = other DNA
tgcctgcaggatggccgcgg

SEQ ID NO: 57709 - DNA, 20 bp, synthetic construct
  source 1..20: mol_type = other DNA
tgcatgtgaagggcgtcgta

SEQ ID NO: 57710 - DNA, 20 bp, synthetic construct
  source 1..20: mol_type = other DNA
ctacctgtaatcggcaactg

SEQ ID NO: 57711 - DNA, 20 bp, synthetic construct
  source 1..20: mol_type = other DNA
ctctcaggaacaaggcagtg

SEQ ID NO: 57712 - DNA, 20 bp, synthetic construct
  source 1..20: mol_type = other DNA
ttctcactgccttgttcctg

SEQ ID NO: 57713 - DNA, 20 bp, synthetic construct
  source 1..20: mol_type = other DNA
agatgaagaggattccatcc

SEQ ID NO: 57714 - DNA, 20 bp, synthetic construct
  source 1..20: mol_type = other DNA
gcagagtttgggatccagca

SEQ ID NO: 57715 - DNA, 20 bp, synthetic construct
  source 1..20: mol_type = other DNA
gcaggatggccgcggtgaaa

SEQ ID NO: 57716 - DNA, 20 bp, synthetic construct
  source 1..20: mol_type = other DNA
cattctcactgccttgttcc

SEQ ID NO: 57717 - DNA, 20 bp, synthetic construct
  source 1..20: mol_type = other DNA
ttcatcttgtcctttccctc

SEQ ID NO: 57718 - DNA, 20 bp, synthetic construct
  source 1..20: mol_type = other DNA
gcacagagctttggcctgct

SEQ ID NO: 57719 - DNA, 20 bp, synthetic construct
  source 1..20: mol_type = other DNA
cttctgcaggaactgcagaa

SEQ ID NO: 57720 - DNA, 20 bp, synthetic construct
  source 1..20: mol_type = other DNA
ccagcaggtagcagagtttg

SEQ ID NO: 57721 - DNA, 20 bp, synthetic construct
  source 1..20: mol_type = other DNA
ggcagtgagaatgacaccat

SEQ ID NO: 57722 - DNA, 20 bp, synthetic construct
  source 1..20: mol_type = other DNA
ttgcagttcagcaggagcgc

SEQ ID NO: 57723 - DNA, 20 bp, synthetic construct
  source 1..20: mol_type = other DNA
agtgagaatgacaccataga

SEQ ID NO: 57724 - DNA, 20 bp, synthetic construct
  source 1..20: mol_type = other DNA
agcaggagcgcagacgcccc

SEQ ID NO: 57725 - DNA, 20 bp, synthetic construct
  source 1..20: mol_type = other DNA
caggaacaaggcagtgagaa

SEQ ID NO: 57726 - DNA, 20 bp, synthetic construct
  source 1..20: mol_type = other DNA
tccagcaggccaaagctctg

SEQ ID NO: 57727 - DNA, 20 bp, synthetic construct
  source 1..20: mol_type = other DNA
ctgacttacgttatagagct

SEQ ID NO: 57728 - DNA, 20 bp, synthetic construct
  source 1..20: mol_type = other DNA
tgttataggagctcaatcta

SEQ ID NO: 57729 - DNA, 20 bp, synthetic construct
  source 1..20: mol_type = other DNA
gcacagaggcacagagcttt

SEQ ID NO: 57730 - DNA, 20 bp, synthetic construct
  source 1..20: mol_type = other DNA
gaagaggattccatccagca

SEQ ID NO: 57731 - DNA, 20 bp, synthetic construct
  source 1..20: mol_type = other DNA
gaggattccatccagcaggt

SEQ ID NO: 57732 - DNA, 20 bp, synthetic construct
  source 1..20: mol_type = other DNA
atctatggtgtcattctcac

SEQ ID NO: 57733 - DNA, 20 bp, synthetic construct
  source 1..20: mol_type = other DNA
ggtagcagagtttgggatcc

SEQ ID NO: 57734 - DNA, 20 bp, synthetic construct
  source 1..20: mol_type = other DNA
tcacgccagggtctcagtac

SEQ ID NO: 57735 - DNA, 20 bp, synthetic construct
  source 1..20: mol_type = other DNA
ggtacccaccttcactctca

SEQ ID NO: 57736 - DNA, 20 bp, synthetic construct
  source 1..20: mol_type = other DNA
aagcagtcgcccatgcttgt

SEQ ID NO: 57737 - DNA, 20 bp, synthetic construct
  source 1..20: mol_type = other DNA
aggagcaggctcctgcacag

SEQ ID NO: 57738 - DNA, 20 bp, synthetic construct
  source 1..20: mol_type = other DNA
cccaggaaacaagattttgg

SEQ ID NO: 57739 - DNA, 20 bp, synthetic construct
  source 1..20: mol_type = other DNA
ttacctttcacatggataat

SEQ ID NO: 57740 - DNA, 20 bp, synthetic construct
  source 1..20: mol_type = other DNA
gcagaagtaaatatctgttt

SEQ ID NO: 57741 - DNA, 20 bp, synthetic construct
  source 1..20: mol_type = other DNA
agcaatggaaccattatcca

SEQ ID NO: 57742 - DNA, 20 bp, synthetic construct
  source 1..20: mol_type = other DNA
gcacccaaaagggcttagaa

SEQ ID NO: 57743 - DNA, 20 bp, synthetic construct
  source 1..20: mol_type = other DNA
cttacccagaaaataataaa

SEQ ID NO: 57744 - DNA, 20 bp, synthetic construct
  source 1..20: mol_type = other DNA
ggatgcccggaactcccttg

SEQ ID NO: 57745 - DNA, 20 bp, synthetic construct
  source 1..20: mol_type = other DNA
gtaattcccatatacaacac

SEQ ID NO: 57746 - DNA, 20 bp, synthetic construct
  source 1..20: mol_type = other DNA
acgctacaagcatgggcgac

SEQ ID NO: 57747 - DNA, 20 bp, synthetic construct
  source 1..20: mol_type = other DNA
tgctatagcttgctagtaac

SEQ ID NO: 57748 - DNA, 20 bp, synthetic construct
  source 1..20: mol_type = other DNA
ggtgaggagtaagaggagca

SEQ ID NO: 57749 - DNA, 20 bp, synthetic construct
  source 1..20: mol_type = other DNA
cacaaaggactggatagtgc

SEQ ID NO: 57750 - DNA, 20 bp, synthetic construct
  source 1..20: mol_type = other DNA
aattactcccagcagcttca

SEQ ID NO: 57751 - DNA, 20 bp, synthetic construct
  source 1..20: mol_type = other DNA
taataaaggccactgttact

SEQ ID NO: 57752 - DNA, 20 bp, synthetic construct
  source 1..20: mol_type = other DNA
cttggacaaaggtgtttccc

SEQ ID NO: 57753 - DNA, 20 bp, synthetic construct
  source 1..20: mol_type = other DNA
agggatgcccggaactccct

SEQ ID NO: 57754 - DNA, 20 bp, synthetic construct
  source 1..20: mol_type = other DNA
agaggagcaggctcctgcac

SEQ ID NO: 57755 - DNA, 20 bp, synthetic construct
  source 1..20: mol_type = other DNA
atgtatcctcctccttacct

SEQ ID NO: 57756 - DNA, 20 bp, synthetic construct
  source 1..20: mol_type = other DNA
cccggaactcccttgagaag

SEQ ID NO: 57757 - DNA, 20 bp, synthetic construct
  source 1..20: mol_type = other DNA
ggagcgataggctgcgaagt

SEQ ID NO: 57758 - DNA, 20 bp, synthetic construct
  source 1..20: mol_type = other DNA
gagtaaacctgaagctgctg

SEQ ID NO: 57759 - DNA, 20 bp, synthetic construct
  source 1..20: mol_type = other DNA
cctgcaggtgaggagtaaga

SEQ ID NO: 57760 - DNA, 20 bp, synthetic construct
  source 1..20: mol_type = other DNA
ttctggaggtagaatgtcac

SEQ ID NO: 57761 - DNA, 20 bp, synthetic construct
  source 1..20: mol_type = other DNA
cttacctagacaatgagaag

SEQ ID NO: 57762 - DNA, 20 bp, synthetic construct
  source 1..20: mol_type = other DNA
gcccacccgcaagcattacc

SEQ ID NO: 57763 - DNA, 20 bp, synthetic construct
  source 1..20: mol_type = other DNA
gtaggaatacttgcagctaa

SEQ ID NO: 57764 - DNA, 20 bp, synthetic construct
  source 1..20: mol_type = other DNA
cacatggataatggttccat

SEQ ID NO: 57765 - DNA, 20 bp, synthetic construct
  source 1..20: mol_type = other DNA
atatgggaattactcccagc

SEQ ID NO: 57766 - DNA, 20 bp, synthetic construct
  source 1..20: mol_type = other DNA
tgtatatgggaattactccc

SEQ ID NO: 57767 - DNA, 20 bp, synthetic construct
  source 1..20: mol_type = other DNA
gttcatgtagtcactgtgca

SEQ ID NO: 57768 - DNA, 20 bp, synthetic construct
  source 1..20: mol_type = other DNA
tcacagttgaaccccgtttt

SEQ ID NO: 57769 - DNA, 20 bp, synthetic construct
  source 1..20: mol_type = other DNA
cttcacaaaggactggatag

SEQ ID NO: 57770 - DNA, 20 bp, synthetic construct
  source 1..20: mol_type = other DNA
tgcccggaactcccttgaga

SEQ ID NO: 57771 - DNA, 20 bp, synthetic construct
  source 1..20: mol_type = other DNA
gttactagcaagctatagca

SEQ ID NO: 57772 - DNA, 20 bp, synthetic construct
  source 1..20: mol_type = other DNA
cgcaagcattaccagcccta

SEQ ID NO: 57773 - DNA, 20 bp, synthetic construct
  source 1..20: mol_type = other DNA
ggaatacttgcagctaaggt

SEQ ID NO: 57774 - DNA, 20 bp, synthetic construct
  source 1..20: mol_type = other DNA
cccttcacaaaggactggat

SEQ ID NO: 57775 - DNA, 20 bp, synthetic construct
  source 1..20: mol_type = other DNA
gtagaatgtcactgattcat

SEQ ID NO: 57776 - DNA, 20 bp, synthetic construct
  source 1..20: mol_type = other DNA
gtggagtcctggcttgctat

SEQ ID NO: 57777 - DNA, 20 bp, synthetic construct
  source 1..20: mol_type = other DNA
tccttacctagacaatgaga

SEQ ID NO: 57778 - DNA, 20 bp, synthetic construct
  source 1..20: mol_type = other DNA
tagcaagctatagcaagcca

SEQ ID NO: 57779 - DNA, 20 bp, synthetic construct
  source 1..20: mol_type = other DNA
gaagagattgtaggaatact

SEQ ID NO: 57780 - DNA, 20 bp, synthetic construct
  source 1..20: mol_type = other DNA
tgcaggtgaggagtaagagg

SEQ ID NO: 57781 - DNA, 20 bp, synthetic construct
  source 1..20: mol_type = other DNA
gctaaggttgaccgcattgt

SEQ ID NO: 57782 - DNA, 20 bp, synthetic construct
  source 1..20: mol_type = other DNA
agtcatgttcatgtagtcac

SEQ ID NO: 57783 - DNA, 20 bp, synthetic construct
  source 1..20: mol_type = other DNA
accagcacccaaaagggctt

SEQ ID NO: 57784 - DNA, 20 bp, synthetic construct
  source 1..20: mol_type = other DNA
gagtaagaggagcaggctcc

SEQ ID NO: 57785 - DNA, 20 bp, synthetic construct
  source 1..20: mol_type = other DNA
aacatacaaattctggaggt

SEQ ID NO: 57786 - DNA, 20 bp, synthetic construct
  source 1..20: mol_type = other DNA
acatgaacatgactccccgc

SEQ ID NO: 57787 - DNA, 20 bp, synthetic construct
  source 1..20: mol_type = other DNA
gtgaagcagtcgcccatgct

SEQ ID NO: 57788 - DNA, 20 bp, synthetic construct
  source 1..20: mol_type = other DNA
gcagctaaggttgaccgcat

SEQ ID NO: 57789 - DNA, 20 bp, synthetic construct
  source 1..20: mol_type = other DNA
catacttctgtaatacactt

SEQ ID NO: 57790 - DNA, 20 bp, synthetic construct
  source 1..20: mol_type = other DNA
gtatcagtgtaaaggatcac

SEQ ID NO: 57791 - DNA, 20 bp, synthetic construct
  source 1..20: mol_type = other DNA
taatacacttggagtggttt

SEQ ID NO: 57792 - DNA, 20 bp, synthetic construct
  source 1..20: mol_type = other DNA
ggagtggttttgacttgttc

SEQ ID NO: 57793 - DNA, 20 bp, synthetic construct
  source 1..20: mol_type = other DNA
aagagaaagccagatatggt

SEQ ID NO: 57794 - DNA, 20 bp, synthetic construct
  source 1..20: mol_type = other DNA
ttaccttgaagaagaatgat

SEQ ID NO: 57795 - DNA, 20 bp, synthetic construct
  source 1..20: mol_type = other DNA
ctttacactgatacatccct

SEQ ID NO: 57796 - DNA, 20 bp, synthetic construct
  source 1..20: mol_type = other DNA
gcaaagagaaagccagatat

SEQ ID NO: 57797 - DNA, 20 bp, synthetic construct
  source 1..20: mol_type = other DNA
ctgacatggaacaggggaag

SEQ ID NO: 57798 - DNA, 20 bp, synthetic construct
  source 1..20: mol_type = other DNA
cacttggagtggttttgact

SEQ ID NO: 57799 - DNA, 20 bp, synthetic construct
  source 1..20: mol_type = other DNA
acagtgtgtcagaactgcat

SEQ ID NO: 57800 - DNA, 20 bp, synthetic construct
  source 1..20: mol_type = other DNA
gcccttaccttgaagaagaa

SEQ ID NO: 57801 - DNA, 20 bp, synthetic construct
  source 1..20: mol_type = other DNA
ctgacacactgtagggaaaa

SEQ ID NO: 57802 - DNA, 20 bp, synthetic construct
  source 1..20: mol_type = other DNA
gacacactgtagggaaaagg

SEQ ID NO: 57803 - DNA, 20 bp, synthetic construct
  source 1..20: mol_type = other DNA
cagccacagcagaaatgaca

SEQ ID NO: 57804 - DNA, 20 bp, synthetic construct
  source 1..20: mol_type = other DNA
cctggagggcaacaatttcg

SEQ ID NO: 57805 - DNA, 20 bp, synthetic construct
  source 1..20: mol_type = other DNA
tacctggagggcaacaattt

SEQ ID NO: 57806 - DNA, 20 bp, synthetic construct
  source 1..20: mol_type = other DNA
atcgacgaggaggtgtactt

SEQ ID NO: 57807 - DNA, 20 bp, synthetic construct
  source 1..20: mol_type = other DNA
ctgctcaagtccatctggta

SEQ ID NO: 57808 - DNA, 20 bp, synthetic construct
  source 1..20: mol_type = other DNA
aagaggcaccagaggcggaa

SEQ ID NO: 57809 - DNA, 20 bp, synthetic construct
  source 1..20: mol_type = other DNA
ggaagagaagctgaagcagt

SEQ ID NO: 57810 - DNA, 20 bp, synthetic construct
  source 1..20: mol_type = other DNA
ggtgagctggaggagcttct

SEQ ID NO: 57811 - DNA, 20 bp, synthetic construct
  source 1..20: mol_type = other DNA
gaaacactggaatgtccaga

SEQ ID NO: 57812 - DNA, 20 bp, synthetic construct
  source 1..20: mol_type = other DNA
gccgagcggctgctgcagga

SEQ ID NO: 57813 - DNA, 20 bp, synthetic construct
  source 1..20: mol_type = other DNA
tccagcacagctcatcaaag

SEQ ID NO: 57814 - DNA, 20 bp, synthetic construct
  source 1..20: mol_type = other DNA
gatggacttgagcagttcct

SEQ ID NO: 57815 - DNA, 20 bp, synthetic construct
  source 1..20: mol_type = other DNA
gcccctcacctccacgcagc

SEQ ID NO: 57816 - DNA, 20 bp, synthetic construct
  source 1..20: mol_type = other DNA
tgccagacgctgagcccccc

SEQ ID NO: 57817 - DNA, 20 bp, synthetic construct
  source 1..20: mol_type = other DNA
cgtaccagatggacttgagc

SEQ ID NO: 57818 - DNA, 20 bp, synthetic construct
  source 1..20: mol_type = other DNA
tgtgggacagcacctgggat

SEQ ID NO: 57819 - DNA, 20 bp, synthetic construct
  source 1..20: mol_type = other DNA
gcttcaggacatcttggatg

SEQ ID NO: 57820 - DNA, 20 bp, synthetic construct
  source 1..20: mol_type = other DNA
ggttcatctggacattccag

SEQ ID NO: 57821 - DNA, 20 bp, synthetic construct
  source 1..20: mol_type = other DNA
ggcagggctacctgtggaag

SEQ ID NO: 57822 - DNA, 20 bp, synthetic construct
  source 1..20: mol_type = other DNA
ctggaggagcttctggccca

SEQ ID NO: 57823 - DNA, 20 bp, synthetic construct
  source 1..20: mol_type = other DNA
ccgtgtacaggttgtgggac

SEQ ID NO: 57824 - DNA, 20 bp, synthetic construct
  source 1..20: mol_type = other DNA
ggaagaggaggaagagaagc

SEQ ID NO: 57825 - DNA, 20 bp, synthetic construct
  source 1..20: mol_type = other DNA
gaggtagggcatgtatccct

SEQ ID NO: 57826 - DNA, 20 bp, synthetic construct
  source 1..20: mol_type = other DNA
gcctttaccgcgctggacgt

SEQ ID NO: 57827 - DNA, 20 bp, synthetic construct
  source 1..20: mol_type = other DNA
caggtattccacctggagca

SEQ ID NO: 57828 - DNA, 20 bp, synthetic construct
  source 1..20: mol_type = other DNA
ctccaggaactgccagacgc

SEQ ID NO: 57829 - DNA, 20 bp, synthetic construct
  source 1..20: mol_type = other DNA
cagcagcatgagcttggagg

SEQ ID NO: 57830 - DNA, 20 bp, synthetic construct
  source 1..20: mol_type = other DNA
gtggatggccatgctgaggg

SEQ ID NO: 57831 - DNA, 20 bp, synthetic construct
  source 1..20: mol_type = other DNA
gcatggaggcccgggcctgt

SEQ ID NO: 57832 - DNA, 20 bp, synthetic construct
  source 1..20: mol_type = other DNA
acggccaagaagaactatcg

SEQ ID NO: 57833 - DNA, 20 bp, synthetic construct
  source 1..20: mol_type = other DNA
gcggaaggcatcctgattgg

SEQ ID NO: 57834 - DNA, 20 bp, synthetic construct
  source 1..20: mol_type = other DNA
ggcgctcatctcatacgtgc

SEQ ID NO: 57835 - DNA, 20 bp, synthetic construct
  source 1..20: mol_type = other DNA
gctgcaggaggaggaggaac

SEQ ID NO: 57836 - DNA, 20 bp, synthetic construct
  source 1..20: mol_type = other DNA
ccgcgacggaaagcgctgca

SEQ ID NO: 57837 - DNA, 20 bp, synthetic construct
  source 1..20: mol_type = other DNA
gaagcaggtcaggcaagctg

SEQ ID NO: 57838 - DNA, 20 bp, synthetic construct
  source 1..20: mol_type = other DNA
ggaaggcatcctgattggag

SEQ ID NO: 57839 - DNA, 20 bp, synthetic construct
  source 1..20: mol_type = other DNA
ctgcagccggatcgccatct

SEQ ID NO: 57840 - DNA, 20 bp, synthetic construct
  source 1..20: mol_type = other DNA
ctgtccactcctggcgctgg

SEQ ID NO: 57841 - DNA, 20 bp, synthetic construct
  source 1..20: mol_type = other DNA
atgggggatgtgcaggaccg

SEQ ID NO: 57842 - DNA, 20 bp, synthetic construct
  source 1..20: mol_type = other DNA
ccaggaactgccagacgctg

SEQ ID NO: 57843 - DNA, 20 bp, synthetic construct
  source 1..20: mol_type = other DNA
tcttcacacagaacatgcag

SEQ ID NO: 57844 - DNA, 20 bp, synthetic construct
  source 1..20: mol_type = other DNA
ctggcagggctacctgtgga

SEQ ID NO: 57845 - DNA, 20 bp, synthetic construct
  source 1..20: mol_type = other DNA
gcgcagggccatggctgagg

SEQ ID NO: 57846 - DNA, 20 bp, synthetic construct
  source 1..20: mol_type = other DNA
cagcacctgggatagagtag

SEQ ID NO: 57847 - DNA, 20 bp, synthetic construct
  source 1..20: mol_type = other DNA
ctggaggaacacttccgaga

SEQ ID NO: 57848 - DNA, 20 bp, synthetic construct
  source 1..20: mol_type = other DNA
gaaaaaggtactcagcagca

SEQ ID NO: 57849 - DNA, 20 bp, synthetic construct
  source 1..20: mol_type = other DNA
gcggtaaaggcgtaccagat

SEQ ID NO: 57850 - DNA, 20 bp, synthetic construct
  source 1..20: mol_type = other DNA
tccatctcagcctgcatgga

SEQ ID NO: 57851 - DNA, 20 bp, synthetic construct
  source 1..20: mol_type = other DNA
tgtagggacgtcttcccctc

SEQ ID NO: 57852 - DNA, 20 bp, synthetic construct
  source 1..20: mol_type = other DNA
agaagaactatcgggcagat

SEQ ID NO: 57853 - DNA, 20 bp, synthetic construct
  source 1..20: mol_type = other DNA
cgctggacgtggagaagagt

SEQ ID NO: 57854 - DNA, 20 bp, synthetic construct
  source 1..20: mol_type = other DNA
gagatgcagcagcggttgca

SEQ ID NO: 57855 - DNA, 20 bp, synthetic construct
  source 1..20: mol_type = other DNA
gggccccaccttgtccagga

SEQ ID NO: 57856 - DNA, 20 bp, synthetic construct
  source 1..20: mol_type = other DNA
gtctaccaggagctcatcca

SEQ ID NO: 57857 - DNA, 20 bp, synthetic construct
  source 1..20: mol_type = other DNA
tcagccatggccctgcgcaa

SEQ ID NO: 57858 - DNA, 20 bp, synthetic construct
  source 1..20: mol_type = other DNA
aaaggcgtaccagatggact

SEQ ID NO: 57859 - DNA, 20 bp, synthetic construct
  source 1..20: mol_type = other DNA
gtacttgtcctcagacagga

SEQ ID NO: 57860 - DNA, 20 bp, synthetic construct
  source 1..20: mol_type = other DNA
gtccactcctggcgctggcg

SEQ ID NO: 57861 - DNA, 20 bp, synthetic construct
  source 1..20: mol_type = other DNA
gccaagaagaactatcgggc

SEQ ID NO: 57862 - DNA, 20 bp, synthetic construct
  source 1..20: mol_type = other DNA
attggagagcatactgttcc

SEQ ID NO: 57863 - DNA, 20 bp, synthetic construct
  source 1..20: mol_type = other DNA
gggctacctgtggaagcgag

SEQ ID NO: 57864 - DNA, 20 bp, synthetic construct
  source 1..20: mol_type = other DNA
aaaaggggcattatcccgct

SEQ ID NO: 57865 - DNA, 20 bp, synthetic construct
  source 1..20: mol_type = other DNA
ctcacctccacgcagcagtg

SEQ ID NO: 57866 - DNA, 20 bp, synthetic construct
  source 1..20: mol_type = other DNA
ccaggtgctgtcccacaacc

SEQ ID NO: 57867 - DNA, 20 bp, synthetic construct
  source 1..20: mol_type = other DNA
tggtacgcctttaccgcgct

SEQ ID NO: 57868 - DNA, 20 bp, synthetic construct
  source 1..20: mol_type = other DNA
gcagcagctccagctcctgc

SEQ ID NO: 57869 - DNA, 20 bp, synthetic construct
  source 1..20: mol_type = other DNA
gtccaggatgtacttgttga

SEQ ID NO: 57870 - DNA, 20 bp, synthetic construct
  source 1..20: mol_type = other DNA
cacgtccagcgcggtaaagg

SEQ ID NO: 57871 - DNA, 20 bp, synthetic construct
  source 1..20: mol_type = other DNA
caggccgagcggctgctgca

SEQ ID NO: 57872 - DNA, 20 bp, synthetic construct
  source 1..20: mol_type = other DNA
gtgcaggaccgtgtacaggt

SEQ ID NO: 57873 - DNA, 20 bp, synthetic construct
  source 1..20: mol_type = other DNA
aattgaagagctccaggaac

SEQ ID NO: 57874 - DNA, 20 bp, synthetic construct
  source 1..20: mol_type = other DNA
ctgcttcaggacatcttgga

SEQ ID NO: 57875 - DNA, 20 bp, synthetic construct
  source 1..20: mol_type = other DNA
gtatccctggctggacacag

SEQ ID NO: 57876 - DNA, 20 bp, synthetic construct
  source 1..20: mol_type = other DNA
atacatgccctacctcaaca

SEQ ID NO: 57877 - DNA, 20 bp, synthetic construct
  source 1..20: mol_type = other DNA
ctcaccagctgtccactcct

SEQ ID NO: 57878 - DNA, 20 bp, synthetic construct
  source 1..20: mol_type = other DNA
gctcacctccaagctcatgc

SEQ ID NO: 57879 - DNA, 20 bp, synthetic construct
  source 1..20: mol_type = other DNA
tggcgcagttttctctgggc

SEQ ID NO: 57880 - DNA, 20 bp, synthetic construct
  source 1..20: mol_type = other DNA
aggagtggacagctggtgag

SEQ ID NO: 57881 - DNA, 20 bp, synthetic construct
  source 1..20: mol_type = other DNA
tcgtggatggccatgctgag

SEQ ID NO: 57882 - DNA, 20 bp, synthetic construct
  source 1..20: mol_type = other DNA
caaagtagcagaggcagctg

SEQ ID NO: 57883 - DNA, 20 bp, synthetic construct
  source 1..20: mol_type = other DNA
ttgagcagttccttgcgcag

SEQ ID NO: 57884 - DNA, 20 bp, synthetic construct
  source 1..20: mol_type = other DNA
aggcggaaggcatcctgatt

SEQ ID NO: 57885 - DNA, 20 bp, synthetic construct
  source 1..20: mol_type = other DNA
caggtagccctgccagccgg

SEQ ID NO: 57886 - DNA, 20 bp, synthetic construct
  source 1..20: mol_type = other DNA
gctgagggtgtcccggccca

SEQ ID NO: 57887 - DNA, 20 bp, synthetic construct
  source 1..20: mol_type = other DNA
tggatggctgccgaagagcg

SEQ ID NO: 57888 - DNA, 20 bp, synthetic construct
  source 1..20: mol_type = other DNA
gcgccaggccagcaccaacg

SEQ ID NO: 57889 - DNA, 20 bp, synthetic construct
  source 1..20: mol_type = other DNA
ttcggcagccatccagatgg

SEQ ID NO: 57890 - DNA, 20 bp, synthetic construct
  source 1..20: mol_type = other DNA
caggaagttgaagaggcacc

SEQ ID NO: 57891 - DNA, 20 bp, synthetic construct
  source 1..20: mol_type = other DNA
agggccatggctgaggcgcc

SEQ ID NO: 57892 - DNA, 20 bp, synthetic construct
  source 1..20: mol_type = other DNA
agggctgacgaggatgtgga

SEQ ID NO: 57893 - DNA, 20 bp, synthetic construct
  source 1..20: mol_type = other DNA
agggtacttgtcctcagaca

SEQ ID NO: 57894 - DNA, 20 bp, synthetic construct
  source 1..20: mol_type = other DNA
gaagttgaagaggcaccaga

SEQ ID NO: 57895 - DNA, 20 bp, synthetic construct
  source 1..20: mol_type = other DNA
cctgcagcagctccagctcc

SEQ ID NO: 57896 - DNA, 20 bp, synthetic construct
  source 1..20: mol_type = other DNA
cagaaccggcagagggctga

SEQ ID NO: 57897 - DNA, 20 bp, synthetic construct
  source 1..20: mol_type = other DNA
ttgcgcagggccatggctga

SEQ ID NO: 57898 - DNA, 20 bp, synthetic construct
  source 1..20: mol_type = other DNA
cctacctggtctgagcgatt

SEQ ID NO: 57899 - DNA, 20 bp, synthetic construct
  source 1..20: mol_type = other DNA
ccccatgaccccgtggccct

SEQ ID NO: 57900 - DNA, 20 bp, synthetic construct
  source 1..20: mol_type = other DNA
gaggaacacttccgagatga

SEQ ID NO: 57901 - DNA, 20 bp, synthetic construct
  source 1..20: mol_type = other DNA
ccaggagtggacagctggtg

SEQ ID NO: 57902 - DNA, 20 bp, synthetic construct
  source 1..20: mol_type = other DNA
ggaggaagagaagctgaagc

SEQ ID NO: 57903 - DNA, 20 bp, synthetic construct
  source 1..20: mol_type = other DNA
ggaactgctcaagtccatct

SEQ ID NO: 57904 - DNA, 20 bp, synthetic construct
  source 1..20: mol_type = other DNA
accagaggcggaaggcatcc

SEQ ID NO: 57905 - DNA, 20 bp, synthetic construct
  source 1..20: mol_type = other DNA
ccagcagtctgccgggtgag

SEQ ID NO: 57906 - DNA, 20 bp, synthetic construct
  source 1..20: mol_type = other DNA
agtcccagctcaaggtgagg

SEQ ID NO: 57907 - DNA, 20 bp, synthetic construct
  source 1..20: mol_type = other DNA
ccggttcatctggacattcc

SEQ ID NO: 57908 - DNA, 20 bp, synthetic construct
  source 1..20: mol_type = other DNA
agcttggaggtgagcttggg

SEQ ID NO: 57909 - DNA, 20 bp, synthetic construct
  source 1..20: mol_type = other DNA
acgtatgagatgagcgcctc

SEQ ID NO: 57910 - DNA, 20 bp, synthetic construct
  source 1..20: mol_type = other DNA
gacagcacctgggatagagt

SEQ ID NO: 57911 - DNA, 20 bp, synthetic construct
  source 1..20: mol_type = other DNA
ctgcgccaggccagcaccaa

SEQ ID NO: 57912 - DNA, 20 bp, synthetic construct
  source 1..20: mol_type = other DNA
gttgaagaggcaccagaggc

SEQ ID NO: 57913 - DNA, 20 bp, synthetic construct
  source 1..20: mol_type = other DNA
tgcagctggaaccagcgttc

SEQ ID NO: 57914 - DNA, 20 bp, synthetic construct
  source 1..20: mol_type = other DNA
tggacttgagcagttccttg

SEQ ID NO: 57915 - DNA, 20 bp, synthetic construct
  source 1..20: mol_type = other DNA
agctccatctcagcctgcat

SEQ ID NO: 57916 - DNA, 20 bp, synthetic construct
  source 1..20: mol_type = other DNA
ctccaagtcccagctcaagg

SEQ ID NO: 57917 - DNA, 20 bp, synthetic construct
  source 1..20: mol_type = other DNA
gagctccaggaactgccaga

SEQ ID NO: 57918 - DNA, 20 bp, synthetic construct
  source 1..20: mol_type = other DNA
tccacaggcccgggcctcca

SEQ ID NO: 57919 - DNA, 20 bp, synthetic construct
  source 1..20: mol_type = other DNA
ctcagacaggaagttgaaga

SEQ ID NO: 57920 - DNA, 20 bp, synthetic construct
  source 1..20: mol_type = other DNA
gaggagcaggagcgctacat

SEQ ID NO: 57921 - DNA, 20 bp, synthetic construct
  source 1..20: mol_type = other DNA
ctcaaggtgaggggcacccg

SEQ ID NO: 57922 - DNA, 20 bp, synthetic construct
  source 1..20: mol_type = other DNA
tttcagcaggtattccacct

SEQ ID NO: 57923 - DNA, 20 bp, synthetic construct
  source 1..20: mol_type = other DNA
gagaaggagcggaagctgca

SEQ ID NO: 57924 - DNA, 20 bp, synthetic construct
  source 1..20: mol_type = other DNA
cagagggctgacgaggatgt

SEQ ID NO: 57925 - DNA, 20 bp, synthetic construct
  source 1..20: mol_type = other DNA
catgaccccgtggccctgga

SEQ ID NO: 57926 - DNA, 20 bp, synthetic construct
  source 1..20: mol_type = other DNA
gtacatcctggacaaggtgg

SEQ ID NO: 57927 - DNA, 20 bp, synthetic construct
  source 1..20: mol_type = other DNA
gtctccaagtcccagctcaa

SEQ ID NO: 57928 - DNA, 20 bp, synthetic construct
  source 1..20: mol_type = other DNA
tcttccagcagtctgccggg

SEQ ID NO: 57929 - DNA, 20 bp, synthetic construct
  source 1..20: mol_type = other DNA
ccacaacctgtacacggtcc

SEQ ID NO: 57930 - DNA, 20 bp, synthetic construct
  source 1..20: mol_type = other DNA
ctggacgctgacggccaaga

SEQ ID NO: 57931 - DNA, 20 bp, synthetic construct
  source 1..20: mol_type = other DNA
cttgtccaggatgtacttgt

SEQ ID NO: 57932 - DNA, 20 bp, synthetic construct
  source 1..20: mol_type = other DNA
gcagcagtgtgcatccagcg

SEQ ID NO: 57933 - DNA, 20 bp, synthetic construct
  source 1..20: mol_type = other DNA
ttccacctggagcaggagaa

SEQ ID NO: 57934 - DNA, 20 bp, synthetic construct
  source 1..20: mol_type = other DNA
gatgtgcaggaccgtgtaca

SEQ ID NO: 57935 - DNA, 20 bp, synthetic construct
  source 1..20: mol_type = other DNA
gaggagcttctggcccagga

SEQ ID NO: 57936 - DNA, 20 bp, synthetic construct
  source 1..20: mol_type = other DNA
tagggcatgtatccctggct

SEQ ID NO: 57937 - DNA, 20 bp, synthetic construct
  source 1..20: mol_type = other DNA
ctgtcccacaacctgtacac

SEQ ID NO: 57938 - DNA, 20 bp, synthetic construct
  source 1..20: mol_type = other DNA
tcagcaggtattccacctgg

SEQ ID NO: 57939 - DNA, 20 bp, synthetic construct
  source 1..20: mol_type = other DNA
gtctgaggacaagtaccctc

SEQ ID NO: 57940 - DNA, 20 bp, synthetic construct
  source 1..20: mol_type = other DNA
ctcacctccacatcctcgtc

SEQ ID NO: 57941 - DNA, 20 bp, synthetic construct
  source 1..20: mol_type = other DNA
atgatgacggccctgtgtcc

SEQ ID NO: 57942 - DNA, 20 bp, synthetic construct
  source 1..20: mol_type = other DNA
cctgcagcagccgctcggcc

SEQ ID NO: 57943 - DNA, 20 bp, synthetic construct
  source 1..20: mol_type = other DNA
gagatggagctgaaggagga

SEQ ID NO: 57944 - DNA, 20 bp, synthetic construct
  source 1..20: mol_type = other DNA
gacaagtaccctctgatcat

SEQ ID NO: 57945 - DNA, 20 bp, synthetic construct
  source 1..20: mol_type = other DNA
tcctggtagacctcgtggat

SEQ ID NO: 57946 - DNA, 20 bp, synthetic construct
  source 1..20: mol_type = other DNA
gctgagatggagctgaagga

SEQ ID NO: 57947 - DNA, 20 bp, synthetic construct
  source 1..20: mol_type = other DNA
gctgcagggagcggctctgc

SEQ ID NO: 57948 - DNA, 20 bp, synthetic construct
  source 1..20: mol_type = other DNA
ttccagcagtctgccgggtg

SEQ ID NO: 57949 - DNA, 20 bp, synthetic construct
  source 1..20: mol_type = other DNA
cgtccagcacagctcatcaa

SEQ ID NO: 57950 - DNA, 20 bp, synthetic construct
  source 1..20: mol_type = other DNA
tcaggatgccttccgcctct

SEQ ID NO: 57951 - DNA, 20 bp, synthetic construct
  source 1..20: mol_type = other DNA
tgcagggagcggctctgctg

SEQ ID NO: 57952 - DNA, 20 bp, synthetic construct
  source 1..20: mol_type = other DNA
gatgagctcctggtagacct

SEQ ID NO: 57953 - DNA, 20 bp, synthetic construct
  source 1..20: mol_type = other DNA
cctcacctcatcaggaacca

SEQ ID NO: 57954 - DNA, 20 bp, synthetic construct
  source 1..20: mol_type = other DNA
gatgaggtgagggtgatggc

SEQ ID NO: 57955 - DNA, 20 bp, synthetic construct
  source 1..20: mol_type = other DNA
tgtgccaggtgctgccagac

SEQ ID NO: 57956 - DNA, 20 bp, synthetic construct
  source 1..20: mol_type = other DNA
tttgttaaagagcactttga

SEQ ID NO: 57957 - DNA, 20 bp, synthetic construct
  source 1..20: mol_type = other DNA
tgggacagcacctgggatag

SEQ ID NO: 57958 - DNA, 20 bp, synthetic construct
  source 1..20: mol_type = other DNA
ggctgacgaggatgtggagg

SEQ ID NO: 57959 - DNA, 20 bp, synthetic construct
  source 1..20: mol_type = other DNA
gagaaggaagagctgcagca

SEQ ID NO: 57960 - DNA, 20 bp, synthetic construct
  source 1..20: mol_type = other DNA
ccctcacctccacgcagcag

SEQ ID NO: 57961 - DNA, 20 bp, synthetic construct
  source 1..20: mol_type = other DNA
ggagagcatactgttcccgt

SEQ ID NO: 57962 - DNA, 20 bp, synthetic construct
  source 1..20: mol_type = other DNA
gaagagtggcaaagtctcca

SEQ ID NO: 57963 - DNA, 20 bp, synthetic construct
  source 1..20: mol_type = other DNA
ctggaaccagcgttcggccc

SEQ ID NO: 57964 - DNA, 20 bp, synthetic construct
  source 1..20: mol_type = other DNA
cccggcagactgctggaaga

SEQ ID NO: 57965 - DNA, 20 bp, synthetic construct
  source 1..20: mol_type = other DNA
gggcacctgagaaggaactg

SEQ ID NO: 57966 - DNA, 20 bp, synthetic construct
  source 1..20: mol_type = other DNA
catagtcgtgcatgctgacg

SEQ ID NO: 57967 - DNA, 20 bp, synthetic construct
  source 1..20: mol_type = other DNA
gagcacctcaactatgtgac

SEQ ID NO: 57968 - DNA, 20 bp, synthetic construct
  source 1..20: mol_type = other DNA
cgggatgaccacggctgcgt

SEQ ID NO: 57969 - DNA, 20 bp, synthetic construct
  source 1..20: mol_type = other DNA
ccacttgggggacagtttct

SEQ ID NO: 57970 - DNA, 20 bp, synthetic construct
  source 1..20: mol_type = other DNA
cgtcagccgctcgccgtgtc

SEQ ID NO: 57971 - DNA, 20 bp, synthetic construct
  source 1..20: mol_type = other DNA
ggaccaccacagtgcccagc

SEQ ID NO: 57972 - DNA, 20 bp, synthetic construct
  source 1..20: mol_type = other DNA
gcgtagctggtccagggtgg

SEQ ID NO: 57973 - DNA, 20 bp, synthetic construct
  source 1..20: mol_type = other DNA
gctggagatgtaccgcaaag

SEQ ID NO: 57974 - DNA, 20 bp, synthetic construct
  source 1..20: mol_type = other DNA
gactatgaggccctgcacta

SEQ ID NO: 57975 - DNA, 20 bp, synthetic construct
  source 1..20: mol_type = other DNA
gtactggcaacgacttggcc

SEQ ID NO: 57976 - DNA, 20 bp, synthetic construct
  source 1..20: mol_type = other DNA
gaagaagagggcatccttca

SEQ ID NO: 57977 - DNA, 20 bp, synthetic construct
  source 1..20: mol_type = other DNA
gccagccgcttctacaggat

SEQ ID NO: 57978 - DNA, 20 bp, synthetic construct
  source 1..20: mol_type = other DNA
tgcaagcaggcagtgagtgg

SEQ ID NO: 57979 - DNA, 20 bp, synthetic construct
  source 1..20: mol_type = other DNA
gagataccagaggaaagact

SEQ ID NO: 57980 - DNA, 20 bp, synthetic construct
  source 1..20: mol_type = other DNA
gctgacgcgactcacctgga

SEQ ID NO: 57981 - DNA, 20 bp, synthetic construct
  source 1..20: mol_type = other DNA
agtgcagggcctcatagtcg

SEQ ID NO: 57982 - DNA, 20 bp, synthetic construct
  source 1..20: mol_type = other DNA
ccactcaccaacgacgtcat

SEQ ID NO: 57983 - DNA, 20 bp, synthetic construct
  source 1..20: mol_type = other DNA
cacctgcagcgcggcctgtg

SEQ ID NO: 57984 - DNA, 20 bp, synthetic construct
  source 1..20: mol_type = other DNA
aggaaagactggatgatctt

SEQ ID NO: 57985 - DNA, 20 bp, synthetic construct
  source 1..20: mol_type = other DNA
cgcactcacaggcctccttg

SEQ ID NO: 57986 - DNA, 20 bp, synthetic construct
  source 1..20: mol_type = other DNA
aggactcaccggggcgtggg

SEQ ID NO: 57987 - DNA, 20 bp, synthetic construct
  source 1..20: mol_type = other DNA
cgcttctacaggatcgaccg

SEQ ID NO: 57988 - DNA, 20 bp, synthetic construct
  source 1..20: mol_type = other DNA
cggctcaccgtggtccagca

SEQ ID NO: 57989 - DNA, 20 bp, synthetic construct
  source 1..20: mol_type = other DNA
cagcggcacagctggagaac

SEQ ID NO: 57990 - DNA, 20 bp, synthetic construct
  source 1..20: mol_type = other DNA
caggtactgtgcgggcacca

SEQ ID NO: 57991 - DNA, 20 bp, synthetic construct
  source 1..20: mol_type = other DNA
ggaggtcccagcggtccagc

SEQ ID NO: 57992 - DNA, 20 bp, synthetic construct
  source 1..20: mol_type = other DNA
caggatcgaccgagcccagg

SEQ ID NO: 57993 - DNA, 20 bp, synthetic construct
  source 1..20: mol_type = other DNA
cctgcaagcttgcagcctca

SEQ ID NO: 57994 - DNA, 20 bp, synthetic construct
  source 1..20: mol_type = other DNA
gttgcgcagggcgatgcgga

SEQ ID NO: 57995 - DNA, 20 bp, synthetic construct
  source 1..20: mol_type = other DNA
actcacaggcctccttgagc

SEQ ID NO: 57996 - DNA, 20 bp, synthetic construct
  source 1..20: mol_type = other DNA
cggcatgacgacggctacct

SEQ ID NO: 57997 - DNA, 20 bp, synthetic construct
  source 1..20: mol_type = other DNA
gcaggtgaagagctgattga

SEQ ID NO: 57998 - DNA, 20 bp, synthetic construct
  source 1..20: mol_type = other DNA
ccctcagggattccagcaga

SEQ ID NO: 57999 - DNA, 20 bp, synthetic construct
  source 1..20: mol_type = other DNA
acccaccttctccagctgct

SEQ ID NO: 58000 - DNA, 20 bp, synthetic construct
  source 1..20: mol_type = other DNA
cgctcaccaccactcggatg

SEQ ID NO: 58001 - DNA, 20 bp, synthetic construct
  source 1..20: mol_type = other DNA
ggtgaagccaatgacctcga

SEQ ID NO: 58002 - DNA, 20 bp, synthetic construct
  source 1..20: mol_type = other DNA
cttcaccatgacgtcgttgg

SEQ ID NO: 58003 - DNA, 20 bp, synthetic construct
  source 1..20: mol_type = other DNA
ggaagcaccacttgggggac

SEQ ID NO: 58004 - DNA, 20 bp, synthetic construct
  source 1..20: mol_type = other DNA
gttgagggttcgggccaagt

SEQ ID NO: 58005 - DNA, 20 bp, synthetic construct
  source 1..20: mol_type = other DNA
cctcgaggtagccgtcgtca

SEQ ID NO: 58006 - DNA, 20 bp, synthetic construct
  source 1..20: mol_type = other DNA
gtagcagaagtccccggaca

SEQ ID NO: 58007 - DNA, 20 bp, synthetic construct
  source 1..20: mol_type = other DNA
cacgtcaccctggagttcca

SEQ ID NO: 58008 - DNA, 20 bp, synthetic construct
  source 1..20: mol_type = other DNA
ataccagaggaaagactgga

SEQ ID NO: 58009 - DNA, 20 bp, synthetic construct
  source 1..20: mol_type = other DNA
ctcaccgtggtccagcaggt

SEQ ID NO: 58010 - DNA, 20 bp, synthetic construct
  source 1..20: mol_type = other DNA
gtgaggctgcaagcttgcag

SEQ ID NO: 58011 - DNA, 20 bp, synthetic construct
  source 1..20: mol_type = other DNA
tggaactccagggtgacgtg

SEQ ID NO: 58012 - DNA, 20 bp, synthetic construct
  source 1..20: mol_type = other DNA
ggattgagataccagaggaa

SEQ ID NO: 58013 - DNA, 20 bp, synthetic construct
  source 1..20: mol_type = other DNA
cgtgcaggtgaagagctgat

SEQ ID NO: 58014 - DNA, 20 bp, synthetic construct
  source 1..20: mol_type = other DNA
gatataaatctcatcctgtg

SEQ ID NO: 58015 - DNA, 20 bp, synthetic construct
  source 1..20: mol_type = other DNA
ttgcaccacgagcagctgat

SEQ ID NO: 58016 - DNA, 20 bp, synthetic construct
  source 1..20: mol_type = other DNA
cgacggcacggtgagctccc

SEQ ID NO: 58017 - DNA, 20 bp, synthetic construct
  source 1..20: mol_type = other DNA
ccaggatataaatctcatcc

SEQ ID NO: 58018 - DNA, 20 bp, synthetic construct
  source 1..20: mol_type = other DNA
cgcagggcgatgcggatgcg

SEQ ID NO: 58019 - DNA, 20 bp, synthetic construct
  source 1..20: mol_type = other DNA
ccaccccagttgagggttcg

SEQ ID NO: 58020 - DNA, 20 bp, synthetic construct
  source 1..20: mol_type = other DNA
cttaccccaccccagttgag

SEQ ID NO: 58021 - DNA, 20 bp, synthetic construct
  source 1..20: mol_type = other DNA
tacacagtactgctccccaa

SEQ ID NO: 58022 - DNA, 20 bp, synthetic construct
  source 1..20: mol_type = other DNA
aaccagatgtgctccccata

SEQ ID NO: 58023 - DNA, 20 bp, synthetic construct
  source 1..20: mol_type = other DNA
tcctgaacatccccaggtga

SEQ ID NO: 58024 - DNA, 20 bp, synthetic construct
  source 1..20: mol_type = other DNA
ctcatagtcgtgcatgctga

SEQ ID NO: 58025 - DNA, 20 bp, synthetic construct
  source 1..20: mol_type = other DNA
gcaggatggcaacagggggt

SEQ ID NO: 58026 - DNA, 20 bp, synthetic construct
  source 1..20: mol_type = other DNA
cgacgtcatggtgaagccaa

SEQ ID NO: 58027 - DNA, 20 bp, synthetic construct
  source 1..20: mol_type = other DNA
agctagtaccttacagaagt

SEQ ID NO: 58028 - DNA, 20 bp, synthetic construct
  source 1..20: mol_type = other DNA
ccgcaggttgtgcactttgc

SEQ ID NO: 58029 - DNA, 20 bp, synthetic construct
  source 1..20: mol_type = other DNA
tgcgatctcagtcacatagt

SEQ ID NO: 58030 - DNA, 20 bp, synthetic construct
  source 1..20: mol_type = other DNA
gttgaggtgctcctgtgggg

SEQ ID NO: 58031 - DNA, 20 bp, synthetic construct
  source 1..20: mol_type = other DNA
catgctgacgcgactcacct

SEQ ID NO: 58032 - DNA, 20 bp, synthetic construct
  source 1..20: mol_type = other DNA
gcactcacgctccagtccac

SEQ ID NO: 58033 - DNA, 20 bp, synthetic construct
  source 1..20: mol_type = other DNA
gggagaggatcttggacaca

SEQ ID NO: 58034 - DNA, 20 bp, synthetic construct
  source 1..20: mol_type = other DNA
acggcagagctctaggtcac

SEQ ID NO: 58035 - DNA, 20 bp, synthetic construct
  source 1..20: mol_type = other DNA
aggcgtagctggtccagggt

SEQ ID NO: 58036 - DNA, 20 bp, synthetic construct
  source 1..20: mol_type = other DNA
accttccacagcaaggagat

SEQ ID NO: 58037 - DNA, 20 bp, synthetic construct
  source 1..20: mol_type = other DNA
agccccagcggcatgacgac

SEQ ID NO: 58038 - DNA, 20 bp, synthetic construct
  source 1..20: mol_type = other DNA
catgaagcaggacaccttgc

SEQ ID NO: 58039 - DNA, 20 bp, synthetic construct
  source 1..20: mol_type = other DNA
gtccagggtggagaggatcc

SEQ ID NO: 58040 - DNA, 20 bp, synthetic construct
  source 1..20: mol_type = other DNA
ctgcaccatggtggcctggt

SEQ ID NO: 58041 - DNA, 20 bp, synthetic construct
  source 1..20: mol_type = other DNA
ctgggaccaccacagtgccc

SEQ ID NO: 58042 - DNA, 20 bp, synthetic construct
  source 1..20: mol_type = other DNA
ttacagcggaaatttatctg

SEQ ID NO: 58043 - DNA, 20 bp, synthetic construct
  source 1..20: mol_type = other DNA
cccgctcaccaccactcgga

SEQ ID NO: 58044 - DNA, 20 bp, synthetic construct
  source 1..20: mol_type = other DNA
gacgcagtgtcgcgaggtgg

SEQ ID NO: 58045 - DNA, 20 bp, synthetic construct
  source 1..20: mol_type = other DNA
cgaggtcattggcttcacca

SEQ ID NO: 58046 - DNA, 20 bp, synthetic construct
  source 1..20: mol_type = other DNA
cgctgtaagccgtccttccg

SEQ ID NO: 58047 - DNA, 20 bp, synthetic construct
  source 1..20: mol_type = other DNA
cccttgcagaatactctgaa

SEQ ID NO: 58048 - DNA, 20 bp, synthetic construct
  source 1..20: mol_type = other DNA
ggatcgaccgagcccaggtg

SEQ ID NO: 58049 - DNA, 20 bp, synthetic construct
  source 1..20: mol_type = other DNA
acgccaggatccgcaggttg

SEQ ID NO: 58050 - DNA, 20 bp, synthetic construct
  source 1..20: mol_type = other DNA
gcccaggctgaagtagttgt

SEQ ID NO: 58051 - DNA, 20 bp, synthetic construct
  source 1..20: mol_type = other DNA
agtaccacagcaaggtgtcc

SEQ ID NO: 58052 - DNA, 20 bp, synthetic construct
  source 1..20: mol_type = other DNA
tcctcagtaccacagcaagg

SEQ ID NO: 58053 - DNA, 20 bp, synthetic construct
  source 1..20: mol_type = other DNA
cttgagctgctccttgtcgt

SEQ ID NO: 58054 - DNA, 20 bp, synthetic construct
  source 1..20: mol_type = other DNA
ggggacttctgctacgttgg

SEQ ID NO: 58055 - DNA, 20 bp, synthetic construct
  source 1..20: mol_type = other DNA
ggtggatggcgagccctgca

SEQ ID NO: 58056 - DNA, 20 bp, synthetic construct
  source 1..20: mol_type = other DNA
gttccacgagtctcgaggtt

SEQ ID NO: 58057 - DNA, 20 bp, synthetic construct
  source 1..20: mol_type = other DNA
ctggaccgctgggacctcca

SEQ ID NO: 58058 - DNA, 20 bp, synthetic construct
  source 1..20: mol_type = other DNA
cctggatgcgcaactgctct

SEQ ID NO: 58059 - DNA, 20 bp, synthetic construct
  source 1..20: mol_type = other DNA
gcctcaccttgagggggtgc

SEQ ID NO: 58060 - DNA, 20 bp, synthetic construct
  source 1..20: mol_type = other DNA
aggatataaatctcatcctg

SEQ ID NO: 58061 - DNA, 20 bp, synthetic construct
  source 1..20: mol_type = other DNA
agtgacctagagctctgccg

SEQ ID NO: 58062 - DNA, 20 bp, synthetic construct
  source 1..20: mol_type = other DNA
gtggtgcacacgccctgcat

SEQ ID NO: 58063 - DNA, 20 bp, synthetic construct
  source 1..20: mol_type = other DNA
tacgacaaggagcagctcaa

SEQ ID NO: 58064 - DNA, 20 bp, synthetic construct
  source 1..20: mol_type = other DNA
ccatccacctgcaccgggat

SEQ ID NO: 58065 - DNA, 20 bp, synthetic construct
  source 1..20: mol_type = other DNA
tgctggagtctctcaatgtg

SEQ ID NO: 58066 - DNA, 20 bp, synthetic construct
  source 1..20: mol_type = other DNA
tacaggatcgaccgagccca

SEQ ID NO: 58067 - DNA, 20 bp, synthetic construct
  source 1..20: mol_type = other DNA
gaggatccaggtgggcggga

SEQ ID NO: 58068 - DNA, 20 bp, synthetic construct
  source 1..20: mol_type = other DNA
cgaagacttgtcggggattg

SEQ ID NO: 58069 - DNA, 20 bp, synthetic construct
  source 1..20: mol_type = other DNA
tggggagcacatctggttcg

SEQ ID NO: 58070 - DNA, 20 bp, synthetic construct
  source 1..20: mol_type = other DNA
gtagtgcagggcctcatagt

SEQ ID NO: 58071 - DNA, 20 bp, synthetic construct
  source 1..20: mol_type = other DNA
acagtgacctagagctctgc

SEQ ID NO: 58072 - DNA, 20 bp, synthetic construct
  source 1..20: mol_type = other DNA
ccacgactttgagccccagc

SEQ ID NO: 58073 - DNA, 20 bp, synthetic construct
  source 1..20: mol_type = other DNA
tgtgggaaggtgagaggccc

SEQ ID NO: 58074 - DNA, 20 bp, synthetic construct
  source 1..20: mol_type = other DNA
caggatgagatttatatcct

SEQ ID NO: 58075 - DNA, 20 bp, synthetic construct
  source 1..20: mol_type = other DNA
gacaaggagcagctcaagga

SEQ ID NO: 58076 - DNA, 20 bp, synthetic construct
  source 1..20: mol_type = other DNA
agcccaggtgagcgattgca

SEQ ID NO: 58077 - DNA, 20 bp, synthetic construct
  source 1..20: mol_type = other DNA
gaggatccagcccacctggg

SEQ ID NO: 58078 - DNA, 20 bp, synthetic construct
  source 1..20: mol_type = other DNA
ggacttctgctacgttgggg

SEQ ID NO: 58079 - DNA, 20 bp, synthetic construct
  source 1..20: mol_type = other DNA
tccaggacctgaaaccccag

SEQ ID NO: 58080 - DNA, 20 bp, synthetic construct
  source 1..20: mol_type = other DNA
cccatcaggaagtcagagaa

SEQ ID NO: 58081 - DNA, 20 bp, synthetic construct
  source 1..20: mol_type = other DNA
gcaagaaagggcctgaggtc

SEQ ID NO: 58082 - DNA, 20 bp, synthetic construct
  source 1..20: mol_type = other DNA
gtttcaggtcctggatcttg

SEQ ID NO: 58083 - DNA, 20 bp, synthetic construct
  source 1..20: mol_type = other DNA
atcgctcacctgggctcggt

SEQ ID NO: 58084 - DNA, 20 bp, synthetic construct
  source 1..20: mol_type = other DNA
ctgggtactggcaacgactt

SEQ ID NO: 58085 - DNA, 20 bp, synthetic construct
  source 1..20: mol_type = other DNA
aaagcccaggctgaagtagt

SEQ ID NO: 58086 - DNA, 20 bp, synthetic construct
  source 1..20: mol_type = other DNA
cgtggaggtcccagcggtcc

SEQ ID NO: 58087 - DNA, 20 bp, synthetic construct
  source 1..20: mol_type = other DNA
cacagatgagcctgtgtcca

SEQ ID NO: 58088 - DNA, 20 bp, synthetic construct
  source 1..20: mol_type = other DNA
ctctaggtcactgtctcctg

SEQ ID NO: 58089 - DNA, 20 bp, synthetic construct
  source 1..20: mol_type = other DNA
tcaggaaaacaacacactgg

SEQ ID NO: 58090 - DNA, 20 bp, synthetic construct
  source 1..20: mol_type = other DNA
agggcgatgcggatgcgtga

SEQ ID NO: 58091 - DNA, 20 bp, synthetic construct
  source 1..20: mol_type = other DNA
ctgccaacctcgagactcgt

SEQ ID NO: 58092 - DNA, 20 bp, synthetic construct
  source 1..20: mol_type = other DNA
gcacctcaactatgtgactg

SEQ ID NO: 58093 - DNA, 20 bp, synthetic construct
  source 1..20: mol_type = other DNA
gcaagcaagaagaagaagag

SEQ ID NO: 58094 - DNA, 20 bp, synthetic construct
  source 1..20: mol_type = other DNA
ctctcaccttcccacagtgc

SEQ ID NO: 58095 - DNA, 20 bp, synthetic construct
  source 1..20: mol_type = other DNA
cgagactcgtggaactccag

SEQ ID NO: 58096 - DNA, 20 bp, synthetic construct
  source 1..20: mol_type = other DNA
ctcgtggaactccagggtga

SEQ ID NO: 58097 - DNA, 20 bp, synthetic construct
  source 1..20: mol_type = other DNA
gtacctgcaaaggcgggcga

SEQ ID NO: 58098 - DNA, 20 bp, synthetic construct
  source 1..20: mol_type = other DNA
gtgcccagcggcacagctgg

SEQ ID NO: 58099 - DNA, 20 bp, synthetic construct
  source 1..20: mol_type = other DNA
gatttatatcctggaccctg

SEQ ID NO: 58100 - DNA, 20 bp, synthetic construct
  source 1..20: mol_type = other DNA
tccccgacaagtcttcgacc

SEQ ID NO: 58101 - DNA, 20 bp, synthetic construct
  source 1..20: mol_type = other DNA
acgccaggacggcaagtgtc

SEQ ID NO: 58102 - DNA, 20 bp, synthetic construct
  source 1..20: mol_type = other DNA
tatggggagcacatctggtt

SEQ ID NO: 58103 - DNA, 20 bp, synthetic construct
  source 1..20: mol_type = other DNA
gcgagcacggctcctcgatc

SEQ ID NO: 58104 - DNA, 20 bp, synthetic construct
  source 1..20: mol_type = other DNA
ctctaggaaagccatcacca

SEQ ID NO: 58105 - DNA, 20 bp, synthetic construct
  source 1..20: mol_type = other DNA
gctccagtccactgtactcc

SEQ ID NO: 58106 - DNA, 20 bp, synthetic construct
  source 1..20: mol_type = other DNA
tgtggccatcagctgctcgt

SEQ ID NO: 58107 - DNA, 20 bp, synthetic construct
  source 1..20: mol_type = other DNA
tgcccacaggccgcgctgca

SEQ ID NO: 58108 - DNA, 20 bp, synthetic construct
  source 1..20: mol_type = other DNA
tgcaggctgcgcactttctt

SEQ ID NO: 58109 - DNA, 20 bp, synthetic construct
  source 1..20: mol_type = other DNA
gtcagagaaagctgtctgtg

SEQ ID NO: 58110 - DNA, 20 bp, synthetic construct
  source 1..20: mol_type = other DNA
tccagcctgggctcatggga

SEQ ID NO: 58111 - DNA, 20 bp, synthetic construct
  source 1..20: mol_type = other DNA
tgcggtacatctccagcctg

SEQ ID NO: 58112 - DNA, 20 bp, synthetic construct
  source 1..20: mol_type = other DNA
tgcgcaactgctctggcacc

SEQ ID NO: 58113 - DNA, 20 bp, synthetic construct
  source 1..20: mol_type = other DNA
cccccagggctacacagatg

SEQ ID NO: 58114 - DNA, 20 bp, synthetic construct
  source 1..20: mol_type = other DNA
ggtgcttaccccaccccagt

SEQ ID NO: 58115 - DNA, 20 bp, synthetic construct
  source 1..20: mol_type = other DNA
ccccagcggggagacctgtt

SEQ ID NO: 58116 - DNA, 20 bp, synthetic construct
  source 1..20: mol_type = other DNA
ctgtagaagcggctggcagt

SEQ ID NO: 58117 - DNA, 20 bp, synthetic construct
  source 1..20: mol_type = other DNA
gctcaccgtgccgtcgcccc

SEQ ID NO: 58118 - DNA, 20 bp, synthetic construct
  source 1..20: mol_type = other DNA
ggtgcaagcaggcagtgagt

SEQ ID NO: 58119 - DNA, 20 bp, synthetic construct
  source 1..20: mol_type = other DNA
agcaggggcttcatgagcgg

SEQ ID NO: 58120 - DNA, 20 bp, synthetic construct
  source 1..20: mol_type = other DNA
atcacactggaggcgggcgg

SEQ ID NO: 58121 - DNA, 20 bp, synthetic construct
  source 1..20: mol_type = other DNA
cccaagagtgggggcaacca

SEQ ID NO: 58122 - DNA, 20 bp, synthetic construct
  source 1..20: mol_type = other DNA
cccccagccaacctttgtac

SEQ ID NO: 58123 - DNA, 20 bp, synthetic construct
  source 1..20: mol_type = other DNA
gtactcacctggggcctccg

SEQ ID NO: 58124 - DNA, 20 bp, synthetic construct
  source 1..20: mol_type = other DNA
atcgaccgagcccaggtgag

SEQ ID NO: 58125 - DNA, 20 bp, synthetic construct
  source 1..20: mol_type = other DNA
ggggcaggatggcaacaggg

SEQ ID NO: 58126 - DNA, 20 bp, synthetic construct
  source 1..20: mol_type = other DNA
cttggccaggtccttggagc

SEQ ID NO: 58127 - DNA, 20 bp, synthetic construct
  source 1..20: mol_type = other DNA
ccccagcgagcacggctcct

SEQ ID NO: 58128 - DNA, 20 bp, synthetic construct
  source 1..20: mol_type = other DNA
ggaaggtgagaggccctgcc

SEQ ID NO: 58129 - DNA, 20 bp, synthetic construct
  source 1..20: mol_type = other DNA
cagggtgacgtgggcgtcaa

SEQ ID NO: 58130 - DNA, 20 bp, synthetic construct
  source 1..20: mol_type = other DNA
tgcgcagggcgatgcggatg

SEQ ID NO: 58131 - DNA, 20 bp, synthetic construct
  source 1..20: mol_type = other DNA
gcacgccaggatccgcaggt

SEQ ID NO: 58132 - DNA, 20 bp, synthetic construct
  source 1..20: mol_type = other DNA
cccgcacgccaggatccgca

SEQ ID NO: 58133 - DNA, 20 bp, synthetic construct
  source 1..20: mol_type = other DNA
gatccagcccacctggggga

SEQ ID NO: 58134 - DNA, 20 bp, synthetic construct
  source 1..20: mol_type = other DNA
ggtgcacacgccctgcatcg

SEQ ID NO: 58135 - DNA, 20 bp, synthetic construct
  source 1..20: mol_type = other DNA
ctcccccagggctacacaga

SEQ ID NO: 58136 - DNA, 20 bp, synthetic construct
  source 1..20: mol_type = other DNA
ctcactgcctgcttgcacca

SEQ ID NO: 58137 - DNA, 20 bp, synthetic construct
  source 1..20: mol_type = other DNA
cactgccagccgcttctaca

SEQ ID NO: 58138 - DNA, 20 bp, synthetic construct
  source 1..20: mol_type = other DNA
ccacaggagcacctcaacta

SEQ ID NO: 58139 - DNA, 20 bp, synthetic construct
  source 1..20: mol_type = other DNA
cagaagtccccggacacgtt

SEQ ID NO: 58140 - DNA, 20 bp, synthetic construct
  source 1..20: mol_type = other DNA
actcaccaacgacgtcatgg

SEQ ID NO: 58141 - DNA, 20 bp, synthetic construct
  source 1..20: mol_type = other DNA
accccagtgtgttgttttcc

SEQ ID NO: 58142 - DNA, 20 bp, synthetic construct
  source 1..20: mol_type = other DNA
cccccaggacgtgttcctca

SEQ ID NO: 58143 - DNA, 20 bp, synthetic construct
  source 1..20: mol_type = other DNA
catgaggaacacgtcctggg

SEQ ID NO: 58144 - DNA, 20 bp, synthetic construct
  source 1..20: mol_type = other DNA
agcagcggctgtacaaggtg

SEQ ID NO: 58145 - DNA, 20 bp, synthetic construct
  source 1..20: mol_type = other DNA
cctcaggatgaccaactctt

SEQ ID NO: 58146 - DNA, 20 bp, synthetic construct
  source 1..20: mol_type = other DNA
gaggaacacgtcctgggggc

SEQ ID NO: 58147 - DNA, 20 bp, synthetic construct
  source 1..20: mol_type = other DNA
cttgaggatgccctcgacga

SEQ ID NO: 58148 - DNA, 20 bp, synthetic construct
  source 1..20: mol_type = other DNA
catccaagagttggtcatcc

SEQ ID NO: 58149 - DNA, 20 bp, synthetic construct
  source 1..20: mol_type = other DNA
tggtgaagccacactcgccc

SEQ ID NO: 58150 - DNA, 20 bp, synthetic construct
  source 1..20: mol_type = other DNA
gacgagcagcggctgtacaa

SEQ ID NO: 58151 - DNA, 20 bp, synthetic construct
  source 1..20: mol_type = other DNA
cgtgaagatggtggtcttgt

SEQ ID NO: 58152 - DNA, 20 bp, synthetic construct
  source 1..20: mol_type = other DNA
cgatggtgagcgggcgtggg

SEQ ID NO: 58153 - DNA, 20 bp, synthetic construct
  source 1..20: mol_type = other DNA
tccacagatgacacctttga

SEQ ID NO: 58154 - DNA, 20 bp, synthetic construct
  source 1..20: mol_type = other DNA
tgtacagccgctgctcgtca

SEQ ID NO: 58155 - DNA, 20 bp, synthetic construct
  source 1..20: mol_type = other DNA
ccgcttgaggatgccctcga

SEQ ID NO: 58156 - DNA, 20 bp, synthetic construct
  source 1..20: mol_type = other DNA
tggggccagctcgagaaagc

SEQ ID NO: 58157 - DNA, 20 bp, synthetic construct
  source 1..20: mol_type = other DNA
agtagcgtaggccacggctc

SEQ ID NO: 58158 - DNA, 20 bp, synthetic construct
  source 1..20: mol_type = other DNA
gacatcttatgggaacatct

SEQ ID NO: 58159 - DNA, 20 bp, synthetic construct
  source 1..20: mol_type = other DNA
cggtacacgtagcgtttccc

SEQ ID NO: 58160 - DNA, 20 bp, synthetic construct
  source 1..20: mol_type = other DNA
ttacccagggcgcagagggc

SEQ ID NO: 58161 - DNA, 20 bp, synthetic construct
  source 1..20: mol_type = other DNA
tctgtccactgccgggggtc

SEQ ID NO: 58162 - DNA, 20 bp, synthetic construct
  source 1..20: mol_type = other DNA
ccatagctggattggtccac

SEQ ID NO: 58163 - DNA, 20 bp, synthetic construct
  source 1..20: mol_type = other DNA
cagcccacatcacccagtcc

SEQ ID NO: 58164 - DNA, 20 bp, synthetic construct
  source 1..20: mol_type = other DNA
tgaatgaattcagcctgaaa

SEQ ID NO: 58165 - DNA, 20 bp, synthetic construct
  source 1..20: mol_type = other DNA
ctgtccagctgataaaagac

SEQ ID NO: 58166 - DNA, 20 bp, synthetic construct
  source 1..20: mol_type = other DNA
ccataagatgtccccaacaa

SEQ ID NO: 58167 - DNA, 20 bp, synthetic construct
  source 1..20: mol_type = other DNA
gtccactgccgggggtctga

SEQ ID NO: 58168 - DNA, 20 bp, synthetic construct
  source 1..20: mol_type = other DNA
ttagtgaaaccactgaaagt

SEQ ID NO: 58169 - DNA, 20 bp, synthetic construct
  source 1..20: mol_type = other DNA
catgcagatatggaatgtgc

SEQ ID NO: 58170 - DNA, 20 bp, synthetic construct
  source 1..20: mol_type = other DNA
ctctagatgttcccataaga

SEQ ID NO: 58171 - DNA, 20 bp, synthetic construct
  source 1..20: mol_type = other DNA
ttcaggctgaattcattcac

SEQ ID NO: 58172 - DNA, 20 bp, synthetic construct
  source 1..20: mol_type = other DNA
tccacaagacagcggggaaa

SEQ ID NO: 58173 - DNA, 20 bp, synthetic construct
  source 1..20: mol_type = other DNA
ggaacatctagagatcctgc

SEQ ID NO: 58174 - DNA, 20 bp, synthetic construct
  source 1..20: mol_type = other DNA
gtaatagtagcgtaggccac

SEQ ID NO: 58175 - DNA, 20 bp, synthetic construct
  source 1..20: mol_type = other DNA
ggagttaatagtgggacatc

SEQ ID NO: 58176 - DNA, 20 bp, synthetic construct
  source 1..20: mol_type = other DNA
gatctctagatgttcccata

SEQ ID NO: 58177 - DNA, 20 bp, synthetic construct
  source 1..20: mol_type = other DNA
tgagtaattccagaagaaac

SEQ ID NO: 58178 - DNA, 20 bp, synthetic construct
  source 1..20: mol_type = other DNA
cccagtcgttgctgttcttt

SEQ ID NO: 58179 - DNA, 20 bp, synthetic construct
  source 1..20: mol_type = other DNA
ggagccgggcgcctgcggga

SEQ ID NO: 58180 - DNA, 20 bp, synthetic construct
  source 1..20: mol_type = other DNA
gatgaggtcggcgtaggaca

SEQ ID NO: 58181 - DNA, 20 bp, synthetic construct
  source 1..20: mol_type = other DNA
gctctcgatggccttggtga

SEQ ID NO: 58182 - DNA, 20 bp, synthetic construct
  source 1..20: mol_type = other DNA
cgtgagccgcttctccgccg

SEQ ID NO: 58183 - DNA, 20 bp, synthetic construct
  source 1..20: mol_type = other DNA
accatggccgaggcgcctca

SEQ ID NO: 58184 - DNA, 20 bp, synthetic construct
  source 1..20: mol_type = other DNA
gcgtaggacaggttgcccca

SEQ ID NO: 58185 - DNA, 20 bp, synthetic construct
  source 1..20: mol_type = other DNA
gtcataatctgtccctacac

SEQ ID NO: 58186 - DNA, 20 bp, synthetic construct
  source 1..20: mol_type = other DNA
gagatggagaagtcccctgg

SEQ ID NO: 58187 - DNA, 20 bp, synthetic construct
  source 1..20: mol_type = other DNA
tacttacttgggaaactgga

SEQ ID NO: 58188 - DNA, 20 bp, synthetic construct
  source 1..20: mol_type = other DNA
tttgaaggtaggtgacctgg

SEQ ID NO: 58189 - DNA, 20 bp, synthetic construct
  source 1..20: mol_type = other DNA
catacagcgcccgggcccac

SEQ ID NO: 58190 - DNA, 20 bp, synthetic construct
  source 1..20: mol_type = other DNA
acagacccagtgcagctcca

SEQ ID NO: 58191 - DNA, 20 bp, synthetic construct
  source 1..20: mol_type = other DNA
ctccaccacctccccgctgt

SEQ ID NO: 58192 - DNA, 20 bp, synthetic construct
  source 1..20: mol_type = other DNA
gcctggagctgcactgggtc

SEQ ID NO: 58193 - DNA, 20 bp, synthetic construct
  source 1..20: mol_type = other DNA
catgagtaagttctctgcct

SEQ ID NO: 58194 - DNA, 20 bp, synthetic construct
  source 1..20: mol_type = other DNA
ggtccaccaggatgggttgg

SEQ ID NO: 58195 - DNA, 20 bp, synthetic construct
  source 1..20: mol_type = other DNA
gacaaattccatctccagac

SEQ ID NO: 58196 - DNA, 20 bp, synthetic construct
  source 1..20: mol_type = other DNA
ggtcagtacctgacagagat

SEQ ID NO: 58197 - DNA, 20 bp, synthetic construct
  source 1..20: mol_type = other DNA
gatgacgttcaacacttcaa

SEQ ID NO: 58198 - DNA, 20 bp, synthetic construct
  source 1..20: mol_type = other DNA
tgaaaccatctgtgggggcg

SEQ ID NO: 58199 - DNA, 20 bp, synthetic construct
  source 1..20: mol_type = other DNA
ctcgcatgaccttgaagtgt

SEQ ID NO: 58200 - DNA, 20 bp, synthetic construct
  source 1..20: mol_type = other DNA
aagctcagttcatcctcacc

SEQ ID NO: 58201 - DNA, 20 bp, synthetic construct
  source 1..20: mol_type = other DNA
ggagatgttttgaaggtagg

SEQ ID NO: 58202 - DNA, 20 bp, synthetic construct
  source 1..20: mol_type = other DNA
tcagtacctgacagagatgg

SEQ ID NO: 58203 - DNA, 20 bp, synthetic construct
  source 1..20: mol_type = other DNA
gatggagaagtcccctgggg

SEQ ID NO: 58204 - DNA, 20 bp, synthetic construct
  source 1..20: mol_type = other DNA
atctccaggcatgaggatga

SEQ ID NO: 58205 - DNA, 20 bp, synthetic construct
  source 1..20: mol_type = other DNA
gatgaagaagccaacctcct

SEQ ID NO: 58206 - DNA, 20 bp, synthetic construct
  source 1..20: mol_type = other DNA
gtacctgacagagatggaga

SEQ ID NO: 58207 - DNA, 20 bp, synthetic construct
  source 1..20: mol_type = other DNA
tttagggatggaaacttctc

SEQ ID NO: 58208 - DNA, 20 bp, synthetic construct
  source 1..20: mol_type = other DNA
ccacagaaagtaattaccct

SEQ ID NO: 58209 - DNA, 20 bp, synthetic construct
  source 1..20: mol_type = other DNA
tcatcatccgggccagccag

SEQ ID NO: 58210 - DNA, 20 bp, synthetic construct
  source 1..20: mol_type = other DNA
cagaaagtaattacccttgt

SEQ ID NO: 58211 - DNA, 20 bp, synthetic construct
  source 1..20: mol_type = other DNA
atacccctgccgcctggagc

SEQ ID NO: 58212 - DNA, 20 bp, synthetic construct
  source 1..20: mol_type = other DNA
ttcaacacttcaaggtcatg

SEQ ID NO: 58213 - DNA, 20 bp, synthetic construct
  source 1..20: mol_type = other DNA
tgcaggcggccggtccacca

SEQ ID NO: 58214 - DNA, 20 bp, synthetic construct
  source 1..20: mol_type = other DNA
cagcatggaagctgttgcca

SEQ ID NO: 58215 - DNA, 20 bp, synthetic construct
  source 1..20: mol_type = other DNA
cccagctcgtcatcctccag

SEQ ID NO: 58216 - DNA, 20 bp, synthetic construct
  source 1..20: mol_type = other DNA
ccggtccaccaggatgggtt

SEQ ID NO: 58217 - DNA, 20 bp, synthetic construct
  source 1..20: mol_type = other DNA
ggatgggttggagctatcca

SEQ ID NO: 58218 - DNA, 20 bp, synthetic construct
  source 1..20: mol_type = other DNA
agatacctggtggaaatggt

SEQ ID NO: 58219 - DNA, 20 bp, synthetic construct
  source 1..20: mol_type = other DNA
aggaagatctgcttctgtct

SEQ ID NO: 58220 - DNA, 20 bp, synthetic construct
  source 1..20: mol_type = other DNA
ccccaacagcgagtgcggtg

SEQ ID NO: 58221 - DNA, 20 bp, synthetic construct
  source 1..20: mol_type = other DNA
cctaccttcaaaacatctcc

SEQ ID NO: 58222 - DNA, 20 bp, synthetic construct
  source 1..20: mol_type = other DNA
gtaagttctctgcctggtgt

SEQ ID NO: 58223 - DNA, 20 bp, synthetic construct
  source 1..20: mol_type = other DNA
agggaagaggcccagcttgt

SEQ ID NO: 58224 - DNA, 20 bp, synthetic construct
  source 1..20: mol_type = other DNA
gacagaagcagatcttcctt

SEQ ID NO: 58225 - DNA, 20 bp, synthetic construct
  source 1..20: mol_type = other DNA
ccttcaaaacatctccagtg

SEQ ID NO: 58226 - DNA, 20 bp, synthetic construct
  source 1..20: mol_type = other DNA
gacctccaccacctccccgc

SEQ ID NO: 58227 - DNA, 20 bp, synthetic construct
  source 1..20: mol_type = other DNA
gcttccatgctgtaacgtga

SEQ ID NO: 58228 - DNA, 20 bp, synthetic construct
  source 1..20: mol_type = other DNA
tccagatacctggtggaaat

SEQ ID NO: 58229 - DNA, 20 bp, synthetic construct
  source 1..20: mol_type = other DNA
atgtagattttaagtaacca

SEQ ID NO: 58230 - DNA, 20 bp, synthetic construct
  source 1..20: mol_type = other DNA
cccacagatggtttcacgaa

SEQ ID NO: 58231 - DNA, 20 bp, synthetic construct
  source 1..20: mol_type = other DNA
ggaggcagccttgacataaa

SEQ ID NO: 58232 - DNA, 20 bp, synthetic construct
  source 1..20: mol_type = other DNA
tgtcaggtactgaccattcc

SEQ ID NO: 58233 - DNA, 20 bp, synthetic construct
  source 1..20: mol_type = other DNA
cctggaggatgacgagctgg

SEQ ID NO: 58234 - DNA, 20 bp, synthetic construct
  source 1..20: mol_type = other DNA
gagcatacctggtcttctcg

SEQ ID NO: 58235 - DNA, 20 bp, synthetic construct
  source 1..20: mol_type = other DNA
cccatacccctgccgcctgg

SEQ ID NO: 58236 - DNA, 20 bp, synthetic construct
  source 1..20: mol_type = other DNA
caggacctccaccacctccc

SEQ ID NO: 58237 - DNA, 20 bp, synthetic construct
  source 1..20: mol_type = other DNA
tgtcaaggctgcctcctcgg

SEQ ID NO: 58238 - DNA, 20 bp, synthetic construct
  source 1..20: mol_type = other DNA
ctcagttcatcctcacctga

SEQ ID NO: 58239 - DNA, 20 bp, synthetic construct
  source 1..20: mol_type = other DNA
gagacacacagacccagtgc

SEQ ID NO: 58240 - DNA, 20 bp, synthetic construct
  source 1..20: mol_type = other DNA
atacctggtggaaatggtgg

SEQ ID NO: 58241 - DNA, 20 bp, synthetic construct
  source 1..20: mol_type = other DNA
cgtgaaaccatctgtggggg

SEQ ID NO: 58242 - DNA, 20 bp, synthetic construct
  source 1..20: mol_type = other DNA
ctggagatgttttgaaggta

SEQ ID NO: 58243 - DNA, 20 bp, synthetic construct
  source 1..20: mol_type = other DNA
cagagagggagaagtcccca

SEQ ID NO: 58244 - DNA, 20 bp, synthetic construct
  source 1..20: mol_type = other DNA
gagagggagaagtccccagg

SEQ ID NO: 58245 - DNA, 20 bp, synthetic construct
  source 1..20: mol_type = other DNA
tggcagctgttgctcgggga

SEQ ID NO: 58246 - DNA, 20 bp, synthetic construct
  source 1..20: mol_type = other DNA
acggaagccgtggcagccca

SEQ ID NO: 58247 - DNA, 20 bp, synthetic construct
  source 1..20: mol_type = other DNA
acatgacgtgatccaggaag

SEQ ID NO: 58248 - DNA, 20 bp, synthetic construct
  source 1..20: mol_type = other DNA
cgtggagtcttggcagctgt

SEQ ID NO: 58249 - DNA, 20 bp, synthetic construct
  source 1..20: mol_type = other DNA
tgtacaccatccacatgggc

SEQ ID NO: 58250 - DNA, 20 bp, synthetic construct
  source 1..20: mol_type = other DNA
cccaggagaacggcccttcc

SEQ ID NO: 58251 - DNA, 20 bp, synthetic construct
  source 1..20: mol_type = other DNA
ctcggggacgcctcgcgctc

SEQ ID NO: 58252 - DNA, 20 bp, synthetic construct
  source 1..20: mol_type = other DNA
accggagtgcgtcctcaggt

SEQ ID NO: 58253 - DNA, 20 bp, synthetic construct
  source 1..20: mol_type = other DNA
gtcgcacataacgcgagggg

SEQ ID NO: 58254 - DNA, 20 bp, synthetic construct
  source 1..20: mol_type = other DNA
gcgcttacctgggtacagtg

SEQ ID NO: 58255 - DNA, 20 bp, synthetic construct
  source 1..20: mol_type = other DNA
cgcactccggtaggtcccct

SEQ ID NO: 58256 - DNA, 20 bp, synthetic construct
  source 1..20: mol_type = other DNA
gcggaggatttacgaatgct

SEQ ID NO: 58257 - DNA, 20 bp, synthetic construct
  source 1..20: mol_type = other DNA
gcggcaggcgtagttgcaga

SEQ ID NO: 58258 - DNA, 20 bp, synthetic construct
  source 1..20: mol_type = other DNA
cacatcaagctgcattccgg

SEQ ID NO: 58259 - DNA, 20 bp, synthetic construct
  source 1..20: mol_type = other DNA
aggggagcaccgcttccaca

SEQ ID NO: 58260 - DNA, 20 bp, synthetic construct
  source 1..20: mol_type = other DNA
cgcacttgtacaccttcatc

SEQ ID NO: 58261 - DNA, 20 bp, synthetic construct
  source 1..20: mol_type = other DNA
tgcagaggtggcatttgaag

SEQ ID NO: 58262 - DNA, 20 bp, synthetic construct
  source 1..20: mol_type = other DNA
gtggcagcccatgtggatgg

SEQ ID NO: 58263 - DNA, 20 bp, synthetic construct
  source 1..20: mol_type = other DNA
ccaggtaagcgctgctgctc

SEQ ID NO: 58264 - DNA, 20 bp, synthetic construct
  source 1..20: mol_type = other DNA
cctgaggacgcactccggta

SEQ ID NO: 58265 - DNA, 20 bp, synthetic construct
  source 1..20: mol_type = other DNA
tcccacagatatcacacttt

SEQ ID NO: 58266 - DNA, 20 bp, synthetic construct
  source 1..20: mol_type = other DNA
gtacatgacgtgatccagga

SEQ ID NO: 58267 - DNA, 20 bp, synthetic construct
  source 1..20: mol_type = other DNA
atccaggaagagcacccggc

SEQ ID NO: 58268 - DNA, 20 bp, synthetic construct
  source 1..20: mol_type = other DNA
gcaggcgtagttgcagaggt

SEQ ID NO: 58269 - DNA, 20 bp, synthetic construct
  source 1..20: mol_type = other DNA
agtgagggcgtccctccggc

SEQ ID NO: 58270 - DNA, 20 bp, synthetic construct
  source 1..20: mol_type = other DNA
ggaccggtacgagttctcgt

SEQ ID NO: 58271 - DNA, 20 bp, synthetic construct
  source 1..20: mol_type = other DNA
tgtgaaccatgagcacattg

SEQ ID NO: 58272 - DNA, 20 bp, synthetic construct
  source 1..20: mol_type = other DNA
cgcacatgttgcactcaaaa

SEQ ID NO: 58273 - DNA, 20 bp, synthetic construct
  source 1..20: mol_type = other DNA
gacaccgagagcaacaacga

SEQ ID NO: 58274 - DNA, 20 bp, synthetic construct
  source 1..20: mol_type = other DNA
gtcctcaggtggccagtgag

SEQ ID NO: 58275 - DNA, 20 bp, synthetic construct
  source 1..20: mol_type = other DNA
catttgaagggcttctcccc

SEQ ID NO: 58276 - DNA, 20 bp, synthetic construct
  source 1..20: mol_type = other DNA
gctgccacaactacttggaa

SEQ ID NO: 58277 - DNA, 20 bp, synthetic construct
  source 1..20: mol_type = other DNA
gctttagctcatgtggaagc

SEQ ID NO: 58278 - DNA, 20 bp, synthetic construct
  source 1..20: mol_type = other DNA
attcacccagaagggcaacc

SEQ ID NO: 58279 - DNA, 20 bp, synthetic construct
  source 1..20: mol_type = other DNA
ctggaagggccgttctcctg

SEQ ID NO: 58280 - DNA, 20 bp, synthetic construct
  source 1..20: mol_type = other DNA
ccatccacatgggctgccac

SEQ ID NO: 58281 - DNA, 20 bp, synthetic construct
  source 1..20: mol_type = other DNA
aactacgcctgccgccggag

SEQ ID NO: 58282 - DNA, 20 bp, synthetic construct
  source 1..20: mol_type = other DNA
ccaagactccacggacaccg

SEQ ID NO: 58283 - DNA, 20 bp, synthetic construct
  source 1..20: mol_type = other DNA
cttaccagtgtggcttcttt

SEQ ID NO: 58284 - DNA, 20 bp, synthetic construct
  source 1..20: mol_type = other DNA
ccggggagaagcccttcaaa

SEQ ID NO: 58285 - DNA, 20 bp, synthetic construct
  source 1..20: mol_type = other DNA
gccagtgagggcgtccctcc

SEQ ID NO: 58286 - DNA, 20 bp, synthetic construct
  source 1..20: mol_type = other DNA
gagcaggttgcccttctggg

SEQ ID NO: 58287 - DNA, 20 bp, synthetic construct
  source 1..20: mol_type = other DNA
ctcacctgaaacttgggaca

SEQ ID NO: 58288 - DNA, 20 bp, synthetic construct
  source 1..20: mol_type = other DNA
ccaggaagagcacccggcag

SEQ ID NO: 58289 - DNA, 20 bp, synthetic construct
  source 1..20: mol_type = other DNA
cggagcaggttgcccttctg

SEQ ID NO: 58290 - DNA, 20 bp, synthetic construct
  source 1..20: mol_type = other DNA
ggaatgcagcttgatgtgcc

SEQ ID NO: 58291 - DNA, 20 bp, synthetic construct
  source 1..20: mol_type = other DNA
gttgcactcaaaaggatcac

SEQ ID NO: 58292 - DNA, 20 bp, synthetic construct
  source 1..20: mol_type = other DNA
cctcaggtggccagtgaggg

SEQ ID NO: 58293 - DNA, 20 bp, synthetic construct
  source 1..20: mol_type = other DNA
gaagagcacccggcagtgtt

SEQ ID NO: 58294 - DNA, 20 bp, synthetic construct
  source 1..20: mol_type = other DNA
acggacaccgagagcaacaa

SEQ ID NO: 58295 - DNA, 20 bp, synthetic construct
  source 1..20: mol_type = other DNA
cctaccggagtgcgtcctca

SEQ ID NO: 58296 - DNA, 20 bp, synthetic construct
  source 1..20: mol_type = other DNA
gaatgaggccccgcactgat

SEQ ID NO: 58297 - DNA, 20 bp, synthetic construct
  source 1..20: mol_type = other DNA
catgtggatggtgtacatga

SEQ ID NO: 58298 - DNA, 20 bp, synthetic construct
  source 1..20: mol_type = other DNA
ccagaagggcaacctgctcc

SEQ ID NO: 58299 - DNA, 20 bp, synthetic construct
  source 1..20: mol_type = other DNA
caggagaacggcccttccag

SEQ ID NO: 58300 - DNA, 20 bp, synthetic construct
  source 1..20: mol_type = other DNA
tgtggatggtgtacatgacg

SEQ ID NO: 58301 - DNA, 20 bp, synthetic construct
  source 1..20: mol_type = other DNA
aagactccacggacaccgag

SEQ ID NO: 58302 - DNA, 20 bp, synthetic construct
  source 1..20: mol_type = other DNA
tgaagggcttctccccggaa

SEQ ID NO: 58303 - DNA, 20 bp, synthetic construct
  source 1..20: mol_type = other DNA
ttggtgaagcagctggtcag

SEQ ID NO: 58304 - DNA, 20 bp, synthetic construct
  source 1..20: mol_type = other DNA
gaagaagtaaccctggttgg

SEQ ID NO: 58305 - DNA, 20 bp, synthetic construct
  source 1..20: mol_type = other DNA
ggtgaagcagctggtcagcg

SEQ ID NO: 58306 - DNA, 20 bp, synthetic construct
  source 1..20: mol_type = other DNA
acaaactgggaagtgactcc

SEQ ID NO: 58307 - DNA, 20 bp, synthetic construct
  source 1..20: mol_type = other DNA
atagagcttctccctcgtct

SEQ ID NO: 58308 - DNA, 20 bp, synthetic construct
  source 1..20: mol_type = other DNA
tgtactcacagcacgcagag

SEQ ID NO: 58309 - DNA, 20 bp, synthetic construct
  source 1..20: mol_type = other DNA
cccagtgtgtttgcaatgcc

SEQ ID NO: 58310 - DNA, 20 bp, synthetic construct
  source 1..20: mol_type = other DNA
tctgaccctgagtacctgct

SEQ ID NO: 58311 - DNA, 20 bp, synthetic construct
  source 1..20: mol_type = other DNA
ttaatgagctgcaggactta

SEQ ID NO: 58312 - DNA, 20 bp, synthetic construct
  source 1..20: mol_type = other DNA
gccagtcaagagcccggcgg

SEQ ID NO: 58313 - DNA, 20 bp, synthetic construct
  source 1..20: mol_type = other DNA
cccttggagagaaaccagga

SEQ ID NO: 58314 - DNA, 20 bp, synthetic construct
  source 1..20: mol_type = other DNA
cggatcagccacatctgtac

SEQ ID NO: 58315 - DNA, 20 bp, synthetic construct
  source 1..20: mol_type = other DNA
gagggagaagctctatggta

SEQ ID NO: 58316 - DNA, 20 bp, synthetic construct
  source 1..20: mol_type = other DNA
ataatgggcttcagctgcag

SEQ ID NO: 58317 - DNA, 20 bp, synthetic construct
  source 1..20: mol_type = other DNA
ggtgaaggcagagtctctgg

SEQ ID NO: 58318 - DNA, 20 bp, synthetic construct
  source 1..20: mol_type = other DNA
aacaagagcaatgactttga

SEQ ID NO: 58319 - DNA, 20 bp, synthetic construct
  source 1..20: mol_type = other DNA
gttgtagtcctgcttgcccg

SEQ ID NO: 58320 - DNA, 20 bp, synthetic construct
  source 1..20: mol_type = other DNA
gtaggtgtgctgatgtggga

SEQ ID NO: 58321 - DNA, 20 bp, synthetic construct
  source 1..20: mol_type = other DNA
tcagcacacctacaagaaat

SEQ ID NO: 58322 - DNA, 20 bp, synthetic construct
  source 1..20: mol_type = other DNA
cttgtaggtgtgctgatgtg

SEQ ID NO: 58323 - DNA, 20 bp, synthetic construct
  source 1..20: mol_type = other DNA
gattcataatctggtagacg

SEQ ID NO: 58324 - DNA, 20 bp, synthetic construct
  source 1..20: mol_type = other DNA
cactgaaaacttcccacatc

SEQ ID NO: 58325 - DNA, 20 bp, synthetic construct
  source 1..20: mol_type = other DNA
tgaagacaacagggtgagtg

SEQ ID NO: 58326 - DNA, 20 bp, synthetic construct
  source 1..20: mol_type = other DNA
atccacagagacttggtatg

SEQ ID NO: 58327 - DNA, 20 bp, synthetic construct
  source 1..20: mol_type = other DNA
tgctcaccgtatctcagccc

SEQ ID NO: 58328 - DNA, 20 bp, synthetic construct
  source 1..20: mol_type = other DNA
gcaccagtttgggatgagag

SEQ ID NO: 58329 - DNA, 20 bp, synthetic construct
  source 1..20: mol_type = other DNA
gcagtctggagaaggctggc

SEQ ID NO: 58330 - DNA, 20 bp, synthetic construct
  source 1..20: mol_type = other DNA
gtcaccaggcctgggttgat

SEQ ID NO: 58331 - DNA, 20 bp, synthetic construct
  source 1..20: mol_type = other DNA
tagttgatgagaagagggat

SEQ ID NO: 58332 - DNA, 20 bp, synthetic construct
  source 1..20: mol_type = other DNA
ccagcagtgattcataatct

SEQ ID NO: 58333 - DNA, 20 bp, synthetic construct
  source 1..20: mol_type = other DNA
cccaaagtcagacaccttga

SEQ ID NO: 58334 - DNA, 20 bp, synthetic construct
  source 1..20: mol_type = other DNA
cccagcgctgccggctctca

SEQ ID NO: 58335 - DNA, 20 bp, synthetic construct
  source 1..20: mol_type = other DNA
cttacctcctccattatgtt

SEQ ID NO: 58336 - DNA, 20 bp, synthetic construct
  source 1..20: mol_type = other DNA
ttcataatctggtagacgtg

SEQ ID NO: 58337 - DNA, 20 bp, synthetic construct
  source 1..20: mol_type = other DNA
aactttaaagtccgcttctt

SEQ ID NO: 58338 - DNA, 20 bp, synthetic construct
  source 1..20: mol_type = other DNA
gatgagaagagggatggaat

SEQ ID NO: 58339 - DNA, 20 bp, synthetic construct
  source 1..20: mol_type = other DNA
cttgatgagctgttcttcca

SEQ ID NO: 58340 - DNA, 20 bp, synthetic construct
  source 1..20: mol_type = other DNA
tccgatgtgtggtcatttgg

SEQ ID NO: 58341 - DNA, 20 bp, synthetic construct
  source 1..20: mol_type = other DNA
actatcaccaacataatgga

SEQ ID NO: 58342 - DNA, 20 bp, synthetic construct
  source 1..20: mol_type = other DNA
ctcaccctgttgtcttcagg

SEQ ID NO: 58343 - DNA, 20 bp, synthetic construct
  source 1..20: mol_type = other DNA
agagcttacctcctccatta

SEQ ID NO: 58344 - DNA, 20 bp, synthetic construct
  source 1..20: mol_type = other DNA
aaagagaaaacctctgggga

SEQ ID NO: 58345 - DNA, 20 bp, synthetic construct
  source 1..20: mol_type = other DNA
taccatgaaggctccttctt

SEQ ID NO: 58346 - DNA, 20 bp, synthetic construct
  source 1..20: mol_type = other DNA
ggccagcacccagcgctgcc

SEQ ID NO: 58347 - DNA, 20 bp, synthetic construct
  source 1..20: mol_type = other DNA
ggtacaataagagtatcagc

SEQ ID NO: 58348 - DNA, 20 bp, synthetic construct
  source 1..20: mol_type = other DNA
cttcccaggttcgttctgga

SEQ ID NO: 58349 - DNA, 20 bp, synthetic construct
  source 1..20: mol_type = other DNA
catcaagaaatcccaacaaa

SEQ ID NO: 58350 - DNA, 20 bp, synthetic construct
  source 1..20: mol_type = other DNA
ccacctggagacacacacac

SEQ ID NO: 58351 - DNA, 20 bp, synthetic construct
  source 1..20: mol_type = other DNA
tcataccaagtctctgtgga

SEQ ID NO: 58352 - DNA, 20 bp, synthetic construct
  source 1..20: mol_type = other DNA
gcccacttcaccgggaattt

SEQ ID NO: 58353 - DNA, 20 bp, synthetic construct
  source 1..20: mol_type = other DNA
gacttactgtgtccaaaaga

SEQ ID NO: 58354 - DNA, 20 bp, synthetic construct
  source 1..20: mol_type = other DNA
agctcaatggaccccttcag

SEQ ID NO: 58355 - DNA, 20 bp, synthetic construct
  source 1..20: mol_type = other DNA
ccatgccctcacacacatcc

SEQ ID NO: 58356 - DNA, 20 bp, synthetic construct
  source 1..20: mol_type = other DNA
ctttcaggtggtacaataag

SEQ ID NO: 58357 - DNA, 20 bp, synthetic construct
  source 1..20: mol_type = other DNA
cacaaagaagcggactttaa

SEQ ID NO: 58358 - DNA, 20 bp, synthetic construct
  source 1..20: mol_type = other DNA
catataggaggtagttgtca

SEQ ID NO: 58359 - DNA, 20 bp, synthetic construct
  source 1..20: mol_type = other DNA
aagaagcggactttaaagtt

SEQ ID NO: 58360 - DNA, 20 bp, synthetic construct
  source 1..20: mol_type = other DNA
ctcacacacatccagacaca

SEQ ID NO: 58361 - DNA, 20 bp, synthetic construct
  source 1..20: mol_type = other DNA
gcagtgattcataatctggt

SEQ ID NO: 58362 - DNA, 20 bp, synthetic construct
  source 1..20: mol_type = other DNA
gccagttgacgcagcagtct

SEQ ID NO: 58363 - DNA, 20 bp, synthetic construct
  source 1..20: mol_type = other DNA
aagtatgccaggctggcttt

SEQ ID NO: 58364 - DNA, 20 bp, synthetic construct
  source 1..20: mol_type = other DNA
aaagagaagaacttctccct

SEQ ID NO: 58365 - DNA, 20 bp, synthetic construct
  source 1..20: mol_type = other DNA
ggtgcgtagataatctgaca

SEQ ID NO: 58366 - DNA, 20 bp, synthetic construct
  source 1..20: mol_type = other DNA
gtgattcataatctggtaga

SEQ ID NO: 58367 - DNA, 20 bp, synthetic construct
  source 1..20: mol_type = other DNA
tcatccacagagacttggta

SEQ ID NO: 58368 - DNA, 20 bp, synthetic construct
  source 1..20: mol_type = other DNA
aggaggctgaagtaatgatg

SEQ ID NO: 58369 - DNA, 20 bp, synthetic construct
  source 1..20: mol_type = other DNA
atcagtacaccagttccaca

SEQ ID NO: 58370 - DNA, 20 bp, synthetic construct
  source 1..20: mol_type = other DNA
gatgagctgttcttccagga

SEQ ID NO: 58371 - DNA, 20 bp, synthetic construct
  source 1..20: mol_type = other DNA
gtctcttaccattcttggtt

SEQ ID NO: 58372 - DNA, 20 bp, synthetic construct
  source 1..20: mol_type = other DNA
ggtgtactgatcatccagaa

SEQ ID NO: 58373 - DNA, 20 bp, synthetic construct
  source 1..20: mol_type = other DNA
ctgccagaaattgtttggtg

SEQ ID NO: 58374 - DNA, 20 bp, synthetic construct
  source 1..20: mol_type = other DNA
ctgaaagagaaaacctctgg

SEQ ID NO: 58375 - DNA, 20 bp, synthetic construct
  source 1..20: mol_type = other DNA
tcaactatcaccaacataat

SEQ ID NO: 58376 - DNA, 20 bp, synthetic construct
  source 1..20: mol_type = other DNA
agcaaacacatataggaggt

SEQ ID NO: 58377 - DNA, 20 bp, synthetic construct
  source 1..20: mol_type = other DNA
ttcttccaggaggataaagt

SEQ ID NO: 58378 - DNA, 20 bp, synthetic construct
  source 1..20: mol_type = other DNA
agagctcaatggaccccttc

SEQ ID NO: 58379 - DNA, 20 bp, synthetic construct
  source 1..20: mol_type = other DNA
gacaacagggtgagtgagag

SEQ ID NO: 58380 - DNA, 20 bp, synthetic construct
  source 1..20: mol_type = other DNA
cccacatcagcacacctaca

SEQ ID NO: 58381 - DNA, 20 bp, synthetic construct
  source 1..20: mol_type = other DNA
gcagcagtctggagaaggct

SEQ ID NO: 58382 - DNA, 20 bp, synthetic construct
  source 1..20: mol_type = other DNA
tgacaggcagccgtgctcca

SEQ ID NO: 58383 - DNA, 20 bp, synthetic construct
  source 1..20: mol_type = other DNA
cactcaccctgttgtcttca

SEQ ID NO: 58384 - DNA, 20 bp, synthetic construct
  source 1..20: mol_type = other DNA
agaggaggctgaagtaatga

SEQ ID NO: 58385 - DNA, 20 bp, synthetic construct
  source 1..20: mol_type = other DNA
cctccacttcccatccatcc

SEQ ID NO: 58386 - DNA, 20 bp, synthetic construct
  source 1..20: mol_type = other DNA
ccaggcacaccccatacagc

SEQ ID NO: 58387 - DNA, 20 bp, synthetic construct
  source 1..20: mol_type = other DNA
tccagacacatgcccagcag

SEQ ID NO: 58388 - DNA, 20 bp, synthetic construct
  source 1..20: mol_type = other DNA
ctcaatggaccccttcagcg

SEQ ID NO: 58389 - DNA, 20 bp, synthetic construct
  source 1..20: mol_type = other DNA
gtgaaaacagacacggtgta

SEQ ID NO: 58390 - DNA, 20 bp, synthetic construct
  source 1..20: mol_type = other DNA
gttgttcatgatccagttct

SEQ ID NO: 58391 - DNA, 20 bp, synthetic construct
  source 1..20: mol_type = other DNA
tgctcataccaagtctctgt

SEQ ID NO: 58392 - DNA, 20 bp, synthetic construct
  source 1..20: mol_type = other DNA
ctttaaagtccgcttctttg

SEQ ID NO: 58393 - DNA, 20 bp, synthetic construct
  source 1..20: mol_type = other DNA
cgcacagatggcactggaat

SEQ ID NO: 58394 - DNA, 20 bp, synthetic construct
  source 1..20: mol_type = other DNA
ccgcagcccgcgtagctgca

SEQ ID NO: 58395 - DNA, 20 bp, synthetic construct
  source 1..20: mol_type = other DNA
atggcactggaatggccggt

SEQ ID NO: 58396 - DNA, 20 bp, synthetic construct
  source 1..20: mol_type = other DNA
gcagcgccaggtgatcggag

SEQ ID NO: 58397 - DNA, 20 bp, synthetic construct
  source 1..20: mol_type = other DNA
cgatcacctggcgctgcaca

SEQ ID NO: 58398 - DNA, 20 bp, synthetic construct
  source 1..20: mol_type = other DNA
ctgcggcaagacctacacca

SEQ ID NO: 58399 - DNA, 20 bp, synthetic construct
  source 1..20: mol_type = other DNA
atgtgcagcgccaggtgatc

SEQ ID NO: 58400 - DNA, 20 bp, synthetic construct
  source 1..20: mol_type = other DNA
cttccagccgcagccgtccc

SEQ ID NO: 58401 - DNA, 20 bp, synthetic construct
  source 1..20: mol_type = other DNA
acgcacacaggtgggcggca

SEQ ID NO: 58402 - DNA, 20 bp, synthetic construct
  source 1..20: mol_type = other DNA
gcccacctgtgtgcgtgcgc

SEQ ID NO: 58403 - DNA, 20 bp, synthetic construct
  source 1..20: mol_type = other DNA
ccagccgcagccgtcccagt

SEQ ID NO: 58404 - DNA, 20 bp, synthetic construct
  source 1..20: mol_type = other DNA
gctgcacatgaaacggcaca

SEQ ID NO: 58405 - DNA, 20 bp, synthetic construct
  source 1..20: mol_type = other DNA
gtgcagcgccaggtgatcgg

SEQ ID NO: 58406 - DNA, 20 bp, synthetic construct
  source 1..20: mol_type = other DNA
agcgccaggtgatcggagcg

SEQ ID NO: 58407 - DNA, 20 bp, synthetic construct
  source 1..20: mol_type = other DNA
ctggaatggccggtggcccg

SEQ ID NO: 58408 - DNA, 20 bp, synthetic construct
  source 1..20: mol_type = other DNA
gccatggccgggacccgggg

SEQ ID NO: 58409 - DNA, 20 bp, synthetic construct
  source 1..20: mol_type = other DNA
gctgcaggtgtgagtggcgg

SEQ ID NO: 58410 - DNA, 20 bp, synthetic construct
  source 1..20: mol_type = other DNA
ttcgcatctgaaggcgcatc

SEQ ID NO: 58411 - DNA, 20 bp, synthetic construct
  source 1..20: mol_type = other DNA
ccctcacctcctgcaggccg

SEQ ID NO: 58412 - DNA, 20 bp, synthetic construct
  source 1..20: mol_type = other DNA
gccgcagccgtcccagttgc

SEQ ID NO: 58413 - DNA, 20 bp, synthetic construct
  source 1..20: mol_type = other DNA
gatgaagtccagcacgctgt

SEQ ID NO: 58414 - DNA, 20 bp, synthetic construct
  source 1..20: mol_type = other DNA
gcgagaaggcacgatcgcac

SEQ ID NO: 58415 - DNA, 20 bp, synthetic construct
  source 1..20: mol_type = other DNA
ggagcgcgagaaggcacgat

SEQ ID NO: 58416 - DNA, 20 bp, synthetic construct
  source 1..20: mol_type = other DNA
gccttcagatgcgaactctt

SEQ ID NO: 58417 - DNA, 20 bp, synthetic construct
  source 1..20: mol_type = other DNA
cgccaggtgatcggagcgcg

SEQ ID NO: 58418 - DNA, 20 bp, synthetic construct
  source 1..20: mol_type = other DNA
cagatggcactggaatggcc

SEQ ID NO: 58419 - DNA, 20 bp, synthetic construct
  source 1..20: mol_type = other DNA
cgccctcacctcctgcaggc

SEQ ID NO: 58420 - DNA, 20 bp, synthetic construct
  source 1..20: mol_type = other DNA
cctaccactgcaactgggac

SEQ ID NO: 58421 - DNA, 20 bp, synthetic construct
  source 1..20: mol_type = other DNA
tagctgcaggtgtgagtggc

SEQ ID NO: 58422 - DNA, 20 bp, synthetic construct
  source 1..20: mol_type = other DNA
cgcagatgcgccttcagatg

SEQ ID NO: 58423 - DNA, 20 bp, synthetic construct
  source 1..20: mol_type = other DNA
ccatggacaggatgaagtcc

SEQ ID NO: 58424 - DNA, 20 bp, synthetic construct
  source 1..20: mol_type = other DNA
cgaactcttggtgtaggtct

SEQ ID NO: 58425 - DNA, 20 bp, synthetic construct
  source 1..20: mol_type = other DNA
cggggacgcaggcggcgtga

SEQ ID NO: 58426 - DNA, 20 bp, synthetic construct
  source 1..20: mol_type = other DNA
cgtcccagttgcagtggtag

SEQ ID NO: 58427 - DNA, 20 bp, synthetic construct
  source 1..20: mol_type = other DNA
gtgtaggtcttgccgcagcc

SEQ ID NO: 58428 - DNA, 20 bp, synthetic construct
  source 1..20: mol_type = other DNA
caggtgagaagccctaccac

SEQ ID NO: 58429 - DNA, 20 bp, synthetic construct
  source 1..20: mol_type = other DNA
gggacgcaggcggcgtgagg

SEQ ID NO: 58430 - DNA, 20 bp, synthetic construct
  source 1..20: mol_type = other DNA
gcgccatggccgggacccgg

SEQ ID NO: 58431 - DNA, 20 bp, synthetic construct
  source 1..20: mol_type = other DNA
ggaatggccggtggcccgtg

SEQ ID NO: 58432 - DNA, 20 bp, synthetic construct
  source 1..20: mol_type = other DNA
tgcgcagatgcgccttcaga

SEQ ID NO: 58433 - DNA, 20 bp, synthetic construct
  source 1..20: mol_type = other DNA
gccactaccgaaagcacacg

SEQ ID NO: 58434 - DNA, 20 bp, synthetic construct
  source 1..20: mol_type = other DNA
cgcatctgaaggcgcatctg

SEQ ID NO: 58435 - DNA, 20 bp, synthetic construct
  source 1..20: mol_type = other DNA
aacggcacatgtagccggga

SEQ ID NO: 58436 - DNA, 20 bp, synthetic construct
  source 1..20: mol_type = other DNA
acgagctcacgcgccactac

SEQ ID NO: 58437 - DNA, 20 bp, synthetic construct
  source 1..20: mol_type = other DNA
gcagcccgcgtagctgcagg

SEQ ID NO: 58438 - DNA, 20 bp, synthetic construct
  source 1..20: mol_type = other DNA
tgcaggtgtgagtggcggtg

SEQ ID NO: 58439 - DNA, 20 bp, synthetic construct
  source 1..20: mol_type = other DNA
gcacatgaaacggcacatgt

SEQ ID NO: 58440 - DNA, 20 bp, synthetic construct
  source 1..20: mol_type = other DNA
gatcggagcgcgagaaggca

SEQ ID NO: 58441 - DNA, 20 bp, synthetic construct
  source 1..20: mol_type = other DNA
cactcacaggtagcctgggt

SEQ ID NO: 58442 - DNA, 20 bp, synthetic construct
  source 1..20: mol_type = other DNA
caggtagcctgggttgtgat

SEQ ID NO: 58443 - DNA, 20 bp, synthetic construct
  source 1..20: mol_type = other DNA
tgggcagcagcaggagcccc

SEQ ID NO: 58444 - DNA, 20 bp, synthetic construct
  source 1..20: mol_type = other DNA
caggaagcaccaccctgaaa

SEQ ID NO: 58445 - DNA, 20 bp, synthetic construct
  source 1..20: mol_type = other DNA
agcaccaccctgaaaggaag

SEQ ID NO: 58446 - DNA, 20 bp, synthetic construct
  source 1..20: mol_type = other DNA
ctcacaggtagcctgggttg

SEQ ID NO: 58447 - DNA, 20 bp, synthetic construct
  source 1..20: mol_type = other DNA
acacacagtgccatcaacat

SEQ ID NO: 58448 - DNA, 20 bp, synthetic construct
  source 1..20: mol_type = other DNA
tcaacatggccaggatgggc

SEQ ID NO: 58449 - DNA, 20 bp, synthetic construct
  source 1..20: mol_type = other DNA
ccatcaacatggccaggatg

SEQ ID NO: 58450 - DNA, 20 bp, synthetic construct
  source 1..20: mol_type = other DNA
gaagcaccaccctgaaagga

SEQ ID NO: 58451 - DNA, 20 bp, synthetic construct
  source 1..20: mol_type = other DNA
cagcagcaggagccccagca

SEQ ID NO: 58452 - DNA, 20 bp, synthetic construct
  source 1..20: mol_type = other DNA
ctccatctgcaggggagctc

SEQ ID NO: 58453 - DNA, 20 bp, synthetic construct
  source 1..20: mol_type = other DNA
tcagggtggtgcttcctgac

SEQ ID NO: 58454 - DNA, 20 bp, synthetic construct
  source 1..20: mol_type = other DNA
agcacgcaggggaccaggat

SEQ ID NO: 58455 - DNA, 20 bp, synthetic construct
  source 1..20: mol_type = other DNA
cagatggaggaggccatcct

SEQ ID NO: 58456 - DNA, 20 bp, synthetic construct
  source 1..20: mol_type = other DNA
ctttcccaggctcctacgac

SEQ ID NO: 58457 - DNA, 20 bp, synthetic construct
  source 1..20: mol_type = other DNA
ccagattacgagaatctgca

SEQ ID NO: 58458 - DNA, 20 bp, synthetic construct
  source 1..20: mol_type = other DNA
ctcacgaggccgtttgaact

SEQ ID NO: 58459 - DNA, 20 bp, synthetic construct
  source 1..20: mol_type = other DNA
ctcagacacggttgccccct

SEQ ID NO: 58460 - DNA, 20 bp, synthetic construct
  source 1..20: mol_type = other DNA
gtagcctgggttgtgatagt

SEQ ID NO: 58461 - DNA, 20 bp, synthetic construct
  source 1..20: mol_type = other DNA
caggagccccagcacgcagg

SEQ ID NO: 58462 - DNA, 20 bp, synthetic construct
  source 1..20: mol_type = other DNA
cggactcacctatctgagga

SEQ ID NO: 58463 - DNA, 20 bp, synthetic construct
  source 1..20: mol_type = other DNA
aggctacctgtgagtggcca

SEQ ID NO: 58464 - DNA, 20 bp, synthetic construct
  source 1..20: mol_type = other DNA
ccactcacctggcagtctgt

SEQ ID NO: 58465 - DNA, 20 bp, synthetic construct
  source 1..20: mol_type = other DNA
gactcacctatctgaggatg

SEQ ID NO: 58466 - DNA, 20 bp, synthetic construct
  source 1..20: mol_type = other DNA
ccaggatgggcagcagcagg

SEQ ID NO: 58467 - DNA, 20 bp, synthetic construct
  source 1..20: mol_type = other DNA
tactcacgggatggggagca

SEQ ID NO: 58468 - DNA, 20 bp, synthetic construct
  source 1..20: mol_type = other DNA
tgattacgtgaacgttccgg

SEQ ID NO: 58469 - DNA, 20 bp, synthetic construct
  source 1..20: mol_type = other DNA
tccacagtggagtccattga

SEQ ID NO: 58470 - DNA, 20 bp, synthetic construct
  source 1..20: mol_type = other DNA
ctcacctggcagtctgtggc

SEQ ID NO: 58471 - DNA, 20 bp, synthetic construct
  source 1..20: mol_type = other DNA
ggccaggatgggcagcagca

SEQ ID NO: 58472 - DNA, 20 bp, synthetic construct
  source 1..20: mol_type = other DNA
cctttcagggtggtgcttcc

SEQ ID NO: 58473 - DNA, 20 bp, synthetic construct
  source 1..20: mol_type = other DNA
gctctaacctgggtaaggga

SEQ ID NO: 58474 - DNA, 20 bp, synthetic construct
  source 1..20: mol_type = other DNA
cctcccaccacggcttctgg

SEQ ID NO: 58475 - DNA, 20 bp, synthetic construct
  source 1..20: mol_type = other DNA
gcctcagccttgagaggcct

SEQ ID NO: 58476 - DNA, 20 bp, synthetic construct
  source 1..20: mol_type = other DNA
gggtaagggatgcggccgtg

SEQ ID NO: 58477 - DNA, 20 bp, synthetic construct
  source 1..20: mol_type = other DNA
gaaggcgtccggggacatgc

SEQ ID NO: 58478 - DNA, 20 bp, synthetic construct
  source 1..20: mol_type = other DNA
atgatgtagatgggctcctg

SEQ ID NO: 58479 - DNA, 20 bp, synthetic construct
  source 1..20: mol_type = other DNA
acacgtaccctccctggctg

SEQ ID NO: 58480 - DNA, 20 bp, synthetic construct
  source 1..20: mol_type = other DNA
cattacaagatccgtaatct

SEQ ID NO: 58481 - DNA, 20 bp, synthetic construct
  source 1..20: mol_type = other DNA
ggagatgtagaagccaccgt

SEQ ID NO: 58482 - DNA, 20 bp, synthetic construct
  source 1..20: mol_type = other DNA
acagttgtcagggcgcacca

SEQ ID NO: 58483 - DNA, 20 bp, synthetic construct
  source 1..20: mol_type = other DNA
gtactcgttgtcctcaatga

SEQ ID NO: 58484 - DNA, 20 bp, synthetic construct
  source 1..20: mol_type = other DNA
gaccacacatctgacttgat

SEQ ID NO: 58485 - DNA, 20 bp, synthetic construct
  source 1..20: mol_type = other DNA
gtaagggatgcggccgtggg

SEQ ID NO: 58486 - DNA, 20 bp, synthetic construct
  source 1..20: mol_type = other DNA
ggaaacttggcccctaagga

SEQ ID NO: 58487 - DNA, 20 bp, synthetic construct
  source 1..20: mol_type = other DNA
ccacctttgactacctgcgc

SEQ ID NO: 58488 - DNA, 20 bp, synthetic construct
  source 1..20: mol_type = other DNA
ggaccatgggctgtggctgc

SEQ ID NO: 58489 - DNA, 20 bp, synthetic construct
  source 1..20: mol_type = other DNA
ggagctgtaccaactcatga

SEQ ID NO: 58490 - DNA, 20 bp, synthetic construct
  source 1..20: mol_type = other DNA
gggtcaccttgcagtgggga

SEQ ID NO: 58491 - DNA, 20 bp, synthetic construct
  source 1..20: mol_type = other DNA
agggatgaccaacccggagg

SEQ ID NO: 58492 - DNA, 20 bp, synthetic construct
  source 1..20: mol_type = other DNA
tgtgtactcgttgtcctcaa

SEQ ID NO: 58493 - DNA, 20 bp, synthetic construct
  source 1..20: mol_type = other DNA
gataaccaggttgtctgtaa

SEQ ID NO: 58494 - DNA, 20 bp, synthetic construct
  source 1..20: mol_type = other DNA
cccatggtccctgagggaat

SEQ ID NO: 58495 - DNA, 20 bp, synthetic construct
  source 1..20: mol_type = other DNA
ccagcacagcctcatgagtt

SEQ ID NO: 58496 - DNA, 20 bp, synthetic construct
  source 1..20: mol_type = other DNA
gtgttgcagctgcttcatga

SEQ ID NO: 58497 - DNA, 20 bp, synthetic construct
  source 1..20: mol_type = other DNA
aggggagatgtagaagccac

SEQ ID NO: 58498 - DNA, 20 bp, synthetic construct
  source 1..20: mol_type = other DNA
gaaccagccgctggtgttgc

SEQ ID NO: 58499 - DNA, 20 bp, synthetic construct
  source 1..20: mol_type = other DNA
cggtgaagagcctgaagcag

SEQ ID NO: 58500 - DNA, 20 bp, synthetic construct
  source 1..20: mol_type = other DNA
ccgggaaaagtgattcgagg

SEQ ID NO: 58501 - DNA, 20 bp, synthetic construct
  source 1..20: mol_type = other DNA
tcggccaggaaggcgtccgg

SEQ ID NO: 58502 - DNA, 20 bp, synthetic construct
  source 1..20: mol_type = other DNA
ctcacccatccacacctccc

SEQ ID NO: 58503 - DNA, 20 bp, synthetic construct
  source 1..20: mol_type = other DNA
gtgcagagcgataaccaggt

SEQ ID NO: 58504 - DNA, 20 bp, synthetic construct
  source 1..20: mol_type = other DNA
cccggatgaggaaggagccg

SEQ ID NO: 58505 - DNA, 20 bp, synthetic construct
  source 1..20: mol_type = other DNA
gacgagtgggaggttcccag

SEQ ID NO: 58506 - DNA, 20 bp, synthetic construct
  source 1..20: mol_type = other DNA
caggaaggcgtccggggaca

SEQ ID NO: 58507 - DNA, 20 bp, synthetic construct
  source 1..20: mol_type = other DNA
gctgtgcagagcgataacca

SEQ ID NO: 58508 - DNA, 20 bp, synthetic construct
  source 1..20: mol_type = other DNA
gcaacaccagcggctggttc

SEQ ID NO: 58509 - DNA, 20 bp, synthetic construct
  source 1..20: mol_type = other DNA
gctgccaacattctggtgtc

SEQ ID NO: 58510 - DNA, 20 bp, synthetic construct
  source 1..20: mol_type = other DNA
ggccacagagggccagtacc

SEQ ID NO: 58511 - DNA, 20 bp, synthetic construct
  source 1..20: mol_type = other DNA
tccgtcagcaggatcccaaa

SEQ ID NO: 58512 - DNA, 20 bp, synthetic construct
  source 1..20: mol_type = other DNA
gtgtcagacaccagaatgtt

SEQ ID NO: 58513 - DNA, 20 bp, synthetic construct
  source 1..20: mol_type = other DNA
accgacagtgaaaacgatcc

SEQ ID NO: 58514 - DNA, 20 bp, synthetic construct
  source 1..20: mol_type = other DNA
ggccaagtttcccattaagt

SEQ ID NO: 58515 - DNA, 20 bp, synthetic construct
  source 1..20: mol_type = other DNA
ccatccacacctccccgaac

SEQ ID NO: 58516 - DNA, 20 bp, synthetic construct
  source 1..20: mol_type = other DNA
gaccaacccggaggtgattc

SEQ ID NO: 58517 - DNA, 20 bp, synthetic construct
  source 1..20: mol_type = other DNA
ggccgaggccaacctcatga

SEQ ID NO: 58518 - DNA, 20 bp, synthetic construct
  source 1..20: mol_type = other DNA
ccccgaactgtccagccccc

SEQ ID NO: 58519 - DNA, 20 bp, synthetic construct
  source 1..20: mol_type = other DNA
ccacacatctgacttgatgg

SEQ ID NO: 58520 - DNA, 20 bp, synthetic construct
  source 1..20: mol_type = other DNA
cggatgaggaaggagccgtg

SEQ ID NO: 58521 - DNA, 20 bp, synthetic construct
  source 1..20: mol_type = other DNA
gggaaaagtgattcgagggg

SEQ ID NO: 58522 - DNA, 20 bp, synthetic construct
  source 1..20: mol_type = other DNA
atgggaaacttggcccctaa

SEQ ID NO: 58523 - DNA, 20 bp, synthetic construct
  source 1..20: mol_type = other DNA
ggcgccaggagctgccgctc

SEQ ID NO: 58524 - DNA, 20 bp, synthetic construct
  source 1..20: mol_type = other DNA
cagccacagcccatggtccc

SEQ ID NO: 58525 - DNA, 20 bp, synthetic construct
  source 1..20: mol_type = other DNA
tgtagaagccaccgttgtcc

SEQ ID NO: 58526 - DNA, 20 bp, synthetic construct
  source 1..20: mol_type = other DNA
gtgaatgtcccgtagttaat

SEQ ID NO: 58527 - DNA, 20 bp, synthetic construct
  source 1..20: mol_type = other DNA
cccgtagggatgaccaaccc

SEQ ID NO: 58528 - DNA, 20 bp, synthetic construct
  source 1..20: mol_type = other DNA
ctcatgaggctgtgctggaa

SEQ ID NO: 58529 - DNA, 20 bp, synthetic construct
  source 1..20: mol_type = other DNA
gactacctgcgcagtgtgct

SEQ ID NO: 58530 - DNA, 20 bp, synthetic construct
  source 1..20: mol_type = other DNA
aggagccgtgagtgttcccg

SEQ ID NO: 58531 - DNA, 20 bp, synthetic construct
  source 1..20: mol_type = other DNA
gtggcgcaggagcggcgagt

SEQ ID NO: 58532 - DNA, 20 bp, synthetic construct
  source 1..20: mol_type = other DNA
ccggaggtgattcagaacct

SEQ ID NO: 58533 - DNA, 20 bp, synthetic construct
  source 1..20: mol_type = other DNA
gtagggatgaccaacccgga

SEQ ID NO: 58534 - DNA, 20 bp, synthetic construct
  source 1..20: mol_type = other DNA
cacttacggttcgggctcca

SEQ ID NO: 58535 - DNA, 20 bp, synthetic construct
  source 1..20: mol_type = other DNA
cctgcacagctggttcttca

SEQ ID NO: 58536 - DNA, 20 bp, synthetic construct
  source 1..20: mol_type = other DNA
ccagccgctccaccagcttc

SEQ ID NO: 58537 - DNA, 20 bp, synthetic construct
  source 1..20: mol_type = other DNA
cacacctccccgaactgtcc

SEQ ID NO: 58538 - DNA, 20 bp, synthetic construct
  source 1..20: mol_type = other DNA
ttggtacagctcctctggac

SEQ ID NO: 58539 - DNA, 20 bp, synthetic construct
  source 1..20: mol_type = other DNA
gatgaggaaggagccgtgag

SEQ ID NO: 58540 - DNA, 20 bp, synthetic construct
  source 1..20: mol_type = other DNA
gtccacttaatgggaaactt

SEQ ID NO: 58541 - DNA, 20 bp, synthetic construct
  source 1..20: mol_type = other DNA
ccagctgtgcagggcggaag

SEQ ID NO: 58542 - DNA, 20 bp, synthetic construct
  source 1..20: mol_type = other DNA
aagcccagatctccgtcgtg

SEQ ID NO: 58543 - DNA, 20 bp, synthetic construct
  source 1..20: mol_type = other DNA
caaagcccagatctccgtcg

SEQ ID NO: 58544 - DNA, 20 bp, synthetic construct
  source 1..20: mol_type = other DNA
gggctcactggtgtaatggc

SEQ ID NO: 58545 - DNA, 20 bp, synthetic construct
  source 1..20: mol_type = other DNA
acagcctcatgagttggtac

SEQ ID NO: 58546 - DNA, 20 bp, synthetic construct
  source 1..20: mol_type = other DNA
cgaactgtccagcccccagc

SEQ ID NO: 58547 - DNA, 20 bp, synthetic construct
  source 1..20: mol_type = other DNA
gtagagccgaaccagccgct

SEQ ID NO: 58548 - DNA, 20 bp, synthetic construct
  source 1..20: mol_type = other DNA
gctgtaccaactcatgaggc

SEQ ID NO: 58549 - DNA, 20 bp, synthetic construct
  source 1..20: mol_type = other DNA
cgacccagggtactacaacg

SEQ ID NO: 58550 - DNA, 20 bp, synthetic construct
  source 1..20: mol_type = other DNA
gggtgaccacagcgtagagc

SEQ ID NO: 58551 - DNA, 20 bp, synthetic construct
  source 1..20: mol_type = other DNA
gtcatccctacgggttgatg

SEQ ID NO: 58552 - DNA, 20 bp, synthetic construct
  source 1..20: mol_type = other DNA
ccaccattctccatgtattc

SEQ ID NO: 58553 - DNA, 20 bp, synthetic construct
  source 1..20: mol_type = other DNA
tgagttggtacagctcctct

SEQ ID NO: 58554 - DNA, 20 bp, synthetic construct
  source 1..20: mol_type = other DNA
gaaggcatggcattcattga

SEQ ID NO: 58555 - DNA, 20 bp, synthetic construct
  source 1..20: mol_type = other DNA
tactacaacgggcacacgaa

SEQ ID NO: 58556 - DNA, 20 bp, synthetic construct
  source 1..20: mol_type = other DNA
cacagcccatggtccctgag

SEQ ID NO: 58557 - DNA, 20 bp, synthetic construct
  source 1..20: mol_type = other DNA
tccaccactcgccgctcctg

SEQ ID NO: 58558 - DNA, 20 bp, synthetic construct
  source 1..20: mol_type = other DNA
aggggccaagtttcccatta

SEQ ID NO: 58559 - DNA, 20 bp, synthetic construct
  source 1..20: mol_type = other DNA
tcagacaccagaatgttggc

SEQ ID NO: 58560 - DNA, 20 bp, synthetic construct
  source 1..20: mol_type = other DNA
cccactcgtcctcccaccac

SEQ ID NO: 58561 - DNA, 20 bp, synthetic construct
  source 1..20: mol_type = other DNA
tttacagacaacctggttat

SEQ ID NO: 58562 - DNA, 20 bp, synthetic construct
  source 1..20: mol_type = other DNA
gactcactgctccaggatgc

SEQ ID NO: 58563 - DNA, 20 bp, synthetic construct
  source 1..20: mol_type = other DNA
ccactagactccctgtgggc

SEQ ID NO: 58564 - DNA, 20 bp, synthetic construct
  source 1..20: mol_type = other DNA
ggctgcagctcacacccgga

SEQ ID NO: 58565 - DNA, 20 bp, synthetic construct
  source 1..20: mol_type = other DNA
ggctaccgcatggtgcgccc

SEQ ID NO: 58566 - DNA, 20 bp, synthetic construct
  source 1..20: mol_type = other DNA
aacacactgtaaaaccaatg

SEQ ID NO: 58567 - DNA, 20 bp, synthetic construct
  source 1..20: mol_type = other DNA
ataggaaatatgaattaccg

SEQ ID NO: 58568 - DNA, 20 bp, synthetic construct
  source 1..20: mol_type = other DNA
ggaacaccaaggaacctact

SEQ ID NO: 58569 - DNA, 20 bp, synthetic construct
  source 1..20: mol_type = other DNA
gctttcagttgcctagacct

SEQ ID NO: 58570 - DNA, 20 bp, synthetic construct
  source 1..20: mol_type = other DNA
tcctggatcaggcgcccgag

SEQ ID NO: 58571 - DNA, 20 bp, synthetic construct
  source 1..20: mol_type = other DNA
tgcaggaaatcactcaattc

SEQ ID NO: 58572 - DNA, 20 bp, synthetic construct
  source 1..20: mol_type = other DNA
acagcgacatggccctcgcc

SEQ ID NO: 58573 - DNA, 20 bp, synthetic construct
  source 1..20: mol_type = other DNA
agactcacaagtggaaaatc

SEQ ID NO: 58574 - DNA, 20 bp, synthetic construct
  source 1..20: mol_type = other DNA
gttgcacagtcacagaattg

SEQ ID NO: 58575 - DNA, 20 bp, synthetic construct
  source 1..20: mol_type = other DNA
ggagctcgctgagcctccgc

SEQ ID NO: 58576 - DNA, 20 bp, synthetic construct
  source 1..20: mol_type = other DNA
cccaacagcgacatggccct

SEQ ID NO: 58577 - DNA, 20 bp, synthetic construct
  source 1..20: mol_type = other DNA
cttactctggaagctctctg

SEQ ID NO: 58578 - DNA, 20 bp, synthetic construct
  source 1..20: mol_type = other DNA
gaagtccagctgtctcagta

SEQ ID NO: 58579 - DNA, 20 bp, synthetic construct
  source 1..20: mol_type = other DNA
gagactggcggagctggcgg

SEQ ID NO: 58580 - DNA, 20 bp, synthetic construct
  source 1..20: mol_type = other DNA
ttgatataggtgccttatgt

SEQ ID NO: 58581 - DNA, 20 bp, synthetic construct
  source 1..20: mol_type = other DNA
ataatataataaccctgaaa

SEQ ID NO: 58582 - DNA, 20 bp, synthetic construct
  source 1..20: mol_type = other DNA
tatagaggcaatgcttggga

SEQ ID NO: 58583 - DNA, 20 bp, synthetic construct
  source 1..20: mol_type = other DNA
cgccagtctcctccagcccc

SEQ ID NO: 58584 - DNA, 20 bp, synthetic construct
  source 1..20: mol_type = other DNA
agttaatgggtgaaaaaggt

SEQ ID NO: 58585 - DNA, 20 bp, synthetic construct
  source 1..20: mol_type = other DNA
aacaccaaggaacctactgg

SEQ ID NO: 58586 - DNA, 20 bp, synthetic construct
  source 1..20: mol_type = other DNA
gagaagctgaagaacttcag

SEQ ID NO: 58587 - DNA, 20 bp, synthetic construct
  source 1..20: mol_type = other DNA
acaggctggggcttccttca

SEQ ID NO: 58588 - DNA, 20 bp, synthetic construct
  source 1..20: mol_type = other DNA
cttaagagaacactgctcca

SEQ ID NO: 58589 - DNA, 20 bp, synthetic construct
  source 1..20: mol_type = other DNA
ctgctccaggtctaggcaac

SEQ ID NO: 58590 - DNA, 20 bp, synthetic construct
  source 1..20: mol_type = other DNA
cagatttgcaacttggattc

SEQ ID NO: 58591 - DNA, 20 bp, synthetic construct
  source 1..20: mol_type = other DNA
tgaactgagtctggtataga

SEQ ID NO: 58592 - DNA, 20 bp, synthetic construct
  source 1..20: mol_type = other DNA
accactgatattgaacaaaa

SEQ ID NO: 58593 - DNA, 20 bp, synthetic construct
  source 1..20: mol_type = other DNA
agtagtttatctgagaagag

SEQ ID NO: 58594 - DNA, 20 bp, synthetic construct
  source 1..20: mol_type = other DNA
ttaaatagaaatgactacga

SEQ ID NO: 58595 - DNA, 20 bp, synthetic construct
  source 1..20: mol_type = other DNA
ggcaacacagtttcacaaac

SEQ ID NO: 58596 - DNA, 20 bp, synthetic construct
  source 1..20: mol_type = other DNA
gttggatcttactgaatatg

SEQ ID NO: 58597 - DNA, 20 bp, synthetic construct
  source 1..20: mol_type = other DNA
gaattaccgggagcacccca

SEQ ID NO: 58598 - DNA, 20 bp, synthetic construct
  source 1..20: mol_type = other DNA
caggctatggaacacactga

SEQ ID NO: 58599 - DNA, 20 bp, synthetic construct
  source 1..20: mol_type = other DNA
cgcctgatccaggagctcgc

SEQ ID NO: 58600 - DNA, 20 bp, synthetic construct
  source 1..20: mol_type = other DNA
aggttgcacagtcacagaat

SEQ ID NO: 58601 - DNA, 20 bp, synthetic construct
  source 1..20: mol_type = other DNA
ctgagaagctgaagaacttc

SEQ ID NO: 58602 - DNA, 20 bp, synthetic construct
  source 1..20: mol_type = other DNA
tggaggagactggcggagct

SEQ ID NO: 58603 - DNA, 20 bp, synthetic construct
  source 1..20: mol_type = other DNA
tcgtacacatccaccaaagg

SEQ ID NO: 58604 - DNA, 20 bp, synthetic construct
  source 1..20: mol_type = other DNA
caggaaatcactcaattctg

SEQ ID NO: 58605 - DNA, 20 bp, synthetic construct
  source 1..20: mol_type = other DNA
ctccagccccggccctcggg

SEQ ID NO: 58606 - DNA, 20 bp, synthetic construct
  source 1..20: mol_type = other DNA
cagtgaactgagtctggtat

SEQ ID NO: 58607 - DNA, 20 bp, synthetic construct
  source 1..20: mol_type = other DNA
tggagcctgaaggaagcccc

SEQ ID NO: 58608 - DNA, 20 bp, synthetic construct
  source 1..20: mol_type = other DNA
gagatgcgtaatgctgtgga

SEQ ID NO: 58609 - DNA, 20 bp, synthetic construct
  source 1..20: mol_type = other DNA
aggaaatatgaattaccggg

SEQ ID NO: 58610 - DNA, 20 bp, synthetic construct
  source 1..20: mol_type = other DNA
ctgttggatcttactgaata

SEQ ID NO: 58611 - DNA, 20 bp, synthetic construct
  source 1..20: mol_type = other DNA
cccactgtagattccgcaca

SEQ ID NO: 58612 - DNA, 20 bp, synthetic construct
  source 1..20: mol_type = other DNA
catcacacattattatctcc

SEQ ID NO: 58613 - DNA, 20 bp, synthetic construct
  source 1..20: mol_type = other DNA
ctggagcagtgttctcttaa

SEQ ID NO: 58614 - DNA, 20 bp, synthetic construct
  source 1..20: mol_type = other DNA
agggccatgtcgctgttggg

SEQ ID NO: 58615 - DNA, 20 bp, synthetic construct
  source 1..20: mol_type = other DNA
tctgagaagagagcacttac

SEQ ID NO: 58616 - DNA, 20 bp, synthetic construct
  source 1..20: mol_type = other DNA
tcctccagccccggccctcg

SEQ ID NO: 58617 - DNA, 20 bp, synthetic construct
  source 1..20: mol_type = other DNA
ccactggtagtgaggaatag

SEQ ID NO: 58618 - DNA, 20 bp, synthetic construct
  source 1..20: mol_type = other DNA
aggagtaaaaactcatccac

SEQ ID NO: 58619 - DNA, 20 bp, synthetic construct
  source 1..20: mol_type = other DNA
cgggagcaccccaagctcaa

SEQ ID NO: 58620 - DNA, 20 bp, synthetic construct
  source 1..20: mol_type = other DNA
cttcagcagacacaggctgg

SEQ ID NO: 58621 - DNA, 20 bp, synthetic construct
  source 1..20: mol_type = other DNA
agcgacatggccctcgccgg

SEQ ID NO: 58622 - DNA, 20 bp, synthetic construct
  source 1..20: mol_type = other DNA
agaacactgctccaggtcta

SEQ ID NO: 58623 - DNA, 20 bp, synthetic construct
  source 1..20: mol_type = other DNA
ctaccttcagtgcactccac

SEQ ID NO: 58624 - DNA, 20 bp, synthetic construct
  source 1..20: mol_type = other DNA
tatcttaccatatactccct

SEQ ID NO: 58625 - DNA, 20 bp, synthetic construct
  source 1..20: mol_type = other DNA
gcaacacactgtaaaaccaa

SEQ ID NO: 58626 - DNA, 20 bp, synthetic construct
  source 1..20: mol_type = other DNA
tcccgcaggcggttgagggt

SEQ ID NO: 58627 - DNA, 20 bp, synthetic construct
  source 1..20: mol_type = other DNA
gacaccagtaggttccttgg

SEQ ID NO: 58628 - DNA, 20 bp, synthetic construct
  source 1..20: mol_type = other DNA
caacagtgaaaccactttga

SEQ ID NO: 58629 - DNA, 20 bp, synthetic construct
  source 1..20: mol_type = other DNA
gggctggaggagactggcgg

SEQ ID NO: 58630 - DNA, 20 bp, synthetic construct
  source 1..20: mol_type = other DNA
ccagtaccttaagagaacac

SEQ ID NO: 58631 - DNA, 20 bp, synthetic construct
  source 1..20: mol_type = other DNA
atcatgacattggaaaactc

SEQ ID NO: 58632 - DNA, 20 bp, synthetic construct
  source 1..20: mol_type = other DNA
ccgcagcagcggctcccgca

SEQ ID NO: 58633 - DNA, 20 bp, synthetic construct
  source 1..20: mol_type = other DNA
cctgatccaggagctcgctg

SEQ ID NO: 58634 - DNA, 20 bp, synthetic construct
  source 1..20: mol_type = other DNA
atgacaccagtaggttcctt

SEQ ID NO: 58635 - DNA, 20 bp, synthetic construct
  source 1..20: mol_type = other DNA
tccaggtctaggcaactgaa

SEQ ID NO: 58636 - DNA, 20 bp, synthetic construct
  source 1..20: mol_type = other DNA
agaagataagaaaatcactg

SEQ ID NO: 58637 - DNA, 20 bp, synthetic construct
  source 1..20: mol_type = other DNA
tcctatcaaaagggcaacct

SEQ ID NO: 58638 - DNA, 20 bp, synthetic construct
  source 1..20: mol_type = other DNA
tcagtaagtgctctcttctc

SEQ ID NO: 58639 - DNA, 20 bp, synthetic construct
  source 1..20: mol_type = other DNA
acctgaggcggaggcgcccg

SEQ ID NO: 58640 - DNA, 20 bp, synthetic construct
  source 1..20: mol_type = other DNA
ccagcacccccgggctcagc

SEQ ID NO: 58641 - DNA, 20 bp, synthetic construct
  source 1..20: mol_type = other DNA
gttccagagtgagggttctg

SEQ ID NO: 58642 - DNA, 20 bp, synthetic construct
  source 1..20: mol_type = other DNA
tgatgatgtctccacccttc

SEQ ID NO: 58643 - DNA, 20 bp, synthetic construct
  source 1..20: mol_type = other DNA
ctggtaccttgccagtaggc

SEQ ID NO: 58644 - DNA, 20 bp, synthetic construct
  source 1..20: mol_type = other DNA
cctactggtgagtggcgccc

SEQ ID NO: 58645 - DNA, 20 bp, synthetic construct
  source 1..20: mol_type = other DNA
gcggcacatggagttcagga

SEQ ID NO: 58646 - DNA, 20 bp, synthetic construct
  source 1..20: mol_type = other DNA
acaccggaccagcacccccg

SEQ ID NO: 58647 - DNA, 20 bp, synthetic construct
  source 1..20: mol_type = other DNA
tcgctcacattagcccccac

SEQ ID NO: 58648 - DNA, 20 bp, synthetic construct
  source 1..20: mol_type = other DNA
aggatttccttctgaagggt

SEQ ID NO: 58649 - DNA, 20 bp, synthetic construct
  source 1..20: mol_type = other DNA
cccccaccgcctactggcaa

SEQ ID NO: 58650 - DNA, 20 bp, synthetic construct
  source 1..20: mol_type = other DNA
gacaccctactggtgagtgg

SEQ ID NO: 58651 - DNA, 20 bp, synthetic construct
  source 1..20: mol_type = other DNA
gagctacagccaccgctctt

SEQ ID NO: 58652 - DNA, 20 bp, synthetic construct
  source 1..20: mol_type = other DNA
agagtgagggttctgagagg

SEQ ID NO: 58653 - DNA, 20 bp, synthetic construct
  source 1..20: mol_type = other DNA
atctaccaaggttagagaaa

SEQ ID NO: 58654 - DNA, 20 bp, synthetic construct
  source 1..20: mol_type = other DNA
ctacagccaccgctctttga

SEQ ID NO: 58655 - DNA, 20 bp, synthetic construct
  source 1..20: mol_type = other DNA
ggagaggtggcataaccact

SEQ ID NO: 58656 - DNA, 20 bp, synthetic construct
  source 1..20: mol_type = other DNA
tatgccacctctccctacat

SEQ ID NO: 58657 - DNA, 20 bp, synthetic construct
  source 1..20: mol_type = other DNA
ggcagtagctttgcgatttc

SEQ ID NO: 58658 - DNA, 20 bp, synthetic construct
  source 1..20: mol_type = other DNA
gaagacagaattatttacca

SEQ ID NO: 58659 - DNA, 20 bp, synthetic construct
  source 1..20: mol_type = other DNA
attattaccgtccaggcagt

SEQ ID NO: 58660 - DNA, 20 bp, synthetic construct
  source 1..20: mol_type = other DNA
taatttcagagacactataa

SEQ ID NO: 58661 - DNA, 20 bp, synthetic construct
  source 1..20: mol_type = other DNA
aacttactagcatcttcagg

SEQ ID NO: 58662 - DNA, 20 bp, synthetic construct
  source 1..20: mol_type = other DNA
gaattccagtggttcttgat

SEQ ID NO: 58663 - DNA, 20 bp, synthetic construct
  source 1..20: mol_type = other DNA
ccatctgttccccagtctct

SEQ ID NO: 58664 - DNA, 20 bp, synthetic construct
  source 1..20: mol_type = other DNA
tggtccaaggacccttgatg

SEQ ID NO: 58665 - DNA, 20 bp, synthetic construct
  source 1..20: mol_type = other DNA
ggtgcatgatcgtccaccag

SEQ ID NO: 58666 - DNA, 20 bp, synthetic construct
  source 1..20: mol_type = other DNA
cagatgggcagaaatcgcaa

SEQ ID NO: 58667 - DNA, 20 bp, synthetic construct
  source 1..20: mol_type = other DNA
gtgaactggctggcccacaa

SEQ ID NO: 58668 - DNA, 20 bp, synthetic construct
  source 1..20: mol_type = other DNA
gcgcagggccaccgacggca

SEQ ID NO: 58669 - DNA, 20 bp, synthetic construct
  source 1..20: mol_type = other DNA
caatagccagcacaggagag

SEQ ID NO: 58670 - DNA, 20 bp, synthetic construct
  source 1..20: mol_type = other DNA
tgagagctggaaaaccaaag

SEQ ID NO: 58671 - DNA, 20 bp, synthetic construct
  source 1..20: mol_type = other DNA
agttcaggtagacccctgtg

SEQ ID NO: 58672 - DNA, 20 bp, synthetic construct
  source 1..20: mol_type = other DNA
cctccacgagtttgactcct

SEQ ID NO: 58673 - DNA, 20 bp, synthetic construct
  source 1..20: mol_type = other DNA
gcagctgcgggaaatcctgg

SEQ ID NO: 58674 - DNA, 20 bp, synthetic construct
  source 1..20: mol_type = other DNA
ttgagttggatgttggcgat

SEQ ID NO: 58675 - DNA, 20 bp, synthetic construct
  source 1..20: mol_type = other DNA
ctcaaggtatgtgccgggca

SEQ ID NO: 58676 - DNA, 20 bp, synthetic construct
  source 1..20: mol_type = other DNA
gagcagcaagagctggagga

SEQ ID NO: 58677 - DNA, 20 bp, synthetic construct
  source 1..20: mol_type = other DNA
tcgggcaggcagatgagcag

SEQ ID NO: 58678 - DNA, 20 bp, synthetic construct
  source 1..20: mol_type = other DNA
ctgtacctgcccactctctc

SEQ ID NO: 58679 - DNA, 20 bp, synthetic construct
  source 1..20: mol_type = other DNA
ggagggccacatgtagaggc

SEQ ID NO: 58680 - DNA, 20 bp, synthetic construct
  source 1..20: mol_type = other DNA
atccagggcagcaaagtgaa

SEQ ID NO: 58681 - DNA, 20 bp, synthetic construct
  source 1..20: mol_type = other DNA
gggcctacaccatcctgcgg

SEQ ID NO: 58682 - DNA, 20 bp, synthetic construct
  source 1..20: mol_type = other DNA
gagagggtgaactcctcaat

SEQ ID NO: 58683 - DNA, 20 bp, synthetic construct
  source 1..20: mol_type = other DNA
tgagttgatgagcttcttca

SEQ ID NO: 58684 - DNA, 20 bp, synthetic construct
  source 1..20: mol_type = other DNA
tggatgttggcgatggtgtc

SEQ ID NO: 58685 - DNA, 20 bp, synthetic construct
  source 1..20: mol_type = other DNA
gagctgtatgagcacgagaa

SEQ ID NO: 58686 - DNA, 20 bp, synthetic construct
  source 1..20: mol_type = other DNA
ttgaggagttcaccctctcc

SEQ ID NO: 58687 - DNA, 20 bp, synthetic construct
  source 1..20: mol_type = other DNA
agggcagcgaggtgagccca

SEQ ID NO: 58688 - DNA, 20 bp, synthetic construct
  source 1..20: mol_type = other DNA
aacgccgacgagcggatgaa

SEQ ID NO: 58689 - DNA, 20 bp, synthetic construct
  source 1..20: mol_type = other DNA
ttggtgaccagcagcagccg

SEQ ID NO: 58690 - DNA, 20 bp, synthetic construct
  source 1..20: mol_type = other DNA
atacaggtactcatgcctgc

SEQ ID NO: 58691 - DNA, 20 bp, synthetic construct
  source 1..20: mol_type = other DNA
tgagcacgagaaggacctgg

SEQ ID NO: 58692 - DNA, 20 bp, synthetic construct
  source 1..20: mol_type = other DNA
agcagggcagcggcgctatc

SEQ ID NO: 58693 - DNA, 20 bp, synthetic construct
  source 1..20: mol_type = other DNA
tgcaggttccggggctactg

SEQ ID NO: 58694 - DNA, 20 bp, synthetic construct
  source 1..20: mol_type = other DNA
cctgcagcgtgtagtcttcc

SEQ ID NO: 58695 - DNA, 20 bp, synthetic construct
  source 1..20: mol_type = other DNA
agccatagggggtcatccta

SEQ ID NO: 58696 - DNA, 20 bp, synthetic construct
  source 1..20: mol_type = other DNA
cgacaacatcatgatccgag

SEQ ID NO: 58697 - DNA, 20 bp, synthetic construct
  source 1..20: mol_type = other DNA
cagcaggaagtcaaccacaa

SEQ ID NO: 58698 - DNA, 20 bp, synthetic construct
  source 1..20: mol_type = other DNA
caccttcatggactccaaga

SEQ ID NO: 58699 - DNA, 20 bp, synthetic construct
  source 1..20: mol_type = other DNA
ggagcagccggaagactaca

SEQ ID NO: 58700 - DNA, 20 bp, synthetic construct
  source 1..20: mol_type = other DNA
gttgagcagggcatccttgt

SEQ ID NO: 58701 - DNA, 20 bp, synthetic construct
  source 1..20: mol_type = other DNA
tccccagtgccagggagtcc

SEQ ID NO: 58702 - DNA, 20 bp, synthetic construct
  source 1..20: mol_type = other DNA
accaagtttggaatcaaccg

SEQ ID NO: 58703 - DNA, 20 bp, synthetic construct
  source 1..20: mol_type = other DNA
ggatgaaggtggggctcctg

SEQ ID NO: 58704 - DNA, 20 bp, synthetic construct
  source 1..20: mol_type = other DNA
aggactcgtacttgagcacc

SEQ ID NO: 58705 - DNA, 20 bp, synthetic construct
  source 1..20: mol_type = other DNA
gatgaggaggctgatctgtg

SEQ ID NO: 58706 - DNA, 20 bp, synthetic construct
  source 1..20: mol_type = other DNA
atcggcaaaggtagctctgc

SEQ ID NO: 58707 - DNA, 20 bp, synthetic construct
  source 1..20: mol_type = other DNA
agagctggaggacgagcaac

SEQ ID NO: 58708 - DNA, 20 bp, synthetic construct
  source 1..20: mol_type = other DNA
ggaggaagagaagcccgtgg

SEQ ID NO: 58709 - DNA, 20 bp, synthetic construct
  source 1..20: mol_type = other DNA
atgccgcagcttccacacca

SEQ ID NO: 58710 - DNA, 20 bp, synthetic construct
  source 1..20: mol_type = other DNA
cccaccttcatccgctcgtc

SEQ ID NO: 58711 - DNA, 20 bp, synthetic construct
  source 1..20: mol_type = other DNA
tctggggagctgtatgagca

SEQ ID NO: 58712 - DNA, 20 bp, synthetic construct
  source 1..20: mol_type = other DNA
agtgaacgccgacgagcgga

SEQ ID NO: 58713 - DNA, 20 bp, synthetic construct
  source 1..20: mol_type = other DNA
tgggacggagggccacatgt

SEQ ID NO: 58714 - DNA, 20 bp, synthetic construct
  source 1..20: mol_type = other DNA
acaacatcatgatccgagag

SEQ ID NO: 58715 - DNA, 20 bp, synthetic construct
  source 1..20: mol_type = other DNA
gaaggacctggtgtggaagc

SEQ ID NO: 58716 - DNA, 20 bp, synthetic construct
  source 1..20: mol_type = other DNA
tgggccagccagttcacttt

SEQ ID NO: 58717 - DNA, 20 bp, synthetic construct
  source 1..20: mol_type = other DNA
ggcagcgaggtgagcccatg

SEQ ID NO: 58718 - DNA, 20 bp, synthetic construct
  source 1..20: mol_type = other DNA
gcacgagaaggacctggtgt

SEQ ID NO: 58719 - DNA, 20 bp, synthetic construct
  source 1..20: mol_type = other DNA
aggcagtagtggctcctccc

SEQ ID NO: 58720 - DNA, 20 bp, synthetic construct
  source 1..20: mol_type = other DNA
ggagcagctgagctcaggca

SEQ ID NO: 58721 - DNA, 20 bp, synthetic construct
  source 1..20: mol_type = other DNA
cctgcagtaggcctccagga

SEQ ID NO: 58722 - DNA, 20 bp, synthetic construct
  source 1..20: mol_type = other DNA
gtcattcagggccttcagtt

SEQ ID NO: 58723 - DNA, 20 bp, synthetic construct
  source 1..20: mol_type = other DNA
cgtgagagctggaaaaccaa

SEQ ID NO: 58724 - DNA, 20 bp, synthetic construct
  source 1..20: mol_type = other DNA
ttggtggagcgagccttctt

SEQ ID NO: 58725 - DNA, 20 bp, synthetic construct
  source 1..20: mol_type = other DNA
gcagtaaccccaacacggat

SEQ ID NO: 58726 - DNA, 20 bp, synthetic construct
  source 1..20: mol_type = other DNA
ctccaagatgaagcccctgt

SEQ ID NO: 58727 - DNA, 20 bp, synthetic construct
  source 1..20: mol_type = other DNA
cgagaaggacctggtgtgga

SEQ ID NO: 58728 - DNA, 20 bp, synthetic construct
  source 1..20: mol_type = other DNA
tccgcagggcacaggccatc

SEQ ID NO: 58729 - DNA, 20 bp, synthetic construct
  source 1..20: mol_type = other DNA
ggacctggtgtggaagctgc

SEQ ID NO: 58730 - DNA, 20 bp, synthetic construct
  source 1..20: mol_type = other DNA
gcagtcctgcagaaggacag

SEQ ID NO: 58731 - DNA, 20 bp, synthetic construct
  source 1..20: mol_type = other DNA
gccaggagcacagcaggtag

SEQ ID NO: 58732 - DNA, 20 bp, synthetic construct
  source 1..20: mol_type = other DNA
caccagctgcagcaggtact

SEQ ID NO: 58733 - DNA, 20 bp, synthetic construct
  source 1..20: mol_type = other DNA
cgggatgagcagagcaaccc

SEQ ID NO: 58734 - DNA, 20 bp, synthetic construct
  source 1..20: mol_type = other DNA
tatgagcacgagaaggacct

SEQ ID NO: 58735 - DNA, 20 bp, synthetic construct
  source 1..20: mol_type = other DNA
gcagcaagagctggaggacg

SEQ ID NO: 58736 - DNA, 20 bp, synthetic construct
  source 1..20: mol_type = other DNA
gtggaggaagagaagcccgt

SEQ ID NO: 58737 - DNA, 20 bp, synthetic construct
  source 1..20: mol_type = other DNA
aggtgaggatgaatgggaca

SEQ ID NO: 58738 - DNA, 20 bp, synthetic construct
  source 1..20: mol_type = other DNA
tgggccgacctgggacggag

SEQ ID NO: 58739 - DNA, 20 bp, synthetic construct
  source 1..20: mol_type = other DNA
tcggaggtgagcgtgtgctc

SEQ ID NO: 58740 - DNA, 20 bp, synthetic construct
  source 1..20: mol_type = other DNA
tcgagtggggactgcaggtg

SEQ ID NO: 58741 - DNA, 20 bp, synthetic construct
  source 1..20: mol_type = other DNA
gacgggcaggaagggctgca

SEQ ID NO: 58742 - DNA, 20 bp, synthetic construct
  source 1..20: mol_type = other DNA
accttccaggtgtccaccaa

SEQ ID NO: 58743 - DNA, 20 bp, synthetic construct
  source 1..20: mol_type = other DNA
caaggagtcaaactcgtgga

SEQ ID NO: 58744 - DNA, 20 bp, synthetic construct
  source 1..20: mol_type = other DNA
tggaacaagcatgaggatgt

SEQ ID NO: 58745 - DNA, 20 bp, synthetic construct
  source 1..20: mol_type = other DNA
ggcgaggatggaggaggaat

SEQ ID NO: 58746 - DNA, 20 bp, synthetic construct
  source 1..20: mol_type = other DNA
caccttcatccgctcgtcgg

SEQ ID NO: 58747 - DNA, 20 bp, synthetic construct
  source 1..20: mol_type = other DNA
ccacaggacgtccatgagct

SEQ ID NO: 58748 - DNA, 20 bp, synthetic construct
  source 1..20: mol_type = other DNA
gctacctttgccgatgagga

SEQ ID NO: 58749 - DNA, 20 bp, synthetic construct
  source 1..20: mol_type = other DNA
ctgagctcaggcaggcctgc

SEQ ID NO: 58750 - DNA, 20 bp, synthetic construct
  source 1..20: mol_type = other DNA
tggagtccatgaaggtgcac

SEQ ID NO: 58751 - DNA, 20 bp, synthetic construct
  source 1..20: mol_type = other DNA
gttcactttgctgccctgga

SEQ ID NO: 58752 - DNA, 20 bp, synthetic construct
  source 1..20: mol_type = other DNA
tcactttgctgccctggatg

SEQ ID NO: 58753 - DNA, 20 bp, synthetic construct
  source 1..20: mol_type = other DNA
tggcgatggtgtctgaacgg

SEQ ID NO: 58754 - DNA, 20 bp, synthetic construct
  source 1..20: mol_type = other DNA
gtggaacagctgaggggagg

SEQ ID NO: 58755 - DNA, 20 bp, synthetic construct
  source 1..20: mol_type = other DNA
gggcacaggccatcagcgcc

SEQ ID NO: 58756 - DNA, 20 bp, synthetic construct
  source 1..20: mol_type = other DNA
catacagctccccagacccc

SEQ ID NO: 58757 - DNA, 20 bp, synthetic construct
  source 1..20: mol_type = other DNA
gcctcacctggaactggcag

SEQ ID NO: 58758 - DNA, 20 bp, synthetic construct
  source 1..20: mol_type = other DNA
gacttcagccagttgagcag

SEQ ID NO: 58759 - DNA, 20 bp, synthetic construct
  source 1..20: mol_type = other DNA
gggtgaactcctcaatggct

SEQ ID NO: 58760 - DNA, 20 bp, synthetic construct
  source 1..20: mol_type = other DNA
ctggaactggcagagcgggt

SEQ ID NO: 58761 - DNA, 20 bp, synthetic construct
  source 1..20: mol_type = other DNA
acagctccccagacccccgc

SEQ ID NO: 58762 - DNA, 20 bp, synthetic construct
  source 1..20: mol_type = other DNA
ggcgcaggacgggcaggaag

SEQ ID NO: 58763 - DNA, 20 bp, synthetic construct
  source 1..20: mol_type = other DNA
tgtccatgtgattcagcagg

SEQ ID NO: 58764 - DNA, 20 bp, synthetic construct
  source 1..20: mol_type = other DNA
acccccaagccccagaccaa

SEQ ID NO: 58765 - DNA, 20 bp, synthetic construct
  source 1..20: mol_type = other DNA
gacggagggccacatgtaga

SEQ ID NO: 58766 - DNA, 20 bp, synthetic construct
  source 1..20: mol_type = other DNA
gctcaactggctgaagtcca

SEQ ID NO: 58767 - DNA, 20 bp, synthetic construct
  source 1..20: mol_type = other DNA
agcgacaacatcatgatccg

SEQ ID NO: 58768 - DNA, 20 bp, synthetic construct
  source 1..20: mol_type = other DNA
tcggcacagcgacaacatca

SEQ ID NO: 58769 - DNA, 20 bp, synthetic construct
  source 1..20: mol_type = other DNA
agctggaggacgagcaacgg

SEQ ID NO: 58770 - DNA, 20 bp, synthetic construct
  source 1..20: mol_type = other DNA
cccactcacctcctcctcgg

SEQ ID NO: 58771 - DNA, 20 bp, synthetic construct
  source 1..20: mol_type = other DNA
ggaacagctgaggggagggg

SEQ ID NO: 58772 - DNA, 20 bp, synthetic construct
  source 1..20: mol_type = other DNA
ggtccagcaggaatttggtc

SEQ ID NO: 58773 - DNA, 20 bp, synthetic construct
  source 1..20: mol_type = other DNA
gtactgcagccaggcctccc

SEQ ID NO: 58774 - DNA, 20 bp, synthetic construct
  source 1..20: mol_type = other DNA
caaagaggtggaggaagaga

SEQ ID NO: 58775 - DNA, 20 bp, synthetic construct
  source 1..20: mol_type = other DNA
ttccaggtgtccaccaagga

SEQ ID NO: 58776 - DNA, 20 bp, synthetic construct
  source 1..20: mol_type = other DNA
cggccaggagcacagcaggt

SEQ ID NO: 58777 - DNA, 20 bp, synthetic construct
  source 1..20: mol_type = other DNA
gccacagcagctggagggac

SEQ ID NO: 58778 - DNA, 20 bp, synthetic construct
  source 1..20: mol_type = other DNA
cttcatggactccaagatga

SEQ ID NO: 58779 - DNA, 20 bp, synthetic construct
  source 1..20: mol_type = other DNA
gccgcatgcacaagtgcatc

SEQ ID NO: 58780 - DNA, 20 bp, synthetic construct
  source 1..20: mol_type = other DNA
gtcaccaagtggaacaagca

SEQ ID NO: 58781 - DNA, 20 bp, synthetic construct
  source 1..20: mol_type = other DNA
gtccaaagacaacaggcagt

SEQ ID NO: 58782 - DNA, 20 bp, synthetic construct
  source 1..20: mol_type = other DNA
gacgggcagctccggccagg

SEQ ID NO: 58783 - DNA, 20 bp, synthetic construct
  source 1..20: mol_type = other DNA
agagctacctttgccgatga

SEQ ID NO: 58784 - DNA, 20 bp, synthetic construct
  source 1..20: mol_type = other DNA
aacgagatgctgtgcaagac

SEQ ID NO: 58785 - DNA, 20 bp, synthetic construct
  source 1..20: mol_type = other DNA
atccacaggggcttcatctt

SEQ ID NO: 58786 - DNA, 20 bp, synthetic construct
  source 1..20: mol_type = other DNA
ggatgagctcgatgcggaac

SEQ ID NO: 58787 - DNA, 20 bp, synthetic construct
  source 1..20: mol_type = other DNA
cggcctcacctggaactggc

SEQ ID NO: 58788 - DNA, 20 bp, synthetic construct
  source 1..20: mol_type = other DNA
gttggcgatggtgtctgaac

SEQ ID NO: 58789 - DNA, 20 bp, synthetic construct
  source 1..20: mol_type = other DNA
ctccagctgctgtggcaccg

SEQ ID NO: 58790 - DNA, 20 bp, synthetic construct
  source 1..20: mol_type = other DNA
cacggatagcgccgctgccc

SEQ ID NO: 58791 - DNA, 20 bp, synthetic construct
  source 1..20: mol_type = other DNA
ctggcccacaacgtgtccaa

SEQ ID NO: 58792 - DNA, 20 bp, synthetic construct
  source 1..20: mol_type = other DNA
aggatgaggccgaagcgcag

SEQ ID NO: 58793 - DNA, 20 bp, synthetic construct
  source 1..20: mol_type = other DNA
gcggggcaggtcgcagatgt

SEQ ID NO: 58794 - DNA, 20 bp, synthetic construct
  source 1..20: mol_type = other DNA
cgtacttgagcacctgcacc

SEQ ID NO: 58795 - DNA, 20 bp, synthetic construct
  source 1..20: mol_type = other DNA
ggaacctgcaggtaggggac

SEQ ID NO: 58796 - DNA, 20 bp, synthetic construct
  source 1..20: mol_type = other DNA
accaaaaaggtcccgtctgc

SEQ ID NO: 58797 - DNA, 20 bp, synthetic construct
  source 1..20: mol_type = other DNA
cagcacaacgactccctcaa

SEQ ID NO: 58798 - DNA, 20 bp, synthetic construct
  source 1..20: mol_type = other DNA
gcacagcagaggcgatgaag

SEQ ID NO: 58799 - DNA, 20 bp, synthetic construct
  source 1..20: mol_type = other DNA
cgtaccaaaaaggtcccgtc

SEQ ID NO: 58800 - DNA, 20 bp, synthetic construct
  source 1..20: mol_type = other DNA
ctgtacaagttatagggctc

SEQ ID NO: 58801 - DNA, 20 bp, synthetic construct
  source 1..20: mol_type = other DNA
gataaggtctggtttaatgc

SEQ ID NO: 58802 - DNA, 20 bp, synthetic construct
  source 1..20: mol_type = other DNA
aaagacgagagaccaatact

SEQ ID NO: 58803 - DNA, 20 bp, synthetic construct
  source 1..20: mol_type = other DNA
atagggctcggcaaagccat

SEQ ID NO: 58804 - DNA, 20 bp, synthetic construct
  source 1..20: mol_type = other DNA
atggtactggggagatatct

SEQ ID NO: 58805 - DNA, 20 bp, synthetic construct
  source 1..20: mol_type = other DNA
ctggataaggtctggtttaa

SEQ ID NO: 58806 - DNA, 20 bp, synthetic construct
  source 1..20: mol_type = other DNA
ttacctcgagatatctcccc

SEQ ID NO: 58807 - DNA, 20 bp, synthetic construct
  source 1..20: mol_type = other DNA
ccgagccctataacttgtac

SEQ ID NO: 58808 - DNA, 20 bp, synthetic construct
  source 1..20: mol_type = other DNA
aacttgtacagctctctgaa

SEQ ID NO: 58809 - DNA, 20 bp, synthetic construct
  source 1..20: mol_type = other DNA
ccttatccagctgagaaaga

SEQ ID NO: 58810 - DNA, 20 bp, synthetic construct
  source 1..20: mol_type = other DNA
tggacggcgaagtaaagcat

SEQ ID NO: 58811 - DNA, 20 bp, synthetic construct
  source 1..20: mol_type = other DNA
cattaaaccagaccttatcc

SEQ ID NO: 58812 - DNA, 20 bp, synthetic construct
  source 1..20: mol_type = other DNA
gaaactgagtgttatattca

SEQ ID NO: 58813 - DNA, 20 bp, synthetic construct
  source 1..20: mol_type = other DNA
agcagtaaacagggctgcta

SEQ ID NO: 58814 - DNA, 20 bp, synthetic construct
  source 1..20: mol_type = other DNA
taggctagtgtgacattgag

SEQ ID NO: 58815 - DNA, 20 bp, synthetic construct
  source 1..20: mol_type = other DNA
caagttatagggctcggcaa

SEQ ID NO: 58816 - DNA, 20 bp, synthetic construct
  source 1..20: mol_type = other DNA
aaattgacaaacgtatgaac

SEQ ID NO: 58817 - DNA, 20 bp, synthetic construct
  source 1..20: mol_type = other DNA
gagtcaaccacctgaaaaac

SEQ ID NO: 58818 - DNA, 20 bp, synthetic construct
  source 1..20: mol_type = other DNA
gtgtaagagtataatcacca

SEQ ID NO: 58819 - DNA, 20 bp, synthetic construct
  source 1..20: mol_type = other DNA
tcaggtggttgactcaaaaa

SEQ ID NO: 58820 - DNA, 20 bp, synthetic construct
  source 1..20: mol_type = other DNA
gattatatgaagaatatacc

SEQ ID NO: 58821 - DNA, 20 bp, synthetic construct
  source 1..20: mol_type = other DNA
ttctcagctggataaggtct

SEQ ID NO: 58822 - DNA, 20 bp, synthetic construct
  source 1..20: mol_type = other DNA
cgtatgaacagcattaaacc

SEQ ID NO: 58823 - DNA, 20 bp, synthetic construct
  source 1..20: mol_type = other DNA
agctagagattcattccggt

SEQ ID NO: 58824 - DNA, 20 bp, synthetic construct
  source 1..20: mol_type = other DNA
tgtagcaccagttctttcag

SEQ ID NO: 58825 - DNA, 20 bp, synthetic construct
  source 1..20: mol_type = other DNA
gagagctgtacaagttatag

SEQ ID NO: 58826 - DNA, 20 bp, synthetic construct
  source 1..20: mol_type = other DNA
tgtacatgaggctgcggtac

SEQ ID NO: 58827 - DNA, 20 bp, synthetic construct
  source 1..20: mol_type = other DNA
atgaagagagtaagggccag

SEQ ID NO: 58828 - DNA, 20 bp, synthetic construct
  source 1..20: mol_type = other DNA
ctgatggaggatacattgca

SEQ ID NO: 58829 - DNA, 20 bp, synthetic construct
  source 1..20: mol_type = other DNA
cacccttaccaccaagatca

SEQ ID NO: 58830 - DNA, 20 bp, synthetic construct
  source 1..20: mol_type = other DNA
aggtacctggataggcaagg

SEQ ID NO: 58831 - DNA, 20 bp, synthetic construct
  source 1..20: mol_type = other DNA
ccacagctgcttcttccctc

SEQ ID NO: 58832 - DNA, 20 bp, synthetic construct
  source 1..20: mol_type = other DNA
actctgaggccacaaaggca

SEQ ID NO: 58833 - DNA, 20 bp, synthetic construct
  source 1..20: mol_type = other DNA
caggtacctgaccggggacc

SEQ ID NO: 58834 - DNA, 20 bp, synthetic construct
  source 1..20: mol_type = other DNA
acatgtcccggtagcaagca

SEQ ID NO: 58835 - DNA, 20 bp, synthetic construct
  source 1..20: mol_type = other DNA
ctacagcacaagaagctggc

SEQ ID NO: 58836 - DNA, 20 bp, synthetic construct
  source 1..20: mol_type = other DNA
gttcacagggtcctccaggt

SEQ ID NO: 58837 - DNA, 20 bp, synthetic construct
  source 1..20: mol_type = other DNA
tcaccagctcactgaaggga

SEQ ID NO: 58838 - DNA, 20 bp, synthetic construct
  source 1..20: mol_type = other DNA
catgaactcctgcacctgga

SEQ ID NO: 58839 - DNA, 20 bp, synthetic construct
  source 1..20: mol_type = other DNA
cagcctcatgtacagcgccc

SEQ ID NO: 58840 - DNA, 20 bp, synthetic construct
  source 1..20: mol_type = other DNA
gagagagtgagaccttcgtg

SEQ ID NO: 58841 - DNA, 20 bp, synthetic construct
  source 1..20: mol_type = other DNA
cccggtcaggtacctggata

SEQ ID NO: 58842 - DNA, 20 bp, synthetic construct
  source 1..20: mol_type = other DNA
ttggcagatgtcgggccccc

SEQ ID NO: 58843 - DNA, 20 bp, synthetic construct
  source 1..20: mol_type = other DNA
agcaaactgcccgtaggtga

SEQ ID NO: 58844 - DNA, 20 bp, synthetic construct
  source 1..20: mol_type = other DNA
gggttgagtccattgtccac

SEQ ID NO: 58845 - DNA, 20 bp, synthetic construct
  source 1..20: mol_type = other DNA
agtcatgacggtgcccacct

SEQ ID NO: 58846 - DNA, 20 bp, synthetic construct
  source 1..20: mol_type = other DNA
taccccaagggccagcgact

SEQ ID NO: 58847 - DNA, 20 bp, synthetic construct
  source 1..20: mol_type = other DNA
tccctcatacagggccccgt

SEQ ID NO: 58848 - DNA, 20 bp, synthetic construct
  source 1..20: mol_type = other DNA
acaagttcagagagctccag

SEQ ID NO: 58849 - DNA, 20 bp, synthetic construct
  source 1..20: mol_type = other DNA
cctgaccagagcacaggctg

SEQ ID NO: 58850 - DNA, 20 bp, synthetic construct
  source 1..20: mol_type = other DNA
tccaagaagtcgcagcgacc

SEQ ID NO: 58851 - DNA, 20 bp, synthetic construct
  source 1..20: mol_type = other DNA
ttaccagaaagagagcgtgt

SEQ ID NO: 58852 - DNA, 20 bp, synthetic construct
  source 1..20: mol_type = other DNA
atccagtcgctggcccttgg

SEQ ID NO: 58853 - DNA, 20 bp, synthetic construct
  source 1..20: mol_type = other DNA
tgggaaagagggttgttcat

SEQ ID NO: 58854 - DNA, 20 bp, synthetic construct
  source 1..20: mol_type = other DNA
catcagccaagttaagccct

SEQ ID NO: 58855 - DNA, 20 bp, synthetic construct
  source 1..20: mol_type = other DNA
taccttgaaagttggcatag

SEQ ID NO: 58856 - DNA, 20 bp, synthetic construct
  source 1..20: mol_type = other DNA
ctcaacttccagacccctgg

SEQ ID NO: 58857 - DNA, 20 bp, synthetic construct
  source 1..20: mol_type = other DNA
gcacccacctcaatagagat

SEQ ID NO: 58858 - DNA, 20 bp, synthetic construct
  source 1..20: mol_type = other DNA
ggtagatgcgggagagctgc

SEQ ID NO: 58859 - DNA, 20 bp, synthetic construct
  source 1..20: mol_type = other DNA
agcctgaccagagcacaggc

SEQ ID NO: 58860 - DNA, 20 bp, synthetic construct
  source 1..20: mol_type = other DNA
ggacgagctgaccttcatca

SEQ ID NO: 58861 - DNA, 20 bp, synthetic construct
  source 1..20: mol_type = other DNA
tgtcgaactccgagttccct

SEQ ID NO: 58862 - DNA, 20 bp, synthetic construct
  source 1..20: mol_type = other DNA
caagaagtcgcagcgacccg

SEQ ID NO: 58863 - DNA, 20 bp, synthetic construct
  source 1..20: mol_type = other DNA
ccgtcccagcagtccactgg

SEQ ID NO: 58864 - DNA, 20 bp, synthetic construct
  source 1..20: mol_type = other DNA
gagtagaacaaagtcatgac

SEQ ID NO: 58865 - DNA, 20 bp, synthetic construct
  source 1..20: mol_type = other DNA
agtagacgacaagttcagag

SEQ ID NO: 58866 - DNA, 20 bp, synthetic construct
  source 1..20: mol_type = other DNA
gtggacaatggactcaaccc

SEQ ID NO: 58867 - DNA, 20 bp, synthetic construct
  source 1..20: mol_type = other DNA
acgcccacgagagcaaagag

SEQ ID NO: 58868 - DNA, 20 bp, synthetic construct
  source 1..20: mol_type = other DNA
aagtgttaccagaaagagag

SEQ ID NO: 58869 - DNA, 20 bp, synthetic construct
  source 1..20: mol_type = other DNA
cgagcataggcttccaagga

SEQ ID NO: 58870 - DNA, 20 bp, synthetic construct
  source 1..20: mol_type = other DNA
agggcaagatcaagcattgc

SEQ ID NO: 58871 - DNA, 20 bp, synthetic construct
  source 1..20: mol_type = other DNA
ggtaccacctgagaacaggc

SEQ ID NO: 58872 - DNA, 20 bp, synthetic construct
  source 1..20: mol_type = other DNA
ccatacagggttgagtccat

SEQ ID NO: 58873 - DNA, 20 bp, synthetic construct
  source 1..20: mol_type = other DNA
ccactactggatctcctcct

SEQ ID NO: 58874 - DNA, 20 bp, synthetic construct
  source 1..20: mol_type = other DNA
gcacccacacccctgcagat

SEQ ID NO: 58875 - DNA, 20 bp, synthetic construct
  source 1..20: mol_type = other DNA
ggagaagattggcacagctg

SEQ ID NO: 58876 - DNA, 20 bp, synthetic construct
  source 1..20: mol_type = other DNA
ctgggacagcatgttcttca

SEQ ID NO: 58877 - DNA, 20 bp, synthetic construct
  source 1..20: mol_type = other DNA
gaggaggagatccagtagtg

SEQ ID NO: 58878 - DNA, 20 bp, synthetic construct
  source 1..20: mol_type = other DNA
ttgtggagattgaggtggct

SEQ ID NO: 58879 - DNA, 20 bp, synthetic construct
  source 1..20: mol_type = other DNA
gcagtggtcctcaatggaca

SEQ ID NO: 58880 - DNA, 20 bp, synthetic construct
  source 1..20: mol_type = other DNA
tgcaggacctggagcagcgc

SEQ ID NO: 58881 - DNA, 20 bp, synthetic construct
  source 1..20: mol_type = other DNA
ctctcgtaaggggtctcgga

SEQ ID NO: 58882 - DNA, 20 bp, synthetic construct
  source 1..20: mol_type = other DNA
tgtatgagggacgcaaccct

SEQ ID NO: 58883 - DNA, 20 bp, synthetic construct
  source 1..20: mol_type = other DNA
tctactccaagaagtcgcag

SEQ ID NO: 58884 - DNA, 20 bp, synthetic construct
  source 1..20: mol_type = other DNA
gtcgcagcgacccgagcgga

SEQ ID NO: 58885 - DNA, 20 bp, synthetic construct
  source 1..20: mol_type = other DNA
tagaggatgccattcttgat

SEQ ID NO: 58886 - DNA, 20 bp, synthetic construct
  source 1..20: mol_type = other DNA
taccgtcagccgctctcgga

SEQ ID NO: 58887 - DNA, 20 bp, synthetic construct
  source 1..20: mol_type = other DNA
gccacctgtgggagccacag

SEQ ID NO: 58888 - DNA, 20 bp, synthetic construct
  source 1..20: mol_type = other DNA
ccggtagcaagcacgttctg

SEQ ID NO: 58889 - DNA, 20 bp, synthetic construct
  source 1..20: mol_type = other DNA
aggtgcaggagttcatgctc

SEQ ID NO: 58890 - DNA, 20 bp, synthetic construct
  source 1..20: mol_type = other DNA
tcagatgtggctgtgagcaa

SEQ ID NO: 58891 - DNA, 20 bp, synthetic construct
  source 1..20: mol_type = other DNA
tgtatgaggaagacatgttt

SEQ ID NO: 58892 - DNA, 20 bp, synthetic construct
  source 1..20: mol_type = other DNA
cagcagggaggccaactcca

SEQ ID NO: 58893 - DNA, 20 bp, synthetic construct
  source 1..20: mol_type = other DNA
cgtaggtgatgtccccgctg

SEQ ID NO: 58894 - DNA, 20 bp, synthetic construct
  source 1..20: mol_type = other DNA
tcaggtacctggataggcaa

SEQ ID NO: 58895 - DNA, 20 bp, synthetic construct
  source 1..20: mol_type = other DNA
gttgagggccacaagctgac

SEQ ID NO: 58896 - DNA, 20 bp, synthetic construct
  source 1..20: mol_type = other DNA
gacagcccatccgcaggcag

SEQ ID NO: 58897 - DNA, 20 bp, synthetic construct
  source 1..20: mol_type = other DNA
cccgtaggtgatgtccccgc

SEQ ID NO: 58898 - DNA, 20 bp, synthetic construct
  source 1..20: mol_type = other DNA
gaaaccaaggctgagaaata

SEQ ID NO: 58899 - DNA, 20 bp, synthetic construct
  source 1..20: mol_type = other DNA
aggggactacggagggaaga

SEQ ID NO: 58900 - DNA, 20 bp, synthetic construct
  source 1..20: mol_type = other DNA
caggtagaggatgccattct

SEQ ID NO: 58901 - DNA, 20 bp, synthetic construct
  source 1..20: mol_type = other DNA
gttggaggaatccagtcgct

SEQ ID NO: 58902 - DNA, 20 bp, synthetic construct
  source 1..20: mol_type = other DNA
cggcagaggtgcagcacctc

SEQ ID NO: 58903 - DNA, 20 bp, synthetic construct
  source 1..20: mol_type = other DNA
ggagaactggtccccggtca

SEQ ID NO: 58904 - DNA, 20 bp, synthetic construct
  source 1..20: mol_type = other DNA
atgaggctgcggtacagctg

SEQ ID NO: 58905 - DNA, 20 bp, synthetic construct
  source 1..20: mol_type = other DNA
tttgactacaaggcccagag

SEQ ID NO: 58906 - DNA, 20 bp, synthetic construct
  source 1..20: mol_type = other DNA
agtaagcaggcgctcagcga

SEQ ID NO: 58907 - DNA, 20 bp, synthetic construct
  source 1..20: mol_type = other DNA
ggaggtgcctacatccatga

SEQ ID NO: 58908 - DNA, 20 bp, synthetic construct
  source 1..20: mol_type = other DNA
ccattcctggaacagaccaa

SEQ ID NO: 58909 - DNA, 20 bp, synthetic construct
  source 1..20: mol_type = other DNA
attctggatgatggcgctct

SEQ ID NO: 58910 - DNA, 20 bp, synthetic construct
  source 1..20: mol_type = other DNA
gtcagctcgtcctccctctg

SEQ ID NO: 58911 - DNA, 20 bp, synthetic construct
  source 1..20: mol_type = other DNA
cggcagtagacgacaagttc

SEQ ID NO: 58912 - DNA, 20 bp, synthetic construct
  source 1..20: mol_type = other DNA
ccagtagtgggaaagagggt

SEQ ID NO: 58913 - DNA, 20 bp, synthetic construct
  source 1..20: mol_type = other DNA
ggaccactgcagcattgccc

SEQ ID NO: 58914 - DNA, 20 bp, synthetic construct
  source 1..20: mol_type = other DNA
agagagcgtgtagtcgccca

SEQ ID NO: 58915 - DNA, 20 bp, synthetic construct
  source 1..20: mol_type = other DNA
aggatgactgggtacctgcg

SEQ ID NO: 58916 - DNA, 20 bp, synthetic construct
  source 1..20: mol_type = other DNA
ccacgaaggtctcactctct

SEQ ID NO: 58917 - DNA, 20 bp, synthetic construct
  source 1..20: mol_type = other DNA
gcccagagattggcacagaa

SEQ ID NO: 58918 - DNA, 20 bp, synthetic construct
  source 1..20: mol_type = other DNA
acggcagtgctggactttcc

SEQ ID NO: 58919 - DNA, 20 bp, synthetic construct
  source 1..20: mol_type = other DNA
ccgcaggtacccagtcatcc

SEQ ID NO: 58920 - DNA, 20 bp, synthetic construct
  source 1..20: mol_type = other DNA
ccctcaacttccagacccct

SEQ ID NO: 58921 - DNA, 20 bp, synthetic construct
  source 1..20: mol_type = other DNA
cctcgaggctgcggcagagg

SEQ ID NO: 58922 - DNA, 20 bp, synthetic construct
  source 1..20: mol_type = other DNA
tggtcagaacaaagtagtgg

SEQ ID NO: 58923 - DNA, 20 bp, synthetic construct
  source 1..20: mol_type = other DNA
gtgttaccagaaagagagcg

SEQ ID NO: 58924 - DNA, 20 bp, synthetic construct
  source 1..20: mol_type = other DNA
ggacaggatgactgggtacc

SEQ ID NO: 58925 - DNA, 20 bp, synthetic construct
  source 1..20: mol_type = other DNA
cgcacactcaatgcagcgac

SEQ ID NO: 58926 - DNA, 20 bp, synthetic construct
  source 1..20: mol_type = other DNA
ggaaggtcttccgctcgggt

SEQ ID NO: 58927 - DNA, 20 bp, synthetic construct
  source 1..20: mol_type = other DNA
ccagaaagagagcgtgtagt

SEQ ID NO: 58928 - DNA, 20 bp, synthetic construct
  source 1..20: mol_type = other DNA
accggggaccagttctccag

SEQ ID NO: 58929 - DNA, 20 bp, synthetic construct
  source 1..20: mol_type = other DNA
cggagccacctggagagaga

SEQ ID NO: 58930 - DNA, 20 bp, synthetic construct
  source 1..20: mol_type = other DNA
taagcaggcgctcagcgatg

SEQ ID NO: 58931 - DNA, 20 bp, synthetic construct
  source 1..20: mol_type = other DNA
atgggcaaaggatcgtagtt

SEQ ID NO: 58932 - DNA, 20 bp, synthetic construct
  source 1..20: mol_type = other DNA
catcaggagctgtgggctgt

SEQ ID NO: 58933 - DNA, 20 bp, synthetic construct
  source 1..20: mol_type = other DNA
ccttactctcttcatcaaag

SEQ ID NO: 58934 - DNA, 20 bp, synthetic construct
  source 1..20: mol_type = other DNA
ggagaagacgaagagccggt

SEQ ID NO: 58935 - DNA, 20 bp, synthetic construct
  source 1..20: mol_type = other DNA
tcgaaggcctcatcccgcat

SEQ ID NO: 58936 - DNA, 20 bp, synthetic construct
  source 1..20: mol_type = other DNA
cccacgcacactcaatgcag

SEQ ID NO: 58937 - DNA, 20 bp, synthetic construct
  source 1..20: mol_type = other DNA
gcagaggtgcagcacctcgg

SEQ ID NO: 58938 - DNA, 20 bp, synthetic construct
  source 1..20: mol_type = other DNA
gcaggcgctcagcgatgtga

SEQ ID NO: 58939 - DNA, 20 bp, synthetic construct
  source 1..20: mol_type = other DNA
gccacctggagagagaagcc

SEQ ID NO: 58940 - DNA, 20 bp, synthetic construct
  source 1..20: mol_type = other DNA
tgacaggtcagcagcagcac

SEQ ID NO: 58941 - DNA, 20 bp, synthetic construct
  source 1..20: mol_type = other DNA
aacttccagacccctggtga

SEQ ID NO: 58942 - DNA, 20 bp, synthetic construct
  source 1..20: mol_type = other DNA
ggcaaaggatcgtagttgga

SEQ ID NO: 58943 - DNA, 20 bp, synthetic construct
  source 1..20: mol_type = other DNA
ggaagacatgtttagtgacc

SEQ ID NO: 58944 - DNA, 20 bp, synthetic construct
  source 1..20: mol_type = other DNA
tgcctctacatagaagccag

SEQ ID NO: 58945 - DNA, 20 bp, synthetic construct
  source 1..20: mol_type = other DNA
gtagaacaaagtcatgacgg

SEQ ID NO: 58946 - DNA, 20 bp, synthetic construct
  source 1..20: mol_type = other DNA
tggtgaggagtgtgtccccc

SEQ ID NO: 58947 - DNA, 20 bp, synthetic construct
  source 1..20: mol_type = other DNA
cggggaccagttctccagtg

SEQ ID NO: 58948 - DNA, 20 bp, synthetic construct
  source 1..20: mol_type = other DNA
tagagatggcacatggctcc

SEQ ID NO: 58949 - DNA, 20 bp, synthetic construct
  source 1..20: mol_type = other DNA
ccacatgggcaaaggatcgt

SEQ ID NO: 58950 - DNA, 20 bp, synthetic construct
  source 1..20: mol_type = other DNA
gaggaagaagattgccctgg

SEQ ID NO: 58951 - DNA, 20 bp, synthetic construct
  source 1..20: mol_type = other DNA
cgtcagccgctctcggagga

SEQ ID NO: 58952 - DNA, 20 bp, synthetic construct
  source 1..20: mol_type = other DNA
tgggcacacccttaccacca

SEQ ID NO: 58953 - DNA, 20 bp, synthetic construct
  source 1..20: mol_type = other DNA
tgatcttggtggtaagggtg

SEQ ID NO: 58954 - DNA, 20 bp, synthetic construct
  source 1..20: mol_type = other DNA
gatcgtagttggaggaatcc

SEQ ID NO: 58955 - DNA, 20 bp, synthetic construct
  source 1..20: mol_type = other DNA
cacctcgaggctgcggcaga

SEQ ID NO: 58956 - DNA, 20 bp, synthetic construct
  source 1..20: mol_type = other DNA
ccagcttcttgtgctgtagg

SEQ ID NO: 58957 - DNA, 20 bp, synthetic construct
  source 1..20: mol_type = other DNA
cgccagggtgagattctgct

SEQ ID NO: 58958 - DNA, 20 bp, synthetic construct
  source 1..20: mol_type = other DNA
ccatgcaggacctggagcag

SEQ ID NO: 58959 - DNA, 20 bp, synthetic construct
  source 1..20: mol_type = other DNA
tctggaagttgagggccaca

SEQ ID NO: 58960 - DNA, 20 bp, synthetic construct
  source 1..20: mol_type = other DNA
acaagaagctggctgagggc

SEQ ID NO: 58961 - DNA, 20 bp, synthetic construct
  source 1..20: mol_type = other DNA
ctatccaggtacctgaccgg

SEQ ID NO: 58962 - DNA, 20 bp, synthetic construct
  source 1..20: mol_type = other DNA
ggaagctgagcatgaactcc

SEQ ID NO: 58963 - DNA, 20 bp, synthetic construct
  source 1..20: mol_type = other DNA
ctcgcacaacacgtgagtgt

SEQ ID NO: 58964 - DNA, 20 bp, synthetic construct
  source 1..20: mol_type = other DNA
cttacctctcaatctgcagg

SEQ ID NO: 58965 - DNA, 20 bp, synthetic construct
  source 1..20: mol_type = other DNA
aaccaaggctgagaaatacg

SEQ ID NO: 58966 - DNA, 20 bp, synthetic construct
  source 1..20: mol_type = other DNA
cacagatccacatgggcaaa

SEQ ID NO: 58967 - DNA, 20 bp, synthetic construct
  source 1..20: mol_type = other DNA
ctcaccaggggtctggaagt

SEQ ID NO: 58968 - DNA, 20 bp, synthetic construct
  source 1..20: mol_type = other DNA
cttgatcttggtggtaaggg

SEQ ID NO: 58969 - DNA, 20 bp, synthetic construct
  source 1..20: mol_type = other DNA
gatccagtagtgggaaagag

SEQ ID NO: 58970 - DNA, 20 bp, synthetic construct
  source 1..20: mol_type = other DNA
catgacggtgcccacctcga

SEQ ID NO: 58971 - DNA, 20 bp, synthetic construct
  source 1..20: mol_type = other DNA
atgcaccgtcttctgggcgc

SEQ ID NO: 58972 - DNA, 20 bp, synthetic construct
  source 1..20: mol_type = other DNA
ccccagtggactgctgggac

SEQ ID NO: 58973 - DNA, 20 bp, synthetic construct
  source 1..20: mol_type = other DNA
ggaaagagggttgttcatgg

SEQ ID NO: 58974 - DNA, 20 bp, synthetic construct
  source 1..20: mol_type = other DNA
ttctccagtgagtcctcctt

SEQ ID NO: 58975 - DNA, 20 bp, synthetic construct
  source 1..20: mol_type = other DNA
gcccacctcgaggctgcggc

SEQ ID NO: 58976 - DNA, 20 bp, synthetic construct
  source 1..20: mol_type = other DNA
cccctgcagattgagaggta

SEQ ID NO: 58977 - DNA, 20 bp, synthetic construct
  source 1..20: mol_type = other DNA
tgaagagggcctggttcatc

SEQ ID NO: 58978 - DNA, 20 bp, synthetic construct
  source 1..20: mol_type = other DNA
gcaggggcacctgctggtag

SEQ ID NO: 58979 - DNA, 20 bp, synthetic construct
  source 1..20: mol_type = other DNA
gattgaggtggctggagctg

SEQ ID NO: 58980 - DNA, 20 bp, synthetic construct
  source 1..20: mol_type = other DNA
gctataccgcaagatgaagc

SEQ ID NO: 58981 - DNA, 20 bp, synthetic construct
  source 1..20: mol_type = other DNA
aagcattgccgtgtccagca

SEQ ID NO: 58982 - DNA, 20 bp, synthetic construct
  source 1..20: mol_type = other DNA
gaaggatgacatgtcccggt

SEQ ID NO: 58983 - DNA, 20 bp, synthetic construct
  source 1..20: mol_type = other DNA
gaccagaatttcctggctca

SEQ ID NO: 58984 - DNA, 20 bp, synthetic construct
  source 1..20: mol_type = other DNA
cgactggattcctccaacta

SEQ ID NO: 58985 - DNA, 20 bp, synthetic construct
  source 1..20: mol_type = other DNA
actcacgtgttgtgcgagga

SEQ ID NO: 58986 - DNA, 20 bp, synthetic construct
  source 1..20: mol_type = other DNA
gtgcaggacatctgagaact

SEQ ID NO: 58987 - DNA, 20 bp, synthetic construct
  source 1..20: mol_type = other DNA
caaaggcaagaagttccttc

SEQ ID NO: 58988 - DNA, 20 bp, synthetic construct
  source 1..20: mol_type = other DNA
tcccagccatccgtcctgag

SEQ ID NO: 58989 - DNA, 20 bp, synthetic construct
  source 1..20: mol_type = other DNA
tcttccagacaagcctatgc

SEQ ID NO: 58990 - DNA, 20 bp, synthetic construct
  source 1..20: mol_type = other DNA
cgaggaggtgcctacatcca

SEQ ID NO: 58991 - DNA, 20 bp, synthetic construct
  source 1..20: mol_type = other DNA
cgtgacgggcgtcacatcgc

SEQ ID NO: 58992 - DNA, 20 bp, synthetic construct
  source 1..20: mol_type = other DNA
tggggtagatgcgggagagc

SEQ ID NO: 58993 - DNA, 20 bp, synthetic construct
  source 1..20: mol_type = other DNA
gtggttcacagggtcctcca

SEQ ID NO: 58994 - DNA, 20 bp, synthetic construct
  source 1..20: mol_type = other DNA
acgaggaaggagccgtcagg

SEQ ID NO: 58995 - DNA, 20 bp, synthetic construct
  source 1..20: mol_type = other DNA
tggcttaccagcctccctct

SEQ ID NO: 58996 - DNA, 20 bp, synthetic construct
  source 1..20: mol_type = other DNA
gtagtggggataccattcct

SEQ ID NO: 58997 - DNA, 20 bp, synthetic construct
  source 1..20: mol_type = other DNA
ttccggagccacctggagag

SEQ ID NO: 58998 - DNA, 20 bp, synthetic construct
  source 1..20: mol_type = other DNA
cccggtagttgacctgggac

SEQ ID NO: 58999 - DNA, 20 bp, synthetic construct
  source 1..20: mol_type = other DNA
aggagatccagtagtgggaa

SEQ ID NO: 59000 - DNA, 20 bp, synthetic construct
  source 1..20: mol_type = other DNA
gcgcaggggcacctgctggt

SEQ ID NO: 59001 - DNA, 20 bp, synthetic construct
  source 1..20: mol_type = other DNA
cgtagttggaggaatccagt

SEQ ID NO: 59002 - DNA, 20 bp, synthetic construct
  source 1..20: mol_type = other DNA
atgctgcagtggtcctcaat

SEQ ID NO: 59003 - DNA, 20 bp, synthetic construct
  source 1..20: mol_type = other DNA
cagattggtgagctcccatc

SEQ ID NO: 59004 - DNA, 20 bp, synthetic construct
  source 1..20: mol_type = other DNA
cctgactacggggccctgta

SEQ ID NO: 59005 - DNA, 20 bp, synthetic construct
  source 1..20: mol_type = other DNA
gtatagcgggtgtttctcat

SEQ ID NO: 59006 - DNA, 20 bp, synthetic construct
  source 1..20: mol_type = other DNA
gtggagccggggcgccgaca

SEQ ID NO: 59007 - DNA, 20 bp, synthetic construct
  source 1..20: mol_type = other DNA
cttactggccccctcgatct

SEQ ID NO: 59008 - DNA, 20 bp, synthetic construct
  source 1..20: mol_type = other DNA
ggtgggcaccgtcatgactt

SEQ ID NO: 59009 - DNA, 20 bp, synthetic construct
  source 1..20: mol_type = other DNA
gtacagctgagcaaactgcc

SEQ ID NO: 59010 - DNA, 20 bp, synthetic construct
  source 1..20: mol_type = other DNA
gtgcgaggaggagatccagt

SEQ ID NO: 59011 - DNA, 20 bp, synthetic construct
  source 1..20: mol_type = other DNA
tgcagggctggggagcggcc

SEQ ID NO: 59012 - DNA, 20 bp, synthetic construct
  source 1..20: mol_type = other DNA
ggaggactcactggagaact

SEQ ID NO: 59013 - DNA, 20 bp, synthetic construct
  source 1..20: mol_type = other DNA
agccacatctgaggatgaag

SEQ ID NO: 59014 - DNA, 20 bp, synthetic construct
  source 1..20: mol_type = other DNA
ctcatgcaccgtcttctggg

SEQ ID NO: 59015 - DNA, 20 bp, synthetic construct
  source 1..20: mol_type = other DNA
agagtgagtcggaggctgga

SEQ ID NO: 59016 - DNA, 20 bp, synthetic construct
  source 1..20: mol_type = other DNA
actcactctgaggccacaaa

SEQ ID NO: 59017 - DNA, 20 bp, synthetic construct
  source 1..20: mol_type = other DNA
cctctgcagtgtgcagtcaa

SEQ ID NO: 59018 - DNA, 20 bp, synthetic construct
  source 1..20: mol_type = other DNA
gcagtagacgacaagttcag

SEQ ID NO: 59019 - DNA, 20 bp, synthetic construct
  source 1..20: mol_type = other DNA
agtcctcacgtggttcacag

SEQ ID NO: 59020 - DNA, 20 bp, synthetic construct
  source 1..20: mol_type = other DNA
tcactggagaactggtcccc

SEQ ID NO: 59021 - DNA, 20 bp, synthetic construct
  source 1..20: mol_type = other DNA
agaacaggaaggtgacaaac

SEQ ID NO: 59022 - DNA, 20 bp, synthetic construct
  source 1..20: mol_type = other DNA
ctgcagtcgattgtactgaa

SEQ ID NO: 59023 - DNA, 20 bp, synthetic construct
  source 1..20: mol_type = other DNA
catacagggccccgtagtca

SEQ ID NO: 59024 - DNA, 20 bp, synthetic construct
  source 1..20: mol_type = other DNA
gagagtgagaccttcgtggg

SEQ ID NO: 59025 - DNA, 20 bp, synthetic construct
  source 1..20: mol_type = other DNA
attgaggaccactgcagcat

SEQ ID NO: 59026 - DNA, 20 bp, synthetic construct
  source 1..20: mol_type = other DNA
cctcctaggatacagagcag

SEQ ID NO: 59027 - DNA, 20 bp, synthetic construct
  source 1..20: mol_type = other DNA
acagagtttgtgggtcagtc

SEQ ID NO: 59028 - DNA, 20 bp, synthetic construct
  source 1..20: mol_type = other DNA
gcgggagagctgcagtcgat

SEQ ID NO: 59029 - DNA, 20 bp, synthetic construct
  source 1..20: mol_type = other DNA
gatgacatgtcccggtagca

SEQ ID NO: 59030 - DNA, 20 bp, synthetic construct
  source 1..20: mol_type = other DNA
acagccacatctgaggatga

SEQ ID NO: 59031 - DNA, 20 bp, synthetic construct
  source 1..20: mol_type = other DNA
cctggaaggtcttccgctcg

SEQ ID NO: 59032 - DNA, 20 bp, synthetic construct
  source 1..20: mol_type = other DNA
agtagatcttgctgctggtc

SEQ ID NO: 59033 - DNA, 20 bp, synthetic construct
  source 1..20: mol_type = other DNA
gatccacatgggcaaaggat

SEQ ID NO: 59034 - DNA, 20 bp, synthetic construct
  source 1..20: mol_type = other DNA
gttcttcaaaggcactgctc

SEQ ID NO: 59035 - DNA, 20 bp, synthetic construct
  source 1..20: mol_type = other DNA
atacagagcagtgcctttga

SEQ ID NO: 59036 - DNA, 20 bp, synthetic construct
  source 1..20: mol_type = other DNA
tccagggaccagtgggccac

SEQ ID NO: 59037 - DNA, 20 bp, synthetic construct
  source 1..20: mol_type = other DNA
atccgcaggcagcgagcata

SEQ ID NO: 59038 - DNA, 20 bp, synthetic construct
  source 1..20: mol_type = other DNA
cttaagctggttgggtgagg

SEQ ID NO: 59039 - DNA, 20 bp, synthetic construct
  source 1..20: mol_type = other DNA
tggacagtttgtcaccttcc

SEQ ID NO: 59040 - DNA, 20 bp, synthetic construct
  source 1..20: mol_type = other DNA
tagtcaggctcctggaaaca

SEQ ID NO: 59041 - DNA, 20 bp, synthetic construct
  source 1..20: mol_type = other DNA
ctgtcccaggtcaactaccg

SEQ ID NO: 59042 - DNA, 20 bp, synthetic construct
  source 1..20: mol_type = other DNA
cctcgaggtgggcaccgtca

SEQ ID NO: 59043 - DNA, 20 bp, synthetic construct
  source 1..20: mol_type = other DNA
ctcccaccttgcaggctcag

SEQ ID NO: 59044 - DNA, 20 bp, synthetic construct
  source 1..20: mol_type = other DNA
cccagtcctgcagctcctcc

SEQ ID NO: 59045 - DNA, 20 bp, synthetic construct
  source 1..20: mol_type = other DNA
tcggaggaagcgcatgttgg

SEQ ID NO: 59046 - DNA, 20 bp, synthetic construct
  source 1..20: mol_type = other DNA
ctgatatactgagaaaacag

SEQ ID NO: 59047 - DNA, 20 bp, synthetic construct
  source 1..20: mol_type = other DNA
tgaagggaagataatggaac

SEQ ID NO: 59048 - DNA, 20 bp, synthetic construct
  source 1..20: mol_type = other DNA
aagattgccctggagctctc

SEQ ID NO: 59049 - DNA, 20 bp, synthetic construct
  source 1..20: mol_type = other DNA
acaggtcagcagcagcacag

SEQ ID NO: 59050 - DNA, 20 bp, synthetic construct
  source 1..20: mol_type = other DNA
tgacaaactgtccagaaaca

SEQ ID NO: 59051 - DNA, 20 bp, synthetic construct
  source 1..20: mol_type = other DNA
ctatgtagaggcaaacccta

SEQ ID NO: 59052 - DNA, 20 bp, synthetic construct
  source 1..20: mol_type = other DNA
acatgaggctgcggtacagc

SEQ ID NO: 59053 - DNA, 20 bp, synthetic construct
  source 1..20: mol_type = other DNA
gggggacacactcctcacca

SEQ ID NO: 59054 - DNA, 20 bp, synthetic construct
  source 1..20: mol_type = other DNA
gctcaccaatctgacaagcc

SEQ ID NO: 59055 - DNA, 20 bp, synthetic construct
  source 1..20: mol_type = other DNA
ctctacatagaagccagggt

SEQ ID NO: 59056 - DNA, 20 bp, synthetic construct
  source 1..20: mol_type = other DNA
gcgcagaaaggcaaattcag

SEQ ID NO: 59057 - DNA, 20 bp, synthetic construct
  source 1..20: mol_type = other DNA
cccgagcggaagaccttcca

SEQ ID NO: 59058 - DNA, 20 bp, synthetic construct
  source 1..20: mol_type = other DNA
aagaccttccaggtcaagct

SEQ ID NO: 59059 - DNA, 20 bp, synthetic construct
  source 1..20: mol_type = other DNA
tatgaggaagacatgtttag

SEQ ID NO: 59060 - DNA, 20 bp, synthetic construct
  source 1..20: mol_type = other DNA
ttcctccaactacgatcctt

SEQ ID NO: 59061 - DNA, 20 bp, synthetic construct
  source 1..20: mol_type = other DNA
cggaggaagaagattgccct

SEQ ID NO: 59062 - DNA, 20 bp, synthetic construct
  source 1..20: mol_type = other DNA
ctacatagaagccagggttg

SEQ ID NO: 59063 - DNA, 20 bp, synthetic construct
  source 1..20: mol_type = other DNA
cttgtgaagggctgagggca

SEQ ID NO: 59064 - DNA, 20 bp, synthetic construct
  source 1..20: mol_type = other DNA
atggaacggaggaagaagat

SEQ ID NO: 59065 - DNA, 20 bp, synthetic construct
  source 1..20: mol_type = other DNA
gtctccagcttgacctggaa

SEQ ID NO: 59066 - DNA, 20 bp, synthetic construct
  source 1..20: mol_type = other DNA
ttcctcaccaggggtctgga

SEQ ID NO: 59067 - DNA, 20 bp, synthetic construct
  source 1..20: mol_type = other DNA
gaacaaggccaaaggcaaga

SEQ ID NO: 59068 - DNA, 20 bp, synthetic construct
  source 1..20: mol_type = other DNA
gttgagtccattgtccactg

SEQ ID NO: 59069 - DNA, 20 bp, synthetic construct
  source 1..20: mol_type = other DNA
cgggacatgtcatccttccc

SEQ ID NO: 59070 - DNA, 20 bp, synthetic construct
  source 1..20: mol_type = other DNA
cgggaaggatgacatgtccc

SEQ ID NO: 59071 - DNA, 20 bp, synthetic construct
  source 1..20: mol_type = other DNA
tgaggggagcccgtcggcag

SEQ ID NO: 59072 - DNA, 20 bp, synthetic construct
  source 1..20: mol_type = other DNA
cgaggctgcggcagaggtgc

SEQ ID NO: 59073 - DNA, 20 bp, synthetic construct
  source 1..20: mol_type = other DNA
ggccaactccaggtcctcac

SEQ ID NO: 59074 - DNA, 20 bp, synthetic construct
  source 1..20: mol_type = other DNA
gcagcgacagcccatccgca

SEQ ID NO: 59075 - DNA, 20 bp, synthetic construct
  source 1..20: mol_type = other DNA
ggtgcccacctcgaggctgc

SEQ ID NO: 59076 - DNA, 20 bp, synthetic construct
  source 1..20: mol_type = other DNA
ttccaggagcctgactacgg

SEQ ID NO: 59077 - DNA, 20 bp, synthetic construct
  source 1..20: mol_type = other DNA
gcattagcatgtgctcagcc

SEQ ID NO: 59078 - DNA, 20 bp, synthetic construct
  source 1..20: mol_type = other DNA
ttccacaggcggaacgggaa

SEQ ID NO: 59079 - DNA, 20 bp, synthetic construct
  source 1..20: mol_type = other DNA
gtagtgcgtgatgaggtcat

SEQ ID NO: 59080 - DNA, 20 bp, synthetic construct
  source 1..20: mol_type = other DNA
gctgagggcagtgcctacga

SEQ ID NO: 59081 - DNA, 20 bp, synthetic construct
  source 1..20: mol_type = other DNA
accaccaagatcaagttctc

SEQ ID NO: 59082 - DNA, 20 bp, synthetic construct
  source 1..20: mol_type = other DNA
acccacacccctgcagattg

SEQ ID NO: 59083 - DNA, 20 bp, synthetic construct
  source 1..20: mol_type = other DNA
agccaaggacctgaagaaca

SEQ ID NO: 59084 - DNA, 20 bp, synthetic construct
  source 1..20: mol_type = other DNA
tcagccgctctcggaggaag

SEQ ID NO: 59085 - DNA, 20 bp, synthetic construct
  source 1..20: mol_type = other DNA
tgagctggtgacacacacaa

SEQ ID NO: 59086 - DNA, 20 bp, synthetic construct
  source 1..20: mol_type = other DNA
gatcaagttctcagatgtcc

SEQ ID NO: 59087 - DNA, 20 bp, synthetic construct
  source 1..20: mol_type = other DNA
tctgtcaagaagaacttggg

SEQ ID NO: 59088 - DNA, 20 bp, synthetic construct
  source 1..20: mol_type = other DNA
gacatctgccaaagaatggc

SEQ ID NO: 59089 - DNA, 20 bp, synthetic construct
  source 1..20: mol_type = other DNA
agcacaagaagctggctgag

SEQ ID NO: 59090 - DNA, 20 bp, synthetic construct
  source 1..20: mol_type = other DNA
cccactactttgttctgacc

SEQ ID NO: 59091 - DNA, 20 bp, synthetic construct
  source 1..20: mol_type = other DNA
agagctgcagtcgattgtac

SEQ ID NO: 59092 - DNA, 20 bp, synthetic construct
  source 1..20: mol_type = other DNA
tactcagctcgcccacctgc

SEQ ID NO: 59093 - DNA, 20 bp, synthetic construct
  source 1..20: mol_type = other DNA
ccagaatggagtcgcaggtg

SEQ ID NO: 59094 - DNA, 20 bp, synthetic construct
  source 1..20: mol_type = other DNA
ataatgtttggataaatatc

SEQ ID NO: 59095 - DNA, 20 bp, synthetic construct
  source 1..20: mol_type = other DNA
agaaacaaaaggagatatca

SEQ ID NO: 59096 - DNA, 20 bp, synthetic construct
  source 1..20: mol_type = other DNA
cttcacaaaagggtttgata

SEQ ID NO: 59097 - DNA, 20 bp, synthetic construct
  source 1..20: mol_type = other DNA
gtacagcttcacctagagaa

SEQ ID NO: 59098 - DNA, 20 bp, synthetic construct
  source 1..20: mol_type = other DNA
gtatacaggaacaatattga

SEQ ID NO: 59099 - DNA, 20 bp, synthetic construct
  source 1..20: mol_type = other DNA
tctataatgatcaggttcat

SEQ ID NO: 59100 - DNA, 20 bp, synthetic construct
  source 1..20: mol_type = other DNA
gatacaggtcaagtctaagt

SEQ ID NO: 59101 - DNA, 20 bp, synthetic construct
  source 1..20: mol_type = other DNA
cctgatcattatagatattc

SEQ ID NO: 59102 - DNA, 20 bp, synthetic construct
  source 1..20: mol_type = other DNA
aaaggagatatcaagaggat

SEQ ID NO: 59103 - DNA, 20 bp, synthetic construct
  source 1..20: mol_type = other DNA
cttactgcaagttccgccac

SEQ ID NO: 59104 - DNA, 20 bp, synthetic construct
  source 1..20: mol_type = other DNA
tagaaatctagggcctcttg

SEQ ID NO: 59105 - DNA, 20 bp, synthetic construct
  source 1..20: mol_type = other DNA
attcccagtcagaggcgcta

SEQ ID NO: 59106 - DNA, 20 bp, synthetic construct
  source 1..20: mol_type = other DNA
gaccataacccaccacagct

SEQ ID NO: 59107 - DNA, 20 bp, synthetic construct
  source 1..20: mol_type = other DNA
taaatacattcttcatacca

SEQ ID NO: 59108 - DNA, 20 bp, synthetic construct
  source 1..20: mol_type = other DNA
gattcgacttagacttgacc

SEQ ID NO: 59109 - DNA, 20 bp, synthetic construct
  source 1..20: mol_type = other DNA
ctaagtcgaatccatcctct

SEQ ID NO: 59110 - DNA, 20 bp, synthetic construct
  source 1..20: mol_type = other DNA
tgaagtacagcttcacctag

SEQ ID NO: 59111 - DNA, 20 bp, synthetic construct
  source 1..20: mol_type = other DNA
aacaaaaggagatatcaaga

SEQ ID NO: 59112 - DNA, 20 bp, synthetic construct
  source 1..20: mol_type = other DNA
ccttaccaggcttgatgaga

SEQ ID NO: 59113 - DNA, 20 bp, synthetic construct
  source 1..20: mol_type = other DNA
taccatagaggtgtccctgc

SEQ ID NO: 59114 - DNA, 20 bp, synthetic construct
  source 1..20: mol_type = other DNA
tagaaagacaaatactggaa

SEQ ID NO: 59115 - DNA, 20 bp, synthetic construct
  source 1..20: mol_type = other DNA
gaataacttgtctacatagt

SEQ ID NO: 59116 - DNA, 20 bp, synthetic construct
  source 1..20: mol_type = other DNA
gttccaagtaatacatacgg

SEQ ID NO: 59117 - DNA, 20 bp, synthetic construct
  source 1..20: mol_type = other DNA
actcacttgctcccatattt

SEQ ID NO: 59118 - DNA, 20 bp, synthetic construct
  source 1..20: mol_type = other DNA
gcatgccttgatgctaaggt

SEQ ID NO: 59119 - DNA, 20 bp, synthetic construct
  source 1..20: mol_type = other DNA
gagttaatgttctaattgtc

SEQ ID NO: 59120 - DNA, 20 bp, synthetic construct
  source 1..20: mol_type = other DNA
tctgtacctcatcaagaata

SEQ ID NO: 59121 - DNA, 20 bp, synthetic construct
  source 1..20: mol_type = other DNA
ttatagggtaaagttcacct

SEQ ID NO: 59122 - DNA, 20 bp, synthetic construct
  source 1..20: mol_type = other DNA
attacctagaagggcccact

SEQ ID NO: 59123 - DNA, 20 bp, synthetic construct
  source 1..20: mol_type = other DNA
tttacctgaacctctgaatt

SEQ ID NO: 59124 - DNA, 20 bp, synthetic construct
  source 1..20: mol_type = other DNA
tacaggtaaccagatccagt

SEQ ID NO: 59125 - DNA, 20 bp, synthetic construct
  source 1..20: mol_type = other DNA
ggcacttactaggaaatctc

SEQ ID NO: 59126 - DNA, 20 bp, synthetic construct
  source 1..20: mol_type = other DNA
aagtttcaaagagacattca

SEQ ID NO: 59127 - DNA, 20 bp, synthetic construct
  source 1..20: mol_type = other DNA
ttggcagtgagatgtataaa

SEQ ID NO: 59128 - DNA, 20 bp, synthetic construct
  source 1..20: mol_type = other DNA
gtccaagatgttttcctagg

SEQ ID NO: 59129 - DNA, 20 bp, synthetic construct
  source 1..20: mol_type = other DNA
gtcgcaaatgaaaagtatga

SEQ ID NO: 59130 - DNA, 20 bp, synthetic construct
  source 1..20: mol_type = other DNA
taaattacccttctttcagg

SEQ ID NO: 59131 - DNA, 20 bp, synthetic construct
  source 1..20: mol_type = other DNA
aggcaacccatggcatgcct

SEQ ID NO: 59132 - DNA, 20 bp, synthetic construct
  source 1..20: mol_type = other DNA
ggcccttaccaggcttgatg

SEQ ID NO: 59133 - DNA, 20 bp, synthetic construct
  source 1..20: mol_type = other DNA
ggcagtgagatgtataaaag

SEQ ID NO: 59134 - DNA, 20 bp, synthetic construct
  source 1..20: mol_type = other DNA
atagatattgatgaagacag

SEQ ID NO: 59135 - DNA, 20 bp, synthetic construct
  source 1..20: mol_type = other DNA
ttaggtacttgctacagcca

SEQ ID NO: 59136 - DNA, 20 bp, synthetic construct
  source 1..20: mol_type = other DNA
cacttactaggaaatctctg

SEQ ID NO: 59137 - DNA, 20 bp, synthetic construct
  source 1..20: mol_type = other DNA
gaacaggaatgaccaaaaga

SEQ ID NO: 59138 - DNA, 20 bp, synthetic construct
  source 1..20: mol_type = other DNA
tagtccaagatgttttccta

SEQ ID NO: 59139 - DNA, 20 bp, synthetic construct
  source 1..20: mol_type = other DNA
gcagcagcagtcgtacaagg

SEQ ID NO: 59140 - DNA, 20 bp, synthetic construct
  source 1..20: mol_type = other DNA
cgcaaatgaaaagtatgagg

SEQ ID NO: 59141 - DNA, 20 bp, synthetic construct
  source 1..20: mol_type = other DNA
gtagcgcagattctcctgca

SEQ ID NO: 59142 - DNA, 20 bp, synthetic construct
  source 1..20: mol_type = other DNA
atgttccaagtaatacatac

SEQ ID NO: 59143 - DNA, 20 bp, synthetic construct
  source 1..20: mol_type = other DNA
gaccatagtactctgaagga

SEQ ID NO: 59144 - DNA, 20 bp, synthetic construct
  source 1..20: mol_type = other DNA
gcacttgtagcggaagcgca

SEQ ID NO: 59145 - DNA, 20 bp, synthetic construct
  source 1..20: mol_type = other DNA
tggggatgagatcttcctac

SEQ ID NO: 59146 - DNA, 20 bp, synthetic construct
  source 1..20: mol_type = other DNA
gcagagctcagcctcataga

SEQ ID NO: 59147 - DNA, 20 bp, synthetic construct
  source 1..20: mol_type = other DNA
ctggaattccatgggctcac

SEQ ID NO: 59148 - DNA, 20 bp, synthetic construct
  source 1..20: mol_type = other DNA
gccctcaccttggaaggggt

SEQ ID NO: 59149 - DNA, 20 bp, synthetic construct
  source 1..20: mol_type = other DNA
gcaggtactggaattccatg

SEQ ID NO: 59150 - DNA, 20 bp, synthetic construct
  source 1..20: mol_type = other DNA
ccggccatggacggtgaggt

SEQ ID NO: 59151 - DNA, 20 bp, synthetic construct
  source 1..20: mol_type = other DNA
gtgaccagggagatgcgcac

SEQ ID NO: 59152 - DNA, 20 bp, synthetic construct
  source 1..20: mol_type = other DNA
gggagatgcgcactgtccct

SEQ ID NO: 59153 - DNA, 20 bp, synthetic construct
  source 1..20: mol_type = other DNA
gaacacaatggccacttgtc

SEQ ID NO: 59154 - DNA, 20 bp, synthetic construct
  source 1..20: mol_type = other DNA
gccgcagctgcatggagaca

SEQ ID NO: 59155 - DNA, 20 bp, synthetic construct
  source 1..20: mol_type = other DNA
cccaccccaccatcaaggtc

SEQ ID NO: 59156 - DNA, 20 bp, synthetic construct
  source 1..20: mol_type = other DNA
gatgagatcttcctactgtg

SEQ ID NO: 59157 - DNA, 20 bp, synthetic construct
  source 1..20: mol_type = other DNA
ctgtgtacctgtatctggca

SEQ ID NO: 59158 - DNA, 20 bp, synthetic construct
  source 1..20: mol_type = other DNA
gggatgagatcttcctactg

SEQ ID NO: 59159 - DNA, 20 bp, synthetic construct
  source 1..20: mol_type = other DNA
gacagatcaatggctacaca

SEQ ID NO: 59160 - DNA, 20 bp, synthetic construct
  source 1..20: mol_type = other DNA
gctgcatggagacacgcaca

SEQ ID NO: 59161 - DNA, 20 bp, synthetic construct
  source 1..20: mol_type = other DNA
tccagtacctgccagataca

SEQ ID NO: 59162 - DNA, 20 bp, synthetic construct
  source 1..20: mol_type = other DNA
cccggcagtcctttcctaca

SEQ ID NO: 59163 - DNA, 20 bp, synthetic construct
  source 1..20: mol_type = other DNA
acacaatggccacttgtcgg

SEQ ID NO: 59164 - DNA, 20 bp, synthetic construct
  source 1..20: mol_type = other DNA
gaagatctcatccccaccga

SEQ ID NO: 59165 - DNA, 20 bp, synthetic construct
  source 1..20: mol_type = other DNA
tgcatggagacacgcacagg

SEQ ID NO: 59166 - DNA, 20 bp, synthetic construct
  source 1..20: mol_type = other DNA
tgtagcggaagcgcatgccc

SEQ ID NO: 59167 - DNA, 20 bp, synthetic construct
  source 1..20: mol_type = other DNA
taggaagatctcatccccac

SEQ ID NO: 59168 - DNA, 20 bp, synthetic construct
  source 1..20: mol_type = other DNA
gtgcagaaaggtatacatca

SEQ ID NO: 59169 - DNA, 20 bp, synthetic construct
  source 1..20: mol_type = other DNA
tccgctacaagtgcgagggg

SEQ ID NO: 59170 - DNA, 20 bp, synthetic construct
  source 1..20: mol_type = other DNA
ggtaggagaggggcctcagg

SEQ ID NO: 59171 - DNA, 20 bp, synthetic construct
  source 1..20: mol_type = other DNA
catagtcttcagcaaggacc

SEQ ID NO: 59172 - DNA, 20 bp, synthetic construct
  source 1..20: mol_type = other DNA
agataccgatgttatactga

SEQ ID NO: 59173 - DNA, 20 bp, synthetic construct
  source 1..20: mol_type = other DNA
aagaccaaagatggagtgag

SEQ ID NO: 59174 - DNA, 20 bp, synthetic construct
  source 1..20: mol_type = other DNA
tggtgatggagcctgtggaa

SEQ ID NO: 59175 - DNA, 20 bp, synthetic construct
  source 1..20: mol_type = other DNA
atagtttaggtgagtggccc

SEQ ID NO: 59176 - DNA, 20 bp, synthetic construct
  source 1..20: mol_type = other DNA
caaggaccagttcccagagg

SEQ ID NO: 59177 - DNA, 20 bp, synthetic construct
  source 1..20: mol_type = other DNA
ctgaggcccctctcctaccc

SEQ ID NO: 59178 - DNA, 20 bp, synthetic construct
  source 1..20: mol_type = other DNA
ataccgatgttatactgatg

SEQ ID NO: 59179 - DNA, 20 bp, synthetic construct
  source 1..20: mol_type = other DNA
agcaaggaccagttcccaga

SEQ ID NO: 59180 - DNA, 20 bp, synthetic construct
  source 1..20: mol_type = other DNA
gcaggaagattatgatcgcc

SEQ ID NO: 59181 - DNA, 20 bp, synthetic construct
  source 1..20: mol_type = other DNA
cccagataccgatgttatac

SEQ ID NO: 59182 - DNA, 20 bp, synthetic construct
  source 1..20: mol_type = other DNA
ttcagcaaggaccagttccc

SEQ ID NO: 59183 - DNA, 20 bp, synthetic construct
  source 1..20: mol_type = other DNA
tgggcacgttgggacagaaa

SEQ ID NO: 59184 - DNA, 20 bp, synthetic construct
  source 1..20: mol_type = other DNA
gcttgcagagcagctctcgt

SEQ ID NO: 59185 - DNA, 20 bp, synthetic construct
  source 1..20: mol_type = other DNA
accaaagatggagtgagaga

SEQ ID NO: 59186 - DNA, 20 bp, synthetic construct
  source 1..20: mol_type = other DNA
gtgcggcacaagtggcatcc

SEQ ID NO: 59187 - DNA, 20 bp, synthetic construct
  source 1..20: mol_type = other DNA
cctaatttcaccaatccact

SEQ ID NO: 59188 - DNA, 20 bp, synthetic construct
  source 1..20: mol_type = other DNA
tccatgaagacgtccacccc

SEQ ID NO: 59189 - DNA, 20 bp, synthetic construct
  source 1..20: mol_type = other DNA
caaacacctgctgtactccc

SEQ ID NO: 59190 - DNA, 20 bp, synthetic construct
  source 1..20: mol_type = other DNA
cgtcttcatggatggcatcc

SEQ ID NO: 59191 - DNA, 20 bp, synthetic construct
  source 1..20: mol_type = other DNA
tgtactccccgattgctaag

SEQ ID NO: 59192 - DNA, 20 bp, synthetic construct
  source 1..20: mol_type = other DNA
catgaagacgtccacccctg

SEQ ID NO: 59193 - DNA, 20 bp, synthetic construct
  source 1..20: mol_type = other DNA
ggccaaccataactcattcc

SEQ ID NO: 59194 - DNA, 20 bp, synthetic construct
  source 1..20: mol_type = other DNA
accacgtctgcctgctggta

SEQ ID NO: 59195 - DNA, 20 bp, synthetic construct
  source 1..20: mol_type = other DNA
cgggaaggtctcggaggtga

SEQ ID NO: 59196 - DNA, 20 bp, synthetic construct
  source 1..20: mol_type = other DNA
cttgcactcattgatggaga

SEQ ID NO: 59197 - DNA, 20 bp, synthetic construct
  source 1..20: mol_type = other DNA
gctgatctggatgccatcca

SEQ ID NO: 59198 - DNA, 20 bp, synthetic construct
  source 1..20: mol_type = other DNA
tcatggatggcatccagatc

SEQ ID NO: 59199 - DNA, 20 bp, synthetic construct
  source 1..20: mol_type = other DNA
tgcactcattgatggagaag

SEQ ID NO: 59200 - DNA, 20 bp, synthetic construct
  source 1..20: mol_type = other DNA
tttgagtgcgccgtccgaac

SEQ ID NO: 59201 - DNA, 20 bp, synthetic construct
  source 1..20: mol_type = other DNA
gagtacagcaggtgtttgag

SEQ ID NO: 59202 - DNA, 20 bp, synthetic construct
  source 1..20: mol_type = other DNA
agcaacttgccctgtacccc

SEQ ID NO: 59203 - DNA, 20 bp, synthetic construct
  source 1..20: mol_type = other DNA
ggaaggtctcggaggtgaag

SEQ ID NO: 59204 - DNA, 20 bp, synthetic construct
  source 1..20: mol_type = other DNA
aaattaggagcaacttgccc

SEQ ID NO: 59205 - DNA, 20 bp, synthetic construct
  source 1..20: mol_type = other DNA
tgagcagcaggccaagtctc

SEQ ID NO: 59206 - DNA, 20 bp, synthetic construct
  source 1..20: mol_type = other DNA
tgaatcactggattccggcc

SEQ ID NO: 59207 - DNA, 20 bp, synthetic construct
  source 1..20: mol_type = other DNA
ctggcacctggagaaggagg

SEQ ID NO: 59208 - DNA, 20 bp, synthetic construct
  source 1..20: mol_type = other DNA
ccttctatcagggctaccgc

SEQ ID NO: 59209 - DNA, 20 bp, synthetic construct
  source 1..20: mol_type = other DNA
gtcctggaccccgatcgccc

SEQ ID NO: 59210 - DNA, 20 bp, synthetic construct
  source 1..20: mol_type = other DNA
ggcaaggtgagctgcacact

SEQ ID NO: 59211 - DNA, 20 bp, synthetic construct
  source 1..20: mol_type = other DNA
atgacctgtgacggggcagt

SEQ ID NO: 59212 - DNA, 20 bp, synthetic construct
  source 1..20: mol_type = other DNA
ctccacagtgggaagcacaa

SEQ ID NO: 59213 - DNA, 20 bp, synthetic construct
  source 1..20: mol_type = other DNA
acccacagcgacacggtgga

SEQ ID NO: 59214 - DNA, 20 bp, synthetic construct
  source 1..20: mol_type = other DNA
ccagatgttctcctttgagg

SEQ ID NO: 59215 - DNA, 20 bp, synthetic construct
  source 1..20: mol_type = other DNA
ttaggaagtgagtatgaaca

SEQ ID NO: 59216 - DNA, 20 bp, synthetic construct
  source 1..20: mol_type = other DNA
tagatgacctgtgacggggc

SEQ ID NO: 59217 - DNA, 20 bp, synthetic construct
  source 1..20: mol_type = other DNA
tcaccagagatgaacagaca

SEQ ID NO: 59218 - DNA, 20 bp, synthetic construct
  source 1..20: mol_type = other DNA
tcaccaggttctcaatggac

SEQ ID NO: 59219 - DNA, 20 bp, synthetic construct
  source 1..20: mol_type = other DNA
tgaggacctcatgcgctcgg

SEQ ID NO: 59220 - DNA, 20 bp, synthetic construct
  source 1..20: mol_type = other DNA
tccaccagctcctagaaggc

SEQ ID NO: 59221 - DNA, 20 bp, synthetic construct
  source 1..20: mol_type = other DNA
tgagccagtgggtgcattgg

SEQ ID NO: 59222 - DNA, 20 bp, synthetic construct
  source 1..20: mol_type = other DNA
gtgcaggtttacaaagtcct

SEQ ID NO: 59223 - DNA, 20 bp, synthetic construct
  source 1..20: mol_type = other DNA
cctgggatggggctcaggtg

SEQ ID NO: 59224 - DNA, 20 bp, synthetic construct
  source 1..20: mol_type = other DNA
ggacatctgggggcgcaggt

SEQ ID NO: 59225 - DNA, 20 bp, synthetic construct
  source 1..20: mol_type = other DNA
ctcacatggccatctcaaac

SEQ ID NO: 59226 - DNA, 20 bp, synthetic construct
  source 1..20: mol_type = other DNA
gtccaggacagagcagacag

SEQ ID NO: 59227 - DNA, 20 bp, synthetic construct
  source 1..20: mol_type = other DNA
tgggccagttcacacacctg

SEQ ID NO: 59228 - DNA, 20 bp, synthetic construct
  source 1..20: mol_type = other DNA
gtcccgcagggtgaacctcc

SEQ ID NO: 59229 - DNA, 20 bp, synthetic construct
  source 1..20: mol_type = other DNA
ctcaaaggagaacatctgga

SEQ ID NO: 59230 - DNA, 20 bp, synthetic construct
  source 1..20: mol_type = other DNA
ggtgatcttgagttccccgt

SEQ ID NO: 59231 - DNA, 20 bp, synthetic construct
  source 1..20: mol_type = other DNA
tgagaagttcggcctcaagc

SEQ ID NO: 59232 - DNA, 20 bp, synthetic construct
  source 1..20: mol_type = other DNA
gtccgagcggttggccagga

SEQ ID NO: 59233 - DNA, 20 bp, synthetic construct
  source 1..20: mol_type = other DNA
gatccttaacaagaagggac

SEQ ID NO: 59234 - DNA, 20 bp, synthetic construct
  source 1..20: mol_type = other DNA
aggccgaacttctcacagca

SEQ ID NO: 59235 - DNA, 20 bp, synthetic construct
  source 1..20: mol_type = other DNA
aggattttggcaaggtgagc

SEQ ID NO: 59236 - DNA, 20 bp, synthetic construct
  source 1..20: mol_type = other DNA
ctacctgctggcctgctgat

SEQ ID NO: 59237 - DNA, 20 bp, synthetic construct
  source 1..20: mol_type = other DNA
cagtgtacttctcctccgtc

SEQ ID NO: 59238 - DNA, 20 bp, synthetic construct
  source 1..20: mol_type = other DNA
caagatcgacggggaactca

SEQ ID NO: 59239 - DNA, 20 bp, synthetic construct
  source 1..20: mol_type = other DNA
gtcgcagtgtctcgttgtct

SEQ ID NO: 59240 - DNA, 20 bp, synthetic construct
  source 1..20: mol_type = other DNA
gatgaggacctgtatgactg

SEQ ID NO: 59241 - DNA, 20 bp, synthetic construct
  source 1..20: mol_type = other DNA
caccaagaaagtcccgtccg

SEQ ID NO: 59242 - DNA, 20 bp, synthetic construct
  source 1..20: mol_type = other DNA
gctcacctcaatgttgataa

SEQ ID NO: 59243 - DNA, 20 bp, synthetic construct
  source 1..20: mol_type = other DNA
ttcttaaggcacaggaactg

SEQ ID NO: 59244 - DNA, 20 bp, synthetic construct
  source 1..20: mol_type = other DNA
gcagtagcggccatagacga

SEQ ID NO: 59245 - DNA, 20 bp, synthetic construct
  source 1..20: mol_type = other DNA
ttccaggttggctggttccc

SEQ ID NO: 59246 - DNA, 20 bp, synthetic construct
  source 1..20: mol_type = other DNA
agaggtcaaaggcttcgaag

SEQ ID NO: 59247 - DNA, 20 bp, synthetic construct
  source 1..20: mol_type = other DNA
gaacattcctggggaatcag

SEQ ID NO: 59248 - DNA, 20 bp, synthetic construct
  source 1..20: mol_type = other DNA
cacctaagcagcatctgaca

SEQ ID NO: 59249 - DNA, 20 bp, synthetic construct
  source 1..20: mol_type = other DNA
cccagacactccttgtgtgc

SEQ ID NO: 59250 - DNA, 20 bp, synthetic construct
  source 1..20: mol_type = other DNA
cgatcttgggccggccatag

SEQ ID NO: 59251 - DNA, 20 bp, synthetic construct
  source 1..20: mol_type = other DNA
cgccacagctccatggctac

SEQ ID NO: 59252 - DNA, 20 bp, synthetic construct
  source 1..20: mol_type = other DNA
tgagccagagactggtccta

SEQ ID NO: 59253 - DNA, 20 bp, synthetic construct
  source 1..20: mol_type = other DNA
actcgtaccttgcccatgtc

SEQ ID NO: 59254 - DNA, 20 bp, synthetic construct
  source 1..20: mol_type = other DNA
cgagcgcatgaggtcctcat

SEQ ID NO: 59255 - DNA, 20 bp, synthetic construct
  source 1..20: mol_type = other DNA
cagcggtagccctgatagaa

SEQ ID NO: 59256 - DNA, 20 bp, synthetic construct
  source 1..20: mol_type = other DNA
gacagggtgtagatgacctg

SEQ ID NO: 59257 - DNA, 20 bp, synthetic construct
  source 1..20: mol_type = other DNA
agcagtttgagatggccatg

SEQ ID NO: 59258 - DNA, 20 bp, synthetic construct
  source 1..20: mol_type = other DNA
ctcaccctcatggcatccag

SEQ ID NO: 59259 - DNA, 20 bp, synthetic construct
  source 1..20: mol_type = other DNA
ggatggtgtccttctgtgtc

SEQ ID NO: 59260 - DNA, 20 bp, synthetic construct
  source 1..20: mol_type = other DNA
agcatctgacaggccttgca

SEQ ID NO: 59261 - DNA, 20 bp, synthetic construct
  source 1..20: mol_type = other DNA
gttgcaggggcttcaagaaa

SEQ ID NO: 59262 - DNA, 20 bp, synthetic construct
  source 1..20: mol_type = other DNA
gctcacctgggacatctggg

SEQ ID NO: 59263 - DNA, 20 bp, synthetic construct
  source 1..20: mol_type = other DNA
ggcgcccacctgctggatgg

SEQ ID NO: 59264 - DNA, 20 bp, synthetic construct
  source 1..20: mol_type = other DNA
cagacggaggagaagtacac

SEQ ID NO: 59265 - DNA, 20 bp, synthetic construct
  source 1..20: mol_type = other DNA
gcaggaaggcatacctggaa

SEQ ID NO: 59266 - DNA, 20 bp, synthetic construct
  source 1..20: mol_type = other DNA
ctcgatcaggaggaacatgt

SEQ ID NO: 59267 - DNA, 20 bp, synthetic construct
  source 1..20: mol_type = other DNA
gagatggccatgtgagtccc

SEQ ID NO: 59268 - DNA, 20 bp, synthetic construct
  source 1..20: mol_type = other DNA
gtaaaactccaccagctcct

SEQ ID NO: 59269 - DNA, 20 bp, synthetic construct
  source 1..20: mol_type = other DNA
tggctccactgcagggaagc

SEQ ID NO: 59270 - DNA, 20 bp, synthetic construct
  source 1..20: mol_type = other DNA
cagacagggtgtagatgacc

SEQ ID NO: 59271 - DNA, 20 bp, synthetic construct
  source 1..20: mol_type = other DNA
cttaccgtaagcccccggaa

SEQ ID NO: 59272 - DNA, 20 bp, synthetic construct
  source 1..20: mol_type = other DNA
gaggaggatgaggacctgta

SEQ ID NO: 59273 - DNA, 20 bp, synthetic construct
  source 1..20: mol_type = other DNA
aggagatgaaggaagccctg

SEQ ID NO: 59274 - DNA, 20 bp, synthetic construct
  source 1..20: mol_type = other DNA
cagagctgtcgctcaaggag

SEQ ID NO: 59275 - DNA, 20 bp, synthetic construct
  source 1..20: mol_type = other DNA
agccacatgttcctcctgat

SEQ ID NO: 59276 - DNA, 20 bp, synthetic construct
  source 1..20: mol_type = other DNA
gcctggcacctggagaagga

SEQ ID NO: 59277 - DNA, 20 bp, synthetic construct
  source 1..20: mol_type = other DNA
caaggtggtgtccagagact

SEQ ID NO: 59278 - DNA, 20 bp, synthetic construct
  source 1..20: mol_type = other DNA
cggcactggatgagccagtg

SEQ ID NO: 59279 - DNA, 20 bp, synthetic construct
  source 1..20: mol_type = other DNA
tattcttagggccctcctca

SEQ ID NO: 59280 - DNA, 20 bp, synthetic construct
  source 1..20: mol_type = other DNA
cgagatctatgaggacctca

SEQ ID NO: 59281 - DNA, 20 bp, synthetic construct
  source 1..20: mol_type = other DNA
catcagcaggtcccgcaggg

SEQ ID NO: 59282 - DNA, 20 bp, synthetic construct
  source 1..20: mol_type = other DNA
tcacagcaggtggacaggaa

SEQ ID NO: 59283 - DNA, 20 bp, synthetic construct
  source 1..20: mol_type = other DNA
acagctggaaattggtgatc

SEQ ID NO: 59284 - DNA, 20 bp, synthetic construct
  source 1..20: mol_type = other DNA
ccatggagctgtggcgccaa

SEQ ID NO: 59285 - DNA, 20 bp, synthetic construct
  source 1..20: mol_type = other DNA
cctccaggtctgcccaagat

SEQ ID NO: 59286 - DNA, 20 bp, synthetic construct
  source 1..20: mol_type = other DNA
gaggacctgtatgactgcgt

SEQ ID NO: 59287 - DNA, 20 bp, synthetic construct
  source 1..20: mol_type = other DNA
cctgtacctcccaccagttc

SEQ ID NO: 59288 - DNA, 20 bp, synthetic construct
  source 1..20: mol_type = other DNA
gacccttaccgtaagccccc

SEQ ID NO: 59289 - DNA, 20 bp, synthetic construct
  source 1..20: mol_type = other DNA
cacaaggagtgtctggggag

SEQ ID NO: 59290 - DNA, 20 bp, synthetic construct
  source 1..20: mol_type = other DNA
gtgtagatgacctgtgacgg

SEQ ID NO: 59291 - DNA, 20 bp, synthetic construct
  source 1..20: mol_type = other DNA
agatctatgaggacctcatg

SEQ ID NO: 59292 - DNA, 20 bp, synthetic construct
  source 1..20: mol_type = other DNA
ctccccaggacctggctcag

SEQ ID NO: 59293 - DNA, 20 bp, synthetic construct
  source 1..20: mol_type = other DNA
cggcagcacccggcactgga

SEQ ID NO: 59294 - DNA, 20 bp, synthetic construct
  source 1..20: mol_type = other DNA
aatggacagctggaaattgg

SEQ ID NO: 59295 - DNA, 20 bp, synthetic construct
  source 1..20: mol_type = other DNA
ttccccaggaatgttctcag

SEQ ID NO: 59296 - DNA, 20 bp, synthetic construct
  source 1..20: mol_type = other DNA
accatcagcaggtcccgcag

SEQ ID NO: 59297 - DNA, 20 bp, synthetic construct
  source 1..20: mol_type = other DNA
tgaagaaggtaagactttcc

SEQ ID NO: 59298 - DNA, 20 bp, synthetic construct
  source 1..20: mol_type = other DNA
tgggcagacctggaggacag

SEQ ID NO: 59299 - DNA, 20 bp, synthetic construct
  source 1..20: mol_type = other DNA
acctcccaccagttctgttc

SEQ ID NO: 59300 - DNA, 20 bp, synthetic construct
  source 1..20: mol_type = other DNA
gccagctccaacatctatcc

SEQ ID NO: 59301 - DNA, 20 bp, synthetic construct
  source 1..20: mol_type = other DNA
tagacgaggaacctacaggg

SEQ ID NO: 59302 - DNA, 20 bp, synthetic construct
  source 1..20: mol_type = other DNA
aagaagtggatggagcagtt

SEQ ID NO: 59303 - DNA, 20 bp, synthetic construct
  source 1..20: mol_type = other DNA
ggggtagcaggttgttaagc

SEQ ID NO: 59304 - DNA, 20 bp, synthetic construct
  source 1..20: mol_type = other DNA
cctgatagaaggtacctctg

SEQ ID NO: 59305 - DNA, 20 bp, synthetic construct
  source 1..20: mol_type = other DNA
ctcacagttcctgtgcctta

SEQ ID NO: 59306 - DNA, 20 bp, synthetic construct
  source 1..20: mol_type = other DNA
gcccccagatgtcccaggtg

SEQ ID NO: 59307 - DNA, 20 bp, synthetic construct
  source 1..20: mol_type = other DNA
tctactcaccagagatgaac

SEQ ID NO: 59308 - DNA, 20 bp, synthetic construct
  source 1..20: mol_type = other DNA
agaaggacaccatcccggag

SEQ ID NO: 59309 - DNA, 20 bp, synthetic construct
  source 1..20: mol_type = other DNA
gctgcagtagcggccataga

SEQ ID NO: 59310 - DNA, 20 bp, synthetic construct
  source 1..20: mol_type = other DNA
tccttccaggtatgccttcc

SEQ ID NO: 59311 - DNA, 20 bp, synthetic construct
  source 1..20: mol_type = other DNA
gcttaggtgagaatctggga

SEQ ID NO: 59312 - DNA, 20 bp, synthetic construct
  source 1..20: mol_type = other DNA
cagtttgagatggccatgtg

SEQ ID NO: 59313 - DNA, 20 bp, synthetic construct
  source 1..20: mol_type = other DNA
accagctcctgagagaacca

SEQ ID NO: 59314 - DNA, 20 bp, synthetic construct
  source 1..20: mol_type = other DNA
ctcctcaaaggagaacatct

SEQ ID NO: 59315 - DNA, 20 bp, synthetic construct
  source 1..20: mol_type = other DNA
atggcagcggtagccctgat

SEQ ID NO: 59316 - DNA, 20 bp, synthetic construct
  source 1..20: mol_type = other DNA
gtcacaggtcatctacaccc

SEQ ID NO: 59317 - DNA, 20 bp, synthetic construct
  source 1..20: mol_type = other DNA
agctcaccttgccaaaatcc

SEQ ID NO: 59318 - DNA, 20 bp, synthetic construct
  source 1..20: mol_type = other DNA
ccatcttgggcagacctgga

SEQ ID NO: 59319 - DNA, 20 bp, synthetic construct
  source 1..20: mol_type = other DNA
ttcatctgcacgtcctcccg

SEQ ID NO: 59320 - DNA, 20 bp, synthetic construct
  source 1..20: mol_type = other DNA
cttgaggccgaacttctcac

SEQ ID NO: 59321 - DNA, 20 bp, synthetic construct
  source 1..20: mol_type = other DNA
gggcggcagcacccggcact

SEQ ID NO: 59322 - DNA, 20 bp, synthetic construct
  source 1..20: mol_type = other DNA
tgcagatgaagctggaggtg

SEQ ID NO: 59323 - DNA, 20 bp, synthetic construct
  source 1..20: mol_type = other DNA
cacagcgacacggtggagga

SEQ ID NO: 59324 - DNA, 20 bp, synthetic construct
  source 1..20: mol_type = other DNA
actgcataggaccagtctct

SEQ ID NO: 59325 - DNA, 20 bp, synthetic construct
  source 1..20: mol_type = other DNA
gaaggttctaatgttcttaa

SEQ ID NO: 59326 - DNA, 20 bp, synthetic construct
  source 1..20: mol_type = other DNA
tccgagtaggacctgcttcg

SEQ ID NO: 59327 - DNA, 20 bp, synthetic construct
  source 1..20: mol_type = other DNA
cgaggtcaagcgagacaacg

SEQ ID NO: 59328 - DNA, 20 bp, synthetic construct
  source 1..20: mol_type = other DNA
aacgaggtcaagcgagacaa

SEQ ID NO: 59329 - DNA, 20 bp, synthetic construct
  source 1..20: mol_type = other DNA
caagaaatgctgcggggaag

SEQ ID NO: 59330 - DNA, 20 bp, synthetic construct
  source 1..20: mol_type = other DNA
ccgctactgcagccaggtgg

SEQ ID NO: 59331 - DNA, 20 bp, synthetic construct
  source 1..20: mol_type = other DNA
cacgtagttggcagggaacc

SEQ ID NO: 59332 - DNA, 20 bp, synthetic construct
  source 1..20: mol_type = other DNA
ctggctcagtgcgtgaacga

SEQ ID NO: 59333 - DNA, 20 bp, synthetic construct
  source 1..20: mol_type = other DNA
gggctatgagctgttcttca

SEQ ID NO: 59334 - DNA, 20 bp, synthetic construct
  source 1..20: mol_type = other DNA
gtcgatcttgggccggccat

SEQ ID NO: 59335 - DNA, 20 bp, synthetic construct
  source 1..20: mol_type = other DNA
tacaaggagaggtgagaccc

SEQ ID NO: 59336 - DNA, 20 bp, synthetic construct
  source 1..20: mol_type = other DNA
acagctccatggctaccgcc

SEQ ID NO: 59337 - DNA, 20 bp, synthetic construct
  source 1..20: mol_type = other DNA
cttaacaacctgctacccca

SEQ ID NO: 59338 - DNA, 20 bp, synthetic construct
  source 1..20: mol_type = other DNA
acacgaagcaggtcctactc

SEQ ID NO: 59339 - DNA, 20 bp, synthetic construct
  source 1..20: mol_type = other DNA
ttaacaagaagggacagcaa

SEQ ID NO: 59340 - DNA, 20 bp, synthetic construct
  source 1..20: mol_type = other DNA
gtcctcgatcaggaggaaca

SEQ ID NO: 59341 - DNA, 20 bp, synthetic construct
  source 1..20: mol_type = other DNA
gccatagtgagccagagact

SEQ ID NO: 59342 - DNA, 20 bp, synthetic construct
  source 1..20: mol_type = other DNA
ggaggagaagtacactgaca

SEQ ID NO: 59343 - DNA, 20 bp, synthetic construct
  source 1..20: mol_type = other DNA
aaacacacgcaggaggcgat

SEQ ID NO: 59344 - DNA, 20 bp, synthetic construct
  source 1..20: mol_type = other DNA
aaggcacaggaactgtgagg

SEQ ID NO: 59345 - DNA, 20 bp, synthetic construct
  source 1..20: mol_type = other DNA
cagagcagacagggtgtaga

SEQ ID NO: 59346 - DNA, 20 bp, synthetic construct
  source 1..20: mol_type = other DNA
cgcaccaagaaagtcccgtc

SEQ ID NO: 59347 - DNA, 20 bp, synthetic construct
  source 1..20: mol_type = other DNA
gaacatctggaagtcatgcc

SEQ ID NO: 59348 - DNA, 20 bp, synthetic construct
  source 1..20: mol_type = other DNA
gtgaaggatgcagcagaatt

SEQ ID NO: 59349 - DNA, 20 bp, synthetic construct
  source 1..20: mol_type = other DNA
cacatgatccccctgttctg

SEQ ID NO: 59350 - DNA, 20 bp, synthetic construct
  source 1..20: mol_type = other DNA
ggacctgctgatggtgccta

SEQ ID NO: 59351 - DNA, 20 bp, synthetic construct
  source 1..20: mol_type = other DNA
ccctggatgccatgagggtg

SEQ ID NO: 59352 - DNA, 20 bp, synthetic construct
  source 1..20: mol_type = other DNA
tccacccacctgtccatctt

SEQ ID NO: 59353 - DNA, 20 bp, synthetic construct
  source 1..20: mol_type = other DNA
ccccaggacctggctcagtg

SEQ ID NO: 59354 - DNA, 20 bp, synthetic construct
  source 1..20: mol_type = other DNA
gcagcacccggcactggatg

SEQ ID NO: 59355 - DNA, 20 bp, synthetic construct
  source 1..20: mol_type = other DNA
tgcgtgaacgaggtcaagcg

SEQ ID NO: 59356 - DNA, 20 bp, synthetic construct
  source 1..20: mol_type = other DNA
gacttgaagcaatcctttag

SEQ ID NO: 59357 - DNA, 20 bp, synthetic construct
  source 1..20: mol_type = other DNA
agaagtacactgacacgctg

SEQ ID NO: 59358 - DNA, 20 bp, synthetic construct
  source 1..20: mol_type = other DNA
cctcaaggactttgtaaacc

SEQ ID NO: 59359 - DNA, 20 bp, synthetic construct
  source 1..20: mol_type = other DNA
tccaggtatgccttcctgct

SEQ ID NO: 59360 - DNA, 20 bp, synthetic construct
  source 1..20: mol_type = other DNA
aggagaacatctggaagtca

SEQ ID NO: 59361 - DNA, 20 bp, synthetic construct
  source 1..20: mol_type = other DNA
cgcccacctccagcttcatc

SEQ ID NO: 59362 - DNA, 20 bp, synthetic construct
  source 1..20: mol_type = other DNA
ccgcaggcagcagcagcgct

SEQ ID NO: 59363 - DNA, 20 bp, synthetic construct
  source 1..20: mol_type = other DNA
ccaggacctggctcagtgcg

SEQ ID NO: 59364 - DNA, 20 bp, synthetic construct
  source 1..20: mol_type = other DNA
gttgatggcatggggtagca

SEQ ID NO: 59365 - DNA, 20 bp, synthetic construct
  source 1..20: mol_type = other DNA
cgggagatccagcagacgga

SEQ ID NO: 59366 - DNA, 20 bp, synthetic construct
  source 1..20: mol_type = other DNA
gtccgaccagatcgagtgag

SEQ ID NO: 59367 - DNA, 20 bp, synthetic construct
  source 1..20: mol_type = other DNA
agcactcactcgatctggtc

SEQ ID NO: 59368 - DNA, 20 bp, synthetic construct
  source 1..20: mol_type = other DNA
tatgaggacctcatgcgctc

SEQ ID NO: 59369 - DNA, 20 bp, synthetic construct
  source 1..20: mol_type = other DNA
tgacaggccttgcaggatgt

SEQ ID NO: 59370 - DNA, 20 bp, synthetic construct
  source 1..20: mol_type = other DNA
gaactcaagatcacctcggt

SEQ ID NO: 59371 - DNA, 20 bp, synthetic construct
  source 1..20: mol_type = other DNA
aaatatcacctccttctcca

SEQ ID NO: 59372 - DNA, 20 bp, synthetic construct
  source 1..20: mol_type = other DNA
ggtgatatttgagaactcgc

SEQ ID NO: 59373 - DNA, 20 bp, synthetic construct
  source 1..20: mol_type = other DNA
gcttgacctcgttcacgcac

SEQ ID NO: 59374 - DNA, 20 bp, synthetic construct
  source 1..20: mol_type = other DNA
tggtgggaggtacaggctgg

SEQ ID NO: 59375 - DNA, 20 bp, synthetic construct
  source 1..20: mol_type = other DNA
ggagtctcccctgcgcttac

SEQ ID NO: 59376 - DNA, 20 bp, synthetic construct
  source 1..20: mol_type = other DNA
atgaagacctggtagagatt

SEQ ID NO: 59377 - DNA, 20 bp, synthetic construct
  source 1..20: mol_type = other DNA
gaggtcataggagtctcccc

SEQ ID NO: 59378 - DNA, 20 bp, synthetic construct
  source 1..20: mol_type = other DNA
caggtacgcaggccccatgg

SEQ ID NO: 59379 - DNA, 20 bp, synthetic construct
  source 1..20: mol_type = other DNA
cccaggcccttccccaccga

SEQ ID NO: 59380 - DNA, 20 bp, synthetic construct
  source 1..20: mol_type = other DNA
ctgtccgaccagatcgagtg

SEQ ID NO: 59381 - DNA, 20 bp, synthetic construct
  source 1..20: mol_type = other DNA
cgcctcaccaggttctcaat

SEQ ID NO: 59382 - DNA, 20 bp, synthetic construct
  source 1..20: mol_type = other DNA
gatgagccagtgggtgcatt

SEQ ID NO: 59383 - DNA, 20 bp, synthetic construct
  source 1..20: mol_type = other DNA
ttaagtaactcctttctccc

SEQ ID NO: 59384 - DNA, 20 bp, synthetic construct
  source 1..20: mol_type = other DNA
caggatgtggtctcctcaaa

SEQ ID NO: 59385 - DNA, 20 bp, synthetic construct
  source 1..20: mol_type = other DNA
ccgcagggtgaacctcccgt

SEQ ID NO: 59386 - DNA, 20 bp, synthetic construct
  source 1..20: mol_type = other DNA
tgcacacaaggagtgtctgg

SEQ ID NO: 59387 - DNA, 20 bp, synthetic construct
  source 1..20: mol_type = other DNA
ggagaaggaggtgatatttg

SEQ ID NO: 59388 - DNA, 20 bp, synthetic construct
  source 1..20: mol_type = other DNA
ctggagaaggaggtgatatt

SEQ ID NO: 59389 - DNA, 20 bp, synthetic construct
  source 1..20: mol_type = other DNA
aggtcacgcggtggctgggc

SEQ ID NO: 59390 - DNA, 20 bp, synthetic construct
  source 1..20: mol_type = other DNA
aagaacagctcatagccctg

SEQ ID NO: 59391 - DNA, 20 bp, synthetic construct
  source 1..20: mol_type = other DNA
tgaggtcaacctgcgccccc

SEQ ID NO: 59392 - DNA, 20 bp, synthetic construct
  source 1..20: mol_type = other DNA
aggatgaggacctgtatgac

SEQ ID NO: 59393 - DNA, 20 bp, synthetic construct
  source 1..20: mol_type = other DNA
agggtgaacctcccgttgtt

SEQ ID NO: 59394 - DNA, 20 bp, synthetic construct
  source 1..20: mol_type = other DNA
attctcacctaagcagcatc

SEQ ID NO: 59395 - DNA, 20 bp, synthetic construct
  source 1..20: mol_type = other DNA
ccgaacctggaagctgtgca

SEQ ID NO: 59396 - DNA, 20 bp, synthetic construct
  source 1..20: mol_type = other DNA
gccctgatagaaggtacctc

SEQ ID NO: 59397 - DNA, 20 bp, synthetic construct
  source 1..20: mol_type = other DNA
acgaggaacctacagggaga

SEQ ID NO: 59398 - DNA, 20 bp, synthetic construct
  source 1..20: mol_type = other DNA
ggtgatctgtcgcagtgtct

SEQ ID NO: 59399 - DNA, 20 bp, synthetic construct
  source 1..20: mol_type = other DNA
taaagatgatctcaatgtct

SEQ ID NO: 59400 - DNA, 20 bp, synthetic construct
  source 1..20: mol_type = other DNA
ggtggacaggaaggttctaa

SEQ ID NO: 59401 - DNA, 20 bp, synthetic construct
  source 1..20: mol_type = other DNA
gccaggatgctctctgcccc

SEQ ID NO: 59402 - DNA, 20 bp, synthetic construct
  source 1..20: mol_type = other DNA
caggaactgtgaggagacag

SEQ ID NO: 59403 - DNA, 20 bp, synthetic construct
  source 1..20: mol_type = other DNA
tcagggctaccgctgccatc

SEQ ID NO: 59404 - DNA, 20 bp, synthetic construct
  source 1..20: mol_type = other DNA
ggacctgtctgttcatctct

SEQ ID NO: 59405 - DNA, 20 bp, synthetic construct
  source 1..20: mol_type = other DNA
acagatgagtagagctttgt

SEQ ID NO: 59406 - DNA, 20 bp, synthetic construct
  source 1..20: mol_type = other DNA
ccggcaccgatggcagcggt

SEQ ID NO: 59407 - DNA, 20 bp, synthetic construct
  source 1..20: mol_type = other DNA
ccaggacagagcagacaggg

SEQ ID NO: 59408 - DNA, 20 bp, synthetic construct
  source 1..20: mol_type = other DNA
tggatggagcccagcgtgtc

SEQ ID NO: 59409 - DNA, 20 bp, synthetic construct
  source 1..20: mol_type = other DNA
gatggagcccagcgtgtcag

SEQ ID NO: 59410 - DNA, 20 bp, synthetic construct
  source 1..20: mol_type = other DNA
tcagagagccaacaacggga

SEQ ID NO: 59411 - DNA, 20 bp, synthetic construct
  source 1..20: mol_type = other DNA
cccagccaccgcgtgacctg

SEQ ID NO: 59412 - DNA, 20 bp, synthetic construct
  source 1..20: mol_type = other DNA
ttccagatgttctcctttga

SEQ ID NO: 59413 - DNA, 20 bp, synthetic construct
  source 1..20: mol_type = other DNA
gaggaggagagtgtaggtga

SEQ ID NO: 59414 - DNA, 20 bp, synthetic construct
  source 1..20: mol_type = other DNA
cgggcgcagaagtcatagcg

SEQ ID NO: 59415 - DNA, 20 bp, synthetic construct
  source 1..20: mol_type = other DNA
ggtcaacctgcgcccccaga

SEQ ID NO: 59416 - DNA, 20 bp, synthetic construct
  source 1..20: mol_type = other DNA
caggttgacctcacgcaggt

SEQ ID NO: 59417 - DNA, 20 bp, synthetic construct
  source 1..20: mol_type = other DNA
gttcatactcacttcctaaa

SEQ ID NO: 59418 - DNA, 20 bp, synthetic construct
  source 1..20: mol_type = other DNA
aggagaggtgagacccagct

SEQ ID NO: 59419 - DNA, 20 bp, synthetic construct
  source 1..20: mol_type = other DNA
catgatccccctgttctggg

SEQ ID NO: 59420 - DNA, 20 bp, synthetic construct
  source 1..20: mol_type = other DNA
cacatggagggaccctcccc

SEQ ID NO: 59421 - DNA, 20 bp, synthetic construct
  source 1..20: mol_type = other DNA
gccaacctggaaacagacga

SEQ ID NO: 59422 - DNA, 20 bp, synthetic construct
  source 1..20: mol_type = other DNA
ggacagagcagacagggtgt

SEQ ID NO: 59423 - DNA, 20 bp, synthetic construct
  source 1..20: mol_type = other DNA
ccccaggaatgttctcagag

SEQ ID NO: 59424 - DNA, 20 bp, synthetic construct
  source 1..20: mol_type = other DNA
gaattgaagaagaagtggat

SEQ ID NO: 59425 - DNA, 20 bp, synthetic construct
  source 1..20: mol_type = other DNA
ccgaacttctcacagcaggt

SEQ ID NO: 59426 - DNA, 20 bp, synthetic construct
  source 1..20: mol_type = other DNA
ggaactgcaaggtggtgtcc

SEQ ID NO: 59427 - DNA, 20 bp, synthetic construct
  source 1..20: mol_type = other DNA
ccaggtctgcccaagatgga

SEQ ID NO: 59428 - DNA, 20 bp, synthetic construct
  source 1..20: mol_type = other DNA
ggagcagtttgagatggcca

SEQ ID NO: 59429 - DNA, 20 bp, synthetic construct
  source 1..20: mol_type = other DNA
cgcactgagccaggtcctgg

SEQ ID NO: 59430 - DNA, 20 bp, synthetic construct
  source 1..20: mol_type = other DNA
acacagaaggacaccatccc

SEQ ID NO: 59431 - DNA, 20 bp, synthetic construct
  source 1..20: mol_type = other DNA
gctgcttaggtgagaatctg

SEQ ID NO: 59432 - DNA, 20 bp, synthetic construct
  source 1..20: mol_type = other DNA
ctggatctcccgcaggcagc

SEQ ID NO: 59433 - DNA, 20 bp, synthetic construct
  source 1..20: mol_type = other DNA
gtagcaggttgttaagcagc

SEQ ID NO: 59434 - DNA, 20 bp, synthetic construct
  source 1..20: mol_type = other DNA
gtctcacctctccttgtatt

SEQ ID NO: 59435 - DNA, 20 bp, synthetic construct
  source 1..20: mol_type = other DNA
gtacttctcctccgtctgct

SEQ ID NO: 59436 - DNA, 20 bp, synthetic construct
  source 1..20: mol_type = other DNA
tccttgaaggggaactgcaa

SEQ ID NO: 59437 - DNA, 20 bp, synthetic construct
  source 1..20: mol_type = other DNA
ttgaaggggaactgcaaggt

SEQ ID NO: 59438 - DNA, 20 bp, synthetic construct
  source 1..20: mol_type = other DNA
cctccatcttgggcagacct

SEQ ID NO: 59439 - DNA, 20 bp, synthetic construct
  source 1..20: mol_type = other DNA
ctgggacatctgggggcgca

SEQ ID NO: 59440 - DNA, 20 bp, synthetic construct
  source 1..20: mol_type = other DNA
tcgaggaccaaggtgcccag

SEQ ID NO: 59441 - DNA, 20 bp, synthetic construct
  source 1..20: mol_type = other DNA
agcgacacggtggaggagga

SEQ ID NO: 59442 - DNA, 20 bp, synthetic construct
  source 1..20: mol_type = other DNA
ggtcataggagtctcccctg

SEQ ID NO: 59443 - DNA, 20 bp, synthetic construct
  source 1..20: mol_type = other DNA
aagcgcaggggagactccta

SEQ ID NO: 59444 - DNA, 20 bp, synthetic construct
  source 1..20: mol_type = other DNA
cacgcaccggcatggacacg

SEQ ID NO: 59445 - DNA, 20 bp, synthetic construct
  source 1..20: mol_type = other DNA
gccaaaatcctgcacatcga

SEQ ID NO: 59446 - DNA, 20 bp, synthetic construct
  source 1..20: mol_type = other DNA
ggagatccagcagacggagg

SEQ ID NO: 59447 - DNA, 20 bp, synthetic construct
  source 1..20: mol_type = other DNA
gtttcaggaaccgttgcagg

SEQ ID NO: 59448 - DNA, 20 bp, synthetic construct
  source 1..20: mol_type = other DNA
ttgacctcacgcaggttgat

SEQ ID NO: 59449 - DNA, 20 bp, synthetic construct
  source 1..20: mol_type = other DNA
ctccccagacactccttgtg

SEQ ID NO: 59450 - DNA, 20 bp, synthetic construct
  source 1..20: mol_type = other DNA
gttaagcagctgacacagaa

SEQ ID NO: 59451 - DNA, 20 bp, synthetic construct
  source 1..20: mol_type = other DNA
gcgcaggttgacctcacgca

SEQ ID NO: 59452 - DNA, 20 bp, synthetic construct
  source 1..20: mol_type = other DNA
tccgggatggtgtccttctg

SEQ ID NO: 59453 - DNA, 20 bp, synthetic construct
  source 1..20: mol_type = other DNA
ggcatccagggccagccgca

SEQ ID NO: 59454 - DNA, 20 bp, synthetic construct
  source 1..20: mol_type = other DNA
gagaacattcctggggaatc

SEQ ID NO: 59455 - DNA, 20 bp, synthetic construct
  source 1..20: mol_type = other DNA
ggccgctactgcagccaggt

SEQ ID NO: 59456 - DNA, 20 bp, synthetic construct
  source 1..20: mol_type = other DNA
atcgagtgagtgctcaggcc

SEQ ID NO: 59457 - DNA, 20 bp, synthetic construct
  source 1..20: mol_type = other DNA
cttgaagcaatcctttagag

SEQ ID NO: 59458 - DNA, 20 bp, synthetic construct
  source 1..20: mol_type = other DNA
ttaaggcacaggaactgtga

SEQ ID NO: 59459 - DNA, 20 bp, synthetic construct
  source 1..20: mol_type = other DNA
gctccactgcagggaagcag

SEQ ID NO: 59460 - DNA, 20 bp, synthetic construct
  source 1..20: mol_type = other DNA
catagacgaggaacctacag

SEQ ID NO: 59461 - DNA, 20 bp, synthetic construct
  source 1..20: mol_type = other DNA
cacccacctgtccatcttgg

SEQ ID NO: 59462 - DNA, 20 bp, synthetic construct
  source 1..20: mol_type = other DNA
ccgagaccgatcagagctgt

SEQ ID NO: 59463 - DNA, 20 bp, synthetic construct
  source 1..20: mol_type = other DNA
gggcaaggtacgagtgggag

SEQ ID NO: 59464 - DNA, 20 bp, synthetic construct
  source 1..20: mol_type = other DNA
tgtcttgaagaacagctcat

SEQ ID NO: 59465 - DNA, 20 bp, synthetic construct
  source 1..20: mol_type = other DNA
ttcgaagagctcgctccgct

SEQ ID NO: 59466 - DNA, 20 bp, synthetic construct
  source 1..20: mol_type = other DNA
gatagaaggtacctctgaga

SEQ ID NO: 59467 - DNA, 20 bp, synthetic construct
  source 1..20: mol_type = other DNA
tgcaggtacgcaggccccat

SEQ ID NO: 59468 - DNA, 20 bp, synthetic construct
  source 1..20: mol_type = other DNA
aactccaccagctcctagaa

SEQ ID NO: 59469 - DNA, 20 bp, synthetic construct
  source 1..20: mol_type = other DNA
ctgctggatctcccgcaggc

SEQ ID NO: 59470 - DNA, 20 bp, synthetic construct
  source 1..20: mol_type = other DNA
cgcaggttctccttctccat

SEQ ID NO: 59471 - DNA, 20 bp, synthetic construct
  source 1..20: mol_type = other DNA
ctcatagccctgggcacctt

SEQ ID NO: 59472 - DNA, 20 bp, synthetic construct
  source 1..20: mol_type = other DNA
tcgagcaggaaggcatacct

SEQ ID NO: 59473 - DNA, 20 bp, synthetic construct
  source 1..20: mol_type = other DNA
tagagattggctgcgccagg

SEQ ID NO: 59474 - DNA, 20 bp, synthetic construct
  source 1..20: mol_type = other DNA
ccccccaggcccttccccac

SEQ ID NO: 59475 - DNA, 20 bp, synthetic construct
  source 1..20: mol_type = other DNA
ggaggaacatgtggctccac

SEQ ID NO: 59476 - DNA, 20 bp, synthetic construct
  source 1..20: mol_type = other DNA
gaagcaggtcctactcggag

SEQ ID NO: 59477 - DNA, 20 bp, synthetic construct
  source 1..20: mol_type = other DNA
gggaagggcctggggggtca

SEQ ID NO: 59478 - DNA, 20 bp, synthetic construct
  source 1..20: mol_type = other DNA
gtggagccacatgttcctcc

SEQ ID NO: 59479 - DNA, 20 bp, synthetic construct
  source 1..20: mol_type = other DNA
gaagaggtcaaaggcttcga

SEQ ID NO: 59480 - DNA, 20 bp, synthetic construct
  source 1..20: mol_type = other DNA
gcactggatgagccagtggg

SEQ ID NO: 59481 - DNA, 20 bp, synthetic construct
  source 1..20: mol_type = other DNA
cttacagatgagtagagctt

SEQ ID NO: 59482 - DNA, 20 bp, synthetic construct
  source 1..20: mol_type = other DNA
caagaagggacagcaaggct

SEQ ID NO: 59483 - DNA, 20 bp, synthetic construct
  source 1..20: mol_type = other DNA
agtggccagcgtctgggaga

SEQ ID NO: 59484 - DNA, 20 bp, synthetic construct
  source 1..20: mol_type = other DNA
agagcagccgaccagcctgg

SEQ ID NO: 59485 - DNA, 20 bp, synthetic construct
  source 1..20: mol_type = other DNA
ggggtggagtagacaagctg

SEQ ID NO: 59486 - DNA, 20 bp, synthetic construct
  source 1..20: mol_type = other DNA
cgagaaccagcgactctttg

SEQ ID NO: 59487 - DNA, 20 bp, synthetic construct
  source 1..20: mol_type = other DNA
ctggaggagggtggagggta

SEQ ID NO: 59488 - DNA, 20 bp, synthetic construct
  source 1..20: mol_type = other DNA
ggaggtgaggaggccacagg

SEQ ID NO: 59489 - DNA, 20 bp, synthetic construct
  source 1..20: mol_type = other DNA
ctcagcctcccagagtgctg

SEQ ID NO: 59490 - DNA, 20 bp, synthetic construct
  source 1..20: mol_type = other DNA
agtagacaagctgtgagtac

SEQ ID NO: 59491 - DNA, 20 bp, synthetic construct
  source 1..20: mol_type = other DNA
aggtacagctgaacaactgc

SEQ ID NO: 59492 - DNA, 20 bp, synthetic construct
  source 1..20: mol_type = other DNA
cgaagcacacagccccacaa

SEQ ID NO: 59493 - DNA, 20 bp, synthetic construct
  source 1..20: mol_type = other DNA
tgagtacagctcctgttccc

SEQ ID NO: 59494 - DNA, 20 bp, synthetic construct
  source 1..20: mol_type = other DNA
cacgagaaccagcgactctt

SEQ ID NO: 59495 - DNA, 20 bp, synthetic construct
  source 1..20: mol_type = other DNA
ggtggagtagacaagctgtg

SEQ ID NO: 59496 - DNA, 20 bp, synthetic construct
  source 1..20: mol_type = other DNA
ggaacaggagctgtactcac

SEQ ID NO: 59497 - DNA, 20 bp, synthetic construct
  source 1..20: mol_type = other DNA
tggaccaaggagcattgtgg

SEQ ID NO: 59498 - DNA, 20 bp, synthetic construct
  source 1..20: mol_type = other DNA
gctctcacttgaatccactg

SEQ ID NO: 59499 - DNA, 20 bp, synthetic construct
  source 1..20: mol_type = other DNA
agctcaccggaggagtggat

SEQ ID NO: 59500 - DNA, 20 bp, synthetic construct
  source 1..20: mol_type = other DNA
gggtggagggtatgttctgc

SEQ ID NO: 59501 - DNA, 20 bp, synthetic construct
  source 1..20: mol_type = other DNA
tcacttacatctccagcgaa

SEQ ID NO: 59502 - DNA, 20 bp, synthetic construct
  source 1..20: mol_type = other DNA
tgttcccagagcagccgacc

SEQ ID NO: 59503 - DNA, 20 bp, synthetic construct
  source 1..20: mol_type = other DNA
ggtcacctgaaggccgtaaa

SEQ ID NO: 59504 - DNA, 20 bp, synthetic construct
  source 1..20: mol_type = other DNA
ccgcagatctgggtcgaggt

SEQ ID NO: 59505 - DNA, 20 bp, synthetic construct
  source 1..20: mol_type = other DNA
ggagggtggagggtatgttc

SEQ ID NO: 59506 - DNA, 20 bp, synthetic construct
  source 1..20: mol_type = other DNA
tcagccccgcttggcagtcc

SEQ ID NO: 59507 - DNA, 20 bp, synthetic construct
  source 1..20: mol_type = other DNA
gaggcccagctcaccgacgc

SEQ ID NO: 59508 - DNA, 20 bp, synthetic construct
  source 1..20: mol_type = other DNA
tttagaggtctcggcgtcgg

SEQ ID NO: 59509 - DNA, 20 bp, synthetic construct
  source 1..20: mol_type = other DNA
agtacagctcctgttcccag

SEQ ID NO: 59510 - DNA, 20 bp, synthetic construct
  source 1..20: mol_type = other DNA
ggagatgtaagtgatcaacc

SEQ ID NO: 59511 - DNA, 20 bp, synthetic construct
  source 1..20: mol_type = other DNA
ggcaggaagcagatcgacgt

SEQ ID NO: 59512 - DNA, 20 bp, synthetic construct
  source 1..20: mol_type = other DNA
gcgctcgatgggaaagtggt

SEQ ID NO: 59513 - DNA, 20 bp, synthetic construct
  source 1..20: mol_type = other DNA
ccacggtcaggaagtcgggg

SEQ ID NO: 59514 - DNA, 20 bp, synthetic construct
  source 1..20: mol_type = other DNA
cggaagttgatgcattcggg

SEQ ID NO: 59515 - DNA, 20 bp, synthetic construct
  source 1..20: mol_type = other DNA
ccgctcaagtggtacgcacc

SEQ ID NO: 59516 - DNA, 20 bp, synthetic construct
  source 1..20: mol_type = other DNA
cctgcagctggtggagtatc

SEQ ID NO: 59517 - DNA, 20 bp, synthetic construct
  source 1..20: mol_type = other DNA
caggaagagcccgtccgcca

SEQ ID NO: 59518 - DNA, 20 bp, synthetic construct
  source 1..20: mol_type = other DNA
tgagtgcgtacagttcgggt

SEQ ID NO: 59519 - DNA, 20 bp, synthetic construct
  source 1..20: mol_type = other DNA
ctgatgaggtagtggtacac

SEQ ID NO: 59520 - DNA, 20 bp, synthetic construct
  source 1..20: mol_type = other DNA
ggtgcatgatctgcgcctcg

SEQ ID NO: 59521 - DNA, 20 bp, synthetic construct
  source 1..20: mol_type = other DNA
ggtaccacagcagcctgacg

SEQ ID NO: 59522 - DNA, 20 bp, synthetic construct
  source 1..20: mol_type = other DNA
gcccagcgagcgcaggcact

SEQ ID NO: 59523 - DNA, 20 bp, synthetic construct
  source 1..20: mol_type = other DNA
ccgctcacctggctcagggg

SEQ ID NO: 59524 - DNA, 20 bp, synthetic construct
  source 1..20: mol_type = other DNA
ccatggacacctggtgcagc

SEQ ID NO: 59525 - DNA, 20 bp, synthetic construct
  source 1..20: mol_type = other DNA
gccagcttcaggtgctcctc

SEQ ID NO: 59526 - DNA, 20 bp, synthetic construct
  source 1..20: mol_type = other DNA
cgcatcatctcttccgtgtc

SEQ ID NO: 59527 - DNA, 20 bp, synthetic construct
  source 1..20: mol_type = other DNA
ggacaacccctacatcgtgc

SEQ ID NO: 59528 - DNA, 20 bp, synthetic construct
  source 1..20: mol_type = other DNA
cggtacacgccctggcgcac

SEQ ID NO: 59529 - DNA, 20 bp, synthetic construct
  source 1..20: mol_type = other DNA
ggatacacccctgagccagg

SEQ ID NO: 59530 - DNA, 20 bp, synthetic construct
  source 1..20: mol_type = other DNA
gccaggctgaggccgcggaa

SEQ ID NO: 59531 - DNA, 20 bp, synthetic construct
  source 1..20: mol_type = other DNA
gaggaggttatcgcgcttca

SEQ ID NO: 59532 - DNA, 20 bp, synthetic construct
  source 1..20: mol_type = other DNA
acaggaacttgccgtcggtc

SEQ ID NO: 59533 - DNA, 20 bp, synthetic construct
  source 1..20: mol_type = other DNA
acagttcgggtggacactct

SEQ ID NO: 59534 - DNA, 20 bp, synthetic construct
  source 1..20: mol_type = other DNA
tgccagagcgtgtcaaactt

SEQ ID NO: 59535 - DNA, 20 bp, synthetic construct
  source 1..20: mol_type = other DNA
cctccagcttccacgtctgg

SEQ ID NO: 59536 - DNA, 20 bp, synthetic construct
  source 1..20: mol_type = other DNA
gcaccaggtgtccatgggga

SEQ ID NO: 59537 - DNA, 20 bp, synthetic construct
  source 1..20: mol_type = other DNA
gagcagaagatgaaagggcc

SEQ ID NO: 59538 - DNA, 20 bp, synthetic construct
  source 1..20: mol_type = other DNA
gagtgactgctggatctaca

SEQ ID NO: 59539 - DNA, 20 bp, synthetic construct
  source 1..20: mol_type = other DNA
gccagaccccgcggcgcacc

SEQ ID NO: 59540 - DNA, 20 bp, synthetic construct
  source 1..20: mol_type = other DNA
ccccagggaggagatccctg

SEQ ID NO: 59541 - DNA, 20 bp, synthetic construct
  source 1..20: mol_type = other DNA
gcgggcaagtactgcattcc

SEQ ID NO: 59542 - DNA, 20 bp, synthetic construct
  source 1..20: mol_type = other DNA
ctcggccacattgctcacag

SEQ ID NO: 59543 - DNA, 20 bp, synthetic construct
  source 1..20: mol_type = other DNA
gttgcagggcagcccgtcgg

SEQ ID NO: 59544 - DNA, 20 bp, synthetic construct
  source 1..20: mol_type = other DNA
ccagagcgtgtcaaacttgg

SEQ ID NO: 59545 - DNA, 20 bp, synthetic construct
  source 1..20: mol_type = other DNA
cagctggacaacccctacat

SEQ ID NO: 59546 - DNA, 20 bp, synthetic construct
  source 1..20: mol_type = other DNA
gccaagttcaatgtcagcta

SEQ ID NO: 59547 - DNA, 20 bp, synthetic construct
  source 1..20: mol_type = other DNA
catggtgaccccatagctcc

SEQ ID NO: 59548 - DNA, 20 bp, synthetic construct
  source 1..20: mol_type = other DNA
tttgtgcaccgtgacctggc

SEQ ID NO: 59549 - DNA, 20 bp, synthetic construct
  source 1..20: mol_type = other DNA
caggcactggcgcagcagga

SEQ ID NO: 59550 - DNA, 20 bp, synthetic construct
  source 1..20: mol_type = other DNA
ggcagcccgtcggggtcgcg

SEQ ID NO: 59551 - DNA, 20 bp, synthetic construct
  source 1..20: mol_type = other DNA
aagcggatggagtgcccacc

SEQ ID NO: 59552 - DNA, 20 bp, synthetic construct
  source 1..20: mol_type = other DNA
gtgcagcagctcggccacat

SEQ ID NO: 59553 - DNA, 20 bp, synthetic construct
  source 1..20: mol_type = other DNA
ccagagtaaagtttgcgctc

SEQ ID NO: 59554 - DNA, 20 bp, synthetic construct
  source 1..20: mol_type = other DNA
ccaggctgtagtaacaggct

SEQ ID NO: 59555 - DNA, 20 bp, synthetic construct
  source 1..20: mol_type = other DNA
gctgatcttggcgtagtgcc

SEQ ID NO: 59556 - DNA, 20 bp, synthetic construct
  source 1..20: mol_type = other DNA
atggggatgaagtacctgga

SEQ ID NO: 59557 - DNA, 20 bp, synthetic construct
  source 1..20: mol_type = other DNA
tcaggctgctgtggtaccag

SEQ ID NO: 59558 - DNA, 20 bp, synthetic construct
  source 1..20: mol_type = other DNA
accagcaggacgttgcgggc

SEQ ID NO: 59559 - DNA, 20 bp, synthetic construct
  source 1..20: mol_type = other DNA
agatccagcagtcactcatg

SEQ ID NO: 59560 - DNA, 20 bp, synthetic construct
  source 1..20: mol_type = other DNA
tacctggaggagaagaactt

SEQ ID NO: 59561 - DNA, 20 bp, synthetic construct
  source 1..20: mol_type = other DNA
ttgagcggccacttccctgc

SEQ ID NO: 59562 - DNA, 20 bp, synthetic construct
  source 1..20: mol_type = other DNA
atgaccagcatgagggcctc

SEQ ID NO: 59563 - DNA, 20 bp, synthetic construct
  source 1..20: mol_type = other DNA
gcagctggtggagtatctga

SEQ ID NO: 59564 - DNA, 20 bp, synthetic construct
  source 1..20: mol_type = other DNA
accagctgcagggagcaggc

SEQ ID NO: 59565 - DNA, 20 bp, synthetic construct
  source 1..20: mol_type = other DNA
gcaggcctccttcaggcagt

SEQ ID NO: 59566 - DNA, 20 bp, synthetic construct
  source 1..20: mol_type = other DNA
tcatccccatggacacctgg

SEQ ID NO: 59567 - DNA, 20 bp, synthetic construct
  source 1..20: mol_type = other DNA
ccgtcacctgaggcgttgct

SEQ ID NO: 59568 - DNA, 20 bp, synthetic construct
  source 1..20: mol_type = other DNA
tgtagtaacaggctcgcatg

SEQ ID NO: 59569 - DNA, 20 bp, synthetic construct
  source 1..20: mol_type = other DNA
agcgactttggcctctccaa

SEQ ID NO: 59570 - DNA, 20 bp, synthetic construct
  source 1..20: mol_type = other DNA
tgtccagctggtgcatgatc

SEQ ID NO: 59571 - DNA, 20 bp, synthetic construct
  source 1..20: mol_type = other DNA
cacttgagcggccacttccc

SEQ ID NO: 59572 - DNA, 20 bp, synthetic construct
  source 1..20: mol_type = other DNA
tcgggaatgcagtacttgcc

SEQ ID NO: 59573 - DNA, 20 bp, synthetic construct
  source 1..20: mol_type = other DNA
ctccacggtcaggaagtcgg

SEQ ID NO: 59574 - DNA, 20 bp, synthetic construct
  source 1..20: mol_type = other DNA
gcgcttcaggaagagcttct

SEQ ID NO: 59575 - DNA, 20 bp, synthetic construct
  source 1..20: mol_type = other DNA
ggcacccagtgctttggaga

SEQ ID NO: 59576 - DNA, 20 bp, synthetic construct
  source 1..20: mol_type = other DNA
gacagcacatagccgcccag

SEQ ID NO: 59577 - DNA, 20 bp, synthetic construct
  source 1..20: mol_type = other DNA
gtgactgctggatctacaag

SEQ ID NO: 59578 - DNA, 20 bp, synthetic construct
  source 1..20: mol_type = other DNA
ccttgatggccacgtcgatc

SEQ ID NO: 59579 - DNA, 20 bp, synthetic construct
  source 1..20: mol_type = other DNA
gcattcgggtgcgtaccact

SEQ ID NO: 59580 - DNA, 20 bp, synthetic construct
  source 1..20: mol_type = other DNA
ggcgatgccagaccccgcgg

SEQ ID NO: 59581 - DNA, 20 bp, synthetic construct
  source 1..20: mol_type = other DNA
atccagcagtcactcatgag

SEQ ID NO: 59582 - DNA, 20 bp, synthetic construct
  source 1..20: mol_type = other DNA
ctccagccgcagcgatgtct

SEQ ID NO: 59583 - DNA, 20 bp, synthetic construct
  source 1..20: mol_type = other DNA
cactcacttgtagatccagc

SEQ ID NO: 59584 - DNA, 20 bp, synthetic construct
  source 1..20: mol_type = other DNA
cctggcagacgccaatgagc

SEQ ID NO: 59585 - DNA, 20 bp, synthetic construct
  source 1..20: mol_type = other DNA
taccagggcatccgctcgtg

SEQ ID NO: 59586 - DNA, 20 bp, synthetic construct
  source 1..20: mol_type = other DNA
gtggaagcgcacatcgtgca

SEQ ID NO: 59587 - DNA, 20 bp, synthetic construct
  source 1..20: mol_type = other DNA
tcagcttcagatactccacc

SEQ ID NO: 59588 - DNA, 20 bp, synthetic construct
  source 1..20: mol_type = other DNA
acagtgtagtagctgtcgtc

SEQ ID NO: 59589 - DNA, 20 bp, synthetic construct
  source 1..20: mol_type = other DNA
gtgtatgagagcccctacag

SEQ ID NO: 59590 - DNA, 20 bp, synthetic construct
  source 1..20: mol_type = other DNA
cttcaggcagtagatgagcc

SEQ ID NO: 59591 - DNA, 20 bp, synthetic construct
  source 1..20: mol_type = other DNA
ccaggtgtccatggggatga

SEQ ID NO: 59592 - DNA, 20 bp, synthetic construct
  source 1..20: mol_type = other DNA
cccatggacacgagcgtgta

SEQ ID NO: 59593 - DNA, 20 bp, synthetic construct
  source 1..20: mol_type = other DNA
agatgagcccgtccgccttc

SEQ ID NO: 59594 - DNA, 20 bp, synthetic construct
  source 1..20: mol_type = other DNA
ccatcaaggtgctgaagcag

SEQ ID NO: 59595 - DNA, 20 bp, synthetic construct
  source 1..20: mol_type = other DNA
ctacaagtgagtgccagtgg

SEQ ID NO: 59596 - DNA, 20 bp, synthetic construct
  source 1..20: mol_type = other DNA
cctacaaggcaggcgcgggc

SEQ ID NO: 59597 - DNA, 20 bp, synthetic construct
  source 1..20: mol_type = other DNA
agcgatgtctggagctatgg

SEQ ID NO: 59598 - DNA, 20 bp, synthetic construct
  source 1..20: mol_type = other DNA
cgcttccaccactttcccat

SEQ ID NO: 59599 - DNA, 20 bp, synthetic construct
  source 1..20: mol_type = other DNA
ctggtgcatgatctgcgcct

SEQ ID NO: 59600 - DNA, 20 bp, synthetic construct
  source 1..20: mol_type = other DNA
aggccaaagtcgctgatctt

SEQ ID NO: 59601 - DNA, 20 bp, synthetic construct
  source 1..20: mol_type = other DNA
caggaagagcttcttgtcct

SEQ ID NO: 59602 - DNA, 20 bp, synthetic construct
  source 1..20: mol_type = other DNA
tccccaggcccgctcagcag

SEQ ID NO: 59603 - DNA, 20 bp, synthetic construct
  source 1..20: mol_type = other DNA
tcatgagtgcgtacagttcg

SEQ ID NO: 59604 - DNA, 20 bp, synthetic construct
  source 1..20: mol_type = other DNA
tcgggcaggaagcagatcga

SEQ ID NO: 59605 - DNA, 20 bp, synthetic construct
  source 1..20: mol_type = other DNA
agctatggggtcaccatgtg

SEQ ID NO: 59606 - DNA, 20 bp, synthetic construct
  source 1..20: mol_type = other DNA
taccacagcagcctgacgcg

SEQ ID NO: 59607 - DNA, 20 bp, synthetic construct
  source 1..20: mol_type = other DNA
aatgagccgcacgatgtagg

SEQ ID NO: 59608 - DNA, 20 bp, synthetic construct
  source 1..20: mol_type = other DNA
gcagggcagcccgtcggggt

SEQ ID NO: 59609 - DNA, 20 bp, synthetic construct
  source 1..20: mol_type = other DNA
agtaacaggctcgcatgcgc

SEQ ID NO: 59610 - DNA, 20 bp, synthetic construct
  source 1..20: mol_type = other DNA
gtagatccagcagtcactca

SEQ ID NO: 59611 - DNA, 20 bp, synthetic construct
  source 1..20: mol_type = other DNA
gatgagggacagggcgtatg

SEQ ID NO: 59612 - DNA, 20 bp, synthetic construct
  source 1..20: mol_type = other DNA
cctcagcctggcaggggaag

SEQ ID NO: 59613 - DNA, 20 bp, synthetic construct
  source 1..20: mol_type = other DNA
ggacaaggcctcccacatgg

SEQ ID NO: 59614 - DNA, 20 bp, synthetic construct
  source 1..20: mol_type = other DNA
atactccaccagctgcaggg

SEQ ID NO: 59615 - DNA, 20 bp, synthetic construct
  source 1..20: mol_type = other DNA
taggacaaggcctcccacat

SEQ ID NO: 59616 - DNA, 20 bp, synthetic construct
  source 1..20: mol_type = other DNA
ttaaccagcaggacgttgcg

SEQ ID NO: 59617 - DNA, 20 bp, synthetic construct
  source 1..20: mol_type = other DNA
caccccagggaggagatccc

SEQ ID NO: 59618 - DNA, 20 bp, synthetic construct
  source 1..20: mol_type = other DNA
gccagaagccctacaaggca

SEQ ID NO: 59619 - DNA, 20 bp, synthetic construct
  source 1..20: mol_type = other DNA
cacctccagcttccacgtct

SEQ ID NO: 59620 - DNA, 20 bp, synthetic construct
  source 1..20: mol_type = other DNA
tagatgagggacagggcgta

SEQ ID NO: 59621 - DNA, 20 bp, synthetic construct
  source 1..20: mol_type = other DNA
ctggccaggctgtagtaaca

SEQ ID NO: 59622 - DNA, 20 bp, synthetic construct
  source 1..20: mol_type = other DNA
caggaacttgtgcagcggcc

SEQ ID NO: 59623 - DNA, 20 bp, synthetic construct
  source 1..20: mol_type = other DNA
ccagacatcgctgcggctgg

SEQ ID NO: 59624 - DNA, 20 bp, synthetic construct
  source 1..20: mol_type = other DNA
cgcactcatgagtgactgct

SEQ ID NO: 59625 - DNA, 20 bp, synthetic construct
  source 1..20: mol_type = other DNA
ctggtaccacagcagcctga

SEQ ID NO: 59626 - DNA, 20 bp, synthetic construct
  source 1..20: mol_type = other DNA
ttcaggtgctcctcggcctc

SEQ ID NO: 59627 - DNA, 20 bp, synthetic construct
  source 1..20: mol_type = other DNA
ccagcagtcactcatgagtg

SEQ ID NO: 59628 - DNA, 20 bp, synthetic construct
  source 1..20: mol_type = other DNA
cttcatccccatggacacct

SEQ ID NO: 59629 - DNA, 20 bp, synthetic construct
  source 1..20: mol_type = other DNA
gcagacgccaatgagccgca

SEQ ID NO: 59630 - DNA, 20 bp, synthetic construct
  source 1..20: mol_type = other DNA
gcagagctctgccggtccac

SEQ ID NO: 59631 - DNA, 20 bp, synthetic construct
  source 1..20: mol_type = other DNA
cgcagcaggaagagcccgtc

SEQ ID NO: 59632 - DNA, 20 bp, synthetic construct
  source 1..20: mol_type = other DNA
gtgtatccatctgagttgag

SEQ ID NO: 59633 - DNA, 20 bp, synthetic construct
  source 1..20: mol_type = other DNA
cagcacatagccgcccagcg

SEQ ID NO: 59634 - DNA, 20 bp, synthetic construct
  source 1..20: mol_type = other DNA
cgtgacctggcggcccgcaa

SEQ ID NO: 59635 - DNA, 20 bp, synthetic construct
  source 1..20: mol_type = other DNA
gcaagtactgcattcccgag

SEQ ID NO: 59636 - DNA, 20 bp, synthetic construct
  source 1..20: mol_type = other DNA
ccagcgagcgcaggcactgg

SEQ ID NO: 59637 - DNA, 20 bp, synthetic construct
  source 1..20: mol_type = other DNA
ggcactggcgcagcaggaag

SEQ ID NO: 59638 - DNA, 20 bp, synthetic construct
  source 1..20: mol_type = other DNA
ctccagacatcgctgcggct

SEQ ID NO: 59639 - DNA, 20 bp, synthetic construct
  source 1..20: mol_type = other DNA
gctcaggcacaggcagcctc

SEQ ID NO: 59640 - DNA, 20 bp, synthetic construct
  source 1..20: mol_type = other DNA
ggcatccgctcgtgggccgt

SEQ ID NO: 59641 - DNA, 20 bp, synthetic construct
  source 1..20: mol_type = other DNA
tccaggtacttcatccccat

SEQ ID NO: 59642 - DNA, 20 bp, synthetic construct
  source 1..20: mol_type = other DNA
cacaaagttcttctcctcca

SEQ ID NO: 59643 - DNA, 20 bp, synthetic construct
  source 1..20: mol_type = other DNA
cggctatgtgctgtcgctcg

SEQ ID NO: 59644 - DNA, 20 bp, synthetic construct
  source 1..20: mol_type = other DNA
ggcccacgagcggatgccct

SEQ ID NO: 59645 - DNA, 20 bp, synthetic construct
  source 1..20: mol_type = other DNA
ctggcgcactgagccaaagt

SEQ ID NO: 59646 - DNA, 20 bp, synthetic construct
  source 1..20: mol_type = other DNA
gtgcacgagcgacagcacat

SEQ ID NO: 59647 - DNA, 20 bp, synthetic construct
  source 1..20: mol_type = other DNA
gctggagaacttgcggaagt

SEQ ID NO: 59648 - DNA, 20 bp, synthetic construct
  source 1..20: mol_type = other DNA
gagcaggccatcatcagcca

SEQ ID NO: 59649 - DNA, 20 bp, synthetic construct
  source 1..20: mol_type = other DNA
agatactccaccagctgcag

SEQ ID NO: 59650 - DNA, 20 bp, synthetic construct
  source 1..20: mol_type = other DNA
gctcgcatgcgctgctccac

SEQ ID NO: 59651 - DNA, 20 bp, synthetic construct
  source 1..20: mol_type = other DNA
ggcggctatgtgctgtcgct

SEQ ID NO: 59652 - DNA, 20 bp, synthetic construct
  source 1..20: mol_type = other DNA
tccagctggtgcatgatctg

SEQ ID NO: 59653 - DNA, 20 bp, synthetic construct
  source 1..20: mol_type = other DNA
agcgcactgtggaccggcag

SEQ ID NO: 59654 - DNA, 20 bp, synthetic construct
  source 1..20: mol_type = other DNA
cgccaggtcacggtgcacaa

SEQ ID NO: 59655 - DNA, 20 bp, synthetic construct
  source 1..20: mol_type = other DNA
ttgtgcagcggcccgccccc

SEQ ID NO: 59656 - DNA, 20 bp, synthetic construct
  source 1..20: mol_type = other DNA
tttggagaggccaaagtcgc

SEQ ID NO: 59657 - DNA, 20 bp, synthetic construct
  source 1..20: mol_type = other DNA
cgcgcgagtagaactcgcag

SEQ ID NO: 59658 - DNA, 20 bp, synthetic construct
  source 1..20: mol_type = other DNA
ttgtagggcttctggccgta

SEQ ID NO: 59659 - DNA, 20 bp, synthetic construct
  source 1..20: mol_type = other DNA
tgtcaaacttggtgccctcg

SEQ ID NO: 59660 - DNA, 20 bp, synthetic construct
  source 1..20: mol_type = other DNA
agggaagtggccgctcaagt

SEQ ID NO: 59661 - DNA, 20 bp, synthetic construct
  source 1..20: mol_type = other DNA
ctcgatgggaaagtggtgga

SEQ ID NO: 59662 - DNA, 20 bp, synthetic construct
  source 1..20: mol_type = other DNA
tcttctacggcagcatctcg

SEQ ID NO: 59663 - DNA, 20 bp, synthetic construct
  source 1..20: mol_type = other DNA
caggacgttgcgggccgcca

SEQ ID NO: 59664 - DNA, 20 bp, synthetic construct
  source 1..20: mol_type = other DNA
cacaggtgggaggatcgccc

SEQ ID NO: 59665 - DNA, 20 bp, synthetic construct
  source 1..20: mol_type = other DNA
gtggtaccagggcatccgct

SEQ ID NO: 59666 - DNA, 20 bp, synthetic construct
  source 1..20: mol_type = other DNA
caacgtcctgctggttaacc

SEQ ID NO: 59667 - DNA, 20 bp, synthetic construct
  source 1..20: mol_type = other DNA
taccactacctcatcagcca

SEQ ID NO: 59668 - DNA, 20 bp, synthetic construct
  source 1..20: mol_type = other DNA
cgatgggaaagtggtggaag

SEQ ID NO: 59669 - DNA, 20 bp, synthetic construct
  source 1..20: mol_type = other DNA
tctggcaggtaggctgcccg

SEQ ID NO: 59670 - DNA, 20 bp, synthetic construct
  source 1..20: mol_type = other DNA
ctgagctcccgctgcccagg

SEQ ID NO: 59671 - DNA, 20 bp, synthetic construct
  source 1..20: mol_type = other DNA
ggggatgaagtacctggagg

SEQ ID NO: 59672 - DNA, 20 bp, synthetic construct
  source 1..20: mol_type = other DNA
gcggatggagtgcccaccag

SEQ ID NO: 59673 - DNA, 20 bp, synthetic construct
  source 1..20: mol_type = other DNA
tccaccagctgcagggagca

SEQ ID NO: 59674 - DNA, 20 bp, synthetic construct
  source 1..20: mol_type = other DNA
gacacctggtgcagcagctc

SEQ ID NO: 59675 - DNA, 20 bp, synthetic construct
  source 1..20: mol_type = other DNA
ctcgaggcccgacggccggt

SEQ ID NO: 59676 - DNA, 20 bp, synthetic construct
  source 1..20: mol_type = other DNA
cttccaccactttcccatcg

SEQ ID NO: 59677 - DNA, 20 bp, synthetic construct
  source 1..20: mol_type = other DNA
gctggacaacccctacatcg

SEQ ID NO: 59678 - DNA, 20 bp, synthetic construct
  source 1..20: mol_type = other DNA
ggagaacttgcggaagttga

SEQ ID NO: 59679 - DNA, 20 bp, synthetic construct
  source 1..20: mol_type = other DNA
ccatgcccgccagcttcagg

SEQ ID NO: 59680 - DNA, 20 bp, synthetic construct
  source 1..20: mol_type = other DNA
cccatagctccagacatcgc

SEQ ID NO: 59681 - DNA, 20 bp, synthetic construct
  source 1..20: mol_type = other DNA
gctgcaccaggtgtccatgg

SEQ ID NO: 59682 - DNA, 20 bp, synthetic construct
  source 1..20: mol_type = other DNA
ggcggacgggctcttcctgc

SEQ ID NO: 59683 - DNA, 20 bp, synthetic construct
  source 1..20: mol_type = other DNA
cacgagcgacagcacatagc

SEQ ID NO: 59684 - DNA, 20 bp, synthetic construct
  source 1..20: mol_type = other DNA
ggcgtaggtgccgttgagct

SEQ ID NO: 59685 - DNA, 20 bp, synthetic construct
  source 1..20: mol_type = other DNA
ctcccacatggtgaccccat

SEQ ID NO: 59686 - DNA, 20 bp, synthetic construct
  source 1..20: mol_type = other DNA
gcgacagcacatagccgccc

SEQ ID NO: 59687 - DNA, 20 bp, synthetic construct
  source 1..20: mol_type = other DNA
gccgcacctttcataccatc

SEQ ID NO: 59688 - DNA, 20 bp, synthetic construct
  source 1..20: mol_type = other DNA
ccggcacagctcggtcttgt

SEQ ID NO: 59689 - DNA, 20 bp, synthetic construct
  source 1..20: mol_type = other DNA
aggggcagaagccgatggta

SEQ ID NO: 59690 - DNA, 20 bp, synthetic construct
  source 1..20: mol_type = other DNA
tgcacatcaaatgcccacaa

SEQ ID NO: 59691 - DNA, 20 bp, synthetic construct
  source 1..20: mol_type = other DNA
ggcaagaggtgcacatcaaa

SEQ ID NO: 59692 - DNA, 20 bp, synthetic construct
  source 1..20: mol_type = other DNA
gtgcacatcaaatgcccaca

SEQ ID NO: 59693 - DNA, 20 bp, synthetic construct
  source 1..20: mol_type = other DNA
cggagcaggttgcccttctg

SEQ ID NO: 59694 - DNA, 20 bp, synthetic construct
  source 1..20: mol_type = other DNA
gcgagaaggcacgatcgcac

SEQ ID NO: 59695 - DNA, 20 bp, synthetic construct
  source 1..20: mol_type = other DNA
cttgaggatgccctcgacga

SEQ ID NO: 59696 - DNA, 20 bp, synthetic construct
  source 1..20: mol_type = other DNA
ccagcatgtgactgaagata

SEQ ID NO: 59697 - DNA, 20 bp, synthetic construct
  source 1..20: mol_type = other DNA
ctgccatgccgtaaggcaag

SEQ ID NO: 59698 - DNA, 20 bp, synthetic construct
  source 1..20: mol_type = other DNA
ggcatttgatgtgcacctct

SEQ ID NO: 59699 - DNA, 20 bp, synthetic construct
  source 1..20: mol_type = other DNA
gtcctcaggtggccagtgag

SEQ ID NO: 59700 - DNA, 20 bp, synthetic construct
  source 1..20: mol_type = other DNA
ggcccactgtcccaatcgag

SEQ ID NO: 59701 - DNA, 20 bp, synthetic construct
  source 1..20: mol_type = other DNA
gccgcagccgtcccagttgc

SEQ ID NO: 59702 - DNA, 20 bp, synthetic construct
  source 1..20: mol_type = other DNA
gagcaggttgcccttctggg

SEQ ID NO: 59703 - DNA, 20 bp, synthetic construct
  source 1..20: mol_type = other DNA
cccaggagaacggcccttcc

SEQ ID NO: 59704 - DNA, 20 bp, synthetic construct
  source 1..20: mol_type = other DNA
cttcttacctgtcctgtgac

SEQ ID NO: 59705 - DNA, 20 bp, synthetic construct
  source 1..20: mol_type = other DNA
atggcccactgtcccaatcg

SEQ ID NO: 59706 - DNA, 20 bp, synthetic construct
  source 1..20: mol_type = other DNA
cctaccggagtgcgtcctca

SEQ ID NO: 59707 - DNA, 20 bp, synthetic construct
  source 1..20: mol_type = other DNA
ccatgccgtaaggcaagagg

SEQ ID NO: 59708 - DNA, 20 bp, synthetic construct
  source 1..20: mol_type = other DNA
agcgccaggtgatcggagcg

SEQ ID NO: 59709 - DNA, 20 bp, synthetic construct
  source 1..20: mol_type = other DNA
cgatcacctggcgctgcaca

SEQ ID NO: 59710 - DNA, 20 bp, synthetic construct
  source 1..20: mol_type = other DNA
gataaggtctggtttaatgc

SEQ ID NO: 59711 - DNA, 20 bp, synthetic construct
  source 1..20: mol_type = other DNA
caggtgagaagccctaccac

SEQ ID NO: 59712 - DNA, 20 bp, synthetic construct
  source 1..20: mol_type = other DNA
ctggaatggccggtggcccg

SEQ ID NO: 59713 - DNA, 20 bp, synthetic construct
  source 1..20: mol_type = other DNA
tgccatgccgtaaggcaaga

SEQ ID NO: 59714 - DNA, 20 bp, synthetic construct
  source 1..20: mol_type = other DNA
gcccacctgtgtgcgtgcgc

SEQ ID NO: 59715 - DNA, 20 bp, synthetic construct
  source 1..20: mol_type = other DNA
ctgaagataagggacagttt

SEQ ID NO: 59716 - DNA, 20 bp, synthetic construct
  source 1..20: mol_type = other DNA
acctgccatgccgtaaggca

SEQ ID NO: 59717 - DNA, 20 bp, synthetic construct
  source 1..20: mol_type = other DNA
gccttcagatgcgaactctt

SEQ ID NO: 59718 - DNA, 20 bp, synthetic construct
  source 1..20: mol_type = other DNA
ccagccgcagccgtcccagt

SEQ ID NO: 59719 - DNA, 20 bp, synthetic construct
  source 1..20: mol_type = other DNA
gttgcactcaaaaggatcac

SEQ ID NO: 59720 - DNA, 20 bp, synthetic construct
  source 1..20: mol_type = other DNA
tggtccaaggacccttgatg

SEQ ID NO: 59721 - DNA, 20 bp, synthetic construct
  source 1..20: mol_type = other DNA
gccactaccgaaagcacacg

SEQ ID NO: 59722 - DNA, 20 bp, synthetic construct
  source 1..20: mol_type = other DNA
tagctgcaggtgtgagtggc

SEQ ID NO: 59723 - DNA, 20 bp, synthetic construct
  source 1..20: mol_type = other DNA
ctgaagatgagggacagttt

SEQ ID NO: 59724 - DNA, 20 bp, synthetic construct
  source 1..20: mol_type = other DNA
atggcactggaatggccggt

SEQ ID NO: 59725 - DNA, 20 bp, synthetic construct
  source 1..20: mol_type = other DNA
atcaatcagggcttgaaata

SEQ ID NO: 59726 - DNA, 20 bp, synthetic construct
  source 1..20: mol_type = other DNA
tgcgcagatgcgccttcaga

SEQ ID NO: 59727 - DNA, 20 bp, synthetic construct
  source 1..20: mol_type = other DNA
tccatggtacgatagttctg

SEQ ID NO: 59728 - DNA, 20 bp, synthetic construct
  source 1..20: mol_type = other DNA
ggaatgcagcttgatgtgcc

SEQ ID NO: 59729 - DNA, 20 bp, synthetic construct
  source 1..20: mol_type = other DNA
cagatggcactggaatggcc

SEQ ID NO: 59730 - DNA, 20 bp, synthetic construct
  source 1..20: mol_type = other DNA
tgcagaggtggcatttgaag

SEQ ID NO: 59731 - DNA, 20 bp, synthetic construct
  source 1..20: mol_type = other DNA
ccgcttgaggatgccctcga

SEQ ID NO: 59732 - DNA, 20 bp, synthetic construct
  source 1..20: mol_type = other DNA
tacttacaatccttccctgc

SEQ ID NO: 59733 - DNA, 20 bp, synthetic construct
  source 1..20: mol_type = other DNA
ggaatggccggtggcccgtg

SEQ ID NO: 59734 - DNA, 20 bp, synthetic construct
  source 1..20: mol_type = other DNA
tgtttaggagtcggatggtc

SEQ ID NO: 59735 - DNA, 20 bp, synthetic construct
  source 1..20: mol_type = other DNA
tatgagcacgagaaggacct

SEQ ID NO: 59736 - DNA, 20 bp, synthetic construct
  source 1..20: mol_type = other DNA
ccgcagcccgcgtagctgca

SEQ ID NO: 59737 - DNA, 20 bp, synthetic construct
  source 1..20: mol_type = other DNA
atccaggaagagcacccggc

SEQ ID NO: 59738 - DNA, 20 bp, synthetic construct
  source 1..20: mol_type = other DNA
ccaggaagagcacccggcag

SEQ ID NO: 59739 - DNA, 20 bp, synthetic construct
  source 1..20: mol_type = other DNA
tttccatggtacgatagttc

SEQ ID NO: 59740 - DNA, 20 bp, synthetic construct
  source 1..20: mol_type = other DNA
aagtcttaccttccgggttt

SEQ ID NO: 59741 - DNA, 20 bp, synthetic construct
  source 1..20: mol_type = other DNA
tgtggatggtgtacatgacg

SEQ ID NO: 59742 - DNA, 20 bp, synthetic construct
  source 1..20: mol_type = other DNA
gctttagctcatgtggaagc

SEQ ID NO: 59743 - DNA, 20 bp, synthetic construct
  source 1..20: mol_type = other DNA
cgcacttgtacaccttcatc

SEQ ID NO: 59744 - DNA, 20 bp, synthetic construct
  source 1..20: mol_type = other DNA
aatgacaaagatgtcaagat

SEQ ID NO: 59745 - DNA, 20 bp, synthetic construct
  source 1..20: mol_type = other DNA
atcttacagagctgaaaagt

SEQ ID NO: 59746 - DNA, 20 bp, synthetic construct
  source 1..20: mol_type = other DNA
gaagagcacccggcagtgtt

SEQ ID NO: 59747 - DNA, 20 bp, synthetic construct
  source 1..20: mol_type = other DNA
cttacagagctgaaaagtgg

SEQ ID NO: 59748 - DNA, 20 bp, synthetic construct
  source 1..20: mol_type = other DNA
gacgagcagcggctgtacaa

SEQ ID NO: 59749 - DNA, 20 bp, synthetic construct
  source 1..20: mol_type = other DNA
gctgcaggtgtgagtggcgg

SEQ ID NO: 59750 - DNA, 20 bp, synthetic construct
  source 1..20: mol_type = other DNA
ttatacctgccatgccgtaa

SEQ ID NO: 59751 - DNA, 20 bp, synthetic construct
  source 1..20: mol_type = other DNA
cgcacagatggcactggaat

SEQ ID NO: 59752 - DNA, 20 bp, synthetic construct
  source 1..20: mol_type = other DNA
gccagtgagggcgtccctcc

SEQ ID NO: 59753 - DNA, 20 bp, synthetic construct
  source 1..20: mol_type = other DNA
gctgcacatgaaacggcaca

SEQ ID NO: 59754 - DNA, 20 bp, synthetic construct
  source 1..20: mol_type = other DNA
tcaggtggttgactcaaaaa

SEQ ID NO: 59755 - DNA, 20 bp, synthetic construct
  source 1..20: mol_type = other DNA
cgccaggtgatcggagcgcg

SEQ ID NO: 59756 - DNA, 20 bp, synthetic construct
  source 1..20: mol_type = other DNA
cgccctcacctcctgcaggc

SEQ ID NO: 59757 - DNA, 20 bp, synthetic construct
  source 1..20: mol_type = other DNA
acgcacacaggtgggcggca

SEQ ID NO: 59758 - DNA, 20 bp, synthetic construct
  source 1..20: mol_type = other DNA
gaagacagaattatttacca

SEQ ID NO: 59759 - DNA, 20 bp, synthetic construct
  source 1..20: mol_type = other DNA
tgaaataagggcttgttatg

SEQ ID NO: 59760 - DNA, 20 bp, synthetic construct
  source 1..20: mol_type = other DNA
gcagtcctgcagaaggacag

SEQ ID NO: 59761 - DNA, 20 bp, synthetic construct
  source 1..20: mol_type = other DNA
tgagcacgagaaggacctgg

SEQ ID NO: 59762 - DNA, 20 bp, synthetic construct
  source 1..20: mol_type = other DNA
gttctagtgcactgacaggc

SEQ ID NO: 59763 - DNA, 20 bp, synthetic construct
  source 1..20: mol_type = other DNA
gtcgcacataacgcgagggg

SEQ ID NO: 59764 - DNA, 20 bp, synthetic construct
  source 1..20: mol_type = other DNA
gcactcacgctccagtccac

SEQ ID NO: 59765 - DNA, 20 bp, synthetic construct
  source 1..20: mol_type = other DNA
caatcagggcttgaaataag

SEQ ID NO: 59766 - DNA, 20 bp, synthetic construct
  source 1..20: mol_type = other DNA
gcagcgccaggtgatcggag

SEQ ID NO: 59767 - DNA, 20 bp, synthetic construct
  source 1..20: mol_type = other DNA
tccacagatgacacctttga

SEQ ID NO: 59768 - DNA, 20 bp, synthetic construct
  source 1..20: mol_type = other DNA
cccccaggacgtgttcctca

SEQ ID NO: 59769 - DNA, 20 bp, synthetic construct
  source 1..20: mol_type = other DNA
gcagcccgcgtagctgcagg

SEQ ID NO: 59770 - DNA, 20 bp, synthetic construct
  source 1..20: mol_type = other DNA
atgcccacaaggctcaatct

SEQ ID NO: 59771 - DNA, 20 bp, synthetic construct
  source 1..20: mol_type = other DNA
catgtggatggtgtacatga

SEQ ID NO: 59772 - DNA, 20 bp, synthetic construct
  source 1..20: mol_type = other DNA
ccctcacctcctgcaggccg

SEQ ID NO: 59773 - DNA, 20 bp, synthetic construct
  source 1..20: mol_type = other DNA
catttgaagggcttctcccc

SEQ ID NO: 59774 - DNA, 20 bp, synthetic construct
  source 1..20: mol_type = other DNA
gtagcagaagtccccggaca

SEQ ID NO: 59775 - DNA, 20 bp, synthetic construct
  source 1..20: mol_type = other DNA
ccagaagggcaacctgctcc

SEQ ID NO: 59776 - DNA, 20 bp, synthetic construct
  source 1..20: mol_type = other DNA
gaatgaggccccgcactgat

SEQ ID NO: 59777 - DNA, 20 bp, synthetic construct
  source 1..20: mol_type = other DNA
cacatcaagctgcattccgg

SEQ ID NO: 59778 - DNA, 20 bp, synthetic construct
  source 1..20: mol_type = other DNA
gctcaccgtgccgtcgcccc

SEQ ID NO: 59779 - DNA, 20 bp, synthetic construct
  source 1..20: mol_type = other DNA
gcacgccaggatccgcaggt

SEQ ID NO: 59780 - DNA, 20 bp, synthetic construct
  source 1..20: mol_type = other DNA
cgcactccggtaggtcccct

SEQ ID NO: 59781 - DNA, 20 bp, synthetic construct
  source 1..20: mol_type = other DNA
cgatggtgagcgggcgtggg

SEQ ID NO: 59782 - DNA, 20 bp, synthetic construct
  source 1..20: mol_type = other DNA
gcgagcacggctcctcgatc

SEQ ID NO: 59783 - DNA, 20 bp, synthetic construct
  source 1..20: mol_type = other DNA
caatggcccactgtcccaat

SEQ ID NO: 59784 - DNA, 20 bp, synthetic construct
  source 1..20: mol_type = other DNA
gtttcaggtcctggatcttg

SEQ ID NO: 59785 - DNA, 20 bp, synthetic construct
  source 1..20: mol_type = other DNA
gtggtgcacacgccctgcat

SEQ ID NO: 59786 - DNA, 20 bp, synthetic construct
  source 1..20: mol_type = other DNA
ctgggtactggcaacgactt

SEQ ID NO: 59787 - DNA, 20 bp, synthetic construct
  source 1..20: mol_type = other DNA
tgaagggcttctccccggaa

SEQ ID NO: 59788 - DNA, 20 bp, synthetic construct
  source 1..20: mol_type = other DNA
gctccagtccactgtactcc

SEQ ID NO: 59789 - DNA, 20 bp, synthetic construct
  source 1..20: mol_type = other DNA
gtgacacatccaggttacat

SEQ ID NO: 59790 - DNA, 20 bp, synthetic construct
  source 1..20: mol_type = other DNA
tgcaggctgcgcactttctt

SEQ ID NO: 59791 - DNA, 20 bp, synthetic construct
  source 1..20: mol_type = other DNA
aggaaagactggatgatctt

SEQ ID NO: 59792 - DNA, 20 bp, synthetic construct
  source 1..20: mol_type = other DNA
gtccagggtggagaggatcc

SEQ ID NO: 59793 - DNA, 20 bp, synthetic construct
  source 1..20: mol_type = other DNA
attattaccgtccaggcagt

SEQ ID NO: 59794 - DNA, 20 bp, synthetic construct
  source 1..20: mol_type = other DNA
gttgagggttcgggccaagt

SEQ ID NO: 59795 - DNA, 20 bp, synthetic construct
  source 1..20: mol_type = other DNA
ctctcaccttcccacagtgc

SEQ ID NO: 59796 - DNA, 20 bp, synthetic construct
  source 1..20: mol_type = other DNA
ggtgcttaccccaccccagt

SEQ ID NO: 59797 - DNA, 20 bp, synthetic construct
  source 1..20: mol_type = other DNA
ttctcagctggataaggtct

SEQ ID NO: 59798 - DNA, 20 bp, synthetic construct
  source 1..20: mol_type = other DNA
tgtgacacatccaggttaca

SEQ ID NO: 59799 - DNA, 20 bp, synthetic construct
  source 1..20: mol_type = other DNA
ccactcaccaacgacgtcat

SEQ ID NO: 59800 - DNA, 20 bp, synthetic construct
  source 1..20: mol_type = other DNA
ggcagtagctttgcgatttc

SEQ ID NO: 59801 - DNA, 20 bp, synthetic construct
  source 1..20: mol_type = other DNA
gacggagggccacatgtaga

SEQ ID NO: 59802 - DNA, 20 bp, synthetic construct
  source 1..20: mol_type = other DNA
cattaaaccagaccttatcc

SEQ ID NO: 59803 - DNA, 20 bp, synthetic construct
  source 1..20: mol_type = other DNA
aaccagatgtgctccccata

SEQ ID NO: 59804 - DNA, 20 bp, synthetic construct
  source 1..20: mol_type = other DNA
tccccgacaagtcttcgacc

SEQ ID NO: 59805 - DNA, 20 bp, synthetic construct
  source 1..20: mol_type = other DNA
ggagaggtggcataaccact

SEQ ID NO: 59806 - DNA, 20 bp, synthetic construct
  source 1..20: mol_type = other DNA
ggcccttaccaggcttgatg

SEQ ID NO: 59807 - DNA, 20 bp, synthetic construct
  source 1..20: mol_type = other DNA
ggtgcacacgccctgcatcg

SEQ ID NO: 59808 - DNA, 20 bp, synthetic construct
  source 1..20: mol_type = other DNA
ccggcacagctcggtcttgt

SEQ ID NO: 59809 - DNA, 20 bp, synthetic construct
  source 1..20: mol_type = other DNA
ctcactgcctgcttgcacca

SEQ ID NO: 59810 - DNA, 20 bp, synthetic construct
  source 1..20: mol_type = other DNA
ttgcaccacgagcagctgat

SEQ ID NO: 59811 - DNA, 20 bp, synthetic construct
  source 1..20: mol_type = other DNA
tcaatcagggcttgaaataa

SEQ ID NO: 59812 - DNA, 20 bp, synthetic construct
  source 1..20: mol_type = other DNA
tgcaggtgtgagtggcggtg

SEQ ID NO: 59813 - DNA, 20 bp, synthetic construct
  source 1..20: mol_type = other DNA
ggtggatggcgagccctgca

SEQ ID NO: 59814 - DNA, 20 bp, synthetic construct
  source 1..20: mol_type = other DNA
catgaggaacacgtcctggg

SEQ ID NO: 59815 - DNA, 20 bp, synthetic construct
  source 1..20: mol_type = other DNA
tggaactccagggtgacgtg

SEQ ID NO: 59816 - DNA, 20 bp, synthetic construct
  source 1..20: mol_type = other DNA
actcacaggcctccttgagc

SEQ ID NO: 59817 - DNA, 20 bp, synthetic construct
  source 1..20: mol_type = other DNA
caggtactgtgcgggcacca

SEQ ID NO: 59818 - DNA, 20 bp, synthetic construct
  source 1..20: mol_type = other DNA
cttaccccaccccagttgag

SEQ ID NO: 59819 - DNA, 20 bp, synthetic construct
  source 1..20: mol_type = other DNA
gggtccacgattatgggctc

SEQ ID NO: 59820 - DNA, 20 bp, synthetic construct
  source 1..20: mol_type = other DNA
ataccagaggaaagactgga

SEQ ID NO: 59821 - DNA, 20 bp, synthetic construct
  source 1..20: mol_type = other DNA
gctatattttccggttaagt

SEQ ID NO: 59822 - DNA, 20 bp, synthetic construct
  source 1..20: mol_type = other DNA
gtcttaccttccgggtttgg

SEQ ID NO: 59823 - DNA, 20 bp, synthetic construct
  source 1..20: mol_type = other DNA
ccacaggagcacctcaacta

SEQ ID NO: 59824 - DNA, 20 bp, synthetic construct
  source 1..20: mol_type = other DNA
cccgctcaccaccactcgga

SEQ ID NO: 59825 - DNA, 20 bp, synthetic construct
  source 1..20: mol_type = other DNA
tcctttaggtcttgtgataa

SEQ ID NO: 59826 - DNA, 20 bp, synthetic construct
  source 1..20: mol_type = other DNA
catacagctccccagacccc

SEQ ID NO: 59827 - DNA, 20 bp, synthetic construct
  source 1..20: mol_type = other DNA
ccttaccaggcttgatgaga

SEQ ID NO: 59828 - DNA, 20 bp, synthetic construct
  source 1..20: mol_type = other DNA
cgtcagccgctcgccgtgtc

SEQ ID NO: 59829 - DNA, 20 bp, synthetic construct
  source 1..20: mol_type = other DNA
acgccaggatccgcaggttg

SEQ ID NO: 59830 - DNA, 20 bp, synthetic construct
  source 1..20: mol_type = other DNA
cctcaggatgaccaactctt

SEQ ID NO: 59831 - DNA, 20 bp, synthetic construct
  source 1..20: mol_type = other DNA
tttacctgaacctctgaatt

SEQ ID NO: 59832 - DNA, 20 bp, synthetic construct
  source 1..20: mol_type = other DNA
ctcccccagggctacacaga

SEQ ID NO: 59833 - DNA, 20 bp, synthetic construct
  source 1..20: mol_type = other DNA
gcgcttacctgggtacagtg

SEQ ID NO: 59834 - DNA, 20 bp, synthetic construct
  source 1..20: mol_type = other DNA
cttccagccgcagccgtccc

SEQ ID NO: 59835 - DNA, 20 bp, synthetic construct
  source 1..20: mol_type = other DNA
ggtgaagccaatgacctcga

SEQ ID NO: 59836 - DNA, 20 bp, synthetic construct
  source 1..20: mol_type = other DNA
tatgccacctctccctacat

SEQ ID NO: 59837 - DNA, 20 bp, synthetic construct
  source 1..20: mol_type = other DNA
ctcacatatgatgaagttaa

SEQ ID NO: 59838 - DNA, 20 bp, synthetic construct
  source 1..20: mol_type = other DNA
gcggcaggcgtagttgcaga

SEQ ID NO: 59839 - DNA, 20 bp, synthetic construct
  source 1..20: mol_type = other DNA
cccgcacgccaggatccgca

SEQ ID NO: 59840 - DNA, 20 bp, synthetic construct
  source 1..20: mol_type = other DNA
gcgccatggccgggacccgg

SEQ ID NO: 59841 - DNA, 20 bp, synthetic construct
  source 1..20: mol_type = other DNA
cagatgggcagaaatcgcaa

SEQ ID NO: 59842 - DNA, 20 bp, synthetic construct
  source 1..20: mol_type = other DNA
gcccaggctgaagtagttgt

SEQ ID NO: 59843 - DNA, 20 bp, synthetic construct
  source 1..20: mol_type = other DNA
ccatctgttccccagtctct

SEQ ID NO: 59844 - DNA, 20 bp, synthetic construct
  source 1..20: mol_type = other DNA
gggagaggatcttggacaca

SEQ ID NO: 59845 - DNA, 20 bp, synthetic construct
  source 1..20: mol_type = other DNA
ggcacttactaggaaatctc

SEQ ID NO: 59846 - DNA, 20 bp, synthetic construct
  source 1..20: mol_type = other DNA
cctcgaggtagccgtcgtca

SEQ ID NO: 59847 - DNA, 20 bp, synthetic construct
  source 1..20: mol_type = other DNA
gaggatccagcccacctggg

SEQ ID NO: 59848 - DNA, 20 bp, synthetic construct
  source 1..20: mol_type = other DNA
gtcagagaaagctgtctgtg

SEQ ID NO: 59849 - DNA, 20 bp, synthetic construct
  source 1..20: mol_type = other DNA
gtactcacctggggcctccg

SEQ ID NO: 59850 - DNA, 20 bp, synthetic construct
  source 1..20: mol_type = other DNA
agaacttaccactttgtcca

SEQ ID NO: 59851 - DNA, 20 bp, synthetic construct
  source 1..20: mol_type = other DNA
tacaggtaaccagatccagt

SEQ ID NO: 59852 - DNA, 20 bp, synthetic construct
  source 1..20: mol_type = other DNA
tgcacagaactatcgtacca

SEQ ID NO: 59853 - DNA, 20 bp, synthetic construct
  source 1..20: mol_type = other DNA
gcggcatcttcccgccctga

SEQ ID NO: 59854 - DNA, 20 bp, synthetic construct
  source 1..20: mol_type = other DNA
tgggacggagggccacatgt

SEQ ID NO: 59855 - DNA, 20 bp, synthetic construct
  source 1..20: mol_type = other DNA
cacgacgcgcggcatcttcc

SEQ ID NO: 59856 - DNA, 20 bp, synthetic construct
  source 1..20: mol_type = other DNA
cacctgcagcgcggcctgtg

SEQ ID NO: 59857 - DNA, 20 bp, synthetic construct
  source 1..20: mol_type = other DNA
ctcgtggaactccagggtga

SEQ ID NO: 59858 - DNA, 20 bp, synthetic construct
  source 1..20: mol_type = other DNA
ctggaccgctgggacctcca

SEQ ID NO: 59859 - DNA, 20 bp, synthetic construct
  source 1..20: mol_type = other DNA
gcatggcaggtataatcatt

SEQ ID NO: 59860 - DNA, 20 bp, synthetic construct
  source 1..20: mol_type = other DNA
tgcaagcaggcagtgagtgg

SEQ ID NO: 59861 - DNA, 20 bp, synthetic construct
  source 1..20: mol_type = other DNA
gaattccagtggttcttgat

SEQ ID NO: 59862 - DNA, 20 bp, synthetic construct
  source 1..20: mol_type = other DNA
ttggcagtgagatgtataaa

SEQ ID NO: 59863 - DNA, 20 bp, synthetic construct
  source 1..20: mol_type = other DNA
cagaagtccccggacacgtt

SEQ ID NO: 59864 - DNA, 20 bp, synthetic construct
  source 1..20: mol_type = other DNA
tgtgggaaggtgagaggccc

SEQ ID NO: 59865 - DNA, 20 bp, synthetic construct
  source 1..20: mol_type = other DNA
cccaagagtgggggcaacca

SEQ ID NO: 59866 - DNA, 20 bp, synthetic construct
  source 1..20: mol_type = other DNA
tgacagcaggaggatgcatt

SEQ ID NO: 59867 - DNA, 20 bp, synthetic construct
  source 1..20: mol_type = other DNA
acccaccttctccagctgct

SEQ ID NO: 59868 - DNA, 20 bp, synthetic construct
  source 1..20: mol_type = other DNA
agtaccacagcaaggtgtcc

SEQ ID NO: 59869 - DNA, 20 bp, synthetic construct
  source 1..20: mol_type = other DNA
ggaggtcccagcggtccagc

SEQ ID NO: 59870 - DNA, 20 bp, synthetic construct
  source 1..20: mol_type = other DNA
ggcagtgagatgtataaaag

SEQ ID NO: 59871 - DNA, 20 bp, synthetic construct
  source 1..20: mol_type = other DNA
aggggagcaccgcttccaca

SEQ ID NO: 59872 - DNA, 20 bp, synthetic construct
  source 1..20: mol_type = other DNA
cgtatgaacagcattaaacc

SEQ ID NO: 59873 - DNA, 20 bp, synthetic construct
  source 1..20: mol_type = other DNA
cctcaggtggccagtgaggg

SEQ ID NO: 59874 - DNA, 20 bp, synthetic construct
  source 1..20: mol_type = other DNA
tcccacagatatcacacttt

SEQ ID NO: 59875 - DNA, 20 bp, synthetic construct
  source 1..20: mol_type = other DNA
ccatccacatgggctgccac

SEQ ID NO: 59876 - DNA, 20 bp, synthetic construct
  source 1..20: mol_type = other DNA
cagggtgacgtgggcgtcaa

SEQ ID NO: 59877 - DNA, 20 bp, synthetic construct
  source 1..20: mol_type = other DNA
tggggagcacatctggttcg

SEQ ID NO: 59878 - DNA, 20 bp, synthetic construct
  source 1..20: mol_type = other DNA
cgtgaagatggtggtcttgt

SEQ ID NO: 59879 - DNA, 20 bp, synthetic construct
  source 1..20: mol_type = other DNA
aaagcccaggctgaagtagt

SEQ ID NO: 59880 - DNA, 20 bp, synthetic construct
  source 1..20: mol_type = other DNA
attacctagaagggcccact

SEQ ID NO: 59881 - DNA, 20 bp, synthetic construct
  source 1..20: mol_type = other DNA
cgcactcacaggcctccttg

SEQ ID NO: 59882 - DNA, 20 bp, synthetic construct
  source 1..20: mol_type = other DNA
ggtattattgatgctattca

SEQ ID NO: 59883 - DNA, 20 bp, synthetic construct
  source 1..20: mol_type = other DNA
gtacctgcaaaggcgggcga

SEQ ID NO: 59884 - DNA, 20 bp, synthetic construct
  source 1..20: mol_type = other DNA
gaggaggatgaggacctgta

SEQ ID NO: 59885 - DNA, 20 bp, synthetic construct
  source 1..20: mol_type = other DNA
cgaccagagaagcaagttcg

SEQ ID NO: 59886 - DNA, 20 bp, synthetic construct
  source 1..20: mol_type = other DNA
tgtacagccgctgctcgtca

SEQ ID NO: 59887 - DNA, 20 bp, synthetic construct
  source 1..20: mol_type = other DNA
cccccagccaacctttgtac

SEQ ID NO: 59888 - DNA, 20 bp, synthetic construct
  source 1..20: mol_type = other DNA
cctaccactgcaactgggac

SEQ ID NO: 59889 - DNA, 20 bp, synthetic construct
  source 1..20: mol_type = other DNA
gcacgagaaggacctggtgt

SEQ ID NO: 59890 - DNA, 20 bp, synthetic construct
  source 1..20: mol_type = other DNA
aggcaacccatggcatgcct

SEQ ID NO: 59891 - DNA, 20 bp, synthetic construct
  source 1..20: mol_type = other DNA
agagacagattggttcctgt

SEQ ID NO: 59892 - DNA, 20 bp, synthetic construct
  source 1..20: mol_type = other DNA
cttcaccatgacgtcgttgg

SEQ ID NO: 59893 - DNA, 20 bp, synthetic construct
  source 1..20: mol_type = other DNA
cgaactcttggtgtaggtct

SEQ ID NO: 59894 - DNA, 20 bp, synthetic construct
  source 1..20: mol_type = other DNA
cgcatctgaaggcgcatctg

SEQ ID NO: 59895 - DNA, 20 bp, synthetic construct
  source 1..20: mol_type = other DNA
agcagtttgagatggccatg

SEQ ID NO: 59896 - DNA, 20 bp, synthetic construct
  source 1..20: mol_type = other DNA
gcagcagcagtcgtacaagg

SEQ ID NO: 59897 - DNA, 20 bp, synthetic construct
  source 1..20: mol_type = other DNA
cgctcaccaccactcggatg

SEQ ID NO: 59898 - DNA, 20 bp, synthetic construct
  source 1..20: mol_type = other DNA
gcatcttcccgccctgaggc

SEQ ID NO: 59899 - DNA, 20 bp, synthetic construct
  source 1..20: mol_type = other DNA
ctgtacaagttatagggctc

SEQ ID NO: 59900 - DNA, 20 bp, synthetic construct
  source 1..20: mol_type = other DNA
ggagcgcgagaaggcacgat

SEQ ID NO: 59901 - DNA, 20 bp, synthetic construct
  source 1..20: mol_type = other DNA
ctgcaccatggtggcctggt

SEQ ID NO: 59902 - DNA, 20 bp, synthetic construct
  source 1..20: mol_type = other DNA
cgacggcacggtgagctccc

SEQ ID NO: 59903 - DNA, 20 bp, synthetic construct
  source 1..20: mol_type = other DNA
gtgaagagagccttagagat

SEQ ID NO: 59904 - DNA, 20 bp, synthetic construct
  source 1..20: mol_type = other DNA
acagaccatacctcataaca

SEQ ID NO: 59905 - DNA, 20 bp, synthetic construct
  source 1..20: mol_type = other DNA
ggtgcatgatcgtccaccag

SEQ ID NO: 59906 - DNA, 20 bp, synthetic construct
  source 1..20: mol_type = other DNA
ttcgcatctgaaggcgcatc

SEQ ID NO: 59907 - DNA, 20 bp, synthetic construct
  source 1..20: mol_type = other DNA
actcaccaacgacgtcatgg

SEQ ID NO: 59908 - DNA, 20 bp, synthetic construct
  source 1..20: mol_type = other DNA
agccccagcggcatgacgac

SEQ ID NO: 59909 - DNA, 20 bp, synthetic construct
  source 1..20: mol_type = other DNA
gcagctatattttccggtta

SEQ ID NO: 59910 - DNA, 20 bp, synthetic construct
  source 1..20: mol_type = other DNA
gacgcagtgtcgcgaggtgg

SEQ ID NO: 59911 - DNA, 20 bp, synthetic construct
  source 1..20: mol_type = other DNA
gaaaggtaaaactagaaaca

SEQ ID NO: 59912 - DNA, 20 bp, synthetic construct
  source 1..20: mol_type = other DNA
cgagactcgtggaactccag

SEQ ID NO: 59913 - DNA, 20 bp, synthetic construct
  source 1..20: mol_type = other DNA
tttaggagtcggatggtcag

SEQ ID NO: 59914 - DNA, 20 bp, synthetic construct
  source 1..20: mol_type = other DNA
accggagtgcgtcctcaggt

SEQ ID NO: 59915 - DNA, 20 bp, synthetic construct
  source 1..20: mol_type = other DNA
aacggcacatgtagccggga

SEQ ID NO: 59916 - DNA, 20 bp, synthetic construct
  source 1..20: mol_type = other DNA
catgaagcaggacaccttgc

SEQ ID NO: 59917 - DNA, 20 bp, synthetic construct
  source 1..20: mol_type = other DNA
gaacaggaatgaccaaaaga

SEQ ID NO: 59918 - DNA, 20 bp, synthetic construct
  source 1..20: mol_type = other DNA
attatacctgccatgccgta

SEQ ID NO: 59919 - DNA, 20 bp, synthetic construct
  source 1..20: mol_type = other DNA
aaaggagatatcaagaggat

SEQ ID NO: 59920 - DNA, 20 bp, synthetic construct
  source 1..20: mol_type = other DNA
ccccagcggggagacctgtt

SEQ ID NO: 59921 - DNA, 20 bp, synthetic construct
  source 1..20: mol_type = other DNA
ctctaggaaagccatcacca

SEQ ID NO: 59922 - DNA, 20 bp, synthetic construct
  source 1..20: mol_type = other DNA
cgcacatgttgcactcaaaa

SEQ ID NO: 59923 - DNA, 20 bp, synthetic construct
  source 1..20: mol_type = other DNA
ccgcaggttgtgcactttgc

SEQ ID NO: 59924 - DNA, 20 bp, synthetic construct
  source 1..20: mol_type = other DNA
ggaaggtgagaggccctgcc

SEQ ID NO: 59925 - DNA, 20 bp, synthetic construct
  source 1..20: mol_type = other DNA
tgcgcagggcgatgcggatg

SEQ ID NO: 59926 - DNA, 20 bp, synthetic construct
  source 1..20: mol_type = other DNA
cttactgcaagttccgccac

SEQ ID NO: 59927 - DNA, 20 bp, synthetic construct
  source 1..20: mol_type = other DNA
tctacctttggtgaacccgt

SEQ ID NO: 59928 - DNA, 20 bp, synthetic construct
  source 1..20: mol_type = other DNA
gaataacttgtctacatagt

SEQ ID NO: 59929 - DNA, 20 bp, synthetic construct
  source 1..20: mol_type = other DNA
gtggcagcccatgtggatgg

SEQ ID NO: 59930 - DNA, 20 bp, synthetic construct
  source 1..20: mol_type = other DNA
cccgaccagagaagcaagtt

SEQ ID NO: 59931 - DNA, 20 bp, synthetic construct
  source 1..20: mol_type = other DNA
gagttaatgttctaattgtc

SEQ ID NO: 59932 - DNA, 20 bp, synthetic construct
  source 1..20: mol_type = other DNA
agaaacaaaaggagatatca

SEQ ID NO: 59933 - DNA, 20 bp, synthetic construct
  source 1..20: mol_type = other DNA
ccgagaccgatcagagctgt

SEQ ID NO: 59934 - DNA, 20 bp, synthetic construct
  source 1..20: mol_type = other DNA
ggggcaggatggcaacaggg

SEQ ID NO: 59935 - DNA, 20 bp, synthetic construct
  source 1..20: mol_type = other DNA
tacacagtactgctccccaa

SEQ ID NO: 59936 - DNA, 20 bp, synthetic construct
  source 1..20: mol_type = other DNA
tatggggagcacatctggtt

SEQ ID NO: 59937 - DNA, 20 bp, synthetic construct
  source 1..20: mol_type = other DNA
cggctcaccgtggtccagca

SEQ ID NO: 59938 - DNA, 20 bp, synthetic construct
  source 1..20: mol_type = other DNA
cgtggaggtcccagcggtcc

SEQ ID NO: 59939 - DNA, 20 bp, synthetic construct
  source 1..20: mol_type = other DNA
gaccatagtactctgaagga

SEQ ID NO: 59940 - DNA, 20 bp, synthetic construct
  source 1..20: mol_type = other DNA
gcagcaagagctggaggacg

SEQ ID NO: 59941 - DNA, 20 bp, synthetic construct
  source 1..20: mol_type = other DNA
gagctgtatgagcacgagaa

SEQ ID NO: 59942 - DNA, 20 bp, synthetic construct
  source 1..20: mol_type = other DNA
taaattacccttctttcagg

SEQ ID NO: 59943 - DNA, 20 bp, synthetic construct
  source 1..20: mol_type = other DNA
cagtgcactagaacagaaaa

SEQ ID NO: 59944 - DNA, 20 bp, synthetic construct
  source 1..20: mol_type = other DNA
aggatgaggacctgtatgac

SEQ ID NO: 59945 - DNA, 20 bp, synthetic construct
  source 1..20: mol_type = other DNA
ttatagggtaaagttcacct

SEQ ID NO: 59946 - DNA, 20 bp, synthetic construct
  source 1..20: mol_type = other DNA
gtacatgacgtgatccagga

SEQ ID NO: 59947 - DNA, 20 bp, synthetic construct
  source 1..20: mol_type = other DNA
cggcatgacgacggctacct

SEQ ID NO: 59948 - DNA, 20 bp, synthetic construct
  source 1..20: mol_type = other DNA
gcacatgaaacggcacatgt

SEQ ID NO: 59949 - DNA, 20 bp, synthetic construct
  source 1..20: mol_type = other DNA
ccctcagggattccagcaga

SEQ ID NO: 59950 - DNA, 20 bp, synthetic construct
  source 1..20: mol_type = other DNA
tctgtacctcatcaagaata

SEQ ID NO: 59951 - DNA, 20 bp, synthetic construct
  source 1..20: mol_type = other DNA
ggagcagtttgagatggcca

SEQ ID NO: 59952 - DNA, 20 bp, synthetic construct
  source 1..20: mol_type = other DNA
ccccagcgagcacggctcct

SEQ ID NO: 59953 - DNA, 20 bp, synthetic construct
  source 1..20: mol_type = other DNA
gatacaggtcaagtctaagt

SEQ ID NO: 59954 - DNA, 20 bp, synthetic construct
  source 1..20: mol_type = other DNA
gaggatccaggtgggcggga

SEQ ID NO: 59955 - DNA, 20 bp, synthetic construct
  source 1..20: mol_type = other DNA
agctagtaccttacagaagt

SEQ ID NO: 59956 - DNA, 20 bp, synthetic construct
  source 1..20: mol_type = other DNA
ctgcggcaagacctacacca

SEQ ID NO: 59957 - DNA, 20 bp, synthetic construct
  source 1..20: mol_type = other DNA
gtgcagcgccaggtgatcgg

SEQ ID NO: 59958 - DNA, 20 bp, synthetic construct
  source 1..20: mol_type = other DNA
ctgccaacctcgagactcgt

SEQ ID NO: 59959 - DNA, 20 bp, synthetic construct
  source 1..20: mol_type = other DNA
cgaagacttgtcggggattg

SEQ ID NO: 59960 - DNA, 20 bp, synthetic construct
  source 1..20: mol_type = other DNA
cgtcccagttgcagtggtag

SEQ ID NO: 59961 - DNA, 20 bp, synthetic construct
  source 1..20: mol_type = other DNA
ctcacctgaaacttgggaca

SEQ ID NO: 59962 - DNA, 20 bp, synthetic construct
  source 1..20: mol_type = other DNA
cgtgcaggtgaagagctgat

SEQ ID NO: 59963 - DNA, 20 bp, synthetic construct
  source 1..20: mol_type = other DNA
attcacccagaagggcaacc

SEQ ID NO: 59964 - DNA, 20 bp, synthetic construct
  source 1..20: mol_type = other DNA
gctggagatgtaccgcaaag

SEQ ID NO: 59965 - DNA, 20 bp, synthetic construct
  source 1..20: mol_type = other DNA
tgcccacaggccgcgctgca

SEQ ID NO: 59966 - DNA, 20 bp, synthetic construct
  source 1..20: mol_type = other DNA
aacaagagcaatgactttga

SEQ ID NO: 59967 - DNA, 20 bp, synthetic construct
  source 1..20: mol_type = other DNA
ttgcaggcaagaagacaaca

SEQ ID NO: 59968 - DNA, 20 bp, synthetic construct
  source 1..20: mol_type = other DNA
tagaaagacaaatactggaa

SEQ ID NO: 59969 - DNA, 20 bp, synthetic construct
  source 1..20: mol_type = other DNA
actcacttgctcccatattt

SEQ ID NO: 59970 - DNA, 20 bp, synthetic construct
  source 1..20: mol_type = other DNA
gttccacgagtctcgaggtt

SEQ ID NO: 59971 - DNA, 20 bp, synthetic construct
  source 1..20: mol_type = other DNA
gattcgacttagacttgacc

SEQ ID NO: 59972 - DNA, 20 bp, synthetic construct
  source 1..20: mol_type = other DNA
tttatatggtcatgaggtgt

SEQ ID NO: 59973 - DNA, 20 bp, synthetic construct
  source 1..20: mol_type = other DNA
ccaccccagttgagggttcg

SEQ ID NO: 59974 - DNA, 20 bp, synthetic construct
  source 1..20: mol_type = other DNA
ccggggagaagcccttcaaa

SEQ ID NO: 59975 - DNA, 20 bp, synthetic construct
  source 1..20: mol_type = other DNA
cttggccaggtccttggagc

SEQ ID NO: 59976 - DNA, 20 bp, synthetic construct
  source 1..20: mol_type = other DNA
cgggcgcagaagtcatagcg

SEQ ID NO: 59977 - DNA, 20 bp, synthetic construct
  source 1..20: mol_type = other DNA
taccatagaggtgtccctgc

SEQ ID NO: 59978 - DNA, 20 bp, synthetic construct
  source 1..20: mol_type = other DNA
acatgacgtgatccaggaag

SEQ ID NO: 59979 - DNA, 20 bp, synthetic construct
  source 1..20: mol_type = other DNA
aggcgtagctggtccagggt

SEQ ID NO: 59980 - DNA, 20 bp, synthetic construct
  source 1..20: mol_type = other DNA
cgggatgaccacggctgcgt

SEQ ID NO: 59981 - DNA, 20 bp, synthetic construct
  source 1..20: mol_type = other DNA
gtgaggctgcaagcttgcag

SEQ ID NO: 59982 - DNA, 20 bp, synthetic construct
  source 1..20: mol_type = other DNA
agggcgatgcggatgcgtga

SEQ ID NO: 59983 - DNA, 20 bp, synthetic construct
  source 1..20: mol_type = other DNA
atgtgcagcgccaggtgatc

SEQ ID NO: 59984 - DNA, 20 bp, synthetic construct
  source 1..20: mol_type = other DNA
gttgcactcgattgggacag

SEQ ID NO: 59985 - DNA, 20 bp, synthetic construct
  source 1..20: mol_type = other DNA
tccagcctgggctcatggga

SEQ ID NO: 59986 - DNA, 20 bp, synthetic construct
  source 1..20: mol_type = other DNA
tccatgaagacgtccacccc

SEQ ID NO: 59987 - DNA, 20 bp, synthetic construct
  source 1..20: mol_type = other DNA
ctggaagggccgttctcctg

SEQ ID NO: 59988 - DNA, 20 bp, synthetic construct
  source 1..20: mol_type = other DNA
gcatgccttgatgctaaggt

SEQ ID NO: 59989 - DNA, 20 bp, synthetic construct
  source 1..20: mol_type = other DNA
cgagaaggacctggtgtgga

SEQ ID NO: 59990 - DNA, 20 bp, synthetic construct
  source 1..20: mol_type = other DNA
gttgcgcagggcgatgcgga

SEQ ID NO: 59991 - DNA, 20 bp, synthetic construct
  source 1..20: mol_type = other DNA
aggactcaccggggcgtggg

SEQ ID NO: 59992 - DNA, 20 bp, synthetic construct
  source 1..20: mol_type = other DNA
caagaagggacagcaaggct

SEQ ID NO: 59993 - DNA, 20 bp, synthetic construct
  source 1..20: mol_type = other DNA
gtacagcttcacctagagaa

SEQ ID NO: 59994 - DNA, 20 bp, synthetic construct
  source 1..20: mol_type = other DNA
agcaggggcttcatgagcgg

SEQ ID NO: 59995 - DNA, 20 bp, synthetic construct
  source 1..20: mol_type = other DNA
caggatgagatttatatcct

SEQ ID NO: 59996 - DNA, 20 bp, synthetic construct
  source 1..20: mol_type = other DNA
ctcaccgtggtccagcaggt

SEQ ID NO: 59997 - DNA, 20 bp, synthetic construct
  source 1..20: mol_type = other DNA
cgctgtaagccgtccttccg

SEQ ID NO: 59998 - DNA, 20 bp, synthetic construct
  source 1..20: mol_type = other DNA
ctggataaggtctggtttaa

SEQ ID NO: 59999 - DNA, 20 bp, synthetic construct
  source 1..20: mol_type = other DNA
cccccagggctacacagatg

SEQ ID NO: 60000 - DNA, 20 bp, synthetic construct
  source 1..20: mol_type = other DNA
gaggaggaggagaaagccgg

SEQ ID NO: 60001 - DNA, 20 bp, synthetic construct
  source 1..20: mol_type = other DNA
ggattgagataccagaggaa

SEQ ID NO: 60002 - DNA, 20 bp, synthetic construct
  source 1..20: mol_type = other DNA
gtcataatctgtccctacac

SEQ ID NO: 60003 - DNA, 20 bp, synthetic construct
  source 1..20: mol_type = other DNA
gtccgagcggttggccagga

SEQ ID NO: 60004 - DNA, 20 bp, synthetic construct
  source 1..20: mol_type = other DNA
cgcagggcgatgcggatgcg

SEQ ID NO: 60005 - DNA, 20 bp, synthetic construct
  source 1..20: mol_type = other DNA
tcctgaacatccccaggtga

SEQ ID NO: 60006 - DNA, 20 bp, synthetic construct
  source 1..20: mol_type = other DNA
ctggtaccttgccagtaggc

SEQ ID NO: 60007 - DNA, 20 bp, synthetic construct
  source 1..20: mol_type = other DNA
ttaggtacttgctacagcca

SEQ ID NO: 60008 - DNA, 20 bp, synthetic construct
  source 1..20: mol_type = other DNA
tagaaatctagggcctcttg

SEQ ID NO: 60009 - DNA, 20 bp, synthetic construct
  source 1..20: mol_type = other DNA
ccaggtaagcgctgctgctc

SEQ ID NO: 60010 - DNA, 20 bp, synthetic construct
  source 1..20: mol_type = other DNA
gtatacaggaacaatattga

SEQ ID NO: 60011 - DNA, 20 bp, synthetic construct
  source 1..20: mol_type = other DNA
ttgcactcgattgggacagt

SEQ ID NO: 60012 - DNA, 20 bp, synthetic construct
  source 1..20: mol_type = other DNA
ggtaggagaggggcctcagg

SEQ ID NO: 60013 - DNA, 20 bp, synthetic construct
  source 1..20: mol_type = other DNA
acgagctcacgcgccactac

SEQ ID NO: 60014 - DNA, 20 bp, synthetic construct
  source 1..20: mol_type = other DNA
gaccataacccaccacagct

SEQ ID NO: 60015 - DNA, 20 bp, synthetic construct
  source 1..20: mol_type = other DNA
gcaggtgaagagctgattga

SEQ ID NO: 60016 - DNA, 20 bp, synthetic construct
  source 1..20: mol_type = other DNA
cctgaggacgcactccggta

SEQ ID NO: 60017 - DNA, 20 bp, synthetic construct
  source 1..20: mol_type = other DNA
tgaagtacagcttcacctag

SEQ ID NO: 60018 - DNA, 20 bp, synthetic construct
  source 1..20: mol_type = other DNA
gcaggatggcaacagggggt

SEQ ID NO: 60019 - DNA, 20 bp, synthetic construct
  source 1..20: mol_type = other DNA
tctgaatactttccatggta

SEQ ID NO: 60020 - DNA, 20 bp, synthetic construct
  source 1..20: mol_type = other DNA
ggaccggtacgagttctcgt

SEQ ID NO: 60021 - DNA, 20 bp, synthetic construct
  source 1..20: mol_type = other DNA
aacaaaaggagatatcaaga

SEQ ID NO: 60022 - DNA, 20 bp, synthetic construct
  source 1..20: mol_type = other DNA
gatgaggtcggcgtaggaca

SEQ ID NO: 60023 - DNA, 20 bp, synthetic construct
  source 1..20: mol_type = other DNA
tcacatagccaatggcccac

SEQ ID NO: 60024 - DNA, 20 bp, synthetic construct
  source 1..20: mol_type = other DNA
tactcagctcgcccacctgc

SEQ ID NO: 60025 - DNA, 20 bp, synthetic construct
  source 1..20: mol_type = other DNA
ctcactttatgctagggagg

SEQ ID NO: 60026 - DNA, 20 bp, synthetic construct
  source 1..20: mol_type = other DNA
gtggttcacagggtcctcca

SEQ ID NO: 60027 - DNA, 20 bp, synthetic construct
  source 1..20: mol_type = other DNA
tcaggaaaacaacacactgg

SEQ ID NO: 60028 - DNA, 20 bp, synthetic construct
  source 1..20: mol_type = other DNA
cacttactaggaaatctctg

SEQ ID NO: 60029 - DNA, 20 bp, synthetic construct
  source 1..20: mol_type = other DNA
catatgatgaagttaaagca

SEQ ID NO: 60030 - DNA, 20 bp, synthetic construct
  source 1..20: mol_type = other DNA
gggtattattgatgctattc

SEQ ID NO: 60031 - DNA, 20 bp, synthetic construct
  source 1..20: mol_type = other DNA
gtagcgcagattctcctgca

SEQ ID NO: 60032 - DNA, 20 bp, synthetic construct
  source 1..20: mol_type = other DNA
tggtgaagccacactcgccc

SEQ ID NO: 60033 - DNA, 20 bp, synthetic construct
  source 1..20: mol_type = other DNA
ggtgcaagcaggcagtgagt

SEQ ID NO: 60034 - DNA, 20 bp, synthetic construct
  source 1..20: mol_type = other DNA
gatgaagtccagcacgctgt

SEQ ID NO: 60035 - DNA, 20 bp, synthetic construct
  source 1..20: mol_type = other DNA
tgcggtacatctccagcctg

SEQ ID NO: 60036 - DNA, 20 bp, synthetic construct
  source 1..20: mol_type = other DNA
ctaagtcgaatccatcctct

SEQ ID NO: 60037 - DNA, 20 bp, synthetic construct
  source 1..20: mol_type = other DNA
gtttaggagtcggatggtca

SEQ ID NO: 60038 - DNA, 20 bp, synthetic construct
  source 1..20: mol_type = other DNA
cttcacaaaagggtttgata

SEQ ID NO: 60039 - DNA, 20 bp, synthetic construct
  source 1..20: mol_type = other DNA
aagtttcaaagagacattca

SEQ ID NO: 60040 - DNA, 20 bp, synthetic construct
  source 1..20: mol_type = other DNA
agtgagggcgtccctccggc

SEQ ID NO: 60041 - DNA, 20 bp, synthetic construct
  source 1..20: mol_type = other DNA
aggggcagaagccgatggta

SEQ ID NO: 60042 - DNA, 20 bp, synthetic construct
  source 1..20: mol_type = other DNA
gtactggcaacgacttggcc

SEQ ID NO: 60043 - DNA, 20 bp, synthetic construct
  source 1..20: mol_type = other DNA
gatcggagcgcgagaaggca

SEQ ID NO: 60044 - DNA, 20 bp, synthetic construct
  source 1..20: mol_type = other DNA
taatttcagagacactataa

SEQ ID NO: 60045 - DNA, 20 bp, synthetic construct
  source 1..20: mol_type = other DNA
gtgtaggtcttgccgcagcc

SEQ ID NO: 60046 - DNA, 20 bp, synthetic construct
  source 1..20: mol_type = other DNA
tgagagctggaaaaccaaag

SEQ ID NO: 60047 - DNA, 20 bp, synthetic construct
  source 1..20: mol_type = other DNA
cgcaaatgaaaagtatgagg

SEQ ID NO: 60048 - DNA, 20 bp, synthetic construct
  source 1..20: mol_type = other DNA
ccccctaagcaagctgccgc

SEQ ID NO: 60049 - DNA, 20 bp, synthetic construct
  source 1..20: mol_type = other DNA
gcgtagctggtccagggtgg

SEQ ID NO: 60050 - DNA, 20 bp, synthetic construct
  source 1..20: mol_type = other DNA
ttacagcggaaatttatctg

SEQ ID NO: 60051 - DNA, 20 bp, synthetic construct
  source 1..20: mol_type = other DNA
ttacctgtgtaacttttata

SEQ ID NO: 60052 - DNA, 20 bp, synthetic construct
  source 1..20: mol_type = other DNA
gagcagcaagagctggagga

SEQ ID NO: 60053 - DNA, 20 bp, synthetic construct
  source 1..20: mol_type = other DNA
cccatcaggaagtcagagaa

SEQ ID NO: 60054 - DNA, 20 bp, synthetic construct
  source 1..20: mol_type = other DNA
gcgtaggacaggttgcccca

SEQ ID NO: 60055 - DNA, 20 bp, synthetic construct
  source 1..20: mol_type = other DNA
cacaggtaaggataattgct

SEQ ID NO: 60056 - DNA, 20 bp, synthetic construct
  source 1..20: mol_type = other DNA
cgtgagccgcttctccgccg

SEQ ID NO: 60057 - DNA, 20 bp, synthetic construct
  source 1..20: mol_type = other DNA
gagtcaaccacctgaaaaac

SEQ ID NO: 60058 - DNA, 20 bp, synthetic construct
  source 1..20: mol_type = other DNA
ataatgtttggataaatatc

SEQ ID NO: 60059 - DNA, 20 bp, synthetic construct
  source 1..20: mol_type = other DNA
tcctcagtaccacagcaagg

SEQ ID NO: 60060 - DNA, 20 bp, synthetic construct
  source 1..20: mol_type = other DNA
cctgcaagcttgcagcctca

SEQ ID NO: 60061 - DNA, 20 bp, synthetic construct
  source 1..20: mol_type = other DNA
gctctcgatggccttggtga

SEQ ID NO: 60062 - DNA, 20 bp, synthetic construct
  source 1..20: mol_type = other DNA
cggagtacttgcgctcagga

SEQ ID NO: 60063 - DNA, 20 bp, synthetic construct
  source 1..20: mol_type = other DNA
cgcagatgcgccttcagatg

SEQ ID NO: 60064 - DNA, 20 bp, synthetic construct
  source 1..20: mol_type = other DNA
acggaagccgtggcagccca

SEQ ID NO: 60065 - DNA, 20 bp, synthetic construct
  source 1..20: mol_type = other DNA
aagacaggatgtgcacatga

SEQ ID NO: 60066 - DNA, 20 bp, synthetic construct
  source 1..20: mol_type = other DNA
gagataccagaggaaagact

SEQ ID NO: 60067 - DNA, 20 bp, synthetic construct
  source 1..20: mol_type = other DNA
tgtacaccatccacatgggc

SEQ ID NO: 60068 - DNA, 20 bp, synthetic construct
  source 1..20: mol_type = other DNA
gtgcactagaacagaaaaag

SEQ ID NO: 60069 - DNA, 20 bp, synthetic construct
  source 1..20: mol_type = other DNA
atcacactggaggcgggcgg

SEQ ID NO: 60070 - DNA, 20 bp, synthetic construct
  source 1..20: mol_type = other DNA
atcggcaaaggtagctctgc

SEQ ID NO: 60071 - DNA, 20 bp, synthetic construct
  source 1..20: mol_type = other DNA
aacttactagcatcttcagg

SEQ ID NO: 60072 - DNA, 20 bp, synthetic construct
  source 1..20: mol_type = other DNA
catccaagagttggtcatcc

SEQ ID NO: 60073 - DNA, 20 bp, synthetic construct
  source 1..20: mol_type = other DNA
caagttatagggctcggcaa

SEQ ID NO: 60074 - DNA, 20 bp, synthetic construct
  source 1..20: mol_type = other DNA
attcccagtcagaggcgcta

SEQ ID NO: 60075 - DNA, 20 bp, synthetic construct
  source 1..20: mol_type = other DNA
cgacgtcatggtgaagccaa

SEQ ID NO: 60076 - DNA, 20 bp, synthetic construct
  source 1..20: mol_type = other DNA
aactacgcctgccgccggag

SEQ ID NO: 60077 - DNA, 20 bp, synthetic construct
  source 1..20: mol_type = other DNA
ctgaggcccctctcctaccc

SEQ ID NO: 60078 - DNA, 20 bp, synthetic construct
  source 1..20: mol_type = other DNA
gcaggcgtagttgcagaggt

SEQ ID NO: 60079 - DNA, 20 bp, synthetic construct
  source 1..20: mol_type = other DNA
gccatggccgggacccgggg

SEQ ID NO: 60080 - DNA, 20 bp, synthetic construct
  source 1..20: mol_type = other DNA
gctctgtaagatttgtgcag

SEQ ID NO: 60081 - DNA, 20 bp, synthetic construct
  source 1..20: mol_type = other DNA
gtcgcaaatgaaaagtatga

SEQ ID NO: 60082 - DNA, 20 bp, synthetic construct
  source 1..20: mol_type = other DNA
gtgtcttaggtatatttgaa

SEQ ID NO: 60083 - DNA, 20 bp, synthetic construct
  source 1..20: mol_type = other DNA
gcctcaccttgagggggtgc

SEQ ID NO: 60084 - DNA, 20 bp, synthetic construct
  source 1..20: mol_type = other DNA
ggagcagctgagctcaggca

SEQ ID NO: 60085 - DNA, 20 bp, synthetic construct
  source 1..20: mol_type = other DNA
acgccaggacggcaagtgtc

SEQ ID NO: 60086 - DNA, 20 bp, synthetic construct
  source 1..20: mol_type = other DNA
ccatggacaggatgaagtcc

SEQ ID NO: 60087 - DNA, 20 bp, synthetic construct
  source 1..20: mol_type = other DNA
tccgagcggccgtcgcggca

SEQ ID NO: 60088 - DNA, 20 bp, synthetic construct
  source 1..20: mol_type = other DNA
aacttgtacagctctctgaa

SEQ ID NO: 60089 - DNA, 20 bp, synthetic construct
  source 1..20: mol_type = other DNA
taaatacattcttcatacca

SEQ ID NO: 60090 - DNA, 20 bp, synthetic construct
  source 1..20: mol_type = other DNA
gatccagcccacctggggga

SEQ ID NO: 60091 - DNA, 20 bp, synthetic construct
  source 1..20: mol_type = other DNA
agcagcggctgtacaaggtg

SEQ ID NO: 60092 - DNA, 20 bp, synthetic construct
  source 1..20: mol_type = other DNA
gaaggcaaggagagaatgta

SEQ ID NO: 60093 - DNA, 20 bp, synthetic construct
  source 1..20: mol_type = other DNA
ccgagccctataacttgtac

SEQ ID NO: 60094 - DNA, 20 bp, synthetic construct
  source 1..20: mol_type = other DNA
cccagataccgatgttatac

SEQ ID NO: 60095 - DNA, 20 bp, synthetic construct
  source 1..20: mol_type = other DNA
aggcagtagtggctcctccc

SEQ ID NO: 60096 - DNA, 20 bp, synthetic construct
  source 1..20: mol_type = other DNA
gttgaaggtagtttcgtgga

SEQ ID NO: 60097 - DNA, 20 bp, synthetic construct
  source 1..20: mol_type = other DNA
gacacctcatgtgcacatcc

SEQ ID NO: 60098 - DNA, 20 bp, synthetic construct
  source 1..20: mol_type = other DNA
tgcacatgaggtgtccacag

SEQ ID NO: 60099 - DNA, 20 bp, synthetic construct
  source 1..20: mol_type = other DNA
gaaggacctggtgtggaagc

SEQ ID NO: 60100 - DNA, 20 bp, synthetic construct
  source 1..20: mol_type = other DNA
catgaagacgtccacccctg

SEQ ID NO: 60101 - DNA, 20 bp, synthetic construct
  source 1..20: mol_type = other DNA
aaaggactgtgaaatgtaca

SEQ ID NO: 60102 - DNA, 20 bp, synthetic construct
  source 1..20: mol_type = other DNA
tgtaagacaggatgtgcaca

SEQ ID NO: 60103 - DNA, 20 bp, synthetic construct
  source 1..20: mol_type = other DNA
gacaggatgtgcacatgagg

SEQ ID NO: 60104 - DNA, 20 bp, synthetic construct
  source 1..20: mol_type = other DNA
gtccaccttccagcagatgt

SEQ ID NO: 60105 - DNA, 20 bp, synthetic construct
  source 1..20: mol_type = other DNA
gatggagttgaaggtagttt

SEQ ID NO: 60106 - DNA, 20 bp, synthetic construct
  source 1..20: mol_type = other DNA
gagacacacagacccagtgc

SEQ ID NO: 60107 - DNA, 20 bp, synthetic construct
  source 1..20: mol_type = other DNA
gcttgcagagcagctctcgt

SEQ ID NO: 60108 - DNA, 20 bp, synthetic construct
  source 1..20: mol_type = other DNA
cgtacttgagcacctgcacc

SEQ ID NO: 60109 - DNA, 20 bp, synthetic construct
  source 1..20: mol_type = other DNA
ccttatccagctgagaaaga

SEQ ID NO: 60110 - DNA, 20 bp, synthetic construct
  source 1..20: mol_type = other DNA
atagggctcggcaaagccat

SEQ ID NO: 60111 - DNA, 20 bp, synthetic construct
  source 1..20: mol_type = other DNA
tcatggatggcatccagatc

SEQ ID NO: 60112 - DNA, 20 bp, synthetic construct
  source 1..20: mol_type = other DNA
ggtccactgcaggcagcgga

SEQ ID NO: 60113 - DNA, 20 bp, synthetic construct
  source 1..20: mol_type = other DNA
ccagggcagtgatctccttc

SEQ ID NO: 60114 - DNA, 20 bp, synthetic construct
  source 1..20: mol_type = other DNA
gtagtggggataccattcct

SEQ ID NO: 60115 - DNA, 20 bp, synthetic construct
  source 1..20: mol_type = other DNA
cgactggattcctccaacta

SEQ ID NO: 60116 - DNA, 20 bp, synthetic construct
  source 1..20: mol_type = other DNA
ccgcgacggaaagcgctgca

SEQ ID NO: 60117 - DNA, 20 bp, synthetic construct
  source 1..20: mol_type = other DNA
gaggacctgtatgactgcgt

SEQ ID NO: 60118 - DNA, 20 bp, synthetic construct
  source 1..20: mol_type = other DNA
caggaactgtgaggagacag

SEQ ID NO: 60119 - DNA, 20 bp, synthetic construct
  source 1..20: mol_type = other DNA
cgtcttcatggatggcatcc

SEQ ID NO: 60120 - DNA, 20 bp, synthetic construct
  source 1..20: mol_type = other DNA
gattatatgaagaatatacc

SEQ ID NO: 60121 - DNA, 20 bp, synthetic construct
  source 1..20: mol_type = other DNA
gccaacctggaaacagacga

SEQ ID NO: 60122 - DNA, 20 bp, synthetic construct
  source 1..20: mol_type = other DNA
aggatgaggccgaagcgcag

SEQ ID NO: 60123 - DNA, 20 bp, synthetic construct
  source 1..20: mol_type = other DNA
atcgagtgagtgctcaggcc

SEQ ID NO: 60124 - DNA, 20 bp, synthetic construct
  source 1..20: mol_type = other DNA
ggcgtacaggtctttgcgga

SEQ ID NO: 60125 - DNA, 20 bp, synthetic construct
  source 1..20: mol_type = other DNA
gaacaatatgaattatactg

SEQ ID NO: 60126 - DNA, 20 bp, synthetic construct
  source 1..20: mol_type = other DNA
gccaggtccagacgcaggat

SEQ ID NO: 60127 - DNA, 20 bp, synthetic construct
  source 1..20: mol_type = other DNA
ggagttgaaggtagtttcgt

SEQ ID NO: 60128 - DNA, 20 bp, synthetic construct
  source 1..20: mol_type = other DNA
caggccgagcggctgctgca

SEQ ID NO: 60129 - DNA, 20 bp, synthetic construct
  source 1..20: mol_type = other DNA
accggggaccagttctccag

SEQ ID NO: 60130 - DNA, 20 bp, synthetic construct
  source 1..20: mol_type = other DNA
aagaccaaagatggagtgag

SEQ ID NO: 60131 - DNA, 20 bp, synthetic construct
  source 1..20: mol_type = other DNA
tatgaggaagacatgtttag

SEQ ID NO: 60132 - DNA, 20 bp, synthetic construct
  source 1..20: mol_type = other DNA
gctgatctggatgccatcca

SEQ ID NO: 60133 - DNA, 20 bp, synthetic construct
  source 1..20: mol_type = other DNA
tgtactccccgattgctaag

SEQ ID NO: 60134 - DNA, 20 bp, synthetic construct
  source 1..20: mol_type = other DNA
gctgagggcagtgcctacga

SEQ ID NO: 60135 - DNA, 20 bp, synthetic construct
  source 1..20: mol_type = other DNA
gagtacagcaggtgtttgag

SEQ ID NO: 60136 - DNA, 20 bp, synthetic construct
  source 1..20: mol_type = other DNA
aacgccgacgagcggatgaa

SEQ ID NO: 60137 - DNA, 20 bp, synthetic construct
  source 1..20: mol_type = other DNA
ggagcgataggctgcgaagt

SEQ ID NO: 60138 - DNA, 20 bp, synthetic construct
  source 1..20: mol_type = other DNA
gctgcttaggtgagaatctg

SEQ ID NO: 60139 - DNA, 20 bp, synthetic construct
  source 1..20: mol_type = other DNA
agataccgatgttatactga

SEQ ID NO: 60140 - DNA, 20 bp, synthetic construct
  source 1..20: mol_type = other DNA
gatgacgttcaacacttcaa

SEQ ID NO: 60141 - DNA, 20 bp, synthetic construct
  source 1..20: mol_type = other DNA
tgaaatgtacaagcaccgca

SEQ ID NO: 60142 - DNA, 20 bp, synthetic construct
  source 1..20: mol_type = other DNA
cgtaccaaaaaggtcccgtc

SEQ ID NO: 60143 - DNA, 20 bp, synthetic construct
  source 1..20: mol_type = other DNA
gagatggccatgtgagtccc

SEQ ID NO: 60144 - DNA, 20 bp, synthetic construct
  source 1..20: mol_type = other DNA
cgcaagcattaccagcccta

SEQ ID NO: 60145 - DNA, 20 bp, synthetic construct
  source 1..20: mol_type = other DNA
ccggttcatctggacattcc

SEQ ID NO: 60146 - DNA, 20 bp, synthetic construct
  source 1..20: mol_type = other DNA
caaggagtcaaactcgtgga

SEQ ID NO: 60147 - DNA, 20 bp, synthetic construct
  source 1..20: mol_type = other DNA
tgagcgcaagtactccgtgt

SEQ ID NO: 60148 - DNA, 20 bp, synthetic construct
  source 1..20: mol_type = other DNA
ttggtggagcgagccttctt

SEQ ID NO: 60149 - DNA, 20 bp, synthetic construct
  source 1..20: mol_type = other DNA
tgtcaaggctgcctcctcgg

SEQ ID NO: 60150 - DNA, 20 bp, synthetic construct
  source 1..20: mol_type = other DNA
ttggtgaccagcagcagccg

SEQ ID NO: 60151 - DNA, 20 bp, synthetic construct
  source 1..20: mol_type = other DNA
agggcagcgaggtgagccca

SEQ ID NO: 60152 - DNA, 20 bp, synthetic construct
  source 1..20: mol_type = other DNA
cagagctgtcgctcaaggag

SEQ ID NO: 60153 - DNA, 20 bp, synthetic construct
  source 1..20: mol_type = other DNA
aggtactgtgaaccacacag

SEQ ID NO: 60154 - DNA, 20 bp, synthetic construct
  source 1..20: mol_type = other DNA
tgaagtaccccatcgagcac

SEQ ID NO: 60155 - DNA, 20 bp, synthetic construct
  source 1..20: mol_type = other DNA
tgagcagcaggccaagtctc

SEQ ID NO: 60156 - DNA, 20 bp, synthetic construct
  source 1..20: mol_type = other DNA
gaggaggaggaggagtggat

SEQ ID NO: 60157 - DNA, 20 bp, synthetic construct
  source 1..20: mol_type = other DNA
catagtcttcagcaaggacc

SEQ ID NO: 60158 - DNA, 20 bp, synthetic construct
  source 1..20: mol_type = other DNA
tttgagtgcgccgtccgaac

SEQ ID NO: 60159 - DNA, 20 bp, synthetic construct
  source 1..20: mol_type = other DNA
gatgaggacctgtatgactg

SEQ ID NO: 60160 - DNA, 20 bp, synthetic construct
  source 1..20: mol_type = other DNA
gttcactttgctgccctgga

SEQ ID NO: 60161 - DNA, 20 bp, synthetic construct
  source 1..20: mol_type = other DNA
gtgcggcacaagtggcatcc

SEQ ID NO: 60162 - DNA, 20 bp, synthetic construct
  source 1..20: mol_type = other DNA
gtgggtgaccccgtcaccgg

SEQ ID NO: 60163 - DNA, 20 bp, synthetic construct
  source 1..20: mol_type = other DNA
tggcaccacaccttctacaa

SEQ ID NO: 60164 - DNA, 20 bp, synthetic construct
  source 1..20: mol_type = other DNA
gggcacctgagaaggaactg

SEQ ID NO: 60165 - DNA, 20 bp, synthetic construct
  source 1..20: mol_type = other DNA
tctggggagctgtatgagca

SEQ ID NO: 60166 - DNA, 20 bp, synthetic construct
  source 1..20: mol_type = other DNA
cgtgagagctggaaaaccaa

SEQ ID NO: 60167 - DNA, 20 bp, synthetic construct
  source 1..20: mol_type = other DNA
tccatcatgaagtgtgacgt

SEQ ID NO: 60168 - DNA, 20 bp, synthetic construct
  source 1..20: mol_type = other DNA
aagaccttccaggtcaagct

SEQ ID NO: 60169 - DNA, 20 bp, synthetic construct
  source 1..20: mol_type = other DNA
accaaagatggagtgagaga

SEQ ID NO: 60170 - DNA, 20 bp, synthetic construct
  source 1..20: mol_type = other DNA
gagaaggagcggaagctgca

SEQ ID NO: 60171 - DNA, 20 bp, synthetic construct
  source 1..20: mol_type = other DNA
gtgtatccatctgagttgag

SEQ ID NO: 60172 - DNA, 20 bp, synthetic construct
  source 1..20: mol_type = other DNA
agcgacacggtggaggagga

SEQ ID NO: 60173 - DNA, 20 bp, synthetic construct
  source 1..20: mol_type = other DNA
tcacagtcctttcccagggt

SEQ ID NO: 60174 - DNA, 20 bp, synthetic construct
  source 1..20: mol_type = other DNA
gcagcagctccagctcctgc

SEQ ID NO: 60175 - DNA, 20 bp, synthetic construct
  source 1..20: mol_type = other DNA
tcgaggaccaaggtgcccag

SEQ ID NO: 60176 - DNA, 20 bp, synthetic construct
  source 1..20: mol_type = other DNA
ggaggcagccttgacataaa

SEQ ID NO: 60177 - DNA, 20 bp, synthetic construct
  source 1..20: mol_type = other DNA
cagagggctgacgaggatgt

SEQ ID NO: 60178 - DNA, 20 bp, synthetic construct
  source 1..20: mol_type = other DNA
ttggtgaagcagctggtcag

SEQ ID NO: 60179 - DNA, 20 bp, synthetic construct
  source 1..20: mol_type = other DNA
ggagggccacatgtagaggc

SEQ ID NO: 60180 - DNA, 20 bp, synthetic construct
  source 1..20: mol_type = other DNA
ggaggagaagaacgacgaga

SEQ ID NO: 60181 - DNA, 20 bp, synthetic construct
  source 1..20: mol_type = other DNA
ttaacaagaagggacagcaa

SEQ ID NO: 60182 - DNA, 20 bp, synthetic construct
  source 1..20: mol_type = other DNA
gtcgcagcgacccgagcgga

SEQ ID NO: 60183 - DNA, 20 bp, synthetic construct
  source 1..20: mol_type = other DNA
ggctgacgaggatgtggagg

SEQ ID NO: 60184 - DNA, 20 bp, synthetic construct
  source 1..20: mol_type = other DNA
ggatacacccctgagccagg

SEQ ID NO: 60185 - DNA, 20 bp, synthetic construct
  source 1..20: mol_type = other DNA
tatgaggacctcatgcgctc

SEQ ID NO: 60186 - DNA, 20 bp, synthetic construct
  source 1..20: mol_type = other DNA
gtccgaccagatcgagtgag

SEQ ID NO: 60187 - DNA, 20 bp, synthetic construct
  source 1..20: mol_type = other DNA
tgggcacgttgggacagaaa

SEQ ID NO: 60188 - DNA, 20 bp, synthetic construct
  source 1..20: mol_type = other DNA
cagtttgagatggccatgtg

SEQ ID NO: 60189 - DNA, 20 bp, synthetic construct
  source 1..20: mol_type = other DNA
ggaaggtctcggaggtgaag

SEQ ID NO: 60190 - DNA, 20 bp, synthetic construct
  source 1..20: mol_type = other DNA
tcggaggtgagcgtgtgctc

SEQ ID NO: 60191 - DNA, 20 bp, synthetic construct
  source 1..20: mol_type = other DNA
accacgtctgcctgctggta

SEQ ID NO: 60192 - DNA, 20 bp, synthetic construct
  source 1..20: mol_type = other DNA
gatccttaacaagaagggac

SEQ ID NO: 60193 - DNA, 20 bp, synthetic construct
  source 1..20: mol_type = other DNA
cctaatttcaccaatccact

SEQ ID NO: 60194 - DNA, 20 bp, synthetic construct
  source 1..20: mol_type = other DNA
ccaggatgtaagacaggatg

SEQ ID NO: 60195 - DNA, 20 bp, synthetic construct
  source 1..20: mol_type = other DNA
cagcacaacgactccctcaa

SEQ ID NO: 60196 - DNA, 20 bp, synthetic construct
  source 1..20: mol_type = other DNA
ctgtccgaccagatcgagtg

SEQ ID NO: 60197 - DNA, 20 bp, synthetic construct
  source 1..20: mol_type = other DNA
gaggagcaggagcgctacat

SEQ ID NO: 60198 - DNA, 20 bp, synthetic construct
  source 1..20: mol_type = other DNA
cccgagcggaagaccttcca

SEQ ID NO: 60199 - DNA, 20 bp, synthetic construct
  source 1..20: mol_type = other DNA
tcttccagcagtctgccggg

SEQ ID NO: 60200 - DNA, 20 bp, synthetic construct
  source 1..20: mol_type = other DNA
tgaggacctcatgcgctcgg

SEQ ID NO: 60201 - DNA, 20 bp, synthetic construct
  source 1..20: mol_type = other DNA
ctcagacacagtactcgcag

SEQ ID NO: 60202 - DNA, 20 bp, synthetic construct
  source 1..20: mol_type = other DNA
gtggagccggggcgccgaca

SEQ ID NO: 60203 - DNA, 20 bp, synthetic construct
  source 1..20: mol_type = other DNA
cgaggaggtgcctacatcca

SEQ ID NO: 60204 - DNA, 20 bp, synthetic construct
  source 1..20: mol_type = other DNA
gcttaggtgagaatctggga

SEQ ID NO: 60205 - DNA, 20 bp, synthetic construct
  source 1..20: mol_type = other DNA
ggtgaaggcagagtctctgg

SEQ ID NO: 60206 - DNA, 20 bp, synthetic construct
  source 1..20: mol_type = other DNA
gccgagcggctgctgcagga

SEQ ID NO: 60207 - DNA, 20 bp, synthetic construct
  source 1..20: mol_type = other DNA
ctgtcccaggtcaactaccg

SEQ ID NO: 60208 - DNA, 20 bp, synthetic construct
  source 1..20: mol_type = other DNA
gcacagcagaggcgatgaag

SEQ ID NO: 60209 - DNA, 20 bp, synthetic construct
  source 1..20: mol_type = other DNA
cacggatagcgccgctgccc

SEQ ID NO: 60210 - DNA, 20 bp, synthetic construct
  source 1..20: mol_type = other DNA
aatgataaggatgtaaagat

SEQ ID NO: 60211 - DNA, 20 bp, synthetic construct
  source 1..20: mol_type = other DNA
ttccagcagtctgccgggtg

SEQ ID NO: 60212 - DNA, 20 bp, synthetic construct
  source 1..20: mol_type = other DNA
acagacccagtgcagctcca

SEQ ID NO: 60213 - DNA, 20 bp, synthetic construct
  source 1..20: mol_type = other DNA
agaaacatctcactagagtt

SEQ ID NO: 60214 - DNA, 20 bp, synthetic construct
  source 1..20: mol_type = other DNA
agatctatgaggacctcatg

SEQ ID NO: 60215 - DNA, 20 bp, synthetic construct
  source 1..20: mol_type = other DNA
ggaagaggaggaagagaagc

SEQ ID NO: 60216 - DNA, 20 bp, synthetic construct
  source 1..20: mol_type = other DNA
ccaggagtggacagctggtg

SEQ ID NO: 60217 - DNA, 20 bp, synthetic construct
  source 1..20: mol_type = other DNA
acagtcctttcccagggtcg

SEQ ID NO: 60218 - DNA, 20 bp, synthetic construct
  source 1..20: mol_type = other DNA
gcgcagggccaccgacggca

SEQ ID NO: 60219 - DNA, 20 bp, synthetic construct
  source 1..20: mol_type = other DNA
ccatcttgggcagacctgga

SEQ ID NO: 60220 - DNA, 20 bp, synthetic construct
  source 1..20: mol_type = other DNA
ggttcatctggacattccag

SEQ ID NO: 60221 - DNA, 20 bp, synthetic construct
  source 1..20: mol_type = other DNA
gattgaggtggctggagctg

SEQ ID NO: 60222 - DNA, 20 bp, synthetic construct
  source 1..20: mol_type = other DNA
agtgaacgccgacgagcgga

SEQ ID NO: 60223 - DNA, 20 bp, synthetic construct
  source 1..20: mol_type = other DNA
gaagaagtaaccctggttgg

SEQ ID NO: 60224 - DNA, 20 bp, synthetic construct
  source 1..20: mol_type = other DNA
ataatgggcttcagctgcag

SEQ ID NO: 60225 - DNA, 20 bp, synthetic construct
  source 1..20: mol_type = other DNA
tgcagggagcggctctgctg

SEQ ID NO: 60226 - DNA, 20 bp, synthetic construct
  source 1..20: mol_type = other DNA
acagctccccagacccccgc

SEQ ID NO: 60227 - DNA, 20 bp, synthetic construct
  source 1..20: mol_type = other DNA
ctcacctccacatcctcgtc

SEQ ID NO: 60228 - DNA, 20 bp, synthetic construct
  source 1..20: mol_type = other DNA
aggactcgtacttgagcacc

SEQ ID NO: 60229 - DNA, 20 bp, synthetic construct
  source 1..20: mol_type = other DNA
tggtggagaatctccgagtg

SEQ ID NO: 60230 - DNA, 20 bp, synthetic construct
  source 1..20: mol_type = other DNA
tgataaggatgtaaagattg

SEQ ID NO: 60231 - DNA, 20 bp, synthetic construct
  source 1..20: mol_type = other DNA
cctccatcttgggcagacct

SEQ ID NO: 60232 - DNA, 20 bp, synthetic construct
  source 1..20: mol_type = other DNA
tggtgatggagcctgtggaa

SEQ ID NO: 60233 - DNA, 20 bp, synthetic construct
  source 1..20: mol_type = other DNA
ggagcagccggaagactaca

SEQ ID NO: 60234 - DNA, 20 bp, synthetic construct
  source 1..20: mol_type = other DNA
gtgtaagagtataatcacca

SEQ ID NO: 60235 - DNA, 20 bp, synthetic construct
  source 1..20: mol_type = other DNA
cccactactttgttctgacc

SEQ ID NO: 60236 - DNA, 20 bp, synthetic construct
  source 1..20: mol_type = other DNA
cacgtagttggcagggaacc

SEQ ID NO: 60237 - DNA, 20 bp, synthetic construct
  source 1..20: mol_type = other DNA
ttcagcaaggaccagttccc

SEQ ID NO: 60238 - DNA, 20 bp, synthetic construct
  source 1..20: mol_type = other DNA
gacagaagcagatcttcctt

SEQ ID NO: 60239 - DNA, 20 bp, synthetic construct
  source 1..20: mol_type = other DNA
tgccaggatgtaagacagga

SEQ ID NO: 60240 - DNA, 20 bp, synthetic construct
  source 1..20: mol_type = other DNA
agcaacttgccctgtacccc

SEQ ID NO: 60241 - DNA, 20 bp, synthetic construct
  source 1..20: mol_type = other DNA
ggcctggatgcctacgacct

SEQ ID NO: 60242 - DNA, 20 bp, synthetic construct
  source 1..20: mol_type = other DNA
ggacctggtgtggaagctgc

SEQ ID NO: 60243 - DNA, 20 bp, synthetic construct
  source 1..20: mol_type = other DNA
tccttcaggtaaggctctcc

SEQ ID NO: 60244 - DNA, 20 bp, synthetic construct
  source 1..20: mol_type = other DNA
cggggaccagttctccagtg

SEQ ID NO: 60245 - DNA, 20 bp, synthetic construct
  source 1..20: mol_type = other DNA
gctgcagggagcggctctgc

SEQ ID NO: 60246 - DNA, 20 bp, synthetic construct
  source 1..20: mol_type = other DNA
ccagcagtctgccgggtgag

SEQ ID NO: 60247 - DNA, 20 bp, synthetic construct
  source 1..20: mol_type = other DNA
cccaccccaccatcaaggtc

SEQ ID NO: 60248 - DNA, 20 bp, synthetic construct
  source 1..20: mol_type = other DNA
gaatgtggagcccatctcac

SEQ ID NO: 60249 - DNA, 20 bp, synthetic construct
  source 1..20: mol_type = other DNA
ggcagcgaggtgagcccatg

SEQ ID NO: 60250 - DNA, 20 bp, synthetic construct
  source 1..20: mol_type = other DNA
ctcagcctcccagagtgctg

SEQ ID NO: 60251 - DNA, 20 bp, synthetic construct
  source 1..20: mol_type = other DNA
cagcagcatgagcttggagg

SEQ ID NO: 60252 - DNA, 20 bp, synthetic construct
  source 1..20: mol_type = other DNA
gggggacacactcctcacca

SEQ ID NO: 60253 - DNA, 20 bp, synthetic construct
  source 1..20: mol_type = other DNA
tggtagatccgtttgatcct

SEQ ID NO: 60254 - DNA, 20 bp, synthetic construct
  source 1..20: mol_type = other DNA
gctcaactggctgaagtcca

SEQ ID NO: 60255 - DNA, 20 bp, synthetic construct
  source 1..20: mol_type = other DNA
tggacggcgaagtaaagcat

SEQ ID NO: 60256 - DNA, 20 bp, synthetic construct
  source 1..20: mol_type = other DNA
agcaaggaccagttcccaga

SEQ ID NO: 60257 - DNA, 20 bp, synthetic construct
  source 1..20: mol_type = other DNA
ctggctcagtgcgtgaacga

SEQ ID NO: 60258 - DNA, 20 bp, synthetic construct
  source 1..20: mol_type = other DNA
tgcactcattgatggagaag

SEQ ID NO: 60259 - DNA, 20 bp, synthetic construct
  source 1..20: mol_type = other DNA
aggtcacgcggtggctgggc

SEQ ID NO: 60260 - DNA, 20 bp, synthetic construct
  source 1..20: mol_type = other DNA
tccccagtgccagggagtcc

SEQ ID NO: 60261 - DNA, 20 bp, synthetic construct
  source 1..20: mol_type = other DNA
gcagctgcgggaaatcctgg

SEQ ID NO: 60262 - DNA, 20 bp, synthetic construct
  source 1..20: mol_type = other DNA
cccctgcagattgagaggta

SEQ ID NO: 60263 - DNA, 20 bp, synthetic construct
  source 1..20: mol_type = other DNA
ggaggagggtccgaaggagt

SEQ ID NO: 60264 - DNA, 20 bp, synthetic construct
  source 1..20: mol_type = other DNA
aaattaggagcaacttgccc

SEQ ID NO: 60265 - DNA, 20 bp, synthetic construct
  source 1..20: mol_type = other DNA
tttacatagttggaatgtgg

SEQ ID NO: 60266 - DNA, 20 bp, synthetic construct
  source 1..20: mol_type = other DNA
acccacacccctgcagattg

SEQ ID NO: 60267 - DNA, 20 bp, synthetic construct
  source 1..20: mol_type = other DNA
aggagtggacagctggtgag

SEQ ID NO: 60268 - DNA, 20 bp, synthetic construct
  source 1..20: mol_type = other DNA
gggcacaggccatcagcgcc

SEQ ID NO: 60269 - DNA, 20 bp, synthetic construct
  source 1..20: mol_type = other DNA
gttcacagggtcctccaggt

SEQ ID NO: 60270 - DNA, 20 bp, synthetic construct
  source 1..20: mol_type = other DNA
atagtttaggtgagtggccc

SEQ ID NO: 60271 - DNA, 20 bp, synthetic construct
  source 1..20: mol_type = other DNA
aacgagatgctgtgcaagac

SEQ ID NO: 60272 - DNA, 20 bp, synthetic construct
  source 1..20: mol_type = other DNA
cgggaaggtctcggaggtga

SEQ ID NO: 60273 - DNA, 20 bp, synthetic construct
  source 1..20: mol_type = other DNA
cttgcactcattgatggaga

SEQ ID NO: 60274 - DNA, 20 bp, synthetic construct
  source 1..20: mol_type = other DNA
ggacctgactgactacctca

SEQ ID NO: 60275 - DNA, 20 bp, synthetic construct
  source 1..20: mol_type = other DNA
gcctcagccttgagaggcct

SEQ ID NO: 60276 - DNA, 20 bp, synthetic construct
  source 1..20: mol_type = other DNA
agctggaggacgagcaacgg

SEQ ID NO: 60277 - DNA, 20 bp, synthetic construct
  source 1..20: mol_type = other DNA
gcaggaagattatgatcgcc

SEQ ID NO: 60278 - DNA, 20 bp, synthetic construct
  source 1..20: mol_type = other DNA
cgagcgcatgaggtcctcat

SEQ ID NO: 60279 - DNA, 20 bp, synthetic construct
  source 1..20: mol_type = other DNA
ttccaggtgtccaccaagga

SEQ ID NO: 60280 - DNA, 20 bp, synthetic construct
  source 1..20: mol_type = other DNA
ggaggtgcctacatccatga

SEQ ID NO: 60281 - DNA, 20 bp, synthetic construct
  source 1..20: mol_type = other DNA
gatgaggaggctgatctgtg

SEQ ID NO: 60282 - DNA, 20 bp, synthetic construct
  source 1..20: mol_type = other DNA
caaggaccagttcccagagg

SEQ ID NO: 60283 - DNA, 20 bp, synthetic construct
  source 1..20: mol_type = other DNA
ggggtacttcagggtgagga

SEQ ID NO: 60284 - DNA, 20 bp, synthetic construct
  source 1..20: mol_type = other DNA
agcatctgacaggccttgca

SEQ ID NO: 60285 - DNA, 20 bp, synthetic construct
  source 1..20: mol_type = other DNA
ccgagatgaagctcagacac

SEQ ID NO: 60286 - DNA, 20 bp, synthetic construct
  source 1..20: mol_type = other DNA
cggatcagccacatctgtac

SEQ ID NO: 60287 - DNA, 20 bp, synthetic construct
  source 1..20: mol_type = other DNA
ggtaccacctgagaacaggc

SEQ ID NO: 60288 - DNA, 20 bp, synthetic construct
  source 1..20: mol_type = other DNA
cggccgagcgggaaatcgtg

SEQ ID NO: 60289 - DNA, 20 bp, synthetic construct
  source 1..20: mol_type = other DNA
gcttgacctcgttcacgcac

SEQ ID NO: 60290 - DNA, 20 bp, synthetic construct
  source 1..20: mol_type = other DNA
tcggattggtgggaggagga

SEQ ID NO: 60291 - DNA, 20 bp, synthetic construct
  source 1..20: mol_type = other DNA
ggccacagagggccagtacc

SEQ ID NO: 60292 - DNA, 20 bp, synthetic construct
  source 1..20: mol_type = other DNA
accaaaaaggtcccgtctgc

SEQ ID NO: 60293 - DNA, 20 bp, synthetic construct
  source 1..20: mol_type = other DNA
gcgccaggccagcaccaacg

SEQ ID NO: 60294 - DNA, 20 bp, synthetic construct
  source 1..20: mol_type = other DNA
tctgaccctgagtacctgct

SEQ ID NO: 60295 - DNA, 20 bp, synthetic construct
  source 1..20: mol_type = other DNA
ggccagaggcgtacagggat

SEQ ID NO: 60296 - DNA, 20 bp, synthetic construct
  source 1..20: mol_type = other DNA
gaaacactggaatgtccaga

SEQ ID NO: 60297 - DNA, 20 bp, synthetic construct
  source 1..20: mol_type = other DNA
tcatcatccgggccagccag

SEQ ID NO: 60298 - DNA, 20 bp, synthetic construct
  source 1..20: mol_type = other DNA
ccgcagatctgggtcgaggt

SEQ ID NO: 60299 - DNA, 20 bp, synthetic construct
  source 1..20: mol_type = other DNA
acgcccacgagagcaaagag

SEQ ID NO: 60300 - DNA, 20 bp, synthetic construct
  source 1..20: mol_type = other DNA
caaacacctgctgtactccc

SEQ ID NO: 60301 - DNA, 20 bp, synthetic construct
  source 1..20: mol_type = other DNA
cagaaccggcagagggctga

SEQ ID NO: 60302 - DNA, 20 bp, synthetic construct
  source 1..20: mol_type = other DNA
cagcactgtgttggcgtaca

SEQ ID NO: 60303 - DNA, 20 bp, synthetic construct
  source 1..20: mol_type = other DNA
ccgcaggatgtggaccaacg

SEQ ID NO: 60304 - DNA, 20 bp, synthetic construct
  source 1..20: mol_type = other DNA
gacgggcaggaagggctgca

SEQ ID NO: 60305 - DNA, 20 bp, synthetic construct
  source 1..20: mol_type = other DNA
ggaagagaagctgaagcagt

SEQ ID NO: 60306 - DNA, 20 bp, synthetic construct
  source 1..20: mol_type = other DNA
cctgcagcagccgctcggcc

SEQ ID NO: 60307 - DNA, 20 bp, synthetic construct
  source 1..20: mol_type = other DNA
aaagacgagagaccaatact

SEQ ID NO: 60308 - DNA, 20 bp, synthetic construct
  source 1..20: mol_type = other DNA
cgcacgatttcccgctcggc

SEQ ID NO: 60309 - DNA, 20 bp, synthetic construct
  source 1..20: mol_type = other DNA
gcctggagctgcactgggtc

SEQ ID NO: 60310 - DNA, 20 bp, synthetic construct
  source 1..20: mol_type = other DNA
tgtccatgtgattcagcagg

SEQ ID NO: 60311 - DNA, 20 bp, synthetic construct
  source 1..20: mol_type = other DNA
cctgcagcagctccagctcc

SEQ ID NO: 60312 - DNA, 20 bp, synthetic construct
  source 1..20: mol_type = other DNA
gcacccacacccctgcagat

SEQ ID NO: 60313 - DNA, 20 bp, synthetic construct
  source 1..20: mol_type = other DNA
agggctgacgaggatgtgga

SEQ ID NO: 60314 - DNA, 20 bp, synthetic construct
  source 1..20: mol_type = other DNA
gctgcaggaggaggaggaac

SEQ ID NO: 60315 - DNA, 20 bp, synthetic construct
  source 1..20: mol_type = other DNA
ggatctaccacgatgggttc

SEQ ID NO: 60316 - DNA, 20 bp, synthetic construct
  source 1..20: mol_type = other DNA
atcgacgaggaggtgtactt

SEQ ID NO: 60317 - DNA, 20 bp, synthetic construct
  source 1..20: mol_type = other DNA
gatgtccacgtcacacttca

SEQ ID NO: 60318 - DNA, 20 bp, synthetic construct
  source 1..20: mol_type = other DNA
cccagtgtgtttgcaatgcc

SEQ ID NO: 60319 - DNA, 20 bp, synthetic construct
  source 1..20: mol_type = other DNA
caccttcatccgctcgtcgg

SEQ ID NO: 60320 - DNA, 20 bp, synthetic construct
  source 1..20: mol_type = other DNA
tgaatcactggattccggcc

SEQ ID NO: 60321 - DNA, 20 bp, synthetic construct
  source 1..20: mol_type = other DNA
ctgcgccaggccagcaccaa

SEQ ID NO: 60322 - DNA, 20 bp, synthetic construct
  source 1..20: mol_type = other DNA
acaaactgggaagtgactcc

SEQ ID NO: 60323 - DNA, 20 bp, synthetic construct
  source 1..20: mol_type = other DNA
gcattagcatgtgctcagcc

SEQ ID NO: 60324 - DNA, 20 bp, synthetic construct
  source 1..20: mol_type = other DNA
tgggcagacctggaggacag

SEQ ID NO: 60325 - DNA, 20 bp, synthetic construct
  source 1..20: mol_type = other DNA
gcgagacaaggtgggagtgg

SEQ ID NO: 60326 - DNA, 20 bp, synthetic construct
  source 1..20: mol_type = other DNA
gcagtaaccccaacacggat

SEQ ID NO: 60327 - DNA, 20 bp, synthetic construct
  source 1..20: mol_type = other DNA
tttagaggtctcggcgtcgg

SEQ ID NO: 60328 - DNA, 20 bp, synthetic construct
  source 1..20: mol_type = other DNA
cgggatgagcagagcaaccc

SEQ ID NO: 60329 - DNA, 20 bp, synthetic construct
  source 1..20: mol_type = other DNA
gctcacctccaagctcatgc

SEQ ID NO: 60330 - DNA, 20 bp, synthetic construct
  source 1..20: mol_type = other DNA
tggcgcagttttctctgggc

SEQ ID NO: 60331 - DNA, 20 bp, synthetic construct
  source 1..20: mol_type = other DNA
gactacctgcgcagtgtgct

SEQ ID NO: 60332 - DNA, 20 bp, synthetic construct
  source 1..20: mol_type = other DNA
ggaggaagagaagctgaagc

SEQ ID NO: 60333 - DNA, 20 bp, synthetic construct
  source 1..20: mol_type = other DNA
ataccgatgttatactgatg

SEQ ID NO: 60334 - DNA, 20 bp, synthetic construct
  source 1..20: mol_type = other DNA
ttgtggagattgaggtggct

SEQ ID NO: 60335 - DNA, 20 bp, synthetic construct
  source 1..20: mol_type = other DNA
gaggcccagctcaccgacgc

SEQ ID NO: 60336 - DNA, 20 bp, synthetic construct
  source 1..20: mol_type = other DNA
gccagtcaagagcccggcgg

SEQ ID NO: 60337 - DNA, 20 bp, synthetic construct
  source 1..20: mol_type = other DNA
ctccaggtagatgcggaagc

SEQ ID NO: 60338 - DNA, 20 bp, synthetic construct
  source 1..20: mol_type = other DNA
gacaacagggtgagtgagag

SEQ ID NO: 60339 - DNA, 20 bp, synthetic construct
  source 1..20: mol_type = other DNA
agagctggaggacgagcaac

SEQ ID NO: 60340 - DNA, 20 bp, synthetic construct
  source 1..20: mol_type = other DNA
attttacatagttggaatgt

SEQ ID NO: 60341 - DNA, 20 bp, synthetic construct
  source 1..20: mol_type = other DNA
ccacctttgactacctgcgc

SEQ ID NO: 60342 - DNA, 20 bp, synthetic construct
  source 1..20: mol_type = other DNA
acagagtttgtgggtcagtc

SEQ ID NO: 60343 - DNA, 20 bp, synthetic construct
  source 1..20: mol_type = other DNA
accttccaggtgtccaccaa

SEQ ID NO: 60344 - DNA, 20 bp, synthetic construct
  source 1..20: mol_type = other DNA
ggtgaagcagctggtcagcg

SEQ ID NO: 60345 - DNA, 20 bp, synthetic construct
  source 1..20: mol_type = other DNA
tgtcgaactccgagttccct

SEQ ID NO: 60346 - DNA, 20 bp, synthetic construct
  source 1..20: mol_type = other DNA
tcactttgctgccctggatg

SEQ ID NO: 60347 - DNA, 20 bp, synthetic construct
  source 1..20: mol_type = other DNA
gaaactgagtgttatattca

SEQ ID NO: 60348 - DNA, 20 bp, synthetic construct
  source 1..20: mol_type = other DNA
aaattgacaaacgtatgaac

SEQ ID NO: 60349 - DNA, 20 bp, synthetic construct
  source 1..20: mol_type = other DNA
cgtgacgggcgtcacatcgc

SEQ ID NO: 60350 - DNA, 20 bp, synthetic construct
  source 1..20: mol_type = other DNA
ctgcagtggaccactgtcat

SEQ ID NO: 60351 - DNA, 20 bp, synthetic construct
  source 1..20: mol_type = other DNA
ggccaaccataactcattcc

SEQ ID NO: 60352 - DNA, 20 bp, synthetic construct
  source 1..20: mol_type = other DNA
gaccagaatttcctggctca

SEQ ID NO: 60353 - DNA, 20 bp, synthetic construct
  source 1..20: mol_type = other DNA
tgtatgaggaagacatgttt

SEQ ID NO: 60354 - DNA, 20 bp, synthetic construct
  source 1..20: mol_type = other DNA
ggaaccacgcgctgttgaag

SEQ ID NO: 60355 - DNA, 20 bp, synthetic construct
  source 1..20: mol_type = other DNA
gagaagatcaccaagttgta

SEQ ID NO: 60356 - DNA, 20 bp, synthetic construct
  source 1..20: mol_type = other DNA
gacgggcagctccggccagg

SEQ ID NO: 60357 - DNA, 20 bp, synthetic construct
  source 1..20: mol_type = other DNA
atccagggcagcaaagtgaa

SEQ ID NO: 60358 - DNA, 20 bp, synthetic construct
  source 1..20: mol_type = other DNA
ggctaccgcatggtgcgccc

SEQ ID NO: 60359 - DNA, 20 bp, synthetic construct
  source 1..20: mol_type = other DNA
ggaagacatgtttagtgacc

SEQ ID NO: 60360 - DNA, 20 bp, synthetic construct
  source 1..20: mol_type = other DNA
tgaagacaacagggtgagtg

SEQ ID NO: 60361 - DNA, 20 bp, synthetic construct
  source 1..20: mol_type = other DNA
ccctggatgccatgagggtg

SEQ ID NO: 60362 - DNA, 20 bp, synthetic construct
  source 1..20: mol_type = other DNA
cgagatctatgaggacctca

SEQ ID NO: 60363 - DNA, 20 bp, synthetic construct
  source 1..20: mol_type = other DNA
gcccacccgcaagcattacc

SEQ ID NO: 60364 - DNA, 20 bp, synthetic construct
  source 1..20: mol_type = other DNA
tgccaaccgattcatcatca

SEQ ID NO: 60365 - DNA, 20 bp, synthetic construct
  source 1..20: mol_type = other DNA
ggagccgggcgcctgcggga

SEQ ID NO: 60366 - DNA, 20 bp, synthetic construct
  source 1..20: mol_type = other DNA
cagcggcacagctggagaac

SEQ ID NO: 60367 - DNA, 20 bp, synthetic construct
  source 1..20: mol_type = other DNA
gacaccctactggtgagtgg

SEQ ID NO: 60368 - DNA, 20 bp, synthetic construct
  source 1..20: mol_type = other DNA
aagactccacggacaccgag

SEQ ID NO: 60369 - DNA, 20 bp, synthetic construct
  source 1..20: mol_type = other DNA
cgaggtcattggcttcacca

SEQ ID NO: 60370 - DNA, 20 bp, synthetic construct
  source 1..20: mol_type = other DNA
gccgcacctttcataccatc

SEQ ID NO: 60371 - DNA, 20 bp, synthetic construct
  source 1..20: mol_type = other DNA
agagtgagggttctgagagg

SEQ ID NO: 60372 - DNA, 20 bp, synthetic construct
  source 1..20: mol_type = other DNA
ccacgactttgagccccagc

SEQ ID NO: 60373 - DNA, 20 bp, synthetic construct
  source 1..20: mol_type = other DNA
cccagacctggggacccagg

SEQ ID NO: 60374 - DNA, 20 bp, synthetic construct
  source 1..20: mol_type = other DNA
gggaagtgtagttgaagaga

SEQ ID NO: 60375 - DNA, 20 bp, synthetic construct
  source 1..20: mol_type = other DNA
acaccggaccagcacccccg

SEQ ID NO: 60376 - DNA, 20 bp, synthetic construct
  source 1..20: mol_type = other DNA
tcatcatcaaggactcctca

SEQ ID NO: 60377 - DNA, 20 bp, synthetic construct
  source 1..20: mol_type = other DNA
cagccacagcagaaatgaca

SEQ ID NO: 60378 - DNA, 20 bp, synthetic construct
  source 1..20: mol_type = other DNA
gttgtagtcctgcttgcccg

SEQ ID NO: 60379 - DNA, 20 bp, synthetic construct
  source 1..20: mol_type = other DNA
gacgacgatgatgatcgtga

SEQ ID NO: 60380 - DNA, 20 bp, synthetic construct
  source 1..20: mol_type = other DNA
tagtccaagatgttttccta

SEQ ID NO: 60381 - DNA, 20 bp, synthetic construct
  source 1..20: mol_type = other DNA
attcagacagtgccttcatg

SEQ ID NO: 60382 - DNA, 20 bp, synthetic construct
  source 1..20: mol_type = other DNA
tgaatgaattcagcctgaaa

SEQ ID NO: 60383 - DNA, 20 bp, synthetic construct
  source 1..20: mol_type = other DNA
gttccagagtgagggttctg

SEQ ID NO: 60384 - DNA, 20 bp, synthetic construct
  source 1..20: mol_type = other DNA
agccattgcttccaggccag

SEQ ID NO: 60385 - DNA, 20 bp, synthetic construct
  source 1..20: mol_type = other DNA
gcaagaaagggcctgaggtc

SEQ ID NO: 60386 - DNA, 20 bp, synthetic construct
  source 1..20: mol_type = other DNA
gagagggagaagtccccagg

SEQ ID NO: 60387 - DNA, 20 bp, synthetic construct
  source 1..20: mol_type = other DNA
ccatagctggattggtccac

SEQ ID NO: 60388 - DNA, 20 bp, synthetic construct
  source 1..20: mol_type = other DNA
ccaagactccacggacaccg

SEQ ID NO: 60389 - DNA, 20 bp, synthetic construct
  source 1..20: mol_type = other DNA
tggtgagttctgcctgtcag

SEQ ID NO: 60390 - DNA, 20 bp, synthetic construct
  source 1..20: mol_type = other DNA
accatggccgaggcgcctca

SEQ ID NO: 60391 - DNA, 20 bp, synthetic construct
  source 1..20: mol_type = other DNA
tctataatgatcaggttcat

SEQ ID NO: 60392 - DNA, 20 bp, synthetic construct
  source 1..20: mol_type = other DNA
gttcgacaagaaatttcttc

SEQ ID NO: 60393 - DNA, 20 bp, synthetic construct
  source 1..20: mol_type = other DNA
atgttccaagtaatacatac

SEQ ID NO: 60394 - DNA, 20 bp, synthetic construct
  source 1..20: mol_type = other DNA
gcggcacatggagttcagga

SEQ ID NO: 60395 - DNA, 20 bp, synthetic construct
  source 1..20: mol_type = other DNA
atagatattgatgaagacag

SEQ ID NO: 60396 - DNA, 20 bp, synthetic construct
  source 1..20: mol_type = other DNA
gccgcagatcgcaggaccgt

SEQ ID NO: 60397 - DNA, 20 bp, synthetic construct
  source 1..20: mol_type = other DNA
cctgatcattatagatattc

SEQ ID NO: 60398 - DNA, 20 bp, synthetic construct
  source 1..20: mol_type = other DNA
atcgctcacctgggctcggt

SEQ ID NO: 60399 - DNA, 20 bp, synthetic construct
  source 1..20: mol_type = other DNA
gctgccacaactacttggaa

SEQ ID NO: 60400 - DNA, 20 bp, synthetic construct
  source 1..20: mol_type = other DNA
ttagtgaaaccactgaaagt

SEQ ID NO: 60401 - DNA, 20 bp, synthetic construct
  source 1..20: mol_type = other DNA
cggggacgcaggcggcgtga

SEQ ID NO: 60402 - DNA, 20 bp, synthetic construct
  source 1..20: mol_type = other DNA
ccaggccagagctaatctgg

SEQ ID NO: 60403 - DNA, 20 bp, synthetic construct
  source 1..20: mol_type = other DNA
ccagcacccccgggctcagc

SEQ ID NO: 60404 - DNA, 20 bp, synthetic construct
  source 1..20: mol_type = other DNA
gtgcaaaaaaaatactcagt

SEQ ID NO: 60405 - DNA, 20 bp, synthetic construct
  source 1..20: mol_type = other DNA
ttcatattgttcctggaatt

SEQ ID NO: 60406 - DNA, 20 bp, synthetic construct
  source 1..20: mol_type = other DNA
cgtggagtcttggcagctgt

SEQ ID NO: 60407 - DNA, 20 bp, synthetic construct
  source 1..20: mol_type = other DNA
tgagtaattccagaagaaac

SEQ ID NO: 60408 - DNA, 20 bp, synthetic construct
  source 1..20: mol_type = other DNA
gggacgcaggcggcgtgagg

SEQ ID NO: 60409 - DNA, 20 bp, synthetic construct
  source 1..20: mol_type = other DNA
acagtgacctagagctctgc

SEQ ID NO: 60410 - DNA, 20 bp, synthetic construct
  source 1..20: mol_type = other DNA
gcggaggatttacgaatgct

SEQ ID NO: 60411 - DNA, 20 bp, synthetic construct
  source 1..20: mol_type = other DNA
cacgtcaccctggagttcca

SEQ ID NO: 60412 - DNA, 20 bp, synthetic construct
  source 1..20: mol_type = other DNA
atctaccaaggttagagaaa

SEQ ID NO: 60413 - DNA, 20 bp, synthetic construct
  source 1..20: mol_type = other DNA
tgtgaaccatgagcacattg

SEQ ID NO: 60414 - DNA, 20 bp, synthetic construct
  source 1..20: mol_type = other DNA
catgcagatatggaatgtgc

SEQ ID NO: 60415 - DNA, 20 bp, synthetic construct
  source 1..20: mol_type = other DNA
cccagtcgttgctgttcttt

SEQ ID NO: 60416 - DNA, 20 bp, synthetic construct
  source 1..20: mol_type = other DNA
agctcatggacaaagtggta

SEQ ID NO: 60417 - DNA, 20 bp, synthetic construct
  source 1..20: mol_type = other DNA
gtccaagatgttttcctagg

SEQ ID NO: 60418 - DNA, 20 bp, synthetic construct
  source 1..20: mol_type = other DNA
ccagaatggagtcgcaggtg

SEQ ID NO: 60419 - DNA, 20 bp, synthetic construct
  source 1..20: mol_type = other DNA
tgtggccatcagctgctcgt

SEQ ID NO: 60420 - DNA, 20 bp, synthetic construct
  source 1..20: mol_type = other DNA
acactgaagaaatttcttgt

SEQ ID NO: 60421 - DNA, 20 bp, synthetic construct
  source 1..20: mol_type = other DNA
tggggccagctcgagaaagc

SEQ ID NO: 60422 - DNA, 20 bp, synthetic construct
  source 1..20: mol_type = other DNA
caggccagagctaatctggt

SEQ ID NO: 60423 - DNA, 20 bp, synthetic construct
  source 1..20: mol_type = other DNA
gaggaacacgtcctgggggc

SEQ ID NO: 60424 - DNA, 20 bp, synthetic construct
  source 1..20: mol_type = other DNA
gcacctcaactatgtgactg

SEQ ID NO: 60425 - DNA, 20 bp, synthetic construct
  source 1..20: mol_type = other DNA
gacaccgagagcaacaacga

SEQ ID NO: 60426 - DNA, 20 bp, synthetic construct
  source 1..20: mol_type = other DNA
accttccacagcaaggagat

SEQ ID NO: 60427 - DNA, 20 bp, synthetic construct
  source 1..20: mol_type = other DNA
agcaagctgccgcagatcgc

SEQ ID NO: 60428 - DNA, 20 bp, synthetic construct
  source 1..20: mol_type = other DNA
gtgatgtgactggtgagttc

SEQ ID NO: 60429 - DNA, 20 bp, synthetic construct
  source 1..20: mol_type = other DNA
cgcagatcgcaggaccgtgg

SEQ ID NO: 60430 - DNA, 20 bp, synthetic construct
  source 1..20: mol_type = other DNA
ctacagccaccgctctttga

SEQ ID NO: 60431 - DNA, 20 bp, synthetic construct
  source 1..20: mol_type = other DNA
actggtgagttctgcctgtc

SEQ ID NO: 60432 - DNA, 20 bp, synthetic construct
  source 1..20: mol_type = other DNA
ttacccagggcgcagagggc

SEQ ID NO: 60433 - DNA, 20 bp, synthetic construct
  source 1..20: mol_type = other DNA
acggacaccgagagcaacaa

SEQ ID NO: 60434 - DNA, 20 bp, synthetic construct
  source 1..20: mol_type = other DNA
gacatcttatgggaacatct

SEQ ID NO: 60435 - DNA, 20 bp, synthetic construct
  source 1..20: mol_type = other DNA
gatctctagatgttcccata

SEQ ID NO: 60436 - DNA, 20 bp, synthetic construct
  source 1..20: mol_type = other DNA
gccagccgcttctacaggat

SEQ ID NO: 60437 - DNA, 20 bp, synthetic construct
  source 1..20: mol_type = other DNA
actgagttgggcaagtttct

SEQ ID NO: 60438 - DNA, 20 bp, synthetic construct
  source 1..20: mol_type = other DNA
gagctacagccaccgctctt

SEQ ID NO: 60439 - DNA, 20 bp, synthetic construct
  source 1..20: mol_type = other DNA
aaacttagaaatataaaact

SEQ ID NO: 60440 - DNA, 20 bp, synthetic construct
  source 1..20: mol_type = other DNA
gttccaagtaatacatacgg

SEQ ID NO: 60441 - DNA, 20 bp, synthetic construct
  source 1..20: mol_type = other DNA
agtgacctagagctctgccg

SEQ ID NO: 60442 - DNA, 20 bp, synthetic construct
  source 1..20: mol_type = other DNA
gatttatatcctggaccctg

SEQ ID NO: 60443 - DNA, 20 bp, synthetic construct
  source 1..20: mol_type = other DNA
cggtacacgtagcgtttccc

SEQ ID NO: 60444 - DNA, 20 bp, synthetic construct
  source 1..20: mol_type = other DNA
gctgacgcgactcacctgga

SEQ ID NO: 60445 - DNA, 20 bp, synthetic construct
  source 1..20: mol_type = other DNA
gacaaggagcagctcaagga

SEQ ID NO: 60446 - DNA, 20 bp, synthetic construct
  source 1..20: mol_type = other DNA
ctctagatgttcccataaga

SEQ ID NO: 60447 - DNA, 20 bp, synthetic construct
  source 1..20: mol_type = other DNA
caggagaacggcccttccag

SEQ ID NO: 60448 - DNA, 20 bp, synthetic construct
  source 1..20: mol_type = other DNA
gcacttcatctgtaatcttc

SEQ ID NO: 60449 - DNA, 20 bp, synthetic construct
  source 1..20: mol_type = other DNA
tgcgcaactgctctggcacc

SEQ ID NO: 60450 - DNA, 20 bp, synthetic construct
  source 1..20: mol_type = other DNA
ggggacttctgctacgttgg

SEQ ID NO: 60451 - DNA, 20 bp, synthetic construct
  source 1..20: mol_type = other DNA
ggacttctgctacgttgggg

SEQ ID NO: 60452 - DNA, 20 bp, synthetic construct
  source 1..20: mol_type = other DNA
cccccaccgcctactggcaa

SEQ ID NO: 60453 - DNA, 20 bp, synthetic construct
  source 1..20: mol_type = other DNA
tccacaagacagcggggaaa

SEQ ID NO: 60454 - DNA, 20 bp, synthetic construct
  source 1..20: mol_type = other DNA
gagcacctcaactatgtgac

SEQ ID NO: 60455 - DNA, 20 bp, synthetic construct
  source 1..20: mol_type = other DNA
gcaagcaagaagaagaagag

SEQ ID NO: 60456 - DNA, 20 bp, synthetic construct
  source 1..20: mol_type = other DNA
ccataagatgtccccaacaa

SEQ ID NO: 60457 - DNA, 20 bp, synthetic construct
  source 1..20: mol_type = other DNA
tccaggacctgaaaccccag

SEQ ID NO: 60458 - DNA, 20 bp, synthetic construct
  source 1..20: mol_type = other DNA
ggaacatctagagatcctgc

SEQ ID NO: 60459 - DNA, 20 bp, synthetic construct
  source 1..20: mol_type = other DNA
tggcagctgttgctcgggga

SEQ ID NO: 60460 - DNA, 20 bp, synthetic construct
  source 1..20: mol_type = other DNA
cactgccagccgcttctaca

SEQ ID NO: 60461 - DNA, 20 bp, synthetic construct
  source 1..20: mol_type = other DNA
atcgaccgagcccaggtgag

SEQ ID NO: 60462 - DNA, 20 bp, synthetic construct
  source 1..20: mol_type = other DNA
cagcccacatcacccagtcc

SEQ ID NO: 60463 - DNA, 20 bp, synthetic construct
  source 1..20: mol_type = other DNA
cctggatgcgcaactgctct

SEQ ID NO: 60464 - DNA, 20 bp, synthetic construct
  source 1..20: mol_type = other DNA
tcgctcacattagcccccac

SEQ ID NO: 60465 - DNA, 20 bp, synthetic construct
  source 1..20: mol_type = other DNA
gatataaatctcatcctgtg

SEQ ID NO: 60466 - DNA, 20 bp, synthetic construct
  source 1..20: mol_type = other DNA
catgctgacgcgactcacct

SEQ ID NO: 60467 - DNA, 20 bp, synthetic construct
  source 1..20: mol_type = other DNA
gtattcagacagtgccttca

SEQ ID NO: 60468 - DNA, 20 bp, synthetic construct
  source 1..20: mol_type = other DNA
catagtcgtgcatgctgacg

SEQ ID NO: 60469 - DNA, 20 bp, synthetic construct
  source 1..20: mol_type = other DNA
aggatttccttctgaagggt

SEQ ID NO: 60470 - DNA, 20 bp, synthetic construct
  source 1..20: mol_type = other DNA
cgccgaatagattcaacaag

SEQ ID NO: 60471 - DNA, 20 bp, synthetic construct
  source 1..20: mol_type = other DNA
ccaagtcttctccacggtcc

SEQ ID NO: 60472 - DNA, 20 bp, synthetic construct
  source 1..20: mol_type = other DNA
ttcaggctgaattcattcac

SEQ ID NO: 60473 - DNA, 20 bp, synthetic construct
  source 1..20: mol_type = other DNA
cagatgaagtgctgaaactt

SEQ ID NO: 60474 - DNA, 20 bp, synthetic construct
  source 1..20: mol_type = other DNA
ctcggggacgcctcgcgctc

SEQ ID NO: 60475 - DNA, 20 bp, synthetic construct
  source 1..20: mol_type = other DNA
tagattcaacaagggtgtcc

SEQ ID NO: 60476 - DNA, 20 bp, synthetic construct
  source 1..20: mol_type = other DNA
tctgtccactgccgggggtc

SEQ ID NO: 60477 - DNA, 20 bp, synthetic construct
  source 1..20: mol_type = other DNA
agcccaggtgagcgattgca

SEQ ID NO: 60478 - DNA, 20 bp, synthetic construct
  source 1..20: mol_type = other DNA
gaagattacagatgaagtgc

SEQ ID NO: 60479 - DNA, 20 bp, synthetic construct
  source 1..20: mol_type = other DNA
cctactggtgagtggcgccc

SEQ ID NO: 60480 - DNA, 20 bp, synthetic construct
  source 1..20: mol_type = other DNA
cctggagggcaacaatttcg

SEQ ID NO: 60481 - DNA, 20 bp, synthetic construct
  source 1..20: mol_type = other DNA
ctggagatgttttgaaggta

SEQ ID NO: 60482 - DNA, 20 bp, synthetic construct
  source 1..20: mol_type = other DNA
gtaagggatgcggccgtggg

SEQ ID NO: 60483 - DNA, 20 bp, synthetic construct
  source 1..20: mol_type = other DNA
ccagctgtgcagggcggaag

SEQ ID NO: 60484 - DNA, 20 bp, synthetic construct
  source 1..20: mol_type = other DNA
gtggaggaagagaagcccgt

SEQ ID NO: 60485 - DNA, 20 bp, synthetic construct
  source 1..20: mol_type = other DNA
gctgatcttggcgtagtgcc

SEQ ID NO: 60486 - DNA, 20 bp, synthetic construct
  source 1..20: mol_type = other DNA
aaagagaagaacttctccct

SEQ ID NO: 60487 - DNA, 20 bp, synthetic construct
  source 1..20: mol_type = other DNA
cgtgaaaccatctgtggggg

SEQ ID NO: 60488 - DNA, 20 bp, synthetic construct
  source 1..20: mol_type = other DNA
agagctcaatggaccccttc

SEQ ID NO: 60489 - DNA, 20 bp, synthetic construct
  source 1..20: mol_type = other DNA
acgcgcaggaactcctcctc

SEQ ID NO: 60490 - DNA, 20 bp, synthetic construct
  source 1..20: mol_type = other DNA
gagcaggccatcatcagcca

SEQ ID NO: 60491 - DNA, 20 bp, synthetic construct
  source 1..20: mol_type = other DNA
ctgctccaggtctaggcaac

SEQ ID NO: 60492 - DNA, 20 bp, synthetic construct
  source 1..20: mol_type = other DNA
ccggtagcaagcacgttctg

SEQ ID NO: 60493 - DNA, 20 bp, synthetic construct
  source 1..20: mol_type = other DNA
gtgaaaacagacacggtgta

SEQ ID NO: 60494 - DNA, 20 bp, synthetic construct
  source 1..20: mol_type = other DNA
caccagctgcagcaggtact

SEQ ID NO: 60495 - DNA, 20 bp, synthetic construct
  source 1..20: mol_type = other DNA
cttgcatgttgtgcaaatgt

SEQ ID NO: 60496 - DNA, 20 bp, synthetic construct
  source 1..20: mol_type = other DNA
gatcgtagttggaggaatcc

SEQ ID NO: 60497 - DNA, 20 bp, synthetic construct
  source 1..20: mol_type = other DNA
aggattttggcaaggtgagc

SEQ ID NO: 60498 - DNA, 20 bp, synthetic construct
  source 1..20: mol_type = other DNA
cttcatggactccaagatga

SEQ ID NO: 60499 - DNA, 20 bp, synthetic construct
  source 1..20: mol_type = other DNA
aagattgccctggagctctc

SEQ ID NO: 60500 - DNA, 20 bp, synthetic construct
  source 1..20: mol_type = other DNA
agccacatctgaggatgaag

SEQ ID NO: 60501 - DNA, 20 bp, synthetic construct
  source 1..20: mol_type = other DNA
agcaaacacatataggaggt

SEQ ID NO: 60502 - DNA, 20 bp, synthetic construct
  source 1..20: mol_type = other DNA
ggagttaatagtgggacatc

SEQ ID NO: 60503 - DNA, 20 bp, synthetic construct
  source 1..20: mol_type = other DNA
aaaaggggcattatcccgct

SEQ ID NO: 60504 - DNA, 20 bp, synthetic construct
  source 1..20: mol_type = other DNA
cacatgatccccctgttctg

SEQ ID NO: 60505 - DNA, 20 bp, synthetic construct
  source 1..20: mol_type = other DNA
cgtcagccgctctcggagga

SEQ ID NO: 60506 - DNA, 20 bp, synthetic construct
  source 1..20: mol_type = other DNA
atgaggctgcggtacagctg

SEQ ID NO: 60507 - DNA, 20 bp, synthetic construct
  source 1..20: mol_type = other DNA
gagatggagctgaaggagga

SEQ ID NO: 60508 - DNA, 20 bp, synthetic construct
  source 1..20: mol_type = other DNA
ggtgcccacctcgaggctgc

SEQ ID NO: 60509 - DNA, 20 bp, synthetic construct
  source 1..20: mol_type = other DNA
ggtcatcaagctgcagcagc

SEQ ID NO: 60510 - DNA, 20 bp, synthetic construct
  source 1..20: mol_type = other DNA
ttcaacacttcaaggtcatg

SEQ ID NO: 60511 - DNA, 20 bp, synthetic construct
  source 1..20: mol_type = other DNA
gaacaaggccaaaggcaaga

SEQ ID NO: 60512 - DNA, 20 bp, synthetic construct
  source 1..20: mol_type = other DNA
cttcaggcagtagatgagcc

SEQ ID NO: 60513 - DNA, 20 bp, synthetic construct
  source 1..20: mol_type = other DNA
gctctaacctgggtaaggga

SEQ ID NO: 60514 - DNA, 20 bp, synthetic construct
  source 1..20: mol_type = other DNA
gagagctgtacaagttatag

SEQ ID NO: 60515 - DNA, 20 bp, synthetic construct
  source 1..20: mol_type = other DNA
agctagagattcattccggt

SEQ ID NO: 60516 - DNA, 20 bp, synthetic construct
  source 1..20: mol_type = other DNA
gacaaattccatctccagac

SEQ ID NO: 60517 - DNA, 20 bp, synthetic construct
  source 1..20: mol_type = other DNA
ccaccattctccatgtattc

SEQ ID NO: 60518 - DNA, 20 bp, synthetic construct
  source 1..20: mol_type = other DNA
taatacacttggagtggttt

SEQ ID NO: 60519 - DNA, 20 bp, synthetic construct
  source 1..20: mol_type = other DNA
ggtccagcaggaatttggtc

SEQ ID NO: 60520 - DNA, 20 bp, synthetic construct
  source 1..20: mol_type = other DNA
tgcagatgaagctggaggtg

SEQ ID NO: 60521 - DNA, 20 bp, synthetic construct
  source 1..20: mol_type = other DNA
tcagccgctctcggaggaag

SEQ ID NO: 60522 - DNA, 20 bp, synthetic construct
  source 1..20: mol_type = other DNA
ctgtccagctgataaaagac

SEQ ID NO: 60523 - DNA, 20 bp, synthetic construct
  source 1..20: mol_type = other DNA
tgcatggagacacgcacagg

SEQ ID NO: 60524 - DNA, 20 bp, synthetic construct
  source 1..20: mol_type = other DNA
tgagttgatgagcttcttca

SEQ ID NO: 60525 - DNA, 20 bp, synthetic construct
  source 1..20: mol_type = other DNA
catcacacattattatctcc

SEQ ID NO: 60526 - DNA, 20 bp, synthetic construct
  source 1..20: mol_type = other DNA
tccagggaccagtgggccac

SEQ ID NO: 60527 - DNA, 20 bp, synthetic construct
  source 1..20: mol_type = other DNA
accactgatattgaacaaaa

SEQ ID NO: 60528 - DNA, 20 bp, synthetic construct
  source 1..20: mol_type = other DNA
tggaccaaggagcattgtgg

SEQ ID NO: 60529 - DNA, 20 bp, synthetic construct
  source 1..20: mol_type = other DNA
ggtgttgaaggtctcaaaca

SEQ ID NO: 60530 - DNA, 20 bp, synthetic construct
  source 1..20: mol_type = other DNA
gacttactgtgtccaaaaga

SEQ ID NO: 60531 - DNA, 20 bp, synthetic construct
  source 1..20: mol_type = other DNA
ggagtctcccctgcgcttac

SEQ ID NO: 60532 - DNA, 20 bp, synthetic construct
  source 1..20: mol_type = other DNA
cgatccacacggagtacttg

SEQ ID NO: 60533 - DNA, 20 bp, synthetic construct
  source 1..20: mol_type = other DNA
gtaattcccatatacaacac

SEQ ID NO: 60534 - DNA, 20 bp, synthetic construct
  source 1..20: mol_type = other DNA
gtggagccacatgttcctcc

SEQ ID NO: 60535 - DNA, 20 bp, synthetic construct
  source 1..20: mol_type = other DNA
tcgagtggggactgcaggtg

SEQ ID NO: 60536 - DNA, 20 bp, synthetic construct
  source 1..20: mol_type = other DNA
agcttccaagtcttctccac

SEQ ID NO: 60537 - DNA, 20 bp, synthetic construct
  source 1..20: mol_type = other DNA
ctgtagaagcggctggcagt

SEQ ID NO: 60538 - DNA, 20 bp, synthetic construct
  source 1..20: mol_type = other DNA
ttaatgagctgcaggactta

SEQ ID NO: 60539 - DNA, 20 bp, synthetic construct
  source 1..20: mol_type = other DNA
cgcaagaccatctgggtgga

SEQ ID NO: 60540 - DNA, 20 bp, synthetic construct
  source 1..20: mol_type = other DNA
tacctggagggcaacaattt

SEQ ID NO: 60541 - DNA, 20 bp, synthetic construct
  source 1..20: mol_type = other DNA
ccagattacgagaatctgca

SEQ ID NO: 60542 - DNA, 20 bp, synthetic construct
  source 1..20: mol_type = other DNA
ccatccacctgcaccgggat

SEQ ID NO: 60543 - DNA, 20 bp, synthetic construct
  source 1..20: mol_type = other DNA
ctcccagaaagctgctgccc

SEQ ID NO: 60544 - DNA, 20 bp, synthetic construct
  source 1..20: mol_type = other DNA
agtgcagggcctcatagtcg

SEQ ID NO: 60545 - DNA, 20 bp, synthetic construct
  source 1..20: mol_type = other DNA
ggagctcgctgagcctccgc

SEQ ID NO: 60546 - DNA, 20 bp, synthetic construct
  source 1..20: mol_type = other DNA
ccgagacctccaactcgagg

SEQ ID NO: 60547 - DNA, 20 bp, synthetic construct
  source 1..20: mol_type = other DNA
tcaccaggttctcaatggac

SEQ ID NO: 60548 - DNA, 20 bp, synthetic construct
  source 1..20: mol_type = other DNA
ggaacctgcaggtaggggac

SEQ ID NO: 60549 - DNA, 20 bp, synthetic construct
  source 1..20: mol_type = other DNA
acgtatgagatgagcgcctc

SEQ ID NO: 60550 - DNA, 20 bp, synthetic construct
  source 1..20: mol_type = other DNA
tggggatgagatcttcctac

SEQ ID NO: 60551 - DNA, 20 bp, synthetic construct
  source 1..20: mol_type = other DNA
gtcattcagggccttcagtt

SEQ ID NO: 60552 - DNA, 20 bp, synthetic construct
  source 1..20: mol_type = other DNA
tgattacgtgaacgttccgg

SEQ ID NO: 60553 - DNA, 20 bp, synthetic construct
  source 1..20: mol_type = other DNA
ggcatccgctcgtgggccgt

SEQ ID NO: 60554 - DNA, 20 bp, synthetic construct
  source 1..20: mol_type = other DNA
cctcagatcattgctcctcc

SEQ ID NO: 60555 - DNA, 20 bp, synthetic construct
  source 1..20: mol_type = other DNA
tgtagcggaagcgcatgccc

SEQ ID NO: 60556 - DNA, 20 bp, synthetic construct
  source 1..20: mol_type = other DNA
gtcctcgatcaggaggaaca

SEQ ID NO: 60557 - DNA, 20 bp, synthetic construct
  source 1..20: mol_type = other DNA
gttcttcaaaggcactgctc

SEQ ID NO: 60558 - DNA, 20 bp, synthetic construct
  source 1..20: mol_type = other DNA
gtccactgccgggggtctga

SEQ ID NO: 60559 - DNA, 20 bp, synthetic construct
  source 1..20: mol_type = other DNA
cgcagctcctctgcctggcg

SEQ ID NO: 60560 - DNA, 20 bp, synthetic construct
  source 1..20: mol_type = other DNA
agagcagccgaccagcctgg

SEQ ID NO: 60561 - DNA, 20 bp, synthetic construct
  source 1..20: mol_type = other DNA
caaaggcaagaagttccttc

SEQ ID NO: 60562 - DNA, 20 bp, synthetic construct
  source 1..20: mol_type = other DNA
cgcatcatctcttccgtgtc

SEQ ID NO: 60563 - DNA, 20 bp, synthetic construct
  source 1..20: mol_type = other DNA
cccatggacacgagcgtgta

SEQ ID NO: 60564 - DNA, 20 bp, synthetic construct
  source 1..20: mol_type = other DNA
ggaacagctgaggggagggg

SEQ ID NO: 60565 - DNA, 20 bp, synthetic construct
  source 1..20: mol_type = other DNA
tcccagccatccgtcctgag

SEQ ID NO: 60566 - DNA, 20 bp, synthetic construct
  source 1..20: mol_type = other DNA
atgccgcagcttccacacca

SEQ ID NO: 60567 - DNA, 20 bp, synthetic construct
  source 1..20: mol_type = other DNA
tgagaagaagcagatgacgc

SEQ ID NO: 60568 - DNA, 20 bp, synthetic construct
  source 1..20: mol_type = other DNA
cacctcgagttggaggtctc

SEQ ID NO: 60569 - DNA, 20 bp, synthetic construct
  source 1..20: mol_type = other DNA
ggagaagattggcacagctg

SEQ ID NO: 60570 - DNA, 20 bp, synthetic construct
  source 1..20: mol_type = other DNA
accaaggggcaaaggggcta

SEQ ID NO: 60571 - DNA, 20 bp, synthetic construct
  source 1..20: mol_type = other DNA
accagcacccaaaagggctt

SEQ ID NO: 60572 - DNA, 20 bp, synthetic construct
  source 1..20: mol_type = other DNA
tgtagtaacaggctcgcatg

SEQ ID NO: 60573 - DNA, 20 bp, synthetic construct
  source 1..20: mol_type = other DNA
gaagagtggcaaagtctcca

SEQ ID NO: 60574 - DNA, 20 bp, synthetic construct
  source 1..20: mol_type = other DNA
atacaggtactcatgcctgc

SEQ ID NO: 60575 - DNA, 20 bp, synthetic construct
  source 1..20: mol_type = other DNA
cctccacttcccatccatcc

SEQ ID NO: 60576 - DNA, 20 bp, synthetic construct
  source 1..20: mol_type = other DNA
gtactgcagccaggcctccc

SEQ ID NO: 60577 - DNA, 20 bp, synthetic construct
  source 1..20: mol_type = other DNA
ggaacaggagctgtactcac

SEQ ID NO: 60578 - DNA, 20 bp, synthetic construct
  source 1..20: mol_type = other DNA
cccactcacctcctcctcgg

SEQ ID NO: 60579 - DNA, 20 bp, synthetic construct
  source 1..20: mol_type = other DNA
atgatgacggccctgtgtcc

SEQ ID NO: 60580 - DNA, 20 bp, synthetic construct
  source 1..20: mol_type = other DNA
ctgtgtacctgtatctggca

SEQ ID NO: 60581 - DNA, 20 bp, synthetic construct
  source 1..20: mol_type = other DNA
agtggccagcgtctgggaga

SEQ ID NO: 60582 - DNA, 20 bp, synthetic construct
  source 1..20: mol_type = other DNA
ctcactgccttgttcctgag

SEQ ID NO: 60583 - DNA, 20 bp, synthetic construct
  source 1..20: mol_type = other DNA
tcgggaatgcagtacttgcc

SEQ ID NO: 60584 - DNA, 20 bp, synthetic construct
  source 1..20: mol_type = other DNA
cgccatgttcttctcctcac

SEQ ID NO: 60585 - DNA, 20 bp, synthetic construct
  source 1..20: mol_type = other DNA
tcttccagacaagcctatgc

SEQ ID NO: 60586 - DNA, 20 bp, synthetic construct
  source 1..20: mol_type = other DNA
gaggagcttctggcccagga

SEQ ID NO: 60587 - DNA, 20 bp, synthetic construct
  source 1..20: mol_type = other DNA
tggacttgagcagttccttg

SEQ ID NO: 60588 - DNA, 20 bp, synthetic construct
  source 1..20: mol_type = other DNA
ccgcagcttgctctccaggt

SEQ ID NO: 60589 - DNA, 20 bp, synthetic construct
  source 1..20: mol_type = other DNA
agttcaggtagacccctgtg

SEQ ID NO: 60590 - DNA, 20 bp, synthetic construct
  source 1..20: mol_type = other DNA
gaagaagagggcatccttca

SEQ ID NO: 60591 - DNA, 20 bp, synthetic construct
  source 1..20: mol_type = other DNA
gttgagcagggcatccttgt

SEQ ID NO: 60592 - DNA, 20 bp, synthetic construct
  source 1..20: mol_type = other DNA
tacctggaggagaagaactt

SEQ ID NO: 60593 - DNA, 20 bp, synthetic construct
  source 1..20: mol_type = other DNA
ttgaggagttcaccctctcc

SEQ ID NO: 60594 - DNA, 20 bp, synthetic construct
  source 1..20: mol_type = other DNA
cctgcagtaggcctccagga

SEQ ID NO: 60595 - DNA, 20 bp, synthetic construct
  source 1..20: mol_type = other DNA
gccacctggagagagaagcc

SEQ ID NO: 60596 - DNA, 20 bp, synthetic construct
  source 1..20: mol_type = other DNA
caccagtttgtacagttctg

SEQ ID NO: 60597 - DNA, 20 bp, synthetic construct
  source 1..20: mol_type = other DNA
gagagtgagaccttcgtggg

SEQ ID NO: 60598 - DNA, 20 bp, synthetic construct
  source 1..20: mol_type = other DNA
tgcgtgaacgaggtcaagcg

SEQ ID NO: 60599 - DNA, 20 bp, synthetic construct
  source 1..20: mol_type = other DNA
ggagctgctgggctctgggg

SEQ ID NO: 60600 - DNA, 20 bp, synthetic construct
  source 1..20: mol_type = other DNA
cagcaggaagtcaaccacaa

SEQ ID NO: 60601 - DNA, 20 bp, synthetic construct
  source 1..20: mol_type = other DNA
agtcccagctcaaggtgagg

SEQ ID NO: 60602 - DNA, 20 bp, synthetic construct
  source 1..20: mol_type = other DNA
ccacttgggggacagtttct

SEQ ID NO: 60603 - DNA, 20 bp, synthetic construct
  source 1..20: mol_type = other DNA
ttacctcgagatatctcccc

SEQ ID NO: 60604 - DNA, 20 bp, synthetic construct
  source 1..20: mol_type = other DNA
tgacgatgcaggcctcccgc

SEQ ID NO: 60605 - DNA, 20 bp, synthetic construct
  source 1..20: mol_type = other DNA
agcgatgtctggagctatgg

SEQ ID NO: 60606 - DNA, 20 bp, synthetic construct
  source 1..20: mol_type = other DNA
gtgtatgagagcccctacag

SEQ ID NO: 60607 - DNA, 20 bp, synthetic construct
  source 1..20: mol_type = other DNA
gccacagcagctggagggac

SEQ ID NO: 60608 - DNA, 20 bp, synthetic construct
  source 1..20: mol_type = other DNA
ctccacagtgggaagcacaa

SEQ ID NO: 60609 - DNA, 20 bp, synthetic construct
  source 1..20: mol_type = other DNA
gtaatagtagcgtaggccac

SEQ ID NO: 60610 - DNA, 20 bp, synthetic construct
  source 1..20: mol_type = other DNA
tgtactcacagcacgcagag

SEQ ID NO: 60611 - DNA, 20 bp, synthetic construct
  source 1..20: mol_type = other DNA
gccgcatgcacaagtgcatc

SEQ ID NO: 60612 - DNA, 20 bp, synthetic construct
  source 1..20: mol_type = other DNA
ggatgagctcgatgcggaac

SEQ ID NO: 60613 - DNA, 20 bp, synthetic construct
  source 1..20: mol_type = other DNA
cctccacgagtttgactcct

SEQ ID NO: 60614 - DNA, 20 bp, synthetic construct
  source 1..20: mol_type = other DNA
gcggggcaggtcgcagatgt

SEQ ID NO: 60615 - DNA, 20 bp, synthetic construct
  source 1..20: mol_type = other DNA
tcgggcaggcagatgagcag

SEQ ID NO: 60616 - DNA, 20 bp, synthetic construct
  source 1..20: mol_type = other DNA
cttgatgacctcgttcatca

SEQ ID NO: 60617 - DNA, 20 bp, synthetic construct
  source 1..20: mol_type = other DNA
aggggactacggagggaaga

SEQ ID NO: 60618 - DNA, 20 bp, synthetic construct
  source 1..20: mol_type = other DNA
ttgtgcaaatgtagctggaa

SEQ ID NO: 60619 - DNA, 20 bp, synthetic construct
  source 1..20: mol_type = other DNA
tcagagagccaacaacggga

SEQ ID NO: 60620 - DNA, 20 bp, synthetic construct
  source 1..20: mol_type = other DNA
gcaactacgcgtgcgcgcag

SEQ ID NO: 60621 - DNA, 20 bp, synthetic construct
  source 1..20: mol_type = other DNA
ctgtacctgcccactctctc

SEQ ID NO: 60622 - DNA, 20 bp, synthetic construct
  source 1..20: mol_type = other DNA
tcagccccgcttggcagtcc

SEQ ID NO: 60623 - DNA, 20 bp, synthetic construct
  source 1..20: mol_type = other DNA
tggaacaagcatgaggatgt

SEQ ID NO: 60624 - DNA, 20 bp, synthetic construct
  source 1..20: mol_type = other DNA
gctacctttgccgatgagga

SEQ ID NO: 60625 - DNA, 20 bp, synthetic construct
  source 1..20: mol_type = other DNA
acccccaagccccagaccaa

SEQ ID NO: 60626 - DNA, 20 bp, synthetic construct
  source 1..20: mol_type = other DNA
ccaacaccttcatcatccgc

SEQ ID NO: 60627 - DNA, 20 bp, synthetic construct
  source 1..20: mol_type = other DNA
ggatgagaagaagcagatga

SEQ ID NO: 60628 - DNA, 20 bp, synthetic construct
  source 1..20: mol_type = other DNA
tccgcagggcacaggccatc

SEQ ID NO: 60629 - DNA, 20 bp, synthetic construct
  source 1..20: mol_type = other DNA
gacttcagccagttgagcag

SEQ ID NO: 60630 - DNA, 20 bp, synthetic construct
  source 1..20: mol_type = other DNA
gatgagatcttcctactgtg

SEQ ID NO: 60631 - DNA, 20 bp, synthetic construct
  source 1..20: mol_type = other DNA
ccaggcacaccccatacagc

SEQ ID NO: 60632 - DNA, 20 bp, synthetic construct
  source 1..20: mol_type = other DNA
atgtagattttaagtaacca

SEQ ID NO: 60633 - DNA, 20 bp, synthetic construct
  source 1..20: mol_type = other DNA
ccaggacagagcagacaggg

SEQ ID NO: 60634 - DNA, 20 bp, synthetic construct
  source 1..20: mol_type = other DNA
atgggcaaaggatcgtagtt

SEQ ID NO: 60635 - DNA, 20 bp, synthetic construct
  source 1..20: mol_type = other DNA
tcaactatcaccaacataat

SEQ ID NO: 60636 - DNA, 20 bp, synthetic construct
  source 1..20: mol_type = other DNA
ttgcgcagggccatggctga

SEQ ID NO: 60637 - DNA, 20 bp, synthetic construct
  source 1..20: mol_type = other DNA
gcacttgtagcggaagcgca

SEQ ID NO: 60638 - DNA, 20 bp, synthetic construct
  source 1..20: mol_type = other DNA
ctcatagtcgtgcatgctga

SEQ ID NO: 60639 - DNA, 20 bp, synthetic construct
  source 1..20: mol_type = other DNA
cacctccagcttccacgtct

SEQ ID NO: 60640 - DNA, 20 bp, synthetic construct
  source 1..20: mol_type = other DNA
acctcccaccagttctgttc

SEQ ID NO: 60641 - DNA, 20 bp, synthetic construct
  source 1..20: mol_type = other DNA
aactccaccagctcctagaa

SEQ ID NO: 60642 - DNA, 20 bp, synthetic construct
  source 1..20: mol_type = other DNA
gaacatctggaagtcatgcc

SEQ ID NO: 60643 - DNA, 20 bp, synthetic construct
  source 1..20: mol_type = other DNA
gagtggaaggcctgccaggg

SEQ ID NO: 60644 - DNA, 20 bp, synthetic construct
  source 1..20: mol_type = other DNA
cattacaagatccgtaatct

SEQ ID NO: 60645 - DNA, 20 bp, synthetic construct
  source 1..20: mol_type = other DNA
gaagtccagctgtctcagta

SEQ ID NO: 60646 - DNA, 20 bp, synthetic construct
  source 1..20: mol_type = other DNA
tgggccgacctgggacggag

SEQ ID NO: 60647 - DNA, 20 bp, synthetic construct
  source 1..20: mol_type = other DNA
ggcgaggatggaggaggaat

SEQ ID NO: 60648 - DNA, 20 bp, synthetic construct
  source 1..20: mol_type = other DNA
acatgaacatgactccccgc

SEQ ID NO: 60649 - DNA, 20 bp, synthetic construct
  source 1..20: mol_type = other DNA
ctgcagatgacagtcacgaa

SEQ ID NO: 60650 - DNA, 20 bp, synthetic construct
  source 1..20: mol_type = other DNA
ctggaggagggtggagggta

SEQ ID NO: 60651 - DNA, 20 bp, synthetic construct
  source 1..20: mol_type = other DNA
tgttcccagagcagccgacc

SEQ ID NO: 60652 - DNA, 20 bp, synthetic construct
  source 1..20: mol_type = other DNA
gtaggtgtgctgatgtggga

SEQ ID NO: 60653 - DNA, 20 bp, synthetic construct
  source 1..20: mol_type = other DNA
cacacctccccgaactgtcc

SEQ ID NO: 60654 - DNA, 20 bp, synthetic construct
  source 1..20: mol_type = other DNA
ttgaaggggaactgcaaggt

SEQ ID NO: 60655 - DNA, 20 bp, synthetic construct
  source 1..20: mol_type = other DNA
taggctagtgtgacattgag

SEQ ID NO: 60656 - DNA, 20 bp, synthetic construct
  source 1..20: mol_type = other DNA
tggggtagatgcgggagagc

SEQ ID NO: 60657 - DNA, 20 bp, synthetic construct
  source 1..20: mol_type = other DNA
ggaaggtcttccgctcgggt

SEQ ID NO: 60658 - DNA, 20 bp, synthetic construct
  source 1..20: mol_type = other DNA
tgcgatctcagtcacatagt

SEQ ID NO: 60659 - DNA, 20 bp, synthetic construct
  source 1..20: mol_type = other DNA
ctgggaccaccacagtgccc

SEQ ID NO: 60660 - DNA, 20 bp, synthetic construct
  source 1..20: mol_type = other DNA
gtggaacagctgaggggagg

SEQ ID NO: 60661 - DNA, 20 bp, synthetic construct
  source 1..20: mol_type = other DNA
tgaagaaggtaagactttcc

SEQ ID NO: 60662 - DNA, 20 bp, synthetic construct
  source 1..20: mol_type = other DNA
ctcaaggtatgtgccgggca

SEQ ID NO: 60663 - DNA, 20 bp, synthetic construct
  source 1..20: mol_type = other DNA
tgcacagctcgcacttgtaa

SEQ ID NO: 60664 - DNA, 20 bp, synthetic construct
  source 1..20: mol_type = other DNA
tggcaaaggaggagcccctg

SEQ ID NO: 60665 - DNA, 20 bp, synthetic construct
  source 1..20: mol_type = other DNA
caatgtcccgccgcaaacag

SEQ ID NO: 60666 - DNA, 20 bp, synthetic construct
  source 1..20: mol_type = other DNA
gtcgcagcggtacacctcct

SEQ ID NO: 60667 - DNA, 20 bp, synthetic construct
  source 1..20: mol_type = other DNA
ctgttgaagggctgcttgca

SEQ ID NO: 60668 - DNA, 20 bp, synthetic construct
  source 1..20: mol_type = other DNA
ttcatcttgtcctttccctc

SEQ ID NO: 60669 - DNA, 20 bp, synthetic construct
  source 1..20: mol_type = other DNA
cttggccagcacggtgggtg

SEQ ID NO: 60670 - DNA, 20 bp, synthetic construct
  source 1..20: mol_type = other DNA
tatcttaccatatactccct

SEQ ID NO: 60671 - DNA, 20 bp, synthetic construct
  source 1..20: mol_type = other DNA
ggaagcaccacttgggggac

SEQ ID NO: 60672 - DNA, 20 bp, synthetic construct
  source 1..20: mol_type = other DNA
tgcaggttccggggctactg

SEQ ID NO: 60673 - DNA, 20 bp, synthetic construct
  source 1..20: mol_type = other DNA
atggtactggggagatatct

SEQ ID NO: 60674 - DNA, 20 bp, synthetic construct
  source 1..20: mol_type = other DNA
agcaggagcgcagacgcccc

SEQ ID NO: 60675 - DNA, 20 bp, synthetic construct
  source 1..20: mol_type = other DNA
tgtagggacgtcttcccctc

SEQ ID NO: 60676 - DNA, 20 bp, synthetic construct
  source 1..20: mol_type = other DNA
cacaaggagtgtctggggag

SEQ ID NO: 60677 - DNA, 20 bp, synthetic construct
  source 1..20: mol_type = other DNA
cggatgtagaacgagtcccc

SEQ ID NO: 60678 - DNA, 20 bp, synthetic construct
  source 1..20: mol_type = other DNA
acacccaccttgatcttcat

SEQ ID NO: 60679 - DNA, 20 bp, synthetic construct
  source 1..20: mol_type = other DNA
acactggccacaggtgagca

SEQ ID NO: 60680 - DNA, 20 bp, synthetic construct
  source 1..20: mol_type = other DNA
accgacagtgaaaacgatcc

SEQ ID NO: 60681 - DNA, 20 bp, synthetic construct
  source 1..20: mol_type = other DNA
tcgtacacatccaccaaagg

SEQ ID NO: 60682 - DNA, 20 bp, synthetic construct
  source 1..20: mol_type = other DNA
gggtgaactcctcaatggct

SEQ ID NO: 60683 - DNA, 20 bp, synthetic construct
  source 1..20: mol_type = other DNA
tttgactacaaggcccagag

SEQ ID NO: 60684 - DNA, 20 bp, synthetic construct
  source 1..20: mol_type = other DNA
cccagttggtgacgatgccg

SEQ ID NO: 60685 - DNA, 20 bp, synthetic construct
  source 1..20: mol_type = other DNA
tggagcctgaaggaagcccc

SEQ ID NO: 60686 - DNA, 20 bp, synthetic construct
  source 1..20: mol_type = other DNA
agtacagctcctgttcccag

SEQ ID NO: 60687 - DNA, 20 bp, synthetic construct
  source 1..20: mol_type = other DNA
gtactcgttgtcctcaatga

SEQ ID NO: 60688 - DNA, 20 bp, synthetic construct
  source 1..20: mol_type = other DNA
gacacactgtagggaaaagg

SEQ ID NO: 60689 - DNA, 20 bp, synthetic construct
  source 1..20: mol_type = other DNA
ctaccttcagtgcactccac

SEQ ID NO: 60690 - DNA, 20 bp, synthetic construct
  source 1..20: mol_type = other DNA
ggccaagtttcccattaagt

SEQ ID NO: 60691 - DNA, 20 bp, synthetic construct
  source 1..20: mol_type = other DNA
ggatgaaggtggggctcctg

SEQ ID NO: 60692 - DNA, 20 bp, synthetic construct
  source 1..20: mol_type = other DNA
ctggcagggctacctgtgga

SEQ ID NO: 60693 - DNA, 20 bp, synthetic construct
  source 1..20: mol_type = other DNA
tgcatgtgaagggcgtcgta

SEQ ID NO: 60694 - DNA, 20 bp, synthetic construct
  source 1..20: mol_type = other DNA
agcagggcagcggcgctatc

SEQ ID NO: 60695 - DNA, 20 bp, synthetic construct
  source 1..20: mol_type = other DNA
ctccagctgctgtggcaccg

SEQ ID NO: 60696 - DNA, 20 bp, synthetic construct
  source 1..20: mol_type = other DNA
agggcagcggaaccgctcat

SEQ ID NO: 60697 - DNA, 20 bp, synthetic construct
  source 1..20: mol_type = other DNA
gtagcacagcttctccttaa

SEQ ID NO: 60698 - DNA, 20 bp, synthetic construct
  source 1..20: mol_type = other DNA
tgtagcaccagttctttcag

SEQ ID NO: 60699 - DNA, 20 bp, synthetic construct
  source 1..20: mol_type = other DNA
acctgaggcggaggcgcccg

SEQ ID NO: 60700 - DNA, 20 bp, synthetic construct
  source 1..20: mol_type = other DNA
cacagatgagcctgtgtcca

SEQ ID NO: 60701 - DNA, 20 bp, synthetic construct
  source 1..20: mol_type = other DNA
gggcctacaccatcctgcgg

SEQ ID NO: 60702 - DNA, 20 bp, synthetic construct
  source 1..20: mol_type = other DNA
ggcggacgggctcttcctgc

SEQ ID NO: 60703 - DNA, 20 bp, synthetic construct
  source 1..20: mol_type = other DNA
tgctcataccaagtctctgt

SEQ ID NO: 60704 - DNA, 20 bp, synthetic construct
  source 1..20: mol_type = other DNA
tccgctacaagtgcgagggg

SEQ ID NO: 60705 - DNA, 20 bp, synthetic construct
  source 1..20: mol_type = other DNA
ggagggtggagggtatgttc

SEQ ID NO: 60706 - DNA, 20 bp, synthetic construct
  source 1..20: mol_type = other DNA
tgctggagtctctcaatgtg

SEQ ID NO: 60707 - DNA, 20 bp, synthetic construct
  source 1..20: mol_type = other DNA
gagagggtgaactcctcaat

SEQ ID NO: 60708 - DNA, 20 bp, synthetic construct
  source 1..20: mol_type = other DNA
agagctacctttgccgatga

SEQ ID NO: 60709 - DNA, 20 bp, synthetic construct
  source 1..20: mol_type = other DNA
gaccaacccggaggtgattc

SEQ ID NO: 60710 - DNA, 20 bp, synthetic construct
  source 1..20: mol_type = other DNA
tactcacgggatggggagca

SEQ ID NO: 60711 - DNA, 20 bp, synthetic construct
  source 1..20: mol_type = other DNA
ggtagatgcgggagagctgc

SEQ ID NO: 60712 - DNA, 20 bp, synthetic construct
  source 1..20: mol_type = other DNA
caccttcatggactccaaga

SEQ ID NO: 60713 - DNA, 20 bp, synthetic construct
  source 1..20: mol_type = other DNA
cttaccagtgtggcttcttt

SEQ ID NO: 60714 - DNA, 20 bp, synthetic construct
  source 1..20: mol_type = other DNA
acggcagagctctaggtcac

SEQ ID NO: 60715 - DNA, 20 bp, synthetic construct
  source 1..20: mol_type = other DNA
aggatataaatctcatcctg
